United States Patent Application Publication US 2015/0159161 A1 - sequence listing, part 2

SEQ ID NO: 28465 - DNA, 15 bp, Homo sapiens
gagctaatacatttg

SEQ ID NO: 28466 - DNA, 15 bp, Homo sapiens
agagctaatacattt

SEQ ID NO: 28467 - DNA, 15 bp, Homo sapiens
tagagctaatacatt

SEQ ID NO: 28468 - DNA, 15 bp, Homo sapiens
ttagagctaatacat

SEQ ID NO: 28469 - DNA, 15 bp, Homo sapiens
attagagctaataca

SEQ ID NO: 28470 - DNA, 15 bp, Homo sapiens
aattagagctaatac

SEQ ID NO: 28471 - DNA, 15 bp, Homo sapiens
caattagagctaata

SEQ ID NO: 28472 - DNA, 15 bp, Homo sapiens
gcaattagagctaat

SEQ ID NO: 28473 - DNA, 15 bp, Homo sapiens
tgcaattagagctaa

SEQ ID NO: 28474 - DNA, 15 bp, Homo sapiens
atgcaattagagcta

SEQ ID NO: 28475 - DNA, 15 bp, Homo sapiens
tatgcaattagagct

SEQ ID NO: 28476 - DNA, 15 bp, Homo sapiens
gtatgcaattagagc

SEQ ID NO: 28477 - DNA, 15 bp, Homo sapiens
tgtatgcaattagag

SEQ ID NO: 28478 - DNA, 15 bp, Homo sapiens
gtgtatgcaattaga

SEQ ID NO: 28479 - DNA, 15 bp, Homo sapiens
agtgtatgcaattag

SEQ ID NO: 28480 - DNA, 15 bp, Homo sapiens
aagtgtatgcaatta

SEQ ID NO: 28481 - DNA, 15 bp, Homo sapiens
taagtgtatgcaatt

SEQ ID NO: 28482 - DNA, 15 bp, Homo sapiens
ttaagtgtatgcaat

SEQ ID NO: 28483 - DNA, 15 bp, Homo sapiens
attaagtgtatgcaa

SEQ ID NO: 28484 - DNA, 15 bp, Homo sapiens
gattaagtgtatgca

SEQ ID NO: 28485 - DNA, 15 bp, Homo sapiens
agattaagtgtatgc

SEQ ID NO: 28486 - DNA, 15 bp, Homo sapiens
aagattaagtgtatg

SEQ ID NO: 28487 - DNA, 15 bp, Homo sapiens
aaagattaagtgtat

SEQ ID NO: 28488 - DNA, 15 bp, Homo sapiens
aaaagattaagtgta

SEQ ID NO: 28489 - DNA, 15 bp, Homo sapiens
taaaagattaagtgt

SEQ ID NO: 28490 - DNA, 15 bp, Homo sapiens
ttaaaagattaagtg

SEQ ID NO: 28491 - DNA, 15 bp, Homo sapiens
cttaaaagattaagt

SEQ ID NO: 28492 - DNA, 15 bp, Homo sapiens
gcttaaaagattaag

SEQ ID NO: 28493 - DNA, 15 bp, Homo sapiens
agcttaaaagattaa

SEQ ID NO: 28494 - DNA, 15 bp, Homo sapiens
aagcttaaaagatta

SEQ ID NO: 28495 - DNA, 15 bp, Homo sapiens
aaagcttaaaagatt

SEQ ID NO: 28496 - DNA, 15 bp, Homo sapiens
caaagcttaaaagat

SEQ ID NO: 28497 - DNA, 15 bp, Homo sapiens
ccaaagcttaaaaga

SEQ ID NO: 28498 - DNA, 15 bp, Homo sapiens
accaaagcttaaaag

SEQ ID NO: 28499 - DNA, 15 bp, Homo sapiens
aaccaaagcttaaaa

SEQ ID NO: 28500 - DNA, 15 bp, Homo sapiens
aaaccaaagcttaaa

SEQ ID NO: 28501 - DNA, 15 bp, Homo sapiens
aaaaccaaagcttaa

SEQ ID NO: 28502 - DNA, 15 bp, Homo sapiens
taaaaccaaagctta

SEQ ID NO: 28503 - DNA, 15 bp, Homo sapiens
ataaaaccaaagctt

SEQ ID NO: 28504 - DNA, 15 bp, Homo sapiens
aataaaaccaaagct

SEQ ID NO: 28505 - DNA, 15 bp, Homo sapiens
taataaaaccaaagc

SEQ ID NO: 28506 - DNA, 15 bp, Homo sapiens
ataataaaaccaaag

SEQ ID NO: 28507 - DNA, 15 bp, Homo sapiens
aataataaaaccaaa

SEQ ID NO: 28508 - DNA, 15 bp, Homo sapiens
taataataaaaccaa

SEQ ID NO: 28509 - DNA, 15 bp, Homo sapiens
ataataataaaacca

SEQ ID NO: 28510 - DNA, 15 bp, Homo sapiens
tataataataaaacc

SEQ ID NO: 28511 - DNA, 15 bp, Homo sapiens
ttataataataaaac

SEQ ID NO: 28512 - DNA, 15 bp, Homo sapiens
attataataataaaa

SEQ ID NO: 28513 - DNA, 15 bp, Homo sapiens
tattataataataaa

SEQ ID NO: 28514 - DNA, 15 bp, Homo sapiens
atattataataataa

SEQ ID NO: 28515 - DNA, 15 bp, Homo sapiens
catattataataata

SEQ ID NO: 28516 - DNA, 15 bp, Homo sapiens
ccatattataataat

SEQ ID NO: 28517 - DNA, 15 bp, Homo sapiens
cccatattataataa

SEQ ID NO: 28518 - DNA, 15 bp, Homo sapiens
ccccatattataata

SEQ ID NO: 28519 - DNA, 15 bp, Homo sapiens
cccccatattataat

SEQ ID NO: 28520 - DNA, 15 bp, Homo sapiens
acccccatattataa

SEQ ID NO: 28521 - DNA, 15 bp, Homo sapiens
cacccccatattata

SEQ ID NO: 28522 - DNA, 15 bp, Homo sapiens
tcacccccatattat

SEQ ID NO: 28523 - DNA, 15 bp, Homo sapiens
atcacccccatatta

SEQ ID NO: 28524 - DNA, 15 bp, Homo sapiens
tatcacccccatatt

SEQ ID NO: 28525 - DNA, 15 bp, Homo sapiens
ttatcacccccatat

SEQ ID NO: 28526 - DNA, 15 bp, Homo sapiens
gttatcacccccata

SEQ ID NO: 28527 - DNA, 15 bp, Homo sapiens
tgttatcacccccat

SEQ ID NO: 28528 - DNA, 15 bp, Homo sapiens
ctgttatcaccccca

SEQ ID NO: 28529 - DNA, 15 bp, Homo sapiens
actgttatcaccccc

SEQ ID NO: 28530 - DNA, 15 bp, Homo sapiens
tactgttatcacccc

SEQ ID NO: 28531 - DNA, 15 bp, Homo sapiens
atactgttatcaccc

SEQ ID NO: 28532 - DNA, 15 bp, Homo sapiens
gatactgttatcacc

SEQ ID NO: 28533 - DNA, 15 bp, Homo sapiens
agatactgttatcac

SEQ ID NO: 28534 - DNA, 15 bp, Homo sapiens
tagatactgttatca

SEQ ID NO: 28535 - DNA, 15 bp, Homo sapiens
gtagatactgttatc

SEQ ID NO: 28536 - DNA, 15 bp, Homo sapiens
agtagatactgttat

SEQ ID NO: 28537 - DNA, 15 bp, Homo sapiens
aagtagatactgtta

SEQ ID NO: 28538 - DNA, 15 bp, Homo sapiens
taagtagatactgtt

SEQ ID NO: 28539 - DNA, 15 bp, Homo sapiens
ttaagtagatactgt

SEQ ID NO: 28540 - DNA, 15 bp, Homo sapiens
attaagtagatactg

SEQ ID NO: 28541 - DNA, 15 bp, Homo sapiens
tattaagtagatact

SEQ ID NO: 28542 - DNA, 15 bp, Homo sapiens
ctattaagtagatac

SEQ ID NO: 28543 - DNA, 15 bp, Homo sapiens
tctattaagtagata

SEQ ID NO: 28544 - DNA, 15 bp, Homo sapiens
ttctattaagtagat

SEQ ID NO: 28545 - DNA, 15 bp, Homo sapiens
attctattaagtaga

SEQ ID NO: 28546 - DNA, 15 bp, Homo sapiens
aattctattaagtag

SEQ ID NO: 28547 - DNA, 15 bp, Homo sapiens
gaattctattaagta

SEQ ID NO: 28548 - DNA, 15 bp, Homo sapiens
agaattctattaagt

SEQ ID NO: 28549 - DNA, 15 bp, Homo sapiens
aagaattctattaag

SEQ ID NO: 28550 - DNA, 15 bp, Homo sapiens
caagaattctattaa

SEQ ID NO: 28551 - DNA, 15 bp, Homo sapiens
acaagaattctatta

SEQ ID NO: 28552 - DNA, 15 bp, Homo sapiens
aacaagaattctatt

SEQ ID NO: 28553 - DNA, 15 bp, Homo sapiens
taacaagaattctat

SEQ ID NO: 28554 - DNA, 15 bp, Homo sapiens
ataacaagaattcta

SEQ ID NO: 28555 - DNA, 15 bp, Homo sapiens
aataacaagaattct

SEQ ID NO: 28556 - DNA, 15 bp, Homo sapiens
taataacaagaattc

SEQ ID NO: 28557 - DNA, 15 bp, Homo sapiens
gtaataacaagaatt

SEQ ID NO: 28558 - DNA, 15 bp, Homo sapiens
tgtaataacaagaat

SEQ ID NO: 28559 - DNA, 15 bp, Homo sapiens
atgtaataacaagaa

SEQ ID NO: 28560 - DNA, 15 bp, Homo sapiens
catgtaataacaaga

SEQ ID NO: 28561 - DNA, 15 bp, Homo sapiens
tcatgtaataacaag

SEQ ID NO: 28562 - DNA, 15 bp, Homo sapiens
ttcatgtaataacaa

SEQ ID NO: 28563 - DNA, 15 bp, Homo sapiens
tttcatgtaataaca

SEQ ID NO: 28564 - DNA, 15 bp, Homo sapiens
atttcatgtaataac

SEQ ID NO: 28565 - DNA, 15 bp, Homo sapiens
tatttcatgtaataa

SEQ ID NO: 28566 - DNA, 15 bp, Homo sapiens
ttatttcatgtaata

SEQ ID NO: 28567 - DNA, 15 bp, Homo sapiens
attatttcatgtaat

SEQ ID NO: 28568 - DNA, 15 bp, Homo sapiens
aattatttcatgtaa

SEQ ID NO: 28569 - DNA, 15 bp, Homo sapiens
taattatttcatgta

SEQ ID NO: 28570 - DNA, 15 bp, Homo sapiens
ttaattatttcatgt

SEQ ID NO: 28571 - DNA, 15 bp, Homo sapiens
attaattatttcatg

SEQ ID NO: 28572 - DNA, 15 bp, Homo sapiens
cattaattatttcat

SEQ ID NO: 28573 - DNA, 15 bp, Homo sapiens
acattaattatttca

SEQ ID NO: 28574 - DNA, 15 bp, Homo sapiens
aacattaattatttc

SEQ ID NO: 28575 - DNA, 15 bp, Homo sapiens
taacattaattattt

SEQ ID NO: 28576 - DNA, 15 bp, Homo sapiens
ttaacattaattatt

SEQ ID NO: 28577 - DNA, 15 bp, Homo sapiens
tttaacattaattat

SEQ ID NO: 28578 - DNA, 15 bp, Homo sapiens
gtttaacattaatta

SEQ ID NO: 28579 - DNA, 15 bp, Homo sapiens
tgtttaacattaatt

SEQ ID NO: 28580 - DNA, 15 bp, Homo sapiens
gtgtttaacattaat

SEQ ID NO: 28581 - DNA, 15 bp, Homo sapiens
tgtgtttaacattaa

SEQ ID NO: 28582 - DNA, 15 bp, Homo sapiens
ctgtgtttaacatta

SEQ ID NO: 28583 - DNA, 15 bp, Homo sapiens
gctgtgtttaacatt

SEQ ID NO: 28584 - DNA, 15 bp, Homo sapiens
tgctgtgtttaacat

SEQ ID NO: 28585 - DNA, 15 bp, Homo sapiens
atgctgtgtttaaca

SEQ ID NO: 28586 - DNA, 15 bp, Homo sapiens
tatgctgtgtttaac

SEQ ID NO: 28587 - DNA, 15 bp, Homo sapiens
ttatgctgtgtttaa

SEQ ID NO: 28588 - DNA, 15 bp, Homo sapiens
attatgctgtgttta

SEQ ID NO: 28589 - DNA, 15 bp, Homo sapiens
tattatgctgtgttt

SEQ ID NO: 28590 - DNA, 15 bp, Homo sapiens
atattatgctgtgtt

SEQ ID NO: 28591 - DNA, 15 bp, Homo sapiens
catattatgctgtgt

SEQ ID NO: 28592 - DNA, 15 bp, Homo sapiens
acatattatgctgtg

SEQ ID NO: 28593 - DNA, 15 bp, Homo sapiens
cacatattatgctgt

SEQ ID NO: 28594 - DNA, 15 bp, Homo sapiens
acacatattatgctg

SEQ ID NO: 28595 - DNA, 15 bp, Homo sapiens
gacacatattatgct

SEQ ID NO: 28596 - DNA, 15 bp, Homo sapiens
tgacacatattatgc

SEQ ID NO: 28597 - DNA, 15 bp, Homo sapiens
gtgacacatattatg

SEQ ID NO: 28598 - DNA, 15 bp, Homo sapiens
tgtgacacatattat

SEQ ID NO: 28599 - DNA, 15 bp, Homo sapiens
atgtgacacatatta

SEQ ID NO: 28600 - DNA, 15 bp, Homo sapiens
aatgtgacacatatt

SEQ ID NO: 28601 - DNA, 15 bp, Homo sapiens
taatgtgacacatat

SEQ ID NO: 28602 - DNA, 15 bp, Homo sapiens
ataatgtgacacata

SEQ ID NO: 28603 - DNA, 15 bp, Homo sapiens
tataatgtgacacat

SEQ ID NO: 28604 - DNA, 15 bp, Homo sapiens
ttataatgtgacaca

SEQ ID NO: 28605 - DNA, 15 bp, Homo sapiens
tttataatgtgacac

SEQ ID NO: 28606 - DNA, 15 bp, Homo sapiens
ctttataatgtgaca

SEQ ID NO: 28607 - DNA, 15 bp, Homo sapiens
tctttataatgtgac

SEQ ID NO: 28608 - DNA, 15 bp, Homo sapiens
atctttataatgtga

SEQ ID NO: 28609 - DNA, 15 bp, Homo sapiens
aatctttataatgtg

SEQ ID NO: 28610 - DNA, 15 bp, Homo sapiens
gaatctttataatgt

SEQ ID NO: 28611 - DNA, 15 bp, Homo sapiens
tgaatctttataatg

SEQ ID NO: 28612 - DNA, 15 bp, Homo sapiens
ctgaatctttataat

SEQ ID NO: 28613 - DNA, 15 bp, Homo sapiens
cctgaatctttataa

SEQ ID NO: 28614 - DNA, 15 bp, Homo sapiens
gcctgaatctttata

SEQ ID NO: 28615 - DNA, 15 bp, Homo sapiens
tgcctgaatctttat

SEQ ID NO: 28616 - DNA, 15 bp, Homo sapiens
ttgcctgaatcttta

SEQ ID NO: 28617 - DNA, 15 bp, Homo sapiens
attgcctgaatcttt

SEQ ID NO: 28618 - DNA, 15 bp, Homo sapiens
cattgcctgaatctt

SEQ ID NO: 28619 - DNA, 15 bp, Homo sapiens
acattgcctgaatct

SEQ ID NO: 28620 - DNA, 15 bp, Homo sapiens
aacattgcctgaatc

SEQ ID NO: 28621 - DNA, 15 bp, Homo sapiens
aaacattgcctgaat

SEQ ID NO: 28622 - DNA, 15 bp, Homo sapiens
caaacattgcctgaa

SEQ ID NO: 28623 - DNA, 15 bp, Homo sapiens
acaaacattgcctga

SEQ ID NO: 28624 - DNA, 15 bp, Homo sapiens
aacaaacattgcctg

SEQ ID NO: 28625 - DNA, 15 bp, Homo sapiens
taacaaacattgcct

SEQ ID NO: 28626 - DNA, 15 bp, Homo sapiens
ctaacaaacattgcc

SEQ ID NO: 28627 - DNA, 15 bp, Homo sapiens
actaacaaacattgc

SEQ ID NO: 28628 - DNA, 15 bp, Homo sapiens
tactaacaaacattg

SEQ ID NO: 28629 - DNA, 15 bp, Homo sapiens
atactaacaaacatt

SEQ ID NO: 28630 - DNA, 15 bp, Homo sapiens
aatactaacaaacat

SEQ ID NO: 28631 - DNA, 15 bp, Homo sapiens
taatactaacaaaca

SEQ ID NO: 28632 - DNA, 15 bp, Homo sapiens
ctaatactaacaaac

SEQ ID NO: 28633 - DNA, 15 bp, Homo sapiens
actaatactaacaaa

SEQ ID NO: 28634 - DNA, 15 bp, Homo sapiens
tactaatactaacaa

SEQ ID NO: 28635 - DNA, 15 bp, Homo sapiens
gtactaatactaaca

SEQ ID NO: 28636 - DNA, 15 bp, Homo sapiens
agtactaatactaac

SEQ ID NO: 28637 - DNA, 15 bp, Homo sapiens
aagtactaatactaa

SEQ ID NO: 28638 - DNA, 15 bp, Homo sapiens
aaagtactaatacta

SEQ ID NO: 28639 - DNA, 15 bp, Homo sapiens
aaaagtactaatact

SEQ ID NO: 28640 - DNA, 15 bp, Homo sapiens
aaaaagtactaatac

SEQ ID NO: 28641 - DNA, 15 bp, Homo sapiens
aaaaaagtactaata

SEQ ID NO: 28642 - DNA, 15 bp, Homo sapiens
aaaaaaagtactaat

SEQ ID NO: 28643 - DNA, 15 bp, Homo sapiens
aaaaaaaagtactaa

SEQ ID NO: 28644 - DNA, 15 bp, Homo sapiens
gaaaaaaaagtacta

SEQ ID NO: 28645 - DNA, 15 bp, Homo sapiens
agaaaaaaaagtact

SEQ ID NO: 28646 - DNA, 15 bp, Homo sapiens
aagaaaaaaaagtac

SEQ ID NO: 28647 - DNA, 15 bp, Homo sapiens
gaagaaaaaaaagta

SEQ ID NO: 28648 - DNA, 15 bp, Homo sapiens
ggaagaaaaaaaagt

SEQ ID NO: 28649 - DNA, 15 bp, Homo sapiens
aggaagaaaaaaaag

SEQ ID NO: 28650 - DNA, 15 bp, Homo sapiens
taggaagaaaaaaaa

SEQ ID NO: 28651 - DNA, 15 bp, Homo sapiens
ttaggaagaaaaaaa

SEQ ID NO: 28652 - DNA, 15 bp, Homo sapiens
cttaggaagaaaaaa

SEQ ID NO: 28653 - DNA, 15 bp, Homo sapiens
acttaggaagaaaaa

SEQ ID NO: 28654 - DNA, 15 bp, Homo sapiens
cacttaggaagaaaa

SEQ ID NO: 28655 - DNA, 15 bp, Homo sapiens
gcacttaggaagaaa

SEQ ID NO: 28656 - DNA, 15 bp, Homo sapiens
tgcacttaggaagaa

SEQ ID NO: 28657 - DNA, 15 bp, Homo sapiens
ttgcacttaggaaga

SEQ ID NO: 28658 - DNA, 15 bp, Homo sapiens
tttgcacttaggaag

SEQ ID NO: 28659 - DNA, 15 bp, Homo sapiens
ttttgcacttaggaa

SEQ ID NO: 28660 - DNA, 15 bp, Homo sapiens
cttttgcacttagga

SEQ ID NO: 28661 - DNA, 15 bp, Homo sapiens
tcttttgcacttagg

SEQ ID NO: 28662 - DNA, 15 bp, Homo sapiens
atcttttgcacttag

SEQ ID NO: 28663 - DNA, 15 bp, Homo sapiens
tatcttttgcactta

SEQ ID NO: 28664 - DNA, 15 bp, Homo sapiens
ttatcttttgcactt

SEQ ID NO: 28665 - DNA, 15 bp, Homo sapiens
gttatcttttgcact

SEQ ID NO: 28666 - DNA, 15 bp, Homo sapiens
agttatcttttgcac

SEQ ID NO: 28667 - DNA, 15 bp, Homo sapiens
aagttatcttttgca

SEQ ID NO: 28668 - DNA, 15 bp, Homo sapiens
aaagttatcttttgc

SEQ ID NO: 28669 - DNA, 15 bp, Homo sapiens
taaagttatcttttg

SEQ ID NO: 28670 - DNA, 15 bp, Homo sapiens
ataaagttatctttt

SEQ ID NO: 28671 - DNA, 15 bp, Homo sapiens
tataaagttatcttt

SEQ ID NO: 28672 - DNA, 15 bp, Homo sapiens
atataaagttatctt

SEQ ID NO: 28673 - DNA, 15 bp, Homo sapiens
gatataaagttatct

SEQ ID NO: 28674 - DNA, 15 bp, Homo sapiens
tgatataaagttatc

SEQ ID NO: 28675 - DNA, 15 bp, Homo sapiens
gtgatataaagttat

SEQ ID NO: 28676 - DNA, 15 bp, Homo sapiens
agtgatataaagtta

SEQ ID NO: 28677 - DNA, 15 bp, Homo sapiens
aagtgatataaagtt

SEQ ID NO: 28678 - DNA, 15 bp, Homo sapiens
aaagtgatataaagt

SEQ ID NO: 28679 - DNA, 15 bp, Homo sapiens
aaaagtgatataaag

SEQ ID NO: 28680 - DNA, 15 bp, Homo sapiens
taaaagtgatataaa

SEQ ID NO: 28681 - DNA, 15 bp, Homo sapiens
ttaaaagtgatataa

SEQ ID NO: 28682 - DNA, 15 bp, Homo sapiens
tttaaaagtgatata

SEQ ID NO: 28683 - DNA, 15 bp, Homo sapiens
gtttaaaagtgatat

SEQ ID NO: 28684 - DNA, 15 bp, Homo sapiens
agtttaaaagtgata

SEQ ID NO: 28685 - DNA, 15 bp, Homo sapiens
aagtttaaaagtgat

SEQ ID NO: 28686 - DNA, 15 bp, Homo sapiens
aaagtttaaaagtga

SEQ ID NO: 28687 - DNA, 15 bp, Homo sapiens
aaaagtttaaaagtg

SEQ ID NO: 28688 - DNA, 15 bp, Homo sapiens
gaaaagtttaaaagt

SEQ ID NO: 28689 - DNA, 15 bp, Homo sapiens
agaaaagtttaaaag

SEQ ID NO: 28690 - DNA, 15 bp, Homo sapiens
aagaaaagtttaaaa

SEQ ID NO: 28691 - DNA, 15 bp, Homo sapiens
aaagaaaagtttaaa

SEQ ID NO: 28692 - DNA, 15 bp, Homo sapiens
aaaagaaaagtttaa

SEQ ID NO: 28693 - DNA, 15 bp, Homo sapiens
taaaagaaaagttta

SEQ ID NO: 28694 - DNA, 15 bp, Homo sapiens
ctaaaagaaaagttt

SEQ ID NO: 28695 - DNA, 15 bp, Homo sapiens
actaaaagaaaagtt

SEQ ID NO: 28696 - DNA, 15 bp, Homo sapiens
aactaaaagaaaagt

SEQ ID NO: 28697 - DNA, 15 bp, Homo sapiens
caactaaaagaaaag

SEQ ID NO: 28698 - DNA, 15 bp, Homo sapiens
acaactaaaagaaaa

SEQ ID NO: 28699 - DNA, 15 bp, Homo sapiens
cacaactaaaagaaa

SEQ ID NO: 28700 - DNA, 15 bp, Homo sapiens
gcacaactaaaagaa

SEQ ID NO: 28701 - DNA, 15 bp, Homo sapiens
agcacaactaaaaga

SEQ ID NO: 28702 - DNA, 15 bp, Homo sapiens
cagcacaactaaaag

SEQ ID NO: 28703 - DNA, 15 bp, Homo sapiens
tcagcacaactaaaa

SEQ ID NO: 28704 - DNA, 15 bp, Homo sapiens
ttcagcacaactaaa

SEQ ID NO: 28705 - DNA, 15 bp, Homo sapiens
tttcagcacaactaa

SEQ ID NO: 28706 - DNA, 15 bp, Homo sapiens
ctttcagcacaacta

SEQ ID NO: 28707 - DNA, 15 bp, Homo sapiens
tctttcagcacaact

SEQ ID NO: 28708 - DNA, 15 bp, Homo sapiens
gtctttcagcacaac

SEQ ID NO: 28709 - DNA, 15 bp, Homo sapiens
tgtctttcagcacaa

SEQ ID NO: 28710 - DNA, 15 bp, Homo sapiens
atgtctttcagcaca

SEQ ID NO: 28711 - DNA, 15 bp, Homo sapiens
aatgtctttcagcac

SEQ ID NO: 28712 - DNA, 15 bp, Homo sapiens
taatgtctttcagca

SEQ ID NO: 28713 - DNA, 15 bp, Homo sapiens
ataatgtctttcagc

SEQ ID NO: 28714 - DNA, 15 bp, Homo sapiens
cataatgtctttcag

SEQ ID NO: 28715 - DNA, 15 bp, Homo sapiens
tcataatgtctttca

SEQ ID NO: 28716 - DNA, 15 bp, Homo sapiens
gtcataatgtctttc

SEQ ID NO: 28717 - DNA, 15 bp, Homo sapiens
tgtcataatgtcttt

SEQ ID NO: 28718 - DNA, 15 bp, Homo sapiens
gtgtcataatgtctt

SEQ ID NO: 28719 - DNA, 15 bp, Homo sapiens
ggtgtcataatgtct

SEQ ID NO: 28720 - DNA, 15 bp, Homo sapiens
cggtgtcataatgtc

SEQ ID NO: 28721 - DNA, 15 bp, Homo sapiens
gcggtgtcataatgt

SEQ ID NO: 28722 - DNA, 15 bp, Homo sapiens
ggcggtgtcataatg

SEQ ID NO: 28723 - DNA, 15 bp, Homo sapiens
tggcggtgtcataat

SEQ ID NO: 28724 - DNA, 15 bp, Homo sapiens
ttggcggtgtcataa

SEQ ID NO: 28725 - DNA, 15 bp, Homo sapiens
tttggcggtgtcata

SEQ ID NO: 28726 - DNA, 15 bp, Homo sapiens
atttggcggtgtcat

SEQ ID NO: 28727 - DNA, 15 bp, Homo sapiens
aatttggcggtgtca

SEQ ID NO: 28728 - DNA, 15 bp, Homo sapiens
aaatttggcggtgtc

SEQ ID NO: 28729 - DNA, 15 bp, Homo sapiens
taaatttggcggtgt

SEQ ID NO: 28730 - DNA, 15 bp, Homo sapiens
ttaaatttggcggtg

SEQ ID NO: 28731 - DNA, 15 bp, Homo sapiens
attaaatttggcggt

SEQ ID NO: 28732 - DNA, 15 bp, Homo sapiens
aattaaatttggcgg

SEQ ID NO: 28733 - DNA, 15 bp, Homo sapiens
caattaaatttggcg

SEQ ID NO: 28734 - DNA, 15 bp, Homo sapiens
gcaattaaatttggc

SEQ ID NO: 28735 - DNA, 15 bp, Homo sapiens
tgcaattaaatttgg

SEQ ID NO: 28736 - DNA, 15 bp, Homo sapiens
ctgcaattaaatttg

SEQ ID NO: 28737 - DNA, 15 bp, Homo sapiens
tctgcaattaaattt

SEQ ID NO: 28738 - DNA, 15 bp, Homo sapiens
ctctgcaattaaatt

SEQ ID NO: 28739 - DNA, 15 bp, Homo sapiens
cctctgcaattaaat

SEQ ID NO: 28740 - DNA, 15 bp, Homo sapiens
acctctgcaattaaa

SEQ ID NO: 28741 - DNA, 15 bp, Homo sapiens
tacctctgcaattaa

SEQ ID NO: 28742 - DNA, 15 bp, Homo sapiens
ctacctctgcaatta

SEQ ID NO: 28743 - DNA, 15 bp, Homo sapiens
cctacctctgcaatt

SEQ ID NO: 28744 - DNA, 15 bp, Homo sapiens
acctacctctgcaat

SEQ ID NO: 28745 - DNA, 15 bp, Homo sapiens
tacctacctctgcaa

SEQ ID NO: 28746 - DNA, 15 bp, Homo sapiens
atacctacctctgca

SEQ ID NO: 28747 - DNA, 15 bp, Homo sapiens
catacctacctctgc

SEQ ID NO: 28748 - DNA, 15 bp, Homo sapiens
tcatacctacctctg

SEQ ID NO: 28749 - DNA, 15 bp, Homo sapiens
ttcatacctacctct

SEQ ID NO: 28750 - DNA, 15 bp, Homo sapiens
attcatacctacctc

SEQ ID NO: 28751 - DNA, 15 bp, Homo sapiens
cattcatacctacct

SEQ ID NO: 28752 - DNA, 15 bp, Homo sapiens
acattcatacctacc

SEQ ID NO: 28753 - DNA, 15 bp, Homo sapiens
tacattcatacctac

SEQ ID NO: 28754 - DNA, 15 bp, Homo sapiens
gtacattcataccta

SEQ ID NO: 28755 - DNA, 15 bp, Homo sapiens
agtacattcatacct

SEQ ID NO: 28756 - DNA, 15 bp, Homo sapiens
cagtacattcatacc

SEQ ID NO: 28757 - DNA, 15 bp, Homo sapiens
acagtacattcatac

SEQ ID NO: 28758 - DNA, 15 bp, Homo sapiens
tacagtacattcata

SEQ ID NO: 28759 - DNA, 15 bp, Homo sapiens
gtacagtacattcat

SEQ ID NO: 28760 - DNA, 15 bp, Homo sapiens
agtacagtacattca

SEQ ID NO: 28761 - DNA, 15 bp, Homo sapiens
tagtacagtacattc

SEQ ID NO: 28762 - DNA, 15 bp, Homo sapiens
atagtacagtacatt

SEQ ID NO: 28763 - DNA, 15 bp, Homo sapiens
catagtacagtacat

SEQ ID NO: 28764 - DNA, 15 bp, Homo sapiens
acatagtacagtaca

SEQ ID NO: 28765 - DNA, 15 bp, Homo sapiens
aacatagtacagtac

SEQ ID NO: 28766 - DNA, 15 bp, Homo sapiens
caacatagtacagta

SEQ ID NO: 28767 - DNA, 15 bp, Homo sapiens
acaacatagtacagt

SEQ ID NO: 28768 - DNA, 15 bp, Homo sapiens
tacaacatagtacag

SEQ ID NO: 28769 - DNA, 15 bp, Homo sapiens
atacaacatagtaca

SEQ ID NO: 28770 - DNA, 15 bp, Homo sapiens
tatacaacatagtac

SEQ ID NO: 28771 - DNA, 15 bp, Homo sapiens
ttatacaacatagta

SEQ ID NO: 28772 - DNA, 15 bp, Homo sapiens
gttatacaacatagt

SEQ ID NO: 28773 - DNA, 15 bp, Homo sapiens
agttatacaacatag

SEQ ID NO: 28774 - DNA, 15 bp, Homo sapiens
aagttatacaacata

SEQ ID NO: 28775 - DNA, 15 bp, Homo sapiens
taagttatacaacat

SEQ ID NO: 28776 - DNA, 15 bp, Homo sapiens
ttaagttatacaaca

SEQ ID NO: 28777 - DNA, 15 bp, Homo sapiens
tttaagttatacaac

SEQ ID NO: 28778 - DNA, 15 bp, Homo sapiens
gtttaagttatacaa

SEQ ID NO: 28779 - DNA, 15 bp, Homo sapiens
ggtttaagttataca

SEQ ID NO: 28780 - DNA, 15 bp, Homo sapiens
gggtttaagttatac

SEQ ID NO: 28781 - DNA, 15 bp, Homo sapiens
cgggtttaagttata

SEQ ID NO: 28782 - DNA, 15 bp, Homo sapiens
tcgggtttaagttat

SEQ ID NO: 28783 - DNA, 15 bp, Homo sapiens
atcgggtttaagtta

SEQ ID NO: 28784 - DNA, 15 bp, Homo sapiens
tatcgggtttaagtt

SEQ ID NO: 28785 - DNA, 15 bp, Homo sapiens
ctatcgggtttaagt

SEQ ID NO: 28786 - DNA, 15 bp, Homo sapiens
tctatcgggtttaag

SEQ ID NO: 28787 - DNA, 15 bp, Homo sapiens
gtctatcgggtttaa

SEQ ID NO: 28788 - DNA, 15 bp, Homo sapiens
agtctatcgggttta

SEQ ID NO: 28789 - DNA, 15 bp, Homo sapiens
cagtctatcgggttt

SEQ ID NO: 28790 - DNA, 15 bp, Homo sapiens
acagtctatcgggtt

SEQ ID NO: 28791 - DNA, 15 bp, Homo sapiens
tacagtctatcgggt

SEQ ID NO: 28792 - DNA, 15 bp, Homo sapiens
atacagtctatcggg

SEQ ID NO: 28793 - DNA, 15 bp, Homo sapiens
gatacagtctatcgg

SEQ ID NO: 28794 - DNA, 15 bp, Homo sapiens
agatacagtctatcg

SEQ ID NO: 28795 - DNA, 15 bp, Homo sapiens
aagatacagtctatc

SEQ ID NO: 28796 - DNA, 15 bp, Homo sapiens
taagatacagtctat

SEQ ID NO: 28797 - DNA, 15 bp, Homo sapiens
gtaagatacagtcta

SEQ ID NO: 28798 - DNA, 15 bp, Homo sapiens
agtaagatacagtct

SEQ ID NO: 28799 - DNA, 15 bp, Homo sapiens
cagtaagatacagtc

SEQ ID NO: 28800 - DNA, 15 bp, Homo sapiens
acagtaagatacagt

SEQ ID NO: 28801 - DNA, 15 bp, Homo sapiens
gacagtaagatacag

SEQ ID NO: 28802 - DNA, 15 bp, Homo sapiens
tgacagtaagataca

SEQ ID NO: 28803 - DNA, 15 bp, Homo sapiens
atgacagtaagatac

SEQ ID NO: 28804 - DNA, 15 bp, Homo sapiens
tatgacagtaagata

SEQ ID NO: 28805 - DNA, 15 bp, Homo sapiens
ttatgacagtaagat

SEQ ID NO: 28806 - DNA, 15 bp, Homo sapiens
gttatgacagtaaga

SEQ ID NO: 28807 - DNA, 15 bp, Homo sapiens
tgttatgacagtaag

SEQ ID NO: 28808 - DNA, 15 bp, Homo sapiens
ttgttatgacagtaa

SEQ ID NO: 28809 - DNA, 15 bp, Homo sapiens
attgttatgacagta

SEQ ID NO: 28810 - DNA, 15 bp, Homo sapiens
tattgttatgacagt

SEQ ID NO: 28811 - DNA, 15 bp, Homo sapiens
ttattgttatgacag

SEQ ID NO: 28812 - DNA, 15 bp, Homo sapiens
attattgttatgaca

SEQ ID NO: 28813 - DNA, 15 bp, Homo sapiens
cattattgttatgac

SEQ ID NO: 28814 - DNA, 15 bp, Homo sapiens
tcattattgttatga

SEQ ID NO: 28815 - DNA, 15 bp, Homo sapiens
ctcattattgttatg

SEQ ID NO: 28816 - DNA, 15 bp, Homo sapiens
actcattattgttat

SEQ ID NO: 28817 - DNA, 15 bp, Homo sapiens
gactcattattgtta

SEQ ID NO: 28818 - DNA, 15 bp, Homo sapiens
tgactcattattgtt

SEQ ID NO: 28819 - DNA, 15 bp, Homo sapiens
atgactcattattgt

SEQ ID NO: 28820 - DNA, 15 bp, Homo sapiens
gatgactcattattg

SEQ ID NO: 28821 - DNA, 15 bp, Homo sapiens
ggatgactcattatt

SEQ ID NO: 28822 - DNA, 15 bp, Homo sapiens
tggatgactcattat

SEQ ID NO: 28823 - DNA, 15 bp, Homo sapiens
ctggatgactcatta

SEQ ID NO: 28824 - DNA, 15 bp, Homo sapiens
tctggatgactcatt

SEQ ID NO: 28825 - DNA, 15 bp, Homo sapiens
atctggatgactcat

SEQ ID NO: 28826 - DNA, 15 bp, Homo sapiens
aatctggatgactca

SEQ ID NO: 28827 - DNA, 15 bp, Homo sapiens
taatctggatgactc

SEQ ID NO: 28828 - DNA, 15 bp, Homo sapiens
ataatctggatgact

SEQ ID NO: 28829 - DNA, 15 bp, Homo sapiens
gataatctggatgac

SEQ ID NO: 28830 - DNA, 15 bp, Homo sapiens
cgataatctggatga

SEQ ID NO: 28831 - DNA, 15 bp, Homo sapiens
tcgataatctggatg

SEQ ID NO: 28832 - DNA, 15 bp, Homo sapiens
ctcgataatctggat

SEQ ID NO: 28833 - DNA, 15 bp, Homo sapiens
actcgataatctgga

SEQ ID NO: 28834 - DNA, 15 bp, Homo sapiens
cactcgataatctgg

SEQ ID NO: 28835 - DNA, 15 bp, Homo sapiens
tcactcgataatctg

SEQ ID NO: 28836 - DNA, 15 bp, Homo sapiens
ctcactcgataatct

SEQ ID NO: 28837 - DNA, 15 bp, Homo sapiens
tctcactcgataatc

SEQ ID NO: 28838 - DNA, 15 bp, Homo sapiens
atctcactcgataat

SEQ ID NO: 28839 - DNA, 15 bp, Homo sapiens
tatctcactcgataa

SEQ ID NO: 28840 - DNA, 15 bp, Homo sapiens
gtatctcactcgata

SEQ ID NO: 28841 - DNA, 15 bp, Homo sapiens
tgtatctcactcgat

SEQ ID NO: 28842 - DNA, 15 bp, Homo sapiens
atgtatctcactcga

SEQ ID NO: 28843 - DNA, 15 bp, Homo sapiens
tatgtatctcactcg

SEQ ID NO: 28844 - DNA, 15 bp, Homo sapiens
atatgtatctcactc

SEQ ID NO: 28845 - DNA, 15 bp, Homo sapiens
aatatgtatctcact

SEQ ID NO: 28846 - DNA, 15 bp, Homo sapiens
aaatatgtatctcac

SEQ ID NO: 28847 - DNA, 15 bp, Homo sapiens
taaatatgtatctca

SEQ ID NO: 28848 - DNA, 15 bp, Homo sapiens
ttaaatatgtatctc

SEQ ID NO: 28849 - DNA, 15 bp, Homo sapiens
cttaaatatgtatct

SEQ ID NO: 28850 - DNA, 15 bp, Homo sapiens
tcttaaatatgtatc

SEQ ID NO: 28851 - DNA, 15 bp, Homo sapiens
ttcttaaatatgtat

SEQ ID NO: 28852 - DNA, 15 bp, Homo sapiens
attcttaaatatgta

SEQ ID NO: 28853 - DNA, 15 bp, Homo sapiens
aattcttaaatatgt

SEQ ID NO: 28854 - DNA, 15 bp, Homo sapiens
taattcttaaatatg

SEQ ID NO: 28855 - DNA, 15 bp, Homo sapiens
ataattcttaaatat

SEQ ID NO: 28856 - DNA, 15 bp, Homo sapiens
gataattcttaaata

SEQ ID NO: 28857 - DNA, 15 bp, Homo sapiens
agataattcttaaat

SEQ ID NO: 28858 - DNA, 15 bp, Homo sapiens
aagataattcttaaa

SEQ ID NO: 28859 - DNA, 15 bp, Homo sapiens
aaagataattcttaa

SEQ ID NO: 28860 - DNA, 15 bp, Homo sapiens
taaagataattctta

SEQ ID NO: 28861 - DNA, 15 bp, Homo sapiens
ttaaagataattctt

SEQ ID NO: 28862 - DNA, 15 bp, Homo sapiens
tttaaagataattct

SEQ ID NO: 28863 - DNA, 15 bp, Homo sapiens
ttttaaagataattc

SEQ ID NO: 28864 - DNA, 15 bp, Homo sapiens
tttttaaagataatt

SEQ ID NO: 28865 - DNA, 15 bp, Homo sapiens
atttttaaagataat

SEQ ID NO: 28866 - DNA, 15 bp, Homo sapiens
aatttttaaagataa

SEQ ID NO: 28867 - DNA, 15 bp, Homo sapiens
aaatttttaaagata

SEQ ID NO: 28868 - DNA, 15 bp, Homo sapiens
gaaatttttaaagat

SEQ ID NO: 28869 - DNA, 15 bp, Homo sapiens
tgaaatttttaaaga

SEQ ID NO: 28870 - DNA, 15 bp, Homo sapiens
ttgaaatttttaaag

SEQ ID NO: 28871 - DNA, 15 bp, Homo sapiens
tttgaaatttttaaa

SEQ ID NO: 28872 - DNA, 15 bp, Homo sapiens
ttttgaaatttttaa

SEQ ID NO: 28873 - DNA, 15 bp, Homo sapiens
tttttgaaattttta

SEQ ID NO: 28874 - DNA, 15 bp, Homo sapiens
atttttgaaattttt

SEQ ID NO: 28875 - DNA, 15 bp, Homo sapiens
aatttttgaaatttt

SEQ ID NO: 28876 - DNA, 15 bp, Homo sapiens
aaatttttgaaattt

SEQ ID NO: 28877 - DNA, 15 bp, Homo sapiens
aaaatttttgaaatt

SEQ ID NO: 28878 - DNA, 15 bp, Homo sapiens
taaaatttttgaaat

SEQ ID NO: 28879 - DNA, 15 bp, Homo sapiens
ttaaaatttttgaaa

SEQ ID NO: 28880 - DNA, 15 bp, Homo sapiens
attaaaatttttgaa

SEQ ID NO: 28881 - DNA, 15 bp, Homo sapiens
aattaaaatttttga

SEQ ID NO: 28882 - DNA, 15 bp, Homo sapiens
aaattaaaatttttg

SEQ ID NO: 28883 - DNA, 15 bp, Homo sapiens
aaaattaaaattttt

SEQ ID NO: 28884 - DNA, 15 bp, Homo sapiens
taaaattaaaatttt

SEQ ID NO: 28885 - DNA, 15 bp, Homo sapiens
gtaaaattaaaattt

SEQ ID NO: 28886 - DNA, 15 bp, Homo sapiens
agtaaaattaaaatt

SEQ ID NO: 28887 - DNA, 15 bp, Homo sapiens
cagtaaaattaaaat

SEQ ID NO: 28888 - DNA, 15 bp, Homo sapiens
acagtaaaattaaaa

SEQ ID NO: 28889 - DNA, 15 bp, Homo sapiens
aacagtaaaattaaa

SEQ ID NO: 28890 - DNA, 15 bp, Homo sapiens
caacagtaaaattaa

SEQ ID NO: 28891 - DNA, 15 bp, Homo sapiens
acaacagtaaaatta

SEQ ID NO: 28892 - DNA, 15 bp, Homo sapiens
cacaacagtaaaatt

SEQ ID NO: 28893 - DNA, 15 bp, Homo sapiens
acacaacagtaaaat

SEQ ID NO: 28894 - DNA, 15 bp, Homo sapiens
aacacaacagtaaaa

SEQ ID NO: 28895 - DNA, 15 bp, Homo sapiens
aaacacaacagtaaa

SEQ ID NO: 28896 - DNA, 15 bp, Homo sapiens
aaaacacaacagtaa

SEQ ID NO: 28897 - DNA, 15 bp, Homo sapiens
taaaacacaacagta

SEQ ID NO: 28898 - DNA, 15 bp, Homo sapiens
ctaaaacacaacagt

SEQ ID NO: 28899 - DNA, 15 bp, Homo sapiens
cctaaaacacaacag

SEQ ID NO: 28900 - DNA, 15 bp, Homo sapiens
tcctaaaacacaaca

SEQ ID NO: 28901 - DNA, 15 bp, Homo sapiens
ttcctaaaacacaac

SEQ ID NO: 28902 - DNA, 15 bp, Homo sapiens
tttcctaaaacacaa

SEQ ID NO: 28903 - DNA, 15 bp, Homo sapiens
ttttcctaaaacaca

SEQ ID NO: 28904 - DNA, 15 bp, Homo sapiens
tttttcctaaaacac

SEQ ID NO: 28905 - DNA, 15 bp, Homo sapiens
ctttttcctaaaaca

SEQ ID NO: 28906 - DNA, 15 bp, Homo sapiens
actttttcctaaaac

SEQ ID NO: 28907 - DNA, 15 bp, Homo sapiens
tactttttcctaaaa

SEQ ID NO: 28908 - DNA, 15 bp, Homo sapiens
atactttttcctaaa

SEQ ID NO: 28909 - DNA, 15 bp, Homo sapiens
aatactttttcctaa

SEQ ID NO: 28910 - DNA, 15 bp, Homo sapiens
caatactttttccta

SEQ ID NO: 28911 - DNA, 15 bp, Homo sapiens
gcaatactttttcct

SEQ ID NO: 28912 - DNA, 15 bp, Homo sapiens
tgcaatactttttcc

SEQ ID NO: 28913 - DNA, 15 bp, Homo sapiens
atgcaatactttttc

SEQ ID NO: 28914 - DNA, 15 bp, Homo sapiens
tatgcaatacttttt

SEQ ID NO: 28915 - DNA, 15 bp, Homo sapiens
ttatgcaatactttt

SEQ ID NO: 28916 - DNA, 15 bp, Homo sapiens
tttatgcaatacttt

SEQ ID NO: 28917 - DNA, 15 bp, Homo sapiens
ctttatgcaatactt

SEQ ID NO: 28918 - DNA, 15 bp, Homo sapiens
gctttatgcaatact

SEQ ID NO: 28919 - DNA, 15 bp, Homo sapiens
agctttatgcaatac

SEQ ID NO: 28920 - DNA, 15 bp, Homo sapiens
tagctttatgcaata

SEQ ID NO: 28921 - DNA, 15 bp, Homo sapiens
atagctttatgcaat

SEQ ID NO: 28922 - DNA, 15 bp, Homo sapiens
aatagctttatgcaa

SEQ ID NO: 28923 - DNA, 15 bp, Homo sapiens
taatagctttatgca

SEQ ID NO: 28924 - DNA, 15 bp, Homo sapiens
ttaatagctttatgc

SEQ ID NO: 28925 - DNA, 15 bp, Homo sapiens
attaatagctttatg

SEQ ID NO: 28926 - DNA, 15 bp, Homo sapiens
tattaatagctttat

SEQ ID NO: 28927 - DNA, 15 bp, Homo sapiens
atattaatagcttta

SEQ ID NO: 28928 - DNA, 15 bp, Homo sapiens
aatattaatagcttt

SEQ ID NO: 28929 - DNA, 15 bp, Homo sapiens
caatattaatagctt

SEQ ID NO: 28930 - DNA, 15 bp, Homo sapiens
acaatattaatagct

SEQ ID NO: 28931 - DNA, 15 bp, Homo sapiens
gacaatattaatagc

SEQ ID NO: 28932 - DNA, 15 bp, Homo sapiens
tgacaatattaatag

SEQ ID NO: 28933 - DNA, 15 bp, Homo sapiens
ctgacaatattaata

SEQ ID NO: 28934 - DNA, 15 bp, Homo sapiens
cctgacaatattaat

SEQ ID NO: 28935 - DNA, 15 bp, Homo sapiens
tcctgacaatattaa

SEQ ID NO: 28936 - DNA, 15 bp, Homo sapiens
ttcctgacaatatta

SEQ ID NO: 28937 - DNA, 15 bp, Homo sapiens
cttcctgacaatatt

SEQ ID NO: 28938 - DNA, 15 bp, Homo sapiens
tcttcctgacaatat

SEQ ID NO: 28939 - DNA, 15 bp, Homo sapiens
gtcttcctgacaata

SEQ ID NO: 28940 - DNA, 15 bp, Homo sapiens
agtcttcctgacaat

SEQ ID NO: 28941 - DNA, 15 bp, Homo sapiens
tagtcttcctgacaa

SEQ ID NO: 28942 - DNA, 15 bp, Homo sapiens
ttagtcttcctgaca

SEQ ID NO: 28943 - DNA, 15 bp, Homo sapiens
tttagtcttcctgac

SEQ ID NO: 28944 - DNA, 15 bp, Homo sapiens
ctttagtcttcctga

SEQ ID NO: 28945 - DNA, 15 bp, Homo sapiens
actttagtcttcctg

SEQ ID NO: 28946 - DNA, 15 bp, Homo sapiens
cactttagtcttcct

SEQ ID NO: 28947 - DNA, 15 bp, Homo sapiens
gcactttagtcttcc

SEQ ID NO: 28948 - DNA, 15 bp, Homo sapiens
tgcactttagtcttc

SEQ ID NO: 28949 - DNA, 15 bp, Homo sapiens
ctgcactttagtctt

SEQ ID NO: 28950 - DNA, 15 bp, Homo sapiens
gctgcactttagtct

SEQ ID NO: 28951 - DNA, 15 bp, Homo sapiens
tgctgcactttagtc

SEQ ID NO: 28952 - DNA, 15 bp, Homo sapiens
atgctgcactttagt

SEQ ID NO: 28953 - DNA, 15 bp, Homo sapiens
tatgctgcactttag

SEQ ID NO: 28954 - DNA, 15 bp, Homo sapiens
ctatgctgcacttta

SEQ ID NO: 28955 - DNA, 15 bp, Homo sapiens
tctatgctgcacttt

SEQ ID NO: 28956 - DNA, 15 bp, Homo sapiens
gtctatgctgcactt

SEQ ID NO: 28957 - DNA, 15 bp, Homo sapiens
agtctatgctgcact

SEQ ID NO: 28958 - DNA, 15 bp, Homo sapiens
tagtctatgctgcac

SEQ ID NO: 28959 - DNA, 15 bp, Homo sapiens
ttagtctatgctgca

SEQ ID NO: 28960 - DNA, 15 bp, Homo sapiens
cttagtctatgctgc

SEQ ID NO: 28961 - DNA, 15 bp, Homo sapiens
tcttagtctatgctg

SEQ ID NO: 28962 - DNA, 15 bp, Homo sapiens
ttcttagtctatgct

SEQ ID NO: 28963 - DNA, 15 bp, Homo sapiens
attcttagtctatgc

SEQ ID NO: 28964 - DNA, 15 bp, Homo sapiens
aattcttagtctatg

SEQ ID NO: 28965 - DNA, 15 bp, Homo sapiens
taattcttagtctat

SEQ ID NO: 28966 - DNA, 15 bp, Homo sapiens
ctaattcttagtcta

SEQ ID NO: 28967 - DNA, 15 bp, Homo sapiens
cctaattcttagtct

SEQ ID NO: 28968 - DNA, 15 bp, Homo sapiens
tcctaattcttagtc

SEQ ID NO: 28969 - DNA, 15 bp, Homo sapiens
ttcctaattcttagt

SEQ ID NO: 28970 - DNA, 15 bp, Homo sapiens
tttcctaattcttag

SEQ ID NO: 28971 - DNA, 15 bp, Homo sapiens
ttttcctaattctta

SEQ ID NO: 28972 - DNA, 15 bp, Homo sapiens
attttcctaattctt

SEQ ID NO: 28973 - DNA, 15 bp, Homo sapiens
aattttcctaattct

SEQ ID NO: 28974 - DNA, 15 bp, Homo sapiens
gaattttcctaattc

SEQ ID NO: 28975 - DNA, 15 bp, Homo sapiens
ggaattttcctaatt

SEQ ID NO: 28976 - DNA, 15 bp, Homo sapiens
aggaattttcctaat

SEQ ID NO: 28977 - DNA, 15 bp, Homo sapiens
taggaattttcctaa

SEQ ID NO: 28978 - DNA, 15 bp, Homo sapiens
ctaggaattttccta

SEQ ID NO: 28979 - DNA, 15 bp, Homo sapiens
tctaggaattttcct

SEQ ID NO: 28980 - DNA, 15 bp, Homo sapiens
gtctaggaattttcc

SEQ ID NO: 28981 - DNA, 15 bp, Homo sapiens
agtctaggaattttc

SEQ ID NO: 28982 - DNA, 15 bp, Homo sapiens
tagtctaggaatttt

SEQ ID NO: 28983 - DNA, 15 bp, Homo sapiens
ttagtctaggaattt

SEQ ID NO: 28984 - DNA, 15 bp, Homo sapiens
tttagtctaggaatt

SEQ ID NO: 28985 - DNA, 15 bp, Homo sapiens
ttttagtctaggaat

SEQ ID NO: 28986 - DNA, 15 bp, Homo sapiens
tttttagtctaggaa

SEQ ID NO: 28987 - DNA, 15 bp, Homo sapiens
atttttagtctagga

SEQ ID NO: 28988 - DNA, 15 bp, Homo sapiens
tatttttagtctagg

SEQ ID NO: 28989 - DNA, 15 bp, Homo sapiens
ctatttttagtctag

SEQ ID NO: 28990 - DNA, 15 bp, Homo sapiens
actatttttagtcta

SEQ ID NO: 28991 - DNA, 15 bp, Homo sapiens
tactatttttagtct

SEQ ID NO: 28992 - DNA, 15 bp, Homo sapiens
atactatttttagtc

SEQ ID NO: 28993 - DNA, 15 bp, Homo sapiens
tatactatttttagt

SEQ ID NO: 28994 - DNA, 15 bp, Homo sapiens
ttatactatttttag

SEQ ID NO: 28995 - DNA, 15 bp, Homo sapiens
cttatactattttta

SEQ ID NO: 28996 - DNA, 15 bp, Homo sapiens
ccttatactattttt

SEQ ID NO: 28997 - DNA, 15 bp, Homo sapiens
tccttatactatttt

SEQ ID NO: 28998 - DNA, 15 bp, Homo sapiens
ctccttatactattt

SEQ ID NO: 28999 - DNA, 15 bp, Homo sapiens
tctccttatactatt

SEQ ID NO: 29000 - DNA, 15 bp, Homo sapiens
ctctccttatactat

SEQ ID NO: 29001 - DNA, 15 bp, Homo sapiens
cctctccttatacta

SEQ ID NO: 29002 - DNA, 15 bp, Homo sapiens
ccctctccttatact

SEQ ID NO: 29003 - DNA, 15 bp, Homo sapiens
accctctccttatac

SEQ ID NO: 29004 - DNA, 15 bp, Homo sapiens
aaccctctccttata

SEQ ID NO: 29005 - DNA, 15 bp, Homo sapiens
aaaccctctccttat

SEQ ID NO: 29006 - DNA, 15 bp, Homo sapiens
taaaccctctcctta

SEQ ID NO: 29007 - DNA, 15 bp, Homo sapiens
gtaaaccctctcctt

SEQ ID NO: 29008 - DNA, 15 bp, Homo sapiens
ggtaaaccctctcct

SEQ ID NO: 29009 - DNA, 15 bp, Homo sapiens
aggtaaaccctctcc

SEQ ID NO: 29010 - DNA, 15 bp, Homo sapiens
taggtaaaccctctc

SEQ ID NO: 29011 - DNA, 15 bp, Homo sapiens
gtaggtaaaccctct

SEQ ID NO: 29012 - DNA, 15 bp, Homo sapiens
agtaggtaaaccctc

SEQ ID NO: 29013 - DNA, 15 bp, Homo sapiens
tagtaggtaaaccct

SEQ ID NO: 29014 - DNA, 15 bp, Homo sapiens
atagtaggtaaaccc

SEQ ID NO: 29015 - DNA, 15 bp, Homo sapiens
aatagtaggtaaacc

SEQ ID NO: 29016 - DNA, 15 bp, Homo sapiens
aaatagtaggtaaac

SEQ ID NO: 29017 - DNA, 15 bp, Homo sapiens
caaatagtaggtaaa

SEQ ID NO: 29018 - DNA, 15 bp, Homo sapiens
tcaaatagtaggtaa

SEQ ID NO: 29019 - DNA, 15 bp, Homo sapiens
ctcaaatagtaggta

SEQ ID NO: 29020 - DNA, 15 bp, Homo sapiens
cctcaaatagtaggt

SEQ ID NO: 29021 - DNA, 15 bp, Homo sapiens
gcctcaaatagtagg

SEQ ID NO: 29022 - DNA, 15 bp, Homo sapiens
tgcctcaaatagtag

SEQ ID NO: 29023 - DNA, 15 bp, Homo sapiens
ctgcctcaaatagta

SEQ ID NO: 29024 - DNA, 15 bp, Homo sapiens
actgcctcaaatagt

SEQ ID NO: 29025 - DNA, 15 bp, Homo sapiens
aactgcctcaaatag

SEQ ID NO: 29026 - DNA, 15 bp, Homo sapiens
caactgcctcaaata

SEQ ID NO: 29027 - DNA, 15 bp, Homo sapiens
ccaactgcctcaaat

SEQ ID NO: 29028 - DNA, 15 bp, Homo sapiens
accaactgcctcaaa

SEQ ID NO: 29029 - DNA, 15 bp, Homo sapiens
gaccaactgcctcaa

SEQ ID NO: 29030 - DNA, 15 bp, Homo sapiens
agaccaactgcctca

SEQ ID NO: 29031 - DNA, 15 bp, Homo sapiens
tagaccaactgcctc

SEQ ID NO: 29032 - DNA, 15 bp, Homo sapiens
ttagaccaactgcct

SEQ ID NO: 29033 - DNA, 15 bp, Homo sapiens
attagaccaactgcc

SEQ ID NO: 29034 - DNA, 15 bp, Homo sapiens
tattagaccaactgc

SEQ ID NO: 29035 - DNA, 15 bp, Homo sapiens
ctattagaccaactg

SEQ ID NO: 29036 - DNA, 15 bp, Homo sapiens
actattagaccaact

SEQ ID NO: 29037 - DNA, 15 bp, Homo sapiens
tactattagaccaac

SEQ ID NO: 29038 - DNA, 15 bp, Homo sapiens
ttactattagaccaa

SEQ ID NO: 29039 - DNA, 15 bp, Homo sapiens
cttactattagacca

SEQ ID NO: 29040 - DNA, 15 bp, Homo sapiens
gcttactattagacc

SEQ ID NO: 29041 - DNA, 15 bp, Homo sapiens
tgcttactattagac

SEQ ID NO: 29042 - DNA, 15 bp, Homo sapiens
ttgcttactattaga

SEQ ID NO: 29043 - DNA, 15 bp, Homo sapiens
attgcttactattag

SEQ ID NO: 29044 - DNA, 15 bp, Homo sapiens
gattgcttactatta

SEQ ID NO: 29045 - DNA, 15 bp, Homo sapiens
tgattgcttactatt

SEQ ID NO: 29046 - DNA, 15 bp, Homo sapiens
gtgattgcttactat

SEQ ID NO: 29047 - DNA, 15 bp, Homo sapiens
tgtgattgcttacta

SEQ ID NO: 29048 - DNA, 15 bp, Homo sapiens
ctgtgattgcttact

SEQ ID NO: 29049 - DNA, 15 bp, Homo sapiens
cctgtgattgcttac

SEQ ID NO: 29050 - DNA, 15 bp, Homo sapiens
ccctgtgattgctta

SEQ ID NO: 29051 - DNA, 15 bp, Homo sapiens
tccctgtgattgctt

SEQ ID NO: 29052 - DNA, 15 bp, Homo sapiens
ctccctgtgattgct

SEQ ID NO: 29053 - DNA, 15 bp, Homo sapiens
tctccctgtgattgc

SEQ ID NO: 29054 - DNA, 15 bp, Homo sapiens
ttctccctgtgattg

SEQ ID NO: 29055 - DNA, 15 bp, Homo sapiens
tttctccctgtgatt

SEQ ID NO: 29056 - DNA, 15 bp, Homo sapiens
ctttctccctgtgat

SEQ ID NO: 29057 - DNA, 15 bp, Homo sapiens
gctttctccctgtga

SEQ ID NO: 29058 - DNA, 15 bp, Homo sapiens
tgctttctccctgtg

SEQ ID NO: 29059 - DNA, 15 bp, Homo sapiens
ctgctttctccctgt

SEQ ID NO: 29060 - DNA, 15 bp, Homo sapiens
tctgctttctccctg

SEQ ID NO: 29061 - DNA, 15 bp, Homo sapiens
ttctgctttctccct

SEQ ID NO: 29062 - DNA, 15 bp, Homo sapiens
gttctgctttctccc

SEQ ID NO: 29063 - DNA, 15 bp, Homo sapiens
agttctgctttctcc

SEQ ID NO: 29064 - DNA, 15 bp, Homo sapiens
tagttctgctttctc

SEQ ID NO: 29065 - DNA, 15 bp, Homo sapiens
gtagttctgctttct

SEQ ID NO: 29066 - DNA, 15 bp, Homo sapiens
agtagttctgctttc

SEQ ID NO: 29067 - DNA, 15 bp, Homo sapiens
aagtagttctgcttt

SEQ ID NO: 29068 - DNA, 15 bp, Homo sapiens
taagtagttctgctt

SEQ ID NO: 29069 - DNA, 15 bp, Homo sapiens
ttaagtagttctgct

SEQ ID NO: 29070 - DNA, 15 bp, Homo sapiens
gttaagtagttctgc

SEQ ID NO: 29071 - DNA, 15 bp, Homo sapiens
agttaagtagttctg

SEQ ID NO: 29072 - DNA, 15 bp, Homo sapiens
gagttaagtagttct

SEQ ID NO: 29073 - DNA, 15 bp, Homo sapiens
agagttaagtagttc

SEQ ID NO: 29074 - DNA, 15 bp, Homo sapiens
aagagttaagtagtt

SEQ ID NO: 29075 - DNA, 15 bp, Homo sapiens
gaagagttaagtagt

SEQ ID NO: 29076 - DNA, 15 bp, Homo sapiens
agaagagttaagtag

SEQ ID NO: 29077 - DNA, 15 bp, Homo sapiens
cagaagagttaagta

SEQ ID NO: 29078 - DNA, 15 bp, Homo sapiens
acagaagagttaagt

SEQ ID NO: 29079 - DNA, 15 bp, Homo sapiens
cacagaagagttaag

SEQ ID NO: 29080 - DNA, 15 bp, Homo sapiens
acacagaagagttaa

SEQ ID NO: 29081 - DNA, 15 bp, Homo sapiens
aacacagaagagtta

SEQ ID NO: 29082 - DNA, 15 bp, Homo sapiens
caacacagaagagtt

SEQ ID NO: 29083 - DNA, 15 bp, Homo sapiens
tcaacacagaagagt

SEQ ID NO: 29084 - DNA, 15 bp, Homo sapiens
ctcaacacagaagag

SEQ ID NO: 29085 - DNA, 15 bp, Homo sapiens
cctcaacacagaaga

SEQ ID NO: 29086 - DNA, 15 bp, Homo sapiens
tcctcaacacagaag

SEQ ID NO: 29087 - DNA, 15 bp, Homo sapiens
ttcctcaacacagaa

SEQ ID NO: 29088 - DNA, 15 bp, Homo sapiens
attcctcaacacaga

SEQ ID NO: 29089 - DNA, 15 bp, Homo sapiens
cattcctcaacacag

SEQ ID NO: 29090 - DNA, 15 bp, Homo sapiens
tcattcctcaacaca

SEQ ID NO: 29091 - DNA, 15 bp, Homo sapiens
gtcattcctcaacac

SEQ ID NO: 29092 - DNA, 15 bp, Homo sapiens
tgtcattcctcaaca

SEQ ID NO: 29093 - DNA, 15 bp, Homo sapiens
atgtcattcctcaac

SEQ ID NO: 29094 - DNA, 15 bp, Homo sapiens
tatgtcattcctcaa

SEQ ID NO: 29095 - DNA, 15 bp, Homo sapiens
ttatgtcattcctca

SEQ ID NO: 29096 - DNA, 15 bp, Homo sapiens
tttatgtcattcctc

SEQ ID NO: 29097 - DNA, 15 bp, Homo sapiens
ttttatgtcattcct

SEQ ID NO: 29098 - DNA, 15 bp, Homo sapiens
cttttatgtcattcc

SEQ ID NO: 29099 - DNA, 15 bp, Homo sapiens
ccttttatgtcattc

SEQ ID NO: 29100 - DNA, 15 bp, Homo sapiens
accttttatgtcatt

SEQ ID NO: 29101 - DNA, 15 bp, Homo sapiens
taccttttatgtcat

SEQ ID NO: 29102 - DNA, 15 bp, Homo sapiens
ctaccttttatgtca

SEQ ID NO: 29103 - DNA, 15 bp, Homo sapiens
cctaccttttatgtc

SEQ ID NO: 29104 - DNA, 15 bp, Homo sapiens
tcctaccttttatgt

SEQ ID NO: 29105 - DNA, 15 bp, Homo sapiens
ttcctaccttttatg

SEQ ID NO: 29106 - DNA, 15 bp, Homo sapiens
tttcctaccttttat

SEQ ID NO: 29107 - DNA, 15 bp, Homo sapiens
ctttcctacctttta

SEQ ID NO: 29108 - DNA, 15 bp, Homo sapiens
cctttcctacctttt

SEQ ID NO: 29109 - DNA, 15 bp, Homo sapiens
tcctttcctaccttt

SEQ ID NO: 29110 - DNA, 15 bp, Homo sapiens
atcctttcctacctt

SEQ ID NO: 29111 - DNA, 15 bp, Homo sapiens
tatcctttcctacct

SEQ ID NO: 29112 - DNA, 15 bp, Homo sapiens
atatcctttcctacc

SEQ ID NO: 29113 - DNA, 15 bp, Homo sapiens
tatatcctttcctac

SEQ ID NO: 29114 - DNA, 15 bp, Homo sapiens
ttatatcctttccta

SEQ ID NO: 29115 - DNA, 15 bp, Homo sapiens
gttatatcctttcct

SEQ ID NO: 29116 - DNA, 15 bp, Homo sapiens
tgttatatcctttcc

SEQ ID NO: 29117 - DNA, 15 bp, Homo sapiens
ttgttatatcctttc

SEQ ID NO: 29118 - DNA, 15 bp, Homo sapiens
tttgttatatccttt

SEQ ID NO: 29119 - DNA, 15 bp, Homo sapiens
atttgttatatcctt

SEQ ID NO: 29120 - DNA, 15 bp, Homo sapiens
catttgttatatcct

SEQ ID NO: 29121 - DNA, 15 bp, Homo sapiens
acatttgttatatcc

SEQ ID NO: 29122 - DNA, 15 bp, Homo sapiens
aacatttgttatatc

SEQ ID NO: 29123 - DNA, 15 bp, Homo sapiens
caacatttgttatat

SEQ ID NO: 29124 - DNA, 15 bp, Homo sapiens
tcaacatttgttata

SEQ ID NO: 29125 - DNA, 15 bp, Homo sapiens
atcaacatttgttat

SEQ ID NO: 29126 - DNA, 15 bp, Homo sapiens
tatcaacatttgtta

SEQ ID NO: 29127 - DNA, 15 bp, Homo sapiens
ttatcaacatttgtt

SEQ ID NO: 29128 - DNA, 15 bp, Homo sapiens
cttatcaacatttgt

SEQ ID NO: 29129 - DNA, 15 bp, Homo sapiens
tcttatcaacatttg

SEQ ID NO: 29130 - DNA, 15 bp, Homo sapiens
ctcttatcaacattt

SEQ ID NO: 29131 - DNA, 15 bp, Homo sapiens
cctcttatcaacatt

SEQ ID NO: 29132 - DNA, 15 bp, Homo sapiens
tcctcttatcaacat

SEQ ID NO: 29133 - DNA, 15 bp, Homo sapiens
ctcctcttatcaaca

SEQ ID NO: 29134 - DNA, 15 bp, Homo sapiens
actcctcttatcaac

SEQ ID NO: 29135 - DNA, 15 bp, Homo sapiens
gactcctcttatcaa

SEQ ID NO: 29136 - DNA, 15 bp, Homo sapiens
agactcctcttatca

SEQ ID NO: 29137 - DNA, 15 bp, Homo sapiens
cagactcctcttatc

SEQ ID NO: 29138 - DNA, 15 bp, Homo sapiens
tcagactcctcttat

SEQ ID NO: 29139 - DNA, 15 bp, Homo sapiens
atcagactcctctta

SEQ ID NO: 29140 - DNA, 15 bp, Homo sapiens
catcagactcctctt

SEQ ID NO: 29141 - DNA, 15 bp, Homo sapiens
ccatcagactcctct

SEQ ID NO: 29142 - DNA, 15 bp, Homo sapiens
tccatcagactcctc

SEQ ID NO: 29143 - DNA, 15 bp, Homo sapiens
atccatcagactcct

SEQ ID NO: 29144 - DNA, 15 bp, Homo sapiens
catccatcagactcc

SEQ ID NO: 29145 - DNA, 15 bp, Homo sapiens
tcatccatcagactc

SEQ ID NO: 29146 - DNA, 15 bp, Homo sapiens
ctcatccatcagact

SEQ ID NO: 29147 - DNA, 15 bp, Homo sapiens
tctcatccatcagac

SEQ ID NO: 29148 - DNA, 15 bp, Homo sapiens
ctctcatccatcaga

SEQ ID NO: 29149 - DNA, 15 bp, Homo sapiens
cctctcatccatcag

SEQ ID NO: 29150 - DNA, 15 bp, Homo sapiens
tcctctcatccatca

SEQ ID NO: 29151 - DNA, 15 bp, Homo sapiens
ctcctctcatccatc

SEQ ID NO: 29152 - DNA, 15 bp, Homo sapiens
cctcctctcatccat

SEQ ID NO: 29153 - DNA, 15 bp, Homo sapiens
ccctcctctcatcca

SEQ ID NO: 29154 - DNA, 15 bp, Homo sapiens
tccctcctctcatcc

SEQ ID NO: 29155 - DNA, 15 bp, Homo sapiens
ttccctcctctcatc

SEQ ID NO: 29156 - DNA, 15 bp, Homo sapiens
gttccctcctctcat

SEQ ID NO: 29157 - DNA, 15 bp, Homo sapiens
agttccctcctctca

SEQ ID NO: 29158 - DNA, 15 bp, Homo sapiens
cagttccctcctctc

SEQ ID NO: 29159 - DNA, 15 bp, Homo sapiens
gcagttccctcctct

SEQ ID NO: 29160 - DNA, 15 bp, Homo sapiens
agcagttccctcctc

SEQ ID NO: 29161 - DNA, 15 bp, Homo sapiens
aagcagttccctcct

SEQ ID NO: 29162 - DNA, 15 bp, Homo sapiens
aaagcagttccctcc

SEQ ID NO: 29163 - DNA, 15 bp, Homo sapiens
taaagcagttccctc

SEQ ID NO: 29164 - DNA, 15 bp, Homo sapiens
ttaaagcagttccct

SEQ ID NO: 29165 - DNA, 15 bp, Homo sapiens
tttaaagcagttccc

SEQ ID NO: 29166 - DNA, 15 bp, Homo sapiens
atttaaagcagttcc

SEQ ID NO: 29167 - DNA, 15 bp, Homo sapiens
catttaaagcagttc

SEQ ID NO: 29168 - DNA, 15 bp, Homo sapiens
tcatttaaagcagtt

SEQ ID NO: 29169 - DNA, 15 bp, Homo sapiens
ctcatttaaagcagt

SEQ ID NO: 29170 - DNA, 15 bp, Homo sapiens
actcatttaaagcag

SEQ ID NO: 29171 - DNA, 15 bp, Homo sapiens
aactcatttaaagca

SEQ ID NO: 29172 - DNA, 15 bp, Homo sapiens
aaactcatttaaagc

SEQ ID NO: 29173 - DNA, 15 bp, Homo sapiens
gaaactcatttaaag

SEQ ID NO: 29174 - DNA, 15 bp, Homo sapiens
agaaactcatttaaa

SEQ ID NO: 29175 - DNA, 15 bp, Homo sapiens
tagaaactcatttaa

SEQ ID NO: 29176 - DNA, 15 bp, Homo sapiens
gtagaaactcattta

SEQ ID NO: 29177 - DNA, 15 bp, Homo sapiens
agtagaaactcattt

SEQ ID NO: 29178 - DNA, 15 bp, Homo sapiens
aagtagaaactcatt

SEQ ID NO: 29179 - DNA, 15 bp, Homo sapiens
gaagtagaaactcat

SEQ ID NO: 29180 - DNA, 15 bp, Homo sapiens
tgaagtagaaactca

SEQ ID NO: 29181 - DNA, 15 bp, Homo sapiens
ctgaagtagaaactc

SEQ ID NO: 29182 - DNA, 15 bp, Homo sapiens
tctgaagtagaaact

SEQ ID NO: 29183 - DNA, 15 bp, Homo sapiens
gtctgaagtagaaac

SEQ ID NO: 29184 - DNA, 15 bp, Homo sapiens
tgtctgaagtagaaa

SEQ ID NO: 29185 - DNA, 15 bp, Homo sapiens
atgtctgaagtagaa

SEQ ID NO: 29186 - DNA, 15 bp, Homo sapiens
tatgtctgaagtaga

SEQ ID NO: 29187 - DNA, 15 bp, Homo sapiens
ttatgtctgaagtag

SEQ ID NO: 29188 - DNA, 15 bp, Homo sapiens
cttatgtctgaagta

SEQ ID NO: 29189 - DNA, 15 bp, Homo sapiens
acttatgtctgaagt

SEQ ID NO: 29190 - DNA, 15 bp, Homo sapiens
aacttatgtctgaag

SEQ ID NO: 29191 - DNA, 15 bp, Homo sapiens
taacttatgtctgaa

SEQ ID NO: 29192 - DNA, 15 bp, Homo sapiens
ttaacttatgtctga

SEQ ID NO: 29193 - DNA, 15 bp, Homo sapiens
attaacttatgtctg

SEQ ID NO: 29194 - DNA, 15 bp, Homo sapiens
aattaacttatgtct

SEQ ID NO: 29195 - DNA, 15 bp, Homo sapiens
gaattaacttatgtc

SEQ ID NO: 29196 - DNA, 15 bp, Homo sapiens
agaattaacttatgt

SEQ ID NO: 29197 - DNA, 15 bp, Homo sapiens
gagaattaacttatg

SEQ ID NO: 29198 - DNA, 15 bp, Homo sapiens
tgagaattaacttat

SEQ ID NO: 29199 - DNA, 15 bp, Homo sapiens
ctgagaattaactta

SEQ ID NO: 29200 - DNA, 15 bp, Homo sapiens
tctgagaattaactt

SEQ ID NO: 29201 - DNA, 15 bp, Homo sapiens
ctctgagaattaact

SEQ ID NO: 29202 - DNA, 15 bp, Homo sapiens
gctctgagaattaac

SEQ ID NO: 29203 - DNA, 15 bp, Homo sapiens
ggctctgagaattaa

SEQ ID NO: 29204 - DNA, 15 bp, Homo sapiens
gggctctgagaatta

SEQ ID NO: 29205 - DNA, 15 bp, Homo sapiens
tgggctctgagaatt

SEQ ID NO: 29206 - DNA, 15 bp, Homo sapiens
gtgggctctgagaat

SEQ ID NO: 29207 - DNA, 15 bp, Homo sapiens
tgtgggctctgagaa

SEQ ID NO: 29208 - DNA, 15 bp, Homo sapiens
ttgtgggctctgaga

SEQ ID NO: 29209 - DNA, 15 bp, Homo sapiens
tttgtgggctctgag

SEQ ID NO: 29210 - DNA, 15 bp, Homo sapiens
ttttgtgggctctga

SEQ ID NO: 29211 - DNA, 15 bp, Homo sapiens
tttttgtgggctctg

SEQ ID NO: 29212 - DNA, 15 bp, Homo sapiens
gtttttgtgggctct

SEQ ID NO: 29213 - DNA, 15 bp, Homo sapiens
agtttttgtgggctc

SEQ ID NO: 29214 - DNA, 15 bp, Homo sapiens
aagtttttgtgggct

SEQ ID NO: 29215 - DNA, 15 bp, Homo sapiens
aaagtttttgtgggc

SEQ ID NO: 29216 - DNA, 15 bp, Homo sapiens
gaaagtttttgtggg

SEQ ID NO: 29217 - DNA, 15 bp, Homo sapiens
tgaaagtttttgtgg

SEQ ID NO: 29218 - DNA, 15 bp, Homo sapiens
gtgaaagtttttgtg

SEQ ID NO: 29219 - DNA, 15 bp, Homo sapiens
agtgaaagtttttgt

SEQ ID NO: 29220 - DNA, 15 bp, Homo sapiens
aagtgaaagtttttg

SEQ ID NO: 29221 - DNA, 15 bp, Homo sapiens
aaagtgaaagttttt

SEQ ID NO: 29222 - DNA, 15 bp, Homo sapiens
aaaagtgaaagtttt

SEQ ID NO: 29223 - DNA, 15 bp, Homo sapiens
taaaagtgaaagttt

SEQ ID NO: 29224 - DNA, 15 bp, Homo sapiens
ataaaagtgaaagtt

SEQ ID NO: 29225 - DNA, 15 bp, Homo sapiens
aataaaagtgaaagt

SEQ ID NO: 29226 - DNA, 15 bp, Homo sapiens
aaataaaagtgaaag

SEQ ID NO: 29227 - DNA, 15 bp, Homo sapiens
caaataaaagtgaaa

SEQ ID NO: 29228 - DNA, 15 bp, Homo sapiens
acaaataaaagtgaa

SEQ ID NO: 29229 - DNA, 15 bp, Homo sapiens
cacaaataaaagtga

SEQ ID NO: 29230 - DNA, 15 bp, Homo sapiens
tcacaaataaaagtg

SEQ ID NO: 29231 - DNA, 15 bp, Homo sapiens
ttcacaaataaaagt

SEQ ID NO: 29232 - DNA, 15 bp, Homo sapiens
tttcacaaataaaag

SEQ ID NO: 29233 - DNA, 15 bp, Homo sapiens
atttcacaaataaaa

SEQ ID NO: 29234 - DNA, 15 bp, Homo sapiens
tatttcacaaataaa

SEQ ID NO: 29235 - DNA, 15 bp, Homo sapiens
gtatttcacaaataa

SEQ ID NO: 29236 - DNA, 15 bp, Homo sapiens
tgtatttcacaaata

SEQ ID NO: 29237 - DNA, 15 bp, Homo sapiens
ttgtatttcacaaat

SEQ ID NO: 29238 - DNA, 15 bp, Homo sapiens
gttgtatttcacaaa

SEQ ID NO: 29239 - DNA, 15 bp, Homo sapiens
agttgtatttcacaa

SEQ ID NO: 29240 - DNA, 15 bp, Homo sapiens
gagttgtatttcaca

SEQ ID NO: 29241 - DNA, 15 bp, Homo sapiens
tgagttgtatttcac

SEQ ID NO: 29242 - DNA, 15 bp, Homo sapiens
ctgagttgtatttca

SEQ ID NO: 29243 - DNA, 15 bp, Homo sapiens
actgagttgtatttc

SEQ ID NO: 29244 - DNA, 15 bp, Homo sapiens
aactgagttgtattt

SEQ ID NO: 29245 - DNA, 15 bp, Homo sapiens
gaactgagttgtatt

SEQ ID NO: 29246 - DNA, 15 bp, Homo sapiens
agaactgagttgtat

SEQ ID NO: 29247 - DNA, 15 bp, Homo sapiens
gagaactgagttgta

SEQ ID NO: 29248 - DNA, 15 bp, Homo sapiens
tgagaactgagttgt

SEQ ID NO: 29249 - DNA, 15 bp, Homo sapiens
atgagaactgagttg

SEQ ID NO: 29250 - DNA, 15 bp, Homo sapiens
catgagaactgagtt

SEQ ID NO: 29251 - DNA, 15 bp, Homo sapiens
ccatgagaactgagt

SEQ ID NO: 29252 - DNA, 15 bp, Homo sapiens
gccatgagaactgag

SEQ ID NO: 29253 - DNA, 15 bp, Homo sapiens
agccatgagaactga

SEQ ID NO: 29254 - DNA, 15 bp, Homo sapiens
aagccatgagaactg

SEQ ID NO: 29255 - DNA, 15 bp, Homo sapiens
taagccatgagaact

SEQ ID NO: 29256 - DNA, 15 bp, Homo sapiens
ttaagccatgagaac

SEQ ID NO: 29257 - DNA, 15 bp, Homo sapiens
gttaagccatgagaa

SEQ ID NO: 29258 - DNA, 15 bp, Homo sapiens
tgttaagccatgaga

SEQ ID NO: 29259 - DNA, 15 bp, Homo sapiens
gtgttaagccatgag

SEQ ID NO: 29260 - DNA, 15 bp, Homo sapiens
agtgttaagccatga

SEQ ID NO: 29261 - DNA, 15 bp, Homo sapiens
aagtgttaagccatg

SEQ ID NO: 29262 - DNA, 15 bp, Homo sapiens
aaagtgttaagccat

SEQ ID NO: 29263 - DNA, 15 bp, Homo sapiens
taaagtgttaagcca

SEQ ID NO: 29264 - DNA, 15 bp, Homo sapiens
ttaaagtgttaagcc

SEQ ID NO: 29265 - DNA, 15 bp, Homo sapiens
tttaaagtgttaagc

SEQ ID NO: 29266 - DNA, 15 bp, Homo sapiens
gtttaaagtgttaag

SEQ ID NO: 29267 - DNA, 15 bp, Homo sapiens
ggtttaaagtgttaa

SEQ ID NO: 29268 - DNA, 15 bp, Homo sapiens
tggtttaaagtgtta

SEQ ID NO: 29269 - DNA, 15 bp, Homo sapiens
atggtttaaagtgtt

SEQ ID NO: 29270 - DNA, 15 bp, Homo sapiens
catggtttaaagtgt

SEQ ID NO: 29271 - DNA, 15 bp, Homo sapiens
tcatggtttaaagtg

SEQ ID NO: 29272 - DNA, 15 bp, Homo sapiens
ctcatggtttaaagt

SEQ ID NO: 29273 - DNA, 15 bp, Homo sapiens
tctcatggtttaaag

SEQ ID NO: 29274 - DNA, 15 bp, Homo sapiens
ttctcatggtttaaa

SEQ ID NO: 29275 - DNA, 15 bp, Homo sapiens
tttctcatggtttaa

SEQ ID NO: 29276 - DNA, 15 bp, Homo sapiens
ttttctcatggttta

SEQ ID NO: 29277 - DNA, 15 bp, Homo sapiens
gttttctcatggttt

SEQ ID NO: 29278 - DNA, 15 bp, Homo sapiens
agttttctcatggtt

SEQ ID NO: 29279 - DNA, 15 bp, Homo sapiens
cagttttctcatggt

SEQ ID NO: 29280 - DNA, 15 bp, Homo sapiens
tcagttttctcatgg

SEQ ID NO: 29281 - DNA, 15 bp, Homo sapiens
ttcagttttctcatg

SEQ ID NO: 29282 - DNA, 15 bp, Homo sapiens
cttcagttttctcat

SEQ ID NO: 29283 - DNA, 15 bp, Homo sapiens
tcttcagttttctca

SEQ ID NO: 29284 - DNA, 15 bp, Homo sapiens
ctcttcagttttctc

SEQ ID NO: 29285 - DNA, 15 bp, Homo sapiens
actcttcagttttct

SEQ ID NO: 29286 - DNA, 15 bp, Homo sapiens
aactcttcagttttc

SEQ ID NO: 29287 - DNA, 15 bp, Homo sapiens
caactcttcagtttt

SEQ ID NO: 29288 - DNA, 15 bp, Homo sapiens
tcaactcttcagttt

SEQ ID NO: 29289 - DNA, 15 bp, Homo sapiens
ctcaactcttcagtt

SEQ ID NO: 29290 - DNA, 15 bp, Homo sapiens
tctcaactcttcagt

SEQ ID NO: 29291 - DNA, 15 bp, Homo sapiens
ttctcaactcttcag

SEQ ID NO: 29292 - DNA, 15 bp, Homo sapiens
cttctcaactcttca

SEQ ID NO: 29293 - DNA, 15 bp, Homo sapiens
gcttctcaactcttc

SEQ ID NO: 29294 - DNA, 15 bp, Homo sapiens
agcttctcaactctt

SEQ ID NO: 29295 - DNA, 15 bp, Homo sapiens
aagcttctcaactct

SEQ ID NO: 29296 - DNA, 15 bp, Homo sapiens
caagcttctcaactc

SEQ ID NO: 29297 - DNA, 15 bp, Homo sapiens
ccaagcttctcaact

SEQ ID NO: 29298 - DNA, 15 bp, Homo sapiens
gccaagcttctcaac

SEQ ID NO: 29299 - DNA, 15 bp, Homo sapiens
tgccaagcttctcaa

SEQ ID NO: 29300 - DNA, 15 bp, Homo sapiens
ctgccaagcttctca

SEQ ID NO: 29301 - DNA, 15 bp, Homo sapiens
tctgccaagcttctc

SEQ ID NO: 29302 - DNA, 15 bp, Homo sapiens
atctgccaagcttct

SEQ ID NO: 29303 - DNA, 15 bp, Homo sapiens
catctgccaagcttc

SEQ ID NO: 29304 - DNA, 15 bp, Homo sapiens
gcatctgccaagctt

SEQ ID NO: 29305 - DNA, 15 bp, Homo sapiens
agcatctgccaagct

SEQ ID NO: 29306 - DNA, 15 bp, Homo sapiens
cagcatctgccaagc

SEQ ID NO: 29307 - DNA, 15 bp, Homo sapiens
gcagcatctgccaag

SEQ ID NO: 29308 - DNA, 15 bp, Homo sapiens
agcagcatctgccaa

SEQ ID NO: 29309 - DNA, 15 bp, Homo sapiens
cagcagcatctgcca

SEQ ID NO: 29310 - DNA, 15 bp, Homo sapiens
acagcagcatctgcc

SEQ ID NO: 29311 - DNA, 15 bp, Homo sapiens
cacagcagcatctgc

SEQ ID NO: 29312 - DNA, 15 bp, Homo sapiens
tcacagcagcatctg

SEQ ID NO: 29313 - DNA, 15 bp, Homo sapiens
atcacagcagcatct

SEQ ID NO: 29314 - DNA, 15 bp, Homo sapiens
tatcacagcagcatc

SEQ ID NO: 29315 - DNA, 15 bp, Homo sapiens
ctatcacagcagcat

SEQ ID NO: 29316 - DNA, 15 bp, Homo sapiens
actatcacagcagca

SEQ ID NO: 29317 - DNA, 15 bp, Homo sapiens
gactatcacagcagc

SEQ ID NO: 29318 - DNA, 15 bp, Homo sapiens
tgactatcacagcag

SEQ ID NO: 29319 - DNA, 15 bp, Homo sapiens
ttgactatcacagca

SEQ ID NO: 29320 - DNA, 15 bp, Homo sapiens
tttgactatcacagc

SEQ ID NO: 29321 - DNA, 15 bp, Homo sapiens
ttttgactatcacag

SEQ ID NO: 29322 - DNA, 15 bp, Homo sapiens
tttttgactatcaca

SEQ ID NO: 29323 - DNA, 15 bp, Homo sapiens
ctttttgactatcac

SEQ ID NO: 29324 - DNA, 15 bp, Homo sapiens
tctttttgactatca

SEQ ID NO: 29325 - DNA, 15 bp, Homo sapiens
ttctttttgactatc

SEQ ID NO: 29326 - DNA, 15 bp, Homo sapiens
tttctttttgactat

SEQ ID NO: 29327 - DNA, 15 bp, Homo sapiens
ctttctttttgacta

SEQ ID NO: 29328 - DNA, 15 bp, Homo sapiens
actttctttttgact

SEQ ID NO: 29329 - DNA, 15 bp, Homo sapiens
cactttctttttgac

SEQ ID NO: 29330 - DNA, 15 bp, Homo sapiens
ccactttctttttga

SEQ ID NO: 29331 - DNA, 15 bp, Homo sapiens
cccactttctttttg

SEQ ID NO: 29332 - DNA, 15 bp, Homo sapiens
acccactttcttttt

SEQ ID NO: 29333 - DNA, 15 bp, Homo sapiens
cacccactttctttt

SEQ ID NO: 29334 - DNA, 15 bp, Homo sapiens
gcacccactttcttt

SEQ ID NO: 29335 - DNA, 15 bp, Homo sapiens
ggcacccactttctt

SEQ ID NO: 29336 - DNA, 15 bp, Homo sapiens
tggcacccactttct

SEQ ID NO: 29337 - DNA, 15 bp, Homo sapiens
atggcacccactttc

SEQ ID NO: 29338 - DNA, 15 bp, Homo sapiens
catggcacccacttt

SEQ ID NO: 29339 - DNA, 15 bp, Homo sapiens
tcatggcacccactt

SEQ ID NO: 29340 - DNA, 15 bp, Homo sapiens
ctcatggcacccact

SEQ ID NO: 29341 - DNA, 15 bp, Homo sapiens
gctcatggcacccac

SEQ ID NO: 29342 - DNA, 15 bp, Homo sapiens
agctcatggcaccca

SEQ ID NO: 29343 - DNA, 15 bp, Homo sapiens
tagctcatggcaccc

SEQ ID NO: 29344 - DNA, 15 bp, Homo sapiens
gtagctcatggcacc

SEQ ID NO: 29345 - DNA, 15 bp, Homo sapiens
agtagctcatggcac

SEQ ID NO: 29346 - DNA, 15 bp, Homo sapiens
tagtagctcatggca

SEQ ID NO: 29347 - DNA, 15 bp, Homo sapiens
atagtagctcatggc

SEQ ID NO: 29348 - DNA, 15 bp, Homo sapiens
aatagtagctcatgg

SEQ ID NO: 29349 - DNA, 15 bp, Homo sapiens
caatagtagctcatg

SEQ ID NO: 29350 - DNA, 15 bp, Homo sapiens
tcaatagtagctcat

SEQ ID NO: 29351 - DNA, 15 bp, Homo sapiens
atcaatagtagctca

SEQ ID NO: 29352 - DNA, 15 bp, Homo sapiens
catcaatagtagctc

SEQ ID NO: 29353 - DNA, 15 bp, Homo sapiens
acatcaatagtagct

SEQ ID NO: 29354 - DNA, 15 bp, Homo sapiens
tacatcaatagtagc

SEQ ID NO: 29355 - DNA, 15 bp, Homo sapiens
atacatcaatagtag

SEQ ID NO: 29356 - DNA, 15 bp, Homo sapiens
aatacatcaatagta

SEQ ID NO: 29357 - DNA, 15 bp, Homo sapiens
aaatacatcaatagt

SEQ ID NO: 29358 - DNA, 15 bp, Homo sapiens
caaatacatcaatag

SEQ ID NO: 29359 - DNA, 15 bp, Homo sapiens
gcaaatacatcaata

SEQ ID NO: 29360 - DNA, 15 bp, Homo sapiens
ggcaaatacatcaat

SEQ ID NO: 29361 - DNA, 15 bp, Homo sapiens
tggcaaatacatcaa

SEQ ID NO: 29362 - DNA, 15 bp, Homo sapiens
atggcaaatacatca

SEQ ID NO: 29363 - DNA, 15 bp, Homo sapiens
aatggcaaatacatc

SEQ ID NO: 29364 - DNA, 15 bp, Homo sapiens
caatggcaaatacat

SEQ ID NO: 29365 - DNA, 15 bp, Homo sapiens
tcaatggcaaataca

SEQ ID NO: 29366 - DNA, 15 bp, Homo sapiens
atcaatggcaaatac

SEQ ID NO: 29367 - DNA, 15 bp, Homo sapiens
gatcaatggcaaata

SEQ ID NO: 29368 - DNA, 15 bp, Homo sapiens
ggatcaatggcaaat

SEQ ID NO: 29369 - DNA, 15 bp, Homo sapiens
gggatcaatggcaaa

SEQ ID NO: 29370 - DNA, 15 bp, Homo sapiens
agggatcaatggcaa

SEQ ID NO: 29371 - DNA, 15 bp, Homo sapiens
gagggatcaatggca

SEQ ID NO: 29372 - DNA, 15 bp, Homo sapiens
ggagggatcaatggc

SEQ ID NO: 29373 - DNA, 15 bp, Homo sapiens
aggagggatcaatgg

SEQ ID NO: 29374 - DNA, 15 bp, Homo sapiens
caggagggatcaatg

SEQ ID NO: 29375 - DNA, 15 bp, Homo sapiens
tcaggagggatcaat

SEQ ID NO: 29376 - DNA, 15 bp, Homo sapiens
ttcaggagggatcaa

SEQ ID NO: 29377 - DNA, 15 bp, Homo sapiens
tttcaggagggatca

SEQ ID NO: 29378 - DNA, 15 bp, Homo sapiens
ttttcaggagggatc

SEQ ID NO: 29379 - DNA, 15 bp, Homo sapiens
attttcaggagggat

SEQ ID NO: 29380 - DNA, 15 bp, Homo sapiens
gattttcaggaggga

SEQ ID NO: 29381 - DNA, 15 bp, Homo sapiens
agattttcaggaggg

SEQ ID NO: 29382 - DNA, 15 bp, Homo sapiens
tagattttcaggagg

SEQ ID NO: 29383 - DNA, 15 bp, Homo sapiens
ctagattttcaggag

SEQ ID NO: 29384 - DNA, 15 bp, Homo sapiens
tctagattttcagga

SEQ ID NO: 29385 - DNA, 15 bp, Homo sapiens
ttctagattttcagg

SEQ ID NO: 29386 - DNA, 15 bp, Homo sapiens
attctagattttcag

SEQ ID NO: 29387 - DNA, 15 bp, Homo sapiens
cattctagattttca

SEQ ID NO: 29388 - DNA, 15 bp, Homo sapiens
ccattctagattttc

SEQ ID NO: 29389 - DNA, 15 bp, Homo sapiens
tccattctagatttt

SEQ ID NO: 29390 - DNA, 15 bp, Homo sapiens
gtccattctagattt

SEQ ID NO: 29391 - DNA, 15 bp, Homo sapiens
agtccattctagatt

SEQ ID NO: 29392 - DNA, 15 bp, Homo sapiens
aagtccattctagat

SEQ ID NO: 29393 - DNA, 15 bp, Homo sapiens
aaagtccattctaga

SEQ ID NO: 29394 - DNA, 15 bp, Homo sapiens
gaaagtccattctag

SEQ ID NO: 29395 - DNA, 15 bp, Homo sapiens
tgaaagtccattcta

SEQ ID NO: 29396 - DNA, 15 bp, Homo sapiens
ctgaaagtccattct

SEQ ID NO: 29397 - DNA, 15 bp, Homo sapiens
tctgaaagtccattc

SEQ ID NO: 29398 - DNA, 15 bp, Homo sapiens
gtctgaaagtccatt

SEQ ID NO: 29399 - DNA, 15 bp, Homo sapiens
tgtctgaaagtccat

SEQ ID NO: 29400 - DNA, 15 bp, Homo sapiens
ttgtctgaaagtcca

SEQ ID NO: 29401 - DNA, 15 bp, Homo sapiens
tttgtctgaaagtcc

SEQ ID NO: 29402 - DNA, 15 bp, Homo sapiens
atttgtctgaaagtc

SEQ ID NO: 29403 - DNA, 15 bp, Homo sapiens
catttgtctgaaagt

SEQ ID NO: 29404 - DNA, 15 bp, Homo sapiens
ccatttgtctgaaag

SEQ ID NO: 29405 - DNA, 15 bp, Homo sapiens
accatttgtctgaaa

SEQ ID NO: 29406 - DNA, 15 bp, Homo sapiens
aaccatttgtctgaa

SEQ ID NO: 29407 - DNA, 15 bp, Homo sapiens
aaaccatttgtctga

SEQ ID NO: 29408 - DNA, 15 bp, Homo sapiens
caaaccatttgtctg

SEQ ID NO: 29409 - DNA, 15 bp, Homo sapiens
tcaaaccatttgtct

SEQ ID NO: 29410 - DNA, 15 bp, Homo sapiens
ttcaaaccatttgtc

SEQ ID NO: 29411 - DNA, 15 bp, Homo sapiens
tttcaaaccatttgt

SEQ ID NO: 29412 - DNA, 15 bp, Homo sapiens
ttttcaaaccatttg

SEQ ID NO: 29413 - DNA, 15 bp, Homo sapiens
attttcaaaccattt

SEQ ID NO: 29414 - DNA, 15 bp, Homo sapiens
aattttcaaaccatt

SEQ ID NO: 29415 - DNA, 15 bp, Homo sapiens
gaattttcaaaccat

SEQ ID NO: 29416 - DNA, 15 bp, Homo sapiens
agaattttcaaacca

SEQ ID NO: 29417 - DNA, 15 bp, Homo sapiens
tagaattttcaaacc

SEQ ID NO: 29418 - DNA, 15 bp, Homo sapiens
ttagaattttcaaac

SEQ ID NO: 29419 - DNA, 15 bp, Homo sapiens
tttagaattttcaaa

SEQ ID NO: 29420 - DNA, 15 bp, Homo sapiens
atttagaattttcaa

SEQ ID NO: 29421 - DNA, 15 bp, Homo sapiens
gatttagaattttca

SEQ ID NO: 29422 - DNA, 15 bp, Homo sapiens
tgatttagaattttc

SEQ ID NO: 29423 - DNA, 15 bp, Homo sapiens
gtgatttagaatttt

SEQ ID NO: 29424 - DNA, 15 bp, Homo sapiens
agtgatttagaattt

SEQ ID NO: 29425 - DNA, 15 bp, Homo sapiens
tagtgatttagaatt

SEQ ID NO: 29426 - DNA, 15 bp, Homo sapiens
ttagtgatttagaat

SEQ ID NO: 29427 - DNA, 15 bp, Homo sapiens
attagtgatttagaa

SEQ ID NO: 29428 - DNA, 15 bp, Homo sapiens
cattagtgatttaga

SEQ ID NO: 29429 - DNA, 15 bp, Homo sapiens
tcattagtgatttag

SEQ ID NO: 29430 - DNA, 15 bp, Homo sapiens
atcattagtgattta

SEQ ID NO: 29431 - DNA, 15 bp, Homo sapiens
aatcattagtgattt

SEQ ID NO: 29432 - DNA, 15 bp, Homo sapiens
caatcattagtgatt

SEQ ID NO: 29433 - DNA, 15 bp, Homo sapiens
tcaatcattagtgat

SEQ ID NO: 29434 - DNA, 15 bp, Homo sapiens
ctcaatcattagtga

SEQ ID NO: 29435 - DNA, 15 bp, Homo sapiens
tctcaatcattagtg

SEQ ID NO: 29436 - DNA, 15 bp, Homo sapiens
atctcaatcattagt

SEQ ID NO: 29437 - DNA, 15 bp, Homo sapiens
aatctcaatcattag

SEQ ID NO: 29438 - DNA, 15 bp, Homo sapiens
aaatctcaatcatta

SEQ ID NO: 29439 - DNA, 15 bp, Homo sapiens
taaatctcaatcatt

SEQ ID NO: 29440 - DNA, 15 bp, Homo sapiens
ctaaatctcaatcat

SEQ ID NO: 29441 - DNA, 15 bp, Homo sapiens
actaaatctcaatca

SEQ ID NO: 29442 - DNA, 15 bp, Homo sapiens
tactaaatctcaatc

SEQ ID NO: 29443 - DNA, 15 bp, Homo sapiens
atactaaatctcaat

SEQ ID NO: 29444 - DNA, 15 bp, Homo sapiens
tatactaaatctcaa

SEQ ID NO: 29445 - DNA, 15 bp, Homo sapiens
ctatactaaatctca

SEQ ID NO: 29446 - DNA, 15 bp, Homo sapiens
cctatactaaatctc

SEQ ID NO: 29447 - DNA, 15 bp, Homo sapiens
acctatactaaatct

SEQ ID NO: 29448 - DNA, 15 bp, Homo sapiens
aacctatactaaatc

SEQ ID NO: 29449 - DNA, 15 bp, Homo sapiens
aaacctatactaaat

SEQ ID NO: 29450 - DNA, 15 bp, Homo sapiens
taaacctatactaaa

SEQ ID NO: 29451 - DNA, 15 bp, Homo sapiens
gtaaacctatactaa

SEQ ID NO: 29452 - DNA, 15 bp, Homo sapiens
agtaaacctatacta

SEQ ID NO: 29453 - DNA, 15 bp, Homo sapiens
tagtaaacctatact

SEQ ID NO: 29454 - DNA, 15 bp, Homo sapiens
ttagtaaacctatac

SEQ ID NO: 29455 - DNA, 15 bp, Homo sapiens
cttagtaaacctata

SEQ ID NO: 29456 - DNA, 15 bp, Homo sapiens
tcttagtaaacctat

SEQ ID NO: 29457 - DNA, 15 bp, Homo sapiens
ttcttagtaaaccta

SEQ ID NO: 29458 - DNA, 15 bp, Homo sapiens
gttcttagtaaacct

SEQ ID NO: 29459 - DNA, 15 bp, Homo sapiens
cgttcttagtaaacc

SEQ ID NO: 29460 - DNA, 15 bp, Homo sapiens
ccgttcttagtaaac

SEQ ID NO: 29461 - DNA, 15 bp, Homo sapiens
cccgttcttagtaaa

SEQ ID NO: 29462 - DNA, 15 bp, Homo sapiens
acccgttcttagtaa

SEQ ID NO: 29463 - DNA, 15 bp, Homo sapiens
aacccgttcttagta

SEQ ID NO: 29464 - DNA, 15 bp, Homo sapiens
aaacccgttcttagt

SEQ ID NO: 29465 - DNA, 15 bp, Homo sapiens
aaaacccgttcttag

SEQ ID NO: 29466 - DNA, 15 bp, Homo sapiens
aaaaacccgttctta

SEQ ID NO: 29467 - DNA, 15 bp, Homo sapiens
aaaaaacccgttctt

SEQ ID NO: 29468 - DNA, 15 bp, Homo sapiens
aaaaaaacccgttct

SEQ ID NO: 29469 - DNA, 15 bp, Homo sapiens
aaaaaaaacccgttc

SEQ ID NO: 29470 - DNA, 15 bp, Homo sapiens
caaaaaaaacccgtt

SEQ ID NO: 29471 - DNA, 15 bp, Homo sapiens
acaaaaaaaacccgt

SEQ ID NO: 29472 - DNA, 15 bp, Homo sapiens
aacaaaaaaaacccg

SEQ ID NO: 29473 - DNA, 15 bp, Homo sapiens
aaacaaaaaaaaccc

SEQ ID NO: 29474 - DNA, 15 bp, Homo sapiens
aaaacaaaaaaaacc

SEQ ID NO: 29475 - DNA, 15 bp, Homo sapiens
aaaaacaaaaaaaac

SEQ ID NO: 29476 - DNA, 15 bp, Homo sapiens
caaaaacaaaaaaaa

SEQ ID NO: 29477 - DNA, 15 bp, Homo sapiens
acaaaaacaaaaaaa

SEQ ID NO: 29478 - DNA, 15 bp, Homo sapiens
ccaaaaacaaaaaca

SEQ ID NO: 29479 - DNA, 15 bp, Homo sapiens
accaaaaacaaaaac

SEQ ID NO: 29480 - DNA, 15 bp, Homo sapiens
caccaaaaacaaaaa

SEQ ID NO: 29481 - DNA, 15 bp, Homo sapiens
ccaccaaaaacaaaa

SEQ ID NO: 29482 - DNA, 15 bp, Homo sapiens
tccaccaaaaacaaa

SEQ ID NO: 29483 - DNA, 15 bp, Homo sapiens
atccaccaaaaacaa

SEQ ID NO: 29484 - DNA, 15 bp, Homo sapiens
aatccaccaaaaaca

SEQ ID NO: 29485 - DNA, 15 bp, Homo sapiens
aaatccaccaaaaac

SEQ ID NO: 29486 - DNA, 15 bp, Homo sapiens
taaatccaccaaaaa

SEQ ID NO: 29487 - DNA, 15 bp, Homo sapiens
ctaaatccaccaaaa

SEQ ID NO: 29488 - DNA, 15 bp, Homo sapiens
cctaaatccaccaaa

SEQ ID NO: 29489 - DNA, 15 bp, Homo sapiens
gcctaaatccaccaa

SEQ ID NO: 29490 - DNA, 15 bp, Homo sapiens
agcctaaatccacca

SEQ ID NO: 29491 - DNA, 15 bp, Homo sapiens
cagcctaaatccacc

SEQ ID NO: 29492 - DNA, 15 bp, Homo sapiens
acagcctaaatccac

SEQ ID NO: 29493 - DNA, 15 bp, Homo sapiens
aacagcctaaatcca

SEQ ID NO: 29494 - DNA, 15 bp, Homo sapiens
caacagcctaaatcc

SEQ ID NO: 29495 - DNA, 15 bp, Homo sapiens
gcaacagcctaaatc

SEQ ID NO: 29496 - DNA, 15 bp, Homo sapiens
agcaacagcctaaat

SEQ ID NO: 29497 - DNA, 15 bp, Homo sapiens
aagcaacagcctaaa

SEQ ID NO: 29498 - DNA, 15 bp, Homo sapiens
taagcaacagcctaa

SEQ ID NO: 29499 - DNA, 15 bp, Homo sapiens
gtaagcaacagccta

SEQ ID NO: 29500 - DNA, 15 bp, Homo sapiens
agtaagcaacagcct

SEQ ID NO: 29501 - DNA, 15 bp, Homo sapiens
tagtaagcaacagcc

SEQ ID NO: 29502 - DNA, 15 bp, Homo sapiens
ttagtaagcaacagc

SEQ ID NO: 29503 - DNA, 15 bp, Homo sapiens
cttagtaagcaacag

SEQ ID NO: 29504 - DNA, 15 bp, Homo sapiens
gcttagtaagcaaca

SEQ ID NO: 29505 - DNA, 15 bp, Homo sapiens
tgcttagtaagcaac

SEQ ID NO: 29506 - DNA, 15 bp, Homo sapiens
ttgcttagtaagcaa

SEQ ID NO: 29507 - DNA, 15 bp, Homo sapiens
tttgcttagtaagca

SEQ ID NO: 29508 - DNA, 15 bp, Homo sapiens
ctttgcttagtaagc

SEQ ID NO: 29509 - DNA, 15 bp, Homo sapiens
gctttgcttagtaag

SEQ ID NO: 29510 - DNA, 15 bp, Homo sapiens
tgctttgcttagtaa

SEQ ID NO: 29511 - DNA, 15 bp, Homo sapiens
ctgctttgcttagta

SEQ ID NO: 29512 - DNA, 15 bp, Homo sapiens
cctgctttgcttagt

SEQ ID NO: 29513 - DNA, 15 bp, Homo sapiens
gcctgctttgcttag

SEQ ID NO: 29514 - DNA, 15 bp, Homo sapiens
agcctgctttgctta

SEQ ID NO: 29515 - DNA, 15 bp, Homo sapiens
aagcctgctttgctt

SEQ ID NO: 29516 - DNA, 15 bp, Homo sapiens
aaagcctgctttgct

SEQ ID NO: 29517 - DNA, 15 bp, Homo sapiens
taaagcctgctttgc

SEQ ID NO: 29518 - DNA, 15 bp, Homo sapiens
ctaaagcctgctttg

SEQ ID NO: 29519 - DNA, 15 bp, Homo sapiens
actaaagcctgcttt

SEQ ID NO: 29520 - DNA, 15 bp, Homo sapiens
aactaaagcctgctt

SEQ ID NO: 29521 - DNA, 15 bp, Homo sapiens
caactaaagcctgct

SEQ ID NO: 29522 - DNA, 15 bp, Homo sapiens
tcaactaaagcctgc

SEQ ID NO: 29523 - DNA, 15 bp, Homo sapiens
ctcaactaaagcctg

SEQ ID NO: 29524 - DNA, 15 bp, Homo sapiens
cctcaactaaagcct

SEQ ID NO: 29525 - DNA, 15 bp, Homo sapiens
acctcaactaaagcc

SEQ ID NO: 29526 - DNA, 15 bp, Homo sapiens
aacctcaactaaagc

SEQ ID NO: 29527 - DNA, 15 bp, Homo sapiens
aaacctcaactaaag

SEQ ID NO: 29528 - DNA, 15 bp, Homo sapiens
taaacctcaactaaa

SEQ ID NO: 29529 - DNA, 15 bp, Homo sapiens
ataaacctcaactaa

SEQ ID NO: 29530 - DNA, 15 bp, Homo sapiens
gataaacctcaacta

SEQ ID NO: 29531 - DNA, 15 bp, Homo sapiens
agataaacctcaact

SEQ ID NO: 29532 - DNA, 15 bp, Homo sapiens
aagataaacctcaac

SEQ ID NO: 29533 - DNA, 15 bp, Homo sapiens
caagataaacctcaa

SEQ ID NO: 29534 - DNA, 15 bp, Homo sapiens
gcaagataaacctca

SEQ ID NO: 29535 - DNA, 15 bp, Homo sapiens
agcaagataaacctc

SEQ ID NO: 29536 - DNA, 15 bp, Homo sapiens
aagcaagataaacct

SEQ ID NO: 29537 - DNA, 15 bp, Homo sapiens
aaagcaagataaacc

SEQ ID NO: 29538 - DNA, 15 bp, Homo sapiens
taaagcaagataaac

SEQ ID NO: 29539 - DNA, 15 bp, Homo sapiens
ttaaagcaagataaa

SEQ ID NO: 29540 - DNA, 15 bp, Homo sapiens
tttaaagcaagataa

SEQ ID NO: 29541 - DNA, 15 bp, Homo sapiens
gtttaaagcaagata

SEQ ID NO: 29542 - DNA, 15 bp, Homo sapiens
tgtttaaagcaagat

SEQ ID NO: 29543 - DNA, 15 bp, Homo sapiens
ctgtttaaagcaaga

SEQ ID NO: 29544 - DNA, 15 bp, Homo sapiens
tctgtttaaagcaag

SEQ ID NO: 29545 - DNA, 15 bp, Homo sapiens
atctgtttaaagcaa

SEQ ID NO: 29546 - DNA, 15 bp, Homo sapiens
tatctgtttaaagca

SEQ ID NO: 29547 - DNA, 15 bp, Homo sapiens
atatctgtttaaagc

SEQ ID NO: 29548 - DNA, 15 bp, Homo sapiens
aatatctgtttaaag

SEQ ID NO: 29549 - DNA, 15 bp, Homo sapiens
aaatatctgtttaaa

SEQ ID NO: 29550 - DNA, 15 bp, Homo sapiens
taaatatctgtttaa

SEQ ID NO: 29551 - DNA, 15 bp, Homo sapiens
ttaaatatctgttta

SEQ ID NO: 29552 - DNA, 15 bp, Homo sapiens
gttaaatatctgttt

SEQ ID NO: 29553 - DNA, 15 bp, Homo sapiens
tgttaaatatctgtt

SEQ ID NO: 29554 - DNA, 15 bp, Homo sapiens
ctgttaaatatctgt

SEQ ID NO: 29555 - DNA, 15 bp, Homo sapiens
tctgttaaatatctg

SEQ ID NO: 29556 - DNA, 15 bp, Homo sapiens
atctgttaaatatct

SEQ ID NO: 29557 - DNA, 15 bp, Homo sapiens
aatctgttaaatatc

SEQ ID NO: 29558 - DNA, 15 bp, Homo sapiens
aaatctgttaaatat

SEQ ID NO: 29559 - DNA, 15 bp, Homo sapiens
aaaatctgttaaata

SEQ ID NO: 29560 - DNA, 15 bp, Homo sapiens
gaaaatctgttaaat

SEQ ID NO: 29561 - DNA, 15 bp, Homo sapiens
ggaaaatctgttaaa

SEQ ID NO: 29562 - DNA, 15 bp, Homo sapiens
aggaaaatctgttaa

SEQ ID NO: 29563 - DNA, 15 bp, Homo sapiens
caggaaaatctgtta

SEQ ID NO: 29564 - DNA, 15 bp, Homo sapiens
ccaggaaaatctgtt

SEQ ID NO: 29565 - DNA, 15 bp, Homo sapiens
tccaggaaaatctgt

SEQ ID NO: 29566 - DNA, 15 bp, Homo sapiens
ctccaggaaaatctg

SEQ ID NO: 29567 - DNA, 15 bp, Homo sapiens
cctccaggaaaatct

SEQ ID NO: 29568 - DNA, 15 bp, Homo sapiens
acctccaggaaaatc

SEQ ID NO: 29569 - DNA, 15 bp, Homo sapiens
aacctccaggaaaat

SEQ ID NO: 29570 - DNA, 15 bp, Homo sapiens
aaacctccaggaaaa

SEQ ID NO: 29571 - DNA, 15 bp, Homo sapiens
aaaacctccaggaaa

SEQ ID NO: 29572 - DNA, 15 bp, Homo sapiens
aaaaacctccaggaa

SEQ ID NO: 29573 - DNA, 15 bp, Homo sapiens
caaaaacctccagga

SEQ ID NO: 29574 - DNA, 15 bp, Homo sapiens
acaaaaacctccagg

SEQ ID NO: 29575 - DNA, 15 bp, Homo sapiens
cacaaaaacctccag

SEQ ID NO: 29576 - DNA, 15 bp, Homo sapiens
acacaaaaacctcca

SEQ ID NO: 29577 - DNA, 15 bp, Homo sapiens
tacacaaaaacctcc

SEQ ID NO: 29578 - DNA, 15 bp, Homo sapiens
gtacacaaaaacctc

SEQ ID NO: 29579 - DNA, 15 bp, Homo sapiens
ggtacacaaaaacct

SEQ ID NO: 29580 - DNA, 15 bp, Homo sapiens
tggtacacaaaaacc

SEQ ID NO: 29581 - DNA, 15 bp, Homo sapiens
gtggtacacaaaaac

SEQ ID NO: 29582 - DNA, 15 bp, Homo sapiens
agtggtacacaaaaa

SEQ ID NO: 29583 - DNA, 15 bp, Homo sapiens
cagtggtacacaaaa

SEQ ID NO: 29584 - DNA, 15 bp, Homo sapiens
ccagtggtacacaaa

SEQ ID NO: 29585 - DNA, 15 bp, Homo sapiens
cccagtggtacacaa

SEQ ID NO: 29586 - DNA, 15 bp, Homo sapiens
tcccagtggtacaca

SEQ ID NO: 29587 - DNA, 15 bp, Homo sapiens
ttcccagtggtacac

SEQ ID NO: 29588 - DNA, 15 bp, Homo sapiens
tttcccagtggtaca

SEQ ID NO: 29589 - DNA, 15 bp, Homo sapiens
ttttcccagtggtac

SEQ ID NO: 29590 - DNA, 15 bp, Homo sapiens
attttcccagtggta

SEQ ID NO: 29591 - DNA, 15 bp, Homo sapiens
cattttcccagtggt

SEQ ID NO: 29592 - DNA, 15 bp, Homo sapiens
tcattttcccagtgg

SEQ ID NO: 29593 - DNA, 15 bp, Homo sapiens
ttcattttcccagtg

SEQ ID NO: 29594 - DNA, 15 bp, Homo sapiens
cttcattttcccagt

SEQ ID NO: 29595 - DNA, 15 bp, Homo sapiens
acttcattttcccag

SEQ ID NO: 29596 - DNA, 15 bp, Homo sapiens
aacttcattttccca

SEQ ID NO: 29597 - DNA, 15 bp, Homo sapiens
taacttcattttccc

SEQ ID NO: 29598 - DNA, 15 bp, Homo sapiens
ctaacttcattttcc

SEQ ID NO: 29599 - DNA, 15 bp, Homo sapiens
cctaacttcattttc

SEQ ID NO: 29600 - DNA, 15 bp, Homo sapiens
gcctaacttcatttt

SEQ ID NO: 29601 - DNA, 15 bp, Homo sapiens
tgcctaacttcattt

SEQ ID NO: 29602 - DNA, 15 bp, Homo sapiens
ctgcctaacttcatt

SEQ ID NO: 29603 - DNA, 15 bp, Homo sapiens
tctgcctaacttcat

SEQ ID NO: 29604 - DNA, 15 bp, Homo sapiens
atctgcctaacttca

SEQ ID NO: 29605 - DNA, 15 bp, Homo sapiens
catctgcctaacttc

SEQ ID NO: 29606 - DNA, 15 bp, Homo sapiens
tcatctgcctaactt

SEQ ID NO: 29607 - DNA, 15 bp, Homo sapiens
gtcatctgcctaact

SEQ ID NO: 29608 - DNA, 15 bp, Homo sapiens
agtcatctgcctaac

SEQ ID NO: 29609 - DNA, 15 bp, Homo sapiens
tagtcatctgcctaa

SEQ ID NO: 29610 - DNA, 15 bp, Homo sapiens
ttagtcatctgccta

SEQ ID NO: 29611 - DNA, 15 bp, Homo sapiens
cttagtcatctgcct

SEQ ID NO: 29612 - DNA, 15 bp, Homo sapiens
acttagtcatctgcc

SEQ ID NO: 29613 - DNA, 15 bp, Homo sapiens
cacttagtcatctgc

SEQ ID NO: 29614 - DNA, 15 bp, Homo sapiens
tcacttagtcatctg

SEQ ID NO: 29615 - DNA, 15 bp, Homo sapiens
ttcacttagtcatct

SEQ ID NO: 29616 - DNA, 15 bp, Homo sapiens
tttcacttagtcatc

SEQ ID NO: 29617 - DNA, 15 bp, Homo sapiens
ctttcacttagtcat

SEQ ID NO: 29618 - DNA, 15 bp, Homo sapiens
gctttcacttagtca

SEQ ID NO: 29619 - DNA, 15 bp, Homo sapiens
agctttcacttagtc

SEQ ID NO: 29620 - DNA, 15 bp, Homo sapiens
cagctttcacttagt

SEQ ID NO: 29621 - DNA, 15 bp, Homo sapiens
acagctttcacttag

SEQ ID NO: 29622 - DNA, 15 bp, Homo sapiens
gacagctttcactta

SEQ ID NO: 29623 - DNA, 15 bp, Homo sapiens
ggacagctttcactt

SEQ ID NO: 29624 - DNA, 15 bp, Homo sapiens
aggacagctttcact

SEQ ID NO: 29625 - DNA, 15 bp, Homo sapiens
caggacagctttcac

SEQ ID NO: 29626 - DNA, 15 bp, Homo sapiens
gcaggacagctttca

SEQ ID NO: 29627 - DNA, 15 bp, Homo sapiens
agcaggacagctttc

SEQ ID NO: 29628 - DNA, 15 bp, Homo sapiens
cagcaggacagcttt

SEQ ID NO: 29629 - DNA, 15 bp, Homo sapiens
tcagcaggacagctt

SEQ ID NO: 29630 - DNA, 15 bp, Homo sapiens
gtcagcaggacagct

SEQ ID NO: 29631 - DNA, 15 bp, Homo sapiens
agtcagcaggacagc

SEQ ID NO: 29632 - DNA, 15 bp, Homo sapiens
gagtcagcaggacag

SEQ ID NO: 29633 - DNA, 15 bp, Homo sapiens
ggagtcagcaggaca

SEQ ID NO: 29634 - DNA, 15 bp, Homo sapiens
aggagtcagcaggac

SEQ ID NO: 29635 - DNA, 15 bp, Homo sapiens
aaggagtcagcagga

SEQ ID NO: 29636 - DNA, 15 bp, Homo sapiens
taaggagtcagcagg

SEQ ID NO: 29637 - DNA, 15 bp, Homo sapiens
ataaggagtcagcag

SEQ ID NO: 29638 - DNA, 15 bp, Homo sapiens
tataaggagtcagca

SEQ ID NO: 29639 - DNA, 15 bp, Homo sapiens
ttataaggagtcagc

SEQ ID NO: 29640 - DNA, 15 bp, Homo sapiens
attataaggagtcag

SEQ ID NO: 29641 - DNA, 15 bp, Homo sapiens
cattataaggagtca

SEQ ID NO: 29642 - DNA, 15 bp, Homo sapiens
tcattataaggagtc

SEQ ID NO: 29643 - DNA, 15 bp, Homo sapiens
atcattataaggagt

SEQ ID NO: 29644 - DNA, 15 bp, Homo sapiens
tatcattataaggag

SEQ ID NO: 29645 - DNA, 15 bp, Homo sapiens
ctatcattataagga

SEQ ID NO: 29646 - DNA, 15 bp, Homo sapiens
actatcattataagg

SEQ ID NO: 29647 - DNA, 15 bp, Homo sapiens
gactatcattataag

SEQ ID NO: 29648 - DNA, 15 bp, Homo sapiens
tgactatcattataa

SEQ ID NO: 29649 - DNA, 15 bp, Homo sapiens
atgactatcattata

SEQ ID NO: 29650 - DNA, 15 bp, Homo sapiens
aatgactatcattat

SEQ ID NO: 29651 - DNA, 15 bp, Homo sapiens
caatgactatcatta

SEQ ID NO: 29652 - DNA, 15 bp, Homo sapiens
acaatgactatcatt

SEQ ID NO: 29653 - DNA, 15 bp, Homo sapiens
gacaatgactatcat

SEQ ID NO: 29654 - DNA, 15 bp, Homo sapiens
agacaatgactatca

SEQ ID NO: 29655 - DNA, 15 bp, Homo sapiens
tagacaatgactatc

SEQ ID NO: 29656 - DNA, 15 bp, Homo sapiens
gtagacaatgactat

SEQ ID NO: 29657 - DNA, 15 bp, Homo sapiens
ggtagacaatgacta

SEQ ID NO: 29658 - DNA, 15 bp, Homo sapiens
tggtagacaatgact

SEQ ID NO: 29659 - DNA, 15 bp, Homo sapiens
ctggtagacaatgac

SEQ ID NO: 29660 - DNA, 15 bp, Homo sapiens
tctggtagacaatga

SEQ ID NO: 29661 - DNA, 15 bp, Homo sapiens
ttctggtagacaatg

SEQ ID NO: 29662 - DNA, 15 bp, Homo sapiens
cttctggtagacaat

SEQ ID NO: 29663 - DNA, 15 bp, Homo sapiens
tcttctggtagacaa

SEQ ID NO: 29664 - DNA, 15 bp, Homo sapiens
atcttctggtagaca

SEQ ID NO: 29665 - DNA, 15 bp, Homo sapiens
gatcttctggtagac

SEQ ID NO: 29666 - DNA, 15 bp, Homo sapiens
agatcttctggtaga

SEQ ID NO: 29667 - DNA, 15 bp, Homo sapiens
gagatcttctggtag

SEQ ID NO: 29668 - DNA, 15 bp, Homo sapiens
agagatcttctggta

SEQ ID NO: 29669 - DNA, 15 bp, Homo sapiens
gagagatcttctggt

SEQ ID NO: 29670 - DNA, 15 bp, Homo sapiens
ggagagatcttctgg

SEQ ID NO: 29671 - DNA, 15 bp, Homo sapiens
aggagagatcttctg

SEQ ID NO: 29672 - DNA, 15 bp, Homo sapiens
caggagagatcttct

SEQ ID NO: 29673 - DNA, 15 bp, Homo sapiens
acaggagagatcttc

SEQ ID NO: 29674 - DNA, 15 bp, Homo sapiens
gacaggagagatctt

SEQ ID NO: 29675 - DNA, 15 bp, Homo sapiens
tgacaggagagatct

SEQ ID NO: 29676 - DNA, 15 bp, Homo sapiens
gtgacaggagagatc

SEQ ID NO: 29677 - DNA, 15 bp, Homo sapiens
tgtgacaggagagat

SEQ ID NO: 29678 - DNA, 15 bp, Homo sapiens
gtgtgacaggagaga

SEQ ID NO: 29679 - DNA, 15 bp, Homo sapiens
ggtgtgacaggagag

SEQ ID NO: 29680 - DNA, 15 bp, Homo sapiens
tggtgtgacaggaga

SEQ ID NO: 29681 - DNA, 15 bp, Homo sapiens
ttggtgtgacaggag

SEQ ID NO: 29682 - DNA, 15 bp, Homo sapiens
tttggtgtgacagga

SEQ ID NO: 29683 - DNA, 15 bp, Homo sapiens
ctttggtgtgacagg

SEQ ID NO: 29684 - DNA, 15 bp, Homo sapiens
cctttggtgtgacag

SEQ ID NO: 29685 - DNA, 15 bp, Homo sapiens
tcctttggtgtgaca

SEQ ID NO: 29686 - DNA, 15 bp, Homo sapiens
atcctttggtgtgac

SEQ ID NO: 29687 - DNA, 15 bp, Homo sapiens
tatcctttggtgtga

SEQ ID NO: 29688 - DNA, 15 bp, Homo sapiens
ttatcctttggtgtg

SEQ ID NO: 29689 - DNA, 15 bp, Homo sapiens
attatcctttggtgt

SEQ ID NO: 29690 - DNA, 15 bp, Homo sapiens
aattatcctttggtg

SEQ ID NO: 29691 - DNA, 15 bp, Homo sapiens
caattatcctttggt

SEQ ID NO: 29692 - DNA, 15 bp, Homo sapiens
tcaattatcctttgg

SEQ ID NO: 29693 - DNA, 15 bp, Homo sapiens
atcaattatcctttg

SEQ ID NO: 29694 - DNA, 15 bp, Homo sapiens
aatcaattatccttt

SEQ ID NO: 29695 - DNA, 15 bp, Homo sapiens
taatcaattatcctt

SEQ ID NO: 29696 - DNA, 15 bp, Homo sapiens
ataatcaattatcct

SEQ ID NO: 29697 - DNA, 15 bp, Homo sapiens
tataatcaattatcc

SEQ ID NO: 29698 - DNA, 15 bp, Homo sapiens
atataatcaattatc

SEQ ID NO: 29699 - DNA, 15 bp, Homo sapiens
gatataatcaattat

SEQ ID NO: 29700 - DNA, 15 bp, Homo sapiens
ggatataatcaatta

SEQ ID NO: 29701 - DNA, 15 bp, Homo sapiens
aggatataatcaatt

SEQ ID NO: 29702 - DNA, 15 bp, Homo sapiens
caggatataatcaat

SEQ ID NO: 29703 - DNA, 15 bp, Homo sapiens
acaggatataatcaa

SEQ ID NO: 29704 - DNA, 15 bp, Homo sapiens
tacaggatataatca

SEQ ID NO: 29705 - DNA, 15 bp, Homo sapiens
gtacaggatataatc

SEQ ID NO: 29706 - DNA, 15 bp, Homo sapiens
ggtacaggatataat

SEQ ID NO: 29707 - DNA, 15 bp, Homo sapiens
tggtacaggatataa

SEQ ID NO: 29708 - DNA, 15 bp, Homo sapiens
atggtacaggatata

SEQ ID NO: 29709 - DNA, 15 bp, Homo sapiens
tatggtacaggatat

SEQ ID NO: 29710 - DNA, 15 bp, Homo sapiens
atatggtacaggata

SEQ ID NO: 29711 - DNA, 15 bp, Homo sapiens
aatatggtacaggat

SEQ ID NO: 29712 - DNA, 15 bp, Homo sapiens
taatatggtacagga

SEQ ID NO: 29713 - DNA, 15 bp, Homo sapiens
ataatatggtacagg

SEQ ID NO: 29714 - DNA, 15 bp, Homo sapiens
cataatatggtacag

SEQ ID NO: 29715 - DNA, 15 bp, Homo sapiens
tcataatatggtaca

SEQ ID NO: 29716 - DNA, 15 bp, Homo sapiens
ctcataatatggtac

SEQ ID NO: 29717 - DNA, 15 bp, Homo sapiens
actcataatatggta

SEQ ID NO: 29718 - DNA, 15 bp, Homo sapiens
gactcataatatggt

SEQ ID NO: 29719 - DNA, 15 bp, Homo sapiens
tgactcataatatgg

SEQ ID NO: 29720 - DNA, 15 bp, Homo sapiens
gtgactcataatatg

SEQ ID NO: 29721 - DNA, 15 bp, Homo sapiens
ggtgactcataatat

SEQ ID NO: 29722 - DNA, 15 bp, Homo sapiens
aggtgactcataata

SEQ ID NO: 29723 - DNA, 15 bp, Homo sapiens
caggtgactcataat

SEQ ID NO: 29724 - DNA, 15 bp, Homo sapiens
tcaggtgactcataa

SEQ ID NO: 29725 - DNA, 15 bp, Homo sapiens
atcaggtgactcata

SEQ ID NO: 29726 - DNA, 15 bp, Homo sapiens
aatcaggtgactcat

SEQ ID NO: 29727 - DNA, 15 bp, Homo sapiens
caatcaggtgactca

SEQ ID NO: 29728 - DNA, 15 bp, Homo sapiens
ccaatcaggtgactc

SEQ ID NO: 29729 - DNA, 15 bp, Homo sapiens
tccaatcaggtgact

SEQ ID NO: 29730 - DNA, 15 bp, Homo sapiens
ctccaatcaggtgac

SEQ ID NO: 29731 - DNA, 15 bp, Homo sapiens
tctccaatcaggtga

SEQ ID NO: 29732 - DNA, 15 bp, Homo sapiens
atctccaatcaggtg

SEQ ID NO: 29733 - DNA, 15 bp, Homo sapiens
tatctccaatcaggt

SEQ ID NO: 29734 - DNA, 15 bp, Homo sapiens
atatctccaatcagg

SEQ ID NO: 29735 - DNA, 15 bp, Homo sapiens
tatatctccaatcag

SEQ ID NO: 29736 - DNA, 15 bp, Homo sapiens
ttatatctccaatca

SEQ ID NO: 29737 - DNA, 15 bp, Homo sapiens
cttatatctccaatc

SEQ ID NO: 29738 - DNA, 15 bp, Homo sapiens
tcttatatctccaat

SEQ ID NO: 29739 - DNA, 15 bp, Homo sapiens
gtcttatatctccaa

SEQ ID NO: 29740 - DNA, 15 bp, Homo sapiens
tgtcttatatctcca

SEQ ID NO: 29741 - DNA, 15 bp, Homo sapiens
atgtcttatatctcc

SEQ ID NO: 29742 - DNA, 15 bp, Homo sapiens
tatgtcttatatctc

SEQ ID NO: 29743 - DNA, 15 bp, Homo sapiens
gtatgtcttatatct

SEQ ID NO: 29744 - DNA, 15 bp, Homo sapiens
agtatgtcttatatc

SEQ ID NO: 29745 - DNA, 15 bp, Homo sapiens
aagtatgtcttatat

SEQ ID NO: 29746 - DNA, 15 bp, Homo sapiens
gaagtatgtcttata

SEQ ID NO: 29747 - DNA, 15 bp, Homo sapiens
agaagtatgtcttat

SEQ ID NO: 29748 - DNA, 15 bp, Homo sapiens
gagaagtatgtctta

SEQ ID NO: 29749 - DNA, 15 bp, Homo sapiens
tgagaagtatgtctt

SEQ ID NO: 29750 - DNA, 15 bp, Homo sapiens
gtgagaagtatgtct

SEQ ID NO: 29751 - DNA, 15 bp, Homo sapiens
tgtgagaagtatgtc

SEQ ID NO: 29752 - DNA, 15 bp, Homo sapiens
atgtgagaagtatgt

SEQ ID NO: 29753 - DNA, 15 bp, Homo sapiens
tatgtgagaagtatg

SEQ ID NO: 29754 - DNA, 15 bp, Homo sapiens
atatgtgagaagtat

SEQ ID NO: 29755 - DNA, 15 bp, Homo sapiens
aatatgtgagaagta

SEQ ID NO: 29756 - DNA, 15 bp, Homo sapiens
aaatatgtgagaagt

SEQ ID NO: 29757 - DNA, 15 bp, Homo sapiens
taaatatgtgagaag

SEQ ID NO: 29758 - DNA, 15 bp, Homo sapiens
ctaaatatgtgagaa

SEQ ID NO: 29759 - DNA, 15 bp, Homo sapiens
tctaaatatgtgaga

SEQ ID NO: 29760 - DNA, 15 bp, Homo sapiens
atctaaatatgtgag

SEQ ID NO: 29761 - DNA, 15 bp, Homo sapiens
catctaaatatgtga

SEQ ID NO: 29762 - DNA, 15 bp, Homo sapiens
tcatctaaatatgtg

SEQ ID NO: 29763 - DNA, 15 bp, Homo sapiens
gtcatctaaatatgt

SEQ ID NO: 29764 - DNA, 15 bp, Homo sapiens
tgtcatctaaatatg

SEQ ID NO: 29765 - DNA, 15 bp, Homo sapiens
gtgtcatctaaatat

SEQ ID NO: 29766 - DNA, 15 bp, Homo sapiens
tgtgtcatctaaata

SEQ ID NO: 29767 - DNA, 15 bp, Homo sapiens
ctgtgtcatctaaat

SEQ ID NO: 29768 - DNA, 15 bp, Homo sapiens
cctgtgtcatctaaa

SEQ ID NO: 29769 - DNA, 15 bp, Homo sapiens
acctgtgtcatctaa

SEQ ID NO: 29770 - DNA, 15 bp, Homo sapiens
aacctgtgtcatcta

SEQ ID NO: 29771 - DNA, 15 bp, Homo sapiens
taacctgtgtcatct

SEQ ID NO: 29772 - DNA, 15 bp, Homo sapiens
ctaacctgtgtcatc

SEQ ID NO: 29773 - DNA, 15 bp, Homo sapiens
actaacctgtgtcat

SEQ ID NO: 29774 - DNA, 15 bp, Homo sapiens
tactaacctgtgtca

SEQ ID NO: 29775 - DNA, 15 bp, Homo sapiens
gtactaacctgtgtc

SEQ ID NO: 29776 - DNA, 15 bp, Homo sapiens
tgtactaacctgtgt

SEQ ID NO: 29777 - DNA, 15 bp, Homo sapiens
atgtactaacctgtg

SEQ ID NO: 29778 - DNA, 15 bp, Homo sapiens
aatgtactaacctgt

SEQ ID NO: 29779 - DNA, 15 bp, Homo sapiens
caatgtactaacctg

SEQ ID NO: 29780 - DNA, 15 bp, Homo sapiens
tcaatgtactaacct

SEQ ID NO: 29781 - DNA, 15 bp, Homo sapiens
ttcaatgtactaacc

SEQ ID NO: 29782 - DNA, 15 bp, Homo sapiens
attcaatgtactaac

SEQ ID NO: 29783 - DNA, 15 bp, Homo sapiens
tattcaatgtactaa

SEQ ID NO: 29784 - DNA, 15 bp, Homo sapiens
atattcaatgtacta

SEQ ID NO: 29785 - DNA, 15 bp, Homo sapiens
gatattcaatgtact

SEQ ID NO: 29786 - DNA, 15 bp, Homo sapiens
tgatattcaatgtac

SEQ ID NO: 29787 - DNA, 15 bp, Homo sapiens
ctgatattcaatgta

SEQ ID NO: 29788 - DNA, 15 bp, Homo sapiens
gctgatattcaatgt

SEQ ID NO: 29789 - DNA, 15 bp, Homo sapiens
ggctgatattcaatg

SEQ ID NO: 29790 - DNA, 15 bp, Homo sapiens
tggctgatattcaat

SEQ ID NO: 29791 - DNA, 15 bp, Homo sapiens
ctggctgatattcaa

SEQ ID NO: 29792 - DNA, 15 bp, Homo sapiens
cctggctgatattca

SEQ ID NO: 29793 - DNA, 15 bp, Homo sapiens
ccctggctgatattc

SEQ ID NO: 29794 - DNA, 15 bp, Homo sapiens
accctggctgatatt

SEQ ID NO: 29795 - DNA, 15 bp, Homo sapiens
aaccctggctgatat

SEQ ID NO: 29796 - DNA, 15 bp, Homo sapiens
aaaccctggctgata

SEQ ID NO: 29797 - DNA, 15 bp, Homo sapiens
aaaaccctggctgat

SEQ ID NO: 29798 - DNA, 15 bp, Homo sapiens
aaaaaccctggctga

SEQ ID NO: 29799 - DNA, 15 bp, Homo sapiens
taaaaaccctggctg

SEQ ID NO: 29800 - DNA, 15 bp, Homo sapiens
ttaaaaaccctggct

SEQ ID NO: 29801 - DNA, 15 bp, Homo sapiens
cttaaaaaccctggc

SEQ ID NO: 29802 - DNA, 15 bp, Homo sapiens
ccttaaaaaccctgg

SEQ ID NO: 29803 - DNA, 15 bp, Homo sapiens
tccttaaaaaccctg

SEQ ID NO: 29804 - DNA, 15 bp, Homo sapiens
atccttaaaaaccct

SEQ ID NO: 29805 - DNA, 15 bp, Homo sapiens
gatccttaaaaaccc

SEQ ID NO: 29806 - DNA, 15 bp, Homo sapiens
agatccttaaaaacc

SEQ ID NO: 29807 - DNA, 15 bp, Homo sapiens
aagatccttaaaaac

SEQ ID NO: 29808 - DNA, 15 bp, Homo sapiens
taagatccttaaaaa

SEQ ID NO: 29809 - DNA, 15 bp, Homo sapiens
ttaagatccttaaaa

SEQ ID NO: 29810 - DNA, 15 bp, Homo sapiens
attaagatccttaaa

SEQ ID NO: 29811 - DNA, 15 bp, Homo sapiens
tattaagatccttaa

SEQ ID NO: 29812 - DNA, 15 bp, Homo sapiens
ctattaagatcctta

SEQ ID NO: 29813 - DNA, 15 bp, Homo sapiens
tctattaagatcctt

SEQ ID NO: 29814 - DNA, 15 bp, Homo sapiens
ctctattaagatcct

SEQ ID NO: 29815 - DNA, 15 bp, Homo sapiens
actctattaagatcc

SEQ ID NO: 29816 - DNA, 15 bp, Homo sapiens
cactctattaagatc

SEQ ID NO: 29817 - DNA, 15 bp, Homo sapiens
ccactctattaagat

SEQ ID NO: 29818 - DNA, 15 bp, Homo sapiens
tccactctattaaga

SEQ ID NO: 29819 - DNA, 15 bp, Homo sapiens
ttccactctattaag

SEQ ID NO: 29820 - DNA, 15 bp, Homo sapiens
gttccactctattaa

SEQ ID NO: 29821 - DNA, 15 bp, Homo sapiens
agttccactctatta

SEQ ID NO: 29822 - DNA, 15 bp, Homo sapiens
tagttccactctatt

SEQ ID NO: 29823 - DNA, 15 bp, Homo sapiens
ttagttccactctat

SEQ ID NO: 29824 - DNA, 15 bp, Homo sapiens
cttagttccactcta

SEQ ID NO: 29825 - DNA, 15 bp, Homo sapiens
ccttagttccactct

SEQ ID NO: 29826 - DNA, 15 bp, Homo sapiens
accttagttccactc

SEQ ID NO: 29827 - DNA, 15 bp, Homo sapiens
taccttagttccact

SEQ ID NO: 29828 - DNA, 15 bp, Homo sapiens
ctaccttagttccac

SEQ ID NO: 29829 - DNA, 15 bp, Homo sapiens
tctaccttagttcca

SEQ ID NO: 29830 - DNA, 15 bp, Homo sapiens
ttctaccttagttcc

SEQ ID NO: 29831 - DNA, 15 bp, Homo sapiens
tttctaccttagttc

SEQ ID NO: 29832 - DNA, 15 bp, Homo sapiens
gtttctaccttagtt

SEQ ID NO: 29833 - DNA, 15 bp, Homo sapiens
agtttctaccttagt

SEQ ID NO: 29834 - DNA, 15 bp, Homo sapiens
tagtttctaccttag

SEQ ID NO: 29835 - DNA, 15 bp, Homo sapiens
atagtttctacctta

SEQ ID NO: 29836 - DNA, 15 bp, Homo sapiens
aatagtttctacctt

SEQ ID NO: 29837 - DNA, 15 bp, Homo sapiens
taatagtttctacct

SEQ ID NO: 29838 - DNA, 15 bp, Homo sapiens
ttaatagtttctacc

SEQ ID NO: 29839 - DNA, 15 bp, Homo sapiens
cttaatagtttctac

SEQ ID NO: 29840 - DNA, 15 bp, Homo sapiens
tcttaatagtttcta

SEQ ID NO: 29841 - DNA, 15 bp, Homo sapiens
ctcttaatagtttct

SEQ ID NO: 29842 - DNA, 15 bp, Homo sapiens
gctcttaatagtttc

SEQ ID NO: 29843 - DNA, 15 bp, Homo sapiens
tgctcttaatagttt

SEQ ID NO: 29844 - DNA, 15 bp, Homo sapiens
ttgctcttaatagtt

SEQ ID NO: 29845 - DNA, 15 bp, Homo sapiens
attgctcttaatagt

SEQ ID NO: 29846 - DNA, 15 bp, Homo sapiens
aattgctcttaatag

SEQ ID NO: 29847 - DNA, 15 bp, Homo sapiens
taattgctcttaata

SEQ ID NO: 29848 - DNA, 15 bp, Homo sapiens
ttaattgctcttaat

SEQ ID NO: 29849 - DNA, 15 bp, Homo sapiens
attaattgctcttaa

SEQ ID NO: 29850 - DNA, 15 bp, Homo sapiens
tattaattgctctta

SEQ ID NO: 29851 - DNA, 15 bp, Homo sapiens
ctattaattgctctt

SEQ ID NO: 29852 - DNA, 15 bp, Homo sapiens
actattaattgctct

SEQ ID NO: 29853 - DNA, 15 bp, Homo sapiens
cactattaattgctc

SEQ ID NO: 29854 - DNA, 15 bp, Homo sapiens
tcactattaattgct

SEQ ID NO: 29855 - DNA, 15 bp, Homo sapiens
atcactattaattgc

SEQ ID NO: 29856 - DNA, 15 bp, Homo sapiens
tatcactattaattg

SEQ ID NO: 29857 - DNA, 15 bp, Homo sapiens
atatcactattaatt

SEQ ID NO: 29858 - DNA, 15 bp, Homo sapiens
tatatcactattaat

SEQ ID NO: 29859 - DNA, 15 bp, Homo sapiens
atatatcactattaa

SEQ ID NO: 29860 - DNA, 15 bp, Homo sapiens
gatatatcactatta

SEQ ID NO: 29861 - DNA, 15 bp, Homo sapiens
agatatatcactatt

SEQ ID NO: 29862 - DNA, 15 bp, Homo sapiens
tagatatatcactat

SEQ ID NO: 29863 - DNA, 15 bp, Homo sapiens
atagatatatcacta

SEQ ID NO: 29864 - DNA, 15 bp, Homo sapiens
tatagatatatcact

SEQ ID NO: 29865 - DNA, 15 bp, Homo sapiens
ctatagatatatcac

SEQ ID NO: 29866 - DNA, 15 bp, Homo sapiens
actatagatatatca

SEQ ID NO: 29867 - DNA, 15 bp, Homo sapiens
gactatagatatatc

SEQ ID NO: 29868 - DNA, 15 bp, Homo sapiens
ggactatagatatat

SEQ ID NO: 29869 - DNA, 15 bp, Homo sapiens
aggactatagatata

SEQ ID NO: 29870 - DNA, 15 bp, Homo sapiens
caggactatagatat

SEQ ID NO: 29871 - DNA, 15 bp, Homo sapiens
acaggactatagata

SEQ ID NO: 29872 - DNA, 15 bp, Homo sapiens
aacaggactatagat

SEQ ID NO: 29873 - DNA, 15 bp, Homo sapiens
aaacaggactataga

SEQ ID NO: 29874 - DNA, 15 bp, Homo sapiens
gaaacaggactatag

SEQ ID NO: 29875 - DNA, 15 bp, Homo sapiens
agaaacaggactata

SEQ ID NO: 29876 - DNA, 15 bp, Homo sapiens
tagaaacaggactat

SEQ ID NO: 29877 - DNA, 15 bp, Homo sapiens
ttagaaacaggacta

SEQ ID NO: 29878 - DNA, 15 bp, Homo sapiens
tttagaaacaggact

SEQ ID NO: 29879 - DNA, 15 bp, Homo sapiens
gtttagaaacaggac

SEQ ID NO: 29880 - DNA, 15 bp, Homo sapiens
tgtttagaaacagga

SEQ ID NO: 29881 - DNA, 15 bp, Homo sapiens
ttgtttagaaacagg

SEQ ID NO: 29882 - DNA, 15 bp, Homo sapiens
cttgtttagaaacag

SEQ ID NO: 29883 - DNA, 15 bp, Homo sapiens
acttgtttagaaaca

SEQ ID NO: 29884 - DNA, 15 bp, Homo sapiens
aacttgtttagaaac

SEQ ID NO: 29885 - DNA, 15 bp, Homo sapiens
aaacttgtttagaaa

SEQ ID NO: 29886 - DNA, 15 bp, Homo sapiens
aaaacttgtttagaa

SEQ ID NO: 29887 - DNA, 15 bp, Homo sapiens
aaaaacttgtttaga

SEQ ID NO: 29888 - DNA, 15 bp, Homo sapiens
aaaaaacttgtttag

SEQ ID NO: 29889 - DNA, 15 bp, Homo sapiens
aaaaaaacttgttta

SEQ ID NO: 29890 - DNA, 15 bp, Homo sapiens
taaaaaaacttgttt

SEQ ID NO: 29891 - DNA, 15 bp, Homo sapiens
ttaaaaaaacttgtt

SEQ ID NO: 29892 - DNA, 15 bp, Homo sapiens
tttaaaaaaacttgt

SEQ ID NO: 29893 - DNA, 15 bp, Homo sapiens
ttttaaaaaaacttg

SEQ ID NO: 29894 - DNA, 15 bp, Homo sapiens
tttttaaaaaaactt

SEQ ID NO: 29895 - DNA, 15 bp, Homo sapiens
gtttttaaaaaaact

SEQ ID NO: 29896 - DNA, 15 bp, Homo sapiens
ggtttttaaaaaaac

SEQ ID NO: 29897 - DNA, 15 bp, Homo sapiens
aggtttttaaaaaaa

SEQ ID NO: 29898 - DNA, 15 bp, Homo sapiens
gaggtttttaaaaaa

SEQ ID NO: 29899 - DNA, 15 bp, Homo sapiens
tgaggtttttaaaaa

SEQ ID NO: 29900 - DNA, 15 bp, Homo sapiens
ttgaggtttttaaaa

SEQ ID NO: 29901 - DNA, 15 bp, Homo sapiens
gttgaggtttttaaa

SEQ ID NO: 29902 - DNA, 15 bp, Homo sapiens
agttgaggtttttaa

SEQ ID NO: 29903 - DNA, 15 bp, Homo sapiens
gagttgaggttttta

SEQ ID NO: 29904 - DNA, 15 bp, Homo sapiens
agagttgaggttttt

SEQ ID NO: 29905 - DNA, 15 bp, Homo sapiens
cagagttgaggtttt

SEQ ID NO: 29906 - DNA, 15 bp, Homo sapiens
tcagagttgaggttt

SEQ ID NO: 29907 - DNA, 15 bp, Homo sapiens
gtcagagttgaggtt

SEQ ID NO: 29908 - DNA, 15 bp, Homo sapiens
agtcagagttgaggt

SEQ ID NO: 29909 - DNA, 15 bp, Homo sapiens
tagtcagagttgagg

SEQ ID NO: 29910 - DNA, 15 bp, Homo sapiens
atagtcagagttgag

SEQ ID NO: 29911 - DNA, 15 bp, Homo sapiens
tatagtcagagttga

SEQ ID NO: 29912 - DNA, 15 bp, Homo sapiens
ctatagtcagagttg

SEQ ID NO: 29913 - DNA, 15 bp, Homo sapiens
actatagtcagagtt

SEQ ID NO: 29914 - DNA, 15 bp, Homo sapiens
cactatagtcagagt

SEQ ID NO: 29915 - DNA, 15 bp, Homo sapiens
tcactatagtcagag

SEQ ID NO: 29916 - DNA, 15 bp, Homo sapiens
ttcactatagtcaga

SEQ ID NO: 29917 - DNA, 15 bp, Homo sapiens
gttcactatagtcag

SEQ ID NO: 29918 - DNA, 15 bp, Homo sapiens
tgttcactatagtca

SEQ ID NO: 29919 - DNA, 15 bp, Homo sapiens
ctgttcactatagtc

SEQ ID NO: 29920 - DNA, 15 bp, Homo sapiens
tctgttcactatagt

SEQ ID NO: 29921 - DNA, 15 bp, Homo sapiens
ctctgttcactatag

SEQ ID NO: 29922 - DNA, 15 bp, Homo sapiens
tctctgttcactata

SEQ ID NO: 29923 - DNA, 15 bp, Homo sapiens
ttctctgttcactat

SEQ ID NO: 29924 - DNA, 15 bp, Homo sapiens
cttctctgttcacta

SEQ ID NO: 29925 - DNA, 15 bp, Homo sapiens
acttctctgttcact

SEQ ID NO: 29926 - DNA, 15 bp, Homo sapiens
gacttctctgttcac

SEQ ID NO: 29927 - DNA, 15 bp, Homo sapiens
agacttctctgttca

SEQ ID NO: 29928 - DNA, 15 bp, Homo sapiens
aagacttctctgttc

SEQ ID NO: 29929 - DNA, 15 bp, Homo sapiens
caagacttctctgtt

SEQ ID NO: 29930 - DNA, 15 bp, Homo sapiens
ccaagacttctctgt

SEQ ID NO: 29931 - DNA, 15 bp, Homo sapiens
tccaagacttctctg

SEQ ID NO: 29932 - DNA, 15 bp, Homo sapiens
gtccaagacttctct

SEQ ID NO: 29933 - DNA, 15 bp, Homo sapiens
agtccaagacttctc

SEQ ID NO: 29934 - DNA, 15 bp, Homo sapiens
gagtccaagacttct

SEQ ID NO: 29935 - DNA, 15 bp, Homo sapiens
agagtccaagacttc

SEQ ID NO: 29936 - DNA, 15 bp, Homo sapiens
aagagtccaagactt

SEQ ID NO: 29937 - DNA, 15 bp, Homo sapiens
taagagtccaagact

SEQ ID NO: 29938 - DNA, 15 bp, Homo sapiens
gtaagagtccaagac

SEQ ID NO: 29939 - DNA, 15 bp, Homo sapiens
tgtaagagtccaaga

SEQ ID NO: 29940 - DNA, 15 bp, Homo sapiens
ttgtaagagtccaag

SEQ ID NO: 29941 - DNA, 15 bp, Homo sapiens
attgtaagagtccaa

SEQ ID NO: 29942 - DNA, 15 bp, Homo sapiens
aattgtaagagtcca

SEQ ID NO: 29943 - DNA, 15 bp, Homo sapiens
gaattgtaagagtcc

SEQ ID NO: 29944 - DNA, 15 bp, Homo sapiens
tgaattgtaagagtc

SEQ ID NO: 29945 - DNA, 15 bp, Homo sapiens
atgaattgtaagagt

SEQ ID NO: 29946 - DNA, 15 bp, Homo sapiens
catgaattgtaagag

SEQ ID NO: 29947 - DNA, 15 bp, Homo sapiens
acatgaattgtaaga

SEQ ID NO: 29948 - DNA, 15 bp, Homo sapiens
cacatgaattgtaag

SEQ ID NO: 29949 - DNA, 15 bp, Homo sapiens
tcacatgaattgtaa

SEQ ID NO: 29950 - DNA, 15 bp, Homo sapiens
ctcacatgaattgta

SEQ ID NO: 29951 - DNA, 15 bp, Homo sapiens
tctcacatgaattgt

SEQ ID NO: 29952 - DNA, 15 bp, Homo sapiens
ttctcacatgaattg

SEQ ID NO: 29953 - DNA, 15 bp, Homo sapiens
cttctcacatgaatt

SEQ ID NO: 29954 - DNA, 15 bp, Homo sapiens
tcttctcacatgaat

SEQ ID NO: 29955 - DNA, 15 bp, Homo sapiens
gtcttctcacatgaa

SEQ ID NO: 29956 - DNA, 15 bp, Homo sapiens
ggtcttctcacatga

SEQ ID NO: 29957 - DNA, 15 bp, Homo sapiens
aggtcttctcacatg

SEQ ID NO: 29958 - DNA, 15 bp, Homo sapiens
caggtcttctcacat

SEQ ID NO: 29959 - DNA, 15 bp, Homo sapiens
tcaggtcttctcaca

SEQ ID NO: 29960 - DNA, 15 bp, Homo sapiens
ttcaggtcttctcac

SEQ ID NO: 29961 - DNA, 15 bp, Homo sapiens
tttcaggtcttctca

SEQ ID NO: 29962 - DNA, 15 bp, Homo sapiens
gtttcaggtcttctc

SEQ ID NO: 29963 - DNA, 15 bp, Homo sapiens
agtttcaggtcttct

SEQ ID NO: 29964 - DNA, 15 bp, Homo sapiens
aagtttcaggtcttc

SEQ ID NO: 29965 - DNA, 15 bp, Homo sapiens
aaagtttcaggtctt

SEQ ID NO: 29966 - DNA, 15 bp, Homo sapiens
caaagtttcaggtct

SEQ ID NO: 29967 - DNA, 15 bp, Homo sapiens
tcaaagtttcaggtc

SEQ ID NO: 29968 - DNA, 15 bp, Homo sapiens
atcaaagtttcaggt

SEQ ID NO: 29969 - DNA, 15 bp, Homo sapiens
tatcaaagtttcagg

SEQ ID NO: 29970 - DNA, 15 bp, Homo sapiens
ttatcaaagtttcag

SEQ ID NO: 29971 - DNA, 15 bp, Homo sapiens
gttatcaaagtttca

SEQ ID NO: 29972 - DNA, 15 bp, Homo sapiens
tgttatcaaagtttc

SEQ ID NO: 29973 - DNA, 15 bp, Homo sapiens
ttgttatcaaagttt

SEQ ID NO: 29974 - DNA, 15 bp, Homo sapiens
attgttatcaaagtt

SEQ ID NO: 29975 - DNA, 15 bp, Homo sapiens
aattgttatcaaagt

SEQ ID NO: 29976 - DNA, 15 bp, Homo sapiens
taattgttatcaaag

SEQ ID NO: 29977 - DNA, 15 bp, Homo sapiens
ataattgttatcaaa

SEQ ID NO: 29978 - DNA, 15 bp, Homo sapiens
tataattgttatcaa

SEQ ID NO: 29979 - DNA, 15 bp, Homo sapiens
atataattgttatca

SEQ ID NO: 29980 - DNA, 15 bp, Homo sapiens
tatataattgttatc

SEQ ID NO: 29981 - DNA, 15 bp, Homo sapiens
gtatataattgttat

SEQ ID NO: 29982 - DNA, 15 bp, Homo sapiens
tgtatataattgtta

SEQ ID NO: 29983 - DNA, 15 bp, Homo sapiens
atgtatataattgtt

SEQ ID NO: 29984 - DNA, 15 bp, Homo sapiens
aatgtatataattgt

SEQ ID NO: 29985 - DNA, 15 bp, Homo sapiens
aaatgtatataattg

SEQ ID NO: 29986 - DNA, 15 bp, Homo sapiens
aaaatgtatataatt

SEQ ID NO: 29987 - DNA, 15 bp, Homo sapiens
caaaatgtatataat

SEQ ID NO: 29988 - DNA, 15 bp, Homo sapiens
acaaaatgtatataa

SEQ ID NO: 29989 - DNA, 15 bp, Homo sapiens
cacaaaatgtatata

SEQ ID NO: 29990 - DNA, 15 bp, Homo sapiens
tcacaaaatgtatat

SEQ ID NO: 29991 - DNA, 15 bp, Homo sapiens
ctcacaaaatgtata

SEQ ID NO: 29992 - DNA, 15 bp, Homo sapiens
actcacaaaatgtat

SEQ ID NO: 29993 - DNA, 15 bp, Homo sapiens
tactcacaaaatgta

SEQ ID NO: 29994 - DNA, 15 bp, Homo sapiens
ttactcacaaaatgt

SEQ ID NO: 29995 - DNA, 15 bp, Homo sapiens
attactcacaaaatg

SEQ ID NO: 29996 - DNA, 15 bp, Homo sapiens
aattactcacaaaat

SEQ ID NO: 29997 - DNA, 15 bp, Homo sapiens
aaattactcacaaaa

SEQ ID NO: 29998 - DNA, 15 bp, Homo sapiens
gaaattactcacaaa

SEQ ID NO: 29999 - DNA, 15 bp, Homo sapiens
agaaattactcacaa

SEQ ID NO: 30000 - DNA, 15 bp, Homo sapiens
aagaaattactcaca

SEQ ID NO: 30001 - DNA, 15 bp, Homo sapiens
aaagaaattactcac

SEQ ID NO: 30002 - DNA, 15 bp, Homo sapiens
caaagaaattactca

SEQ ID NO: 30003 - DNA, 15 bp, Homo sapiens
ccaaagaaattactc

SEQ ID NO: 30004 - DNA, 15 bp, Homo sapiens
accaaagaaattact

SEQ ID NO: 30005 - DNA, 15 bp, Homo sapiens
caccaaagaaattac

SEQ ID NO: 30006 - DNA, 15 bp, Homo sapiens
acaccaaagaaatta

SEQ ID NO: 30007 - DNA, 15 bp, Homo sapiens
tacaccaaagaaatt

SEQ ID NO: 30008 - DNA, 15 bp, Homo sapiens
atacaccaaagaaat

SEQ ID NO: 30009 - DNA, 15 bp, Homo sapiens
catacaccaaagaaa

SEQ ID NO: 30010 - DNA, 15 bp, Homo sapiens
gcatacaccaaagaa

SEQ ID NO: 30011 - DNA, 15 bp, Homo sapiens
ggcatacaccaaaga

SEQ ID NO: 30012 - DNA, 15 bp, Homo sapiens
aggcatacaccaaag

SEQ ID NO: 30013 - DNA, 15 bp, Homo sapiens
aaggcatacaccaaa

SEQ ID NO: 30014 - DNA, 15 bp, Homo sapiens
gaaggcatacaccaa

SEQ ID NO: 30015 - DNA, 15 bp, Homo sapiens
tgaaggcatacacca

SEQ ID NO: 30016 - DNA, 15 bp, Homo sapiens
gtgaaggcatacacc

SEQ ID NO: 30017 - DNA, 15 bp, Homo sapiens
tgtgaaggcatacac

SEQ ID NO: 30018 - DNA, 15 bp, Homo sapiens
atgtgaaggcataca

SEQ ID NO: 30019 - DNA, 15 bp, Homo sapiens
tatgtgaaggcatac

SEQ ID NO: 30020 - DNA, 15 bp, Homo sapiens
atatgtgaaggcata

SEQ ID NO: 30021 - DNA, 15 bp, Homo sapiens
gatatgtgaaggcat

SEQ ID NO: 30022 - DNA, 15 bp, Homo sapiens
agatatgtgaaggca

SEQ ID NO: 30023 - DNA, 15 bp, Homo sapiens
gagatatgtgaaggc

SEQ ID NO: 30024 - DNA, 15 bp, Homo sapiens
agagatatgtgaagg

SEQ ID NO: 30025 - DNA, 15 bp, Homo sapiens
cagagatatgtgaag

SEQ ID NO: 30026 - DNA, 15 bp, Homo sapiens
ccagagatatgtgaa

SEQ ID NO: 30027 - DNA, 15 bp, Homo sapiens
accagagatatgtga

SEQ ID NO: 30028 - DNA, 15 bp, Homo sapiens
taccagagatatgtg

SEQ ID NO: 30029 - DNA, 15 bp, Homo sapiens
ataccagagatatgt

SEQ ID NO: 30030 - DNA, 15 bp, Homo sapiens
cataccagagatatg

SEQ ID NO: 30031 - DNA, 15 bp, Homo sapiens
acataccagagatat

SEQ ID NO: 30032 - DNA, 15 bp, Homo sapiens
cacataccagagata

SEQ ID NO: 30033 - DNA, 15 bp, Homo sapiens
tcacataccagagat

SEQ ID NO: 30034 - DNA, 15 bp, Homo sapiens
gtcacataccagaga

SEQ ID NO: 30035 - DNA, 15 bp, Homo sapiens
ggtcacataccagag

SEQ ID NO: 30036 - DNA, 15 bp, Homo sapiens
aggtcacataccaga

SEQ ID NO: 30037 - DNA, 15 bp, Homo sapiens
taggtcacataccag

SEQ ID NO: 30038 - DNA, 15 bp, Homo sapiens
ataggtcacatacca

SEQ ID NO: 30039 - DNA, 15 bp, Homo sapiens
cataggtcacatacc

SEQ ID NO: 30040 - DNA, 15 bp, Homo sapiens
gcataggtcacatac

SEQ ID NO: 30041 - DNA, 15 bp, Homo sapiens
agcataggtcacata

SEQ ID NO: 30042 - DNA, 15 bp, Homo sapiens
cagcataggtcacat

SEQ ID NO: 30043 - DNA, 15 bp, Homo sapiens
gcagcataggtcaca

SEQ ID NO: 30044 - DNA, 15 bp, Homo sapiens
tgcagcataggtcac

SEQ ID NO: 30045 - DNA, 15 bp, Homo sapiens
ctgcagcataggtca

SEQ ID NO: 30046 - DNA, 15 bp, Homo sapiens
actgcagcataggtc

SEQ ID NO: 30047 - DNA, 15 bp, Homo sapiens
gactgcagcataggt

SEQ ID NO: 30048 - DNA, 15 bp, Homo sapiens
ggactgcagcatagg

SEQ ID NO: 30049 - DNA, 15 bp, Homo sapiens
tggactgcagcatag

SEQ ID NO: 30050 - DNA, 15 bp, Homo sapiens
atggactgcagcata

SEQ ID NO: 30051 - DNA, 15 bp, Homo sapiens
aatggactgcagcat

SEQ ID NO: 30052 - DNA, 15 bp, Homo sapiens
caatggactgcagca

SEQ ID NO: 30053 - DNA, 15 bp, Homo sapiens
tcaatggactgcagc

SEQ ID NO: 30054 - DNA, 15 bp, Homo sapiens
ctcaatggactgcag

SEQ ID NO: 30055 - DNA, 15 bp, Homo sapiens
gctcaatggactgca

SEQ ID NO: 30056 - DNA, 15 bp, Homo sapiens
tgctcaatggactgc

SEQ ID NO: 30057 - DNA, 15 bp, Homo sapiens
atgctcaatggactg

SEQ ID NO: 30058 - DNA, 15 bp, Homo sapiens
tatgctcaatggact

SEQ ID NO: 30059 - DNA, 15 bp, Homo sapiens
ctatgctcaatggac

SEQ ID NO: 30060 - DNA, 15 bp, Homo sapiens
tctatgctcaatgga

SEQ ID NO: 30061 - DNA, 15 bp, Homo sapiens
atctatgctcaatgg

SEQ ID NO: 30062 - DNA, 15 bp, Homo sapiens
aatctatgctcaatg

SEQ ID NO: 30063 - DNA, 15 bp, Homo sapiens
gaatctatgctcaat

SEQ ID NO: 30064 - DNA, 15 bp, Homo sapiens
ggaatctatgctcaa

SEQ ID NO: 30065 - DNA, 15 bp, Homo sapiens
gggaatctatgctca

SEQ ID NO: 30066 - DNA, 15 bp, Homo sapiens
tgggaatctatgctc

SEQ ID NO: 30067 - DNA, 15 bp, Homo sapiens
ctgggaatctatgct

SEQ ID NO: 30068 - DNA, 15 bp, Homo sapiens
tctgggaatctatgc

SEQ ID NO: 30069 - DNA, 15 bp, Homo sapiens
ttctgggaatctatg

SEQ ID NO: 30070 - DNA, 15 bp, Homo sapiens
attctgggaatctat

SEQ ID NO: 30071 - DNA, 15 bp, Homo sapiens
cattctgggaatcta

SEQ ID NO: 30072 - DNA, 15 bp, Homo sapiens
acattctgggaatct

SEQ ID NO: 30073 - DNA, 15 bp, Homo sapiens
tacattctgggaatc

SEQ ID NO: 30074 - DNA, 15 bp, Homo sapiens
atacattctgggaat

SEQ ID NO: 30075 - DNA, 15 bp, Homo sapiens
aatacattctgggaa

SEQ ID NO: 30076 - DNA, 15 bp, Homo sapiens
gaatacattctggga

SEQ ID NO: 30077 - DNA, 15 bp, Homo sapiens
agaatacattctggg

SEQ ID NO: 30078 - DNA, 15 bp, Homo sapiens
gagaatacattctgg

SEQ ID NO: 30079 - DNA, 15 bp, Homo sapiens
ggagaatacattctg

SEQ ID NO: 30080 - DNA, 15 bp, Homo sapiens
aggagaatacattct

SEQ ID NO: 30081 - DNA, 15 bp, Homo sapiens
caggagaatacattc

SEQ ID NO: 30082 - DNA, 15 bp, Homo sapiens
gcaggagaatacatt

SEQ ID NO: 30083 - DNA, 15 bp, Homo sapiens
tgcaggagaatacat

SEQ ID NO: 30084 - DNA, 15 bp, Homo sapiens
ctgcaggagaataca

SEQ ID NO: 30085 - DNA, 15 bp, Homo sapiens
tctgcaggagaatac

SEQ ID NO: 30086 - DNA, 15 bp, Homo sapiens
ttctgcaggagaata

SEQ ID NO: 30087 - DNA, 15 bp, Homo sapiens
tttctgcaggagaat

SEQ ID NO: 30088 - DNA, 15 bp, Homo sapiens
ttttctgcaggagaa

SEQ ID NO: 30089 - DNA, 15 bp, Homo sapiens
attttctgcaggaga

SEQ ID NO: 30090 - DNA, 15 bp, Homo sapiens
cattttctgcaggag

SEQ ID NO: 30091 - DNA, 15 bp, Homo sapiens
ccattttctgcagga

SEQ ID NO: 30092 - DNA, 15 bp, Homo sapiens
tccattttctgcagg

SEQ ID NO: 30093 - DNA, 15 bp, Homo sapiens
ctccattttctgcag

SEQ ID NO: 30094 - DNA, 15 bp, Homo sapiens
cctccattttctgca

SEQ ID NO: 30095 - DNA, 15 bp, Homo sapiens
tcctccattttctgc

SEQ ID NO: 30096 - DNA, 15 bp, Homo sapiens
ttcctccattttctg

SEQ ID NO: 30097 - DNA, 15 bp, Homo sapiens
tttcctccattttct

SEQ ID NO: 30098 - DNA, 15 bp, Homo sapiens
ttttcctccattttc

SEQ ID NO: 30099 - DNA, 15 bp, Homo sapiens
attttcctccatttt

SEQ ID NO: 30100 - DNA, 15 bp, Homo sapiens
tattttcctccattt

SEQ ID NO: 30101 - DNA, 15 bp, Homo sapiens
ttattttcctccatt

SEQ ID NO: 30102 - DNA, 15 bp, Homo sapiens
attattttcctccat

SEQ ID NO: 30103 - DNA, 15 bp, Homo sapiens
tattattttcctcca

SEQ ID NO: 30104 - DNA, 15 bp, Homo sapiens
gtattattttcctcc

SEQ ID NO: 30105 - DNA, 15 bp, Homo sapiens
agtattattttcctc

SEQ ID NO: 30106 - DNA, 15 bp, Homo sapiens
aagtattattttcct

SEQ ID NO: 30107 - DNA, 15 bp, Homo sapiens
caagtattattttcc

SEQ ID NO: 30108 - DNA, 15 bp, Homo sapiens
ccaagtattattttc

SEQ ID NO: 30109 - DNA, 15 bp, Homo sapiens
gccaagtattatttt

SEQ ID NO: 30110 - DNA, 15 bp, Homo sapiens
agccaagtattattt

SEQ ID NO: 30111 - DNA, 15 bp, Homo sapiens
aagccaagtattatt

SEQ ID NO: 30112 - DNA, 15 bp, Homo sapiens
gaagccaagtattat

SEQ ID NO: 30113 - DNA, 15 bp, Homo sapiens
ggaagccaagtatta

SEQ ID NO: 30114 - DNA, 15 bp, Homo sapiens
gggaagccaagtatt

SEQ ID NO: 30115 - DNA, 15 bp, Homo sapiens
agggaagccaagtat

SEQ ID NO: 30116 - DNA, 15 bp, Homo sapiens
tagggaagccaagta

SEQ ID NO: 30117 - DNA, 15 bp, Homo sapiens
ttagggaagccaagt

SEQ ID NO: 30118 - DNA, 15 bp, Homo sapiens
attagggaagccaag

SEQ ID NO: 30119 - DNA, 15 bp, Homo sapiens
cattagggaagccaa

SEQ ID NO: 30120 - DNA, 15 bp, Homo sapiens
tcattagggaagcca

SEQ ID NO: 30121 - DNA, 15 bp, Homo sapiens
atcattagggaagcc

SEQ ID NO: 30122 - DNA, 15 bp, Homo sapiens
aatcattagggaagc

SEQ ID NO: 30123 - DNA, 15 bp, Homo sapiens
taatcattagggaag

SEQ ID NO: 30124 - DNA, 15 bp, Homo sapiens
gtaatcattagggaa

SEQ ID NO: 30125 - DNA, 15 bp, Homo sapiens
tgtaatcattaggga

SEQ ID NO: 30126 - DNA, 15 bp, Homo sapiens
atgtaatcattaggg

SEQ ID NO: 30127 - DNA, 15 bp, Homo sapiens
catgtaatcattagg

SEQ ID NO: 30128 - DNA, 15 bp, Homo sapiens
acatgtaatcattag

SEQ ID NO: 30129 - DNA, 15 bp, Homo sapiens
cacatgtaatcatta

SEQ ID NO: 30130 - DNA, 15 bp, Homo sapiens
acacatgtaatcatt

SEQ ID NO: 30131 - DNA, 15 bp, Homo sapiens
tacacatgtaatcat

SEQ ID NO: 30132 - DNA, 15 bp, Homo sapiens
atacacatgtaatca

SEQ ID NO: 30133 - DNA, 15 bp, Homo sapiens
tatacacatgtaatc

SEQ ID NO: 30134 - DNA, 15 bp, Homo sapiens
gtatacacatgtaat

SEQ ID NO: 30135 - DNA, 15 bp, Homo sapiens
tgtatacacatgtaa

SEQ ID NO: 30136 - DNA, 15 bp, Homo sapiens
ttgtatacacatgta

SEQ ID NO: 30137 - DNA, 15 bp, Homo sapiens
gttgtatacacatgt

SEQ ID NO: 30138 - DNA, 15 bp, Homo sapiens
tgttgtatacacatg

SEQ ID NO: 30139 - DNA, 15 bp, Homo sapiens
gtgttgtatacacat

SEQ ID NO: 30140 - DNA, 15 bp, Homo sapiens
agtgttgtatacaca

SEQ ID NO: 30141 - DNA, 15 bp, Homo sapiens
tagtgttgtatacac

SEQ ID NO: 30142 - DNA, 15 bp, Homo sapiens
ttagtgttgtataca

SEQ ID NO: 30143 - DNA, 15 bp, Homo sapiens
gttagtgttgtatac

SEQ ID NO: 30144 - DNA, 15 bp, Homo sapiens
tgttagtgttgtata

SEQ ID NO: 30145 - DNA, 15 bp, Homo sapiens
atgttagtgttgtat

SEQ ID NO: 30146 - DNA, 15 bp, Homo sapiens
aatgttagtgttgta

SEQ ID NO: 30147 - DNA, 15 bp, Homo sapiens
aaatgttagtgttgt

SEQ ID NO: 30148 - DNA, 15 bp, Homo sapiens
caaatgttagtgttg

SEQ ID NO: 30149 - DNA, 15 bp, Homo sapiens
gcaaatgttagtgtt

SEQ ID NO: 30150 - DNA, 15 bp, Homo sapiens
tgcaaatgttagtgt

SEQ ID NO: 30151 - DNA, 15 bp, Homo sapiens
ttgcaaatgttagtg

SEQ ID NO: 30152 - DNA, 15 bp, Homo sapiens
cttgcaaatgttagt

SEQ ID NO: 30153 - DNA, 15 bp, Homo sapiens
tcttgcaaatgttag

SEQ ID NO: 30154 - DNA, 15 bp, Homo sapiens
gtcttgcaaatgtta

SEQ ID NO: 30155 - DNA, 15 bp, Homo sapiens
ggtcttgcaaatgtt

SEQ ID NO: 30156 - DNA, 15 bp, Homo sapiens
tggtcttgcaaatgt

SEQ ID NO: 30157 - DNA, 15 bp, Homo sapiens
gtggtcttgcaaatg

SEQ ID NO: 30158 - DNA, 15 bp, Homo sapiens
ggtggtcttgcaaat

SEQ ID NO: 30159 - DNA, 15 bp, Homo sapiens
aggtggtcttgcaaa

SEQ ID NO: 30160 - DNA, 15 bp, Homo sapiens
aaggtggtcttgcaa

SEQ ID NO: 30161 - DNA, 15 bp, Homo sapiens
aaaggtggtcttgca

SEQ ID NO: 30162 - DNA, 15 bp, Homo sapiens
taaaggtggtcttgc

SEQ ID NO: 30163 - DNA, 15 bp, Homo sapiens
ttaaaggtggtcttg

SEQ ID NO: 30164 - DNA, 15 bp, Homo sapiens
tttaaaggtggtctt

SEQ ID NO: 30165 - DNA, 15 bp, Homo sapiens
atttaaaggtggtct

SEQ ID NO: 30166 - DNA, 15 bp, Homo sapiens
tatttaaaggtggtc

SEQ ID NO: 30167 - DNA, 15 bp, Homo sapiens
ttatttaaaggtggt

SEQ ID NO: 30168 - DNA, 15 bp, Homo sapiens
gttatttaaaggtgg

SEQ ID NO: 30169 - DNA, 15 bp, Homo sapiens
tgttatttaaaggtg

SEQ ID NO: 30170 - DNA, 15 bp, Homo sapiens
gtgttatttaaaggt

SEQ ID NO: 30171 - DNA, 15 bp, Homo sapiens
tgtgttatttaaagg

SEQ ID NO: 30172 - DNA, 15 bp, Homo sapiens
gtgtgttatttaaag

SEQ ID NO: 30173 - DNA, 15 bp, Homo sapiens
agtgtgttatttaaa

SEQ ID NO: 30174 - DNA, 15 bp, Homo sapiens
aagtgtgttatttaa

SEQ ID NO: 30175 - DNA, 15 bp, Homo sapiens
taagtgtgttattta

SEQ ID NO: 30176 - DNA, 15 bp, Homo sapiens
ctaagtgtgttattt

SEQ ID NO: 30177 - DNA, 15 bp, Homo sapiens
gctaagtgtgttatt

SEQ ID NO: 30178 - DNA, 15 bp, Homo sapiens
tgctaagtgtgttat

SEQ ID NO: 30179 - DNA, 15 bp, Homo sapiens
atgctaagtgtgtta

SEQ ID NO: 30180 - DNA, 15 bp, Homo sapiens
aatgctaagtgtgtt

SEQ ID NO: 30181 - DNA, 15 bp, Homo sapiens
aaatgctaagtgtgt

SEQ ID NO: 30182 - DNA, 15 bp, Homo sapiens
aaaatgctaagtgtg

SEQ ID NO: 30183 - DNA, 15 bp, Homo sapiens
aaaaatgctaagtgt

SEQ ID NO: 30184 - DNA, 15 bp, Homo sapiens
taaaaatgctaagtg

SEQ ID NO: 30185 - DNA, 15 bp, Homo sapiens
ataaaaatgctaagt

SEQ ID NO: 30186 - DNA, 15 bp, Homo sapiens
aataaaaatgctaag

SEQ ID NO: 30187 - DNA, 15 bp, Homo sapiens
aaataaaaatgctaa

SEQ ID NO: 30188 - DNA, 15 bp, Homo sapiens
aaaataaaaatgcta

SEQ ID NO: 30189 - DNA, 15 bp, Homo sapiens
taaaataaaaatgct

SEQ ID NO: 30190 - DNA, 15 bp, Homo sapiens
ataaaataaaaatgc

SEQ ID NO: 30191 - DNA, 15 bp, Homo sapiens
cataaaataaaaatg

SEQ ID NO: 30192 - DNA, 15 bp, Homo sapiens
tcataaaataaaaat

SEQ ID NO: 30193 - DNA, 15 bp, Homo sapiens
ttcataaaataaaaa

SEQ ID NO: 30194 - DNA, 15 bp, Homo sapiens
tttcataaaataaaa

SEQ ID NO: 30195 - DNA, 15 bp, Homo sapiens
atttcataaaataaa

SEQ ID NO: 30196 - DNA, 15 bp, Homo sapiens
catttcataaaataa

SEQ ID NO: 30197 - DNA, 15 bp, Homo sapiens
acatttcataaaata

SEQ ID NO: 30198 - DNA, 15 bp, Homo sapiens
tacatttcataaaat

SEQ ID NO: 30199 - DNA, 15 bp, Homo sapiens
ttacatttcataaaa

SEQ ID NO: 30200 - DNA, 15 bp, Homo sapiens
attacatttcataaa

SEQ ID NO: 30201 - DNA, 15 bp, Homo sapiens
tattacatttcataa

SEQ ID NO: 30202 - DNA, 15 bp, Homo sapiens
atattacatttcata

SEQ ID NO: 30203 - DNA, 15 bp, Homo sapiens
catattacatttcat

SEQ ID NO: 30204 - DNA, 15 bp, Homo sapiens
acatattacatttca

SEQ ID NO: 30205 - DNA, 15 bp, Homo sapiens
tacatattacatttc

SEQ ID NO: 30206 - DNA, 15 bp, Homo sapiens
ctacatattacattt

SEQ ID NO: 30207 - DNA, 15 bp, Homo sapiens
actacatattacatt

SEQ ID NO: 30208 - DNA, 15 bp, Homo sapiens
aactacatattacat

SEQ ID NO: 30209 - DNA, 15 bp, Homo sapiens
gaactacatattaca

SEQ ID NO: 30210 - DNA, 15 bp, Homo sapiens
agaactacatattac

SEQ ID NO: 30211 - DNA, 15 bp, Homo sapiens
aagaactacatatta

SEQ ID NO: 30212 - DNA, 15 bp, Homo sapiens
aaagaactacatatt

SEQ ID NO: 30213 - DNA, 15 bp, Homo sapiens
caaagaactacatat

SEQ ID NO: 30214 - DNA, 15 bp, Homo sapiens
gcaaagaactacata

SEQ ID NO: 30215 - DNA, 15 bp, Homo sapiens
tgcaaagaactacat

SEQ ID NO: 30216 - DNA, 15 bp, Homo sapiens
atgcaaagaactaca

SEQ ID NO: 30217 - DNA, 15 bp, Homo sapiens
tatgcaaagaactac

SEQ ID NO: 30218 - DNA, 15 bp, Homo sapiens
ctatgcaaagaacta

SEQ ID NO: 30219 - DNA, 15 bp, Homo sapiens
actatgcaaagaact

SEQ ID NO: 30220 - DNA, 15 bp, Homo sapiens
aactatgcaaagaac

SEQ ID NO: 30221 - DNA, 15 bp, Homo sapiens
aaactatgcaaagaa

SEQ ID NO: 30222 - DNA, 15 bp, Homo sapiens
taaactatgcaaaga

SEQ ID NO: 30223 - DNA, 15 bp, Homo sapiens
ataaactatgcaaag

SEQ ID NO: 30224 - DNA, 15 bp, Homo sapiens
gataaactatgcaaa

SEQ ID NO: 30225 - DNA, 15 bp, Homo sapiens
ggataaactatgcaa

SEQ ID NO: 30226 - DNA, 15 bp, Homo sapiens
aggataaactatgca

SEQ ID NO: 30227 - DNA, 15 bp, Homo sapiens
taggataaactatgc

SEQ ID NO: 30228 - DNA, 15 bp, Homo sapiens
ataggataaactatg

SEQ ID NO: 30229 - DNA, 15 bp, Homo sapiens
aataggataaactat

SEQ ID NO: 30230 - DNA, 15 bp, Homo sapiens
taataggataaacta

SEQ ID NO: 30231 - DNA, 15 bp, Homo sapiens
ctaataggataaact

SEQ ID NO: 30232 - DNA, 15 bp, Homo sapiens
actaataggataaac

SEQ ID NO: 30233 - DNA, 15 bp, Homo sapiens
tactaataggataaa

SEQ ID NO: 30234 - DNA, 15 bp, Homo sapiens
ttactaataggataa

SEQ ID NO: 30235 - DNA, 15 bp, Homo sapiens
attactaataggata

SEQ ID NO: 30236 - DNA, 15 bp, Homo sapiens
gattactaataggat

SEQ ID NO: 30237 - DNA, 15 bp, Homo sapiens
agattactaatagga

SEQ ID NO: 30238 - DNA, 15 bp, Homo sapiens
tagattactaatagg

SEQ ID NO: 30239 - DNA, 15 bp, Homo sapiens
atagattactaatag

SEQ ID NO: 30240 - DNA, 15 bp, Homo sapiens
aatagattactaata

SEQ ID NO: 30241 - DNA, 15 bp, Homo sapiens
gaatagattactaat

SEQ ID NO: 30242 - DNA, 15 bp, Homo sapiens
agaatagattactaa

SEQ ID NO: 30243 - DNA, 15 bp, Homo sapiens
cagaatagattacta

SEQ ID NO: 30244 - DNA, 15 bp, Homo sapiens
acagaatagattact

SEQ ID NO: 30245 - DNA, 15 bp, Homo sapiens
gacagaatagattac

SEQ ID NO: 30246 - DNA, 15 bp, Homo sapiens
agacagaatagatta

SEQ ID NO: 30247 - DNA, 15 bp, Homo sapiens
aagacagaatagatt

SEQ ID NO: 30248 - DNA, 15 bp, Homo sapiens
aaagacagaatagat

SEQ ID NO: 30249 - DNA, 15 bp, Homo sapiens
caaagacagaataga

SEQ ID NO: 30250 - DNA, 15 bp, Homo sapiens
ccaaagacagaatag

SEQ ID NO: 30251 - DNA, 15 bp, Homo sapiens
tccaaagacagaata

SEQ ID NO: 30252 - DNA, 15 bp, Homo sapiens
ttccaaagacagaat

SEQ ID NO: 30253 - DNA, 15 bp, Homo sapiens
attccaaagacagaa

SEQ ID NO: 30254 - DNA, 15 bp, Homo sapiens
tattccaaagacaga

SEQ ID NO: 30255 - DNA, 15 bp, Homo sapiens
atattccaaagacag

SEQ ID NO: 30256 - DNA, 15 bp, Homo sapiens
catattccaaagaca

SEQ ID NO: 30257 - DNA, 15 bp, Homo sapiens
acatattccaaagac

SEQ ID NO: 30258 - DNA, 15 bp, Homo sapiens
aacatattccaaaga

SEQ ID NO: 30259 - DNA, 15 bp, Homo sapiens
aaacatattccaaag

SEQ ID NO: 30260 - DNA, 15 bp, Homo sapiens
aaaacatattccaaa

SEQ ID NO: 30261 - DNA, 15 bp, Homo sapiens
caaaacatattccaa

SEQ ID NO: 30262 - DNA, 15 bp, Homo sapiens
acaaaacatattcca

SEQ ID NO: 30263 - DNA, 15 bp, Homo sapiens
cacaaaacatattcc

SEQ ID NO: 30264 - DNA, 15 bp, Homo sapiens
tcacaaaacatattc

SEQ ID NO: 30265 - DNA, 15 bp, Homo sapiens
atcacaaaacatatt

SEQ ID NO: 30266 - DNA, 15 bp, Homo sapiens
catcacaaaacatat

SEQ ID NO: 30267 - DNA, 15 bp, Homo sapiens
tcatcacaaaacata

SEQ ID NO: 30268 - DNA, 15 bp, Homo sapiens
atcatcacaaaacat

SEQ ID NO: 30269 - DNA, 15 bp, Homo sapiens
catcatcacaaaaca

SEQ ID NO: 30270 - DNA, 15 bp, Homo sapiens
tcatcatcacaaaac

SEQ ID NO: 30271 - DNA, 15 bp, Homo sapiens
ttcatcatcacaaaa

SEQ ID NO: 30272 - DNA, 15 bp, Homo sapiens
tttcatcatcacaaa

SEQ ID NO: 30273 - DNA, 15 bp, Homo sapiens
atttcatcatcacaa

SEQ ID NO: 30274 - DNA, 15 bp, Homo sapiens
tatttcatcatcaca

SEQ ID NO: 30275 - DNA, 15 bp, Homo sapiens
ttatttcatcatcac

SEQ ID NO: 30276 - DNA, 15 bp, Homo sapiens
tttatttcatcatca

SEQ ID NO: 30277 - DNA, 15 bp, Homo sapiens
atttatttcatcatc

SEQ ID NO: 30278 - DNA, 15 bp, Homo sapiens
tatttatttcatcat

SEQ ID NO: 30279 - DNA, 15 bp, Homo sapiens
gtatttatttcatca

SEQ ID NO: 30280 - DNA, 15 bp, Homo sapiens
agtatttatttcatc

SEQ ID NO: 30281 - DNA, 15 bp, Homo sapiens
tagtatttatttcat

SEQ ID NO: 30282 - DNA, 15 bp, Homo sapiens
atagtatttatttca

SEQ ID NO: 30283 - DNA, 15 bp, Homo sapiens
tatagtatttatttc

SEQ ID NO: 30284 - DNA, 15 bp, Homo sapiens
ttatagtatttattt

SEQ ID NO: 30285 - DNA, 15 bp, Homo sapiens
tttatagtatttatt

SEQ ID NO: 30286 - DNA, 15 bp, Homo sapiens
atttatagtatttat

SEQ ID NO: 30287 - DNA, 15 bp, Homo sapiens
tatttatagtattta

SEQ ID NO: 30288 - DNA, 15 bp, Homo sapiens
ctatttatagtattt

SEQ ID NO: 30289 - DNA, 15 bp, Homo sapiens
actatttatagtatt

SEQ ID NO: 30290 - DNA, 15 bp, Homo sapiens
tactatttatagtat

SEQ ID NO: 30291 - DNA, 15 bp, Homo sapiens
atactatttatagta

SEQ ID NO: 30292 - DNA, 15 bp, Homo sapiens
aatactatttatagt

SEQ ID NO: 30293 - DNA, 15 bp, Homo sapiens
taatactatttatag

SEQ ID NO: 30294 - DNA, 15 bp, Homo sapiens
ataatactatttata

SEQ ID NO: 30295 - DNA, 15 bp, Homo sapiens
aataatactatttat

SEQ ID NO: 30296 - DNA, 15 bp, Homo sapiens
gaataatactattta

SEQ ID NO: 30297 - DNA, 15 bp, Homo sapiens
ggaataatactattt

SEQ ID NO: 30298 - DNA, 15 bp, Homo sapiens
aggaataatactatt

SEQ ID NO: 30299 - DNA, 15 bp, Homo sapiens
aaggaataatactat

SEQ ID NO: 30300 - DNA, 15 bp, Homo sapiens
aaaggaataatacta

SEQ ID NO: 30301 - DNA, 15 bp, Homo sapiens
aaaaggaataatact

SEQ ID NO: 30302 - DNA, 15 bp, Homo sapiens
caaaaggaataatac

SEQ ID NO: 30303 - DNA, 15 bp, Homo sapiens
gcaaaaggaataata

SEQ ID NO: 30304 - DNA, 15 bp, Homo sapiens
tgcaaaaggaataat

SEQ ID NO: 30305 - DNA, 15 bp, Homo sapiens
atgcaaaaggaataa

SEQ ID NO: 30306 - DNA, 15 bp, Homo sapiens
aatgcaaaaggaata

SEQ ID NO: 30307 - DNA, 15 bp, Homo sapiens
caatgcaaaaggaat

SEQ ID NO: 30308 - DNA, 15 bp, Homo sapiens
tcaatgcaaaaggaa

SEQ ID NO: 30309 - DNA, 15 bp, Homo sapiens
ctcaatgcaaaagga

SEQ ID NO: 30310 - DNA, 15 bp, Homo sapiens
tctcaatgcaaaagg

SEQ ID NO: 30311 - DNA, 15 bp, Homo sapiens
ctctcaatgcaaaag

SEQ ID NO: 30312 - DNA, 15 bp, Homo sapiens
actctcaatgcaaaa

SEQ ID NO: 30313 - DNA, 15 bp, Homo sapiens
gactctcaatgcaaa

SEQ ID NO: 30314 - DNA, 15 bp, Homo sapiens
ggactctcaatgcaa

SEQ ID NO: 30315 - DNA, 15 bp, Homo sapiens
aggactctcaatgca

SEQ ID NO: 30316 - DNA, 15 bp, Homo sapiens
caggactctcaatgc

SEQ ID NO: 30317 - DNA, 15 bp, Homo sapiens
tcaggactctcaatg

SEQ ID NO: 30318 - DNA, 15 bp, Homo sapiens
gtcaggactctcaat

SEQ ID NO: 30319 - DNA, 15 bp, Homo sapiens
cgtcaggactctcaa

SEQ ID NO: 30320 - DNA, 15 bp, Homo sapiens
tcgtcaggactctca

SEQ ID NO: 30321 - DNA, 15 bp, Homo sapiens
ttcgtcaggactctc

SEQ ID NO: 30322 - DNA, 15 bp, Homo sapiens
tttcgtcaggactct

SEQ ID NO: 30323 - DNA, 15 bp, Homo sapiens
atttcgtcaggactc

SEQ ID NO: 30324 - DNA, 15 bp, Homo sapiens
catttcgtcaggact

SEQ ID NO: 30325 - DNA, 15 bp, Homo sapiens
acatttcgtcaggac

SEQ ID NO: 30326 - DNA, 15 bp, Homo sapiens
gacatttcgtcagga

SEQ ID NO: 30327 - DNA, 15 bp, Homo sapiens
ggacatttcgtcagg

SEQ ID NO: 30328 - DNA, 15 bp, Homo sapiens
tggacatttcgtcag

SEQ ID NO: 30329 - DNA, 15 bp, Homo sapiens
atggacatttcgtca

SEQ ID NO: 30330 - DNA, 15 bp, Homo sapiens
catggacatttcgtc

SEQ ID NO: 30331 - DNA, 15 bp, Homo sapiens
acatggacatttcgt

SEQ ID NO: 30332 - DNA, 15 bp, Homo sapiens
cacatggacatttcg

SEQ ID NO: 30333 - DNA, 15 bp, Homo sapiens
tcacatggacatttc

SEQ ID NO: 30334 - DNA, 15 bp, Homo sapiens
gtcacatggacattt

SEQ ID NO: 30335 - DNA, 15 bp, Homo sapiens
tgtcacatggacatt

SEQ ID NO: 30336 - DNA, 15 bp, Homo sapiens
ctgtcacatggacat

SEQ ID NO: 30337 - DNA, 15 bp, Homo sapiens
actgtcacatggaca

SEQ ID NO: 30338 - DNA, 15 bp, Homo sapiens
aactgtcacatggac

SEQ ID NO: 30339 - DNA, 15 bp, Homo sapiens
gaactgtcacatgga

SEQ ID NO: 30340 - DNA, 15 bp, Homo sapiens
tgaactgtcacatgg

SEQ ID NO: 30341 - DNA, 15 bp, Homo sapiens
atgaactgtcacatg

SEQ ID NO: 30342 - DNA, 15 bp, Homo sapiens
aatgaactgtcacat

SEQ ID NO: 30343 - DNA, 15 bp, Homo sapiens
aaatgaactgtcaca

SEQ ID NO: 30344 - DNA, 15 bp, Homo sapiens
aaaatgaactgtcac

SEQ ID NO: 30345 - DNA, 15 bp, Homo sapiens
caaaatgaactgtca

SEQ ID NO: 30346 - DNA, 15 bp, Homo sapiens
ccaaaatgaactgtc

SEQ ID NO: 30347 - DNA, 15 bp, Homo sapiens
cccaaaatgaactgt

SEQ ID NO: 30348 - DNA, 15 bp, Homo sapiens
acccaaaatgaactg

SEQ ID NO: 30349 - DNA, 15 bp, Homo sapiens
aacccaaaatgaact

SEQ ID NO: 30350 - DNA, 15 bp, Homo sapiens
aaacccaaaatgaac

SEQ ID NO: 30351 - DNA, 15 bp, Homo sapiens
taaacccaaaatgaa

SEQ ID NO: 30352 - DNA, 15 bp, Homo sapiens
ctaaacccaaaatga

SEQ ID NO: 30353 - DNA, 15 bp, Homo sapiens
gctaaacccaaaatg

SEQ ID NO: 30354 - DNA, 15 bp, Homo sapiens
agctaaacccaaaat

SEQ ID NO: 30355 - DNA, 15 bp, Homo sapiens
gagctaaacccaaaa

SEQ ID NO: 30356 - DNA, 15 bp, Homo sapiens
agagctaaacccaaa

SEQ ID NO: 30357 - DNA, 15 bp, Homo sapiens
tagagctaaacccaa

SEQ ID NO: 30358 - DNA, 15 bp, Homo sapiens
gtagagctaaaccca

SEQ ID NO: 30359 - DNA, 15 bp, Homo sapiens
ggtagagctaaaccc

SEQ ID NO: 30360 - DNA, 15 bp, Homo sapiens
aggtagagctaaacc

SEQ ID NO: 30361 - DNA, 15 bp, Homo sapiens
gaggtagagctaaac

SEQ ID NO: 30362 - DNA, 15 bp, Homo sapiens
agaggtagagctaaa

SEQ ID NO: 30363 - DNA, 15 bp, Homo sapiens
tagaggtagagctaa

SEQ ID NO: 30364 - DNA, 15 bp, Homo sapiens
ttagaggtagagcta

SEQ ID NO: 30365 - DNA, 15 bp, Homo sapiens
attagaggtagagct

SEQ ID NO: 30366 - DNA, 15 bp, Homo sapiens
tattagaggtagagc

SEQ ID NO: 30367 - DNA, 15 bp, Homo sapiens
atattagaggtagag

SEQ ID NO: 30368 - DNA, 15 bp, Homo sapiens
catattagaggtaga

SEQ ID NO: 30369 - DNA, 15 bp, Homo sapiens
acatattagaggtag

SEQ ID NO: 30370 - DNA, 15 bp, Homo sapiens
cacatattagaggta

SEQ ID NO: 30371 - DNA, 15 bp, Homo sapiens
tcacatattagaggt

SEQ ID NO: 30372 - DNA, 15 bp, Homo sapiens
gtcacatattagagg

SEQ ID NO: 30373 - DNA, 15 bp, Homo sapiens
ggtcacatattagag

SEQ ID NO: 30374 - DNA, 15 bp, Homo sapiens
aggtcacatattaga

SEQ ID NO: 30375 - DNA, 15 bp, Homo sapiens
taggtcacatattag

SEQ ID NO: 30376 - DNA, 15 bp, Homo sapiens
ataggtcacatatta

SEQ ID NO: 30377 - DNA, 15 bp, Homo sapiens
cataggtcacatatt

SEQ ID NO: 30378 - DNA, 15 bp, Homo sapiens
gcataggtcacatat

SEQ ID NO: 30379 - DNA, 15 bp, Homo sapiens
tagcataggtcacat

SEQ ID NO: 30380 - DNA, 15 bp, Homo sapiens
gtagcataggtcaca

SEQ ID NO: 30381 - DNA, 15 bp, Homo sapiens
ggtagcataggtcac

SEQ ID NO: 30382 - DNA, 15 bp, Homo sapiens
tggtagcataggtca

SEQ ID NO: 30383 - DNA, 15 bp, Homo sapiens
ctggtagcataggtc

SEQ ID NO: 30384 - DNA, 15 bp, Homo sapiens
actggtagcataggt

SEQ ID NO: 30385 - DNA, 15 bp, Homo sapiens
gactggtagcatagg

SEQ ID NO: 30386 - DNA, 15 bp, Homo sapiens
ggactggtagcatag

SEQ ID NO: 30387 - DNA, 15 bp, Homo sapiens
cggactggtagcata

SEQ ID NO: 30388 - DNA, 15 bp, Homo sapiens
acggactggtagcat

SEQ ID NO: 30389 - DNA, 15 bp, Homo sapiens
tacggactggtagca

SEQ ID NO: 30390 - DNA, 15 bp, Homo sapiens
atacggactggtagc

SEQ ID NO: 30391 - DNA, 15 bp, Homo sapiens
tatacggactggtag

SEQ ID NO: 30392 - DNA, 15 bp, Homo sapiens
ctatacggactggta

SEQ ID NO: 30393 - DNA, 15 bp, Homo sapiens
gctatacggactggt

SEQ ID NO: 30394 - DNA, 15 bp, Homo sapiens
cgctatacggactgg

SEQ ID NO: 30395 - DNA, 15 bp, Homo sapiens
acgctatacggactg

SEQ ID NO: 30396 - DNA, 15 bp, Homo sapiens
tacgctatacggact

SEQ ID NO: 30397 - DNA, 15 bp, Homo sapiens
ttacgctatacggac

SEQ ID NO: 30398 - DNA, 15 bp, Homo sapiens
tttacgctatacgga

SEQ ID NO: 30399 - DNA, 15 bp, Homo sapiens
atttacgctatacgg

SEQ ID NO: 30400 - DNA, 15 bp, Homo sapiens
aatttacgctatacg

SEQ ID NO: 30401 - DNA, 15 bp, Homo sapiens
gaatttacgctatac

SEQ ID NO: 30402 - DNA, 15 bp, Homo sapiens
ggaatttacgctata

SEQ ID NO: 30403 - DNA, 15 bp, Homo sapiens
gggaatttacgctat

SEQ ID NO: 30404 - DNA, 15 bp, Homo sapiens
tgggaatttacgcta

SEQ ID NO: 30405 - DNA, 15 bp, Homo sapiens
ctgggaatttacgct

SEQ ID NO: 30406 - DNA, 15 bp, Homo sapiens
tctgggaatttacgc

SEQ ID NO: 30407 - DNA, 15 bp, Homo sapiens
ttctgggaatttacg

SEQ ID NO: 30408 - DNA, 15 bp, Homo sapiens
attctgggaatttac

SEQ ID NO: 30409 - DNA, 15 bp, Homo sapiens
tattctgggaattta

SEQ ID NO: 30410 - DNA, 15 bp, Homo sapiens
atattctgggaattt

SEQ ID NO: 30411 - DNA, 15 bp, Homo sapiens
tatattctgggaatt

SEQ ID NO: 30412 - DNA, 15 bp, Homo sapiens
atatattctgggaat

SEQ ID NO: 30413 - DNA, 15 bp, Homo sapiens
gatatattctgggaa

SEQ ID NO: 30414 - DNA, 15 bp, Homo sapiens
ggatatattctggga

SEQ ID NO: 30415 - DNA, 15 bp, Homo sapiens
aggatatattctggg

SEQ ID NO: 30416 - DNA, 15 bp, Homo sapiens
gaggatatattctgg

SEQ ID NO: 30417 - DNA, 15 bp, Homo sapiens
ggaggatatattctg

SEQ ID NO: 30418 - DNA, 15 bp, Homo sapiens
aggaggatatattct

SEQ ID NO: 30419 - DNA, 15 bp, Homo sapiens
caggaggatatattc

SEQ ID NO: 30420 - DNA, 15 bp, Homo sapiens
tcaggaggatatatt

SEQ ID NO: 30421 - DNA, 15 bp, Homo sapiens
ttcaggaggatatat

SEQ ID NO: 30422 - DNA, 15 bp, Homo sapiens
attcaggaggatata

SEQ ID NO: 30423 - DNA, 15 bp, Homo sapiens
tattcaggaggatat

SEQ ID NO: 30424 - DNA, 15 bp, Homo sapiens
ttattcaggaggata

SEQ ID NO: 30425 - DNA, 15 bp, Homo sapiens
tttattcaggaggat

SEQ ID NO: 30426 - DNA, 15 bp, Homo sapiens
ttttattcaggagga

SEQ ID NO: 30427 - DNA, 15 bp, Homo sapiens
attttattcaggagg

SEQ ID NO: 30428 - DNA, 15 bp, Homo sapiens
cattttattcaggag

SEQ ID NO: 30429 - DNA, 15 bp, Homo sapiens
ccattttattcagga

SEQ ID NO: 30430 - DNA, 15 bp, Homo sapiens
cccattttattcagg

SEQ ID NO: 30431 - DNA, 15 bp, Homo sapiens
ccccattttattcag

SEQ ID NO: 30432 - DNA, 15 bp, Homo sapiens
cccccattttattca

SEQ ID NO: 30433 - DNA, 15 bp, Homo sapiens
tcccccattttattc

SEQ ID NO: 30434 - DNA, 15 bp, Homo sapiens
ttcccccattttatt

SEQ ID NO: 30435 - DNA, 15 bp, Homo sapiens
tttcccccattttat

SEQ ID NO: 30436 - DNA, 15 bp, Homo sapiens
ttttcccccatttta

SEQ ID NO: 30437 - DNA, 15 bp, Homo sapiens
attttcccccatttt

SEQ ID NO: 30438 - DNA, 15 bp, Homo sapiens
tattttcccccattt

SEQ ID NO: 30439 - DNA, 15 bp, Homo sapiens
ttattttcccccatt

SEQ ID NO: 30440 - DNA, 15 bp, Homo sapiens
attattttcccccat

SEQ ID NO: 30441 - DNA, 15 bp, Homo sapiens
tattattttccccca

SEQ ID NO: 30442 - DNA, 15 bp, Homo sapiens
gtattattttccccc

SEQ ID NO: 30443 - DNA, 15 bp, Homo sapiens
ggtattattttcccc

SEQ ID NO: 30444 - DNA, 15 bp, Homo sapiens
aggtattattttccc

SEQ ID NO: 30445 - DNA, 15 bp, Homo sapiens
caggtattattttcc

SEQ ID NO: 30446 - DNA, 15 bp, Homo sapiens
ccaggtattattttc

SEQ ID NO: 30447 - DNA, 15 bp, Homo sapiens
gccaggtattatttt

SEQ ID NO: 30448 - DNA, 15 bp, Homo sapiens
agccaggtattattt

SEQ ID NO: 30449 - DNA, 15 bp, Homo sapiens
aagccaggtattatt

SEQ ID NO: 30450 - DNA, 15 bp, Homo sapiens
gaagccaggtattat

SEQ ID NO: 30451 - DNA, 15 bp, Homo sapiens
ggaagccaggtatta

SEQ ID NO: 30452 - DNA, 15 bp, Homo sapiens
aggaagccaggtatt

SEQ ID NO: 30453 - DNA, 15 bp, Homo sapiens
aaggaagccaggtat

SEQ ID NO: 30454 - DNA, 15 bp, Homo sapiens
taaggaagccaggta

SEQ ID NO: 30455 - DNA, 15 bp, Homo sapiens
ttaaggaagccaggt

SEQ ID NO: 30456 - DNA, 15 bp, Homo sapiens
attaaggaagccagg

SEQ ID NO: 30457 - DNA, 15 bp, Homo sapiens
cattaaggaagccag

SEQ ID NO: 30458 - DNA, 15 bp, Homo sapiens
tcattaaggaagcca

SEQ ID NO: 30459 - DNA, 15 bp, Homo sapiens
atcattaaggaagcc

SEQ ID NO: 30460 - DNA, 15 bp, Homo sapiens
aatcattaaggaagc

SEQ ID NO: 30461 - DNA, 15 bp, Homo sapiens
taatcattaaggaag

SEQ ID NO: 30462 - DNA, 15 bp, Homo sapiens
ataatcattaaggaa

SEQ ID NO: 30463 - DNA, 15 bp, Homo sapiens
tataatcattaagga

SEQ ID NO: 30464 - DNA, 15 bp, Homo sapiens
atataatcattaagg

SEQ ID NO: 30465 - DNA, 15 bp, Homo sapiens
aatataatcattaag

SEQ ID NO: 30466 - DNA, 15 bp, Homo sapiens
aaatataatcattaa

SEQ ID NO: 30467 - DNA, 15 bp, Homo sapiens
taaatataatcatta

SEQ ID NO: 30468 - DNA, 15 bp, Homo sapiens
ttaaatataatcatt

SEQ ID NO: 30469 - DNA, 15 bp, Homo sapiens
cttaaatataatcat

SEQ ID NO: 30470 - DNA, 15 bp, Homo sapiens
tcttaaatataatca

SEQ ID NO: 30471 - DNA, 15 bp, Homo sapiens
gtcttaaatataatc

SEQ ID NO: 30472 - DNA, 15 bp, Homo sapiens
agtcttaaatataat

SEQ ID NO: 30473 - DNA, 15 bp, Homo sapiens
aagtcttaaatataa

SEQ ID NO: 30474 - DNA, 15 bp, Homo sapiens
taagtcttaaatata

SEQ ID NO: 30475 - DNA, 15 bp, Homo sapiens
ataagtcttaaatat

SEQ ID NO: 30476 - DNA, 15 bp, Homo sapiens
gataagtcttaaata

SEQ ID NO: 30477 - DNA, 15 bp, Homo sapiens
tgataagtcttaaat

SEQ ID NO: 30478 - DNA, 15 bp, Homo sapiens
ttgataagtcttaaa

SEQ ID NO: 30479 - DNA, 15 bp, Homo sapiens
cttgataagtcttaa

SEQ ID NO: 30480 - DNA, 15 bp, Homo sapiens
tcttgataagtctta

SEQ ID NO: 30481 - DNA, 15 bp, Homo sapiens
ctcttgataagtctt

SEQ ID NO: 30482 - DNA, 15 bp, Homo sapiens
tctcttgataagtct

SEQ ID NO: 30483 - DNA, 15 bp, Homo sapiens
gtctcttgataagtc

SEQ ID NO: 30484 - DNA, 15 bp, Homo sapiens
agtctcttgataagt

SEQ ID NO: 30485 - DNA, 15 bp, Homo sapiens
tagtctcttgataag

SEQ ID NO: 30486 - DNA, 15 bp, Homo sapiens
atagtctcttgataa

SEQ ID NO: 30487 - DNA, 15 bp, Homo sapiens
aatagtctcttgata

SEQ ID NO: 30488 - DNA, 15 bp, Homo sapiens
aaatagtctcttgat

SEQ ID NO: 30489 - DNA, 15 bp, Homo sapiens
aaaatagtctcttga

SEQ ID NO: 30490 - DNA, 15 bp, Homo sapiens
gaaaatagtctcttg

SEQ ID NO: 30491 - DNA, 15 bp, Homo sapiens
agaaaatagtctctt

SEQ ID NO: 30492 - DNA, 15 bp, Homo sapiens
tagaaaatagtctct

SEQ ID NO: 30493 - DNA, 15 bp, Homo sapiens
atagaaaatagtctc

SEQ ID NO: 30494 - DNA, 15 bp, Homo sapiens
aatagaaaatagtct

SEQ ID NO: 30495 - DNA, 15 bp, Homo sapiens
aaatagaaaatagtc

SEQ ID NO: 30496 - DNA, 15 bp, Homo sapiens
taaatagaaaatagt

SEQ ID NO: 30497 - DNA, 15 bp, Homo sapiens
ttaaatagaaaatag

SEQ ID NO: 30498 - DNA, 15 bp, Homo sapiens
gttaaatagaaaata

SEQ ID NO: 30499 - DNA, 15 bp, Homo sapiens
tgttaaatagaaaat

SEQ ID NO: 30500 - DNA, 15 bp, Homo sapiens
ttgttaaatagaaaa

SEQ ID NO: 30501 - DNA, 15 bp, Homo sapiens
attgttaaatagaaa

SEQ ID NO: 30502 - DNA, 15 bp, Homo sapiens
aattgttaaatagaa

SEQ ID NO: 30503 - DNA, 15 bp, Homo sapiens
taattgttaaataga

SEQ ID NO: 30504 - DNA, 15 bp, Homo sapiens
ctaattgttaaatag

SEQ ID NO: 30505 - DNA, 15 bp, Homo sapiens
tctaattgttaaata

SEQ ID NO: 30506 - DNA, 15 bp, Homo sapiens
ttctaattgttaaat

SEQ ID NO: 30507 - DNA, 15 bp, Homo sapiens
tttctaattgttaaa

SEQ ID NO: 30508 - DNA, 15 bp, Homo sapiens
ctttctaattgttaa

SEQ ID NO: 30509 - DNA, 15 bp, Homo sapiens
actttctaattgtta

SEQ ID NO: 30510 - DNA, 15 bp, Homo sapiens
aactttctaattgtt

SEQ ID NO: 30511 - DNA, 15 bp, Homo sapiens
taactttctaattgt

SEQ ID NO: 30512 - DNA, 15 bp, Homo sapiens
ttaactttctaattg

SEQ ID NO: 30513 - DNA, 15 bp, Homo sapiens
cttaactttctaatt

SEQ ID NO: 30514 - DNA, 15 bp, Homo sapiens
gcttaactttctaat

SEQ ID NO: 30515 - DNA, 15 bp, Homo sapiens
tgcttaactttctaa

SEQ ID NO: 30516 - DNA, 15 bp, Homo sapiens
ttgcttaactttcta

SEQ ID NO: 30517 - DNA, 15 bp, Homo sapiens
attgcttaactttct

SEQ ID NO: 30518 - DNA, 15 bp, Homo sapiens
tattgcttaactttc

SEQ ID NO: 30519 - DNA, 15 bp, Homo sapiens
gtattgcttaacttt

SEQ ID NO: 30520 - DNA, 15 bp, Homo sapiens
tgtattgcttaactt

SEQ ID NO: 30521 - DNA, 15 bp, Homo sapiens
atgtattgcttaact

SEQ ID NO: 30522 - DNA, 15 bp, Homo sapiens
aatgtattgcttaac

SEQ ID NO: 30523 - DNA, 15 bp, Homo sapiens
taatgtattgcttaa

SEQ ID NO: 30524 - DNA, 15 bp, Homo sapiens
ataatgtattgctta

SEQ ID NO: 30525 - DNA, 15 bp, Homo sapiens
aataatgtattgctt

SEQ ID NO: 30526 - DNA, 15 bp, Homo sapiens
aaataatgtattgct

SEQ ID NO: 30527 - DNA, 15 bp, Homo sapiens
aaaataatgtattgc

SEQ ID NO: 30528 - DNA, 15 bp, Homo sapiens
aaaaataatgtattg

SEQ ID NO: 30529 - DNA, 15 bp, Homo sapiens
gaaaaataatgtatt

SEQ ID NO: 30530 - DNA, 15 bp, Homo sapiens
agaaaaataatgtat

SEQ ID NO: 30531 - DNA, 15 bp, Homo sapiens
gagaaaaataatgta

SEQ ID NO: 30532 - DNA, 15 bp, Homo sapiens
agagaaaaataatgt

SEQ ID NO: 30533 - DNA, 15 bp, Homo sapiens
cagagaaaaataatg

SEQ ID NO: 30534 - DNA, 15 bp, Homo sapiens
ccagagaaaaataat

SEQ ID NO: 30535 - DNA, 15 bp, Homo sapiens
tccagagaaaaataa

SEQ ID NO: 30536 - DNA, 15 bp, Homo sapiens
ttccagagaaaaata

SEQ ID NO: 30537 - DNA, 15 bp, Homo sapiens
attccagagaaaaat

SEQ ID NO: 30538 - DNA, 15 bp, Homo sapiens
gattccagagaaaaa

SEQ ID NO: 30539 - DNA, 15 bp, Homo sapiens
ggattccagagaaaa

SEQ ID NO: 30540 - DNA, 15 bp, Homo sapiens
tggattccagagaaa

SEQ ID NO: 30541 - DNA, 15 bp, Homo sapiens
ctggattccagagaa

SEQ ID NO: 30542 - DNA, 15 bp, Homo sapiens
actggattccagaga

SEQ ID NO: 30543 - DNA, 15 bp, Homo sapiens
cactggattccagag

SEQ ID NO: 30544 - DNA, 15 bp, Homo sapiens
acactggattccaga

SEQ ID NO: 30545 - DNA, 15 bp, Homo sapiens
aacactggattccag

SEQ ID NO: 30546 - DNA, 15 bp, Homo sapiens
aaacactggattcca

SEQ ID NO: 30547 - DNA, 15 bp, Homo sapiens
gaaacactggattcc

SEQ ID NO: 30548 - DNA, 15 bp, Homo sapiens
agaaacactggattc

SEQ ID NO: 30549 - DNA, 15 bp, Homo sapiens
aagaaacactggatt

SEQ ID NO: 30550 - DNA, 15 bp, Homo sapiens
aaagaaacactggat

SEQ ID NO: 30551 - DNA, 15 bp, Homo sapiens
aaaagaaacactgga

SEQ ID NO: 30552 - DNA, 15 bp, Homo sapiens
taaaagaaacactgg

SEQ ID NO: 30553 - DNA, 15 bp, Homo sapiens
ttaaaagaaacactg

SEQ ID NO: 30554 - DNA, 15 bp, Homo sapiens
tttaaaagaaacact

SEQ ID NO: 30555 - DNA, 15 bp, Homo sapiens
atttaaaagaaacac

SEQ ID NO: 30556 - DNA, 15 bp, Homo sapiens
tatttaaaagaaaca

SEQ ID NO: 30557 - DNA, 15 bp, Homo sapiens
gtatttaaaagaaac

SEQ ID NO: 30558 - DNA, 15 bp, Homo sapiens
ggtatttaaaagaaa

SEQ ID NO: 30559 - DNA, 15 bp, Homo sapiens
aggtatttaaaagaa

SEQ ID NO: 30560 - DNA, 15 bp, Homo sapiens
caggtatttaaaaga

SEQ ID NO: 30561 - DNA, 15 bp, Homo sapiens
acaggtatttaaaag

SEQ ID NO: 30562 - DNA, 15 bp, Homo sapiens
aacaggtatttaaaa

SEQ ID NO: 30563 - DNA, 15 bp, Homo sapiens
taacaggtatttaaa

SEQ ID NO: 30564 - DNA, 15 bp, Homo sapiens
ttaacaggtatttaa

SEQ ID NO: 30565 - DNA, 15 bp, Homo sapiens
cttaacaggtattta

SEQ ID NO: 30566 - DNA, 15 bp, Homo sapiens
acttaacaggtattt

SEQ ID NO: 30567 - DNA, 15 bp, Homo sapiens
aacttaacaggtatt

SEQ ID NO: 30568 - DNA, 15 bp, Homo sapiens
aaacttaacaggtat

SEQ ID NO: 30569 - DNA, 15 bp, Homo sapiens
caaacttaacaggta

SEQ ID NO: 30570 - DNA, 15 bp, Homo sapiens
acaaacttaacaggt

SEQ ID NO: 30571 - DNA, 15 bp, Homo sapiens
tacaaacttaacagg

SEQ ID NO: 30572 - DNA, 15 bp, Homo sapiens
atacaaacttaacag

SEQ ID NO: 30573 - DNA, 15 bp, Homo sapiens
catacaaacttaaca

SEQ ID NO: 30574 - DNA, 15 bp, Homo sapiens
gcatacaaacttaac

SEQ ID NO: 30575 - DNA, 15 bp, Homo sapiens
tgcatacaaacttaa

SEQ ID NO: 30576 - DNA, 15 bp, Homo sapiens
ttgcatacaaactta

SEQ ID NO: 30577 - DNA, 15 bp, Homo sapiens
gttgcatacaaactt

SEQ ID NO: 30578 - DNA, 15 bp, Homo sapiens
tgttgcatacaaact

SEQ ID NO: 30579 - DNA, 15 bp, Homo sapiens
atgttgcatacaaac

SEQ ID NO: 30580 - DNA, 15 bp, Homo sapiens
aatgttgcatacaaa

SEQ ID NO: 30581 - DNA, 15 bp, Homo sapiens
aaatgttgcatacaa

SEQ ID NO: 30582 - DNA, 15 bp, Homo sapiens
gaaatgttgcataca

SEQ ID NO: 30583 - DNA, 15 bp, Homo sapiens
agaaatgttgcatac

SEQ ID NO: 30584 - DNA, 15 bp, Homo sapiens
tagaaatgttgcata

SEQ ID NO: 30585 - DNA, 15 bp, Homo sapiens
ttagaaatgttgcat

SEQ ID NO: 30586 - DNA, 15 bp, Homo sapiens
tttagaaatgttgca

SEQ ID NO: 30587 - DNA, 15 bp, Homo sapiens
ctttagaaatgttgc

SEQ ID NO: 30588 - DNA, 15 bp, Homo sapiens
actttagaaatgttg

SEQ ID NO: 30589 - DNA, 15 bp, Homo sapiens
aactttagaaatgtt

SEQ ID NO: 30590 - DNA, 15 bp, Homo sapiens
taactttagaaatgt

SEQ ID NO: 30591 - DNA, 15 bp, Homo sapiens
gtaactttagaaatg

SEQ ID NO: 30592 - DNA, 15 bp, Homo sapiens
ggtaactttagaaat

SEQ ID NO: 30593 - DNA, 15 bp, Homo sapiens
aggtaactttagaaa

SEQ ID NO: 30594 - DNA, 15 bp, Homo sapiens
taggtaactttagaa

SEQ ID NO: 30595 - DNA, 15 bp, Homo sapiens
gtaggtaactttaga

SEQ ID NO: 30596 - DNA, 15 bp, Homo sapiens
agtaggtaactttag

SEQ ID NO: 30597 - DNA, 15 bp, Homo sapiens
aagtaggtaacttta

SEQ ID NO: 30598 - DNA, 15 bp, Homo sapiens
caagtaggtaacttt

SEQ ID NO: 30599 - DNA, 15 bp, Homo sapiens
acaagtaggtaactt

SEQ ID NO: 30600 - DNA, 15 bp, Homo sapiens
aacaagtaggtaact

SEQ ID NO: 30601 - DNA, 15 bp, Homo sapiens
taacaagtaggtaac

SEQ ID NO: 30602 - DNA, 15 bp, Homo sapiens
ttaacaagtaggtaa

SEQ ID NO: 30603 - DNA, 15 bp, Homo sapiens
attaacaagtaggta

SEQ ID NO: 30604 - DNA, 15 bp, Homo sapiens
aattaacaagtaggt

SEQ ID NO: 30605 - DNA, 15 bp, Homo sapiens
taattaacaagtagg

SEQ ID NO: 30606 - DNA, 15 bp, Homo sapiens
ttaattaacaagtag

SEQ ID NO: 30607 - DNA, 15 bp, Homo sapiens
tttaattaacaagta

SEQ ID NO: 30608 - DNA, 15 bp, Homo sapiens
ttttaattaacaagt

SEQ ID NO: 30609 - DNA, 15 bp, Homo sapiens
tttttaattaacaag

SEQ ID NO: 30610 - DNA, 15 bp, Homo sapiens
atttttaattaacaa

SEQ ID NO: 30611 - DNA, 15 bp, Homo sapiens
aatttttaattaaca

SEQ ID NO: 30612 - DNA, 15 bp, Homo sapiens
gaatttttaattaac

SEQ ID NO: 30613 - DNA, 15 bp, Homo sapiens
tgaatttttaattaa

SEQ ID NO: 30614 - DNA, 15 bp, Homo sapiens
ttgaatttttaatta

SEQ ID NO: 30615 - DNA, 15 bp, Homo sapiens
cttgaatttttaatt

SEQ ID NO: 30616 - DNA, 15 bp, Homo sapiens
tcttgaatttttaat

SEQ ID NO: 30617 - DNA, 15 bp, Homo sapiens
ctcttgaatttttaa

SEQ ID NO: 30618 - DNA, 15 bp, Homo sapiens
actcttgaattttta

SEQ ID NO: 30619 - DNA, 15 bp, Homo sapiens
aactcttgaattttt

SEQ ID NO: 30620 - DNA, 15 bp, Homo sapiens
aaactcttgaatttt

SEQ ID NO: 30621 - DNA, 15 bp, Homo sapiens
aaaactcttgaattt

SEQ ID NO: 30622 - DNA, 15 bp, Homo sapiens
aaaaactcttgaatt

SEQ ID NO: 30623 - DNA, 15 bp, Homo sapiens
aaaaaactcttgaat

SEQ ID NO: 30624 - DNA, 15 bp, Homo sapiens
aaaaaaactcttgaa

SEQ ID NO: 30625 - DNA, 15 bp, Homo sapiens
aaaaaaaactcttga

SEQ ID NO: 30626 - DNA, 15 bp, Homo sapiens
aaaaaaaaactcttg

SEQ ID NO: 30627 - DNA, 15 bp, Homo sapiens
gaaaaaaaaactctt

SEQ ID NO: 30628 - DNA, 15 bp, Homo sapiens
agaaaaaaaaactct

SEQ ID NO: 30629 - DNA, 15 bp, Homo sapiens
aagaaaaaaaaactc

SEQ ID NO: 30630 - DNA, 15 bp, Homo sapiens
taagaaaaaaaaact

SEQ ID NO: 30631 - DNA, 15 bp, Homo sapiens
ataagaaaaaaaaac

SEQ ID NO: 30632 - DNA, 15 bp, Homo sapiens
aataagaaaaaaaaa

SEQ ID NO: 30633 - DNA, 15 bp, Homo sapiens
gaataagaaaaaaaa

SEQ ID NO: 30634 - DNA, 15 bp, Homo sapiens
agaataagaaaaaaa

SEQ ID NO: 30635 - DNA, 15 bp, Homo sapiens
cagaataagaaaaaa

SEQ ID NO: 30636 - DNA, 15 bp, Homo sapiens
tcagaataagaaaaa

SEQ ID NO: 30637 - DNA, 15 bp, Homo sapiens
ctcagaataagaaaa

SEQ ID NO: 30638 - DNA, 15 bp, Homo sapiens
cctcagaataagaaa

SEQ ID NO: 30639 - DNA, 15 bp, Homo sapiens
acctcagaataagaa

SEQ ID NO: 30640 - DNA, 15 bp, Homo sapiens
aacctcagaataaga

SEQ ID NO: 30641 - DNA, 15 bp, Homo sapiens
taacctcagaataag

SEQ ID NO: 30642 - DNA, 15 bp, Homo sapiens
ataacctcagaataa

SEQ ID NO: 30643 - DNA, 15 bp, Homo sapiens
gataacctcagaata

SEQ ID NO: 30644 - DNA, 15 bp, Homo sapiens
agataacctcagaat

SEQ ID NO: 30645 - DNA, 15 bp, Homo sapiens
aagataacctcagaa

SEQ ID NO: 30646 - DNA, 15 bp, Homo sapiens
aaagataacctcaga

SEQ ID NO: 30647 - DNA, 15 bp, Homo sapiens
aaaagataacctcag

SEQ ID NO: 30648 - DNA, 15 bp, Homo sapiens
aaaaagataacctca

SEQ ID NO: 30649 - DNA, 15 bp, Homo sapiens
taaaaagataacctc

SEQ ID NO: 30650 - DNA, 15 bp, Homo sapiens
gtaaaaagataacct

SEQ ID NO: 30651 - DNA, 15 bp, Homo sapiens
ggtaaaaagataacc

SEQ ID NO: 30652 - DNA, 15 bp, Homo sapiens
tggtaaaaagataac

SEQ ID NO: 30653 - DNA, 15 bp, Homo sapiens
gtggtaaaaagataa

SEQ ID NO: 30654 - DNA, 15 bp, Homo sapiens
tgtggtaaaaagata

SEQ ID NO: 30655 - DNA, 15 bp, Homo sapiens
ctgtggtaaaaagat

SEQ ID NO: 30656 - DNA, 15 bp, Homo sapiens
actgtggtaaaaaga

SEQ ID NO: 30657 - DNA, 15 bp, Homo sapiens
aactgtggtaaaaag

SEQ ID NO: 30658 - DNA, 15 bp, Homo sapiens
caactgtggtaaaaa

SEQ ID NO: 30659 - DNA, 15 bp, Homo sapiens
gcaactgtggtaaaa

SEQ ID NO: 30660 - DNA, 15 bp, Homo sapiens
tgcaactgtggtaaa

SEQ ID NO: 30661 - DNA, 15 bp, Homo sapiens
gtgcaactgtggtaa

SEQ ID NO: 30662 - DNA, 15 bp, Homo sapiens
tgtgcaactgtggta

SEQ ID NO: 30663 - DNA, 15 bp, Homo sapiens
ttgtgcaactgtggt

SEQ ID NO: 30664 - DNA, 15 bp, Homo sapiens
attgtgcaactgtgg

SEQ ID NO: 30665 - DNA, 15 bp, Homo sapiens
tattgtgcaactgtg

SEQ ID NO: 30666 - DNA, 15 bp, Homo sapiens
atattgtgcaactgt

SEQ ID NO: 30667 - DNA, 15 bp, Homo sapiens
gatattgtgcaactg

SEQ ID NO: 30668 - DNA, 15 bp, Homo sapiens
ggatattgtgcaact

SEQ ID NO: 30669 - DNA, 15 bp, Homo sapiens
aggatattgtgcaac

SEQ ID NO: 30670 - DNA, 15 bp, Homo sapiens
aaggatattgtgcaa

SEQ ID NO: 30671 - DNA, 15 bp, Homo sapiens
aaaggatattgtgca

SEQ ID NO: 30672 - DNA, 15 bp, Homo sapiens
aaaaggatattgtgc

SEQ ID NO: 30673 - DNA, 15 bp, Homo sapiens
caaaaggatattgtg

SEQ ID NO: 30674 - DNA, 15 bp, Homo sapiens
tcaaaaggatattgt

SEQ ID NO: 30675 - DNA, 15 bp, Homo sapiens
ttcaaaaggatattg

SEQ ID NO: 30676 - DNA, 15 bp, Homo sapiens
cttcaaaaggatatt

SEQ ID NO: 30677 - DNA, 15 bp, Homo sapiens
tcttcaaaaggatat

SEQ ID NO: 30678 - DNA, 15 bp, Homo sapiens
gtcttcaaaaggata

SEQ ID NO: 30679 - DNA, 15 bp, Homo sapiens
ggtcttcaaaaggat

SEQ ID NO: 30680 - DNA, 15 bp, Homo sapiens
tggtcttcaaaagga

SEQ ID NO: 30681 - DNA, 15 bp, Homo sapiens
atggtcttcaaaagg

SEQ ID NO: 30682 - DNA, 15 bp, Homo sapiens
tatggtcttcaaaag

SEQ ID NO: 30683 - DNA, 15 bp, Homo sapiens
ttatggtcttcaaaa

SEQ ID NO: 30684 - DNA, 15 bp, Homo sapiens
gttatggtcttcaaa

SEQ ID NO: 30685 - DNA, 15 bp, Homo sapiens
ggttatggtcttcaa

SEQ ID NO: 30686 - DNA, 15 bp, Homo sapiens
gggttatggtcttca

SEQ ID NO: 30687 - DNA, 15 bp, Homo sapiens
tgggttatggtcttc

SEQ ID NO: 30688 - DNA, 15 bp, Homo sapiens
gtgggttatggtctt

SEQ ID NO: 30689 - DNA, 15 bp, Homo sapiens
ggtgggttatggtct

SEQ ID NO: 30690 - DNA, 15 bp, Homo sapiens
tggtgggttatggtc

SEQ ID NO: 30691 - DNA, 15 bp, Homo sapiens
gtggtgggttatggt

SEQ ID NO: 30692 - DNA, 15 bp, Homo sapiens
tgtggtgggttatgg

SEQ ID NO: 30693 - DNA, 15 bp, Homo sapiens
ctgtggtgggttatg

SEQ ID NO: 30694 - DNA, 15 bp, Homo sapiens
gctgtggtgggttat

SEQ ID NO: 30695 - DNA, 15 bp, Homo sapiens
agctgtggtgggtta

SEQ ID NO: 30696 - DNA, 15 bp, Homo sapiens
tagctgtggtgggtt

SEQ ID NO: 30697 - DNA, 15 bp, Homo sapiens
ctagctgtggtgggt

SEQ ID NO: 30698 - DNA, 15 bp, Homo sapiens
tctagctgtggtggg

SEQ ID NO: 30699 - DNA, 15 bp, Homo sapiens
ttctagctgtggtgg

SEQ ID NO: 30700 - DNA, 15 bp, Homo sapiens
gttctagctgtggtg

SEQ ID NO: 30701 - DNA, 15 bp, Homo sapiens
agttctagctgtggt

SEQ ID NO: 30702 - DNA, 15 bp, Homo sapiens
aagttctagctgtgg

SEQ ID NO: 30703 - DNA, 15 bp, Homo sapiens
taagttctagctgtg

SEQ ID NO: 30704 - DNA, 15 bp, Homo sapiens
ataagttctagctgt

SEQ ID NO: 30705 - DNA, 15 bp, Homo sapiens
gataagttctagctg

SEQ ID NO: 30706 - DNA, 15 bp, Homo sapiens
tgataagttctagct

SEQ ID NO: 30707 - DNA, 15 bp, Homo sapiens
ttgataagttctagc

SEQ ID NO: 30708 - DNA, 15 bp, Homo sapiens
tttgataagttctag

SEQ ID NO: 30709 - DNA, 15 bp, Homo sapiens
gtttgataagttcta

SEQ ID NO: 30710 - DNA, 15 bp, Homo sapiens
ggtttgataagttct

SEQ ID NO: 30711 - DNA, 15 bp, Homo sapiens
gggtttgataagttc

SEQ ID NO: 30712 - DNA, 15 bp, Homo sapiens
agggtttgataagtt

SEQ ID NO: 30713 - DNA, 15 bp, Homo sapiens
aagggtttgataagt

SEQ ID NO: 30714 - DNA, 15 bp, Homo sapiens
aaagggtttgataag

SEQ ID NO: 30715 - DNA, 15 bp, Homo sapiens
aaaagggtttgataa

SEQ ID NO: 30716 - DNA, 15 bp, Homo sapiens
caaaagggtttgata

SEQ ID NO: 30717 - DNA, 15 bp, Homo sapiens
acaaaagggtttgat

SEQ ID NO: 30718 - DNA, 15 bp, Homo sapiens
cacaaaagggtttga

SEQ ID NO: 30719 - DNA, 15 bp, Homo sapiens
tcacaaaagggtttg

SEQ ID NO: 30720 - DNA, 15 bp, Homo sapiens
ttcacaaaagggttt

SEQ ID NO: 30721 - DNA, 15 bp, Homo sapiens
cttcacaaaagggtt

SEQ ID NO: 30722 - DNA, 15 bp, Homo sapiens
tcttcacaaaagggt

SEQ ID NO: 30723 - DNA, 15 bp, Homo sapiens
atcttcacaaaaggg

SEQ ID NO: 30724 - DNA, 15 bp, Homo sapiens
gatcttcacaaaagg

SEQ ID NO: 30725 - DNA, 15 bp, Homo sapiens
agatcttcacaaaag

SEQ ID NO: 30726 - DNA, 15 bp, Homo sapiens
aagatcttcacaaaa

SEQ ID NO: 30727 - DNA, 15 bp, Homo sapiens
caagatcttcacaaa

SEQ ID NO: 30728 - DNA, 15 bp, Homo sapiens
tcaagatcttcacaa

SEQ ID NO: 30729 - DNA, 15 bp, Homo sapiens
gtcaagatcttcaca

SEQ ID NO: 30730 - DNA, 15 bp, Homo sapiens
ggtcaagatcttcac

SEQ ID NO: 30731 - DNA, 15 bp, Homo sapiens
tggtcaagatcttca

SEQ ID NO: 30732 - DNA, 15 bp, Homo sapiens
ttggtcaagatcttc

SEQ ID NO: 30733 - DNA, 15 bp, Homo sapiens
attggtcaagatctt

SEQ ID NO: 30734 - DNA, 15 bp, Homo sapiens
cattggtcaagatct

SEQ ID NO: 30735 - DNA, 15 bp, Homo sapiens
ccattggtcaagatc

SEQ ID NO: 30736 - DNA, 15 bp, Homo sapiens
gccattggtcaagat

SEQ ID NO: 30737 - DNA, 15 bp, Homo sapiens
agccattggtcaaga

SEQ ID NO: 30738 - DNA, 15 bp, Homo sapiens
tagccattggtcaag

SEQ ID NO: 30739 - DNA, 15 bp, Homo sapiens
ttagccattggtcaa

SEQ ID NO: 30740 - DNA, 15 bp, Homo sapiens
cttagccattggtca

SEQ ID NO: 30741 - DNA, 15 bp, Homo sapiens
acttagccattggtc

SEQ ID NO: 30742 - DNA, 15 bp, Homo sapiens
cacttagccattggt

SEQ ID NO: 30743 - DNA, 15 bp, Homo sapiens
tcacttagccattgg

SEQ ID NO: 30744 - DNA, 15 bp, Homo sapiens
ttcacttagccattg

SEQ ID NO: 30745 - DNA, 15 bp, Homo sapiens
cttcacttagccatt

SEQ ID NO: 30746 - DNA, 15 bp, Homo sapiens
tcttcacttagccat

SEQ ID NO: 30747 - DNA, 15 bp, Homo sapiens
atcttcacttagcca

SEQ ID NO: 30748 - DNA, 15 bp, Homo sapiens
catcttcacttagcc

SEQ ID NO: 30749 - DNA, 15 bp, Homo sapiens
tcatcttcacttagc

SEQ ID NO: 30750 - DNA, 15 bp, Homo sapiens
gtcatcttcacttag

SEQ ID NO: 30751 - DNA, 15 bp, Homo sapiens
tgtcatcttcactta

SEQ ID NO: 30752 - DNA, 15 bp, Homo sapiens
ttgtcatcttcactt

SEQ ID NO: 30753 - DNA, 15 bp, Homo sapiens
attgtcatcttcact

SEQ ID NO: 30754 - DNA, 15 bp, Homo sapiens
gattgtcatcttcac

SEQ ID NO: 30755 - DNA, 15 bp, Homo sapiens
tgattgtcatcttca

SEQ ID NO: 30756 - DNA, 15 bp, Homo sapiens
atgattgtcatcttc

SEQ ID NO: 30757 - DNA, 15 bp, Homo sapiens
catgattgtcatctt

SEQ ID NO: 30758 - DNA, 15 bp, Homo sapiens
acatgattgtcatct

SEQ ID NO: 30759 - DNA, 15 bp, Homo sapiens
aacatgattgtcatc

SEQ ID NO: 30760 - DNA, 15 bp, Homo sapiens
caacatgattgtcat

SEQ ID NO: 30761 - DNA, 15 bp, Homo sapiens
gcaacatgattgtca

SEQ ID NO: 30762 - DNA, 15 bp, Homo sapiens
tgcaacatgattgtc

SEQ ID NO: 30763 - DNA, 15 bp, Homo sapiens
ctgcaacatgattgt

SEQ ID NO: 30764 - DNA, 15 bp, Homo sapiens
gctgcaacatgattg

SEQ ID NO: 30765 - DNA, 15 bp, Homo sapiens
tgctgcaacatgatt

SEQ ID NO: 30766 - DNA, 15 bp, Homo sapiens
ttgctgcaacatgat

SEQ ID NO: 30767 - DNA, 15 bp, Homo sapiens
attgctgcaacatga

SEQ ID NO: 30768 - DNA, 15 bp, Homo sapiens
aattgctgcaacatg

SEQ ID NO: 30769 - DNA, 15 bp, Homo sapiens
gaattgctgcaacat

SEQ ID NO: 30770 - DNA, 15 bp, Homo sapiens
tgaattgctgcaaca

SEQ ID NO: 30771 - DNA, 15 bp, Homo sapiens
gtgaattgctgcaac

SEQ ID NO: 30772 - DNA, 15 bp, Homo sapiens
agtgaattgctgcaa

SEQ ID NO: 30773 - DNA, 15 bp, Homo sapiens
cagtgaattgctgca

SEQ ID NO: 30774 - DNA, 15 bp, Homo sapiens
acagtgaattgctgc

SEQ ID NO: 30775 - DNA, 15 bp, Homo sapiens
tacagtgaattgctg

SEQ ID NO: 30776 - DNA, 15 bp, Homo sapiens
ttacagtgaattgct

SEQ ID NO: 30777 - DNA, 15 bp, Homo sapiens
tttacagtgaattgc

SEQ ID NO: 30778 - DNA, 15 bp, Homo sapiens
ctttacagtgaattg

SEQ ID NO: 30779 - DNA, 15 bp, Homo sapiens
gctttacagtgaatt

SEQ ID NO: 30780 - DNA, 15 bp, Homo sapiens
agctttacagtgaat

SEQ ID NO: 30781 - DNA, 15 bp, Homo sapiens
cagctttacagtgaa

SEQ ID NO: 30782 - DNA, 15 bp, Homo sapiens
ccagctttacagtga

SEQ ID NO: 30783 - DNA, 15 bp, Homo sapiens
tccagctttacagtg

SEQ ID NO: 30784 - DNA, 15 bp, Homo sapiens
ttccagctttacagt

SEQ ID NO: 30785 - DNA, 15 bp, Homo sapiens
tttccagctttacag

SEQ ID NO: 30786 - DNA, 15 bp, Homo sapiens
ctttccagctttaca

SEQ ID NO: 30787 - DNA, 15 bp, Homo sapiens
cctttccagctttac

SEQ ID NO: 30788 - DNA, 15 bp, Homo sapiens
ccctttccagcttta

SEQ ID NO: 30789 - DNA, 15 bp, Homo sapiens
tccctttccagcttt

SEQ ID NO: 30790 - DNA, 15 bp, Homo sapiens
gtccctttccagctt

SEQ ID NO: 30791 - DNA, 15 bp, Homo sapiens
cgtccctttccagct

SEQ ID NO: 30792 - DNA, 15 bp, Homo sapiens
tcgtccctttccagc

SEQ ID NO: 30793 - DNA, 15 bp, Homo sapiens
ttcgtccctttccag

SEQ ID NO: 30794 - DNA, 15 bp, Homo sapiens
gttcgtccctttcca

SEQ ID NO: 30795 - DNA, 15 bp, Homo sapiens
agttcgtccctttcc

SEQ ID NO: 30796 - DNA, 15 bp, Homo sapiens
cagttcgtccctttc

SEQ ID NO: 30797 - DNA, 15 bp, Homo sapiens
ccagttcgtcccttt

SEQ ID NO: 30798 - DNA, 15 bp, Homo sapiens
accagttcgtccctt

SEQ ID NO: 30799 - DNA, 15 bp, Homo sapiens
caccagttcgtccct

SEQ ID NO: 30800 - DNA, 15 bp, Homo sapiens
acaccagttcgtccc

SEQ ID NO: 30801 - DNA, 15 bp, Homo sapiens
tacaccagttcgtcc

SEQ ID NO: 30802 - DNA, 15 bp, Homo sapiens
ttacaccagttcgtc

SEQ ID NO: 30803 - DNA, 15 bp, Homo sapiens
attacaccagttcgt

SEQ ID NO: 30804 - DNA, 15 bp, Homo sapiens
cattacaccagttcg

SEQ ID NO: 30805 - DNA, 15 bp, Homo sapiens
tcattacaccagttc

SEQ ID NO: 30806 - DNA, 15 bp, Homo sapiens
atcattacaccagtt

SEQ ID NO: 30807 - DNA, 15 bp, Homo sapiens
tatcattacaccagt

SEQ ID NO: 30808 - DNA, 15 bp, Homo sapiens
atatcattacaccag

SEQ ID NO: 30809 - DNA, 15 bp, Homo sapiens
catatcattacacca

SEQ ID NO: 30810 - DNA, 15 bp, Homo sapiens
acatatcattacacc

SEQ ID NO: 30811 - DNA, 15 bp, Homo sapiens
cacatatcattacac

SEQ ID NO: 30812 - DNA, 15 bp, Homo sapiens
gcacatatcattaca

SEQ ID NO: 30813 - DNA, 15 bp, Homo sapiens
tgcacatatcattac

SEQ ID NO: 30814 - DNA, 15 bp, Homo sapiens
atgcacatatcatta

SEQ ID NO: 30815 - DNA, 15 bp, Homo sapiens
tatgcacatatcatt

SEQ ID NO: 30816 - DNA, 15 bp, Homo sapiens
atatgcacatatcat

SEQ ID NO: 30817 - DNA, 15 bp, Homo sapiens
aatatgcacatatca

SEQ ID NO: 30818 - DNA, 15 bp, Homo sapiens
aaatatgcacatatc

SEQ ID NO: 30819 - DNA, 15 bp, Homo sapiens
taaatatgcacatat

SEQ ID NO: 30820 - DNA, 15 bp, Homo sapiens
ataaatatgcacata

SEQ ID NO: 30821 - DNA, 15 bp, Homo sapiens
aataaatatgcacat

SEQ ID NO: 30822 - DNA, 15 bp, Homo sapiens
taataaatatgcaca

SEQ ID NO: 30823 - DNA, 15 bp, Homo sapiens
gtaataaatatgcac

SEQ ID NO: 30824 - DNA, 15 bp, Homo sapiens
tgtaataaatatgca

SEQ ID NO: 30825 - DNA, 15 bp, Homo sapiens
atgtaataaatatgc

SEQ ID NO: 30826 - DNA, 15 bp, Homo sapiens
gatgtaataaatatg

SEQ ID NO: 30827 - DNA, 15 bp, Homo sapiens
cgatgtaataaatat

SEQ ID NO: 30828 - DNA, 15 bp, Homo sapiens
ccgatgtaataaata

SEQ ID NO: 30829 - DNA, 15 bp, Homo sapiens
cccgatgtaataaat

SEQ ID NO: 30830 - DNA, 15 bp, Homo sapiens
ccccgatgtaataaa

SEQ ID NO: 30831 - DNA, 15 bp, Homo sapiens
gccccgatgtaataa

SEQ ID NO: 30832 - DNA, 15 bp, Homo sapiens
tgccccgatgtaata

SEQ ID NO: 30833 - DNA, 15 bp, Homo sapiens
ttgccccgatgtaat

SEQ ID NO: 30834 - DNA, 15 bp, Homo sapiens
tttgccccgatgtaa

SEQ ID NO: 30835 - DNA, 15 bp, Homo sapiens
atttgccccgatgta

SEQ ID NO: 30836 - DNA, 15 bp, Homo sapiens
aatttgccccgatgt

SEQ ID NO: 30837 - DNA, 15 bp, Homo sapiens
aaatttgccccgatg

SEQ ID NO: 30838 - DNA, 15 bp, Homo sapiens
aaaatttgccccgat

SEQ ID NO: 30839 - DNA, 15 bp, Homo sapiens
aaaaatttgccccga

SEQ ID NO: 30840 - DNA, 15 bp, Homo sapiens
taaaaatttgccccg

SEQ ID NO: 30841 - DNA, 15 bp, Homo sapiens
ttaaaaatttgcccc

SEQ ID NO: 30842 - DNA, 15 bp, Homo sapiens
tttaaaaatttgccc

SEQ ID NO: 30843 - DNA, 15 bp, Homo sapiens
ctttaaaaatttgcc

SEQ ID NO: 30844 - DNA, 15 bp, Homo sapiens
cctttaaaaatttgc

SEQ ID NO: 30845 - DNA, 15 bp, Homo sapiens
gcctttaaaaatttg

SEQ ID NO: 30846 - DNA, 15 bp, Homo sapiens
tgcctttaaaaattt

SEQ ID NO: 30847 - DNA, 15 bp, Homo sapiens
gtgcctttaaaaatt

SEQ ID NO: 30848 - DNA, 15 bp, Homo sapiens
tgtgcctttaaaaat

SEQ ID NO: 30849 - DNA, 15 bp, Homo sapiens
ttgtgcctttaaaaa

SEQ ID NO: 30850 - DNA, 15 bp, Homo sapiens
cttgtgcctttaaaa

SEQ ID NO: 30851 - DNA, 15 bp, Homo sapiens
tcttgtgcctttaaa

SEQ ID NO: 30852 - DNA, 15 bp, Homo sapiens
ctcttgtgcctttaa

SEQ ID NO: 30853 - DNA, 15 bp, Homo sapiens
cctcttgtgccttta

SEQ ID NO: 30854 - DNA, 15 bp, Homo sapiens
gcctcttgtgccttt

SEQ ID NO: 30855 - DNA, 15 bp, Homo sapiens
ggcctcttgtgcctt

SEQ ID NO: 30856 - DNA, 15 bp, Homo sapiens
gggcctcttgtgcct

SEQ ID NO: 30857 - DNA, 15 bp, Homo sapiens
agggcctcttgtgcc

SEQ ID NO: 30858 - DNA, 15 bp, Homo sapiens
tagggcctcttgtgc

SEQ ID NO: 30859 - DNA, 15 bp, Homo sapiens
ctagggcctcttgtg

SEQ ID NO: 30860 - DNA, 15 bp, Homo sapiens
tctagggcctcttgt

SEQ ID NO: 30861 - DNA, 15 bp, Homo sapiens
atctagggcctcttg

SEQ ID NO: 30862 - DNA, 15 bp, Homo sapiens
aatctagggcctctt

SEQ ID NO: 30863 - DNA, 15 bp, Homo sapiens
aaatctagggcctct

SEQ ID NO: 30864 - DNA, 15 bp, Homo sapiens
gaaatctagggcctc

SEQ ID NO: 30865 - DNA, 15 bp, Homo sapiens
agaaatctagggcct

SEQ ID NO: 30866 - DNA, 15 bp, Homo sapiens
tagaaatctagggcc

SEQ ID NO: 30867 - DNA, 15 bp, Homo sapiens
atagaaatctagggc

SEQ ID NO: 30868 - DNA, 15 bp, Homo sapiens
catagaaatctaggg

SEQ ID NO: 30869 - DNA, 15 bp, Homo sapiens
ccatagaaatctagg

SEQ ID NO: 30870 - DNA, 15 bp, Homo sapiens
cccatagaaatctag

SEQ ID NO: 30871 - DNA, 15 bp, Homo sapiens
ccccatagaaatcta

SEQ ID NO: 30872 - DNA, 15 bp, Homo sapiens
tccccatagaaatct

SEQ ID NO: 30873 - DNA, 15 bp, Homo sapiens
ttccccatagaaatc

SEQ ID NO: 30874 - DNA, 15 bp, Homo sapiens
cttccccatagaaat

SEQ ID NO: 30875 - DNA, 15 bp, Homo sapiens
acttccccatagaaa

SEQ ID NO: 30876 - DNA, 15 bp, Homo sapiens
tacttccccatagaa

SEQ ID NO: 30877 - DNA, 15 bp, Homo sapiens
ttacttccccataga

SEQ ID NO: 30878 - DNA, 15 bp, Homo sapiens
cttacttccccatag

SEQ ID NO: 30879 - DNA, 15 bp, Homo sapiens
ccttacttccccata

SEQ ID NO: 30880 - DNA, 15 bp, Homo sapiens
tccttacttccccat

SEQ ID NO: 30881 - DNA, 15 bp, Homo sapiens
gtccttacttcccca

SEQ ID NO: 30882 - DNA, 15 bp, Homo sapiens
ggtccttacttcccc

SEQ ID NO: 30883 - DNA, 15 bp, Homo sapiens
tggtccttacttccc

SEQ ID NO: 30884 - DNA, 15 bp, Homo sapiens
ctggtccttacttcc

SEQ ID NO: 30885 - DNA, 15 bp, Homo sapiens
tctggtccttacttc

SEQ ID NO: 30886 - DNA, 15 bp, Homo sapiens
ctctggtccttactt

SEQ ID NO: 30887 - DNA, 15 bp, Homo sapiens
tctctggtccttact

SEQ ID NO: 30888 - DNA, 15 bp, Homo sapiens
gtctctggtccttac

SEQ ID NO: 30889 - DNA, 15 bp, Homo sapiens
tgtctctggtcctta

SEQ ID NO: 30890 - DNA, 15 bp, Homo sapiens
ttgtctctggtcctt

SEQ ID NO: 30891 - DNA, 15 bp, Homo sapiens
tttgtctctggtcct

SEQ ID NO: 30892 - DNA, 15 bp, Homo sapiens
ttttgtctctggtcc

SEQ ID NO: 30893 - DNA, 15 bp, Homo sapiens
tttttgtctctggtc

SEQ ID NO: 30894 - DNA, 15 bp, Homo sapiens
ctttttgtctctggt

SEQ ID NO: 30895 - DNA, 15 bp, Homo sapiens
cctttttgtctctgg

SEQ ID NO: 30896 - DNA, 15 bp, Homo sapiens
acctttttgtctctg

SEQ ID NO: 30897 - DNA, 15 bp, Homo sapiens
tacctttttgtctct

SEQ ID NO: 30898 - DNA, 15 bp, Homo sapiens
ttacctttttgtctc

SEQ ID NO: 30899 - DNA, 15 bp, Homo sapiens
cttacctttttgtct

SEQ ID NO: 30900 - DNA, 15 bp, Homo sapiens
acttacctttttgtc

SEQ ID NO: 30901 - DNA, 15 bp, Homo sapiens
aacttacctttttgt

SEQ ID NO: 30902 - DNA, 15 bp, Homo sapiens
taacttacctttttg

SEQ ID NO: 30903 - DNA, 15 bp, Homo sapiens
ataacttaccttttt

SEQ ID NO: 30904 - DNA, 15 bp, Homo sapiens
aataacttacctttt

SEQ ID NO: 30905 - DNA, 15 bp, Homo sapiens
aaataacttaccttt

SEQ ID NO: 30906 - DNA, 15 bp, Homo sapiens
aaaataacttacctt

SEQ ID NO: 30907 - DNA, 15 bp, Homo sapiens
aaaaataacttacct

SEQ ID NO: 30908 - DNA, 15 bp, Homo sapiens
aaaaaataacttacc

SEQ ID NO: 30909 - DNA, 15 bp, Homo sapiens
caaaaaataacttac

SEQ ID NO: 30910 - DNA, 15 bp, Homo sapiens
tcaaaaaataactta

SEQ ID NO: 30911 - DNA, 15 bp, Homo sapiens
atcaaaaaataactt

SEQ ID NO: 30912 - DNA, 15 bp, Homo sapiens
catcaaaaaataact

SEQ ID NO: 30913 - DNA, 15 bp, Homo sapiens
acatcaaaaaataac

SEQ ID NO: 30914 - DNA, 15 bp, Homo sapiens
aacatcaaaaaataa

SEQ ID NO: 30915 - DNA, 15 bp, Homo sapiens
aaacatcaaaaaata

SEQ ID NO: 30916 - DNA, 15 bp, Homo sapiens
aaaacatcaaaaaat

SEQ ID NO: 30917 - DNA, 15 bp, Homo sapiens
aaaaacatcaaaaaa

SEQ ID NO: 30918 - DNA, 15 bp, Homo sapiens
gaaaaacatcaaaaa

SEQ ID NO: 30919 - DNA, 15 bp, Homo sapiens
ggaaaaacatcaaaa

SEQ ID NO: 30920 - DNA, 15 bp, Homo sapiens
aggaaaaacatcaaa

SEQ ID NO: 30921 - DNA, 15 bp, Homo sapiens
aaggaaaaacatcaa

SEQ ID NO: 30922 - DNA, 15 bp, Homo sapiens
aaaggaaaaacatca

SEQ ID NO: 30923 - DNA, 15 bp, Homo sapiens
gaaaggaaaaacatc

SEQ ID NO: 30924 - DNA, 15 bp, Homo sapiens
ggaaaggaaaaacat

SEQ ID NO: 30925 - DNA, 15 bp, Homo sapiens
aggaaaggaaaaaca

SEQ ID NO: 30926 - DNA, 15 bp, Homo sapiens
gaggaaaggaaaaac

SEQ ID NO: 30927 - DNA, 15 bp, Homo sapiens
agaggaaaggaaaaa

SEQ ID NO: 30928 - DNA, 15 bp, Homo sapiens
aagaggaaaggaaaa

SEQ ID NO: 30929 - DNA, 15 bp, Homo sapiens
gaagaggaaaggaaa

SEQ ID NO: 30930 - DNA, 15 bp, Homo sapiens
ggaagaggaaaggaa

SEQ ID NO: 30931 - DNA, 15 bp, Homo sapiens
aggaagaggaaagga

SEQ ID NO: 30932 - DNA, 15 bp, Homo sapiens
caggaagaggaaagg

SEQ ID NO: 30933 - DNA, 15 bp, Homo sapiens
ccaggaagaggaaag

SEQ ID NO: 30934 - DNA, 15 bp, Homo sapiens
tccaggaagaggaaa

SEQ ID NO: 30935 - DNA, 15 bp, Homo sapiens
atccaggaagaggaa

SEQ ID NO: 30936 - DNA, 15 bp, Homo sapiens
gatccaggaagagga

SEQ ID NO: 30937 - DNA, 15 bp, Homo sapiens
agatccaggaagagg

SEQ ID NO: 30938 - DNA, 15 bp, Homo sapiens
cagatccaggaagag

SEQ ID NO: 30939 - DNA, 15 bp, Homo sapiens
tcagatccaggaaga

SEQ ID NO: 30940 - DNA, 15 bp, Homo sapiens
ctcagatccaggaag

SEQ ID NO: 30941 - DNA, 15 bp, Homo sapiens
tctcagatccaggaa

SEQ ID NO: 30942 - DNA, 15 bp, Homo sapiens
ttctcagatccagga

SEQ ID NO: 30943 - DNA, 15 bp, Homo sapiens
attctcagatccagg

SEQ ID NO: 30944 - DNA, 15 bp, Homo sapiens
aattctcagatccag

SEQ ID NO: 30945 - DNA, 15 bp, Homo sapiens
aaattctcagatcca

SEQ ID NO: 30946 - DNA, 15 bp, Homo sapiens
taaattctcagatcc

SEQ ID NO: 30947 - DNA, 15 bp, Homo sapiens
ataaattctcagatc

SEQ ID NO: 30948 - DNA, 15 bp, Homo sapiens
aataaattctcagat

SEQ ID NO: 30949 - DNA, 15 bp, Homo sapiens
caataaattctcaga

SEQ ID NO: 30950 - DNA, 15 bp, Homo sapiens
ccaataaattctcag

SEQ ID NO: 30951 - DNA, 15 bp, Homo sapiens
tccaataaattctca

SEQ ID NO: 30952 - DNA, 15 bp, Homo sapiens
ttccaataaattctc

SEQ ID NO: 30953 - DNA, 15 bp, Homo sapiens
tgttttccaataaat

SEQ ID NO: 30954 - DNA, 15 bp, Homo sapiens
ctgttttccaataaa

SEQ ID NO: 30955 - DNA, 15 bp, Homo sapiens
tctgttttccaataa

SEQ ID NO: 30956 - DNA, 15 bp, Homo sapiens
atctgttttccaata

SEQ ID NO: 30957 - DNA, 15 bp, Homo sapiens
aatctgttttccaat

SEQ ID NO: 30958 - DNA, 15 bp, Homo sapiens
aaatctgttttccaa

SEQ ID NO: 30959 - DNA, 15 bp, Homo sapiens
aaaatctgttttcca

SEQ ID NO: 30960 - DNA, 15 bp, Homo sapiens
caaaatctgttttcc

SEQ ID NO: 30961 - DNA, 15 bp, Homo sapiens
ccaaaatctgttttc

SEQ ID NO: 30962 - DNA, 15 bp, Homo sapiens
cccaaaatctgtttt

SEQ ID NO: 30963 - DNA, 15 bp, Homo sapiens
acccaaaatctgttt

SEQ ID NO: 30964 - DNA, 15 bp, Homo sapiens
aacccaaaatctgtt

SEQ ID NO: 30965 - DNA, 15 bp, Homo sapiens
aaacccaaaatctgt

SEQ ID NO: 30966 - DNA, 15 bp, Homo sapiens
gaaacccaaaatctg

SEQ ID NO: 30967 - DNA, 15 bp, Homo sapiens
agaaacccaaaatct

SEQ ID NO: 30968 - DNA, 15 bp, Homo sapiens
aagaaacccaaaatc

SEQ ID NO: 30969 - DNA, 15 bp, Homo sapiens
aaagaaacccaaaat

SEQ ID NO: 30970 - DNA, 15 bp, Homo sapiens
aaaagaaacccaaaa

SEQ ID NO: 30971 - DNA, 15 bp, Homo sapiens
aaaaagaaacccaaa

SEQ ID NO: 30972 - DNA, 15 bp, Homo sapiens
aaaaaagaaacccaa

SEQ ID NO: 30973 - DNA, 15 bp, Homo sapiens
aaaaaaagaaaccca

SEQ ID NO: 30974 - DNA, 15 bp, Homo sapiens
gaaaaaaagaaaccc

SEQ ID NO: 30975 - DNA, 15 bp, Homo sapiens
ggaaaaaaagaaacc

SEQ ID NO: 30976 - DNA, 15 bp, Homo sapiens
aggaaaaaaagaaac

SEQ ID NO: 30977 - DNA, 15 bp, Homo sapiens
aaggaaaaaaagaaa

SEQ ID NO: 30978 - DNA, 15 bp, Homo sapiens
gaaggaaaaaaagaa

SEQ ID NO: 30979 - DNA, 15 bp, Homo sapiens
tgaaggaaaaaaaga

SEQ ID NO: 30980 - DNA, 15 bp, Homo sapiens
ctgaaggaaaaaaag

SEQ ID NO: 30981 - DNA, 15 bp, Homo sapiens
actgaaggaaaaaaa

SEQ ID NO: 30982 - DNA, 15 bp, Homo sapiens
aactgaaggaaaaaa

SEQ ID NO: 30983 - DNA, 15 bp, Homo sapiens
aaactgaaggaaaaa

SEQ ID NO: 30984 - DNA, 15 bp, Homo sapiens
taaaactgaaggaaa

SEQ ID NO: 30985 - DNA, 15 bp, Homo sapiens
ataaaactgaaggaa

SEQ ID NO: 30986 - DNA, 15 bp, Homo sapiens
aataaaactgaagga

SEQ ID NO: 30987 - DNA, 15 bp, Homo sapiens
caataaaactgaagg

SEQ ID NO: 30988 - DNA, 15 bp, Homo sapiens
tcaataaaactgaag

SEQ ID NO: 30989 - DNA, 15 bp, Homo sapiens
ctcaataaaactgaa

SEQ ID NO: 30990 - DNA, 15 bp, Homo sapiens
cctcaataaaactga

SEQ ID NO: 30991 - DNA, 15 bp, Homo sapiens
acctcaataaaactg

SEQ ID NO: 30992 - DNA, 15 bp, Homo sapiens
cacctcaataaaact

SEQ ID NO: 30993 - DNA, 15 bp, Homo sapiens
acacctcaataaaac

SEQ ID NO: 30994 - DNA, 15 bp, Homo sapiens
tacacctcaataaaa

SEQ ID NO: 30995 - DNA, 15 bp, Homo sapiens
ttacacctcaataaa

SEQ ID NO: 30996 - DNA, 15 bp, Homo sapiens
attacacctcaataa

SEQ ID NO: 30997 - DNA, 15 bp, Homo sapiens
aattacacctcaata

SEQ ID NO: 30998 - DNA, 15 bp, Homo sapiens
caattacacctcaat

SEQ ID NO: 30999 - DNA, 15 bp, Homo sapiens
tcaattacacctcaa

SEQ ID NO: 31000 - DNA, 15 bp, Homo sapiens
gtcaattacacctca

SEQ ID NO: 31001 - DNA, 15 bp, Homo sapiens
tgtcaattacacctc

SEQ ID NO: 31002 - DNA, 15 bp, Homo sapiens
ttgtcaattacacct

SEQ ID NO: 31003 - DNA, 15 bp, Homo sapiens
cttgtcaattacacc

SEQ ID NO: 31004 - DNA, 15 bp, Homo sapiens
acttgtcaattacac

SEQ ID NO: 31005 - DNA, 15 bp, Homo sapiens
tacttgtcaattaca

SEQ ID NO: 31006 - DNA, 15 bp, Homo sapiens
ttacttgtcaattac

SEQ ID NO: 31007 - DNA, 15 bp, Homo sapiens
tttacttgtcaatta

SEQ ID NO: 31008 - DNA, 15 bp, Homo sapiens
ttttacttgtcaatt

SEQ ID NO: 31009 - DNA, 15 bp, Homo sapiens
tttttacttgtcaat

SEQ ID NO: 31010 - DNA, 15 bp, Homo sapiens
atttttacttgtcaa

SEQ ID NO: 31011 - DNA, 15 bp, Homo sapiens
aatttttacttgtca

SEQ ID NO: 31012 - DNA, 15 bp, Homo sapiens
taatttttacttgtc

SEQ ID NO: 31013 - DNA, 15 bp, Homo sapiens
ataatttttacttgt

SEQ ID NO: 31014 - DNA, 15 bp, Homo sapiens
tataatttttacttg

SEQ ID NO: 31015 - DNA, 15 bp, Homo sapiens
atataatttttactt

SEQ ID NO: 31016 - DNA, 15 bp, Homo sapiens
tatataatttttact

SEQ ID NO: 31017 - DNA, 15 bp, Homo sapiens
atatataatttttac

SEQ ID NO: 31018 - DNA, 15 bp, Homo sapiens
tatatataattttta

SEQ ID NO: 31019 - DNA, 15 bp, Homo sapiens
ttatatataattttt

SEQ ID NO: 31020 - DNA, 15 bp, Homo sapiens
tttatatataatttt

SEQ ID NO: 31021 - DNA, 15 bp, Homo sapiens
atttatatataattt

SEQ ID NO: 31022 - DNA, 15 bp, Homo sapiens
tatttatatataatt

SEQ ID NO: 31023 - DNA, 15 bp, Homo sapiens
gtatttatatataat

SEQ ID NO: 31024 - DNA, 15 bp, Homo sapiens
tgtatttatatataa

SEQ ID NO: 31025 - DNA, 15 bp, Homo sapiens
ttgtatttatatata

SEQ ID NO: 31026 - DNA, 15 bp, Homo sapiens
attgtatttatatat

SEQ ID NO: 31027 - DNA, 15 bp, Homo sapiens
cattgtatttatata

SEQ ID NO: 31028 - DNA, 15 bp, Homo sapiens
acattgtatttatat

SEQ ID NO: 31029 - DNA, 15 bp, Homo sapiens
tacattgtatttata

SEQ ID NO: 31030 - DNA, 15 bp, Homo sapiens
atacattgtatttat

SEQ ID NO: 31031 - DNA, 15 bp, Homo sapiens
tatacattgtattta

SEQ ID NO: 31032 - DNA, 15 bp, Homo sapiens
ttatacattgtattt

SEQ ID NO: 31033 - DNA, 15 bp, Homo sapiens
attatacattgtatt

SEQ ID NO: 31034 - DNA, 15 bp, Homo sapiens
tattatacattgtat

SEQ ID NO: 31035 - DNA, 15 bp, Homo sapiens
atattatacattgta

SEQ ID NO: 31036 - DNA, 15 bp, Homo sapiens
catattatacattgt

SEQ ID NO: 31037 - DNA, 15 bp, Homo sapiens
tcatattatacattg

SEQ ID NO: 31038 - DNA, 15 bp, Homo sapiens
atcatattatacatt

SEQ ID NO: 31039 - DNA, 15 bp, Homo sapiens
catcatattatacat

SEQ ID NO: 31040 - DNA, 15 bp, Homo sapiens
acatcatattataca

SEQ ID NO: 31041 - DNA, 15 bp, Homo sapiens
aacatcatattatac

SEQ ID NO: 31042 - DNA, 15 bp, Homo sapiens
aaacatcatattata

SEQ ID NO: 31043 - DNA, 15 bp, Homo sapiens
aaaacatcatattat

SEQ ID NO: 31044 - DNA, 15 bp, Homo sapiens
caaaacatcatatta

SEQ ID NO: 31045 - DNA, 15 bp, Homo sapiens
tcaaaacatcatatt

SEQ ID NO: 31046 - DNA, 15 bp, Homo sapiens
atcaaaacatcatat

SEQ ID NO: 31047 - DNA, 15 bp, Homo sapiens
catcaaaacatcata

SEQ ID NO: 31048 - DNA, 15 bp, Homo sapiens
acatcaaaacatcat

SEQ ID NO: 31049 - DNA, 15 bp, Homo sapiens
tacatcaaaacatca

SEQ ID NO: 31050 - DNA, 15 bp, Homo sapiens
atacatcaaaacatc

SEQ ID NO: 31051 - DNA, 15 bp, Homo sapiens
catacatcaaaacat

SEQ ID NO: 31052 - DNA, 15 bp, Homo sapiens
acatacatcaaaaca

SEQ ID NO: 31053 - DNA, 15 bp, Homo sapiens
cacatacatcaaaac

SEQ ID NO: 31054 - DNA, 15 bp, Homo sapiens
acacatacatcaaaa

SEQ ID NO: 31055 - DNA, 15 bp, Homo sapiens
tacacatacatcaaa

SEQ ID NO: 31056 - DNA, 15 bp, Homo sapiens
atacacatacatcaa

SEQ ID NO: 31057 - DNA, 15 bp, Homo sapiens
tatacacatacatca

SEQ ID NO: 31058 - DNA, 15 bp, Homo sapiens
atatacacatacatc

SEQ ID NO: 31059 - DNA, 15 bp, Homo sapiens
tatatacacatacat

SEQ ID NO: 31060 - DNA, 15 bp, Homo sapiens
gtatatacacataca

SEQ ID NO: 31061 - DNA, 15 bp, Homo sapiens
tgtatatacacatac

SEQ ID NO: 31062 - DNA, 15 bp, Homo sapiens
atgtatatacacata

SEQ ID NO: 31063 - DNA, 15 bp, Homo sapiens
aatgtatatacacat

SEQ ID NO: 31064 - DNA, 15 bp, Homo sapiens
caatgtatatacaca

SEQ ID NO: 31065 - DNA, 15 bp, Homo sapiens
acaatgtatatacac

SEQ ID NO: 31066 - DNA, 15 bp, Homo sapiens
cacaatgtatataca

SEQ ID NO: 31067 - DNA, 15 bp, Homo sapiens
tcacaatgtatatac

SEQ ID NO: 31068 - DNA, 15 bp, Homo sapiens
ttcacaatgtatata

SEQ ID NO: 31069 - DNA, 15 bp, Homo sapiens
tttcacaatgtatat

SEQ ID NO: 31070 - DNA, 15 bp, Homo sapiens
atttcacaatgtata

SEQ ID NO: 31071 - DNA, 15 bp, Homo sapiens
catttcacaatgtat

SEQ ID NO: 31072 - DNA, 15 bp, Homo sapiens
tcatttcacaatgta

SEQ ID NO: 31073 - DNA, 15 bp, Homo sapiens
atcatttcacaatgt

SEQ ID NO: 31074 - DNA, 15 bp, Homo sapiens
aatcatttcacaatg

SEQ ID NO: 31075 - DNA, 15 bp, Homo sapiens
taatcatttcacaat

SEQ ID NO: 31076 - DNA, 15 bp, Homo sapiens
gtaatcatttcacaa

SEQ ID NO: 31077 - DNA, 15 bp, Homo sapiens
agtaatcatttcaca

SEQ ID NO: 31078 - DNA, 15 bp, Homo sapiens
tagtaatcatttcac

SEQ ID NO: 31079 - DNA, 15 bp, Homo sapiens
gtagtaatcatttca

SEQ ID NO: 31080 - DNA, 15 bp, Homo sapiens
tgtagtaatcatttc

SEQ ID NO: 31081 - DNA, 15 bp, Homo sapiens
ctgtagtaatcattt

SEQ ID NO: 31082 - DNA, 15 bp, Homo sapiens
actgtagtaatcatt

SEQ ID NO: 31083 - DNA, 15 bp, Homo sapiens
gactgtagtaatcat

SEQ ID NO: 31084 - DNA, 15 bp, Homo sapiens
tgactgtagtaatca

SEQ ID NO: 31085 - DNA, 15 bp, Homo sapiens
ttgactgtagtaatc

SEQ ID NO: 31086 - DNA, 15 bp, Homo sapiens
tttgactgtagtaat

SEQ ID NO: 31087 - DNA, 15 bp, Homo sapiens
gtttgactgtagtaa

SEQ ID NO: 31088 - DNA, 15 bp, Homo sapiens
agtttgactgtagta

SEQ ID NO: 31089 - DNA, 15 bp, Homo sapiens
tagtttgactgtagt

SEQ ID NO: 31090 - DNA, 15 bp, Homo sapiens
gtagtttgactgtag

SEQ ID NO: 31091 - DNA, 15 bp, Homo sapiens
agtagtttgactgta

SEQ ID NO: 31092 - DNA, 15 bp, Homo sapiens
aagtagtttgactgt

SEQ ID NO: 31093 - DNA, 15 bp, Homo sapiens
taagtagtttgactg

SEQ ID NO: 31094 - DNA, 15 bp, Homo sapiens
ttaagtagtttgact

SEQ ID NO: 31095 - DNA, 15 bp, Homo sapiens
gttaagtagtttgac

SEQ ID NO: 31096 - DNA, 15 bp, Homo sapiens
tgttaagtagtttga

SEQ ID NO: 31097 - DNA, 15 bp, Homo sapiens
atgttaagtagtttg

SEQ ID NO: 31098 - DNA, 15 bp, Homo sapiens
tatgttaagtagttt

SEQ ID NO: 31099 - DNA, 15 bp, Homo sapiens
atatgttaagtagtt

SEQ ID NO: 31100 - DNA, 15 bp, Homo sapiens
aatatgttaagtagt

SEQ ID NO: 31101 - DNA, 15 bp, Homo sapiens
gaatatgttaagtag

SEQ ID NO: 31102 - DNA, 15 bp, Homo sapiens
tgaatatgttaagta

SEQ ID NO: 31103 - DNA, 15 bp, Homo sapiens
atgaatatgttaagt

SEQ ID NO: 31104 - DNA, 15 bp, Homo sapiens
gatgaatatgttaag

SEQ ID NO: 31105 - DNA, 15 bp, Homo sapiens
tgatgaatatgttaa

SEQ ID NO: 31106 - DNA, 15 bp, Homo sapiens
gtgatgaatatgtta

SEQ ID NO: 31107 - DNA, 15 bp, Homo sapiens
ggtgatgaatatgtt

SEQ ID NO: 31108 - DNA, 15 bp, Homo sapiens
aggtgatgaatatgt

SEQ ID NO: 31109 - DNA, 15 bp, Homo sapiens
gaggtgatgaatatg

SEQ ID NO: 31110 - DNA, 15 bp, Homo sapiens
tgaggtgatgaatat

SEQ ID NO: 31111 - DNA, 15 bp, Homo sapiens
gtgaggtgatgaata

SEQ ID NO: 31112 - DNA, 15 bp, Homo sapiens
tgtgaggtgatgaat

SEQ ID NO: 31113 - DNA, 15 bp, Homo sapiens
atgtgaggtgatgaa

SEQ ID NO: 31114 - DNA, 15 bp, Homo sapiens
tatgtgaggtgatga

SEQ ID NO: 31115 - DNA, 15 bp, Homo sapiens
ttatgtgaggtgatg

SEQ ID NO: 31116 - DNA, 15 bp, Homo sapiens
attatgtgaggtgat

SEQ ID NO: 31117 - DNA, 15 bp, Homo sapiens
aattatgtgaggtga

SEQ ID NO: 31118 - DNA, 15 bp, Homo sapiens
taattatgtgaggtg

SEQ ID NO: 31119 - DNA, 15 bp, Homo sapiens
ataattatgtgaggt

SEQ ID NO: 31120 - DNA, 15 bp, Homo sapiens
aataattatgtgagg

SEQ ID NO: 31121 - DNA, 15 bp, Homo sapiens
taataattatgtgag

SEQ ID NO: 31122 - DNA, 15 bp, Homo sapiens
ataataattatgtga

SEQ ID NO: 31123 - DNA, 15 bp, Homo sapiens
aataataattatgtg

SEQ ID NO: 31124 - DNA, 15 bp, Homo sapiens
gaataataattatgt

SEQ ID NO: 31125 - DNA, 15 bp, Homo sapiens
agaataataattatg

SEQ ID NO: 31126 - DNA, 15 bp, Homo sapiens
gagaataataattat

SEQ ID NO: 31127 - DNA, 15 bp, Homo sapiens
ggagaataataatta

SEQ ID NO: 31128 - DNA, 15 bp, Homo sapiens
gggagaataataatt

SEQ ID NO: 31129 - DNA, 15 bp, Homo sapiens
ggggagaataataat

SEQ ID NO: 31130 - DNA, 15 bp, Homo sapiens
gggggagaataataa

SEQ ID NO: 31131 - DNA, 15 bp, Homo sapiens
ggggggagaataata

SEQ ID NO: 31132 - DNA, 15 bp, Homo sapiens
tggggggagaataat

SEQ ID NO: 31133 - DNA, 15 bp, Homo sapiens
ctggggggagaataa

SEQ ID NO: 31134 - DNA, 15 bp, Homo sapiens
cctggggggagaata

SEQ ID NO: 31135 - DNA, 15 bp, Homo sapiens
ccctggggggagaat

SEQ ID NO: 31136 - DNA, 15 bp, Homo sapiens
accctggggggagaa

SEQ ID NO: 31137 - DNA, 15 bp, Homo sapiens
caccctggggggaga

SEQ ID NO: 31138 - DNA, 15 bp, Homo sapiens
tcaccctggggggag

SEQ ID NO: 31139 - DNA, 15 bp, Homo sapiens
ttcaccctgggggga

SEQ ID NO: 31140 - DNA, 15 bp, Homo sapiens
tttcaccctgggggg

SEQ ID NO: 31141 - DNA, 15 bp, Homo sapiens
ctttcaccctggggg

SEQ ID NO: 31142 - DNA, 15 bp, Homo sapiens
gctttcaccctgggg

SEQ ID NO: 31143 - DNA, 15 bp, Homo sapiens
tgctttcaccctggg

SEQ ID NO: 31144 - DNA, 15 bp, Homo sapiens
atgctttcaccctgg

SEQ ID NO: 31145 - DNA, 15 bp, Homo sapiens
aatgctttcaccctg

SEQ ID NO: 31146 - DNA, 15 bp, Homo sapiens
aaatgctttcaccct

SEQ ID NO: 31147 - DNA, 15 bp, Homo sapiens
taaatgctttcaccc

SEQ ID NO: 31148 - DNA, 15 bp, Homo sapiens
ttaaatgctttcacc

SEQ ID NO: 31149 - DNA, 15 bp, Homo sapiens
cttaaatgctttcac

SEQ ID NO: 31150 - DNA, 15 bp, Homo sapiens
tcttaaatgctttca

SEQ ID NO: 31151 - DNA, 15 bp, Homo sapiens
atcttaaatgctttc

SEQ ID NO: 31152 - DNA, 15 bp, Homo sapiens
gatcttaaatgcttt

SEQ ID NO: 31153 - DNA, 15 bp, Homo sapiens
agatcttaaatgctt

SEQ ID NO: 31154 - DNA, 15 bp, Homo sapiens
tagatcttaaatgct

SEQ ID NO: 31155 - DNA, 15 bp, Homo sapiens
gtagatcttaaatgc

SEQ ID NO: 31156 - DNA, 15 bp, Homo sapiens
tgtagatcttaaatg

SEQ ID NO: 31157 - DNA, 15 bp, Homo sapiens
ttgtagatcttaaat

SEQ ID NO: 31158 - DNA, 15 bp, Homo sapiens
cttgtagatcttaaa

SEQ ID NO: 31159 - DNA, 15 bp, Homo sapiens
gcttgtagatcttaa

SEQ ID NO: 31160 - DNA, 15 bp, Homo sapiens
agcttgtagatctta

SEQ ID NO: 31161 - DNA, 15 bp, Homo sapiens
tagcttgtagatctt

SEQ ID NO: 31162 - DNA, 15 bp, Homo sapiens
gtagcttgtagatct

SEQ ID NO: 31163 - DNA, 15 bp, Homo sapiens
tgtagcttgtagatc

SEQ ID NO: 31164 - DNA, 15 bp, Homo sapiens
ttgtagcttgtagat

SEQ ID NO: 31165 - DNA, 15 bp, Homo sapiens
attgtagcttgtaga

SEQ ID NO: 31166 - DNA, 15 bp, Homo sapiens
aattgtagcttgtag

SEQ ID NO: 31167 - DNA, 15 bp, Homo sapiens
aaattgtagcttgta

SEQ ID NO: 31168 - DNA, 15 bp, Homo sapiens
aaaattgtagcttgt

SEQ ID NO: 31169 - DNA, 15 bp, Homo sapiens
gaaaattgtagcttg

SEQ ID NO: 31170 - DNA, 15 bp, Homo sapiens
tgaaaattgtagctt

SEQ ID NO: 31171 - DNA, 15 bp, Homo sapiens
ttgaaaattgtagct

SEQ ID NO: 31172 - DNA, 15 bp, Homo sapiens
attgaaaattgtagc

SEQ ID NO: 31173 - DNA, 15 bp, Homo sapiens
aattgaaaattgtag

SEQ ID NO: 31174 - DNA, 15 bp, Homo sapiens
taattgaaaattgta

SEQ ID NO: 31175 - DNA, 15 bp, Homo sapiens
ataattgaaaattgt

SEQ ID NO: 31176 - DNA, 15 bp, Homo sapiens
tataattgaaaattg

SEQ ID NO: 31177 - DNA, 15 bp, Homo sapiens
gtataattgaaaatt

SEQ ID NO: 31178 - DNA, 15 bp, Homo sapiens
tgtataattgaaaat

SEQ ID NO: 31179 - DNA, 15 bp, Homo sapiens
ttgtataattgaaaa

SEQ ID NO: 31180 - DNA, 15 bp, Homo sapiens
attgtataattgaaa

SEQ ID NO: 31181 - DNA, 15 bp, Homo sapiens
cattgtataattgaa

SEQ ID NO: 31182 - DNA, 15 bp, Homo sapiens
acattgtataattga

SEQ ID NO: 31183 - DNA, 15 bp, Homo sapiens
aacattgtataattg

SEQ ID NO: 31184 - DNA, 15 bp, Homo sapiens
taacattgtataatt

SEQ ID NO: 31185 - DNA, 15 bp, Homo sapiens
ataacattgtataat

SEQ ID NO: 31186 - DNA, 15 bp, Homo sapiens
aataacattgtataa

SEQ ID NO: 31187 - DNA, 15 bp, Homo sapiens
taataacattgtata

SEQ ID NO: 31188 - DNA, 15 bp, Homo sapiens
ataataacattgtat

SEQ ID NO: 31189 - DNA, 15 bp, Homo sapiens
aataataacattgta

SEQ ID NO: 31190 - DNA, 15 bp, Homo sapiens
taataataacattgt

SEQ ID NO: 31191 - DNA, 15 bp, Homo sapiens
ttaataataacattg

SEQ ID NO: 31192 - DNA, 15 bp, Homo sapiens
gttaataataacatt

SEQ ID NO: 31193 - DNA, 15 bp, Homo sapiens
agttaataataacat

SEQ ID NO: 31194 - DNA, 15 bp, Homo sapiens
tagttaataataaca

SEQ ID NO: 31195 - DNA, 15 bp, Homo sapiens
atagttaataataac

SEQ ID NO: 31196 - DNA, 15 bp, Homo sapiens
tatagttaataataa

SEQ ID NO: 31197 - DNA, 15 bp, Homo sapiens
ctatagttaataata

SEQ ID NO: 31198 - DNA, 15 bp, Homo sapiens
actatagttaataat

SEQ ID NO: 31199 - DNA, 15 bp, Homo sapiens
gactatagttaataa

SEQ ID NO: 31200 - DNA, 15 bp, Homo sapiens
tgactatagttaata

SEQ ID NO: 31201 - DNA, 15 bp, Homo sapiens
gtgactatagttaat

SEQ ID NO: 31202 - DNA, 15 bp, Homo sapiens
agtgactatagttaa

SEQ ID NO: 31203 - DNA, 15 bp, Homo sapiens
tagtgactatagtta

SEQ ID NO: 31204 - DNA, 15 bp, Homo sapiens
atagtgactatagtt

SEQ ID NO: 31205 - DNA, 15 bp, Homo sapiens
catagtgactatagt

SEQ ID NO: 31206 - DNA, 15 bp, Homo sapiens
gcatagtgactatag

SEQ ID NO: 31207 - DNA, 15 bp, Homo sapiens
agcatagtgactata

SEQ ID NO: 31208 - DNA, 15 bp, Homo sapiens
cagcatagtgactat

SEQ ID NO: 31209 - DNA, 15 bp, Homo sapiens
acagcatagtgacta

SEQ ID NO: 31210 - DNA, 15 bp, Homo sapiens
gacagcatagtgact

SEQ ID NO: 31211 - DNA, 15 bp, Homo sapiens
ggacagcatagtgac

SEQ ID NO: 31212 - DNA, 15 bp, Homo sapiens
tggacagcatagtga

SEQ ID NO: 31213 - DNA, 15 bp, Homo sapiens
ctggacagcatagtg

SEQ ID NO: 31214 - DNA, 15 bp, Homo sapiens
actggacagcatagt

SEQ ID NO: 31215 - DNA, 15 bp, Homo sapiens
tactggacagcatag

SEQ ID NO: 31216 - DNA, 15 bp, Homo sapiens
ctactggacagcata

SEQ ID NO: 31217 - DNA, 15 bp, Homo sapiens
tctactggacagcat

SEQ ID NO: 31218 - DNA, 15 bp, Homo sapiens
ctctactggacagca

SEQ ID NO: 31219 - DNA, 15 bp, Homo sapiens
gctctactggacagc

SEQ ID NO: 31220 - DNA, 15 bp, Homo sapiens
agctctactggacag

SEQ ID NO: 31221 - DNA, 15 bp, Homo sapiens
aagctctactggaca

SEQ ID NO: 31222 - DNA, 15 bp, Homo sapiens
gaagctctactggac

SEQ ID NO: 31223 - DNA, 15 bp, Homo sapiens
tgaagctctactgga

SEQ ID NO: 31224 - DNA, 15 bp, Homo sapiens
ctgaagctctactgg

SEQ ID NO: 31225 - DNA, 15 bp, Homo sapiens
tctgaagctctactg

SEQ ID NO: 31226 - DNA, 15 bp, Homo sapiens
atctgaagctctact

SEQ ID NO: 31227 - DNA, 15 bp, Homo sapiens
gatctgaagctctac

SEQ ID NO: 31228 - DNA, 15 bp, Homo sapiens
agatctgaagctcta

SEQ ID NO: 31229 - DNA, 15 bp, Homo sapiens
aagatctgaagctct

SEQ ID NO: 31230 - DNA, 15 bp, Homo sapiens
caagatctgaagctc

SEQ ID NO: 31231 - DNA, 15 bp, Homo sapiens
acaagatctgaagct

SEQ ID NO: 31232 - DNA, 15 bp, Homo sapiens
aacaagatctgaagc

SEQ ID NO: 31233 - DNA, 15 bp, Homo sapiens
gaacaagatctgaag

SEQ ID NO: 31234 - DNA, 15 bp, Homo sapiens
tgaacaagatctgaa

SEQ ID NO: 31235 - DNA, 15 bp, Homo sapiens
atgaacaagatctga

SEQ ID NO: 31236 - DNA, 15 bp, Homo sapiens
gatgaacaagatctg

SEQ ID NO: 31237 - DNA, 15 bp, Homo sapiens
agatgaacaagatct

SEQ ID NO: 31238 - DNA, 15 bp, Homo sapiens
aagatgaacaagatc

SEQ ID NO: 31239 - DNA, 15 bp, Homo sapiens
caagatgaacaagat

SEQ ID NO: 31240 - DNA, 15 bp, Homo sapiens
acaagatgaacaaga

SEQ ID NO: 31241 - DNA, 15 bp, Homo sapiens
cacaagatgaacaag

SEQ ID NO: 31242 - DNA, 15 bp, Homo sapiens
acacaagatgaacaa

SEQ ID NO: 31243 - DNA, 15 bp, Homo sapiens
aacacaagatgaaca

SEQ ID NO: 31244 - DNA, 15 bp, Homo sapiens
gaacacaagatgaac

SEQ ID NO: 31245 - DNA, 15 bp, Homo sapiens
ggaacacaagatgaa

SEQ ID NO: 31246 - DNA, 15 bp, Homo sapiens
aggaacacaagatga

SEQ ID NO: 31247 - DNA, 15 bp, Homo sapiens
gaggaacacaagatg

SEQ ID NO: 31248 - DNA, 15 bp, Homo sapiens
ggaggaacacaagat

SEQ ID NO: 31249 - DNA, 15 bp, Homo sapiens
gggaggaacacaaga

SEQ ID NO: 31250 - DNA, 15 bp, Homo sapiens
agggaggaacacaag

SEQ ID NO: 31251 - DNA, 15 bp, Homo sapiens
gagggaggaacacaa

SEQ ID NO: 31252 - DNA, 15 bp, Homo sapiens
ggagggaggaacaca

SEQ ID NO: 31253 - DNA, 15 bp, Homo sapiens
gggagggaggaacac

SEQ ID NO: 31254 - DNA, 15 bp, Homo sapiens
ggggagggaggaaca

SEQ ID NO: 31255 - DNA, 15 bp, Homo sapiens
tggggagggaggaac

SEQ ID NO: 31256 - DNA, 15 bp, Homo sapiens
gtggggagggaggaa

SEQ ID NO: 31257 - DNA, 15 bp, Homo sapiens
ggtggggagggagga

SEQ ID NO: 31258 - DNA, 15 bp, Homo sapiens
gggtggggagggagg

SEQ ID NO: 31259 - DNA, 15 bp, Homo sapiens
agggtggggagggag

SEQ ID NO: 31260 - DNA, 15 bp, Homo sapiens
gagggtggggaggga

SEQ ID NO: 31261 - DNA, 15 bp, Homo sapiens
tgagggtggggaggg

SEQ ID NO: 31262 - DNA, 15 bp, Homo sapiens
ctgagggtggggagg

SEQ ID NO: 31263 - DNA, 15 bp, Homo sapiens
actgagggtggggag

SEQ ID NO: 31264 - DNA, 15 bp, Homo sapiens
gactgagggtgggga

SEQ ID NO: 31265 - DNA, 15 bp, Homo sapiens
ggactgagggtgggg

SEQ ID NO: 31266 - DNA, 15 bp, Homo sapiens
gggactgagggtggg

SEQ ID NO: 31267 - DNA, 15 bp, Homo sapiens
agggactgagggtgg

SEQ ID NO: 31268 - DNA, 15 bp, Homo sapiens
cagggactgagggtg

SEQ ID NO: 31269 - DNA, 15 bp, Homo sapiens
ccagggactgagggt

SEQ ID NO: 31270 - DNA, 15 bp, Homo sapiens
tccagggactgaggg

SEQ ID NO: 31271 - DNA, 15 bp, Homo sapiens
ttccagggactgagg

SEQ ID NO: 31272 - DNA, 15 bp, Homo sapiens
tttccagggactgag

SEQ ID NO: 31273 - DNA, 15 bp, Homo sapiens
ttttccagggactga

SEQ ID NO: 31274 - DNA, 15 bp, Homo sapiens
gttttccagggactg

SEQ ID NO: 31275 - DNA, 15 bp, Homo sapiens
tgttttccagggact

SEQ ID NO: 31276 - DNA, 15 bp, Homo sapiens
ctgttttccagggac

SEQ ID NO: 31277 - DNA, 15 bp, Homo sapiens
cctgttttccaggga

SEQ ID NO: 31278 - DNA, 15 bp, Homo sapiens
acctgttttccaggg

SEQ ID NO: 31279 - DNA, 15 bp, Homo sapiens
aacctgttttccagg

SEQ ID NO: 31280 - DNA, 15 bp, Homo sapiens
aaacctgttttccag

SEQ ID NO: 31281 - DNA, 15 bp, Homo sapiens
aaaacctgttttcca

SEQ ID NO: 31282 - DNA, 15 bp, Homo sapiens
taaaacctgttttcc

SEQ ID NO: 31283 - DNA, 15 bp, Homo sapiens
ttaaaacctgttttc

SEQ ID NO: 31284 - DNA, 15 bp, Homo sapiens
tttaaaacctgtttt

SEQ ID NO: 31285 - DNA, 15 bp, Homo sapiens
ctttaaaacctgttt

SEQ ID NO: 31286 - DNA, 15 bp, Homo sapiens
tctttaaaacctgtt

SEQ ID NO: 31287 - DNA, 15 bp, Homo sapiens
atctttaaaacctgt

SEQ ID NO: 31288 - DNA, 15 bp, Homo sapiens
tatctttaaaacctg

SEQ ID NO: 31289 - DNA, 15 bp, Homo sapiens
ctatctttaaaacct

SEQ ID NO: 31290 - DNA, 15 bp, Homo sapiens
actatctttaaaacc

SEQ ID NO: 31291 - DNA, 15 bp, Homo sapiens
aactatctttaaaac

SEQ ID NO: 31292 - DNA, 15 bp, Homo sapiens
caactatctttaaaa

SEQ ID NO: 31293 - DNA, 15 bp, Homo sapiens
gcaactatctttaaa

SEQ ID NO: 31294 - DNA, 15 bp, Homo sapiens
agcaactatctttaa

SEQ ID NO: 31295 - DNA, 15 bp, Homo sapiens
tagcaactatcttta

SEQ ID NO: 31296 - DNA, 15 bp, Homo sapiens
ttagcaactatcttt

SEQ ID NO: 31297 - DNA, 15 bp, Homo sapiens
attagcaactatctt

SEQ ID NO: 31298 - DNA, 15 bp, Homo sapiens
gattagcaactatct

SEQ ID NO: 31299 - DNA, 15 bp, Homo sapiens
ggattagcaactatc

SEQ ID NO: 31300 - DNA, 15 bp, Homo sapiens
aggattagcaactat

SEQ ID NO: 31301 - DNA, 15 bp, Homo sapiens
aaggattagcaacta

SEQ ID NO: 31302 - DNA, 15 bp, Homo sapiens
taaggattagcaact

SEQ ID NO: 31303 - DNA, 15 bp, Homo sapiens
ataaggattagcaac

SEQ ID NO: 31304 - DNA, 15 bp, Homo sapiens
aataaggattagcaa

SEQ ID NO: 31305 - DNA, 15 bp, Homo sapiens
aaataaggattagca

SEQ ID NO: 31306 - DNA, 15 bp, Homo sapiens
gaaataaggattagc

SEQ ID NO: 31307 - DNA, 15 bp, Homo sapiens
agaaataaggattag

SEQ ID NO: 31308 - DNA, 15 bp, Homo sapiens
aagaaataaggatta

SEQ ID NO: 31309 - DNA, 15 bp, Homo sapiens
gaagaaataaggatt

SEQ ID NO: 31310 - DNA, 15 bp, Homo sapiens
agaagaaataaggat

SEQ ID NO: 31311 - DNA, 15 bp, Homo sapiens
tagaagaaataagga

SEQ ID NO: 31312 - DNA, 15 bp, Homo sapiens
ttagaagaaataagg

SEQ ID NO: 31313 - DNA, 15 bp, Homo sapiens
tttagaagaaataag

SEQ ID NO: 31314 - DNA, 15 bp, Homo sapiens
atttagaagaaataa

SEQ ID NO: 31315 - DNA, 15 bp, Homo sapiens
aatttagaagaaata

SEQ ID NO: 31316 - DNA, 15 bp, Homo sapiens
aaatttagaagaaat

SEQ ID NO: 31317 - DNA, 15 bp, Homo sapiens
aaaatttagaagaaa

SEQ ID NO: 31318 - DNA, 15 bp, Homo sapiens
aaaaatttagaagaa

SEQ ID NO: 31319 - DNA, 15 bp, Homo sapiens
taaaaatttagaaga

SEQ ID NO: 31320 - DNA, 15 bp, Homo sapiens
ttaaaaatttagaag

SEQ ID NO: 31321 - DNA, 15 bp, Homo sapiens
tttaaaaatttagaa

SEQ ID NO: 31322 - DNA, 15 bp, Homo sapiens
atttaaaaatttaga

SEQ ID NO: 31323 - DNA, 15 bp, Homo sapiens
gatttaaaaatttag

SEQ ID NO: 31324 - DNA, 15 bp, Homo sapiens
tgatttaaaaattta

SEQ ID NO: 31325 - DNA, 15 bp, Homo sapiens
ctgatttaaaaattt

SEQ ID NO: 31326 - DNA, 15 bp, Homo sapiens
actgatttaaaaatt

SEQ ID NO: 31327 - DNA, 15 bp, Homo sapiens
aactgatttaaaaat

SEQ ID NO: 31328 - DNA, 15 bp, Homo sapiens
caactgatttaaaaa

SEQ ID NO: 31329 - DNA, 15 bp, Homo sapiens
gcaactgatttaaaa

SEQ ID NO: 31330 - DNA, 15 bp, Homo sapiens
agcaactgatttaaa

SEQ ID NO: 31331 - DNA, 15 bp, Homo sapiens
cagcaactgatttaa

SEQ ID NO: 31332 - DNA, 15 bp, Homo sapiens
gcagcaactgattta

SEQ ID NO: 31333 - DNA, 15 bp, Homo sapiens
ggcagcaactgattt

SEQ ID NO: 31334 - DNA, 15 bp, Homo sapiens
aggcagcaactgatt

SEQ ID NO: 31335 - DNA, 15 bp, Homo sapiens
gaggcagcaactgat

SEQ ID NO: 31336 - DNA, 15 bp, Homo sapiens
tgaggcagcaactga

SEQ ID NO: 31337 - DNA, 15 bp, Homo sapiens
ttgaggcagcaactg

SEQ ID NO: 31338 - DNA, 15 bp, Homo sapiens
attgaggcagcaact

SEQ ID NO: 31339 - DNA, 15 bp, Homo sapiens
aattgaggcagcaac

SEQ ID NO: 31340 - DNA, 15 bp, Homo sapiens
aaattgaggcagcaa

SEQ ID NO: 31341 - DNA, 15 bp, Homo sapiens
gaaattgaggcagca

SEQ ID NO: 31342 - DNA, 15 bp, Homo sapiens
agaaattgaggcagc

SEQ ID NO: 31343 - DNA, 15 bp, Homo sapiens
tagaaattgaggcag

SEQ ID NO: 31344 - DNA, 15 bp, Homo sapiens
atagaaattgaggca

SEQ ID NO: 31345 - DNA, 15 bp, Homo sapiens
tatagaaattgaggc

SEQ ID NO: 31346 - DNA, 15 bp, Homo sapiens
atatagaaattgagg

SEQ ID NO: 31347 - DNA, 15 bp, Homo sapiens
catatagaaattgag

SEQ ID NO: 31348 - DNA, 15 bp, Homo sapiens
tcatatagaaattga

SEQ ID NO: 31349 - DNA, 15 bp, Homo sapiens
ctcatatagaaattg

SEQ ID NO: 31350 - DNA, 15 bp, Homo sapiens
tctcatatagaaatt

SEQ ID NO: 31351 - DNA, 15 bp, Homo sapiens
ttctcatatagaaat

SEQ ID NO: 31352 - DNA, 15 bp, Homo sapiens
tttctcatatagaaa

SEQ ID NO: 31353 - DNA, 15 bp, Homo sapiens
atttctcatatagaa

SEQ ID NO: 31354 - DNA, 15 bp, Homo sapiens
catttctcatataga

SEQ ID NO: 31355 - DNA, 15 bp, Homo sapiens
tcatttctcatatag

SEQ ID NO: 31356 - DNA, 15 bp, Homo sapiens
gtcatttctcatata

SEQ ID NO: 31357 - DNA, 15 bp, Homo sapiens
agtcatttctcatat

SEQ ID NO: 31358 - DNA, 15 bp, Homo sapiens
cagtcatttctcata

SEQ ID NO: 31359 - DNA, 15 bp, Homo sapiens
tcagtcatttctcat

SEQ ID NO: 31360 - DNA, 15 bp, Homo sapiens
atcagtcatttctca

SEQ ID NO: 31361 - DNA, 15 bp, Homo sapiens
aatcagtcatttctc

SEQ ID NO: 31362 - DNA, 15 bp, Homo sapiens
caatcagtcatttct

SEQ ID NO: 31363 - DNA, 15 bp, Homo sapiens
tcaatcagtcatttc

SEQ ID NO: 31364 - DNA, 15 bp, Homo sapiens
atcaatcagtcattt

SEQ ID NO: 31365 - DNA, 15 bp, Homo sapiens
aatcaatcagtcatt

SEQ ID NO: 31366 - DNA, 15 bp, Homo sapiens
aaatcaatcagtcat

SEQ ID NO: 31367 - DNA, 15 bp, Homo sapiens
gaaatcaatcagtca

SEQ ID NO: 31368 - DNA, 15 bp, Homo sapiens
tgaaatcaatcagtc

SEQ ID NO: 31369 - DNA, 15 bp, Homo sapiens
atgaaatcaatcagt

SEQ ID NO: 31370 - DNA, 15 bp, Homo sapiens
aatgaaatcaatcag

SEQ ID NO: 31371 - DNA, 15 bp, Homo sapiens
aaatgaaatcaatca

SEQ ID NO: 31372 - DNA, 15 bp, Homo sapiens
aaaatgaaatcaatc

SEQ ID NO: 31373 - DNA, 15 bp, Homo sapiens
aaaaatgaaatcaat

SEQ ID NO: 31374 - DNA, 15 bp, Homo sapiens
gaaaaatgaaatcaa

SEQ ID NO: 31375 - DNA, 15 bp, Homo sapiens
agaaaaatgaaatca

SEQ ID NO: 31376 - DNA, 15 bp, Homo sapiens
cagaaaaatgaaatc

SEQ ID NO: 31377 - DNA, 15 bp, Homo sapiens
acagaaaaatgaaat

SEQ ID NO: 31378 - DNA, 15 bp, Homo sapiens
aacagaaaaatgaaa

SEQ ID NO: 31379 - DNA, 15 bp, Homo sapiens
gaacagaaaaatgaa

SEQ ID NO: 31380 - DNA, 15 bp, Homo sapiens
tgaacagaaaaatga

SEQ ID NO: 31381 - DNA, 15 bp, Homo sapiens
gtgaacagaaaaatg

SEQ ID NO: 31382 - DNA, 15 bp, Homo sapiens
cgtgaacagaaaaat

SEQ ID NO: 31383 - DNA, 15 bp, Homo sapiens
gcgtgaacagaaaaa

SEQ ID NO: 31384 - DNA, 15 bp, Homo sapiens
agcgtgaacagaaaa

SEQ ID NO: 31385 - DNA, 15 bp, Homo sapiens
tagcgtgaacagaaa

SEQ ID NO: 31386 - DNA, 15 bp, Homo sapiens
gtagcgtgaacagaa

SEQ ID NO: 31387 - DNA, 15 bp, Homo sapiens
ggtagcgtgaacaga

SEQ ID NO: 31388 - DNA, 15 bp, Homo sapiens
tggtagcgtgaacag

SEQ ID NO: 31389 - DNA, 15 bp, Homo sapiens
atggtagcgtgaaca

SEQ ID NO: 31390 - DNA, 15 bp, Homo sapiens
aatggtagcgtgaac

SEQ ID NO: 31391 - DNA, 15 bp, Homo sapiens
aaatggtagcgtgaa

SEQ ID NO: 31392 - DNA, 15 bp, Homo sapiens
aaaatggtagcgtga

SEQ ID NO: 31393 - DNA, 15 bp, Homo sapiens
gaaaatggtagcgtg

SEQ ID NO: 31394 - DNA, 15 bp, Homo sapiens
tgaaaatggtagcgt

SEQ ID NO: 31395 - DNA, 15 bp, Homo sapiens
atgaaaatggtagcg

SEQ ID NO: 31396 - DNA, 15 bp, Homo sapiens
tatgaaaatggtagc

SEQ ID NO: 31397 - DNA, 15 bp, Homo sapiens
atatgaaaatggtag

SEQ ID NO: 31398 - DNA, 15 bp, Homo sapiens
gatatgaaaatggta

SEQ ID NO: 31399 - DNA, 15 bp, Homo sapiens
tgatatgaaaatggt

SEQ ID NO: 31400 - DNA, 15 bp, Homo sapiens
atgatatgaaaatgg

SEQ ID NO: 31401 - DNA, 15 bp, Homo sapiens
tatgatatgaaaatg

SEQ ID NO: 31402 - DNA, 15 bp, Homo sapiens
gtatgatatgaaaat

SEQ ID NO: 31403 - DNA, 15 bp, Homo sapiens
agtatgatatgaaaa

SEQ ID NO: 31404 - DNA, 15 bp, Homo sapiens
tagtatgatatgaaa

SEQ ID NO: 31405 - DNA, 15 bp, Homo sapiens
ctagtatgatatgaa

SEQ ID NO: 31406 - DNA, 15 bp, Homo sapiens
gctagtatgatatga

SEQ ID NO: 31407 - DNA, 15 bp, Homo sapiens
tgctagtatgatatg

SEQ ID NO: 31408 - DNA, 15 bp, Homo sapiens
gtgctagtatgatat

SEQ ID NO: 31409 - DNA, 15 bp, Homo sapiens
tgtgctagtatgata

SEQ ID NO: 31410 - DNA, 15 bp, Homo sapiens
atgtgctagtatgat

SEQ ID NO: 31411 - DNA, 15 bp, Homo sapiens
catgtgctagtatga

SEQ ID NO: 31412 - DNA, 15 bp, Homo sapiens
acatgtgctagtatg

SEQ ID NO: 31413 - DNA, 15 bp, Homo sapiens
aacatgtgctagtat

SEQ ID NO: 31414 - DNA, 15 bp, Homo sapiens
taacatgtgctagta

SEQ ID NO: 31415 - DNA, 15 bp, Homo sapiens
gtaacatgtgctagt

SEQ ID NO: 31416 - DNA, 15 bp, Homo sapiens
ggtaacatgtgctag

SEQ ID NO: 31417 - DNA, 15 bp, Homo sapiens
gggtaacatgtgcta

SEQ ID NO: 31418 - DNA, 15 bp, Homo sapiens
tgggtaacatgtgct

SEQ ID NO: 31419 - DNA, 15 bp, Homo sapiens
atgggtaacatgtgc

SEQ ID NO: 31420 - DNA, 15 bp, Homo sapiens
aatgggtaacatgtg

SEQ ID NO: 31421 - DNA, 15 bp, Homo sapiens
taatgggtaacatgt

SEQ ID NO: 31422 - DNA, 15 bp, Homo sapiens
ttaatgggtaacatg

SEQ ID NO: 31423 - DNA, 15 bp, Homo sapiens
gttaatgggtaacat

SEQ ID NO: 31424 - DNA, 15 bp, Homo sapiens
agttaatgggtaaca

SEQ ID NO: 31425 - DNA, 15 bp, Homo sapiens
cagttaatgggtaac

SEQ ID NO: 31426 - DNA, 15 bp, Homo sapiens
acagttaatgggtaa

SEQ ID NO: 31427 - DNA, 15 bp, Homo sapiens
tacagttaatgggta

SEQ ID NO: 31428 - DNA, 15 bp, Homo sapiens
atacagttaatgggt

SEQ ID NO: 31429 - DNA, 15 bp, Homo sapiens
aatacagttaatggg

SEQ ID NO: 31430 - DNA, 15 bp, Homo sapiens
caatacagttaatgg

SEQ ID NO: 31431 - DNA, 15 bp, Homo sapiens
gcaatacagttaatg

SEQ ID NO: 31432 - DNA, 15 bp, Homo sapiens
tgcaatacagttaat

SEQ ID NO: 31433 - DNA, 15 bp, Homo sapiens
ctgcaatacagttaa

SEQ ID NO: 31434 - DNA, 15 bp, Homo sapiens
tctgcaatacagtta

SEQ ID NO: 31435 - DNA, 15 bp, Homo sapiens
atctgcaatacagtt

SEQ ID NO: 31436 - DNA, 15 bp, Homo sapiens
aatctgcaatacagt

SEQ ID NO: 31437 - DNA, 15 bp, Homo sapiens
aaatctgcaatacag

SEQ ID NO: 31438 - DNA, 15 bp, Homo sapiens
caaatctgcaataca

SEQ ID NO: 31439 - DNA, 15 bp, Homo sapiens
ccaaatctgcaatac

SEQ ID NO: 31440 - DNA, 15 bp, Homo sapiens
accaaatctgcaata

SEQ ID NO: 31441 - DNA, 15 bp, Homo sapiens
gaccaaatctgcaat

SEQ ID NO: 31442 - DNA, 15 bp, Homo sapiens
agaccaaatctgcaa

SEQ ID NO: 31443 - DNA, 15 bp, Homo sapiens
gagaccaaatctgca

SEQ ID NO: 31444 - DNA, 15 bp, Homo sapiens
tgagaccaaatctgc

SEQ ID NO: 31445 - DNA, 15 bp, Homo sapiens
gtgagaccaaatctg

SEQ ID NO: 31446 - DNA, 15 bp, Homo sapiens
tgtgagaccaaatct

SEQ ID NO: 31447 - DNA, 15 bp, Homo sapiens
ttgtgagaccaaatc

SEQ ID NO: 31448 - DNA, 15 bp, Homo sapiens
tttgtgagaccaaat

SEQ ID NO: 31449 - DNA, 15 bp, Homo sapiens
ttttgtgagaccaaa

SEQ ID NO: 31450 - DNA, 15 bp, Homo sapiens
attttgtgagaccaa

SEQ ID NO: 31451 - DNA, 15 bp, Homo sapiens
aattttgtgagacca

SEQ ID NO: 31452 - DNA, 15 bp, Homo sapiens
gaattttgtgagacc

SEQ ID NO: 31453 - DNA, 15 bp, Homo sapiens
agaattttgtgagac

SEQ ID NO: 31454 - DNA, 15 bp, Homo sapiens
aagaattttgtgaga

SEQ ID NO: 31455 - DNA, 15 bp, Homo sapiens
gaagaattttgtgag

SEQ ID NO: 31456 - DNA, 15 bp, Homo sapiens
agaagaattttgtga

SEQ ID NO: 31457 - DNA, 15 bp, Homo sapiens
tagaagaattttgtg

SEQ ID NO: 31458 - DNA, 15 bp, Homo sapiens
ttagaagaattttgt

SEQ ID NO: 31459 - DNA, 15 bp, Homo sapiens
tttagaagaattttg

SEQ ID NO: 31460 - DNA, 15 bp, Homo sapiens
ttttagaagaatttt

SEQ ID NO: 31461 - DNA, 15 bp, Homo sapiens
attttagaagaattt

SEQ ID NO: 31462 - DNA, 15 bp, Homo sapiens
tattttagaagaatt

SEQ ID NO: 31463 - DNA, 15 bp, Homo sapiens
ttattttagaagaat

SEQ ID NO: 31464 - DNA, 15 bp, Homo sapiens
gttattttagaagaa

SEQ ID NO: 31465 - DNA, 15 bp, Homo sapiens
tgttattttagaaga

SEQ ID NO: 31466 - DNA, 15 bp, Homo sapiens
atgttattttagaag

SEQ ID NO: 31467 - DNA, 15 bp, Homo sapiens
aatgttattttagaa

SEQ ID NO: 31468 - DNA, 15 bp, Homo sapiens
aaatgttattttaga

SEQ ID NO: 31469 - DNA, 15 bp, Homo sapiens
aaaatgttattttag

SEQ ID NO: 31470 - DNA, 15 bp, Homo sapiens
aaaaatgttatttta

SEQ ID NO: 31471 - DNA, 15 bp, Homo sapiens
taaaaatgttatttt

SEQ ID NO: 31472 - DNA, 15 bp, Homo sapiens
ttaaaaatgttattt

SEQ ID NO: 31473 - DNA, 15 bp, Homo sapiens
tttaaaaatgttatt

SEQ ID NO: 31474 - DNA, 15 bp, Homo sapiens
ttttaaaaatgttat

SEQ ID NO: 31475 - DNA, 15 bp, Homo sapiens
tttttaaaaatgtta

SEQ ID NO: 31476 - DNA, 15 bp, Homo sapiens
ctttttaaaaatgtt

SEQ ID NO: 31477 - DNA, 15 bp, Homo sapiens
gctttttaaaaatgt

SEQ ID NO: 31478 - DNA, 15 bp, Homo sapiens
tgctttttaaaaatg

SEQ ID NO: 31479 - DNA, 15 bp, Homo sapiens
atgctttttaaaaat

SEQ ID NO: 31480 - DNA, 15 bp, Homo sapiens
tatgctttttaaaaa

SEQ ID NO: 31481 - DNA, 15 bp, Homo sapiens
atatgctttttaaaa

SEQ ID NO: 31482 - DNA, 15 bp, Homo sapiens
aatatgctttttaaa

SEQ ID NO: 31483 - DNA, 15 bp, Homo sapiens
taatatgctttttaa

SEQ ID NO: 31484 - DNA, 15 bp, Homo sapiens
ttaatatgcttttta

SEQ ID NO: 31485 - DNA, 15 bp, Homo sapiens
attaatatgcttttt

SEQ ID NO: 31486 - DNA, 15 bp, Homo sapiens
gattaatatgctttt

SEQ ID NO: 31487 - DNA, 15 bp, Homo sapiens
tgattaatatgcttt

SEQ ID NO: 31488 - DNA, 15 bp, Homo sapiens
ttgattaatatgctt

SEQ ID NO: 31489 - DNA, 15 bp, Homo sapiens
tttgattaatatgct

SEQ ID NO: 31490 - DNA, 15 bp, Homo sapiens
ttttgattaatatgc

SEQ ID NO: 31491 - DNA, 15 bp, Homo sapiens
tttttgattaatatg

SEQ ID NO: 31492 - DNA, 15 bp, Homo sapiens
atttttgattaatat

SEQ ID NO: 31493 - DNA, 15 bp, Homo sapiens
tatttttgattaata

SEQ ID NO: 31494 - DNA, 15 bp, Homo sapiens
ttatttttgattaat

SEQ ID NO: 31495 - DNA, 15 bp, Homo sapiens
cttatttttgattaa

SEQ ID NO: 31496 - DNA, 15 bp, Homo sapiens
gcttatttttgatta

SEQ ID NO: 31497 - DNA, 15 bp, Homo sapiens
agcttatttttgatt

SEQ ID NO: 31498 - DNA, 15 bp, Homo sapiens
aagcttatttttgat

SEQ ID NO: 31499 - DNA, 15 bp, Homo sapiens
aaagcttatttttga

SEQ ID NO: 31500 - DNA, 15 bp, Homo sapiens
taaagcttatttttg

SEQ ID NO: 31501 - DNA, 15 bp, Homo sapiens
ataaagcttattttt

SEQ ID NO: 31502 - DNA, 15 bp, Homo sapiens
tataaagcttatttt

SEQ ID NO: 31503 - DNA, 15 bp, Homo sapiens
atataaagcttattt

SEQ ID NO: 31504 - DNA, 15 bp, Homo sapiens
aatataaagcttatt

SEQ ID NO: 31505 - DNA, 15 bp, Homo sapiens
aaatataaagcttat

SEQ ID NO: 31506 - DNA, 15 bp, Homo sapiens
gaaatataaagctta

SEQ ID NO: 31507 - DNA, 15 bp, Homo sapiens
agaaatataaagctt

SEQ ID NO: 31508 - DNA, 15 bp, Homo sapiens
cagaaatataaagct

SEQ ID NO: 31509 - DNA, 15 bp, Homo sapiens
tcagaaatataaagc

SEQ ID NO: 31510 - DNA, 15 bp, Homo sapiens
ttcagaaatataaag

SEQ ID NO: 31511 - DNA, 15 bp, Homo sapiens
cttcagaaatataaa

SEQ ID NO: 31512 - DNA, 15 bp, Homo sapiens
gcttcagaaatataa

SEQ ID NO: 31513 - DNA, 15 bp, Homo sapiens
agcttcagaaatata

SEQ ID NO: 31514 - DNA, 15 bp, Homo sapiens
aagcttcagaaatat

SEQ ID NO: 31515 - DNA, 15 bp, Homo sapiens
caagcttcagaaata

SEQ ID NO: 31516 - DNA, 15 bp, Homo sapiens
acaagcttcagaaat

SEQ ID NO: 31517 - DNA, 15 bp, Homo sapiens
aacaagcttcagaaa

SEQ ID NO: 31518 - DNA, 15 bp, Homo sapiens
aaacaagcttcagaa

SEQ ID NO: 31519 - DNA, 15 bp, Homo sapiens
caaacaagcttcaga

SEQ ID NO: 31520 - DNA, 15 bp, Homo sapiens
tcaaacaagcttcag

SEQ ID NO: 31521 - DNA, 15 bp, Homo sapiens
ctcaaacaagcttca

SEQ ID NO: 31522 - DNA, 15 bp, Homo sapiens
gctcaaacaagcttc

SEQ ID NO: 31523 - DNA, 15 bp, Homo sapiens
tgctcaaacaagctt

SEQ ID NO: 31524 - DNA, 15 bp, Homo sapiens
atgctcaaacaagct

SEQ ID NO: 31525 - DNA, 15 bp, Homo sapiens
tatgctcaaacaagc

SEQ ID NO: 31526 - DNA, 15 bp, Homo sapiens
ctatgctcaaacaag

SEQ ID NO: 31527 - DNA, 15 bp, Homo sapiens
tctatgctcaaacaa

SEQ ID NO: 31528 - DNA, 15 bp, Homo sapiens
ttctatgctcaaaca

SEQ ID NO: 31529 - DNA, 15 bp, Homo sapiens
attctatgctcaaac

SEQ ID NO: 31530 - DNA, 15 bp, Homo sapiens
cattctatgctcaaa

SEQ ID NO: 31531 - DNA, 15 bp, Homo sapiens
gcattctatgctcaa

SEQ ID NO: 31532 - DNA, 15 bp, Homo sapiens
ggcattctatgctca

SEQ ID NO: 31533 - DNA, 15 bp, Homo sapiens
aggcattctatgctc

SEQ ID NO: 31534 - DNA, 15 bp, Homo sapiens
aaggcattctatgct

SEQ ID NO: 31535 - DNA, 15 bp, Homo sapiens
aaaggcattctatgc

SEQ ID NO: 31536 - DNA, 15 bp, Homo sapiens
caaaggcattctatg

SEQ ID NO: 31537 - DNA, 15 bp, Homo sapiens
ccaaaggcattctat

SEQ ID NO: 31538 - DNA, 15 bp, Homo sapiens
tccaaaggcattcta

SEQ ID NO: 31539 - DNA, 15 bp, Homo sapiens
atccaaaggcattct

SEQ ID NO: 31540 - DNA, 15 bp, Homo sapiens
tatccaaaggcattc

SEQ ID NO: 31541 - DNA, 15 bp, Homo sapiens
ttatccaaaggcatt

SEQ ID NO: 31542 - DNA, 15 bp, Homo sapiens
tttatccaaaggcat

SEQ ID NO: 31543 - DNA, 15 bp, Homo sapiens
ttttatccaaaggca

SEQ ID NO: 31544 - DNA, 15 bp, Homo sapiens
attttatccaaaggc

SEQ ID NO: 31545 - DNA, 15 bp, Homo sapiens
tattttatccaaagg

SEQ ID NO: 31546 - DNA, 15 bp, Homo sapiens
gtattttatccaaag

SEQ ID NO: 31547 - DNA, 15 bp, Homo sapiens
ggtattttatccaaa

SEQ ID NO: 31548 - DNA, 15 bp, Homo sapiens
tggtattttatccaa

SEQ ID NO: 31549 - DNA, 15 bp, Homo sapiens
atggtattttatcca

SEQ ID NO: 31550 - DNA, 15 bp, Homo sapiens
aatggtattttatcc

SEQ ID NO: 31551 - DNA, 15 bp, Homo sapiens
taatggtattttatc

SEQ ID NO: 31552 - DNA, 15 bp, Homo sapiens
gtaatggtattttat

SEQ ID NO: 31553 - DNA, 15 bp, Homo sapiens
ggtaatggtatttta

SEQ ID NO: 31554 - DNA, 15 bp, Homo sapiens
aggtaatggtatttt

SEQ ID NO: 31555 - DNA, 15 bp, Homo sapiens
taggtaatggtattt

SEQ ID NO: 31556 - DNA, 15 bp, Homo sapiens
ctaggtaatggtatt

SEQ ID NO: 31557 - DNA, 15 bp, Homo sapiens
actaggtaatggtat

SEQ ID NO: 31558 - DNA, 15 bp, Homo sapiens
tactaggtaatggta

SEQ ID NO: 31559 - DNA, 15 bp, Homo sapiens
ttactaggtaatggt

SEQ ID NO: 31560 - DNA, 15 bp, Homo sapiens
tttactaggtaatgg

SEQ ID NO: 31561 - DNA, 15 bp, Homo sapiens
ctttactaggtaatg

SEQ ID NO: 31562 - DNA, 15 bp, Homo sapiens
actttactaggtaat

SEQ ID NO: 31563 - DNA, 15 bp, Homo sapiens
cactttactaggtaa

SEQ ID NO: 31564 - DNA, 15 bp, Homo sapiens
acactttactaggta

SEQ ID NO: 31565 - DNA, 15 bp, Homo sapiens
cacactttactaggt

SEQ ID NO: 31566 - DNA, 15 bp, Homo sapiens
tcacactttactagg

SEQ ID NO: 31567 - DNA, 15 bp, Homo sapiens
ttcacactttactag

SEQ ID NO: 31568 - DNA, 15 bp, Homo sapiens
gttcacactttacta

SEQ ID NO: 31569 - DNA, 15 bp, Homo sapiens
agttcacactttact

SEQ ID NO: 31570 - DNA, 15 bp, Homo sapiens
aagttcacactttac

SEQ ID NO: 31571 - DNA, 15 bp, Homo sapiens
aaagttcacacttta

SEQ ID NO: 31572 - DNA, 15 bp, Homo sapiens
aaaagttcacacttt

SEQ ID NO: 31573 - DNA, 15 bp, Homo sapiens
taaaagttcacactt

SEQ ID NO: 31574 - DNA, 15 bp, Homo sapiens
ataaaagttcacact

SEQ ID NO: 31575 - DNA, 15 bp, Homo sapiens
tataaaagttcacac

SEQ ID NO: 31576 - DNA, 15 bp, Homo sapiens
ttataaaagttcaca

SEQ ID NO: 31577 - DNA, 15 bp, Homo sapiens
attataaaagttcac

SEQ ID NO: 31578 - DNA, 15 bp, Homo sapiens
gattataaaagttca

SEQ ID NO: 31579 - DNA, 15 bp, Homo sapiens
ggattataaaagttc

SEQ ID NO: 31580 - DNA, 15 bp, Homo sapiens
tggattataaaagtt

SEQ ID NO: 31581 - DNA, 15 bp, Homo sapiens
atggattataaaagt

SEQ ID NO: 31582 - DNA, 15 bp, Homo sapiens
tatggattataaaag

SEQ ID NO: 31583 - DNA, 15 bp, Homo sapiens
ttatggattataaaa

SEQ ID NO: 31584 - DNA, 15 bp, Homo sapiens
tttatggattataaa

SEQ ID NO: 31585 - DNA, 15 bp, Homo sapiens
ttttatggattataa

SEQ ID NO: 31586 - DNA, 15 bp, Homo sapiens
tttttatggattata

SEQ ID NO: 31587 - DNA, 15 bp, Homo sapiens
atttttatggattat

SEQ ID NO: 31588 - DNA, 15 bp, Homo sapiens
aatttttatggatta

SEQ ID NO: 31589 - DNA, 15 bp, Homo sapiens
taatttttatggatt

SEQ ID NO: 31590 - DNA, 15 bp, Homo sapiens
ataatttttatggat

SEQ ID NO: 31591 - DNA, 15 bp, Homo sapiens
aataatttttatgga

SEQ ID NO: 31592 - DNA, 15 bp, Homo sapiens
gaataatttttatgg

SEQ ID NO: 31593 - DNA, 15 bp, Homo sapiens
agaataatttttatg

SEQ ID NO: 31594 - DNA, 15 bp, Homo sapiens
aagaataatttttat

SEQ ID NO: 31595 - DNA, 15 bp, Homo sapiens
aaagaataattttta

SEQ ID NO: 31596 - DNA, 15 bp, Homo sapiens
aaaagaataattttt

SEQ ID NO: 31597 - DNA, 15 bp, Homo sapiens
taaaagaataatttt

SEQ ID NO: 31598 - DNA, 15 bp, Homo sapiens
ataaaagaataattt

SEQ ID NO: 31599 - DNA, 15 bp, Homo sapiens
tataaaagaataatt

SEQ ID NO: 31600 - DNA, 15 bp, Homo sapiens
ttataaaagaataat

SEQ ID NO: 31601 - DNA, 15 bp, Homo sapiens
cttataaaagaataa

SEQ ID NO: 31602 - DNA, 15 bp, Homo sapiens
tcttataaaagaata

SEQ ID NO: 31603 - DNA, 15 bp, Homo sapiens
ttcttataaaagaat

SEQ ID NO: 31604 - DNA, 15 bp, Homo sapiens
attcttataaaagaa

SEQ ID NO: 31605 - DNA, 15 bp, Homo sapiens
tattcttataaaaga

SEQ ID NO: 31606 - DNA, 15 bp, Homo sapiens
atattcttataaaag

SEQ ID NO: 31607 - DNA, 15 bp, Homo sapiens
aatattcttataaaa

SEQ ID NO: 31608 - DNA, 15 bp, Homo sapiens
gaatattcttataaa

SEQ ID NO: 31609 - DNA, 15 bp, Homo sapiens
tgaatattcttataa

SEQ ID NO: 31610 - DNA, 15 bp, Homo sapiens
atgaatattcttata

SEQ ID NO: 31611 - DNA, 15 bp, Homo sapiens
tatgaatattcttat

SEQ ID NO: 31612 - DNA, 15 bp, Homo sapiens
ttatgaatattctta

SEQ ID NO: 31613 - DNA, 15 bp, Homo sapiens
tttatgaatattctt

SEQ ID NO: 31614 - DNA, 15 bp, Homo sapiens
atttatgaatattct

SEQ ID NO: 31615 - DNA, 15 bp, Homo sapiens
catttatgaatattc

SEQ ID NO: 31616 - DNA, 15 bp, Homo sapiens
acatttatgaatatt

SEQ ID NO: 31617 - DNA, 15 bp, Homo sapiens
tacatttatgaatat

SEQ ID NO: 31618 - DNA, 15 bp, Homo sapiens
ctacatttatgaata

SEQ ID NO: 31619 - DNA, 15 bp, Homo sapiens
actacatttatgaat

SEQ ID NO: 31620 - DNA, 15 bp, Homo sapiens
aactacatttatgaa

SEQ ID NO: 31621 - DNA, 15 bp, Homo sapiens
taactacatttatga

SEQ ID NO: 31622 - DNA, 15 bp, Homo sapiens
ctaactacatttatg

SEQ ID NO: 31623 - DNA, 15 bp, Homo sapiens
tctaactacatttat

SEQ ID NO: 31624 - DNA, 15 bp, Homo sapiens
atctaactacattta

SEQ ID NO: 31625 - DNA, 15 bp, Homo sapiens
aatctaactacattt

SEQ ID NO: 31626 - DNA, 15 bp, Homo sapiens
taatctaactacatt

SEQ ID NO: 31627 - DNA, 15 bp, Homo sapiens
ttaatctaactacat

SEQ ID NO: 31628 - DNA, 15 bp, Homo sapiens
attaatctaactaca

SEQ ID NO: 31629 - DNA, 15 bp, Homo sapiens
tattaatctaactac

SEQ ID NO: 31630 - DNA, 15 bp, Homo sapiens
ctattaatctaacta

SEQ ID NO: 31631 - DNA, 15 bp, Homo sapiens
tctattaatctaact

SEQ ID NO: 31632 - DNA, 15 bp, Homo sapiens
ttctattaatctaac

SEQ ID NO: 31633 - DNA, 15 bp, Homo sapiens
cttctattaatctaa

SEQ ID NO: 31634 - DNA, 15 bp, Homo sapiens
tcttctattaatcta

SEQ ID NO: 31635 - DNA, 15 bp, Homo sapiens
atcttctattaatct

SEQ ID NO: 31636 - DNA, 15 bp, Homo sapiens
aatcttctattaatc

SEQ ID NO: 31637 - DNA, 15 bp, Homo sapiens
gaatcttctattaat

SEQ ID NO: 31638 - DNA, 15 bp, Homo sapiens
agaatcttctattaa

SEQ ID NO: 31639 - DNA, 15 bp, Homo sapiens
gagaatcttctatta

SEQ ID NO: 31640 - DNA, 15 bp, Homo sapiens
cgagaatcttctatt

SEQ ID NO: 31641 - DNA, 15 bp, Homo sapiens
tcgagaatcttctat

SEQ ID NO: 31642 - DNA, 15 bp, Homo sapiens
atcgagaatcttcta

SEQ ID NO: 31643 - DNA, 15 bp, Homo sapiens
aatcgagaatcttct

SEQ ID NO: 31644 - DNA, 15 bp, Homo sapiens
gaatcgagaatcttc

SEQ ID NO: 31645 - DNA, 15 bp, Homo sapiens
agaatcgagaatctt

SEQ ID NO: 31646 - DNA, 15 bp, Homo sapiens
aagaatcgagaatct

SEQ ID NO: 31647 - DNA, 15 bp, Homo sapiens
aaagaatcgagaatc

SEQ ID NO: 31648 - DNA, 15 bp, Homo sapiens
caaagaatcgagaat

SEQ ID NO: 31649 - DNA, 15 bp, Homo sapiens
tcaaagaatcgagaa

SEQ ID NO: 31650 - DNA, 15 bp, Homo sapiens
atcaaagaatcgaga

SEQ ID NO: 31651 - DNA, 15 bp, Homo sapiens
gatcaaagaatcgag

SEQ ID NO: 31652 - DNA, 15 bp, Homo sapiens
tgatcaaagaatcga

SEQ ID NO: 31653 - DNA, 15 bp, Homo sapiens
ctgatcaaagaatcg

SEQ ID NO: 31654 - DNA, 15 bp, Homo sapiens
tctgatcaaagaatc

SEQ ID NO: 31655 - DNA, 15 bp, Homo sapiens
ttctgatcaaagaat

SEQ ID NO: 31656 - DNA, 15 bp, Homo sapiens
tttctgatcaaagaa

SEQ ID NO: 31657 - DNA, 15 bp, Homo sapiens
ttttctgatcaaaga

SEQ ID NO: 31658 - DNA, 15 bp, Homo sapiens
gttttctgatcaaag

SEQ ID NO: 31659 - DNA, 15 bp, Homo sapiens
agttttctgatcaaa

SEQ ID NO: 31660 - DNA, 15 bp, Homo sapiens
tagttttctgatcaa

SEQ ID NO: 31661 - DNA, 15 bp, Homo sapiens
ttagttttctgatca

SEQ ID NO: 31662 - DNA, 15 bp, Homo sapiens
cttagttttctgatc

SEQ ID NO: 31663 - DNA, 15 bp, Homo sapiens
ccttagttttctgat

SEQ ID NO: 31664 - DNA, 15 bp, Homo sapiens
tccttagttttctga

SEQ ID NO: 31665 - DNA, 15 bp, Homo sapiens
gtccttagttttctg

SEQ ID NO: 31666 - DNA, 15 bp, Homo sapiens
agtccttagttttct

SEQ ID NO: 31667 - DNA, 15 bp, Homo sapiens
tagtccttagttttc

SEQ ID NO: 31668 - DNA, 15 bp, Homo sapiens
atagtccttagtttt

SEQ ID NO: 31669 - DNA, 15 bp, Homo sapiens
tatagtccttagttt

SEQ ID NO: 31670 - DNA, 15 bp, Homo sapiens
atatagtccttagtt

SEQ ID NO: 31671 - DNA, 15 bp, Homo sapiens
aatatagtccttagt

SEQ ID NO: 31672 - DNA, 15 bp, Homo sapiens
caatatagtccttag

SEQ ID NO: 31673 - DNA, 15 bp, Homo sapiens
tcaatatagtcctta

SEQ ID NO: 31674 - DNA, 15 bp, Homo sapiens
ttcaatatagtcctt

SEQ ID NO: 31675 - DNA, 15 bp, Homo sapiens
tttcaatatagtcct

SEQ ID NO: 31676 - DNA, 15 bp, Homo sapiens
ttttcaatatagtcc

SEQ ID NO: 31677 - DNA, 15 bp, Homo sapiens
tttttcaatatagtc

SEQ ID NO: 31678 - DNA, 15 bp, Homo sapiens
atttttcaatatagt

SEQ ID NO: 31679 - DNA, 15 bp, Homo sapiens
gatttttcaatatag

SEQ ID NO: 31680 - DNA, 15 bp, Homo sapiens
tgatttttcaatata

SEQ ID NO: 31681 - DNA, 15 bp, Homo sapiens
ctgatttttcaatat

SEQ ID NO: 31682 - DNA, 15 bp, Homo sapiens
actgatttttcaata

SEQ ID NO: 31683 - DNA, 15 bp, Homo sapiens
cactgatttttcaat

SEQ ID NO: 31684 - DNA, 15 bp, Homo sapiens
tcactgatttttcaa

SEQ ID NO: 31685 - DNA, 15 bp, Homo sapiens
gtcactgatttttca

SEQ ID NO: 31686 - DNA, 15 bp, Homo sapiens
tgtcactgatttttc

SEQ ID NO: 31687 - DNA, 15 bp, Homo sapiens
ttgtcactgattttt

SEQ ID NO: 31688 - DNA, 15 bp, Homo sapiens
tttgtcactgatttt

SEQ ID NO: 31689 - DNA, 15 bp, Homo sapiens
atttgtcactgattt

SEQ ID NO: 31690 - DNA, 15 bp, Homo sapiens
aatttgtcactgatt

SEQ ID NO: 31691 - DNA, 15 bp, Homo sapiens
aaatttgtcactgat

SEQ ID NO: 31692 - DNA, 15 bp, Homo sapiens
taaatttgtcactga

SEQ ID NO: 31693 - DNA, 15 bp, Homo sapiens
ttaaatttgtcactg

SEQ ID NO: 31694 - DNA, 15 bp, Homo sapiens
attaaatttgtcact

SEQ ID NO: 31695 - DNA, 15 bp, Homo sapiens
aattaaatttgtcac

SEQ ID NO: 31696 - DNA, 15 bp, Homo sapiens
gaattaaatttgtca

SEQ ID NO: 31697 - DNA, 15 bp, Homo sapiens
agaattaaatttgtc

SEQ ID NO: 31698 - DNA, 15 bp, Homo sapiens
aagaattaaatttgt

SEQ ID NO: 31699 - DNA, 15 bp, Homo sapiens
taagaattaaatttg

SEQ ID NO: 31700 - DNA, 15 bp, Homo sapiens
ataagaattaaattt

SEQ ID NO: 31701 - DNA, 15 bp, Homo sapiens
tataagaattaaatt

SEQ ID NO: 31702 - DNA, 15 bp, Homo sapiens
ctataagaattaaat

SEQ ID NO: 31703 - DNA, 15 bp, Homo sapiens
actataagaattaaa

SEQ ID NO: 31704 - DNA, 15 bp, Homo sapiens
tactataagaattaa

SEQ ID NO: 31705 - DNA, 15 bp, Homo sapiens
gtactataagaatta

SEQ ID NO: 31706 - DNA, 15 bp, Homo sapiens
tgtactataagaatt

SEQ ID NO: 31707 - DNA, 15 bp, Homo sapiens
atgtactataagaat

SEQ ID NO: 31708 - DNA, 15 bp, Homo sapiens
gatgtactataagaa

SEQ ID NO: 31709 - DNA, 15 bp, Homo sapiens
agatgtactataaga

SEQ ID NO: 31710 - DNA, 15 bp, Homo sapiens
cagatgtactataag

SEQ ID NO: 31711 - DNA, 15 bp, Homo sapiens
tcagatgtactataa

SEQ ID NO: 31712 - DNA, 15 bp, Homo sapiens
ttcagatgtactata

SEQ ID NO: 31713 - DNA, 15 bp, Homo sapiens
tttcagatgtactat

SEQ ID NO: 31714 - DNA, 15 bp, Homo sapiens
ctttcagatgtacta

SEQ ID NO: 31715 - DNA, 15 bp, Homo sapiens
tctttcagatgtact

SEQ ID NO: 31716 - DNA, 15 bp, Homo sapiens
ttctttcagatgtac

SEQ ID NO: 31717 - DNA, 15 bp, Homo sapiens
tttctttcagatgta

SEQ ID NO: 31718 - DNA, 15 bp, Homo sapiens
ttttctttcagatgt

SEQ ID NO: 31719 - DNA, 15 bp, Homo sapiens
tttttctttcagatg

SEQ ID NO: 31720 - DNA, 15 bp, Homo sapiens
ttttttctttcagat

SEQ ID NO: 31721 - DNA, 15 bp, Homo sapiens
cttttttctttcaga

SEQ ID NO: 31722 - DNA, 15 bp, Homo sapiens
tcttttttctttcag

SEQ ID NO: 31723 - DNA, 15 bp, Homo sapiens
ttcttttttctttca

SEQ ID NO: 31724 - DNA, 15 bp, Homo sapiens
tttcttttttctttc

SEQ ID NO: 31725 - DNA, 15 bp, Homo sapiens
ttttcttttttcttt

SEQ ID NO: 31726 - DNA, 15 bp, Homo sapiens
gttttcttttttctt

SEQ ID NO: 31727 - DNA, 15 bp, Homo sapiens
agttttcttttttct

SEQ ID NO: 31728 - DNA, 15 bp, Homo sapiens
gagttttcttttttc

SEQ ID NO: 31729 - DNA, 15 bp, Homo sapiens
agagttttctttttt

SEQ ID NO: 31730 - DNA, 15 bp, Homo sapiens
aagagttttcttttt

SEQ ID NO: 31731 - DNA, 15 bp, Homo sapiens
caagagttttctttt

SEQ ID NO: 31732 - DNA, 15 bp, Homo sapiens
ccaagagttttcttt

SEQ ID NO: 31733 - DNA, 15 bp, Homo sapiens
cccaagagttttctt

SEQ ID NO: 31734 - DNA, 15 bp, Homo sapiens
tcccaagagttttct

SEQ ID NO: 31735 - DNA, 15 bp, Homo sapiens
ctcccaagagttttc

SEQ ID NO: 31736 - DNA, 15 bp, Homo sapiens
tctcccaagagtttt

SEQ ID NO: 31737 - DNA, 15 bp, Homo sapiens
ttctcccaagagttt

SEQ ID NO: 31738 - DNA, 15 bp, Homo sapiens
gttctcccaagagtt

SEQ ID NO: 31739 - DNA, 15 bp, Homo sapiens
agttctcccaagagt

SEQ ID NO: 31740 - DNA, 15 bp, Homo sapiens
aagttctcccaagag

SEQ ID NO: 31741 - DNA, 15 bp, Homo sapiens
aaagttctcccaaga

SEQ ID NO: 31742 - DNA, 15 bp, Homo sapiens
aaaagttctcccaag

SEQ ID NO: 31743 - DNA, 15 bp, Homo sapiens
taaaagttctcccaa

SEQ ID NO: 31744 - DNA, 15 bp, Homo sapiens
gtaaaagttctccca

SEQ ID NO: 31745 - DNA, 15 bp, Homo sapiens
tgtaaaagttctccc

SEQ ID NO: 31746 - DNA, 15 bp, Homo sapiens
ctgtaaaagttctcc

SEQ ID NO: 31747 - DNA, 15 bp, Homo sapiens
actgtaaaagttctc

SEQ ID NO: 31748 - DNA, 15 bp, Homo sapiens
cactgtaaaagttct

SEQ ID NO: 31749 - DNA, 15 bp, Homo sapiens
tcactgtaaaagttc

SEQ ID NO: 31750 - DNA, 15 bp, Homo sapiens
atcactgtaaaagtt

SEQ ID NO: 31751 - DNA, 15 bp, Homo sapiens
aatcactgtaaaagt

SEQ ID NO: 31752 - DNA, 15 bp, Homo sapiens
aaatcactgtaaaag

SEQ ID NO: 31753 - DNA, 15 bp, Homo sapiens
taaatcactgtaaaa

SEQ ID NO: 31754 - DNA, 15 bp, Homo sapiens
ttaaatcactgtaaa

SEQ ID NO: 31755 - DNA, 15 bp, Homo sapiens
attaaatcactgtaa

SEQ ID NO: 31756 - DNA, 15 bp, Homo sapiens
aattaaatcactgta

SEQ ID NO: 31757 - DNA, 15 bp, Homo sapiens
aaattaaatcactgt

SEQ ID NO: 31758 - DNA, 15 bp, Homo sapiens
aaaattaaatcactg

SEQ ID NO: 31759 - DNA, 15 bp, Homo sapiens
caaaattaaatcact

SEQ ID NO: 31760 - DNA, 15 bp, Homo sapiens
gcaaaattaaatcac

SEQ ID NO: 31761 - DNA, 15 bp, Homo sapiens
agcaaaattaaatca

SEQ ID NO: 31762 - DNA, 15 bp, Homo sapiens
cagcaaaattaaatc

SEQ ID NO: 31763 - DNA, 15 bp, Homo sapiens
acagcaaaattaaat

SEQ ID NO: 31764 - DNA, 15 bp, Homo sapiens
aacagcaaaattaaa

SEQ ID NO: 31765 - DNA, 15 bp, Homo sapiens
caacagcaaaattaa

SEQ ID NO: 31766 - DNA, 15 bp, Homo sapiens
tcaacagcaaaatta

SEQ ID NO: 31767 - DNA, 15 bp, Homo sapiens
atcaacagcaaaatt

SEQ ID NO: 31768 - DNA, 15 bp, Homo sapiens
tatcaacagcaaaat

SEQ ID NO: 31769 - DNA, 15 bp, Homo sapiens
atatcaacagcaaaa

SEQ ID NO: 31770 - DNA, 15 bp, Homo sapiens
tatatcaacagcaaa

SEQ ID NO: 31771 - DNA, 15 bp, Homo sapiens
atatatcaacagcaa

SEQ ID NO: 31772 - DNA, 15 bp, Homo sapiens
aatatatcaacagca

SEQ ID NO: 31773 - DNA, 15 bp, Homo sapiens
aaatatatcaacagc

SEQ ID NO: 31774 - DNA, 15 bp, Homo sapiens
gaaatatatcaacag

SEQ ID NO: 31775 - DNA, 15 bp, Homo sapiens
agaaatatatcaaca

SEQ ID NO: 31776 - DNA, 15 bp, Homo sapiens
aagaaatatatcaac

SEQ ID NO: 31777 - DNA, 15 bp, Homo sapiens
aaagaaatatatcaa

SEQ ID NO: 31778 - DNA, 15 bp, Homo sapiens
caaagaaatatatca

SEQ ID NO: 31779 - DNA, 15 bp, Homo sapiens
ccaaagaaatatatc

SEQ ID NO: 31780 - DNA, 15 bp, Homo sapiens
cccaaagaaatatat

SEQ ID NO: 31781 - DNA, 15 bp, Homo sapiens
acccaaagaaatata

SEQ ID NO: 31782 - DNA, 15 bp, Homo sapiens
cacccaaagaaatat

SEQ ID NO: 31783 - DNA, 15 bp, Homo sapiens
ccacccaaagaaata

SEQ ID NO: 31784 - DNA, 15 bp, Homo sapiens
accacccaaagaaat

SEQ ID NO: 31785 - DNA, 15 bp, Homo sapiens
taccacccaaagaaa

SEQ ID NO: 31786 - DNA, 15 bp, Homo sapiens
ttaccacccaaagaa

SEQ ID NO: 31787 - DNA, 15 bp, Homo sapiens
cttaccacccaaaga

SEQ ID NO: 31788 - DNA, 15 bp, Homo sapiens
acttaccacccaaag

SEQ ID NO: 31789 - DNA, 15 bp, Homo sapiens
tacttaccacccaaa

SEQ ID NO: 31790 - DNA, 15 bp, Homo sapiens
atacttaccacccaa

SEQ ID NO: 31791 - DNA, 15 bp, Homo sapiens
catacttaccaccca

SEQ ID NO: 31792 - DNA, 15 bp, Homo sapiens
ccatacttaccaccc

SEQ ID NO: 31793 - DNA, 15 bp, Homo sapiens
gccatacttaccacc

SEQ ID NO: 31794 - DNA, 15 bp, Homo sapiens
tgccatacttaccac

SEQ ID NO: 31795 - DNA, 15 bp, Homo sapiens
ttgccatacttacca

SEQ ID NO: 31796 - DNA, 15 bp, Homo sapiens
tttgccatacttacc

SEQ ID NO: 31797 - DNA, 15 bp, Homo sapiens
ttttgccatacttac

SEQ ID NO: 31798 - DNA, 15 bp, Homo sapiens
gttttgccatactta

SEQ ID NO: 31799 - DNA, 15 bp, Homo sapiens
tgttttgccatactt

SEQ ID NO: 31800 - DNA, 15 bp, Homo sapiens
atgttttgccatact

SEQ ID NO: 31801 - DNA, 15 bp, Homo sapiens
catgttttgccatac

SEQ ID NO: 31802 - DNA, 15 bp, Homo sapiens
acatgttttgccata

SEQ ID NO: 31803 - DNA, 15 bp, Homo sapiens
aacatgttttgccat

SEQ ID NO: 31804 - DNA, 15 bp, Homo sapiens
taacatgttttgcca

SEQ ID NO: 31805 - DNA, 15 bp, Homo sapiens
ttaacatgttttgcc

SEQ ID NO: 31806 - DNA, 15 bp, Homo sapiens
tttaacatgttttgc

SEQ ID NO: 31807 - DNA, 15 bp, Homo sapiens
ttttaacatgttttg

SEQ ID NO: 31808 - DNA, 15 bp, Homo sapiens
attttaacatgtttt

SEQ ID NO: 31809 - DNA, 15 bp, Homo sapiens
aattttaacatgttt

SEQ ID NO: 31810 - DNA, 15 bp, Homo sapiens
aaattttaacatgtt

SEQ ID NO: 31811 - DNA, 15 bp, Homo sapiens
taaattttaacatgt

SEQ ID NO: 31812 - DNA, 15 bp, Homo sapiens
ttaaattttaacatg

SEQ ID NO: 31813 - DNA, 15 bp, Homo sapiens
attaaattttaacat

SEQ ID NO: 31814 - DNA, 15 bp, Homo sapiens
cattaaattttaaca

SEQ ID NO: 31815 - DNA, 15 bp, Homo sapiens
gcattaaattttaac

SEQ ID NO: 31816 - DNA, 15 bp, Homo sapiens
tgcattaaattttaa

SEQ ID NO: 31817 - DNA, 15 bp, Homo sapiens
ttgcattaaatttta

SEQ ID NO: 31818 - DNA, 15 bp, Homo sapiens
tttgcattaaatttt

SEQ ID NO: 31819 - DNA, 15 bp, Homo sapiens
ctttgcattaaattt

SEQ ID NO: 31820 - DNA, 15 bp, Homo sapiens
tctttgcattaaatt

SEQ ID NO: 31821 - DNA, 15 bp, Homo sapiens
ctctttgcattaaat

SEQ ID NO: 31822 - DNA, 15 bp, Homo sapiens
tctctttgcattaaa

SEQ ID NO: 31823 - DNA, 15 bp, Homo sapiens
atctctttgcattaa

SEQ ID NO: 31824 - DNA, 15 bp, Homo sapiens
aatctctttgcatta

SEQ ID NO: 31825 - DNA, 15 bp, Homo sapiens
aaatctctttgcatt

SEQ ID NO: 31826 - DNA, 15 bp, Homo sapiens
aaaatctctttgcat

SEQ ID NO: 31827 - DNA, 15 bp, Homo sapiens
caaaatctctttgca

SEQ ID NO: 31828 - DNA, 15 bp, Homo sapiens
acaaaatctctttgc

SEQ ID NO: 31829 - DNA, 15 bp, Homo sapiens
tacaaaatctctttg

SEQ ID NO: 31830 - DNA, 15 bp, Homo sapiens
gtacaaaatctcttt

SEQ ID NO: 31831 - DNA, 15 bp, Homo sapiens
tgtacaaaatctctt

SEQ ID NO: 31832 - DNA, 15 bp, Homo sapiens
atgtacaaaatctct

SEQ ID NO: 31833 - DNA, 15 bp, Homo sapiens
aatgtacaaaatctc

SEQ ID NO: 31834 - DNA, 15 bp, Homo sapiens
aaatgtacaaaatct

SEQ ID NO: 31835 - DNA, 15 bp, Homo sapiens
aaaatgtacaaaatc

SEQ ID NO: 31836 - DNA, 15 bp, Homo sapiens
aaaaatgtacaaaat

SEQ ID NO: 31837 - DNA, 15 bp, Homo sapiens
gaaaaatgtacaaaa

SEQ ID NO: 31838 - DNA, 15 bp, Homo sapiens
ggaaaaatgtacaaa

SEQ ID NO: 31839 - DNA, 15 bp, Homo sapiens
tggaaaaatgtacaa

SEQ ID NO: 31840 - DNA, 15 bp, Homo sapiens
atggaaaaatgtaca

SEQ ID NO: 31841 - DNA, 15 bp, Homo sapiens
gatggaaaaatgtac

SEQ ID NO: 31842 - DNA, 15 bp, Homo sapiens
agatggaaaaatgta

SEQ ID NO: 31843 - DNA, 15 bp, Homo sapiens
gagatggaaaaatgt

SEQ ID NO: 31844 - DNA, 15 bp, Homo sapiens
agagatggaaaaatg

SEQ ID NO: 31845 - DNA, 15 bp, Homo sapiens
tagagatggaaaaat

SEQ ID NO: 31846 - DNA, 15 bp, Homo sapiens
ttagagatggaaaaa

SEQ ID NO: 31847 - DNA, 15 bp, Homo sapiens
cttagagatggaaaa

SEQ ID NO: 31848 - DNA, 15 bp, Homo sapiens
tcttagagatggaaa

SEQ ID NO: 31849 - DNA, 15 bp, Homo sapiens
ttcttagagatggaa

SEQ ID NO: 31850 - DNA, 15 bp, Homo sapiens
cttcttagagatgga

SEQ ID NO: 31851 - DNA, 15 bp, Homo sapiens
ccttcttagagatgg

SEQ ID NO: 31852 - DNA, 15 bp, Homo sapiens
tccttcttagagatg

SEQ ID NO: 31853 - DNA, 15 bp, Homo sapiens
gtccttcttagagat

SEQ ID NO: 31854 - DNA, 15 bp, Homo sapiens
tgtccttcttagaga

SEQ ID NO: 31855 - DNA, 15 bp, Homo sapiens
ttgtccttcttagag

SEQ ID NO: 31856 - DNA, 15 bp, Homo sapiens
tttgtccttcttaga

SEQ ID NO: 31857 - DNA, 15 bp, Homo sapiens
ctttgtccttcttag

SEQ ID NO: 31858 - DNA, 15 bp, Homo sapiens
gctttgtccttctta

SEQ ID NO: 31859 - DNA, 15 bp, Homo sapiens
ggctttgtccttctt

SEQ ID NO: 31860 - DNA, 15 bp, Homo sapiens
aggctttgtccttct

SEQ ID NO: 31861 - DNA, 15 bp, Homo sapiens
taggctttgtccttc

SEQ ID NO: 31862 - DNA, 15 bp, Homo sapiens
ttaggctttgtcctt

SEQ ID NO: 31863 - DNA, 15 bp, Homo sapiens
cttaggctttgtcct

SEQ ID NO: 31864 - DNA, 15 bp, Homo sapiens
gcttaggctttgtcc

SEQ ID NO: 31865 - DNA, 15 bp, Homo sapiens
ggcttaggctttgtc

SEQ ID NO: 31866 - DNA, 15 bp, Homo sapiens
gggcttaggctttgt

SEQ ID NO: 31867 - DNA, 15 bp, Homo sapiens
ggggcttaggctttg

SEQ ID NO: 31868 - DNA, 15 bp, Homo sapiens
aggggcttaggcttt

SEQ ID NO: 31869 - DNA, 15 bp, Homo sapiens
gaggggcttaggctt

SEQ ID NO: 31870 - DNA, 15 bp, Homo sapiens
ggaggggcttaggct

SEQ ID NO: 31871 - DNA, 15 bp, Homo sapiens
tggaggggcttaggc

SEQ ID NO: 31872 - DNA, 15 bp, Homo sapiens
ctggaggggcttagg

SEQ ID NO: 31873 - DNA, 15 bp, Homo sapiens
tctggaggggcttag

SEQ ID NO: 31874 - DNA, 15 bp, Homo sapiens
atctggaggggctta

SEQ ID NO: 31875 - DNA, 15 bp, Homo sapiens
tatctggaggggctt

SEQ ID NO: 31876 - DNA, 15 bp, Homo sapiens
ctatctggaggggct

SEQ ID NO: 31877 - DNA, 15 bp, Homo sapiens
tctatctggaggggc

SEQ ID NO: 31878 - DNA, 15 bp, Homo sapiens
atctatctggagggg

SEQ ID NO: 31879 - DNA, 15 bp, Homo sapiens
tatctatctggaggg

SEQ ID NO: 31880 - DNA, 15 bp, Homo sapiens
ctatctatctggagg

SEQ ID NO: 31881 - DNA, 15 bp, Homo sapiens
tctatctatctggag

SEQ ID NO: 31882 - DNA, 15 bp, Homo sapiens
ttctatctatctgga

SEQ ID NO: 31883 - DNA, 15 bp, Homo sapiens
tttctatctatctgg

SEQ ID NO: 31884 - DNA, 15 bp, Homo sapiens
ttttctatctatctg

SEQ ID NO: 31885 - DNA, 15 bp, Homo sapiens
tttttctatctatct

SEQ ID NO: 31886 - DNA, 15 bp, Homo sapiens
gtttttctatctatc

SEQ ID NO: 31887 - DNA, 15 bp, Homo sapiens
agtttttctatctat

SEQ ID NO: 31888 - DNA, 15 bp, Homo sapiens
gagtttttctatcta

SEQ ID NO: 31889 - DNA, 15 bp, Homo sapiens
tgagtttttctatct

SEQ ID NO: 31890 - DNA, 15 bp, Homo sapiens
atgagtttttctatc

SEQ ID NO: 31891 - DNA, 15 bp, Homo sapiens
aatgagtttttctat

SEQ ID NO: 31892 - DNA, 15 bp, Homo sapiens
aaatgagtttttcta

SEQ ID NO: 31893 - DNA, 15 bp, Homo sapiens
taaatgagtttttct

SEQ ID NO: 31894 - DNA, 15 bp, Homo sapiens
ctaaatgagtttttc

SEQ ID NO: 31895 - DNA, 15 bp, Homo sapiens
tctaaatgagttttt

SEQ ID NO: 31896 - DNA, 15 bp, Homo sapiens
ctctaaatgagtttt

SEQ ID NO: 31897 - DNA, 15 bp, Homo sapiens
tctctaaatgagttt

SEQ ID NO: 31898 - DNA, 15 bp, Homo sapiens
ctctctaaatgagtt

SEQ ID NO: 31899 - DNA, 15 bp, Homo sapiens
actctctaaatgagt

SEQ ID NO: 31900 - DNA, 15 bp, Homo sapiens
aactctctaaatgag

SEQ ID NO: 31901 - DNA, 15 bp, Homo sapiens
gaactctctaaatga

SEQ ID NO: 31902 - DNA, 15 bp, Homo sapiens
agaactctctaaatg

SEQ ID NO: 31903 - DNA, 15 bp, Homo sapiens
gagaactctctaaat

SEQ ID NO: 31904 - DNA, 15 bp, Homo sapiens
ggagaactctctaaa

SEQ ID NO: 31905 - DNA, 15 bp, Homo sapiens
aggagaactctctaa

SEQ ID NO: 31906 - DNA, 15 bp, Homo sapiens
aaggagaactctcta

SEQ ID NO: 31907 - DNA, 15 bp, Homo sapiens
gaaggagaactctct

SEQ ID NO: 31908 - DNA, 15 bp, Homo sapiens
tgaaggagaactctc

SEQ ID NO: 31909 - DNA, 15 bp, Homo sapiens
atgaaggagaactct

SEQ ID NO: 31910 - DNA, 15 bp, Homo sapiens
catgaaggagaactc

SEQ ID NO: 31911 - DNA, 15 bp, Homo sapiens
acatgaaggagaact

SEQ ID NO: 31912 - DNA, 15 bp, Homo sapiens
aacatgaaggagaac

SEQ ID NO: 31913 - DNA, 15 bp, Homo sapiens
taacatgaaggagaa

SEQ ID NO: 31914 - DNA, 15 bp, Homo sapiens
ttaacatgaaggaga

SEQ ID NO: 31915 - DNA, 15 bp, Homo sapiens
attaacatgaaggag

SEQ ID NO: 31916 - DNA, 15 bp, Homo sapiens
gattaacatgaagga

SEQ ID NO: 31917 - DNA, 15 bp, Homo sapiens
agattaacatgaagg

SEQ ID NO: 31918 - DNA, 15 bp, Homo sapiens
tagattaacatgaag

SEQ ID NO: 31919 - DNA, 15 bp, Homo sapiens
ttagattaacatgaa

SEQ ID NO: 31920 - DNA, 15 bp, Homo sapiens
attagattaacatga

SEQ ID NO: 31921 - DNA, 15 bp, Homo sapiens
aattagattaacatg

SEQ ID NO: 31922 - DNA, 15 bp, Homo sapiens
aaattagattaacat

SEQ ID NO: 31923 - DNA, 15 bp, Homo sapiens
gaaattagattaaca

SEQ ID NO: 31924 - DNA, 15 bp, Homo sapiens
agaaattagattaac

SEQ ID NO: 31925 - DNA, 15 bp, Homo sapiens
aagaaattagattaa

SEQ ID NO: 31926 - DNA, 15 bp, Homo sapiens
gaagaaattagatta

SEQ ID NO: 31927 - DNA, 15 bp, Homo sapiens
agaagaaattagatt

SEQ ID NO: 31928 - DNA, 15 bp, Homo sapiens
aagaagaaattagat

SEQ ID NO: 31929 - DNA, 15 bp, Homo sapiens
taagaagaaattaga

SEQ ID NO: 31930 - DNA, 15 bp, Homo sapiens
ttaagaagaaattag

SEQ ID NO: 31931 - DNA, 15 bp, Homo sapiens
attaagaagaaatta

SEQ ID NO: 31932 - DNA, 15 bp, Homo sapiens
aattaagaagaaatt

SEQ ID NO: 31933 - DNA, 15 bp, Homo sapiens
gaattaagaagaaat

SEQ ID NO: 31934 - DNA, 15 bp, Homo sapiens
tgaattaagaagaaa

SEQ ID NO: 31935 - DNA, 15 bp, Homo sapiens
ctgaattaagaagaa

SEQ ID NO: 31936 - DNA, 15 bp, Homo sapiens
gctgaattaagaaga

SEQ ID NO: 31937 - DNA, 15 bp, Homo sapiens
agctgaattaagaag

SEQ ID NO: 31938 - DNA, 15 bp, Homo sapiens
cagctgaattaagaa

SEQ ID NO: 31939 - DNA, 15 bp, Homo sapiens
acagctgaattaaga

SEQ ID NO: 31940 - DNA, 15 bp, Homo sapiens
tacagctgaattaag

SEQ ID NO: 31941 - DNA, 15 bp, Homo sapiens
ttacagctgaattaa

SEQ ID NO: 31942 - DNA, 15 bp, Homo sapiens
tttacagctgaatta

SEQ ID NO: 31943 - DNA, 15 bp, Homo sapiens
ttttacagctgaatt

SEQ ID NO: 31944 - DNA, 15 bp, Homo sapiens
gttttacagctgaat

SEQ ID NO: 31945 - DNA, 15 bp, Homo sapiens
tgttttacagctgaa

SEQ ID NO: 31946 - DNA, 15 bp, Homo sapiens
ctgttttacagctga

SEQ ID NO: 31947 - DNA, 15 bp, Homo sapiens
tctgttttacagctg

SEQ ID NO: 31948 - DNA, 15 bp, Homo sapiens
ttctgttttacagct

SEQ ID NO: 31949 - DNA, 15 bp, Homo sapiens
tttctgttttacagc

SEQ ID NO: 31950 - DNA, 15 bp, Homo sapiens
atttctgttttacag

SEQ ID NO: 31951 - DNA, 15 bp, Homo sapiens
tatttctgttttaca

SEQ ID NO: 31952 - DNA, 15 bp, Homo sapiens
ctatttctgttttac

SEQ ID NO: 31953 - DNA, 15 bp, Homo sapiens
tctatttctgtttta

SEQ ID NO: 31954 - DNA, 15 bp, Homo sapiens
ttctatttctgtttt

SEQ ID NO: 31955 - DNA, 15 bp, Homo sapiens
attctatttctgttt

SEQ ID NO: 31956 - DNA, 15 bp, Homo sapiens
cattctatttctgtt

SEQ ID NO: 31957 - DNA, 15 bp, Homo sapiens
tcattctatttctgt

SEQ ID NO: 31958 - DNA, 15 bp, Homo sapiens
atcattctatttctg

SEQ ID NO: 31959 - DNA, 15 bp, Homo sapiens
gatcattctatttct

SEQ ID NO: 31960 - DNA, 15 bp, Homo sapiens
cgatcattctatttc

SEQ ID NO: 31961 - DNA, 15 bp, Homo sapiens
acgatcattctattt

SEQ ID NO: 31962 - DNA, 15 bp, Homo sapiens
tacgatcattctatt

SEQ ID NO: 31963 - DNA, 15 bp, Homo sapiens
atacgatcattctat

SEQ ID NO: 31964 - DNA, 15 bp, Homo sapiens
aatacgatcattcta

SEQ ID NO: 31965 - DNA, 15 bp, Homo sapiens
taatacgatcattct

SEQ ID NO: 31966 - DNA, 15 bp, Homo sapiens
ttaatacgatcattc

SEQ ID NO: 31967 - DNA, 15 bp, Homo sapiens
attaatacgatcatt

SEQ ID NO: 31968 - DNA, 15 bp, Homo sapiens
gattaatacgatcat

SEQ ID NO: 31969 - DNA, 15 bp, Homo sapiens
tgattaatacgatca

SEQ ID NO: 31970 - DNA, 15 bp, Homo sapiens
atgattaatacgatc

SEQ ID NO: 31971 - DNA, 15 bp, Homo sapiens
aatgattaatacgat

SEQ ID NO: 31972 - DNA, 15 bp, Homo sapiens
aaatgattaatacga

SEQ ID NO: 31973 - DNA, 15 bp, Homo sapiens
taaatgattaatacg

SEQ ID NO: 31974 - DNA, 15 bp, Homo sapiens
ttaaatgattaatac

SEQ ID NO: 31975 - DNA, 15 bp, Homo sapiens
tttaaatgattaata

SEQ ID NO: 31976 - DNA, 15 bp, Homo sapiens
ctttaaatgattaat

SEQ ID NO: 31977 - DNA, 15 bp, Homo sapiens
gctttaaatgattaa

SEQ ID NO: 31978 - DNA, 15 bp, Homo sapiens
agctttaaatgatta

SEQ ID NO: 31979 - DNA, 15 bp, Homo sapiens
cagctttaaatgatt

SEQ ID NO: 31980 - DNA, 15 bp, Homo sapiens
acagctttaaatgat

SEQ ID NO: 31981 - DNA, 15 bp, Homo sapiens
cacagctttaaatga

SEQ ID NO: 31982 - DNA, 15 bp, Homo sapiens
acacagctttaaatg

SEQ ID NO: 31983 - DNA, 15 bp, Homo sapiens
tacacagctttaaat

SEQ ID NO: 31984 - DNA, 15 bp, Homo sapiens
ttacacagctttaaa

SEQ ID NO: 31985 - DNA, 15 bp, Homo sapiens
attacacagctttaa

SEQ ID NO: 31986 - DNA, 15 bp, Homo sapiens
aattacacagcttta

SEQ ID NO: 31987 - DNA, 15 bp, Homo sapiens
caattacacagcttt

SEQ ID NO: 31988 - DNA, 15 bp, Homo sapiens
gcaattacacagctt

SEQ ID NO: 31989 - DNA, 15 bp, Homo sapiens
tgcaattacacagct

SEQ ID NO: 31990 - DNA, 15 bp, Homo sapiens
atgcaattacacagc

SEQ ID NO: 31991 - DNA, 15 bp, Homo sapiens
tatgcaattacacag

SEQ ID NO: 31992 - DNA, 15 bp, Homo sapiens
ctatgcaattacaca

SEQ ID NO: 31993 - DNA, 15 bp, Homo sapiens
tctatgcaattacac

SEQ ID NO: 31994 - DNA, 15 bp, Homo sapiens
atctatgcaattaca

SEQ ID NO: 31995 - DNA, 15 bp, Homo sapiens
aatctatgcaattac

SEQ ID NO: 31996 - DNA, 15 bp, Homo sapiens
gaatctatgcaatta

SEQ ID NO: 31997 - DNA, 15 bp, Homo sapiens
ggaatctatgcaatt

SEQ ID NO: 31998 - DNA, 15 bp, Homo sapiens
aggaatctatgcaat

SEQ ID NO: 31999 - DNA, 15 bp, Homo sapiens
aaggaatctatgcaa

SEQ ID NO: 32000 - DNA, 15 bp, Homo sapiens
caaggaatctatgca

SEQ ID NO: 32001 - DNA, 15 bp, Homo sapiens
acaaggaatctatgc

SEQ ID NO: 32002 - DNA, 15 bp, Homo sapiens
aacaaggaatctatg

SEQ ID NO: 32003 - DNA, 15 bp, Homo sapiens
gaacaaggaatctat

SEQ ID NO: 32004 - DNA, 15 bp, Homo sapiens
ggaacaaggaatcta

SEQ ID NO: 32005 - DNA, 15 bp, Homo sapiens
aggaacaaggaatct

SEQ ID NO: 32006 - DNA, 15 bp, Homo sapiens
aaggaacaaggaatc

SEQ ID NO: 32007 - DNA, 15 bp, Homo sapiens
aaaggaacaaggaat

SEQ ID NO: 32008 - DNA, 15 bp, Homo sapiens
taaaggaacaaggaa

SEQ ID NO: 32009 - DNA, 15 bp, Homo sapiens
gtaaaggaacaagga

SEQ ID NO: 32010 - DNA, 15 bp, Homo sapiens
ggtaaaggaacaagg

SEQ ID NO: 32011 - DNA, 15 bp, Homo sapiens
gggtaaaggaacaag

SEQ ID NO: 32012 - DNA, 15 bp, Homo sapiens
ggggtaaaggaacaa

SEQ ID NO: 32013 - DNA, 15 bp, Homo sapiens
gggggtaaaggaaca

SEQ ID NO: 32014 - DNA, 15 bp, Homo sapiens
agggggtaaaggaac

SEQ ID NO: 32015 - DNA, 15 bp, Homo sapiens
gagggggtaaaggaa

SEQ ID NO: 32016 - DNA, 15 bp, Homo sapiens
agagggggtaaagga

SEQ ID NO: 32017 - DNA, 15 bp, Homo sapiens
aagagggggtaaagg

SEQ ID NO: 32018 - DNA, 15 bp, Homo sapiens
taagagggggtaaag

SEQ ID NO: 32019 - DNA, 15 bp, Homo sapiens
ataagagggggtaaa

SEQ ID NO: 32020 - DNA, 15 bp, Homo sapiens
tataagagggggtaa

SEQ ID NO: 32021 - DNA, 15 bp, Homo sapiens
atataagagggggta

SEQ ID NO: 32022 - DNA, 15 bp, Homo sapiens
gatataagagggggt

SEQ ID NO: 32023 - DNA, 15 bp, Homo sapiens
agatataagaggggg

SEQ ID NO: 32024 - DNA, 15 bp, Homo sapiens
aagatataagagggg

SEQ ID NO: 32025 - DNA, 15 bp, Homo sapiens
caagatataagaggg

SEQ ID NO: 32026 - DNA, 15 bp, Homo sapiens
acaagatataagagg

SEQ ID NO: 32027 - DNA, 15 bp, Homo sapiens
aacaagatataagag

SEQ ID NO: 32028 - DNA, 15 bp, Homo sapiens
aaacaagatataaga

SEQ ID NO: 32029 - DNA, 15 bp, Homo sapiens
gaaacaagatataag

SEQ ID NO: 32030 - DNA, 15 bp, Homo sapiens
ggaaacaagatataa

SEQ ID NO: 32031 - DNA, 15 bp, Homo sapiens
aggaaacaagatata

SEQ ID NO: 32032 - DNA, 15 bp, Homo sapiens
taggaaacaagatat

SEQ ID NO: 32033 - DNA, 15 bp, Homo sapiens
ataggaaacaagata

SEQ ID NO: 32034 - DNA, 15 bp, Homo sapiens
gataggaaacaagat

SEQ ID NO: 32035 - DNA, 15 bp, Homo sapiens
ggataggaaacaaga

SEQ ID NO: 32036 - DNA, 15 bp, Homo sapiens
aggataggaaacaag

SEQ ID NO: 32037 - DNA, 15 bp, Homo sapiens
aaggataggaaacaa

SEQ ID NO: 32038 - DNA, 15 bp, Homo sapiens
aaaggataggaaaca

SEQ ID NO: 32039 - DNA, 15 bp, Homo sapiens
caaaggataggaaac

SEQ ID NO: 32040 - DNA, 15 bp, Homo sapiens
acaaaggataggaaa

SEQ ID NO: 32041 - DNA, 15 bp, Homo sapiens
cacaaaggataggaa

SEQ ID NO: 32042 - DNA, 15 bp, Homo sapiens
tcacaaaggatagga

SEQ ID NO: 32043 - DNA, 15 bp, Homo sapiens
gtcacaaaggatagg

SEQ ID NO: 32044 - DNA, 15 bp, Homo sapiens
agtcacaaaggatag

SEQ ID NO: 32045 - DNA, 15 bp, Homo sapiens
aagtcacaaaggata

SEQ ID NO: 32046 - DNA, 15 bp, Homo sapiens
aaagtcacaaaggat

SEQ ID NO: 32047 - DNA, 15 bp, Homo sapiens
aaaagtcacaaagga

SEQ ID NO: 32048 - DNA, 15 bp, Homo sapiens
aaaaagtcacaaagg

SEQ ID NO: 32049 - DNA, 15 bp, Homo sapiens
aaaaaagtcacaaag

SEQ ID NO: 32050 - DNA, 15 bp, Homo sapiens
aaaaaaagtcacaaa

SEQ ID NO: 32051 - DNA, 15 bp, Homo sapiens
caaaaaaagtcacaa

SEQ ID NO: 32052 - DNA, 15 bp, Homo sapiens
gcaaaaaaagtcaca

SEQ ID NO: 32053 - DNA, 15 bp, Homo sapiens
tgcaaaaaaagtcac

SEQ ID NO: 32054 - DNA, 15 bp, Homo sapiens
atgcaaaaaaagtca

SEQ ID NO: 32055 - DNA, 15 bp, Homo sapiens
aatgcaaaaaaagtc

SEQ ID NO: 32056 - DNA, 15 bp, Homo sapiens
taatgcaaaaaaagt

SEQ ID NO: 32057 - DNA, 15 bp, Homo sapiens
ataatgcaaaaaaag

SEQ ID NO: 32058 - DNA, 15 bp, Homo sapiens
tataatgcaaaaaaa

SEQ ID NO: 32059 - DNA, 15 bp, Homo sapiens
atataatgcaaaaaa

SEQ ID NO: 32060 - DNA, 15 bp, Homo sapiens
tatataatgcaaaaa

SEQ ID NO: 32061 - DNA, 15 bp, Homo sapiens
atatataatgcaaaa

SEQ ID NO: 32062 - DNA, 15 bp, Homo sapiens
tatatataatgcaaa

SEQ ID NO: 32063 - DNA, 15 bp, Homo sapiens
ttatatataatgcaa

SEQ ID NO: 32064 - DNA, 15 bp, Homo sapiens
cttatatataatgca

SEQ ID NO: 32065 - DNA, 15 bp, Homo sapiens
ccttatatataatgc

SEQ ID NO: 32066 - DNA, 15 bp, Homo sapiens
tccttatatataatg

SEQ ID NO: 32067 - DNA, 15 bp, Homo sapiens
atccttatatataat

SEQ ID NO: 32068 - DNA, 15 bp, Homo sapiens
catccttatatataa

SEQ ID NO: 32069 - DNA, 15 bp, Homo sapiens
gcatccttatatata

SEQ ID NO: 32070 - DNA, 15 bp, Homo sapiens
ggcatccttatatat

SEQ ID NO: 32071 - DNA, 15 bp, Homo sapiens
cggcatccttatata

SEQ ID NO: 32072 - DNA, 15 bp, Homo sapiens
tcggcatccttatat

SEQ ID NO: 32073 - DNA, 15 bp, Homo sapiens
ttcggcatccttata

SEQ ID NO: 32074 - DNA, 15 bp, Homo sapiens
tttcggcatccttat

SEQ ID NO: 32075 - DNA, 15 bp, Homo sapiens
atttcggcatcctta

SEQ ID NO: 32076 - DNA, 15 bp, Homo sapiens
tatttcggcatcctt

SEQ ID NO: 32077 - DNA, 15 bp, Homo sapiens
gtatttcggcatcct

SEQ ID NO: 32078 - DNA, 15 bp, Homo sapiens
agtatttcggcatcc

SEQ ID NO: 32079 - DNA, 15 bp, Homo sapiens
cagtatttcggcatc

SEQ ID NO: 32080 - DNA, 15 bp, Homo sapiens
acagtatttcggcat

SEQ ID NO: 32081 - DNA, 15 bp, Homo sapiens
aacagtatttcggca

SEQ ID NO: 32082 - DNA, 15 bp, Homo sapiens
aaacagtatttcggc

SEQ ID NO: 32083 - DNA, 15 bp, Homo sapiens
taaacagtatttcgg

SEQ ID NO: 32084 - DNA, 15 bp, Homo sapiens
ataaacagtatttcg

SEQ ID NO: 32085 - DNA, 15 bp, Homo sapiens
aataaacagtatttc

SEQ ID NO: 32086 - DNA, 15 bp, Homo sapiens
caataaacagtattt

SEQ ID NO: 32087 - DNA, 15 bp, Homo sapiens
acaataaacagtatt

SEQ ID NO: 32088 - DNA, 15 bp, Homo sapiens
aacaataaacagtat

SEQ ID NO: 32089 - DNA, 15 bp, Homo sapiens
caacaataaacagta

SEQ ID NO: 32090 - DNA, 15 bp, Homo sapiens
tcaacaataaacagt

SEQ ID NO: 32091 - DNA, 15 bp, Homo sapiens
atcaacaataaacag

SEQ ID NO: 32092 - DNA, 15 bp, Homo sapiens
tatcaacaataaaca

SEQ ID NO: 32093 - DNA, 15 bp, Homo sapiens
ctatcaacaataaac

SEQ ID NO: 32094 - DNA, 15 bp, Homo sapiens
actatcaacaataaa

SEQ ID NO: 32095 - DNA, 15 bp, Homo sapiens
aactatcaacaataa

SEQ ID NO: 32096 - DNA, 15 bp, Homo sapiens
aaactatcaacaata

SEQ ID NO: 32097 - DNA, 15 bp, Homo sapiens
taaactatcaacaat

SEQ ID NO: 32098 - DNA, 15 bp, Homo sapiens
gtaaactatcaacaa

SEQ ID NO: 32099 - DNA, 15 bp, Homo sapiens
tgtaaactatcaaca

SEQ ID NO: 32100 - DNA, 15 bp, Homo sapiens
ttgtaaactatcaac

SEQ ID NO: 32101 - DNA, 15 bp, Homo sapiens
tttgtaaactatcaa

SEQ ID NO: 32102 - DNA, 15 bp, Homo sapiens
ttttgtaaactatca

SEQ ID NO: 32103 - DNA, 15 bp, Homo sapiens
attttgtaaactatc

SEQ ID NO: 32104 - DNA, 15 bp, Homo sapiens
aattttgtaaactat

SEQ ID NO: 32105 - DNA, 15 bp, Homo sapiens
caattttgtaaacta

SEQ ID NO: 32106 - DNA, 15 bp, Homo sapiens
tcaattttgtaaact

SEQ ID NO: 32107 - DNA, 15 bp, Homo sapiens
ttcaattttgtaaac

SEQ ID NO: 32108 - DNA, 15 bp, Homo sapiens
attcaattttgtaaa

SEQ ID NO: 32109 - DNA, 15 bp, Homo sapiens
gattcaattttgtaa

SEQ ID NO: 32110 - DNA, 15 bp, Homo sapiens
agattcaattttgta

SEQ ID NO: 32111 - DNA, 15 bp, Homo sapiens
aagattcaattttgt

SEQ ID NO: 32112 - DNA, 15 bp, Homo sapiens
taagattcaattttg

SEQ ID NO: 32113 - DNA, 15 bp, Homo sapiens
gtaagattcaatttt

SEQ ID NO: 32114 - DNA, 15 bp, Homo sapiens
tgtaagattcaattt

SEQ ID NO: 32115 - DNA, 15 bp, Homo sapiens
atgtaagattcaatt

SEQ ID NO: 32116 - DNA, 15 bp, Homo sapiens
aatgtaagattcaat

SEQ ID NO: 32117 - DNA, 15 bp, Homo sapiens
taatgtaagattcaa

SEQ ID NO: 32118 - DNA, 15 bp, Homo sapiens
ctaatgtaagattca

SEQ ID NO: 32119 - DNA, 15 bp, Homo sapiens
actaatgtaagattc

SEQ ID NO: 32120 - DNA, 15 bp, Homo sapiens
cactaatgtaagatt

SEQ ID NO: 32121 - DNA, 15 bp, Homo sapiens
gcactaatgtaagat

SEQ ID NO: 32122 - DNA, 15 bp, Homo sapiens
tgcactaatgtaaga

SEQ ID NO: 32123 - DNA, 15 bp, Homo sapiens
atgcactaatgtaag

SEQ ID NO: 32124 - DNA, 15 bp, Homo sapiens
tatgcactaatgtaa

SEQ ID NO: 32125 - DNA, 15 bp, Homo sapiens
ttatgcactaatgta

SEQ ID NO: 32126 - DNA, 15 bp, Homo sapiens
attatgcactaatgt

SEQ ID NO: 32127 - DNA, 15 bp, Homo sapiens
aattatgcactaatg

SEQ ID NO: 32128 - DNA, 15 bp, Homo sapiens
aaattatgcactaat

SEQ ID NO: 32129 - DNA, 15 bp, Homo sapiens
aaaattatgcactaa

SEQ ID NO: 32130 - DNA, 15 bp, Homo sapiens
caaaattatgcacta

SEQ ID NO: 32131 - DNA, 15 bp, Homo sapiens
ccaaaattatgcact

SEQ ID NO: 32132 - DNA, 15 bp, Homo sapiens
accaaaattatgcac

SEQ ID NO: 32133 - DNA, 15 bp, Homo sapiens
caccaaaattatgca

SEQ ID NO: 32134 - DNA, 15 bp, Homo sapiens
tcaccaaaattatgc

SEQ ID NO: 32135 - DNA, 15 bp, Homo sapiens
ttcaccaaaattatg

SEQ ID NO: 32136 - DNA, 15 bp, Homo sapiens
attcaccaaaattat

SEQ ID NO: 32137 - DNA, 15 bp, Homo sapiens
cattcaccaaaatta

SEQ ID NO: 32138 - DNA, 15 bp, Homo sapiens
acattcaccaaaatt

SEQ ID NO: 32139 - DNA, 15 bp, Homo sapiens
aacattcaccaaaat

SEQ ID NO: 32140 - DNA, 15 bp, Homo sapiens
caacattcaccaaaa

SEQ ID NO: 32141 - DNA, 15 bp, Homo sapiens
tcaacattcaccaaa

SEQ ID NO: 32142 - DNA, 15 bp, Homo sapiens
ttcaacattcaccaa

SEQ ID NO: 32143 - DNA, 15 bp, Homo sapiens
cttcaacattcacca

SEQ ID NO: 32144 - DNA, 15 bp, Homo sapiens
tcttcaacattcacc

SEQ ID NO: 32145 - DNA, 15 bp, Homo sapiens
atcttcaacattcac

SEQ ID NO: 32146 - DNA, 15 bp, Homo sapiens
aatcttcaacattca

SEQ ID NO: 32147 - DNA, 15 bp, Homo sapiens
taatcttcaacattc

SEQ ID NO: 32148 - DNA, 15 bp, Homo sapiens
ataatcttcaacatt

SEQ ID NO: 32149 - DNA, 15 bp, Homo sapiens
cataatcttcaacat

SEQ ID NO: 32150 - DNA, 15 bp, Homo sapiens
ccataatcttcaaca

SEQ ID NO: 32151 - DNA, 15 bp, Homo sapiens
accataatcttcaac

SEQ ID NO: 32152 - DNA, 15 bp, Homo sapiens
taccataatcttcaa

SEQ ID NO: 32153 - DNA, 15 bp, Homo sapiens
ctaccataatcttca

SEQ ID NO: 32154 - DNA, 15 bp, Homo sapiens
tctaccataatcttc

SEQ ID NO: 32155 - DNA, 15 bp, Homo sapiens
atctaccataatctt

SEQ ID NO: 32156 - DNA, 15 bp, Homo sapiens
aatctaccataatct

SEQ ID NO: 32157 - DNA, 15 bp, Homo sapiens
caatctaccataatc

SEQ ID NO: 32158 - DNA, 15 bp, Homo sapiens
gcaatctaccataat

SEQ ID NO: 32159 - DNA, 15 bp, Homo sapiens
ggcaatctaccataa

SEQ ID NO: 32160 - DNA, 15 bp, Homo sapiens
aggcaatctaccata

SEQ ID NO: 32161 - DNA, 15 bp, Homo sapiens
aaggcaatctaccat

SEQ ID NO: 32162 - DNA, 15 bp, Homo sapiens
taaggcaatctacca

SEQ ID NO: 32163 - DNA, 15 bp, Homo sapiens
gtaaggcaatctacc

SEQ ID NO: 32164 - DNA, 15 bp, Homo sapiens
tgtaaggcaatctac

SEQ ID NO: 32165 - DNA, 15 bp, Homo sapiens
atgtaaggcaatcta

SEQ ID NO: 32166 - DNA, 15 bp, Homo sapiens
aatgtaaggcaatct

SEQ ID NO: 32167 - DNA, 15 bp, Homo sapiens
aaatgtaaggcaatc

SEQ ID NO: 32168 - DNA, 15 bp, Homo sapiens
gaaatgtaaggcaat

SEQ ID NO: 32169 - DNA, 15 bp, Homo sapiens
agaaatgtaaggcaa

SEQ ID NO: 32170 - DNA, 15 bp, Homo sapiens
cagaaatgtaaggca

SEQ ID NO: 32171 - DNA, 15 bp, Homo sapiens
gcagaaatgtaaggc

SEQ ID NO: 32172 - DNA, 15 bp, Homo sapiens
tgcagaaatgtaagg

SEQ ID NO: 32173 - DNA, 15 bp, Homo sapiens
atgcagaaatgtaag

SEQ ID NO: 32174 - DNA, 15 bp, Homo sapiens
tatgcagaaatgtaa

SEQ ID NO: 32175 - DNA, 15 bp, Homo sapiens
atatgcagaaatgta

SEQ ID NO: 32176 - DNA, 15 bp, Homo sapiens
aatatgcagaaatgt

SEQ ID NO: 32177 - DNA, 15 bp, Homo sapiens
caatatgcagaaatg

SEQ ID NO: 32178 - DNA, 15 bp, Homo sapiens
acaatatgcagaaat

SEQ ID NO: 32179 - DNA, 15 bp, Homo sapiens
aacaatatgcagaaa

SEQ ID NO: 32180 - DNA, 15 bp, Homo sapiens
aaacaatatgcagaa

SEQ ID NO: 32181 - DNA, 15 bp, Homo sapiens
caaacaatatgcaga

SEQ ID NO: 32182 - DNA, 15 bp, Homo sapiens
gcaaacaatatgcag

SEQ ID NO: 32183 - DNA, 15 bp, Homo sapiens
tgcaaacaatatgca

SEQ ID NO: 32184 - DNA, 15 bp, Homo sapiens
gtgcaaacaatatgc

SEQ ID NO: 32185 - DNA, 15 bp, Homo sapiens
ggtgcaaacaatatg

SEQ ID NO: 32186 - DNA, 15 bp, Homo sapiens
aggtgcaaacaatat

SEQ ID NO: 32187 - DNA, 15 bp, Homo sapiens
aaggtgcaaacaata

SEQ ID NO: 32188 - DNA, 15 bp, Homo sapiens
caaggtgcaaacaat

SEQ ID NO: 32189 - DNA, 15 bp, Homo sapiens
ccaaggtgcaaacaa

SEQ ID NO: 32190 - DNA, 15 bp, Homo sapiens
tccaaggtgcaaaca

SEQ ID NO: 32191 - DNA, 15 bp, Homo sapiens
ttccaaggtgcaaac

SEQ ID NO: 32192 - DNA, 15 bp, Homo sapiens
attccaaggtgcaaa

SEQ ID NO: 32193 - DNA, 15 bp, Homo sapiens
cattccaaggtgcaa

SEQ ID NO: 32194 - DNA, 15 bp, Homo sapiens
tcattccaaggtgca

SEQ ID NO: 32195 - DNA, 15 bp, Homo sapiens
atcattccaaggtgc

SEQ ID NO: 32196 - DNA, 15 bp, Homo sapiens
tatcattccaaggtg

SEQ ID NO: 32197 - DNA, 15 bp, Homo sapiens
ctatcattccaaggt

SEQ ID NO: 32198 - DNA, 15 bp, Homo sapiens
gctatcattccaagg

SEQ ID NO: 32199 - DNA, 15 bp, Homo sapiens
tgctatcattccaag

SEQ ID NO: 32200 - DNA, 15 bp, Homo sapiens
gtgctatcattccaa

SEQ ID NO: 32201 - DNA, 15 bp, Homo sapiens
agtgctatcattcca

SEQ ID NO: 32202 - DNA, 15 bp, Homo sapiens
cagtgctatcattcc

SEQ ID NO: 32203 - DNA, 15 bp, Homo sapiens
ccagtgctatcattc

SEQ ID NO: 32204 - DNA, 15 bp, Homo sapiens
gccagtgctatcatt

SEQ ID NO: 32205 - DNA, 15 bp, Homo sapiens
tgccagtgctatcat

SEQ ID NO: 32206 - DNA, 15 bp, Homo sapiens
atgccagtgctatca

SEQ ID NO: 32207 - DNA, 15 bp, Homo sapiens
catgccagtgctatc

SEQ ID NO: 32208 - DNA, 15 bp, Homo sapiens
tcatgccagtgctat

SEQ ID NO: 32209 - DNA, 15 bp, Homo sapiens
ttcatgccagtgcta

SEQ ID NO: 32210 - DNA, 15 bp, Homo sapiens
attcatgccagtgct

SEQ ID NO: 32211 - DNA, 15 bp, Homo sapiens
aattcatgccagtgc

SEQ ID NO: 32212 - DNA, 15 bp, Homo sapiens
taattcatgccagtg

SEQ ID NO: 32213 - DNA, 15 bp, Homo sapiens
ataattcatgccagt

SEQ ID NO: 32214 - DNA, 15 bp, Homo sapiens
tataattcatgccag

SEQ ID NO: 32215 - DNA, 15 bp, Homo sapiens
ctataattcatgcca

SEQ ID NO: 32216 - DNA, 15 bp, Homo sapiens
tctataattcatgcc

SEQ ID NO: 32217 - DNA, 15 bp, Homo sapiens
ctctataattcatgc

SEQ ID NO: 32218 - DNA, 15 bp, Homo sapiens
gctctataattcatg

SEQ ID NO: 32219 - DNA, 15 bp, Homo sapiens
agctctataattcat

SEQ ID NO: 32220 - DNA, 15 bp, Homo sapiens
cagctctataattca

SEQ ID NO: 32221 - DNA, 15 bp, Homo sapiens
tcagctctataattc

SEQ ID NO: 32222 - DNA, 15 bp, Homo sapiens
ctcagctctataatt

SEQ ID NO: 32223 - DNA, 15 bp, Homo sapiens
cctcagctctataat

SEQ ID NO: 32224 - DNA, 15 bp, Homo sapiens
tcctcagctctataa

SEQ ID NO: 32225 - DNA, 15 bp, Homo sapiens
atcctcagctctata

SEQ ID NO: 32226 - DNA, 15 bp, Homo sapiens
gatcctcagctctat

SEQ ID NO: 32227 - DNA, 15 bp, Homo sapiens
agatcctcagctcta

SEQ ID NO: 32228 - DNA, 15 bp, Homo sapiens
tagatcctcagctct

SEQ ID NO: 32229 - DNA, 15 bp, Homo sapiens
ttagatcctcagctc

SEQ ID NO: 32230 - DNA, 15 bp, Homo sapiens
tttagatcctcagct

SEQ ID NO: 32231 - DNA, 15 bp, Homo sapiens
ctttagatcctcagc

SEQ ID NO: 32232 - DNA, 15 bp, Homo sapiens
tctttagatcctcag

SEQ ID NO: 32233 - DNA, 15 bp, Homo sapiens
atctttagatcctca

SEQ ID NO: 32234 - DNA, 15 bp, Homo sapiens
aatctttagatcctc

SEQ ID NO: 32235 - DNA, 15 bp, Homo sapiens
aaatctttagatcct

SEQ ID NO: 32236 - DNA, 15 bp, Homo sapiens
aaaatctttagatcc

SEQ ID NO: 32237 - DNA, 15 bp, Homo sapiens
aaaaatctttagatc

SEQ ID NO: 32238 - DNA, 15 bp, Homo sapiens
taaaaatctttagat

SEQ ID NO: 32239 - DNA, 15 bp, Homo sapiens
gtaaaaatctttaga

SEQ ID NO: 32240 - DNA, 15 bp, Homo sapiens
agtaaaaatctttag

SEQ ID NO: 32241 - DNA, 15 bp, Homo sapiens
aagtaaaaatcttta

SEQ ID NO: 32242 - DNA, 15 bp, Homo sapiens
aaagtaaaaatcttt

SEQ ID NO: 32243 - DNA, 15 bp, Homo sapiens
caaagtaaaaatctt

SEQ ID NO: 32244 - DNA, 15 bp, Homo sapiens
tcaaagtaaaaatct

SEQ ID NO: 32245 - DNA, 15 bp, Homo sapiens
atcaaagtaaaaatc

SEQ ID NO: 32246 - DNA, 15 bp, Homo sapiens
aatcaaagtaaaaat

SEQ ID NO: 32247 - DNA, 15 bp, Homo sapiens
aaatcaaagtaaaaa

SEQ ID NO: 32248 - DNA, 15 bp, Homo sapiens
taaatcaaagtaaaa

SEQ ID NO: 32249 - DNA, 15 bp, Homo sapiens
ataaatcaaagtaaa

SEQ ID NO: 32250 - DNA, 15 bp, Homo sapiens
gataaatcaaagtaa

SEQ ID NO: 32251 - DNA, 15 bp, Homo sapiens
ggataaatcaaagta

SEQ ID NO: 32252 - DNA, 15 bp, Homo sapiens
gggataaatcaaagt

SEQ ID NO: 32253 - DNA, 15 bp, Homo sapiens
tgggataaatcaaag

SEQ ID NO: 32254 - DNA, 15 bp, Homo sapiens
atgggataaatcaaa

SEQ ID NO: 32255 - DNA, 15 bp, Homo sapiens
aatgggataaatcaa

SEQ ID NO: 32256 - DNA, 15 bp, Homo sapiens
taatgggataaatca

SEQ ID NO: 32257 - DNA, 15 bp, Homo sapiens
ataatgggataaatc

SEQ ID NO: 32258 - DNA, 15 bp, Homo sapiens
gataatgggataaat

SEQ ID NO: 32259 - DNA, 15 bp, Homo sapiens
tgataatgggataaa

SEQ ID NO: 32260 - DNA, 15 bp, Homo sapiens
atgataatgggataa

SEQ ID NO: 32261 - DNA, 15 bp, Homo sapiens
gatgataatgggata

SEQ ID NO: 32262 - DNA, 15 bp, Homo sapiens
agatgataatgggat

SEQ ID NO: 32263 - DNA, 15 bp, Homo sapiens
cagatgataatggga

SEQ ID NO: 32264 - DNA, 15 bp, Homo sapiens
gcagatgataatggg

SEQ ID NO: 32265 - DNA, 15 bp, Homo sapiens
tgcagatgataatgg

SEQ ID NO: 32266 - DNA, 15 bp, Homo sapiens
ctgcagatgataatg

SEQ ID NO: 32267 - DNA, 15 bp, Homo sapiens
cctgcagatgataat

SEQ ID NO: 32268 - DNA, 15 bp, Homo sapiens
ccctgcagatgataa

SEQ ID NO: 32269 - DNA, 15 bp, Homo sapiens
tccctgcagatgata

SEQ ID NO: 32270 - DNA, 15 bp, Homo sapiens
ttccctgcagatgat

SEQ ID NO: 32271 - DNA, 15 bp, Homo sapiens
tttccctgcagatga

SEQ ID NO: 32272 - DNA, 15 bp, Homo sapiens
gtttccctgcagatg

SEQ ID NO: 32273 - DNA, 15 bp, Homo sapiens
tgtttccctgcagat

SEQ ID NO: 32274 - DNA, 15 bp, Homo sapiens
ttgtttccctgcaga

SEQ ID NO: 32275 - DNA, 15 bp, Homo sapiens
attgtttccctgcag

SEQ ID NO: 32276 - DNA, 15 bp, Homo sapiens
aattgtttccctgca

SEQ ID NO: 32277 - DNA, 15 bp, Homo sapiens
caattgtttccctgc

SEQ ID NO: 32278 - DNA, 15 bp, Homo sapiens
gcaattgtttccctg

SEQ ID NO: 32279 - DNA, 15 bp, Homo sapiens
agcaattgtttccct

SEQ ID NO: 32280 - DNA, 15 bp, Homo sapiens
aagcaattgtttccc

SEQ ID NO: 32281 - DNA, 15 bp, Homo sapiens
aaagcaattgtttcc

SEQ ID NO: 32282 - DNA, 15 bp, Homo sapiens
aaaagcaattgtttc

SEQ ID NO: 32283 - DNA, 15 bp, Homo sapiens
taaaagcaattgttt

SEQ ID NO: 32284 - DNA, 15 bp, Homo sapiens
gtaaaagcaattgtt

SEQ ID NO: 32285 - DNA, 15 bp, Homo sapiens
agtaaaagcaattgt

SEQ ID NO: 32286 - DNA, 15 bp, Homo sapiens
cagtaaaagcaattg

SEQ ID NO: 32287 - DNA, 15 bp, Homo sapiens
tcagtaaaagcaatt

SEQ ID NO: 32288 - DNA, 15 bp, Homo sapiens
atcagtaaaagcaat

SEQ ID NO: 32289 - DNA, 15 bp, Homo sapiens
aatcagtaaaagcaa

SEQ ID NO: 32290 - DNA, 15 bp, Homo sapiens
taatcagtaaaagca

SEQ ID NO: 32291 - DNA, 15 bp, Homo sapiens
ttaatcagtaaaagc

SEQ ID NO: 32292 - DNA, 15 bp, Homo sapiens
tttaatcagtaaaag

SEQ ID NO: 32293 - DNA, 15 bp, Homo sapiens
ttttaatcagtaaaa

SEQ ID NO: 32294 - DNA, 15 bp, Homo sapiens
tttttaatcagtaaa

SEQ ID NO: 32295 - DNA, 15 bp, Homo sapiens
atttttaatcagtaa

SEQ ID NO: 32296 - DNA, 15 bp, Homo sapiens
catttttaatcagta

SEQ ID NO: 32297 - DNA, 15 bp, Homo sapiens
gcatttttaatcagt

SEQ ID NO: 32298 - DNA, 15 bp, Homo sapiens
tgcatttttaatcag

SEQ ID NO: 32299 - DNA, 15 bp, Homo sapiens
ctgcatttttaatca

SEQ ID NO: 32300 - DNA, 15 bp, Homo sapiens
cctgcatttttaatc

SEQ ID NO: 32301 - DNA, 15 bp, Homo sapiens
gcctgcatttttaat

SEQ ID NO: 32302 - DNA, 15 bp, Homo sapiens
agcctgcatttttaa

SEQ ID NO: 32303 - DNA, 15 bp, Homo sapiens
cagcctgcattttta

SEQ ID NO: 32304 - DNA, 15 bp, Homo sapiens
ccagcctgcattttt

SEQ ID NO: 32305 - DNA, 15 bp, Homo sapiens
cccagcctgcatttt

SEQ ID NO: 32306 - DNA, 15 bp, Homo sapiens
gcccagcctgcattt

SEQ ID NO: 32307 - DNA, 15 bp, Homo sapiens
tgcccagcctgcatt

SEQ ID NO: 32308 - DNA, 15 bp, Homo sapiens
gtgcccagcctgcat

SEQ ID NO: 32309 - DNA, 15 bp, Homo sapiens
tgtgcccagcctgca

SEQ ID NO: 32310 - DNA, 15 bp, Homo sapiens
ctgtgcccagcctgc

SEQ ID NO: 32311 - DNA, 15 bp, Homo sapiens
gctgtgcccagcctg

SEQ ID NO: 32312 - DNA, 15 bp, Homo sapiens
cgctgtgcccagcct

SEQ ID NO: 32313 - DNA, 15 bp, Homo sapiens
ccgctgtgcccagcc

SEQ ID NO: 32314 - DNA, 15 bp, Homo sapiens
gccgctgtgcccagc

SEQ ID NO: 32315 - DNA, 15 bp, Homo sapiens
agccgctgtgcccag

SEQ ID NO: 32316 - DNA, 15 bp, Homo sapiens
gagccgctgtgccca

SEQ ID NO: 32317 - DNA, 15 bp, Homo sapiens
tgagccgctgtgccc

SEQ ID NO: 32318 - DNA, 15 bp, Homo sapiens
gtgagccgctgtgcc

SEQ ID NO: 32319 - DNA, 15 bp, Homo sapiens
cgtgagccgctgtgc

SEQ ID NO: 32320 - DNA, 15 bp, Homo sapiens
gcgtgagccgctgtg

SEQ ID NO: 32321 - DNA, 15 bp, Homo sapiens
ggcgtgagccgctgt

SEQ ID NO: 32322 - DNA, 15 bp, Homo sapiens
aggcgtgagccgctg

SEQ ID NO: 32323 - DNA, 15 bp, Homo sapiens
caggcgtgagccgct

SEQ ID NO: 32324 - DNA, 15 bp, Homo sapiens
acaggcgtgagccgc

SEQ ID NO: 32325 - DNA, 15 bp, Homo sapiens
tacaggcgtgagccg

SEQ ID NO: 32326 - DNA, 15 bp, Homo sapiens
tactgggattacagg

SEQ ID NO: 32327 - DNA, 15 bp, Homo sapiens
gtactgggattacag

SEQ ID NO: 32328 - DNA, 15 bp, Homo sapiens
agtactgggattaca

SEQ ID NO: 32329 - DNA, 15 bp, Homo sapiens
aagtactgggattac

SEQ ID NO: 32330 - DNA, 15 bp, Homo sapiens
aaagtactgggatta

SEQ ID NO: 32331 - DNA, 15 bp, Homo sapiens
caaagtactgggatt

SEQ ID NO: 32332 - DNA, 15 bp, Homo sapiens
ccaaagtactgggat

SEQ ID NO: 32333 - DNA, 15 bp, Homo sapiens
cccaaagtactggga

SEQ ID NO: 32334 - DNA, 15 bp, Homo sapiens
tcccaaagtactggg

SEQ ID NO: 32335 - DNA, 15 bp, Homo sapiens
ctcccaaagtactgg

SEQ ID NO: 32336 - DNA, 15 bp, Homo sapiens
cctcccaaagtactg

SEQ ID NO: 32337 - DNA, 15 bp, Homo sapiens
gcctcccaaagtact

SEQ ID NO: 32338 - DNA, 15 bp, Homo sapiens
ggcctcccaaagtac

SEQ ID NO: 32339 - DNA, 15 bp, Homo sapiens
cggcctcccaaagta

SEQ ID NO: 32340 - DNA, 15 bp, Homo sapiens
cgcctcggcctccca

SEQ ID NO: 32341 - DNA, 15 bp, Homo sapiens
ccgcctcggcctccc

SEQ ID NO: 32342 - DNA, 15 bp, Homo sapiens
cccgcctcggcctcc

SEQ ID NO: 32343 - DNA, 15 bp, Homo sapiens
gcccgcctcggcctc

SEQ ID NO: 32344 - DNA, 15 bp, Homo sapiens
cgcccgcctcggcct

SEQ ID NO: 32345 - DNA, 15 bp, Homo sapiens
ccgcccgcctcggcc

SEQ ID NO: 32346 - DNA, 15 bp, Homo sapiens
tccgcccgcctcggc

SEQ ID NO: 32347 - DNA, 15 bp, Homo sapiens
atccgcccgcctcgg

SEQ ID NO: 32348 - DNA, 15 bp, Homo sapiens
gatccgcccgcctcg

SEQ ID NO: 32349 - DNA, 15 bp, Homo sapiens
tgatccgcccgcctc

SEQ ID NO: 32350 - DNA, 15 bp, Homo sapiens
gtgatccgcccgcct

SEQ ID NO: 32351 - DNA, 15 bp, Homo sapiens
tgtgatccgcccgcc

SEQ ID NO: 32352 - DNA, 15 bp, Homo sapiens
ttgtgatccgcccgc

SEQ ID NO: 32353 - DNA, 15 bp, Homo sapiens
cttgtgatccgcccg

SEQ ID NO: 32354 - DNA, 15 bp, Homo sapiens
ccttgtgatccgccc

SEQ ID NO: 32355 - DNA, 15 bp, Homo sapiens
accttgtgatccgcc

SEQ ID NO: 32356 - DNA, 15 bp, Homo sapiens
gaccttgtgatccgc

SEQ ID NO: 32357 - DNA, 15 bp, Homo sapiens
tgaccttgtgatccg

SEQ ID NO: 32358 - DNA, 15 bp, Homo sapiens
ttgaccttgtgatcc

SEQ ID NO: 32359 - DNA, 15 bp, Homo sapiens
cttgaccttgtgatc

SEQ ID NO: 32360 - DNA, 15 bp, Homo sapiens
tcttgaccttgtgat

SEQ ID NO: 32361 - DNA, 15 bp, Homo sapiens
ctcttgaccttgtga

SEQ ID NO: 32362 - DNA, 15 bp, Homo sapiens
tctcttgaccttgtg

SEQ ID NO: 32363 - DNA, 15 bp, Homo sapiens
atctcttgaccttgt

SEQ ID NO: 32364 - DNA, 15 bp, Homo sapiens
gatctcttgaccttg

SEQ ID NO: 32365 - DNA, 15 bp, Homo sapiens
cgatctcttgacctt

SEQ ID NO: 32366 - DNA, 15 bp, Homo sapiens
tcgatctcttgacct

SEQ ID NO: 32367 - DNA, 15 bp, Homo sapiens
ctcgatctcttgacc

SEQ ID NO: 32368 - DNA, 15 bp, Homo sapiens
tctcgatctcttgac

SEQ ID NO: 32369 - DNA, 15 bp, Homo sapiens
gtctcgatctcttga

SEQ ID NO: 32370 - DNA, 15 bp, Homo sapiens
ggtctcgatctcttg

SEQ ID NO: 32371 - DNA, 15 bp, Homo sapiens
tggtctcgatctctt

SEQ ID NO: 32372 - DNA, 15 bp, Homo sapiens
atggtctcgatctct

SEQ ID NO: 32373 - DNA, 15 bp, Homo sapiens
ccaggatggtctcga

SEQ ID NO: 32374 - DNA, 15 bp, Homo sapiens
gccaggatggtctcg

SEQ ID NO: 32375 - DNA, 15 bp, Homo sapiens
ggccaggatggtctc

SEQ ID NO: 32376 - DNA, 15 bp, Homo sapiens
tggccaggatggtct

SEQ ID NO: 32377 - DNA, 15 bp, Homo sapiens
ttggccaggatggtc

SEQ ID NO: 32378 - DNA, 15 bp, Homo sapiens
gttggccaggatggt

SEQ ID NO: 32379 - DNA, 15 bp, Homo sapiens
ggttggccaggatgg

SEQ ID NO: 32380 - DNA, 15 bp, Homo sapiens
tggttggccaggatg

SEQ ID NO: 32381 - DNA, 15 bp, Homo sapiens
ttggttggccaggat

SEQ ID NO: 32382 - DNA, 15 bp, Homo sapiens
gttggttggccagga

SEQ ID NO: 32383 - DNA, 15 bp, Homo sapiens
tgttggttggccagg

SEQ ID NO: 32384 - DNA, 15 bp, Homo sapiens
atgttggttggccag

SEQ ID NO: 32385 - DNA, 15 bp, Homo sapiens
catgttggttggcca

SEQ ID NO: 32386 - DNA, 15 bp, Homo sapiens
ccatgttggttggcc

SEQ ID NO: 32387 - DNA, 15 bp, Homo sapiens
accatgttggttggc

SEQ ID NO: 32388 - DNA, 15 bp, Homo sapiens
caccatgttggttgg

SEQ ID NO: 32389 - DNA, 15 bp, Homo sapiens
tcaccatgttggttg

SEQ ID NO: 32390 - DNA, 15 bp, Homo sapiens
ttcaccatgttggtt

SEQ ID NO: 32391 - DNA, 15 bp, Homo sapiens
aggtttcaccatgtt

SEQ ID NO: 32392 - DNA, 15 bp, Homo sapiens
gaggtttcaccatgt

SEQ ID NO: 32393 - DNA, 15 bp, Homo sapiens
tgaggtttcaccatg

SEQ ID NO: 32394 - DNA, 15 bp, Homo sapiens
atgaggtttcaccat

SEQ ID NO: 32395 - DNA, 15 bp, Homo sapiens
gatgaggtttcacca

SEQ ID NO: 32396 - DNA, 15 bp, Homo sapiens
agatgaggtttcacc

SEQ ID NO: 32397 - DNA, 15 bp, Homo sapiens
gagatgaggtttcac

SEQ ID NO: 32398 - DNA, 15 bp, Homo sapiens
agagatgaggtttca

SEQ ID NO: 32399 - DNA, 15 bp, Homo sapiens
tagagatgaggtttc

SEQ ID NO: 32400 - DNA, 15 bp, Homo sapiens
gtagagatgaggttt

SEQ ID NO: 32401 - DNA, 15 bp, Homo sapiens
agtagagatgaggtt

SEQ ID NO: 32402 - DNA, 15 bp, Homo sapiens
tagtagagatgaggt

SEQ ID NO: 32403 - DNA, 15 bp, Homo sapiens
ttagtagagatgagg

SEQ ID NO: 32404 - DNA, 15 bp, Homo sapiens
tttagtagagatgag

SEQ ID NO: 32405 - DNA, 15 bp, Homo sapiens
ttttagtagagatga

SEQ ID NO: 32406 - DNA, 15 bp, Homo sapiens
cccagctaatttttg

SEQ ID NO: 32407 - DNA, 15 bp, Homo sapiens
acccagctaattttt

SEQ ID NO: 32408 - DNA, 15 bp, Homo sapiens
cacccagctaatttt

SEQ ID NO: 32409 - DNA, 15 bp, Homo sapiens
acacccagctaattt

SEQ ID NO: 32410 - DNA, 15 bp, Homo sapiens
cacacccagctaatt

SEQ ID NO: 32411 - DNA, 15 bp, Homo sapiens
ccacacccagctaat

SEQ ID NO: 32412 - DNA, 15 bp, Homo sapiens
accacacccagctaa

SEQ ID NO: 32413 - DNA, 15 bp, Homo sapiens
caccacacccagcta

SEQ ID NO: 32414 - DNA, 15 bp, Homo sapiens
ccaccacacccagct

SEQ ID NO: 32415 - DNA, 15 bp, Homo sapiens
gccaccacacccagc

SEQ ID NO: 32416 - DNA, 15 bp, Homo sapiens
cgccaccacacccag

SEQ ID NO: 32417 - DNA, 15 bp, Homo sapiens
gcgccaccacaccca

SEQ ID NO: 32418 - DNA, 15 bp, Homo sapiens
cgcgccaccacaccc

SEQ ID NO: 32419 - DNA, 15 bp, Homo sapiens
acgcgccaccacacc

SEQ ID NO: 32420 - DNA, 15 bp, Homo sapiens
cacgcgccaccacac

SEQ ID NO: 32421 - DNA, 15 bp, Homo sapiens
gcacgcgccaccaca

SEQ ID NO: 32422 - DNA, 15 bp, Homo sapiens
ggcacgcgccaccac

SEQ ID NO: 32423 - DNA, 15 bp, Homo sapiens
aggcacgcgccacca

SEQ ID NO: 32424 - DNA, 15 bp, Homo sapiens
caggcacgcgccacc

SEQ ID NO: 32425 - DNA, 15 bp, Homo sapiens
ttacaggcacgcgcc

SEQ ID NO: 32426 - DNA, 15 bp, Homo sapiens
attacaggcacgcgc

SEQ ID NO: 32427 - DNA, 15 bp, Homo sapiens
gattacaggcacgcg

SEQ ID NO: 32428 - DNA, 15 bp, Homo sapiens
ggattacaggcacgc

SEQ ID NO: 32429 - DNA, 15 bp, Homo sapiens
gggattacaggcacg

SEQ ID NO: 32430 - DNA, 15 bp, Homo sapiens
tgggattacaggcac

SEQ ID NO: 32431 - DNA, 15 bp, Homo sapiens
agctgggattacagg

SEQ ID NO: 32432 - DNA, 15 bp, Homo sapiens
tagctgggattacag

SEQ ID NO: 32433 - DNA, 15 bp, Homo sapiens
gtagctgggattaca

SEQ ID NO: 32434 - DNA, 15 bp, Homo sapiens
agtagctgggattac

SEQ ID NO: 32435 - DNA, 15 bp, Homo sapiens
gagtagctgggatta

SEQ ID NO: 32436 - DNA, 15 bp, Homo sapiens
tgagtagctgggatt

SEQ ID NO: 32437 - DNA, 15 bp, Homo sapiens
ctgagtagctgggat

SEQ ID NO: 32438 - DNA, 15 bp, Homo sapiens
atcctgagtagctgg

SEQ ID NO: 32439 - DNA, 15 bp, Homo sapiens
catcctgagtagctg

SEQ ID NO: 32440 - DNA, 15 bp, Homo sapiens
gcatcctgagtagct

SEQ ID NO: 32441 - DNA, 15 bp, Homo sapiens
agcatcctgagtagc

SEQ ID NO: 32442 - DNA, 15 bp, Homo sapiens
cagcatcctgagtag

SEQ ID NO: 32443 - DNA, 15 bp, Homo sapiens
tcagcatcctgagta

SEQ ID NO: 32444 - DNA, 15 bp, Homo sapiens
ctcagcatcctgagt

SEQ ID NO: 32445 - DNA, 15 bp, Homo sapiens
cctcagcatcctgag

SEQ ID NO: 32446 - DNA, 15 bp, Homo sapiens
gcctcagcatcctga

SEQ ID NO: 32447 - DNA, 15 bp, Homo sapiens
tgcctcagcatcctg

SEQ ID NO: 32448 - DNA, 15 bp, Homo sapiens
ctgcctcagcatcct

SEQ ID NO: 32449 - DNA, 15 bp, Homo sapiens
cctgcctcagcatcc

SEQ ID NO: 32450 - DNA, 15 bp, Homo sapiens
tcctgcctcagcatc

SEQ ID NO: 32451 - DNA, 15 bp, Homo sapiens
ctcctgcctcagcat

SEQ ID NO: 32452 - DNA, 15 bp, Homo sapiens
tctcctgcctcagca

SEQ ID NO: 32453 - DNA, 15 bp, Homo sapiens
ttctcctgcctcagc

SEQ ID NO: 32454 - DNA, 15 bp, Homo sapiens
gattctcctgcctca

SEQ ID NO: 32455 - DNA, 15 bp, Homo sapiens
cgattctcctgcctc

SEQ ID NO: 32456 - DNA, 15 bp, Homo sapiens
agcgattctcctgcc

SEQ ID NO: 32457 - DNA, 15 bp, Homo sapiens
aagcgattctcctgc

SEQ ID NO: 32458 - DNA, 15 bp, Homo sapiens
caagcgattctcctg

SEQ ID NO: 32459 - DNA, 15 bp, Homo sapiens
tcaagcgattctcct

SEQ ID NO: 32460 - DNA, 15 bp, Homo sapiens
ttcaagcgattctcc

SEQ ID NO: 32461 - DNA, 15 bp, Homo sapiens
gggttcaagcgattc

SEQ ID NO: 32462 - DNA, 15 bp, Homo sapiens
cgggttcaagcgatt

SEQ ID NO: 32463 - DNA, 15 bp, Homo sapiens
ccgggttcaagcgat

SEQ ID NO: 32464 - DNA, 15 bp, Homo sapiens
cccgggttcaagcga

SEQ ID NO: 32465 - DNA, 15 bp, Homo sapiens
tcccgggttcaagcg

SEQ ID NO: 32466 - DNA, 15 bp, Homo sapiens
ctcccgggttcaagc

SEQ ID NO: 32467 - DNA, 15 bp, Homo sapiens
cctcccgggttcaag

SEQ ID NO: 32468 - DNA, 15 bp, Homo sapiens
acctcccgggttcaa

SEQ ID NO: 32469 - DNA, 15 bp, Homo sapiens
cacctcccgggttca

SEQ ID NO: 32470 - DNA, 15 bp, Homo sapiens
ccacctcccgggttc

SEQ ID NO: 32471 - DNA, 15 bp, Homo sapiens
tccacctcccgggtt

SEQ ID NO: 32472 - DNA, 15 bp, Homo sapiens
ctccacctcccgggt

SEQ ID NO: 32473 - DNA, 15 bp, Homo sapiens
cctccacctcccggg

SEQ ID NO: 32474 - DNA, 15 bp, Homo sapiens
acctccacctcccgg

SEQ ID NO: 32475 - DNA, 15 bp, Homo sapiens
aacctccacctcccg

SEQ ID NO: 32476 - DNA, 15 bp, Homo sapiens
caacctccacctccc

SEQ ID NO: 32477 - DNA, 15 bp, Homo sapiens
gcaacctccacctcc

SEQ ID NO: 32478 - DNA, 15 bp, Homo sapiens
tgcaacctccacctc

SEQ ID NO: 32479 - DNA, 15 bp, Homo sapiens
ctgcaacctccacct

SEQ ID NO: 32480 - DNA, 15 bp, Homo sapiens
actgcaacctccacc

SEQ ID NO: 32481 - DNA, 15 bp, Homo sapiens
cactgcaacctccac

SEQ ID NO: 32482 - DNA, 15 bp, Homo sapiens
tcactgcaacctcca

SEQ ID NO: 32483 - DNA, 15 bp, Homo sapiens
cggctcactgcaacc

SEQ ID NO: 32484 - DNA, 15 bp, Homo sapiens
tcggctcactgcaac

SEQ ID NO: 32485 - DNA, 15 bp, Homo sapiens
ctcggctcactgcaa

SEQ ID NO: 32486 - DNA, 15 bp, Homo sapiens
tctcggctcactgca

SEQ ID NO: 32487 - DNA, 15 bp, Homo sapiens
gtctcggctcactgc

SEQ ID NO: 32488 - DNA, 15 bp, Homo sapiens
agtctcggctcactg

SEQ ID NO: 32489 - DNA, 15 bp, Homo sapiens
cagtctcggctcact

SEQ ID NO: 32490 - DNA, 15 bp, Homo sapiens
acagtctcggctcac

SEQ ID NO: 32491 - DNA, 15 bp, Homo sapiens
cacagtctcggctca

SEQ ID NO: 32492 - DNA, 15 bp, Homo sapiens
gcacagtctcggctc

SEQ ID NO: 32493 - DNA, 15 bp, Homo sapiens
ggcacagtctcggct

SEQ ID NO: 32494 - DNA, 15 bp, Homo sapiens
tggcacagtctcggc

SEQ ID NO: 32495 - DNA, 15 bp, Homo sapiens
gtggcacagtctcgg

SEQ ID NO: 32496 - DNA, 15 bp, Homo sapiens
agtggcacagtctcg

SEQ ID NO: 32497 - DNA, 15 bp, Homo sapiens
cagtggcacagtctc

SEQ ID NO: 32498 - DNA, 15 bp, Homo sapiens
gcagtggcacagtct

SEQ ID NO: 32499 - DNA, 15 bp, Homo sapiens
tgcagtggcacagtc

SEQ ID NO: 32500 - DNA, 15 bp, Homo sapiens
gtgcagtggcacagt

SEQ ID NO: 32501 - DNA, 15 bp, Homo sapiens
agtgcagtggcacag

SEQ ID NO: 32502 - DNA, 15 bp, Homo sapiens
ggagtgcagtggcac

SEQ ID NO: 32503 - DNA, 15 bp, Homo sapiens
accaggctggagtgc

SEQ ID NO: 32504 - DNA, 15 bp, Homo sapiens
caccaggctggagtg

SEQ ID NO: 32505 - DNA, 15 bp, Homo sapiens
tcaccaggctggagt

SEQ ID NO: 32506 - DNA, 15 bp, Homo sapiens
atcaccaggctggag

SEQ ID NO: 32507 - DNA, 15 bp, Homo sapiens
tatcaccaggctgga

SEQ ID NO: 32508 - DNA, 15 bp, Homo sapiens
ctatcaccaggctgg

SEQ ID NO: 32509 - DNA, 15 bp, Homo sapiens
tctatcaccaggctg

SEQ ID NO: 32510 - DNA, 15 bp, Homo sapiens
ctctatcaccaggct

SEQ ID NO: 32511 - DNA, 15 bp, Homo sapiens
cctctatcaccaggc

SEQ ID NO: 32512 - DNA, 15 bp, Homo sapiens
ccctctatcaccagg

SEQ ID NO: 32513 - DNA, 15 bp, Homo sapiens
tccctctatcaccag

SEQ ID NO: 32514 - DNA, 15 bp, Homo sapiens
ctccctctatcacca

SEQ ID NO: 32515 - DNA, 15 bp, Homo sapiens
tctccctctatcacc

SEQ ID NO: 32516 - DNA, 15 bp, Homo sapiens
gtctccctctatcac

SEQ ID NO: 32517 - DNA, 15 bp, Homo sapiens
agtctccctctatca

SEQ ID NO: 32518 - DNA, 15 bp, Homo sapiens
gagtctccctctatc

SEQ ID NO: 32519 - DNA, 15 bp, Homo sapiens
ggagtctccctctat

SEQ ID NO: 32520 - DNA, 15 bp, Homo sapiens
tggagtctccctcta

SEQ ID NO: 32521 - DNA, 15 bp, Homo sapiens
atggagtctccctct

SEQ ID NO: 32522 - DNA, 15 bp, Homo sapiens
gatggagtctccctc

SEQ ID NO: 32523 - DNA, 15 bp, Homo sapiens
agatggagtctccct

SEQ ID NO: 32524 - DNA, 15 bp, Homo sapiens
gagatggagtctccc

SEQ ID NO: 32525 - DNA, 15 bp, Homo sapiens
tgagatggagtctcc

SEQ ID NO: 32526 - DNA, 15 bp, Homo sapiens
ttgagatggagtctc

SEQ ID NO: 32527 - DNA, 15 bp, Homo sapiens
tttgagatggagtct

SEQ ID NO: 32528 - DNA, 15 bp, Homo sapiens
ttttgagatggagtc

SEQ ID NO: 32529 - DNA, 15 bp, Homo sapiens
tttttgagatggagt

SEQ ID NO: 32530 - DNA, 15 bp, Homo sapiens
ttttttgagatggag

SEQ ID NO: 32531 - DNA, 15 bp, Homo sapiens
cattttttttttttt

SEQ ID NO: 32532 - DNA, 15 bp, Homo sapiens
gcatttttttttttt

SEQ ID NO: 32533 - DNA, 15 bp, Homo sapiens
tgcattttttttttt

SEQ ID NO: 32534 - DNA, 15 bp, Homo sapiens
ctgcatttttttttt

SEQ ID NO: 32535 - DNA, 15 bp, Homo sapiens
actgcattttttttt

SEQ ID NO: 32536 - DNA, 15 bp, Homo sapiens
tactgcatttttttt

SEQ ID NO: 32537 - DNA, 15 bp, Homo sapiens
ctactgcattttttt

SEQ ID NO: 32538 - DNA, 15 bp, Homo sapiens
gctactgcatttttt

SEQ ID NO: 32539 - DNA, 15 bp, Homo sapiens
tgctactgcattttt

SEQ ID NO: 32540 - DNA, 15 bp, Homo sapiens
ttgctactgcatttt

SEQ ID NO: 32541 - DNA, 15 bp, Homo sapiens
tttgctactgcattt

SEQ ID NO: 32542 - DNA, 15 bp, Homo sapiens
ttttgctactgcatt

SEQ ID NO: 32543 - DNA, 15 bp, Homo sapiens
cttttgctactgcat

SEQ ID NO: 32544 - DNA, 15 bp, Homo sapiens
gcttttgctactgca

SEQ ID NO: 32545 - DNA, 15 bp, Homo sapiens
cgcttttgctactgc

SEQ ID NO: 32546 - DNA, 15 bp, Homo sapiens
tcgcttttgctactg

SEQ ID NO: 32547 - DNA, 15 bp, Homo sapiens
atcgcttttgctact

SEQ ID NO: 32548 - DNA, 15 bp, Homo sapiens
catcgcttttgctac

SEQ ID NO: 32549 - DNA, 15 bp, Homo sapiens
ccatcgcttttgcta

SEQ ID NO: 32550 - DNA, 15 bp, Homo sapiens
accatcgcttttgct

SEQ ID NO: 32551 - DNA, 15 bp, Homo sapiens
taccatcgcttttgc

SEQ ID NO: 32552 - DNA, 15 bp, Homo sapiens
ctaccatcgcttttg

SEQ ID NO: 32553 - DNA, 15 bp, Homo sapiens
tctaccatcgctttt

SEQ ID NO: 32554 - DNA, 15 bp, Homo sapiens
ttctaccatcgcttt

SEQ ID NO: 32555 - DNA, 15 bp, Homo sapiens
tttctaccatcgctt

SEQ ID NO: 32556 - DNA, 15 bp, Homo sapiens
atttctaccatcgct

SEQ ID NO: 32557 - DNA, 15 bp, Homo sapiens
aatttctaccatcgc

SEQ ID NO: 32558 - DNA, 15 bp, Homo sapiens
aaatttctaccatcg

SEQ ID NO: 32559 - DNA, 15 bp, Homo sapiens
taaatttctaccatc

SEQ ID NO: 32560 - DNA, 15 bp, Homo sapiens
ttaaatttctaccat

SEQ ID NO: 32561 - DNA, 15 bp, Homo sapiens
tttaaatttctacca

SEQ ID NO: 32562 - DNA, 15 bp, Homo sapiens
ttttaaatttctacc

SEQ ID NO: 32563 - DNA, 15 bp, Homo sapiens
gttttaaatttctac

SEQ ID NO: 32564 - DNA, 15 bp, Homo sapiens
tgttttaaatttcta

SEQ ID NO: 32565 - DNA, 15 bp, Homo sapiens
ctgttttaaatttct

SEQ ID NO: 32566 - DNA, 15 bp, Homo sapiens
tctgttttaaatttc

SEQ ID NO: 32567 - DNA, 15 bp, Homo sapiens
ctctgttttaaattt

SEQ ID NO: 32568 - DNA, 15 bp, Homo sapiens
actctgttttaaatt

SEQ ID NO: 32569 - DNA, 15 bp, Homo sapiens
aactctgttttaaat

SEQ ID NO: 32570 - DNA, 15 bp, Homo sapiens
caactctgttttaaa

SEQ ID NO: 32571 - DNA, 15 bp, Homo sapiens
tcaactctgttttaa

SEQ ID NO: 32572 - DNA, 15 bp, Homo sapiens
atcaactctgtttta

SEQ ID NO: 32573 - DNA, 15 bp, Homo sapiens
catcaactctgtttt

SEQ ID NO: 32574 - DNA, 15 bp, Homo sapiens
tcatcaactctgttt

SEQ ID NO: 32575 - DNA, 15 bp, Homo sapiens
ctcatcaactctgtt

SEQ ID NO: 32576 - DNA, 15 bp, Homo sapiens
gctcatcaactctgt

SEQ ID NO: 32577 - DNA, 15 bp, Homo sapiens
tgctcatcaactctg

SEQ ID NO: 32578 - DNA, 15 bp, Homo sapiens
ctgctcatcaactct

SEQ ID NO: 32579 - DNA, 15 bp, Homo sapiens
gctgctcatcaactc

SEQ ID NO: 32580 - DNA, 15 bp, Homo sapiens
tgctgctcatcaact

SEQ ID NO: 32581 - DNA, 15 bp, Homo sapiens
atgctgctcatcaac

SEQ ID NO: 32582 - DNA, 15 bp, Homo sapiens
tatgctgctcatcaa

SEQ ID NO: 32583 - DNA, 15 bp, Homo sapiens
atatgctgctcatca

SEQ ID NO: 32584 - DNA, 15 bp, Homo sapiens
tatatgctgctcatc

SEQ ID NO: 32585 - DNA, 15 bp, Homo sapiens
atatatgctgctcat

SEQ ID NO: 32586 - DNA, 15 bp, Homo sapiens
aatatatgctgctca

SEQ ID NO: 32587 - DNA, 15 bp, Homo sapiens
aaatatatgctgctc

SEQ ID NO: 32588 - DNA, 15 bp, Homo sapiens
aaaatatatgctgct

SEQ ID NO: 32589 - DNA, 15 bp, Homo sapiens
caaaatatatgctgc

SEQ ID NO: 32590 - DNA, 15 bp, Homo sapiens
ccaaaatatatgctg

SEQ ID NO: 32591 - DNA, 15 bp, Homo sapiens
accaaaatatatgct

SEQ ID NO: 32592 - DNA, 15 bp, Homo sapiens
taccaaaatatatgc

SEQ ID NO: 32593 - DNA, 15 bp, Homo sapiens
ctaccaaaatatatg

SEQ ID NO: 32594 - DNA, 15 bp, Homo sapiens
actaccaaaatatat

SEQ ID NO: 32595 - DNA, 15 bp, Homo sapiens
cactaccaaaatata

SEQ ID NO: 32596 - DNA, 15 bp, Homo sapiens
ccactaccaaaatat

SEQ ID NO: 32597 - DNA, 15 bp, Homo sapiens
tccactaccaaaata

SEQ ID NO: 32598 - DNA, 15 bp, Homo sapiens
ttccactaccaaaat

SEQ ID NO: 32599 - DNA, 15 bp, Homo sapiens
tttccactaccaaaa

SEQ ID NO: 32600 - DNA, 15 bp, Homo sapiens
ttttccactaccaaa

SEQ ID NO: 32601 - DNA, 15 bp, Homo sapiens
tttttccactaccaa

SEQ ID NO: 32602 - DNA, 15 bp, Homo sapiens
ttttttccactacca

SEQ ID NO: 32603 - DNA, 15 bp, Homo sapiens
tttttttccactacc

SEQ ID NO: 32604 - DNA, 15 bp, Homo sapiens
ctttttttccactac

SEQ ID NO: 32605 - DNA, 15 bp, Homo sapiens
cctttttttccacta

SEQ ID NO: 32606 - DNA, 15 bp, Homo sapiens
acctttttttccact

SEQ ID NO: 32607 - DNA, 15 bp, Homo sapiens
tacctttttttccac

SEQ ID NO: 32608 - DNA, 15 bp, Homo sapiens
ttacctttttttcca

SEQ ID NO: 32609 - DNA, 15 bp, Homo sapiens
tttacctttttttcc

SEQ ID NO: 32610 - DNA, 15 bp, Homo sapiens
ttttacctttttttc

SEQ ID NO: 32611 - DNA, 15 bp, Homo sapiens
tttttaccttttttt

SEQ ID NO: 32612 - DNA, 15 bp, Homo sapiens
ttttttacctttttt

SEQ ID NO: 32613 - DNA, 15 bp, Homo sapiens
attttttaccttttt

SEQ ID NO: 32614 - DNA, 15 bp, Homo sapiens
aattttttacctttt

SEQ ID NO: 32615 - DNA, 15 bp, Homo sapiens
aaattttttaccttt

SEQ ID NO: 32616 - DNA, 15 bp, Homo sapiens
aaaattttttacctt

SEQ ID NO: 32617 - DNA, 15 bp, Homo sapiens
aaaaattttttacct

SEQ ID NO: 32618 - DNA, 15 bp, Homo sapiens
aaaaaattttttacc

SEQ ID NO: 32619 - DNA, 15 bp, Homo sapiens
caaaaaattttttac

SEQ ID NO: 32620 - DNA, 15 bp, Homo sapiens
acaaaaaatttttta

SEQ ID NO: 32621 - DNA, 15 bp, Homo sapiens
tacaaaaaatttttt

SEQ ID NO: 32622 - DNA, 15 bp, Homo sapiens
ttacaaaaaattttt

SEQ ID NO: 32623 - DNA, 15 bp, Homo sapiens
attacaaaaaatttt

SEQ ID NO: 32624 - DNA, 15 bp, Homo sapiens
tattacaaaaaattt

SEQ ID NO: 32625 - DNA, 15 bp, Homo sapiens
ttattacaaaaaatt

SEQ ID NO: 32626 - DNA, 15 bp, Homo sapiens
tttattacaaaaaat

SEQ ID NO: 32627 - DNA, 15 bp, Homo sapiens
ttttattacaaaaaa

SEQ ID NO: 32628 - DNA, 15 bp, Homo sapiens
attttattacaaaaa

SEQ ID NO: 32629 - DNA, 15 bp, Homo sapiens
tattttattacaaaa

SEQ ID NO: 32630 - DNA, 15 bp, Homo sapiens
ctattttattacaaa

SEQ ID NO: 32631 - DNA, 15 bp, Homo sapiens
tctattttattacaa

SEQ ID NO: 32632 - DNA, 15 bp, Homo sapiens
ttctattttattaca

SEQ ID NO: 32633 - DNA, 15 bp, Homo sapiens
tttctattttattac

SEQ ID NO: 32634 - DNA, 15 bp, Homo sapiens
ttttctattttatta

SEQ ID NO: 32635 - DNA, 15 bp, Homo sapiens
tttttctattttatt

SEQ ID NO: 32636 - DNA, 15 bp, Homo sapiens
atttttctattttat

SEQ ID NO: 32637 - DNA, 15 bp, Homo sapiens
aatttttctatttta

SEQ ID NO: 32638 - DNA, 15 bp, Homo sapiens
aaatttttctatttt

SEQ ID NO: 32639 - DNA, 15 bp, Homo sapiens
aaaatttttctattt

SEQ ID NO: 32640 - DNA, 15 bp, Homo sapiens
caaaatttttctatt

SEQ ID NO: 32641 - DNA, 15 bp, Homo sapiens
acaaaatttttctat

SEQ ID NO: 32642 - DNA, 15 bp, Homo sapiens
tacaaaatttttcta

SEQ ID NO: 32643 - DNA, 15 bp, Homo sapiens
ttacaaaatttttct

SEQ ID NO: 32644 - DNA, 15 bp, Homo sapiens
attacaaaatttttc

SEQ ID NO: 32645 - DNA, 15 bp, Homo sapiens
cattacaaaattttt

SEQ ID NO: 32646 - DNA, 15 bp, Homo sapiens
acattacaaaatttt

SEQ ID NO: 32647 - DNA, 15 bp, Homo sapiens
cacattacaaaattt

SEQ ID NO: 32648 - DNA, 15 bp, Homo sapiens
ccacattacaaaatt

SEQ ID NO: 32649 - DNA, 15 bp, Homo sapiens
tccacattacaaaat

SEQ ID NO: 32650 - DNA, 15 bp, Homo sapiens
ctccacattacaaaa

SEQ ID NO: 32651 - DNA, 15 bp, Homo sapiens
cctccacattacaaa

SEQ ID NO: 32652 - DNA, 15 bp, Homo sapiens
gcctccacattacaa

SEQ ID NO: 32653 - DNA, 15 bp, Homo sapiens
cgcctccacattaca

SEQ ID NO: 32654 - DNA, 15 bp, Homo sapiens
gcgcctccacattac

SEQ ID NO: 32655 - DNA, 15 bp, Homo sapiens
tgcgcctccacatta

SEQ ID NO: 32656 - DNA, 15 bp, Homo sapiens
ctgcgcctccacatt

SEQ ID NO: 32657 - DNA, 15 bp, Homo sapiens
tctgcgcctccacat

SEQ ID NO: 32658 - DNA, 15 bp, Homo sapiens
ttctgcgcctccaca

SEQ ID NO: 32659 - DNA, 15 bp, Homo sapiens
gttctgcgcctccac

SEQ ID NO: 32660 - DNA, 15 bp, Homo sapiens
tgttctgcgcctcca

SEQ ID NO: 32661 - DNA, 15 bp, Homo sapiens
gtgttctgcgcctcc

SEQ ID NO: 32662 - DNA, 15 bp, Homo sapiens
agtgttctgcgcctc

SEQ ID NO: 32663 - DNA, 15 bp, Homo sapiens
tagtgttctgcgcct

SEQ ID NO: 32664 - DNA, 15 bp, Homo sapiens
ctagtgttctgcgcc

SEQ ID NO: 32665 - DNA, 15 bp, Homo sapiens
tctagtgttctgcgc

SEQ ID NO: 32666 - DNA, 15 bp, Homo sapiens
atctagtgttctgcg

SEQ ID NO: 32667 - DNA, 15 bp, Homo sapiens
aatctagtgttctgc

SEQ ID NO: 32668 - DNA, 15 bp, Homo sapiens
aaatctagtgttctg

SEQ ID NO: 32669 - DNA, 15 bp, Homo sapiens
taaatctagtgttct

SEQ ID NO: 32670 - DNA, 15 bp, Homo sapiens
ttaaatctagtgttc

SEQ ID NO: 32671 - DNA, 15 bp, Homo sapiens
cttaaatctagtgtt

SEQ ID NO: 32672 - DNA, 15 bp, Homo sapiens
gcttaaatctagtgt

SEQ ID NO: 32673 - DNA, 15 bp, Homo sapiens
ggcttaaatctagtg

SEQ ID NO: 32674 - DNA, 15 bp, Homo sapiens
tggcttaaatctagt

SEQ ID NO: 32675 - DNA, 15 bp, Homo sapiens
ctggcttaaatctag

SEQ ID NO: 32676 - DNA, 15 bp, Homo sapiens
cctggcttaaatcta

SEQ ID NO: 32677 - DNA, 15 bp, Homo sapiens
ccctggcttaaatct

SEQ ID NO: 32678 - DNA, 15 bp, Homo sapiens
cccctggcttaaatc

SEQ ID NO: 32679 - DNA, 15 bp, Homo sapiens
ccccctggcttaaat

SEQ ID NO: 32680 - DNA, 15 bp, Homo sapiens
accccctggcttaaa

SEQ ID NO: 32681 - DNA, 15 bp, Homo sapiens
gaccccctggcttaa

SEQ ID NO: 32682 - DNA, 15 bp, Homo sapiens
agaccccctggctta

SEQ ID NO: 32683 - DNA, 15 bp, Homo sapiens
aagaccccctggctt

SEQ ID NO: 32684 - DNA, 15 bp, Homo sapiens
taagaccccctggct

SEQ ID NO: 32685 - DNA, 15 bp, Homo sapiens
ttaagaccccctggc

SEQ ID NO: 32686 - DNA, 15 bp, Homo sapiens
tttaagaccccctgg

SEQ ID NO: 32687 - DNA, 15 bp, Homo sapiens
atttaagaccccctg

SEQ ID NO: 32688 - DNA, 15 bp, Homo sapiens
aatttaagaccccct

SEQ ID NO: 32689 - DNA, 15 bp, Homo sapiens
caatttaagaccccc

SEQ ID NO: 32690 - DNA, 15 bp, Homo sapiens
acaatttaagacccc

SEQ ID NO: 32691 - DNA, 15 bp, Homo sapiens
cacaatttaagaccc

SEQ ID NO: 32692 - DNA, 15 bp, Homo sapiens
acacaatttaagacc

SEQ ID NO: 32693 - DNA, 15 bp, Homo sapiens
aacacaatttaagac

SEQ ID NO: 32694 - DNA, 15 bp, Homo sapiens
taacacaatttaaga

SEQ ID NO: 32695 - DNA, 15 bp, Homo sapiens
gtaacacaatttaag

SEQ ID NO: 32696 - DNA, 15 bp, Homo sapiens
tgtaacacaatttaa

SEQ ID NO: 32697 - DNA, 15 bp, Homo sapiens
atgtaacacaattta

SEQ ID NO: 32698 - DNA, 15 bp, Homo sapiens
aatgtaacacaattt

SEQ ID NO: 32699 - DNA, 15 bp, Homo sapiens
gaatgtaacacaatt

SEQ ID NO: 32700 - DNA, 15 bp, Homo sapiens
ggaatgtaacacaat

SEQ ID NO: 32701 - DNA, 15 bp, Homo sapiens
aggaatgtaacacaa

SEQ ID NO: 32702 - DNA, 15 bp, Homo sapiens
aaggaatgtaacaca

SEQ ID NO: 32703 - DNA, 15 bp, Homo sapiens
aaaggaatgtaacac

SEQ ID NO: 32704 - DNA, 15 bp, Homo sapiens
aaaaggaatgtaaca

SEQ ID NO: 32705 - DNA, 15 bp, Homo sapiens
taaaaggaatgtaac

SEQ ID NO: 32706 - DNA, 15 bp, Homo sapiens
ttaaaaggaatgtaa

SEQ ID NO: 32707 - DNA, 15 bp, Homo sapiens
tttaaaaggaatgta

SEQ ID NO: 32708 - DNA, 15 bp, Homo sapiens
ctttaaaaggaatgt

SEQ ID NO: 32709 - DNA, 15 bp, Homo sapiens
actttaaaaggaatg

SEQ ID NO: 32710 - DNA, 15 bp, Homo sapiens
gactttaaaaggaat

SEQ ID NO: 32711 - DNA, 15 bp, Homo sapiens
agactttaaaaggaa

SEQ ID NO: 32712 - DNA, 15 bp, Homo sapiens
cagactttaaaagga

SEQ ID NO: 32713 - DNA, 15 bp, Homo sapiens
tcagactttaaaagg

SEQ ID NO: 32714 - DNA, 15 bp, Homo sapiens
atcagactttaaaag

SEQ ID NO: 32715 - DNA, 15 bp, Homo sapiens
catcagactttaaaa

SEQ ID NO: 32716 - DNA, 15 bp, Homo sapiens
ccatcagactttaaa

SEQ ID NO: 32717 - DNA, 15 bp, Homo sapiens
tccatcagactttaa

SEQ ID NO: 32718 - DNA, 15 bp, Homo sapiens
ttccatcagacttta

SEQ ID NO: 32719 - DNA, 15 bp, Homo sapiens
cttccatcagacttt

SEQ ID NO: 32720 - DNA, 15 bp, Homo sapiens
ccttccatcagactt

SEQ ID NO: 32721 - DNA, 15 bp, Homo sapiens
accttccatcagact

SEQ ID NO: 32722 - DNA, 15 bp, Homo sapiens
taccttccatcagac

SEQ ID NO: 32723 - DNA, 15 bp, Homo sapiens
ataccttccatcaga

SEQ ID NO: 32724 - DNA, 15 bp, Homo sapiens
tataccttccatcag

SEQ ID NO: 32725 - DNA, 15 bp, Homo sapiens
ttataccttccatca

SEQ ID NO: 32726 - DNA, 15 bp, Homo sapiens
tttataccttccatc

SEQ ID NO: 32727 - DNA, 15 bp, Homo sapiens
atttataccttccat

SEQ ID NO: 32728 - DNA, 15 bp, Homo sapiens
catttataccttcca

SEQ ID NO: 32729 - DNA, 15 bp, Homo sapiens
acatttataccttcc

SEQ ID NO: 32730 - DNA, 15 bp, Homo sapiens
aacatttataccttc

SEQ ID NO: 32731 - DNA, 15 bp, Homo sapiens
gaacatttatacctt

SEQ ID NO: 32732 - DNA, 15 bp, Homo sapiens
agaacatttatacct

SEQ ID NO: 32733 - DNA, 15 bp, Homo sapiens
gagaacatttatacc

SEQ ID NO: 32734 - DNA, 15 bp, Homo sapiens
ggagaacatttatac

SEQ ID NO: 32735 - DNA, 15 bp, Homo sapiens
gggagaacatttata

SEQ ID NO: 32736 - DNA, 15 bp, Homo sapiens
ggggagaacatttat

SEQ ID NO: 32737 - DNA, 15 bp, Homo sapiens
aggggagaacattta

SEQ ID NO: 32738 - DNA, 15 bp, Homo sapiens
gaggggagaacattt

SEQ ID NO: 32739 - DNA, 15 bp, Homo sapiens
tgaggggagaacatt

SEQ ID NO: 32740 - DNA, 15 bp, Homo sapiens
ttgaggggagaacat

SEQ ID NO: 32741 - DNA, 15 bp, Homo sapiens
tttgaggggagaaca

SEQ ID NO: 32742 - DNA, 15 bp, Homo sapiens
ttttgaggggagaac

SEQ ID NO: 32743 - DNA, 15 bp, Homo sapiens
tttttgaggggagaa

SEQ ID NO: 32744 - DNA, 15 bp, Homo sapiens
ttttttgaggggaga

SEQ ID NO: 32745 - DNA, 15 bp, Homo sapiens
attttttgaggggag

SEQ ID NO: 32746 - DNA, 15 bp, Homo sapiens
cattttttgagggga

SEQ ID NO: 32747 - DNA, 15 bp, Homo sapiens
acattttttgagggg

SEQ ID NO: 32748 - DNA, 15 bp, Homo sapiens
cacattttttgaggg

SEQ ID NO: 32749 - DNA, 15 bp, Homo sapiens
gcacattttttgagg

SEQ ID NO: 32750 - DNA, 15 bp, Homo sapiens
tgcacattttttgag

SEQ ID NO: 32751 - DNA, 15 bp, Homo sapiens
atgcacattttttga

SEQ ID NO: 32752 - DNA, 15 bp, Homo sapiens
tatgcacattttttg

SEQ ID NO: 32753 - DNA, 15 bp, Homo sapiens
ctatgcacatttttt

SEQ ID NO: 32754 - DNA, 15 bp, Homo sapiens
actatgcacattttt

SEQ ID NO: 32755 - DNA, 15 bp, Homo sapiens
cactatgcacatttt

SEQ ID NO: 32756 - DNA, 15 bp, Homo sapiens
acactatgcacattt

SEQ ID NO: 32757 - DNA, 15 bp, Homo sapiens
tacactatgcacatt

SEQ ID NO: 32758 - DNA, 15 bp, Homo sapiens
gtacactatgcacat

SEQ ID NO: 32759 - DNA, 15 bp, Homo sapiens
tgtacactatgcaca

SEQ ID NO: 32760 - DNA, 15 bp, Homo sapiens
atgtacactatgcac

SEQ ID NO: 32761 - DNA, 15 bp, Homo sapiens
tatgtacactatgca

SEQ ID NO: 32762 - DNA, 15 bp, Homo sapiens
ttatgtacactatgc

SEQ ID NO: 32763 - DNA, 15 bp, Homo sapiens
tttatgtacactatg

SEQ ID NO: 32764 - DNA, 15 bp, Homo sapiens
ttttatgtacactat

SEQ ID NO: 32765 - DNA, 15 bp, Homo sapiens
attttatgtacacta

SEQ ID NO: 32766 - DNA, 15 bp, Homo sapiens
aattttatgtacact

SEQ ID NO: 32767 - DNA, 15 bp, Homo sapiens
aaattttatgtacac

SEQ ID NO: 32768 - DNA, 15 bp, Homo sapiens
aaaattttatgtaca

SEQ ID NO: 32769 - DNA, 15 bp, Homo sapiens
caaaattttatgtac

SEQ ID NO: 32770 - DNA, 15 bp, Homo sapiens
gcaaaattttatgta

SEQ ID NO: 32771 - DNA, 15 bp, Homo sapiens
tgcaaaattttatgt

SEQ ID NO: 32772 - DNA, 15 bp, Homo sapiens
ctgcaaaattttatg

SEQ ID NO: 32773 - DNA, 15 bp, Homo sapiens
actgcaaaattttat

SEQ ID NO: 32774 - DNA, 15 bp, Homo sapiens
aactgcaaaatttta

SEQ ID NO: 32775 - DNA, 15 bp, Homo sapiens
aaactgcaaaatttt

SEQ ID NO: 32776 - DNA, 15 bp, Homo sapiens
aaaactgcaaaattt

SEQ ID NO: 32777 - DNA, 15 bp, Homo sapiens
aaaaactgcaaaatt

SEQ ID NO: 32778 - DNA, 15 bp, Homo sapiens
taaaaactgcaaaat

SEQ ID NO: 32779 - DNA, 15 bp, Homo sapiens
ataaaaactgcaaaa

SEQ ID NO: 32780 - DNA, 15 bp, Homo sapiens
aataaaaactgcaaa

SEQ ID NO: 32781 - DNA, 15 bp, Homo sapiens
taataaaaactgcaa

SEQ ID NO: 32782 - DNA, 15 bp, Homo sapiens
gtaataaaaactgca

SEQ ID NO: 32783 - DNA, 15 bp, Homo sapiens
tgtaataaaaactgc

SEQ ID NO: 32784 - DNA, 15 bp, Homo sapiens
atgtaataaaaactg

SEQ ID NO: 32785 - DNA, 15 bp, Homo sapiens
aatgtaataaaaact

SEQ ID NO: 32786 - DNA, 15 bp, Homo sapiens
caatgtaataaaaac

SEQ ID NO: 32787 - DNA, 15 bp, Homo sapiens
tcaatgtaataaaaa

SEQ ID NO: 32788 - DNA, 15 bp, Homo sapiens
ttcaatgtaataaaa

SEQ ID NO: 32789 - DNA, 15 bp, Homo sapiens
tttcaatgtaataaa

SEQ ID NO: 32790 - DNA, 15 bp, Homo sapiens
atttcaatgtaataa

SEQ ID NO: 32791 - DNA, 15 bp, Homo sapiens
tatttcaatgtaata

SEQ ID NO: 32792 - DNA, 15 bp, Homo sapiens
atatttcaatgtaat

SEQ ID NO: 32793 - DNA, 15 bp, Homo sapiens
tatatttcaatgtaa

SEQ ID NO: 32794 - DNA, 15 bp, Homo sapiens
atatatttcaatgta

SEQ ID NO: 32795 - DNA, 15 bp, Homo sapiens
aatatatttcaatgt

SEQ ID NO: 32796 - DNA, 15 bp, Homo sapiens
gaatatatttcaatg

SEQ ID NO: 32797 - DNA, 15 bp, Homo sapiens
agaatatatttcaat

SEQ ID NO: 32798 - DNA, 15 bp, Homo sapiens
aagaatatatttcaa

SEQ ID NO: 32799 - DNA, 15 bp, Homo sapiens
aaagaatatatttca

SEQ ID NO: 32800 - DNA, 15 bp, Homo sapiens
aaaagaatatatttc

SEQ ID NO: 32801 - DNA, 15 bp, Homo sapiens
taaaagaatatattt

SEQ ID NO: 32802 - DNA, 15 bp, Homo sapiens
ctaaaagaatatatt

SEQ ID NO: 32803 - DNA, 15 bp, Homo sapiens
tctaaaagaatatat

SEQ ID NO: 32804 - DNA, 15 bp, Homo sapiens
gtctaaaagaatata

SEQ ID NO: 32805 - DNA, 15 bp, Homo sapiens
tgtctaaaagaatat

SEQ ID NO: 32806 - DNA, 15 bp, Homo sapiens
ctgtctaaaagaata

SEQ ID NO: 32807 - DNA, 15 bp, Homo sapiens
tctgtctaaaagaat

SEQ ID NO: 32808 - DNA, 15 bp, Homo sapiens
ttctgtctaaaagaa

SEQ ID NO: 32809 - DNA, 15 bp, Homo sapiens
attctgtctaaaaga

SEQ ID NO: 32810 - DNA, 15 bp, Homo sapiens
cattctgtctaaaag

SEQ ID NO: 32811 - DNA, 15 bp, Homo sapiens
acattctgtctaaaa

SEQ ID NO: 32812 - DNA, 15 bp, Homo sapiens
tacattctgtctaaa

SEQ ID NO: 32813 - DNA, 15 bp, Homo sapiens
ttacattctgtctaa

SEQ ID NO: 32814 - DNA, 15 bp, Homo sapiens
tttacattctgtcta

SEQ ID NO: 32815 - DNA, 15 bp, Homo sapiens
ttttacattctgtct

SEQ ID NO: 32816 - DNA, 15 bp, Homo sapiens
cttttacattctgtc

SEQ ID NO: 32817 - DNA, 15 bp, Homo sapiens
tcttttacattctgt

SEQ ID NO: 32818 - DNA, 15 bp, Homo sapiens
ttcttttacattctg

SEQ ID NO: 32819 - DNA, 15 bp, Homo sapiens
gttcttttacattct

SEQ ID NO: 32820 - DNA, 15 bp, Homo sapiens
ggttcttttacattc

SEQ ID NO: 32821 - DNA, 15 bp, Homo sapiens
aggttcttttacatt

SEQ ID NO: 32822 - DNA, 15 bp, Homo sapiens
aaggttcttttacat

SEQ ID NO: 32823 - DNA, 15 bp, Homo sapiens
gaaggttcttttaca

SEQ ID NO: 32824 - DNA, 15 bp, Homo sapiens
tgaaggttcttttac

SEQ ID NO: 32825 - DNA, 15 bp, Homo sapiens
atgaaggttctttta

SEQ ID NO: 32826 - DNA, 15 bp, Homo sapiens
catgaaggttctttt

SEQ ID NO: 32827 - DNA, 15 bp, Homo sapiens
tcatgaaggttcttt

SEQ ID NO: 32828 - DNA, 15 bp, Homo sapiens
ttcatgaaggttctt

SEQ ID NO: 32829 - DNA, 15 bp, Homo sapiens
tttcatgaaggttct

SEQ ID NO: 32830 - DNA, 15 bp, Homo sapiens
ttttcatgaaggttc

SEQ ID NO: 32831 - DNA, 15 bp, Homo sapiens
gttttcatgaaggtt

SEQ ID NO: 32832 - DNA, 15 bp, Homo sapiens
agttttcatgaaggt

SEQ ID NO: 32833 - DNA, 15 bp, Homo sapiens
tagttttcatgaagg

SEQ ID NO: 32834 - DNA, 15 bp, Homo sapiens
atagttttcatgaag

SEQ ID NO: 32835 - DNA, 15 bp, Homo sapiens
catagttttcatgaa

SEQ ID NO: 32836 - DNA, 15 bp, Homo sapiens
acatagttttcatga

SEQ ID NO: 32837 - DNA, 15 bp, Homo sapiens
gacatagttttcatg

SEQ ID NO: 32838 - DNA, 15 bp, Homo sapiens
tgacatagttttcat

SEQ ID NO: 32839 - DNA, 15 bp, Homo sapiens
gtgacatagttttca

SEQ ID NO: 32840 - DNA, 15 bp, Homo sapiens
agtgacatagttttc

SEQ ID NO: 32841 - DNA, 15 bp, Homo sapiens
aagtgacatagtttt

SEQ ID NO: 32842 - DNA, 15 bp, Homo sapiens
aaagtgacatagttt

SEQ ID NO: 32843 - DNA, 15 bp, Homo sapiens
aaaagtgacatagtt

SEQ ID NO: 32844 - DNA, 15 bp, Homo sapiens
aaaaagtgacatagt

SEQ ID NO: 32845 - DNA, 15 bp, Homo sapiens
aaaaaagtgacatag

SEQ ID NO: 32846 - DNA, 15 bp, Homo sapiens
taaaaaagtgacata

SEQ ID NO: 32847 - DNA, 15 bp, Homo sapiens
ataaaaaagtgacat

SEQ ID NO: 32848 - DNA, 15 bp, Homo sapiens
cataaaaaagtgaca

SEQ ID NO: 32849 - DNA, 15 bp, Homo sapiens
gcataaaaaagtgac

SEQ ID NO: 32850 - DNA, 15 bp, Homo sapiens
tgcataaaaaagtga

SEQ ID NO: 32851 - DNA, 15 bp, Homo sapiens
ttgcataaaaaagtg

SEQ ID NO: 32852 - DNA, 15 bp, Homo sapiens
tttgcataaaaaagt

SEQ ID NO: 32853 - DNA, 15 bp, Homo sapiens
ttttgcataaaaaag

SEQ ID NO: 32854 - DNA, 15 bp, Homo sapiens
tttttgcataaaaaa

SEQ ID NO: 32855 - DNA, 15 bp, Homo sapiens
gtttttgcataaaaa

SEQ ID NO: 32856 - DNA, 15 bp, Homo sapiens
ggtttttgcataaaa

SEQ ID NO: 32857 - DNA, 15 bp, Homo sapiens
tggtttttgcataaa

SEQ ID NO: 32858 - DNA, 15 bp, Homo sapiens
ctggtttttgcataa

SEQ ID NO: 32859 - DNA, 15 bp, Homo sapiens
actggtttttgcata

SEQ ID NO: 32860 - DNA, 15 bp, Homo sapiens
cactggtttttgcat

SEQ ID NO: 32861 - DNA, 15 bp, Homo sapiens
ccactggtttttgca

SEQ ID NO: 32862 - DNA, 15 bp, Homo sapiens
gccactggtttttgc

SEQ ID NO: 32863 - DNA, 15 bp, Homo sapiens
agccactggtttttg

SEQ ID NO: 32864 - DNA, 15 bp, Homo sapiens
tagccactggttttt

SEQ ID NO: 32865 - DNA, 15 bp, Homo sapiens
gtagccactggtttt

SEQ ID NO: 32866 - DNA, 15 bp, Homo sapiens
agtagccactggttt

SEQ ID NO: 32867 - DNA, 15 bp, Homo sapiens
tagtagccactggtt

SEQ ID NO: 32868 - DNA, 15 bp, Homo sapiens
gtagtagccactggt

SEQ ID NO: 32869 - DNA, 15 bp, Homo sapiens
tgtagtagccactgg

SEQ ID NO: 32870 - DNA, 15 bp, Homo sapiens
atgtagtagccactg

SEQ ID NO: 32871 - DNA, 15 bp, Homo sapiens
catgtagtagccact

SEQ ID NO: 32872 - DNA, 15 bp, Homo sapiens
tcatgtagtagccac

SEQ ID NO: 32873 - DNA, 15 bp, Homo sapiens
ctcatgtagtagcca

SEQ ID NO: 32874 - DNA, 15 bp, Homo sapiens
tctcatgtagtagcc

SEQ ID NO: 32875 - DNA, 15 bp, Homo sapiens
ctctcatgtagtagc

SEQ ID NO: 32876 - DNA, 15 bp, Homo sapiens
gctctcatgtagtag

SEQ ID NO: 32877 - DNA, 15 bp, Homo sapiens
tgctctcatgtagta

SEQ ID NO: 32878 - DNA, 15 bp, Homo sapiens
ttgctctcatgtagt

SEQ ID NO: 32879 - DNA, 15 bp, Homo sapiens
attgctctcatgtag

SEQ ID NO: 32880 - DNA, 15 bp, Homo sapiens
cattgctctcatgta

SEQ ID NO: 32881 - DNA, 15 bp, Homo sapiens
tcattgctctcatgt

SEQ ID NO: 32882 - DNA, 15 bp, Homo sapiens
ttcattgctctcatg

SEQ ID NO: 32883 - DNA, 15 bp, Homo sapiens
attcattgctctcat

SEQ ID NO: 32884 - DNA, 15 bp, Homo sapiens
tattcattgctctca

SEQ ID NO: 32885 - DNA, 15 bp, Homo sapiens
ttattcattgctctc

SEQ ID NO: 32886 - DNA, 15 bp, Homo sapiens
tttattcattgctct

SEQ ID NO: 32887 - DNA, 15 bp, Homo sapiens
atttattcattgctc

SEQ ID NO: 32888 - DNA, 15 bp, Homo sapiens
gatttattcattgct

SEQ ID NO: 32889 - DNA, 15 bp, Homo sapiens
agatttattcattgc

SEQ ID NO: 32890 - DNA, 15 bp, Homo sapiens
tagatttattcattg

SEQ ID NO: 32891 - DNA, 15 bp, Homo sapiens
ttagatttattcatt

SEQ ID NO: 32892 - DNA, 15 bp, Homo sapiens
cttagatttattcat

SEQ ID NO: 32893 - DNA, 15 bp, Homo sapiens
acttagatttattca

SEQ ID NO: 32894 - DNA, 15 bp, Homo sapiens
cacttagatttattc

SEQ ID NO: 32895 - DNA, 15 bp, Homo sapiens
ccacttagatttatt

SEQ ID NO: 32896 - DNA, 15 bp, Homo sapiens
accacttagatttat

SEQ ID NO: 32897 - DNA, 15 bp, Homo sapiens
taccacttagattta

SEQ ID NO: 32898 - DNA, 15 bp, Homo sapiens
gtaccacttagattt

SEQ ID NO: 32899 - DNA, 15 bp, Homo sapiens
tgtaccacttagatt

SEQ ID NO: 32900 - DNA, 15 bp, Homo sapiens
ttgtaccacttagat

SEQ ID NO: 32901 - DNA, 15 bp, Homo sapiens
tttgtaccacttaga

SEQ ID NO: 32902 - DNA, 15 bp, Homo sapiens
atttgtaccacttag

SEQ ID NO: 32903 - DNA, 15 bp, Homo sapiens
aatttgtaccactta

SEQ ID NO: 32904 - DNA, 15 bp, Homo sapiens
taatttgtaccactt

SEQ ID NO: 32905 - DNA, 15 bp, Homo sapiens
ttaatttgtaccact

SEQ ID NO: 32906 - DNA, 15 bp, Homo sapiens
gttaatttgtaccac

SEQ ID NO: 32907 - DNA, 15 bp, Homo sapiens
ggttaatttgtacca

SEQ ID NO: 32908 - DNA, 15 bp, Homo sapiens
tggttaatttgtacc

SEQ ID NO: 32909 - DNA, 15 bp, Homo sapiens
ttggttaatttgtac

SEQ ID NO: 32910 - DNA, 15 bp, Homo sapiens
tttggttaatttgta

SEQ ID NO: 32911 - DNA, 15 bp, Homo sapiens
ttttggttaatttgt

SEQ ID NO: 32912 - DNA, 15 bp, Homo sapiens
attttggttaatttg

SEQ ID NO: 32913 - DNA, 15 bp, Homo sapiens
aattttggttaattt

SEQ ID NO: 32914 - DNA, 15 bp, Homo sapiens
taattttggttaatt

SEQ ID NO: 32915 - DNA, 15 bp, Homo sapiens
ttaattttggttaat

SEQ ID NO: 32916 - DNA, 15 bp, Homo sapiens
cttaattttggttaa

SEQ ID NO: 32917 - DNA, 15 bp, Homo sapiens
gcttaattttggtta

SEQ ID NO: 32918 - DNA, 15 bp, Homo sapiens
agcttaattttggtt

SEQ ID NO: 32919 - DNA, 15 bp, Homo sapiens
aagcttaattttggt

SEQ ID NO: 32920 - DNA, 15 bp, Homo sapiens
aaagcttaattttgg

SEQ ID NO: 32921 - DNA, 15 bp, Homo sapiens
taaagcttaattttg

SEQ ID NO: 32922 - DNA, 15 bp, Homo sapiens
ctaaagcttaatttt

SEQ ID NO: 32923 - DNA, 15 bp, Homo sapiens
actaaagcttaattt

SEQ ID NO: 32924 - DNA, 15 bp, Homo sapiens
aactaaagcttaatt

SEQ ID NO: 32925 - DNA, 15 bp, Homo sapiens
gaactaaagcttaat

SEQ ID NO: 32926 - DNA, 15 bp, Homo sapiens
agaactaaagcttaa

SEQ ID NO: 32927 - DNA, 15 bp, Homo sapiens
cagaactaaagctta

SEQ ID NO: 32928 - DNA, 15 bp, Homo sapiens
acagaactaaagctt

SEQ ID NO: 32929 - DNA, 15 bp, Homo sapiens
aacagaactaaagct

SEQ ID NO: 32930 - DNA, 15 bp, Homo sapiens
gaacagaactaaagc

SEQ ID NO: 32931 - DNA, 15 bp, Homo sapiens
tgaacagaactaaag

SEQ ID NO: 32932 - DNA, 15 bp, Homo sapiens
ttgaacagaactaaa

SEQ ID NO: 32933 - DNA, 15 bp, Homo sapiens
attgaacagaactaa

SEQ ID NO: 32934 - DNA, 15 bp, Homo sapiens
tattgaacagaacta

SEQ ID NO: 32935 - DNA, 15 bp, Homo sapiens
gtattgaacagaact

SEQ ID NO: 32936 - DNA, 15 bp, Homo sapiens
agtattgaacagaac

SEQ ID NO: 32937 - DNA, 15 bp, Homo sapiens
tagtattgaacagaa

SEQ ID NO: 32938 - DNA, 15 bp, Homo sapiens
ttagtattgaacaga

SEQ ID NO: 32939 - DNA, 15 bp, Homo sapiens
tttagtattgaacag

SEQ ID NO: 32940 - DNA, 15 bp, Homo sapiens
atttagtattgaaca

SEQ ID NO: 32941 - DNA, 15 bp, Homo sapiens
aatttagtattgaac

SEQ ID NO: 32942 - DNA, 15 bp, Homo sapiens
aaatttagtattgaa

SEQ ID NO: 32943 - DNA, 15 bp, Homo sapiens
aaaatttagtattga

SEQ ID NO: 32944 - DNA, 15 bp, Homo sapiens
taaaatttagtattg

SEQ ID NO: 32945 - DNA, 15 bp, Homo sapiens
ttaaaatttagtatt

SEQ ID NO: 32946 - DNA, 15 bp, Homo sapiens
attaaaatttagtat

SEQ ID NO: 32947 - DNA, 15 bp, Homo sapiens
cattaaaatttagta

SEQ ID NO: 32948 - DNA, 15 bp, Homo sapiens
tcattaaaatttagt

SEQ ID NO: 32949 - DNA, 15 bp, Homo sapiens
ttcattaaaatttag

SEQ ID NO: 32950 - DNA, 15 bp, Homo sapiens
tttcattaaaattta

SEQ ID NO: 32951 - DNA, 15 bp, Homo sapiens
ttttcattaaaattt

SEQ ID NO: 32952 - DNA, 15 bp, Homo sapiens
cttttcattaaaatt

SEQ ID NO: 32953 - DNA, 15 bp, Homo sapiens
tcttttcattaaaat

SEQ ID NO: 32954 - DNA, 15 bp, Homo sapiens
gtcttttcattaaaa

SEQ ID NO: 32955 - DNA, 15 bp, Homo sapiens
agtcttttcattaaa

SEQ ID NO: 32956 - DNA, 15 bp, Homo sapiens
cagtcttttcattaa

SEQ ID NO: 32957 - DNA, 15 bp, Homo sapiens
gcagtcttttcatta

SEQ ID NO: 32958 - DNA, 15 bp, Homo sapiens
agcagtcttttcatt

SEQ ID NO: 32959 - DNA, 15 bp, Homo sapiens
tagcagtcttttcat

SEQ ID NO: 32960 - DNA, 15 bp, Homo sapiens
atagcagtcttttca

SEQ ID NO: 32961 - DNA, 15 bp, Homo sapiens
aatagcagtcttttc

SEQ ID NO: 32962 - DNA, 15 bp, Homo sapiens
aaatagcagtctttt

SEQ ID NO: 32963 - DNA, 15 bp, Homo sapiens
taaatagcagtcttt

SEQ ID NO: 32964 - DNA, 15 bp, Homo sapiens
ttaaatagcagtctt

SEQ ID NO: 32965 - DNA, 15 bp, Homo sapiens
gttaaatagcagtct

SEQ ID NO: 32966 - DNA, 15 bp, Homo sapiens
agttaaatagcagtc

SEQ ID NO: 32967 - DNA, 15 bp, Homo sapiens
aagttaaatagcagt

SEQ ID NO: 32968 - DNA, 15 bp, Homo sapiens
aaagttaaatagcag

SEQ ID NO: 32969 - DNA, 15 bp, Homo sapiens
aaaagttaaatagca

SEQ ID NO: 32970 - DNA, 15 bp, Homo sapiens
taaaagttaaatagc

SEQ ID NO: 32971 - DNA, 15 bp, Homo sapiens
ttaaaagttaaatag

SEQ ID NO: 32972 - DNA, 15 bp, Homo sapiens
tttaaaagttaaata

SEQ ID NO: 32973 - DNA, 15 bp, Homo sapiens
ttttaaaagttaaat

SEQ ID NO: 32974 - DNA, 15 bp, Homo sapiens
attttaaaagttaaa

SEQ ID NO: 32975 - DNA, 15 bp, Homo sapiens
tattttaaaagttaa

SEQ ID NO: 32976 - DNA, 15 bp, Homo sapiens
ttattttaaaagtta

SEQ ID NO: 32977 - DNA, 15 bp, Homo sapiens
gttattttaaaagtt

SEQ ID NO: 32978 - DNA, 15 bp, Homo sapiens
tgttattttaaaagt

SEQ ID NO: 32979 - DNA, 15 bp, Homo sapiens
ttgttattttaaaag

SEQ ID NO: 32980 - DNA, 15 bp, Homo sapiens
cttgttattttaaaa

SEQ ID NO: 32981 - DNA, 15 bp, Homo sapiens
acttgttattttaaa

SEQ ID NO: 32982 - DNA, 15 bp, Homo sapiens
aacttgttattttaa

SEQ ID NO: 32983 - DNA, 15 bp, Homo sapiens
caacttgttatttta

SEQ ID NO: 32984 - DNA, 15 bp, Homo sapiens
tcaacttgttatttt

SEQ ID NO: 32985 - DNA, 15 bp, Homo sapiens
ttcaacttgttattt

SEQ ID NO: 32986 - DNA, 15 bp, Homo sapiens
tttcaacttgttatt

SEQ ID NO: 32987 - DNA, 15 bp, Homo sapiens
gtttcaacttgttat

SEQ ID NO: 32988 - DNA, 15 bp, Homo sapiens
agtttcaacttgtta

SEQ ID NO: 32989 - DNA, 15 bp, Homo sapiens
tagtttcaacttgtt

SEQ ID NO: 32990 - DNA, 15 bp, Homo sapiens
atagtttcaacttgt

SEQ ID NO: 32991 - DNA, 15 bp, Homo sapiens
catagtttcaacttg

SEQ ID NO: 32992 - DNA, 15 bp, Homo sapiens
gcatagtttcaactt

SEQ ID NO: 32993 - DNA, 15 bp, Homo sapiens
agcatagtttcaact

SEQ ID NO: 32994 - DNA, 15 bp, Homo sapiens
gagcatagtttcaac

SEQ ID NO: 32995 - DNA, 15 bp, Homo sapiens
agagcatagtttcaa

SEQ ID NO: 32996 - DNA, 15 bp, Homo sapiens
aagagcatagtttca

SEQ ID NO: 32997 - DNA, 15 bp, Homo sapiens
aaagagcatagtttc

SEQ ID NO: 32998 - DNA, 15 bp, Homo sapiens
caaagagcatagttt

SEQ ID NO: 32999 - DNA, 15 bp, Homo sapiens
tcaaagagcatagtt

SEQ ID NO: 33000 - DNA, 15 bp, Homo sapiens
gtcaaagagcatagt

SEQ ID NO: 33001 - DNA, 15 bp, Homo sapiens
agtcaaagagcatag

SEQ ID NO: 33002 - DNA, 15 bp, Homo sapiens
aagtcaaagagcata

SEQ ID NO: 33003 - DNA, 15 bp, Homo sapiens
aaagtcaaagagcat

SEQ ID NO: 33004 - DNA, 15 bp, Homo sapiens
caaagtcaaagagca

SEQ ID NO: 33005 - DNA, 15 bp, Homo sapiens
tcaaagtcaaagagc

SEQ ID NO: 33006 - DNA, 15 bp, Homo sapiens
gtcaaagtcaaagag

SEQ ID NO: 33007 - DNA, 15 bp, Homo sapiens
agtcaaagtcaaaga

SEQ ID NO: 33008 - DNA, 15 bp, Homo sapiens
aagtcaaagtcaaag

SEQ ID NO: 33009 - DNA, 15 bp, Homo sapiens
aaagtcaaagtcaaa

SEQ ID NO: 33010 - DNA, 15 bp, Homo sapiens
caaagtcaaagtcaa

SEQ ID NO: 33011 - DNA, 15 bp, Homo sapiens
gcaaagtcaaagtca

SEQ ID NO: 33012 - DNA, 15 bp, Homo sapiens
tgcaaagtcaaagtc

SEQ ID NO: 33013 - DNA, 15 bp, Homo sapiens
ttgcaaagtcaaagt

SEQ ID NO: 33014 - DNA, 15 bp, Homo sapiens
gttgcaaagtcaaag

SEQ ID NO: 33015 - DNA, 15 bp, Homo sapiens
agttgcaaagtcaaa

SEQ ID NO: 33016 - DNA, 15 bp, Homo sapiens
aagttgcaaagtcaa

SEQ ID NO: 33017 - DNA, 15 bp, Homo sapiens
aaagttgcaaagtca

SEQ ID NO: 33018 - DNA, 15 bp, Homo sapiens
aaaagttgcaaagtc

SEQ ID NO: 33019 - DNA, 15 bp, Homo sapiens
taaaagttgcaaagt

SEQ ID NO: 33020 - DNA, 15 bp, Homo sapiens
ataaaagttgcaaag

SEQ ID NO: 33021 - DNA, 15 bp, Homo sapiens
tataaaagttgcaaa

SEQ ID NO: 33022 - DNA, 15 bp, Homo sapiens
atataaaagttgcaa

SEQ ID NO: 33023 - DNA, 15 bp, Homo sapiens
catataaaagttgca

SEQ ID NO: 33024 - DNA, 15 bp, Homo sapiens
tcatataaaagttgc

SEQ ID NO: 33025 - DNA, 15 bp, Homo sapiens
atcatataaaagttg

SEQ ID NO: 33026 - DNA, 15 bp, Homo sapiens
gatcatataaaagtt

SEQ ID NO: 33027 - DNA, 15 bp, Homo sapiens
agatcatataaaagt

SEQ ID NO: 33028 - DNA, 15 bp, Homo sapiens
aagatcatataaaag

SEQ ID NO: 33029 - DNA, 15 bp, Homo sapiens
aaagatcatataaaa

SEQ ID NO: 33030 - DNA, 15 bp, Homo sapiens
caaagatcatataaa

SEQ ID NO: 33031 - DNA, 15 bp, Homo sapiens
tcaaagatcatataa

SEQ ID NO: 33032 - DNA, 15 bp, Homo sapiens
atcaaagatcatata

SEQ ID NO: 33033 - DNA, 15 bp, Homo sapiens
tatcaaagatcatat

SEQ ID NO: 33034 - DNA, 15 bp, Homo sapiens
atatcaaagatcata

SEQ ID NO: 33035 - DNA, 15 bp, Homo sapiens
gatatcaaagatcat

SEQ ID NO: 33036 - DNA, 15 bp, Homo sapiens
ggatatcaaagatca

SEQ ID NO: 33037 - DNA, 15 bp, Homo sapiens
tggatatcaaagatc

SEQ ID NO: 33038 - DNA, 15 bp, Homo sapiens
ttggatatcaaagat

SEQ ID NO: 33039 - DNA, 15 bp, Homo sapiens
attggatatcaaaga

SEQ ID NO: 33040 - DNA, 15 bp, Homo sapiens
gattggatatcaaag

SEQ ID NO: 33041 - DNA, 15 bp, Homo sapiens
tgattggatatcaaa

SEQ ID NO: 33042 - DNA, 15 bp, Homo sapiens
ctgattggatatcaa

SEQ ID NO: 33043 - DNA, 15 bp, Homo sapiens
actgattggatatca

SEQ ID NO: 33044 - DNA, 15 bp, Homo sapiens
cactgattggatatc

SEQ ID NO: 33045 - DNA, 15 bp, Homo sapiens
acactgattggatat

SEQ ID NO: 33046 - DNA, 15 bp, Homo sapiens
aacactgattggata

SEQ ID NO: 33047 - DNA, 15 bp, Homo sapiens
caacactgattggat

SEQ ID NO: 33048 - DNA, 15 bp, Homo sapiens
tcaacactgattgga

SEQ ID NO: 33049 - DNA, 15 bp, Homo sapiens
gtcaacactgattgg

SEQ ID NO: 33050 - DNA, 15 bp, Homo sapiens
agtcaacactgattg

SEQ ID NO: 33051 - DNA, 15 bp, Homo sapiens
aagtcaacactgatt

SEQ ID NO: 33052 - DNA, 15 bp, Homo sapiens
aaagtcaacactgat

SEQ ID NO: 33053 - DNA, 15 bp, Homo sapiens
caaagtcaacactga

SEQ ID NO: 33054 - DNA, 15 bp, Homo sapiens
ccaaagtcaacactg

SEQ ID NO: 33055 - DNA, 15 bp, Homo sapiens
accaaagtcaacact

SEQ ID NO: 33056 - DNA, 15 bp, Homo sapiens
taccaaagtcaacac

SEQ ID NO: 33057 - DNA, 15 bp, Homo sapiens
ttaccaaagtcaaca

SEQ ID NO: 33058 - DNA, 15 bp, Homo sapiens
tttaccaaagtcaac

SEQ ID NO: 33059 - DNA, 15 bp, Homo sapiens
ttttaccaaagtcaa

SEQ ID NO: 33060 - DNA, 15 bp, Homo sapiens
tttttaccaaagtca

SEQ ID NO: 33061 - DNA, 15 bp, Homo sapiens
ctttttaccaaagtc

SEQ ID NO: 33062 - DNA, 15 bp, Homo sapiens
actttttaccaaagt

SEQ ID NO: 33063 - DNA, 15 bp, Homo sapiens
cactttttaccaaag

SEQ ID NO: 33064 - DNA, 15 bp, Homo sapiens
gcactttttaccaaa

SEQ ID NO: 33065 - DNA, 15 bp, Homo sapiens
agcactttttaccaa

SEQ ID NO: 33066 - DNA, 15 bp, Homo sapiens
cagcactttttacca

SEQ ID NO: 33067 - DNA, 15 bp, Homo sapiens
tcagcactttttacc

SEQ ID NO: 33068 - DNA, 15 bp, Homo sapiens
ttcagcactttttac

SEQ ID NO: 33069 - DNA, 15 bp, Homo sapiens
tttcagcacttttta

SEQ ID NO: 33070 - DNA, 15 bp, Homo sapiens
ttttcagcacttttt

SEQ ID NO: 33071 - DNA, 15 bp, Homo sapiens
attttcagcactttt

SEQ ID NO: 33072 - DNA, 15 bp, Homo sapiens
cattttcagcacttt

SEQ ID NO: 33073 - DNA, 15 bp, Homo sapiens
gcattttcagcactt

SEQ ID NO: 33074 - DNA, 15 bp, Homo sapiens
agcattttcagcact

SEQ ID NO: 33075 - DNA, 15 bp, Homo sapiens
tagcattttcagcac

SEQ ID NO: 33076 - DNA, 15 bp, Homo sapiens
atagcattttcagca

SEQ ID NO: 33077 - DNA, 15 bp, Homo sapiens
aatagcattttcagc

SEQ ID NO: 33078 - DNA, 15 bp, Homo sapiens
aaatagcattttcag

SEQ ID NO: 33079 - DNA, 15 bp, Homo sapiens
aaaatagcattttca

SEQ ID NO: 33080 - DNA, 15 bp, Homo sapiens
taaaatagcattttc

SEQ ID NO: 33081 - DNA, 15 bp, Homo sapiens
gtaaaatagcatttt

SEQ ID NO: 33082 - DNA, 15 bp, Homo sapiens
tgtaaaatagcattt

SEQ ID NO: 33083 - DNA, 15 bp, Homo sapiens
ttgtaaaatagcatt

SEQ ID NO: 33084 - DNA, 15 bp, Homo sapiens
tttgtaaaatagcat

SEQ ID NO: 33085 - DNA, 15 bp, Homo sapiens
ttttgtaaaatagca

SEQ ID NO: 33086 - DNA, 15 bp, Homo sapiens
cttttgtaaaatagc

SEQ ID NO: 33087 - DNA, 15 bp, Homo sapiens
tcttttgtaaaatag

SEQ ID NO: 33088 - DNA, 15 bp, Homo sapiens
ttcttttgtaaaata

SEQ ID NO: 33089 - DNA, 15 bp, Homo sapiens
tttcttttgtaaaat

SEQ ID NO: 33090 - DNA, 15 bp, Homo sapiens
ctttcttttgtaaaa

SEQ ID NO: 33091 - DNA, 15 bp, Homo sapiens
tctttcttttgtaaa

SEQ ID NO: 33092 - DNA, 15 bp, Homo sapiens
ttctttcttttgtaa

SEQ ID NO: 33093 - DNA, 15 bp, Homo sapiens
cttctttcttttgta

SEQ ID NO: 33094 - DNA, 15 bp, Homo sapiens
tcttctttcttttgt

SEQ ID NO: 33095 - DNA, 15 bp, Homo sapiens
ctcttctttcttttg

SEQ ID NO: 33096 - DNA, 15 bp, Homo sapiens
actcttctttctttt

SEQ ID NO: 33097 - DNA, 15 bp, Homo sapiens
tactcttctttcttt

SEQ ID NO: 33098 - DNA, 15 bp, Homo sapiens
ttactcttctttctt

SEQ ID NO: 33099 - DNA, 15 bp, Homo sapiens
tttactcttctttct

SEQ ID NO: 33100 - DNA, 15 bp, Homo sapiens
atttactcttctttc

SEQ ID NO: 33101 - DNA, 15 bp, Homo sapiens
catttactcttcttt

SEQ ID NO: 33102 - DNA, 15 bp, Homo sapiens
ccatttactcttctt

SEQ ID NO: 33103 - DNA, 15 bp, Homo sapiens
tccatttactcttct

SEQ ID NO: 33104 - DNA, 15 bp, Homo sapiens
ttccatttactcttc

SEQ ID NO: 33105 - DNA, 15 bp, Homo sapiens
attccatttactctt

SEQ ID NO: 33106 - DNA, 15 bp, Homo sapiens
gattccatttactct

SEQ ID NO: 33107 - DNA, 15 bp, Homo sapiens
agattccatttactc

SEQ ID NO: 33108 - DNA, 15 bp, Homo sapiens
cagattccatttact

SEQ ID NO: 33109 - DNA, 15 bp, Homo sapiens
acagattccatttac

SEQ ID NO: 33110 - DNA, 15 bp, Homo sapiens
tacagattccattta

SEQ ID NO: 33111 - DNA, 15 bp, Homo sapiens
ctacagattccattt

SEQ ID NO: 33112 - DNA, 15 bp, Homo sapiens
tctacagattccatt

SEQ ID NO: 33113 - DNA, 15 bp, Homo sapiens
atctacagattccat

SEQ ID NO: 33114 - DNA, 15 bp, Homo sapiens
aatctacagattcca

SEQ ID NO: 33115 - DNA, 15 bp, Homo sapiens
gaatctacagattcc

SEQ ID NO: 33116 - DNA, 15 bp, Homo sapiens
agaatctacagattc

SEQ ID NO: 33117 - DNA, 15 bp, Homo sapiens
tagaatctacagatt

SEQ ID NO: 33118 - DNA, 15 bp, Homo sapiens
atagaatctacagat

SEQ ID NO: 33119 - DNA, 15 bp, Homo sapiens
aatagaatctacaga

SEQ ID NO: 33120 - DNA, 15 bp, Homo sapiens
caatagaatctacag

SEQ ID NO: 33121 - DNA, 15 bp, Homo sapiens
gcaatagaatctaca

SEQ ID NO: 33122 - DNA, 15 bp, Homo sapiens
ggcaatagaatctac

SEQ ID NO: 33123 - DNA, 15 bp, Homo sapiens
aggcaatagaatcta

SEQ ID NO: 33124 - DNA, 15 bp, Homo sapiens
caggcaatagaatct

SEQ ID NO: 33125 - DNA, 15 bp, Homo sapiens
tcaggcaatagaatc

SEQ ID NO: 33126 - DNA, 15 bp, Homo sapiens
atcaggcaatagaat

SEQ ID NO: 33127 - DNA, 15 bp, Homo sapiens
catcaggcaatagaa

SEQ ID NO: 33128 - DNA, 15 bp, Homo sapiens
tcatcaggcaataga

SEQ ID NO: 33129 - DNA, 15 bp, Homo sapiens
ttcatcaggcaatag

SEQ ID NO: 33130 - DNA, 15 bp, Homo sapiens
tttcatcaggcaata

SEQ ID NO: 33131 - DNA, 15 bp, Homo sapiens
ctttcatcaggcaat

SEQ ID NO: 33132 - DNA, 15 bp, Homo sapiens
actttcatcaggcaa

SEQ ID NO: 33133 - DNA, 15 bp, Homo sapiens
tactttcatcaggca

SEQ ID NO: 33134 - DNA, 15 bp, Homo sapiens
ctactttcatcaggc

SEQ ID NO: 33135 - DNA, 15 bp, Homo sapiens
tctactttcatcagg

SEQ ID NO: 33136 - DNA, 15 bp, Homo sapiens
gtctactttcatcag

SEQ ID NO: 33137 - DNA, 15 bp, Homo sapiens
cgtctactttcatca

SEQ ID NO: 33138 - DNA, 15 bp, Homo sapiens
acgtctactttcatc

SEQ ID NO: 33139 - DNA, 15 bp, Homo sapiens
cacgtctactttcat

SEQ ID NO: 33140 - DNA, 15 bp, Homo sapiens
acacgtctactttca

SEQ ID NO: 33141 - DNA, 15 bp, Homo sapiens
gacacgtctactttc

SEQ ID NO: 33142 - DNA, 15 bp, Homo sapiens
tgacacgtctacttt

SEQ ID NO: 33143 - DNA, 15 bp, Homo sapiens
ttgacacgtctactt

SEQ ID NO: 33144 - DNA, 15 bp, Homo sapiens
cttgacacgtctact

SEQ ID NO: 33145 - DNA, 15 bp, Homo sapiens
tcttgacacgtctac

SEQ ID NO: 33146 - DNA, 15 bp, Homo sapiens
ttcttgacacgtcta

SEQ ID NO: 33147 - DNA, 15 bp, Homo sapiens
tttcttgacacgtct

SEQ ID NO: 33148 - DNA, 15 bp, Homo sapiens
atttcttgacacgtc

SEQ ID NO: 33149 - DNA, 15 bp, Homo sapiens
tatttcttgacacgt

SEQ ID NO: 33150 - DNA, 15 bp, Homo sapiens
ttatttcttgacacg

SEQ ID NO: 33151 - DNA, 15 bp, Homo sapiens
cttatttcttgacac

SEQ ID NO: 33152 - DNA, 15 bp, Homo sapiens
tcttatttcttgaca

SEQ ID NO: 33153 - DNA, 15 bp, Homo sapiens
ttcttatttcttgac

SEQ ID NO: 33154 - DNA, 15 bp, Homo sapiens
attcttatttcttga

SEQ ID NO: 33155 - DNA, 15 bp, Homo sapiens
aattcttatttcttg

SEQ ID NO: 33156 - DNA, 15 bp, Homo sapiens
gaattcttatttctt

SEQ ID NO: 33157 - DNA, 15 bp, Homo sapiens
agaattcttatttct

SEQ ID NO: 33158 - DNA, 15 bp, Homo sapiens
gagaattcttatttc

SEQ ID NO: 33159 - DNA, 15 bp, Homo sapiens
ggagaattcttattt

SEQ ID NO: 33160 - DNA, 15 bp, Homo sapiens
tggagaattcttatt

SEQ ID NO: 33161 - DNA, 15 bp, Homo sapiens
ttggagaattcttat

SEQ ID NO: 33162 - DNA, 15 bp, Homo sapiens
cttggagaattctta

SEQ ID NO: 33163 - DNA, 15 bp, Homo sapiens
ccttggagaattctt

SEQ ID NO: 33164 - DNA, 15 bp, Homo sapiens
gccttggagaattct

SEQ ID NO: 33165 - DNA, 15 bp, Homo sapiens
agccttggagaattc

SEQ ID NO: 33166 - DNA, 15 bp, Homo sapiens
gagccttggagaatt

SEQ ID NO: 33167 - DNA, 15 bp, Homo sapiens
agagccttggagaat

SEQ ID NO: 33168 - DNA, 15 bp, Homo sapiens
aagagccttggagaa

SEQ ID NO: 33169 - DNA, 15 bp, Homo sapiens
gaagagccttggaga

SEQ ID NO: 33170 - DNA, 15 bp, Homo sapiens
tgaagagccttggag

SEQ ID NO: 33171 - DNA, 15 bp, Homo sapiens
ctgaagagccttgga

SEQ ID NO: 33172 - DNA, 15 bp, Homo sapiens
tctgaagagccttgg

SEQ ID NO: 33173 - DNA, 15 bp, Homo sapiens
atctgaagagccttg

SEQ ID NO: 33174 - DNA, 15 bp, Homo sapiens
tatctgaagagcctt

SEQ ID NO: 33175 - DNA, 15 bp, Homo sapiens
ttatctgaagagcct

SEQ ID NO: 33176 - DNA, 15 bp, Homo sapiens
tttatctgaagagcc

SEQ ID NO: 33177 - DNA, 15 bp, Homo sapiens
atttatctgaagagc

SEQ ID NO: 33178 - DNA, 15 bp, Homo sapiens
aatttatctgaagag

SEQ ID NO: 33179 - DNA, 15 bp, Homo sapiens
gaatttatctgaaga

SEQ ID NO: 33180 - DNA, 15 bp, Homo sapiens
tgaatttatctgaag

SEQ ID NO: 33181 - DNA, 15 bp, Homo sapiens
atgaatttatctgaa

SEQ ID NO: 33182 - DNA, 15 bp, Homo sapiens
catgaatttatctga

SEQ ID NO: 33183 - DNA, 15 bp, Homo sapiens
acatgaatttatctg

SEQ ID NO: 33184 - DNA, 15 bp, Homo sapiens
aacatgaatttatct

SEQ ID NO: 33185 - DNA, 15 bp, Homo sapiens
aaacatgaatttatc

SEQ ID NO: 33186 - DNA, 15 bp, Homo sapiens
gaaacatgaatttat

SEQ ID NO: 33187 - DNA, 15 bp, Homo sapiens
tgaaacatgaattta

SEQ ID NO: 33188 - DNA, 15 bp, Homo sapiens
atgaaacatgaattt

SEQ ID NO: 33189 - DNA, 15 bp, Homo sapiens
gatgaaacatgaatt

SEQ ID NO: 33190 - DNA, 15 bp, Homo sapiens
tgatgaaacatgaat

SEQ ID NO: 33191 - DNA, 15 bp, Homo sapiens
atgatgaaacatgaa

SEQ ID NO: 33192 - DNA, 15 bp, Homo sapiens
aatgatgaaacatga

SEQ ID NO: 33193 - DNA, 15 bp, Homo sapiens
aaatgatgaaacatg

SEQ ID NO: 33194 - DNA, 15 bp, Homo sapiens
aaaatgatgaaacat

SEQ ID NO: 33195 - DNA, 15 bp, Homo sapiens
gaaaatgatgaaaca

SEQ ID NO: 33196 - DNA, 15 bp, Homo sapiens
agaaaatgatgaaac

SEQ ID NO: 33197 - DNA, 15 bp, Homo sapiens
aagaaaatgatgaaa

SEQ ID NO: 33198 - DNA, 15 bp, Homo sapiens
aaagaaaatgatgaa

SEQ ID NO: 33199 - DNA, 15 bp, Homo sapiens
caaagaaaatgatga

SEQ ID NO: 33200 - DNA, 15 bp, Homo sapiens
gcaaagaaaatgatg

SEQ ID NO: 33201 - DNA, 15 bp, Homo sapiens
ggcaaagaaaatgat

SEQ ID NO: 33202 - DNA, 15 bp, Homo sapiens
aggcaaagaaaatga

SEQ ID NO: 33203 - DNA, 15 bp, Homo sapiens
aaggcaaagaaaatg

SEQ ID NO: 33204 - DNA, 15 bp, Homo sapiens
gaaggcaaagaaaat

SEQ ID NO: 33205 - DNA, 15 bp, Homo sapiens
tgaaggcaaagaaaa

SEQ ID NO: 33206 - DNA, 15 bp, Homo sapiens
ttgaaggcaaagaaa

SEQ ID NO: 33207 - DNA, 15 bp, Homo sapiens
cttgaaggcaaagaa

SEQ ID NO: 33208 - DNA, 15 bp, Homo sapiens
acttgaaggcaaaga

SEQ ID NO: 33209 - DNA, 15 bp, Homo sapiens
aacttgaaggcaaag

SEQ ID NO: 33210 - DNA, 15 bp, Homo sapiens
taacttgaaggcaaa

SEQ ID NO: 33211 - DNA, 15 bp, Homo sapiens
gtaacttgaaggcaa

SEQ ID NO: 33212 - DNA, 15 bp, Homo sapiens
agtaacttgaaggca

SEQ ID NO: 33213 - DNA, 15 bp, Homo sapiens
cagtaacttgaaggc

SEQ ID NO: 33214 - DNA, 15 bp, Homo sapiens
tcagtaacttgaagg

SEQ ID NO: 33215 - DNA, 15 bp, Homo sapiens
ctcagtaacttgaag

SEQ ID NO: 33216 - DNA, 15 bp, Homo sapiens
tctcagtaacttgaa

SEQ ID NO: 33217 - DNA, 15 bp, Homo sapiens
atctcagtaacttga

SEQ ID NO: 33218 - DNA, 15 bp, Homo sapiens
gatctcagtaacttg

SEQ ID NO: 33219 - DNA, 15 bp, Homo sapiens
tgatctcagtaactt

SEQ ID NO: 33220 - DNA, 15 bp, Homo sapiens
atgatctcagtaact

SEQ ID NO: 33221 - DNA, 15 bp, Homo sapiens
aatgatctcagtaac

SEQ ID NO: 33222 - DNA, 15 bp, Homo sapiens
aaatgatctcagtaa

SEQ ID NO: 33223 - DNA, 15 bp, Homo sapiens
aaaatgatctcagta

SEQ ID NO: 33224 - DNA, 15 bp, Homo sapiens
aaaaatgatctcagt

SEQ ID NO: 33225 - DNA, 15 bp, Homo sapiens
caaaaatgatctcag

SEQ ID NO: 33226 - DNA, 15 bp, Homo sapiens
ccaaaaatgatctca

SEQ ID NO: 33227 - DNA, 15 bp, Homo sapiens
gccaaaaatgatctc

SEQ ID NO: 33228 - DNA, 15 bp, Homo sapiens
tgccaaaaatgatct

SEQ ID NO: 33229 - DNA, 15 bp, Homo sapiens
ttgccaaaaatgatc

SEQ ID NO: 33230 - DNA, 15 bp, Homo sapiens
cttgccaaaaatgat

SEQ ID NO: 33231 - DNA, 15 bp, Homo sapiens
tcttgccaaaaatga

SEQ ID NO: 33232 - DNA, 15 bp, Homo sapiens
atcttgccaaaaatg

SEQ ID NO: 33233 - DNA, 15 bp, Homo sapiens
gatcttgccaaaaat

SEQ ID NO: 33234 - DNA, 15 bp, Homo sapiens
agatcttgccaaaaa

SEQ ID NO: 33235 - DNA, 15 bp, Homo sapiens
cagatcttgccaaaa

SEQ ID NO: 33236 - DNA, 15 bp, Homo sapiens
acagatcttgccaaa

SEQ ID NO: 33237 - DNA, 15 bp, Homo sapiens
tacagatcttgccaa

SEQ ID NO: 33238 - DNA, 15 bp, Homo sapiens
atacagatcttgcca

SEQ ID NO: 33239 - DNA, 15 bp, Homo sapiens
gatacagatcttgcc

SEQ ID NO: 33240 - DNA, 15 bp, Homo sapiens
tgatacagatcttgc

SEQ ID NO: 33241 - DNA, 15 bp, Homo sapiens
atgatacagatcttg

SEQ ID NO: 33242 - DNA, 15 bp, Homo sapiens
aatgatacagatctt

SEQ ID NO: 33243 - DNA, 15 bp, Homo sapiens
taatgatacagatct

SEQ ID NO: 33244 - DNA, 15 bp, Homo sapiens
ttaatgatacagatc

SEQ ID NO: 33245 - DNA, 15 bp, Homo sapiens
attaatgatacagat

SEQ ID NO: 33246 - DNA, 15 bp, Homo sapiens
cattaatgatacaga

SEQ ID NO: 33247 - DNA, 15 bp, Homo sapiens
gcattaatgatacag

SEQ ID NO: 33248 - DNA, 15 bp, Homo sapiens
agcattaatgataca

SEQ ID NO: 33249 - DNA, 15 bp, Homo sapiens
cagcattaatgatac

SEQ ID NO: 33250 - DNA, 15 bp, Homo sapiens
acagcattaatgata

SEQ ID NO: 33251 - DNA, 15 bp, Homo sapiens
cacagcattaatgat

SEQ ID NO: 33252 - DNA, 15 bp, Homo sapiens
acacagcattaatga

SEQ ID NO: 33253 - DNA, 15 bp, Homo sapiens
aacacagcattaatg

SEQ ID NO: 33254 - DNA, 15 bp, Homo sapiens
taacacagcattaat

SEQ ID NO: 33255 - DNA, 15 bp, Homo sapiens
ctaacacagcattaa

SEQ ID NO: 33256 - DNA, 15 bp, Homo sapiens
cctaacacagcatta

SEQ ID NO: 33257 - DNA, 15 bp, Homo sapiens
tcctaacacagcatt

SEQ ID NO: 33258 - DNA, 15 bp, Homo sapiens
ttcctaacacagcat

SEQ ID NO: 33259 - DNA, 15 bp, Homo sapiens
tttcctaacacagca

SEQ ID NO: 33260 - DNA, 15 bp, Homo sapiens
ctttcctaacacagc

SEQ ID NO: 33261 - DNA, 15 bp, Homo sapiens
tctttcctaacacag

SEQ ID NO: 33262 - DNA, 15 bp, Homo sapiens
ttctttcctaacaca

SEQ ID NO: 33263 - DNA, 15 bp, Homo sapiens
tttctttcctaacac

SEQ ID NO: 33264 - DNA, 15 bp, Homo sapiens
ttttctttcctaaca

SEQ ID NO: 33265 - DNA, 15 bp, Homo sapiens
cttttctttcctaac

SEQ ID NO: 33266 - DNA, 15 bp, Homo sapiens
tcttttctttcctaa

SEQ ID NO: 33267 - DNA, 15 bp, Homo sapiens
atcttttctttccta

SEQ ID NO: 33268 - DNA, 15 bp, Homo sapiens
aatcttttctttcct

SEQ ID NO: 33269 - DNA, 15 bp, Homo sapiens
taatcttttctttcc

SEQ ID NO: 33270 - DNA, 15 bp, Homo sapiens
ataatcttttctttc

SEQ ID NO: 33271 - DNA, 15 bp, Homo sapiens
cataatcttttcttt

SEQ ID NO: 33272 - DNA, 15 bp, Homo sapiens
tcataatcttttctt

SEQ ID NO: 33273 - DNA, 15 bp, Homo sapiens
gtcataatcttttct

SEQ ID NO: 33274 - DNA, 15 bp, Homo sapiens
agtcataatcttttc

SEQ ID NO: 33275 - DNA, 15 bp, Homo sapiens
gagtcataatctttt

SEQ ID NO: 33276 - DNA, 15 bp, Homo sapiens
ggagtcataatcttt

SEQ ID NO: 33277 - DNA, 15 bp, Homo sapiens
tggagtcataatctt

SEQ ID NO: 33278 - DNA, 15 bp, Homo sapiens
gtggagtcataatct

SEQ ID NO: 33279 - DNA, 15 bp, Homo sapiens
tgtggagtcataatc

SEQ ID NO: 33280 - DNA, 15 bp, Homo sapiens
atgtggagtcataat

SEQ ID NO: 33281 - DNA, 15 bp, Homo sapiens
aatgtggagtcataa

SEQ ID NO: 33282 - DNA, 15 bp, Homo sapiens
aaatgtggagtcata

SEQ ID NO: 33283 - DNA, 15 bp, Homo sapiens
aaaatgtggagtcat

SEQ ID NO: 33284 - DNA, 15 bp, Homo sapiens
taaaatgtggagtca

SEQ ID NO: 33285 - DNA, 15 bp, Homo sapiens
gtaaaatgtggagtc

SEQ ID NO: 33286 - DNA, 15 bp, Homo sapiens
agtaaaatgtggagt

SEQ ID NO: 33287 - DNA, 15 bp, Homo sapiens
aagtaaaatgtggag

SEQ ID NO: 33288 - DNA, 15 bp, Homo sapiens
aaagtaaaatgtgga

SEQ ID NO: 33289 - DNA, 15 bp, Homo sapiens
gaaagtaaaatgtgg

SEQ ID NO: 33290 - DNA, 15 bp, Homo sapiens
tgaaagtaaaatgtg

SEQ ID NO: 33291 - DNA, 15 bp, Homo sapiens
ttgaaagtaaaatgt

SEQ ID NO: 33292 - DNA, 15 bp, Homo sapiens
cttgaaagtaaaatg

SEQ ID NO: 33293 - DNA, 15 bp, Homo sapiens
ccttgaaagtaaaat

SEQ ID NO: 33294 - DNA, 15 bp, Homo sapiens
accttgaaagtaaaa

SEQ ID NO: 33295 - DNA, 15 bp, Homo sapiens
aaccttgaaagtaaa

SEQ ID NO: 33296 - DNA, 15 bp, Homo sapiens
caaccttgaaagtaa

SEQ ID NO: 33297 - DNA, 15 bp, Homo sapiens
tcaaccttgaaagta

SEQ ID NO: 33298 - DNA, 15 bp, Homo sapiens
ttcaaccttgaaagt

SEQ ID NO: 33299 - DNA, 15 bp, Homo sapiens
cttcaaccttgaaag

SEQ ID NO: 33300 - DNA, 15 bp, Homo sapiens
tcttcaaccttgaaa

SEQ ID NO: 33301 - DNA, 15 bp, Homo sapiens
ctcttcaaccttgaa

SEQ ID NO: 33302 - DNA, 15 bp, Homo sapiens
actcttcaaccttga

SEQ ID NO: 33303 - DNA, 15 bp, Homo sapiens
aactcttcaaccttg

SEQ ID NO: 33304 - DNA, 15 bp, Homo sapiens
taactcttcaacctt

SEQ ID NO: 33305 - DNA, 15 bp, Homo sapiens
ttaactcttcaacct

SEQ ID NO: 33306 - DNA, 15 bp, Homo sapiens
tttaactcttcaacc

SEQ ID NO: 33307 - DNA, 15 bp, Homo sapiens
gtttaactcttcaac

SEQ ID NO: 33308 - DNA, 15 bp, Homo sapiens
agtttaactcttcaa

SEQ ID NO: 33309 - DNA, 15 bp, Homo sapiens
cagtttaactcttca

SEQ ID NO: 33310 - DNA, 15 bp, Homo sapiens
acagtttaactcttc

SEQ ID NO: 33311 - DNA, 15 bp, Homo sapiens
aacagtttaactctt

SEQ ID NO: 33312 - DNA, 15 bp, Homo sapiens
aaacagtttaactct

SEQ ID NO: 33313 - DNA, 15 bp, Homo sapiens
taaacagtttaactc

SEQ ID NO: 33314 - DNA, 15 bp, Homo sapiens
ttaaacagtttaact

SEQ ID NO: 33315 - DNA, 15 bp, Homo sapiens
tttaaacagtttaac

SEQ ID NO: 33316 - DNA, 15 bp, Homo sapiens
ttttaaacagtttaa

SEQ ID NO: 33317 - DNA, 15 bp, Homo sapiens
tttttaaacagttta

SEQ ID NO: 33318 - DNA, 15 bp, Homo sapiens
ctttttaaacagttt

SEQ ID NO: 33319 - DNA, 15 bp, Homo sapiens
tctttttaaacagtt

SEQ ID NO: 33320 - DNA, 15 bp, Homo sapiens
ctctttttaaacagt

SEQ ID NO: 33321 - DNA, 15 bp, Homo sapiens
actctttttaaacag

SEQ ID NO: 33322 - DNA, 15 bp, Homo sapiens
cactctttttaaaca

SEQ ID NO: 33323 - DNA, 15 bp, Homo sapiens
acactctttttaaac

SEQ ID NO: 33324 - DNA, 15 bp, Homo sapiens
tacactctttttaaa

SEQ ID NO: 33325 - DNA, 15 bp, Homo sapiens
atacactctttttaa

SEQ ID NO: 33326 - DNA, 15 bp, Homo sapiens
catacactcttttta

SEQ ID NO: 33327 - DNA, 15 bp, Homo sapiens
acatacactcttttt

SEQ ID NO: 33328 - DNA, 15 bp, Homo sapiens
aacatacactctttt

SEQ ID NO: 33329 - DNA, 15 bp, Homo sapiens
taacatacactcttt

SEQ ID NO: 33330 - DNA, 15 bp, Homo sapiens
ataacatacactctt

SEQ ID NO: 33331 - DNA, 15 bp, Homo sapiens
gataacatacactct

SEQ ID NO: 33332 - DNA, 15 bp, Homo sapiens
ggataacatacactc

SEQ ID NO: 33333 - DNA, 15 bp, Homo sapiens
aggataacatacact

SEQ ID NO: 33334 - DNA, 15 bp, Homo sapiens
caggataacatacac

SEQ ID NO: 33335 - DNA, 15 bp, Homo sapiens
acaggataacataca

SEQ ID NO: 33336 - DNA, 15 bp, Homo sapiens
tacaggataacatac

SEQ ID NO: 33337 - DNA, 15 bp, Homo sapiens
ttacaggataacata

SEQ ID NO: 33338 - DNA, 15 bp, Homo sapiens
tttacaggataacat

SEQ ID NO: 33339 - DNA, 15 bp, Homo sapiens
gtttacaggataaca

SEQ ID NO: 33340 - DNA, 15 bp, Homo sapiens
tgtttacaggataac

SEQ ID NO: 33341 - DNA, 15 bp, Homo sapiens
ctgtttacaggataa

SEQ ID NO: 33342 - DNA, 15 bp, Homo sapiens
gctgtttacaggata

SEQ ID NO: 33343 - DNA, 15 bp, Homo sapiens
tgctgtttacaggat

SEQ ID NO: 33344 - DNA, 15 bp, Homo sapiens
ctgctgtttacagga

SEQ ID NO: 33345 - DNA, 15 bp, Homo sapiens
actgctgtttacagg

SEQ ID NO: 33346 - DNA, 15 bp, Homo sapiens
tactgctgtttacag

SEQ ID NO: 33347 - DNA, 15 bp, Homo sapiens
atactgctgtttaca

SEQ ID NO: 33348 - DNA, 15 bp, Homo sapiens
gatactgctgtttac

SEQ ID NO: 33349 - DNA, 15 bp, Homo sapiens
tgatactgctgttta

SEQ ID NO: 33350 - DNA, 15 bp, Homo sapiens
ctgatactgctgttt

SEQ ID NO: 33351 - DNA, 15 bp, Homo sapiens
cctgatactgctgtt

SEQ ID NO: 33352 - DNA, 15 bp, Homo sapiens
gcctgatactgctgt

SEQ ID NO: 33353 - DNA, 15 bp, Homo sapiens
agcctgatactgctg

SEQ ID NO: 33354 - DNA, 15 bp, Homo sapiens
cagcctgatactgct

SEQ ID NO: 33355 - DNA, 15 bp, Homo sapiens
acagcctgatactgc

SEQ ID NO: 33356 - DNA, 15 bp, Homo sapiens
tacagcctgatactg

SEQ ID NO: 33357 - DNA, 15 bp, Homo sapiens
ctacagcctgatact

SEQ ID NO: 33358 - DNA, 15 bp, Homo sapiens
tctacagcctgatac

SEQ ID NO: 33359 - DNA, 15 bp, Homo sapiens
ttctacagcctgata

SEQ ID NO: 33360 - DNA, 15 bp, Homo sapiens
attctacagcctgat

SEQ ID NO: 33361 - DNA, 15 bp, Homo sapiens
aattctacagcctga

SEQ ID NO: 33362 - DNA, 15 bp, Homo sapiens
aaattctacagcctg

SEQ ID NO: 33363 - DNA, 15 bp, Homo sapiens
caaattctacagcct

SEQ ID NO: 33364 - DNA, 15 bp, Homo sapiens
acaaattctacagcc

SEQ ID NO: 33365 - DNA, 15 bp, Homo sapiens
gacaaattctacagc

SEQ ID NO: 33366 - DNA, 15 bp, Homo sapiens
agacaaattctacag

SEQ ID NO: 33367 - DNA, 15 bp, Homo sapiens
aagacaaattctaca

SEQ ID NO: 33368 - DNA, 15 bp, Homo sapiens
gaagacaaattctac

SEQ ID NO: 33369 - DNA, 15 bp, Homo sapiens
agaagacaaattcta

SEQ ID NO: 33370 - DNA, 15 bp, Homo sapiens
cagaagacaaattct

SEQ ID NO: 33371 - DNA, 15 bp, Homo sapiens
tcagaagacaaattc

SEQ ID NO: 33372 - DNA, 15 bp, Homo sapiens
ttcagaagacaaatt

SEQ ID NO: 33373 - DNA, 15 bp, Homo sapiens
tttcagaagacaaat

SEQ ID NO: 33374 - DNA, 15 bp, Homo sapiens
ctttcagaagacaaa

SEQ ID NO: 33375 - DNA, 15 bp, Homo sapiens
gctttcagaagacaa

SEQ ID NO: 33376 - DNA, 15 bp, Homo sapiens
tgctttcagaagaca

SEQ ID NO: 33377 - DNA, 15 bp, Homo sapiens
ctgctttcagaagac

SEQ ID NO: 33378 - DNA, 15 bp, Homo sapiens
cctgctttcagaaga

SEQ ID NO: 33379 - DNA, 15 bp, Homo sapiens
ccctgctttcagaag

SEQ ID NO: 33380 - DNA, 15 bp, Homo sapiens
tccctgctttcagaa

SEQ ID NO: 33381 - DNA, 15 bp, Homo sapiens
ttccctgctttcaga

SEQ ID NO: 33382 - DNA, 15 bp, Homo sapiens
gttccctgctttcag

SEQ ID NO: 33383 - DNA, 15 bp, Homo sapiens
agttccctgctttca

SEQ ID NO: 33384 - DNA, 15 bp, Homo sapiens
aagttccctgctttc

SEQ ID NO: 33385 - DNA, 15 bp, Homo sapiens
taagttccctgcttt

SEQ ID NO: 33386 - DNA, 15 bp, Homo sapiens
ataagttccctgctt

SEQ ID NO: 33387 - DNA, 15 bp, Homo sapiens
tataagttccctgct

SEQ ID NO: 33388 - DNA, 15 bp, Homo sapiens
atataagttccctgc

SEQ ID NO: 33389 - DNA, 15 bp, Homo sapiens
tatataagttccctg

SEQ ID NO: 33390 - DNA, 15 bp, Homo sapiens
atatataagttccct

SEQ ID NO: 33391 - DNA, 15 bp, Homo sapiens
tatatataagttccc

SEQ ID NO: 33392 - DNA, 15 bp, Homo sapiens
ctatatataagttcc

SEQ ID NO: 33393 - DNA, 15 bp, Homo sapiens
gctatatataagttc

SEQ ID NO: 33394 - DNA, 15 bp, Homo sapiens
tgctatatataagtt

SEQ ID NO: 33395 - DNA, 15 bp, Homo sapiens
ttgctatatataagt

SEQ ID NO: 33396 - DNA, 15 bp, Homo sapiens
tttgctatatataag

SEQ ID NO: 33397 - DNA, 15 bp, Homo sapiens
ctttgctatatataa

SEQ ID NO: 33398 - DNA, 15 bp, Homo sapiens
tctttgctatatata

SEQ ID NO: 33399 - DNA, 15 bp, Homo sapiens
ttctttgctatatat

SEQ ID NO: 33400 - DNA, 15 bp, Homo sapiens
gttctttgctatata

SEQ ID NO: 33401 - DNA, 15 bp, Homo sapiens
agttctttgctatat

SEQ ID NO: 33402 - DNA, 15 bp, Homo sapiens
aagttctttgctata

SEQ ID NO: 33403 - DNA, 15 bp, Homo sapiens
gaagttctttgctat

SEQ ID NO: 33404 - DNA, 15 bp, Homo sapiens
tgaagttctttgcta

SEQ ID NO: 33405 - DNA, 15 bp, Homo sapiens
atgaagttctttgct

SEQ ID NO: 33406 - DNA, 15 bp, Homo sapiens
tatgaagttctttgc

SEQ ID NO: 33407 - DNA, 15 bp, Homo sapiens
ctatgaagttctttg

SEQ ID NO: 33408 - DNA, 15 bp, Homo sapiens
actatgaagttcttt

SEQ ID NO: 33409 - DNA, 15 bp, Homo sapiens
cactatgaagttctt

SEQ ID NO: 33410 - DNA, 15 bp, Homo sapiens
gcactatgaagttct

SEQ ID NO: 33411 - DNA, 15 bp, Homo sapiens
agcactatgaagttc

SEQ ID NO: 33412 - DNA, 15 bp, Homo sapiens
gagcactatgaagtt

SEQ ID NO: 33413 - DNA, 15 bp, Homo sapiens
ggagcactatgaagt

SEQ ID NO: 33414 - DNA, 15 bp, Homo sapiens
gggagcactatgaag

SEQ ID NO: 33415 - DNA, 15 bp, Homo sapiens
tgggagcactatgaa

SEQ ID NO: 33416 - DNA, 15 bp, Homo sapiens
atgggagcactatga

SEQ ID NO: 33417 - DNA, 15 bp, Homo sapiens
aatgggagcactatg

SEQ ID NO: 33418 - DNA, 15 bp, Homo sapiens
aaatgggagcactat

SEQ ID NO: 33419 - DNA, 15 bp, Homo sapiens
gaaatgggagcacta

SEQ ID NO: 33420 - DNA, 15 bp, Homo sapiens
agaaatgggagcact

SEQ ID NO: 33421 - DNA, 15 bp, Homo sapiens
aagaaatgggagcac

SEQ ID NO: 33422 - DNA, 15 bp, Homo sapiens
caagaaatgggagca

SEQ ID NO: 33423 - DNA, 15 bp, Homo sapiens
tcaagaaatgggagc

SEQ ID NO: 33424 - DNA, 15 bp, Homo sapiens
gtcaagaaatgggag

SEQ ID NO: 33425 - DNA, 15 bp, Homo sapiens
tgtcaagaaatggga

SEQ ID NO: 33426 - DNA, 15 bp, Homo sapiens
ttgtcaagaaatggg

SEQ ID NO: 33427 - DNA, 15 bp, Homo sapiens
tttgtcaagaaatgg

SEQ ID NO: 33428 - DNA, 15 bp, Homo sapiens
ttttgtcaagaaatg

SEQ ID NO: 33429 - DNA, 15 bp, Homo sapiens
gttttgtcaagaaat

SEQ ID NO: 33430 - DNA, 15 bp, Homo sapiens
ggttttgtcaagaaa

SEQ ID NO: 33431 - DNA, 15 bp, Homo sapiens
aggttttgtcaagaa

SEQ ID NO: 33432 - DNA, 15 bp, Homo sapiens
gaggttttgtcaaga

SEQ ID NO: 33433 - DNA, 15 bp, Homo sapiens
agaggttttgtcaag

SEQ ID NO: 33434 - DNA, 15 bp, Homo sapiens
gagaggttttgtcaa

SEQ ID NO: 33435 - DNA, 15 bp, Homo sapiens
cgagaggttttgtca

SEQ ID NO: 33436 - DNA, 15 bp, Homo sapiens
tcgagaggttttgtc

SEQ ID NO: 33437 - DNA, 15 bp, Homo sapiens
ctcgagaggttttgt

SEQ ID NO: 33438 - DNA, 15 bp, Homo sapiens
tctcgagaggttttg

SEQ ID NO: 33439 - DNA, 15 bp, Homo sapiens
ttctcgagaggtttt

SEQ ID NO: 33440 - DNA, 15 bp, Homo sapiens
cttctcgagaggttt

SEQ ID NO: 33441 - DNA, 15 bp, Homo sapiens
gcttctcgagaggtt

SEQ ID NO: 33442 - DNA, 15 bp, Homo sapiens
agcttctcgagaggt

SEQ ID NO: 33443 - DNA, 15 bp, Homo sapiens
gagcttctcgagagg

SEQ ID NO: 33444 - DNA, 15 bp, Homo sapiens
agagcttctcgagag

SEQ ID NO: 33445 - DNA, 15 bp, Homo sapiens
aagagcttctcgaga

SEQ ID NO: 33446 - DNA, 15 bp, Homo sapiens
caagagcttctcgag

SEQ ID NO: 33447 - DNA, 15 bp, Homo sapiens
tcaagagcttctcga

SEQ ID NO: 33448 - DNA, 15 bp, Homo sapiens
atcaagagcttctcg

SEQ ID NO: 33449 - DNA, 15 bp, Homo sapiens
aatcaagagcttctc

SEQ ID NO: 33450 - DNA, 15 bp, Homo sapiens
caatcaagagcttct

SEQ ID NO: 33451 - DNA, 15 bp, Homo sapiens
tcaatcaagagcttc

SEQ ID NO: 33452 - DNA, 15 bp, Homo sapiens
ttcaatcaagagctt

SEQ ID NO: 33453 - DNA, 15 bp, Homo sapiens
tttcaatcaagagct

SEQ ID NO: 33454 - DNA, 15 bp, Homo sapiens
ctttcaatcaagagc

SEQ ID NO: 33455 - DNA, 15 bp, Homo sapiens
actttcaatcaagag

SEQ ID NO: 33456 - DNA, 15 bp, Homo sapiens
gactttcaatcaaga

SEQ ID NO: 33457 - DNA, 15 bp, Homo sapiens
agactttcaatcaag

SEQ ID NO: 33458 - DNA, 15 bp, Homo sapiens
aagactttcaatcaa

SEQ ID NO: 33459 - DNA, 15 bp, Homo sapiens
caagactttcaatca

SEQ ID NO: 33460 - DNA, 15 bp, Homo sapiens
ccaagactttcaatc

SEQ ID NO: 33461 - DNA, 15 bp, Homo sapiens
gccaagactttcaat

SEQ ID NO: 33462 - DNA, 15 bp, Homo sapiens
agccaagactttcaa

SEQ ID NO: 33463 - DNA, 15 bp, Homo sapiens
aagccaagactttca

SEQ ID NO: 33464 - DNA, 15 bp, Homo sapiens
aaagccaagactttc

SEQ ID NO: 33465 - DNA, 15 bp, Homo sapiens
gaaagccaagacttt

SEQ ID NO: 33466 - DNA, 15 bp, Homo sapiens
tgaaagccaagactt

SEQ ID NO: 33467 - DNA, 15 bp, Homo sapiens
atgaaagccaagact

SEQ ID NO: 33468 - DNA, 15 bp, Homo sapiens
catgaaagccaagac

SEQ ID NO: 33469 - DNA, 15 bp, Homo sapiens
tcatgaaagccaaga

SEQ ID NO: 33470 - DNA, 15 bp, Homo sapiens
ttcatgaaagccaag

SEQ ID NO: 33471 - DNA, 15 bp, Homo sapiens
attcatgaaagccaa

SEQ ID NO: 33472 - DNA, 15 bp, Homo sapiens
gattcatgaaagcca

SEQ ID NO: 33473 - DNA, 15 bp, Homo sapiens
agattcatgaaagcc

SEQ ID NO: 33474 - DNA, 15 bp, Homo sapiens
cagattcatgaaagc

SEQ ID NO: 33475 - DNA, 15 bp, Homo sapiens
ccagattcatgaaag

SEQ ID NO: 33476 - DNA, 15 bp, Homo sapiens
gccagattcatgaaa

SEQ ID NO: 33477 - DNA, 15 bp, Homo sapiens
tgccagattcatgaa

SEQ ID NO: 33478 - DNA, 15 bp, Homo sapiens
ctgccagattcatga

SEQ ID NO: 33479 - DNA, 15 bp, Homo sapiens
gctgccagattcatg

SEQ ID NO: 33480 - DNA, 15 bp, Homo sapiens
agctgccagattcat

SEQ ID NO: 33481 - DNA, 15 bp, Homo sapiens
aagctgccagattca

SEQ ID NO: 33482 - DNA, 15 bp, Homo sapiens
aaagctgccagattc

SEQ ID NO: 33483 - DNA, 15 bp, Homo sapiens
gaaagctgccagatt

SEQ ID NO: 33484 - DNA, 15 bp, Homo sapiens
tgaaagctgccagat

SEQ ID NO: 33485 - DNA, 15 bp, Homo sapiens
gtgaaagctgccaga

SEQ ID NO: 33486 - DNA, 15 bp, Homo sapiens
tgtgaaagctgccag

SEQ ID NO: 33487 - DNA, 15 bp, Homo sapiens
ttgtgaaagctgcca

SEQ ID NO: 33488 - DNA, 15 bp, Homo sapiens
attgtgaaagctgcc

SEQ ID NO: 33489 - DNA, 15 bp, Homo sapiens
tattgtgaaagctgc

SEQ ID NO: 33490 - DNA, 15 bp, Homo sapiens
ctattgtgaaagctg

SEQ ID NO: 33491 - DNA, 15 bp, Homo sapiens
actattgtgaaagct

SEQ ID NO: 33492 - DNA, 15 bp, Homo sapiens
cactattgtgaaagc

SEQ ID NO: 33493 - DNA, 15 bp, Homo sapiens
ccactattgtgaaag

SEQ ID NO: 33494 - DNA, 15 bp, Homo sapiens
tccactattgtgaaa

SEQ ID NO: 33495 - DNA, 15 bp, Homo sapiens
atccactattgtgaa

SEQ ID NO: 33496 - DNA, 15 bp, Homo sapiens
aatccactattgtga

SEQ ID NO: 33497 - DNA, 15 bp, Homo sapiens
aaatccactattgtg

SEQ ID NO: 33498 - DNA, 15 bp, Homo sapiens
aaaatccactattgt

SEQ ID NO: 33499 - DNA, 15 bp, Homo sapiens
aaaaatccactattg

SEQ ID NO: 33500 - DNA, 15 bp, Homo sapiens
gaaaaatccactatt

SEQ ID NO: 33501 - DNA, 15 bp, Homo sapiens
tgaaaaatccactat

SEQ ID NO: 33502 - DNA, 15 bp, Homo sapiens
atgaaaaatccacta

SEQ ID NO: 33503 - DNA, 15 bp, Homo sapiens
catgaaaaatccact

SEQ ID NO: 33504 - DNA, 15 bp, Homo sapiens
tcatgaaaaatccac

SEQ ID NO: 33505 - DNA, 15 bp, Homo sapiens
gtcatgaaaaatcca

SEQ ID NO: 33506 - DNA, 15 bp, Homo sapiens
tgtcatgaaaaatcc

SEQ ID NO: 33507 - DNA, 15 bp, Homo sapiens
ttgtcatgaaaaatc

SEQ ID NO: 33508 - DNA, 15 bp, Homo sapiens
tttgtcatgaaaaat

SEQ ID NO: 33509 - DNA, 15 bp, Homo sapiens
atttgtcatgaaaaa

SEQ ID NO: 33510 - DNA, 15 bp, Homo sapiens
gatttgtcatgaaaa

SEQ ID NO: 33511 - DNA, 15 bp, Homo sapiens
tgatttgtcatgaaa

SEQ ID NO: 33512 - DNA, 15 bp, Homo sapiens
atgatttgtcatgaa

SEQ ID NO: 33513 - DNA, 15 bp, Homo sapiens
gatgatttgtcatga

SEQ ID NO: 33514 - DNA, 15 bp, Homo sapiens
agatgatttgtcatg

SEQ ID NO: 33515 - DNA, 15 bp, Homo sapiens
aagatgatttgtcat

SEQ ID NO: 33516 - DNA, 15 bp, Homo sapiens
taagatgatttgtca

SEQ ID NO: 33517 - DNA, 15 bp, Homo sapiens
gtaagatgatttgtc

SEQ ID NO: 33518 - DNA, 15 bp, Homo sapiens
tgtaagatgatttgt

SEQ ID NO: 33519 - DNA, 15 bp, Homo sapiens
gtgtaagatgatttg

SEQ ID NO: 33520 - DNA, 15 bp, Homo sapiens
tgtgtaagatgattt

SEQ ID NO: 33521 - DNA, 15 bp, Homo sapiens
ctgtgtaagatgatt

SEQ ID NO: 33522 - DNA, 15 bp, Homo sapiens
cctgtgtaagatgat

SEQ ID NO: 33523 - DNA, 15 bp, Homo sapiens
ccctgtgtaagatga

SEQ ID NO: 33524 - DNA, 15 bp, Homo sapiens
tccctgtgtaagatg

SEQ ID NO: 33525 - DNA, 15 bp, Homo sapiens
ttccctgtgtaagat

SEQ ID NO: 33526 - DNA, 15 bp, Homo sapiens
attccctgtgtaaga

SEQ ID NO: 33527 - DNA, 15 bp, Homo sapiens
aattccctgtgtaag

SEQ ID NO: 33528 - DNA, 15 bp, Homo sapiens
taattccctgtgtaa

SEQ ID NO: 33529 - DNA, 15 bp, Homo sapiens
ataattccctgtgta

SEQ ID NO: 33530 - DNA, 15 bp, Homo sapiens
aataattccctgtgt

SEQ ID NO: 33531 - DNA, 15 bp, Homo sapiens
gaataattccctgtg

SEQ ID NO: 33532 - DNA, 15 bp, Homo sapiens
tgaataattccctgt

SEQ ID NO: 33533 - DNA, 15 bp, Homo sapiens
ttgaataattccctg

SEQ ID NO: 33534 - DNA, 15 bp, Homo sapiens
cttgaataattccct

SEQ ID NO: 33535 - DNA, 15 bp, Homo sapiens
ccttgaataattccc

SEQ ID NO: 33536 - DNA, 15 bp, Homo sapiens
cccttgaataattcc

SEQ ID NO: 33537 - DNA, 15 bp, Homo sapiens
acccttgaataattc

SEQ ID NO: 33538 - DNA, 15 bp, Homo sapiens
aacccttgaataatt

SEQ ID NO: 33539 - DNA, 15 bp, Homo sapiens
caacccttgaataat

SEQ ID NO: 33540 - DNA, 15 bp, Homo sapiens
ccaacccttgaataa

SEQ ID NO: 33541 - DNA, 15 bp, Homo sapiens
gccaacccttgaata

SEQ ID NO: 33542 - DNA, 15 bp, Homo sapiens
tgccaacccttgaat

SEQ ID NO: 33543 - DNA, 15 bp, Homo sapiens
gtgccaacccttgaa

SEQ ID NO: 33544 - DNA, 15 bp, Homo sapiens
agtgccaacccttga

SEQ ID NO: 33545 - DNA, 15 bp, Homo sapiens
aagtgccaacccttg

SEQ ID NO: 33546 - DNA, 15 bp, Homo sapiens
caagtgccaaccctt

SEQ ID NO: 33547 - DNA, 15 bp, Homo sapiens
tcaagtgccaaccct

SEQ ID NO: 33548 - DNA, 15 bp, Homo sapiens
ttcaagtgccaaccc

SEQ ID NO: 33549 - DNA, 15 bp, Homo sapiens
tttcaagtgccaacc

SEQ ID NO: 33550 - DNA, 15 bp, Homo sapiens
gtttcaagtgccaac

SEQ ID NO: 33551 - DNA, 15 bp, Homo sapiens
tgtttcaagtgccaa

SEQ ID NO: 33552 - DNA, 15 bp, Homo sapiens
ctgtttcaagtgcca

SEQ ID NO: 33553 - DNA, 15 bp, Homo sapiens
actgtttcaagtgcc

SEQ ID NO: 33554 - DNA, 15 bp, Homo sapiens
tactgtttcaagtgc

SEQ ID NO: 33555 - DNA, 15 bp, Homo sapiens
ctactgtttcaagtg

SEQ ID NO: 33556 - DNA, 15 bp, Homo sapiens
tctactgtttcaagt

SEQ ID NO: 33557 - DNA, 15 bp, Homo sapiens
ttctactgtttcaag

SEQ ID NO: 33558 - DNA, 15 bp, Homo sapiens
attctactgtttcaa

SEQ ID NO: 33559 - DNA, 15 bp, Homo sapiens
tattctactgtttca

SEQ ID NO: 33560 - DNA, 15 bp, Homo sapiens
gtattctactgtttc

SEQ ID NO: 33561 - DNA, 15 bp, Homo sapiens
agtattctactgttt

SEQ ID NO: 33562 - DNA, 15 bp, Homo sapiens
aagtattctactgtt

SEQ ID NO: 33563 - DNA, 15 bp, Homo sapiens
aaagtattctactgt

SEQ ID NO: 33564 - DNA, 15 bp, Homo sapiens
gaaagtattctactg

SEQ ID NO: 33565 - DNA, 15 bp, Homo sapiens
tgaaagtattctact

SEQ ID NO: 33566 - DNA, 15 bp, Homo sapiens
gtgaaagtattctac

SEQ ID NO: 33567 - DNA, 15 bp, Homo sapiens
tgtgaaagtattcta

SEQ ID NO: 33568 - DNA, 15 bp, Homo sapiens
ttgtgaaagtattct

SEQ ID NO: 33569 - DNA, 15 bp, Homo sapiens
gttgtgaaagtattc

SEQ ID NO: 33570 - DNA, 15 bp, Homo sapiens
tgttgtgaaagtatt

SEQ ID NO: 33571 - DNA, 15 bp, Homo sapiens
ttgttgtgaaagtat

SEQ ID NO: 33572 - DNA, 15 bp, Homo sapiens
cttgttgtgaaagta

SEQ ID NO: 33573 - DNA, 15 bp, Homo sapiens
tcttgttgtgaaagt

SEQ ID NO: 33574 - DNA, 15 bp, Homo sapiens
ctcttgttgtgaaag

SEQ ID NO: 33575 - DNA, 15 bp, Homo sapiens
tctcttgttgtgaaa

SEQ ID NO: 33576 - DNA, 15 bp, Homo sapiens
atctcttgttgtgaa

SEQ ID NO: 33577 - DNA, 15 bp, Homo sapiens
tatctcttgttgtga

SEQ ID NO: 33578 - DNA, 15 bp, Homo sapiens
ttatctcttgttgtg

SEQ ID NO: 33579 - DNA, 15 bp, Homo sapiens
cttatctcttgttgt

SEQ ID NO: 33580 - DNA, 15 bp, Homo sapiens
tcttatctcttgttg

SEQ ID NO: 33581 - DNA, 15 bp, Homo sapiens
atcttatctcttgtt

SEQ ID NO: 33582 - DNA, 15 bp, Homo sapiens
aatcttatctcttgt

SEQ ID NO: 33583 - DNA, 15 bp, Homo sapiens
aaatcttatctcttg

SEQ ID NO: 33584 - DNA, 15 bp, Homo sapiens
gaaatcttatctctt

SEQ ID NO: 33585 - DNA, 15 bp, Homo sapiens
agaaatcttatctct

SEQ ID NO: 33586 - DNA, 15 bp, Homo sapiens
aagaaatcttatctc

SEQ ID NO: 33587 - DNA, 15 bp, Homo sapiens
aaagaaatcttatct

SEQ ID NO: 33588 - DNA, 15 bp, Homo sapiens
gaaagaaatcttatc

SEQ ID NO: 33589 - DNA, 15 bp, Homo sapiens
tgaaagaaatcttat

SEQ ID NO: 33590 - DNA, 15 bp, Homo sapiens
ctgaaagaaatctta

SEQ ID NO: 33591 - DNA, 15 bp, Homo sapiens
cctgaaagaaatctt

SEQ ID NO: 33592 - DNA, 15 bp, Homo sapiens
tcctgaaagaaatct

SEQ ID NO: 33593 - DNA, 15 bp, Homo sapiens
atcctgaaagaaatc

SEQ ID NO: 33594 - DNA, 15 bp, Homo sapiens
aatcctgaaagaaat

SEQ ID NO: 33595 - DNA, 15 bp, Homo sapiens
caatcctgaaagaaa

SEQ ID NO: 33596 - DNA, 15 bp, Homo sapiens
tcaatcctgaaagaa

SEQ ID NO: 33597 - DNA, 15 bp, Homo sapiens
atcaatcctgaaaga

SEQ ID NO: 33598 - DNA, 15 bp, Homo sapiens
catcaatcctgaaag

SEQ ID NO: 33599 - DNA, 15 bp, Homo sapiens
tcatcaatcctgaaa

SEQ ID NO: 33600 - DNA, 15 bp, Homo sapiens
gtcatcaatcctgaa

SEQ ID NO: 33601 - DNA, 15 bp, Homo sapiens
tgtcatcaatcctga

SEQ ID NO: 33602 - DNA, 15 bp, Homo sapiens
ctgtcatcaatcctg

SEQ ID NO: 33603 - DNA, 15 bp, Homo sapiens
actgtcatcaatcct

SEQ ID NO: 33604 - DNA, 15 bp, Homo sapiens
gactgtcatcaatcc

SEQ ID NO: 33605 - DNA, 15 bp, Homo sapiens
agactgtcatcaatc

SEQ ID NO: 33606 - DNA, 15 bp, Homo sapiens
aagactgtcatcaat

SEQ ID NO: 33607 - DNA, 15 bp, Homo sapiens
caagactgtcatcaa

SEQ ID NO: 33608 - DNA, 15 bp, Homo sapiens
gcaagactgtcatca

SEQ ID NO: 33609 - DNA, 15 bp, Homo sapiens
tgcaagactgtcatc

SEQ ID NO: 33610 - DNA, 15 bp, Homo sapiens
gtgcaagactgtcat

SEQ ID NO: 33611 - DNA, 15 bp, Homo sapiens
ggtgcaagactgtca

SEQ ID NO: 33612 - DNA, 15 bp, Homo sapiens
gggtgcaagactgtc

SEQ ID NO: 33613 - DNA, 15 bp, Homo sapiens
agggtgcaagactgt

SEQ ID NO: 33614 - DNA, 15 bp, Homo sapiens
tagggtgcaagactg

SEQ ID NO: 33615 - DNA, 15 bp, Homo sapiens
ctagggtgcaagact

SEQ ID NO: 33616 - DNA, 15 bp, Homo sapiens
gctagggtgcaagac

SEQ ID NO: 33617 - DNA, 15 bp, Homo sapiens
cgctagggtgcaaga

SEQ ID NO: 33618 - DNA, 15 bp, Homo sapiens
gcgctagggtgcaag

SEQ ID NO: 33619 - DNA, 15 bp, Homo sapiens
tgcgctagggtgcaa

SEQ ID NO: 33620 - DNA, 15 bp, Homo sapiens
atgcgctagggtgca

SEQ ID NO: 33621 - DNA, 15 bp, Homo sapiens
tatgcgctagggtgc

SEQ ID NO: 33622 - DNA, 15 bp, Homo sapiens
gtatgcgctagggtg

SEQ ID NO: 33623 - DNA, 15 bp, Homo sapiens
agtatgcgctagggt

SEQ ID NO: 33624 - DNA, 15 bp, Homo sapiens
cagtatgcgctaggg

SEQ ID NO: 33625 - DNA, 15 bp, Homo sapiens
tcagtatgcgctagg

SEQ ID NO: 33626 - DNA, 15 bp, Homo sapiens
atcagtatgcgctag

SEQ ID NO: 33627 - DNA, 15 bp, Homo sapiens
catcagtatgcgcta

SEQ ID NO: 33628 - DNA, 15 bp, Homo sapiens
tcatcagtatgcgct

SEQ ID NO: 33629 - DNA, 15 bp, Homo sapiens
ttcatcagtatgcgc

SEQ ID NO: 33630 - DNA, 15 bp, Homo sapiens
cttcatcagtatgcg

SEQ ID NO: 33631 - DNA, 15 bp, Homo sapiens
tcttcatcagtatgc

SEQ ID NO: 33632 - DNA, 15 bp, Homo sapiens
ctcttcatcagtatg

SEQ ID NO: 33633 - DNA, 15 bp, Homo sapiens
tctcttcatcagtat

SEQ ID NO: 33634 - DNA, 15 bp, Homo sapiens
ctctcttcatcagta

SEQ ID NO: 33635 - DNA, 15 bp, Homo sapiens
gctctcttcatcagt

SEQ ID NO: 33636 - DNA, 15 bp, Homo sapiens
tgctctcttcatcag

SEQ ID NO: 33637 - DNA, 15 bp, Homo sapiens
ctgctctcttcatca

SEQ ID NO: 33638 - DNA, 15 bp, Homo sapiens
actgctctcttcatc

SEQ ID NO: 33639 - DNA, 15 bp, Homo sapiens
cactgctctcttcat

SEQ ID NO: 33640 - DNA, 15 bp, Homo sapiens
ccactgctctcttca

SEQ ID NO: 33641 - DNA, 15 bp, Homo sapiens
cccactgctctcttc

SEQ ID NO: 33642 - DNA, 15 bp, Homo sapiens
acccactgctctctt

SEQ ID NO: 33643 - DNA, 15 bp, Homo sapiens
cacccactgctctct

SEQ ID NO: 33644 - DNA, 15 bp, Homo sapiens
tcacccactgctctc

SEQ ID NO: 33645 - DNA, 15 bp, Homo sapiens
gtcacccactgctct

SEQ ID NO: 33646 - DNA, 15 bp, Homo sapiens
ggtcacccactgctc

SEQ ID NO: 33647 - DNA, 15 bp, Homo sapiens
tggtcacccactgct

SEQ ID NO: 33648 - DNA, 15 bp, Homo sapiens
atggtcacccactgc

SEQ ID NO: 33649 - DNA, 15 bp, Homo sapiens
catggtcacccactg

SEQ ID NO: 33650 - DNA, 15 bp, Homo sapiens
tcatggtcacccact

SEQ ID NO: 33651 - DNA, 15 bp, Homo sapiens
gtcatggtcacccac

SEQ ID NO: 33652 - DNA, 15 bp, Homo sapiens
tgtcatggtcaccca

SEQ ID NO: 33653 - DNA, 15 bp, Homo sapiens
atgtcatggtcaccc

SEQ ID NO: 33654 - DNA, 15 bp, Homo sapiens
catgtcatggtcacc

SEQ ID NO: 33655 - DNA, 15 bp, Homo sapiens
ccatgtcatggtcac

SEQ ID NO: 33656 - DNA, 15 bp, Homo sapiens
tccatgtcatggtca

SEQ ID NO: 33657 - DNA, 15 bp, Homo sapiens
ctccatgtcatggtc

SEQ ID NO: 33658 - DNA, 15 bp, Homo sapiens
tctccatgtcatggt

SEQ ID NO: 33659 - DNA, 15 bp, Homo sapiens
ctctccatgtcatgg

SEQ ID NO: 33660 - DNA, 15 bp, Homo sapiens
gctctccatgtcatg

SEQ ID NO: 33661 - DNA, 15 bp, Homo sapiens
agctctccatgtcat

SEQ ID NO: 33662 - DNA, 15 bp, Homo sapiens
aagctctccatgtca

SEQ ID NO: 33663 - DNA, 15 bp, Homo sapiens
gaagctctccatgtc

SEQ ID NO: 33664 - DNA, 15 bp, Homo sapiens
agaagctctccatgt

SEQ ID NO: 33665 - DNA, 15 bp, Homo sapiens
cagaagctctccatg

SEQ ID NO: 33666 - DNA, 15 bp, Homo sapiens
acagaagctctccat

SEQ ID NO: 33667 - DNA, 15 bp, Homo sapiens
gacagaagctctcca

SEQ ID NO: 33668 - DNA, 15 bp, Homo sapiens
agacagaagctctcc

SEQ ID NO: 33669 - DNA, 15 bp, Homo sapiens
aagacagaagctctc

SEQ ID NO: 33670 - DNA, 15 bp, Homo sapiens
aaagacagaagctct

SEQ ID NO: 33671 - DNA, 15 bp, Homo sapiens
taaagacagaagctc

SEQ ID NO: 33672 - DNA, 15 bp, Homo sapiens
gtaaagacagaagct

SEQ ID NO: 33673 - DNA, 15 bp, Homo sapiens
ggtaaagacagaagc

SEQ ID NO: 33674 - DNA, 15 bp, Homo sapiens
tggtaaagacagaag

SEQ ID NO: 33675 - DNA, 15 bp, Homo sapiens
ctggtaaagacagaa

SEQ ID NO: 33676 - DNA, 15 bp, Homo sapiens
actggtaaagacaga

SEQ ID NO: 33677 - DNA, 15 bp, Homo sapiens
cactggtaaagacag

SEQ ID NO: 33678 - DNA, 15 bp, Homo sapiens
gcactggtaaagaca

SEQ ID NO: 33679 - DNA, 15 bp, Homo sapiens
ggcactggtaaagac

SEQ ID NO: 33680 - DNA, 15 bp, Homo sapiens
gggcactggtaaaga

SEQ ID NO: 33681 - DNA, 15 bp, Homo sapiens
ggggcactggtaaag

SEQ ID NO: 33682 - DNA, 15 bp, Homo sapiens
tggggcactggtaaa

SEQ ID NO: 33683 - DNA, 15 bp, Homo sapiens
ttggggcactggtaa

SEQ ID NO: 33684 - DNA, 15 bp, Homo sapiens
attggggcactggta

SEQ ID NO: 33685 - DNA, 15 bp, Homo sapiens
tattggggcactggt

SEQ ID NO: 33686 - DNA, 15 bp, Homo sapiens
atattggggcactgg

SEQ ID NO: 33687 - DNA, 15 bp, Homo sapiens
gatattggggcactg

SEQ ID NO: 33688 - DNA, 15 bp, Homo sapiens
tgatattggggcact

SEQ ID NO: 33689 - DNA, 15 bp, Homo sapiens
ctgatattggggcac

SEQ ID NO: 33690 - DNA, 15 bp, Homo sapiens
tctgatattggggca

SEQ ID NO: 33691 - DNA, 15 bp, Homo sapiens
atctgatattggggc

SEQ ID NO: 33692 - DNA, 15 bp, Homo sapiens
catctgatattgggg

SEQ ID NO: 33693 - DNA, 15 bp, Homo sapiens
acatctgatattggg

SEQ ID NO: 33694 - DNA, 15 bp, Homo sapiens
cacatctgatattgg

SEQ ID NO: 33695 - DNA, 15 bp, Homo sapiens
acacatctgatattg

SEQ ID NO: 33696 - DNA, 15 bp, Homo sapiens
aacacatctgatatt

SEQ ID NO: 33697 - DNA, 15 bp, Homo sapiens
caacacatctgatat

SEQ ID NO: 33698 - DNA, 15 bp, Homo sapiens
acaacacatctgata

SEQ ID NO: 33699 - DNA, 15 bp, Homo sapiens
gacaacacatctgat

SEQ ID NO: 33700 - DNA, 15 bp, Homo sapiens
agacaacacatctga

SEQ ID NO: 33701 - DNA, 15 bp, Homo sapiens
cagacaacacatctg

SEQ ID NO: 33702 - DNA, 15 bp, Homo sapiens
ccagacaacacatct

SEQ ID NO: 33703 - DNA, 15 bp, Homo sapiens
gccagacaacacatc

SEQ ID NO: 33704 - DNA, 15 bp, Homo sapiens
tgccagacaacacat

SEQ ID NO: 33705 - DNA, 15 bp, Homo sapiens
ctgccagacaacaca

SEQ ID NO: 33706 - DNA, 15 bp, Homo sapiens
actgccagacaacac

SEQ ID NO: 33707 - DNA, 15 bp, Homo sapiens
tactgccagacaaca

SEQ ID NO: 33708 - DNA, 15 bp, Homo sapiens
ttactgccagacaac

SEQ ID NO: 33709 - DNA, 15 bp, Homo sapiens
cttactgccagacaa

SEQ ID NO: 33710 - DNA, 15 bp, Homo sapiens
ccttactgccagaca

SEQ ID NO: 33711 - DNA, 15 bp, Homo sapiens
accttactgccagac

SEQ ID NO: 33712 - DNA, 15 bp, Homo sapiens
caccttactgccaga

SEQ ID NO: 33713 - DNA, 15 bp, Homo sapiens
acaccttactgccag

SEQ ID NO: 33714 - DNA, 15 bp, Homo sapiens
tacaccttactgcca

SEQ ID NO: 33715 - DNA, 15 bp, Homo sapiens
gtacaccttactgcc

SEQ ID NO: 33716 - DNA, 15 bp, Homo sapiens
agtacaccttactgc

SEQ ID NO: 33717 - DNA, 15 bp, Homo sapiens
cagtacaccttactg

SEQ ID NO: 33718 - DNA, 15 bp, Homo sapiens
acagtacaccttact

SEQ ID NO: 33719 - DNA, 15 bp, Homo sapiens
gacagtacaccttac

SEQ ID NO: 33720 - DNA, 15 bp, Homo sapiens
agacagtacacctta

SEQ ID NO: 33721 - DNA, 15 bp, Homo sapiens
cagacagtacacctt

SEQ ID NO: 33722 - DNA, 15 bp, Homo sapiens
gcagacagtacacct

SEQ ID NO: 33723 - DNA, 15 bp, Homo sapiens
ggcagacagtacacc

SEQ ID NO: 33724 - DNA, 15 bp, Homo sapiens
aggcagacagtacac

SEQ ID NO: 33725 - DNA, 15 bp, Homo sapiens
taggcagacagtaca

SEQ ID NO: 33726 - DNA, 15 bp, Homo sapiens
gtaggcagacagtac

SEQ ID NO: 33727 - DNA, 15 bp, Homo sapiens
tgtaggcagacagta

SEQ ID NO: 33728 - DNA, 15 bp, Homo sapiens
ctgtaggcagacagt

SEQ ID NO: 33729 - DNA, 15 bp, Homo sapiens
tctgtaggcagacag

SEQ ID NO: 33730 - DNA, 15 bp, Homo sapiens
ttctgtaggcagaca

SEQ ID NO: 33731 - DNA, 15 bp, Homo sapiens
attctgtaggcagac

SEQ ID NO: 33732 - DNA, 15 bp, Homo sapiens
tattctgtaggcaga

SEQ ID NO: 33733 - DNA, 15 bp, Homo sapiens
gtattctgtaggcag

SEQ ID NO: 33734 - DNA, 15 bp, Homo sapiens
agtattctgtaggca

SEQ ID NO: 33735 - DNA, 15 bp, Homo sapiens
cagtattctgtaggc

SEQ ID NO: 33736 - DNA, 15 bp, Homo sapiens
tcagtattctgtagg

SEQ ID NO: 33737 - DNA, 15 bp, Homo sapiens
ctcagtattctgtag

SEQ ID NO: 33738 - DNA, 15 bp, Homo sapiens
cctcagtattctgta

SEQ ID NO: 33739 - DNA, 15 bp, Homo sapiens
acctcagtattctgt

SEQ ID NO: 33740 - DNA, 15 bp, Homo sapiens
aacctcagtattctg

SEQ ID NO: 33741 - DNA, 15 bp, Homo sapiens
aaacctcagtattct

SEQ ID NO: 33742 - DNA, 15 bp, Homo sapiens
gaaacctcagtattc

SEQ ID NO: 33743 - DNA, 15 bp, Homo sapiens
agaaacctcagtatt

SEQ ID NO: 33744 - DNA, 15 bp, Homo sapiens
aagaaacctcagtat

SEQ ID NO: 33745 - DNA, 15 bp, Homo sapiens
gaagaaacctcagta

SEQ ID NO: 33746 - DNA, 15 bp, Homo sapiens
tgaagaaacctcagt

SEQ ID NO: 33747 - DNA, 15 bp, Homo sapiens
ctgaagaaacctcag

SEQ ID NO: 33748 - DNA, 15 bp, Homo sapiens
cctgaagaaacctca

SEQ ID NO: 33749 - DNA, 15 bp, Homo sapiens
tcctgaagaaacctc

SEQ ID NO: 33750 - DNA, 15 bp, Homo sapiens
ctcctgaagaaacct

SEQ ID NO: 33751 - DNA, 15 bp, Homo sapiens
tctcctgaagaaacc

SEQ ID NO: 33752 - DNA, 15 bp, Homo sapiens
ttctcctgaagaaac

SEQ ID NO: 33753 - DNA, 15 bp, Homo sapiens
cttctcctgaagaaa

SEQ ID NO: 33754 - DNA, 15 bp, Homo sapiens
acttctcctgaagaa

SEQ ID NO: 33755 - DNA, 15 bp, Homo sapiens
aacttctcctgaaga

SEQ ID NO: 33756 - DNA, 15 bp, Homo sapiens
aaacttctcctgaag

SEQ ID NO: 33757 - DNA, 15 bp, Homo sapiens
aaaacttctcctgaa

SEQ ID NO: 33758 - DNA, 15 bp, Homo sapiens
aaaaacttctcctga

SEQ ID NO: 33759 - DNA, 15 bp, Homo sapiens
aaaaaacttctcctg

SEQ ID NO: 33760 - DNA, 15 bp, Homo sapiens
caaaaaacttctcct

SEQ ID NO: 33761 - DNA, 15 bp, Homo sapiens
ccaaaaaacttctcc

SEQ ID NO: 33762 - DNA, 15 bp, Homo sapiens
accaaaaaacttctc

SEQ ID NO: 33763 - DNA, 15 bp, Homo sapiens
taccaaaaaacttct

SEQ ID NO: 33764 - DNA, 15 bp, Homo sapiens
ttaccaaaaaacttc

SEQ ID NO: 33765 - DNA, 15 bp, Homo sapiens
tttaccaaaaaactt

SEQ ID NO: 33766 - DNA, 15 bp, Homo sapiens
ctttaccaaaaaact

SEQ ID NO: 33767 - DNA, 15 bp, Homo sapiens
tctttaccaaaaaac

SEQ ID NO: 33768 - DNA, 15 bp, Homo sapiens
ttctttaccaaaaaa

SEQ ID NO: 33769 - DNA, 15 bp, Homo sapiens
tttctttaccaaaaa

SEQ ID NO: 33770 - DNA, 15 bp, Homo sapiens
gtttctttaccaaaa

SEQ ID NO: 33771 - DNA, 15 bp, Homo sapiens
agtttctttaccaaa

SEQ ID NO: 33772 - DNA, 15 bp, Homo sapiens
aagtttctttaccaa

SEQ ID NO: 33773 - DNA, 15 bp, Homo sapiens
aaagtttctttacca

SEQ ID NO: 33774 - DNA, 15 bp, Homo sapiens
taaagtttctttacc

SEQ ID NO: 33775 - DNA, 15 bp, Homo sapiens
gtaaagtttctttac

SEQ ID NO: 33776 - DNA, 15 bp, Homo sapiens
ggtaaagtttcttta

SEQ ID NO: 33777 - DNA, 15 bp, Homo sapiens
tggtaaagtttcttt

SEQ ID NO: 33778 - DNA, 15 bp, Homo sapiens
atggtaaagtttctt

SEQ ID NO: 33779 - DNA, 15 bp, Homo sapiens
aatggtaaagtttct

SEQ ID NO: 33780 - DNA, 15 bp, Homo sapiens
aaatggtaaagtttc

SEQ ID NO: 33781 - DNA, 15 bp, Homo sapiens
aaaatggtaaagttt

SEQ ID NO: 33782 - DNA, 15 bp, Homo sapiens
caaaatggtaaagtt

SEQ ID NO: 33783 - DNA, 15 bp, Homo sapiens
tcaaaatggtaaagt

SEQ ID NO: 33784 - DNA, 15 bp, Homo sapiens
ttcaaaatggtaaag

SEQ ID NO: 33785 - DNA, 15 bp, Homo sapiens
tttcaaaatggtaaa

SEQ ID NO: 33786 - DNA, 15 bp, Homo sapiens
ctttcaaaatggtaa

SEQ ID NO: 33787 - DNA, 15 bp, Homo sapiens
actttcaaaatggta

SEQ ID NO: 33788 - DNA, 15 bp, Homo sapiens
cactttcaaaatggt

SEQ ID NO: 33789 - DNA, 15 bp, Homo sapiens
acactttcaaaatgg

SEQ ID NO: 33790 - DNA, 15 bp, Homo sapiens
aacactttcaaaatg

SEQ ID NO: 33791 - DNA, 15 bp, Homo sapiens
taacactttcaaaat

SEQ ID NO: 33792 - DNA, 15 bp, Homo sapiens
ttaacactttcaaaa

SEQ ID NO: 33793 - DNA, 15 bp, Homo sapiens
attaacactttcaaa

SEQ ID NO: 33794 - DNA, 15 bp, Homo sapiens
cattaacactttcaa

SEQ ID NO: 33795 - DNA, 15 bp, Homo sapiens
acattaacactttca

SEQ ID NO: 33796 - DNA, 15 bp, Homo sapiens
aacattaacactttc

SEQ ID NO: 33797 - DNA, 15 bp, Homo sapiens
aaacattaacacttt

SEQ ID NO: 33798 - DNA, 15 bp, Homo sapiens
aaaacattaacactt

SEQ ID NO: 33799 - DNA, 15 bp, Homo sapiens
gaaaacattaacact

SEQ ID NO: 33800 - DNA, 15 bp, Homo sapiens
agaaaacattaacac

SEQ ID NO: 33801 - DNA, 15 bp, Homo sapiens
cagaaaacattaaca

SEQ ID NO: 33802 - DNA, 15 bp, Homo sapiens
tcagaaaacattaac

SEQ ID NO: 33803 - DNA, 15 bp, Homo sapiens
ttcagaaaacattaa

SEQ ID NO: 33804 - DNA, 15 bp, Homo sapiens
cttcagaaaacatta

SEQ ID NO: 33805 - DNA, 15 bp, Homo sapiens
gcttcagaaaacatt

SEQ ID NO: 33806 - DNA, 15 bp, Homo sapiens
agcttcagaaaacat

SEQ ID NO: 33807 - DNA, 15 bp, Homo sapiens
aagcttcagaaaaca

SEQ ID NO: 33808 - DNA, 15 bp, Homo sapiens
gaagcttcagaaaac

SEQ ID NO: 33809 - DNA, 15 bp, Homo sapiens
ggaagcttcagaaaa

SEQ ID NO: 33810 - DNA, 15 bp, Homo sapiens
tggaagcttcagaaa

SEQ ID NO: 33811 - DNA, 15 bp, Homo sapiens
ttggaagcttcagaa

SEQ ID NO: 33812 - DNA, 15 bp, Homo sapiens
tttggaagcttcaga

SEQ ID NO: 33813 - DNA, 15 bp, Homo sapiens
ttttggaagcttcag

SEQ ID NO: 33814 - DNA, 15 bp, Homo sapiens
tttttggaagcttca

SEQ ID NO: 33815 - DNA, 15 bp, Homo sapiens
ctttttggaagcttc

SEQ ID NO: 33816 - DNA, 15 bp, Homo sapiens
tctttttggaagctt

SEQ ID NO: 33817 - DNA, 15 bp, Homo sapiens
atctttttggaagct

SEQ ID NO: 33818 - DNA, 15 bp, Homo sapiens
aatctttttggaagc

SEQ ID NO: 33819 - DNA, 15 bp, Homo sapiens
gaatctttttggaag

SEQ ID NO: 33820 - DNA, 15 bp, Homo sapiens
ggaatctttttggaa

SEQ ID NO: 33821 - DNA, 15 bp, Homo sapiens
tggaatctttttgga

SEQ ID NO: 33822 - DNA, 15 bp, Homo sapiens
ttggaatctttttgg

SEQ ID NO: 33823 - DNA, 15 bp, Homo sapiens
tttggaatctttttg

SEQ ID NO: 33824 - DNA, 15 bp, Homo sapiens
ttttggaatcttttt

SEQ ID NO: 33825 - DNA, 15 bp, Homo sapiens
attttggaatctttt

SEQ ID NO: 33826 - DNA, 15 bp, Homo sapiens
cattttggaatcttt

SEQ ID NO: 33827 - DNA, 15 bp, Homo sapiens
ccattttggaatctt

SEQ ID NO: 33828 - DNA, 15 bp, Homo sapiens
cccattttggaatct

SEQ ID NO: 33829 - DNA, 15 bp, Homo sapiens
tcccattttggaatc

SEQ ID NO: 33830 - DNA, 15 bp, Homo sapiens
ttcccattttggaat

SEQ ID NO: 33831 - DNA, 15 bp, Homo sapiens
attcccattttggaa

SEQ ID NO: 33832 - DNA, 15 bp, Homo sapiens
cattcccattttgga

SEQ ID NO: 33833 - DNA, 15 bp, Homo sapiens
acattcccattttgg

SEQ ID NO: 33834 - DNA, 15 bp, Homo sapiens
aacattcccattttg

SEQ ID NO: 33835 - DNA, 15 bp, Homo sapiens
aaacattcccatttt

SEQ ID NO: 33836 - DNA, 15 bp, Homo sapiens
gaaacattcccattt

SEQ ID NO: 33837 - DNA, 15 bp, Homo sapiens
ggaaacattcccatt

SEQ ID NO: 33838 - DNA, 15 bp, Homo sapiens
aggaaacattcccat

SEQ ID NO: 33839 - DNA, 15 bp, Homo sapiens
aaggaaacattccca

SEQ ID NO: 33840 - DNA, 15 bp, Homo sapiens
caaggaaacattccc

SEQ ID NO: 33841 - DNA, 15 bp, Homo sapiens
tcaaggaaacattcc

SEQ ID NO: 33842 - DNA, 15 bp, Homo sapiens
atcaaggaaacattc

SEQ ID NO: 33843 - DNA, 15 bp, Homo sapiens
aatcaaggaaacatt

SEQ ID NO: 33844 - DNA, 15 bp, Homo sapiens
caatcaaggaaacat

SEQ ID NO: 33845 - DNA, 15 bp, Homo sapiens
acaatcaaggaaaca

SEQ ID NO: 33846 - DNA, 15 bp, Homo sapiens
cacaatcaaggaaac

SEQ ID NO: 33847 - DNA, 15 bp, Homo sapiens
acacaatcaaggaaa

SEQ ID NO: 33848 - DNA, 15 bp, Homo sapiens
gacacaatcaaggaa

SEQ ID NO: 33849 - DNA, 15 bp, Homo sapiens
tgacacaatcaagga

SEQ ID NO: 33850 - DNA, 15 bp, Homo sapiens
gtgacacaatcaagg

SEQ ID NO: 33851 - DNA, 15 bp, Homo sapiens
ggtgacacaatcaag

SEQ ID NO: 33852 - DNA, 15 bp, Homo sapiens
tggtgacacaatcaa

SEQ ID NO: 33853 - DNA, 15 bp, Homo sapiens
atggtgacacaatca

SEQ ID NO: 33854 - DNA, 15 bp, Homo sapiens
catggtgacacaatc

SEQ ID NO: 33855 - DNA, 15 bp, Homo sapiens
gcatggtgacacaat

SEQ ID NO: 33856 - DNA, 15 bp, Homo sapiens
agcatggtgacacaa

SEQ ID NO: 33857 - DNA, 15 bp, Homo sapiens
aagcatggtgacaca

SEQ ID NO: 33858 - DNA, 15 bp, Homo sapiens
caagcatggtgacac

SEQ ID NO: 33859 - DNA, 15 bp, Homo sapiens
gcaagcatggtgaca

SEQ ID NO: 33860 - DNA, 15 bp, Homo sapiens
tgcaagcatggtgac

SEQ ID NO: 33861 - DNA, 15 bp, Homo sapiens
atgcaagcatggtga

SEQ ID NO: 33862 - DNA, 15 bp, Homo sapiens
aatgcaagcatggtg

SEQ ID NO: 33863 - DNA, 15 bp, Homo sapiens
aaatgcaagcatggt

SEQ ID NO: 33864 - DNA, 15 bp, Homo sapiens
caaatgcaagcatgg

SEQ ID NO: 33865 - DNA, 15 bp, Homo sapiens
tcaaatgcaagcatg

SEQ ID NO: 33866 - DNA, 15 bp, Homo sapiens
atcaaatgcaagcat

SEQ ID NO: 33867 - DNA, 15 bp, Homo sapiens
catcaaatgcaagca

SEQ ID NO: 33868 - DNA, 15 bp, Homo sapiens
tcatcaaatgcaagc

SEQ ID NO: 33869 - DNA, 15 bp, Homo sapiens
ttcatcaaatgcaag

SEQ ID NO: 33870 - DNA, 15 bp, Homo sapiens
tttcatcaaatgcaa

SEQ ID NO: 33871 - DNA, 15 bp, Homo sapiens
ttttcatcaaatgca

SEQ ID NO: 33872 - DNA, 15 bp, Homo sapiens
gttttcatcaaatgc

SEQ ID NO: 33873 - DNA, 15 bp, Homo sapiens
agttttcatcaaatg

SEQ ID NO: 33874 - DNA, 15 bp, Homo sapiens
aagttttcatcaaat

SEQ ID NO: 33875 - DNA, 15 bp, Homo sapiens
caagttttcatcaaa

SEQ ID NO: 33876 - DNA, 15 bp, Homo sapiens
acaagttttcatcaa

SEQ ID NO: 33877 - DNA, 15 bp, Homo sapiens
tacaagttttcatca

SEQ ID NO: 33878 - DNA, 15 bp, Homo sapiens
ctacaagttttcatc

SEQ ID NO: 33879 - DNA, 15 bp, Homo sapiens
gctacaagttttcat

SEQ ID NO: 33880 - DNA, 15 bp, Homo sapiens
ggctacaagttttca

SEQ ID NO: 33881 - DNA, 15 bp, Homo sapiens
cggctacaagttttc

SEQ ID NO: 33882 - DNA, 15 bp, Homo sapiens
ccggctacaagtttt

SEQ ID NO: 33883 - DNA, 15 bp, Homo sapiens
gccggctacaagttt

SEQ ID NO: 33884 - DNA, 15 bp, Homo sapiens
agccggctacaagtt

SEQ ID NO: 33885 - DNA, 15 bp, Homo sapiens
tagccggctacaagt

SEQ ID NO: 33886 - DNA, 15 bp, Homo sapiens
atagccggctacaag

SEQ ID NO: 33887 - DNA, 15 bp, Homo sapiens
tatagccggctacaa

SEQ ID NO: 33888 - DNA, 15 bp, Homo sapiens
gtatagccggctaca

SEQ ID NO: 33889 - DNA, 15 bp, Homo sapiens
agtatagccggctac

SEQ ID NO: 33890 - DNA, 15 bp, Homo sapiens
cagtatagccggcta

SEQ ID NO: 33891 - DNA, 15 bp, Homo sapiens
tcagtatagccggct

SEQ ID NO: 33892 - DNA, 15 bp, Homo sapiens
ctcagtatagccggc

SEQ ID NO: 33893 - DNA, 15 bp, Homo sapiens
tctcagtatagccgg

SEQ ID NO: 33894 - DNA, 15 bp, Homo sapiens
ttctcagtatagccg

SEQ ID NO: 33895 - DNA, 15 bp, Homo sapiens
tttctcagtatagcc

SEQ ID NO: 33896 - DNA, 15 bp, Homo sapiens
atttctcagtatagc

SEQ ID NO: 33897 - DNA, 15 bp, Homo sapiens
gatttctcagtatag

SEQ ID NO: 33898 - DNA, 15 bp, Homo sapiens
tgatttctcagtata

SEQ ID NO: 33899 - DNA, 15 bp, Homo sapiens
atgatttctcagtat

SEQ ID NO: 33900 - DNA, 15 bp, Homo sapiens
tatgatttctcagta

SEQ ID NO: 33901 - DNA, 15 bp, Homo sapiens
atatgatttctcagt

SEQ ID NO: 33902 - DNA, 15 bp, Homo sapiens
gatatgatttctcag

SEQ ID NO: 33903 - DNA, 15 bp, Homo sapiens
agatatgatttctca

SEQ ID NO: 33904 - DNA, 15 bp, Homo sapiens
cagatatgatttctc

SEQ ID NO: 33905 - DNA, 15 bp, Homo sapiens
tcagatatgatttct

SEQ ID NO: 33906 - DNA, 15 bp, Homo sapiens
ttcagatatgatttc

SEQ ID NO: 33907 - DNA, 15 bp, Homo sapiens
cttcagatatgattt

SEQ ID NO: 33908 - DNA, 15 bp, Homo sapiens
tcttcagatatgatt

SEQ ID NO: 33909 - DNA, 15 bp, Homo sapiens
ttcttcagatatgat

SEQ ID NO: 33910 - DNA, 15 bp, Homo sapiens
tttcttcagatatga

SEQ ID NO: 33911 - DNA, 15 bp, Homo sapiens
ctttcttcagatatg

SEQ ID NO: 33912 - DNA, 15 bp, Homo sapiens
cctttcttcagatat

SEQ ID NO: 33913 - DNA, 15 bp, Homo sapiens
acctttcttcagata

SEQ ID NO: 33914 - DNA, 15 bp, Homo sapiens
cacctttcttcagat

SEQ ID NO: 33915 - DNA, 15 bp, Homo sapiens
ccacctttcttcaga

SEQ ID NO: 33916 - DNA, 15 bp, Homo sapiens
accacctttcttcag

SEQ ID NO: 33917 - DNA, 15 bp, Homo sapiens
taccacctttcttca

SEQ ID NO: 33918 - DNA, 15 bp, Homo sapiens
gtaccacctttcttc

SEQ ID NO: 33919 - DNA, 15 bp, Homo sapiens
agtaccacctttctt

SEQ ID NO: 33920 - DNA, 15 bp, Homo sapiens
aagtaccacctttct

SEQ ID NO: 33921 - DNA, 15 bp, Homo sapiens
gaagtaccacctttc

SEQ ID NO: 33922 - DNA, 15 bp, Homo sapiens
ggaagtaccaccttt

SEQ ID NO: 33923 - DNA, 15 bp, Homo sapiens
tggaagtaccacctt

SEQ ID NO: 33924 - DNA, 15 bp, Homo sapiens
ttggaagtaccacct

SEQ ID NO: 33925 - DNA, 15 bp, Homo sapiens
attggaagtaccacc

SEQ ID NO: 33926 - DNA, 15 bp, Homo sapiens
gattggaagtaccac

SEQ ID NO: 33927 - DNA, 15 bp, Homo sapiens
agattggaagtacca

SEQ ID NO: 33928 - DNA, 15 bp, Homo sapiens
aagattggaagtacc

SEQ ID NO: 33929 - DNA, 15 bp, Homo sapiens
aaagattggaagtac

SEQ ID NO: 33930 - DNA, 15 bp, Homo sapiens
aaaagattggaagta

SEQ ID NO: 33931 - DNA, 15 bp, Homo sapiens
aaaaagattggaagt

SEQ ID NO: 33932 - DNA, 15 bp, Homo sapiens
caaaaagattggaag

SEQ ID NO: 33933 - DNA, 15 bp, Homo sapiens
acaaaaagattggaa

SEQ ID NO: 33934 - DNA, 15 bp, Homo sapiens
cacaaaaagattgga

SEQ ID NO: 33935 - DNA, 15 bp, Homo sapiens
tcacaaaaagattgg

SEQ ID NO: 33936 - DNA, 15 bp, Homo sapiens
gtcacaaaaagattg

SEQ ID NO: 33937 - DNA, 15 bp, Homo sapiens
ggtcacaaaaagatt

SEQ ID NO: 33938 - DNA, 15 bp, Homo sapiens
aggtcacaaaaagat

SEQ ID NO: 33939 - DNA, 15 bp, Homo sapiens
taggtcacaaaaaga

SEQ ID NO: 33940 - DNA, 15 bp, Homo sapiens
gtaggtcacaaaaag

SEQ ID NO: 33941 - DNA, 15 bp, Homo sapiens
agtaggtcacaaaaa

SEQ ID NO: 33942 - DNA, 15 bp, Homo sapiens
aagtaggtcacaaaa

SEQ ID NO: 33943 - DNA, 15 bp, Homo sapiens
aaagtaggtcacaaa

SEQ ID NO: 33944 - DNA, 15 bp, Homo sapiens
taaagtaggtcacaa

SEQ ID NO: 33945 - DNA, 15 bp, Homo sapiens
ataaagtaggtcaca

SEQ ID NO: 33946 - DNA, 15 bp, Homo sapiens
aataaagtaggtcac

SEQ ID NO: 33947 - DNA, 15 bp, Homo sapiens
taataaagtaggtca

SEQ ID NO: 33948 - DNA, 15 bp, Homo sapiens
ataataaagtaggtc

SEQ ID NO: 33949 - DNA, 15 bp, Homo sapiens
aataataaagtaggt

SEQ ID NO: 33950 - DNA, 15 bp, Homo sapiens
caataataaagtagg

SEQ ID NO: 33951 - DNA, 15 bp, Homo sapiens
acaataataaagtag

SEQ ID NO: 33952 - DNA, 15 bp, Homo sapiens
aacaataataaagta

SEQ ID NO: 33953 - DNA, 15 bp, Homo sapiens
aaacaataataaagt

SEQ ID NO: 33954 - DNA, 15 bp, Homo sapiens
aaaacaataataaag

SEQ ID NO: 33955 - DNA, 15 bp, Homo sapiens
aaaaacaataataaa

SEQ ID NO: 33956 - DNA, 15 bp, Homo sapiens
aaaaaacaataataa

SEQ ID NO: 33957 - DNA, 15 bp, Homo sapiens
aaaaaaacaataata

SEQ ID NO: 33958 - DNA, 15 bp, Homo sapiens
taaaaaaacaataat

SEQ ID NO: 33959 - DNA, 15 bp, Homo sapiens
ttaaaaaaacaataa

SEQ ID NO: 33960 - DNA, 15 bp, Homo sapiens
attaaaaaaacaata

SEQ ID NO: 33961 - DNA, 15 bp, Homo sapiens
cattaaaaaaacaat

SEQ ID NO: 33962 - DNA, 15 bp, Homo sapiens
acattaaaaaaacaa

SEQ ID NO: 33963 - DNA, 15 bp, Homo sapiens
gacattaaaaaaaca

SEQ ID NO: 33964 - DNA, 15 bp, Homo sapiens
tgacattaaaaaaac

SEQ ID NO: 33965 - DNA, 15 bp, Homo sapiens
ctgacattaaaaaaa

SEQ ID NO: 33966 - DNA, 15 bp, Homo sapiens
cctgacattaaaaaa

SEQ ID NO: 33967 - DNA, 15 bp, Homo sapiens
ccctgacattaaaaa

SEQ ID NO: 33968 - DNA, 15 bp, Homo sapiens
accctgacattaaaa

SEQ ID NO: 33969 - DNA, 15 bp, Homo sapiens
aaccctgacattaaa

SEQ ID NO: 33970 - DNA, 15 bp, Homo sapiens
aaaccctgacattaa

SEQ ID NO: 33971 - DNA, 15 bp, Homo sapiens
aaaaccctgacatta

SEQ ID NO: 33972 - DNA, 15 bp, Homo sapiens
aaaaaccctgacatt

SEQ ID NO: 33973 - DNA, 15 bp, Homo sapiens
aaaaaaccctgacat

SEQ ID NO: 33974 - DNA, 15 bp, Homo sapiens
aaaaaaaccctgaca

SEQ ID NO: 33975 - DNA, 15 bp, Homo sapiens
aaaaaaaaccctgac

SEQ ID NO: 33976 - DNA, 15 bp, Homo sapiens
caaaaaaaaccctga

SEQ ID NO: 33977 - DNA, 15 bp, Homo sapiens
ccaaaaaaaaccctg

SEQ ID NO: 33978 - DNA, 15 bp, Homo sapiens
tccaaaaaaaaccct

SEQ ID NO: 33979 - DNA, 15 bp, Homo sapiens
ttccaaaaaaaaccc

SEQ ID NO: 33980 - DNA, 15 bp, Homo sapiens
attccaaaaaaaacc

SEQ ID NO: 33981 - DNA, 15 bp, Homo sapiens
cattccaaaaaaaac

SEQ ID NO: 33982 - DNA, 15 bp, Homo sapiens
ccattccaaaaaaaa

SEQ ID NO: 33983 - DNA, 15 bp, Homo sapiens
tccattccaaaaaaa

SEQ ID NO: 33984 - DNA, 15 bp, Homo sapiens
ctccattccaaaaaa

SEQ ID NO: 33985 - DNA, 15 bp, Homo sapiens
tctccattccaaaaa

SEQ ID NO: 33986 - DNA, 15 bp, Homo sapiens
ttctccattccaaaa

SEQ ID NO: 33987 - DNA, 15 bp, Homo sapiens
tttctccattccaaa

SEQ ID NO: 33988 - DNA, 15 bp, Homo sapiens
ttttctccattccaa

SEQ ID NO: 33989 - DNA, 15 bp, Homo sapiens
cttttctccattcca

SEQ ID NO: 33990 - DNA, 15 bp, Homo sapiens
acttttctccattcc

SEQ ID NO: 33991 - DNA, 15 bp, Homo sapiens
tacttttctccattc

SEQ ID NO: 33992 - DNA, 15 bp, Homo sapiens
atacttttctccatt

SEQ ID NO: 33993 - DNA, 15 bp, Homo sapiens
aatacttttctccat

SEQ ID NO: 33994 - DNA, 15 bp, Homo sapiens
aaatacttttctcca

SEQ ID NO: 33995 - DNA, 15 bp, Homo sapiens
caaatacttttctcc

SEQ ID NO: 33996 - DNA, 15 bp, Homo sapiens
tcaaatacttttctc

SEQ ID NO: 33997 - DNA, 15 bp, Homo sapiens
atcaaatacttttct

SEQ ID NO: 33998 - DNA, 15 bp, Homo sapiens
tatcaaatacttttc

SEQ ID NO: 33999 - DNA, 15 bp, Homo sapiens
ctatcaaatactttt

SEQ ID NO: 34000 - DNA, 15 bp, Homo sapiens
tctatcaaatacttt

SEQ ID NO: 34001 - DNA, 15 bp, Homo sapiens
ctctatcaaatactt

SEQ ID NO: 34002 - DNA, 15 bp, Homo sapiens
cctctatcaaatact

SEQ ID NO: 34003 - DNA, 15 bp, Homo sapiens
acctctatcaaatac

SEQ ID NO: 34004 - DNA, 15 bp, Homo sapiens
tacctctatcaaata

SEQ ID NO: 34005 - DNA, 15 bp, Homo sapiens
atacctctatcaaat

SEQ ID NO: 34006 - DNA, 15 bp, Homo sapiens
aatacctctatcaaa

SEQ ID NO: 34007 - DNA, 15 bp, Homo sapiens
caatacctctatcaa

SEQ ID NO: 34008 - DNA, 15 bp, Homo sapiens
gcaatacctctatca

SEQ ID NO: 34009 - DNA, 15 bp, Homo sapiens
tgcaatacctctatc

SEQ ID NO: 34010 - DNA, 15 bp, Homo sapiens
ttgcaatacctctat

SEQ ID NO: 34011 - DNA, 15 bp, Homo sapiens
gttgcaatacctcta

SEQ ID NO: 34012 - DNA, 15 bp, Homo sapiens
tgttgcaatacctct

SEQ ID NO: 34013 - DNA, 15 bp, Homo sapiens
ctgttgcaatacctc

SEQ ID NO: 34014 - DNA, 15 bp, Homo sapiens
actgttgcaatacct

SEQ ID NO: 34015 - DNA, 15 bp, Homo sapiens
gactgttgcaatacc

SEQ ID NO: 34016 - DNA, 15 bp, Homo sapiens
agactgttgcaatac

SEQ ID NO: 34017 - DNA, 15 bp, Homo sapiens
aagactgttgcaata

SEQ ID NO: 34018 - DNA, 15 bp, Homo sapiens
taagactgttgcaat

SEQ ID NO: 34019 - DNA, 15 bp, Homo sapiens
ataagactgttgcaa

SEQ ID NO: 34020 - DNA, 15 bp, Homo sapiens
aataagactgttgca

SEQ ID NO: 34021 - DNA, 15 bp, Homo sapiens
gaataagactgttgc

SEQ ID NO: 34022 - DNA, 15 bp, Homo sapiens
agaataagactgttg

SEQ ID NO: 34023 - DNA, 15 bp, Homo sapiens
aagaataagactgtt

SEQ ID NO: 34024 - DNA, 15 bp, Homo sapiens
gaagaataagactgt

SEQ ID NO: 34025 - DNA, 15 bp, Homo sapiens
agaagaataagactg

SEQ ID NO: 34026 - DNA, 15 bp, Homo sapiens
aagaagaataagact

SEQ ID NO: 34027 - DNA, 15 bp, Homo sapiens
gaagaagaataagac

SEQ ID NO: 34028 - DNA, 15 bp, Homo sapiens
tgaagaagaataaga

SEQ ID NO: 34029 - DNA, 15 bp, Homo sapiens
atgaagaagaataag

SEQ ID NO: 34030 - DNA, 15 bp, Homo sapiens
catgaagaagaataa

SEQ ID NO: 34031 - DNA, 15 bp, Homo sapiens
gcatgaagaagaata

SEQ ID NO: 34032 - DNA, 15 bp, Homo sapiens
agcatgaagaagaat

SEQ ID NO: 34033 - DNA, 15 bp, Homo sapiens
tagcatgaagaagaa

SEQ ID NO: 34034 - DNA, 15 bp, Homo sapiens
gtagcatgaagaaga

SEQ ID NO: 34035 - DNA, 15 bp, Homo sapiens
tgtagcatgaagaag

SEQ ID NO: 34036 - DNA, 15 bp, Homo sapiens
ttgtagcatgaagaa

SEQ ID NO: 34037 - DNA, 15 bp, Homo sapiens
cttgtagcatgaaga

SEQ ID NO: 34038 - DNA, 15 bp, Homo sapiens
acttgtagcatgaag

SEQ ID NO: 34039 - DNA, 15 bp, Homo sapiens
tacttgtagcatgaa

SEQ ID NO: 34040 - DNA, 15 bp, Homo sapiens
atacttgtagcatga

SEQ ID NO: 34041 - DNA, 15 bp, Homo sapiens
tatacttgtagcatg

SEQ ID NO: 34042 - DNA, 15 bp, Homo sapiens
atatacttgtagcat

SEQ ID NO: 34043 - DNA, 15 bp, Homo sapiens
aatatacttgtagca

SEQ ID NO: 34044 - DNA, 15 bp, Homo sapiens
aaatatacttgtagc

SEQ ID NO: 34045 - DNA, 15 bp, Homo sapiens
caaatatacttgtag

SEQ ID NO: 34046 - DNA, 15 bp, Homo sapiens
tcaaatatacttgta

SEQ ID NO: 34047 - DNA, 15 bp, Homo sapiens
gtcaaatatacttgt

SEQ ID NO: 34048 - DNA, 15 bp, Homo sapiens
agtcaaatatacttg

SEQ ID NO: 34049 - DNA, 15 bp, Homo sapiens
gagtcaaatatactt

SEQ ID NO: 34050 - DNA, 15 bp, Homo sapiens
agagtcaaatatact

SEQ ID NO: 34051 - DNA, 15 bp, Homo sapiens
aagagtcaaatatac

SEQ ID NO: 34052 - DNA, 15 bp, Homo sapiens
aaagagtcaaatata

SEQ ID NO: 34053 - DNA, 15 bp, Homo sapiens
gaaagagtcaaatat

SEQ ID NO: 34054 - DNA, 15 bp, Homo sapiens
agaaagagtcaaata

SEQ ID NO: 34055 - DNA, 15 bp, Homo sapiens
tagaaagagtcaaat

SEQ ID NO: 34056 - DNA, 15 bp, Homo sapiens
ttagaaagagtcaaa

SEQ ID NO: 34057 - DNA, 15 bp, Homo sapiens
cttagaaagagtcaa

SEQ ID NO: 34058 - DNA, 15 bp, Homo sapiens
tcttagaaagagtca

SEQ ID NO: 34059 - DNA, 15 bp, Homo sapiens
atcttagaaagagtc

SEQ ID NO: 34060 - DNA, 15 bp, Homo sapiens
tatcttagaaagagt

SEQ ID NO: 34061 - DNA, 15 bp, Homo sapiens
gtatcttagaaagag

SEQ ID NO: 34062 - DNA, 15 bp, Homo sapiens
agtatcttagaaaga

SEQ ID NO: 34063 - DNA, 15 bp, Homo sapiens
aagtatcttagaaag

SEQ ID NO: 34064 - DNA, 15 bp, Homo sapiens
caagtatcttagaaa

SEQ ID NO: 34065 - DNA, 15 bp, Homo sapiens
gcaagtatcttagaa

SEQ ID NO: 34066 - DNA, 15 bp, Homo sapiens
ggcaagtatcttaga

SEQ ID NO: 34067 - DNA, 15 bp, Homo sapiens
aggcaagtatcttag

SEQ ID NO: 34068 - DNA, 15 bp, Homo sapiens
aaggcaagtatctta

SEQ ID NO: 34069 - DNA, 15 bp, Homo sapiens
gaaggcaagtatctt

SEQ ID NO: 34070 - DNA, 15 bp, Homo sapiens
tgaaggcaagtatct

SEQ ID NO: 34071 - DNA, 15 bp, Homo sapiens
gtgaaggcaagtatc

SEQ ID NO: 34072 - DNA, 15 bp, Homo sapiens
agtgaaggcaagtat

SEQ ID NO: 34073 - DNA, 15 bp, Homo sapiens
cagtgaaggcaagta

SEQ ID NO: 34074 - DNA, 15 bp, Homo sapiens
acagtgaaggcaagt

SEQ ID NO: 34075 - DNA, 15 bp, Homo sapiens
aacagtgaaggcaag

SEQ ID NO: 34076 - DNA, 15 bp, Homo sapiens
gaacagtgaaggcaa

SEQ ID NO: 34077 - DNA, 15 bp, Homo sapiens
tgaacagtgaaggca

SEQ ID NO: 34078 - DNA, 15 bp, Homo sapiens
ttgaacagtgaaggc

SEQ ID NO: 34079 - DNA, 15 bp, Homo sapiens
gttgaacagtgaagg

SEQ ID NO: 34080 - DNA, 15 bp, Homo sapiens
agttgaacagtgaag

SEQ ID NO: 34081 - DNA, 15 bp, Homo sapiens
cagttgaacagtgaa

SEQ ID NO: 34082 - DNA, 15 bp, Homo sapiens
acagttgaacagtga

SEQ ID NO: 34083 - DNA, 15 bp, Homo sapiens
cacagttgaacagtg

SEQ ID NO: 34084 - DNA, 15 bp, Homo sapiens
acacagttgaacagt

SEQ ID NO: 34085 - DNA, 15 bp, Homo sapiens
cacacagttgaacag

SEQ ID NO: 34086 - DNA, 15 bp, Homo sapiens
tcacacagttgaaca

SEQ ID NO: 34087 - DNA, 15 bp, Homo sapiens
gtcacacagttgaac

SEQ ID NO: 34088 - DNA, 15 bp, Homo sapiens
agtcacacagttgaa

SEQ ID NO: 34089 - DNA, 15 bp, Homo sapiens
aagtcacacagttga

SEQ ID NO: 34090 - DNA, 15 bp, Homo sapiens
aaagtcacacagttg

SEQ ID NO: 34091 - DNA, 15 bp, Homo sapiens
aaaagtcacacagtt

SEQ ID NO: 34092 - DNA, 15 bp, Homo sapiens
aaaaagtcacacagt

SEQ ID NO: 34093 - DNA, 15 bp, Homo sapiens
caaaaagtcacacag

SEQ ID NO: 34094 - DNA, 15 bp, Homo sapiens
acaaaaagtcacaca

SEQ ID NO: 34095 - DNA, 15 bp, Homo sapiens
aacaaaaagtcacac

SEQ ID NO: 34096 - DNA, 15 bp, Homo sapiens
aaacaaaaagtcaca

SEQ ID NO: 34097 - DNA, 15 bp, Homo sapiens
caaacaaaaagtcac

SEQ ID NO: 34098 - DNA, 15 bp, Homo sapiens
acaaacaaaaagtca

SEQ ID NO: 34099 - DNA, 15 bp, Homo sapiens
aacaaacaaaaagtc

SEQ ID NO: 34100 - DNA, 15 bp, Homo sapiens
aaacaaacaaaaagt

SEQ ID NO: 34101 - DNA, 15 bp, Homo sapiens
taaacaaacaaaaag

SEQ ID NO: 34102 - DNA, 15 bp, Homo sapiens
ctaaacaaacaaaaa

SEQ ID NO: 34103 - DNA, 15 bp, Homo sapiens
gctaaacaaacaaaa

SEQ ID NO: 34104 - DNA, 15 bp, Homo sapiens
tgctaaacaaacaaa

SEQ ID NO: 34105 - DNA, 15 bp, Homo sapiens
atgctaaacaaacaa

SEQ ID NO: 34106 - DNA, 15 bp, Homo sapiens
aatgctaaacaaaca

SEQ ID NO: 34107 - DNA, 15 bp, Homo sapiens
taatgctaaacaaac

SEQ ID NO: 34108 - DNA, 15 bp, Homo sapiens
gtaatgctaaacaaa

SEQ ID NO: 34109 - DNA, 15 bp, Homo sapiens
tgtaatgctaaacaa

SEQ ID NO: 34110 - DNA, 15 bp, Homo sapiens
ttgtaatgctaaaca

SEQ ID NO: 34111 - DNA, 15 bp, Homo sapiens
attgtaatgctaaac

SEQ ID NO: 34112 - DNA, 15 bp, Homo sapiens
gattgtaatgctaaa

SEQ ID NO: 34113 - DNA, 15 bp, Homo sapiens
tgattgtaatgctaa

SEQ ID NO: 34114 - DNA, 15 bp, Homo sapiens
ttgattgtaatgcta

SEQ ID NO: 34115 - DNA, 15 bp, Homo sapiens
attgattgtaatgct

SEQ ID NO: 34116 - DNA, 15 bp, Homo sapiens
tattgattgtaatgc

SEQ ID NO: 34117 - DNA, 15 bp, Homo sapiens
atattgattgtaatg

SEQ ID NO: 34118 - DNA, 15 bp, Homo sapiens
gatattgattgtaat

SEQ ID NO: 34119 - DNA, 15 bp, Homo sapiens
ggatattgattgtaa

SEQ ID NO: 34120 - DNA, 15 bp, Homo sapiens
aggatattgattgta

SEQ ID NO: 34121 - DNA, 15 bp, Homo sapiens
taggatattgattgt

SEQ ID NO: 34122 - DNA, 15 bp, Homo sapiens
ctaggatattgattg

SEQ ID NO: 34123 - DNA, 15 bp, Homo sapiens
actaggatattgatt

SEQ ID NO: 34124 - DNA, 15 bp, Homo sapiens
tactaggatattgat

SEQ ID NO: 34125 - DNA, 15 bp, Homo sapiens
ctactaggatattga

SEQ ID NO: 34126 - DNA, 15 bp, Homo sapiens
cctactaggatattg

SEQ ID NO: 34127 - DNA, 15 bp, Homo sapiens
tcctactaggatatt

SEQ ID NO: 34128 - DNA, 15 bp, Homo sapiens
atcctactaggatat

SEQ ID NO: 34129 - DNA, 15 bp, Homo sapiens
catcctactaggata

SEQ ID NO: 34130 - DNA, 15 bp, Homo sapiens
tcatcctactaggat

SEQ ID NO: 34131 - DNA, 15 bp, Homo sapiens
atcatcctactagga

SEQ ID NO: 34132 - DNA, 15 bp, Homo sapiens
aatcatcctactagg

SEQ ID NO: 34133 - DNA, 15 bp, Homo sapiens
aaatcatcctactag

SEQ ID NO: 34134 - DNA, 15 bp, Homo sapiens
taaatcatcctacta

SEQ ID NO: 34135 - DNA, 15 bp, Homo sapiens
ttaaatcatcctact

SEQ ID NO: 34136 - DNA, 15 bp, Homo sapiens
attaaatcatcctac

SEQ ID NO: 34137 - DNA, 15 bp, Homo sapiens
gattaaatcatccta

SEQ ID NO: 34138 - DNA, 15 bp, Homo sapiens
tgattaaatcatcct

SEQ ID NO: 34139 - DNA, 15 bp, Homo sapiens
ttgattaaatcatcc

SEQ ID NO: 34140 - DNA, 15 bp, Homo sapiens
attgattaaatcatc

SEQ ID NO: 34141 - DNA, 15 bp, Homo sapiens
cattgattaaatcat

SEQ ID NO: 34142 - DNA, 15 bp, Homo sapiens
tcattgattaaatca

SEQ ID NO: 34143 - DNA, 15 bp, Homo sapiens
atcattgattaaatc

SEQ ID NO: 34144 - DNA, 15 bp, Homo sapiens
aatcattgattaaat

SEQ ID NO: 34145 - DNA, 15 bp, Homo sapiens
aaatcattgattaaa

SEQ ID NO: 34146 - DNA, 15 bp, Homo sapiens
aaaatcattgattaa

SEQ ID NO: 34147 - DNA, 15 bp, Homo sapiens
aaaaatcattgatta

SEQ ID NO: 34148 - DNA, 15 bp, Homo sapiens
taaaaatcattgatt

SEQ ID NO: 34149 - DNA, 15 bp, Homo sapiens
ttaaaaatcattgat

SEQ ID NO: 34150 - DNA, 15 bp, Homo sapiens
attaaaaatcattga

SEQ ID NO: 34151 - DNA, 15 bp, Homo sapiens
aattaaaaatcattg

SEQ ID NO: 34152 - DNA, 15 bp, Homo sapiens
caattaaaaatcatt

SEQ ID NO: 34153 - DNA, 15 bp, Homo sapiens
ccaattaaaaatcat

SEQ ID NO: 34154 - DNA, 15 bp, Homo sapiens
tccaattaaaaatca

SEQ ID NO: 34155 - DNA, 15 bp, Homo sapiens
ttccaattaaaaatc

SEQ ID NO: 34156 - DNA, 15 bp, Homo sapiens
gttccaattaaaaat

SEQ ID NO: 34157 - DNA, 15 bp, Homo sapiens
tgttccaattaaaaa

SEQ ID NO: 34158 - DNA, 15 bp, Homo sapiens
ttgttccaattaaaa

SEQ ID NO: 34159 - DNA, 15 bp, Homo sapiens
tttgttccaattaaa

SEQ ID NO: 34160 - DNA, 15 bp, Homo sapiens
atttgttccaattaa

SEQ ID NO: 34161 - DNA, 15 bp, Homo sapiens
tatttgttccaatta

SEQ ID NO: 34162 - DNA, 15 bp, Homo sapiens
ctatttgttccaatt

SEQ ID NO: 34163 - DNA, 15 bp, Homo sapiens
actatttgttccaat

SEQ ID NO: 34164 - DNA, 15 bp, Homo sapiens
aactatttgttccaa

SEQ ID NO: 34165 - DNA, 15 bp, Homo sapiens
aaactatttgttcca

SEQ ID NO: 34166 - DNA, 15 bp, Homo sapiens
aaaactatttgttcc

SEQ ID NO: 34167 - DNA, 15 bp, Homo sapiens
aaaaactatttgttc

SEQ ID NO: 34168 - DNA, 15 bp, Homo sapiens
caaaaactatttgtt

SEQ ID NO: 34169 - DNA, 15 bp, Homo sapiens
acaaaaactatttgt

SEQ ID NO: 34170 - DNA, 15 bp, Homo sapiens
tacaaaaactatttg

SEQ ID NO: 34171 - DNA, 15 bp, Homo sapiens
ttacaaaaactattt

SEQ ID NO: 34172 - DNA, 15 bp, Homo sapiens
attacaaaaactatt

SEQ ID NO: 34173 - DNA, 15 bp, Homo sapiens
cattacaaaaactat

SEQ ID NO: 34174 - DNA, 15 bp, Homo sapiens
ccattacaaaaacta

SEQ ID NO: 34175 - DNA, 15 bp, Homo sapiens
accattacaaaaact

SEQ ID NO: 34176 - DNA, 15 bp, Homo sapiens
gaccattacaaaaac

SEQ ID NO: 34177 - DNA, 15 bp, Homo sapiens
agaccattacaaaaa

SEQ ID NO: 34178 - DNA, 15 bp, Homo sapiens
tagaccattacaaaa

SEQ ID NO: 34179 - DNA, 15 bp, Homo sapiens
ctagaccattacaaa

SEQ ID NO: 34180 - DNA, 15 bp, Homo sapiens
cctagaccattacaa

SEQ ID NO: 34181 - DNA, 15 bp, Homo sapiens
gcctagaccattaca

SEQ ID NO: 34182 - DNA, 15 bp, Homo sapiens
agcctagaccattac

SEQ ID NO: 34183 - DNA, 15 bp, Homo sapiens
aagcctagaccatta

SEQ ID NO: 34184 - DNA, 15 bp, Homo sapiens
aaagcctagaccatt

SEQ ID NO: 34185 - DNA, 15 bp, Homo sapiens
aaaagcctagaccat

SEQ ID NO: 34186 - DNA, 15 bp, Homo sapiens
gaaaagcctagacca

SEQ ID NO: 34187 - DNA, 15 bp, Homo sapiens
ggaaaagcctagacc

SEQ ID NO: 34188 - DNA, 15 bp, Homo sapiens
tggaaaagcctagac

SEQ ID NO: 34189 - DNA, 15 bp, Homo sapiens
ttggaaaagcctaga

SEQ ID NO: 34190 - DNA, 15 bp, Homo sapiens
gttggaaaagcctag

SEQ ID NO: 34191 - DNA, 15 bp, Homo sapiens
agttggaaaagccta

SEQ ID NO: 34192 - DNA, 15 bp, Homo sapiens
aagttggaaaagcct

SEQ ID NO: 34193 - DNA, 15 bp, Homo sapiens
taagttggaaaagcc

SEQ ID NO: 34194 - DNA, 15 bp, Homo sapiens
ttaagttggaaaagc

SEQ ID NO: 34195 - DNA, 15 bp, Homo sapiens
gttaagttggaaaag

SEQ ID NO: 34196 - DNA, 15 bp, Homo sapiens
agttaagttggaaaa

SEQ ID NO: 34197 - DNA, 15 bp, Homo sapiens
cagttaagttggaaa

SEQ ID NO: 34198 - DNA, 15 bp, Homo sapiens
acagttaagttggaa

SEQ ID NO: 34199 - DNA, 15 bp, Homo sapiens
cacagttaagttgga

SEQ ID NO: 34200 - DNA, 15 bp, Homo sapiens
gcacagttaagttgg

SEQ ID NO: 34201 - DNA, 15 bp, Homo sapiens
agcacagttaagttg

SEQ ID NO: 34202 - DNA, 15 bp, Homo sapiens
gagcacagttaagtt

SEQ ID NO: 34203 - DNA, 15 bp, Homo sapiens
agagcacagttaagt

SEQ ID NO: 34204 - DNA, 15 bp, Homo sapiens
gagagcacagttaag

SEQ ID NO: 34205 - DNA, 15 bp, Homo sapiens
tgagagcacagttaa

SEQ ID NO: 34206 - DNA, 15 bp, Homo sapiens
gtgagagcacagtta

SEQ ID NO: 34207 - DNA, 15 bp, Homo sapiens
tgtgagagcacagtt

SEQ ID NO: 34208 - DNA, 15 bp, Homo sapiens
atgtgagagcacagt

SEQ ID NO: 34209 - DNA, 15 bp, Homo sapiens
catgtgagagcacag

SEQ ID NO: 34210 - DNA, 15 bp, Homo sapiens
acatgtgagagcaca

SEQ ID NO: 34211 - DNA, 15 bp, Homo sapiens
cacatgtgagagcac

SEQ ID NO: 34212 - DNA, 15 bp, Homo sapiens
ccacatgtgagagca

SEQ ID NO: 34213 - DNA, 15 bp, Homo sapiens
accacatgtgagagc

SEQ ID NO: 34214 - DNA, 15 bp, Homo sapiens
gaccacatgtgagag

SEQ ID NO: 34215 - DNA, 15 bp, Homo sapiens
agaccacatgtgaga

SEQ ID NO: 34216 - DNA, 15 bp, Homo sapiens
gagaccacatgtgag

SEQ ID NO: 34217 - DNA, 15 bp, Homo sapiens
agagaccacatgtga

SEQ ID NO: 34218 - DNA, 15 bp, Homo sapiens
aagagaccacatgtg

SEQ ID NO: 34219 - DNA, 15 bp, Homo sapiens
aaagagaccacatgt

SEQ ID NO: 34220 - DNA, 15 bp, Homo sapiens
aaaagagaccacatg

SEQ ID NO: 34221 - DNA, 15 bp, Homo sapiens
aaaaagagaccacat

SEQ ID NO: 34222 - DNA, 15 bp, Homo sapiens
gaaaaagagaccaca

SEQ ID NO: 34223 - DNA, 15 bp, Homo sapiens
agaaaaagagaccac

SEQ ID NO: 34224 - DNA, 15 bp, Homo sapiens
gagaaaaagagacca

SEQ ID NO: 34225 - DNA, 15 bp, Homo sapiens
ggagaaaaagagacc

SEQ ID NO: 34226 - DNA, 15 bp, Homo sapiens
gggagaaaaagagac

SEQ ID NO: 34227 - DNA, 15 bp, Homo sapiens
agggagaaaaagaga

SEQ ID NO: 34228 - DNA, 15 bp, Homo sapiens
gagggagaaaaagag

SEQ ID NO: 34229 - DNA, 15 bp, Homo sapiens
agagggagaaaaaga

SEQ ID NO: 34230 - DNA, 15 bp, Homo sapiens
aagagggagaaaaag

SEQ ID NO: 34231 - DNA, 15 bp, Homo sapiens
aaagagggagaaaaa

SEQ ID NO: 34232 - DNA, 15 bp, Homo sapiens
gaaagagggagaaaa

SEQ ID NO: 34233 - DNA, 15 bp, Homo sapiens
ggaaagagggagaaa

SEQ ID NO: 34234 - DNA, 15 bp, Homo sapiens
aggaaagagggagaa

SEQ ID NO: 34235 - DNA, 15 bp, Homo sapiens
gaggaaagagggaga

SEQ ID NO: 34236 - DNA, 15 bp, Homo sapiens
ggaggaaagagggag

SEQ ID NO: 34237 - DNA, 15 bp, Homo sapiens
aggaggaaagaggga

SEQ ID NO: 34238 - DNA, 15 bp, Homo sapiens
aaggaggaaagaggg

SEQ ID NO: 34239 - DNA, 15 bp, Homo sapiens
gaaggaggaaagagg

SEQ ID NO: 34240 - DNA, 15 bp, Homo sapiens
agaaggaggaaagag

SEQ ID NO: 34241 - DNA, 15 bp, Homo sapiens
aagaaggaggaaaga

SEQ ID NO: 34242 - DNA, 15 bp, Homo sapiens
taagaaggaggaaag

SEQ ID NO: 34243 - DNA, 15 bp, Homo sapiens
ataagaaggaggaaa

SEQ ID NO: 34244 - DNA, 15 bp, Homo sapiens
tataagaaggaggaa

SEQ ID NO: 34245 - DNA, 15 bp, Homo sapiens
gtataagaaggagga

SEQ ID NO: 34246 - DNA, 15 bp, Homo sapiens
tgtataagaaggagg

SEQ ID NO: 34247 - DNA, 15 bp, Homo sapiens
gtgtataagaaggag

SEQ ID NO: 34248 - DNA, 15 bp, Homo sapiens
agtgtataagaagga

SEQ ID NO: 34249 - DNA, 15 bp, Homo sapiens
gagtgtataagaagg

SEQ ID NO: 34250 - DNA, 15 bp, Homo sapiens
agagtgtataagaag

SEQ ID NO: 34251 - DNA, 15 bp, Homo sapiens
gagagtgtataagaa

SEQ ID NO: 34252 - DNA, 15 bp, Homo sapiens
tgagagtgtataaga

SEQ ID NO: 34253 - DNA, 15 bp, Homo sapiens
gtgagagtgtataag

SEQ ID NO: 34254 - DNA, 15 bp, Homo sapiens
ggtgagagtgtataa

SEQ ID NO: 34255 - DNA, 15 bp, Homo sapiens
gggtgagagtgtata

SEQ ID NO: 34256 - DNA, 15 bp, Homo sapiens
tgggtgagagtgtat

SEQ ID NO: 34257 - DNA, 15 bp, Homo sapiens
gtgggtgagagtgta

SEQ ID NO: 34258 - DNA, 15 bp, Homo sapiens
tgtgggtgagagtgt

SEQ ID NO: 34259 - DNA, 15 bp, Homo sapiens
gtgtgggtgagagtg

SEQ ID NO: 34260 - DNA, 15 bp, Homo sapiens
tgtgtgggtgagagt

SEQ ID NO: 34261 - DNA, 15 bp, Homo sapiens
gtgtgtgggtgagag

SEQ ID NO: 34262 - DNA, 15 bp, Homo sapiens
tgtgtgtgggtgaga

SEQ ID NO: 34263 - DNA, 15 bp, Homo sapiens
atgtgtgtgggtgag

SEQ ID NO: 34264 - DNA, 15 bp, Homo sapiens
tatgtgtgtgggtga

SEQ ID NO: 34265 - DNA, 15 bp, Homo sapiens
atatgtgtgtgggtg

SEQ ID NO: 34266 - DNA, 15 bp, Homo sapiens
catatgtgtgtgggt

SEQ ID NO: 34267 - DNA, 15 bp, Homo sapiens
gcatatgtgtgtggg

SEQ ID NO: 34268 - DNA, 15 bp, Homo sapiens
tgcatatgtgtgtgg

SEQ ID NO: 34269 - DNA, 15 bp, Homo sapiens
atgcatatgtgtgtg

SEQ ID NO: 34270 - DNA, 15 bp, Homo sapiens
tatgcatatgtgtgt

SEQ ID NO: 34271 - DNA, 15 bp, Homo sapiens
gtatgcatatgtgtg

SEQ ID NO: 34272 - DNA, 15 bp, Homo sapiens
tgtatgcatatgtgt

SEQ ID NO: 34273 - DNA, 15 bp, Homo sapiens
atgtatgcatatgtg

SEQ ID NO: 34274 - DNA, 15 bp, Homo sapiens
tatgtatgcatatgt

SEQ ID NO: 34275 - DNA, 15 bp, Homo sapiens
gtatgtatgcatatg

SEQ ID NO: 34276 - DNA, 15 bp, Homo sapiens
ggtatgtatgcatat

SEQ ID NO: 34277 - DNA, 15 bp, Homo sapiens
gggtatgtatgcata

SEQ ID NO: 34278 - DNA, 15 bp, Homo sapiens
agggtatgtatgcat

SEQ ID NO: 34279 - DNA, 15 bp, Homo sapiens
cagggtatgtatgca

SEQ ID NO: 34280 - DNA, 15 bp, Homo sapiens
acagggtatgtatgc

SEQ ID NO: 34281 - DNA, 15 bp, Homo sapiens
gacagggtatgtatg

SEQ ID NO: 34282 - DNA, 15 bp, Homo sapiens
agacagggtatgtat

SEQ ID NO: 34283 - DNA, 15 bp, Homo sapiens
cagacagggtatgta

SEQ ID NO: 34284 - DNA, 15 bp, Homo sapiens
tcagacagggtatgt

SEQ ID NO: 34285 - DNA, 15 bp, Homo sapiens
atcagacagggtatg

SEQ ID NO: 34286 - DNA, 15 bp, Homo sapiens
catcagacagggtat

SEQ ID NO: 34287 - DNA, 15 bp, Homo sapiens
acatcagacagggta

SEQ ID NO: 34288 - DNA, 15 bp, Homo sapiens
tacatcagacagggt

SEQ ID NO: 34289 - DNA, 15 bp, Homo sapiens
atacatcagacaggg

SEQ ID NO: 34290 - DNA, 15 bp, Homo sapiens
gatacatcagacagg

SEQ ID NO: 34291 - DNA, 15 bp, Homo sapiens
agatacatcagacag

SEQ ID NO: 34292 - DNA, 15 bp, Homo sapiens
cagatacatcagaca

SEQ ID NO: 34293 - DNA, 15 bp, Homo sapiens
gcagatacatcagac

SEQ ID NO: 34294 - DNA, 15 bp, Homo sapiens
agcagatacatcaga

SEQ ID NO: 34295 - DNA, 15 bp, Homo sapiens
aagcagatacatcag

SEQ ID NO: 34296 - DNA, 15 bp, Homo sapiens
gaagcagatacatca

SEQ ID NO: 34297 - DNA, 15 bp, Homo sapiens
agaagcagatacatc

SEQ ID NO: 34298 - DNA, 15 bp, Homo sapiens
aagaagcagatacat

SEQ ID NO: 34299 - DNA, 15 bp, Homo sapiens
gaagaagcagataca

SEQ ID NO: 34300 - DNA, 15 bp, Homo sapiens
tgaagaagcagatac

SEQ ID NO: 34301 - DNA, 15 bp, Homo sapiens
ctgaagaagcagata

SEQ ID NO: 34302 - DNA, 15 bp, Homo sapiens
tctgaagaagcagat

SEQ ID NO: 34303 - DNA, 15 bp, Homo sapiens
ttctgaagaagcaga

SEQ ID NO: 34304 - DNA, 15 bp, Homo sapiens
attctgaagaagcag

SEQ ID NO: 34305 - DNA, 15 bp, Homo sapiens
tattctgaagaagca

SEQ ID NO: 34306 - DNA, 15 bp, Homo sapiens
ctattctgaagaagc

SEQ ID NO: 34307 - DNA, 15 bp, Homo sapiens
actattctgaagaag

SEQ ID NO: 34308 - DNA, 15 bp, Homo sapiens
aactattctgaagaa

SEQ ID NO: 34309 - DNA, 15 bp, Homo sapiens
caactattctgaaga

SEQ ID NO: 34310 - DNA, 15 bp, Homo sapiens
ccaactattctgaag

SEQ ID NO: 34311 - DNA, 15 bp, Homo sapiens
gccaactattctgaa

SEQ ID NO: 34312 - DNA, 15 bp, Homo sapiens
agccaactattctga

SEQ ID NO: 34313 - DNA, 15 bp, Homo sapiens
cagccaactattctg

SEQ ID NO: 34314 - DNA, 15 bp, Homo sapiens
acagccaactattct

SEQ ID NO: 34315 - DNA, 15 bp, Homo sapiens
cacagccaactattc

SEQ ID NO: 34316 - DNA, 15 bp, Homo sapiens
gcacagccaactatt

SEQ ID NO: 34317 - DNA, 15 bp, Homo sapiens
agcacagccaactat

SEQ ID NO: 34318 - DNA, 15 bp, Homo sapiens
gagcacagccaacta

SEQ ID NO: 34319 - DNA, 15 bp, Homo sapiens
agagcacagccaact

SEQ ID NO: 34320 - DNA, 15 bp, Homo sapiens
cagagcacagccaac

SEQ ID NO: 34321 - DNA, 15 bp, Homo sapiens
gcagagcacagccaa

SEQ ID NO: 34322 - DNA, 15 bp, Homo sapiens
agcagagcacagcca

SEQ ID NO: 34323 - DNA, 15 bp, Homo sapiens
cagcagagcacagcc

SEQ ID NO: 34324 - DNA, 15 bp, Homo sapiens
tcagcagagcacagc

SEQ ID NO: 34325 - DNA, 15 bp, Homo sapiens
atcagcagagcacag

SEQ ID NO: 34326 - DNA, 15 bp, Homo sapiens
catcagcagagcaca

SEQ ID NO: 34327 - DNA, 15 bp, Homo sapiens
tcatcagcagagcac

SEQ ID NO: 34328 - DNA, 15 bp, Homo sapiens
atcatcagcagagca

SEQ ID NO: 34329 - DNA, 15 bp, Homo sapiens
catcatcagcagagc

SEQ ID NO: 34330 - DNA, 15 bp, Homo sapiens
tcatcatcagcagag

SEQ ID NO: 34331 - DNA, 15 bp, Homo sapiens
ctcatcatcagcaga

SEQ ID NO: 34332 - DNA, 15 bp, Homo sapiens
tctcatcatcagcag

SEQ ID NO: 34333 - DNA, 15 bp, Homo sapiens
ttctcatcatcagca

SEQ ID NO: 34334 - DNA, 15 bp, Homo sapiens
gttctcatcatcagc

SEQ ID NO: 34335 - DNA, 15 bp, Homo sapiens
agttctcatcatcag

SEQ ID NO: 34336 - DNA, 15 bp, Homo sapiens
aagttctcatcatca

SEQ ID NO: 34337 - DNA, 15 bp, Homo sapiens
caagttctcatcatc

SEQ ID NO: 34338 - DNA, 15 bp, Homo sapiens
gcaagttctcatcat

SEQ ID NO: 34339 - DNA, 15 bp, Homo sapiens
ggcaagttctcatca

SEQ ID NO: 34340 - DNA, 15 bp, Homo sapiens
tggcaagttctcatc

SEQ ID NO: 34341 - DNA, 15 bp, Homo sapiens
atggcaagttctcat

SEQ ID NO: 34342 - DNA, 15 bp, Homo sapiens
aatggcaagttctca

SEQ ID NO: 34343 - DNA, 15 bp, Homo sapiens
aaatggcaagttctc

SEQ ID NO: 34344 - DNA, 15 bp, Homo sapiens
taaatggcaagttct

SEQ ID NO: 34345 - DNA, 15 bp, Homo sapiens
ttaaatggcaagttc

SEQ ID NO: 34346 - DNA, 15 bp, Homo sapiens
cttaaatggcaagtt

SEQ ID NO: 34347 - DNA, 15 bp, Homo sapiens
tcttaaatggcaagt

SEQ ID NO: 34348 - DNA, 15 bp, Homo sapiens
ttcttaaatggcaag

SEQ ID NO: 34349 - DNA, 15 bp, Homo sapiens
cttcttaaatggcaa

SEQ ID NO: 34350 - DNA, 15 bp, Homo sapiens
ccttcttaaatggca

SEQ ID NO: 34351 - DNA, 15 bp, Homo sapiens
tccttcttaaatggc

SEQ ID NO: 34352 - DNA, 15 bp, Homo sapiens
gtccttcttaaatgg

SEQ ID NO: 34353 - DNA, 15 bp, Homo sapiens
agtccttcttaaatg

SEQ ID NO: 34354 - DNA, 15 bp, Homo sapiens
aagtccttcttaaat

SEQ ID NO: 34355 - DNA, 15 bp, Homo sapiens
caagtccttcttaaa

SEQ ID NO: 34356 - DNA, 15 bp, Homo sapiens
ccaagtccttcttaa

SEQ ID NO: 34357 - DNA, 15 bp, Homo sapiens
cccaagtccttctta

SEQ ID NO: 34358 - DNA, 15 bp, Homo sapiens
tcccaagtccttctt

SEQ ID NO: 34359 - DNA, 15 bp, Homo sapiens
atcccaagtccttct

SEQ ID NO: 34360 - DNA, 15 bp, Homo sapiens
tatcccaagtccttc

SEQ ID NO: 34361 - DNA, 15 bp, Homo sapiens
ctatcccaagtcctt

SEQ ID NO: 34362 - DNA, 15 bp, Homo sapiens
actatcccaagtcct

SEQ ID NO: 34363 - DNA, 15 bp, Homo sapiens
gactatcccaagtcc

SEQ ID NO: 34364 - DNA, 15 bp, Homo sapiens
ggactatcccaagtc

SEQ ID NO: 34365 - DNA, 15 bp, Homo sapiens
tggactatcccaagt

SEQ ID NO: 34366 - DNA, 15 bp, Homo sapiens
atggactatcccaag

SEQ ID NO: 34367 - DNA, 15 bp, Homo sapiens
catggactatcccaa

SEQ ID NO: 34368 - DNA, 15 bp, Homo sapiens
acatggactatccca

SEQ ID NO: 34369 - DNA, 15 bp, Homo sapiens
gacatggactatccc

SEQ ID NO: 34370 - DNA, 15 bp, Homo sapiens
tgacatggactatcc

SEQ ID NO: 34371 - DNA, 15 bp, Homo sapiens
atgacatggactatc

SEQ ID NO: 34372 - DNA, 15 bp, Homo sapiens
gatgacatggactat

SEQ ID NO: 34373 - DNA, 15 bp, Homo sapiens
tgatgacatggacta

SEQ ID NO: 34374 - DNA, 15 bp, Homo sapiens
atgatgacatggact

SEQ ID NO: 34375 - DNA, 15 bp, Homo sapiens
catgatgacatggac

SEQ ID NO: 34376 - DNA, 15 bp, Homo sapiens
acatgatgacatgga

SEQ ID NO: 34377 - DNA, 15 bp, Homo sapiens
aacatgatgacatgg

SEQ ID NO: 34378 - DNA, 15 bp, Homo sapiens
gaacatgatgacatg

SEQ ID NO: 34379 - DNA, 15 bp, Homo sapiens
tgaacatgatgacat

SEQ ID NO: 34380 - DNA, 15 bp, Homo sapiens
ctgaacatgatgaca

SEQ ID NO: 34381 - DNA, 15 bp, Homo sapiens
cctgaacatgatgac

SEQ ID NO: 34382 - DNA, 15 bp, Homo sapiens
ccctgaacatgatga

SEQ ID NO: 34383 - DNA, 15 bp, Homo sapiens
tccctgaacatgatg

SEQ ID NO: 34384 - DNA, 15 bp, Homo sapiens
atccctgaacatgat

SEQ ID NO: 34385 - DNA, 15 bp, Homo sapiens
tatccctgaacatga

SEQ ID NO: 34386 - DNA, 15 bp, Homo sapiens
ttatccctgaacatg

SEQ ID NO: 34387 - DNA, 15 bp, Homo sapiens
tttatccctgaacat

SEQ ID NO: 34388 - DNA, 15 bp, Homo sapiens
ttttatccctgaaca

SEQ ID NO: 34389 - DNA, 15 bp, Homo sapiens
cttttatccctgaac

SEQ ID NO: 34390 - DNA, 15 bp, Homo sapiens
acttttatccctgaa

SEQ ID NO: 34391 - DNA, 15 bp, Homo sapiens
tacttttatccctga

SEQ ID NO: 34392 - DNA, 15 bp, Homo sapiens
ttacttttatccctg

SEQ ID NO: 34393 - DNA, 15 bp, Homo sapiens
tttacttttatccct

SEQ ID NO: 34394 - DNA, 15 bp, Homo sapiens
ttttacttttatccc

SEQ ID NO: 34395 - DNA, 15 bp, Homo sapiens
gttttacttttatcc

SEQ ID NO: 34396 - DNA, 15 bp, Homo sapiens
ggttttacttttatc

SEQ ID NO: 34397 - DNA, 15 bp, Homo sapiens
gggttttacttttat

SEQ ID NO: 34398 - DNA, 15 bp, Homo sapiens
tgggttttactttta

SEQ ID NO: 34399 - DNA, 15 bp, Homo sapiens
ttgggttttactttt

SEQ ID NO: 34400 - DNA, 15 bp, Homo sapiens
cttgggttttacttt

SEQ ID NO: 34401 - DNA, 15 bp, Homo sapiens
ccttgggttttactt

SEQ ID NO: 34402 - DNA, 15 bp, Homo sapiens
cccttgggttttact

SEQ ID NO: 34403 - DNA, 15 bp, Homo sapiens
gcccttgggttttac

SEQ ID NO: 34404 - DNA, 15 bp, Homo sapiens
tgcccttgggtttta

SEQ ID NO: 34405 - DNA, 15 bp, Homo sapiens
atgcccttgggtttt

SEQ ID NO: 34406 - DNA, 15 bp, Homo sapiens
aatgcccttgggttt

SEQ ID NO: 34407 - DNA, 15 bp, Homo sapiens
aaatgcccttgggtt

SEQ ID NO: 34408 - DNA, 15 bp, Homo sapiens
taaatgcccttgggt

SEQ ID NO: 34409 - DNA, 15 bp, Homo sapiens
ttaaatgcccttggg

SEQ ID NO: 34410 - DNA, 15 bp, Homo sapiens
tttaaatgcccttgg

SEQ ID NO: 34411 - DNA, 15 bp, Homo sapiens
gtttaaatgcccttg

SEQ ID NO: 34412 - DNA, 15 bp, Homo sapiens
agtttaaatgccctt

SEQ ID NO: 34413 - DNA, 15 bp, Homo sapiens
aagtttaaatgccct

SEQ ID NO: 34414 - DNA, 15 bp, Homo sapiens
aaagtttaaatgccc

SEQ ID NO: 34415 - DNA, 15 bp, Homo sapiens
taaagtttaaatgcc

SEQ ID NO: 34416 - DNA, 15 bp, Homo sapiens
ataaagtttaaatgc

SEQ ID NO: 34417 - DNA, 15 bp, Homo sapiens
aataaagtttaaatg

SEQ ID NO: 34418 - DNA, 15 bp, Homo sapiens
caataaagtttaaat

SEQ ID NO: 34419 - DNA, 15 bp, Homo sapiens
acaataaagtttaaa

SEQ ID NO: 34420 - DNA, 15 bp, Homo sapiens
tacaataaagtttaa

SEQ ID NO: 34421 - DNA, 15 bp, Homo sapiens
atacaataaagttta

SEQ ID NO: 34422 - DNA, 15 bp, Homo sapiens
aatacaataaagttt

SEQ ID NO: 34423 - DNA, 15 bp, Homo sapiens
aaatacaataaagtt

SEQ ID NO: 34424 - DNA, 15 bp, Homo sapiens
aaaatacaataaagt

SEQ ID NO: 34425 - DNA, 15 bp, Homo sapiens
taaaatacaataaag

SEQ ID NO: 34426 - DNA, 15 bp, Homo sapiens
ataaaatacaataaa

SEQ ID NO: 34427 - DNA, 15 bp, Homo sapiens
aataaaatacaataa

SEQ ID NO: 34428 - DNA, 15 bp, Homo sapiens
aaataaaatacaata

SEQ ID NO: 34429 - DNA, 15 bp, Homo sapiens
aaaataaaatacaat

SEQ ID NO: 34430 - DNA, 15 bp, Homo sapiens
gaaaataaaatacaa

SEQ ID NO: 34431 - DNA, 15 bp, Homo sapiens
agaaaataaaataca

SEQ ID NO: 34432 - DNA, 15 bp, Homo sapiens
cagaaaataaaatac

SEQ ID NO: 34433 - DNA, 15 bp, Homo sapiens
acagaaaataaaata

SEQ ID NO: 34434 - DNA, 15 bp, Homo sapiens
aacagaaaataaaat

SEQ ID NO: 34435 - DNA, 15 bp, Homo sapiens
aaacagaaaataaaa

SEQ ID NO: 34436 - DNA, 15 bp, Homo sapiens
gaaacagaaaataaa

SEQ ID NO: 34437 - DNA, 15 bp, Homo sapiens
ggaaacagaaaataa

SEQ ID NO: 34438 - DNA, 15 bp, Homo sapiens
tggaaacagaaaata

SEQ ID NO: 34439 - DNA, 15 bp, Homo sapiens
ctggaaacagaaaat

SEQ ID NO: 34440 - DNA, 15 bp, Homo sapiens
actggaaacagaaaa

SEQ ID NO: 34441 - DNA, 15 bp, Homo sapiens
gactggaaacagaaa

SEQ ID NO: 34442 - DNA, 15 bp, Homo sapiens
ggactggaaacagaa

SEQ ID NO: 34443 - DNA, 15 bp, Homo sapiens
tggactggaaacaga

SEQ ID NO: 34444 - DNA, 15 bp, Homo sapiens
ttggactggaaacag

SEQ ID NO: 34445 - DNA, 15 bp, Homo sapiens
tttggactggaaaca

SEQ ID NO: 34446 - DNA, 15 bp, Homo sapiens
atttggactggaaac

SEQ ID NO: 34447 - DNA, 15 bp, Homo sapiens
aatttggactggaaa

SEQ ID NO: 34448 - DNA, 15 bp, Homo sapiens
taatttggactggaa

SEQ ID NO: 34449 - DNA, 15 bp, Homo sapiens
ttaatttggactgga

SEQ ID NO: 34450 - DNA, 15 bp, Homo sapiens
tttaatttggactgg

SEQ ID NO: 34451 - DNA, 15 bp, Homo sapiens
atttaatttggactg

SEQ ID NO: 34452 - DNA, 15 bp, Homo sapiens
gatttaatttggact

SEQ ID NO: 34453 - DNA, 15 bp, Homo sapiens
ggatttaatttggac

SEQ ID NO: 34454 - DNA, 15 bp, Homo sapiens
tggatttaatttgga

SEQ ID NO: 34455 - DNA, 15 bp, Homo sapiens
ttggatttaatttgg

SEQ ID NO: 34456 - DNA, 15 bp, Homo sapiens
cttggatttaatttg

SEQ ID NO: 34457 - DNA, 15 bp, Homo sapiens
tcttggatttaattt

SEQ ID NO: 34458 - DNA, 15 bp, Homo sapiens
ctcttggatttaatt

SEQ ID NO: 34459 - DNA, 15 bp, Homo sapiens
tctcttggatttaat

SEQ ID NO: 34460 - DNA, 15 bp, Homo sapiens
ttctcttggatttaa

SEQ ID NO: 34461 - DNA, 15 bp, Homo sapiens
cttctcttggattta

SEQ ID NO: 34462 - DNA, 15 bp, Homo sapiens
ccttctcttggattt

SEQ ID NO: 34463 - DNA, 15 bp, Homo sapiens
gccttctcttggatt

SEQ ID NO: 34464 - DNA, 15 bp, Homo sapiens
agccttctcttggat

SEQ ID NO: 34465 - DNA, 15 bp, Homo sapiens
gagccttctcttgga

SEQ ID NO: 34466 - DNA, 15 bp, Homo sapiens
ggagccttctcttgg

SEQ ID NO: 34467 - DNA, 15 bp, Homo sapiens
tggagccttctcttg

SEQ ID NO: 34468 - DNA, 15 bp, Homo sapiens
atggagccttctctt

SEQ ID NO: 34469 - DNA, 15 bp, Homo sapiens
tatggagccttctct

SEQ ID NO: 34470 - DNA, 15 bp, Homo sapiens
ttatggagccttctc

SEQ ID NO: 34471 - DNA, 15 bp, Homo sapiens
attatggagccttct

SEQ ID NO: 34472 - DNA, 15 bp, Homo sapiens
gattatggagccttc

SEQ ID NO: 34473 - DNA, 15 bp, Homo sapiens
tgattatggagcctt

SEQ ID NO: 34474 - DNA, 15 bp, Homo sapiens
ttgattatggagcct

SEQ ID NO: 34475 - DNA, 15 bp, Homo sapiens
tttgattatggagcc

SEQ ID NO: 34476 - DNA, 15 bp, Homo sapiens
ttttgattatggagc

SEQ ID NO: 34477 - DNA, 15 bp, Homo sapiens
tttttgattatggag

SEQ ID NO: 34478 - DNA, 15 bp, Homo sapiens
ctttttgattatgga

SEQ ID NO: 34479 - DNA, 15 bp, Homo sapiens
actttttgattatgg

SEQ ID NO: 34480 - DNA, 15 bp, Homo sapiens
tactttttgattatg

SEQ ID NO: 34481 - DNA, 15 bp, Homo sapiens
ttactttttgattat

SEQ ID NO: 34482 - DNA, 15 bp, Homo sapiens
cttactttttgatta

SEQ ID NO: 34483 - DNA, 15 bp, Homo sapiens
ccttactttttgatt

SEQ ID NO: 34484 - DNA, 15 bp, Homo sapiens
tccttactttttgat

SEQ ID NO: 34485 - DNA, 15 bp, Homo sapiens
gtccttactttttga

SEQ ID NO: 34486 - DNA, 15 bp, Homo sapiens
tgtccttactttttg

SEQ ID NO: 34487 - DNA, 15 bp, Homo sapiens
atgtccttacttttt

SEQ ID NO: 34488 - DNA, 15 bp, Homo sapiens
tatgtccttactttt

SEQ ID NO: 34489 - DNA, 15 bp, Homo sapiens
atatgtccttacttt

SEQ ID NO: 34490 - DNA, 15 bp, Homo sapiens
aatatgtccttactt

SEQ ID NO: 34491 - DNA, 15 bp, Homo sapiens
aaatatgtccttact

SEQ ID NO: 34492 - DNA, 15 bp, Homo sapiens
aaaatatgtccttac

SEQ ID NO: 34493 - DNA, 15 bp, Homo sapiens
taaaatatgtcctta

SEQ ID NO: 34494 - DNA, 15 bp, Homo sapiens
ttaaaatatgtcctt

SEQ ID NO: 34495 - DNA, 15 bp, Homo sapiens
tttaaaatatgtcct

SEQ ID NO: 34496 - DNA, 15 bp, Homo sapiens
atttaaaatatgtcc

SEQ ID NO: 34497 - DNA, 15 bp, Homo sapiens
aatttaaaatatgtc

SEQ ID NO: 34498 - DNA, 15 bp, Homo sapiens
aaatttaaaatatgt

SEQ ID NO: 34499 - DNA, 15 bp, Homo sapiens
caaatttaaaatatg

SEQ ID NO: 34500 - DNA, 15 bp, Homo sapiens
gcaaatttaaaatat

SEQ ID NO: 34501 - DNA, 15 bp, Homo sapiens
ggcaaatttaaaata

SEQ ID NO: 34502 - DNA, 15 bp, Homo sapiens
tggcaaatttaaaat

SEQ ID NO: 34503 - DNA, 15 bp, Homo sapiens
ttggcaaatttaaaa

SEQ ID NO: 34504 - DNA, 15 bp, Homo sapiens
attggcaaatttaaa

SEQ ID NO: 34505 - DNA, 15 bp, Homo sapiens
cattggcaaatttaa

SEQ ID NO: 34506 - DNA, 15 bp, Homo sapiens
ccattggcaaattta

SEQ ID NO: 34507 - DNA, 15 bp, Homo sapiens
cccattggcaaattt

SEQ ID NO: 34508 - DNA, 15 bp, Homo sapiens
tcccattggcaaatt

SEQ ID NO: 34509 - DNA, 15 bp, Homo sapiens
ttcccattggcaaat

SEQ ID NO: 34510 - DNA, 15 bp, Homo sapiens
cttcccattggcaaa

SEQ ID NO: 34511 - DNA, 15 bp, Homo sapiens
tcttcccattggcaa

SEQ ID NO: 34512 - DNA, 15 bp, Homo sapiens
atcttcccattggca

SEQ ID NO: 34513 - DNA, 15 bp, Homo sapiens
tatcttcccattggc

SEQ ID NO: 34514 - DNA, 15 bp, Homo sapiens
atatcttcccattgg

SEQ ID NO: 34515 - DNA, 15 bp, Homo sapiens
aatatcttcccattg

SEQ ID NO: 34516 - DNA, 15 bp, Homo sapiens
gaatatcttcccatt

SEQ ID NO: 34517 - DNA, 15 bp, Homo sapiens
agaatatcttcccat

SEQ ID NO: 34518 - DNA, 15 bp, Homo sapiens
tagaatatcttccca

SEQ ID NO: 34519 - DNA, 15 bp, Homo sapiens
ctagaatatcttccc

SEQ ID NO: 34520 - DNA, 15 bp, Homo sapiens
actagaatatcttcc

SEQ ID NO: 34521 - DNA, 15 bp, Homo sapiens
gactagaatatcttc

SEQ ID NO: 34522 - DNA, 15 bp, Homo sapiens
tgactagaatatctt

SEQ ID NO: 34523 - DNA, 15 bp, Homo sapiens
atgactagaatatct

SEQ ID NO: 34524 - DNA, 15 bp, Homo sapiens
aatgactagaatatc

SEQ ID NO: 34525 - DNA, 15 bp, Homo sapiens
taatgactagaatat

SEQ ID NO: 34526 - DNA, 15 bp, Homo sapiens
gtaatgactagaata

SEQ ID NO: 34527 - DNA, 15 bp, Homo sapiens
tgtaatgactagaat

SEQ ID NO: 34528 - DNA, 15 bp, Homo sapiens
ctgtaatgactagaa

SEQ ID NO: 34529 - DNA, 15 bp, Homo sapiens
actgtaatgactaga

SEQ ID NO: 34530 - DNA, 15 bp, Homo sapiens
gactgtaatgactag

SEQ ID NO: 34531 - DNA, 15 bp, Homo sapiens
agactgtaatgacta

SEQ ID NO: 34532 - DNA, 15 bp, Homo sapiens
cagactgtaatgact

SEQ ID NO: 34533 - DNA, 15 bp, Homo sapiens
ccagactgtaatgac

SEQ ID NO: 34534 - DNA, 15 bp, Homo sapiens
accagactgtaatga

SEQ ID NO: 34535 - DNA, 15 bp, Homo sapiens
taccagactgtaatg

SEQ ID NO: 34536 - DNA, 15 bp, Homo sapiens
ttaccagactgtaat

SEQ ID NO: 34537 - DNA, 15 bp, Homo sapiens
attaccagactgtaa

SEQ ID NO: 34538 - DNA, 15 bp, Homo sapiens
tattaccagactgta

SEQ ID NO: 34539 - DNA, 15 bp, Homo sapiens
gtattaccagactgt

SEQ ID NO: 34540 - DNA, 15 bp, Homo sapiens
agtattaccagactg

SEQ ID NO: 34541 - DNA, 15 bp, Homo sapiens
tagtattaccagact

SEQ ID NO: 34542 - DNA, 15 bp, Homo sapiens
atagtattaccagac

SEQ ID NO: 34543 - DNA, 15 bp, Homo sapiens
gatagtattaccaga

SEQ ID NO: 34544 - DNA, 15 bp, Homo sapiens
tgatagtattaccag

SEQ ID NO: 34545 - DNA, 15 bp, Homo sapiens
ttgatagtattacca

SEQ ID NO: 34546 - DNA, 15 bp, Homo sapiens
attgatagtattacc

SEQ ID NO: 34547 - DNA, 15 bp, Homo sapiens
aattgatagtattac

SEQ ID NO: 34548 - DNA, 15 bp, Homo sapiens
gaattgatagtatta

SEQ ID NO: 34549 - DNA, 15 bp, Homo sapiens
agaattgatagtatt

SEQ ID NO: 34550 - DNA, 15 bp, Homo sapiens
cagaattgatagtat

SEQ ID NO: 34551 - DNA, 15 bp, Homo sapiens
acagaattgatagta

SEQ ID NO: 34552 - DNA, 15 bp, Homo sapiens
aacagaattgatagt

SEQ ID NO: 34553 - DNA, 15 bp, Homo sapiens
aaacagaattgatag

SEQ ID NO: 34554 - DNA, 15 bp, Homo sapiens
gaaacagaattgata

SEQ ID NO: 34555 - DNA, 15 bp, Homo sapiens
agaaacagaattgat

SEQ ID NO: 34556 - DNA, 15 bp, Homo sapiens
gagaaacagaattga

SEQ ID NO: 34557 - DNA, 15 bp, Homo sapiens
agagaaacagaattg

SEQ ID NO: 34558 - DNA, 15 bp, Homo sapiens
aagagaaacagaatt

SEQ ID NO: 34559 - DNA, 15 bp, Homo sapiens
gaagagaaacagaat

SEQ ID NO: 34560 - DNA, 15 bp, Homo sapiens
tgaagagaaacagaa

SEQ ID NO: 34561 - DNA, 15 bp, Homo sapiens
ctgaagagaaacaga

SEQ ID NO: 34562 - DNA, 15 bp, Homo sapiens
tctgaagagaaacag

SEQ ID NO: 34563 - DNA, 15 bp, Homo sapiens
ctctgaagagaaaca

SEQ ID NO: 34564 - DNA, 15 bp, Homo sapiens
cctctgaagagaaac

SEQ ID NO: 34565 - DNA, 15 bp, Homo sapiens
acctctgaagagaaa

SEQ ID NO: 34566 - DNA, 15 bp, Homo sapiens
cacctctgaagagaa

SEQ ID NO: 34567 - DNA, 15 bp, Homo sapiens
tcacctctgaagaga

SEQ ID NO: 34568 - DNA, 15 bp, Homo sapiens
ctcacctctgaagag

SEQ ID NO: 34569 - DNA, 15 bp, Homo sapiens
cctcacctctgaaga

SEQ ID NO: 34570 - DNA, 15 bp, Homo sapiens
ccctcacctctgaag

SEQ ID NO: 34571 - DNA, 15 bp, Homo sapiens
cccctcacctctgaa

SEQ ID NO: 34572 - DNA, 15 bp, Homo sapiens
tcccctcacctctga

SEQ ID NO: 34573 - DNA, 15 bp, Homo sapiens
ctcccctcacctctg

SEQ ID NO: 34574 - DNA, 15 bp, Homo sapiens
tctcccctcacctct

SEQ ID NO: 34575 - DNA, 15 bp, Homo sapiens
gtctcccctcacctc

SEQ ID NO: 34576 - DNA, 15 bp, Homo sapiens
agtctcccctcacct

SEQ ID NO: 34577 - DNA, 15 bp, Homo sapiens
tagtctcccctcacc

SEQ ID NO: 34578 - DNA, 15 bp, Homo sapiens
atagtctcccctcac

SEQ ID NO: 34579 - DNA, 15 bp, Homo sapiens
aatagtctcccctca

SEQ ID NO: 34580 - DNA, 15 bp, Homo sapiens
aaatagtctcccctc

SEQ ID NO: 34581 - DNA, 15 bp, Homo sapiens
caaatagtctcccct

SEQ ID NO: 34582 - DNA, 15 bp, Homo sapiens
tcaaatagtctcccc

SEQ ID NO: 34583 - DNA, 15 bp, Homo sapiens
atcaaatagtctccc

SEQ ID NO: 34584 - DNA, 15 bp, Homo sapiens
catcaaatagtctcc

SEQ ID NO: 34585 - DNA, 15 bp, Homo sapiens
tcatcaaatagtctc

SEQ ID NO: 34586 - DNA, 15 bp, Homo sapiens
ttcatcaaatagtct

SEQ ID NO: 34587 - DNA, 15 bp, Homo sapiens
tttcatcaaatagtc

SEQ ID NO: 34588 - DNA, 15 bp, Homo sapiens
atttcatcaaatagt

SEQ ID NO: 34589 - DNA, 15 bp, Homo sapiens
gatttcatcaaatag

SEQ ID NO: 34590 - DNA, 15 bp, Homo sapiens
cgatttcatcaaata

SEQ ID NO: 34591 - DNA, 15 bp, Homo sapiens
acgatttcatcaaat

SEQ ID NO: 34592 - DNA, 15 bp, Homo sapiens
tacgatttcatcaaa

SEQ ID NO: 34593 - DNA, 15 bp, Homo sapiens
ttacgatttcatcaa

SEQ ID NO: 34594 - DNA, 15 bp, Homo sapiens
cttacgatttcatca

SEQ ID NO: 34595 - DNA, 15 bp, Homo sapiens
acttacgatttcatc

SEQ ID NO: 34596 - DNA, 15 bp, Homo sapiens
gacttacgatttcat

SEQ ID NO: 34597 - DNA, 15 bp, Homo sapiens
ggacttacgatttca

SEQ ID NO: 34598 - DNA, 15 bp, Homo sapiens
aggacttacgatttc

SEQ ID NO: 34599 - DNA, 15 bp, Homo sapiens
caggacttacgattt

SEQ ID NO: 34600 - DNA, 15 bp, Homo sapiens
acaggacttacgatt

SEQ ID NO: 34601 - DNA, 15 bp, Homo sapiens
tacaggacttacgat

SEQ ID NO: 34602 - DNA, 15 bp, Homo sapiens
ctacaggacttacga

SEQ ID NO: 34603 - DNA, 15 bp, Homo sapiens
cctacaggacttacg

SEQ ID NO: 34604 - DNA, 15 bp, Homo sapiens
ccctacaggacttac

SEQ ID NO: 34605 - DNA, 15 bp, Homo sapiens
accctacaggactta

SEQ ID NO: 34606 - DNA, 15 bp, Homo sapiens
caccctacaggactt

SEQ ID NO: 34607 - DNA, 15 bp, Homo sapiens
acaccctacaggact

SEQ ID NO: 34608 - DNA, 15 bp, Homo sapiens
aacaccctacaggac

SEQ ID NO: 34609 - DNA, 15 bp, Homo sapiens
caacaccctacagga

SEQ ID NO: 34610 - DNA, 15 bp, Homo sapiens
acaacaccctacagg

SEQ ID NO: 34611 - DNA, 15 bp, Homo sapiens
cacaacaccctacag

SEQ ID NO: 34612 - DNA, 15 bp, Homo sapiens
tcacaacaccctaca

SEQ ID NO: 34613 - DNA, 15 bp, Homo sapiens
ttcacaacaccctac

SEQ ID NO: 34614 - DNA, 15 bp, Homo sapiens
tttcacaacacccta

SEQ ID NO: 34615 - DNA, 15 bp, Homo sapiens
atttcacaacaccct

SEQ ID NO: 34616 - DNA, 15 bp, Homo sapiens
tatttcacaacaccc

SEQ ID NO: 34617 - DNA, 15 bp, Homo sapiens
ctatttcacaacacc

SEQ ID NO: 34618 - DNA, 15 bp, Homo sapiens
cctatttcacaacac

SEQ ID NO: 34619 - DNA, 15 bp, Homo sapiens
ccctatttcacaaca

SEQ ID NO: 34620 - DNA, 15 bp, Homo sapiens
gccctatttcacaac

SEQ ID NO: 34621 - DNA, 15 bp, Homo sapiens
ggccctatttcacaa

SEQ ID NO: 34622 - DNA, 15 bp, Homo sapiens
tggccctatttcaca

SEQ ID NO: 34623 - DNA, 15 bp, Homo sapiens
ctggccctatttcac

SEQ ID NO: 34624 - DNA, 15 bp, Homo sapiens
tctggccctatttca

SEQ ID NO: 34625 - DNA, 15 bp, Homo sapiens
ttctggccctatttc

SEQ ID NO: 34626 - DNA, 15 bp, Homo sapiens
attctggccctattt

SEQ ID NO: 34627 - DNA, 15 bp, Homo sapiens
cattctggccctatt

SEQ ID NO: 34628 - DNA, 15 bp, Homo sapiens
tcattctggccctat

SEQ ID NO: 34629 - DNA, 15 bp, Homo sapiens
ttcattctggcccta

SEQ ID NO: 34630 - DNA, 15 bp, Homo sapiens
tttcattctggccct

SEQ ID NO: 34631 - DNA, 15 bp, Homo sapiens
ctttcattctggccc

SEQ ID NO: 34632 - DNA, 15 bp, Homo sapiens
tctttcattctggcc

SEQ ID NO: 34633 - DNA, 15 bp, Homo sapiens
atctttcattctggc

SEQ ID NO: 34634 - DNA, 15 bp, Homo sapiens
tatctttcattctgg

SEQ ID NO: 34635 - DNA, 15 bp, Homo sapiens
ctatctttcattctg

SEQ ID NO: 34636 - DNA, 15 bp, Homo sapiens
gctatctttcattct

SEQ ID NO: 34637 - DNA, 15 bp, Homo sapiens
tgctatctttcattc

SEQ ID NO: 34638 - DNA, 15 bp, Homo sapiens
ttgctatctttcatt

SEQ ID NO: 34639 - DNA, 15 bp, Homo sapiens
cttgctatctttcat

SEQ ID NO: 34640 - DNA, 15 bp, Homo sapiens
tcttgctatctttca

SEQ ID NO: 34641 - DNA, 15 bp, Homo sapiens
ttcttgctatctttc

SEQ ID NO: 34642 - DNA, 15 bp, Homo sapiens
attcttgctatcttt

SEQ ID NO: 34643 - DNA, 15 bp, Homo sapiens
tattcttgctatctt

SEQ ID NO: 34644 - DNA, 15 bp, Homo sapiens
ctattcttgctatct

SEQ ID NO: 34645 - DNA, 15 bp, Homo sapiens
actattcttgctatc

SEQ ID NO: 34646 - DNA, 15 bp, Homo sapiens
cactattcttgctat

SEQ ID NO: 34647 - DNA, 15 bp, Homo sapiens
acactattcttgcta

SEQ ID NO: 34648 - DNA, 15 bp, Homo sapiens
aacactattcttgct

SEQ ID NO: 34649 - DNA, 15 bp, Homo sapiens
taacactattcttgc

SEQ ID NO: 34650 - DNA, 15 bp, Homo sapiens
ataacactattcttg

SEQ ID NO: 34651 - DNA, 15 bp, Homo sapiens
cataacactattctt

SEQ ID NO: 34652 - DNA, 15 bp, Homo sapiens
tcataacactattct

SEQ ID NO: 34653 - DNA, 15 bp, Homo sapiens
ttcataacactattc

SEQ ID NO: 34654 - DNA, 15 bp, Homo sapiens
tttcataacactatt

SEQ ID NO: 34655 - DNA, 15 bp, Homo sapiens
ttttcataacactat

SEQ ID NO: 34656 - DNA, 15 bp, Homo sapiens
attttcataacacta

SEQ ID NO: 34657 - DNA, 15 bp, Homo sapiens
tattttcataacact

SEQ ID NO: 34658 - DNA, 15 bp, Homo sapiens
ttattttcataacac

SEQ ID NO: 34659 - DNA, 15 bp, Homo sapiens
tttattttcataaca

SEQ ID NO: 34660 - DNA, 15 bp, Homo sapiens
ttttattttcataac

SEQ ID NO: 34661 - DNA, 15 bp, Homo sapiens
attttattttcataa

SEQ ID NO: 34662 - DNA, 15 bp, Homo sapiens
cattttattttcata

SEQ ID NO: 34663 - DNA, 15 bp, Homo sapiens
gcattttattttcat

SEQ ID NO: 34664 - DNA, 15 bp, Homo sapiens
tgcattttattttca

SEQ ID NO: 34665 - DNA, 15 bp, Homo sapiens
ttgcattttattttc

SEQ ID NO: 34666 - DNA, 15 bp, Homo sapiens
tttgcattttatttt

SEQ ID NO: 34667 - DNA, 15 bp, Homo sapiens
ctttgcattttattt

SEQ ID NO: 34668 - DNA, 15 bp, Homo sapiens
actttgcattttatt

SEQ ID NO: 34669 - DNA, 15 bp, Homo sapiens
aactttgcattttat

SEQ ID NO: 34670 - DNA, 15 bp, Homo sapiens
aaactttgcatttta

SEQ ID NO: 34671 - DNA, 15 bp, Homo sapiens
taaactttgcatttt

SEQ ID NO: 34672 - DNA, 15 bp, Homo sapiens
ataaactttgcattt

SEQ ID NO: 34673 - DNA, 15 bp, Homo sapiens
tataaactttgcatt

SEQ ID NO: 34674 - DNA, 15 bp, Homo sapiens
ttataaactttgcat

SEQ ID NO: 34675 - DNA, 15 bp, Homo sapiens
attataaactttgca

SEQ ID NO: 34676 - DNA, 15 bp, Homo sapiens
tattataaactttgc

SEQ ID NO: 34677 - DNA, 15 bp, Homo sapiens
atattataaactttg

SEQ ID NO: 34678 - DNA, 15 bp, Homo sapiens
gatattataaacttt

SEQ ID NO: 34679 - DNA, 15 bp, Homo sapiens
tgatattataaactt

SEQ ID NO: 34680 - DNA, 15 bp, Homo sapiens
atgatattataaact

SEQ ID NO: 34681 - DNA, 15 bp, Homo sapiens
catgatattataaac

SEQ ID NO: 34682 - DNA, 15 bp, Homo sapiens
acatgatattataaa

SEQ ID NO: 34683 - DNA, 15 bp, Homo sapiens
cacatgatattataa

SEQ ID NO: 34684 - DNA, 15 bp, Homo sapiens
ccacatgatattata

SEQ ID NO: 34685 - DNA, 15 bp, Homo sapiens
accacatgatattat

SEQ ID NO: 34686 - DNA, 15 bp, Homo sapiens
taccacatgatatta

SEQ ID NO: 34687 - DNA, 15 bp, Homo sapiens
ttaccacatgatatt

SEQ ID NO: 34688 - DNA, 15 bp, Homo sapiens
tttaccacatgatat

SEQ ID NO: 34689 - DNA, 15 bp, Homo sapiens
ttttaccacatgata

SEQ ID NO: 34690 - DNA, 15 bp, Homo sapiens
attttaccacatgat

SEQ ID NO: 34691 - DNA, 15 bp, Homo sapiens
cattttaccacatga

SEQ ID NO: 34692 - DNA, 15 bp, Homo sapiens
acattttaccacatg

SEQ ID NO: 34693 - DNA, 15 bp, Homo sapiens
tacattttaccacat

SEQ ID NO: 34694 - DNA, 15 bp, Homo sapiens
ttacattttaccaca

SEQ ID NO: 34695 - DNA, 15 bp, Homo sapiens
attacattttaccac

SEQ ID NO: 34696 - DNA, 15 bp, Homo sapiens
tattacattttacca

SEQ ID NO: 34697 - DNA, 15 bp, Homo sapiens
ctattacattttacc

SEQ ID NO: 34698 - DNA, 15 bp, Homo sapiens
actattacattttac

SEQ ID NO: 34699 - DNA, 15 bp, Homo sapiens
tactattacatttta

SEQ ID NO: 34700 - DNA, 15 bp, Homo sapiens
atactattacatttt

SEQ ID NO: 34701 - DNA, 15 bp, Homo sapiens
aatactattacattt

SEQ ID NO: 34702 - DNA, 15 bp, Homo sapiens
aaatactattacatt

SEQ ID NO: 34703 - DNA, 15 bp, Homo sapiens
taaatactattacat

SEQ ID NO: 34704 - DNA, 15 bp, Homo sapiens
gtaaatactattaca

SEQ ID NO: 34705 - DNA, 15 bp, Homo sapiens
agtaaatactattac

SEQ ID NO: 34706 - DNA, 15 bp, Homo sapiens
aagtaaatactatta

SEQ ID NO: 34707 - DNA, 15 bp, Homo sapiens
gaagtaaatactatt

SEQ ID NO: 34708 - DNA, 15 bp, Homo sapiens
tgaagtaaatactat

SEQ ID NO: 34709 - DNA, 15 bp, Homo sapiens
atgaagtaaatacta

SEQ ID NO: 34710 - DNA, 15 bp, Homo sapiens
gatgaagtaaatact

SEQ ID NO: 34711 - DNA, 15 bp, Homo sapiens
tgatgaagtaaatac

SEQ ID NO: 34712 - DNA, 15 bp, Homo sapiens
ctgatgaagtaaata

SEQ ID NO: 34713 - DNA, 15 bp, Homo sapiens
actgatgaagtaaat

SEQ ID NO: 34714 - DNA, 15 bp, Homo sapiens
tactgatgaagtaaa

SEQ ID NO: 34715 - DNA, 15 bp, Homo sapiens
ctactgatgaagtaa

SEQ ID NO: 34716 - DNA, 15 bp, Homo sapiens
tctactgatgaagta

SEQ ID NO: 34717 - DNA, 15 bp, Homo sapiens
ttctactgatgaagt

SEQ ID NO: 34718 - DNA, 15 bp, Homo sapiens
gttctactgatgaag

SEQ ID NO: 34719 - DNA, 15 bp, Homo sapiens
agttctactgatgaa

SEQ ID NO: 34720 - DNA, 15 bp, Homo sapiens
cagttctactgatga

SEQ ID NO: 34721 - DNA, 15 bp, Homo sapiens
gcagttctactgatg

SEQ ID NO: 34722 - DNA, 15 bp, Homo sapiens
agcagttctactgat

SEQ ID NO: 34723 - DNA, 15 bp, Homo sapiens
gagcagttctactga

SEQ ID NO: 34724 - DNA, 15 bp, Homo sapiens
agagcagttctactg

SEQ ID NO: 34725 - DNA, 15 bp, Homo sapiens
tagagcagttctact

SEQ ID NO: 34726 - DNA, 15 bp, Homo sapiens
ctagagcagttctac

SEQ ID NO: 34727 - DNA, 15 bp, Homo sapiens
actagagcagttcta

SEQ ID NO: 34728 - DNA, 15 bp, Homo sapiens
tactagagcagttct

SEQ ID NO: 34729 - DNA, 15 bp, Homo sapiens
ctactagagcagttc

SEQ ID NO: 34730 - DNA, 15 bp, Homo sapiens
gctactagagcagtt

SEQ ID NO: 34731 - DNA, 15 bp, Homo sapiens
agctactagagcagt

SEQ ID NO: 34732 - DNA, 15 bp, Homo sapiens
cagctactagagcag

SEQ ID NO: 34733 - DNA, 15 bp, Homo sapiens
acagctactagagca

SEQ ID NO: 34734 - DNA, 15 bp, Homo sapiens
tacagctactagagc

SEQ ID NO: 34735 - DNA, 15 bp, Homo sapiens
atacagctactagag

SEQ ID NO: 34736 - DNA, 15 bp, Homo sapiens
tatacagctactaga

SEQ ID NO: 34737 - DNA, 15 bp, Homo sapiens
atatacagctactag

SEQ ID NO: 34738 - DNA, 15 bp, Homo sapiens
aatatacagctacta

SEQ ID NO: 34739 - DNA, 15 bp, Homo sapiens
gaatatacagctact

SEQ ID NO: 34740 - DNA, 15 bp, Homo sapiens
agaatatacagctac

SEQ ID NO: 34741 - DNA, 15 bp, Homo sapiens
gagaatatacagcta

SEQ ID NO: 34742 - DNA, 15 bp, Homo sapiens
ggagaatatacagct

SEQ ID NO: 34743 - DNA, 15 bp, Homo sapiens
tggagaatatacagc

SEQ ID NO: 34744 - DNA, 15 bp, Homo sapiens
atggagaatatacag

SEQ ID NO: 34745 - DNA, 15 bp, Homo sapiens
gatggagaatataca

SEQ ID NO: 34746 - DNA, 15 bp, Homo sapiens
ggatggagaatatac

SEQ ID NO: 34747 - DNA, 15 bp, Homo sapiens
aggatggagaatata

SEQ ID NO: 34748 - DNA, 15 bp, Homo sapiens
aaggatggagaatat

SEQ ID NO: 34749 - DNA, 15 bp, Homo sapiens
caaggatggagaata

SEQ ID NO: 34750 - DNA, 15 bp, Homo sapiens
gcaaggatggagaat

SEQ ID NO: 34751 - DNA, 15 bp, Homo sapiens
tgcaaggatggagaa

SEQ ID NO: 34752 - DNA, 15 bp, Homo sapiens
atgcaaggatggaga

SEQ ID NO: 34753 - DNA, 15 bp, Homo sapiens
tatgcaaggatggag

SEQ ID NO: 34754 - DNA, 15 bp, Homo sapiens
ctatgcaaggatgga

SEQ ID NO: 34755 - DNA, 15 bp, Homo sapiens
cctatgcaaggatgg

SEQ ID NO: 34756 - DNA, 15 bp, Homo sapiens
acctatgcaaggatg

SEQ ID NO: 34757 - DNA, 15 bp, Homo sapiens
aacctatgcaaggat

SEQ ID NO: 34758 - DNA, 15 bp, Homo sapiens
caacctatgcaagga

SEQ ID NO: 34759 - DNA, 15 bp, Homo sapiens
ccaacctatgcaagg

SEQ ID NO: 34760 - DNA, 15 bp, Homo sapiens
tccaacctatgcaag

SEQ ID NO: 34761 - DNA, 15 bp, Homo sapiens
ttccaacctatgcaa

SEQ ID NO: 34762 - DNA, 15 bp, Homo sapiens
attccaacctatgca

SEQ ID NO: 34763 - DNA, 15 bp, Homo sapiens
tattccaacctatgc

SEQ ID NO: 34764 - DNA, 15 bp, Homo sapiens
atattccaacctatg

SEQ ID NO: 34765 - DNA, 15 bp, Homo sapiens
gatattccaacctat

SEQ ID NO: 34766 - DNA, 15 bp, Homo sapiens
ggatattccaaccta

SEQ ID NO: 34767 - DNA, 15 bp, Homo sapiens
gggatattccaacct

SEQ ID NO: 34768 - DNA, 15 bp, Homo sapiens
ggggatattccaacc

SEQ ID NO: 34769 - DNA, 15 bp, Homo sapiens
gggggatattccaac

SEQ ID NO: 34770 - DNA, 15 bp, Homo sapiens
tgggggatattccaa

SEQ ID NO: 34771 - DNA, 15 bp, Homo sapiens
ttgggggatattcca

SEQ ID NO: 34772 - DNA, 15 bp, Homo sapiens
cttgggggatattcc

SEQ ID NO: 34773 - DNA, 15 bp, Homo sapiens
acttgggggatattc

SEQ ID NO: 34774 - DNA, 15 bp, Homo sapiens
cacttgggggatatt

SEQ ID NO: 34775 - DNA, 15 bp, Homo sapiens
tcacttgggggatat

SEQ ID NO: 34776 - DNA, 15 bp, Homo sapiens
ttcacttgggggata

SEQ ID NO: 34777 - DNA, 15 bp, Homo sapiens
tttcacttgggggat

SEQ ID NO: 34778 - DNA, 15 bp, Homo sapiens
ttttcacttggggga

SEQ ID NO: 34779 - DNA, 15 bp, Homo sapiens
cttttcacttggggg

SEQ ID NO: 34780 - DNA, 15 bp, Homo sapiens
tcttttcacttgggg

SEQ ID NO: 34781 - DNA, 15 bp, Homo sapiens
ctcttttcacttggg

SEQ ID NO: 34782 - DNA, 15 bp, Homo sapiens
tctcttttcacttgg

SEQ ID NO: 34783 - DNA, 15 bp, Homo sapiens
atctcttttcacttg

SEQ ID NO: 34784 - DNA, 15 bp, Homo sapiens
aatctcttttcactt

SEQ ID NO: 34785 - DNA, 15 bp, Homo sapiens
caatctcttttcact

SEQ ID NO: 34786 - DNA, 15 bp, Homo sapiens
tcaatctcttttcac

SEQ ID NO: 34787 - DNA, 15 bp, Homo sapiens
atcaatctcttttca

SEQ ID NO: 34788 - DNA, 15 bp, Homo sapiens
catcaatctcttttc

SEQ ID NO: 34789 - DNA, 15 bp, Homo sapiens
ccatcaatctctttt

SEQ ID NO: 34790 - DNA, 15 bp, Homo sapiens
cccatcaatctcttt

SEQ ID NO: 34791 - DNA, 15 bp, Homo sapiens
gcccatcaatctctt

SEQ ID NO: 34792 - DNA, 15 bp, Homo sapiens
agcccatcaatctct

SEQ ID NO: 34793 - DNA, 15 bp, Homo sapiens
tagcccatcaatctc

SEQ ID NO: 34794 - DNA, 15 bp, Homo sapiens
ttagcccatcaatct

SEQ ID NO: 34795 - DNA, 15 bp, Homo sapiens
attagcccatcaatc

SEQ ID NO: 34796 - DNA, 15 bp, Homo sapiens
tattagcccatcaat

SEQ ID NO: 34797 - DNA, 15 bp, Homo sapiens
ctattagcccatcaa

SEQ ID NO: 34798 - DNA, 15 bp, Homo sapiens
actattagcccatca

SEQ ID NO: 34799 - DNA, 15 bp, Homo sapiens
aactattagcccatc

SEQ ID NO: 34800 - DNA, 15 bp, Homo sapiens
taactattagcccat

SEQ ID NO: 34801 - DNA, 15 bp, Homo sapiens
ttaactattagccca

SEQ ID NO: 34802 - DNA, 15 bp, Homo sapiens
attaactattagccc

SEQ ID NO: 34803 - DNA, 15 bp, Homo sapiens
tattaactattagcc

SEQ ID NO: 34804 - DNA, 15 bp, Homo sapiens
ctattaactattagc

SEQ ID NO: 34805 - DNA, 15 bp, Homo sapiens
tctattaactattag

SEQ ID NO: 34806 - DNA, 15 bp, Homo sapiens
ttctattaactatta

SEQ ID NO: 34807 - DNA, 15 bp, Homo sapiens
tttctattaactatt

SEQ ID NO: 34808 - DNA, 15 bp, Homo sapiens
ttttctattaactat

SEQ ID NO: 34809 - DNA, 15 bp, Homo sapiens
attttctattaacta

SEQ ID NO: 34810 - DNA, 15 bp, Homo sapiens
cattttctattaact

SEQ ID NO: 34811 - DNA, 15 bp, Homo sapiens
ccattttctattaac

SEQ ID NO: 34812 - DNA, 15 bp, Homo sapiens
tccattttctattaa

SEQ ID NO: 34813 - DNA, 15 bp, Homo sapiens
ctccattttctatta

SEQ ID NO: 34814 - DNA, 15 bp, Homo sapiens
tctccattttctatt

SEQ ID NO: 34815 - DNA, 15 bp, Homo sapiens
atctccattttctat

SEQ ID NO: 34816 - DNA, 15 bp, Homo sapiens
gatctccattttcta

SEQ ID NO: 34817 - DNA, 15 bp, Homo sapiens
agatctccattttct

SEQ ID NO: 34818 - DNA, 15 bp, Homo sapiens
cagatctccattttc

SEQ ID NO: 34819 - DNA, 15 bp, Homo sapiens
acagatctccatttt

SEQ ID NO: 34820 - DNA, 15 bp, Homo sapiens
tacagatctccattt

SEQ ID NO: 34821 - DNA, 15 bp, Homo sapiens
gtacagatctccatt

SEQ ID NO: 34822 - DNA, 15 bp, Homo sapiens
tgtacagatctccat

SEQ ID NO: 34823 - DNA, 15 bp, Homo sapiens
atgtacagatctcca

SEQ ID NO: 34824 - DNA, 15 bp, Homo sapiens
tatgtacagatctcc

SEQ ID NO: 34825 - DNA, 15 bp, Homo sapiens
gtatgtacagatctc

SEQ ID NO: 34826 - DNA, 15 bp, Homo sapiens
tgtatgtacagatct

SEQ ID NO: 34827 - DNA, 15 bp, Homo sapiens
ctgtatgtacagatc

SEQ ID NO: 34828 - DNA, 15 bp, Homo sapiens
actgtatgtacagat

SEQ ID NO: 34829 - DNA, 15 bp, Homo sapiens
cactgtatgtacaga

SEQ ID NO: 34830 - DNA, 15 bp, Homo sapiens
acactgtatgtacag

SEQ ID NO: 34831 - DNA, 15 bp, Homo sapiens
aacactgtatgtaca

SEQ ID NO: 34832 - DNA, 15 bp, Homo sapiens
taacactgtatgtac

SEQ ID NO: 34833 - DNA, 15 bp, Homo sapiens
ttaacactgtatgta

SEQ ID NO: 34834 - DNA, 15 bp, Homo sapiens
cttaacactgtatgt

SEQ ID NO: 34835 - DNA, 15 bp, Homo sapiens
tcttaacactgtatg

SEQ ID NO: 34836 - DNA, 15 bp, Homo sapiens
ttcttaacactgtat

SEQ ID NO: 34837 - DNA, 15 bp, Homo sapiens
attcttaacactgta

SEQ ID NO: 34838 - DNA, 15 bp, Homo sapiens
cattcttaacactgt

SEQ ID NO: 34839 - DNA, 15 bp, Homo sapiens
acattcttaacactg

SEQ ID NO: 34840 - DNA, 15 bp, Homo sapiens
tacattcttaacact

SEQ ID NO: 34841 - DNA, 15 bp, Homo sapiens
ctacattcttaacac

SEQ ID NO: 34842 - DNA, 15 bp, Homo sapiens
tctacattcttaaca

SEQ ID NO: 34843 - DNA, 15 bp, Homo sapiens
atctacattcttaac

SEQ ID NO: 34844 - DNA, 15 bp, Homo sapiens
tatctacattcttaa

SEQ ID NO: 34845 - DNA, 15 bp, Homo sapiens
atatctacattctta

SEQ ID NO: 34846 - DNA, 15 bp, Homo sapiens
aatatctacattctt

SEQ ID NO: 34847 - DNA, 15 bp, Homo sapiens
taatatctacattct

SEQ ID NO: 34848 - DNA, 15 bp, Homo sapiens
ttaatatctacattc

SEQ ID NO: 34849 - DNA, 15 bp, Homo sapiens
tttaatatctacatt

SEQ ID NO: 34850 - DNA, 15 bp, Homo sapiens
ttttaatatctacat

SEQ ID NO: 34851 - DNA, 15 bp, Homo sapiens
attttaatatctaca

SEQ ID NO: 34852 - DNA, 15 bp, Homo sapiens
aattttaatatctac

SEQ ID NO: 34853 - DNA, 15 bp, Homo sapiens
caattttaatatcta

SEQ ID NO: 34854 - DNA, 15 bp, Homo sapiens
acaattttaatatct

SEQ ID NO: 34855 - DNA, 15 bp, Homo sapiens
aacaattttaatatc

SEQ ID NO: 34856 - DNA, 15 bp, Homo sapiens
taacaattttaatat

SEQ ID NO: 34857 - DNA, 15 bp, Homo sapiens
ataacaattttaata

SEQ ID NO: 34858 - DNA, 15 bp, Homo sapiens
tataacaattttaat

SEQ ID NO: 34859 - DNA, 15 bp, Homo sapiens
atataacaattttaa

SEQ ID NO: 34860 - DNA, 15 bp, Homo sapiens
aatataacaatttta

SEQ ID NO: 34861 - DNA, 15 bp, Homo sapiens
aaatataacaatttt

SEQ ID NO: 34862 - DNA, 15 bp, Homo sapiens
taaatataacaattt

SEQ ID NO: 34863 - DNA, 15 bp, Homo sapiens
ctaaatataacaatt

SEQ ID NO: 34864 - DNA, 15 bp, Homo sapiens
gctaaatataacaat

SEQ ID NO: 34865 - DNA, 15 bp, Homo sapiens
agctaaatataacaa

SEQ ID NO: 34866 - DNA, 15 bp, Homo sapiens
cagctaaatataaca

SEQ ID NO: 34867 - DNA, 15 bp, Homo sapiens
acagctaaatataac

SEQ ID NO: 34868 - DNA, 15 bp, Homo sapiens
aacagctaaatataa

SEQ ID NO: 34869 - DNA, 15 bp, Homo sapiens
taacagctaaatata

SEQ ID NO: 34870 - DNA, 15 bp, Homo sapiens
gtaacagctaaatat

SEQ ID NO: 34871 - DNA, 15 bp, Homo sapiens
tgtaacagctaaata

SEQ ID NO: 34872 - DNA, 15 bp, Homo sapiens
atgtaacagctaaat

SEQ ID NO: 34873 - DNA, 15 bp, Homo sapiens
tatgtaacagctaaa

SEQ ID NO: 34874 - DNA, 15 bp, Homo sapiens
ttatgtaacagctaa

SEQ ID NO: 34875 - DNA, 15 bp, Homo sapiens
attatgtaacagcta

SEQ ID NO: 34876 - DNA, 15 bp, Homo sapiens
tattatgtaacagct

SEQ ID NO: 34877 - DNA, 15 bp, Homo sapiens
atattatgtaacagc

SEQ ID NO: 34878 - DNA, 15 bp, Homo sapiens
aatattatgtaacag

SEQ ID NO: 34879 - DNA, 15 bp, Homo sapiens
taatattatgtaaca

SEQ ID NO: 34880 - DNA, 15 bp, Homo sapiens
ttaatattatgtaac

SEQ ID NO: 34881 - DNA, 15 bp, Homo sapiens
cttaatattatgtaa

SEQ ID NO: 34882 - DNA, 15 bp, Homo sapiens
tcttaatattatgta

SEQ ID NO: 34883 - DNA, 15 bp, Homo sapiens
gtcttaatattatgt

SEQ ID NO: 34884 - DNA, 15 bp, Homo sapiens
agtcttaatattatg

SEQ ID NO: 34885 - DNA, 15 bp, Homo sapiens
gagtcttaatattat

SEQ ID NO: 34886 - DNA, 15 bp, Homo sapiens
tgagtcttaatatta

SEQ ID NO: 34887 - DNA, 15 bp, Homo sapiens
ctgagtcttaatatt

SEQ ID NO: 34888 - DNA, 15 bp, Homo sapiens
tctgagtcttaatat

SEQ ID NO: 34889 - DNA, 15 bp, Homo sapiens
ctctgagtcttaata

SEQ ID NO: 34890 - DNA, 15 bp, Homo sapiens
actctgagtcttaat

SEQ ID NO: 34891 - DNA, 15 bp, Homo sapiens
aactctgagtcttaa

SEQ ID NO: 34892 - DNA, 15 bp, Homo sapiens
taactctgagtctta

SEQ ID NO: 34893 - DNA, 15 bp, Homo sapiens
ttaactctgagtctt

SEQ ID NO: 34894 - DNA, 15 bp, Homo sapiens
cttaactctgagtct

SEQ ID NO: 34895 - DNA, 15 bp, Homo sapiens
acttaactctgagtc

SEQ ID NO: 34896 - DNA, 15 bp, Homo sapiens
tacttaactctgagt

SEQ ID NO: 34897 - DNA, 15 bp, Homo sapiens
ttacttaactctgag

SEQ ID NO: 34898 - DNA, 15 bp, Homo sapiens
attacttaactctga

SEQ ID NO: 34899 - DNA, 15 bp, Homo sapiens
aattacttaactctg

SEQ ID NO: 34900 - DNA, 15 bp, Homo sapiens
aaattacttaactct

SEQ ID NO: 34901 - DNA, 15 bp, Homo sapiens
gaaattacttaactc

SEQ ID NO: 34902 - DNA, 15 bp, Homo sapiens
tgaaattacttaact

SEQ ID NO: 34903 - DNA, 15 bp, Homo sapiens
gtgaaattacttaac

SEQ ID NO: 34904 - DNA, 15 bp, Homo sapiens
agtgaaattacttaa

SEQ ID NO: 34905 - DNA, 15 bp, Homo sapiens
cagtgaaattactta

SEQ ID NO: 34906 - DNA, 15 bp, Homo sapiens
tcagtgaaattactt

SEQ ID NO: 34907 - DNA, 15 bp, Homo sapiens
ttcagtgaaattact

SEQ ID NO: 34908 - DNA, 15 bp, Homo sapiens
tttcagtgaaattac

SEQ ID NO: 34909 - DNA, 15 bp, Homo sapiens
atttcagtgaaatta

SEQ ID NO: 34910 - DNA, 15 bp, Homo sapiens
aatttcagtgaaatt

SEQ ID NO: 34911 - DNA, 15 bp, Homo sapiens
caatttcagtgaaat

SEQ ID NO: 34912 - DNA, 15 bp, Homo sapiens
tcaatttcagtgaaa

SEQ ID NO: 34913 - DNA, 15 bp, Homo sapiens
atcaatttcagtgaa

SEQ ID NO: 34914 - DNA, 15 bp, Homo sapiens
aatcaatttcagtga

SEQ ID NO: 34915 - DNA, 15 bp, Homo sapiens
caatcaatttcagtg

SEQ ID NO: 34916 - DNA, 15 bp, Homo sapiens
gcaatcaatttcagt

SEQ ID NO: 34917 - DNA, 15 bp, Homo sapiens
agcaatcaatttcag

SEQ ID NO: 34918 - DNA, 15 bp, Homo sapiens
aagcaatcaatttca

SEQ ID NO: 34919 - DNA, 15 bp, Homo sapiens
aaagcaatcaatttc

SEQ ID NO: 34920 - DNA, 15 bp, Homo sapiens
aaaagcaatcaattt

SEQ ID NO: 34921 - DNA, 15 bp, Homo sapiens
aaaaagcaatcaatt

SEQ ID NO: 34922 - DNA, 15 bp, Homo sapiens
caaaaagcaatcaat

SEQ ID NO: 34923 - DNA, 15 bp, Homo sapiens
acaaaaagcaatcaa

SEQ ID NO: 34924 - DNA, 15 bp, Homo sapiens
cacaaaaagcaatca

SEQ ID NO: 34925 - DNA, 15 bp, Homo sapiens
acacaaaaagcaatc

SEQ ID NO: 34926 - DNA, 15 bp, Homo sapiens
gacacaaaaagcaat

SEQ ID NO: 34927 - DNA, 15 bp, Homo sapiens
agacacaaaaagcaa

SEQ ID NO: 34928 - DNA, 15 bp, Homo sapiens
aagacacaaaaagca

SEQ ID NO: 34929 - DNA, 15 bp, Homo sapiens
caagacacaaaaagc

SEQ ID NO: 34930 - DNA, 15 bp, Homo sapiens
ccaagacacaaaaag

SEQ ID NO: 34931 - DNA, 15 bp, Homo sapiens
tccaagacacaaaaa

SEQ ID NO: 34932 - DNA, 15 bp, Homo sapiens
ctccaagacacaaaa

SEQ ID NO: 34933 - DNA, 15 bp, Homo sapiens
actccaagacacaaa

SEQ ID NO: 34934 - DNA, 15 bp, Homo sapiens
gactccaagacacaa

SEQ ID NO: 34935 - DNA, 15 bp, Homo sapiens
tgactccaagacaca

SEQ ID NO: 34936 - DNA, 15 bp, Homo sapiens
ttgactccaagacac

SEQ ID NO: 34937 - DNA, 15 bp, Homo sapiens
tttgactccaagaca

SEQ ID NO: 34938 - DNA, 15 bp, Homo sapiens
ttttgactccaagac

SEQ ID NO: 34939 - DNA, 15 bp, Homo sapiens
attttgactccaaga

SEQ ID NO: 34940 - DNA, 15 bp, Homo sapiens
tattttgactccaag

SEQ ID NO: 34941 - DNA, 15 bp, Homo sapiens
ttattttgactccaa

SEQ ID NO: 34942 - DNA, 15 bp, Homo sapiens
tttattttgactcca

SEQ ID NO: 34943 - DNA, 15 bp, Homo sapiens
atttattttgactcc

SEQ ID NO: 34944 - DNA, 15 bp, Homo sapiens
tatttattttgactc

SEQ ID NO: 34945 - DNA, 15 bp, Homo sapiens
ttatttattttgact

SEQ ID NO: 34946 - DNA, 15 bp, Homo sapiens
gttatttattttgac

SEQ ID NO: 34947 - DNA, 15 bp, Homo sapiens
agttatttattttga

SEQ ID NO: 34948 - DNA, 15 bp, Homo sapiens
cagttatttattttg

SEQ ID NO: 34949 - DNA, 15 bp, Homo sapiens
tcagttatttatttt

SEQ ID NO: 34950 - DNA, 15 bp, Homo sapiens
ttcagttatttattt

SEQ ID NO: 34951 - DNA, 15 bp, Homo sapiens
tttcagttatttatt

SEQ ID NO: 34952 - DNA, 15 bp, Homo sapiens
atttcagttatttat

SEQ ID NO: 34953 - DNA, 15 bp, Homo sapiens
gatttcagttattta

SEQ ID NO: 34954 - DNA, 15 bp, Homo sapiens
agatttcagttattt

SEQ ID NO: 34955 - DNA, 15 bp, Homo sapiens
tagatttcagttatt

SEQ ID NO: 34956 - DNA, 15 bp, Homo sapiens
gtagatttcagttat

SEQ ID NO: 34957 - DNA, 15 bp, Homo sapiens
agtagatttcagtta

SEQ ID NO: 34958 - DNA, 15 bp, Homo sapiens
tagtagatttcagtt

SEQ ID NO: 34959 - DNA, 15 bp, Homo sapiens
atagtagatttcagt

SEQ ID NO: 34960 - DNA, 15 bp, Homo sapiens
tatagtagatttcag

SEQ ID NO: 34961 - DNA, 15 bp, Homo sapiens
gtatagtagatttca

SEQ ID NO: 34962 - DNA, 15 bp, Homo sapiens
agtatagtagatttc

SEQ ID NO: 34963 - DNA, 15 bp, Homo sapiens
aagtatagtagattt

SEQ ID NO: 34964 - DNA, 15 bp, Homo sapiens
caagtatagtagatt

SEQ ID NO: 34965 - DNA, 15 bp, Homo sapiens
ccaagtatagtagat

SEQ ID NO: 34966 - DNA, 15 bp, Homo sapiens
gccaagtatagtaga

SEQ ID NO: 34967 - DNA, 15 bp, Homo sapiens
agccaagtatagtag

SEQ ID NO: 34968 - DNA, 15 bp, Homo sapiens
gagccaagtatagta

SEQ ID NO: 34969 - DNA, 15 bp, Homo sapiens
tgagccaagtatagt

SEQ ID NO: 34970 - DNA, 15 bp, Homo sapiens
atgagccaagtatag

SEQ ID NO: 34971 - DNA, 15 bp, Homo sapiens
catgagccaagtata

SEQ ID NO: 34972 - DNA, 15 bp, Homo sapiens
gcatgagccaagtat

SEQ ID NO: 34973 - DNA, 15 bp, Homo sapiens
agcatgagccaagta

SEQ ID NO: 34974 - DNA, 15 bp, Homo sapiens
aagcatgagccaagt

SEQ ID NO: 34975 - DNA, 15 bp, Homo sapiens
taagcatgagccaag

SEQ ID NO: 34976 - DNA, 15 bp, Homo sapiens
ttaagcatgagccaa

SEQ ID NO: 34977 - DNA, 15 bp, Homo sapiens
attaagcatgagcca

SEQ ID NO: 34978 - DNA, 15 bp, Homo sapiens
aattaagcatgagcc

SEQ ID NO: 34979 - DNA, 15 bp, Homo sapiens
taattaagcatgagc

SEQ ID NO: 34980 - DNA, 15 bp, Homo sapiens
ttaattaagcatgag

SEQ ID NO: 34981 - DNA, 15 bp, Homo sapiens
attaattaagcatga

SEQ ID NO: 34982 - DNA, 15 bp, Homo sapiens
tattaattaagcatg

SEQ ID NO: 34983 - DNA, 15 bp, Homo sapiens
atattaattaagcat

SEQ ID NO: 34984 - DNA, 15 bp, Homo sapiens
tatattaattaagca

SEQ ID NO: 34985 - DNA, 15 bp, Homo sapiens
gtatattaattaagc

SEQ ID NO: 34986 - DNA, 15 bp, Homo sapiens
agtatattaattaag

SEQ ID NO: 34987 - DNA, 15 bp, Homo sapiens
aagtatattaattaa

SEQ ID NO: 34988 - DNA, 15 bp, Homo sapiens
taagtatattaatta

SEQ ID NO: 34989 - DNA, 15 bp, Homo sapiens
ctaagtatattaatt

SEQ ID NO: 34990 - DNA, 15 bp, Homo sapiens
tctaagtatattaat

SEQ ID NO: 34991 - DNA, 15 bp, Homo sapiens
gtctaagtatattaa

SEQ ID NO: 34992 - DNA, 15 bp, Homo sapiens
ggtctaagtatatta

SEQ ID NO: 34993 - DNA, 15 bp, Homo sapiens
tggtctaagtatatt

SEQ ID NO: 34994 - DNA, 15 bp, Homo sapiens
atggtctaagtatat

SEQ ID NO: 34995 - DNA, 15 bp, Homo sapiens
tatggtctaagtata

SEQ ID NO: 34996 - DNA, 15 bp, Homo sapiens
atatggtctaagtat

SEQ ID NO: 34997 - DNA, 15 bp, Homo sapiens
aatatggtctaagta

SEQ ID NO: 34998 - DNA, 15 bp, Homo sapiens
aaatatggtctaagt

SEQ ID NO: 34999 - DNA, 15 bp, Homo sapiens
gaaatatggtctaag

SEQ ID NO: 35000 - DNA, 15 bp, Homo sapiens
cgaaatatggtctaa

SEQ ID NO: 35001 - DNA, 15 bp, Homo sapiens
ccgaaatatggtcta

SEQ ID NO: 35002 - DNA, 15 bp, Homo sapiens
tccgaaatatggtct

SEQ ID NO: 35003 - DNA, 15 bp, Homo sapiens
atccgaaatatggtc

SEQ ID NO: 35004 - DNA, 15 bp, Homo sapiens
catccgaaatatggt

SEQ ID NO: 35005 - DNA, 15 bp, Homo sapiens
tcatccgaaatatgg

SEQ ID NO: 35006 - DNA, 15 bp, Homo sapiens
ttcatccgaaatatg

SEQ ID NO: 35007 - DNA, 15 bp, Homo sapiens
attcatccgaaatat

SEQ ID NO: 35008 - DNA, 15 bp, Homo sapiens
aattcatccgaaata

SEQ ID NO: 35009 - DNA, 15 bp, Homo sapiens
taattcatccgaaat

SEQ ID NO: 35010 - DNA, 15 bp, Homo sapiens
ataattcatccgaaa

SEQ ID NO: 35011 - DNA, 15 bp, Homo sapiens
aataattcatccgaa

SEQ ID NO: 35012 - DNA, 15 bp, Homo sapiens
gaataattcatccga

SEQ ID NO: 35013 - DNA, 15 bp, Homo sapiens
tgaataattcatccg

SEQ ID NO: 35014 - DNA, 15 bp, Homo sapiens
gtgaataattcatcc

SEQ ID NO: 35015 - DNA, 15 bp, Homo sapiens
tgtgaataattcatc

SEQ ID NO: 35016 - DNA, 15 bp, Homo sapiens
ctgtgaataattcat

SEQ ID NO: 35017 - DNA, 15 bp, Homo sapiens
tctgtgaataattca

SEQ ID NO: 35018 - DNA, 15 bp, Homo sapiens
ttctgtgaataattc

SEQ ID NO: 35019 - DNA, 15 bp, Homo sapiens
attctgtgaataatt

SEQ ID NO: 35020 - DNA, 15 bp, Homo sapiens
gattctgtgaataat

SEQ ID NO: 35021 - DNA, 15 bp, Homo sapiens
agattctgtgaataa

SEQ ID NO: 35022 - DNA, 15 bp, Homo sapiens
tagattctgtgaata

SEQ ID NO: 35023 - DNA, 15 bp, Homo sapiens
ttagattctgtgaat

SEQ ID NO: 35024 - DNA, 15 bp, Homo sapiens
tttagattctgtgaa

SEQ ID NO: 35025 - DNA, 15 bp, Homo sapiens
ctttagattctgtga

SEQ ID NO: 35026 - DNA, 15 bp, Homo sapiens
cctttagattctgtg

SEQ ID NO: 35027 - DNA, 15 bp, Homo sapiens
tcctttagattctgt

SEQ ID NO: 35028 - DNA, 15 bp, Homo sapiens
ctcctttagattctg

SEQ ID NO: 35029 - DNA, 15 bp, Homo sapiens
actcctttagattct

SEQ ID NO: 35030 - DNA, 15 bp, Homo sapiens
tactcctttagattc

SEQ ID NO: 35031 - DNA, 15 bp, Homo sapiens
atactcctttagatt

SEQ ID NO: 35032 - DNA, 15 bp, Homo sapiens
gatactcctttagat

SEQ ID NO: 35033 - DNA, 15 bp, Homo sapiens
ggatactcctttaga

SEQ ID NO: 35034 - DNA, 15 bp, Homo sapiens
aggatactcctttag

SEQ ID NO: 35035 - DNA, 15 bp, Homo sapiens
gaggatactccttta

SEQ ID NO: 35036 - DNA, 15 bp, Homo sapiens
cgaggatactccttt

SEQ ID NO: 35037 - DNA, 15 bp, Homo sapiens
acgaggatactcctt

SEQ ID NO: 35038 - DNA, 15 bp, Homo sapiens
cacgaggatactcct

SEQ ID NO: 35039 - DNA, 15 bp, Homo sapiens
acacgaggatactcc

SEQ ID NO: 35040 - DNA, 15 bp, Homo sapiens
aacacgaggatactc

SEQ ID NO: 35041 - DNA, 15 bp, Homo sapiens
gaacacgaggatact

SEQ ID NO: 35042 - DNA, 15 bp, Homo sapiens
agaacacgaggatac

SEQ ID NO: 35043 - DNA, 15 bp, Homo sapiens
aagaacacgaggata

SEQ ID NO: 35044 - DNA, 15 bp, Homo sapiens
taagaacacgaggat

SEQ ID NO: 35045 - DNA, 15 bp, Homo sapiens
gtaagaacacgagga

SEQ ID NO: 35046 - DNA, 15 bp, Homo sapiens
ggtaagaacacgagg

SEQ ID NO: 35047 - DNA, 15 bp, Homo sapiens
aggtaagaacacgag

SEQ ID NO: 35048 - DNA, 15 bp, Homo sapiens
aaggtaagaacacga

SEQ ID NO: 35049 - DNA, 15 bp, Homo sapiens
gaaggtaagaacacg

SEQ ID NO: 35050 - DNA, 15 bp, Homo sapiens
agaaggtaagaacac

SEQ ID NO: 35051 - DNA, 15 bp, Homo sapiens
aagaaggtaagaaca

SEQ ID NO: 35052 - DNA, 15 bp, Homo sapiens
aaagaaggtaagaac

SEQ ID NO: 35053 - DNA, 15 bp, Homo sapiens
taaagaaggtaagaa

SEQ ID NO: 35054 - DNA, 15 bp, Homo sapiens
ataaagaaggtaaga

SEQ ID NO: 35055 - DNA, 15 bp, Homo sapiens
gataaagaaggtaag

SEQ ID NO: 35056 - DNA, 15 bp, Homo sapiens
ggataaagaaggtaa

SEQ ID NO: 35057 - DNA, 15 bp, Homo sapiens
gggataaagaaggta

SEQ ID NO: 35058 - DNA, 15 bp, Homo sapiens
agggataaagaaggt

SEQ ID NO: 35059 - DNA, 15 bp, Homo sapiens
cagggataaagaagg

SEQ ID NO: 35060 - DNA, 15 bp, Homo sapiens
acagggataaagaag

SEQ ID NO: 35061 - DNA, 15 bp, Homo sapiens
cacagggataaagaa

SEQ ID NO: 35062 - DNA, 15 bp, Homo sapiens
acacagggataaaga

SEQ ID NO: 35063 - DNA, 15 bp, Homo sapiens
aacacagggataaag

SEQ ID NO: 35064 - DNA, 15 bp, Homo sapiens
aaacacagggataaa

SEQ ID NO: 35065 - DNA, 15 bp, Homo sapiens
taaacacagggataa

SEQ ID NO: 35066 - DNA, 15 bp, Homo sapiens
ataaacacagggata

SEQ ID NO: 35067 - DNA, 15 bp, Homo sapiens
aataaacacagggat

SEQ ID NO: 35068 - DNA, 15 bp, Homo sapiens
aaataaacacaggga

SEQ ID NO: 35069 - DNA, 15 bp, Homo sapiens
taaataaacacaggg

SEQ ID NO: 35070 - DNA, 15 bp, Homo sapiens
ttaaataaacacagg

SEQ ID NO: 35071 - DNA, 15 bp, Homo sapiens
tttaaataaacacag

SEQ ID NO: 35072 - DNA, 15 bp, Homo sapiens
ttttaaataaacaca

SEQ ID NO: 35073 - DNA, 15 bp, Homo sapiens
tttttaaataaacac

SEQ ID NO: 35074 - DNA, 15 bp, Homo sapiens
ctttttaaataaaca

SEQ ID NO: 35075 - DNA, 15 bp, Homo sapiens
cctttttaaataaac

SEQ ID NO: 35076 - DNA, 15 bp, Homo sapiens
gcctttttaaataaa

SEQ ID NO: 35077 - DNA, 15 bp, Homo sapiens
tgcctttttaaataa

SEQ ID NO: 35078 - DNA, 15 bp, Homo sapiens
ttgcctttttaaata

SEQ ID NO: 35079 - DNA, 15 bp, Homo sapiens
tttgcctttttaaat

SEQ ID NO: 35080 - DNA, 15 bp, Homo sapiens
ttttgcctttttaaa

SEQ ID NO: 35081 - DNA, 15 bp, Homo sapiens
tttttgcctttttaa

SEQ ID NO: 35082 - DNA, 15 bp, Homo sapiens
ttttttgccttttta

SEQ ID NO: 35083 - DNA, 15 bp, Homo sapiens
tttttttgccttttt

SEQ ID NO: 35084 - DNA, 15 bp, Homo sapiens
ttttttttgcctttt

SEQ ID NO: 35085 - DNA, 15 bp, Homo sapiens
attttttttgccttt

SEQ ID NO: 35086 - DNA, 15 bp, Homo sapiens
cattttttttgcctt

SEQ ID NO: 35087 - DNA, 15 bp, Homo sapiens
ccattttttttgcct

SEQ ID NO: 35088 - DNA, 15 bp, Homo sapiens
tccattttttttgcc

SEQ ID NO: 35089 - DNA, 15 bp, Homo sapiens
ctccattttttttgc

SEQ ID NO: 35090 - DNA, 15 bp, Homo sapiens
gctccattttttttg

SEQ ID NO: 35091 - DNA, 15 bp, Homo sapiens
tgctccatttttttt

SEQ ID NO: 35092 - DNA, 15 bp, Homo sapiens
ctgctccattttttt

SEQ ID NO: 35093 - DNA, 15 bp, Homo sapiens
tctgctccatttttt

SEQ ID NO: 35094 - DNA, 15 bp, Homo sapiens
atctgctccattttt

SEQ ID NO: 35095 - DNA, 15 bp, Homo sapiens
catctgctccatttt

SEQ ID NO: 35096 - DNA, 15 bp, Homo sapiens
gcatctgctccattt

SEQ ID NO: 35097 - DNA, 15 bp, Homo sapiens
agcatctgctccatt

SEQ ID NO: 35098 - DNA, 15 bp, Homo sapiens
cagcatctgctccat

SEQ ID NO: 35099 - DNA, 15 bp, Homo sapiens
acagcatctgctcca

SEQ ID NO: 35100 - DNA, 15 bp, Homo sapiens
aacagcatctgctcc

SEQ ID NO: 35101 - DNA, 15 bp, Homo sapiens
caacagcatctgctc

SEQ ID NO: 35102 - DNA, 15 bp, Homo sapiens
ccaacagcatctgct

SEQ ID NO: 35103 - DNA, 15 bp, Homo sapiens
accaacagcatctgc

SEQ ID NO: 35104 - DNA, 15 bp, Homo sapiens
aaccaacagcatctg

SEQ ID NO: 35105 - DNA, 15 bp, Homo sapiens
caaccaacagcatct

SEQ ID NO: 35106 - DNA, 15 bp, Homo sapiens
tcaaccaacagcatc

SEQ ID NO: 35107 - DNA, 15 bp, Homo sapiens
gtcaaccaacagcat

SEQ ID NO: 35108 - DNA, 15 bp, Homo sapiens
ggtcaaccaacagca

SEQ ID NO: 35109 - DNA, 15 bp, Homo sapiens
tggtcaaccaacagc

SEQ ID NO: 35110 - DNA, 15 bp, Homo sapiens
atggtcaaccaacag

SEQ ID NO: 35111 - DNA, 15 bp, Homo sapiens
tatggtcaaccaaca

SEQ ID NO: 35112 - DNA, 15 bp, Homo sapiens
atatggtcaaccaac

SEQ ID NO: 35113 - DNA, 15 bp, Homo sapiens
aatatggtcaaccaa

SEQ ID NO: 35114 - DNA, 15 bp, Homo sapiens
aaatatggtcaacca

SEQ ID NO: 35115 - DNA, 15 bp, Homo sapiens
aaaatatggtcaacc

SEQ ID NO: 35116 - DNA, 15 bp, Homo sapiens
taaaatatggtcaac

SEQ ID NO: 35117 - DNA, 15 bp, Homo sapiens
gtaaaatatggtcaa

SEQ ID NO: 35118 - DNA, 15 bp, Homo sapiens
agtaaaatatggtca

SEQ ID NO: 35119 - DNA, 15 bp, Homo sapiens
cagtaaaatatggtc

SEQ ID NO: 35120 - DNA, 15 bp, Homo sapiens
tcagtaaaatatggt

SEQ ID NO: 35121 - DNA, 15 bp, Homo sapiens
ttcagtaaaatatgg

SEQ ID NO: 35122 - DNA, 15 bp, Homo sapiens
gttcagtaaaatatg

SEQ ID NO: 35123 - DNA, 15 bp, Homo sapiens
tgttcagtaaaatat

SEQ ID NO: 35124 - DNA, 15 bp, Homo sapiens
ctgttcagtaaaata

SEQ ID NO: 35125 - DNA, 15 bp, Homo sapiens
actgttcagtaaaat

SEQ ID NO: 35126 - DNA, 15 bp, Homo sapiens
tactgttcagtaaaa

SEQ ID NO: 35127 - DNA, 15 bp, Homo sapiens
ctactgttcagtaaa

SEQ ID NO: 35128 - DNA, 15 bp, Homo sapiens
gctactgttcagtaa

SEQ ID NO: 35129 - DNA, 15 bp, Homo sapiens
tgctactgttcagta

SEQ ID NO: 35130 - DNA, 15 bp, Homo sapiens
atgctactgttcagt

SEQ ID NO: 35131 - DNA, 15 bp, Homo sapiens
aatgctactgttcag

SEQ ID NO: 35132 - DNA, 15 bp, Homo sapiens
aaatgctactgttca

SEQ ID NO: 35133 - DNA, 15 bp, Homo sapiens
caaatgctactgttc

SEQ ID NO: 35134 - DNA, 15 bp, Homo sapiens
acaaatgctactgtt

SEQ ID NO: 35135 - DNA, 15 bp, Homo sapiens
cacaaatgctactgt

SEQ ID NO: 35136 - DNA, 15 bp, Homo sapiens
acacaaatgctactg

SEQ ID NO: 35137 - DNA, 15 bp, Homo sapiens
aacacaaatgctact

SEQ ID NO: 35138 - DNA, 15 bp, Homo sapiens
aaacacaaatgctac

SEQ ID NO: 35139 - DNA, 15 bp, Homo sapiens
taaacacaaatgcta

SEQ ID NO: 35140 - DNA, 15 bp, Homo sapiens
ctaaacacaaatgct

SEQ ID NO: 35141 - DNA, 15 bp, Homo sapiens
cctaaacacaaatgc

SEQ ID NO: 35142 - DNA, 15 bp, Homo sapiens
acctaaacacaaatg

SEQ ID NO: 35143 - DNA, 15 bp, Homo sapiens
aacctaaacacaaat

SEQ ID NO: 35144 - DNA, 15 bp, Homo sapiens
caacctaaacacaaa

SEQ ID NO: 35145 - DNA, 15 bp, Homo sapiens
tcaacctaaacacaa

SEQ ID NO: 35146 - DNA, 15 bp, Homo sapiens
ttcaacctaaacaca

SEQ ID NO: 35147 - DNA, 15 bp, Homo sapiens
tttcaacctaaacac

SEQ ID NO: 35148 - DNA, 15 bp, Homo sapiens
gtttcaacctaaaca

SEQ ID NO: 35149 - DNA, 15 bp, Homo sapiens
tgtttcaacctaaac

SEQ ID NO: 35150 - DNA, 15 bp, Homo sapiens
ctgtttcaacctaaa

SEQ ID NO: 35151 - DNA, 15 bp, Homo sapiens
gctgtttcaacctaa

SEQ ID NO: 35152 - DNA, 15 bp, Homo sapiens
tgctgtttcaaccta

SEQ ID NO: 35153 - DNA, 15 bp, Homo sapiens
atgctgtttcaacct

SEQ ID NO: 35154 - DNA, 15 bp, Homo sapiens
aatgctgtttcaacc

SEQ ID NO: 35155 - DNA, 15 bp, Homo sapiens
taatgctgtttcaac

SEQ ID NO: 35156 - DNA, 15 bp, Homo sapiens
ctaatgctgtttcaa

SEQ ID NO: 35157 - DNA, 15 bp, Homo sapiens
tctaatgctgtttca

SEQ ID NO: 35158 - DNA, 15 bp, Homo sapiens
ttctaatgctgtttc

SEQ ID NO: 35159 - DNA, 15 bp, Homo sapiens
tttctaatgctgttt

SEQ ID NO: 35160 - DNA, 15 bp, Homo sapiens
ttttctaatgctgtt

SEQ ID NO: 35161 - DNA, 15 bp, Homo sapiens
gttttctaatgctgt

SEQ ID NO: 35162 - DNA, 15 bp, Homo sapiens
agttttctaatgctg

SEQ ID NO: 35163 - DNA, 15 bp, Homo sapiens
tagttttctaatgct

SEQ ID NO: 35164 - DNA, 15 bp, Homo sapiens
ctagttttctaatgc

SEQ ID NO: 35165 - DNA, 15 bp, Homo sapiens
tctagttttctaatg

SEQ ID NO: 35166 - DNA, 15 bp, Homo sapiens
atctagttttctaat

SEQ ID NO: 35167 - DNA, 15 bp, Homo sapiens
tatctagttttctaa

SEQ ID NO: 35168 - DNA, 15 bp, Homo sapiens
gtatctagttttcta

SEQ ID NO: 35169 - DNA, 15 bp, Homo sapiens
cgtatctagttttct

SEQ ID NO: 35170 - DNA, 15 bp, Homo sapiens
ccgtatctagttttc

SEQ ID NO: 35171 - DNA, 15 bp, Homo sapiens
tccgtatctagtttt

SEQ ID NO: 35172 - DNA, 15 bp, Homo sapiens
atccgtatctagttt

SEQ ID NO: 35173 - DNA, 15 bp, Homo sapiens
aatccgtatctagtt

SEQ ID NO: 35174 - DNA, 15 bp, Homo sapiens
taatccgtatctagt

SEQ ID NO: 35175 - DNA, 15 bp, Homo sapiens
ttaatccgtatctag

SEQ ID NO: 35176 - DNA, 15 bp, Homo sapiens
tttaatccgtatcta

SEQ ID NO: 35177 - DNA, 15 bp, Homo sapiens
ctttaatccgtatct

SEQ ID NO: 35178 - DNA, 15 bp, Homo sapiens
actttaatccgtatc

SEQ ID NO: 35179 - DNA, 15 bp, Homo sapiens
gactttaatccgtat

SEQ ID NO: 35180 - DNA, 15 bp, Homo sapiens
tgactttaatccgta

SEQ ID NO: 35181 - DNA, 15 bp, Homo sapiens
ctgactttaatccgt

SEQ ID NO: 35182 - DNA, 15 bp, Homo sapiens
actgactttaatccg

SEQ ID NO: 35183 - DNA, 15 bp, Homo sapiens
cactgactttaatcc

SEQ ID NO: 35184 - DNA, 15 bp, Homo sapiens
ccactgactttaatc

SEQ ID NO: 35185 - DNA, 15 bp, Homo sapiens
accactgactttaat

SEQ ID NO: 35186 - DNA, 15 bp, Homo sapiens
taccactgactttaa

SEQ ID NO: 35187 - DNA, 15 bp, Homo sapiens
ctaccactgacttta

SEQ ID NO: 35188 - DNA, 15 bp, Homo sapiens
cctaccactgacttt

SEQ ID NO: 35189 - DNA, 15 bp, Homo sapiens
acctaccactgactt

SEQ ID NO: 35190 - DNA, 15 bp, Homo sapiens
aacctaccactgact

SEQ ID NO: 35191 - DNA, 15 bp, Homo sapiens
aaacctaccactgac

SEQ ID NO: 35192 - DNA, 15 bp, Homo sapiens
aaaacctaccactga

SEQ ID NO: 35193 - DNA, 15 bp, Homo sapiens
aaaaacctaccactg

SEQ ID NO: 35194 - DNA, 15 bp, Homo sapiens
aaaaaacctaccact

SEQ ID NO: 35195 - DNA, 15 bp, Homo sapiens
aaaaaaacctaccac

SEQ ID NO: 35196 - DNA, 15 bp, Homo sapiens
aaaaaaaacctacca

SEQ ID NO: 35197 - DNA, 15 bp, Homo sapiens
aaaaaaaaacctacc

SEQ ID NO: 35198 - DNA, 15 bp, Homo sapiens
aaaaaaaaaacctac

SEQ ID NO: 35199 - DNA, 15 bp, Homo sapiens
aaaaaaaaaaaccta

SEQ ID NO: 35200 - DNA, 15 bp, Homo sapiens
aaaaaaaaaaaacct

SEQ ID NO: 35201 - DNA, 15 bp, Homo sapiens
aaaaaaaaaaaaacc

SEQ ID NO: 35202 - DNA, 15 bp, Homo sapiens
gaaaaaaaaaaaaaa

SEQ ID NO: 35203 - DNA, 15 bp, Homo sapiens
agaaaaaaaaaaaaa

SEQ ID NO: 35204 - DNA, 15 bp, Homo sapiens
aagaaaaaaaaaaaa

SEQ ID NO: 35205 - DNA, 15 bp, Homo sapiens
gaagaaaaaaaaaaa

SEQ ID NO: 35206 - DNA, 15 bp, Homo sapiens
ggaagaaaaaaaaaa

SEQ ID NO: 35207 - DNA, 15 bp, Homo sapiens
tggaagaaaaaaaaa

SEQ ID NO: 35208 - DNA, 15 bp, Homo sapiens
ctggaagaaaaaaaa

SEQ ID NO: 35209 - DNA, 15 bp, Homo sapiens
cctggaagaaaaaaa

SEQ ID NO: 35210 - DNA, 15 bp, Homo sapiens
tcctggaagaaaaaa

SEQ ID NO: 35211 - DNA, 15 bp, Homo sapiens
ttcctggaagaaaaa

SEQ ID NO: 35212 - DNA, 15 bp, Homo sapiens
attcctggaagaaaa

SEQ ID NO: 35213 - DNA, 15 bp, Homo sapiens
cattcctggaagaaa

SEQ ID NO: 35214 - DNA, 15 bp, Homo sapiens
acattcctggaagaa

SEQ ID NO: 35215 - DNA, 15 bp, Homo sapiens
aacattcctggaaga

SEQ ID NO: 35216 - DNA, 15 bp, Homo sapiens
aaacattcctggaag

SEQ ID NO: 35217 - DNA, 15 bp, Homo sapiens
gaaacattcctggaa

SEQ ID NO: 35218 - DNA, 15 bp, Homo sapiens
agaaacattcctgga

SEQ ID NO: 35219 - DNA, 15 bp, Homo sapiens
aagaaacattcctgg

SEQ ID NO: 35220 - DNA, 15 bp, Homo sapiens
taagaaacattcctg

SEQ ID NO: 35221 - DNA, 15 bp, Homo sapiens
ataagaaacattcct

SEQ ID NO: 35222 - DNA, 15 bp, Homo sapiens
tataagaaacattcc

SEQ ID NO: 35223 - DNA, 15 bp, Homo sapiens
ctataagaaacattc

SEQ ID NO: 35224 - DNA, 15 bp, Homo sapiens
tctataagaaacatt

SEQ ID NO: 35225 - DNA, 15 bp, Homo sapiens
atctataagaaacat

SEQ ID NO: 35226 - DNA, 15 bp, Homo sapiens
catctataagaaaca

SEQ ID NO: 35227 - DNA, 15 bp, Homo sapiens
tcatctataagaaac

SEQ ID NO: 35228 - DNA, 15 bp, Homo sapiens
atcatctataagaaa

SEQ ID NO: 35229 - DNA, 15 bp, Homo sapiens
gatcatctataagaa

SEQ ID NO: 35230 - DNA, 15 bp, Homo sapiens
tgatcatctataaga

SEQ ID NO: 35231 - DNA, 15 bp, Homo sapiens
ttgatcatctataag

SEQ ID NO: 35232 - DNA, 15 bp, Homo sapiens
tttgatcatctataa

SEQ ID NO: 35233 - DNA, 15 bp, Homo sapiens
gtttgatcatctata

SEQ ID NO: 35234 - DNA, 15 bp, Homo sapiens
tgtttgatcatctat

SEQ ID NO: 35235 - DNA, 15 bp, Homo sapiens
ctgtttgatcatcta

SEQ ID NO: 35236 - DNA, 15 bp, Homo sapiens
cctgtttgatcatct

SEQ ID NO: 35237 - DNA, 15 bp, Homo sapiens
gcctgtttgatcatc

SEQ ID NO: 35238 - DNA, 15 bp, Homo sapiens
tgcctgtttgatcat

SEQ ID NO: 35239 - DNA, 15 bp, Homo sapiens
gtgcctgtttgatca

SEQ ID NO: 35240 - DNA, 15 bp, Homo sapiens
tgtgcctgtttgatc

SEQ ID NO: 35241 - DNA, 15 bp, Homo sapiens
ctgtgcctgtttgat

SEQ ID NO: 35242 - DNA, 15 bp, Homo sapiens
cctgtgcctgtttga

SEQ ID NO: 35243 - DNA, 15 bp, Homo sapiens
tcctgtgcctgtttg

SEQ ID NO: 35244 - DNA, 15 bp, Homo sapiens
ttcctgtgcctgttt

SEQ ID NO: 35245 - DNA, 15 bp, Homo sapiens
cttcctgtgcctgtt

SEQ ID NO: 35246 - DNA, 15 bp, Homo sapiens
ccttcctgtgcctgt

SEQ ID NO: 35247 - DNA, 15 bp, Homo sapiens
cccttcctgtgcctg

SEQ ID NO: 35248 - DNA, 15 bp, Homo sapiens
ccccttcctgtgcct

SEQ ID NO: 35249 - DNA, 15 bp, Homo sapiens
tccccttcctgtgcc

SEQ ID NO: 35250 - DNA, 15 bp, Homo sapiens
ttccccttcctgtgc

SEQ ID NO: 35251 - DNA, 15 bp, Homo sapiens
cttccccttcctgtg

SEQ ID NO: 35252 - DNA, 15 bp, Homo sapiens
acttccccttcctgt

SEQ ID NO: 35253 - DNA, 15 bp, Homo sapiens
cacttccccttcctg

SEQ ID NO: 35254 - DNA, 15 bp, Homo sapiens
acacttccccttcct

SEQ ID NO: 35255 - DNA, 15 bp, Homo sapiens
aacacttccccttcc

SEQ ID NO: 35256 - DNA, 15 bp, Homo sapiens
caacacttccccttc

SEQ ID NO: 35257 - DNA, 15 bp, Homo sapiens
acaacacttcccctt

SEQ ID NO: 35258 - DNA, 15 bp, Homo sapiens
cacaacacttcccct

SEQ ID NO: 35259 - DNA, 15 bp, Homo sapiens
tcacaacacttcccc

SEQ ID NO: 35260 - DNA, 15 bp, Homo sapiens
atcacaacacttccc

SEQ ID NO: 35261 - DNA, 15 bp, Homo sapiens
gatcacaacacttcc

SEQ ID NO: 35262 - DNA, 15 bp, Homo sapiens
tgatcacaacacttc

SEQ ID NO: 35263 - DNA, 15 bp, Homo sapiens
ttgatcacaacactt

SEQ ID NO: 35264 - DNA, 15 bp, Homo sapiens
attgatcacaacact

SEQ ID NO: 35265 - DNA, 15 bp, Homo sapiens
tattgatcacaacac

SEQ ID NO: 35266 - DNA, 15 bp, Homo sapiens
atattgatcacaaca

SEQ ID NO: 35267 - DNA, 15 bp, Homo sapiens
aatattgatcacaac

SEQ ID NO: 35268 - DNA, 15 bp, Homo sapiens
taatattgatcacaa

SEQ ID NO: 35269 - DNA, 15 bp, Homo sapiens
ataatattgatcaca

SEQ ID NO: 35270 - DNA, 15 bp, Homo sapiens
gataatattgatcac

SEQ ID NO: 35271 - DNA, 15 bp, Homo sapiens
ggataatattgatca

SEQ ID NO: 35272 - DNA, 15 bp, Homo sapiens
tggataatattgatc

SEQ ID NO: 35273 - DNA, 15 bp, Homo sapiens
ctggataatattgat

SEQ ID NO: 35274 - DNA, 15 bp, Homo sapiens
actggataatattga

SEQ ID NO: 35275 - DNA, 15 bp, Homo sapiens
aactggataatattg

SEQ ID NO: 35276 - DNA, 15 bp, Homo sapiens
taactggataatatt

SEQ ID NO: 35277 - DNA, 15 bp, Homo sapiens
ttaactggataatat

SEQ ID NO: 35278 - DNA, 15 bp, Homo sapiens
attaactggataata

SEQ ID NO: 35279 - DNA, 15 bp, Homo sapiens
tattaactggataat

SEQ ID NO: 35280 - DNA, 15 bp, Homo sapiens
atattaactggataa

SEQ ID NO: 35281 - DNA, 15 bp, Homo sapiens
aatattaactggata

SEQ ID NO: 35282 - DNA, 15 bp, Homo sapiens
taatattaactggat

SEQ ID NO: 35283 - DNA, 15 bp, Homo sapiens
ctaatattaactgga

SEQ ID NO: 35284 - DNA, 15 bp, Homo sapiens
gctaatattaactgg

SEQ ID NO: 35285 - DNA, 15 bp, Homo sapiens
tgctaatattaactg

SEQ ID NO: 35286 - DNA, 15 bp, Homo sapiens
atgctaatattaact

SEQ ID NO: 35287 - DNA, 15 bp, Homo sapiens
aatgctaatattaac

SEQ ID NO: 35288 - DNA, 15 bp, Homo sapiens
gaatgctaatattaa

SEQ ID NO: 35289 - DNA, 15 bp, Homo sapiens
tgaatgctaatatta

SEQ ID NO: 35290 - DNA, 15 bp, Homo sapiens
ctgaatgctaatatt

SEQ ID NO: 35291 - DNA, 15 bp, Homo sapiens
tctgaatgctaatat

SEQ ID NO: 35292 - DNA, 15 bp, Homo sapiens
ctctgaatgctaata

SEQ ID NO: 35293 - DNA, 15 bp, Homo sapiens
cctctgaatgctaat

SEQ ID NO: 35294 - DNA, 15 bp, Homo sapiens
tcctctgaatgctaa

SEQ ID NO: 35295 - DNA, 15 bp, Homo sapiens
ttcctctgaatgcta

SEQ ID NO: 35296 - DNA, 15 bp, Homo sapiens
tttcctctgaatgct

SEQ ID NO: 35297 - DNA, 15 bp, Homo sapiens
ttttcctctgaatgc

SEQ ID NO: 35298 - DNA, 15 bp, Homo sapiens
attttcctctgaatg

SEQ ID NO: 35299 - DNA, 15 bp, Homo sapiens
aattttcctctgaat

SEQ ID NO: 35300 - DNA, 15 bp, Homo sapiens
aaattttcctctgaa

SEQ ID NO: 35301 - DNA, 15 bp, Homo sapiens
caaattttcctctga

SEQ ID NO: 35302 - DNA, 15 bp, Homo sapiens
tcaaattttcctctg

SEQ ID NO: 35303 - DNA, 15 bp, Homo sapiens
ctcaaattttcctct

SEQ ID NO: 35304 - DNA, 15 bp, Homo sapiens
actcaaattttcctc

SEQ ID NO: 35305 - DNA, 15 bp, Homo sapiens
gactcaaattttcct

SEQ ID NO: 35306 - DNA, 15 bp, Homo sapiens
ggactcaaattttcc

SEQ ID NO: 35307 - DNA, 15 bp, Homo sapiens
aggactcaaattttc

SEQ ID NO: 35308 - DNA, 15 bp, Homo sapiens
gaggactcaaatttt

SEQ ID NO: 35309 - DNA, 15 bp, Homo sapiens
agaggactcaaattt

SEQ ID NO: 35310 - DNA, 15 bp, Homo sapiens
cagaggactcaaatt

SEQ ID NO: 35311 - DNA, 15 bp, Homo sapiens
tcagaggactcaaat

SEQ ID NO: 35312 - DNA, 15 bp, Homo sapiens
atcagaggactcaaa

SEQ ID NO: 35313 - DNA, 15 bp, Homo sapiens
tatcagaggactcaa

SEQ ID NO: 35314 - DNA, 15 bp, Homo sapiens
gtatcagaggactca

SEQ ID NO: 35315 - DNA, 15 bp, Homo sapiens
tgtatcagaggactc

SEQ ID NO: 35316 - DNA, 15 bp, Homo sapiens
gtgtatcagaggact

SEQ ID NO: 35317 - DNA, 15 bp, Homo sapiens
agtgtatcagaggac

SEQ ID NO: 35318 - DNA, 15 bp, Homo sapiens
cagtgtatcagagga

SEQ ID NO: 35319 - DNA, 15 bp, Homo sapiens
acagtgtatcagagg

SEQ ID NO: 35320 - DNA, 15 bp, Homo sapiens
aacagtgtatcagag

SEQ ID NO: 35321 - DNA, 15 bp, Homo sapiens
taacagtgtatcaga

SEQ ID NO: 35322 - DNA, 15 bp, Homo sapiens
ttaacagtgtatcag

SEQ ID NO: 35323 - DNA, 15 bp, Homo sapiens
tttaacagtgtatca

SEQ ID NO: 35324 - DNA, 15 bp, Homo sapiens
atttaacagtgtatc

SEQ ID NO: 35325 - DNA, 15 bp, Homo sapiens
aatttaacagtgtat

SEQ ID NO: 35326 - DNA, 15 bp, Homo sapiens
aaatttaacagtgta

SEQ ID NO: 35327 - DNA, 15 bp, Homo sapiens
gaaatttaacagtgt

SEQ ID NO: 35328 - DNA, 15 bp, Homo sapiens
agaaatttaacagtg

SEQ ID NO: 35329 - DNA, 15 bp, Homo sapiens
aagaaatttaacagt

SEQ ID NO: 35330 - DNA, 15 bp, Homo sapiens
aaagaaatttaacag

SEQ ID NO: 35331 - DNA, 15 bp, Homo sapiens
gaaagaaatttaaca

SEQ ID NO: 35332 - DNA, 15 bp, Homo sapiens
agaaagaaatttaac

SEQ ID NO: 35333 - DNA, 15 bp, Homo sapiens
tagaaagaaatttaa

SEQ ID NO: 35334 - DNA, 15 bp, Homo sapiens
atagaaagaaattta

SEQ ID NO: 35335 - DNA, 15 bp, Homo sapiens
tatagaaagaaattt

SEQ ID NO: 35336 - DNA, 15 bp, Homo sapiens
gtatagaaagaaatt

SEQ ID NO: 35337 - DNA, 15 bp, Homo sapiens
agtatagaaagaaat

SEQ ID NO: 35338 - DNA, 15 bp, Homo sapiens
tagtatagaaagaaa

SEQ ID NO: 35339 - DNA, 15 bp, Homo sapiens
atagtatagaaagaa

SEQ ID NO: 35340 - DNA, 15 bp, Homo sapiens
gatagtatagaaaga

SEQ ID NO: 35341 - DNA, 15 bp, Homo sapiens
tgatagtatagaaag

SEQ ID NO: 35342 - DNA, 15 bp, Homo sapiens
ttgatagtatagaaa

SEQ ID NO: 35343 - DNA, 15 bp, Homo sapiens
cttgatagtatagaa

SEQ ID NO: 35344 - DNA, 15 bp, Homo sapiens
acttgatagtataga

SEQ ID NO: 35345 - DNA, 15 bp, Homo sapiens
gacttgatagtatag

SEQ ID NO: 35346 - DNA, 15 bp, Homo sapiens
ggacttgatagtata

SEQ ID NO: 35347 - DNA, 15 bp, Homo sapiens
tggacttgatagtat

SEQ ID NO: 35348 - DNA, 15 bp, Homo sapiens
gtggacttgatagta

SEQ ID NO: 35349 - DNA, 15 bp, Homo sapiens
tgtggacttgatagt

SEQ ID NO: 35350 - DNA, 15 bp, Homo sapiens
ttgtggacttgatag

SEQ ID NO: 35351 - DNA, 15 bp, Homo sapiens
tttgtggacttgata

SEQ ID NO: 35352 - DNA, 15 bp, Homo sapiens
atttgtggacttgat

SEQ ID NO: 35353 - DNA, 15 bp, Homo sapiens
gatttgtggacttga

SEQ ID NO: 35354 - DNA, 15 bp, Homo sapiens
ggatttgtggacttg

SEQ ID NO: 35355 - DNA, 15 bp, Homo sapiens
aggatttgtggactt

SEQ ID NO: 35356 - DNA, 15 bp, Homo sapiens
caggatttgtggact

SEQ ID NO: 35357 - DNA, 15 bp, Homo sapiens
ccaggatttgtggac

SEQ ID NO: 35358 - DNA, 15 bp, Homo sapiens
tccaggatttgtgga

SEQ ID NO: 35359 - DNA, 15 bp, Homo sapiens
ttccaggatttgtgg

SEQ ID NO: 35360 - DNA, 15 bp, Homo sapiens
gttccaggatttgtg

SEQ ID NO: 35361 - DNA, 15 bp, Homo sapiens
agttccaggatttgt

SEQ ID NO: 35362 - DNA, 15 bp, Homo sapiens
cagttccaggatttg

SEQ ID NO: 35363 - DNA, 15 bp, Homo sapiens
gcagttccaggattt

SEQ ID NO: 35364 - DNA, 15 bp, Homo sapiens
tgcagttccaggatt

SEQ ID NO: 35365 - DNA, 15 bp, Homo sapiens
ttgcagttccaggat

SEQ ID NO: 35366 - DNA, 15 bp, Homo sapiens
tttgcagttccagga

SEQ ID NO: 35367 - DNA, 15 bp, Homo sapiens
ttttgcagttccagg

SEQ ID NO: 35368 - DNA, 15 bp, Homo sapiens
cttttgcagttccag

SEQ ID NO: 35369 - DNA, 15 bp, Homo sapiens
tcttttgcagttcca

SEQ ID NO: 35370 - DNA, 15 bp, Homo sapiens
ttcttttgcagttcc

SEQ ID NO: 35371 - DNA, 15 bp, Homo sapiens
attcttttgcagttc

SEQ ID NO: 35372 - DNA, 15 bp, Homo sapiens
aattcttttgcagtt

SEQ ID NO: 35373 - DNA, 15 bp, Homo sapiens
aaattcttttgcagt

SEQ ID NO: 35374 - DNA, 15 bp, Homo sapiens
aaaattcttttgcag

SEQ ID NO: 35375 - DNA, 15 bp, Homo sapiens
caaaattcttttgca

SEQ ID NO: 35376 - DNA, 15 bp, Homo sapiens
tcaaaattcttttgc

SEQ ID NO: 35377 - DNA, 15 bp, Homo sapiens
ctcaaaattcttttg

SEQ ID NO: 35378 - DNA, 15 bp, Homo sapiens
tctcaaaattctttt

SEQ ID NO: 35379 - DNA, 15 bp, Homo sapiens
gtctcaaaattcttt

SEQ ID NO: 35380 - DNA, 15 bp, Homo sapiens
agtctcaaaattctt

SEQ ID NO: 35381 - DNA, 15 bp, Homo sapiens
cagtctcaaaattct

SEQ ID NO: 35382 - DNA, 15 bp, Homo sapiens
acagtctcaaaattc

SEQ ID NO: 35383 - DNA, 15 bp, Homo sapiens
aacagtctcaaaatt

SEQ ID NO: 35384 - DNA, 15 bp, Homo sapiens
gaacagtctcaaaat

SEQ ID NO: 35385 - DNA, 15 bp, Homo sapiens
tgaacagtctcaaaa

SEQ ID NO: 35386 - DNA, 15 bp, Homo sapiens
ttgaacagtctcaaa

SEQ ID NO: 35387 - DNA, 15 bp, Homo sapiens
tttgaacagtctcaa

SEQ ID NO: 35388 - DNA, 15 bp, Homo sapiens
ttttgaacagtctca

SEQ ID NO: 35389 - DNA, 15 bp, Homo sapiens
attttgaacagtctc

SEQ ID NO: 35390 - DNA, 15 bp, Homo sapiens
tattttgaacagtct

SEQ ID NO: 35391 - DNA, 15 bp, Homo sapiens
ttattttgaacagtc

SEQ ID NO: 35392 - DNA, 15 bp, Homo sapiens
attattttgaacagt

SEQ ID NO: 35393 - DNA, 15 bp, Homo sapiens
aattattttgaacag

SEQ ID NO: 35394 - DNA, 15 bp, Homo sapiens
taattattttgaaca

SEQ ID NO: 35395 - DNA, 15 bp, Homo sapiens
ttaattattttgaac

SEQ ID NO: 35396 - DNA, 15 bp, Homo sapiens
attaattattttgaa

SEQ ID NO: 35397 - DNA, 15 bp, Homo sapiens
gattaattattttga

SEQ ID NO: 35398 - DNA, 15 bp, Homo sapiens
agattaattattttg

SEQ ID NO: 35399 - DNA, 15 bp, Homo sapiens
gagattaattatttt

SEQ ID NO: 35400 - DNA, 15 bp, Homo sapiens
agagattaattattt

SEQ ID NO: 35401 - DNA, 15 bp, Homo sapiens
cagagattaattatt

SEQ ID NO: 35402 - DNA, 15 bp, Homo sapiens
acagagattaattat

SEQ ID NO: 35403 - DNA, 15 bp, Homo sapiens
tacagagattaatta

SEQ ID NO: 35404 - DNA, 15 bp, Homo sapiens
atacagagattaatt

SEQ ID NO: 35405 - DNA, 15 bp, Homo sapiens
tatacagagattaat

SEQ ID NO: 35406 - DNA, 15 bp, Homo sapiens
ctatacagagattaa

SEQ ID NO: 35407 - DNA, 15 bp, Homo sapiens
cctatacagagatta

SEQ ID NO: 35408 - DNA, 15 bp, Homo sapiens
gcctatacagagatt

SEQ ID NO: 35409 - DNA, 15 bp, Homo sapiens
agcctatacagagat

SEQ ID NO: 35410 - DNA, 15 bp, Homo sapiens
gagcctatacagaga

SEQ ID NO: 35411 - DNA, 15 bp, Homo sapiens
tgagcctatacagag

SEQ ID NO: 35412 - DNA, 15 bp, Homo sapiens
ctgagcctatacaga

SEQ ID NO: 35413 - DNA, 15 bp, Homo sapiens
cctgagcctatacag

SEQ ID NO: 35414 - DNA, 15 bp, Homo sapiens
gcctgagcctataca

SEQ ID NO: 35415 - DNA, 15 bp, Homo sapiens
agcctgagcctatac

SEQ ID NO: 35416 - DNA, 15 bp, Homo sapiens
aagcctgagcctata

SEQ ID NO: 35417 - DNA, 15 bp, Homo sapiens
aaagcctgagcctat

SEQ ID NO: 35418 - DNA, 15 bp, Homo sapiens
gaaagcctgagccta

SEQ ID NO: 35419 - DNA, 15 bp, Homo sapiens
ggaaagcctgagcct

SEQ ID NO: 35420 - DNA, 15 bp, Homo sapiens
aggaaagcctgagcc

SEQ ID NO: 35421 - DNA, 15 bp, Homo sapiens
caggaaagcctgagc

SEQ ID NO: 35422 - DNA, 15 bp, Homo sapiens
gcaggaaagcctgag

SEQ ID NO: 35423 - DNA, 15 bp, Homo sapiens
tgcaggaaagcctga

SEQ ID NO: 35424 - DNA, 15 bp, Homo sapiens
ttgcaggaaagcctg

SEQ ID NO: 35425 - DNA, 15 bp, Homo sapiens
cttgcaggaaagcct

SEQ ID NO: 35426 - DNA, 15 bp, Homo sapiens
ccttgcaggaaagcc

SEQ ID NO: 35427 - DNA, 15 bp, Homo sapiens
accttgcaggaaagc

SEQ ID NO: 35428 - DNA, 15 bp, Homo sapiens
aaccttgcaggaaag

SEQ ID NO: 35429 - DNA, 15 bp, Homo sapiens
taaccttgcaggaaa

SEQ ID NO: 35430 - DNA, 15 bp, Homo sapiens
ataaccttgcaggaa

SEQ ID NO: 35431 - DNA, 15 bp, Homo sapiens
cataaccttgcagga

SEQ ID NO: 35432 - DNA, 15 bp, Homo sapiens
tcataaccttgcagg

SEQ ID NO: 35433 - DNA, 15 bp, Homo sapiens
ttcataaccttgcag

SEQ ID NO: 35434 - DNA, 15 bp, Homo sapiens
tttcataaccttgca

SEQ ID NO: 35435 - DNA, 15 bp, Homo sapiens
atttcataaccttgc

SEQ ID NO: 35436 - DNA, 15 bp, Homo sapiens
catttcataaccttg

SEQ ID NO: 35437 - DNA, 15 bp, Homo sapiens
gcatttcataacctt

SEQ ID NO: 35438 - DNA, 15 bp, Homo sapiens
agcatttcataacct

SEQ ID NO: 35439 - DNA, 15 bp, Homo sapiens
cagcatttcataacc

SEQ ID NO: 35440 - DNA, 15 bp, Homo sapiens
tcagcatttcataac

SEQ ID NO: 35441 - DNA, 15 bp, Homo sapiens
atcagcatttcataa

SEQ ID NO: 35442 - DNA, 15 bp, Homo sapiens
tatcagcatttcata

SEQ ID NO: 35443 - DNA, 15 bp, Homo sapiens
ttatcagcatttcat

SEQ ID NO: 35444 - DNA, 15 bp, Homo sapiens
tttatcagcatttca

SEQ ID NO: 35445 - DNA, 15 bp, Homo sapiens
ttttatcagcatttc

SEQ ID NO: 35446 - DNA, 15 bp, Homo sapiens
attttatcagcattt

SEQ ID NO: 35447 - DNA, 15 bp, Homo sapiens
aattttatcagcatt

SEQ ID NO: 35448 - DNA, 15 bp, Homo sapiens
caattttatcagcat

SEQ ID NO: 35449 - DNA, 15 bp, Homo sapiens
ccaattttatcagca

SEQ ID NO: 35450 - DNA, 15 bp, Homo sapiens
accaattttatcagc

SEQ ID NO: 35451 - DNA, 15 bp, Homo sapiens
gaccaattttatcag

SEQ ID NO: 35452 - DNA, 15 bp, Homo sapiens
agaccaattttatca

SEQ ID NO: 35453 - DNA, 15 bp, Homo sapiens
aagaccaattttatc

SEQ ID NO: 35454 - DNA, 15 bp, Homo sapiens
taagaccaattttat

SEQ ID NO: 35455 - DNA, 15 bp, Homo sapiens
ataagaccaatttta

SEQ ID NO: 35456 - DNA, 15 bp, Homo sapiens
aataagaccaatttt

SEQ ID NO: 35457 - DNA, 15 bp, Homo sapiens
aaataagaccaattt

SEQ ID NO: 35458 - DNA, 15 bp, Homo sapiens
aaaataagaccaatt

SEQ ID NO: 35459 - DNA, 15 bp, Homo sapiens
caaaataagaccaat

SEQ ID NO: 35460 - DNA, 15 bp, Homo sapiens
tcaaaataagaccaa

SEQ ID NO: 35461 - DNA, 15 bp, Homo sapiens
ttcaaaataagacca

SEQ ID NO: 35462 - DNA, 15 bp, Homo sapiens
tttcaaaataagacc

SEQ ID NO: 35463 - DNA, 15 bp, Homo sapiens
ctttcaaaataagac

SEQ ID NO: 35464 - DNA, 15 bp, Homo sapiens
cctttcaaaataaga

SEQ ID NO: 35465 - DNA, 15 bp, Homo sapiens
gcctttcaaaataag

SEQ ID NO: 35466 - DNA, 15 bp, Homo sapiens
agcctttcaaaataa

SEQ ID NO: 35467 - DNA, 15 bp, Homo sapiens
gagcctttcaaaata

SEQ ID NO: 35468 - DNA, 15 bp, Homo sapiens
ggagcctttcaaaat

SEQ ID NO: 35469 - DNA, 15 bp, Homo sapiens
aggagcctttcaaaa

SEQ ID NO: 35470 - DNA, 15 bp, Homo sapiens
gaggagcctttcaaa

SEQ ID NO: 35471 - DNA, 15 bp, Homo sapiens
tgaggagcctttcaa

SEQ ID NO: 35472 - DNA, 15 bp, Homo sapiens
ctgaggagcctttca

SEQ ID NO: 35473 - DNA, 15 bp, Homo sapiens
gctgaggagcctttc

SEQ ID NO: 35474 - DNA, 15 bp, Homo sapiens
agctgaggagccttt

SEQ ID NO: 35475 - DNA, 15 bp, Homo sapiens
aagctgaggagcctt

SEQ ID NO: 35476 - DNA, 15 bp, Homo sapiens
taagctgaggagcct

SEQ ID NO: 35477 - DNA, 15 bp, Homo sapiens
ataagctgaggagcc

SEQ ID NO: 35478 - DNA, 15 bp, Homo sapiens
tataagctgaggagc

SEQ ID NO: 35479 - DNA, 15 bp, Homo sapiens
gtataagctgaggag

SEQ ID NO: 35480 - DNA, 15 bp, Homo sapiens
ggtataagctgagga

SEQ ID NO: 35481 - DNA, 15 bp, Homo sapiens
aggtataagctgagg

SEQ ID NO: 35482 - DNA, 15 bp, Homo sapiens
aaggtataagctgag

SEQ ID NO: 35483 - DNA, 15 bp, Homo sapiens
aaaggtataagctga

SEQ ID NO: 35484 - DNA, 15 bp, Homo sapiens
gaaaggtataagctg

SEQ ID NO: 35485 - DNA, 15 bp, Homo sapiens
ggaaaggtataagct

SEQ ID NO: 35486 - DNA, 15 bp, Homo sapiens
aggaaaggtataagc

SEQ ID NO: 35487 - DNA, 15 bp, Homo sapiens
aaggaaaggtataag

SEQ ID NO: 35488 - DNA, 15 bp, Homo sapiens
taaggaaaggtataa

SEQ ID NO: 35489 - DNA, 15 bp, Homo sapiens
gtaaggaaaggtata

SEQ ID NO: 35490 - DNA, 15 bp, Homo sapiens
tgtaaggaaaggtat

SEQ ID NO: 35491 - DNA, 15 bp, Homo sapiens
ttgtaaggaaaggta

SEQ ID NO: 35492 - DNA, 15 bp, Homo sapiens
tttgtaaggaaaggt

SEQ ID NO: 35493 - DNA, 15 bp, Homo sapiens
atttgtaaggaaagg

SEQ ID NO: 35494 - DNA, 15 bp, Homo sapiens
catttgtaaggaaag

SEQ ID NO: 35495 - DNA, 15 bp, Homo sapiens
gcatttgtaaggaaa

SEQ ID NO: 35496 - DNA, 15 bp, Homo sapiens
agcatttgtaaggaa

SEQ ID NO: 35497 - DNA, 15 bp, Homo sapiens
aagcatttgtaagga

SEQ ID NO: 35498 - DNA, 15 bp, Homo sapiens
gaagcatttgtaagg

SEQ ID NO: 35499 - DNA, 15 bp, Homo sapiens
ggaagcatttgtaag

SEQ ID NO: 35500 - DNA, 15 bp, Homo sapiens
aggaagcatttgtaa

SEQ ID NO: 35501 - DNA, 15 bp, Homo sapiens
aaggaagcatttgta

SEQ ID NO: 35502 - DNA, 15 bp, Homo sapiens
taaggaagcatttgt

SEQ ID NO: 35503 - DNA, 15 bp, Homo sapiens
gtaaggaagcatttg

SEQ ID NO: 35504 - DNA, 15 bp, Homo sapiens
tgtaaggaagcattt

SEQ ID NO: 35505 - DNA, 15 bp, Homo sapiens
ttgtaaggaagcatt

SEQ ID NO: 35506 - DNA, 15 bp, Homo sapiens
tttgtaaggaagcat

SEQ ID NO: 35507 - DNA, 15 bp, Homo sapiens
atttgtaaggaagca

SEQ ID NO: 35508 - DNA, 15 bp, Homo sapiens
catttgtaaggaagc

SEQ ID NO: 35509 - DNA, 15 bp, Homo sapiens
gcatttgtaaggaag

SEQ ID NO: 35510 - DNA, 15 bp, Homo sapiens
tagcatttgtaagga

SEQ ID NO: 35511 - DNA, 15 bp, Homo sapiens
ttagcatttgtaagg

SEQ ID NO: 35512 - DNA, 15 bp, Homo sapiens
tttagcatttgtaag

SEQ ID NO: 35513 - DNA, 15 bp, Homo sapiens
ctttagcatttgtaa

SEQ ID NO: 35514 - DNA, 15 bp, Homo sapiens
gctttagcatttgta

SEQ ID NO: 35515 - DNA, 15 bp, Homo sapiens
tgctttagcatttgt

SEQ ID NO: 35516 - DNA, 15 bp, Homo sapiens
atgctttagcatttg

SEQ ID NO: 35517 - DNA, 15 bp, Homo sapiens
aatgctttagcattt

SEQ ID NO: 35518 - DNA, 15 bp, Homo sapiens
aaatgctttagcatt

SEQ ID NO: 35519 - DNA, 15 bp, Homo sapiens
taaatgctttagcat

SEQ ID NO: 35520 - DNA, 15 bp, Homo sapiens
ttaaatgctttagca

SEQ ID NO: 35521 - DNA, 15 bp, Homo sapiens
attaaatgctttagc

SEQ ID NO: 35522 - DNA, 15 bp, Homo sapiens
cattaaatgctttag

SEQ ID NO: 35523 - DNA, 15 bp, Homo sapiens
tcattaaatgcttta

SEQ ID NO: 35524 - DNA, 15 bp, Homo sapiens
gtcattaaatgcttt

SEQ ID NO: 35525 - DNA, 15 bp, Homo sapiens
agtcattaaatgctt

SEQ ID NO: 35526 - DNA, 15 bp, Homo sapiens
gagtcattaaatgct

SEQ ID NO: 35527 - DNA, 15 bp, Homo sapiens
ggagtcattaaatgc

SEQ ID NO: 35528 - DNA, 15 bp, Homo sapiens
aggagtcattaaatg

SEQ ID NO: 35529 - DNA, 15 bp, Homo sapiens
caggagtcattaaat

SEQ ID NO: 35530 - DNA, 15 bp, Homo sapiens
tcaggagtcattaaa

SEQ ID NO: 35531 - DNA, 15 bp, Homo sapiens
gtcaggagtcattaa

SEQ ID NO: 35532 - DNA, 15 bp, Homo sapiens
agtcaggagtcatta

SEQ ID NO: 35533 - DNA, 15 bp, Homo sapiens
aagtcaggagtcatt

SEQ ID NO: 35534 - DNA, 15 bp, Homo sapiens
taagtcaggagtcat

SEQ ID NO: 35535 - DNA, 15 bp, Homo sapiens
ttaagtcaggagtca

SEQ ID NO: 35536 - DNA, 15 bp, Homo sapiens
tttaagtcaggagtc

SEQ ID NO: 35537 - DNA, 15 bp, Homo sapiens
ctttaagtcaggagt

SEQ ID NO: 35538 - DNA, 15 bp, Homo sapiens
cctttaagtcaggag

SEQ ID NO: 35539 - DNA, 15 bp, Homo sapiens
ccctttaagtcagga

SEQ ID NO: 35540 - DNA, 15 bp, Homo sapiens
tccctttaagtcagg

SEQ ID NO: 35541 - DNA, 15 bp, Homo sapiens
ttccctttaagtcag

SEQ ID NO: 35542 - DNA, 15 bp, Homo sapiens
attccctttaagtca

SEQ ID NO: 35543 - DNA, 15 bp, Homo sapiens
aattccctttaagtc

SEQ ID NO: 35544 - DNA, 15 bp, Homo sapiens
aaattccctttaagt

SEQ ID NO: 35545 - DNA, 15 bp, Homo sapiens
caaattccctttaag

SEQ ID NO: 35546 - DNA, 15 bp, Homo sapiens
ccaaattccctttaa

SEQ ID NO: 35547 - DNA, 15 bp, Homo sapiens
tccaaattcccttta

SEQ ID NO: 35548 - DNA, 15 bp, Homo sapiens
gtccaaattcccttt

SEQ ID NO: 35549 - DNA, 15 bp, Homo sapiens
tgtccaaattccctt

SEQ ID NO: 35550 - DNA, 15 bp, Homo sapiens
ctgtccaaattccct

SEQ ID NO: 35551 - DNA, 15 bp, Homo sapiens
tctgtccaaattccc

SEQ ID NO: 35552 - DNA, 15 bp, Homo sapiens
atctgtccaaattcc

SEQ ID NO: 35553 - DNA, 15 bp, Homo sapiens
aatctgtccaaattc

SEQ ID NO: 35554 - DNA, 15 bp, Homo sapiens
caatctgtccaaatt

SEQ ID NO: 35555 - DNA, 15 bp, Homo sapiens
tcaatctgtccaaat

SEQ ID NO: 35556 - DNA, 15 bp, Homo sapiens
ctcaatctgtccaaa

SEQ ID NO: 35557 - DNA, 15 bp, Homo sapiens
cctcaatctgtccaa

SEQ ID NO: 35558 - DNA, 15 bp, Homo sapiens
acctcaatctgtcca

SEQ ID NO: 35559 - DNA, 15 bp, Homo sapiens
aacctcaatctgtcc

SEQ ID NO: 35560 - DNA, 15 bp, Homo sapiens
caacctcaatctgtc

SEQ ID NO: 35561 - DNA, 15 bp, Homo sapiens
acaacctcaatctgt

SEQ ID NO: 35562 - DNA, 15 bp, Homo sapiens
aacaacctcaatctg

SEQ ID NO: 35563 - DNA, 15 bp, Homo sapiens
caacaacctcaatct

SEQ ID NO: 35564 - DNA, 15 bp, Homo sapiens
ccaacaacctcaatc

SEQ ID NO: 35565 - DNA, 15 bp, Homo sapiens
accaacaacctcaat

SEQ ID NO: 35566 - DNA, 15 bp, Homo sapiens
gaccaacaacctcaa

SEQ ID NO: 35567 - DNA, 15 bp, Homo sapiens
agaccaacaacctca

SEQ ID NO: 35568 - DNA, 15 bp, Homo sapiens
aagaccaacaacctc

SEQ ID NO: 35569 - DNA, 15 bp, Homo sapiens
caagaccaacaacct

SEQ ID NO: 35570 - DNA, 15 bp, Homo sapiens
ccaagaccaacaacc

SEQ ID NO: 35571 - DNA, 15 bp, Homo sapiens
tccaagaccaacaac

SEQ ID NO: 35572 - DNA, 15 bp, Homo sapiens
ttccaagaccaacaa

SEQ ID NO: 35573 - DNA, 15 bp, Homo sapiens
tttccaagaccaaca

SEQ ID NO: 35574 - DNA, 15 bp, Homo sapiens
atttccaagaccaac

SEQ ID NO: 35575 - DNA, 15 bp, Homo sapiens
tatttccaagaccaa

SEQ ID NO: 35576 - DNA, 15 bp, Homo sapiens
atatttccaagacca

SEQ ID NO: 35577 - DNA, 15 bp, Homo sapiens
tatatttccaagacc

SEQ ID NO: 35578 - DNA, 15 bp, Homo sapiens
ttatatttccaagac

SEQ ID NO: 35579 - DNA, 15 bp, Homo sapiens
attatatttccaaga

SEQ ID NO: 35580 - DNA, 15 bp, Homo sapiens
tattatatttccaag

SEQ ID NO: 35581 - DNA, 15 bp, Homo sapiens
gtattatatttccaa

SEQ ID NO: 35582 - DNA, 15 bp, Homo sapiens
agtattatatttcca

SEQ ID NO: 35583 - DNA, 15 bp, Homo sapiens
cagtattatatttcc

SEQ ID NO: 35584 - DNA, 15 bp, Homo sapiens
gcagtattatatttc

SEQ ID NO: 35585 - DNA, 15 bp, Homo sapiens
tgcagtattatattt

SEQ ID NO: 35586 - DNA, 15 bp, Homo sapiens
ctgcagtattatatt

SEQ ID NO: 35587 - DNA, 15 bp, Homo sapiens
cctgcagtattatat

SEQ ID NO: 35588 - DNA, 15 bp, Homo sapiens
gcctgcagtattata

SEQ ID NO: 35589 - DNA, 15 bp, Homo sapiens
agcctgcagtattat

SEQ ID NO: 35590 - DNA, 15 bp, Homo sapiens
aagcctgcagtatta

SEQ ID NO: 35591 - DNA, 15 bp, Homo sapiens
gaagcctgcagtatt

SEQ ID NO: 35592 - DNA, 15 bp, Homo sapiens
agaagcctgcagtat

SEQ ID NO: 35593 - DNA, 15 bp, Homo sapiens
cagaagcctgcagta

SEQ ID NO: 35594 - DNA, 15 bp, Homo sapiens
acagaagcctgcagt

SEQ ID NO: 35595 - DNA, 15 bp, Homo sapiens
tacagaagcctgcag

SEQ ID NO: 35596 - DNA, 15 bp, Homo sapiens
ttacagaagcctgca

SEQ ID NO: 35597 - DNA, 15 bp, Homo sapiens
tttacagaagcctgc

SEQ ID NO: 35598 - DNA, 15 bp, Homo sapiens
ttttacagaagcctg

SEQ ID NO: 35599 - DNA, 15 bp, Homo sapiens
attttacagaagcct

SEQ ID NO: 35600 - DNA, 15 bp, Homo sapiens
tattttacagaagcc

SEQ ID NO: 35601 - DNA, 15 bp, Homo sapiens
gtattttacagaagc

SEQ ID NO: 35602 - DNA, 15 bp, Homo sapiens
agtattttacagaag

SEQ ID NO: 35603 - DNA, 15 bp, Homo sapiens
aagtattttacagaa

SEQ ID NO: 35604 - DNA, 15 bp, Homo sapiens
caagtattttacaga

SEQ ID NO: 35605 - DNA, 15 bp, Homo sapiens
tcaagtattttacag

SEQ ID NO: 35606 - DNA, 15 bp, Homo sapiens
ttcaagtattttaca

SEQ ID NO: 35607 - DNA, 15 bp, Homo sapiens
tttcaagtattttac

SEQ ID NO: 35608 - DNA, 15 bp, Homo sapiens
atttcaagtatttta

SEQ ID NO: 35609 - DNA, 15 bp, Homo sapiens
catttcaagtatttt

SEQ ID NO: 35610 - DNA, 15 bp, Homo sapiens
acatttcaagtattt

SEQ ID NO: 35611 - DNA, 15 bp, Homo sapiens
tacatttcaagtatt

SEQ ID NO: 35612 - DNA, 15 bp, Homo sapiens
ttacatttcaagtat

SEQ ID NO: 35613 - DNA, 15 bp, Homo sapiens
attacatttcaagta

SEQ ID NO: 35614 - DNA, 15 bp, Homo sapiens
aattacatttcaagt

SEQ ID NO: 35615 - DNA, 15 bp, Homo sapiens
caattacatttcaag

SEQ ID NO: 35616 - DNA, 15 bp, Homo sapiens
acaattacatttcaa

SEQ ID NO: 35617 - DNA, 15 bp, Homo sapiens
aacaattacatttca

SEQ ID NO: 35618 - DNA, 15 bp, Homo sapiens
aaacaattacatttc

SEQ ID NO: 35619 - DNA, 15 bp, Homo sapiens
aaaacaattacattt

SEQ ID NO: 35620 - DNA, 15 bp, Homo sapiens
taaaacaattacatt

SEQ ID NO: 35621 - DNA, 15 bp, Homo sapiens
ttaaaacaattacat

SEQ ID NO: 35622 - DNA, 15 bp, Homo sapiens
tttaaaacaattaca

SEQ ID NO: 35623 - DNA, 15 bp, Homo sapiens
ttttaaaacaattac

SEQ ID NO: 35624 - DNA, 15 bp, Homo sapiens
gttttaaaacaatta

SEQ ID NO: 35625 - DNA, 15 bp, Homo sapiens
agttttaaaacaatt

SEQ ID NO: 35626 - DNA, 15 bp, Homo sapiens
aagttttaaaacaat

SEQ ID NO: 35627 - DNA, 15 bp, Homo sapiens
aaagttttaaaacaa

SEQ ID NO: 35628 - DNA, 15 bp, Homo sapiens
gaaagttttaaaaca

SEQ ID NO: 35629 - DNA, 15 bp, Homo sapiens
tgaaagttttaaaac

SEQ ID NO: 35630 - DNA, 15 bp, Homo sapiens
ttgaaagttttaaaa

SEQ ID NO: 35631 - DNA, 15 bp, Homo sapiens
tttgaaagttttaaa

SEQ ID NO: 35632 - DNA, 15 bp, Homo sapiens
ctttgaaagttttaa

SEQ ID NO: 35633 - DNA, 15 bp, Homo sapiens
tctttgaaagtttta

SEQ ID NO: 35634 - DNA, 15 bp, Homo sapiens
atctttgaaagtttt

SEQ ID NO: 35635 - DNA, 15 bp, Homo sapiens
tatctttgaaagttt

SEQ ID NO: 35636 - DNA, 15 bp, Homo sapiens
gtatctttgaaagtt

SEQ ID NO: 35637 - DNA, 15 bp, Homo sapiens
ggtatctttgaaagt

SEQ ID NO: 35638 - DNA, 15 bp, Homo sapiens
tggtatctttgaaag

SEQ ID NO: 35639 - DNA, 15 bp, Homo sapiens
gtggtatctttgaaa

SEQ ID NO: 35640 - DNA, 15 bp, Homo sapiens
agtggtatctttgaa

SEQ ID NO: 35641 - DNA, 15 bp, Homo sapiens
aagtggtatctttga

SEQ ID NO: 35642 - DNA, 15 bp, Homo sapiens
caagtggtatctttg

SEQ ID NO: 35643 - DNA, 15 bp, Homo sapiens
acaagtggtatcttt

SEQ ID NO: 35644 - DNA, 15 bp, Homo sapiens
aacaagtggtatctt

SEQ ID NO: 35645 - DNA, 15 bp, Homo sapiens
aaacaagtggtatct

SEQ ID NO: 35646 - DNA, 15 bp, Homo sapiens
caaacaagtggtatc

SEQ ID NO: 35647 - DNA, 15 bp, Homo sapiens
gcaaacaagtggtat

SEQ ID NO: 35648 - DNA, 15 bp, Homo sapiens
ggcaaacaagtggta

SEQ ID NO: 35649 - DNA, 15 bp, Homo sapiens
aggcaaacaagtggt

SEQ ID NO: 35650 - DNA, 15 bp, Homo sapiens
caggcaaacaagtgg

SEQ ID NO: 35651 - DNA, 15 bp, Homo sapiens
acaggcaaacaagtg

SEQ ID NO: 35652 - DNA, 15 bp, Homo sapiens
aacaggcaaacaagt

SEQ ID NO: 35653 - DNA, 15 bp, Homo sapiens
caacaggcaaacaag

SEQ ID NO: 35654 - DNA, 15 bp, Homo sapiens
ccaacaggcaaacaa

SEQ ID NO: 35655 - DNA, 15 bp, Homo sapiens
accaacaggcaaaca

SEQ ID NO: 35656 - DNA, 15 bp, Homo sapiens
aaccaacaggcaaac

SEQ ID NO: 35657 - DNA, 15 bp, Homo sapiens
taaccaacaggcaaa

SEQ ID NO: 35658 - DNA, 15 bp, Homo sapiens
ctaaccaacaggcaa

SEQ ID NO: 35659 - DNA, 15 bp, Homo sapiens
tctaaccaacaggca

SEQ ID NO: 35660 - DNA, 15 bp, Homo sapiens
ttctaaccaacaggc

SEQ ID NO: 35661 - DNA, 15 bp, Homo sapiens
attctaaccaacagg

SEQ ID NO: 35662 - DNA, 15 bp, Homo sapiens
tattctaaccaacag

SEQ ID NO: 35663 - DNA, 15 bp, Homo sapiens
gtattctaaccaaca

SEQ ID NO: 35664 - DNA, 15 bp, Homo sapiens
agtattctaaccaac

SEQ ID NO: 35665 - DNA, 15 bp, Homo sapiens
cagtattctaaccaa

SEQ ID NO: 35666 - DNA, 15 bp, Homo sapiens
ccagtattctaacca

SEQ ID NO: 35667 - DNA, 15 bp, Homo sapiens
accagtattctaacc

SEQ ID NO: 35668 - DNA, 15 bp, Homo sapiens
caccagtattctaac

SEQ ID NO: 35669 - DNA, 15 bp, Homo sapiens
tcaccagtattctaa

SEQ ID NO: 35670 - DNA, 15 bp, Homo sapiens
ttcaccagtattcta

SEQ ID NO: 35671 - DNA, 15 bp, Homo sapiens
tttcaccagtattct

SEQ ID NO: 35672 - DNA, 15 bp, Homo sapiens
atttcaccagtattc

SEQ ID NO: 35673 - DNA, 15 bp, Homo sapiens
tatttcaccagtatt

SEQ ID NO: 35674 - DNA, 15 bp, Homo sapiens
ttatttcaccagtat

SEQ ID NO: 35675 - DNA, 15 bp, Homo sapiens
attatttcaccagta

SEQ ID NO: 35676 - DNA, 15 bp, Homo sapiens
aattatttcaccagt

SEQ ID NO: 35677 - DNA, 15 bp, Homo sapiens
aaattatttcaccag

SEQ ID NO: 35678 - DNA, 15 bp, Homo sapiens
aaaattatttcacca

SEQ ID NO: 35679 - DNA, 15 bp, Homo sapiens
aaaaattatttcacc

SEQ ID NO: 35680 - DNA, 15 bp, Homo sapiens
taaaaattatttcac

SEQ ID NO: 35681 - DNA, 15 bp, Homo sapiens
ttaaaaattatttca

SEQ ID NO: 35682 - DNA, 15 bp, Homo sapiens
attaaaaattatttc

SEQ ID NO: 35683 - DNA, 15 bp, Homo sapiens
gattaaaaattattt

SEQ ID NO: 35684 - DNA, 15 bp, Homo sapiens
agattaaaaattatt

SEQ ID NO: 35685 - DNA, 15 bp, Homo sapiens
aagattaaaaattat

SEQ ID NO: 35686 - DNA, 15 bp, Homo sapiens
aaagattaaaaatta

SEQ ID NO: 35687 - DNA, 15 bp, Homo sapiens
aaaagattaaaaatt

SEQ ID NO: 35688 - DNA, 15 bp, Homo sapiens
taaaagattaaaaat

SEQ ID NO: 35689 - DNA, 15 bp, Homo sapiens
ataaaagattaaaaa

SEQ ID NO: 35690 - DNA, 15 bp, Homo sapiens
cataaaagattaaaa

SEQ ID NO: 35691 - DNA, 15 bp, Homo sapiens
tcataaaagattaaa

SEQ ID NO: 35692 - DNA, 15 bp, Homo sapiens
ttcataaaagattaa

SEQ ID NO: 35693 - DNA, 15 bp, Homo sapiens
attcataaaagatta

SEQ ID NO: 35694 - DNA, 15 bp, Homo sapiens
tattcataaaagatt

SEQ ID NO: 35695 - DNA, 15 bp, Homo sapiens
ttattcataaaagat

SEQ ID NO: 35696 - DNA, 15 bp, Homo sapiens
gttattcataaaaga

SEQ ID NO: 35697 - DNA, 15 bp, Homo sapiens
agttattcataaaag

SEQ ID NO: 35698 - DNA, 15 bp, Homo sapiens
tagttattcataaaa

SEQ ID NO: 35699 - DNA, 15 bp, Homo sapiens
ttagttattcataaa

SEQ ID NO: 35700 - DNA, 15 bp, Homo sapiens
attagttattcataa

SEQ ID NO: 35701 - DNA, 15 bp, Homo sapiens
aattagttattcata

SEQ ID NO: 35702 - DNA, 15 bp, Homo sapiens
aaattagttattcat

SEQ ID NO: 35703 - DNA, 15 bp, Homo sapiens
gaaattagttattca

SEQ ID NO: 35704 - DNA, 15 bp, Homo sapiens
tgaaattagttattc

SEQ ID NO: 35705 - DNA, 15 bp, Homo sapiens
atgaaattagttatt

SEQ ID NO: 35706 - DNA, 15 bp, Homo sapiens
gatgaaattagttat

SEQ ID NO: 35707 - DNA, 15 bp, Homo sapiens
tgatgaaattagtta

SEQ ID NO: 35708 - DNA, 15 bp, Homo sapiens
atgatgaaattagtt

SEQ ID NO: 35709 - DNA, 15 bp, Homo sapiens
tatgatgaaattagt

SEQ ID NO: 35710 - DNA, 15 bp, Homo sapiens
ttatgatgaaattag

SEQ ID NO: 35711 - DNA, 15 bp, Homo sapiens
cttatgatgaaatta

SEQ ID NO: 35712 - DNA, 15 bp, Homo sapiens
tcttatgatgaaatt

SEQ ID NO: 35713 - DNA, 15 bp, Homo sapiens
ttcttatgatgaaat

SEQ ID NO: 35714 - DNA, 15 bp, Homo sapiens
tttcttatgatgaaa

SEQ ID NO: 35715 - DNA, 15 bp, Homo sapiens
ttttcttatgatgaa

SEQ ID NO: 35716 - DNA, 15 bp, Homo sapiens
gttttcttatgatga

SEQ ID NO: 35717 - DNA, 15 bp, Homo sapiens
agttttcttatgatg

SEQ ID NO: 35718 - DNA, 15 bp, Homo sapiens
aagttttcttatgat

SEQ ID NO: 35719 - DNA, 15 bp, Homo sapiens
taagttttcttatga

SEQ ID NO: 35720 - DNA, 15 bp, Homo sapiens
ctaagttttcttatg

SEQ ID NO: 35721 - DNA, 15 bp, Homo sapiens
gctaagttttcttat

SEQ ID NO: 35722 - DNA, 15 bp, Homo sapiens
agctaagttttctta

SEQ ID NO: 35723 - DNA, 15 bp, Homo sapiens
tagctaagttttctt

SEQ ID NO: 35724 - DNA, 15 bp, Homo sapiens
ttagctaagttttct

SEQ ID NO: 35725 - DNA, 15 bp, Homo sapiens
cttagctaagttttc

SEQ ID NO: 35726 - DNA, 15 bp, Homo sapiens
gcttagctaagtttt

SEQ ID NO: 35727 - DNA, 15 bp, Homo sapiens
tgcttagctaagttt

SEQ ID NO: 35728 - DNA, 15 bp, Homo sapiens
atgcttagctaagtt

SEQ ID NO: 35729 - DNA, 15 bp, Homo sapiens
catgcttagctaagt

SEQ ID NO: 35730 - DNA, 15 bp, Homo sapiens
ccatgcttagctaag

SEQ ID NO: 35731 - DNA, 15 bp, Homo sapiens
accatgcttagctaa

SEQ ID NO: 35732 - DNA, 15 bp, Homo sapiens
taccatgcttagcta

SEQ ID NO: 35733 - DNA, 15 bp, Homo sapiens
ttaccatgcttagct

SEQ ID NO: 35734 - DNA, 15 bp, Homo sapiens
tttaccatgcttagc

SEQ ID NO: 35735 - DNA, 15 bp, Homo sapiens
ctttaccatgcttag

SEQ ID NO: 35736 - DNA, 15 bp, Homo sapiens
gctttaccatgctta

SEQ ID NO: 35737 - DNA, 15 bp, Homo sapiens
agctttaccatgctt

SEQ ID NO: 35738 - DNA, 15 bp, Homo sapiens
cagctttaccatgct

SEQ ID NO: 35739 - DNA, 15 bp, Homo sapiens
acagctttaccatgc

SEQ ID NO: 35740 - DNA, 15 bp, Homo sapiens
aacagctttaccatg

SEQ ID NO: 35741 - DNA, 15 bp, Homo sapiens
caacagctttaccat

SEQ ID NO: 35742 - DNA, 15 bp, Homo sapiens
acaacagctttacca

SEQ ID NO: 35743 - DNA, 15 bp, Homo sapiens
aacaacagctttacc

SEQ ID NO: 35744 - DNA, 15 bp, Homo sapiens
taacaacagctttac

SEQ ID NO: 35745 - DNA, 15 bp, Homo sapiens
ataacaacagcttta

SEQ ID NO: 35746 - DNA, 15 bp, Homo sapiens
tataacaacagcttt

SEQ ID NO: 35747 - DNA, 15 bp, Homo sapiens
gtataacaacagctt

SEQ ID NO: 35748 - DNA, 15 bp, Homo sapiens
tgtataacaacagct

SEQ ID NO: 35749 - DNA, 15 bp, Homo sapiens
ttgtataacaacagc

SEQ ID NO: 35750 - DNA, 15 bp, Homo sapiens
gttgtataacaacag

SEQ ID NO: 35751 - DNA, 15 bp, Homo sapiens
agttgtataacaaca

SEQ ID NO: 35752 - DNA, 15 bp, Homo sapiens
cagttgtataacaac

SEQ ID NO: 35753 - DNA, 15 bp, Homo sapiens
acagttgtataacaa

SEQ ID NO: 35754 - DNA, 15 bp, Homo sapiens
cacagttgtataaca

SEQ ID NO: 35755 - DNA, 15 bp, Homo sapiens
ccacagttgtataac

SEQ ID NO: 35756 - DNA, 15 bp, Homo sapiens
tccacagttgtataa

SEQ ID NO: 35757 - DNA, 15 bp, Homo sapiens
ttccacagttgtata

SEQ ID NO: 35758 - DNA, 15 bp, Homo sapiens
attccacagttgtat

SEQ ID NO: 35759 - DNA, 15 bp, Homo sapiens
aattccacagttgta

SEQ ID NO: 35760 - DNA, 15 bp, Homo sapiens
gaattccacagttgt

SEQ ID NO: 35761 - DNA, 15 bp, Homo sapiens
agaattccacagttg

SEQ ID NO: 35762 - DNA, 15 bp, Homo sapiens
aagaattccacagtt

SEQ ID NO: 35763 - DNA, 15 bp, Homo sapiens
gaagaattccacagt

SEQ ID NO: 35764 - DNA, 15 bp, Homo sapiens
ggaagaattccacag

SEQ ID NO: 35765 - DNA, 15 bp, Homo sapiens
aggaagaattccaca

SEQ ID NO: 35766 - DNA, 15 bp, Homo sapiens
caggaagaattccac

SEQ ID NO: 35767 - DNA, 15 bp, Homo sapiens
tcaggaagaattcca

SEQ ID NO: 35768 - DNA, 15 bp, Homo sapiens
ctcaggaagaattcc

SEQ ID NO: 35769 - DNA, 15 bp, Homo sapiens
cctcaggaagaattc

SEQ ID NO: 35770 - DNA, 15 bp, Homo sapiens
tcctcaggaagaatt

SEQ ID NO: 35771 - DNA, 15 bp, Homo sapiens
ctcctcaggaagaat

SEQ ID NO: 35772 - DNA, 15 bp, Homo sapiens
actcctcaggaagaa

SEQ ID NO: 35773 - DNA, 15 bp, Homo sapiens
tactcctcaggaaga

SEQ ID NO: 35774 - DNA, 15 bp, Homo sapiens
ttactcctcaggaag

SEQ ID NO: 35775 - DNA, 15 bp, Homo sapiens
gttactcctcaggaa

SEQ ID NO: 35776 - DNA, 15 bp, Homo sapiens
agttactcctcagga

SEQ ID NO: 35777 - DNA, 15 bp, Homo sapiens
tagttactcctcagg

SEQ ID NO: 35778 - DNA, 15 bp, Homo sapiens
atagttactcctcag

SEQ ID NO: 35779 - DNA, 15 bp, Homo sapiens
gatagttactcctca

SEQ ID NO: 35780 - DNA, 15 bp, Homo sapiens
agatagttactcctc

SEQ ID NO: 35781 - DNA, 15 bp, Homo sapiens
aagatagttactcct

SEQ ID NO: 35782 - DNA, 15 bp, Homo sapiens
taagatagttactcc

SEQ ID NO: 35783 - DNA, 15 bp, Homo sapiens
ataagatagttactc

SEQ ID NO: 35784 - DNA, 15 bp, Homo sapiens
tataagatagttact

SEQ ID NO: 35785 - DNA, 15 bp, Homo sapiens
ttataagatagttac

SEQ ID NO: 35786 - DNA, 15 bp, Homo sapiens
attataagatagtta

SEQ ID NO: 35787 - DNA, 15 bp, Homo sapiens
tattataagatagtt

SEQ ID NO: 35788 - DNA, 15 bp, Homo sapiens
ttattataagatagt

SEQ ID NO: 35789 - DNA, 15 bp, Homo sapiens
tttattataagatag

SEQ ID NO: 35790 - DNA, 15 bp, Homo sapiens
atttattataagata

SEQ ID NO: 35791 - DNA, 15 bp, Homo sapiens
catttattataagat

SEQ ID NO: 35792 - DNA, 15 bp, Homo sapiens
acatttattataaga

SEQ ID NO: 35793 - DNA, 15 bp, Homo sapiens
tacatttattataag

SEQ ID NO: 35794 - DNA, 15 bp, Homo sapiens
ctacatttattataa

SEQ ID NO: 35795 - DNA, 15 bp, Homo sapiens
actacatttattata

SEQ ID NO: 35796 - DNA, 15 bp, Homo sapiens
aactacatttattat

SEQ ID NO: 35797 - DNA, 15 bp, Homo sapiens
caactacatttatta

SEQ ID NO: 35798 - DNA, 15 bp, Homo sapiens
tcaactacatttatt

SEQ ID NO: 35799 - DNA, 15 bp, Homo sapiens
atcaactacatttat

SEQ ID NO: 35800 - DNA, 15 bp, Homo sapiens
aatcaactacattta

SEQ ID NO: 35801 - DNA, 15 bp, Homo sapiens
taatcaactacattt

SEQ ID NO: 35802 - DNA, 15 bp, Homo sapiens
ataatcaactacatt

SEQ ID NO: 35803 - DNA, 15 bp, Homo sapiens
gataatcaactacat

SEQ ID NO: 35804 - DNA, 15 bp, Homo sapiens
agataatcaactaca

SEQ ID NO: 35805 - DNA, 15 bp, Homo sapiens
tagataatcaactac

SEQ ID NO: 35806 - DNA, 15 bp, Homo sapiens
ttagataatcaacta

SEQ ID NO: 35807 - DNA, 15 bp, Homo sapiens
tttagataatcaact

SEQ ID NO: 35808 - DNA, 15 bp, Homo sapiens
ctttagataatcaac

SEQ ID NO: 35809 - DNA, 15 bp, Homo sapiens
actttagataatcaa

SEQ ID NO: 35810 - DNA, 15 bp, Homo sapiens
tactttagataatca

SEQ ID NO: 35811 - DNA, 15 bp, Homo sapiens
ctactttagataatc

SEQ ID NO: 35812 - DNA, 15 bp, Homo sapiens
actactttagataat

SEQ ID NO: 35813 - DNA, 15 bp, Homo sapiens
aactactttagataa

SEQ ID NO: 35814 - DNA, 15 bp, Homo sapiens
aaactactttagata

SEQ ID NO: 35815 - DNA, 15 bp, Homo sapiens
aaaactactttagat

SEQ ID NO: 35816 - DNA, 15 bp, Homo sapiens
taaaactactttaga

SEQ ID NO: 35817 - DNA, 15 bp, Homo sapiens
ataaaactactttag

SEQ ID NO: 35818 - DNA, 15 bp, Homo sapiens
aataaaactacttta

SEQ ID NO: 35819 - DNA, 15 bp, Homo sapiens
gaataaaactacttt

SEQ ID NO: 35820 - DNA, 15 bp, Homo sapiens
agaataaaactactt

SEQ ID NO: 35821 - DNA, 15 bp, Homo sapiens
aagaataaaactact

SEQ ID NO: 35822 - DNA, 15 bp, Homo sapiens
caagaataaaactac

SEQ ID NO: 35823 - DNA, 15 bp, Homo sapiens
ccaagaataaaacta

SEQ ID NO: 35824 - DNA, 15 bp, Homo sapiens
tccaagaataaaact

SEQ ID NO: 35825 - DNA, 15 bp, Homo sapiens
ttccaagaataaaac

SEQ ID NO: 35826 - DNA, 15 bp, Homo sapiens
attccaagaataaaa

SEQ ID NO: 35827 - DNA, 15 bp, Homo sapiens
tattccaagaataaa

SEQ ID NO: 35828 - DNA, 15 bp, Homo sapiens
atattccaagaataa

SEQ ID NO: 35829 - DNA, 15 bp, Homo sapiens
gatattccaagaata

SEQ ID NO: 35830 - DNA, 15 bp, Homo sapiens
agatattccaagaat

SEQ ID NO: 35831 - DNA, 15 bp, Homo sapiens
gagatattccaagaa

SEQ ID NO: 35832 - DNA, 15 bp, Homo sapiens
tgagatattccaaga

SEQ ID NO: 35833 - DNA, 15 bp, Homo sapiens
atgagatattccaag

SEQ ID NO: 35834 - DNA, 15 bp, Homo sapiens
tatgagatattccaa

SEQ ID NO: 35835 - DNA, 15 bp, Homo sapiens
ttatgagatattcca

SEQ ID NO: 35836 - DNA, 15 bp, Homo sapiens
attatgagatattcc

SEQ ID NO: 35837 - DNA, 15 bp, Homo sapiens
tattatgagatattc

SEQ ID NO: 35838 - DNA, 15 bp, Homo sapiens
ctattatgagatatt

SEQ ID NO: 35839 - DNA, 15 bp, Homo sapiens
cctattatgagatat

SEQ ID NO: 35840 - DNA, 15 bp, Homo sapiens
acctattatgagata

SEQ ID NO: 35841 - DNA, 15 bp, Homo sapiens
aacctattatgagat

SEQ ID NO: 35842 - DNA, 15 bp, Homo sapiens
aaacctattatgaga

SEQ ID NO: 35843 - DNA, 15 bp, Homo sapiens
taaacctattatgag

SEQ ID NO: 35844 - DNA, 15 bp, Homo sapiens
ataaacctattatga

SEQ ID NO: 35845 - DNA, 15 bp, Homo sapiens
aataaacctattatg

SEQ ID NO: 35846 - DNA, 15 bp, Homo sapiens
gaataaacctattat

SEQ ID NO: 35847 - DNA, 15 bp, Homo sapiens
agaataaacctatta

SEQ ID NO: 35848 - DNA, 15 bp, Homo sapiens
gagaataaacctatt

SEQ ID NO: 35849 - DNA, 15 bp, Homo sapiens
agagaataaacctat

SEQ ID NO: 35850 - DNA, 15 bp, Homo sapiens
aagagaataaaccta

SEQ ID NO: 35851 - DNA, 15 bp, Homo sapiens
gaagagaataaacct

SEQ ID NO: 35852 - DNA, 15 bp, Homo sapiens
agaagagaataaacc

SEQ ID NO: 35853 - DNA, 15 bp, Homo sapiens
aagaagagaataaac

SEQ ID NO: 35854 - DNA, 15 bp, Homo sapiens
caagaagagaataaa

SEQ ID NO: 35855 - DNA, 15 bp, Homo sapiens
acaagaagagaataa

SEQ ID NO: 35856 - DNA, 15 bp, Homo sapiens
gacaagaagagaata

SEQ ID NO: 35857 - DNA, 15 bp, Homo sapiens
tgacaagaagagaat

SEQ ID NO: 35858 - DNA, 15 bp, Homo sapiens
ctgacaagaagagaa

SEQ ID NO: 35859 - DNA, 15 bp, Homo sapiens
actgacaagaagaga

SEQ ID NO: 35860 - DNA, 15 bp, Homo sapiens
tactgacaagaagag

SEQ ID NO: 35861 - DNA, 15 bp, Homo sapiens
atactgacaagaaga

SEQ ID NO: 35862 - DNA, 15 bp, Homo sapiens
aatactgacaagaag

SEQ ID NO: 35863 - DNA, 15 bp, Homo sapiens
aaatactgacaagaa

SEQ ID NO: 35864 - DNA, 15 bp, Homo sapiens
gaaatactgacaaga

SEQ ID NO: 35865 - DNA, 15 bp, Homo sapiens
ggaaatactgacaag

SEQ ID NO: 35866 - DNA, 15 bp, Homo sapiens
aggaaatactgacaa

SEQ ID NO: 35867 - DNA, 15 bp, Homo sapiens
aaggaaatactgaca

SEQ ID NO: 35868 - DNA, 15 bp, Homo sapiens
caaggaaatactgac

SEQ ID NO: 35869 - DNA, 15 bp, Homo sapiens
acaaggaaatactga

SEQ ID NO: 35870 - DNA, 15 bp, Homo sapiens
tacaaggaaatactg

SEQ ID NO: 35871 - DNA, 15 bp, Homo sapiens
ctacaaggaaatact

SEQ ID NO: 35872 - DNA, 15 bp, Homo sapiens
tctacaaggaaatac

SEQ ID NO: 35873 - DNA, 15 bp, Homo sapiens
atctacaaggaaata

SEQ ID NO: 35874 - DNA, 15 bp, Homo sapiens
aatctacaaggaaat

SEQ ID NO: 35875 - DNA, 15 bp, Homo sapiens
caatctacaaggaaa

SEQ ID NO: 35876 - DNA, 15 bp, Homo sapiens
tcaatctacaaggaa

SEQ ID NO: 35877 - DNA, 15 bp, Homo sapiens
ctcaatctacaagga

SEQ ID NO: 35878 - DNA, 15 bp, Homo sapiens
gctcaatctacaagg

SEQ ID NO: 35879 - DNA, 15 bp, Homo sapiens
ggctcaatctacaag

SEQ ID NO: 35880 - DNA, 15 bp, Homo sapiens
aggctcaatctacaa

SEQ ID NO: 35881 - DNA, 15 bp, Homo sapiens
caggctcaatctaca

SEQ ID NO: 35882 - DNA, 15 bp, Homo sapiens
acaggctcaatctac

SEQ ID NO: 35883 - DNA, 15 bp, Homo sapiens
cacaggctcaatcta

SEQ ID NO: 35884 - DNA, 15 bp, Homo sapiens
ccacaggctcaatct

SEQ ID NO: 35885 - DNA, 15 bp, Homo sapiens
tccacaggctcaatc

SEQ ID NO: 35886 - DNA, 15 bp, Homo sapiens
atccacaggctcaat

SEQ ID NO: 35887 - DNA, 15 bp, Homo sapiens
aatccacaggctcaa

SEQ ID NO: 35888 - DNA, 15 bp, Homo sapiens
aaatccacaggctca

SEQ ID NO: 35889 - DNA, 15 bp, Homo sapiens
caaatccacaggctc

SEQ ID NO: 35890 - DNA, 15 bp, Homo sapiens
gcaaatccacaggct

SEQ ID NO: 35891 - DNA, 15 bp, Homo sapiens
tgcaaatccacaggc

SEQ ID NO: 35892 - DNA, 15 bp, Homo sapiens
atgcaaatccacagg

SEQ ID NO: 35893 - DNA, 15 bp, Homo sapiens
aatgcaaatccacag

SEQ ID NO: 35894 - DNA, 15 bp, Homo sapiens
aaatgcaaatccaca

SEQ ID NO: 35895 - DNA, 15 bp, Homo sapiens
aaaatgcaaatccac

SEQ ID NO: 35896 - DNA, 15 bp, Homo sapiens
aaaaatgcaaatcca

SEQ ID NO: 35897 - DNA, 15 bp, Homo sapiens
caaaaatgcaaatcc

SEQ ID NO: 35898 - DNA, 15 bp, Homo sapiens
acaaaaatgcaaatc

SEQ ID NO: 35899 - DNA, 15 bp, Homo sapiens
tacaaaaatgcaaat

SEQ ID NO: 35900 - DNA, 15 bp, Homo sapiens
ttacaaaaatgcaaa

SEQ ID NO: 35901 - DNA, 15 bp, Homo sapiens
attacaaaaatgcaa

SEQ ID NO: 35902 - DNA, 15 bp, Homo sapiens
aattacaaaaatgca

SEQ ID NO: 35903 - DNA, 15 bp, Homo sapiens
caattacaaaaatgc

SEQ ID NO: 35904 - DNA, 15 bp, Homo sapiens
acaattacaaaaatg

SEQ ID NO: 35905 - DNA, 15 bp, Homo sapiens
cacaattacaaaaat

SEQ ID NO: 35906 - DNA, 15 bp, Homo sapiens
tcacaattacaaaaa

SEQ ID NO: 35907 - DNA, 15 bp, Homo sapiens
ttcacaattacaaaa

SEQ ID NO: 35908 - DNA, 15 bp, Homo sapiens
attcacaattacaaa

SEQ ID NO: 35909 - DNA, 15 bp, Homo sapiens
gattcacaattacaa

SEQ ID NO: 35910 - DNA, 15 bp, Homo sapiens
tgattcacaattaca

SEQ ID NO: 35911 - DNA, 15 bp, Homo sapiens
gtgattcacaattac

SEQ ID NO: 35912 - DNA, 15 bp, Homo sapiens
ggtgattcacaatta

SEQ ID NO: 35913 - DNA, 15 bp, Homo sapiens
tggtgattcacaatt

SEQ ID NO: 35914 - DNA, 15 bp, Homo sapiens
atggtgattcacaat

SEQ ID NO: 35915 - DNA, 15 bp, Homo sapiens
aatggtgattcacaa

SEQ ID NO: 35916 - DNA, 15 bp, Homo sapiens
taatggtgattcaca

SEQ ID NO: 35917 - DNA, 15 bp, Homo sapiens
ataatggtgattcac

SEQ ID NO: 35918 - DNA, 15 bp, Homo sapiens
tataatggtgattca

SEQ ID NO: 35919 - DNA, 15 bp, Homo sapiens
ctataatggtgattc

SEQ ID NO: 35920 - DNA, 15 bp, Homo sapiens
cctataatggtgatt

SEQ ID NO: 35921 - DNA, 15 bp, Homo sapiens
tcctataatggtgat

SEQ ID NO: 35922 - DNA, 15 bp, Homo sapiens
ctcctataatggtga

SEQ ID NO: 35923 - DNA, 15 bp, Homo sapiens
tctcctataatggtg

SEQ ID NO: 35924 - DNA, 15 bp, Homo sapiens
atctcctataatggt

SEQ ID NO: 35925 - DNA, 15 bp, Homo sapiens
tatctcctataatgg

SEQ ID NO: 35926 - DNA, 15 bp, Homo sapiens
gtatctcctataatg

SEQ ID NO: 35927 - DNA, 15 bp, Homo sapiens
tgtatctcctataat

SEQ ID NO: 35928 - DNA, 15 bp, Homo sapiens
atgtatctcctataa

SEQ ID NO: 35929 - DNA, 15 bp, Homo sapiens
catgtatctcctata

SEQ ID NO: 35930 - DNA, 15 bp, Homo sapiens
gcatgtatctcctat

SEQ ID NO: 35931 - DNA, 15 bp, Homo sapiens
tgcatgtatctccta

SEQ ID NO: 35932 - DNA, 15 bp, Homo sapiens
atgcatgtatctcct

SEQ ID NO: 35933 - DNA, 15 bp, Homo sapiens
aatgcatgtatctcc

SEQ ID NO: 35934 - DNA, 15 bp, Homo sapiens
aaatgcatgtatctc

SEQ ID NO: 35935 - DNA, 15 bp, Homo sapiens
aaaatgcatgtatct

SEQ ID NO: 35936 - DNA, 15 bp, Homo sapiens
taaaatgcatgtatc

SEQ ID NO: 35937 - DNA, 15 bp, Homo sapiens
ataaaatgcatgtat

SEQ ID NO: 35938 - DNA, 15 bp, Homo sapiens
gataaaatgcatgta

SEQ ID NO: 35939 - DNA, 15 bp, Homo sapiens
agataaaatgcatgt

SEQ ID NO: 35940 - DNA, 15 bp, Homo sapiens
tagataaaatgcatg

SEQ ID NO: 35941 - DNA, 15 bp, Homo sapiens
gtagataaaatgcat

SEQ ID NO: 35942 - DNA, 15 bp, Homo sapiens
agtagataaaatgca

SEQ ID NO: 35943 - DNA, 15 bp, Homo sapiens
aagtagataaaatgc

SEQ ID NO: 35944 - DNA, 15 bp, Homo sapiens
aaagtagataaaatg

SEQ ID NO: 35945 - DNA, 15 bp, Homo sapiens
aaaagtagataaaat

SEQ ID NO: 35946 - DNA, 15 bp, Homo sapiens
gaaaagtagataaaa

SEQ ID NO: 35947 - DNA, 15 bp, Homo sapiens
tgaaaagtagataaa

SEQ ID NO: 35948 - DNA, 15 bp, Homo sapiens
ctgaaaagtagataa

SEQ ID NO: 35949 - DNA, 15 bp, Homo sapiens
actgaaaagtagata

SEQ ID NO: 35950 - DNA, 15 bp, Homo sapiens
aactgaaaagtagat

SEQ ID NO: 35951 - DNA, 15 bp, Homo sapiens
aaactgaaaagtaga

SEQ ID NO: 35952 - DNA, 15 bp, Homo sapiens
caaactgaaaagtag

SEQ ID NO: 35953 - DNA, 15 bp, Homo sapiens
acaaactgaaaagta

SEQ ID NO: 35954 - DNA, 15 bp, Homo sapiens
tacaaactgaaaagt

SEQ ID NO: 35955 - DNA, 15 bp, Homo sapiens
atacaaactgaaaag

SEQ ID NO: 35956 - DNA, 15 bp, Homo sapiens
catacaaactgaaaa

SEQ ID NO: 35957 - DNA, 15 bp, Homo sapiens
ccatacaaactgaaa

SEQ ID NO: 35958 - DNA, 15 bp, Homo sapiens
cccatacaaactgaa

SEQ ID NO: 35959 - DNA, 15 bp, Homo sapiens
ccccatacaaactga

SEQ ID NO: 35960 - DNA, 15 bp, Homo sapiens
accccatacaaactg

SEQ ID NO: 35961 - DNA, 15 bp, Homo sapiens
aaccccatacaaact

SEQ ID NO: 35962 - DNA, 15 bp, Homo sapiens
taaccccatacaaac

SEQ ID NO: 35963 - DNA, 15 bp, Homo sapiens
ttaaccccatacaaa

SEQ ID NO: 35964 - DNA, 15 bp, Homo sapiens
gttaaccccatacaa

SEQ ID NO: 35965 - DNA, 15 bp, Homo sapiens
agttaaccccataca

SEQ ID NO: 35966 - DNA, 15 bp, Homo sapiens
aagttaaccccatac

SEQ ID NO: 35967 - DNA, 15 bp, Homo sapiens
aaagttaaccccata

SEQ ID NO: 35968 - DNA, 15 bp, Homo sapiens
taaagttaaccccat

SEQ ID NO: 35969 - DNA, 15 bp, Homo sapiens
ataaagttaacccca

SEQ ID NO: 35970 - DNA, 15 bp, Homo sapiens
aataaagttaacccc

SEQ ID NO: 35971 - DNA, 15 bp, Homo sapiens
taataaagttaaccc

SEQ ID NO: 35972 - DNA, 15 bp, Homo sapiens
ctaataaagttaacc

SEQ ID NO: 35973 - DNA, 15 bp, Homo sapiens
tctaataaagttaac

SEQ ID NO: 35974 - DNA, 15 bp, Homo sapiens
ttctaataaagttaa

SEQ ID NO: 35975 - DNA, 15 bp, Homo sapiens
attctaataaagtta

SEQ ID NO: 35976 - DNA, 15 bp, Homo sapiens
aattctaataaagtt

SEQ ID NO: 35977 - DNA, 15 bp, Homo sapiens
taattctaataaagt

SEQ ID NO: 35978 - DNA, 15 bp, Homo sapiens
ataattctaataaag

SEQ ID NO: 35979 - DNA, 15 bp, Homo sapiens
gataattctaataaa

SEQ ID NO: 35980 - DNA, 15 bp, Homo sapiens
agataattctaataa

SEQ ID NO: 35981 - DNA, 15 bp, Homo sapiens
aagataattctaata

SEQ ID NO: 35982 - DNA, 15 bp, Homo sapiens
aaagataattctaat

SEQ ID NO: 35983 - DNA, 15 bp, Homo sapiens
taaagataattctaa

SEQ ID NO: 35984 - DNA, 15 bp, Homo sapiens
ttaaagataattcta

SEQ ID NO: 35985 - DNA, 15 bp, Homo sapiens
attaaagataattct

SEQ ID NO: 35986 - DNA, 15 bp, Homo sapiens
cattaaagataattc

SEQ ID NO: 35987 - DNA, 15 bp, Homo sapiens
acattaaagataatt

SEQ ID NO: 35988 - DNA, 15 bp, Homo sapiens
aacattaaagataat

SEQ ID NO: 35989 - DNA, 15 bp, Homo sapiens
taacattaaagataa

SEQ ID NO: 35990 - DNA, 15 bp, Homo sapiens
ataacattaaagata

SEQ ID NO: 35991 - DNA, 15 bp, Homo sapiens
aataacattaaagat

SEQ ID NO: 35992 - DNA, 15 bp, Homo sapiens
aaataacattaaaga

SEQ ID NO: 35993 - DNA, 15 bp, Homo sapiens
aaaataacattaaag

SEQ ID NO: 35994 - DNA, 15 bp, Homo sapiens
caaaataacattaaa

SEQ ID NO: 35995 - DNA, 15 bp, Homo sapiens
gcaaaataacattaa

SEQ ID NO: 35996 - DNA, 15 bp, Homo sapiens
agcaaaataacatta

SEQ ID NO: 35997 - DNA, 15 bp, Homo sapiens
aagcaaaataacatt

SEQ ID NO: 35998 - DNA, 15 bp, Homo sapiens
taagcaaaataacat

SEQ ID NO: 35999 - DNA, 15 bp, Homo sapiens
ataagcaaaataaca

SEQ ID NO: 36000 - DNA, 15 bp, Homo sapiens
tataagcaaaataac

SEQ ID NO: 36001 - DNA, 15 bp, Homo sapiens
atataagcaaaataa

SEQ ID NO: 36002 - DNA, 15 bp, Homo sapiens
gatataagcaaaata

SEQ ID NO: 36003 - DNA, 15 bp, Homo sapiens
ggatataagcaaaat

SEQ ID NO: 36004 - DNA, 15 bp, Homo sapiens
aggatataagcaaaa

SEQ ID NO: 36005 - DNA, 15 bp, Homo sapiens
aaggatataagcaaa

SEQ ID NO: 36006 - DNA, 15 bp, Homo sapiens
taaggatataagcaa

SEQ ID NO: 36007 - DNA, 15 bp, Homo sapiens
ttaaggatataagca

SEQ ID NO: 36008 - DNA, 15 bp, Homo sapiens
attaaggatataagc

SEQ ID NO: 36009 - DNA, 15 bp, Homo sapiens
aattaaggatataag

SEQ ID NO: 36010 - DNA, 15 bp, Homo sapiens
aaattaaggatataa

SEQ ID NO: 36011 - DNA, 15 bp, Homo sapiens
aaaattaaggatata

SEQ ID NO: 36012 - DNA, 15 bp, Homo sapiens
taaaattaaggatat

SEQ ID NO: 36013 - DNA, 15 bp, Homo sapiens
ttaaaattaaggata

SEQ ID NO: 36014 - DNA, 15 bp, Homo sapiens
attaaaattaaggat

SEQ ID NO: 36015 - DNA, 15 bp, Homo sapiens
aattaaaattaagga

SEQ ID NO: 36016 - DNA, 15 bp, Homo sapiens
taattaaaattaagg

SEQ ID NO: 36017 - DNA, 15 bp, Homo sapiens
ataattaaaattaag

SEQ ID NO: 36018 - DNA, 15 bp, Homo sapiens
tataattaaaattaa

SEQ ID NO: 36019 - DNA, 15 bp, Homo sapiens
ctataattaaaatta

SEQ ID NO: 36020 - DNA, 15 bp, Homo sapiens
tctataattaaaatt

SEQ ID NO: 36021 - DNA, 15 bp, Homo sapiens
gtctataattaaaat

SEQ ID NO: 36022 - DNA, 15 bp, Homo sapiens
tgtctataattaaaa

SEQ ID NO: 36023 - DNA, 15 bp, Homo sapiens
ttgtctataattaaa

SEQ ID NO: 36024 - DNA, 15 bp, Homo sapiens
tttgtctataattaa

SEQ ID NO: 36025 - DNA, 15 bp, Homo sapiens
gtttgtctataatta

SEQ ID NO: 36026 - DNA, 15 bp, Homo sapiens
tgtttgtctataatt

SEQ ID NO: 36027 - DNA, 15 bp, Homo sapiens
atgtttgtctataat

SEQ ID NO: 36028 - DNA, 15 bp, Homo sapiens
aatgtttgtctataa

SEQ ID NO: 36029 - DNA, 15 bp, Homo sapiens
taatgtttgtctata

SEQ ID NO: 36030 - DNA, 15 bp, Homo sapiens
ttaatgtttgtctat

SEQ ID NO: 36031 - DNA, 15 bp, Homo sapiens
cttaatgtttgtcta

SEQ ID NO: 36032 - DNA, 15 bp, Homo sapiens
tcttaatgtttgtct

SEQ ID NO: 36033 - DNA, 15 bp, Homo sapiens
ttcttaatgtttgtc

SEQ ID NO: 36034 - DNA, 15 bp, Homo sapiens
cttcttaatgtttgt

SEQ ID NO: 36035 - DNA, 15 bp, Homo sapiens
gcttcttaatgtttg

SEQ ID NO: 36036 - DNA, 15 bp, Homo sapiens
agcttcttaatgttt

SEQ ID NO: 36037 - DNA, 15 bp, Homo sapiens
cagcttcttaatgtt

SEQ ID NO: 36038 - DNA, 15 bp, Homo sapiens
ccagcttcttaatgt

SEQ ID NO: 36039 - DNA, 15 bp, Homo sapiens
tccagcttcttaatg

SEQ ID NO: 36040 - DNA, 15 bp, Homo sapiens
ctccagcttcttaat

SEQ ID NO: 36041 - DNA, 15 bp, Homo sapiens
tctccagcttcttaa

SEQ ID NO: 36042 - DNA, 15 bp, Homo sapiens
ttctccagcttctta

SEQ ID NO: 36043 - DNA, 15 bp, Homo sapiens
tttctccagcttctt

SEQ ID NO: 36044 - DNA, 15 bp, Homo sapiens
ttttctccagcttct

SEQ ID NO: 36045 - DNA, 15 bp, Homo sapiens
attttctccagcttc

SEQ ID NO: 36046 - DNA, 15 bp, Homo sapiens
aattttctccagctt

SEQ ID NO: 36047 - DNA, 15 bp, Homo sapiens
taattttctccagct

SEQ ID NO: 36048 - DNA, 15 bp, Homo sapiens
ataattttctccagc

SEQ ID NO: 36049 - DNA, 15 bp, Homo sapiens
cataattttctccag

SEQ ID NO: 36050 - DNA, 15 bp, Homo sapiens
acataattttctcca

SEQ ID NO: 36051 - DNA, 15 bp, Homo sapiens
aacataattttctcc

SEQ ID NO: 36052 - DNA, 15 bp, Homo sapiens
gaacataattttctc

SEQ ID NO: 36053 - DNA, 15 bp, Homo sapiens
agaacataattttct

SEQ ID NO: 36054 - DNA, 15 bp, Homo sapiens
tagaacataattttc

SEQ ID NO: 36055 - DNA, 15 bp, Homo sapiens
ctagaacataatttt

SEQ ID NO: 36056 - DNA, 15 bp, Homo sapiens
actagaacataattt

SEQ ID NO: 36057 - DNA, 15 bp, Homo sapiens
cactagaacataatt

SEQ ID NO: 36058 - DNA, 15 bp, Homo sapiens
tcactagaacataat

SEQ ID NO: 36059 - DNA, 15 bp, Homo sapiens
gtcactagaacataa

SEQ ID NO: 36060 - DNA, 15 bp, Homo sapiens
tgtcactagaacata

SEQ ID NO: 36061 - DNA, 15 bp, Homo sapiens
atgtcactagaacat

SEQ ID NO: 36062 - DNA, 15 bp, Homo sapiens
aatgtcactagaaca

SEQ ID NO: 36063 - DNA, 15 bp, Homo sapiens
aaatgtcactagaac

SEQ ID NO: 36064 - DNA, 15 bp, Homo sapiens
taaatgtcactagaa

SEQ ID NO: 36065 - DNA, 15 bp, Homo sapiens
ataaatgtcactaga

SEQ ID NO: 36066 - DNA, 15 bp, Homo sapiens
tataaatgtcactag

SEQ ID NO: 36067 - DNA, 15 bp, Homo sapiens
atataaatgtcacta

SEQ ID NO: 36068 - DNA, 15 bp, Homo sapiens
tatataaatgtcact

SEQ ID NO: 36069 - DNA, 15 bp, Homo sapiens
ctatataaatgtcac

SEQ ID NO: 36070 - DNA, 15 bp, Homo sapiens
tctatataaatgtca

SEQ ID NO: 36071 - DNA, 15 bp, Homo sapiens
ttctatataaatgtc

SEQ ID NO: 36072 - DNA, 15 bp, Homo sapiens
cttctatataaatgt

SEQ ID NO: 36073 - DNA, 15 bp, Homo sapiens
tcttctatataaatg

SEQ ID NO: 36074 - DNA, 15 bp, Homo sapiens
ttcttctatataaat

SEQ ID NO: 36075 - DNA, 15 bp, Homo sapiens
cttcttctatataaa

SEQ ID NO: 36076 - DNA, 15 bp, Homo sapiens
tcttcttctatataa

SEQ ID NO: 36077 - DNA, 15 bp, Homo sapiens
ttcttcttctatata

SEQ ID NO: 36078 - DNA, 15 bp, Homo sapiens
attcttcttctatat

SEQ ID NO: 36079 - DNA, 15 bp, Homo sapiens
gattcttcttctata

SEQ ID NO: 36080 - DNA, 15 bp, Homo sapiens
agattcttcttctat

SEQ ID NO: 36081 - DNA, 15 bp, Homo sapiens
aagattcttcttcta

SEQ ID NO: 36082 - DNA, 15 bp, Homo sapiens
aaagattcttcttct

SEQ ID NO: 36083 - DNA, 15 bp, Homo sapiens
aaaagattcttcttc

SEQ ID NO: 36084 - DNA, 15 bp, Homo sapiens
aaaaagattcttctt

SEQ ID NO: 36085 - DNA, 15 bp, Homo sapiens
aaaaaagattcttct

SEQ ID NO: 36086 - DNA, 15 bp, Homo sapiens
gaaaaaagattcttc

SEQ ID NO: 36087 - DNA, 15 bp, Homo sapiens
ggaaaaaagattctt

SEQ ID NO: 36088 - DNA, 15 bp, Homo sapiens
gggaaaaaagattct

SEQ ID NO: 36089 - DNA, 15 bp, Homo sapiens
ggggaaaaaagattc

SEQ ID NO: 36090 - DNA, 15 bp, Homo sapiens
gggggaaaaaagatt

SEQ ID NO: 36091 - DNA, 15 bp, Homo sapiens
agggggaaaaaagat

SEQ ID NO: 36092 - DNA, 15 bp, Homo sapiens
aagggggaaaaaaga

SEQ ID NO: 36093 - DNA, 15 bp, Homo sapiens
aaagggggaaaaaag

SEQ ID NO: 36094 - DNA, 15 bp, Homo sapiens
gaaagggggaaaaaa

SEQ ID NO: 36095 - DNA, 15 bp, Homo sapiens
agaaagggggaaaaa

SEQ ID NO: 36096 - DNA, 15 bp, Homo sapiens
aagaaagggggaaaa

SEQ ID NO: 36097 - DNA, 15 bp, Homo sapiens
aaagaaagggggaaa

SEQ ID NO: 36098 - DNA, 15 bp, Homo sapiens
aaaagaaagggggaa

SEQ ID NO: 36099 - DNA, 15 bp, Homo sapiens
aaaaagaaaggggga

SEQ ID NO: 36100 - DNA, 15 bp, Homo sapiens
aaaaaagaaaggggg

SEQ ID NO: 36101 - DNA, 15 bp, Homo sapiens
caaaaaagaaagggg

SEQ ID NO: 36102 - DNA, 15 bp, Homo sapiens
tcaaaaaagaaaggg

SEQ ID NO: 36103 - DNA, 15 bp, Homo sapiens
ttcaaaaaagaaagg

SEQ ID NO: 36104 - DNA, 15 bp, Homo sapiens
cttcaaaaaagaaag

SEQ ID NO: 36105 - DNA, 15 bp, Homo sapiens
ccttcaaaaaagaaa

SEQ ID NO: 36106 - DNA, 15 bp, Homo sapiens
cccttcaaaaaagaa

SEQ ID NO: 36107 - DNA, 15 bp, Homo sapiens
tcccttcaaaaaaga

SEQ ID NO: 36108 - DNA, 15 bp, Homo sapiens
ctcccttcaaaaaag

SEQ ID NO: 36109 - DNA, 15 bp, Homo sapiens
tctcccttcaaaaaa

SEQ ID NO: 36110 - DNA, 15 bp, Homo sapiens
atctcccttcaaaaa

SEQ ID NO: 36111 - DNA, 15 bp, Homo sapiens
catctcccttcaaaa

SEQ ID NO: 36112 - DNA, 15 bp, Homo sapiens
tcatctcccttcaaa

SEQ ID NO: 36113 - DNA, 15 bp, Homo sapiens
ctcatctcccttcaa

SEQ ID NO: 36114 - DNA, 15 bp, Homo sapiens
cctcatctcccttca

SEQ ID NO: 36115 - DNA, 15 bp, Homo sapiens
gcctcatctcccttc

SEQ ID NO: 36116 - DNA, 15 bp, Homo sapiens
tgcctcatctccctt

SEQ ID NO: 36117 - DNA, 15 bp, Homo sapiens
ctgcctcatctccct

SEQ ID NO: 36118 - DNA, 15 bp, Homo sapiens
actgcctcatctccc

SEQ ID NO: 36119 - DNA, 15 bp, Homo sapiens
gactgcctcatctcc

SEQ ID NO: 36120 - DNA, 15 bp, Homo sapiens
tgactgcctcatctc

SEQ ID NO: 36121 - DNA, 15 bp, Homo sapiens
atgactgcctcatct

SEQ ID NO: 36122 - DNA, 15 bp, Homo sapiens
tatgactgcctcatc

SEQ ID NO: 36123 - DNA, 15 bp, Homo sapiens
atatgactgcctcat

SEQ ID NO: 36124 - DNA, 15 bp, Homo sapiens
aatatgactgcctca

SEQ ID NO: 36125 - DNA, 15 bp, Homo sapiens
aaatatgactgcctc

SEQ ID NO: 36126 - DNA, 15 bp, Homo sapiens
aaaatatgactgcct

SEQ ID NO: 36127 - DNA, 15 bp, Homo sapiens
caaaatatgactgcc

SEQ ID NO: 36128 - DNA, 15 bp, Homo sapiens
ccaaaatatgactgc

SEQ ID NO: 36129 - DNA, 15 bp, Homo sapiens
accaaaatatgactg

SEQ ID NO: 36130 - DNA, 15 bp, Homo sapiens
taccaaaatatgact

SEQ ID NO: 36131 - DNA, 15 bp, Homo sapiens
ttaccaaaatatgac

SEQ ID NO: 36132 - DNA, 15 bp, Homo sapiens
tttaccaaaatatga

SEQ ID NO: 36133 - DNA, 15 bp, Homo sapiens
ctttaccaaaatatg

SEQ ID NO: 36134 - DNA, 15 bp, Homo sapiens
tctttaccaaaatat

SEQ ID NO: 36135 - DNA, 15 bp, Homo sapiens
ttctttaccaaaata

SEQ ID NO: 36136 - DNA, 15 bp, Homo sapiens
attctttaccaaaat

SEQ ID NO: 36137 - DNA, 15 bp, Homo sapiens
aattctttaccaaaa

SEQ ID NO: 36138 - DNA, 15 bp, Homo sapiens
aaattctttaccaaa

SEQ ID NO: 36139 - DNA, 15 bp, Homo sapiens
caaattctttaccaa

SEQ ID NO: 36140 - DNA, 15 bp, Homo sapiens
acaaattctttacca

SEQ ID NO: 36141 - DNA, 15 bp, Homo sapiens
tacaaattctttacc

SEQ ID NO: 36142 - DNA, 15 bp, Homo sapiens
ctacaaattctttac

SEQ ID NO: 36143 - DNA, 15 bp, Homo sapiens
tctacaaattcttta

SEQ ID NO: 36144 - DNA, 15 bp, Homo sapiens
gtctacaaattcttt

SEQ ID NO: 36145 - DNA, 15 bp, Homo sapiens
agtctacaaattctt

SEQ ID NO: 36146 - DNA, 15 bp, Homo sapiens
aagtctacaaattct

SEQ ID NO: 36147 - DNA, 15 bp, Homo sapiens
aaagtctacaaattc

SEQ ID NO: 36148 - DNA, 15 bp, Homo sapiens
caaagtctacaaatt

SEQ ID NO: 36149 - DNA, 15 bp, Homo sapiens
gcaaagtctacaaat

SEQ ID NO: 36150 - DNA, 15 bp, Homo sapiens
tgcaaagtctacaaa

SEQ ID NO: 36151 - DNA, 15 bp, Homo sapiens
ctgcaaagtctacaa

SEQ ID NO: 36152 - DNA, 15 bp, Homo sapiens
tctgcaaagtctaca

SEQ ID NO: 36153 - DNA, 15 bp, Homo sapiens
ctctgcaaagtctac

SEQ ID NO: 36154 - DNA, 15 bp, Homo sapiens
cctctgcaaagtcta

SEQ ID NO: 36155 - DNA, 15 bp, Homo sapiens
acctctgcaaagtct

SEQ ID NO: 36156 - DNA, 15 bp, Homo sapiens
gacctctgcaaagtc

SEQ ID NO: 36157 - DNA, 15 bp, Homo sapiens
agacctctgcaaagt

SEQ ID NO: 36158 - DNA, 15 bp, Homo sapiens
gagacctctgcaaag

SEQ ID NO: 36159 - DNA, 15 bp, Homo sapiens
agagacctctgcaaa

SEQ ID NO: 36160 - DNA, 15 bp, Homo sapiens
aagagacctctgcaa

SEQ ID NO: 36161 - DNA, 15 bp, Homo sapiens
gaagagacctctgca

SEQ ID NO: 36162 - DNA, 15 bp, Homo sapiens
tgaagagacctctgc

SEQ ID NO: 36163 - DNA, 15 bp, Homo sapiens
ttgaagagacctctg

SEQ ID NO: 36164 - DNA, 15 bp, Homo sapiens
tttgaagagacctct

SEQ ID NO: 36165 - DNA, 15 bp, Homo sapiens
ttttgaagagacctc

SEQ ID NO: 36166 - DNA, 15 bp, Homo sapiens
attttgaagagacct

SEQ ID NO: 36167 - DNA, 15 bp, Homo sapiens
tattttgaagagacc

SEQ ID NO: 36168 - DNA, 15 bp, Homo sapiens
ttattttgaagagac

SEQ ID NO: 36169 - DNA, 15 bp, Homo sapiens
attattttgaagaga

SEQ ID NO: 36170 - DNA, 15 bp, Homo sapiens
gattattttgaagag

SEQ ID NO: 36171 - DNA, 15 bp, Homo sapiens
agattattttgaaga

SEQ ID NO: 36172 - DNA, 15 bp, Homo sapiens
cagattattttgaag

SEQ ID NO: 36173 - DNA, 15 bp, Homo sapiens
ccagattattttgaa

SEQ ID NO: 36174 - DNA, 15 bp, Homo sapiens
gccagattattttga

SEQ ID NO: 36175 - DNA, 15 bp, Homo sapiens
agccagattattttg

SEQ ID NO: 36176 - DNA, 15 bp, Homo sapiens
gagccagattatttt

SEQ ID NO: 36177 - DNA, 15 bp, Homo sapiens
tgagccagattattt

SEQ ID NO: 36178 - DNA, 15 bp, Homo sapiens
ctgagccagattatt

SEQ ID NO: 36179 - DNA, 15 bp, Homo sapiens
tctgagccagattat

SEQ ID NO: 36180 - DNA, 15 bp, Homo sapiens
ctctgagccagatta

SEQ ID NO: 36181 - DNA, 15 bp, Homo sapiens
actctgagccagatt

SEQ ID NO: 36182 - DNA, 15 bp, Homo sapiens
gactctgagccagat

SEQ ID NO: 36183 - DNA, 15 bp, Homo sapiens
agactctgagccaga

SEQ ID NO: 36184 - DNA, 15 bp, Homo sapiens
aagactctgagccag

SEQ ID NO: 36185 - DNA, 15 bp, Homo sapiens
caagactctgagcca

SEQ ID NO: 36186 - DNA, 15 bp, Homo sapiens
tcaagactctgagcc

SEQ ID NO: 36187 - DNA, 15 bp, Homo sapiens
gtcaagactctgagc

SEQ ID NO: 36188 - DNA, 15 bp, Homo sapiens
tgtcaagactctgag

SEQ ID NO: 36189 - DNA, 15 bp, Homo sapiens
atgtcaagactctga

SEQ ID NO: 36190 - DNA, 15 bp, Homo sapiens
tatgtcaagactctg

SEQ ID NO: 36191 - DNA, 15 bp, Homo sapiens
atatgtcaagactct

SEQ ID NO: 36192 - DNA, 15 bp, Homo sapiens
gatatgtcaagactc

SEQ ID NO: 36193 - DNA, 15 bp, Homo sapiens
ggatatgtcaagact

SEQ ID NO: 36194 - DNA, 15 bp, Homo sapiens
aggatatgtcaagac

SEQ ID NO: 36195 - DNA, 15 bp, Homo sapiens
gaggatatgtcaaga

SEQ ID NO: 36196 - DNA, 15 bp, Homo sapiens
tgaggatatgtcaag

SEQ ID NO: 36197 - DNA, 15 bp, Homo sapiens
ctgaggatatgtcaa

SEQ ID NO: 36198 - DNA, 15 bp, Homo sapiens
gctgaggatatgtca

SEQ ID NO: 36199 - DNA, 15 bp, Homo sapiens
tgctgaggatatgtc

SEQ ID NO: 36200 - DNA, 15 bp, Homo sapiens
ctgctgaggatatgt

SEQ ID NO: 36201 - DNA, 15 bp, Homo sapiens
tctgctgaggatatg

SEQ ID NO: 36202 - DNA, 15 bp, Homo sapiens
gtctgctgaggatat

SEQ ID NO: 36203 - DNA, 15 bp, Homo sapiens
tgtctgctgaggata

SEQ ID NO: 36204 - DNA, 15 bp, Homo sapiens
atgtctgctgaggat

SEQ ID NO: 36205 - DNA, 15 bp, Homo sapiens
catgtctgctgagga

SEQ ID NO: 36206 - DNA, 15 bp, Homo sapiens
ccatgtctgctgagg

SEQ ID NO: 36207 - DNA, 15 bp, Homo sapiens
accatgtctgctgag

SEQ ID NO: 36208 - DNA, 15 bp, Homo sapiens
caccatgtctgctga

SEQ ID NO: 36209 - DNA, 15 bp, Homo sapiens
gcaccatgtctgctg

SEQ ID NO: 36210 - DNA, 15 bp, Homo sapiens
tgcaccatgtctgct

SEQ ID NO: 36211 - DNA, 15 bp, Homo sapiens
ttgcaccatgtctgc

SEQ ID NO: 36212 - DNA, 15 bp, Homo sapiens
tttgcaccatgtctg

SEQ ID NO: 36213 - DNA, 15 bp, Homo sapiens
atttgcaccatgtct

SEQ ID NO: 36214 - DNA, 15 bp, Homo sapiens
aatttgcaccatgtc

SEQ ID NO: 36215 - DNA, 15 bp, Homo sapiens
taatttgcaccatgt

SEQ ID NO: 36216 - DNA, 15 bp, Homo sapiens
ctaatttgcaccatg

SEQ ID NO: 36217 - DNA, 15 bp, Homo sapiens
tctaatttgcaccat

SEQ ID NO: 36218 - DNA, 15 bp, Homo sapiens
atctaatttgcacca

SEQ ID NO: 36219 - DNA, 15 bp, Homo sapiens
catctaatttgcacc

SEQ ID NO: 36220 - DNA, 15 bp, Homo sapiens
ccatctaatttgcac

SEQ ID NO: 36221 - DNA, 15 bp, Homo sapiens
gccatctaatttgca

SEQ ID NO: 36222 - DNA, 15 bp, Homo sapiens
tgccatctaatttgc

SEQ ID NO: 36223 - DNA, 15 bp, Homo sapiens
ctgccatctaatttg

SEQ ID NO: 36224 - DNA, 15 bp, Homo sapiens
tctgccatctaattt

SEQ ID NO: 36225 - DNA, 15 bp, Homo sapiens
ctctgccatctaatt

SEQ ID NO: 36226 - DNA, 15 bp, Homo sapiens
actctgccatctaat

SEQ ID NO: 36227 - DNA, 15 bp, Homo sapiens
cactctgccatctaa

SEQ ID NO: 36228 - DNA, 15 bp, Homo sapiens
ccactctgccatcta

SEQ ID NO: 36229 - DNA, 15 bp, Homo sapiens
accactctgccatct

SEQ ID NO: 36230 - DNA, 15 bp, Homo sapiens
caccactctgccatc

SEQ ID NO: 36231 - DNA, 15 bp, Homo sapiens
ccaccactctgccat

SEQ ID NO: 36232 - DNA, 15 bp, Homo sapiens
cccaccactctgcca

SEQ ID NO: 36233 - DNA, 15 bp, Homo sapiens
acccaccactctgcc

SEQ ID NO: 36234 - DNA, 15 bp, Homo sapiens
tacccaccactctgc

SEQ ID NO: 36235 - DNA, 15 bp, Homo sapiens
gtacccaccactctg

SEQ ID NO: 36236 - DNA, 15 bp, Homo sapiens
tgtacccaccactct

SEQ ID NO: 36237 - DNA, 15 bp, Homo sapiens
ttgtacccaccactc

SEQ ID NO: 36238 - DNA, 15 bp, Homo sapiens
cttgtacccaccact

SEQ ID NO: 36239 - DNA, 15 bp, Homo sapiens
acttgtacccaccac

SEQ ID NO: 36240 - DNA, 15 bp, Homo sapiens
aacttgtacccacca

SEQ ID NO: 36241 - DNA, 15 bp, Homo sapiens
caacttgtacccacc

SEQ ID NO: 36242 - DNA, 15 bp, Homo sapiens
tcaacttgtacccac

SEQ ID NO: 36243 - DNA, 15 bp, Homo sapiens
gtcaacttgtaccca

SEQ ID NO: 36244 - DNA, 15 bp, Homo sapiens
ggtcaacttgtaccc

SEQ ID NO: 36245 - DNA, 15 bp, Homo sapiens
tggtcaacttgtacc

SEQ ID NO: 36246 - DNA, 15 bp, Homo sapiens
atggtcaacttgtac

SEQ ID NO: 36247 - DNA, 15 bp, Homo sapiens
tatggtcaacttgta

SEQ ID NO: 36248 - DNA, 15 bp, Homo sapiens
ttatggtcaacttgt

SEQ ID NO: 36249 - DNA, 15 bp, Homo sapiens
tttatggtcaacttg

SEQ ID NO: 36250 - DNA, 15 bp, Homo sapiens
ttttatggtcaactt

SEQ ID NO: 36251 - DNA, 15 bp, Homo sapiens
attttatggtcaact

SEQ ID NO: 36252 - DNA, 15 bp, Homo sapiens
tattttatggtcaac

SEQ ID NO: 36253 - DNA, 15 bp, Homo sapiens
ttattttatggtcaa

SEQ ID NO: 36254 - DNA, 15 bp, Homo sapiens
gttattttatggtca

SEQ ID NO: 36255 - DNA, 15 bp, Homo sapiens
cgttattttatggtc

SEQ ID NO: 36256 - DNA, 15 bp, Homo sapiens
gcgttattttatggt

SEQ ID NO: 36257 - DNA, 15 bp, Homo sapiens
tgcgttattttatgg

SEQ ID NO: 36258 - DNA, 15 bp, Homo sapiens
atgcgttattttatg

SEQ ID NO: 36259 - DNA, 15 bp, Homo sapiens
aatgcgttattttat

SEQ ID NO: 36260 - DNA, 15 bp, Homo sapiens
taatgcgttatttta

SEQ ID NO: 36261 - DNA, 15 bp, Homo sapiens
ctaatgcgttatttt

SEQ ID NO: 36262 - DNA, 15 bp, Homo sapiens
cctaatgcgttattt

SEQ ID NO: 36263 - DNA, 15 bp, Homo sapiens
acctaatgcgttatt

SEQ ID NO: 36264 - DNA, 15 bp, Homo sapiens
aacctaatgcgttat

SEQ ID NO: 36265 - DNA, 15 bp, Homo sapiens
taacctaatgcgtta

SEQ ID NO: 36266 - DNA, 15 bp, Homo sapiens
ctaacctaatgcgtt

SEQ ID NO: 36267 - DNA, 15 bp, Homo sapiens
actaacctaatgcgt

SEQ ID NO: 36268 - DNA, 15 bp, Homo sapiens
tactaacctaatgcg

SEQ ID NO: 36269 - DNA, 15 bp, Homo sapiens
ttactaacctaatgc

SEQ ID NO: 36270 - DNA, 15 bp, Homo sapiens
attactaacctaatg

SEQ ID NO: 36271 - DNA, 15 bp, Homo sapiens
cattactaacctaat

SEQ ID NO: 36272 - DNA, 15 bp, Homo sapiens
gcattactaacctaa

SEQ ID NO: 36273 - DNA, 15 bp, Homo sapiens
ggcattactaaccta

SEQ ID NO: 36274 - DNA, 15 bp, Homo sapiens
gggcattactaacct

SEQ ID NO: 36275 - DNA, 15 bp, Homo sapiens
tgggcattactaacc

SEQ ID NO: 36276 - DNA, 15 bp, Homo sapiens
ttgggcattactaac

SEQ ID NO: 36277 - DNA, 15 bp, Homo sapiens
tttgggcattactaa

SEQ ID NO: 36278 - DNA, 15 bp, Homo sapiens
atttgggcattacta

SEQ ID NO: 36279 - DNA, 15 bp, Homo sapiens
tatttgggcattact

SEQ ID NO: 36280 - DNA, 15 bp, Homo sapiens
ttatttgggcattac

SEQ ID NO: 36281 - DNA, 15 bp, Homo sapiens
attatttgggcatta

SEQ ID NO: 36282 - DNA, 15 bp, Homo sapiens
tattatttgggcatt

SEQ ID NO: 36283 - DNA, 15 bp, Homo sapiens
gtattatttgggcat

SEQ ID NO: 36284 - DNA, 15 bp, Homo sapiens
agtattatttgggca

SEQ ID NO: 36285 - DNA, 15 bp, Homo sapiens
aagtattatttgggc

SEQ ID NO: 36286 - DNA, 15 bp, Homo sapiens
aaagtattatttggg

SEQ ID NO: 36287 - DNA, 15 bp, Homo sapiens
caaagtattatttgg

SEQ ID NO: 36288 - DNA, 15 bp, Homo sapiens
ccaaagtattatttg

SEQ ID NO: 36289 - DNA, 15 bp, Homo sapiens
cccaaagtattattt

SEQ ID NO: 36290 - DNA, 15 bp, Homo sapiens
acccaaagtattatt

SEQ ID NO: 36291 - DNA, 15 bp, Homo sapiens
aacccaaagtattat

SEQ ID NO: 36292 - DNA, 15 bp, Homo sapiens
aaacccaaagtatta

SEQ ID NO: 36293 - DNA, 15 bp, Homo sapiens
aaaacccaaagtatt

SEQ ID NO: 36294 - DNA, 15 bp, Homo sapiens
gaaaacccaaagtat

SEQ ID NO: 36295 - DNA, 15 bp, Homo sapiens
tgaaaacccaaagta

SEQ ID NO: 36296 - DNA, 15 bp, Homo sapiens
ctgaaaacccaaagt

SEQ ID NO: 36297 - DNA, 15 bp, Homo sapiens
actgaaaacccaaag

SEQ ID NO: 36298 - DNA, 15 bp, Homo sapiens
cactgaaaacccaaa

SEQ ID NO: 36299 - DNA, 15 bp, Homo sapiens
acactgaaaacccaa

SEQ ID NO: 36300 - DNA, 15 bp, Homo sapiens
aacactgaaaaccca

SEQ ID NO: 36301 - DNA, 15 bp, Homo sapiens
caacactgaaaaccc

SEQ ID NO: 36302 - DNA, 15 bp, Homo sapiens
gcaacactgaaaacc

SEQ ID NO: 36303 - DNA, 15 bp, Homo sapiens
tgcaacactgaaaac

SEQ ID NO: 36304 - DNA, 15 bp, Homo sapiens
ctgcaacactgaaaa

SEQ ID NO: 36305 - DNA, 15 bp, Homo sapiens
tctgcaacactgaaa

SEQ ID NO: 36306 - DNA, 15 bp, Homo sapiens
ctctgcaacactgaa

SEQ ID NO: 36307 - DNA, 15 bp, Homo sapiens
tctctgcaacactga

SEQ ID NO: 36308 - DNA, 15 bp, Homo sapiens
ttctctgcaacactg

SEQ ID NO: 36309 - DNA, 15 bp, Homo sapiens
cttctctgcaacact

SEQ ID NO: 36310 - DNA, 15 bp, Homo sapiens
acttctctgcaacac

SEQ ID NO: 36311 - DNA, 15 bp, Homo sapiens
gacttctctgcaaca

SEQ ID NO: 36312 - DNA, 15 bp, Homo sapiens
tgacttctctgcaac

SEQ ID NO: 36313 - DNA, 15 bp, Homo sapiens
ctgacttctctgcaa

SEQ ID NO: 36314 - DNA, 15 bp, Homo sapiens
tctgacttctctgca

SEQ ID NO: 36315 - DNA, 15 bp, Homo sapiens
gtctgacttctctgc

SEQ ID NO: 36316 - DNA, 15 bp, Homo sapiens
tgtctgacttctctg

SEQ ID NO: 36317 - DNA, 15 bp, Homo sapiens
ttgtctgacttctct

SEQ ID NO: 36318 - DNA, 15 bp, Homo sapiens
gttgtctgacttctc

SEQ ID NO: 36319 - DNA, 15 bp, Homo sapiens
agttgtctgacttct

SEQ ID NO: 36320 - DNA, 15 bp, Homo sapiens
cagttgtctgacttc

SEQ ID NO: 36321 - DNA, 15 bp, Homo sapiens
tcagttgtctgactt

SEQ ID NO: 36322 - DNA, 15 bp, Homo sapiens
atcagttgtctgact

SEQ ID NO: 36323 - DNA, 15 bp, Homo sapiens
tatcagttgtctgac

SEQ ID NO: 36324 - DNA, 15 bp, Homo sapiens
ctatcagttgtctga

SEQ ID NO: 36325 - DNA, 15 bp, Homo sapiens
actatcagttgtctg

SEQ ID NO: 36326 - DNA, 15 bp, Homo sapiens
aactatcagttgtct

SEQ ID NO: 36327 - DNA, 15 bp, Homo sapiens
taactatcagttgtc

SEQ ID NO: 36328 - DNA, 15 bp, Homo sapiens
ataactatcagttgt

SEQ ID NO: 36329 - DNA, 15 bp, Homo sapiens
aataactatcagttg

SEQ ID NO: 36330 - DNA, 15 bp, Homo sapiens
taataactatcagtt

SEQ ID NO: 36331 - DNA, 15 bp, Homo sapiens
ataataactatcagt

SEQ ID NO: 36332 - DNA, 15 bp, Homo sapiens
tataataactatcag

SEQ ID NO: 36333 - DNA, 15 bp, Homo sapiens
ttataataactatca

SEQ ID NO: 36334 - DNA, 15 bp, Homo sapiens
tttataataactatc

SEQ ID NO: 36335 - DNA, 15 bp, Homo sapiens
ctttataataactat

SEQ ID NO: 36336 - DNA, 15 bp, Homo sapiens
tctttataataacta

SEQ ID NO: 36337 - DNA, 15 bp, Homo sapiens
ttctttataataact

SEQ ID NO: 36338 - DNA, 15 bp, Homo sapiens
tttctttataataac

SEQ ID NO: 36339 - DNA, 15 bp, Homo sapiens
ttttctttataataa

SEQ ID NO: 36340 - DNA, 15 bp, Homo sapiens
tttttctttataata

SEQ ID NO: 36341 - DNA, 15 bp, Homo sapiens
atttttctttataat

SEQ ID NO: 36342 - DNA, 15 bp, Homo sapiens
catttttctttataa

SEQ ID NO: 36343 - DNA, 15 bp, Homo sapiens
acatttttctttata

SEQ ID NO: 36344 - DNA, 15 bp, Homo sapiens
aacatttttctttat

SEQ ID NO: 36345 - DNA, 15 bp, Homo sapiens
gaacatttttcttta

SEQ ID NO: 36346 - DNA, 15 bp, Homo sapiens
agaacatttttcttt

SEQ ID NO: 36347 - DNA, 15 bp, Homo sapiens
cagaacatttttctt

SEQ ID NO: 36348 - DNA, 15 bp, Homo sapiens
tcagaacatttttct

SEQ ID NO: 36349 - DNA, 15 bp, Homo sapiens
ctcagaacatttttc

SEQ ID NO: 36350 - DNA, 15 bp, Homo sapiens
tctcagaacattttt

SEQ ID NO: 36351 - DNA, 15 bp, Homo sapiens
ctctcagaacatttt

SEQ ID NO: 36352 - DNA, 15 bp, Homo sapiens
actctcagaacattt

SEQ ID NO: 36353 - DNA, 15 bp, Homo sapiens
cactctcagaacatt

SEQ ID NO: 36354 - DNA, 15 bp, Homo sapiens
tcactctcagaacat

SEQ ID NO: 36355 - DNA, 15 bp, Homo sapiens
ctcactctcagaaca

SEQ ID NO: 36356 - DNA, 15 bp, Homo sapiens
cctcactctcagaac

SEQ ID NO: 36357 - DNA, 15 bp, Homo sapiens
acctcactctcagaa

SEQ ID NO: 36358 - DNA, 15 bp, Homo sapiens
tacctcactctcaga

SEQ ID NO: 36359 - DNA, 15 bp, Homo sapiens
ttacctcactctcag

SEQ ID NO: 36360 - DNA, 15 bp, Homo sapiens
gttacctcactctca

SEQ ID NO: 36361 - DNA, 15 bp, Homo sapiens
ggttacctcactctc

SEQ ID NO: 36362 - DNA, 15 bp, Homo sapiens
cggttacctcactct

SEQ ID NO: 36363 - DNA, 15 bp, Homo sapiens
gcggttacctcactc

SEQ ID NO: 36364 - DNA, 15 bp, Homo sapiens
agcggttacctcact

SEQ ID NO: 36365 - DNA, 15 bp, Homo sapiens
aagcggttacctcac

SEQ ID NO: 36366 - DNA, 15 bp, Homo sapiens
taagcggttacctca

SEQ ID NO: 36367 - DNA, 15 bp, Homo sapiens
ttaagcggttacctc

SEQ ID NO: 36368 - DNA, 15 bp, Homo sapiens
cttaagcggttacct

SEQ ID NO: 36369 - DNA, 15 bp, Homo sapiens
ccttaagcggttacc

SEQ ID NO: 36370 - DNA, 15 bp, Homo sapiens
cccttaagcggttac

SEQ ID NO: 36371 - DNA, 15 bp, Homo sapiens
tcccttaagcggtta

SEQ ID NO: 36372 - DNA, 15 bp, Homo sapiens
ttcccttaagcggtt

SEQ ID NO: 36373 - DNA, 15 bp, Homo sapiens
cttcccttaagcggt

SEQ ID NO: 36374 - DNA, 15 bp, Homo sapiens
ccttcccttaagcgg

SEQ ID NO: 36375 - DNA, 15 bp, Homo sapiens
tccttcccttaagcg

SEQ ID NO: 36376 - DNA, 15 bp, Homo sapiens
ttccttcccttaagc

SEQ ID NO: 36377 - DNA, 15 bp, Homo sapiens
cttccttcccttaag

SEQ ID NO: 36378 - DNA, 15 bp, Homo sapiens
gcttccttcccttaa

SEQ ID NO: 36379 - DNA, 15 bp, Homo sapiens
ggcttccttccctta

SEQ ID NO: 36380 - DNA, 15 bp, Homo sapiens
aggcttccttccctt

SEQ ID NO: 36381 - DNA, 15 bp, Homo sapiens
gaggcttccttccct

SEQ ID NO: 36382 - DNA, 15 bp, Homo sapiens
ggaggcttccttccc

SEQ ID NO: 36383 - DNA, 15 bp, Homo sapiens
aggaggcttccttcc

SEQ ID NO: 36384 - DNA, 15 bp, Homo sapiens
aaggaggcttccttc

SEQ ID NO: 36385 - DNA, 15 bp, Homo sapiens
gaaggaggcttcctt

SEQ ID NO: 36386 - DNA, 15 bp, Homo sapiens
agaaggaggcttcct

SEQ ID NO: 36387 - DNA, 15 bp, Homo sapiens
cagaaggaggcttcc

SEQ ID NO: 36388 - DNA, 15 bp, Homo sapiens
acagaaggaggcttc

SEQ ID NO: 36389 - DNA, 15 bp, Homo sapiens
gacagaaggaggctt

SEQ ID NO: 36390 - DNA, 15 bp, Homo sapiens
agacagaaggaggct

SEQ ID NO: 36391 - DNA, 15 bp, Homo sapiens
aagacagaaggaggc

SEQ ID NO: 36392 - DNA, 15 bp, Homo sapiens
taagacagaaggagg

SEQ ID NO: 36393 - DNA, 15 bp, Homo sapiens
ataagacagaaggag

SEQ ID NO: 36394 - DNA, 15 bp, Homo sapiens
aataagacagaagga

SEQ ID NO: 36395 - DNA, 15 bp, Homo sapiens
gaataagacagaagg

SEQ ID NO: 36396 - DNA, 15 bp, Homo sapiens
gtgaataagacagaa

SEQ ID NO: 36397 - DNA, 15 bp, Homo sapiens
agtgaataagacaga

SEQ ID NO: 36398 - DNA, 15 bp, Homo sapiens
tagtgaataagacag

SEQ ID NO: 36399 - DNA, 15 bp, Homo sapiens
ttagtgaataagaca

SEQ ID NO: 36400 - DNA, 15 bp, Homo sapiens
attagtgaataagac

SEQ ID NO: 36401 - DNA, 15 bp, Homo sapiens
aattagtgaataaga

SEQ ID NO: 36402 - DNA, 15 bp, Homo sapiens
aaattagtgaataag

SEQ ID NO: 36403 - DNA, 15 bp, Homo sapiens
taaattagtgaataa

SEQ ID NO: 36404 - DNA, 15 bp, Homo sapiens
gtaaattagtgaata

SEQ ID NO: 36405 - DNA, 15 bp, Homo sapiens
tgtaaattagtgaat

SEQ ID NO: 36406 - DNA, 15 bp, Homo sapiens
ttgtaaattagtgaa

SEQ ID NO: 36407 - DNA, 15 bp, Homo sapiens
cttgtaaattagtga

SEQ ID NO: 36408 - DNA, 15 bp, Homo sapiens
tcttgtaaattagtg

SEQ ID NO: 36409 - DNA, 15 bp, Homo sapiens
ttcttgtaaattagt

SEQ ID NO: 36410 - DNA, 15 bp, Homo sapiens
cttcttgtaaattag

SEQ ID NO: 36411 - DNA, 15 bp, Homo sapiens
tcttcttgtaaatta

SEQ ID NO: 36412 - DNA, 15 bp, Homo sapiens
atcttcttgtaaatt

SEQ ID NO: 36413 - DNA, 15 bp, Homo sapiens
tatcttcttgtaaat

SEQ ID NO: 36414 - DNA, 15 bp, Homo sapiens
ttatcttcttgtaaa

SEQ ID NO: 36415 - DNA, 15 bp, Homo sapiens
attatcttcttgtaa

SEQ ID NO: 36416 - DNA, 15 bp, Homo sapiens
aattatcttcttgta

SEQ ID NO: 36417 - DNA, 15 bp, Homo sapiens
caattatcttcttgt

SEQ ID NO: 36418 - DNA, 15 bp, Homo sapiens
acaattatcttcttg

SEQ ID NO: 36419 - DNA, 15 bp, Homo sapiens
cacaattatcttctt

SEQ ID NO: 36420 - DNA, 15 bp, Homo sapiens
acacaattatcttct

SEQ ID NO: 36421 - DNA, 15 bp, Homo sapiens
aacacaattatcttc

SEQ ID NO: 36422 - DNA, 15 bp, Homo sapiens
taacacaattatctt

SEQ ID NO: 36423 - DNA, 15 bp, Homo sapiens
gtaacacaattatct

SEQ ID NO: 36424 - DNA, 15 bp, Homo sapiens
tgtaacacaattatc

SEQ ID NO: 36425 - DNA, 15 bp, Homo sapiens
gtgtaacacaattat

SEQ ID NO: 36426 - DNA, 15 bp, Homo sapiens
agtgtaacacaatta

SEQ ID NO: 36427 - DNA, 15 bp, Homo sapiens
aagtgtaacacaatt

SEQ ID NO: 36428 - DNA, 15 bp, Homo sapiens
gaagtgtaacacaat

SEQ ID NO: 36429 - DNA, 15 bp, Homo sapiens
ggaagtgtaacacaa

SEQ ID NO: 36430 - DNA, 15 bp, Homo sapiens
aggaagtgtaacaca

SEQ ID NO: 36431 - DNA, 15 bp, Homo sapiens
aaggaagtgtaacac

SEQ ID NO: 36432 - DNA, 15 bp, Homo sapiens
taaggaagtgtaaca

SEQ ID NO: 36433 - DNA, 15 bp, Homo sapiens
ctaaggaagtgtaac

SEQ ID NO: 36434 - DNA, 15 bp, Homo sapiens
cctaaggaagtgtaa

SEQ ID NO: 36435 - DNA, 15 bp, Homo sapiens
tcctaaggaagtgta

SEQ ID NO: 36436 - DNA, 15 bp, Homo sapiens
ctcctaaggaagtgt

SEQ ID NO: 36437 - DNA, 15 bp, Homo sapiens
actcctaaggaagtg

SEQ ID NO: 36438 - DNA, 15 bp, Homo sapiens
gactcctaaggaagt

SEQ ID NO: 36439 - DNA, 15 bp, Homo sapiens
tgactcctaaggaag

SEQ ID NO: 36440 - DNA, 15 bp, Homo sapiens
atgactcctaaggaa

SEQ ID NO: 36441 - DNA, 15 bp, Homo sapiens
aatgactcctaagga

SEQ ID NO: 36442 - DNA, 15 bp, Homo sapiens
gaatgactcctaagg

SEQ ID NO: 36443 - DNA, 15 bp, Homo sapiens
tgaatgactcctaag

SEQ ID NO: 36444 - DNA, 15 bp, Homo sapiens
atgaatgactcctaa

SEQ ID NO: 36445 - DNA, 15 bp, Homo sapiens
aatgaatgactccta

SEQ ID NO: 36446 - DNA, 15 bp, Homo sapiens
aaatgaatgactcct

SEQ ID NO: 36447 - DNA, 15 bp, Homo sapiens
caaatgaatgactcc

SEQ ID NO: 36448 - DNA, 15 bp, Homo sapiens
acaaatgaatgactc

SEQ ID NO: 36449 - DNA, 15 bp, Homo sapiens
tacaaatgaatgact

SEQ ID NO: 36450 - DNA, 15 bp, Homo sapiens
atacaaatgaatgac

SEQ ID NO: 36451 - DNA, 15 bp, Homo sapiens
tatacaaatgaatga

SEQ ID NO: 36452 - DNA, 15 bp, Homo sapiens
atatacaaatgaatg

SEQ ID NO: 36453 - DNA, 15 bp, Homo sapiens
aatatacaaatgaat

SEQ ID NO: 36454 - DNA, 15 bp, Homo sapiens
aaatatacaaatgaa

SEQ ID NO: 36455 - DNA, 15 bp, Homo sapiens
caaatatacaaatga

SEQ ID NO: 36456 - DNA, 15 bp, Homo sapiens
tcaaatatacaaatg

SEQ ID NO: 36457 - DNA, 15 bp, Homo sapiens
gtcaaatatacaaat

SEQ ID NO: 36458 - DNA, 15 bp, Homo sapiens
tgtcaaatatacaaa

SEQ ID NO: 36459 - DNA, 15 bp, Homo sapiens
gtgtcaaatatacaa

SEQ ID NO: 36460 - DNA, 15 bp, Homo sapiens
agtgtcaaatataca

SEQ ID NO: 36461 - DNA, 15 bp, Homo sapiens
aagtgtcaaatatac

SEQ ID NO: 36462 - DNA, 15 bp, Homo sapiens
aaagtgtcaaatata

SEQ ID NO: 36463 - DNA, 15 bp, Homo sapiens
aaaagtgtcaaatat

SEQ ID NO: 36464 - DNA, 15 bp, Homo sapiens
caaaagtgtcaaata

SEQ ID NO: 36465 - DNA, 15 bp, Homo sapiens
gcaaaagtgtcaaat

SEQ ID NO: 36466 - DNA, 15 bp, Homo sapiens
agcaaaagtgtcaaa

SEQ ID NO: 36467 - DNA, 15 bp, Homo sapiens
aagcaaaagtgtcaa

SEQ ID NO: 36468 - DNA, 15 bp, Homo sapiens
aaagcaaaagtgtca

SEQ ID NO: 36469 - DNA, 15 bp, Homo sapiens
taaagcaaaagtgtc

SEQ ID NO: 36470 - DNA, 15 bp, Homo sapiens
ataaagcaaaagtgt

SEQ ID NO: 36471 - DNA, 15 bp, Homo sapiens
cataaagcaaaagtg

SEQ ID NO: 36472 - DNA, 15 bp, Homo sapiens
tcataaagcaaaagt

SEQ ID NO: 36473 - DNA, 15 bp, Homo sapiens
ttcataaagcaaaag

SEQ ID NO: 36474 - DNA, 15 bp, Homo sapiens
gttcataaagcaaaa

SEQ ID NO: 36475 - DNA, 15 bp, Homo sapiens
tgttcataaagcaaa

SEQ ID NO: 36476 - DNA, 15 bp, Homo sapiens
atgttcataaagcaa

SEQ ID NO: 36477 - DNA, 15 bp, Homo sapiens
catgttcataaagca

SEQ ID NO: 36478 - DNA, 15 bp, Homo sapiens
acatgttcataaagc

SEQ ID NO: 36479 - DNA, 15 bp, Homo sapiens
cacatgttcataaag

SEQ ID NO: 36480 - DNA, 15 bp, Homo sapiens
tcacatgttcataaa

SEQ ID NO: 36481 - DNA, 15 bp, Homo sapiens
ttcacatgttcataa

SEQ ID NO: 36482 - DNA, 15 bp, Homo sapiens
cttcacatgttcata

SEQ ID NO: 36483 - DNA, 15 bp, Homo sapiens
tcttcacatgttcat

SEQ ID NO: 36484 - DNA, 15 bp, Homo sapiens
atcttcacatgttca

SEQ ID NO: 36485 - DNA, 15 bp, Homo sapiens
aatcttcacatgttc

SEQ ID NO: 36486 - DNA, 15 bp, Homo sapiens
taatcttcacatgtt

SEQ ID NO: 36487 - DNA, 15 bp, Homo sapiens
ataatcttcacatgt

SEQ ID NO: 36488 - DNA, 15 bp, Homo sapiens
aataatcttcacatg

SEQ ID NO: 36489 - DNA, 15 bp, Homo sapiens
gaataatcttcacat

SEQ ID NO: 36490 - DNA, 15 bp, Homo sapiens
tgaataatcttcaca

SEQ ID NO: 36491 - DNA, 15 bp, Homo sapiens
ttgaataatcttcac

SEQ ID NO: 36492 - DNA, 15 bp, Homo sapiens
tttgaataatcttca

SEQ ID NO: 36493 - DNA, 15 bp, Homo sapiens
ttttgaataatcttc

SEQ ID NO: 36494 - DNA, 15 bp, Homo sapiens
cttttgaataatctt

SEQ ID NO: 36495 - DNA, 15 bp, Homo sapiens
acttttgaataatct

SEQ ID NO: 36496 - DNA, 15 bp, Homo sapiens
tacttttgaataatc

SEQ ID NO: 36497 - DNA, 15 bp, Homo sapiens
ttacttttgaataat

SEQ ID NO: 36498 - DNA, 15 bp, Homo sapiens
cttacttttgaataa

SEQ ID NO: 36499 - DNA, 15 bp, Homo sapiens
gcttacttttgaata

SEQ ID NO: 36500 - DNA, 15 bp, Homo sapiens
agcttacttttgaat

SEQ ID NO: 36501 - DNA, 15 bp, Homo sapiens
cagcttacttttgaa

SEQ ID NO: 36502 - DNA, 15 bp, Homo sapiens
acagcttacttttga

SEQ ID NO: 36503 - DNA, 15 bp, Homo sapiens
aacagcttacttttg

SEQ ID NO: 36504 - DNA, 15 bp, Homo sapiens
caacagcttactttt

SEQ ID NO: 36505 - DNA, 15 bp, Homo sapiens
ccaacagcttacttt

SEQ ID NO: 36506 - DNA, 15 bp, Homo sapiens
accaacagcttactt

SEQ ID NO: 36507 - DNA, 15 bp, Homo sapiens
caccaacagcttact

SEQ ID NO: 36508 - DNA, 15 bp, Homo sapiens
tcaccaacagcttac

SEQ ID NO: 36509 - DNA, 15 bp, Homo sapiens
atcaccaacagctta

SEQ ID NO: 36510 - DNA, 15 bp, Homo sapiens
aatcaccaacagctt

SEQ ID NO: 36511 - DNA, 15 bp, Homo sapiens
aaatcaccaacagct

SEQ ID NO: 36512 - DNA, 15 bp, Homo sapiens
aaaatcaccaacagc

SEQ ID NO: 36513 - DNA, 15 bp, Homo sapiens
aaaaatcaccaacag

SEQ ID NO: 36514 - DNA, 15 bp, Homo sapiens
aaaaaatcaccaaca

SEQ ID NO: 36515 - DNA, 15 bp, Homo sapiens
aaaaaaatcaccaac

SEQ ID NO: 36516 - DNA, 15 bp, Homo sapiens
gaaaaaaatcaccaa

SEQ ID NO: 36517 - DNA, 15 bp, Homo sapiens
agaaaaaaatcacca

SEQ ID NO: 36518 - DNA, 15 bp, Homo sapiens
aagaaaaaaatcacc

SEQ ID NO: 36519 - DNA, 15 bp, Homo sapiens
gaagaaaaaaatcac

SEQ ID NO: 36520 - DNA, 15 bp, Homo sapiens
ggaagaaaaaaatca

SEQ ID NO: 36521 - DNA, 15 bp, Homo sapiens
tggaagaaaaaaatc

SEQ ID NO: 36522 - DNA, 15 bp, Homo sapiens
ttggaagaaaaaaat

SEQ ID NO: 36523 - DNA, 15 bp, Homo sapiens
cttggaagaaaaaaa

SEQ ID NO: 36524 - DNA, 15 bp, Homo sapiens
tcttggaagaaaaaa

SEQ ID NO: 36525 - DNA, 15 bp, Homo sapiens
ttcttggaagaaaaa

SEQ ID NO: 36526 - DNA, 15 bp, Homo sapiens
tttcttggaagaaaa

SEQ ID NO: 36527 - DNA, 15 bp, Homo sapiens
ctttcttggaagaaa

SEQ ID NO: 36528 - DNA, 15 bp, Homo sapiens
gctttcttggaagaa

SEQ ID NO: 36529 - DNA, 15 bp, Homo sapiens
tgctttcttggaaga

SEQ ID NO: 36530 - DNA, 15 bp, Homo sapiens
atgctttcttggaag

SEQ ID NO: 36531 - DNA, 15 bp, Homo sapiens
catgctttcttggaa

SEQ ID NO: 36532 - DNA, 15 bp, Homo sapiens
gcatgctttcttgga

SEQ ID NO: 36533 - DNA, 15 bp, Homo sapiens
ggcatgctttcttgg

SEQ ID NO: 36534 - DNA, 15 bp, Homo sapiens
tggcatgctttcttg

SEQ ID NO: 36535 - DNA, 15 bp, Homo sapiens
gtggcatgctttctt

SEQ ID NO: 36536 - DNA, 15 bp, Homo sapiens
tgtggcatgctttct

SEQ ID NO: 36537 - DNA, 15 bp, Homo sapiens
ctgtggcatgctttc

SEQ ID NO: 36538 - DNA, 15 bp, Homo sapiens
cctgtggcatgcttt

SEQ ID NO: 36539 - DNA, 15 bp, Homo sapiens
ccctgtggcatgctt

SEQ ID NO: 36540 - DNA, 15 bp, Homo sapiens
gccctgtggcatgct

SEQ ID NO: 36541 - DNA, 15 bp, Homo sapiens
tgccctgtggcatgc

SEQ ID NO: 36542 - DNA, 15 bp, Homo sapiens
ttgccctgtggcatg

SEQ ID NO: 36543 - DNA, 15 bp, Homo sapiens
gttgccctgtggcat

SEQ ID NO: 36544 - DNA, 15 bp, Homo sapiens
agttgccctgtggca

SEQ ID NO: 36545 - DNA, 15 bp, Homo sapiens
aagttgccctgtggc

SEQ ID NO: 36546 - DNA, 15 bp, Homo sapiens
gaagttgccctgtgg

SEQ ID NO: 36547 - DNA, 15 bp, Homo sapiens
agaagttgccctgtg

SEQ ID NO: 36548 - DNA, 15 bp, Homo sapiens
tagaagttgccctgt

SEQ ID NO: 36549 - DNA, 15 bp, Homo sapiens
ctagaagttgccctg

SEQ ID NO: 36550 - DNA, 15 bp, Homo sapiens
cctagaagttgccct

SEQ ID NO: 36551 - DNA, 15 bp, Homo sapiens
ccctagaagttgccc

SEQ ID NO: 36552 - DNA, 15 bp, Homo sapiens
accctagaagttgcc

SEQ ID NO: 36553 - DNA, 15 bp, Homo sapiens
aaccctagaagttgc

SEQ ID NO: 36554 - DNA, 15 bp, Homo sapiens
caaccctagaagttg

SEQ ID NO: 36555 - DNA, 15 bp, Homo sapiens
ccaaccctagaagtt

SEQ ID NO: 36556 - DNA, 15 bp, Homo sapiens
accaaccctagaagt

SEQ ID NO: 36557 - DNA, 15 bp, Homo sapiens
aaccaaccctagaag

SEQ ID NO: 36558 - DNA, 15 bp, Homo sapiens
gaaccaaccctagaa

SEQ ID NO: 36559 - DNA, 15 bp, Homo sapiens
agaaccaaccctaga

SEQ ID NO: 36560 - DNA, 15 bp, Homo sapiens
gagaaccaaccctag

SEQ ID NO: 36561 - DNA, 15 bp, Homo sapiens
tgagaaccaacccta

SEQ ID NO: 36562 - DNA, 15 bp, Homo sapiens
atgagaaccaaccct

SEQ ID NO: 36563 - DNA, 15 bp, Homo sapiens
gatgagaaccaaccc

SEQ ID NO: 36564 - DNA, 15 bp, Homo sapiens
agatgagaaccaacc

SEQ ID NO: 36565 - DNA, 15 bp, Homo sapiens
tagatgagaaccaac

SEQ ID NO: 36566 - DNA, 15 bp, Homo sapiens
ctagatgagaaccaa

SEQ ID NO: 36567 - DNA, 15 bp, Homo sapiens
actagatgagaacca

SEQ ID NO: 36568 - DNA, 15 bp, Homo sapiens
gactagatgagaacc

SEQ ID NO: 36569 - DNA, 15 bp, Homo sapiens
ggactagatgagaac

SEQ ID NO: 36570 - DNA, 15 bp, Homo sapiens
aggactagatgagaa

SEQ ID NO: 36571 - DNA, 15 bp, Homo sapiens
caggactagatgaga

SEQ ID NO: 36572 - DNA, 15 bp, Homo sapiens
acaggactagatgag

SEQ ID NO: 36573 - DNA, 15 bp, Homo sapiens
cacaggactagatga

SEQ ID NO: 36574 - DNA, 15 bp, Homo sapiens
gcacaggactagatg

SEQ ID NO: 36575 - DNA, 15 bp, Homo sapiens
agcacaggactagat

SEQ ID NO: 36576 - DNA, 15 bp, Homo sapiens
gagcacaggactaga

SEQ ID NO: 36577 - DNA, 15 bp, Homo sapiens
ggagcacaggactag

SEQ ID NO: 36578 - DNA, 15 bp, Homo sapiens
tggagcacaggacta

SEQ ID NO: 36579 - DNA, 15 bp, Homo sapiens
gtggagcacaggact

SEQ ID NO: 36580 - DNA, 15 bp, Homo sapiens
tgtggagcacaggac

SEQ ID NO: 36581 - DNA, 15 bp, Homo sapiens
gtgtggagcacagga

SEQ ID NO: 36582 - DNA, 15 bp, Homo sapiens
agtgtggagcacagg

SEQ ID NO: 36583 - DNA, 15 bp, Homo sapiens
tagtgtggagcacag

SEQ ID NO: 36584 - DNA, 15 bp, Homo sapiens
atagtgtggagcaca

SEQ ID NO: 36585 - DNA, 15 bp, Homo sapiens
gatagtgtggagcac

SEQ ID NO: 36586 - DNA, 15 bp, Homo sapiens
agatagtgtggagca

SEQ ID NO: 36587 - DNA, 15 bp, Homo sapiens
cagatagtgtggagc

SEQ ID NO: 36588 - DNA, 15 bp, Homo sapiens
gcagatagtgtggag

SEQ ID NO: 36589 - DNA, 15 bp, Homo sapiens
tgcagatagtgtgga

SEQ ID NO: 36590 - DNA, 15 bp, Homo sapiens
atgcagatagtgtgg

SEQ ID NO: 36591 - DNA, 15 bp, Homo sapiens
gatgcagatagtgtg

SEQ ID NO: 36592 - DNA, 15 bp, Homo sapiens
agatgcagatagtgt

SEQ ID NO: 36593 - DNA, 15 bp, Homo sapiens
cagatgcagatagtg

SEQ ID NO: 36594 - DNA, 15 bp, Homo sapiens
gcagatgcagatagt

SEQ ID NO: 36595 - DNA, 15 bp, Homo sapiens
tgcagatgcagatag

SEQ ID NO: 36596 - DNA, 15 bp, Homo sapiens
gtgcagatgcagata

SEQ ID NO: 36597 - DNA, 15 bp, Homo sapiens
agtgcagatgcagat

SEQ ID NO: 36598 - DNA, 15 bp, Homo sapiens
aagtgcagatgcaga

SEQ ID NO: 36599 - DNA, 15 bp, Homo sapiens
taagtgcagatgcag

SEQ ID NO: 36600 - DNA, 15 bp, Homo sapiens
ttaagtgcagatgca

SEQ ID NO: 36601 - DNA, 15 bp, Homo sapiens
cttaagtgcagatgc

SEQ ID NO: 36602 - DNA, 15 bp, Homo sapiens
acttaagtgcagatg

SEQ ID NO: 36603 - DNA, 15 bp, Homo sapiens
aacttaagtgcagat

SEQ ID NO: 36604 - DNA, 15 bp, Homo sapiens
aaacttaagtgcaga

SEQ ID NO: 36605 - DNA, 15 bp, Homo sapiens
gaaacttaagtgcag

SEQ ID NO: 36606 - DNA, 15 bp, Homo sapiens
tgaaacttaagtgca

SEQ ID NO: 36607 - DNA, 15 bp, Homo sapiens
ttgaaacttaagtgc

SEQ ID NO: 36608 - DNA, 15 bp, Homo sapiens
attgaaacttaagtg

SEQ ID NO: 36609 - DNA, 15 bp, Homo sapiens
tattgaaacttaagt

SEQ ID NO: 36610 - DNA, 15 bp, Homo sapiens
atattgaaacttaag

SEQ ID NO: 36611 - DNA, 15 bp, Homo sapiens
aatattgaaacttaa

SEQ ID NO: 36612 - DNA, 15 bp, Homo sapiens
taatattgaaactta

SEQ ID NO: 36613 - DNA, 15 bp, Homo sapiens
ctaatattgaaactt

SEQ ID NO: 36614 - DNA, 15 bp, Homo sapiens
tctaatattgaaact

SEQ ID NO: 36615 - DNA, 15 bp, Homo sapiens
atctaatattgaaac

SEQ ID NO: 36616 - DNA, 15 bp, Homo sapiens
tatctaatattgaaa

SEQ ID NO: 36617 - DNA, 15 bp, Homo sapiens
ttatctaatattgaa

SEQ ID NO: 36618 - DNA, 15 bp, Homo sapiens
gttatctaatattga

SEQ ID NO: 36619 - DNA, 15 bp, Homo sapiens
agttatctaatattg

SEQ ID NO: 36620 - DNA, 15 bp, Homo sapiens
gagttatctaatatt

SEQ ID NO: 36621 - DNA, 15 bp, Homo sapiens
tgagttatctaatat

SEQ ID NO: 36622 - DNA, 15 bp, Homo sapiens
gtgagttatctaata

SEQ ID NO: 36623 - DNA, 15 bp, Homo sapiens
tgtgagttatctaat

SEQ ID NO: 36624 - DNA, 15 bp, Homo sapiens
atgtgagttatctaa

SEQ ID NO: 36625 - DNA, 15 bp, Homo sapiens
catgtgagttatcta

SEQ ID NO: 36626 - DNA, 15 bp, Homo sapiens
acatgtgagttatct

SEQ ID NO: 36627 - DNA, 15 bp, Homo sapiens
aacatgtgagttatc

SEQ ID NO: 36628 - DNA, 15 bp, Homo sapiens
aaacatgtgagttat

SEQ ID NO: 36629 - DNA, 15 bp, Homo sapiens
taaacatgtgagtta

SEQ ID NO: 36630 - DNA, 15 bp, Homo sapiens
ttaaacatgtgagtt

SEQ ID NO: 36631 - DNA, 15 bp, Homo sapiens
tttaaacatgtgagt

SEQ ID NO: 36632 - DNA, 15 bp, Homo sapiens
gtttaaacatgtgag

SEQ ID NO: 36633 - DNA, 15 bp, Homo sapiens
agtttaaacatgtga

SEQ ID NO: 36634 - DNA, 15 bp, Homo sapiens
tagtttaaacatgtg

SEQ ID NO: 36635 - DNA, 15 bp, Homo sapiens
atagtttaaacatgt

SEQ ID NO: 36636 - DNA, 15 bp, Homo sapiens
catagtttaaacatg

SEQ ID NO: 36637 - DNA, 15 bp, Homo sapiens
tcatagtttaaacat

SEQ ID NO: 36638 - DNA, 15 bp, Homo sapiens
ttcatagtttaaaca

SEQ ID NO: 36639 - DNA, 15 bp, Homo sapiens
cttcatagtttaaac

SEQ ID NO: 36640 - DNA, 15 bp, Homo sapiens
tcttcatagtttaaa

SEQ ID NO: 36641 - DNA, 15 bp, Homo sapiens
ttcttcatagtttaa

SEQ ID NO: 36642 - DNA, 15 bp, Homo sapiens
tttcttcatagttta

SEQ ID NO: 36643 - DNA, 15 bp, Homo sapiens
ctttcttcatagttt

SEQ ID NO: 36644 - DNA, 15 bp, Homo sapiens
tctttcttcatagtt

SEQ ID NO: 36645 - DNA, 15 bp, Homo sapiens
ctctttcttcatagt

SEQ ID NO: 36646 - DNA, 15 bp, Homo sapiens
actctttcttcatag

SEQ ID NO: 36647 - DNA, 15 bp, Homo sapiens
aactctttcttcata

SEQ ID NO: 36648 - DNA, 15 bp, Homo sapiens
taactctttcttcat

SEQ ID NO: 36649 - DNA, 15 bp, Homo sapiens
ttaactctttcttca

SEQ ID NO: 36650 - DNA, 15 bp, Homo sapiens
tttaactctttcttc

SEQ ID NO: 36651 - DNA, 15 bp, Homo sapiens
ttttaactctttctt

SEQ ID NO: 36652 - DNA, 15 bp, Homo sapiens
gttttaactctttct

SEQ ID NO: 36653 - DNA, 15 bp, Homo sapiens
tgttttaactctttc

SEQ ID NO: 36654 - DNA, 15 bp, Homo sapiens
atgttttaactcttt

SEQ ID NO: 36655 - DNA, 15 bp, Homo sapiens
gatgttttaactctt

SEQ ID NO: 36656 - DNA, 15 bp, Homo sapiens
ggatgttttaactct

SEQ ID NO: 36657 - DNA, 15 bp, Homo sapiens
aggatgttttaactc

SEQ ID NO: 36658 - DNA, 15 bp, Homo sapiens
caggatgttttaact

SEQ ID NO: 36659 - DNA, 15 bp, Homo sapiens
tcaggatgttttaac

SEQ ID NO: 36660 - DNA, 15 bp, Homo sapiens
ctcaggatgttttaa

SEQ ID NO: 36661 - DNA, 15 bp, Homo sapiens
tctcaggatgtttta

SEQ ID NO: 36662 - DNA, 15 bp, Homo sapiens
ttctcaggatgtttt

SEQ ID NO: 36663 - DNA, 15 bp, Homo sapiens
attctcaggatgttt

SEQ ID NO: 36664 - DNA, 15 bp, Homo sapiens
cattctcaggatgtt

SEQ ID NO: 36665 - DNA, 15 bp, Homo sapiens
gcattctcaggatgt

SEQ ID NO: 36666 - DNA, 15 bp, Homo sapiens
agcattctcaggatg

SEQ ID NO: 36667 - DNA, 15 bp, Homo sapiens
tagcattctcaggat

SEQ ID NO: 36668 - DNA, 15 bp, Homo sapiens
ctagcattctcagga

SEQ ID NO: 36669 - DNA, 15 bp, Homo sapiens
actagcattctcagg

SEQ ID NO: 36670 - DNA, 15 bp, Homo sapiens
tactagcattctcag

SEQ ID NO: 36671 - DNA, 15 bp, Homo sapiens
ttactagcattctca

SEQ ID NO: 36672 - DNA, 15 bp, Homo sapiens
cttactagcattctc

SEQ ID NO: 36673 - DNA, 15 bp, Homo sapiens
acttactagcattct

SEQ ID NO: 36674 - DNA, 15 bp, Homo sapiens
tacttactagcattc

SEQ ID NO: 36675 - DNA, 15 bp, Homo sapiens
atacttactagcatt

SEQ ID NO: 36676 - DNA, 15 bp, Homo sapiens
catacttactagcat

SEQ ID NO: 36677 - DNA, 15 bp, Homo sapiens
acatacttactagca

SEQ ID NO: 36678 - DNA, 15 bp, Homo sapiens
tacatacttactagc

SEQ ID NO: 36679 - DNA, 15 bp, Homo sapiens
atacatacttactag

SEQ ID NO: 36680 - DNA, 15 bp, Homo sapiens
aatacatacttacta

SEQ ID NO: 36681 - DNA, 15 bp, Homo sapiens
aaatacatacttact

SEQ ID NO: 36682 - DNA, 15 bp, Homo sapiens
aaaatacatacttac

SEQ ID NO: 36683 - DNA, 15 bp, Homo sapiens
aaaaatacatactta

SEQ ID NO: 36684 - DNA, 15 bp, Homo sapiens
caaaaatacatactt

SEQ ID NO: 36685 - DNA, 15 bp, Homo sapiens
tcaaaaatacatact

SEQ ID NO: 36686 - DNA, 15 bp, Homo sapiens
ttcaaaaatacatac

SEQ ID NO: 36687 - DNA, 15 bp, Homo sapiens
tttcaaaaatacata

SEQ ID NO: 36688 - DNA, 15 bp, Homo sapiens
ctttcaaaaatacat

SEQ ID NO: 36689 - DNA, 15 bp, Homo sapiens
cctttcaaaaataca

SEQ ID NO: 36690 - DNA, 15 bp, Homo sapiens
tcctttcaaaaatac

SEQ ID NO: 36691 - DNA, 15 bp, Homo sapiens
gtcctttcaaaaata

SEQ ID NO: 36692 - DNA, 15 bp, Homo sapiens
agtcctttcaaaaat

SEQ ID NO: 36693 - DNA, 15 bp, Homo sapiens
aagtcctttcaaaaa

SEQ ID NO: 36694 - DNA, 15 bp, Homo sapiens
gaagtcctttcaaaa

SEQ ID NO: 36695 - DNA, 15 bp, Homo sapiens
ggaagtcctttcaaa

SEQ ID NO: 36696 - DNA, 15 bp, Homo sapiens
tggaagtcctttcaa

SEQ ID NO: 36697 - DNA, 15 bp, Homo sapiens
ttggaagtcctttca

SEQ ID NO: 36698 - DNA, 15 bp, Homo sapiens
tttggaagtcctttc

SEQ ID NO: 36699 - DNA, 15 bp, Homo sapiens
ttttggaagtccttt

SEQ ID NO: 36700 - DNA, 15 bp, Homo sapiens
attttggaagtcctt

SEQ ID NO: 36701 - DNA, 15 bp, Homo sapiens
aattttggaagtcct

SEQ ID NO: 36702 - DNA, 15 bp, Homo sapiens
aaattttggaagtcc

SEQ ID NO: 36703 - DNA, 15 bp, Homo sapiens
caaattttggaagtc

SEQ ID NO: 36704 - DNA, 15 bp, Homo sapiens
tcaaattttggaagt

SEQ ID NO: 36705 - DNA, 15 bp, Homo sapiens
ctcaaattttggaag

SEQ ID NO: 36706 - DNA, 15 bp, Homo sapiens
actcaaattttggaa

SEQ ID NO: 36707 - DNA, 15 bp, Homo sapiens
aactcaaattttgga

SEQ ID NO: 36708 - DNA, 15 bp, Homo sapiens
aaactcaaattttgg

SEQ ID NO: 36709 - DNA, 15 bp, Homo sapiens
taaactcaaattttg

SEQ ID NO: 36710 - DNA, 15 bp, Homo sapiens
ttaaactcaaatttt

SEQ ID NO: 36711 - DNA, 15 bp, Homo sapiens
tttaaactcaaattt

SEQ ID NO: 36712 - DNA, 15 bp, Homo sapiens
ctttaaactcaaatt

SEQ ID NO: 36713 - DNA, 15 bp, Homo sapiens
tctttaaactcaaat

SEQ ID NO: 36714 - DNA, 15 bp, Homo sapiens
ctctttaaactcaaa

SEQ ID NO: 36715 - DNA, 15 bp, Homo sapiens
cctctttaaactcaa

SEQ ID NO: 36716 - DNA, 15 bp, Homo sapiens
acctctttaaactca

SEQ ID NO: 36717 - DNA, 15 bp, Homo sapiens
tacctctttaaactc

SEQ ID NO: 36718 - DNA, 15 bp, Homo sapiens
ttacctctttaaact

SEQ ID NO: 36719 - DNA, 15 bp, Homo sapiens
tttacctctttaaac

SEQ ID NO: 36720 - DNA, 15 bp, Homo sapiens
gtttacctctttaaa

SEQ ID NO: 36721 - DNA, 15 bp, Homo sapiens
agtttacctctttaa

SEQ ID NO: 36722 - DNA, 15 bp, Homo sapiens
gagtttacctcttta

SEQ ID NO: 36723 - DNA, 15 bp, Homo sapiens
ggagtttacctcttt

SEQ ID NO: 36724 - DNA, 15 bp, Homo sapiens
aggagtttacctctt

SEQ ID NO: 36725 - DNA, 15 bp, Homo sapiens
aaggagtttacctct

SEQ ID NO: 36726 - DNA, 15 bp, Homo sapiens
aaaggagtttacctc

SEQ ID NO: 36727 - DNA, 15 bp, Homo sapiens
aaaaggagtttacct

SEQ ID NO: 36728 - DNA, 15 bp, Homo sapiens
taaaaggagtttacc

SEQ ID NO: 36729 - DNA, 15 bp, Homo sapiens
gtaaaaggagtttac

SEQ ID NO: 36730 - DNA, 15 bp, Homo sapiens
tgtaaaaggagttta

SEQ ID NO: 36731 - DNA, 15 bp, Homo sapiens
atgtaaaaggagttt

SEQ ID NO: 36732 - DNA, 15 bp, Homo sapiens
catgtaaaaggagtt

SEQ ID NO: 36733 - DNA, 15 bp, Homo sapiens
tcatgtaaaaggagt

SEQ ID NO: 36734 - DNA, 15 bp, Homo sapiens
gtcatgtaaaaggag

SEQ ID NO: 36735 - DNA, 15 bp, Homo sapiens
tgtcatgtaaaagga

SEQ ID NO: 36736 - DNA, 15 bp, Homo sapiens
ttgtcatgtaaaagg

SEQ ID NO: 36737 - DNA, 15 bp, Homo sapiens
tttgtcatgtaaaag

SEQ ID NO: 36738 - DNA, 15 bp, Homo sapiens
ctttgtcatgtaaaa

SEQ ID NO: 36739 - DNA, 15 bp, Homo sapiens
actttgtcatgtaaa

SEQ ID NO: 36740 - DNA, 15 bp, Homo sapiens
aactttgtcatgtaa

SEQ ID NO: 36741 - DNA, 15 bp, Homo sapiens
taactttgtcatgta

SEQ ID NO: 36742 - DNA, 15 bp, Homo sapiens
gtaactttgtcatgt

SEQ ID NO: 36743 - DNA, 15 bp, Homo sapiens
agtaactttgtcatg

SEQ ID NO: 36744 - DNA, 15 bp, Homo sapiens
aagtaactttgtcat

SEQ ID NO: 36745 - DNA, 15 bp, Homo sapiens
taagtaactttgtca

SEQ ID NO: 36746 - DNA, 15 bp, Homo sapiens
ctaagtaactttgtc

SEQ ID NO: 36747 - DNA, 15 bp, Homo sapiens
tctaagtaactttgt

SEQ ID NO: 36748 - DNA, 15 bp, Homo sapiens
ttctaagtaactttg

SEQ ID NO: 36749 - DNA, 15 bp, Homo sapiens
tttctaagtaacttt

SEQ ID NO: 36750 - DNA, 15 bp, Homo sapiens
gtttctaagtaactt

SEQ ID NO: 36751 - DNA, 15 bp, Homo sapiens
tgtttctaagtaact

SEQ ID NO: 36752 - DNA, 15 bp, Homo sapiens
gtgtttctaagtaac

SEQ ID NO: 36753 - DNA, 15 bp, Homo sapiens
agtgtttctaagtaa

SEQ ID NO: 36754 - DNA, 15 bp, Homo sapiens
tagtgtttctaagta

SEQ ID NO: 36755 - DNA, 15 bp, Homo sapiens
gtagtgtttctaagt

SEQ ID NO: 36756 - DNA, 15 bp, Homo sapiens
agtagtgtttctaag

SEQ ID NO: 36757 - DNA, 15 bp, Homo sapiens
cagtagtgtttctaa

SEQ ID NO: 36758 - DNA, 15 bp, Homo sapiens
gcagtagtgtttcta

SEQ ID NO: 36759 - DNA, 15 bp, Homo sapiens
agcagtagtgtttct

SEQ ID NO: 36760 - DNA, 15 bp, Homo sapiens
cagcagtagtgtttc

SEQ ID NO: 36761 - DNA, 15 bp, Homo sapiens
acagcagtagtgttt

SEQ ID NO: 36762 - DNA, 15 bp, Homo sapiens
aacagcagtagtgtt

SEQ ID NO: 36763 - DNA, 15 bp, Homo sapiens
aaacagcagtagtgt

SEQ ID NO: 36764 - DNA, 15 bp, Homo sapiens
gaaacagcagtagtg

SEQ ID NO: 36765 - DNA, 15 bp, Homo sapiens
ggaaacagcagtagt

SEQ ID NO: 36766 - DNA, 15 bp, Homo sapiens
gggaaacagcagtag

SEQ ID NO: 36767 - DNA, 15 bp, Homo sapiens
agggaaacagcagta

SEQ ID NO: 36768 - DNA, 15 bp, Homo sapiens
gagggaaacagcagt

SEQ ID NO: 36769 - DNA, 15 bp, Homo sapiens
agagggaaacagcag

SEQ ID NO: 36770 - DNA, 15 bp, Homo sapiens
gagagggaaacagca

SEQ ID NO: 36771 - DNA, 15 bp, Homo sapiens
ggagagggaaacagc

SEQ ID NO: 36772 - DNA, 15 bp, Homo sapiens
gggagagggaaacag

SEQ ID NO: 36773 - DNA, 15 bp, Homo sapiens
agggagagggaaaca

SEQ ID NO: 36774 - DNA, 15 bp, Homo sapiens
aagggagagggaaac

SEQ ID NO: 36775 - DNA, 15 bp, Homo sapiens
caagggagagggaaa

SEQ ID NO: 36776 - DNA, 15 bp, Homo sapiens
gcaagggagagggaa

SEQ ID NO: 36777 - DNA, 15 bp, Homo sapiens
ggcaagggagaggga

SEQ ID NO: 36778 - DNA, 15 bp, Homo sapiens
aggcaagggagaggg

SEQ ID NO: 36779 - DNA, 15 bp, Homo sapiens
aaggcaagggagagg

SEQ ID NO: 36780 - DNA, 15 bp, Homo sapiens
gaaggcaagggagag

SEQ ID NO: 36781 - DNA, 15 bp, Homo sapiens
agaaggcaagggaga

SEQ ID NO: 36782 - DNA, 15 bp, Homo sapiens
gagaaggcaagggag

SEQ ID NO: 36783 - DNA, 15 bp, Homo sapiens
ggagaaggcaaggga

SEQ ID NO: 36784 - DNA, 15 bp, Homo sapiens
gggagaaggcaaggg

SEQ ID NO: 36785 - DNA, 15 bp, Homo sapiens
agggagaaggcaagg

SEQ ID NO: 36786 - DNA, 15 bp, Homo sapiens
cagggagaaggcaag

SEQ ID NO: 36787 - DNA, 15 bp, Homo sapiens
acagggagaaggcaa

SEQ ID NO: 36788 - DNA, 15 bp, Homo sapiens
gacagggagaaggca

SEQ ID NO: 36789 - DNA, 15 bp, Homo sapiens
ggacagggagaaggc

SEQ ID NO: 36790 - DNA, 15 bp, Homo sapiens
gggacagggagaagg

SEQ ID NO: 36791 - DNA, 15 bp, Homo sapiens
tgggacagggagaag

SEQ ID NO: 36792 - DNA, 15 bp, Homo sapiens
atgggacagggagaa

SEQ ID NO: 36793 - DNA, 15 bp, Homo sapiens
catgggacagggaga

SEQ ID NO: 36794 - DNA, 15 bp, Homo sapiens
gcatgggacagggag

SEQ ID NO: 36795 - DNA, 15 bp, Homo sapiens
tgcatgggacaggga

SEQ ID NO: 36796 - DNA, 15 bp, Homo sapiens
atgcatgggacaggg

SEQ ID NO: 36797 - DNA, 15 bp, Homo sapiens
tatgcatgggacagg

SEQ ID NO: 36798 - DNA, 15 bp, Homo sapiens
gtatgcatgggacag

SEQ ID NO: 36799 - DNA, 15 bp, Homo sapiens
ggtatgcatgggaca

SEQ ID NO: 36800 - DNA, 15 bp, Homo sapiens
gggtatgcatgggac

SEQ ID NO: 36801 - DNA, 15 bp, Homo sapiens
ggggtatgcatggga

SEQ ID NO: 36802 - DNA, 15 bp, Homo sapiens
gggggtatgcatggg

SEQ ID NO: 36803 - DNA, 15 bp, Homo sapiens
tgggggtatgcatgg

SEQ ID NO: 36804 - DNA, 15 bp, Homo sapiens
ctgggggtatgcatg

SEQ ID NO: 36805 - DNA, 15 bp, Homo sapiens
gctgggggtatgcat

SEQ ID NO: 36806 - DNA, 15 bp, Homo sapiens
agctgggggtatgca

SEQ ID NO: 36807 - DNA, 15 bp, Homo sapiens
cagctgggggtatgc

SEQ ID NO: 36808 - DNA, 15 bp, Homo sapiens
acagctgggggtatg

SEQ ID NO: 36809 - DNA, 15 bp, Homo sapiens
cacagctgggggtat

SEQ ID NO: 36810 - DNA, 15 bp, Homo sapiens
acacagctgggggta

SEQ ID NO: 36811 - DNA, 15 bp, Homo sapiens
aacacagctgggggt

SEQ ID NO: 36812 - DNA, 15 bp, Homo sapiens
gaacacagctggggg

SEQ ID NO: 36813 - DNA, 15 bp, Homo sapiens
ggaacacagctgggg

SEQ ID NO: 36814 - DNA, 15 bp, Homo sapiens
tggaacacagctggg

SEQ ID NO: 36815 - DNA, 15 bp, Homo sapiens
ctggaacacagctgg

SEQ ID NO: 36816 - DNA, 15 bp, Homo sapiens
tctggaacacagctg

SEQ ID NO: 36817 - DNA, 15 bp, Homo sapiens
ttctggaacacagct

SEQ ID NO: 36818 - DNA, 15 bp, Homo sapiens
attctggaacacagc

SEQ ID NO: 36819 - DNA, 15 bp, Homo sapiens
cattctggaacacag

SEQ ID NO: 36820 - DNA, 15 bp, Homo sapiens
tcattctggaacaca

SEQ ID NO: 36821 - DNA, 15 bp, Homo sapiens
atcattctggaacac

SEQ ID NO: 36822 - DNA, 15 bp, Homo sapiens
catcattctggaaca

SEQ ID NO: 36823 - DNA, 15 bp, Homo sapiens
ccatcattctggaac

SEQ ID NO: 36824 - DNA, 15 bp, Homo sapiens
gccatcattctggaa

SEQ ID NO: 36825 - DNA, 15 bp, Homo sapiens
tgccatcattctgga

SEQ ID NO: 36826 - DNA, 15 bp, Homo sapiens
gtgccatcattctgg

SEQ ID NO: 36827 - DNA, 15 bp, Homo sapiens
tgtgccatcattctg

SEQ ID NO: 36828 - DNA, 15 bp, Homo sapiens
atgtgccatcattct

SEQ ID NO: 36829 - DNA, 15 bp, Homo sapiens
tatgtgccatcattc

SEQ ID NO: 36830 - DNA, 15 bp, Homo sapiens
ttatgtgccatcatt

SEQ ID NO: 36831 - DNA, 15 bp, Homo sapiens
tttatgtgccatcat

SEQ ID NO: 36832 - DNA, 15 bp, Homo sapiens
ctttatgtgccatca

SEQ ID NO: 36833 - DNA, 15 bp, Homo sapiens
actttatgtgccatc

SEQ ID NO: 36834 - DNA, 15 bp, Homo sapiens
tactttatgtgccat

SEQ ID NO: 36835 - DNA, 15 bp, Homo sapiens
ttactttatgtgcca

SEQ ID NO: 36836 - DNA, 15 bp, Homo sapiens
tttactttatgtgcc

SEQ ID NO: 36837 - DNA, 15 bp, Homo sapiens
gtttactttatgtgc

SEQ ID NO: 36838 - DNA, 15 bp, Homo sapiens
tgtttactttatgtg

SEQ ID NO: 36839 - DNA, 15 bp, Homo sapiens
atgtttactttatgt

SEQ ID NO: 36840 - DNA, 15 bp, Homo sapiens
aatgtttactttatg

SEQ ID NO: 36841 - DNA, 15 bp, Homo sapiens
gaatgtttactttat

SEQ ID NO: 36842 - DNA, 15 bp, Homo sapiens
tgaatgtttacttta

SEQ ID NO: 36843 - DNA, 15 bp, Homo sapiens
atgaatgtttacttt

SEQ ID NO: 36844 - DNA, 15 bp, Homo sapiens
tatgaatgtttactt

SEQ ID NO: 36845 - DNA, 15 bp, Homo sapiens
atatgaatgtttact

SEQ ID NO: 36846 - DNA, 15 bp, Homo sapiens
aatatgaatgtttac

SEQ ID NO: 36847 - DNA, 15 bp, Homo sapiens
aaatatgaatgttta

SEQ ID NO: 36848 - DNA, 15 bp, Homo sapiens
taaatatgaatgttt

SEQ ID NO: 36849 - DNA, 15 bp, Homo sapiens
ataaatatgaatgtt

SEQ ID NO: 36850 - DNA, 15 bp, Homo sapiens
aataaatatgaatgt

SEQ ID NO: 36851 - DNA, 15 bp, Homo sapiens
aaataaatatgaatg

SEQ ID NO: 36852 - DNA, 15 bp, Homo sapiens
gaaataaatatgaat

SEQ ID NO: 36853 - DNA, 15 bp, Homo sapiens
ggaaataaatatgaa

SEQ ID NO: 36854 - DNA, 15 bp, Homo sapiens
gggaaataaatatga

SEQ ID NO: 36855 - DNA, 15 bp, Homo sapiens
agggaaataaatatg

SEQ ID NO: 36856 - DNA, 15 bp, Homo sapiens
aagggaaataaatat

SEQ ID NO: 36857 - DNA, 15 bp, Homo sapiens
aaagggaaataaata

SEQ ID NO: 36858 - DNA, 15 bp, Homo sapiens
aaaagggaaataaat

SEQ ID NO: 36859 - DNA, 15 bp, Homo sapiens
aaaaagggaaataaa

SEQ ID NO: 36860 - DNA, 15 bp, Homo sapiens
aaaaaagggaaataa

SEQ ID NO: 36861 - DNA, 15 bp, Homo sapiens
aaaaaaagggaaata

SEQ ID NO: 36862 - DNA, 15 bp, Homo sapiens
caaaaaaagggaaat

SEQ ID NO: 36863 - DNA, 15 bp, Homo sapiens
acaaaaaaagggaaa

SEQ ID NO: 36864 - DNA, 15 bp, Homo sapiens
aacaaaaaaagggaa

SEQ ID NO: 36865 - DNA, 15 bp, Homo sapiens
aaacaaaaaaaggga

SEQ ID NO: 36866 - DNA, 15 bp, Homo sapiens
aaaacaaaaaaaggg

SEQ ID NO: 36867 - DNA, 15 bp, Homo sapiens
aaaaacaaaaaaagg

SEQ ID NO: 36868 - DNA, 15 bp, Homo sapiens
aaaaaacaaaaaaag

SEQ ID NO: 36869 - DNA, 15 bp, Homo sapiens
aaaaaaacaaaaaaa

SEQ ID NO: 36870 - DNA, 15 bp, Homo sapiens
aaaaaaaacaaaaaa

SEQ ID NO: 36871 - DNA, 15 bp, Homo sapiens
aaaaaaaaacaaaaa

SEQ ID NO: 36872 - DNA, 15 bp, Homo sapiens
aaaaaaaaaacaaaa

SEQ ID NO: 36873 - DNA, 15 bp, Homo sapiens
aaaaaaaaaaacaaa

SEQ ID NO: 36874 - DNA, 15 bp, Homo sapiens
aaaaaaaaaaaacaa

SEQ ID NO: 36875 - DNA, 15 bp, Homo sapiens
aaaaaaaaaaaaaca

SEQ ID NO: 36876 - DNA, 15 bp, Homo sapiens
gcaaaaaaaaaaaaa

SEQ ID NO: 36877 - DNA, 15 bp, Homo sapiens
agcaaaaaaaaaaaa

SEQ ID NO: 36878 - DNA, 15 bp, Homo sapiens
aagcaaaaaaaaaaa

SEQ ID NO: 36879 - DNA, 15 bp, Homo sapiens
caagcaaaaaaaaaa

SEQ ID NO: 36880 - DNA, 15 bp, Homo sapiens
acaagcaaaaaaaaa

SEQ ID NO: 36881 - DNA, 15 bp, Homo sapiens
aacaagcaaaaaaaa

SEQ ID NO: 36882 - DNA, 15 bp, Homo sapiens
aaacaagcaaaaaaa

SEQ ID NO: 36883 - DNA, 15 bp, Homo sapiens
caaacaagcaaaaaa

SEQ ID NO: 36884 - DNA, 15 bp, Homo sapiens
acaaacaagcaaaaa

SEQ ID NO: 36885 - DNA, 15 bp, Homo sapiens
aacaaacaagcaaaa

SEQ ID NO: 36886 - DNA, 15 bp, Homo sapiens
aaacaaacaagcaaa

SEQ ID NO: 36887 - DNA, 15 bp, Homo sapiens
aaaacaaacaagcaa

SEQ ID NO: 36888 - DNA, 15 bp, Homo sapiens
caaaacaaacaagca

SEQ ID NO: 36889 - DNA, 15 bp, Homo sapiens
acaaaacaaacaagc

SEQ ID NO: 36890 - DNA, 15 bp, Homo sapiens
aacaaaacaaacaag

SEQ ID NO: 36891 - DNA, 15 bp, Homo sapiens
aaaaacaaaacaaac

SEQ ID NO: 36892 - DNA, 15 bp, Homo sapiens
aaaaaacaaaacaaa

SEQ ID NO: 36893 - DNA, 15 bp, Homo sapiens
aaaaaaacaaaacaa

SEQ ID NO: 36894 - DNA, 15 bp, Homo sapiens
caaaaaaacaaaaca

SEQ ID NO: 36895 - DNA, 15 bp, Homo sapiens
acaaaaaaacaaaac

SEQ ID NO: 36896 - DNA, 15 bp, Homo sapiens
aacaaaaaaacaaaa

SEQ ID NO: 36897 - DNA, 15 bp, Homo sapiens
aaacaaaaaaacaaa

SEQ ID NO: 36898 - DNA, 15 bp, Homo sapiens
caaacaaaaaaacaa

SEQ ID NO: 36899 - DNA, 15 bp, Homo sapiens
tcaaacaaaaaaaca

SEQ ID NO: 36900 - DNA, 15 bp, Homo sapiens
ctcaaacaaaaaaac

SEQ ID NO: 36901 - DNA, 15 bp, Homo sapiens
tctcaaacaaaaaaa

SEQ ID NO: 36902 - DNA, 15 bp, Homo sapiens
gtctcaaacaaaaaa

SEQ ID NO: 36903 - DNA, 15 bp, Homo sapiens
tgtctcaaacaaaaa

SEQ ID NO: 36904 - DNA, 15 bp, Homo sapiens
ctgtctcaaacaaaa

SEQ ID NO: 36905 - DNA, 15 bp, Homo sapiens
actgtctcaaacaaa

SEQ ID NO: 36906 - DNA, 15 bp, Homo sapiens
gactgtctcaaacaa

SEQ ID NO: 36907 - DNA, 15 bp, Homo sapiens
agactgtctcaaaca

SEQ ID NO: 36908 - DNA, 15 bp, Homo sapiens
gagactgtctcaaac

SEQ ID NO: 36909 - DNA, 15 bp, Homo sapiens
tgagactgtctcaaa

SEQ ID NO: 36910 - DNA, 15 bp, Homo sapiens
gtgagactgtctcaa

SEQ ID NO: 36911 - DNA, 15 bp, Homo sapiens
agtgagactgtctca

SEQ ID NO: 36912 - DNA, 15 bp, Homo sapiens
gagtgagactgtctc

SEQ ID NO: 36913 - DNA, 15 bp, Homo sapiens
tgagtgagactgtct

SEQ ID NO: 36914 - DNA, 15 bp, Homo sapiens
ttgagtgagactgtc

SEQ ID NO: 36915 - DNA, 15 bp, Homo sapiens
attgagtgagactgt

SEQ ID NO: 36916 - DNA, 15 bp, Homo sapiens
gattgagtgagactg

SEQ ID NO: 36917 - DNA, 15 bp, Homo sapiens
tgattgagtgagact

SEQ ID NO: 36918 - DNA, 15 bp, Homo sapiens
gtgattgagtgagac

SEQ ID NO: 36919 - DNA, 15 bp, Homo sapiens
ggtgattgagtgaga

SEQ ID NO: 36920 - DNA, 15 bp, Homo sapiens
gggtgattgagtgag

SEQ ID NO: 36921 - DNA, 15 bp, Homo sapiens
tgggtgattgagtga

SEQ ID NO: 36922 - DNA, 15 bp, Homo sapiens
ctgggtgattgagtg

SEQ ID NO: 36923 - DNA, 15 bp, Homo sapiens
cctgggtgattgagt

SEQ ID NO: 36924 - DNA, 15 bp, Homo sapiens
gcctgggtgattgag

SEQ ID NO: 36925 - DNA, 15 bp, Homo sapiens
agcctgggtgattga

SEQ ID NO: 36926 - DNA, 15 bp, Homo sapiens
cagcctgggtgattg

SEQ ID NO: 36927 - DNA, 15 bp, Homo sapiens
ccagcctgggtgatt

SEQ ID NO: 36928 - DNA, 15 bp, Homo sapiens
tccagcctgggtgat

SEQ ID NO: 36929 - DNA, 15 bp, Homo sapiens
ttgccactgcactcc

SEQ ID NO: 36930 - DNA, 15 bp, Homo sapiens
gttgccactgcactc

SEQ ID NO: 36931 - DNA, 15 bp, Homo sapiens
tgttgccactgcact

SEQ ID NO: 36932 - DNA, 15 bp, Homo sapiens
atgttgccactgcac

SEQ ID NO: 36933 - DNA, 15 bp, Homo sapiens
gatgttgccactgca

SEQ ID NO: 36934 - DNA, 15 bp, Homo sapiens
agatgttgccactgc

SEQ ID NO: 36935 - DNA, 15 bp, Homo sapiens
gagatgttgccactg

SEQ ID NO: 36936 - DNA, 15 bp, Homo sapiens
tgagatgttgccact

SEQ ID NO: 36937 - DNA, 15 bp, Homo sapiens
ctgagatgttgccac

SEQ ID NO: 36938 - DNA, 15 bp, Homo sapiens
gctgagatgttgcca

SEQ ID NO: 36939 - DNA, 15 bp, Homo sapiens
agctgagatgttgcc

SEQ ID NO: 36940 - DNA, 15 bp, Homo sapiens
gagctgagatgttgc

SEQ ID NO: 36941 - DNA, 15 bp, Homo sapiens
tgagctgagatgttg

SEQ ID NO: 36942 - DNA, 15 bp, Homo sapiens
gtgagctgagatgtt

SEQ ID NO: 36943 - DNA, 15 bp, Homo sapiens
agtgagctgagatgt

SEQ ID NO: 36944 - DNA, 15 bp, Homo sapiens
aggaggtagaggttg

SEQ ID NO: 36945 - DNA, 15 bp, Homo sapiens
caggaggtagaggtt

SEQ ID NO: 36946 - DNA, 15 bp, Homo sapiens
tcaggaggtagaggt

SEQ ID NO: 36947 - DNA, 15 bp, Homo sapiens
ctcaggaggtagagg

SEQ ID NO: 36948 - DNA, 15 bp, Homo sapiens
actcaggaggtagag

SEQ ID NO: 36949 - DNA, 15 bp, Homo sapiens
aactcaggaggtaga

SEQ ID NO: 36950 - DNA, 15 bp, Homo sapiens
gaactcaggaggtag

SEQ ID NO: 36951 - DNA, 15 bp, Homo sapiens
tgaactcaggaggta

SEQ ID NO: 36952 - DNA, 15 bp, Homo sapiens
ttgaactcaggaggt

SEQ ID NO: 36953 - DNA, 15 bp, Homo sapiens
cttgaactcaggagg

SEQ ID NO: 36954 - DNA, 15 bp, Homo sapiens
gcttgaactcaggag

SEQ ID NO: 36955 - DNA, 15 bp, Homo sapiens
cgcttgaactcagga

SEQ ID NO: 36956 - DNA, 15 bp, Homo sapiens
tcgcttgaactcagg

SEQ ID NO: 36957 - DNA, 15 bp, Homo sapiens
atcgcttgaactcag

SEQ ID NO: 36958 - DNA, 15 bp, Homo sapiens
aatcgcttgaactca

SEQ ID NO: 36959 - DNA, 15 bp, Homo sapiens
gctcgggaggctgag

SEQ ID NO: 36960 - DNA, 15 bp, Homo sapiens
tgctcgggaggctga

SEQ ID NO: 36961 - DNA, 15 bp, Homo sapiens
ctgctcgggaggctg

SEQ ID NO: 36962 - DNA, 15 bp, Homo sapiens
gctgctcgggaggct

SEQ ID NO: 36963 - DNA, 15 bp, Homo sapiens
agctgctcgggaggc

SEQ ID NO: 36964 - DNA, 15 bp, Homo sapiens
cagctgctcgggagg

SEQ ID NO: 36965 - DNA, 15 bp, Homo sapiens
ccagctgctcgggag

SEQ ID NO: 36966 - DNA, 15 bp, Homo sapiens
cccagctgctcggga

SEQ ID NO: 36967 - DNA, 15 bp, Homo sapiens
tcccagctgctcggg

SEQ ID NO: 36968 - DNA, 15 bp, Homo sapiens
atcccagctgctcgg

SEQ ID NO: 36969 - DNA, 15 bp, Homo sapiens
aatcccagctgctcg

SEQ ID NO: 36970 - DNA, 15 bp, Homo sapiens
gtaatcccagctgct

SEQ ID NO: 36971 - DNA, 15 bp, Homo sapiens
tgtaatcccagctgc

SEQ ID NO: 36972 - DNA, 15 bp, Homo sapiens
ctgtaatcccagctg

SEQ ID NO: 36973 - DNA, 15 bp, Homo sapiens
ggcgcctgtaatccc

SEQ ID NO: 36974 - DNA, 15 bp, Homo sapiens
aggcgcctgtaatcc

SEQ ID NO: 36975 - DNA, 15 bp, Homo sapiens
caggcgcctgtaatc

SEQ ID NO: 36976 - DNA, 15 bp, Homo sapiens
gcaggcgcctgtaat

SEQ ID NO: 36977 - DNA, 15 bp, Homo sapiens
ggcaggcgcctgtaa

SEQ ID NO: 36978 - DNA, 15 bp, Homo sapiens
gggcaggcgcctgta

SEQ ID NO: 36979 - DNA, 15 bp, Homo sapiens
ggggcaggcgcctgt

SEQ ID NO: 36980 - DNA, 15 bp, Homo sapiens
gggggcaggcgcctg

SEQ ID NO: 36981 - DNA, 15 bp, Homo sapiens
tgggggcaggcgcct

SEQ ID NO: 36982 - DNA, 15 bp, Homo sapiens
gtgggggcaggcgcc

SEQ ID NO: 36983 - DNA, 15 bp, Homo sapiens
cgtgggggcaggcgc

SEQ ID NO: 36984 - DNA, 15 bp, Homo sapiens
gcgtgggggcaggcg

SEQ ID NO: 36985 - DNA, 15 bp, Homo sapiens
ggcgtgggggcaggc

SEQ ID NO: 36986 - DNA, 15 bp, Homo sapiens
aggcgtgggggcagg

SEQ ID NO: 36987 - DNA, 15 bp, Homo sapiens
caggcgtgggggcag

SEQ ID NO: 36988 - DNA, 15 bp, Homo sapiens
ccaggcgtgggggca

SEQ ID NO: 36989 - DNA, 15 bp, Homo sapiens
gccaggcgtgggggc

SEQ ID NO: 36990 - DNA, 15 bp, Homo sapiens
agccaggcgtggggg

SEQ ID NO: 36991 - DNA, 15 bp, Homo sapiens
tagccaggcgtgggg

SEQ ID NO: 36992 - DNA, 15 bp, Homo sapiens
ttagccaggcgtggg

SEQ ID NO: 36993 - DNA, 15 bp, Homo sapiens
attagccaggcgtgg

SEQ ID NO: 36994 - DNA, 15 bp, Homo sapiens
aattagccaggcgtg

SEQ ID NO: 36995 - DNA, 15 bp, Homo sapiens
aaattagccaggcgt

SEQ ID NO: 36996 - DNA, 15 bp, Homo sapiens
aaaattagccaggcg

SEQ ID NO: 36997 - DNA, 15 bp, Homo sapiens
atctctactaaaaat

SEQ ID NO: 36998 - DNA, 15 bp, Homo sapiens
catctctactaaaaa

SEQ ID NO: 36999 - DNA, 15 bp, Homo sapiens
cgaaaccccatctct

SEQ ID NO: 37000 - DNA, 15 bp, Homo sapiens
gcgaaaccccatctc

SEQ ID NO: 37001 - DNA, 15 bp, Homo sapiens
ggcgaaaccccatct

SEQ ID NO: 37002 - DNA, 15 bp, Homo sapiens
tggcgaaaccccatc

SEQ ID NO: 37003 - DNA, 15 bp, Homo sapiens
atggcgaaaccccat

SEQ ID NO: 37004 - DNA, 15 bp, Homo sapiens
catggcgaaacccca

SEQ ID NO: 37005 - DNA, 15 bp, Homo sapiens
acatggcgaaacccc

SEQ ID NO: 37006 - DNA, 15 bp, Homo sapiens
tctggccaacatggc

SEQ ID NO: 37007 - DNA, 15 bp, Homo sapiens
gtctggccaacatgg

SEQ ID NO: 37008 - DNA, 15 bp, Homo sapiens
agtctggccaacatg

SEQ ID NO: 37009 - DNA, 15 bp, Homo sapiens
cagtctggccaacat

SEQ ID NO: 37010 - DNA, 15 bp, Homo sapiens
ccagtctggccaaca

SEQ ID NO: 37011 - DNA, 15 bp, Homo sapiens
accagtctggccaac

SEQ ID NO: 37012 - DNA, 15 bp, Homo sapiens
gaccagtctggccaa

SEQ ID NO: 37013 - DNA, 15 bp, Homo sapiens
agaccagtctggcca

SEQ ID NO: 37014 - DNA, 15 bp, Homo sapiens
aagaccagtctggcc

SEQ ID NO: 37015 - DNA, 15 bp, Homo sapiens
caagaccagtctggc

SEQ ID NO: 37016 - DNA, 15 bp, Homo sapiens
tcaagaccagtctgg

SEQ ID NO: 37017 - DNA, 15 bp, Homo sapiens
ttcaagaccagtctg

SEQ ID NO: 37018 - DNA, 15 bp, Homo sapiens
gttcaagaccagtct

SEQ ID NO: 37019 - DNA, 15 bp, Homo sapiens
agttcaagaccagtc

SEQ ID NO: 37020 - DNA, 15 bp, Homo sapiens
gagttcaagaccagt

SEQ ID NO: 37021 - DNA, 15 bp, Homo sapiens
agagttcaagaccag

SEQ ID NO: 37022 - DNA, 15 bp, Homo sapiens
aagagttcaagacca

SEQ ID NO: 37023 - DNA, 15 bp, Homo sapiens
caagagttcaagacc

SEQ ID NO: 37024 - DNA, 15 bp, Homo sapiens
tcaagagttcaagac

SEQ ID NO: 37025 - DNA, 15 bp, Homo sapiens
gtcaagagttcaaga

SEQ ID NO: 37026 - DNA, 15 bp, Homo sapiens
ggtcaagagttcaag

SEQ ID NO: 37027 - DNA, 15 bp, Homo sapiens
aggtcaagagttcaa

SEQ ID NO: 37028 - DNA, 15 bp, Homo sapiens
gaggtcaagagttca

SEQ ID NO: 37029 - DNA, 15 bp, Homo sapiens
ttgaggtcaagagtt

SEQ ID NO: 37030 - DNA, 15 bp, Homo sapiens
cttgaggtcaagagt

SEQ ID NO: 37031 - DNA, 15 bp, Homo sapiens
acttgaggtcaagag

SEQ ID NO: 37032 - DNA, 15 bp, Homo sapiens
cacttgaggtcaaga

SEQ ID NO: 37033 - DNA, 15 bp, Homo sapiens
tcacttgaggtcaag

SEQ ID NO: 37034 - DNA, 15 bp, Homo sapiens
atcacttgaggtcaa

SEQ ID NO: 37035 - DNA, 15 bp, Homo sapiens
gggcggatcacttga

SEQ ID NO: 37036 - DNA, 15 bp, Homo sapiens
tgggcggatcacttg

SEQ ID NO: 37037 - DNA, 15 bp, Homo sapiens
gtgggcggatcactt

SEQ ID NO: 37038 - DNA, 15 bp, Homo sapiens
ggtgggcggatcact

SEQ ID NO: 37039 - DNA, 15 bp, Homo sapiens
aggtgggcggatcac

SEQ ID NO: 37040 - DNA, 15 bp, Homo sapiens
gaggtgggcggatca

SEQ ID NO: 37041 - DNA, 15 bp, Homo sapiens
cgaggtgggcggatc

SEQ ID NO: 37042 - DNA, 15 bp, Homo sapiens
ccgaggtgggcggat

SEQ ID NO: 37043 - DNA, 15 bp, Homo sapiens
gccgaggtgggcgga

SEQ ID NO: 37044 - DNA, 15 bp, Homo sapiens
ggccgaggtgggcgg

SEQ ID NO: 37045 - DNA, 15 bp, Homo sapiens
aggccgaggtgggcg

SEQ ID NO: 37046 - DNA, 15 bp, Homo sapiens
gaggccgaggtgggc

SEQ ID NO: 37047 - DNA, 15 bp, Homo sapiens
tcagcactttgggag

SEQ ID NO: 37048 - DNA, 15 bp, Homo sapiens
ctcagcactttggga

SEQ ID NO: 37049 - DNA, 15 bp, Homo sapiens
tctcagcactttggg

SEQ ID NO: 37050 - DNA, 15 bp, Homo sapiens
atctcagcactttgg

SEQ ID NO: 37051 - DNA, 15 bp, Homo sapiens
aatctcagcactttg

SEQ ID NO: 37052 - DNA, 15 bp, Homo sapiens
actcatgcctgtaat

SEQ ID NO: 37053 - DNA, 15 bp, Homo sapiens
gactcatgcctgtaa

SEQ ID NO: 37054 - DNA, 15 bp, Homo sapiens
tgactcatgcctgta

SEQ ID NO: 37055 - DNA, 15 bp, Homo sapiens
gtgactcatgcctgt

SEQ ID NO: 37056 - DNA, 15 bp, Homo sapiens
agtgactcatgcctg

SEQ ID NO: 37057 - DNA, 15 bp, Homo sapiens
cagtgactcatgcct

SEQ ID NO: 37058 - DNA, 15 bp, Homo sapiens
acagtgactcatgcc

SEQ ID NO: 37059 - DNA, 15 bp, Homo sapiens
cacagtgactcatgc

SEQ ID NO: 37060 - DNA, 15 bp, Homo sapiens
gcacagtgactcatg

SEQ ID NO: 37061 - DNA, 15 bp, Homo sapiens
ggcacagtgactcat

SEQ ID NO: 37062 - DNA, 15 bp, Homo sapiens
aggcacagtgactca

SEQ ID NO: 37063 - DNA, 15 bp, Homo sapiens
caggcacagtgactc

SEQ ID NO: 37064 - DNA, 15 bp, Homo sapiens
ccaggcacagtgact

SEQ ID NO: 37065 - DNA, 15 bp, Homo sapiens
gccaggcacagtgac

SEQ ID NO: 37066 - DNA, 15 bp, Homo sapiens
ggccaggcacagtga

SEQ ID NO: 37067 - DNA, 15 bp, Homo sapiens
aggccaggcacagtg

SEQ ID NO: 37068 - DNA, 15 bp, Homo sapiens
gaggccaggcacagt

SEQ ID NO: 37069 - DNA, 15 bp, Homo sapiens
agaggccaggcacag

SEQ ID NO: 37070 - DNA, 15 bp, Homo sapiens
aagaggccaggcaca

SEQ ID NO: 37071 - DNA, 15 bp, Homo sapiens
taagaggccaggcac

SEQ ID NO: 37072 - DNA, 15 bp, Homo sapiens
ataagaggccaggca

SEQ ID NO: 37073 - DNA, 15 bp, Homo sapiens
aataagaggccaggc

SEQ ID NO: 37074 - DNA, 15 bp, Homo sapiens
aaataagaggccagg

SEQ ID NO: 37075 - DNA, 15 bp, Homo sapiens
aaaataagaggccag

SEQ ID NO: 37076 - DNA, 15 bp, Homo sapiens
aaaaataagaggcca

SEQ ID NO: 37077 - DNA, 15 bp, Homo sapiens
aaaaaataagaggcc

SEQ ID NO: 37078 - DNA, 15 bp, Homo sapiens
gaaaaaataagaggc

SEQ ID NO: 37079 - DNA, 15 bp, Homo sapiens
agaaaaaataagagg

SEQ ID NO: 37080 - DNA, 15 bp, Homo sapiens
aagaaaaaataagag

SEQ ID NO: 37081 - DNA, 15 bp, Homo sapiens
aaagaaaaaataaga

SEQ ID NO: 37082 - DNA, 15 bp, Homo sapiens
caaagaaaaaataag

SEQ ID NO: 37083 - DNA, 15 bp, Homo sapiens
ccaaagaaaaaataa

SEQ ID NO: 37084 - DNA, 15 bp, Homo sapiens
accaaagaaaaaata

SEQ ID NO: 37085 - DNA, 15 bp, Homo sapiens
aaccaaagaaaaaat

SEQ ID NO: 37086 - DNA, 15 bp, Homo sapiens
taaccaaagaaaaaa

SEQ ID NO: 37087 - DNA, 15 bp, Homo sapiens
ttaaccaaagaaaaa

SEQ ID NO: 37088 - DNA, 15 bp, Homo sapiens
tttaaccaaagaaaa

SEQ ID NO: 37089 - DNA, 15 bp, Homo sapiens
gtttaaccaaagaaa

SEQ ID NO: 37090 - DNA, 15 bp, Homo sapiens
agtttaaccaaagaa

SEQ ID NO: 37091 - DNA, 15 bp, Homo sapiens
aagtttaaccaaaga

SEQ ID NO: 37092 - DNA, 15 bp, Homo sapiens
aaagtttaaccaaag

SEQ ID NO: 37093 - DNA, 15 bp, Homo sapiens
aaaagtttaaccaaa

SEQ ID NO: 37094 - DNA, 15 bp, Homo sapiens
taaaagtttaaccaa

SEQ ID NO: 37095 - DNA, 15 bp, Homo sapiens
ctaaaagtttaacca

SEQ ID NO: 37096 - DNA, 15 bp, Homo sapiens
cctaaaagtttaacc

SEQ ID NO: 37097 - DNA, 15 bp, Homo sapiens
ccctaaaagtttaac

SEQ ID NO: 37098 - DNA, 15 bp, Homo sapiens
tccctaaaagtttaa

SEQ ID NO: 37099 - DNA, 15 bp, Homo sapiens
ttccctaaaagttta

SEQ ID NO: 37100 - DNA, 15 bp, Homo sapiens
tttccctaaaagttt

SEQ ID NO: 37101 - DNA, 15 bp, Homo sapiens
ttttccctaaaagtt

SEQ ID NO: 37102 - DNA, 15 bp, Homo sapiens
tttttccctaaaagt

SEQ ID NO: 37103 - DNA, 15 bp, Homo sapiens
ctttttccctaaaag

SEQ ID NO: 37104 - DNA, 15 bp, Homo sapiens
actttttccctaaaa

SEQ ID NO: 37105 - DNA, 15 bp, Homo sapiens
aactttttccctaaa

SEQ ID NO: 37106 - DNA, 15 bp, Homo sapiens
aaactttttccctaa

SEQ ID NO: 37107 - DNA, 15 bp, Homo sapiens
caaactttttcccta

SEQ ID NO: 37108 - DNA, 15 bp, Homo sapiens
tcaaactttttccct

SEQ ID NO: 37109 - DNA, 15 bp, Homo sapiens
ctcaaactttttccc

SEQ ID NO: 37110 - DNA, 15 bp, Homo sapiens
gctcaaactttttcc

SEQ ID NO: 37111 - DNA, 15 bp, Homo sapiens
agctcaaactttttc

SEQ ID NO: 37112 - DNA, 15 bp, Homo sapiens
cagctcaaacttttt

SEQ ID NO: 37113 - DNA, 15 bp, Homo sapiens
gcagctcaaactttt

SEQ ID NO: 37114 - DNA, 15 bp, Homo sapiens
agcagctcaaacttt

SEQ ID NO: 37115 - DNA, 15 bp, Homo sapiens
aagcagctcaaactt

SEQ ID NO: 37116 - DNA, 15 bp, Homo sapiens
aaagcagctcaaact

SEQ ID NO: 37117 - DNA, 15 bp, Homo sapiens
aaaagcagctcaaac

SEQ ID NO: 37118 - DNA, 15 bp, Homo sapiens
taaaagcagctcaaa

SEQ ID NO: 37119 - DNA, 15 bp, Homo sapiens
ttaaaagcagctcaa

SEQ ID NO: 37120 - DNA, 15 bp, Homo sapiens
attaaaagcagctca

SEQ ID NO: 37121 - DNA, 15 bp, Homo sapiens
aattaaaagcagctc

SEQ ID NO: 37122 - DNA, 15 bp, Homo sapiens
aaattaaaagcagct

SEQ ID NO: 37123 - DNA, 15 bp, Homo sapiens
aaaattaaaagcagc

SEQ ID NO: 37124 - DNA, 15 bp, Homo sapiens
gaaaattaaaagcag

SEQ ID NO: 37125 - DNA, 15 bp, Homo sapiens
agaaaattaaaagca

SEQ ID NO: 37126 - DNA, 15 bp, Homo sapiens
aagaaaattaaaagc

SEQ ID NO: 37127 - DNA, 15 bp, Homo sapiens
aaagaaaattaaaag

SEQ ID NO: 37128 - DNA, 15 bp, Homo sapiens
aaaagaaaattaaaa

SEQ ID NO: 37129 - DNA, 15 bp, Homo sapiens
aaaaagaaaattaaa

SEQ ID NO: 37130 - DNA, 15 bp, Homo sapiens
caaaaagaaaattaa

SEQ ID NO: 37131 - DNA, 15 bp, Homo sapiens
acaaaaagaaaatta

SEQ ID NO: 37132 - DNA, 15 bp, Homo sapiens
aacaaaaagaaaatt

SEQ ID NO: 37133 - DNA, 15 bp, Homo sapiens
aaacaaaaagaaaat

SEQ ID NO: 37134 - DNA, 15 bp, Homo sapiens
aaaacaaaaagaaaa

SEQ ID NO: 37135 - DNA, 15 bp, Homo sapiens
aaaaacaaaaagaaa

SEQ ID NO: 37136 - DNA, 15 bp, Homo sapiens
taaaaacaaaaagaa

SEQ ID NO: 37137 - DNA, 15 bp, Homo sapiens
ttaaaaacaaaaaga

SEQ ID NO: 37138 - DNA, 15 bp, Homo sapiens
tttaaaaacaaaaag

SEQ ID NO: 37139 - DNA, 15 bp, Homo sapiens
atttaaaaacaaaaa

SEQ ID NO: 37140 - DNA, 15 bp, Homo sapiens
tatttaaaaacaaaa

SEQ ID NO: 37141 - DNA, 15 bp, Homo sapiens
ttatttaaaaacaaa

SEQ ID NO: 37142 - DNA, 15 bp, Homo sapiens
tttatttaaaaacaa

SEQ ID NO: 37143 - DNA, 15 bp, Homo sapiens
atttatttaaaaaca

SEQ ID NO: 37144 - DNA, 15 bp, Homo sapiens
aatttatttaaaaac

SEQ ID NO: 37145 - DNA, 15 bp, Homo sapiens
taatttatttaaaaa

SEQ ID NO: 37146 - DNA, 15 bp, Homo sapiens
ataatttatttaaaa

SEQ ID NO: 37147 - DNA, 15 bp, Homo sapiens
aataatttatttaaa

SEQ ID NO: 37148 - DNA, 15 bp, Homo sapiens
taataatttatttaa

SEQ ID NO: 37149 - DNA, 15 bp, Homo sapiens
ttaataatttattta

SEQ ID NO: 37150 - DNA, 15 bp, Homo sapiens
tttaataatttattt

SEQ ID NO: 37151 - DNA, 15 bp, Homo sapiens
ctttaataatttatt

SEQ ID NO: 37152 - DNA, 15 bp, Homo sapiens
actttaataatttat

SEQ ID NO: 37153 - DNA, 15 bp, Homo sapiens
aactttaataattta

SEQ ID NO: 37154 - DNA, 15 bp, Homo sapiens
aaactttaataattt

SEQ ID NO: 37155 - DNA, 15 bp, Homo sapiens
gaaactttaataatt

SEQ ID NO: 37156 - DNA, 15 bp, Homo sapiens
agaaactttaataat

SEQ ID NO: 37157 - DNA, 15 bp, Homo sapiens
gagaaactttaataa

SEQ ID NO: 37158 - DNA, 15 bp, Homo sapiens
agagaaactttaata

SEQ ID NO: 37159 - DNA, 15 bp, Homo sapiens
tagagaaactttaat

SEQ ID NO: 37160 - DNA, 15 bp, Homo sapiens
atagagaaactttaa

SEQ ID NO: 37161 - DNA, 15 bp, Homo sapiens
catagagaaacttta

SEQ ID NO: 37162 - DNA, 15 bp, Homo sapiens
acatagagaaacttt

SEQ ID NO: 37163 - DNA, 15 bp, Homo sapiens
aacatagagaaactt

SEQ ID NO: 37164 - DNA, 15 bp, Homo sapiens
taacatagagaaact

SEQ ID NO: 37165 - DNA, 15 bp, Homo sapiens
ctaacatagagaaac

SEQ ID NO: 37166 - DNA, 15 bp, Homo sapiens
cctaacatagagaaa

SEQ ID NO: 37167 - DNA, 15 bp, Homo sapiens
tcctaacatagagaa

SEQ ID NO: 37168 - DNA, 15 bp, Homo sapiens
ttcctaacatagaga

SEQ ID NO: 37169 - DNA, 15 bp, Homo sapiens
gttcctaacatagag

SEQ ID NO: 37170 - DNA, 15 bp, Homo sapiens
agttcctaacataga

SEQ ID NO: 37171 - DNA, 15 bp, Homo sapiens
gagttcctaacatag

SEQ ID NO: 37172 - DNA, 15 bp, Homo sapiens
agagttcctaacata

SEQ ID NO: 37173 - DNA, 15 bp, Homo sapiens
aagagttcctaacat

SEQ ID NO: 37174 - DNA, 15 bp, Homo sapiens
caagagttcctaaca

SEQ ID NO: 37175 - DNA, 15 bp, Homo sapiens
acaagagttcctaac

SEQ ID NO: 37176 - DNA, 15 bp, Homo sapiens
cacaagagttcctaa

SEQ ID NO: 37177 - DNA, 15 bp, Homo sapiens
acacaagagttccta

SEQ ID NO: 37178 - DNA, 15 bp, Homo sapiens
tacacaagagttcct

SEQ ID NO: 37179 - DNA, 15 bp, Homo sapiens
gtacacaagagttcc

SEQ ID NO: 37180 - DNA, 15 bp, Homo sapiens
tgtacacaagagttc

SEQ ID NO: 37181 - DNA, 15 bp, Homo sapiens
atgtacacaagagtt

SEQ ID NO: 37182 - DNA, 15 bp, Homo sapiens
catgtacacaagagt

SEQ ID NO: 37183 - DNA, 15 bp, Homo sapiens
tcatgtacacaagag

SEQ ID NO: 37184 - DNA, 15 bp, Homo sapiens
ctcatgtacacaaga

SEQ ID NO: 37185 - DNA, 15 bp, Homo sapiens
actcatgtacacaag

SEQ ID NO: 37186 - DNA, 15 bp, Homo sapiens
aactcatgtacacaa

SEQ ID NO: 37187 - DNA, 15 bp, Homo sapiens
gaactcatgtacaca

SEQ ID NO: 37188 - DNA, 15 bp, Homo sapiens
tgaactcatgtacac

SEQ ID NO: 37189 - DNA, 15 bp, Homo sapiens
atgaactcatgtaca

SEQ ID NO: 37190 - DNA, 15 bp, Homo sapiens
aatgaactcatgtac

SEQ ID NO: 37191 - DNA, 15 bp, Homo sapiens
caatgaactcatgta

SEQ ID NO: 37192 - DNA, 15 bp, Homo sapiens
tcaatgaactcatgt

SEQ ID NO: 37193 - DNA, 15 bp, Homo sapiens
ctcaatgaactcatg

SEQ ID NO: 37194 - DNA, 15 bp, Homo sapiens
gctcaatgaactcat

SEQ ID NO: 37195 - DNA, 15 bp, Homo sapiens
agctcaatgaactca

SEQ ID NO: 37196 - DNA, 15 bp, Homo sapiens
aagctcaatgaactc

SEQ ID NO: 37197 - DNA, 15 bp, Homo sapiens
taagctcaatgaact

SEQ ID NO: 37198 - DNA, 15 bp, Homo sapiens
ataagctcaatgaac

SEQ ID NO: 37199 - DNA, 15 bp, Homo sapiens
aataagctcaatgaa

SEQ ID NO: 37200 - DNA, 15 bp, Homo sapiens
gaataagctcaatga

SEQ ID NO: 37201 - DNA, 15 bp, Homo sapiens
agaataagctcaatg

SEQ ID NO: 37202 - DNA, 15 bp, Homo sapiens
aagaataagctcaat

SEQ ID NO: 37203 - DNA, 15 bp, Homo sapiens
taagaataagctcaa

SEQ ID NO: 37204 - DNA, 15 bp, Homo sapiens
ttaagaataagctca

SEQ ID NO: 37205 - DNA, 15 bp, Homo sapiens
attaagaataagctc

SEQ ID NO: 37206 - DNA, 15 bp, Homo sapiens
tattaagaataagct

SEQ ID NO: 37207 - DNA, 15 bp, Homo sapiens
ttattaagaataagc

SEQ ID NO: 37208 - DNA, 15 bp, Homo sapiens
tttattaagaataag

SEQ ID NO: 37209 - DNA, 15 bp, Homo sapiens
ctttattaagaataa

SEQ ID NO: 37210 - DNA, 15 bp, Homo sapiens
tctttattaagaata

SEQ ID NO: 37211 - DNA, 15 bp, Homo sapiens
gtctttattaagaat

SEQ ID NO: 37212 - DNA, 15 bp, Homo sapiens
tgtctttattaagaa

SEQ ID NO: 37213 - DNA, 15 bp, Homo sapiens
ttgtctttattaaga

SEQ ID NO: 37214 - DNA, 15 bp, Homo sapiens
tttgtctttattaag

SEQ ID NO: 37215 - DNA, 15 bp, Homo sapiens
atttgtctttattaa

SEQ ID NO: 37216 - DNA, 15 bp, Homo sapiens
gatttgtctttatta

SEQ ID NO: 37217 - DNA, 15 bp, Homo sapiens
agatttgtctttatt

SEQ ID NO: 37218 - DNA, 15 bp, Homo sapiens
aagatttgtctttat

SEQ ID NO: 37219 - DNA, 15 bp, Homo sapiens
gaagatttgtcttta

SEQ ID NO: 37220 - DNA, 15 bp, Homo sapiens
agaagatttgtcttt

SEQ ID NO: 37221 - DNA, 15 bp, Homo sapiens
tagaagatttgtctt

SEQ ID NO: 37222 - DNA, 15 bp, Homo sapiens
ctagaagatttgtct

SEQ ID NO: 37223 - DNA, 15 bp, Homo sapiens
tctagaagatttgtc

SEQ ID NO: 37224 - DNA, 15 bp, Homo sapiens
ttctagaagatttgt

SEQ ID NO: 37225 - DNA, 15 bp, Homo sapiens
tttctagaagatttg

SEQ ID NO: 37226 - DNA, 15 bp, Homo sapiens
atttctagaagattt

SEQ ID NO: 37227 - DNA, 15 bp, Homo sapiens
tatttctagaagatt

SEQ ID NO: 37228 - DNA, 15 bp, Homo sapiens
ttatttctagaagat

SEQ ID NO: 37229 - DNA, 15 bp, Homo sapiens
attatttctagaaga

SEQ ID NO: 37230 - DNA, 15 bp, Homo sapiens
tattatttctagaag

SEQ ID NO: 37231 - DNA, 15 bp, Homo sapiens
ctattatttctagaa

SEQ ID NO: 37232 - DNA, 15 bp, Homo sapiens
actattatttctaga

SEQ ID NO: 37233 - DNA, 15 bp, Homo sapiens
aactattatttctag

SEQ ID NO: 37234 - DNA, 15 bp, Homo sapiens
caactattatttcta

SEQ ID NO: 37235 - DNA, 15 bp, Homo sapiens
acaactattatttct

SEQ ID NO: 37236 - DNA, 15 bp, Homo sapiens
tacaactattatttc

SEQ ID NO: 37237 - DNA, 15 bp, Homo sapiens
atacaactattattt

SEQ ID NO: 37238 - DNA, 15 bp, Homo sapiens
gatacaactattatt

SEQ ID NO: 37239 - DNA, 15 bp, Homo sapiens
agatacaactattat

SEQ ID NO: 37240 - DNA, 15 bp, Homo sapiens
aagatacaactatta

SEQ ID NO: 37241 - DNA, 15 bp, Homo sapiens
aaagatacaactatt

SEQ ID NO: 37242 - DNA, 15 bp, Homo sapiens
taaagatacaactat

SEQ ID NO: 37243 - DNA, 15 bp, Homo sapiens
ttaaagatacaacta

SEQ ID NO: 37244 - DNA, 15 bp, Homo sapiens
tttaaagatacaact

SEQ ID NO: 37245 - DNA, 15 bp, Homo sapiens
atttaaagatacaac

SEQ ID NO: 37246 - DNA, 15 bp, Homo sapiens
catttaaagatacaa

SEQ ID NO: 37247 - DNA, 15 bp, Homo sapiens
tcatttaaagataca

SEQ ID NO: 37248 - DNA, 15 bp, Homo sapiens
atcatttaaagatac

SEQ ID NO: 37249 - DNA, 15 bp, Homo sapiens
gatcatttaaagata

SEQ ID NO: 37250 - DNA, 15 bp, Homo sapiens
agatcatttaaagat

SEQ ID NO: 37251 - DNA, 15 bp, Homo sapiens
gagatcatttaaaga

SEQ ID NO: 37252 - DNA, 15 bp, Homo sapiens
tgagatcatttaaag

SEQ ID NO: 37253 - DNA, 15 bp, Homo sapiens
ttgagatcatttaaa

SEQ ID NO: 37254 - DNA, 15 bp, Homo sapiens
cttgagatcatttaa

SEQ ID NO: 37255 - DNA, 15 bp, Homo sapiens
ccttgagatcattta

SEQ ID NO: 37256 - DNA, 15 bp, Homo sapiens
tccttgagatcattt

SEQ ID NO: 37257 - DNA, 15 bp, Homo sapiens
ttccttgagatcatt

SEQ ID NO: 37258 - DNA, 15 bp, Homo sapiens
tttccttgagatcat

SEQ ID NO: 37259 - DNA, 15 bp, Homo sapiens
ttttccttgagatca

SEQ ID NO: 37260 - DNA, 15 bp, Homo sapiens
attttccttgagatc

SEQ ID NO: 37261 - DNA, 15 bp, Homo sapiens
cattttccttgagat

SEQ ID NO: 37262 - DNA, 15 bp, Homo sapiens
acattttccttgaga

SEQ ID NO: 37263 - DNA, 15 bp, Homo sapiens
aacattttccttgag

SEQ ID NO: 37264 - DNA, 15 bp, Homo sapiens
aaacattttccttga

SEQ ID NO: 37265 - DNA, 15 bp, Homo sapiens
caaacattttccttg

SEQ ID NO: 37266 - DNA, 15 bp, Homo sapiens
ccaaacattttcctt

SEQ ID NO: 37267 - DNA, 15 bp, Homo sapiens
accaaacattttcct

SEQ ID NO: 37268 - DNA, 15 bp, Homo sapiens
aaccaaacattttcc

SEQ ID NO: 37269 - DNA, 15 bp, Homo sapiens
aaaccaaacattttc

SEQ ID NO: 37270 - DNA, 15 bp, Homo sapiens
gaaaccaaacatttt

SEQ ID NO: 37271 - DNA, 15 bp, Homo sapiens
agaaaccaaacattt

SEQ ID NO: 37272 - DNA, 15 bp, Homo sapiens
gagaaaccaaacatt

SEQ ID NO: 37273 - DNA, 15 bp, Homo sapiens
agagaaaccaaacat

SEQ ID NO: 37274 - DNA, 15 bp, Homo sapiens
cagagaaaccaaaca

SEQ ID NO: 37275 - DNA, 15 bp, Homo sapiens
ccagagaaaccaaac

SEQ ID NO: 37276 - DNA, 15 bp, Homo sapiens
cccagagaaaccaaa

SEQ ID NO: 37277 - DNA, 15 bp, Homo sapiens
ccccagagaaaccaa

SEQ ID NO: 37278 - DNA, 15 bp, Homo sapiens
tccccagagaaacca

SEQ ID NO: 37279 - DNA, 15 bp, Homo sapiens
ttccccagagaaacc

SEQ ID NO: 37280 - DNA, 15 bp, Homo sapiens
attccccagagaaac

SEQ ID NO: 37281 - DNA, 15 bp, Homo sapiens
cattccccagagaaa

SEQ ID NO: 37282 - DNA, 15 bp, Homo sapiens
tcattccccagagaa

SEQ ID NO: 37283 - DNA, 15 bp, Homo sapiens
ttcattccccagaga

SEQ ID NO: 37284 - DNA, 15 bp, Homo sapiens
attcattccccagag

SEQ ID NO: 37285 - DNA, 15 bp, Homo sapiens
aattcattccccaga

SEQ ID NO: 37286 - DNA, 15 bp, Homo sapiens
aaattcattccccag

SEQ ID NO: 37287 - DNA, 15 bp, Homo sapiens
aaaattcattcccca

SEQ ID NO: 37288 - DNA, 15 bp, Homo sapiens
gaaaattcattcccc

SEQ ID NO: 37289 - DNA, 15 bp, Homo sapiens
tgaaaattcattccc

SEQ ID NO: 37290 - DNA, 15 bp, Homo sapiens
atgaaaattcattcc

SEQ ID NO: 37291 - DNA, 15 bp, Homo sapiens
catgaaaattcattc

SEQ ID NO: 37292 - DNA, 15 bp, Homo sapiens
tcatgaaaattcatt

SEQ ID NO: 37293 - DNA, 15 bp, Homo sapiens
gtcatgaaaattcat

SEQ ID NO: 37294 - DNA, 15 bp, Homo sapiens
ggtcatgaaaattca

SEQ ID NO: 37295 - DNA, 15 bp, Homo sapiens
aggtcatgaaaattc

SEQ ID NO: 37296 - DNA, 15 bp, Homo sapiens
taggtcatgaaaatt

SEQ ID NO: 37297 - DNA, 15 bp, Homo sapiens
ttaggtcatgaaaat

SEQ ID NO: 37298 - DNA, 15 bp, Homo sapiens
attaggtcatgaaaa

SEQ ID NO: 37299 - DNA, 15 bp, Homo sapiens
gattaggtcatgaaa

SEQ ID NO: 37300 - DNA, 15 bp, Homo sapiens
agattaggtcatgaa

SEQ ID NO: 37301 - DNA, 15 bp, Homo sapiens
aagattaggtcatga

SEQ ID NO: 37302 - DNA, 15 bp, Homo sapiens
taagattaggtcatg

SEQ ID NO: 37303 - DNA, 15 bp, Homo sapiens
ttaagattaggtcat

SEQ ID NO: 37304 - DNA, 15 bp, Homo sapiens
tttaagattaggtca

SEQ ID NO: 37305 - DNA, 15 bp, Homo sapiens
atttaagattaggtc

SEQ ID NO: 37306 - DNA, 15 bp, Homo sapiens
gatttaagattaggt

SEQ ID NO: 37307 - DNA, 15 bp, Homo sapiens
tgatttaagattagg

SEQ ID NO: 37308 - DNA, 15 bp, Homo sapiens
ctgatttaagattag

SEQ ID NO: 37309 - DNA, 15 bp, Homo sapiens
cctgatttaagatta

SEQ ID NO: 37310 - DNA, 15 bp, Homo sapiens
acctgatttaagatt

SEQ ID NO: 37311 - DNA, 15 bp, Homo sapiens
aacctgatttaagat

SEQ ID NO: 37312 - DNA, 15 bp, Homo sapiens
taacctgatttaaga

SEQ ID NO: 37313 - DNA, 15 bp, Homo sapiens
ataacctgatttaag

SEQ ID NO: 37314 - DNA, 15 bp, Homo sapiens
aataacctgatttaa

SEQ ID NO: 37315 - DNA, 15 bp, Homo sapiens
aaataacctgattta

SEQ ID NO: 37316 - DNA, 15 bp, Homo sapiens
aaaataacctgattt

SEQ ID NO: 37317 - DNA, 15 bp, Homo sapiens
aaaaataacctgatt

SEQ ID NO: 37318 - DNA, 15 bp, Homo sapiens
aaaaaataacctgat

SEQ ID NO: 37319 - DNA, 15 bp, Homo sapiens
gaaaaaataacctga

SEQ ID NO: 37320 - DNA, 15 bp, Homo sapiens
agaaaaaataacctg

SEQ ID NO: 37321 - DNA, 15 bp, Homo sapiens
tagaaaaaataacct

SEQ ID NO: 37322 - DNA, 15 bp, Homo sapiens
ctagaaaaaataacc

SEQ ID NO: 37323 - DNA, 15 bp, Homo sapiens
gctagaaaaaataac

SEQ ID NO: 37324 - DNA, 15 bp, Homo sapiens
ggctagaaaaaataa

SEQ ID NO: 37325 - DNA, 15 bp, Homo sapiens
aggctagaaaaaata

SEQ ID NO: 37326 - DNA, 15 bp, Homo sapiens
caggctagaaaaaat

SEQ ID NO: 37327 - DNA, 15 bp, Homo sapiens
acaggctagaaaaaa

SEQ ID NO: 37328 - DNA, 15 bp, Homo sapiens
aacaggctagaaaaa

SEQ ID NO: 37329 - DNA, 15 bp, Homo sapiens
aaacaggctagaaaa

SEQ ID NO: 37330 - DNA, 15 bp, Homo sapiens
taaacaggctagaaa

SEQ ID NO: 37331 - DNA, 15 bp, Homo sapiens
gtaaacaggctagaa

SEQ ID NO: 37332 - DNA, 15 bp, Homo sapiens
agtaaacaggctaga

SEQ ID NO: 37333 - DNA, 15 bp, Homo sapiens
tagtaaacaggctag

SEQ ID NO: 37334 - DNA, 15 bp, Homo sapiens
ttagtaaacaggcta

SEQ ID NO: 37335 - DNA, 15 bp, Homo sapiens
tttagtaaacaggct

SEQ ID NO: 37336 - DNA, 15 bp, Homo sapiens
atttagtaaacaggc

SEQ ID NO: 37337 - DNA, 15 bp, Homo sapiens
aatttagtaaacagg

SEQ ID NO: 37338 - DNA, 15 bp, Homo sapiens
aaatttagtaaacag

SEQ ID NO: 37339 - DNA, 15 bp, Homo sapiens
gaaatttagtaaaca

SEQ ID NO: 37340 - DNA, 15 bp, Homo sapiens
agaaatttagtaaac

SEQ ID NO: 37341 - DNA, 15 bp, Homo sapiens
tagaaatttagtaaa

SEQ ID NO: 37342 - DNA, 15 bp, Homo sapiens
gtagaaatttagtaa

SEQ ID NO: 37343 - DNA, 15 bp, Homo sapiens
tgtagaaatttagta

SEQ ID NO: 37344 - DNA, 15 bp, Homo sapiens
atgtagaaatttagt

SEQ ID NO: 37345 - DNA, 15 bp, Homo sapiens
catgtagaaatttag

SEQ ID NO: 37346 - DNA, 15 bp, Homo sapiens
acatgtagaaattta

SEQ ID NO: 37347 - DNA, 15 bp, Homo sapiens
aacatgtagaaattt

SEQ ID NO: 37348 - DNA, 15 bp, Homo sapiens
taacatgtagaaatt

SEQ ID NO: 37349 - DNA, 15 bp, Homo sapiens
ataacatgtagaaat

SEQ ID NO: 37350 - DNA, 15 bp, Homo sapiens
tataacatgtagaaa

SEQ ID NO: 37351 - DNA, 15 bp, Homo sapiens
ttataacatgtagaa

SEQ ID NO: 37352 - DNA, 15 bp, Homo sapiens
gttataacatgtaga

SEQ ID NO: 37353 - DNA, 15 bp, Homo sapiens
ggttataacatgtag

SEQ ID NO: 37354 - DNA, 15 bp, Homo sapiens
aggttataacatgta

SEQ ID NO: 37355 - DNA, 15 bp, Homo sapiens
taggttataacatgt

SEQ ID NO: 37356 - DNA, 15 bp, Homo sapiens
ttaggttataacatg

SEQ ID NO: 37357 - DNA, 15 bp, Homo sapiens
attaggttataacat

SEQ ID NO: 37358 - DNA, 15 bp, Homo sapiens
cattaggttataaca

SEQ ID NO: 37359 - DNA, 15 bp, Homo sapiens
tcattaggttataac

SEQ ID NO: 37360 - DNA, 15 bp, Homo sapiens
ttcattaggttataa

SEQ ID NO: 37361 - DNA, 15 bp, Homo sapiens
tttcattaggttata

SEQ ID NO: 37362 - DNA, 15 bp, Homo sapiens
atttcattaggttat

SEQ ID NO: 37363 - DNA, 15 bp, Homo sapiens
aatttcattaggtta

SEQ ID NO: 37364 - DNA, 15 bp, Homo sapiens
aaatttcattaggtt

SEQ ID NO: 37365 - DNA, 15 bp, Homo sapiens
aaaatttcattaggt

SEQ ID NO: 37366 - DNA, 15 bp, Homo sapiens
gaaaatttcattagg

SEQ ID NO: 37367 - DNA, 15 bp, Homo sapiens
agaaaatttcattag

SEQ ID NO: 37368 - DNA, 15 bp, Homo sapiens
aagaaaatttcatta

SEQ ID NO: 37369 - DNA, 15 bp, Homo sapiens
taagaaaatttcatt

SEQ ID NO: 37370 - DNA, 15 bp, Homo sapiens
gtaagaaaatttcat

SEQ ID NO: 37371 - DNA, 15 bp, Homo sapiens
agtaagaaaatttca

SEQ ID NO: 37372 - DNA, 15 bp, Homo sapiens
aagtaagaaaatttc

SEQ ID NO: 37373 - DNA, 15 bp, Homo sapiens
gaagtaagaaaattt

SEQ ID NO: 37374 - DNA, 15 bp, Homo sapiens
ggaagtaagaaaatt

SEQ ID NO: 37375 - DNA, 15 bp, Homo sapiens
aggaagtaagaaaat

SEQ ID NO: 37376 - DNA, 15 bp, Homo sapiens
gaggaagtaagaaaa

SEQ ID NO: 37377 - DNA, 15 bp, Homo sapiens
agaggaagtaagaaa

SEQ ID NO: 37378 - DNA, 15 bp, Homo sapiens
aagaggaagtaagaa

SEQ ID NO: 37379 - DNA, 15 bp, Homo sapiens
aaagaggaagtaaga

SEQ ID NO: 37380 - DNA, 15 bp, Homo sapiens
taaagaggaagtaag

SEQ ID NO: 37381 - DNA, 15 bp, Homo sapiens
ataaagaggaagtaa

SEQ ID NO: 37382 - DNA, 15 bp, Homo sapiens
aataaagaggaagta

SEQ ID NO: 37383 - DNA, 15 bp, Homo sapiens
aaataaagaggaagt

SEQ ID NO: 37384 - DNA, 15 bp, Homo sapiens
taaataaagaggaag

SEQ ID NO: 37385 - DNA, 15 bp, Homo sapiens
ttaaataaagaggaa

SEQ ID NO: 37386 - DNA, 15 bp, Homo sapiens
tttaaataaagagga

SEQ ID NO: 37387 - DNA, 15 bp, Homo sapiens
ttttaaataaagagg

SEQ ID NO: 37388 - DNA, 15 bp, Homo sapiens
gttttaaataaagag

SEQ ID NO: 37389 - DNA, 15 bp, Homo sapiens
tgttttaaataaaga

SEQ ID NO: 37390 - DNA, 15 bp, Homo sapiens
ttgttttaaataaag

SEQ ID NO: 37391 - DNA, 15 bp, Homo sapiens
tttgttttaaataaa

SEQ ID NO: 37392 - DNA, 15 bp, Homo sapiens
gtttgttttaaataa

SEQ ID NO: 37393 - DNA, 15 bp, Homo sapiens
agtttgttttaaata

SEQ ID NO: 37394 - DNA, 15 bp, Homo sapiens
tagtttgttttaaat

SEQ ID NO: 37395 - DNA, 15 bp, Homo sapiens
atagtttgttttaaa

SEQ ID NO: 37396 - DNA, 15 bp, Homo sapiens
tatagtttgttttaa

SEQ ID NO: 37397 - DNA, 15 bp, Homo sapiens
ttatagtttgtttta

SEQ ID NO: 37398 - DNA, 15 bp, Homo sapiens
attatagtttgtttt

SEQ ID NO: 37399 - DNA, 15 bp, Homo sapiens
aattatagtttgttt

SEQ ID NO: 37400 - DNA, 15 bp, Homo sapiens
taattatagtttgtt

SEQ ID NO: 37401 - DNA, 15 bp, Homo sapiens
gtaattatagtttgt

SEQ ID NO: 37402 - DNA, 15 bp, Homo sapiens
agtaattatagtttg

SEQ ID NO: 37403 - DNA, 15 bp, Homo sapiens
cagtaattatagttt

SEQ ID NO: 37404 - DNA, 15 bp, Homo sapiens
acagtaattatagtt

SEQ ID NO: 37405 - DNA, 15 bp, Homo sapiens
gacagtaattatagt

SEQ ID NO: 37406 - DNA, 15 bp, Homo sapiens
agacagtaattatag

SEQ ID NO: 37407 - DNA, 15 bp, Homo sapiens
aagacagtaattata

SEQ ID NO: 37408 - DNA, 15 bp, Homo sapiens
aaagacagtaattat

SEQ ID NO: 37409 - DNA, 15 bp, Homo sapiens
aaaagacagtaatta

SEQ ID NO: 37410 - DNA, 15 bp, Homo sapiens
aaaaagacagtaatt

SEQ ID NO: 37411 - DNA, 15 bp, Homo sapiens
taaaaagacagtaat

SEQ ID NO: 37412 - DNA, 15 bp, Homo sapiens
ttaaaaagacagtaa

SEQ ID NO: 37413 - DNA, 15 bp, Homo sapiens
tttaaaaagacagta

SEQ ID NO: 37414 - DNA, 15 bp, Homo sapiens
ttttaaaaagacagt

SEQ ID NO: 37415 - DNA, 15 bp, Homo sapiens
tttttaaaaagacag

SEQ ID NO: 37416 - DNA, 15 bp, Homo sapiens
atttttaaaaagaca

SEQ ID NO: 37417 - DNA, 15 bp, Homo sapiens
gatttttaaaaagac

SEQ ID NO: 37418 - DNA, 15 bp, Homo sapiens
agatttttaaaaaga

SEQ ID NO: 37419 - DNA, 15 bp, Homo sapiens
aagatttttaaaaag

SEQ ID NO: 37420 - DNA, 15 bp, Homo sapiens
gaagatttttaaaaa

SEQ ID NO: 37421 - DNA, 15 bp, Homo sapiens
ggaagatttttaaaa

SEQ ID NO: 37422 - DNA, 15 bp, Homo sapiens
tggaagatttttaaa

SEQ ID NO: 37423 - DNA, 15 bp, Homo sapiens
ttggaagatttttaa

SEQ ID NO: 37424 - DNA, 15 bp, Homo sapiens
attggaagattttta

SEQ ID NO: 37425 - DNA, 15 bp, Homo sapiens
cattggaagattttt

SEQ ID NO: 37426 - DNA, 15 bp, Homo sapiens
acattggaagatttt

SEQ ID NO: 37427 - DNA, 15 bp, Homo sapiens
cacattggaagattt

SEQ ID NO: 37428 - DNA, 15 bp, Homo sapiens
ccacattggaagatt

SEQ ID NO: 37429 - DNA, 15 bp, Homo sapiens
gccacattggaagat

SEQ ID NO: 37430 - DNA, 15 bp, Homo sapiens
cgccacattggaaga

SEQ ID NO: 37431 - DNA, 15 bp, Homo sapiens
acgccacattggaag

SEQ ID NO: 37432 - DNA, 15 bp, Homo sapiens
aacgccacattggaa

SEQ ID NO: 37433 - DNA, 15 bp, Homo sapiens
gaacgccacattgga

SEQ ID NO: 37434 - DNA, 15 bp, Homo sapiens
agaacgccacattgg

SEQ ID NO: 37435 - DNA, 15 bp, Homo sapiens
aagaacgccacattg

SEQ ID NO: 37436 - DNA, 15 bp, Homo sapiens
taagaacgccacatt

SEQ ID NO: 37437 - DNA, 15 bp, Homo sapiens
ataagaacgccacat

SEQ ID NO: 37438 - DNA, 15 bp, Homo sapiens
aataagaacgccaca

SEQ ID NO: 37439 - DNA, 15 bp, Homo sapiens
aaataagaacgccac

SEQ ID NO: 37440 - DNA, 15 bp, Homo sapiens
aaaataagaacgcca

SEQ ID NO: 37441 - DNA, 15 bp, Homo sapiens
aaaaataagaacgcc

SEQ ID NO: 37442 - DNA, 15 bp, Homo sapiens
gaaaaataagaacgc

SEQ ID NO: 37443 - DNA, 15 bp, Homo sapiens
agaaaaataagaacg

SEQ ID NO: 37444 - DNA, 15 bp, Homo sapiens
aagaaaaataagaac

SEQ ID NO: 37445 - DNA, 15 bp, Homo sapiens
taagaaaaataagaa

SEQ ID NO: 37446 - DNA, 15 bp, Homo sapiens
ttaagaaaaataaga

SEQ ID NO: 37447 - DNA, 15 bp, Homo sapiens
gttaagaaaaataag

SEQ ID NO: 37448 - DNA, 15 bp, Homo sapiens
tgttaagaaaaataa

SEQ ID NO: 37449 - DNA, 15 bp, Homo sapiens
atgttaagaaaaata

SEQ ID NO: 37450 - DNA, 15 bp, Homo sapiens
aatgttaagaaaaat

SEQ ID NO: 37451 - DNA, 15 bp, Homo sapiens
aaatgttaagaaaaa

SEQ ID NO: 37452 - DNA, 15 bp, Homo sapiens
caaatgttaagaaaa

SEQ ID NO: 37453 - DNA, 15 bp, Homo sapiens
tcaaatgttaagaaa

SEQ ID NO: 37454 - DNA, 15 bp, Homo sapiens
ttcaaatgttaagaa

SEQ ID NO: 37455 - DNA, 15 bp, Homo sapiens
attcaaatgttaaga

SEQ ID NO: 37456 - DNA, 15 bp, Homo sapiens
aattcaaatgttaag

SEQ ID NO: 37457 - DNA, 15 bp, Homo sapiens
aaattcaaatgttaa

SEQ ID NO: 37458 - DNA, 15 bp, Homo sapiens
aaaattcaaatgtta

SEQ ID NO: 37459 - DNA, 15 bp, Homo sapiens
gaaaattcaaatgtt

SEQ ID NO: 37460 - DNA, 15 bp, Homo sapiens
ggaaaattcaaatgt

SEQ ID NO: 37461 - DNA, 15 bp, Homo sapiens
aggaaaattcaaatg

SEQ ID NO: 37462 - DNA, 15 bp, Homo sapiens
caggaaaattcaaat

SEQ ID NO: 37463 - DNA, 15 bp, Homo sapiens
ccaggaaaattcaaa

SEQ ID NO: 37464 - DNA, 15 bp, Homo sapiens
cccaggaaaattcaa

SEQ ID NO: 37465 - DNA, 15 bp, Homo sapiens
gcccaggaaaattca

SEQ ID NO: 37466 - DNA, 15 bp, Homo sapiens
ggcccaggaaaattc

SEQ ID NO: 37467 - DNA, 15 bp, Homo sapiens
tggcccaggaaaatt

SEQ ID NO: 37468 - DNA, 15 bp, Homo sapiens
ttggcccaggaaaat

SEQ ID NO: 37469 - DNA, 15 bp, Homo sapiens
tttggcccaggaaaa

SEQ ID NO: 37470 - DNA, 15 bp, Homo sapiens
gtttggcccaggaaa

SEQ ID NO: 37471 - DNA, 15 bp, Homo sapiens
ggtttggcccaggaa

SEQ ID NO: 37472 - DNA, 15 bp, Homo sapiens
tggtttggcccagga

SEQ ID NO: 37473 - DNA, 15 bp, Homo sapiens
atggtttggcccagg

SEQ ID NO: 37474 - DNA, 15 bp, Homo sapiens
catggtttggcccag

SEQ ID NO: 37475 - DNA, 15 bp, Homo sapiens
acatggtttggccca

SEQ ID NO: 37476 - DNA, 15 bp, Homo sapiens
aacatggtttggccc

SEQ ID NO: 37477 - DNA, 15 bp, Homo sapiens
taacatggtttggcc

SEQ ID NO: 37478 - DNA, 15 bp, Homo sapiens
gtaacatggtttggc

SEQ ID NO: 37479 - DNA, 15 bp, Homo sapiens
agtaacatggtttgg

SEQ ID NO: 37480 - DNA, 15 bp, Homo sapiens
tagtaacatggtttg

SEQ ID NO: 37481 - DNA, 15 bp, Homo sapiens
atagtaacatggttt

SEQ ID NO: 37482 - DNA, 15 bp, Homo sapiens
catagtaacatggtt

SEQ ID NO: 37483 - DNA, 15 bp, Homo sapiens
tcatagtaacatggt

SEQ ID NO: 37484 - DNA, 15 bp, Homo sapiens
atcatagtaacatgg

SEQ ID NO: 37485 - DNA, 15 bp, Homo sapiens
tatcatagtaacatg

SEQ ID NO: 37486 - DNA, 15 bp, Homo sapiens
gtatcatagtaacat

SEQ ID NO: 37487 - DNA, 15 bp, Homo sapiens
tgtatcatagtaaca

SEQ ID NO: 37488 - DNA, 15 bp, Homo sapiens
gtgtatcatagtaac

SEQ ID NO: 37489 - DNA, 15 bp, Homo sapiens
tgtgtatcatagtaa

SEQ ID NO: 37490 - DNA, 15 bp, Homo sapiens
atgtgtatcatagta

SEQ ID NO: 37491 - DNA, 15 bp, Homo sapiens
aatgtgtatcatagt

SEQ ID NO: 37492 - DNA, 15 bp, Homo sapiens
taatgtgtatcatag

SEQ ID NO: 37493 - DNA, 15 bp, Homo sapiens
ataatgtgtatcata

SEQ ID NO: 37494 - DNA, 15 bp, Homo sapiens
aataatgtgtatcat

SEQ ID NO: 37495 - DNA, 15 bp, Homo sapiens
aaataatgtgtatca

SEQ ID NO: 37496 - DNA, 15 bp, Homo sapiens
taaataatgtgtatc

SEQ ID NO: 37497 - DNA, 15 bp, Homo sapiens
ttaaataatgtgtat

SEQ ID NO: 37498 - DNA, 15 bp, Homo sapiens
cttaaataatgtgta

SEQ ID NO: 37499 - DNA, 15 bp, Homo sapiens
ccttaaataatgtgt

SEQ ID NO: 37500 - DNA, 15 bp, Homo sapiens
gccttaaataatgtg

SEQ ID NO: 37501 - DNA, 15 bp, Homo sapiens
agccttaaataatgt

SEQ ID NO: 37502 - DNA, 15 bp, Homo sapiens
cagccttaaataatg

SEQ ID NO: 37503 - DNA, 15 bp, Homo sapiens
acagccttaaataat

SEQ ID NO: 37504 - DNA, 15 bp, Homo sapiens
aacagccttaaataa

SEQ ID NO: 37505 - DNA, 15 bp, Homo sapiens
taacagccttaaata

SEQ ID NO: 37506 - DNA, 15 bp, Homo sapiens
ataacagccttaaat

SEQ ID NO: 37507 - DNA, 15 bp, Homo sapiens
tataacagccttaaa

SEQ ID NO: 37508 - DNA, 15 bp, Homo sapiens
atataacagccttaa

SEQ ID NO: 37509 - DNA, 15 bp, Homo sapiens
tatataacagcctta

SEQ ID NO: 37510 - DNA, 15 bp, Homo sapiens
ttatataacagcctt

SEQ ID NO: 37511 - DNA, 15 bp, Homo sapiens
attatataacagcct

SEQ ID NO: 37512 - DNA, 15 bp, Homo sapiens
tattatataacagcc

SEQ ID NO: 37513 - DNA, 15 bp, Homo sapiens
gtattatataacagc

SEQ ID NO: 37514 - DNA, 15 bp, Homo sapiens
tgtattatataacag

SEQ ID NO: 37515 - DNA, 15 bp, Homo sapiens
ctgtattatataaca

SEQ ID NO: 37516 - DNA, 15 bp, Homo sapiens
actgtattatataac

SEQ ID NO: 37517 - DNA, 15 bp, Homo sapiens
tactgtattatataa

SEQ ID NO: 37518 - DNA, 15 bp, Homo sapiens
ttactgtattatata

SEQ ID NO: 37519 - DNA, 15 bp, Homo sapiens
tttactgtattatat

SEQ ID NO: 37520 - DNA, 15 bp, Homo sapiens
ttttactgtattata

SEQ ID NO: 37521 - DNA, 15 bp, Homo sapiens
attttactgtattat

SEQ ID NO: 37522 - DNA, 15 bp, Homo sapiens
aattttactgtatta

SEQ ID NO: 37523 - DNA, 15 bp, Homo sapiens
caattttactgtatt

SEQ ID NO: 37524 - DNA, 15 bp, Homo sapiens
acaattttactgtat

SEQ ID NO: 37525 - DNA, 15 bp, Homo sapiens
tacaattttactgta

SEQ ID NO: 37526 - DNA, 15 bp, Homo sapiens
ctacaattttactgt

SEQ ID NO: 37527 - DNA, 15 bp, Homo sapiens
tctacaattttactg

SEQ ID NO: 37528 - DNA, 15 bp, Homo sapiens
ttctacaattttact

SEQ ID NO: 37529 - DNA, 15 bp, Homo sapiens
gttctacaattttac

SEQ ID NO: 37530 - DNA, 15 bp, Homo sapiens
agttctacaatttta

SEQ ID NO: 37531 - DNA, 15 bp, Homo sapiens
aagttctacaatttt

SEQ ID NO: 37532 - DNA, 15 bp, Homo sapiens
aaagttctacaattt

SEQ ID NO: 37533 - DNA, 15 bp, Homo sapiens
gaaagttctacaatt

SEQ ID NO: 37534 - DNA, 15 bp, Homo sapiens
tgaaagttctacaat

SEQ ID NO: 37535 - DNA, 15 bp, Homo sapiens
atgaaagttctacaa

SEQ ID NO: 37536 - DNA, 15 bp, Homo sapiens
tatgaaagttctaca

SEQ ID NO: 37537 - DNA, 15 bp, Homo sapiens
gtatgaaagttctac

SEQ ID NO: 37538 - DNA, 15 bp, Homo sapiens
ggtatgaaagttcta

SEQ ID NO: 37539 - DNA, 15 bp, Homo sapiens
aggtatgaaagttct

SEQ ID NO: 37540 - DNA, 15 bp, Homo sapiens
aaggtatgaaagttc

SEQ ID NO: 37541 - DNA, 15 bp, Homo sapiens
caaggtatgaaagtt

SEQ ID NO: 37542 - DNA, 15 bp, Homo sapiens
tcaaggtatgaaagt

SEQ ID NO: 37543 - DNA, 15 bp, Homo sapiens
ttcaaggtatgaaag

SEQ ID NO: 37544 - DNA, 15 bp, Homo sapiens
cttcaaggtatgaaa

SEQ ID NO: 37545 - DNA, 15 bp, Homo sapiens
ccttcaaggtatgaa

SEQ ID NO: 37546 - DNA, 15 bp, Homo sapiens
tccttcaaggtatga

SEQ ID NO: 37547 - DNA, 15 bp, Homo sapiens
atccttcaaggtatg

SEQ ID NO: 37548 - DNA, 15 bp, Homo sapiens
gatccttcaaggtat

SEQ ID NO: 37549 - DNA, 15 bp, Homo sapiens
agatccttcaaggta

SEQ ID NO: 37550 - DNA, 15 bp, Homo sapiens
aagatccttcaaggt

SEQ ID NO: 37551 - DNA, 15 bp, Homo sapiens
taagatccttcaagg

SEQ ID NO: 37552 - DNA, 15 bp, Homo sapiens
ctaagatccttcaag

SEQ ID NO: 37553 - DNA, 15 bp, Homo sapiens
gctaagatccttcaa

SEQ ID NO: 37554 - DNA, 15 bp, Homo sapiens
tgctaagatccttca

SEQ ID NO: 37555 - DNA, 15 bp, Homo sapiens
ttgctaagatccttc

SEQ ID NO: 37556 - DNA, 15 bp, Homo sapiens
attgctaagatcctt

SEQ ID NO: 37557 - DNA, 15 bp, Homo sapiens
aattgctaagatcct

SEQ ID NO: 37558 - DNA, 15 bp, Homo sapiens
taattgctaagatcc

SEQ ID NO: 37559 - DNA, 15 bp, Homo sapiens
ataattgctaagatc

SEQ ID NO: 37560 - DNA, 15 bp, Homo sapiens
aataattgctaagat

SEQ ID NO: 37561 - DNA, 15 bp, Homo sapiens
aaataattgctaaga

SEQ ID NO: 37562 - DNA, 15 bp, Homo sapiens
taaataattgctaag

SEQ ID NO: 37563 - DNA, 15 bp, Homo sapiens
ttaaataattgctaa

SEQ ID NO: 37564 - DNA, 15 bp, Homo sapiens
attaaataattgcta

SEQ ID NO: 37565 - DNA, 15 bp, Homo sapiens
aattaaataattgct

SEQ ID NO: 37566 - DNA, 15 bp, Homo sapiens
gaattaaataattgc

SEQ ID NO: 37567 - DNA, 15 bp, Homo sapiens
tgaattaaataattg

SEQ ID NO: 37568 - DNA, 15 bp, Homo sapiens
ttgaattaaataatt

SEQ ID NO: 37569 - DNA, 15 bp, Homo sapiens
tttgaattaaataat

SEQ ID NO: 37570 - DNA, 15 bp, Homo sapiens
gtttgaattaaataa

SEQ ID NO: 37571 - DNA, 15 bp, Homo sapiens
ggtttgaattaaata

SEQ ID NO: 37572 - DNA, 15 bp, Homo sapiens
gggtttgaattaaat

SEQ ID NO: 37573 - DNA, 15 bp, Homo sapiens
tgggtttgaattaaa

SEQ ID NO: 37574 - DNA, 15 bp, Homo sapiens
atgggtttgaattaa

SEQ ID NO: 37575 - DNA, 15 bp, Homo sapiens
aatgggtttgaatta

SEQ ID NO: 37576 - DNA, 15 bp, Homo sapiens
gaatgggtttgaatt

SEQ ID NO: 37577 - DNA, 15 bp, Homo sapiens
agaatgggtttgaat

SEQ ID NO: 37578 - DNA, 15 bp, Homo sapiens
tagaatgggtttgaa

SEQ ID NO: 37579 - DNA, 15 bp, Homo sapiens
ttagaatgggtttga

SEQ ID NO: 37580 - DNA, 15 bp, Homo sapiens
gttagaatgggtttg

SEQ ID NO: 37581 - DNA, 15 bp, Homo sapiens
tgttagaatgggttt

SEQ ID NO: 37582 - DNA, 15 bp, Homo sapiens
atgttagaatgggtt

SEQ ID NO: 37583 - DNA, 15 bp, Homo sapiens
tatgttagaatgggt

SEQ ID NO: 37584 - DNA, 15 bp, Homo sapiens
ctatgttagaatggg

SEQ ID NO: 37585 - DNA, 15 bp, Homo sapiens
tctatgttagaatgg

SEQ ID NO: 37586 - DNA, 15 bp, Homo sapiens
atctatgttagaatg

SEQ ID NO: 37587 - DNA, 15 bp, Homo sapiens
catctatgttagaat

SEQ ID NO: 37588 - DNA, 15 bp, Homo sapiens
tcatctatgttagaa

SEQ ID NO: 37589 - DNA, 15 bp, Homo sapiens
atcatctatgttaga

SEQ ID NO: 37590 - DNA, 15 bp, Homo sapiens
tatcatctatgttag

SEQ ID NO: 37591 - DNA, 15 bp, Homo sapiens
ttatcatctatgtta

SEQ ID NO: 37592 - DNA, 15 bp, Homo sapiens
tttatcatctatgtt

SEQ ID NO: 37593 - DNA, 15 bp, Homo sapiens
ttttatcatctatgt

SEQ ID NO: 37594 - DNA, 15 bp, Homo sapiens
gttttatcatctatg

SEQ ID NO: 37595 - DNA, 15 bp, Homo sapiens
tgttttatcatctat

SEQ ID NO: 37596 - DNA, 15 bp, Homo sapiens
ctgttttatcatcta

SEQ ID NO: 37597 - DNA, 15 bp, Homo sapiens
tctgttttatcatct

SEQ ID NO: 37598 - DNA, 15 bp, Homo sapiens
atctgttttatcatc

SEQ ID NO: 37599 - DNA, 15 bp, Homo sapiens
aatctgttttatcat

SEQ ID NO: 37600 - DNA, 15 bp, Homo sapiens
aaatctgttttatca

SEQ ID NO: 37601 - DNA, 15 bp, Homo sapiens
caaatctgttttatc

SEQ ID NO: 37602 - DNA, 15 bp, Homo sapiens
gcaaatctgttttat

SEQ ID NO: 37603 - DNA, 15 bp, Homo sapiens
tgcaaatctgtttta

SEQ ID NO: 37604 - DNA, 15 bp, Homo sapiens
ctgcaaatctgtttt

SEQ ID NO: 37605 - DNA, 15 bp, Homo sapiens
cctgcaaatctgttt

SEQ ID NO: 37606 - DNA, 15 bp, Homo sapiens
ccctgcaaatctgtt

SEQ ID NO: 37607 - DNA, 15 bp, Homo sapiens
accctgcaaatctgt

SEQ ID NO: 37608 - DNA, 15 bp, Homo sapiens
aaccctgcaaatctg

SEQ ID NO: 37609 - DNA, 15 bp, Homo sapiens
caaccctgcaaatct

SEQ ID NO: 37610 - DNA, 15 bp, Homo sapiens
ccaaccctgcaaatc

SEQ ID NO: 37611 - DNA, 15 bp, Homo sapiens
cccaaccctgcaaat

SEQ ID NO: 37612 - DNA, 15 bp, Homo sapiens
gcccaaccctgcaaa

SEQ ID NO: 37613 - DNA, 15 bp, Homo sapiens
tgcccaaccctgcaa

SEQ ID NO: 37614 - DNA, 15 bp, Homo sapiens
gtgcccaaccctgca

SEQ ID NO: 37615 - DNA, 15 bp, Homo sapiens
cgtgcccaaccctgc

SEQ ID NO: 37616 - DNA, 15 bp, Homo sapiens
ccgtgcccaaccctg

SEQ ID NO: 37617 - DNA, 15 bp, Homo sapiens
accgtgcccaaccct

SEQ ID NO: 37618 - DNA, 15 bp, Homo sapiens
caccgtgcccaaccc

SEQ ID NO: 37619 - DNA, 15 bp, Homo sapiens
ccaccgtgcccaacc

SEQ ID NO: 37620 - DNA, 15 bp, Homo sapiens
gccaccgtgcccaac

SEQ ID NO: 37621 - DNA, 15 bp, Homo sapiens
agccaccgtgcccaa

SEQ ID NO: 37622 - DNA, 15 bp, Homo sapiens
tgagccaccgtgccc

SEQ ID NO: 37623 - DNA, 15 bp, Homo sapiens
atgagccaccgtgcc

SEQ ID NO: 37624 - DNA, 15 bp, Homo sapiens
tatgagccaccgtgc

SEQ ID NO: 37625 - DNA, 15 bp, Homo sapiens
gtatgagccaccgtg

SEQ ID NO: 37626 - DNA, 15 bp, Homo sapiens
ggtatgagccaccgt

SEQ ID NO: 37627 - DNA, 15 bp, Homo sapiens
aggtatgagccaccg

SEQ ID NO: 37628 - DNA, 15 bp, Homo sapiens
taggtatgagccacc

SEQ ID NO: 37629 - DNA, 15 bp, Homo sapiens
ataggtatgagccac

SEQ ID NO: 37630 - DNA, 15 bp, Homo sapiens
tataggtatgagcca

SEQ ID NO: 37631 - DNA, 15 bp, Homo sapiens
atataggtatgagcc

SEQ ID NO: 37632 - DNA, 15 bp, Homo sapiens
aatataggtatgagc

SEQ ID NO: 37633 - DNA, 15 bp, Homo sapiens
gaatataggtatgag

SEQ ID NO: 37634 - DNA, 15 bp, Homo sapiens
ggaatataggtatga

SEQ ID NO: 37635 - DNA, 15 bp, Homo sapiens
gggaatataggtatg

SEQ ID NO: 37636 - DNA, 15 bp, Homo sapiens
tgggaatataggtat

SEQ ID NO: 37637 - DNA, 15 bp, Homo sapiens
ctgggaatataggta

SEQ ID NO: 37638 - DNA, 15 bp, Homo sapiens
gctgggaatataggt

SEQ ID NO: 37639 - DNA, 15 bp, Homo sapiens
tgctgggaatatagg

SEQ ID NO: 37640 - DNA, 15 bp, Homo sapiens
gtgctgggaatatag

SEQ ID NO: 37641 - DNA, 15 bp, Homo sapiens
agtgctgggaatata

SEQ ID NO: 37642 - DNA, 15 bp, Homo sapiens
aagtgctgggaatat

SEQ ID NO: 37643 - DNA, 15 bp, Homo sapiens
aaagtgctgggaata

SEQ ID NO: 37644 - DNA, 15 bp, Homo sapiens
caaagtgctgggaat

SEQ ID NO: 37645 - DNA, 15 bp, Homo sapiens
ccaaagtgctgggaa

SEQ ID NO: 37646 - DNA, 15 bp, Homo sapiens
gtctcccaaagtgct

SEQ ID NO: 37647 - DNA, 15 bp, Homo sapiens
agtctcccaaagtgc

SEQ ID NO: 37648 - DNA, 15 bp, Homo sapiens
gagtctcccaaagtg

SEQ ID NO: 37649 - DNA, 15 bp, Homo sapiens
tgagtctcccaaagt

SEQ ID NO: 37650 - DNA, 15 bp, Homo sapiens
ttgagtctcccaaag

SEQ ID NO: 37651 - DNA, 15 bp, Homo sapiens
cttgagtctcccaaa

SEQ ID NO: 37652 - DNA, 15 bp, Homo sapiens
gcttgagtctcccaa

SEQ ID NO: 37653 - DNA, 15 bp, Homo sapiens
cgcttgagtctccca

SEQ ID NO: 37654 - DNA, 15 bp, Homo sapiens
ccgcttgagtctccc

SEQ ID NO: 37655 - DNA, 15 bp, Homo sapiens
cccgcttgagtctcc

SEQ ID NO: 37656 - DNA, 15 bp, Homo sapiens
tcccgcttgagtctc

SEQ ID NO: 37657 - DNA, 15 bp, Homo sapiens
ttcccgcttgagtct

SEQ ID NO: 37658 - DNA, 15 bp, Homo sapiens
cttcccgcttgagtc

SEQ ID NO: 37659 - DNA, 15 bp, Homo sapiens
tcttcccgcttgagt

SEQ ID NO: 37660 - DNA, 15 bp, Homo sapiens
atcttcccgcttgag

SEQ ID NO: 37661 - DNA, 15 bp, Homo sapiens
aatcttcccgcttga

SEQ ID NO: 37662 - DNA, 15 bp, Homo sapiens
caatcttcccgcttg

SEQ ID NO: 37663 - DNA, 15 bp, Homo sapiens
gcaatcttcccgctt

SEQ ID NO: 37664 - DNA, 15 bp, Homo sapiens
agcaatcttcccgct

SEQ ID NO: 37665 - DNA, 15 bp, Homo sapiens
aagcaatcttcccgc

SEQ ID NO: 37666 - DNA, 15 bp, Homo sapiens
caagcaatcttcccg

SEQ ID NO: 37667 - DNA, 15 bp, Homo sapiens
tcaagcaatcttccc

SEQ ID NO: 37668 - DNA, 15 bp, Homo sapiens
ctcaagcaatcttcc

SEQ ID NO: 37669 - DNA, 15 bp, Homo sapiens
gctcaagcaatcttc

SEQ ID NO: 37670 - DNA, 15 bp, Homo sapiens
ggctcaagcaatctt

SEQ ID NO: 37671 - DNA, 15 bp, Homo sapiens
gggctcaagcaatct

SEQ ID NO: 37672 - DNA, 15 bp, Homo sapiens
tgggctcaagcaatc

SEQ ID NO: 37673 - DNA, 15 bp, Homo sapiens
gaactcctgggctca

SEQ ID NO: 37674 - DNA, 15 bp, Homo sapiens
tgaactcctgggctc

SEQ ID NO: 37675 - DNA, 15 bp, Homo sapiens
ttgaactcctgggct

SEQ ID NO: 37676 - DNA, 15 bp, Homo sapiens
cttgaactcctgggc

SEQ ID NO: 37677 - DNA, 15 bp, Homo sapiens
tcttgaactcctggg

SEQ ID NO: 37678 - DNA, 15 bp, Homo sapiens
gtcttgaactcctgg

SEQ ID NO: 37679 - DNA, 15 bp, Homo sapiens
agctggtcttgaact

SEQ ID NO: 37680 - DNA, 15 bp, Homo sapiens
aagctggtcttgaac

SEQ ID NO: 37681 - DNA, 15 bp, Homo sapiens
caagctggtcttgaa

SEQ ID NO: 37682 - DNA, 15 bp, Homo sapiens
ccaagctggtcttga

SEQ ID NO: 37683 - DNA, 15 bp, Homo sapiens
cccaagctggtcttg

SEQ ID NO: 37684 - DNA, 15 bp, Homo sapiens
gcccaagctggtctt

SEQ ID NO: 37685 - DNA, 15 bp, Homo sapiens
tgcccaagctggtct

SEQ ID NO: 37686 - DNA, 15 bp, Homo sapiens
ttgcccaagctggtc

SEQ ID NO: 37687 - DNA, 15 bp, Homo sapiens
gttgcccaagctggt

SEQ ID NO: 37688 - DNA, 15 bp, Homo sapiens
tgttgcccaagctgg

SEQ ID NO: 37689 - DNA, 15 bp, Homo sapiens
atgttgcccaagctg

SEQ ID NO: 37690 - DNA, 15 bp, Homo sapiens
tatgttgcccaagct

SEQ ID NO: 37691 - DNA, 15 bp, Homo sapiens
ctatgttgcccaagc

SEQ ID NO: 37692 - DNA, 15 bp, Homo sapiens
actatgttgcccaag

SEQ ID NO: 37693 - DNA, 15 bp, Homo sapiens
cactatgttgcccaa

SEQ ID NO: 37694 - DNA, 15 bp, Homo sapiens
tcactatgttgccca

SEQ ID NO: 37695 - DNA, 15 bp, Homo sapiens
ctcactatgttgccc

SEQ ID NO: 37696 - DNA, 15 bp, Homo sapiens
tctcactatgttgcc

SEQ ID NO: 37697 - DNA, 15 bp, Homo sapiens
ctctcactatgttgc

SEQ ID NO: 37698 - DNA, 15 bp, Homo sapiens
cctctcactatgttg

SEQ ID NO: 37699 - DNA, 15 bp, Homo sapiens
gcctctcactatgtt

SEQ ID NO: 37700 - DNA, 15 bp, Homo sapiens
agcctctcactatgt

SEQ ID NO: 37701 - DNA, 15 bp, Homo sapiens
cagcctctcactatg

SEQ ID NO: 37702 - DNA, 15 bp, Homo sapiens
acagcctctcactat

SEQ ID NO: 37703 - DNA, 15 bp, Homo sapiens
gacagcctctcacta

SEQ ID NO: 37704 - DNA, 15 bp, Homo sapiens
agacagcctctcact

SEQ ID NO: 37705 - DNA, 15 bp, Homo sapiens
gagacagcctctcac

SEQ ID NO: 37706 - DNA, 15 bp, Homo sapiens
agagacagcctctca

SEQ ID NO: 37707 - DNA, 15 bp, Homo sapiens
tagagacagcctctc

SEQ ID NO: 37708 - DNA, 15 bp, Homo sapiens
gtagagacagcctct

SEQ ID NO: 37709 - DNA, 15 bp, Homo sapiens
tgtagagacagcctc

SEQ ID NO: 37710 - DNA, 15 bp, Homo sapiens
ttgtagagacagcct

SEQ ID NO: 37711 - DNA, 15 bp, Homo sapiens
tttgtagagacagcc

SEQ ID NO: 37712 - DNA, 15 bp, Homo sapiens
ttttgtagagacagc

SEQ ID NO: 37713 - DNA, 15 bp, Homo sapiens
atttttttgtagaga

SEQ ID NO: 37714 - DNA, 15 bp, Homo sapiens
tatttttttgtagag

SEQ ID NO: 37715 - DNA, 15 bp, Homo sapiens
atatttttttgtaga

SEQ ID NO: 37716 - DNA, 15 bp, Homo sapiens
aatatttttttgtag

SEQ ID NO: 37717 - DNA, 15 bp, Homo sapiens
aaatatttttttgta

SEQ ID NO: 37718 - DNA, 15 bp, Homo sapiens
taaatatttttttgt

SEQ ID NO: 37719 - DNA, 15 bp, Homo sapiens
ttaaatatttttttg

SEQ ID NO: 37720 - DNA, 15 bp, Homo sapiens
tttaaatattttttt

SEQ ID NO: 37721 - DNA, 15 bp, Homo sapiens
tttttaaatattttt

SEQ ID NO: 37722 - DNA, 15 bp, Homo sapiens
ttttttaaatatttt

SEQ ID NO: 37723 - DNA, 15 bp, Homo sapiens
attttttaaatattt

SEQ ID NO: 37724 - DNA, 15 bp, Homo sapiens
tattttttaaatatt

SEQ ID NO: 37725 - DNA, 15 bp, Homo sapiens
ctattttttaaatat

SEQ ID NO: 37726 - DNA, 15 bp, Homo sapiens
gctattttttaaata

SEQ ID NO: 37727 - DNA, 15 bp, Homo sapiens
ggctattttttaaat

SEQ ID NO: 37728 - DNA, 15 bp, Homo sapiens
cggctattttttaaa

SEQ ID NO: 37729 - DNA, 15 bp, Homo sapiens
ccggctattttttaa

SEQ ID NO: 37730 - DNA, 15 bp, Homo sapiens
cccggctatttttta

SEQ ID NO: 37731 - DNA, 15 bp, Homo sapiens
gcccggctatttttt

SEQ ID NO: 37732 - DNA, 15 bp, Homo sapiens
tgcccggctattttt

SEQ ID NO: 37733 - DNA, 15 bp, Homo sapiens
atgcccggctatttt

SEQ ID NO: 37734 - DNA, 15 bp, Homo sapiens
catgcccggctattt

SEQ ID NO: 37735 - DNA, 15 bp, Homo sapiens
ccatgcccggctatt

SEQ ID NO: 37736 - DNA, 15 bp, Homo sapiens
accatgcccggctat

SEQ ID NO: 37737 - DNA, 15 bp, Homo sapiens
caccatgcccggcta

SEQ ID NO: 37738 - DNA, 15 bp, Homo sapiens
acaccatgcccggct

SEQ ID NO: 37739 - DNA, 15 bp, Homo sapiens
gacaccatgcccggc

SEQ ID NO: 37740 - DNA, 15 bp, Homo sapiens
tgacaccatgcccgg

SEQ ID NO: 37741 - DNA, 15 bp, Homo sapiens
gtgacaccatgcccg

SEQ ID NO: 37742 - DNA, 15 bp, Homo sapiens
cgtgacaccatgccc

SEQ ID NO: 37743 - DNA, 15 bp, Homo sapiens
acgtgacaccatgcc

SEQ ID NO: 37744 - DNA, 15 bp, Homo sapiens
cacgtgacaccatgc

SEQ ID NO: 37745 - DNA, 15 bp, Homo sapiens
gcacgtgacaccatg

SEQ ID NO: 37746 - DNA, 15 bp, Homo sapiens
ggcacgtgacaccat

SEQ ID NO: 37747 - DNA, 15 bp, Homo sapiens
aggcacgtgacacca

SEQ ID NO: 37748 - DNA, 15 bp, Homo sapiens
caggcacgtgacacc

SEQ ID NO: 37749 - DNA, 15 bp, Homo sapiens
acaggcacgtgacac

SEQ ID NO: 37750 - DNA, 15 bp, Homo sapiens
tacaggcacgtgaca

SEQ ID NO: 37751 - DNA, 15 bp, Homo sapiens
ctacaggcacgtgac

SEQ ID NO: 37752 - DNA, 15 bp, Homo sapiens
actacaggcacgtga

SEQ ID NO: 37753 - DNA, 15 bp, Homo sapiens
aactacaggcacgtg

SEQ ID NO: 37754 - DNA, 15 bp, Homo sapiens
gaactacaggcacgt

SEQ ID NO: 37755 - DNA, 15 bp, Homo sapiens
ggaactacaggcacg

SEQ ID NO: 37756 - DNA, 15 bp, Homo sapiens
tggaactacaggcac

SEQ ID NO: 37757 - DNA, 15 bp, Homo sapiens
ctggaactacaggca

SEQ ID NO: 37758 - DNA, 15 bp, Homo sapiens
gctggaactacaggc

SEQ ID NO: 37759 - DNA, 15 bp, Homo sapiens
agctggaactacagg

SEQ ID NO: 37760 - DNA, 15 bp, Homo sapiens
cagctggaactacag

SEQ ID NO: 37761 - DNA, 15 bp, Homo sapiens
gcagctggaactaca

SEQ ID NO: 37762 - DNA, 15 bp, Homo sapiens
agcagctggaactac

SEQ ID NO: 37763 - DNA, 15 bp, Homo sapiens
aagcagctggaacta

SEQ ID NO: 37764 - DNA, 15 bp, Homo sapiens
caagcagctggaact

SEQ ID NO: 37765 - DNA, 15 bp, Homo sapiens
ccaagcagctggaac

SEQ ID NO: 37766 - DNA, 15 bp, Homo sapiens
cccaagcagctggaa

SEQ ID NO: 37767 - DNA, 15 bp, Homo sapiens
tcccaagcagctgga

SEQ ID NO: 37768 - DNA, 15 bp, Homo sapiens
gcctcccaagcagct

SEQ ID NO: 37769 - DNA, 15 bp, Homo sapiens
agcctcccaagcagc

SEQ ID NO: 37770 - DNA, 15 bp, Homo sapiens
cagcctcccaagcag

SEQ ID NO: 37771 - DNA, 15 bp, Homo sapiens
tcagcctcccaagca

SEQ ID NO: 37772 - DNA, 15 bp, Homo sapiens
ctcagcctcccaagc

SEQ ID NO: 37773 - DNA, 15 bp, Homo sapiens
aatcctcccacctca

SEQ ID NO: 37774 - DNA, 15 bp, Homo sapiens
caatcctcccacctc

SEQ ID NO: 37775 - DNA, 15 bp, Homo sapiens
gcaatcctcccacct

SEQ ID NO: 37776 - DNA, 15 bp, Homo sapiens
ggcaatcctcccacc

SEQ ID NO: 37777 - DNA, 15 bp, Homo sapiens
tggcaatcctcccac

SEQ ID NO: 37778 - DNA, 15 bp, Homo sapiens
ctggcaatcctccca

SEQ ID NO: 37779 - DNA, 15 bp, Homo sapiens
tctggcaatcctccc

SEQ ID NO: 37780 - DNA, 15 bp, Homo sapiens
ctctggcaatcctcc

SEQ ID NO: 37781 - DNA, 15 bp, Homo sapiens
gctctggcaatcctc

SEQ ID NO: 37782 - DNA, 15 bp, Homo sapiens
ggctctggcaatcct

SEQ ID NO: 37783 - DNA, 15 bp, Homo sapiens
aggctctggcaatcc

SEQ ID NO: 37784 - DNA, 15 bp, Homo sapiens
caggctctggcaatc

SEQ ID NO: 37785 - DNA, 15 bp, Homo sapiens
ccaggctctggcaat

SEQ ID NO: 37786 - DNA, 15 bp, Homo sapiens
cccaggctctggcaa

SEQ ID NO: 37787 - DNA, 15 bp, Homo sapiens
tcccaggctctggca

SEQ ID NO: 37788 - DNA, 15 bp, Homo sapiens
ctcccaggctctggc

SEQ ID NO: 37789 - DNA, 15 bp, Homo sapiens
cctcccaggctctgg

SEQ ID NO: 37790 - DNA, 15 bp, Homo sapiens
acctcccaggctctg

SEQ ID NO: 37791 - DNA, 15 bp, Homo sapiens
aacctcccaggctct

SEQ ID NO: 37792 - DNA, 15 bp, Homo sapiens
caacctcccaggctc

SEQ ID NO: 37793 - DNA, 15 bp, Homo sapiens
tcaacctcccaggct

SEQ ID NO: 37794 - DNA, 15 bp, Homo sapiens
ctcaacctcccaggc

SEQ ID NO: 37795 - DNA, 15 bp, Homo sapiens
cctcaacctcccagg

SEQ ID NO: 37796 - DNA, 15 bp, Homo sapiens
gcctcaacctcccag

SEQ ID NO: 37797 - DNA, 15 bp, Homo sapiens
agcctcaacctccca

SEQ ID NO: 37798 - DNA, 15 bp, Homo sapiens
cagcctcaacctccc

SEQ ID NO: 37799 - DNA, 15 bp, Homo sapiens
gcagcctcaacctcc

SEQ ID NO: 37800 - DNA, 15 bp, Homo sapiens
tgcagcctcaacctc

SEQ ID NO: 37801 - DNA, 15 bp, Homo sapiens
ctgcagcctcaacct

SEQ ID NO: 37802 - DNA, 15 bp, Homo sapiens
actgcagcctcaacc

SEQ ID NO: 37803 - DNA, 15 bp, Homo sapiens
cactgcagcctcaac

SEQ ID NO: 37804 - DNA, 15 bp, Homo sapiens
tcactgcagcctcaa

SEQ ID NO: 37805 - DNA, 15 bp, Homo sapiens
ctcactgcagcctca

SEQ ID NO: 37806 - DNA, 15 bp, Homo sapiens
ggctcactgcagcct

SEQ ID NO: 37807 - DNA, 15 bp, Homo sapiens
tggctcactgcagcc

SEQ ID NO: 37808 - DNA, 15 bp, Homo sapiens
atggctcactgcagc

SEQ ID NO: 37809 - DNA, 15 bp, Homo sapiens
catggctcactgcag

SEQ ID NO: 37810 - DNA, 15 bp, Homo sapiens
tgtgatcatggctca

SEQ ID NO: 37811 - DNA, 15 bp, Homo sapiens
gtgtgatcatggctc

SEQ ID NO: 37812 - DNA, 15 bp, Homo sapiens
ggtgtgatcatggct

SEQ ID NO: 37813 - DNA, 15 bp, Homo sapiens
tggtgtgatcatggc

SEQ ID NO: 37814 - DNA, 15 bp, Homo sapiens
gtggtgtgatcatgg

SEQ ID NO: 37815 - DNA, 15 bp, Homo sapiens
tgtggtgtgatcatg

SEQ ID NO: 37816 - DNA, 15 bp, Homo sapiens
ctgtggtgtgatcat

SEQ ID NO: 37817 - DNA, 15 bp, Homo sapiens
gctgtggtgtgatca

SEQ ID NO: 37818 - DNA, 15 bp, Homo sapiens
tgctgtggtgtgatc

SEQ ID NO: 37819 - DNA, 15 bp, Homo sapiens
gtgctgtggtgtgat

SEQ ID NO: 37820 - DNA, 15 bp, Homo sapiens
agtgctgtggtgtga

SEQ ID NO: 37821 - DNA, 15 bp, Homo sapiens
gagtgctgtggtgtg

SEQ ID NO: 37822 - DNA, 15 bp, Homo sapiens
agagtgctgtggtgt

SEQ ID NO: 37823 - DNA, 15 bp, Homo sapiens
tagagtgctgtggtg

SEQ ID NO: 37824 - DNA, 15 bp, Homo sapiens
ctagagtgctgtggt

SEQ ID NO: 37825 - DNA, 15 bp, Homo sapiens
gctagagtgctgtgg

SEQ ID NO: 37826 - DNA, 15 bp, Homo sapiens
ggctagagtgctgtg

SEQ ID NO: 37827 - DNA, 15 bp, Homo sapiens
aggctagagtgctgt

SEQ ID NO: 37828 - DNA, 15 bp, Homo sapiens
taggctagagtgctg

SEQ ID NO: 37829 - DNA, 15 bp, Homo sapiens
ctaggctagagtgct

SEQ ID NO: 37830 - DNA, 15 bp, Homo sapiens
tctaggctagagtgc

SEQ ID NO: 37831 - DNA, 15 bp, Homo sapiens
ctctaggctagagtg

SEQ ID NO: 37832 - DNA, 15 bp, Homo sapiens
gctctaggctagagt

SEQ ID NO: 37833 - DNA, 15 bp, Homo sapiens
ggctctaggctagag

SEQ ID NO: 37834 - DNA, 15 bp, Homo sapiens
aggctctaggctaga

SEQ ID NO: 37835 - DNA, 15 bp, Homo sapiens
gaggctctaggctag

SEQ ID NO: 37836 - DNA, 15 bp, Homo sapiens
ggaggctctaggcta

SEQ ID NO: 37837 - DNA, 15 bp, Homo sapiens
gggaggctctaggct

SEQ ID NO: 37838 - DNA, 15 bp, Homo sapiens
agggaggctctaggc

SEQ ID NO: 37839 - DNA, 15 bp, Homo sapiens
cagggaggctctagg

SEQ ID NO: 37840 - DNA, 15 bp, Homo sapiens
acagggaggctctag

SEQ ID NO: 37841 - DNA, 15 bp, Homo sapiens
cacagggaggctcta

SEQ ID NO: 37842 - DNA, 15 bp, Homo sapiens
acacagggaggctct

SEQ ID NO: 37843 - DNA, 15 bp, Homo sapiens
cacacagggaggctc

SEQ ID NO: 37844 - DNA, 15 bp, Homo sapiens
ccacacagggaggct

SEQ ID NO: 37845 - DNA, 15 bp, Homo sapiens
gccacacagggaggc

SEQ ID NO: 37846 - DNA, 15 bp, Homo sapiens
tgccacacagggagg

SEQ ID NO: 37847 - DNA, 15 bp, Homo sapiens
ctgccacacagggag

SEQ ID NO: 37848 - DNA, 15 bp, Homo sapiens
cctgccacacaggga

SEQ ID NO: 37849 - DNA, 15 bp, Homo sapiens
gcctgccacacaggg

SEQ ID NO: 37850 - DNA, 15 bp, Homo sapiens
agcctgccacacagg

SEQ ID NO: 37851 - DNA, 15 bp, Homo sapiens
gagcctgccacacag

SEQ ID NO: 37852 - DNA, 15 bp, Homo sapiens
agagcctgccacaca

SEQ ID NO: 37853 - DNA, 15 bp, Homo sapiens
tagagcctgccacac

SEQ ID NO: 37854 - DNA, 15 bp, Homo sapiens
gtagagcctgccaca

SEQ ID NO: 37855 - DNA, 15 bp, Homo sapiens
tgtagagcctgccac

SEQ ID NO: 37856 - DNA, 15 bp, Homo sapiens
gtgtagagcctgcca

SEQ ID NO: 37857 - DNA, 15 bp, Homo sapiens
agtgtagagcctgcc

SEQ ID NO: 37858 - DNA, 15 bp, Homo sapiens
aagtgtagagcctgc

SEQ ID NO: 37859 - DNA, 15 bp, Homo sapiens
gaagtgtagagcctg

SEQ ID NO: 37860 - DNA, 15 bp, Homo sapiens
tgaagtgtagagcct

SEQ ID NO: 37861 - DNA, 15 bp, Homo sapiens
ctgaagtgtagagcc

SEQ ID NO: 37862 - DNA, 15 bp, Homo sapiens
tctgaagtgtagagc

SEQ ID NO: 37863 - DNA, 15 bp, Homo sapiens
atctgaagtgtagag

SEQ ID NO: 37864 - DNA, 15 bp, Homo sapiens
tatctgaagtgtaga

SEQ ID NO: 37865 - DNA, 15 bp, Homo sapiens
ctatctgaagtgtag

SEQ ID NO: 37866 - DNA, 15 bp, Homo sapiens
cctatctgaagtgta

SEQ ID NO: 37867 - DNA, 15 bp, Homo sapiens
gcctatctgaagtgt

SEQ ID NO: 37868 - DNA, 15 bp, Homo sapiens
tgcctatctgaagtg

SEQ ID NO: 37869 - DNA, 15 bp, Homo sapiens
ttgcctatctgaagt

SEQ ID NO: 37870 - DNA, 15 bp, Homo sapiens
gttgcctatctgaag

SEQ ID NO: 37871 - DNA, 15 bp, Homo sapiens
tgttgcctatctgaa

SEQ ID NO: 37872 - DNA, 15 bp, Homo sapiens
ctgttgcctatctga

SEQ ID NO: 37873 - DNA, 15 bp, Homo sapiens
tctgttgcctatctg

SEQ ID NO: 37874 - DNA, 15 bp, Homo sapiens
atctgttgcctatct

SEQ ID NO: 37875 - DNA, 15 bp, Homo sapiens
gatctgttgcctatc

SEQ ID NO: 37876 - DNA, 15 bp, Homo sapiens
cgatctgttgcctat

SEQ ID NO: 37877 - DNA, 15 bp, Homo sapiens
tcgatctgttgccta

SEQ ID NO: 37878 - DNA, 15 bp, Homo sapiens
ctcgatctgttgcct

SEQ ID NO: 37879 - DNA, 15 bp, Homo sapiens
tctcgatctgttgcc

SEQ ID NO: 37880 - DNA, 15 bp, Homo sapiens
gtctcgatctgttgc

SEQ ID NO: 37881 - DNA, 15 bp, Homo sapiens
ggtctcgatctgttg

SEQ ID NO: 37882 - DNA, 15 bp, Homo sapiens
aggtctcgatctgtt

SEQ ID NO: 37883 - DNA, 15 bp, Homo sapiens
aaggtctcgatctgt

SEQ ID NO: 37884 - DNA, 15 bp, Homo sapiens
caaggtctcgatctg

SEQ ID NO: 37885 - DNA, 15 bp, Homo sapiens
acaaggtctcgatct

SEQ ID NO: 37886 - DNA, 15 bp, Homo sapiens
aacaaggtctcgatc

SEQ ID NO: 37887 - DNA, 15 bp, Homo sapiens
aaacaaggtctcgat

SEQ ID NO: 37888 - DNA, 15 bp, Homo sapiens
gaaacaaggtctcga

SEQ ID NO: 37889 - DNA, 15 bp, Homo sapiens
tgaaacaaggtctcg

SEQ ID NO: 37890 - DNA, 15 bp, Homo sapiens
gtgaaacaaggtctc

SEQ ID NO: 37891 - DNA, 15 bp, Homo sapiens
tgtgaaacaaggtct

SEQ ID NO: 37892 - DNA, 15 bp, Homo sapiens
ttgtgaaacaaggtc

SEQ ID NO: 37893 - DNA, 15 bp, Homo sapiens
tttgtgaaacaaggt

SEQ ID NO: 37894 - DNA, 15 bp, Homo sapiens
ttttgtgaaacaagg

SEQ ID NO: 37895 - DNA, 15 bp, Homo sapiens
gttttgtgaaacaag

SEQ ID NO: 37896 - DNA, 15 bp, Homo sapiens
cgttttgtgaaacaa

SEQ ID NO: 37897 - DNA, 15 bp, Homo sapiens
tcgttttgtgaaaca

SEQ ID NO: 37898 - DNA, 15 bp, Homo sapiens
ttcgttttgtgaaac

SEQ ID NO: 37899 - DNA, 15 bp, Homo sapiens
gttcgttttgtgaaa

SEQ ID NO: 37900 - DNA, 15 bp, Homo sapiens
tgttcgttttgtgaa

SEQ ID NO: 37901 - DNA, 15 bp, Homo sapiens
ctgttcgttttgtga

SEQ ID NO: 37902 - DNA, 15 bp, Homo sapiens
tctgttcgttttgtg

SEQ ID NO: 37903 - DNA, 15 bp, Homo sapiens
atctgttcgttttgt

SEQ ID NO: 37904 - DNA, 15 bp, Homo sapiens
gatctgttcgttttg

SEQ ID NO: 37905 - DNA, 15 bp, Homo sapiens
agatctgttcgtttt

SEQ ID NO: 37906 - DNA, 15 bp, Homo sapiens
cagatctgttcgttt

SEQ ID NO: 37907 - DNA, 15 bp, Homo sapiens
gcagatctgttcgtt

SEQ ID NO: 37908 - DNA, 15 bp, Homo sapiens
tgcagatctgttcgt

SEQ ID NO: 37909 - DNA, 15 bp, Homo sapiens
ttgcagatctgttcg

SEQ ID NO: 37910 - DNA, 15 bp, Homo sapiens
tttgcagatctgttc

SEQ ID NO: 37911 - DNA, 15 bp, Homo sapiens
ctttgcagatctgtt

SEQ ID NO: 37912 - DNA, 15 bp, Homo sapiens
tctttgcagatctgt

SEQ ID NO: 37913 - DNA, 15 bp, Homo sapiens
atctttgcagatctg

SEQ ID NO: 37914 - DNA, 15 bp, Homo sapiens
gatctttgcagatct

SEQ ID NO: 37915 - DNA, 15 bp, Homo sapiens
tgatctttgcagatc

SEQ ID NO: 37916 - DNA, 15 bp, Homo sapiens
ttgatctttgcagat

SEQ ID NO: 37917 - DNA, 15 bp, Homo sapiens
gttgatctttgcaga

SEQ ID NO: 37918 - DNA, 15 bp, Homo sapiens
ggttgatctttgcag

SEQ ID NO: 37919 - DNA, 15 bp, Homo sapiens
aggttgatctttgca

SEQ ID NO: 37920 - DNA, 15 bp, Homo sapiens
caggttgatctttgc

SEQ ID NO: 37921 - DNA, 15 bp, Homo sapiens
acaggttgatctttg

SEQ ID NO: 37922 - DNA, 15 bp, Homo sapiens
gacaggttgatcttt

SEQ ID NO: 37923 - DNA, 15 bp, Homo sapiens
ggacaggttgatctt

SEQ ID NO: 37924 - DNA, 15 bp, Homo sapiens
aggacaggttgatct

SEQ ID NO: 37925 - DNA, 15 bp, Homo sapiens
taggacaggttgatc

SEQ ID NO: 37926 - DNA, 15 bp, Homo sapiens
ttaggacaggttgat

SEQ ID NO: 37927 - DNA, 15 bp, Homo sapiens
cttaggacaggttga

SEQ ID NO: 37928 - DNA, 15 bp, Homo sapiens
acttaggacaggttg

SEQ ID NO: 37929 - DNA, 15 bp, Homo sapiens
gacttaggacaggtt

SEQ ID NO: 37930 - DNA, 15 bp, Homo sapiens
tgacttaggacaggt

SEQ ID NO: 37931 - DNA, 15 bp, Homo sapiens
atgacttaggacagg

SEQ ID NO: 37932 - DNA, 15 bp, Homo sapiens
tatgacttaggacag

SEQ ID NO: 37933 - DNA, 15 bp, Homo sapiens
atatgacttaggaca

SEQ ID NO: 37934 - DNA, 15 bp, Homo sapiens
tatatgacttaggac

SEQ ID NO: 37935 - DNA, 15 bp, Homo sapiens
ttatatgacttagga

SEQ ID NO: 37936 - DNA, 15 bp, Homo sapiens
attatatgacttagg

SEQ ID NO: 37937 - DNA, 15 bp, Homo sapiens
gattatatgacttag

SEQ ID NO: 37938 - DNA, 15 bp, Homo sapiens
agattatatgactta

SEQ ID NO: 37939 - DNA, 15 bp, Homo sapiens
gagattatatgactt

SEQ ID NO: 37940 - DNA, 15 bp, Homo sapiens
agagattatatgact

SEQ ID NO: 37941 - DNA, 15 bp, Homo sapiens
aagagattatatgac

SEQ ID NO: 37942 - DNA, 15 bp, Homo sapiens
aaagagattatatga

SEQ ID NO: 37943 - DNA, 15 bp, Homo sapiens
caaagagattatatg

SEQ ID NO: 37944 - DNA, 15 bp, Homo sapiens
acaaagagattatat

SEQ ID NO: 37945 - DNA, 15 bp, Homo sapiens
cacaaagagattata

SEQ ID NO: 37946 - DNA, 15 bp, Homo sapiens
acacaaagagattat

SEQ ID NO: 37947 - DNA, 15 bp, Homo sapiens
tacacaaagagatta

SEQ ID NO: 37948 - DNA, 15 bp, Homo sapiens
ttacacaaagagatt

SEQ ID NO: 37949 - DNA, 15 bp, Homo sapiens
attacacaaagagat

SEQ ID NO: 37950 - DNA, 15 bp, Homo sapiens
tattacacaaagaga

SEQ ID NO: 37951 - DNA, 15 bp, Homo sapiens
ttattacacaaagag

SEQ ID NO: 37952 - DNA, 15 bp, Homo sapiens
attattacacaaaga

SEQ ID NO: 37953 - DNA, 15 bp, Homo sapiens
tattattacacaaag

SEQ ID NO: 37954 - DNA, 15 bp, Homo sapiens
ttattattacacaaa

SEQ ID NO: 37955 - DNA, 15 bp, Homo sapiens
tttattattacacaa

SEQ ID NO: 37956 - DNA, 15 bp, Homo sapiens
ttttattattacaca

SEQ ID NO: 37957 - DNA, 15 bp, Homo sapiens
tttttattattacac

SEQ ID NO: 37958 - DNA, 15 bp, Homo sapiens
gtttttattattaca

SEQ ID NO: 37959 - DNA, 15 bp, Homo sapiens
ggtttttattattac

SEQ ID NO: 37960 - DNA, 15 bp, Homo sapiens
gggtttttattatta

SEQ ID NO: 37961 - DNA, 15 bp, Homo sapiens
ggggtttttattatt

SEQ ID NO: 37962 - DNA, 15 bp, Homo sapiens
tggggtttttattat

SEQ ID NO: 37963 - DNA, 15 bp, Homo sapiens
atggggtttttatta

SEQ ID NO: 37964 - DNA, 15 bp, Homo sapiens
gatggggtttttatt

SEQ ID NO: 37965 - DNA, 15 bp, Homo sapiens
agatggggtttttat

SEQ ID NO: 37966 - DNA, 15 bp, Homo sapiens
aagatggggttttta

SEQ ID NO: 37967 - DNA, 15 bp, Homo sapiens
gaagatggggttttt

SEQ ID NO: 37968 - DNA, 15 bp, Homo sapiens
agaagatggggtttt

SEQ ID NO: 37969 - DNA, 15 bp, Homo sapiens
tagaagatggggttt

SEQ ID NO: 37970 - DNA, 15 bp, Homo sapiens
ttagaagatggggtt

SEQ ID NO: 37971 - DNA, 15 bp, Homo sapiens
gttagaagatggggt

SEQ ID NO: 37972 - DNA, 15 bp, Homo sapiens
ggttagaagatgggg

SEQ ID NO: 37973 - DNA, 15 bp, Homo sapiens
aggttagaagatggg

SEQ ID NO: 37974 - DNA, 15 bp, Homo sapiens
aaggttagaagatgg

SEQ ID NO: 37975 - DNA, 15 bp, Homo sapiens
taaggttagaagatg

SEQ ID NO: 37976 - DNA, 15 bp, Homo sapiens
ttaaggttagaagat

SEQ ID NO: 37977 - DNA, 15 bp, Homo sapiens
tttaaggttagaaga

SEQ ID NO: 37978 - DNA, 15 bp, Homo sapiens
gtttaaggttagaag

SEQ ID NO: 37979 - DNA, 15 bp, Homo sapiens
ggtttaaggttagaa

SEQ ID NO: 37980 - DNA, 15 bp, Homo sapiens
aggtttaaggttaga

SEQ ID NO: 37981 - DNA, 15 bp, Homo sapiens
caggtttaaggttag

SEQ ID NO: 37982 - DNA, 15 bp, Homo sapiens
ccaggtttaaggtta

SEQ ID NO: 37983 - DNA, 15 bp, Homo sapiens
accaggtttaaggtt

SEQ ID NO: 37984 - DNA, 15 bp, Homo sapiens
taccaggtttaaggt

SEQ ID NO: 37985 - DNA, 15 bp, Homo sapiens
ataccaggtttaagg

SEQ ID NO: 37986 - DNA, 15 bp, Homo sapiens
aataccaggtttaag

SEQ ID NO: 37987 - DNA, 15 bp, Homo sapiens
aaataccaggtttaa

SEQ ID NO: 37988 - DNA, 15 bp, Homo sapiens
aaaataccaggttta

SEQ ID NO: 37989 - DNA, 15 bp, Homo sapiens
aaaaataccaggttt

SEQ ID NO: 37990 - DNA, 15 bp, Homo sapiens
aaaaaataccaggtt

SEQ ID NO: 37991 - DNA, 15 bp, Homo sapiens
aaaaaaataccaggt

SEQ ID NO: 37992 - DNA, 15 bp, Homo sapiens
gaaaaaaataccagg

SEQ ID NO: 37993 - DNA, 15 bp, Homo sapiens
agaaaaaaataccag

SEQ ID NO: 37994 - DNA, 15 bp, Homo sapiens
tagaaaaaaatacca

SEQ ID NO: 37995 - DNA, 15 bp, Homo sapiens
gtagaaaaaaatacc

SEQ ID NO: 37996 - DNA, 15 bp, Homo sapiens
cgtagaaaaaaatac

SEQ ID NO: 37997 - DNA, 15 bp, Homo sapiens
tcgtagaaaaaaata

SEQ ID NO: 37998 - DNA, 15 bp, Homo sapiens
ttcgtagaaaaaaat

SEQ ID NO: 37999 - DNA, 15 bp, Homo sapiens
tttcgtagaaaaaaa

SEQ ID NO: 38000 - DNA, 15 bp, Homo sapiens
gtttcgtagaaaaaa

SEQ ID NO: 38001 - DNA, 15 bp, Homo sapiens
agtttcgtagaaaaa

SEQ ID NO: 38002 - DNA, 15 bp, Homo sapiens
tagtttcgtagaaaa

SEQ ID NO: 38003 - DNA, 15 bp, Homo sapiens
atagtttcgtagaaa

SEQ ID NO: 38004 - DNA, 15 bp, Homo sapiens
catagtttcgtagaa

SEQ ID NO: 38005 - DNA, 15 bp, Homo sapiens
acatagtttcgtaga

SEQ ID NO: 38006 - DNA, 15 bp, Homo sapiens
aacatagtttcgtag

SEQ ID NO: 38007 - DNA, 15 bp, Homo sapiens
gaacatagtttcgta

SEQ ID NO: 38008 - DNA, 15 bp, Homo sapiens
agaacatagtttcgt

SEQ ID NO: 38009 - DNA, 15 bp, Homo sapiens
cagaacatagtttcg

SEQ ID NO: 38010 - DNA, 15 bp, Homo sapiens
gcagaacatagtttc

SEQ ID NO: 38011 - DNA, 15 bp, Homo sapiens
tgcagaacatagttt

SEQ ID NO: 38012 - DNA, 15 bp, Homo sapiens
ctgcagaacatagtt

SEQ ID NO: 38013 - DNA, 15 bp, Homo sapiens
actgcagaacatagt

SEQ ID NO: 38014 - DNA, 15 bp, Homo sapiens
gactgcagaacatag

SEQ ID NO: 38015 - DNA, 15 bp, Homo sapiens
ggactgcagaacata

SEQ ID NO: 38016 - DNA, 15 bp, Homo sapiens
tggactgcagaacat

SEQ ID NO: 38017 - DNA, 15 bp, Homo sapiens
ttggactgcagaaca

SEQ ID NO: 38018 - DNA, 15 bp, Homo sapiens
tttggactgcagaac

SEQ ID NO: 38019 - DNA, 15 bp, Homo sapiens
atttggactgcagaa

SEQ ID NO: 38020 - DNA, 15 bp, Homo sapiens
aatttggactgcaga

SEQ ID NO: 38021 - DNA, 15 bp, Homo sapiens
taatttggactgcag

SEQ ID NO: 38022 - DNA, 15 bp, Homo sapiens
ataatttggactgca

SEQ ID NO: 38023 - DNA, 15 bp, Homo sapiens
aataatttggactgc

SEQ ID NO: 38024 - DNA, 15 bp, Homo sapiens
aaataatttggactg

SEQ ID NO: 38025 - DNA, 15 bp, Homo sapiens
aaaataatttggact

SEQ ID NO: 38026 - DNA, 15 bp, Homo sapiens
aaaaataatttggac

SEQ ID NO: 38027 - DNA, 15 bp, Homo sapiens
gaaaaataatttgga

SEQ ID NO: 38028 - DNA, 15 bp, Homo sapiens
agaaaaataatttgg

SEQ ID NO: 38029 - DNA, 15 bp, Homo sapiens
aagaaaaataatttg

SEQ ID NO: 38030 - DNA, 15 bp, Homo sapiens
aaagaaaaataattt

SEQ ID NO: 38031 - DNA, 15 bp, Homo sapiens
taaagaaaaataatt

SEQ ID NO: 38032 - DNA, 15 bp, Homo sapiens
ataaagaaaaataat

SEQ ID NO: 38033 - DNA, 15 bp, Homo sapiens
aataaagaaaaataa

SEQ ID NO: 38034 - DNA, 15 bp, Homo sapiens
taataaagaaaaata

SEQ ID NO: 38035 - DNA, 15 bp, Homo sapiens
ataataaagaaaaat

SEQ ID NO: 38036 - DNA, 15 bp, Homo sapiens
aataataaagaaaaa

SEQ ID NO: 38037 - DNA, 15 bp, Homo sapiens
aaataataaagaaaa

SEQ ID NO: 38038 - DNA, 15 bp, Homo sapiens
aaaataataaagaaa

SEQ ID NO: 38039 - DNA, 15 bp, Homo sapiens
caaaataataaagaa

SEQ ID NO: 38040 - DNA, 15 bp, Homo sapiens
tcaaaataataaaga

SEQ ID NO: 38041 - DNA, 15 bp, Homo sapiens
ttcaaaataataaag

SEQ ID NO: 38042 - DNA, 15 bp, Homo sapiens
attcaaaataataaa

SEQ ID NO: 38043 - DNA, 15 bp, Homo sapiens
gattcaaaataataa

SEQ ID NO: 38044 - DNA, 15 bp, Homo sapiens
ggattcaaaataata

SEQ ID NO: 38045 - DNA, 15 bp, Homo sapiens
aggattcaaaataat

SEQ ID NO: 38046 - DNA, 15 bp, Homo sapiens
taggattcaaaataa

SEQ ID NO: 38047 - DNA, 15 bp, Homo sapiens
ttaggattcaaaata

SEQ ID NO: 38048 - DNA, 15 bp, Homo sapiens
tttaggattcaaaat

SEQ ID NO: 38049 - DNA, 15 bp, Homo sapiens
ctttaggattcaaaa

SEQ ID NO: 38050 - DNA, 15 bp, Homo sapiens
actttaggattcaaa

SEQ ID NO: 38051 - DNA, 15 bp, Homo sapiens
tactttaggattcaa

SEQ ID NO: 38052 - DNA, 15 bp, Homo sapiens
ctactttaggattca

SEQ ID NO: 38053 - DNA, 15 bp, Homo sapiens
tctactttaggattc

SEQ ID NO: 38054 - DNA, 15 bp, Homo sapiens
ttctactttaggatt

SEQ ID NO: 38055 - DNA, 15 bp, Homo sapiens
tttctactttaggat

SEQ ID NO: 38056 - DNA, 15 bp, Homo sapiens
atttctactttagga

SEQ ID NO: 38057 - DNA, 15 bp, Homo sapiens
tatttctactttagg

SEQ ID NO: 38058 - DNA, 15 bp, Homo sapiens
ctatttctactttag

SEQ ID NO: 38059 - DNA, 15 bp, Homo sapiens
tctatttctacttta

SEQ ID NO: 38060 - DNA, 15 bp, Homo sapiens
ttctatttctacttt

SEQ ID NO: 38061 - DNA, 15 bp, Homo sapiens
tttctatttctactt

SEQ ID NO: 38062 - DNA, 15 bp, Homo sapiens
gtttctatttctact

SEQ ID NO: 38063 - DNA, 15 bp, Homo sapiens
agtttctatttctac

SEQ ID NO: 38064 - DNA, 15 bp, Homo sapiens
aagtttctatttcta

SEQ ID NO: 38065 - DNA, 15 bp, Homo sapiens
taagtttctatttct

SEQ ID NO: 38066 - DNA, 15 bp, Homo sapiens
ctaagtttctatttc

SEQ ID NO: 38067 - DNA, 15 bp, Homo sapiens
tctaagtttctattt

SEQ ID NO: 38068 - DNA, 15 bp, Homo sapiens
ttctaagtttctatt

SEQ ID NO: 38069 - DNA, 15 bp, Homo sapiens
tttctaagtttctat

SEQ ID NO: 38070 - DNA, 15 bp, Homo sapiens
ttttctaagtttcta

SEQ ID NO: 38071 - DNA, 15 bp, Homo sapiens
tttttctaagtttct

SEQ ID NO: 38072 - DNA, 15 bp, Homo sapiens
atttttctaagtttc

SEQ ID NO: 38073 - DNA, 15 bp, Homo sapiens
tatttttctaagttt

SEQ ID NO: 38074 - DNA, 15 bp, Homo sapiens
ttatttttctaagtt

SEQ ID NO: 38075 - DNA, 15 bp, Homo sapiens
tttatttttctaagt

SEQ ID NO: 38076 - DNA, 15 bp, Homo sapiens
ttttatttttctaag

SEQ ID NO: 38077 - DNA, 15 bp, Homo sapiens
tttttatttttctaa

SEQ ID NO: 38078 - DNA, 15 bp, Homo sapiens
ctttttatttttcta

SEQ ID NO: 38079 - DNA, 15 bp, Homo sapiens
gctttttatttttct

SEQ ID NO: 38080 - DNA, 15 bp, Homo sapiens
tgctttttatttttc

SEQ ID NO: 38081 - DNA, 15 bp, Homo sapiens
ttgctttttattttt

SEQ ID NO: 38082 - DNA, 15 bp, Homo sapiens
gttgctttttatttt

SEQ ID NO: 38083 - DNA, 15 bp, Homo sapiens
agttgctttttattt

SEQ ID NO: 38084 - DNA, 15 bp, Homo sapiens
gagttgctttttatt

SEQ ID NO: 38085 - DNA, 15 bp, Homo sapiens
ggagttgctttttat

SEQ ID NO: 38086 - DNA, 15 bp, Homo sapiens
aggagttgcttttta

SEQ ID NO: 38087 - DNA, 15 bp, Homo sapiens
aaggagttgcttttt

SEQ ID NO: 38088 - DNA, 15 bp, Homo sapiens
aaaggagttgctttt

SEQ ID NO: 38089 - DNA, 15 bp, Homo sapiens
taaaggagttgcttt

SEQ ID NO: 38090 - DNA, 15 bp, Homo sapiens
ataaaggagttgctt

SEQ ID NO: 38091 - DNA, 15 bp, Homo sapiens
cataaaggagttgct

SEQ ID NO: 38092 - DNA, 15 bp, Homo sapiens
tcataaaggagttgc

SEQ ID NO: 38093 - DNA, 15 bp, Homo sapiens
gtcataaaggagttg

SEQ ID NO: 38094 - DNA, 15 bp, Homo sapiens
tgtcataaaggagtt

SEQ ID NO: 38095 - DNA, 15 bp, Homo sapiens
atgtcataaaggagt

SEQ ID NO: 38096 - DNA, 15 bp, Homo sapiens
tatgtcataaaggag

SEQ ID NO: 38097 - DNA, 15 bp, Homo sapiens
atatgtcataaagga

SEQ ID NO: 38098 - DNA, 15 bp, Homo sapiens
catatgtcataaagg

SEQ ID NO: 38099 - DNA, 15 bp, Homo sapiens
tcatatgtcataaag

SEQ ID NO: 38100 - DNA, 15 bp, Homo sapiens
ctcatatgtcataaa

SEQ ID NO: 38101 - DNA, 15 bp, Homo sapiens
cctcatatgtcataa

SEQ ID NO: 38102 - DNA, 15 bp, Homo sapiens
tcctcatatgtcata

SEQ ID NO: 38103 - DNA, 15 bp, Homo sapiens
gtcctcatatgtcat

SEQ ID NO: 38104 - DNA, 15 bp, Homo sapiens
agtcctcatatgtca

SEQ ID NO: 38105 - DNA, 15 bp, Homo sapiens
aagtcctcatatgtc

SEQ ID NO: 38106 - DNA, 15 bp, Homo sapiens
aaagtcctcatatgt

SEQ ID NO: 38107 - DNA, 15 bp, Homo sapiens
aaaagtcctcatatg

SEQ ID NO: 38108 - DNA, 15 bp, Homo sapiens
aaaaagtcctcatat

SEQ ID NO: 38109 - DNA, 15 bp, Homo sapiens
gaaaaagtcctcata

SEQ ID NO: 38110 - DNA, 15 bp, Homo sapiens
tgaaaaagtcctcat

SEQ ID NO: 38111 - DNA, 15 bp, Homo sapiens
ctgaaaaagtcctca

SEQ ID NO: 38112 - DNA, 15 bp, Homo sapiens
actgaaaaagtcctc

SEQ ID NO: 38113 - DNA, 15 bp, Homo sapiens
aactgaaaaagtcct

SEQ ID NO: 38114 - DNA, 15 bp, Homo sapiens
aaactgaaaaagtcc

SEQ ID NO: 38115 - DNA, 15 bp, Homo sapiens
aaaactgaaaaagtc

SEQ ID NO: 38116 - DNA, 15 bp, Homo sapiens
taaaactgaaaaagt

SEQ ID NO: 38117 - DNA, 15 bp, Homo sapiens
ttaaaactgaaaaag

SEQ ID NO: 38118 - DNA, 15 bp, Homo sapiens
tttaaaactgaaaaa

SEQ ID NO: 38119 - DNA, 15 bp, Homo sapiens
atttaaaactgaaaa

SEQ ID NO: 38120 - DNA, 15 bp, Homo sapiens
tatttaaaactgaaa

SEQ ID NO: 38121 - DNA, 15 bp, Homo sapiens
ttatttaaaactgaa

SEQ ID NO: 38122 - DNA, 15 bp, Homo sapiens
cttatttaaaactga

SEQ ID NO: 38123 - DNA, 15 bp, Homo sapiens
tcttatttaaaactg

SEQ ID NO: 38124 - DNA, 15 bp, Homo sapiens
ttcttatttaaaact

SEQ ID NO: 38125 - DNA, 15 bp, Homo sapiens
tttcttatttaaaac

SEQ ID NO: 38126 - DNA, 15 bp, Homo sapiens
ttttcttatttaaaa

SEQ ID NO: 38127 - DNA, 15 bp, Homo sapiens
tttttcttatttaaa

SEQ ID NO: 38128 - DNA, 15 bp, Homo sapiens
gtttttcttatttaa

SEQ ID NO: 38129 - DNA, 15 bp, Homo sapiens
ggtttttcttattta

SEQ ID NO: 38130 - DNA, 15 bp, Homo sapiens
gggtttttcttattt

SEQ ID NO: 38131 - DNA, 15 bp, Homo sapiens
tgggtttttcttatt

SEQ ID NO: 38132 - DNA, 15 bp, Homo sapiens
ttgggtttttcttat

SEQ ID NO: 38133 - DNA, 15 bp, Homo sapiens
gttgggtttttctta

SEQ ID NO: 38134 - DNA, 15 bp, Homo sapiens
agttgggtttttctt

SEQ ID NO: 38135 - DNA, 15 bp, Homo sapiens
gagttgggtttttct

SEQ ID NO: 38136 - DNA, 15 bp, Homo sapiens
tgagttgggtttttc

SEQ ID NO: 38137 - DNA, 15 bp, Homo sapiens
ttgagttgggttttt

SEQ ID NO: 38138 - DNA, 15 bp, Homo sapiens
tttgagttgggtttt

SEQ ID NO: 38139 - DNA, 15 bp, Homo sapiens
ctttgagttgggttt

SEQ ID NO: 38140 - DNA, 15 bp, Homo sapiens
actttgagttgggtt

SEQ ID NO: 38141 - DNA, 15 bp, Homo sapiens
tactttgagttgggt

SEQ ID NO: 38142 - DNA, 15 bp, Homo sapiens
ctactttgagttggg

SEQ ID NO: 38143 - DNA, 15 bp, Homo sapiens
gctactttgagttgg

SEQ ID NO: 38144 - DNA, 15 bp, Homo sapiens
agctactttgagttg

SEQ ID NO: 38145 - DNA, 15 bp, Homo sapiens
aagctactttgagtt

SEQ ID NO: 38146 - DNA, 15 bp, Homo sapiens
taagctactttgagt

SEQ ID NO: 38147 - DNA, 15 bp, Homo sapiens
ttaagctactttgag

SEQ ID NO: 38148 - DNA, 15 bp, Homo sapiens
tttaagctactttga

SEQ ID NO: 38149 - DNA, 15 bp, Homo sapiens
atttaagctactttg

SEQ ID NO: 38150 - DNA, 15 bp, Homo sapiens
tatttaagctacttt

SEQ ID NO: 38151 - DNA, 15 bp, Homo sapiens
ttatttaagctactt

SEQ ID NO: 38152 - DNA, 15 bp, Homo sapiens
tttatttaagctact

SEQ ID NO: 38153 - DNA, 15 bp, Homo sapiens
ttttatttaagctac

SEQ ID NO: 38154 - DNA, 15 bp, Homo sapiens
cttttatttaagcta

SEQ ID NO: 38155 - DNA, 15 bp, Homo sapiens
ccttttatttaagct

SEQ ID NO: 38156 - DNA, 15 bp, Homo sapiens
tccttttatttaagc

SEQ ID NO: 38157 - DNA, 15 bp, Homo sapiens
ctccttttatttaag

SEQ ID NO: 38158 - DNA, 15 bp, Homo sapiens
tctccttttatttaa

SEQ ID NO: 38159 - DNA, 15 bp, Homo sapiens
gtctccttttattta

SEQ ID NO: 38160 - DNA, 15 bp, Homo sapiens
tgtctccttttattt

SEQ ID NO: 38161 - DNA, 15 bp, Homo sapiens
atgtctccttttatt

SEQ ID NO: 38162 - DNA, 15 bp, Homo sapiens
aatgtctccttttat

SEQ ID NO: 38163 - DNA, 15 bp, Homo sapiens
aaatgtctcctttta

SEQ ID NO: 38164 - DNA, 15 bp, Homo sapiens
aaaatgtctcctttt

SEQ ID NO: 38165 - DNA, 15 bp, Homo sapiens
aaaaatgtctccttt

SEQ ID NO: 38166 - DNA, 15 bp, Homo sapiens
aaaaaatgtctcctt

SEQ ID NO: 38167 - DNA, 15 bp, Homo sapiens
caaaaaatgtctcct

SEQ ID NO: 38168 - DNA, 15 bp, Homo sapiens
tcaaaaaatgtctcc

SEQ ID NO: 38169 - DNA, 15 bp, Homo sapiens
gtcaaaaaatgtctc

SEQ ID NO: 38170 - DNA, 15 bp, Homo sapiens
agtcaaaaaatgtct

SEQ ID NO: 38171 - DNA, 15 bp, Homo sapiens
aagtcaaaaaatgtc

SEQ ID NO: 38172 - DNA, 15 bp, Homo sapiens
taagtcaaaaaatgt

SEQ ID NO: 38173 - DNA, 15 bp, Homo sapiens
gtaagtcaaaaaatg

SEQ ID NO: 38174 - DNA, 15 bp, Homo sapiens
tgtaagtcaaaaaat

SEQ ID NO: 38175 - DNA, 15 bp, Homo sapiens
atgtaagtcaaaaaa

SEQ ID NO: 38176 - DNA, 15 bp, Homo sapiens
tatgtaagtcaaaaa

SEQ ID NO: 38177 - DNA, 15 bp, Homo sapiens
ttatgtaagtcaaaa

SEQ ID NO: 38178 - DNA, 15 bp, Homo sapiens
gttatgtaagtcaaa

SEQ ID NO: 38179 - DNA, 15 bp, Homo sapiens
ggttatgtaagtcaa

SEQ ID NO: 38180 - DNA, 15 bp, Homo sapiens
aggttatgtaagtca

SEQ ID NO: 38181 - DNA, 15 bp, Homo sapiens
taggttatgtaagtc

SEQ ID NO: 38182 - DNA, 15 bp, Homo sapiens
ttaggttatgtaagt

SEQ ID NO: 38183 - DNA, 15 bp, Homo sapiens
tttaggttatgtaag

SEQ ID NO: 38184 - DNA, 15 bp, Homo sapiens
ttttaggttatgtaa

SEQ ID NO: 38185 - DNA, 15 bp, Homo sapiens
cttttaggttatgta

SEQ ID NO: 38186 - DNA, 15 bp, Homo sapiens
gcttttaggttatgt

SEQ ID NO: 38187 - DNA, 15 bp, Homo sapiens
agcttttaggttatg

SEQ ID NO: 38188 - DNA, 15 bp, Homo sapiens
gagcttttaggttat

SEQ ID NO: 38189 - DNA, 15 bp, Homo sapiens
agagcttttaggtta

SEQ ID NO: 38190 - DNA, 15 bp, Homo sapiens
cagagcttttaggtt

SEQ ID NO: 38191 - DNA, 15 bp, Homo sapiens
ccagagcttttaggt

SEQ ID NO: 38192 - DNA, 15 bp, Homo sapiens
gccagagcttttagg

SEQ ID NO: 38193 - DNA, 15 bp, Homo sapiens
ggccagagcttttag

SEQ ID NO: 38194 - DNA, 15 bp, Homo sapiens
aggccagagctttta

SEQ ID NO: 38195 - DNA, 15 bp, Homo sapiens
caggccagagctttt

SEQ ID NO: 38196 - DNA, 15 bp, Homo sapiens
ccaggccagagcttt

SEQ ID NO: 38197 - DNA, 15 bp, Homo sapiens
tccaggccagagctt

SEQ ID NO: 38198 - DNA, 15 bp, Homo sapiens
atccaggccagagct

SEQ ID NO: 38199 - DNA, 15 bp, Homo sapiens
gatccaggccagagc

SEQ ID NO: 38200 - DNA, 15 bp, Homo sapiens
agatccaggccagag

SEQ ID NO: 38201 - DNA, 15 bp, Homo sapiens
tagatccaggccaga

SEQ ID NO: 38202 - DNA, 15 bp, Homo sapiens
ctagatccaggccag

SEQ ID NO: 38203 - DNA, 15 bp, Homo sapiens
cctagatccaggcca

SEQ ID NO: 38204 - DNA, 15 bp, Homo sapiens
acctagatccaggcc

SEQ ID NO: 38205 - DNA, 15 bp, Homo sapiens
cacctagatccaggc

SEQ ID NO: 38206 - DNA, 15 bp, Homo sapiens
gcacctagatccagg

SEQ ID NO: 38207 - DNA, 15 bp, Homo sapiens
agcacctagatccag

SEQ ID NO: 38208 - DNA, 15 bp, Homo sapiens
gagcacctagatcca

SEQ ID NO: 38209 - DNA, 15 bp, Homo sapiens
tgagcacctagatcc

SEQ ID NO: 38210 - DNA, 15 bp, Homo sapiens
ttgagcacctagatc

SEQ ID NO: 38211 - DNA, 15 bp, Homo sapiens
gttgagcacctagat

SEQ ID NO: 38212 - DNA, 15 bp, Homo sapiens
tgttgagcacctaga

SEQ ID NO: 38213 - DNA, 15 bp, Homo sapiens
ctgttgagcacctag

SEQ ID NO: 38214 - DNA, 15 bp, Homo sapiens
tctgttgagcaccta

SEQ ID NO: 38215 - DNA, 15 bp, Homo sapiens
atctgttgagcacct

SEQ ID NO: 38216 - DNA, 15 bp, Homo sapiens
gatctgttgagcacc

SEQ ID NO: 38217 - DNA, 15 bp, Homo sapiens
agatctgttgagcac

SEQ ID NO: 38218 - DNA, 15 bp, Homo sapiens
gagatctgttgagca

SEQ ID NO: 38219 - DNA, 15 bp, Homo sapiens
tgagatctgttgagc

SEQ ID NO: 38220 - DNA, 15 bp, Homo sapiens
ttgagatctgttgag

SEQ ID NO: 38221 - DNA, 15 bp, Homo sapiens
cttgagatctgttga

SEQ ID NO: 38222 - DNA, 15 bp, Homo sapiens
tcttgagatctgttg

SEQ ID NO: 38223 - DNA, 15 bp, Homo sapiens
ctcttgagatctgtt

SEQ ID NO: 38224 - DNA, 15 bp, Homo sapiens
actcttgagatctgt

SEQ ID NO: 38225 - DNA, 15 bp, Homo sapiens
tactcttgagatctg

SEQ ID NO: 38226 - DNA, 15 bp, Homo sapiens
atactcttgagatct

SEQ ID NO: 38227 - DNA, 15 bp, Homo sapiens
gatactcttgagatc

SEQ ID NO: 38228 - DNA, 15 bp, Homo sapiens
agatactcttgagat

SEQ ID NO: 38229 - DNA, 15 bp, Homo sapiens
gagatactcttgaga

SEQ ID NO: 38230 - DNA, 15 bp, Homo sapiens
agagatactcttgag

SEQ ID NO: 38231 - DNA, 15 bp, Homo sapiens
gagagatactcttga

SEQ ID NO: 38232 - DNA, 15 bp, Homo sapiens
agagagatactcttg

SEQ ID NO: 38233 - DNA, 15 bp, Homo sapiens
aagagagatactctt

SEQ ID NO: 38234 - DNA, 15 bp, Homo sapiens
taagagagatactct

SEQ ID NO: 38235 - DNA, 15 bp, Homo sapiens
ataagagagatactc

SEQ ID NO: 38236 - DNA, 15 bp, Homo sapiens
aataagagagatact

SEQ ID NO: 38237 - DNA, 15 bp, Homo sapiens
gaataagagagatac

SEQ ID NO: 38238 - DNA, 15 bp, Homo sapiens
agaataagagagata

SEQ ID NO: 38239 - DNA, 15 bp, Homo sapiens
gagaataagagagat

SEQ ID NO: 38240 - DNA, 15 bp, Homo sapiens
agagaataagagaga

SEQ ID NO: 38241 - DNA, 15 bp, Homo sapiens
gagagaataagagag

SEQ ID NO: 38242 - DNA, 15 bp, Homo sapiens
agagagaataagaga

SEQ ID NO: 38243 - DNA, 15 bp, Homo sapiens
gagagagaataagag

SEQ ID NO: 38244 - DNA, 15 bp, Homo sapiens
ggagagagaataaga

SEQ ID NO: 38245 - DNA, 15 bp, Homo sapiens
gggagagagaataag

SEQ ID NO: 38246 - DNA, 15 bp, Homo sapiens
agggagagagaataa

SEQ ID NO: 38247 - DNA, 15 bp, Homo sapiens
gagggagagagaata

SEQ ID NO: 38248 - DNA, 15 bp, Homo sapiens
ggagggagagagaat

SEQ ID NO: 38249 - DNA, 15 bp, Homo sapiens
gggagggagagagaa

SEQ ID NO: 38250 - DNA, 15 bp, Homo sapiens
agggagggagagaga

SEQ ID NO: 38251 - DNA, 15 bp, Homo sapiens
aagggagggagagag

SEQ ID NO: 38252 - DNA, 15 bp, Homo sapiens
taagggagggagaga

SEQ ID NO: 38253 - DNA, 15 bp, Homo sapiens
gtaagggagggagag

SEQ ID NO: 38254 - DNA, 15 bp, Homo sapiens
ggtaagggagggaga

SEQ ID NO: 38255 - DNA, 15 bp, Homo sapiens
gggtaagggagggag

SEQ ID NO: 38256 - DNA, 15 bp, Homo sapiens
agggtaagggaggga

SEQ ID NO: 38257 - DNA, 15 bp, Homo sapiens
gagggtaagggaggg

SEQ ID NO: 38258 - DNA, 15 bp, Homo sapiens
ggagggtaagggagg

SEQ ID NO: 38259 - DNA, 15 bp, Homo sapiens
aggagggtaagggag

SEQ ID NO: 38260 - DNA, 15 bp, Homo sapiens
gaggagggtaaggga

SEQ ID NO: 38261 - DNA, 15 bp, Homo sapiens
ggaggagggtaaggg

SEQ ID NO: 38262 - DNA, 15 bp, Homo sapiens
aggaggagggtaagg

SEQ ID NO: 38263 - DNA, 15 bp, Homo sapiens
gaggaggagggtaag

SEQ ID NO: 38264 - DNA, 15 bp, Homo sapiens
agaggaggagggtaa

SEQ ID NO: 38265 - DNA, 15 bp, Homo sapiens
aagaggaggagggta

SEQ ID NO: 38266 - DNA, 15 bp, Homo sapiens
aaagaggaggagggt

SEQ ID NO: 38267 - DNA, 15 bp, Homo sapiens
aaaagaggaggaggg

SEQ ID NO: 38268 - DNA, 15 bp, Homo sapiens
gaaaagaggaggagg

SEQ ID NO: 38269 - DNA, 15 bp, Homo sapiens
agaaaagaggaggag

SEQ ID NO: 38270 - DNA, 15 bp, Homo sapiens
gagaaaagaggagga

SEQ ID NO: 38271 - DNA, 15 bp, Homo sapiens
agagaaaagaggagg

SEQ ID NO: 38272 - DNA, 15 bp, Homo sapiens
gagagaaaagaggag

SEQ ID NO: 38273 - DNA, 15 bp, Homo sapiens
agagagaaaagagga

SEQ ID NO: 38274 - DNA, 15 bp, Homo sapiens
aagagagaaaagagg

SEQ ID NO: 38275 - DNA, 15 bp, Homo sapiens
gaagagagaaaagag

SEQ ID NO: 38276 - DNA, 15 bp, Homo sapiens
agaagagagaaaaga

SEQ ID NO: 38277 - DNA, 15 bp, Homo sapiens
cagaagagagaaaag

SEQ ID NO: 38278 - DNA, 15 bp, Homo sapiens
acagaagagagaaaa

SEQ ID NO: 38279 - DNA, 15 bp, Homo sapiens
tacagaagagagaaa

SEQ ID NO: 38280 - DNA, 15 bp, Homo sapiens
atacagaagagagaa

SEQ ID NO: 38281 - DNA, 15 bp, Homo sapiens
tatacagaagagaga

SEQ ID NO: 38282 - DNA, 15 bp, Homo sapiens
atatacagaagagag

SEQ ID NO: 38283 - DNA, 15 bp, Homo sapiens
tatatacagaagaga

SEQ ID NO: 38284 - DNA, 15 bp, Homo sapiens
atatatacagaagag

SEQ ID NO: 38285 - DNA, 15 bp, Homo sapiens
catatatacagaaga

SEQ ID NO: 38286 - DNA, 15 bp, Homo sapiens
acatatatacagaag

SEQ ID NO: 38287 - DNA, 15 bp, Homo sapiens
aacatatatacagaa

SEQ ID NO: 38288 - DNA, 15 bp, Homo sapiens
taacatatatacaga

SEQ ID NO: 38289 - DNA, 15 bp, Homo sapiens
ataacatatatacag

SEQ ID NO: 38290 - DNA, 15 bp, Homo sapiens
aataacatatataca

SEQ ID NO: 38291 - DNA, 15 bp, Homo sapiens
aaataacatatatac

SEQ ID NO: 38292 - DNA, 15 bp, Homo sapiens
aaaataacatatata

SEQ ID NO: 38293 - DNA, 15 bp, Homo sapiens
gaaaataacatatat

SEQ ID NO: 38294 - DNA, 15 bp, Homo sapiens
tgaaaataacatata

SEQ ID NO: 38295 - DNA, 15 bp, Homo sapiens
ttgaaaataacatat

SEQ ID NO: 38296 - DNA, 15 bp, Homo sapiens
tttgaaaataacata

SEQ ID NO: 38297 - DNA, 15 bp, Homo sapiens
gtttgaaaataacat

SEQ ID NO: 38298 - DNA, 15 bp, Homo sapiens
tgtttgaaaataaca

SEQ ID NO: 38299 - DNA, 15 bp, Homo sapiens
ctgtttgaaaataac

SEQ ID NO: 38300 - DNA, 15 bp, Homo sapiens
cctgtttgaaaataa

SEQ ID NO: 38301 - DNA, 15 bp, Homo sapiens
gcctgtttgaaaata

SEQ ID NO: 38302 - DNA, 15 bp, Homo sapiens
agcctgtttgaaaat

SEQ ID NO: 38303 - DNA, 15 bp, Homo sapiens
gagcctgtttgaaaa

SEQ ID NO: 38304 - DNA, 15 bp, Homo sapiens
agagcctgtttgaaa

SEQ ID NO: 38305 - DNA, 15 bp, Homo sapiens
gagagcctgtttgaa

SEQ ID NO: 38306 - DNA, 15 bp, Homo sapiens
tgagagcctgtttga

SEQ ID NO: 38307 - DNA, 15 bp, Homo sapiens
gtgagagcctgtttg

SEQ ID NO: 38308 - DNA, 15 bp, Homo sapiens
tgtgagagcctgttt

SEQ ID NO: 38309 - DNA, 15 bp, Homo sapiens
ttgtgagagcctgtt

SEQ ID NO: 38310 - DNA, 15 bp, Homo sapiens
cttgtgagagcctgt

SEQ ID NO: 38311 - DNA, 15 bp, Homo sapiens
acttgtgagagcctg

SEQ ID NO: 38312 - DNA, 15 bp, Homo sapiens
tacttgtgagagcct

SEQ ID NO: 38313 - DNA, 15 bp, Homo sapiens
ctacttgtgagagcc

SEQ ID NO: 38314 - DNA, 15 bp, Homo sapiens
actacttgtgagagc

SEQ ID NO: 38315 - DNA, 15 bp, Homo sapiens
cactacttgtgagag

SEQ ID NO: 38316 - DNA, 15 bp, Homo sapiens
ccactacttgtgaga

SEQ ID NO: 38317 - DNA, 15 bp, Homo sapiens
gccactacttgtgag

SEQ ID NO: 38318 - DNA, 15 bp, Homo sapiens
tgccactacttgtga

SEQ ID NO: 38319 - DNA, 15 bp, Homo sapiens
ttgccactacttgtg

SEQ ID NO: 38320 - DNA, 15 bp, Homo sapiens
cttgccactacttgt

SEQ ID NO: 38321 - DNA, 15 bp, Homo sapiens
tcttgccactacttg

SEQ ID NO: 38322 - DNA, 15 bp, Homo sapiens
atcttgccactactt

SEQ ID NO: 38323 - DNA, 15 bp, Homo sapiens
tatcttgccactact

SEQ ID NO: 38324 - DNA, 15 bp, Homo sapiens
atatcttgccactac

SEQ ID NO: 38325 - DNA, 15 bp, Homo sapiens
tatatcttgccacta

SEQ ID NO: 38326 - DNA, 15 bp, Homo sapiens
ctatatcttgccact

SEQ ID NO: 38327 - DNA, 15 bp, Homo sapiens
actatatcttgccac

SEQ ID NO: 38328 - DNA, 15 bp, Homo sapiens
aactatatcttgcca

SEQ ID NO: 38329 - DNA, 15 bp, Homo sapiens
gaactatatcttgcc

SEQ ID NO: 38330 - DNA, 15 bp, Homo sapiens
ggaactatatcttgc

SEQ ID NO: 38331 - DNA, 15 bp, Homo sapiens
aggaactatatcttg

SEQ ID NO: 38332 - DNA, 15 bp, Homo sapiens
taggaactatatctt

SEQ ID NO: 38333 - DNA, 15 bp, Homo sapiens
ttaggaactatatct

SEQ ID NO: 38334 - DNA, 15 bp, Homo sapiens
attaggaactatatc

SEQ ID NO: 38335 - DNA, 15 bp, Homo sapiens
tattaggaactatat

SEQ ID NO: 38336 - DNA, 15 bp, Homo sapiens
ctattaggaactata

SEQ ID NO: 38337 - DNA, 15 bp, Homo sapiens
gctattaggaactat

SEQ ID NO: 38338 - DNA, 15 bp, Homo sapiens
agctattaggaacta

SEQ ID NO: 38339 - DNA, 15 bp, Homo sapiens
aagctattaggaact

SEQ ID NO: 38340 - DNA, 15 bp, Homo sapiens
gaagctattaggaac

SEQ ID NO: 38341 - DNA, 15 bp, Homo sapiens
tgaagctattaggaa

SEQ ID NO: 38342 - DNA, 15 bp, Homo sapiens
ctgaagctattagga

SEQ ID NO: 38343 - DNA, 15 bp, Homo sapiens
cctgaagctattagg

SEQ ID NO: 38344 - DNA, 15 bp, Homo sapiens
acctgaagctattag

SEQ ID NO: 38345 - DNA, 15 bp, Homo sapiens
aacctgaagctatta

SEQ ID NO: 38346 - DNA, 15 bp, Homo sapiens
aaacctgaagctatt

SEQ ID NO: 38347 - DNA, 15 bp, Homo sapiens
caaacctgaagctat

SEQ ID NO: 38348 - DNA, 15 bp, Homo sapiens
gcaaacctgaagcta

SEQ ID NO: 38349 - DNA, 15 bp, Homo sapiens
tgcaaacctgaagct

SEQ ID NO: 38350 - DNA, 15 bp, Homo sapiens
atgcaaacctgaagc

SEQ ID NO: 38351 - DNA, 15 bp, Homo sapiens
aatgcaaacctgaag

SEQ ID NO: 38352 - DNA, 15 bp, Homo sapiens
gaatgcaaacctgaa

SEQ ID NO: 38353 - DNA, 15 bp, Homo sapiens
agaatgcaaacctga

SEQ ID NO: 38354 - DNA, 15 bp, Homo sapiens
tagaatgcaaacctg

SEQ ID NO: 38355 - DNA, 15 bp, Homo sapiens
gtagaatgcaaacct

SEQ ID NO: 38356 - DNA, 15 bp, Homo sapiens
ggtagaatgcaaacc

SEQ ID NO: 38357 - DNA, 15 bp, Homo sapiens
aggtagaatgcaaac

SEQ ID NO: 38358 - DNA, 15 bp, Homo sapiens
taggtagaatgcaaa

SEQ ID NO: 38359 - DNA, 15 bp, Homo sapiens
gtaggtagaatgcaa

SEQ ID NO: 38360 - DNA, 15 bp, Homo sapiens
agtaggtagaatgca

SEQ ID NO: 38361 - DNA, 15 bp, Homo sapiens
aagtaggtagaatgc

SEQ ID NO: 38362 - DNA, 15 bp, Homo sapiens
aaagtaggtagaatg

SEQ ID NO: 38363 - DNA, 15 bp, Homo sapiens
taaagtaggtagaat

SEQ ID NO: 38364 - DNA, 15 bp, Homo sapiens
ctaaagtaggtagaa

SEQ ID NO: 38365 - DNA, 15 bp, Homo sapiens
gctaaagtaggtaga

SEQ ID NO: 38366 - DNA, 15 bp, Homo sapiens
tgctaaagtaggtag

SEQ ID NO: 38367 - DNA, 15 bp, Homo sapiens
ttgctaaagtaggta

SEQ ID NO: 38368 - DNA, 15 bp, Homo sapiens
gttgctaaagtaggt

SEQ ID NO: 38369 - DNA, 15 bp, Homo sapiens
agttgctaaagtagg

SEQ ID NO: 38370 - DNA, 15 bp, Homo sapiens
tagttgctaaagtag

SEQ ID NO: 38371 - DNA, 15 bp, Homo sapiens
atagttgctaaagta

SEQ ID NO: 38372 - DNA, 15 bp, Homo sapiens
catagttgctaaagt

SEQ ID NO: 38373 - DNA, 15 bp, Homo sapiens
tcatagttgctaaag

SEQ ID NO: 38374 - DNA, 15 bp, Homo sapiens
atcatagttgctaaa

SEQ ID NO: 38375 - DNA, 15 bp, Homo sapiens
catcatagttgctaa

SEQ ID NO: 38376 - DNA, 15 bp, Homo sapiens
tcatcatagttgcta

SEQ ID NO: 38377 - DNA, 15 bp, Homo sapiens
ctcatcatagttgct

SEQ ID NO: 38378 - DNA, 15 bp, Homo sapiens
tctcatcatagttgc

SEQ ID NO: 38379 - DNA, 15 bp, Homo sapiens
ttctcatcatagttg

SEQ ID NO: 38380 - DNA, 15 bp, Homo sapiens
cttctcatcatagtt

SEQ ID NO: 38381 - DNA, 15 bp, Homo sapiens
tcttctcatcatagt

SEQ ID NO: 38382 - DNA, 15 bp, Homo sapiens
ctcttctcatcatag

SEQ ID NO: 38383 - DNA, 15 bp, Homo sapiens
tctcttctcatcata

SEQ ID NO: 38384 - DNA, 15 bp, Homo sapiens
ctctcttctcatcat

SEQ ID NO: 38385 - DNA, 15 bp, Homo sapiens
gctctcttctcatca

SEQ ID NO: 38386 - DNA, 15 bp, Homo sapiens
agctctcttctcatc

SEQ ID NO: 38387 - DNA, 15 bp, Homo sapiens
tagctctcttctcat

SEQ ID NO: 38388 - DNA, 15 bp, Homo sapiens
gtagctctcttctca

SEQ ID NO: 38389 - DNA, 15 bp, Homo sapiens
tgtagctctcttctc

SEQ ID NO: 38390 - DNA, 15 bp, Homo sapiens
ttgtagctctcttct

SEQ ID NO: 38391 - DNA, 15 bp, Homo sapiens
attgtagctctcttc

SEQ ID NO: 38392 - DNA, 15 bp, Homo sapiens
aattgtagctctctt

SEQ ID NO: 38393 - DNA, 15 bp, Homo sapiens
aaattgtagctctct

SEQ ID NO: 38394 - DNA, 15 bp, Homo sapiens
caaattgtagctctc

SEQ ID NO: 38395 - DNA, 15 bp, Homo sapiens
tcaaattgtagctct

SEQ ID NO: 38396 - DNA, 15 bp, Homo sapiens
ctcaaattgtagctc

SEQ ID NO: 38397 - DNA, 15 bp, Homo sapiens
gctcaaattgtagct

SEQ ID NO: 38398 - DNA, 15 bp, Homo sapiens
tgctcaaattgtagc

SEQ ID NO: 38399 - DNA, 15 bp, Homo sapiens
ttgctcaaattgtag

SEQ ID NO: 38400 - DNA, 15 bp, Homo sapiens
tttgctcaaattgta

SEQ ID NO: 38401 - DNA, 15 bp, Homo sapiens
ttttgctcaaattgt

SEQ ID NO: 38402 - DNA, 15 bp, Homo sapiens
tttttgctcaaattg

SEQ ID NO: 38403 - DNA, 15 bp, Homo sapiens
atttttgctcaaatt

SEQ ID NO: 38404 - DNA, 15 bp, Homo sapiens
aatttttgctcaaat

SEQ ID NO: 38405 - DNA, 15 bp, Homo sapiens
aaatttttgctcaaa

SEQ ID NO: 38406 - DNA, 15 bp, Homo sapiens
caaatttttgctcaa

SEQ ID NO: 38407 - DNA, 15 bp, Homo sapiens
acaaatttttgctca

SEQ ID NO: 38408 - DNA, 15 bp, Homo sapiens
tacaaatttttgctc

SEQ ID NO: 38409 - DNA, 15 bp, Homo sapiens
ctacaaatttttgct

SEQ ID NO: 38410 - DNA, 15 bp, Homo sapiens
cctacaaatttttgc

SEQ ID NO: 38411 - DNA, 15 bp, Homo sapiens
ccctacaaatttttg

SEQ ID NO: 38412 - DNA, 15 bp, Homo sapiens
accctacaaattttt

SEQ ID NO: 38413 - DNA, 15 bp, Homo sapiens
caccctacaaatttt

SEQ ID NO: 38414 - DNA, 15 bp, Homo sapiens
tcaccctacaaattt

SEQ ID NO: 38415 - DNA, 15 bp, Homo sapiens
ctcaccctacaaatt

SEQ ID NO: 38416 - DNA, 15 bp, Homo sapiens
actcaccctacaaat

SEQ ID NO: 38417 - DNA, 15 bp, Homo sapiens
aactcaccctacaaa

SEQ ID NO: 38418 - DNA, 15 bp, Homo sapiens
gaactcaccctacaa

SEQ ID NO: 38419 - DNA, 15 bp, Homo sapiens
agaactcaccctaca

SEQ ID NO: 38420 - DNA, 15 bp, Homo sapiens
cagaactcaccctac

SEQ ID NO: 38421 - DNA, 15 bp, Homo sapiens
tcagaactcacccta

SEQ ID NO: 38422 - DNA, 15 bp, Homo sapiens
atcagaactcaccct

SEQ ID NO: 38423 - DNA, 15 bp, Homo sapiens
aatcagaactcaccc

SEQ ID NO: 38424 - DNA, 15 bp, Homo sapiens
aaatcagaactcacc

SEQ ID NO: 38425 - DNA, 15 bp, Homo sapiens
gaaatcagaactcac

SEQ ID NO: 38426 - DNA, 15 bp, Homo sapiens
ggaaatcagaactca

SEQ ID NO: 38427 - DNA, 15 bp, Homo sapiens
gggaaatcagaactc

SEQ ID NO: 38428 - DNA, 15 bp, Homo sapiens
agggaaatcagaact

SEQ ID NO: 38429 - DNA, 15 bp, Homo sapiens
cagggaaatcagaac

SEQ ID NO: 38430 - DNA, 15 bp, Homo sapiens
ccagggaaatcagaa

SEQ ID NO: 38431 - DNA, 15 bp, Homo sapiens
tccagggaaatcaga

SEQ ID NO: 38432 - DNA, 15 bp, Homo sapiens
atccagggaaatcag

SEQ ID NO: 38433 - DNA, 15 bp, Homo sapiens
aatccagggaaatca

SEQ ID NO: 38434 - DNA, 15 bp, Homo sapiens
caatccagggaaatc

SEQ ID NO: 38435 - DNA, 15 bp, Homo sapiens
tcaatccagggaaat

SEQ ID NO: 38436 - DNA, 15 bp, Homo sapiens
ctcaatccagggaaa

SEQ ID NO: 38437 - DNA, 15 bp, Homo sapiens
cctcaatccagggaa

SEQ ID NO: 38438 - DNA, 15 bp, Homo sapiens
gcctcaatccaggga

SEQ ID NO: 38439 - DNA, 15 bp, Homo sapiens
tgcctcaatccaggg

SEQ ID NO: 38440 - DNA, 15 bp, Homo sapiens
gtgcctcaatccagg

SEQ ID NO: 38441 - DNA, 15 bp, Homo sapiens
tgtgcctcaatccag

SEQ ID NO: 38442 - DNA, 15 bp, Homo sapiens
atgtgcctcaatcca

SEQ ID NO: 38443 - DNA, 15 bp, Homo sapiens
catgtgcctcaatcc

SEQ ID NO: 38444 - DNA, 15 bp, Homo sapiens
gcatgtgcctcaatc

SEQ ID NO: 38445 - DNA, 15 bp, Homo sapiens
ggcatgtgcctcaat

SEQ ID NO: 38446 - DNA, 15 bp, Homo sapiens
aggcatgtgcctcaa

SEQ ID NO: 38447 - DNA, 15 bp, Homo sapiens
taggcatgtgcctca

SEQ ID NO: 38448 - DNA, 15 bp, Homo sapiens
ataggcatgtgcctc

SEQ ID NO: 38449 - DNA, 15 bp, Homo sapiens
aataggcatgtgcct

SEQ ID NO: 38450 - DNA, 15 bp, Homo sapiens
taataggcatgtgcc

SEQ ID NO: 38451 - DNA, 15 bp, Homo sapiens
ataataggcatgtgc

SEQ ID NO: 38452 - DNA, 15 bp, Homo sapiens
aataataggcatgtg

SEQ ID NO: 38453 - DNA, 15 bp, Homo sapiens
gaataataggcatgt

SEQ ID NO: 38454 - DNA, 15 bp, Homo sapiens
ggaataataggcatg

SEQ ID NO: 38455 - DNA, 15 bp, Homo sapiens
aggaataataggcat

SEQ ID NO: 38456 - DNA, 15 bp, Homo sapiens
caggaataataggca

SEQ ID NO: 38457 - DNA, 15 bp, Homo sapiens
tcaggaataataggc

SEQ ID NO: 38458 - DNA, 15 bp, Homo sapiens
ttcaggaataatagg

SEQ ID NO: 38459 - DNA, 15 bp, Homo sapiens
gttcaggaataatag

SEQ ID NO: 38460 - DNA, 15 bp, Homo sapiens
ggttcaggaataata

SEQ ID NO: 38461 - DNA, 15 bp, Homo sapiens
tggttcaggaataat

SEQ ID NO: 38462 - DNA, 15 bp, Homo sapiens
ttggttcaggaataa

SEQ ID NO: 38463 - DNA, 15 bp, Homo sapiens
tttggttcaggaata

SEQ ID NO: 38464 - DNA, 15 bp, Homo sapiens
atttggttcaggaat

SEQ ID NO: 38465 - DNA, 15 bp, Homo sapiens
tatttggttcaggaa

SEQ ID NO: 38466 - DNA, 15 bp, Homo sapiens
atatttggttcagga

SEQ ID NO: 38467 - DNA, 15 bp, Homo sapiens
aatatttggttcagg

SEQ ID NO: 38468 - DNA, 15 bp, Homo sapiens
gaatatttggttcag

SEQ ID NO: 38469 - DNA, 15 bp, Homo sapiens
agaatatttggttca

SEQ ID NO: 38470 - DNA, 15 bp, Homo sapiens
cagaatatttggttc

SEQ ID NO: 38471 - DNA, 15 bp, Homo sapiens
acagaatatttggtt

SEQ ID NO: 38472 - DNA, 15 bp, Homo sapiens
gacagaatatttggt

SEQ ID NO: 38473 - DNA, 15 bp, Homo sapiens
ggacagaatatttgg

SEQ ID NO: 38474 - DNA, 15 bp, Homo sapiens
tggacagaatatttg

SEQ ID NO: 38475 - DNA, 15 bp, Homo sapiens
ctggacagaatattt

SEQ ID NO: 38476 - DNA, 15 bp, Homo sapiens
cctggacagaatatt

SEQ ID NO: 38477 - DNA, 15 bp, Homo sapiens
ccctggacagaatat

SEQ ID NO: 38478 - DNA, 15 bp, Homo sapiens
tccctggacagaata

SEQ ID NO: 38479 - DNA, 15 bp, Homo sapiens
ttccctggacagaat

SEQ ID NO: 38480 - DNA, 15 bp, Homo sapiens
attccctggacagaa

SEQ ID NO: 38481 - DNA, 15 bp, Homo sapiens
cattccctggacaga

SEQ ID NO: 38482 - DNA, 15 bp, Homo sapiens
ccattccctggacag

SEQ ID NO: 38483 - DNA, 15 bp, Homo sapiens
tccattccctggaca

SEQ ID NO: 38484 - DNA, 15 bp, Homo sapiens
ttccattccctggac

SEQ ID NO: 38485 - DNA, 15 bp, Homo sapiens
attccattccctgga

SEQ ID NO: 38486 - DNA, 15 bp, Homo sapiens
aattccattccctgg

SEQ ID NO: 38487 - DNA, 15 bp, Homo sapiens
gaattccattccctg

SEQ ID NO: 38488 - DNA, 15 bp, Homo sapiens
agaattccattccct

SEQ ID NO: 38489 - DNA, 15 bp, Homo sapiens
gagaattccattccc

SEQ ID NO: 38490 - DNA, 15 bp, Homo sapiens
agagaattccattcc

SEQ ID NO: 38491 - DNA, 15 bp, Homo sapiens
cagagaattccattc

SEQ ID NO: 38492 - DNA, 15 bp, Homo sapiens
ccagagaattccatt

SEQ ID NO: 38493 - DNA, 15 bp, Homo sapiens
cccagagaattccat

SEQ ID NO: 38494 - DNA, 15 bp, Homo sapiens
ccccagagaattcca

SEQ ID NO: 38495 - DNA, 15 bp, Homo sapiens
gccccagagaattcc

SEQ ID NO: 38496 - DNA, 15 bp, Homo sapiens
tgccccagagaattc

SEQ ID NO: 38497 - DNA, 15 bp, Homo sapiens
atgccccagagaatt

SEQ ID NO: 38498 - DNA, 15 bp, Homo sapiens
catgccccagagaat

SEQ ID NO: 38499 - DNA, 15 bp, Homo sapiens
acatgccccagagaa

SEQ ID NO: 38500 - DNA, 15 bp, Homo sapiens
tacatgccccagaga

SEQ ID NO: 38501 - DNA, 15 bp, Homo sapiens
atacatgccccagag

SEQ ID NO: 38502 - DNA, 15 bp, Homo sapiens
gatacatgccccaga

SEQ ID NO: 38503 - DNA, 15 bp, Homo sapiens
agatacatgccccag

SEQ ID NO: 38504 - DNA, 15 bp, Homo sapiens
tagatacatgcccca

SEQ ID NO: 38505 - DNA, 15 bp, Homo sapiens
ttagatacatgcccc

SEQ ID NO: 38506 - DNA, 15 bp, Homo sapiens
tttagatacatgccc

SEQ ID NO: 38507 - DNA, 15 bp, Homo sapiens
ctttagatacatgcc

SEQ ID NO: 38508 - DNA, 15 bp, Homo sapiens
gctttagatacatgc

SEQ ID NO: 38509 - DNA, 15 bp, Homo sapiens
agctttagatacatg

SEQ ID NO: 38510 - DNA, 15 bp, Homo sapiens
cagctttagatacat

SEQ ID NO: 38511 - DNA, 15 bp, Homo sapiens
tcagctttagataca

SEQ ID NO: 38512 - DNA, 15 bp, Homo sapiens
ttcagctttagatac

SEQ ID NO: 38513 - DNA, 15 bp, Homo sapiens
cttcagctttagata

SEQ ID NO: 38514 - DNA, 15 bp, Homo sapiens
acttcagctttagat

SEQ ID NO: 38515 - DNA, 15 bp, Homo sapiens
cacttcagctttaga

SEQ ID NO: 38516 - DNA, 15 bp, Homo sapiens
acacttcagctttag

SEQ ID NO: 38517 - DNA, 15 bp, Homo sapiens
tacacttcagcttta

SEQ ID NO: 38518 - DNA, 15 bp, Homo sapiens
ctacacttcagcttt

SEQ ID NO: 38519 - DNA, 15 bp, Homo sapiens
tctacacttcagctt

SEQ ID NO: 38520 - DNA, 15 bp, Homo sapiens
ctctacacttcagct

SEQ ID NO: 38521 - DNA, 15 bp, Homo sapiens
gctctacacttcagc

SEQ ID NO: 38522 - DNA, 15 bp, Homo sapiens
ggctctacacttcag

SEQ ID NO: 38523 - DNA, 15 bp, Homo sapiens
aggctctacacttca

SEQ ID NO: 38524 - DNA, 15 bp, Homo sapiens
caggctctacacttc

SEQ ID NO: 38525 - DNA, 15 bp, Homo sapiens
gcaggctctacactt

SEQ ID NO: 38526 - DNA, 15 bp, Homo sapiens
ggcaggctctacact

SEQ ID NO: 38527 - DNA, 15 bp, Homo sapiens
tggcaggctctacac

SEQ ID NO: 38528 - DNA, 15 bp, Homo sapiens
gtggcaggctctaca

SEQ ID NO: 38529 - DNA, 15 bp, Homo sapiens
tgtggcaggctctac

SEQ ID NO: 38530 - DNA, 15 bp, Homo sapiens
gtgtggcaggctcta

SEQ ID NO: 38531 - DNA, 15 bp, Homo sapiens
tgtgtggcaggctct

SEQ ID NO: 38532 - DNA, 15 bp, Homo sapiens
ctgtgtggcaggctc

SEQ ID NO: 38533 - DNA, 15 bp, Homo sapiens
cctgtgtggcaggct

SEQ ID NO: 38534 - DNA, 15 bp, Homo sapiens
ccctgtgtggcaggc

SEQ ID NO: 38535 - DNA, 15 bp, Homo sapiens
tccctgtgtggcagg

SEQ ID NO: 38536 - DNA, 15 bp, Homo sapiens
atccctgtgtggcag

SEQ ID NO: 38537 - DNA, 15 bp, Homo sapiens
tatccctgtgtggca

SEQ ID NO: 38538 - DNA, 15 bp, Homo sapiens
ttatccctgtgtggc

SEQ ID NO: 38539 - DNA, 15 bp, Homo sapiens
attatccctgtgtgg

SEQ ID NO: 38540 - DNA, 15 bp, Homo sapiens
tattatccctgtgtg

SEQ ID NO: 38541 - DNA, 15 bp, Homo sapiens
ttattatccctgtgt

SEQ ID NO: 38542 - DNA, 15 bp, Homo sapiens
attattatccctgtg

SEQ ID NO: 38543 - DNA, 15 bp, Homo sapiens
tattattatccctgt

SEQ ID NO: 38544 - DNA, 15 bp, Homo sapiens
ctattattatccctg

SEQ ID NO: 38545 - DNA, 15 bp, Homo sapiens
actattattatccct

SEQ ID NO: 38546 - DNA, 15 bp, Homo sapiens
aactattattatccc

SEQ ID NO: 38547 - DNA, 15 bp, Homo sapiens
aaactattattatcc

SEQ ID NO: 38548 - DNA, 15 bp, Homo sapiens
aaaactattattatc

SEQ ID NO: 38549 - DNA, 15 bp, Homo sapiens
gaaaactattattat

SEQ ID NO: 38550 - DNA, 15 bp, Homo sapiens
ggaaaactattatta

SEQ ID NO: 38551 - DNA, 15 bp, Homo sapiens
tggaaaactattatt

SEQ ID NO: 38552 - DNA, 15 bp, Homo sapiens
ttggaaaactattat

SEQ ID NO: 38553 - DNA, 15 bp, Homo sapiens
tttggaaaactatta

SEQ ID NO: 38554 - DNA, 15 bp, Homo sapiens
ctttggaaaactatt

SEQ ID NO: 38555 - DNA, 15 bp, Homo sapiens
tctttggaaaactat

SEQ ID NO: 38556 - DNA, 15 bp, Homo sapiens
ttctttggaaaacta

SEQ ID NO: 38557 - DNA, 15 bp, Homo sapiens
tttctttggaaaact

SEQ ID NO: 38558 - DNA, 15 bp, Homo sapiens
ttttctttggaaaac

SEQ ID NO: 38559 - DNA, 15 bp, Homo sapiens
tttttctttggaaaa

SEQ ID NO: 38560 - DNA, 15 bp, Homo sapiens
atttttctttggaaa

SEQ ID NO: 38561 - DNA, 15 bp, Homo sapiens
gatttttctttggaa

SEQ ID NO: 38562 - DNA, 15 bp, Homo sapiens
tgatttttctttgga

SEQ ID NO: 38563 - DNA, 15 bp, Homo sapiens
ttgatttttctttgg

SEQ ID NO: 38564 - DNA, 15 bp, Homo sapiens
cttgatttttctttg

SEQ ID NO: 38565 - DNA, 15 bp, Homo sapiens
ccttgatttttcttt

SEQ ID NO: 38566 - DNA, 15 bp, Homo sapiens
tccttgatttttctt

SEQ ID NO: 38567 - DNA, 15 bp, Homo sapiens
ctccttgatttttct

SEQ ID NO: 38568 - DNA, 15 bp, Homo sapiens
cctccttgatttttc

SEQ ID NO: 38569 - DNA, 15 bp, Homo sapiens
ccctccttgattttt

SEQ ID NO: 38570 - DNA, 15 bp, Homo sapiens
cccctccttgatttt

SEQ ID NO: 38571 - DNA, 15 bp, Homo sapiens
tcccctccttgattt

SEQ ID NO: 38572 - DNA, 15 bp, Homo sapiens
ttcccctccttgatt

SEQ ID NO: 38573 - DNA, 15 bp, Homo sapiens
tttcccctccttgat

SEQ ID NO: 38574 - DNA, 15 bp, Homo sapiens
ctttcccctccttga

SEQ ID NO: 38575 - DNA, 15 bp, Homo sapiens
tctttcccctccttg

SEQ ID NO: 38576 - DNA, 15 bp, Homo sapiens
ttctttcccctcctt

SEQ ID NO: 38577 - DNA, 15 bp, Homo sapiens
attctttcccctcct

SEQ ID NO: 38578 - DNA, 15 bp, Homo sapiens
cattctttcccctcc

SEQ ID NO: 38579 - DNA, 15 bp, Homo sapiens
acattctttcccctc

SEQ ID NO: 38580 - DNA, 15 bp, Homo sapiens
aacattctttcccct

SEQ ID NO: 38581 - DNA, 15 bp, Homo sapiens
caacattctttcccc

SEQ ID NO: 38582 - DNA, 15 bp, Homo sapiens
ccaacattctttccc

SEQ ID NO: 38583 - DNA, 15 bp, Homo sapiens
tccaacattctttcc

SEQ ID NO: 38584 - DNA, 15 bp, Homo sapiens
ttccaacattctttc

SEQ ID NO: 38585 - DNA, 15 bp, Homo sapiens
tttccaacattcttt

SEQ ID NO: 38586 - DNA, 15 bp, Homo sapiens
ctttccaacattctt

SEQ ID NO: 38587 - DNA, 15 bp, Homo sapiens
tctttccaacattct

SEQ ID NO: 38588 - DNA, 15 bp, Homo sapiens
ctctttccaacattc

SEQ ID NO: 38589 - DNA, 15 bp, Homo sapiens
tctctttccaacatt

SEQ ID NO: 38590 - DNA, 15 bp, Homo sapiens
ttctctttccaacat

SEQ ID NO: 38591 - DNA, 15 bp, Homo sapiens
tttctctttccaaca

SEQ ID NO: 38592 - DNA, 15 bp, Homo sapiens
ttttctctttccaac

SEQ ID NO: 38593 - DNA, 15 bp, Homo sapiens
tttttctctttccaa

SEQ ID NO: 38594 - DNA, 15 bp, Homo sapiens
ttttttctctttcca

SEQ ID NO: 38595 - DNA, 15 bp, Homo sapiens
tttttttctctttcc

SEQ ID NO: 38596 - DNA, 15 bp, Homo sapiens
atttttttctctttc

SEQ ID NO: 38597 - DNA, 15 bp, Homo sapiens
tatttttttctcttt

SEQ ID NO: 38598 - DNA, 15 bp, Homo sapiens
atatttttttctctt

SEQ ID NO: 38599 - DNA, 15 bp, Homo sapiens
gatatttttttctct

SEQ ID NO: 38600 - DNA, 15 bp, Homo sapiens
tgatatttttttctc

SEQ ID NO: 38601 - DNA, 15 bp, Homo sapiens
ctgatatttttttct

SEQ ID NO: 38602 - DNA, 15 bp, Homo sapiens
actgatatttttttc

SEQ ID NO: 38603 - DNA, 15 bp, Homo sapiens
aactgatattttttt

SEQ ID NO: 38604 - DNA, 15 bp, Homo sapiens
caactgatatttttt

SEQ ID NO: 38605 - DNA, 15 bp, Homo sapiens
acaactgatattttt

SEQ ID NO: 38606 - DNA, 15 bp, Homo sapiens
gacaactgatatttt

SEQ ID NO: 38607 - DNA, 15 bp, Homo sapiens
agacaactgatattt

SEQ ID NO: 38608 - DNA, 15 bp, Homo sapiens
cagacaactgatatt

SEQ ID NO: 38609 - DNA, 15 bp, Homo sapiens
gcagacaactgatat

SEQ ID NO: 38610 - DNA, 15 bp, Homo sapiens
agcagacaactgata

SEQ ID NO: 38611 - DNA, 15 bp, Homo sapiens
aagcagacaactgat

SEQ ID NO: 38612 - DNA, 15 bp, Homo sapiens
gaagcagacaactga

SEQ ID NO: 38613 - DNA, 15 bp, Homo sapiens
tgaagcagacaactg

SEQ ID NO: 38614 - DNA, 15 bp, Homo sapiens
gtgaagcagacaact

SEQ ID NO: 38615 - DNA, 15 bp, Homo sapiens
tgtgaagcagacaac

SEQ ID NO: 38616 - DNA, 15 bp, Homo sapiens
atgtgaagcagacaa

SEQ ID NO: 38617 - DNA, 15 bp, Homo sapiens
aatgtgaagcagaca

SEQ ID NO: 38618 - DNA, 15 bp, Homo sapiens
aaatgtgaagcagac

SEQ ID NO: 38619 - DNA, 15 bp, Homo sapiens
caaatgtgaagcaga

SEQ ID NO: 38620 - DNA, 15 bp, Homo sapiens
acaaatgtgaagcag

SEQ ID NO: 38621 - DNA, 15 bp, Homo sapiens
aacaaatgtgaagca

SEQ ID NO: 38622 - DNA, 15 bp, Homo sapiens
gaacaaatgtgaagc

SEQ ID NO: 38623 - DNA, 15 bp, Homo sapiens
agaacaaatgtgaag

SEQ ID NO: 38624 - DNA, 15 bp, Homo sapiens
gagaacaaatgtgaa

SEQ ID NO: 38625 - DNA, 15 bp, Homo sapiens
tgagaacaaatgtga

SEQ ID NO: 38626 - DNA, 15 bp, Homo sapiens
ttgagaacaaatgtg

SEQ ID NO: 38627 - DNA, 15 bp, Homo sapiens
attgagaacaaatgt

SEQ ID NO: 38628 - DNA, 15 bp, Homo sapiens
tattgagaacaaatg

SEQ ID NO: 38629 - DNA, 15 bp, Homo sapiens
ttattgagaacaaat

SEQ ID NO: 38630 - DNA, 15 bp, Homo sapiens
attattgagaacaaa

SEQ ID NO: 38631 - DNA, 15 bp, Homo sapiens
aattattgagaacaa

SEQ ID NO: 38632 - DNA, 15 bp, Homo sapiens
taattattgagaaca

SEQ ID NO: 38633 - DNA, 15 bp, Homo sapiens
ctaattattgagaac

SEQ ID NO: 38634 - DNA, 15 bp, Homo sapiens
actaattattgagaa

SEQ ID NO: 38635 - DNA, 15 bp, Homo sapiens
aactaattattgaga

SEQ ID NO: 38636 - DNA, 15 bp, Homo sapiens
aaactaattattgag

SEQ ID NO: 38637 - DNA, 15 bp, Homo sapiens
gaaactaattattga

SEQ ID NO: 38638 - DNA, 15 bp, Homo sapiens
tgaaactaattattg

SEQ ID NO: 38639 - DNA, 15 bp, Homo sapiens
atgaaactaattatt

SEQ ID NO: 38640 - DNA, 15 bp, Homo sapiens
tatgaaactaattat

SEQ ID NO: 38641 - DNA, 15 bp, Homo sapiens
ctatgaaactaatta

SEQ ID NO: 38642 - DNA, 15 bp, Homo sapiens
tctatgaaactaatt

SEQ ID NO: 38643 - DNA, 15 bp, Homo sapiens
ttctatgaaactaat

SEQ ID NO: 38644 - DNA, 15 bp, Homo sapiens
cttctatgaaactaa

SEQ ID NO: 38645 - DNA, 15 bp, Homo sapiens
acttctatgaaacta

SEQ ID NO: 38646 - DNA, 15 bp, Homo sapiens
cacttctatgaaact

SEQ ID NO: 38647 - DNA, 15 bp, Homo sapiens
tcacttctatgaaac

SEQ ID NO: 38648 - DNA, 15 bp, Homo sapiens
ttcacttctatgaaa

SEQ ID NO: 38649 - DNA, 15 bp, Homo sapiens
tttcacttctatgaa

SEQ ID NO: 38650 - DNA, 15 bp, Homo sapiens
atttcacttctatga

SEQ ID NO: 38651 - DNA, 15 bp, Homo sapiens
tatttcacttctatg

SEQ ID NO: 38652 - DNA, 15 bp, Homo sapiens
gtatttcacttctat

SEQ ID NO: 38653 - DNA, 15 bp, Homo sapiens
agtatttcacttcta

SEQ ID NO: 38654 - DNA, 15 bp, Homo sapiens
cagtatttcacttct

SEQ ID NO: 38655 - DNA, 15 bp, Homo sapiens
acagtatttcacttc

SEQ ID NO: 38656 - DNA, 15 bp, Homo sapiens
cacagtatttcactt

SEQ ID NO: 38657 - DNA, 15 bp, Homo sapiens
acacagtatttcact

SEQ ID NO: 38658 - DNA, 15 bp, Homo sapiens
tacacagtatttcac

SEQ ID NO: 38659 - DNA, 15 bp, Homo sapiens
ttacacagtatttca

SEQ ID NO: 38660 - DNA, 15 bp, Homo sapiens
gttacacagtatttc

SEQ ID NO: 38661 - DNA, 15 bp, Homo sapiens
tgttacacagtattt

SEQ ID NO: 38662 - DNA, 15 bp, Homo sapiens
gtgttacacagtatt

SEQ ID NO: 38663 - DNA, 15 bp, Homo sapiens
ggtgttacacagtat

SEQ ID NO: 38664 - DNA, 15 bp, Homo sapiens
gggtgttacacagta

SEQ ID NO: 38665 - DNA, 15 bp, Homo sapiens
agggtgttacacagt

SEQ ID NO: 38666 - DNA, 15 bp, Homo sapiens
tagggtgttacacag

SEQ ID NO: 38667 - DNA, 15 bp, Homo sapiens
ttagggtgttacaca

SEQ ID NO: 38668 - DNA, 15 bp, Homo sapiens
tttagggtgttacac

SEQ ID NO: 38669 - DNA, 15 bp, Homo sapiens
gtttagggtgttaca

SEQ ID NO: 38670 - DNA, 15 bp, Homo sapiens
agtttagggtgttac

SEQ ID NO: 38671 - DNA, 15 bp, Homo sapiens
aagtttagggtgtta

SEQ ID NO: 38672 - DNA, 15 bp, Homo sapiens
aaagtttagggtgtt

SEQ ID NO: 38673 - DNA, 15 bp, Homo sapiens
taaagtttagggtgt

SEQ ID NO: 38674 - DNA, 15 bp, Homo sapiens
ctaaagtttagggtg

SEQ ID NO: 38675 - DNA, 15 bp, Homo sapiens
tctaaagtttagggt

SEQ ID NO: 38676 - DNA, 15 bp, Homo sapiens
ctctaaagtttaggg

SEQ ID NO: 38677 - DNA, 15 bp, Homo sapiens
tctctaaagtttagg

SEQ ID NO: 38678 - DNA, 15 bp, Homo sapiens
atctctaaagtttag

SEQ ID NO: 38679 - DNA, 15 bp, Homo sapiens
aatctctaaagttta

SEQ ID NO: 38680 - DNA, 15 bp, Homo sapiens
gaatctctaaagttt

SEQ ID NO: 38681 - DNA, 15 bp, Homo sapiens
agaatctctaaagtt

SEQ ID NO: 38682 - DNA, 15 bp, Homo sapiens
aagaatctctaaagt

SEQ ID NO: 38683 - DNA, 15 bp, Homo sapiens
gaagaatctctaaag

SEQ ID NO: 38684 - DNA, 15 bp, Homo sapiens
cgaagaatctctaaa

SEQ ID NO: 38685 - DNA, 15 bp, Homo sapiens
acgaagaatctctaa

SEQ ID NO: 38686 - DNA, 15 bp, Homo sapiens
tacgaagaatctcta

SEQ ID NO: 38687 - DNA, 15 bp, Homo sapiens
ctacgaagaatctct

SEQ ID NO: 38688 - DNA, 15 bp, Homo sapiens
tctacgaagaatctc

SEQ ID NO: 38689 - DNA, 15 bp, Homo sapiens
gtctacgaagaatct

SEQ ID NO: 38690 - DNA, 15 bp, Homo sapiens
tgtctacgaagaatc

SEQ ID NO: 38691 - DNA, 15 bp, Homo sapiens
ctgtctacgaagaat

SEQ ID NO: 38692 - DNA, 15 bp, Homo sapiens
cctgtctacgaagaa

SEQ ID NO: 38693 - DNA, 15 bp, Homo sapiens
tcctgtctacgaaga

SEQ ID NO: 38694 - DNA, 15 bp, Homo sapiens
ttcctgtctacgaag

SEQ ID NO: 38695 - DNA, 15 bp, Homo sapiens
tttcctgtctacgaa

SEQ ID NO: 38696 - DNA, 15 bp, Homo sapiens
ttttcctgtctacga

SEQ ID NO: 38697 - DNA, 15 bp, Homo sapiens
tttttcctgtctacg

SEQ ID NO: 38698 - DNA, 15 bp, Homo sapiens
atttttcctgtctac

SEQ ID NO: 38699 - DNA, 15 bp, Homo sapiens
tatttttcctgtcta

SEQ ID NO: 38700 - DNA, 15 bp, Homo sapiens
ttatttttcctgtct

SEQ ID NO: 38701 - DNA, 15 bp, Homo sapiens
cttatttttcctgtc

SEQ ID NO: 38702 - DNA, 15 bp, Homo sapiens
tcttatttttcctgt

SEQ ID NO: 38703 - DNA, 15 bp, Homo sapiens
ttcttatttttcctg

SEQ ID NO: 38704 - DNA, 15 bp, Homo sapiens
gttcttatttttcct

SEQ ID NO: 38705 - DNA, 15 bp, Homo sapiens
agttcttatttttcc

SEQ ID NO: 38706 - DNA, 15 bp, Homo sapiens
gagttcttatttttc

SEQ ID NO: 38707 - DNA, 15 bp, Homo sapiens
tgagttcttattttt

SEQ ID NO: 38708 - DNA, 15 bp, Homo sapiens
ttgagttcttatttt

SEQ ID NO: 38709 - DNA, 15 bp, Homo sapiens
attgagttcttattt

SEQ ID NO: 38710 - DNA, 15 bp, Homo sapiens
cattgagttcttatt

SEQ ID NO: 38711 - DNA, 15 bp, Homo sapiens
tcattgagttcttat

SEQ ID NO: 38712 - DNA, 15 bp, Homo sapiens
ttcattgagttctta

SEQ ID NO: 38713 - DNA, 15 bp, Homo sapiens
cttcattgagttctt

SEQ ID NO: 38714 - DNA, 15 bp, Homo sapiens
acttcattgagttct

SEQ ID NO: 38715 - DNA, 15 bp, Homo sapiens
aacttcattgagttc

SEQ ID NO: 38716 - DNA, 15 bp, Homo sapiens
caacttcattgagtt

SEQ ID NO: 38717 - DNA, 15 bp, Homo sapiens
acaacttcattgagt

SEQ ID NO: 38718 - DNA, 15 bp, Homo sapiens
cacaacttcattgag

SEQ ID NO: 38719 - DNA, 15 bp, Homo sapiens
tcacaacttcattga

SEQ ID NO: 38720 - DNA, 15 bp, Homo sapiens
gtcacaacttcattg

SEQ ID NO: 38721 - DNA, 15 bp, Homo sapiens
agtcacaacttcatt

SEQ ID NO: 38722 - DNA, 15 bp, Homo sapiens
aagtcacaacttcat

SEQ ID NO: 38723 - DNA, 15 bp, Homo sapiens
gaagtcacaacttca

SEQ ID NO: 38724 - DNA, 15 bp, Homo sapiens
tgaagtcacaacttc

SEQ ID NO: 38725 - DNA, 15 bp, Homo sapiens
atgaagtcacaactt

SEQ ID NO: 38726 - DNA, 15 bp, Homo sapiens
aatgaagtcacaact

SEQ ID NO: 38727 - DNA, 15 bp, Homo sapiens
gaatgaagtcacaac

SEQ ID NO: 38728 - DNA, 15 bp, Homo sapiens
tgaatgaagtcacaa

SEQ ID NO: 38729 - DNA, 15 bp, Homo sapiens
ttgaatgaagtcaca

SEQ ID NO: 38730 - DNA, 15 bp, Homo sapiens
tttgaatgaagtcac

SEQ ID NO: 38731 - DNA, 15 bp, Homo sapiens
atttgaatgaagtca

SEQ ID NO: 38732 - DNA, 15 bp, Homo sapiens
gatttgaatgaagtc

SEQ ID NO: 38733 - DNA, 15 bp, Homo sapiens
tgatttgaatgaagt

SEQ ID NO: 38734 - DNA, 15 bp, Homo sapiens
gtgatttgaatgaag

SEQ ID NO: 38735 - DNA, 15 bp, Homo sapiens
cgtgatttgaatgaa

SEQ ID NO: 38736 - DNA, 15 bp, Homo sapiens
acgtgatttgaatga

SEQ ID NO: 38737 - DNA, 15 bp, Homo sapiens
tacgtgatttgaatg

SEQ ID NO: 38738 - DNA, 15 bp, Homo sapiens
ctacgtgatttgaat

SEQ ID NO: 38739 - DNA, 15 bp, Homo sapiens
actacgtgatttgaa

SEQ ID NO: 38740 - DNA, 15 bp, Homo sapiens
aactacgtgatttga

SEQ ID NO: 38741 - DNA, 15 bp, Homo sapiens
aaactacgtgatttg

SEQ ID NO: 38742 - DNA, 15 bp, Homo sapiens
taaactacgtgattt

SEQ ID NO: 38743 - DNA, 15 bp, Homo sapiens
ataaactacgtgatt

SEQ ID NO: 38744 - DNA, 15 bp, Homo sapiens
tataaactacgtgat

SEQ ID NO: 38745 - DNA, 15 bp, Homo sapiens
atataaactacgtga

SEQ ID NO: 38746 - DNA, 15 bp, Homo sapiens
tatataaactacgtg

SEQ ID NO: 38747 - DNA, 15 bp, Homo sapiens
gtatataaactacgt

SEQ ID NO: 38748 - DNA, 15 bp, Homo sapiens
tgtatataaactacg

SEQ ID NO: 38749 - DNA, 15 bp, Homo sapiens
atgtatataaactac

SEQ ID NO: 38750 - DNA, 15 bp, Homo sapiens
catgtatataaacta

SEQ ID NO: 38751 - DNA, 15 bp, Homo sapiens
gcatgtatataaact

SEQ ID NO: 38752 - DNA, 15 bp, Homo sapiens
agcatgtatataaac

SEQ ID NO: 38753 - DNA, 15 bp, Homo sapiens
tagcatgtatataaa

SEQ ID NO: 38754 - DNA, 15 bp, Homo sapiens
atagcatgtatataa

SEQ ID NO: 38755 - DNA, 15 bp, Homo sapiens
aatagcatgtatata

SEQ ID NO: 38756 - DNA, 15 bp, Homo sapiens
taatagcatgtatat

SEQ ID NO: 38757 - DNA, 15 bp, Homo sapiens
ctaatagcatgtata

SEQ ID NO: 38758 - DNA, 15 bp, Homo sapiens
actaatagcatgtat

SEQ ID NO: 38759 - DNA, 15 bp, Homo sapiens
tactaatagcatgta

SEQ ID NO: 38760 - DNA, 15 bp, Homo sapiens
ttactaatagcatgt

SEQ ID NO: 38761 - DNA, 15 bp, Homo sapiens
tttactaatagcatg

SEQ ID NO: 38762 - DNA, 15 bp, Homo sapiens
ttttactaatagcat

SEQ ID NO: 38763 - DNA, 15 bp, Homo sapiens
gttttactaatagca

SEQ ID NO: 38764 - DNA, 15 bp, Homo sapiens
ggttttactaatagc

SEQ ID NO: 38765 - DNA, 15 bp, Homo sapiens
gggttttactaatag

SEQ ID NO: 38766 - DNA, 15 bp, Homo sapiens
tgggttttactaata

SEQ ID NO: 38767 - DNA, 15 bp, Homo sapiens
ctgggttttactaat

SEQ ID NO: 38768 - DNA, 15 bp, Homo sapiens
cctgggttttactaa

SEQ ID NO: 38769 - DNA, 15 bp, Homo sapiens
tcctgggttttacta

SEQ ID NO: 38770 - DNA, 15 bp, Homo sapiens
gtcctgggttttact

SEQ ID NO: 38771 - DNA, 15 bp, Homo sapiens
tgtcctgggttttac

SEQ ID NO: 38772 - DNA, 15 bp, Homo sapiens
ctgtcctgggtttta

SEQ ID NO: 38773 - DNA, 15 bp, Homo sapiens
gctgtcctgggtttt

SEQ ID NO: 38774 - DNA, 15 bp, Homo sapiens
agctgtcctgggttt

SEQ ID NO: 38775 - DNA, 15 bp, Homo sapiens
cagctgtcctgggtt

SEQ ID NO: 38776 - DNA, 15 bp, Homo sapiens
tcagctgtcctgggt

SEQ ID NO: 38777 - DNA, 15 bp, Homo sapiens
ctcagctgtcctggg

SEQ ID NO: 38778 - DNA, 15 bp, Homo sapiens
actcagctgtcctgg

SEQ ID NO: 38779 - DNA, 15 bp, Homo sapiens
tactcagctgtcctg

SEQ ID NO: 38780 - DNA, 15 bp, Homo sapiens
gtactcagctgtcct

SEQ ID NO: 38781 - DNA, 15 bp, Homo sapiens
tgtactcagctgtcc

SEQ ID NO: 38782 - DNA, 15 bp, Homo sapiens
ttgtactcagctgtc

SEQ ID NO: 38783 - DNA, 15 bp, Homo sapiens
cttgtactcagctgt

SEQ ID NO: 38784 - DNA, 15 bp, Homo sapiens
acttgtactcagctg

SEQ ID NO: 38785 - DNA, 15 bp, Homo sapiens
aacttgtactcagct

SEQ ID NO: 38786 - DNA, 15 bp, Homo sapiens
aaacttgtactcagc

SEQ ID NO: 38787 - DNA, 15 bp, Homo sapiens
aaaacttgtactcag

SEQ ID NO: 38788 - DNA, 15 bp, Homo sapiens
taaaacttgtactca

SEQ ID NO: 38789 - DNA, 15 bp, Homo sapiens
gtaaaacttgtactc

SEQ ID NO: 38790 - DNA, 15 bp, Homo sapiens
ggtaaaacttgtact

SEQ ID NO: 38791 - DNA, 15 bp, Homo sapiens
gggtaaaacttgtac

SEQ ID NO: 38792 - DNA, 15 bp, Homo sapiens
agggtaaaacttgta

SEQ ID NO: 38793 - DNA, 15 bp, Homo sapiens
aagggtaaaacttgt

SEQ ID NO: 38794 - DNA, 15 bp, Homo sapiens
taagggtaaaacttg

SEQ ID NO: 38795 - DNA, 15 bp, Homo sapiens
ataagggtaaaactt

SEQ ID NO: 38796 - DNA, 15 bp, Homo sapiens
tataagggtaaaact

SEQ ID NO: 38797 - DNA, 15 bp, Homo sapiens
atataagggtaaaac

SEQ ID NO: 38798 - DNA, 15 bp, Homo sapiens
aatataagggtaaaa

SEQ ID NO: 38799 - DNA, 15 bp, Homo sapiens
gaatataagggtaaa

SEQ ID NO: 38800 - DNA, 15 bp, Homo sapiens
tgaatataagggtaa

SEQ ID NO: 38801 - DNA, 15 bp, Homo sapiens
gtgaatataagggta

SEQ ID NO: 38802 - DNA, 15 bp, Homo sapiens
tgtgaatataagggt

SEQ ID NO: 38803 - DNA, 15 bp, Homo sapiens
atgtgaatataaggg

SEQ ID NO: 38804 - DNA, 15 bp, Homo sapiens
aatgtgaatataagg

SEQ ID NO: 38805 - DNA, 15 bp, Homo sapiens
caatgtgaatataag

SEQ ID NO: 38806 - DNA, 15 bp, Homo sapiens
tcaatgtgaatataa

SEQ ID NO: 38807 - DNA, 15 bp, Homo sapiens
ctcaatgtgaatata

SEQ ID NO: 38808 - DNA, 15 bp, Homo sapiens
cctcaatgtgaatat

SEQ ID NO: 38809 - DNA, 15 bp, Homo sapiens
acctcaatgtgaata

SEQ ID NO: 38810 - DNA, 15 bp, Homo sapiens
gacctcaatgtgaat

SEQ ID NO: 38811 - DNA, 15 bp, Homo sapiens
ggacctcaatgtgaa

SEQ ID NO: 38812 - DNA, 15 bp, Homo sapiens
tggacctcaatgtga

SEQ ID NO: 38813 - DNA, 15 bp, Homo sapiens
ctggacctcaatgtg

SEQ ID NO: 38814 - DNA, 15 bp, Homo sapiens
tctggacctcaatgt

SEQ ID NO: 38815 - DNA, 15 bp, Homo sapiens
atctggacctcaatg

SEQ ID NO: 38816 - DNA, 15 bp, Homo sapiens
gatctggacctcaat

SEQ ID NO: 38817 - DNA, 15 bp, Homo sapiens
ggatctggacctcaa

SEQ ID NO: 38818 - DNA, 15 bp, Homo sapiens
aggatctggacctca

SEQ ID NO: 38819 - DNA, 15 bp, Homo sapiens
caggatctggacctc

SEQ ID NO: 38820 - DNA, 15 bp, Homo sapiens
ccaggatctggacct

SEQ ID NO: 38821 - DNA, 15 bp, Homo sapiens
accaggatctggacc

SEQ ID NO: 38822 - DNA, 15 bp, Homo sapiens
aaccaggatctggac

SEQ ID NO: 38823 - DNA, 15 bp, Homo sapiens
aaaccaggatctgga

SEQ ID NO: 38824 - DNA, 15 bp, Homo sapiens
aaaaccaggatctgg

SEQ ID NO: 38825 - DNA, 15 bp, Homo sapiens
caaaaccaggatctg

SEQ ID NO: 38826 - DNA, 15 bp, Homo sapiens
tcaaaaccaggatct

SEQ ID NO: 38827 - DNA, 15 bp, Homo sapiens
ttcaaaaccaggatc

SEQ ID NO: 38828 - DNA, 15 bp, Homo sapiens
attcaaaaccaggat

SEQ ID NO: 38829 - DNA, 15 bp, Homo sapiens
cattcaaaaccagga

SEQ ID NO: 38830 - DNA, 15 bp, Homo sapiens
tcattcaaaaccagg

SEQ ID NO: 38831 - DNA, 15 bp, Homo sapiens
ctcattcaaaaccag

SEQ ID NO: 38832 - DNA, 15 bp, Homo sapiens
tctcattcaaaacca

SEQ ID NO: 38833 - DNA, 15 bp, Homo sapiens
atctcattcaaaacc

SEQ ID NO: 38834 - DNA, 15 bp, Homo sapiens
tatctcattcaaaac

SEQ ID NO: 38835 - DNA, 15 bp, Homo sapiens
ttatctcattcaaaa

SEQ ID NO: 38836 - DNA, 15 bp, Homo sapiens
attatctcattcaaa

SEQ ID NO: 38837 - DNA, 15 bp, Homo sapiens
aattatctcattcaa

SEQ ID NO: 38838 - DNA, 15 bp, Homo sapiens
taattatctcattca

SEQ ID NO: 38839 - DNA, 15 bp, Homo sapiens
gtaattatctcattc

SEQ ID NO: 38840 - DNA, 15 bp, Homo sapiens
cgtaattatctcatt

SEQ ID NO: 38841 - DNA, 15 bp, Homo sapiens
acgtaattatctcat

SEQ ID NO: 38842 - DNA, 15 bp, Homo sapiens
cacgtaattatctca

SEQ ID NO: 38843 - DNA, 15 bp, Homo sapiens
gcacgtaattatctc

SEQ ID NO: 38844 - DNA, 15 bp, Homo sapiens
tgcacgtaattatct

SEQ ID NO: 38845 - DNA, 15 bp, Homo sapiens
ctgcacgtaattatc

SEQ ID NO: 38846 - DNA, 15 bp, Homo sapiens
actgcacgtaattat

SEQ ID NO: 38847 - DNA, 15 bp, Homo sapiens
gactgcacgtaatta

SEQ ID NO: 38848 - DNA, 15 bp, Homo sapiens
cgactgcacgtaatt

SEQ ID NO: 38849 - DNA, 15 bp, Homo sapiens
ccgactgcacgtaat

SEQ ID NO: 38850 - DNA, 15 bp, Homo sapiens
tccgactgcacgtaa

SEQ ID NO: 38851 - DNA, 15 bp, Homo sapiens
gtccgactgcacgta

SEQ ID NO: 38852 - DNA, 15 bp, Homo sapiens
agtccgactgcacgt

SEQ ID NO: 38853 - DNA, 15 bp, Homo sapiens
cagtccgactgcacg

SEQ ID NO: 38854 - DNA, 15 bp, Homo sapiens
acagtccgactgcac

SEQ ID NO: 38855 - DNA, 15 bp, Homo sapiens
aacagtccgactgca

SEQ ID NO: 38856 - DNA, 15 bp, Homo sapiens
aaacagtccgactgc

SEQ ID NO: 38857 - DNA, 15 bp, Homo sapiens
aaaacagtccgactg

SEQ ID NO: 38858 - DNA, 15 bp, Homo sapiens
gaaaacagtccgact

SEQ ID NO: 38859 - DNA, 15 bp, Homo sapiens
agaaaacagtccgac

SEQ ID NO: 38860 - DNA, 15 bp, Homo sapiens
cagaaaacagtccga

SEQ ID NO: 38861 - DNA, 15 bp, Homo sapiens
tcagaaaacagtccg

SEQ ID NO: 38862 - DNA, 15 bp, Homo sapiens
atcagaaaacagtcc

SEQ ID NO: 38863 - DNA, 15 bp, Homo sapiens
gatcagaaaacagtc

SEQ ID NO: 38864 - DNA, 15 bp, Homo sapiens
ggatcagaaaacagt

SEQ ID NO: 38865 - DNA, 15 bp, Homo sapiens
aggatcagaaaacag

SEQ ID NO: 38866 - DNA, 15 bp, Homo sapiens
taggatcagaaaaca

SEQ ID NO: 38867 - DNA, 15 bp, Homo sapiens
ttaggatcagaaaac

SEQ ID NO: 38868 - DNA, 15 bp, Homo sapiens
tttaggatcagaaaa

SEQ ID NO: 38869 - DNA, 15 bp, Homo sapiens
ttttaggatcagaaa

SEQ ID NO: 38870 - DNA, 15 bp, Homo sapiens
tttttaggatcagaa

SEQ ID NO: 38871 - DNA, 15 bp, Homo sapiens
atttttaggatcaga

SEQ ID NO: 38872 - DNA, 15 bp, Homo sapiens
tatttttaggatcag

SEQ ID NO: 38873 - DNA, 15 bp, Homo sapiens
ctatttttaggatca

SEQ ID NO: 38874 - DNA, 15 bp, Homo sapiens
tctatttttaggatc

SEQ ID NO: 38875 - DNA, 15 bp, Homo sapiens
ctctatttttaggat

SEQ ID NO: 38876 - DNA, 15 bp, Homo sapiens
tctctatttttagga

SEQ ID NO: 38877 - DNA, 15 bp, Homo sapiens
gtctctatttttagg

SEQ ID NO: 38878 - DNA, 15 bp, Homo sapiens
tgtctctatttttag

SEQ ID NO: 38879 - DNA, 15 bp, Homo sapiens
ttgtctctattttta

SEQ ID NO: 38880 - DNA, 15 bp, Homo sapiens
attgtctctattttt

SEQ ID NO: 38881 - DNA, 15 bp, Homo sapiens
tattgtctctatttt

SEQ ID NO: 38882 - DNA, 15 bp, Homo sapiens
ttattgtctctattt

SEQ ID NO: 38883 - DNA, 15 bp, Homo sapiens
attattgtctctatt

SEQ ID NO: 38884 - DNA, 15 bp, Homo sapiens
tattattgtctctat

SEQ ID NO: 38885 - DNA, 15 bp, Homo sapiens
atattattgtctcta

SEQ ID NO: 38886 - DNA, 15 bp, Homo sapiens
gatattattgtctct

SEQ ID NO: 38887 - DNA, 15 bp, Homo sapiens
agatattattgtctc

SEQ ID NO: 38888 - DNA, 15 bp, Homo sapiens
tagatattattgtct

SEQ ID NO: 38889 - DNA, 15 bp, Homo sapiens
atagatattattgtc

SEQ ID NO: 38890 - DNA, 15 bp, Homo sapiens
gatagatattattgt

SEQ ID NO: 38891 - DNA, 15 bp, Homo sapiens
agatagatattattg

SEQ ID NO: 38892 - DNA, 15 bp, Homo sapiens
aagatagatattatt

SEQ ID NO: 38893 - DNA, 15 bp, Homo sapiens
caagatagatattat

SEQ ID NO: 38894 - DNA, 15 bp, Homo sapiens
acaagatagatatta

SEQ ID NO: 38895 - DNA, 15 bp, Homo sapiens
tacaagatagatatt

SEQ ID NO: 38896 - DNA, 15 bp, Homo sapiens
ttacaagatagatat

SEQ ID NO: 38897 - DNA, 15 bp, Homo sapiens
tttacaagatagata

SEQ ID NO: 38898 - DNA, 15 bp, Homo sapiens
ctttacaagatagat

SEQ ID NO: 38899 - DNA, 15 bp, Homo sapiens
actttacaagataga

SEQ ID NO: 38900 - DNA, 15 bp, Homo sapiens
aactttacaagatag

SEQ ID NO: 38901 - DNA, 15 bp, Homo sapiens
taactttacaagata

SEQ ID NO: 38902 - DNA, 15 bp, Homo sapiens
ataactttacaagat

SEQ ID NO: 38903 - DNA, 15 bp, Homo sapiens
cataactttacaaga

SEQ ID NO: 38904 - DNA, 15 bp, Homo sapiens
ccataactttacaag

SEQ ID NO: 38905 - DNA, 15 bp, Homo sapiens
accataactttacaa

SEQ ID NO: 38906 - DNA, 15 bp, Homo sapiens
taccataactttaca

SEQ ID NO: 38907 - DNA, 15 bp, Homo sapiens
ctaccataactttac

SEQ ID NO: 38908 - DNA, 15 bp, Homo sapiens
actaccataacttta

SEQ ID NO: 38909 - DNA, 15 bp, Homo sapiens
cactaccataacttt

SEQ ID NO: 38910 - DNA, 15 bp, Homo sapiens
acactaccataactt

SEQ ID NO: 38911 - DNA, 15 bp, Homo sapiens
aacactaccataact

SEQ ID NO: 38912 - DNA, 15 bp, Homo sapiens
taacactaccataac

SEQ ID NO: 38913 - DNA, 15 bp, Homo sapiens
ttaacactaccataa

SEQ ID NO: 38914 - DNA, 15 bp, Homo sapiens
tttaacactaccata

SEQ ID NO: 38915 - DNA, 15 bp, Homo sapiens
ctttaacactaccat

SEQ ID NO: 38916 - DNA, 15 bp, Homo sapiens
tctttaacactacca

SEQ ID NO: 38917 - DNA, 15 bp, Homo sapiens
atctttaacactacc

SEQ ID NO: 38918 - DNA, 15 bp, Homo sapiens
tatctttaacactac

SEQ ID NO: 38919 - DNA, 15 bp, Homo sapiens
atatctttaacacta

SEQ ID NO: 38920 - DNA, 15 bp, Homo sapiens
tatatctttaacact

SEQ ID NO: 38921 - DNA, 15 bp, Homo sapiens
atatatctttaacac

SEQ ID NO: 38922 - DNA, 15 bp, Homo sapiens
tatatatctttaaca

SEQ ID NO: 38923 - DNA, 15 bp, Homo sapiens
ttatatatctttaac

SEQ ID NO: 38924 - DNA, 15 bp, Homo sapiens
tttatatatctttaa

SEQ ID NO: 38925 - DNA, 15 bp, Homo sapiens
ttttatatatcttta

SEQ ID NO: 38926 - DNA, 15 bp, Homo sapiens
attttatatatcttt

SEQ ID NO: 38927 - DNA, 15 bp, Homo sapiens
cattttatatatctt

SEQ ID NO: 38928 - DNA, 15 bp, Homo sapiens
acattttatatatct

SEQ ID NO: 38929 - DNA, 15 bp, Homo sapiens
aacattttatatatc

SEQ ID NO: 38930 - DNA, 15 bp, Homo sapiens
caacattttatatat

SEQ ID NO: 38931 - DNA, 15 bp, Homo sapiens
ccaacattttatata

SEQ ID NO: 38932 - DNA, 15 bp, Homo sapiens
gccaacattttatat

SEQ ID NO: 38933 - DNA, 15 bp, Homo sapiens
tgccaacattttata

SEQ ID NO: 38934 - DNA, 15 bp, Homo sapiens
ttgccaacattttat

SEQ ID NO: 38935 - DNA, 15 bp, Homo sapiens
cttgccaacatttta

SEQ ID NO: 38936 - DNA, 15 bp, Homo sapiens
acttgccaacatttt

SEQ ID NO: 38937 - DNA, 15 bp, Homo sapiens
tacttgccaacattt

SEQ ID NO: 38938 - DNA, 15 bp, Homo sapiens
gtacttgccaacatt

SEQ ID NO: 38939 - DNA, 15 bp, Homo sapiens
ggtacttgccaacat

SEQ ID NO: 38940 - DNA, 15 bp, Homo sapiens
aggtacttgccaaca

SEQ ID NO: 38941 - DNA, 15 bp, Homo sapiens
aaggtacttgccaac

SEQ ID NO: 38942 - DNA, 15 bp, Homo sapiens
taaggtacttgccaa

SEQ ID NO: 38943 - DNA, 15 bp, Homo sapiens
ttaaggtacttgcca

SEQ ID NO: 38944 - DNA, 15 bp, Homo sapiens
attaaggtacttgcc

SEQ ID NO: 38945 - DNA, 15 bp, Homo sapiens
tattaaggtacttgc

SEQ ID NO: 38946 - DNA, 15 bp, Homo sapiens
atattaaggtacttg

SEQ ID NO: 38947 - DNA, 15 bp, Homo sapiens
tatattaaggtactt

SEQ ID NO: 38948 - DNA, 15 bp, Homo sapiens
gtatattaaggtact

SEQ ID NO: 38949 - DNA, 15 bp, Homo sapiens
tgtatattaaggtac

SEQ ID NO: 38950 - DNA, 15 bp, Homo sapiens
ttgtatattaaggta

SEQ ID NO: 38951 - DNA, 15 bp, Homo sapiens
attgtatattaaggt

SEQ ID NO: 38952 - DNA, 15 bp, Homo sapiens
tattgtatattaagg

SEQ ID NO: 38953 - DNA, 15 bp, Homo sapiens
ttattgtatattaag

SEQ ID NO: 38954 - DNA, 15 bp, Homo sapiens
gttattgtatattaa

SEQ ID NO: 38955 - DNA, 15 bp, Homo sapiens
agttattgtatatta

SEQ ID NO: 38956 - DNA, 15 bp, Homo sapiens
tagttattgtatatt

SEQ ID NO: 38957 - DNA, 15 bp, Homo sapiens
gtagttattgtatat

SEQ ID NO: 38958 - DNA, 15 bp, Homo sapiens
agtagttattgtata

SEQ ID NO: 38959 - DNA, 15 bp, Homo sapiens
cagtagttattgtat

SEQ ID NO: 38960 - DNA, 15 bp, Homo sapiens
gcagtagttattgta

SEQ ID NO: 38961 - DNA, 15 bp, Homo sapiens
agcagtagttattgt

SEQ ID NO: 38962 - DNA, 15 bp, Homo sapiens
tagcagtagttattg

SEQ ID NO: 38963 - DNA, 15 bp, Homo sapiens
atagcagtagttatt

SEQ ID NO: 38964 - DNA, 15 bp, Homo sapiens
tatagcagtagttat

SEQ ID NO: 38965 - DNA, 15 bp, Homo sapiens
atatagcagtagtta

SEQ ID NO: 38966 - DNA, 15 bp, Homo sapiens
catatagcagtagtt

SEQ ID NO: 38967 - DNA, 15 bp, Homo sapiens
acatatagcagtagt

SEQ ID NO: 38968 - DNA, 15 bp, Homo sapiens
aacatatagcagtag

SEQ ID NO: 38969 - DNA, 15 bp, Homo sapiens
caacatatagcagta

SEQ ID NO: 38970 - DNA, 15 bp, Homo sapiens
acaacatatagcagt

SEQ ID NO: 38971 - DNA, 15 bp, Homo sapiens
gacaacatatagcag

SEQ ID NO: 38972 - DNA, 15 bp, Homo sapiens
tgacaacatatagca

SEQ ID NO: 38973 - DNA, 15 bp, Homo sapiens
atgacaacatatagc

SEQ ID NO: 38974 - DNA, 15 bp, Homo sapiens
aatgacaacatatag

SEQ ID NO: 38975 - DNA, 15 bp, Homo sapiens
caatgacaacatata

SEQ ID NO: 38976 - DNA, 15 bp, Homo sapiens
acaatgacaacatat

SEQ ID NO: 38977 - DNA, 15 bp, Homo sapiens
tacaatgacaacata

SEQ ID NO: 38978 - DNA, 15 bp, Homo sapiens
ttacaatgacaacat

SEQ ID NO: 38979 - DNA, 15 bp, Homo sapiens
attacaatgacaaca

SEQ ID NO: 38980 - DNA, 15 bp, Homo sapiens
tattacaatgacaac

SEQ ID NO: 38981 - DNA, 15 bp, Homo sapiens
ttattacaatgacaa

SEQ ID NO: 38982 - DNA, 15 bp, Homo sapiens
attattacaatgaca

SEQ ID NO: 38983 - DNA, 15 bp, Homo sapiens
tattattacaatgac

SEQ ID NO: 38984 - DNA, 15 bp, Homo sapiens
ttattattacaatga

SEQ ID NO: 38985 - DNA, 15 bp, Homo sapiens
attattattacaatg

SEQ ID NO: 38986 - DNA, 15 bp, Homo sapiens
gattattattacaat

SEQ ID NO: 38987 - DNA, 15 bp, Homo sapiens
tgattattattacaa

SEQ ID NO: 38988 - DNA, 15 bp, Homo sapiens
atgattattattaca

SEQ ID NO: 38989 - DNA, 15 bp, Homo sapiens
tatgattattattac

SEQ ID NO: 38990 - DNA, 15 bp, Homo sapiens
atatgattattatta

SEQ ID NO: 38991 - DNA, 15 bp, Homo sapiens
aatatgattattatt

SEQ ID NO: 38992 - DNA, 15 bp, Homo sapiens
aaatatgattattat

SEQ ID NO: 38993 - DNA, 15 bp, Homo sapiens
gaaatatgattatta

SEQ ID NO: 38994 - DNA, 15 bp, Homo sapiens
agaaatatgattatt

SEQ ID NO: 38995 - DNA, 15 bp, Homo sapiens
aagaaatatgattat

SEQ ID NO: 38996 - DNA, 15 bp, Homo sapiens
gaagaaatatgatta

SEQ ID NO: 38997 - DNA, 15 bp, Homo sapiens
ggaagaaatatgatt

SEQ ID NO: 38998 - DNA, 15 bp, Homo sapiens
aggaagaaatatgat

SEQ ID NO: 38999 - DNA, 15 bp, Homo sapiens
aaggaagaaatatga

SEQ ID NO: 39000 - DNA, 15 bp, Homo sapiens
aaaggaagaaatatg

SEQ ID NO: 39001 - DNA, 15 bp, Homo sapiens
caaaggaagaaatat

SEQ ID NO: 39002 - DNA, 15 bp, Homo sapiens
acaaaggaagaaata

SEQ ID NO: 39003 - DNA, 15 bp, Homo sapiens
aacaaaggaagaaat

SEQ ID NO: 39004 - DNA, 15 bp, Homo sapiens
caacaaaggaagaaa

SEQ ID NO: 39005 - DNA, 15 bp, Homo sapiens
tcaacaaaggaagaa

SEQ ID NO: 39006 - DNA, 15 bp, Homo sapiens
ttcaacaaaggaaga

SEQ ID NO: 39007 - DNA, 15 bp, Homo sapiens
attcaacaaaggaag

SEQ ID NO: 39008 - DNA, 15 bp, Homo sapiens
aattcaacaaaggaa

SEQ ID NO: 39009 - DNA, 15 bp, Homo sapiens
caattcaacaaagga

SEQ ID NO: 39010 - DNA, 15 bp, Homo sapiens
gcaattcaacaaagg

SEQ ID NO: 39011 - DNA, 15 bp, Homo sapiens
agcaattcaacaaag

SEQ ID NO: 39012 - DNA, 15 bp, Homo sapiens
aagcaattcaacaaa

SEQ ID NO: 39013 - DNA, 15 bp, Homo sapiens
aaagcaattcaacaa

SEQ ID NO: 39014 - DNA, 15 bp, Homo sapiens
gaaagcaattcaaca

SEQ ID NO: 39015 - DNA, 15 bp, Homo sapiens
ggaaagcaattcaac

SEQ ID NO: 39016 - DNA, 15 bp, Homo sapiens
aggaaagcaattcaa

SEQ ID NO: 39017 - DNA, 15 bp, Homo sapiens
caggaaagcaattca

SEQ ID NO: 39018 - DNA, 15 bp, Homo sapiens
acaggaaagcaattc

SEQ ID NO: 39019 - DNA, 15 bp, Homo sapiens
tacaggaaagcaatt

SEQ ID NO: 39020 - DNA, 15 bp, Homo sapiens
ctacaggaaagcaat

SEQ ID NO: 39021 - DNA, 15 bp, Homo sapiens
actacaggaaagcaa

SEQ ID NO: 39022 - DNA, 15 bp, Homo sapiens
tactacaggaaagca

SEQ ID NO: 39023 - DNA, 15 bp, Homo sapiens
ttactacaggaaagc

SEQ ID NO: 39024 - DNA, 15 bp, Homo sapiens
attactacaggaaag

SEQ ID NO: 39025 - DNA, 15 bp, Homo sapiens
gattactacaggaaa

SEQ ID NO: 39026 - DNA, 15 bp, Homo sapiens
agattactacaggaa

SEQ ID NO: 39027 - DNA, 15 bp, Homo sapiens
aagattactacagga

SEQ ID NO: 39028 - DNA, 15 bp, Homo sapiens
taagattactacagg

SEQ ID NO: 39029 - DNA, 15 bp, Homo sapiens
ataagattactacag

SEQ ID NO: 39030 - DNA, 15 bp, Homo sapiens
aataagattactaca

SEQ ID NO: 39031 - DNA, 15 bp, Homo sapiens
caataagattactac

SEQ ID NO: 39032 - DNA, 15 bp, Homo sapiens
acaataagattacta

SEQ ID NO: 39033 - DNA, 15 bp, Homo sapiens
cacaataagattact

SEQ ID NO: 39034 - DNA, 15 bp, Homo sapiens
tcacaataagattac

SEQ ID NO: 39035 - DNA, 15 bp, Homo sapiens
atcacaataagatta

SEQ ID NO: 39036 - DNA, 15 bp, Homo sapiens
gatcacaataagatt

SEQ ID NO: 39037 - DNA, 15 bp, Homo sapiens
tgatcacaataagat

SEQ ID NO: 39038 - DNA, 15 bp, Homo sapiens
atgatcacaataaga

SEQ ID NO: 39039 - DNA, 15 bp, Homo sapiens
gatgatcacaataag

SEQ ID NO: 39040 - DNA, 15 bp, Homo sapiens
ggatgatcacaataa

SEQ ID NO: 39041 - DNA, 15 bp, Homo sapiens
aggatgatcacaata

SEQ ID NO: 39042 - DNA, 15 bp, Homo sapiens
caggatgatcacaat

SEQ ID NO: 39043 - DNA, 15 bp, Homo sapiens
tcaggatgatcacaa

SEQ ID NO: 39044 - DNA, 15 bp, Homo sapiens
ttcaggatgatcaca

SEQ ID NO: 39045 - DNA, 15 bp, Homo sapiens
tttcaggatgatcac

SEQ ID NO: 39046 - DNA, 15 bp, Homo sapiens
gtttcaggatgatca

SEQ ID NO: 39047 - DNA, 15 bp, Homo sapiens
tgtttcaggatgatc

SEQ ID NO: 39048 - DNA, 15 bp, Homo sapiens
atgtttcaggatgat

SEQ ID NO: 39049 - DNA, 15 bp, Homo sapiens
tatgtttcaggatga

SEQ ID NO: 39050 - DNA, 15 bp, Homo sapiens
ctatgtttcaggatg

SEQ ID NO: 39051 - DNA, 15 bp, Homo sapiens
tctatgtttcaggat

SEQ ID NO: 39052 - DNA, 15 bp, Homo sapiens
atctatgtttcagga

SEQ ID NO: 39053 - DNA, 15 bp, Homo sapiens
aatctatgtttcagg

SEQ ID NO: 39054 - DNA, 15 bp, Homo sapiens
aaatctatgtttcag

SEQ ID NO: 39055 - DNA, 15 bp, Homo sapiens
gaaatctatgtttca

SEQ ID NO: 39056 - DNA, 15 bp, Homo sapiens
ggaaatctatgtttc

SEQ ID NO: 39057 - DNA, 15 bp, Homo sapiens
cggaaatctatgttt

SEQ ID NO: 39058 - DNA, 15 bp, Homo sapiens
tcggaaatctatgtt

SEQ ID NO: 39059 - DNA, 15 bp, Homo sapiens
ctcggaaatctatgt

SEQ ID NO: 39060 - DNA, 15 bp, Homo sapiens
gctcggaaatctatg

SEQ ID NO: 39061 - DNA, 15 bp, Homo sapiens
agctcggaaatctat

SEQ ID NO: 39062 - DNA, 15 bp, Homo sapiens
aagctcggaaatcta

SEQ ID NO: 39063 - DNA, 15 bp, Homo sapiens
gaagctcggaaatct

SEQ ID NO: 39064 - DNA, 15 bp, Homo sapiens
tgaagctcggaaatc

SEQ ID NO: 39065 - DNA, 15 bp, Homo sapiens
ttgaagctcggaaat

SEQ ID NO: 39066 - DNA, 15 bp, Homo sapiens
cttgaagctcggaaa

SEQ ID NO: 39067 - DNA, 15 bp, Homo sapiens
gcttgaagctcggaa

SEQ ID NO: 39068 - DNA, 15 bp, Homo sapiens
tgcttgaagctcgga

SEQ ID NO: 39069 - DNA, 15 bp, Homo sapiens
ttgcttgaagctcgg

SEQ ID NO: 39070 - DNA, 15 bp, Homo sapiens
tttgcttgaagctcg

SEQ ID NO: 39071 - DNA, 15 bp, Homo sapiens
gtttgcttgaagctc

SEQ ID NO: 39072 - DNA, 15 bp, Homo sapiens
tgtttgcttgaagct

SEQ ID NO: 39073 - DNA, 15 bp, Homo sapiens
gtgtttgcttgaagc

SEQ ID NO: 39074 - DNA, 15 bp, Homo sapiens
agtgtttgcttgaag

SEQ ID NO: 39075 - DNA, 15 bp, Homo sapiens
tagtgtttgcttgaa

SEQ ID NO: 39076 - DNA, 15 bp, Homo sapiens
atagtgtttgcttga

SEQ ID NO: 39077 - DNA, 15 bp, Homo sapiens
aatagtgtttgcttg

SEQ ID NO: 39078 - DNA, 15 bp, Homo sapiens
taatagtgtttgctt

SEQ ID NO: 39079 - DNA, 15 bp, Homo sapiens
ataatagtgtttgct

SEQ ID NO: 39080 - DNA, 15 bp, Homo sapiens
cataatagtgtttgc

SEQ ID NO: 39081 - DNA, 15 bp, Homo sapiens
acataatagtgtttg

SEQ ID NO: 39082 - DNA, 15 bp, Homo sapiens
aacataatagtgttt

SEQ ID NO: 39083 - DNA, 15 bp, Homo sapiens
caacataatagtgtt

SEQ ID NO: 39084 - DNA, 15 bp, Homo sapiens
tcaacataatagtgt

SEQ ID NO: 39085 - DNA, 15 bp, Homo sapiens
ttcaacataatagtg

SEQ ID NO: 39086 - DNA, 15 bp, Homo sapiens
tttcaacataatagt

SEQ ID NO: 39087 - DNA, 15 bp, Homo sapiens
ttttcaacataatag

SEQ ID NO: 39088 - DNA, 15 bp, Homo sapiens
tttttcaacataata

SEQ ID NO: 39089 - DNA, 15 bp, Homo sapiens
atttttcaacataat

SEQ ID NO: 39090 - DNA, 15 bp, Homo sapiens
gatttttcaacataa

SEQ ID NO: 39091 - DNA, 15 bp, Homo sapiens
agatttttcaacata

SEQ ID NO: 39092 - DNA, 15 bp, Homo sapiens
tagatttttcaacat

SEQ ID NO: 39093 - DNA, 15 bp, Homo sapiens
gtagatttttcaaca

SEQ ID NO: 39094 - DNA, 15 bp, Homo sapiens
tgtagatttttcaac

SEQ ID NO: 39095 - DNA, 15 bp, Homo sapiens
atgtagatttttcaa

SEQ ID NO: 39096 - DNA, 15 bp, Homo sapiens
aatgtagatttttca

SEQ ID NO: 39097 - DNA, 15 bp, Homo sapiens
taatgtagatttttc

SEQ ID NO: 39098 - DNA, 15 bp, Homo sapiens
ataatgtagattttt

SEQ ID NO: 39099 - DNA, 15 bp, Homo sapiens
aataatgtagatttt

SEQ ID NO: 39100 - DNA, 15 bp, Homo sapiens
aaataatgtagattt

SEQ ID NO: 39101 - DNA, 15 bp, Homo sapiens
gaaataatgtagatt

SEQ ID NO: 39102 - DNA, 15 bp, Homo sapiens
agaaataatgtagat

SEQ ID NO: 39103 - DNA, 15 bp, Homo sapiens
tagaaataatgtaga

SEQ ID NO: 39104 - DNA, 15 bp, Homo sapiens
ttagaaataatgtag

SEQ ID NO: 39105 - DNA, 15 bp, Homo sapiens
cttagaaataatgta

SEQ ID NO: 39106 - DNA, 15 bp, Homo sapiens
acttagaaataatgt

SEQ ID NO: 39107 - DNA, 15 bp, Homo sapiens
aacttagaaataatg

SEQ ID NO: 39108 - DNA, 15 bp, Homo sapiens
aaacttagaaataat

SEQ ID NO: 39109 - DNA, 15 bp, Homo sapiens
taaacttagaaataa

SEQ ID NO: 39110 - DNA, 15 bp, Homo sapiens
ctaaacttagaaata

SEQ ID NO: 39111 - DNA, 15 bp, Homo sapiens
gctaaacttagaaat

SEQ ID NO: 39112 - DNA, 15 bp, Homo sapiens
tgctaaacttagaaa

SEQ ID NO: 39113 - DNA, 15 bp, Homo sapiens
ctgctaaacttagaa

SEQ ID NO: 39114 - DNA, 15 bp, Homo sapiens
actgctaaacttaga

SEQ ID NO: 39115 - DNA, 15 bp, Homo sapiens
cactgctaaacttag

SEQ ID NO: 39116 - DNA, 15 bp, Homo sapiens
gcactgctaaactta

SEQ ID NO: 39117 - DNA, 15 bp, Homo sapiens
ggcactgctaaactt

SEQ ID NO: 39118 - DNA, 15 bp, Homo sapiens
tggcactgctaaact

SEQ ID NO: 39119 - DNA, 15 bp, Homo sapiens
ctggcactgctaaac

SEQ ID NO: 39120 - DNA, 15 bp, Homo sapiens
actggcactgctaaa

SEQ ID NO: 39121 - DNA, 15 bp, Homo sapiens
cactggcactgctaa

SEQ ID NO: 39122 - DNA, 15 bp, Homo sapiens
ccactggcactgcta

SEQ ID NO: 39123 - DNA, 15 bp, Homo sapiens
tccactggcactgct

SEQ ID NO: 39124 - DNA, 15 bp, Homo sapiens
ttccactggcactgc

SEQ ID NO: 39125 - DNA, 15 bp, Homo sapiens
tttccactggcactg

SEQ ID NO: 39126 - DNA, 15 bp, Homo sapiens
ctttccactggcact

SEQ ID NO: 39127 - DNA, 15 bp, Homo sapiens
actttccactggcac

SEQ ID NO: 39128 - DNA, 15 bp, Homo sapiens
aactttccactggca

SEQ ID NO: 39129 - DNA, 15 bp, Homo sapiens
aaactttccactggc

SEQ ID NO: 39130 - DNA, 15 bp, Homo sapiens
taaactttccactgg

SEQ ID NO: 39131 - DNA, 15 bp, Homo sapiens
ataaactttccactg

SEQ ID NO: 39132 - DNA, 15 bp, Homo sapiens
aataaactttccact

SEQ ID NO: 39133 - DNA, 15 bp, Homo sapiens
caataaactttccac

SEQ ID NO: 39134 - DNA, 15 bp, Homo sapiens
tcaataaactttcca

SEQ ID NO: 39135 - DNA, 15 bp, Homo sapiens
ttcaataaactttcc

SEQ ID NO: 39136 - DNA, 15 bp, Homo sapiens
tttcaataaactttc

SEQ ID NO: 39137 - DNA, 15 bp, Homo sapiens
atttcaataaacttt

SEQ ID NO: 39138 - DNA, 15 bp, Homo sapiens
tatttcaataaactt

SEQ ID NO: 39139 - DNA, 15 bp, Homo sapiens
ctatttcaataaact

SEQ ID NO: 39140 - DNA, 15 bp, Homo sapiens
tctatttcaataaac

SEQ ID NO: 39141 - DNA, 15 bp, Homo sapiens
ttctatttcaataaa

SEQ ID NO: 39142 - DNA, 15 bp, Homo sapiens
tttctatttcaataa

SEQ ID NO: 39143 - DNA, 15 bp, Homo sapiens
ttttctatttcaata

SEQ ID NO: 39144 - DNA, 15 bp, Homo sapiens
attttctatttcaat

SEQ ID NO: 39145 - DNA, 15 bp, Homo sapiens
aattttctatttcaa

SEQ ID NO: 39146 - DNA, 15 bp, Homo sapiens
taattttctatttca

SEQ ID NO: 39147 - DNA, 15 bp, Homo sapiens
gtaattttctatttc

SEQ ID NO: 39148 - DNA, 15 bp, Homo sapiens
agtaattttctattt

SEQ ID NO: 39149 - DNA, 15 bp, Homo sapiens
aagtaattttctatt

SEQ ID NO: 39150 - DNA, 15 bp, Homo sapiens
aaagtaattttctat

SEQ ID NO: 39151 - DNA, 15 bp, Homo sapiens
aaaagtaattttcta

SEQ ID NO: 39152 - DNA, 15 bp, Homo sapiens
aaaaagtaattttct

SEQ ID NO: 39153 - DNA, 15 bp, Homo sapiens
aaaaaagtaattttc

SEQ ID NO: 39154 - DNA, 15 bp, Homo sapiens
taaaaaagtaatttt

SEQ ID NO: 39155 - DNA, 15 bp, Homo sapiens
ttaaaaaagtaattt

SEQ ID NO: 39156 - DNA, 15 bp, Homo sapiens
gttaaaaaagtaatt

SEQ ID NO: 39157 - DNA, 15 bp, Homo sapiens
agttaaaaaagtaat

SEQ ID NO: 39158 - DNA, 15 bp, Homo sapiens
cagttaaaaaagtaa

SEQ ID NO: 39159 - DNA, 15 bp, Homo sapiens
tcagttaaaaaagta

SEQ ID NO: 39160 - DNA, 15 bp, Homo sapiens
ctcagttaaaaaagt

SEQ ID NO: 39161 - DNA, 15 bp, Homo sapiens
cctcagttaaaaaag

SEQ ID NO: 39162 - DNA, 15 bp, Homo sapiens
tcctcagttaaaaaa

SEQ ID NO: 39163 - DNA, 15 bp, Homo sapiens
ctcctcagttaaaaa

SEQ ID NO: 39164 - DNA, 15 bp, Homo sapiens
actcctcagttaaaa

SEQ ID NO: 39165 - DNA, 15 bp, Homo sapiens
cactcctcagttaaa

SEQ ID NO: 39166 - DNA, 15 bp, Homo sapiens
acactcctcagttaa

SEQ ID NO: 39167 - DNA, 15 bp, Homo sapiens
tacactcctcagtta

SEQ ID NO: 39168 - DNA, 15 bp, Homo sapiens
ctacactcctcagtt

SEQ ID NO: 39169 - DNA, 15 bp, Homo sapiens
tctacactcctcagt

SEQ ID NO: 39170 - DNA, 15 bp, Homo sapiens
atctacactcctcag

SEQ ID NO: 39171 - DNA, 15 bp, Homo sapiens
aatctacactcctca

SEQ ID NO: 39172 - DNA, 15 bp, Homo sapiens
caatctacactcctc

SEQ ID NO: 39173 - DNA, 15 bp, Homo sapiens
acaatctacactcct

SEQ ID NO: 39174 - DNA, 15 bp, Homo sapiens
cacaatctacactcc

SEQ ID NO: 39175 - DNA, 15 bp, Homo sapiens
tcacaatctacactc

SEQ ID NO: 39176 - DNA, 15 bp, Homo sapiens
ttcacaatctacact

SEQ ID NO: 39177 - DNA, 15 bp, Homo sapiens
attcacaatctacac

SEQ ID NO: 39178 - DNA, 15 bp, Homo sapiens
aattcacaatctaca

SEQ ID NO: 39179 - DNA, 15 bp, Homo sapiens
gaattcacaatctac

SEQ ID NO: 39180 - DNA, 15 bp, Homo sapiens
cgaattcacaatcta

SEQ ID NO: 39181 - DNA, 15 bp, Homo sapiens
acgaattcacaatct

SEQ ID NO: 39182 - DNA, 15 bp, Homo sapiens
cacgaattcacaatc

SEQ ID NO: 39183 - DNA, 15 bp, Homo sapiens
tcacgaattcacaat

SEQ ID NO: 39184 - DNA, 15 bp, Homo sapiens
atcacgaattcacaa

SEQ ID NO: 39185 - DNA, 15 bp, Homo sapiens
aatcacgaattcaca

SEQ ID NO: 39186 - DNA, 15 bp, Homo sapiens
gaatcacgaattcac

SEQ ID NO: 39187 - DNA, 15 bp, Homo sapiens
tgaatcacgaattca

SEQ ID NO: 39188 - DNA, 15 bp, Homo sapiens
atgaatcacgaattc

SEQ ID NO: 39189 - DNA, 15 bp, Homo sapiens
gatgaatcacgaatt

SEQ ID NO: 39190 - DNA, 15 bp, Homo sapiens
agatgaatcacgaat

SEQ ID NO: 39191 - DNA, 15 bp, Homo sapiens
aagatgaatcacgaa

SEQ ID NO: 39192 - DNA, 15 bp, Homo sapiens
gaagatgaatcacga

SEQ ID NO: 39193 - DNA, 15 bp, Homo sapiens
agaagatgaatcacg

SEQ ID NO: 39194 - DNA, 15 bp, Homo sapiens
aagaagatgaatcac

SEQ ID NO: 39195 - DNA, 15 bp, Homo sapiens
taagaagatgaatca

SEQ ID NO: 39196 - DNA, 15 bp, Homo sapiens
ctaagaagatgaatc

SEQ ID NO: 39197 - DNA, 15 bp, Homo sapiens
cctaagaagatgaat

SEQ ID NO: 39198 - DNA, 15 bp, Homo sapiens
tcctaagaagatgaa

SEQ ID NO: 39199 - DNA, 15 bp, Homo sapiens
ctcctaagaagatga

SEQ ID NO: 39200 - DNA, 15 bp, Homo sapiens
tctcctaagaagatg

SEQ ID NO: 39201 - DNA, 15 bp, Homo sapiens
atctcctaagaagat

SEQ ID NO: 39202 - DNA, 15 bp, Homo sapiens
catctcctaagaaga

SEQ ID NO: 39203 - DNA, 15 bp, Homo sapiens
tcatctcctaagaag

SEQ ID NO: 39204 - DNA, 15 bp, Homo sapiens
atcatctcctaagaa

SEQ ID NO: 39205 - DNA, 15 bp, Homo sapiens
gatcatctcctaaga

SEQ ID NO: 39206 - DNA, 15 bp, Homo sapiens
cgatcatctcctaag

SEQ ID NO: 39207 - DNA, 15 bp, Homo sapiens
ccgatcatctcctaa

SEQ ID NO: 39208 - DNA, 15 bp, Homo sapiens
tccgatcatctccta

SEQ ID NO: 39209 - DNA, 15 bp, Homo sapiens
ttccgatcatctcct

SEQ ID NO: 39210 - DNA, 15 bp, Homo sapiens
attccgatcatctcc

SEQ ID NO: 39211 - DNA, 15 bp, Homo sapiens
tattccgatcatctc

SEQ ID NO: 39212 - DNA, 15 bp, Homo sapiens
atattccgatcatct

SEQ ID NO: 39213 - DNA, 15 bp, Homo sapiens
aatattccgatcatc

SEQ ID NO: 39214 - DNA, 15 bp, Homo sapiens
caatattccgatcat

SEQ ID NO: 39215 - DNA, 15 bp, Homo sapiens
tcaatattccgatca

SEQ ID NO: 39216 - DNA, 15 bp, Homo sapiens
atcaatattccgatc

SEQ ID NO: 39217 - DNA, 15 bp, Homo sapiens
tatcaatattccgat

SEQ ID NO: 39218 - DNA, 15 bp, Homo sapiens
ttatcaatattccga

SEQ ID NO: 39219 - DNA, 15 bp, Homo sapiens
tttatcaatattccg

SEQ ID NO: 39220 - DNA, 15 bp, Homo sapiens
atttatcaatattcc

SEQ ID NO: 39221 - DNA, 15 bp, Homo sapiens
tatttatcaatattc

SEQ ID NO: 39222 - DNA, 15 bp, Homo sapiens
atatttatcaatatt

SEQ ID NO: 39223 - DNA, 15 bp, Homo sapiens
aatatttatcaatat

SEQ ID NO: 39224 - DNA, 15 bp, Homo sapiens
caatatttatcaata

SEQ ID NO: 39225 - DNA, 15 bp, Homo sapiens
tcaatatttatcaat

SEQ ID NO: 39226 - DNA, 15 bp, Homo sapiens
atcaatatttatcaa

SEQ ID NO: 39227 - DNA, 15 bp, Homo sapiens
catcaatatttatca

SEQ ID NO: 39228 - DNA, 15 bp, Homo sapiens
gcatcaatatttatc

SEQ ID NO: 39229 - DNA, 15 bp, Homo sapiens
tgcatcaatatttat

SEQ ID NO: 39230 - DNA, 15 bp, Homo sapiens
atgcatcaatattta

SEQ ID NO: 39231 - DNA, 15 bp, Homo sapiens
tatgcatcaatattt

SEQ ID NO: 39232 - DNA, 15 bp, Homo sapiens
ctatgcatcaatatt

SEQ ID NO: 39233 - DNA, 15 bp, Homo sapiens
tctatgcatcaatat

SEQ ID NO: 39234 - DNA, 15 bp, Homo sapiens
ttctatgcatcaata

SEQ ID NO: 39235 - DNA, 15 bp, Homo sapiens
attctatgcatcaat

SEQ ID NO: 39236 - DNA, 15 bp, Homo sapiens
tattctatgcatcaa

SEQ ID NO: 39237 - DNA, 15 bp, Homo sapiens
atattctatgcatca

SEQ ID NO: 39238 - DNA, 15 bp, Homo sapiens
catattctatgcatc

SEQ ID NO: 39239 - DNA, 15 bp, Homo sapiens
tcatattctatgcat

SEQ ID NO: 39240 - DNA, 15 bp, Homo sapiens
ttcatattctatgca

SEQ ID NO: 39241 - DNA, 15 bp, Homo sapiens
gttcatattctatgc

SEQ ID NO: 39242 - DNA, 15 bp, Homo sapiens
tgttcatattctatg

SEQ ID NO: 39243 - DNA, 15 bp, Homo sapiens
ttgttcatattctat

SEQ ID NO: 39244 - DNA, 15 bp, Homo sapiens
tttgttcatattcta

SEQ ID NO: 39245 - DNA, 15 bp, Homo sapiens
ttttgttcatattct

SEQ ID NO: 39246 - DNA, 15 bp, Homo sapiens
gttttgttcatattc

SEQ ID NO: 39247 - DNA, 15 bp, Homo sapiens
tgttttgttcatatt

SEQ ID NO: 39248 - DNA, 15 bp, Homo sapiens
atgttttgttcatat

SEQ ID NO: 39249 - DNA, 15 bp, Homo sapiens
aatgttttgttcata

SEQ ID NO: 39250 - DNA, 15 bp, Homo sapiens
taatgttttgttcat

SEQ ID NO: 39251 - DNA, 15 bp, Homo sapiens
gtaatgttttgttca

SEQ ID NO: 39252 - DNA, 15 bp, Homo sapiens
tgtaatgttttgttc

SEQ ID NO: 39253 - DNA, 15 bp, Homo sapiens
atgtaatgttttgtt

SEQ ID NO: 39254 - DNA, 15 bp, Homo sapiens
tatgtaatgttttgt

SEQ ID NO: 39255 - DNA, 15 bp, Homo sapiens
atatgtaatgttttg

SEQ ID NO: 39256 - DNA, 15 bp, Homo sapiens
gatatgtaatgtttt

SEQ ID NO: 39257 - DNA, 15 bp, Homo sapiens
agatatgtaatgttt

SEQ ID NO: 39258 - DNA, 15 bp, Homo sapiens
aagatatgtaatgtt

SEQ ID NO: 39259 - DNA, 15 bp, Homo sapiens
caagatatgtaatgt

SEQ ID NO: 39260 - DNA, 15 bp, Homo sapiens
acaagatatgtaatg

SEQ ID NO: 39261 - DNA, 15 bp, Homo sapiens
cacaagatatgtaat

SEQ ID NO: 39262 - DNA, 15 bp, Homo sapiens
gcacaagatatgtaa

SEQ ID NO: 39263 - DNA, 15 bp, Homo sapiens
agcacaagatatgta

SEQ ID NO: 39264 - DNA, 15 bp, Homo sapiens
cagcacaagatatgt

SEQ ID NO: 39265 - DNA, 15 bp, Homo sapiens
acagcacaagatatg

SEQ ID NO: 39266 - DNA, 15 bp, Homo sapiens
cacagcacaagatat

SEQ ID NO: 39267 - DNA, 15 bp, Homo sapiens
tcacagcacaagata

SEQ ID NO: 39268 - DNA, 15 bp, Homo sapiens
atcacagcacaagat

SEQ ID NO: 39269 - DNA, 15 bp, Homo sapiens
tatcacagcacaaga

SEQ ID NO: 39270 - DNA, 15 bp, Homo sapiens
atatcacagcacaag

SEQ ID NO: 39271 - DNA, 15 bp, Homo sapiens
aatatcacagcacaa

SEQ ID NO: 39272 - DNA, 15 bp, Homo sapiens
taatatcacagcaca

SEQ ID NO: 39273 - DNA, 15 bp, Homo sapiens
ttaatatcacagcac

SEQ ID NO: 39274 - DNA, 15 bp, Homo sapiens
tttaatatcacagca

SEQ ID NO: 39275 - DNA, 15 bp, Homo sapiens
ctttaatatcacagc

SEQ ID NO: 39276 - DNA, 15 bp, Homo sapiens
actttaatatcacag

SEQ ID NO: 39277 - DNA, 15 bp, Homo sapiens
tactttaatatcaca

SEQ ID NO: 39278 - DNA, 15 bp, Homo sapiens
ctactttaatatcac

SEQ ID NO: 39279 - DNA, 15 bp, Homo sapiens
actactttaatatca

SEQ ID NO: 39280 - DNA, 15 bp, Homo sapiens
tactactttaatatc

SEQ ID NO: 39281 - DNA, 15 bp, Homo sapiens
atactactttaatat

SEQ ID NO: 39282 - DNA, 15 bp, Homo sapiens
aatactactttaata

SEQ ID NO: 39283 - DNA, 15 bp, Homo sapiens
gaatactactttaat

SEQ ID NO: 39284 - DNA, 15 bp, Homo sapiens
agaatactactttaa

SEQ ID NO: 39285 - DNA, 15 bp, Homo sapiens
cagaatactacttta

SEQ ID NO: 39286 - DNA, 15 bp, Homo sapiens
acagaatactacttt

SEQ ID NO: 39287 - DNA, 15 bp, Homo sapiens
aacagaatactactt

SEQ ID NO: 39288 - DNA, 15 bp, Homo sapiens
gaacagaatactact

SEQ ID NO: 39289 - DNA, 15 bp, Homo sapiens
agaacagaatactac

SEQ ID NO: 39290 - DNA, 15 bp, Homo sapiens
cagaacagaatacta

SEQ ID NO: 39291 - DNA, 15 bp, Homo sapiens
ccagaacagaatact

SEQ ID NO: 39292 - DNA, 15 bp, Homo sapiens
accagaacagaatac

SEQ ID NO: 39293 - DNA, 15 bp, Homo sapiens
taccagaacagaata

SEQ ID NO: 39294 - DNA, 15 bp, Homo sapiens
ctaccagaacagaat

SEQ ID NO: 39295 - DNA, 15 bp, Homo sapiens
actaccagaacagaa

SEQ ID NO: 39296 - DNA, 15 bp, Homo sapiens
tactaccagaacaga

SEQ ID NO: 39297 - DNA, 15 bp, Homo sapiens
ctactaccagaacag

SEQ ID NO: 39298 - DNA, 15 bp, Homo sapiens
actactaccagaaca

SEQ ID NO: 39299 - DNA, 15 bp, Homo sapiens
tactactaccagaac

SEQ ID NO: 39300 - DNA, 15 bp, Homo sapiens
atactactaccagaa

SEQ ID NO: 39301 - DNA, 15 bp, Homo sapiens
catactactaccaga

SEQ ID NO: 39302 - DNA, 15 bp, Homo sapiens
ccatactactaccag

SEQ ID NO: 39303 - DNA, 15 bp, Homo sapiens
gccatactactacca

SEQ ID NO: 39304 - DNA, 15 bp, Homo sapiens
tgccatactactacc

SEQ ID NO: 39305 - DNA, 15 bp, Homo sapiens
ctgccatactactac

SEQ ID NO: 39306 - DNA, 15 bp, Homo sapiens
actgccatactacta

SEQ ID NO: 39307 - DNA, 15 bp, Homo sapiens
tactgccatactact

SEQ ID NO: 39308 - DNA, 15 bp, Homo sapiens
atactgccatactac

SEQ ID NO: 39309 - DNA, 15 bp, Homo sapiens
aatactgccatacta

SEQ ID NO: 39310 - DNA, 15 bp, Homo sapiens
aaatactgccatact

SEQ ID NO: 39311 - DNA, 15 bp, Homo sapiens
aaaatactgccatac

SEQ ID NO: 39312 - DNA, 15 bp, Homo sapiens
taaaatactgccata

SEQ ID NO: 39313 - DNA, 15 bp, Homo sapiens
ctaaaatactgccat

SEQ ID NO: 39314 - DNA, 15 bp, Homo sapiens
cctaaaatactgcca

SEQ ID NO: 39315 - DNA, 15 bp, Homo sapiens
acctaaaatactgcc

SEQ ID NO: 39316 - DNA, 15 bp, Homo sapiens
gacctaaaatactgc

SEQ ID NO: 39317 - DNA, 15 bp, Homo sapiens
agacctaaaatactg

SEQ ID NO: 39318 - DNA, 15 bp, Homo sapiens
cagacctaaaatact

SEQ ID NO: 39319 - DNA, 15 bp, Homo sapiens
tcagacctaaaatac

SEQ ID NO: 39320 - DNA, 15 bp, Homo sapiens
ttcagacctaaaata

SEQ ID NO: 39321 - DNA, 15 bp, Homo sapiens
tttcagacctaaaat

SEQ ID NO: 39322 - DNA, 15 bp, Homo sapiens
ctttcagacctaaaa

SEQ ID NO: 39323 - DNA, 15 bp, Homo sapiens
tctttcagacctaaa

SEQ ID NO: 39324 - DNA, 15 bp, Homo sapiens
atctttcagacctaa

SEQ ID NO: 39325 - DNA, 15 bp, Homo sapiens
catctttcagaccta

SEQ ID NO: 39326 - DNA, 15 bp, Homo sapiens
acatctttcagacct

SEQ ID NO: 39327 - DNA, 15 bp, Homo sapiens
tacatctttcagacc

SEQ ID NO: 39328 - DNA, 15 bp, Homo sapiens
gtacatctttcagac

SEQ ID NO: 39329 - DNA, 15 bp, Homo sapiens
tgtacatctttcaga

SEQ ID NO: 39330 - DNA, 15 bp, Homo sapiens
atgtacatctttcag

SEQ ID NO: 39331 - DNA, 15 bp, Homo sapiens
tatgtacatctttca

SEQ ID NO: 39332 - DNA, 15 bp, Homo sapiens
ttatgtacatctttc

SEQ ID NO: 39333 - DNA, 15 bp, Homo sapiens
attatgtacatcttt

SEQ ID NO: 39334 - DNA, 15 bp, Homo sapiens
gattatgtacatctt

SEQ ID NO: 39335 - DNA, 15 bp, Homo sapiens
agattatgtacatct

SEQ ID NO: 39336 - DNA, 15 bp, Homo sapiens
cagattatgtacatc

SEQ ID NO: 39337 - DNA, 15 bp, Homo sapiens
acagattatgtacat

SEQ ID NO: 39338 - DNA, 15 bp, Homo sapiens
tacagattatgtaca

SEQ ID NO: 39339 - DNA, 15 bp, Homo sapiens
gtacagattatgtac

SEQ ID NO: 39340 - DNA, 15 bp, Homo sapiens
agtacagattatgta

SEQ ID NO: 39341 - DNA, 15 bp, Homo sapiens
aagtacagattatgt

SEQ ID NO: 39342 - DNA, 15 bp, Homo sapiens
aaagtacagattatg

SEQ ID NO: 39343 - DNA, 15 bp, Homo sapiens
caaagtacagattat

SEQ ID NO: 39344 - DNA, 15 bp, Homo sapiens
tcaaagtacagatta

SEQ ID NO: 39345 - DNA, 15 bp, Homo sapiens
ttcaaagtacagatt

SEQ ID NO: 39346 - DNA, 15 bp, Homo sapiens
cttcaaagtacagat

SEQ ID NO: 39347 - DNA, 15 bp, Homo sapiens
acttcaaagtacaga

SEQ ID NO: 39348 - DNA, 15 bp, Homo sapiens
gacttcaaagtacag

SEQ ID NO: 39349 - DNA, 15 bp, Homo sapiens
agacttcaaagtaca

SEQ ID NO: 39350 - DNA, 15 bp, Homo sapiens
cagacttcaaagtac

SEQ ID NO: 39351 - DNA, 15 bp, Homo sapiens
acagacttcaaagta

SEQ ID NO: 39352 - DNA, 15 bp, Homo sapiens
aacagacttcaaagt

SEQ ID NO: 39353 - DNA, 15 bp, Homo sapiens
aaacagacttcaaag

SEQ ID NO: 39354 - DNA, 15 bp, Homo sapiens
aaaacagacttcaaa

SEQ ID NO: 39355 - DNA, 15 bp, Homo sapiens
aaaaacagacttcaa

SEQ ID NO: 39356 - DNA, 15 bp, Homo sapiens
aaaaaacagacttca

SEQ ID NO: 39357 - DNA, 15 bp, Homo sapiens
taaaaaacagacttc

SEQ ID NO: 39358 - DNA, 15 bp, Homo sapiens
ttaaaaaacagactt

SEQ ID NO: 39359 - DNA, 15 bp, Homo sapiens
cttaaaaaacagact

SEQ ID NO: 39360 - DNA, 15 bp, Homo sapiens
tcttaaaaaacagac

SEQ ID NO: 39361 - DNA, 15 bp, Homo sapiens
ctcttaaaaaacaga

SEQ ID NO: 39362 - DNA, 15 bp, Homo sapiens
tctcttaaaaaacag

SEQ ID NO: 39363 - DNA, 15 bp, Homo sapiens
atctcttaaaaaaca

SEQ ID NO: 39364 - DNA, 15 bp, Homo sapiens
aatctcttaaaaaac

SEQ ID NO: 39365 - DNA, 15 bp, Homo sapiens
taatctcttaaaaaa

SEQ ID NO: 39366 - DNA, 15 bp, Homo sapiens
ttaatctcttaaaaa

SEQ ID NO: 39367 - DNA, 15 bp, Homo sapiens
attaatctcttaaaa

SEQ ID NO: 39368 - DNA, 15 bp, Homo sapiens
gattaatctcttaaa

SEQ ID NO: 39369 - DNA, 15 bp, Homo sapiens
tgattaatctcttaa

SEQ ID NO: 39370 - DNA, 15 bp, Homo sapiens
gtgattaatctctta

SEQ ID NO: 39371 - DNA, 15 bp, Homo sapiens
tgtgattaatctctt

SEQ ID NO: 39372 - DNA, 15 bp, Homo sapiens
ttgtgattaatctct

SEQ ID NO: 39373 - DNA, 15 bp, Homo sapiens
cttgtgattaatctc

SEQ ID NO: 39374 - DNA, 15 bp, Homo sapiens
tcttgtgattaatct

SEQ ID NO: 39375 - DNA, 15 bp, Homo sapiens
ctcttgtgattaatc

SEQ ID NO: 39376 - DNA, 15 bp, Homo sapiens
tctcttgtgattaat

SEQ ID NO: 39377 - DNA, 15 bp, Homo sapiens
atctcttgtgattaa

SEQ ID NO: 39378 - DNA, 15 bp, Homo sapiens
aatctcttgtgatta

SEQ ID NO: 39379 - DNA, 15 bp, Homo sapiens
aaatctcttgtgatt

SEQ ID NO: 39380 - DNA, 15 bp, Homo sapiens
taaatctcttgtgat

SEQ ID NO: 39381 - DNA, 15 bp, Homo sapiens
gtaaatctcttgtga

SEQ ID NO: 39382 - DNA, 15 bp, Homo sapiens
tgtaaatctcttgtg

SEQ ID NO: 39383 - DNA, 15 bp, Homo sapiens
atgtaaatctcttgt

SEQ ID NO: 39384 - DNA, 15 bp, Homo sapiens
tatgtaaatctcttg

SEQ ID NO: 39385 - DNA, 15 bp, Homo sapiens
ttatgtaaatctctt

SEQ ID NO: 39386 - DNA, 15 bp, Homo sapiens
tttatgtaaatctct

SEQ ID NO: 39387 - DNA, 15 bp, Homo sapiens
ttttatgtaaatctc

SEQ ID NO: 39388 - DNA, 15 bp, Homo sapiens
gttttatgtaaatct

SEQ ID NO: 39389 - DNA, 15 bp, Homo sapiens
tgttttatgtaaatc

SEQ ID NO: 39390 - DNA, 15 bp, Homo sapiens
ttgttttatgtaaat

SEQ ID NO: 39391 - DNA, 15 bp, Homo sapiens
gttgttttatgtaaa

SEQ ID NO: 39392 - DNA, 15 bp, Homo sapiens
agttgttttatgtaa

SEQ ID NO: 39393 - DNA, 15 bp, Homo sapiens
tagttgttttatgta

SEQ ID NO: 39394 - DNA, 15 bp, Homo sapiens
ttagttgttttatgt

SEQ ID NO: 39395 - DNA, 15 bp, Homo sapiens
cttagttgttttatg

SEQ ID NO: 39396 - DNA, 15 bp, Homo sapiens
ccttagttgttttat

SEQ ID NO: 39397 - DNA, 15 bp, Homo sapiens
accttagttgtttta

SEQ ID NO: 39398 - DNA, 15 bp, Homo sapiens
aaccttagttgtttt

SEQ ID NO: 39399 - DNA, 15 bp, Homo sapiens
taaccttagttgttt

SEQ ID NO: 39400 - DNA, 15 bp, Homo sapiens
ttaaccttagttgtt

SEQ ID NO: 39401 - DNA, 15 bp, Homo sapiens
tttaaccttagttgt

SEQ ID NO: 39402 - DNA, 15 bp, Homo sapiens
ttttaaccttagttg

SEQ ID NO: 39403 - DNA, 15 bp, Homo sapiens
tttttaaccttagtt

SEQ ID NO: 39404 - DNA, 15 bp, Homo sapiens
atttttaaccttagt

SEQ ID NO: 39405 - DNA, 15 bp, Homo sapiens
tatttttaaccttag

SEQ ID NO: 39406 - DNA, 15 bp, Homo sapiens
ttatttttaacctta

SEQ ID NO: 39407 - DNA, 15 bp, Homo sapiens
tttatttttaacctt

SEQ ID NO: 39408 - DNA, 15 bp, Homo sapiens
atttatttttaacct

SEQ ID NO: 39409 - DNA, 15 bp, Homo sapiens
catttatttttaacc

SEQ ID NO: 39410 - DNA, 15 bp, Homo sapiens
ccatttatttttaac

SEQ ID NO: 39411 - DNA, 15 bp, Homo sapiens
accatttatttttaa

SEQ ID NO: 39412 - DNA, 15 bp, Homo sapiens
caccatttattttta

SEQ ID NO: 39413 - DNA, 15 bp, Homo sapiens
ccaccatttattttt

SEQ ID NO: 39414 - DNA, 15 bp, Homo sapiens
tccaccatttatttt

SEQ ID NO: 39415 - DNA, 15 bp, Homo sapiens
atccaccatttattt

SEQ ID NO: 39416 - DNA, 15 bp, Homo sapiens
aatccaccatttatt

SEQ ID NO: 39417 - DNA, 15 bp, Homo sapiens
taatccaccatttat

SEQ ID NO: 39418 - DNA, 15 bp, Homo sapiens
ctaatccaccattta

SEQ ID NO: 39419 - DNA, 15 bp, Homo sapiens
tctaatccaccattt

SEQ ID NO: 39420 - DNA, 15 bp, Homo sapiens
ctctaatccaccatt

SEQ ID NO: 39421 - DNA, 15 bp, Homo sapiens
tctctaatccaccat

SEQ ID NO: 39422 - DNA, 15 bp, Homo sapiens
atctctaatccacca

SEQ ID NO: 39423 - DNA, 15 bp, Homo sapiens
tatctctaatccacc

SEQ ID NO: 39424 - DNA, 15 bp, Homo sapiens
gtatctctaatccac

SEQ ID NO: 39425 - DNA, 15 bp, Homo sapiens
tgtatctctaatcca

SEQ ID NO: 39426 - DNA, 15 bp, Homo sapiens
atgtatctctaatcc

SEQ ID NO: 39427 - DNA, 15 bp, Homo sapiens
gatgtatctctaatc

SEQ ID NO: 39428 - DNA, 15 bp, Homo sapiens
tgatgtatctctaat

SEQ ID NO: 39429 - DNA, 15 bp, Homo sapiens
ctgatgtatctctaa

SEQ ID NO: 39430 - DNA, 15 bp, Homo sapiens
cctgatgtatctcta

SEQ ID NO: 39431 - DNA, 15 bp, Homo sapiens
gcctgatgtatctct

SEQ ID NO: 39432 - DNA, 15 bp, Homo sapiens
tgcctgatgtatctc

SEQ ID NO: 39433 - DNA, 15 bp, Homo sapiens
ttgcctgatgtatct

SEQ ID NO: 39434 - DNA, 15 bp, Homo sapiens
tttgcctgatgtatc

SEQ ID NO: 39435 - DNA, 15 bp, Homo sapiens
atttgcctgatgtat

SEQ ID NO: 39436 - DNA, 15 bp, Homo sapiens
aatttgcctgatgta

SEQ ID NO: 39437 - DNA, 15 bp, Homo sapiens
aaatttgcctgatgt

SEQ ID NO: 39438 - DNA, 15 bp, Homo sapiens
gaaatttgcctgatg

SEQ ID NO: 39439 - DNA, 15 bp, Homo sapiens
tgaaatttgcctgat

SEQ ID NO: 39440 - DNA, 15 bp, Homo sapiens
ttgaaatttgcctga

SEQ ID NO: 39441 - DNA, 15 bp, Homo sapiens
attgaaatttgcctg

SEQ ID NO: 39442 - DNA, 15 bp, Homo sapiens
aattgaaatttgcct

SEQ ID NO: 39443 - DNA, 15 bp, Homo sapiens
aaattgaaatttgcc

SEQ ID NO: 39444 - DNA, 15 bp, Homo sapiens
gaaattgaaatttgc

SEQ ID NO: 39445 - DNA, 15 bp, Homo sapiens
tgaaattgaaatttg

SEQ ID NO: 39446 - DNA, 15 bp, Homo sapiens
ttgaaattgaaattt

SEQ ID NO: 39447 - DNA, 15 bp, Homo sapiens
tttgaaattgaaatt

SEQ ID NO: 39448 - DNA, 15 bp, Homo sapiens
ttttgaaattgaaat

SEQ ID NO: 39449 - DNA, 15 bp, Homo sapiens
cttttgaaattgaaa

SEQ ID NO: 39450 - DNA, 15 bp, Homo sapiens
gcttttgaaattgaa

SEQ ID NO: 39451 - DNA, 15 bp, Homo sapiens
tgcttttgaaattga

SEQ ID NO: 39452 - DNA, 15 bp, Homo sapiens
ctgcttttgaaattg

SEQ ID NO: 39453 - DNA, 15 bp, Homo sapiens
tctgcttttgaaatt

SEQ ID NO: 39454 - DNA, 15 bp, Homo sapiens
atctgcttttgaaat

SEQ ID NO: 39455 - DNA, 15 bp, Homo sapiens
catctgcttttgaaa

SEQ ID NO: 39456 - DNA, 15 bp, Homo sapiens
tcatctgcttttgaa

SEQ ID NO: 39457 - DNA, 15 bp, Homo sapiens
gtcatctgcttttga

SEQ ID NO: 39458 - DNA, 15 bp, Homo sapiens
tgtcatctgcttttg

SEQ ID NO: 39459 - DNA, 15 bp, Homo sapiens
ctgtcatctgctttt

SEQ ID NO: 39460 - DNA, 15 bp, Homo sapiens
tctgtcatctgcttt

SEQ ID NO: 39461 - DNA, 15 bp, Homo sapiens
ttctgtcatctgctt

SEQ ID NO: 39462 - DNA, 15 bp, Homo sapiens
attctgtcatctgct

SEQ ID NO: 39463 - DNA, 15 bp, Homo sapiens
gattctgtcatctgc

SEQ ID NO: 39464 - DNA, 15 bp, Homo sapiens
agattctgtcatctg

SEQ ID NO: 39465 - DNA, 15 bp, Homo sapiens
gagattctgtcatct

SEQ ID NO: 39466 - DNA, 15 bp, Homo sapiens
tgagattctgtcatc

SEQ ID NO: 39467 - DNA, 15 bp, Homo sapiens
ctgagattctgtcat

SEQ ID NO: 39468 - DNA, 15 bp, Homo sapiens
actgagattctgtca

SEQ ID NO: 39469 - DNA, 15 bp, Homo sapiens
tactgagattctgtc

SEQ ID NO: 39470 - DNA, 15 bp, Homo sapiens
atactgagattctgt

SEQ ID NO: 39471 - DNA, 15 bp, Homo sapiens
gatactgagattctg

SEQ ID NO: 39472 - DNA, 15 bp, Homo sapiens
tgatactgagattct

SEQ ID NO: 39473 - DNA, 15 bp, Homo sapiens
ctgatactgagattc

SEQ ID NO: 39474 - DNA, 15 bp, Homo sapiens
cctgatactgagatt

SEQ ID NO: 39475 - DNA, 15 bp, Homo sapiens
ccctgatactgagat

SEQ ID NO: 39476 - DNA, 15 bp, Homo sapiens
accctgatactgaga

SEQ ID NO: 39477 - DNA, 15 bp, Homo sapiens
taccctgatactgag

SEQ ID NO: 39478 - DNA, 15 bp, Homo sapiens
ctaccctgatactga

SEQ ID NO: 39479 - DNA, 15 bp, Homo sapiens
gctaccctgatactg

SEQ ID NO: 39480 - DNA, 15 bp, Homo sapiens
tgctaccctgatact

SEQ ID NO: 39481 - DNA, 15 bp, Homo sapiens
atgctaccctgatac

SEQ ID NO: 39482 - DNA, 15 bp, Homo sapiens
aatgctaccctgata

SEQ ID NO: 39483 - DNA, 15 bp, Homo sapiens
aaatgctaccctgat

SEQ ID NO: 39484 - DNA, 15 bp, Homo sapiens
taaatgctaccctga

SEQ ID NO: 39485 - DNA, 15 bp, Homo sapiens
ttaaatgctaccctg

SEQ ID NO: 39486 - DNA, 15 bp, Homo sapiens
tttaaatgctaccct

SEQ ID NO: 39487 - DNA, 15 bp, Homo sapiens
ctttaaatgctaccc

SEQ ID NO: 39488 - DNA, 15 bp, Homo sapiens
gctttaaatgctacc

SEQ ID NO: 39489 - DNA, 15 bp, Homo sapiens
tgctttaaatgctac

SEQ ID NO: 39490 - DNA, 15 bp, Homo sapiens
ttgctttaaatgcta

SEQ ID NO: 39491 - DNA, 15 bp, Homo sapiens
tttgctttaaatgct

SEQ ID NO: 39492 - DNA, 15 bp, Homo sapiens
ttttgctttaaatgc

SEQ ID NO: 39493 - DNA, 15 bp, Homo sapiens
tttttgctttaaatg

SEQ ID NO: 39494 - DNA, 15 bp, Homo sapiens
ctttttgctttaaat

SEQ ID NO: 39495 - DNA, 15 bp, Homo sapiens
gctttttgctttaaa

SEQ ID NO: 39496 - DNA, 15 bp, Homo sapiens
tgctttttgctttaa

SEQ ID NO: 39497 - DNA, 15 bp, Homo sapiens
atgctttttgcttta

SEQ ID NO: 39498 - DNA, 15 bp, Homo sapiens
aatgctttttgcttt

SEQ ID NO: 39499 - DNA, 15 bp, Homo sapiens
taatgctttttgctt

SEQ ID NO: 39500 - DNA, 15 bp, Homo sapiens
ttaatgctttttgct

SEQ ID NO: 39501 - DNA, 15 bp, Homo sapiens
tttaatgctttttgc

SEQ ID NO: 39502 - DNA, 15 bp, Homo sapiens
gtttaatgctttttg

SEQ ID NO: 39503 - DNA, 15 bp, Homo sapiens
agtttaatgcttttt

SEQ ID NO: 39504 - DNA, 15 bp, Homo sapiens
cagtttaatgctttt

SEQ ID NO: 39505 - DNA, 15 bp, Homo sapiens
ccagtttaatgcttt

SEQ ID NO: 39506 - DNA, 15 bp, Homo sapiens
tccagtttaatgctt

SEQ ID NO: 39507 - DNA, 15 bp, Homo sapiens
atccagtttaatgct

SEQ ID NO: 39508 - DNA, 15 bp, Homo sapiens
gatccagtttaatgc

SEQ ID NO: 39509 - DNA, 15 bp, Homo sapiens
tgatccagtttaatg

SEQ ID NO: 39510 - DNA, 15 bp, Homo sapiens
ttgatccagtttaat

SEQ ID NO: 39511 - DNA, 15 bp, Homo sapiens
tttgatccagtttaa

SEQ ID NO: 39512 - DNA, 15 bp, Homo sapiens
ttttgatccagttta

SEQ ID NO: 39513 - DNA, 15 bp, Homo sapiens
tttttgatccagttt

SEQ ID NO: 39514 - DNA, 15 bp, Homo sapiens
atttttgatccagtt

SEQ ID NO: 39515 - DNA, 15 bp, Homo sapiens
catttttgatccagt

SEQ ID NO: 39516 - DNA, 15 bp, Homo sapiens
acatttttgatccag

SEQ ID NO: 39517 - DNA, 15 bp, Homo sapiens
gacatttttgatcca

SEQ ID NO: 39518 - DNA, 15 bp, Homo sapiens
tgacatttttgatcc

SEQ ID NO: 39519 - DNA, 15 bp, Homo sapiens
atgacatttttgatc

SEQ ID NO: 39520 - DNA, 15 bp, Homo sapiens
aatgacatttttgat

SEQ ID NO: 39521 - DNA, 15 bp, Homo sapiens
aaatgacatttttga

SEQ ID NO: 39522 - DNA, 15 bp, Homo sapiens
aaaatgacatttttg

SEQ ID NO: 39523 - DNA, 15 bp, Homo sapiens
taaaatgacattttt

SEQ ID NO: 39524 - DNA, 15 bp, Homo sapiens
gtaaaatgacatttt

SEQ ID NO: 39525 - DNA, 15 bp, Homo sapiens
tgtaaaatgacattt

SEQ ID NO: 39526 - DNA, 15 bp, Homo sapiens
atgtaaaatgacatt

SEQ ID NO: 39527 - DNA, 15 bp, Homo sapiens
gatgtaaaatgacat

SEQ ID NO: 39528 - DNA, 15 bp, Homo sapiens
tgatgtaaaatgaca

SEQ ID NO: 39529 - DNA, 15 bp, Homo sapiens
ttgatgtaaaatgac

SEQ ID NO: 39530 - DNA, 15 bp, Homo sapiens
gttgatgtaaaatga

SEQ ID NO: 39531 - DNA, 15 bp, Homo sapiens
tgttgatgtaaaatg

SEQ ID NO: 39532 - DNA, 15 bp, Homo sapiens
gtgttgatgtaaaat

SEQ ID NO: 39533 - DNA, 15 bp, Homo sapiens
tgtgttgatgtaaaa

SEQ ID NO: 39534 - DNA, 15 bp, Homo sapiens
ctgtgttgatgtaaa

SEQ ID NO: 39535 - DNA, 15 bp, Homo sapiens
cctgtgttgatgtaa

SEQ ID NO: 39536 - DNA, 15 bp, Homo sapiens
ccctgtgttgatgta

SEQ ID NO: 39537 - DNA, 15 bp, Homo sapiens
accctgtgttgatgt

SEQ ID NO: 39538 - DNA, 15 bp, Homo sapiens
taccctgtgttgatg

SEQ ID NO: 39539 - DNA, 15 bp, Homo sapiens
gtaccctgtgttgat

SEQ ID NO: 39540 - DNA, 15 bp, Homo sapiens
tgtaccctgtgttga

SEQ ID NO: 39541 - DNA, 15 bp, Homo sapiens
gtgtaccctgtgttg

SEQ ID NO: 39542 - DNA, 15 bp, Homo sapiens
agtgtaccctgtgtt

SEQ ID NO: 39543 - DNA, 15 bp, Homo sapiens
gagtgtaccctgtgt

SEQ ID NO: 39544 - DNA, 15 bp, Homo sapiens
ggagtgtaccctgtg

SEQ ID NO: 39545 - DNA, 15 bp, Homo sapiens
tggagtgtaccctgt

SEQ ID NO: 39546 - DNA, 15 bp, Homo sapiens
ctggagtgtaccctg

SEQ ID NO: 39547 - DNA, 15 bp, Homo sapiens
cctggagtgtaccct

SEQ ID NO: 39548 - DNA, 15 bp, Homo sapiens
acctggagtgtaccc

SEQ ID NO: 39549 - DNA, 15 bp, Homo sapiens
tacctggagtgtacc

SEQ ID NO: 39550 - DNA, 15 bp, Homo sapiens
ttacctggagtgtac

SEQ ID NO: 39551 - DNA, 15 bp, Homo sapiens
tttacctggagtgta

SEQ ID NO: 39552 - DNA, 15 bp, Homo sapiens
ctttacctggagtgt

SEQ ID NO: 39553 - DNA, 15 bp, Homo sapiens
tctttacctggagtg

SEQ ID NO: 39554 - DNA, 15 bp, Homo sapiens
gtctttacctggagt

SEQ ID NO: 39555 - DNA, 15 bp, Homo sapiens
agtctttacctggag

SEQ ID NO: 39556 - DNA, 15 bp, Homo sapiens
aagtctttacctgga

SEQ ID NO: 39557 - DNA, 15 bp, Homo sapiens
taagtctttacctgg

SEQ ID NO: 39558 - DNA, 15 bp, Homo sapiens
ttaagtctttacctg

SEQ ID NO: 39559 - DNA, 15 bp, Homo sapiens
gttaagtctttacct

SEQ ID NO: 39560 - DNA, 15 bp, Homo sapiens
tgttaagtctttacc

SEQ ID NO: 39561 - DNA, 15 bp, Homo sapiens
ctgttaagtctttac

SEQ ID NO: 39562 - DNA, 15 bp, Homo sapiens
actgttaagtcttta

SEQ ID NO: 39563 - DNA, 15 bp, Homo sapiens
aactgttaagtcttt

SEQ ID NO: 39564 - DNA, 15 bp, Homo sapiens
taactgttaagtctt

SEQ ID NO: 39565 - DNA, 15 bp, Homo sapiens
ataactgttaagtct

SEQ ID NO: 39566 - DNA, 15 bp, Homo sapiens
cataactgttaagtc

SEQ ID NO: 39567 - DNA, 15 bp, Homo sapiens
tcataactgttaagt

SEQ ID NO: 39568 - DNA, 15 bp, Homo sapiens
ttcataactgttaag

SEQ ID NO: 39569 - DNA, 15 bp, Homo sapiens
gttcataactgttaa

SEQ ID NO: 39570 - DNA, 15 bp, Homo sapiens
cgttcataactgtta

SEQ ID NO: 39571 - DNA, 15 bp, Homo sapiens
tcgttcataactgtt

SEQ ID NO: 39572 - DNA, 15 bp, Homo sapiens
ttcgttcataactgt

SEQ ID NO: 39573 - DNA, 15 bp, Homo sapiens
attcgttcataactg

SEQ ID NO: 39574 - DNA, 15 bp, Homo sapiens
cattcgttcataact

SEQ ID NO: 39575 - DNA, 15 bp, Homo sapiens
acattcgttcataac

SEQ ID NO: 39576 - DNA, 15 bp, Homo sapiens
cacattcgttcataa

SEQ ID NO: 39577 - DNA, 15 bp, Homo sapiens
gcacattcgttcata

SEQ ID NO: 39578 - DNA, 15 bp, Homo sapiens
agcacattcgttcat

SEQ ID NO: 39579 - DNA, 15 bp, Homo sapiens
tagcacattcgttca

SEQ ID NO: 39580 - DNA, 15 bp, Homo sapiens
ttagcacattcgttc

SEQ ID NO: 39581 - DNA, 15 bp, Homo sapiens
tttagcacattcgtt

SEQ ID NO: 39582 - DNA, 15 bp, Homo sapiens
gtttagcacattcgt

SEQ ID NO: 39583 - DNA, 15 bp, Homo sapiens
tgtttagcacattcg

SEQ ID NO: 39584 - DNA, 15 bp, Homo sapiens
atgtttagcacattc

SEQ ID NO: 39585 - DNA, 15 bp, Homo sapiens
gatgtttagcacatt

SEQ ID NO: 39586 - DNA, 15 bp, Homo sapiens
tgatgtttagcacat

SEQ ID NO: 39587 - DNA, 15 bp, Homo sapiens
ttgatgtttagcaca

SEQ ID NO: 39588 - DNA, 15 bp, Homo sapiens
tttgatgtttagcac

SEQ ID NO: 39589 - DNA, 15 bp, Homo sapiens
ttttgatgtttagca

SEQ ID NO: 39590 - DNA, 15 bp, Homo sapiens
attttgatgtttagc

SEQ ID NO: 39591 - DNA, 15 bp, Homo sapiens
cattttgatgtttag

SEQ ID NO: 39592 - DNA, 15 bp, Homo sapiens
acattttgatgttta

SEQ ID NO: 39593 - DNA, 15 bp, Homo sapiens
tacattttgatgttt

SEQ ID NO: 39594 - DNA, 15 bp, Homo sapiens
atacattttgatgtt

SEQ ID NO: 39595 - DNA, 15 bp, Homo sapiens
aatacattttgatgt

SEQ ID NO: 39596 - DNA, 15 bp, Homo sapiens
taatacattttgatg

SEQ ID NO: 39597 - DNA, 15 bp, Homo sapiens
ttaatacattttgat

SEQ ID NO: 39598 - DNA, 15 bp, Homo sapiens
cttaatacattttga

SEQ ID NO: 39599 - DNA, 15 bp, Homo sapiens
acttaatacattttg

SEQ ID NO: 39600 - DNA, 15 bp, Homo sapiens
tacttaatacatttt

SEQ ID NO: 39601 - DNA, 15 bp, Homo sapiens
ttacttaatacattt

SEQ ID NO: 39602 - DNA, 15 bp, Homo sapiens
tttacttaatacatt

SEQ ID NO: 39603 - DNA, 15 bp, Homo sapiens
ttttacttaatacat

SEQ ID NO: 39604 - DNA, 15 bp, Homo sapiens
cttttacttaataca

SEQ ID NO: 39605 - DNA, 15 bp, Homo sapiens
gcttttacttaatac

SEQ ID NO: 39606 - DNA, 15 bp, Homo sapiens
agcttttacttaata

SEQ ID NO: 39607 - DNA, 15 bp, Homo sapiens
cagcttttacttaat

SEQ ID NO: 39608 - DNA, 15 bp, Homo sapiens
tcagcttttacttaa

SEQ ID NO: 39609 - DNA, 15 bp, Homo sapiens
ttcagcttttactta

SEQ ID NO: 39610 - DNA, 15 bp, Homo sapiens
tttcagcttttactt

SEQ ID NO: 39611 - DNA, 15 bp, Homo sapiens
ctttcagcttttact

SEQ ID NO: 39612 - DNA, 15 bp, Homo sapiens
tctttcagcttttac

SEQ ID NO: 39613 - DNA, 15 bp, Homo sapiens
ttctttcagctttta

SEQ ID NO: 39614 - DNA, 15 bp, Homo sapiens
tttctttcagctttt

SEQ ID NO: 39615 - DNA, 15 bp, Homo sapiens
atttctttcagcttt

SEQ ID NO: 39616 - DNA, 15 bp, Homo sapiens
catttctttcagctt

SEQ ID NO: 39617 - DNA, 15 bp, Homo sapiens
tcatttctttcagct

SEQ ID NO: 39618 - DNA, 15 bp, Homo sapiens
ttcatttctttcagc

SEQ ID NO: 39619 - DNA, 15 bp, Homo sapiens
cttcatttctttcag

SEQ ID NO: 39620 - DNA, 15 bp, Homo sapiens
tcttcatttctttca

SEQ ID NO: 39621 - DNA, 15 bp, Homo sapiens
ttcttcatttctttc

SEQ ID NO: 39622 - DNA, 15 bp, Homo sapiens
attcttcatttcttt

SEQ ID NO: 39623 - DNA, 15 bp, Homo sapiens
tattcttcatttctt

SEQ ID NO: 39624 - DNA, 15 bp, Homo sapiens
ttattcttcatttct

SEQ ID NO: 39625 - DNA, 15 bp, Homo sapiens
attattcttcatttc

SEQ ID NO: 39626 - DNA, 15 bp, Homo sapiens
aattattcttcattt

SEQ ID NO: 39627 - DNA, 15 bp, Homo sapiens
caattattcttcatt

SEQ ID NO: 39628 - DNA, 15 bp, Homo sapiens
ccaattattcttcat

SEQ ID NO: 39629 - DNA, 15 bp, Homo sapiens
accaattattcttca

SEQ ID NO: 39630 - DNA, 15 bp, Homo sapiens
taccaattattcttc

SEQ ID NO: 39631 - DNA, 15 bp, Homo sapiens
ctaccaattattctt

SEQ ID NO: 39632 - DNA, 15 bp, Homo sapiens
tctaccaattattct

SEQ ID NO: 39633 - DNA, 15 bp, Homo sapiens
ttctaccaattattc

SEQ ID NO: 39634 - DNA, 15 bp, Homo sapiens
tttctaccaattatt

SEQ ID NO: 39635 - DNA, 15 bp, Homo sapiens
ttttctaccaattat

SEQ ID NO: 39636 - DNA, 15 bp, Homo sapiens
cttttctaccaatta

SEQ ID NO: 39637 - DNA, 15 bp, Homo sapiens
gcttttctaccaatt

SEQ ID NO: 39638 - DNA, 15 bp, Homo sapiens
tgcttttctaccaat

SEQ ID NO: 39639 - DNA, 15 bp, Homo sapiens
ttgcttttctaccaa

SEQ ID NO: 39640 - DNA, 15 bp, Homo sapiens
attgcttttctacca

SEQ ID NO: 39641 - DNA, 15 bp, Homo sapiens
cattgcttttctacc

SEQ ID NO: 39642 - DNA, 15 bp, Homo sapiens
tcattgcttttctac

SEQ ID NO: 39643 - DNA, 15 bp, Homo sapiens
atcattgcttttcta

SEQ ID NO: 39644 - DNA, 15 bp, Homo sapiens
tatcattgcttttct

SEQ ID NO: 39645 - DNA, 15 bp, Homo sapiens
ctatcattgcttttc

SEQ ID NO: 39646 - DNA, 15 bp, Homo sapiens
cctatcattgctttt

SEQ ID NO: 39647 - DNA, 15 bp, Homo sapiens
tcctatcattgcttt

SEQ ID NO: 39648 - DNA, 15 bp, Homo sapiens
ttcctatcattgctt

SEQ ID NO: 39649 - DNA, 15 bp, Homo sapiens
attcctatcattgct

SEQ ID NO: 39650 - DNA, 15 bp, Homo sapiens
gattcctatcattgc

SEQ ID NO: 39651 - DNA, 15 bp, Homo sapiens
ggattcctatcattg

SEQ ID NO: 39652 - DNA, 15 bp, Homo sapiens
aggattcctatcatt

SEQ ID NO: 39653 - DNA, 15 bp, Homo sapiens
aaggattcctatcat

SEQ ID NO: 39654 - DNA, 15 bp, Homo sapiens
taaggattcctatca

SEQ ID NO: 39655 - DNA, 15 bp, Homo sapiens
ttaaggattcctatc

SEQ ID NO: 39656 - DNA, 15 bp, Homo sapiens
attaaggattcctat

SEQ ID NO: 39657 - DNA, 15 bp, Homo sapiens
cattaaggattccta

SEQ ID NO: 39658 - DNA, 15 bp, Homo sapiens
acattaaggattcct

SEQ ID NO: 39659 - DNA, 15 bp, Homo sapiens
tacattaaggattcc

SEQ ID NO: 39660 - DNA, 15 bp, Homo sapiens
gtacattaaggattc

SEQ ID NO: 39661 - DNA, 15 bp, Homo sapiens
agtacattaaggatt

SEQ ID NO: 39662 - DNA, 15 bp, Homo sapiens
aagtacattaaggat

SEQ ID NO: 39663 - DNA, 15 bp, Homo sapiens
gaagtacattaagga

SEQ ID NO: 39664 - DNA, 15 bp, Homo sapiens
tgaagtacattaagg

SEQ ID NO: 39665 - DNA, 15 bp, Homo sapiens
ttgaagtacattaag

SEQ ID NO: 39666 - DNA, 15 bp, Homo sapiens
tttgaagtacattaa

SEQ ID NO: 39667 - DNA, 15 bp, Homo sapiens
ttttgaagtacatta

SEQ ID NO: 39668 - DNA, 15 bp, Homo sapiens
cttttgaagtacatt

SEQ ID NO: 39669 - DNA, 15 bp, Homo sapiens
ccttttgaagtacat

SEQ ID NO: 39670 - DNA, 15 bp, Homo sapiens
gccttttgaagtaca

SEQ ID NO: 39671 - DNA, 15 bp, Homo sapiens
tgccttttgaagtac

SEQ ID NO: 39672 - DNA, 15 bp, Homo sapiens
gtgccttttgaagta

SEQ ID NO: 39673 - DNA, 15 bp, Homo sapiens
cgtgccttttgaagt

SEQ ID NO: 39674 - DNA, 15 bp, Homo sapiens
tcgtgccttttgaag

SEQ ID NO: 39675 - DNA, 15 bp, Homo sapiens
ttcgtgccttttgaa

SEQ ID NO: 39676 - DNA, 15 bp, Homo sapiens
cttcgtgccttttga

SEQ ID NO: 39677 - DNA, 15 bp, Homo sapiens
acttcgtgccttttg

SEQ ID NO: 39678 - DNA, 15 bp, Homo sapiens
tacttcgtgcctttt

SEQ ID NO: 39679 - DNA, 15 bp, Homo sapiens
ttacttcgtgccttt

SEQ ID NO: 39680 - DNA, 15 bp, Homo sapiens
cttacttcgtgcctt

SEQ ID NO: 39681 - DNA, 15 bp, Homo sapiens
tcttacttcgtgcct

SEQ ID NO: 39682 - DNA, 15 bp, Homo sapiens
ttcttacttcgtgcc

SEQ ID NO: 39683 - DNA, 15 bp, Homo sapiens
cttcttacttcgtgc

SEQ ID NO: 39684 - DNA, 15 bp, Homo sapiens
ccttcttacttcgtg

SEQ ID NO: 39685 - DNA, 15 bp, Homo sapiens
accttcttacttcgt

SEQ ID NO: 39686 - DNA, 15 bp, Homo sapiens
taccttcttacttcg

SEQ ID NO: 39687 - DNA, 15 bp, Homo sapiens
gtaccttcttacttc

SEQ ID NO: 39688 - DNA, 15 bp, Homo sapiens
tgtaccttcttactt

SEQ ID NO: 39689 - DNA, 15 bp, Homo sapiens
ctgtaccttcttact

SEQ ID NO: 39690 - DNA, 15 bp, Homo sapiens
actgtaccttcttac

SEQ ID NO: 39691 - DNA, 15 bp, Homo sapiens
gactgtaccttctta

SEQ ID NO: 39692 - DNA, 15 bp, Homo sapiens
tgactgtaccttctt

SEQ ID NO: 39693 - DNA, 15 bp, Homo sapiens
atgactgtaccttct

SEQ ID NO: 39694 - DNA, 15 bp, Homo sapiens
catgactgtaccttc

SEQ ID NO: 39695 - DNA, 15 bp, Homo sapiens
acatgactgtacctt

SEQ ID NO: 39696 - DNA, 15 bp, Homo sapiens
tacatgactgtacct

SEQ ID NO: 39697 - DNA, 15 bp, Homo sapiens
gtacatgactgtacc

SEQ ID NO: 39698 - DNA, 15 bp, Homo sapiens
ggtacatgactgtac

SEQ ID NO: 39699 - DNA, 15 bp, Homo sapiens
tggtacatgactgta

SEQ ID NO: 39700 - DNA, 15 bp, Homo sapiens
gtggtacatgactgt

SEQ ID NO: 39701 - DNA, 15 bp, Homo sapiens
tgtggtacatgactg

SEQ ID NO: 39702 - DNA, 15 bp, Homo sapiens
atgtggtacatgact

SEQ ID NO: 39703 - DNA, 15 bp, Homo sapiens
tatgtggtacatgac

SEQ ID NO: 39704 - DNA, 15 bp, Homo sapiens
ttatgtggtacatga

SEQ ID NO: 39705 - DNA, 15 bp, Homo sapiens
attatgtggtacatg

SEQ ID NO: 39706 - DNA, 15 bp, Homo sapiens
cattatgtggtacat

SEQ ID NO: 39707 - DNA, 15 bp, Homo sapiens
tcattatgtggtaca

SEQ ID NO: 39708 - DNA, 15 bp, Homo sapiens
atcattatgtggtac

SEQ ID NO: 39709 - DNA, 15 bp, Homo sapiens
catcattatgtggta

SEQ ID NO: 39710 - DNA, 15 bp, Homo sapiens
acatcattatgtggt

SEQ ID NO: 39711 - DNA, 15 bp, Homo sapiens
aacatcattatgtgg

SEQ ID NO: 39712 - DNA, 15 bp, Homo sapiens
aaacatcattatgtg

SEQ ID NO: 39713 - DNA, 15 bp, Homo sapiens
caaacatcattatgt

SEQ ID NO: 39714 - DNA, 15 bp, Homo sapiens
tcaaacatcattatg

SEQ ID NO: 39715 - DNA, 15 bp, Homo sapiens
ctcaaacatcattat

SEQ ID NO: 39716 - DNA, 15 bp, Homo sapiens
actcaaacatcatta

SEQ ID NO: 39717 - DNA, 15 bp, Homo sapiens
gactcaaacatcatt

SEQ ID NO: 39718 - DNA, 15 bp, Homo sapiens
tgactcaaacatcat

SEQ ID NO: 39719 - DNA, 15 bp, Homo sapiens
ttgactcaaacatca

SEQ ID NO: 39720 - DNA, 15 bp, Homo sapiens
gttgactcaaacatc

SEQ ID NO: 39721 - DNA, 15 bp, Homo sapiens
tgttgactcaaacat

SEQ ID NO: 39722 - DNA, 15 bp, Homo sapiens
gtgttgactcaaaca

SEQ ID NO: 39723 - DNA, 15 bp, Homo sapiens
ggtgttgactcaaac

SEQ ID NO: 39724 - DNA, 15 bp, Homo sapiens
aggtgttgactcaaa

SEQ ID NO: 39725 - DNA, 15 bp, Homo sapiens
caggtgttgactcaa

SEQ ID NO: 39726 - DNA, 15 bp, Homo sapiens
tcaggtgttgactca

SEQ ID NO: 39727 - DNA, 15 bp, Homo sapiens
gtcaggtgttgactc

SEQ ID NO: 39728 - DNA, 15 bp, Homo sapiens
ggtcaggtgttgact

SEQ ID NO: 39729 - DNA, 15 bp, Homo sapiens
aggtcaggtgttgac

SEQ ID NO: 39730 - DNA, 15 bp, Homo sapiens
caggtcaggtgttga

SEQ ID NO: 39731 - DNA, 15 bp, Homo sapiens
ccaggtcaggtgttg

SEQ ID NO: 39732 - DNA, 15 bp, Homo sapiens
accaggtcaggtgtt

SEQ ID NO: 39733 - DNA, 15 bp, Homo sapiens
taccaggtcaggtgt

SEQ ID NO: 39734 - DNA, 15 bp, Homo sapiens
ataccaggtcaggtg

SEQ ID NO: 39735 - DNA, 15 bp, Homo sapiens
tataccaggtcaggt

SEQ ID NO: 39736 - DNA, 15 bp, Homo sapiens
gtataccaggtcagg

SEQ ID NO: 39737 - DNA, 15 bp, Homo sapiens
cgtataccaggtcag

SEQ ID NO: 39738 - DNA, 15 bp, Homo sapiens
tcgtataccaggtca

SEQ ID NO: 39739 - DNA, 15 bp, Homo sapiens
gtcgtataccaggtc

SEQ ID NO: 39740 - DNA, 15 bp, Homo sapiens
tgtcgtataccaggt

SEQ ID NO: 39741 - DNA, 15 bp, Homo sapiens
ttgtcgtataccagg

SEQ ID NO: 39742 - DNA, 15 bp, Homo sapiens
attgtcgtataccag

SEQ ID NO: 39743 - DNA, 15 bp, Homo sapiens
cattgtcgtatacca

SEQ ID NO: 39744 - DNA, 15 bp, Homo sapiens
ccattgtcgtatacc

SEQ ID NO: 39745 - DNA, 15 bp, Homo sapiens
accattgtcgtatac

SEQ ID NO: 39746 - DNA, 15 bp, Homo sapiens
gaccattgtcgtata

SEQ ID NO: 39747 - DNA, 15 bp, Homo sapiens
ggaccattgtcgtat

SEQ ID NO: 39748 - DNA, 15 bp, Homo sapiens
aggaccattgtcgta

SEQ ID NO: 39749 - DNA, 15 bp, Homo sapiens
taggaccattgtcgt

SEQ ID NO: 39750 - DNA, 15 bp, Homo sapiens
ataggaccattgtcg

SEQ ID NO: 39751 - DNA, 15 bp, Homo sapiens
tataggaccattgtc

SEQ ID NO: 39752 - DNA, 15 bp, Homo sapiens
ttataggaccattgt

SEQ ID NO: 39753 - DNA, 15 bp, Homo sapiens
tttataggaccattg

SEQ ID NO: 39754 - DNA, 15 bp, Homo sapiens
ttttataggaccatt

SEQ ID NO: 39755 - DNA, 15 bp, Homo sapiens
attttataggaccat

SEQ ID NO: 39756 - DNA, 15 bp, Homo sapiens
aattttataggacca

SEQ ID NO: 39757 - DNA, 15 bp, Homo sapiens
taattttataggacc

SEQ ID NO: 39758 - DNA, 15 bp, Homo sapiens
ataattttataggac

SEQ ID NO: 39759 - DNA, 15 bp, Homo sapiens
tataattttatagga

SEQ ID NO: 39760 - DNA, 15 bp, Homo sapiens
ttataattttatagg

SEQ ID NO: 39761 - DNA, 15 bp, Homo sapiens
attataattttatag

SEQ ID NO: 39762 - DNA, 15 bp, Homo sapiens
cattataattttata

SEQ ID NO: 39763 - DNA, 15 bp, Homo sapiens
ccattataattttat

SEQ ID NO: 39764 - DNA, 15 bp, Homo sapiens
tccattataatttta

SEQ ID NO: 39765 - DNA, 15 bp, Homo sapiens
ctccattataatttt

SEQ ID NO: 39766 - DNA, 15 bp, Homo sapiens
gctccattataattt

SEQ ID NO: 39767 - DNA, 15 bp, Homo sapiens
agctccattataatt

SEQ ID NO: 39768 - DNA, 15 bp, Homo sapiens
tagctccattataat

SEQ ID NO: 39769 - DNA, 15 bp, Homo sapiens
ttagctccattataa

SEQ ID NO: 39770 - DNA, 15 bp, Homo sapiens
tttagctccattata

SEQ ID NO: 39771 - DNA, 15 bp, Homo sapiens
ttttagctccattat

SEQ ID NO: 39772 - DNA, 15 bp, Homo sapiens
tttttagctccatta

SEQ ID NO: 39773 - DNA, 15 bp, Homo sapiens
ctttttagctccatt

SEQ ID NO: 39774 - DNA, 15 bp, Homo sapiens
gctttttagctccat

SEQ ID NO: 39775 - DNA, 15 bp, Homo sapiens
agctttttagctcca

SEQ ID NO: 39776 - DNA, 15 bp, Homo sapiens
aagctttttagctcc

SEQ ID NO: 39777 - DNA, 15 bp, Homo sapiens
gaagctttttagctc

SEQ ID NO: 39778 - DNA, 15 bp, Homo sapiens
agaagctttttagct

SEQ ID NO: 39779 - DNA, 15 bp, Homo sapiens
tagaagctttttagc

SEQ ID NO: 39780 - DNA, 15 bp, Homo sapiens
atagaagctttttag

SEQ ID NO: 39781 - DNA, 15 bp, Homo sapiens
gatagaagcttttta

SEQ ID NO: 39782 - DNA, 15 bp, Homo sapiens
tgatagaagcttttt

SEQ ID NO: 39783 - DNA, 15 bp, Homo sapiens
gtgatagaagctttt

SEQ ID NO: 39784 - DNA, 15 bp, Homo sapiens
ggtgatagaagcttt

SEQ ID NO: 39785 - DNA, 15 bp, Homo sapiens
aggtgatagaagctt

SEQ ID NO: 39786 - DNA, 15 bp, Homo sapiens
taggtgatagaagct

SEQ ID NO: 39787 - DNA, 15 bp, Homo sapiens
ctaggtgatagaagc

SEQ ID NO: 39788 - DNA, 15 bp, Homo sapiens
actaggtgatagaag

SEQ ID NO: 39789 - DNA, 15 bp, Homo sapiens
cactaggtgatagaa

SEQ ID NO: 39790 - DNA, 15 bp, Homo sapiens
tcactaggtgataga

SEQ ID NO: 39791 - DNA, 15 bp, Homo sapiens
atcactaggtgatag

SEQ ID NO: 39792 - DNA, 15 bp, Homo sapiens
catcactaggtgata

SEQ ID NO: 39793 - DNA, 15 bp, Homo sapiens
acatcactaggtgat

SEQ ID NO: 39794 - DNA, 15 bp, Homo sapiens
aacatcactaggtga

SEQ ID NO: 39795 - DNA, 15 bp, Homo sapiens
caacatcactaggtg

SEQ ID NO: 39796 - DNA, 15 bp, Homo sapiens
tcaacatcactaggt

SEQ ID NO: 39797 - DNA, 15 bp, Homo sapiens
ttcaacatcactagg

SEQ ID NO: 39798 - DNA, 15 bp, Homo sapiens
cttcaacatcactag

SEQ ID NO: 39799 - DNA, 15 bp, Homo sapiens
gcttcaacatcacta

SEQ ID NO: 39800 - DNA, 15 bp, Homo sapiens
ggcttcaacatcact

SEQ ID NO: 39801 - DNA, 15 bp, Homo sapiens
cggcttcaacatcac

SEQ ID NO: 39802 - DNA, 15 bp, Homo sapiens
acggcttcaacatca

SEQ ID NO: 39803 - DNA, 15 bp, Homo sapiens
aacggcttcaacatc

SEQ ID NO: 39804 - DNA, 15 bp, Homo sapiens
caacggcttcaacat

SEQ ID NO: 39805 - DNA, 15 bp, Homo sapiens
gcaacggcttcaaca

SEQ ID NO: 39806 - DNA, 15 bp, Homo sapiens
tgcaacggcttcaac

SEQ ID NO: 39807 - DNA, 15 bp, Homo sapiens
ttgcaacggcttcaa

SEQ ID NO: 39808 - DNA, 15 bp, Homo sapiens
attgcaacggcttca

SEQ ID NO: 39809 - DNA, 15 bp, Homo sapiens
cattgcaacggcttc

SEQ ID NO: 39810 - DNA, 15 bp, Homo sapiens
gcattgcaacggctt

SEQ ID NO: 39811 - DNA, 15 bp, Homo sapiens
tgcattgcaacggct

SEQ ID NO: 39812 - DNA, 15 bp, Homo sapiens
ttgcattgcaacggc

SEQ ID NO: 39813 - DNA, 15 bp, Homo sapiens
attgcattgcaacgg

SEQ ID NO: 39814 - DNA, 15 bp, Homo sapiens
cattgcattgcaacg

SEQ ID NO: 39815 - DNA, 15 bp, Homo sapiens
acattgcattgcaac

SEQ ID NO: 39816 - DNA, 15 bp, Homo sapiens
tacattgcattgcaa

SEQ ID NO: 39817 - DNA, 15 bp, Homo sapiens
atacattgcattgca

SEQ ID NO: 39818 - DNA, 15 bp, Homo sapiens
gatacattgcattgc

SEQ ID NO: 39819 - DNA, 15 bp, Homo sapiens
tgatacattgcattg

SEQ ID NO: 39820 - DNA, 15 bp, Homo sapiens
gtgatacattgcatt

SEQ ID NO: 39821 - DNA, 15 bp, Homo sapiens
agtgatacattgcat

SEQ ID NO: 39822 - DNA, 15 bp, Homo sapiens
gagtgatacattgca

SEQ ID NO: 39823 - DNA, 15 bp, Homo sapiens
tgagtgatacattgc

SEQ ID NO: 39824 - DNA, 15 bp, Homo sapiens
gtgagtgatacattg

SEQ ID NO: 39825 - DNA, 15 bp, Homo sapiens
tgtgagtgatacatt

SEQ ID NO: 39826 - DNA, 15 bp, Homo sapiens
atgtgagtgatacat

SEQ ID NO: 39827 - DNA, 15 bp, Homo sapiens
catgtgagtgataca

SEQ ID NO: 39828 - DNA, 15 bp, Homo sapiens
acatgtgagtgatac

SEQ ID NO: 39829 - DNA, 15 bp, Homo sapiens
aacatgtgagtgata

SEQ ID NO: 39830 - DNA, 15 bp, Homo sapiens
aaacatgtgagtgat

SEQ ID NO: 39831 - DNA, 15 bp, Homo sapiens
caaacatgtgagtga

SEQ ID NO: 39832 - DNA, 15 bp, Homo sapiens
acaaacatgtgagtg

SEQ ID NO: 39833 - DNA, 15 bp, Homo sapiens
cacaaacatgtgagt

SEQ ID NO: 39834 - DNA, 15 bp, Homo sapiens
ccacaaacatgtgag

SEQ ID NO: 39835 - DNA, 15 bp, Homo sapiens
accacaaacatgtga

SEQ ID NO: 39836 - DNA, 15 bp, Homo sapiens
taccacaaacatgtg

SEQ ID NO: 39837 - DNA, 15 bp, Homo sapiens
ttaccacaaacatgt

SEQ ID NO: 39838 - DNA, 15 bp, Homo sapiens
attaccacaaacatg

SEQ ID NO: 39839 - DNA, 15 bp, Homo sapiens
cattaccacaaacat

SEQ ID NO: 39840 - DNA, 15 bp, Homo sapiens
gcattaccacaaaca

SEQ ID NO: 39841 - DNA, 15 bp, Homo sapiens
agcattaccacaaac

SEQ ID NO: 39842 - DNA, 15 bp, Homo sapiens
cagcattaccacaaa

SEQ ID NO: 39843 - DNA, 15 bp, Homo sapiens
ccagcattaccacaa

SEQ ID NO: 39844 - DNA, 15 bp, Homo sapiens
accagcattaccaca

SEQ ID NO: 39845 - DNA, 15 bp, Homo sapiens
caccagcattaccac

SEQ ID NO: 39846 - DNA, 15 bp, Homo sapiens
acaccagcattacca

SEQ ID NO: 39847 - DNA, 15 bp, Homo sapiens
tacaccagcattacc

SEQ ID NO: 39848 - DNA, 15 bp, Homo sapiens
ttacaccagcattac

SEQ ID NO: 39849 - DNA, 15 bp, Homo sapiens
cttacaccagcatta

SEQ ID NO: 39850 - DNA, 15 bp, Homo sapiens
gcttacaccagcatt

SEQ ID NO: 39851 - DNA, 15 bp, Homo sapiens
tgcttacaccagcat

SEQ ID NO: 39852 - DNA, 15 bp, Homo sapiens
ttgcttacaccagca

SEQ ID NO: 39853 - DNA, 15 bp, Homo sapiens
tttgcttacaccagc

SEQ ID NO: 39854 - DNA, 15 bp, Homo sapiens
gtttgcttacaccag

SEQ ID NO: 39855 - DNA, 15 bp, Homo sapiens
agtttgcttacacca

SEQ ID NO: 39856 - DNA, 15 bp, Homo sapiens
aagtttgcttacacc

SEQ ID NO: 39857 - DNA, 15 bp, Homo sapiens
taagtttgcttacac

SEQ ID NO: 39858 - DNA, 15 bp, Homo sapiens
gtaagtttgcttaca

SEQ ID NO: 39859 - DNA, 15 bp, Homo sapiens
agtaagtttgcttac

SEQ ID NO: 39860 - DNA, 15 bp, Homo sapiens
cagtaagtttgctta

SEQ ID NO: 39861 - DNA, 15 bp, Homo sapiens
acagtaagtttgctt

SEQ ID NO: 39862 - DNA, 15 bp, Homo sapiens
tacagtaagtttgct

SEQ ID NO: 39863 - DNA, 15 bp, Homo sapiens
gtacagtaagtttgc

SEQ ID NO: 39864 - DNA, 15 bp, Homo sapiens
agtacagtaagtttg

SEQ ID NO: 39865 - DNA, 15 bp, Homo sapiens
cagtacagtaagttt

SEQ ID NO: 39866 - DNA, 15 bp, Homo sapiens
acagtacagtaagtt

SEQ ID NO: 39867 - DNA, 15 bp, Homo sapiens
gacagtacagtaagt

SEQ ID NO: 39868 - DNA, 15 bp, Homo sapiens
tgacagtacagtaag

SEQ ID NO: 39869 - DNA, 15 bp, Homo sapiens
ctgacagtacagtaa

SEQ ID NO: 39870 - DNA, 15 bp, Homo sapiens
actgacagtacagta

SEQ ID NO: 39871 - DNA, 15 bp, Homo sapiens
aactgacagtacagt

SEQ ID NO: 39872 - DNA, 15 bp, Homo sapiens
caactgacagtacag

SEQ ID NO: 39873 - DNA, 15 bp, Homo sapiens
acaactgacagtaca

SEQ ID NO: 39874 - DNA, 15 bp, Homo sapiens
tacaactgacagtac

SEQ ID NO: 39875 - DNA, 15 bp, Homo sapiens
atacaactgacagta

SEQ ID NO: 39876 - DNA, 15 bp, Homo sapiens
tatacaactgacagt

SEQ ID NO: 39877 - DNA, 15 bp, Homo sapiens
ttatacaactgacag

SEQ ID NO: 39878 - DNA, 15 bp, Homo sapiens
tttatacaactgaca

SEQ ID NO: 39879 - DNA, 15 bp, Homo sapiens
ttttatacaactgac

SEQ ID NO: 39880 - DNA, 15 bp, Homo sapiens
cttttatacaactga

SEQ ID NO: 39881 - DNA, 15 bp, Homo sapiens
gcttttatacaactg

SEQ ID NO: 39882 - DNA, 15 bp, Homo sapiens
tgcttttatacaact

SEQ ID NO: 39883 - DNA, 15 bp, Homo sapiens
atgcttttatacaac

SEQ ID NO: 39884 - DNA, 15 bp, Homo sapiens
tatgcttttatacaa

SEQ ID NO: 39885 - DNA, 15 bp, Homo sapiens
ctatgcttttataca

SEQ ID NO: 39886 - DNA, 15 bp, Homo sapiens
gctatgcttttatac

SEQ ID NO: 39887 - DNA, 15 bp, Homo sapiens
tgctatgcttttata

SEQ ID NO: 39888 - DNA, 15 bp, Homo sapiens
gtgctatgcttttat

SEQ ID NO: 39889 - DNA, 15 bp, Homo sapiens
tgtgctatgctttta

SEQ ID NO: 39890 - DNA, 15 bp, Homo sapiens
ctgtgctatgctttt

SEQ ID NO: 39891 - DNA, 15 bp, Homo sapiens
actgtgctatgcttt

SEQ ID NO: 39892 - DNA, 15 bp, Homo sapiens
aactgtgctatgctt

SEQ ID NO: 39893 - DNA, 15 bp, Homo sapiens
taactgtgctatgct

SEQ ID NO: 39894 - DNA, 15 bp, Homo sapiens
ataactgtgctatgc

SEQ ID NO: 39895 - DNA, 15 bp, Homo sapiens
cataactgtgctatg

SEQ ID NO: 39896 - DNA, 15 bp, Homo sapiens
acataactgtgctat

SEQ ID NO: 39897 - DNA, 15 bp, Homo sapiens
aacataactgtgcta

SEQ ID NO: 39898 - DNA, 15 bp, Homo sapiens
gaacataactgtgct

SEQ ID NO: 39899 - DNA, 15 bp, Homo sapiens
tgaacataactgtgc

SEQ ID NO: 39900 - DNA, 15 bp, Homo sapiens
ctgaacataactgtg

SEQ ID NO: 39901 - DNA, 15 bp, Homo sapiens
gctgaacataactgt

SEQ ID NO: 39902 - DNA, 15 bp, Homo sapiens
tgctgaacataactg

SEQ ID NO: 39903 - DNA, 15 bp, Homo sapiens
gtgctgaacataact

SEQ ID NO: 39904 - DNA, 15 bp, Homo sapiens
tgtgctgaacataac

SEQ ID NO: 39905 - DNA, 15 bp, Homo sapiens
atgtgctgaacataa

SEQ ID NO: 39906 - DNA, 15 bp, Homo sapiens
tatgtgctgaacata

SEQ ID NO: 39907 - DNA, 15 bp, Homo sapiens
ttatgtgctgaacat

SEQ ID NO: 39908 - DNA, 15 bp, Homo sapiens
attatgtgctgaaca

SEQ ID NO: 39909 - DNA, 15 bp, Homo sapiens
tattatgtgctgaac

SEQ ID NO: 39910 - DNA, 15 bp, Homo sapiens
gtattatgtgctgaa

SEQ ID NO: 39911 - DNA, 15 bp, Homo sapiens
agtattatgtgctga

SEQ ID NO: 39912 - DNA, 15 bp, Homo sapiens
aagtattatgtgctg

SEQ ID NO: 39913 - DNA, 15 bp, Homo sapiens
aaagtattatgtgct

SEQ ID NO: 39914 - DNA, 15 bp, Homo sapiens
taaagtattatgtgc

SEQ ID NO: 39915 - DNA, 15 bp, Homo sapiens
ataaagtattatgtg

SEQ ID NO: 39916 - DNA, 15 bp, Homo sapiens
tataaagtattatgt

SEQ ID NO: 39917 - DNA, 15 bp, Homo sapiens
ttataaagtattatg

SEQ ID NO: 39918 - DNA, 15 bp, Homo sapiens
attataaagtattat

SEQ ID NO: 39919 - DNA, 15 bp, Homo sapiens
cattataaagtatta

SEQ ID NO: 39920 - DNA, 15 bp, Homo sapiens
tcattataaagtatt

SEQ ID NO: 39921 - DNA, 15 bp, Homo sapiens
atcattataaagtat

SEQ ID NO: 39922 - DNA, 15 bp, Homo sapiens
tatcattataaagta

SEQ ID NO: 39923 - DNA, 15 bp, Homo sapiens
ttatcattataaagt

SEQ ID NO: 39924 - DNA, 15 bp, Homo sapiens
tttatcattataaag

SEQ ID NO: 39925 - DNA, 15 bp, Homo sapiens
gtttatcattataaa

SEQ ID NO: 39926 - DNA, 15 bp, Homo sapiens
cgtttatcattataa

SEQ ID NO: 39927 - DNA, 15 bp, Homo sapiens
tcgtttatcattata

SEQ ID NO: 39928 - DNA, 15 bp, Homo sapiens
ttcgtttatcattat

SEQ ID NO: 39929 - DNA, 15 bp, Homo sapiens
attcgtttatcatta

SEQ ID NO: 39930 - DNA, 15 bp, Homo sapiens
tattcgtttatcatt

SEQ ID NO: 39931 - DNA, 15 bp, Homo sapiens
atattcgtttatcat

SEQ ID NO: 39932 - DNA, 15 bp, Homo sapiens
catattcgtttatca

SEQ ID NO: 39933 - DNA, 15 bp, Homo sapiens
acatattcgtttatc

SEQ ID NO: 39934 - DNA, 15 bp, Homo sapiens
aacatattcgtttat

SEQ ID NO: 39935 - DNA, 15 bp, Homo sapiens
taacatattcgttta

SEQ ID NO: 39936 - DNA, 15 bp, Homo sapiens
gtaacatattcgttt

SEQ ID NO: 39937 - DNA, 15 bp, Homo sapiens
agtaacatattcgtt

SEQ ID NO: 39938 - DNA, 15 bp, Homo sapiens
tagtaacatattcgt

SEQ ID NO: 39939 - DNA, 15 bp, Homo sapiens
ctagtaacatattcg

SEQ ID NO: 39940 - DNA, 15 bp, Homo sapiens
actagtaacatattc

SEQ ID NO: 39941 - DNA, 15 bp, Homo sapiens
aactagtaacatatt

SEQ ID NO: 39942 - DNA, 15 bp, Homo sapiens
aaactagtaacatat

SEQ ID NO: 39943 - DNA, 15 bp, Homo sapiens
taaactagtaacata

SEQ ID NO: 39944 - DNA, 15 bp, Homo sapiens
gtaaactagtaacat

SEQ ID NO: 39945 - DNA, 15 bp, Homo sapiens
cgtaaactagtaaca

SEQ ID NO: 39946 - DNA, 15 bp, Homo sapiens
acgtaaactagtaac

SEQ ID NO: 39947 - DNA, 15 bp, Homo sapiens
cacgtaaactagtaa

SEQ ID NO: 39948 - DNA, 15 bp, Homo sapiens
acacgtaaactagta

SEQ ID NO: 39949 - DNA, 15 bp, Homo sapiens
aacacgtaaactagt

SEQ ID NO: 39950 - DNA, 15 bp, Homo sapiens
aaacacgtaaactag

SEQ ID NO: 39951 - DNA, 15 bp, Homo sapiens
taaacacgtaaacta

SEQ ID NO: 39952 - DNA, 15 bp, Homo sapiens
gtaaacacgtaaact

SEQ ID NO: 39953 - DNA, 15 bp, Homo sapiens
tgtaaacacgtaaac

SEQ ID NO: 39954 - DNA, 15 bp, Homo sapiens
ctgtaaacacgtaaa

SEQ ID NO: 39955 - DNA, 15 bp, Homo sapiens
actgtaaacacgtaa

SEQ ID NO: 39956 - DNA, 15 bp, Homo sapiens
tactgtaaacacgta

SEQ ID NO: 39957 - DNA, 15 bp, Homo sapiens
gtactgtaaacacgt

SEQ ID NO: 39958 - DNA, 15 bp, Homo sapiens
agtactgtaaacacg

SEQ ID NO: 39959 - DNA, 15 bp, Homo sapiens
tagtactgtaaacac

SEQ ID NO: 39960 - DNA, 15 bp, Homo sapiens
atagtactgtaaaca

SEQ ID NO: 39961 - DNA, 15 bp, Homo sapiens
aatagtactgtaaac

SEQ ID NO: 39962 - DNA, 15 bp, Homo sapiens
taatagtactgtaaa

SEQ ID NO: 39963 - DNA, 15 bp, Homo sapiens
ataatagtactgtaa

SEQ ID NO: 39964 - DNA, 15 bp, Homo sapiens
aataatagtactgta

SEQ ID NO: 39965 - DNA, 15 bp, Homo sapiens
aaataatagtactgt

SEQ ID NO: 39966 - DNA, 15 bp, Homo sapiens
aaaataatagtactg

SEQ ID NO: 39967 - DNA, 15 bp, Homo sapiens
taaaataatagtact

SEQ ID NO: 39968 - DNA, 15 bp, Homo sapiens
ctaaaataatagtac

SEQ ID NO: 39969 - DNA, 15 bp, Homo sapiens
gctaaaataatagta

SEQ ID NO: 39970 - DNA, 15 bp, Homo sapiens
tgctaaaataatagt

SEQ ID NO: 39971 - DNA, 15 bp, Homo sapiens
atgctaaaataatag

SEQ ID NO: 39972 - DNA, 15 bp, Homo sapiens
catgctaaaataata

SEQ ID NO: 39973 - DNA, 15 bp, Homo sapiens
acatgctaaaataat

SEQ ID NO: 39974 - DNA, 15 bp, Homo sapiens
cacatgctaaaataa

SEQ ID NO: 39975 - DNA, 15 bp, Homo sapiens
gcacatgctaaaata

SEQ ID NO: 39976 - DNA, 15 bp, Homo sapiens
agcacatgctaaaat

SEQ ID NO: 39977 - DNA, 15 bp, Homo sapiens
aagcacatgctaaaa

SEQ ID NO: 39978 - DNA, 15 bp, Homo sapiens
gaagcacatgctaaa

SEQ ID NO: 39979 - DNA, 15 bp, Homo sapiens
agaagcacatgctaa

SEQ ID NO: 39980 - DNA, 15 bp, Homo sapiens
cagaagcacatgcta

SEQ ID NO: 39981 - DNA, 15 bp, Homo sapiens
gcagaagcacatgct

SEQ ID NO: 39982 - DNA, 15 bp, Homo sapiens
agcagaagcacatgc

SEQ ID NO: 39983 - DNA, 15 bp, Homo sapiens
aagcagaagcacatg

SEQ ID NO: 39984 - DNA, 15 bp, Homo sapiens
taagcagaagcacat

SEQ ID NO: 39985 - DNA, 15 bp, Homo sapiens
ataagcagaagcaca

SEQ ID NO: 39986 - DNA, 15 bp, Homo sapiens
aataagcagaagcac

SEQ ID NO: 39987 - DNA, 15 bp, Homo sapiens
taataagcagaagca

SEQ ID NO: 39988 - DNA, 15 bp, Homo sapiens
ttaataagcagaagc

SEQ ID NO: 39989 - DNA, 15 bp, Homo sapiens
tttaataagcagaag

SEQ ID NO: 39990 - DNA, 15 bp, Homo sapiens
ttttaataagcagaa

SEQ ID NO: 39991 - DNA, 15 bp, Homo sapiens
tttttaataagcaga

SEQ ID NO: 39992 - DNA, 15 bp, Homo sapiens
ttttttaataagcag

SEQ ID NO: 39993 - DNA, 15 bp, Homo sapiens
attttttaataagca

SEQ ID NO: 39994 - DNA, 15 bp, Homo sapiens
cattttttaataagc

SEQ ID NO: 39995 - DNA, 15 bp, Homo sapiens
acattttttaataag

SEQ ID NO: 39996 - DNA, 15 bp, Homo sapiens
aacattttttaataa

SEQ ID NO: 39997 - DNA, 15 bp, Homo sapiens
taacattttttaata

SEQ ID NO: 39998 - DNA, 15 bp, Homo sapiens
ttaacattttttaat

SEQ ID NO: 39999 - DNA, 15 bp, Homo sapiens
gttaacattttttaa

SEQ ID NO: 40000 - DNA, 15 bp, Homo sapiens
agttaacatttttta

SEQ ID NO: 40001 - DNA, 15 bp, Homo sapiens
tagttaacatttttt

SEQ ID NO: 40002 - DNA, 15 bp, Homo sapiens
atagttaacattttt

SEQ ID NO: 40003 - DNA, 15 bp, Homo sapiens
tatagttaacatttt

SEQ ID NO: 40004 - DNA, 15 bp, Homo sapiens
ttatagttaacattt

SEQ ID NO: 40005 - DNA, 15 bp, Homo sapiens
tttatagttaacatt

SEQ ID NO: 40006 - DNA, 15 bp, Homo sapiens
ttttatagttaacat

SEQ ID NO: 40007 - DNA, 15 bp, Homo sapiens
attttatagttaaca

SEQ ID NO: 40008 - DNA, 15 bp, Homo sapiens
tattttatagttaac

SEQ ID NO: 40009 - DNA, 15 bp, Homo sapiens
ttattttatagttaa

SEQ ID NO: 40010 - DNA, 15 bp, Homo sapiens
attattttatagtta

SEQ ID NO: 40011 - DNA, 15 bp, Homo sapiens
gattattttatagtt

SEQ ID NO: 40012 - DNA, 15 bp, Homo sapiens
agattattttatagt

SEQ ID NO: 40013 - DNA, 15 bp, Homo sapiens
aagattattttatag

SEQ ID NO: 40014 - DNA, 15 bp, Homo sapiens
aaagattattttata

SEQ ID NO: 40015 - DNA, 15 bp, Homo sapiens
taaagattattttat

SEQ ID NO: 40016 - DNA, 15 bp, Homo sapiens
ctaaagattatttta

SEQ ID NO: 40017 - DNA, 15 bp, Homo sapiens
cctaaagattatttt

SEQ ID NO: 40018 - DNA, 15 bp, Homo sapiens
gcctaaagattattt

SEQ ID NO: 40019 - DNA, 15 bp, Homo sapiens
tgcctaaagattatt

SEQ ID NO: 40020 - DNA, 15 bp, Homo sapiens
ctgcctaaagattat

SEQ ID NO: 40021 - DNA, 15 bp, Homo sapiens
tctgcctaaagatta

SEQ ID NO: 40022 - DNA, 15 bp, Homo sapiens
atctgcctaaagatt

SEQ ID NO: 40023 - DNA, 15 bp, Homo sapiens
gatctgcctaaagat

SEQ ID NO: 40024 - DNA, 15 bp, Homo sapiens
ggatctgcctaaaga

SEQ ID NO: 40025 - DNA, 15 bp, Homo sapiens
aggatctgcctaaag

SEQ ID NO: 40026 - DNA, 15 bp, Homo sapiens
taggatctgcctaaa

SEQ ID NO: 40027 - DNA, 15 bp, Homo sapiens
gtaggatctgcctaa

SEQ ID NO: 40028 - DNA, 15 bp, Homo sapiens
tgtaggatctgccta

SEQ ID NO: 40029 - DNA, 15 bp, Homo sapiens
ctgtaggatctgcct

SEQ ID NO: 40030 - DNA, 15 bp, Homo sapiens
cctgtaggatctgcc

SEQ ID NO: 40031 - DNA, 15 bp, Homo sapiens
tcctgtaggatctgc

SEQ ID NO: 40032 - DNA, 15 bp, Homo sapiens
ctcctgtaggatctg

SEQ ID NO: 40033 - DNA, 15 bp, Homo sapiens
cctcctgtaggatct

SEQ ID NO: 40034 - DNA, 15 bp, Homo sapiens
acctcctgtaggatc

SEQ ID NO: 40035 - DNA, 15 bp, Homo sapiens
tacctcctgtaggat

SEQ ID NO: 40036 - DNA, 15 bp, Homo sapiens
atacctcctgtagga

SEQ ID NO: 40037 - DNA, 15 bp, Homo sapiens
aatacctcctgtagg

SEQ ID NO: 40038 - DNA, 15 bp, Homo sapiens
gaatacctcctgtag

SEQ ID NO: 40039 - DNA, 15 bp, Homo sapiens
ggaatacctcctgta

SEQ ID NO: 40040 - DNA, 15 bp, Homo sapiens
tggaatacctcctgt

SEQ ID NO: 40041 - DNA, 15 bp, Homo sapiens
ctggaatacctcctg

SEQ ID NO: 40042 - DNA, 15 bp, Homo sapiens
tctggaatacctcct

SEQ ID NO: 40043 - DNA, 15 bp, Homo sapiens
atctggaatacctcc

SEQ ID NO: 40044 - DNA, 15 bp, Homo sapiens
tatctggaatacctc

SEQ ID NO: 40045 - DNA, 15 bp, Homo sapiens
ttatctggaatacct

SEQ ID NO: 40046 - DNA, 15 bp, Homo sapiens
tttatctggaatacc

SEQ ID NO: 40047 - DNA, 15 bp, Homo sapiens
ctttatctggaatac

SEQ ID NO: 40048 - DNA, 15 bp, Homo sapiens
cctttatctggaata

SEQ ID NO: 40049 - DNA, 15 bp, Homo sapiens
gcctttatctggaat

SEQ ID NO: 40050 - DNA, 15 bp, Homo sapiens
tgcctttatctggaa

SEQ ID NO: 40051 - DNA, 15 bp, Homo sapiens
atgcctttatctgga

SEQ ID NO: 40052 - DNA, 15 bp, Homo sapiens
aatgcctttatctgg

SEQ ID NO: 40053 - DNA, 15 bp, Homo sapiens
taatgcctttatctg

SEQ ID NO: 40054 - DNA, 15 bp, Homo sapiens
ataatgcctttatct

SEQ ID NO: 40055 - DNA, 15 bp, Homo sapiens
aataatgcctttatc

SEQ ID NO: 40056 - DNA, 15 bp, Homo sapiens
caataatgcctttat

SEQ ID NO: 40057 - DNA, 15 bp, Homo sapiens
acaataatgccttta

SEQ ID NO: 40058 - DNA, 15 bp, Homo sapiens
gacaataatgccttt

SEQ ID NO: 40059 - DNA, 15 bp, Homo sapiens
tgacaataatgcctt

SEQ ID NO: 40060 - DNA, 15 bp, Homo sapiens
atgacaataatgcct

SEQ ID NO: 40061 - DNA, 15 bp, Homo sapiens
tatgacaataatgcc

SEQ ID NO: 40062 - DNA, 15 bp, Homo sapiens
ctatgacaataatgc

SEQ ID NO: 40063 - DNA, 15 bp, Homo sapiens
cctatgacaataatg

SEQ ID NO: 40064 - DNA, 15 bp, Homo sapiens
tcctatgacaataat

SEQ ID NO: 40065 - DNA, 15 bp, Homo sapiens
ctcctatgacaataa

SEQ ID NO: 40066 - DNA, 15 bp, Homo sapiens
tctcctatgacaata

SEQ ID NO: 40067 - DNA, 15 bp, Homo sapiens
atctcctatgacaat

SEQ ID NO: 40068 - DNA, 15 bp, Homo sapiens
catctcctatgacaa

SEQ ID NO: 40069 - DNA, 15 bp, Homo sapiens
ccatctcctatgaca

SEQ ID NO: 40070 - DNA, 15 bp, Homo sapiens
gccatctcctatgac

SEQ ID NO: 40071 - DNA, 15 bp, Homo sapiens
tgccatctcctatga

SEQ ID NO: 40072 - DNA, 15 bp, Homo sapiens
ctgccatctcctatg

SEQ ID NO: 40073 - DNA, 15 bp, Homo sapiens
gctgccatctcctat

SEQ ID NO: 40074 - DNA, 15 bp, Homo sapiens
agctgccatctccta

SEQ ID NO: 40075 - DNA, 15 bp, Homo sapiens
gagctgccatctcct

SEQ ID NO: 40076 - DNA, 15 bp, Homo sapiens
ggagctgccatctcc

SEQ ID NO: 40077 - DNA, 15 bp, Homo sapiens
tggagctgccatctc

SEQ ID NO: 40078 - DNA, 15 bp, Homo sapiens
atggagctgccatct

SEQ ID NO: 40079 - DNA, 15 bp, Homo sapiens
catggagctgccatc

SEQ ID NO: 40080 - DNA, 15 bp, Homo sapiens
ccatggagctgccat

SEQ ID NO: 40081 - DNA, 15 bp, Homo sapiens
tccatggagctgcca

SEQ ID NO: 40082 - DNA, 15 bp, Homo sapiens
atccatggagctgcc

SEQ ID NO: 40083 - DNA, 15 bp, Homo sapiens
catccatggagctgc

SEQ ID NO: 40084 - DNA, 15 bp, Homo sapiens
acatccatggagctg

SEQ ID NO: 40085 - DNA, 15 bp, Homo sapiens
aacatccatggagct

SEQ ID NO: 40086 - DNA, 15 bp, Homo sapiens
taacatccatggagc

SEQ ID NO: 40087 - DNA, 15 bp, Homo sapiens
ataacatccatggag

SEQ ID NO: 40088 - DNA, 15 bp, Homo sapiens
aataacatccatgga

SEQ ID NO: 40089 - DNA, 15 bp, Homo sapiens
caataacatccatgg

SEQ ID NO: 40090 - DNA, 15 bp, Homo sapiens
gcaataacatccatg

SEQ ID NO: 40091 - DNA, 15 bp, Homo sapiens
ggcaataacatccat

SEQ ID NO: 40092 - DNA, 15 bp, Homo sapiens
gggcaataacatcca

SEQ ID NO: 40093 - DNA, 15 bp, Homo sapiens
ggggcaataacatcc

SEQ ID NO: 40094 - DNA, 15 bp, Homo sapiens
aggggcaataacatc

SEQ ID NO: 40095 - DNA, 15 bp, Homo sapiens
aaggggcaataacat

SEQ ID NO: 40096 - DNA, 15 bp, Homo sapiens
taaggggcaataaca

SEQ ID NO: 40097 - DNA, 15 bp, Homo sapiens
ttaaggggcaataac

SEQ ID NO: 40098 - DNA, 15 bp, Homo sapiens
cttaaggggcaataa

SEQ ID NO: 40099 - DNA, 15 bp, Homo sapiens
tcttaaggggcaata

SEQ ID NO: 40100 - DNA, 15 bp, Homo sapiens
gtcttaaggggcaat

SEQ ID NO: 40101 - DNA, 15 bp, Homo sapiens
ggtcttaaggggcaa

SEQ ID NO: 40102 - DNA, 15 bp, Homo sapiens
aggtcttaaggggca

SEQ ID NO: 40103 - DNA, 15 bp, Homo sapiens
aaggtcttaaggggc

SEQ ID NO: 40104 - DNA, 15 bp, Homo sapiens
gaaggtcttaagggg

SEQ ID NO: 40105 - DNA, 15 bp, Homo sapiens
ggaaggtcttaaggg

SEQ ID NO: 40106 - DNA, 15 bp, Homo sapiens
tggaaggtcttaagg

SEQ ID NO: 40107 - DNA, 15 bp, Homo sapiens
ctggaaggtcttaag

SEQ ID NO: 40108 - DNA, 15 bp, Homo sapiens
actggaaggtcttaa

SEQ ID NO: 40109 - DNA, 15 bp, Homo sapiens
cactggaaggtctta

SEQ ID NO: 40110 - DNA, 15 bp, Homo sapiens
ccactggaaggtctt

SEQ ID NO: 40111 - DNA, 15 bp, Homo sapiens
cccactggaaggtct

SEQ ID NO: 40112 - DNA, 15 bp, Homo sapiens
tcccactggaaggtc

SEQ ID NO: 40113 - DNA, 15 bp, Homo sapiens
gtcccactggaaggt

SEQ ID NO: 40114 - DNA, 15 bp, Homo sapiens
tgtcccactggaagg

SEQ ID NO: 40115 - DNA, 15 bp, Homo sapiens
ttgtcccactggaag

SEQ ID NO: 40116 - DNA, 15 bp, Homo sapiens
cttgtcccactggaa

SEQ ID NO: 40117 - DNA, 15 bp, Homo sapiens
tcttgtcccactgga

SEQ ID NO: 40118 - DNA, 15 bp, Homo sapiens
atcttgtcccactgg

SEQ ID NO: 40119 - DNA, 15 bp, Homo sapiens
catcttgtcccactg

SEQ ID NO: 40120 - DNA, 15 bp, Homo sapiens
acatcttgtcccact

SEQ ID NO: 40121 - DNA, 15 bp, Homo sapiens
tacatcttgtcccac

SEQ ID NO: 40122 - DNA, 15 bp, Homo sapiens
atacatcttgtccca

SEQ ID NO: 40123 - DNA, 15 bp, Homo sapiens
tatacatcttgtccc

SEQ ID NO: 40124 - DNA, 15 bp, Homo sapiens
ctatacatcttgtcc

SEQ ID NO: 40125 - DNA, 15 bp, Homo sapiens
cctatacatcttgtc

SEQ ID NO: 40126 - DNA, 15 bp, Homo sapiens
acctatacatcttgt

SEQ ID NO: 40127 - DNA, 15 bp, Homo sapiens
cacctatacatcttg

SEQ ID NO: 40128 - DNA, 15 bp, Homo sapiens
ccacctatacatctt

SEQ ID NO: 40129 - DNA, 15 bp, Homo sapiens
tccacctatacatct

SEQ ID NO: 40130 - DNA, 15 bp, Homo sapiens
ttccacctatacatc

SEQ ID NO: 40131 - DNA, 15 bp, Homo sapiens
cttccacctatacat

SEQ ID NO: 40132 - DNA, 15 bp, Homo sapiens
tcttccacctataca

SEQ ID NO: 40133 - DNA, 15 bp, Homo sapiens
gtcttccacctatac

SEQ ID NO: 40134 - DNA, 15 bp, Homo sapiens
tgtcttccacctata

SEQ ID NO: 40135 - DNA, 15 bp, Homo sapiens
ctgtcttccacctat

SEQ ID NO: 40136 - DNA, 15 bp, Homo sapiens
actgtcttccaccta

SEQ ID NO: 40137 - DNA, 15 bp, Homo sapiens
cactgtcttccacct

SEQ ID NO: 40138 - DNA, 15 bp, Homo sapiens
tcactgtcttccacc

SEQ ID NO: 40139 - DNA, 15 bp, Homo sapiens
atcactgtcttccac

SEQ ID NO: 40140 - DNA, 15 bp, Homo sapiens
tatcactgtcttcca

SEQ ID NO: 40141 - DNA, 15 bp, Homo sapiens
atatcactgtcttcc

SEQ ID NO: 40142 - DNA, 15 bp, Homo sapiens
aatatcactgtcttc

SEQ ID NO: 40143 - DNA, 15 bp, Homo sapiens
caatatcactgtctt

SEQ ID NO: 40144 - DNA, 15 bp, Homo sapiens
tcaatatcactgtct

SEQ ID NO: 40145 - DNA, 15 bp, Homo sapiens
atcaatatcactgtc

SEQ ID NO: 40146 - DNA, 15 bp, Homo sapiens
catcaatatcactgt

SEQ ID NO: 40147 - DNA, 15 bp, Homo sapiens
tcatcaatatcactg

SEQ ID NO: 40148 - DNA, 15 bp, Homo sapiens
atcatcaatatcact

SEQ ID NO: 40149 - DNA, 15 bp, Homo sapiens
gatcatcaatatcac

SEQ ID NO: 40150 - DNA, 15 bp, Homo sapiens
ggatcatcaatatca

SEQ ID NO: 40151 - DNA, 15 bp, Homo sapiens
aggatcatcaatatc

SEQ ID NO: 40152 - DNA, 15 bp, Homo sapiens
caggatcatcaatat

SEQ ID NO: 40153 - DNA, 15 bp, Homo sapiens
tcaggatcatcaata

SEQ ID NO: 40154 - DNA, 15 bp, Homo sapiens
gtcaggatcatcaat

SEQ ID NO: 40155 - DNA, 15 bp, Homo sapiens
ggtcaggatcatcaa

SEQ ID NO: 40156 - DNA, 15 bp, Homo sapiens
aggtcaggatcatca

SEQ ID NO: 40157 - DNA, 15 bp, Homo sapiens
aaggtcaggatcatc

SEQ ID NO: 40158 - DNA, 15 bp, Homo sapiens
caaggtcaggatcat

SEQ ID NO: 40159 - DNA, 15 bp, Homo sapiens
acaaggtcaggatca

SEQ ID NO: 40160 - DNA, 15 bp, Homo sapiens
tacaaggtcaggatc

SEQ ID NO: 40161 - DNA, 15 bp, Homo sapiens
ctacaaggtcaggat

SEQ ID NO: 40162 - DNA, 15 bp, Homo sapiens
tctacaaggtcagga

SEQ ID NO: 40163 - DNA, 15 bp, Homo sapiens
ctctacaaggtcagg

SEQ ID NO: 40164 - DNA, 15 bp, Homo sapiens
cctctacaaggtcag

SEQ ID NO: 40165 - DNA, 15 bp, Homo sapiens
gcctctacaaggtca

SEQ ID NO: 40166 - DNA, 15 bp, Homo sapiens
ggcctctacaaggtc

SEQ ID NO: 40167 - DNA, 15 bp, Homo sapiens
tggcctctacaaggt

SEQ ID NO: 40168 - DNA, 15 bp, Homo sapiens
ttggcctctacaagg

SEQ ID NO: 40169 - DNA, 15 bp, Homo sapiens
cttggcctctacaag

SEQ ID NO: 40170 - DNA, 15 bp, Homo sapiens
ccttggcctctacaa

SEQ ID NO: 40171 - DNA, 15 bp, Homo sapiens
gccttggcctctaca

SEQ ID NO: 40172 - DNA, 15 bp, Homo sapiens
agccttggcctctac

SEQ ID NO: 40173 - DNA, 15 bp, Homo sapiens
tagccttggcctcta

SEQ ID NO: 40174 - DNA, 15 bp, Homo sapiens
ttagccttggcctct

SEQ ID NO: 40175 - DNA, 15 bp, Homo sapiens
tttagccttggcctc

SEQ ID NO: 40176 - DNA, 15 bp, Homo sapiens
ctttagccttggcct

SEQ ID NO: 40177 - DNA, 15 bp, Homo sapiens
actttagccttggcc

SEQ ID NO: 40178 - DNA, 15 bp, Homo sapiens
tactttagccttggc

SEQ ID NO: 40179 - DNA, 15 bp, Homo sapiens
atactttagccttgg

SEQ ID NO: 40180 - DNA, 15 bp, Homo sapiens
catactttagccttg

SEQ ID NO: 40181 - DNA, 15 bp, Homo sapiens
acatactttagcctt

SEQ ID NO: 40182 - DNA, 15 bp, Homo sapiens
tacatactttagcct

SEQ ID NO: 40183 - DNA, 15 bp, Homo sapiens
atacatactttagcc

SEQ ID NO: 40184 - DNA, 15 bp, Homo sapiens
aatacatactttagc

SEQ ID NO: 40185 - DNA, 15 bp, Homo sapiens
aaatacatactttag

SEQ ID NO: 40186 - DNA, 15 bp, Homo sapiens
taaatacatacttta

SEQ ID NO: 40187 - DNA, 15 bp, Homo sapiens
ataaatacatacttt

SEQ ID NO: 40188 - DNA, 15 bp, Homo sapiens
aataaatacatactt

SEQ ID NO: 40189 - DNA, 15 bp, Homo sapiens
taataaatacatact

SEQ ID NO: 40190 - DNA, 15 bp, Homo sapiens
ctaataaatacatac

SEQ ID NO: 40191 - DNA, 15 bp, Homo sapiens
actaataaatacata

SEQ ID NO: 40192 - DNA, 15 bp, Homo sapiens
aactaataaatacat

SEQ ID NO: 40193 - DNA, 15 bp, Homo sapiens
aaactaataaataca

SEQ ID NO: 40194 - DNA, 15 bp, Homo sapiens
aaaactaataaatac

SEQ ID NO: 40195 - DNA, 15 bp, Homo sapiens
aaaaactaataaata

SEQ ID NO: 40196 - DNA, 15 bp, Homo sapiens
taaaaactaataaat

SEQ ID NO: 40197 - DNA, 15 bp, Homo sapiens
ttaaaaactaataaa

SEQ ID NO: 40198 - DNA, 15 bp, Homo sapiens
gttaaaaactaataa

SEQ ID NO: 40199 - DNA, 15 bp, Homo sapiens
tgttaaaaactaata

SEQ ID NO: 40200 - DNA, 15 bp, Homo sapiens
ttgttaaaaactaat

SEQ ID NO: 40201 - DNA, 15 bp, Homo sapiens
cttgttaaaaactaa

SEQ ID NO: 40202 - DNA, 15 bp, Homo sapiens
tcttgttaaaaacta

SEQ ID NO: 40203 - DNA, 15 bp, Homo sapiens
ctcttgttaaaaact

SEQ ID NO: 40204 - DNA, 15 bp, Homo sapiens
actcttgttaaaaac

SEQ ID NO: 40205 - DNA, 15 bp, Homo sapiens
aactcttgttaaaaa

SEQ ID NO: 40206 - DNA, 15 bp, Homo sapiens
aaactcttgttaaaa

SEQ ID NO: 40207 - DNA, 15 bp, Homo sapiens
taaactcttgttaaa

SEQ ID NO: 40208 - DNA, 15 bp, Homo sapiens
ttaaactcttgttaa

SEQ ID NO: 40209 - DNA, 15 bp, Homo sapiens
tttaaactcttgtta

SEQ ID NO: 40210 - DNA, 15 bp, Homo sapiens
ttttaaactcttgtt

SEQ ID NO: 40211 - DNA, 15 bp, Homo sapiens
tttttaaactcttgt

SEQ ID NO: 40212 - DNA, 15 bp, Homo sapiens
ctttttaaactcttg

SEQ ID NO: 40213 - DNA, 15 bp, Homo sapiens
actttttaaactctt

SEQ ID NO: 40214 - DNA, 15 bp, Homo sapiens
tactttttaaactct

SEQ ID NO: 40215 - DNA, 15 bp, Homo sapiens
ttactttttaaactc

SEQ ID NO: 40216 - DNA, 15 bp, Homo sapiens
tttactttttaaact

SEQ ID NO: 40217 - DNA, 15 bp, Homo sapiens
ttttactttttaaac

SEQ ID NO: 40218 - DNA, 15 bp, Homo sapiens
tttttactttttaaa

SEQ ID NO: 40219 - DNA, 15 bp, Homo sapiens
ttttttactttttaa

SEQ ID NO: 40220 - DNA, 15 bp, Homo sapiens
tttttttacttttta

SEQ ID NO: 40221 - DNA, 15 bp, Homo sapiens
ttttttttacttttt

SEQ ID NO: 40222 - DNA, 15 bp, Homo sapiens
tttttttttactttt

SEQ ID NO: 40223 - DNA, 15 bp, Homo sapiens
ttttttttttacttt

SEQ ID NO: 40224 - DNA, 15 bp, Homo sapiens
tttttttttttactt

SEQ ID NO: 40225 - DNA, 15 bp, Homo sapiens
ttttttttttttact

SEQ ID NO: 40226 - DNA, 15 bp, Homo sapiens
attttttttttttac

SEQ ID NO: 40227 - DNA, 15 bp, Homo sapiens
tatttttttttttta

SEQ ID NO: 40228 - DNA, 15 bp, Homo sapiens
ttatttttttttttt

SEQ ID NO: 40229 - DNA, 15 bp, Homo sapiens
tttattttttttttt

SEQ ID NO: 40230 - DNA, 15 bp, Homo sapiens
atttatttttttttt

SEQ ID NO: 40231 - DNA, 15 bp, Homo sapiens
aatttattttttttt

SEQ ID NO: 40232 - DNA, 15 bp, Homo sapiens
aaatttatttttttt

SEQ ID NO: 40233 - DNA, 15 bp, Homo sapiens
taaatttattttttt

SEQ ID NO: 40234 - DNA, 15 bp, Homo sapiens
ttaaatttatttttt

SEQ ID NO: 40235 - DNA, 15 bp, Homo sapiens
tttaaatttattttt

SEQ ID NO: 40236 - DNA, 15 bp, Homo sapiens
ttttaaatttatttt

SEQ ID NO: 40237 - DNA, 15 bp, Homo sapiens
tttttaaatttattt

SEQ ID NO: 40238 - DNA, 15 bp, Homo sapiens
atttttaaatttatt

SEQ ID NO: 40239 - DNA, 15 bp, Homo sapiens
tatttttaaatttat

SEQ ID NO: 40240 - DNA, 15 bp, Homo sapiens
ctatttttaaattta

SEQ ID NO: 40241 - DNA, 15 bp, Homo sapiens
tctatttttaaattt

SEQ ID NO: 40242 - DNA, 15 bp, Homo sapiens
ttctatttttaaatt

SEQ ID NO: 40243 - DNA, 15 bp, Homo sapiens
tttctatttttaaat

SEQ ID NO: 40244 - DNA, 15 bp, Homo sapiens
ttttctatttttaaa

SEQ ID NO: 40245 - DNA, 15 bp, Homo sapiens
tttttctatttttaa

SEQ ID NO: 40246 - DNA, 15 bp, Homo sapiens
ttttttctattttta

SEQ ID NO: 40247 - DNA, 15 bp, Homo sapiens
attttttctattttt

SEQ ID NO: 40248 - DNA, 15 bp, Homo sapiens
gattttttctatttt

SEQ ID NO: 40249 - DNA, 15 bp, Homo sapiens
agattttttctattt

SEQ ID NO: 40250 - DNA, 15 bp, Homo sapiens
aagattttttctatt

SEQ ID NO: 40251 - DNA, 15 bp, Homo sapiens
taagattttttctat

SEQ ID NO: 40252 - DNA, 15 bp, Homo sapiens
ttaagattttttcta

SEQ ID NO: 40253 - DNA, 15 bp, Homo sapiens
attaagattttttct

SEQ ID NO: 40254 - DNA, 15 bp, Homo sapiens
tattaagattttttc

SEQ ID NO: 40255 - DNA, 15 bp, Homo sapiens
ttattaagatttttt

SEQ ID NO: 40256 - DNA, 15 bp, Homo sapiens
cttattaagattttt

SEQ ID NO: 40257 - DNA, 15 bp, Homo sapiens
ccttattaagatttt

SEQ ID NO: 40258 - DNA, 15 bp, Homo sapiens
tccttattaagattt

SEQ ID NO: 40259 - DNA, 15 bp, Homo sapiens
atccttattaagatt

SEQ ID NO: 40260 - DNA, 15 bp, Homo sapiens
tatccttattaagat

SEQ ID NO: 40261 - DNA, 15 bp, Homo sapiens
gtatccttattaaga

SEQ ID NO: 40262 - DNA, 15 bp, Homo sapiens
tgtatccttattaag

SEQ ID NO: 40263 - DNA, 15 bp, Homo sapiens
ttgtatccttattaa

SEQ ID NO: 40264 - DNA, 15 bp, Homo sapiens
tttgtatccttatta

SEQ ID NO: 40265 - DNA, 15 bp, Homo sapiens
ctttgtatccttatt

SEQ ID NO: 40266 - DNA, 15 bp, Homo sapiens
tctttgtatccttat

SEQ ID NO: 40267 - DNA, 15 bp, Homo sapiens
ttctttgtatcctta

SEQ ID NO: 40268 - DNA, 15 bp, Homo sapiens
tttctttgtatcctt

SEQ ID NO: 40269 - DNA, 15 bp, Homo sapiens
ttttctttgtatcct

SEQ ID NO: 40270 - DNA, 15 bp, Homo sapiens
tttttctttgtatcc

SEQ ID NO: 40271 - DNA, 15 bp, Homo sapiens
ttttttctttgtatc

SEQ ID NO: 40272 - DNA, 15 bp, Homo sapiens
attttttctttgtat

SEQ ID NO: 40273 - DNA, 15 bp, Homo sapiens
cattttttctttgta

SEQ ID NO: 40274 - DNA, 15 bp, Homo sapiens
acattttttctttgt

SEQ ID NO: 40275 - DNA, 15 bp, Homo sapiens
aacattttttctttg

SEQ ID NO: 40276 - DNA, 15 bp, Homo sapiens
aaacattttttcttt

SEQ ID NO: 40277 - DNA, 15 bp, Homo sapiens
aaaacattttttctt

SEQ ID NO: 40278 - DNA, 15 bp, Homo sapiens
aaaaacattttttct

SEQ ID NO: 40279 - DNA, 15 bp, Homo sapiens
caaaaacattttttc

SEQ ID NO: 40280 - DNA, 15 bp, Homo sapiens
acaaaaacatttttt

SEQ ID NO: 40281 - DNA, 15 bp, Homo sapiens
cacaaaaacattttt

SEQ ID NO: 40282 - DNA, 15 bp, Homo sapiens
acacaaaaacatttt

SEQ ID NO: 40283 - DNA, 15 bp, Homo sapiens
tacacaaaaacattt

SEQ ID NO: 40284 - DNA, 15 bp, Homo sapiens
ctacacaaaaacatt

SEQ ID NO: 40285 - DNA, 15 bp, Homo sapiens
gctacacaaaaacat

SEQ ID NO: 40286 - DNA, 15 bp, Homo sapiens
agctacacaaaaaca

SEQ ID NO: 40287 - DNA, 15 bp, Homo sapiens
cagctacacaaaaac

SEQ ID NO: 40288 - DNA, 15 bp, Homo sapiens
acagctacacaaaaa

SEQ ID NO: 40289 - DNA, 15 bp, Homo sapiens
cacagctacacaaaa

SEQ ID NO: 40290 - DNA, 15 bp, Homo sapiens
acacagctacacaaa

SEQ ID NO: 40291 - DNA, 15 bp, Homo sapiens
tacacagctacacaa

SEQ ID NO: 40292 - DNA, 15 bp, Homo sapiens
ttacacagctacaca

SEQ ID NO: 40293 - DNA, 15 bp, Homo sapiens
attacacagctacac

SEQ ID NO: 40294 - DNA, 15 bp, Homo sapiens
tattacacagctaca

SEQ ID NO: 40295 - DNA, 15 bp, Homo sapiens
atattacacagctac

SEQ ID NO: 40296 - DNA, 15 bp, Homo sapiens
catattacacagcta

SEQ ID NO: 40297 - DNA, 15 bp, Homo sapiens
acatattacacagct

SEQ ID NO: 40298 - DNA, 15 bp, Homo sapiens
aacatattacacagc

SEQ ID NO: 40299 - DNA, 15 bp, Homo sapiens
aaacatattacacag

SEQ ID NO: 40300 - DNA, 15 bp, Homo sapiens
aaaacatattacaca

SEQ ID NO: 40301 - DNA, 15 bp, Homo sapiens
aaaaacatattacac

SEQ ID NO: 40302 - DNA, 15 bp, Homo sapiens
caaaaacatattaca

SEQ ID NO: 40303 - DNA, 15 bp, Homo sapiens
acaaaaacatattac

SEQ ID NO: 40304 - DNA, 15 bp, Homo sapiens
aacaaaaacatatta

SEQ ID NO: 40305 - DNA, 15 bp, Homo sapiens
aaacaaaaacatatt

SEQ ID NO: 40306 - DNA, 15 bp, Homo sapiens
aaaacaaaaacatat

SEQ ID NO: 40307 - DNA, 15 bp, Homo sapiens
taaaacaaaaacata

SEQ ID NO: 40308 - DNA, 15 bp, Homo sapiens
ttaaaacaaaaacat

SEQ ID NO: 40309 - DNA, 15 bp, Homo sapiens
cttaaaacaaaaaca

SEQ ID NO: 40310 - DNA, 15 bp, Homo sapiens
acttaaaacaaaaac

SEQ ID NO: 40311 - DNA, 15 bp, Homo sapiens
aacttaaaacaaaaa

SEQ ID NO: 40312 - DNA, 15 bp, Homo sapiens
taacttaaaacaaaa

SEQ ID NO: 40313 - DNA, 15 bp, Homo sapiens
ttaacttaaaacaaa

SEQ ID NO: 40314 - DNA, 15 bp, Homo sapiens
tttaacttaaaacaa

SEQ ID NO: 40315 - DNA, 15 bp, Homo sapiens
atttaacttaaaaca

SEQ ID NO: 40316 - DNA, 15 bp, Homo sapiens
catttaacttaaaac

SEQ ID NO: 40317 - DNA, 15 bp, Homo sapiens
acatttaacttaaaa

SEQ ID NO: 40318 - DNA, 15 bp, Homo sapiens
aacatttaacttaaa

SEQ ID NO: 40319 - DNA, 15 bp, Homo sapiens
taacatttaacttaa

SEQ ID NO: 40320 - DNA, 15 bp, Homo sapiens
gtaacatttaactta

SEQ ID NO: 40321 - DNA, 15 bp, Homo sapiens
tgtaacatttaactt

SEQ ID NO: 40322 - DNA, 15 bp, Homo sapiens
ttgtaacatttaact

SEQ ID NO: 40323 - DNA, 15 bp, Homo sapiens
tttgtaacatttaac

SEQ ID NO: 40324 - DNA, 15 bp, Homo sapiens
ttttgtaacatttaa

SEQ ID NO: 40325 - DNA, 15 bp, Homo sapiens
cttttgtaacattta

SEQ ID NO: 40326 - DNA, 15 bp, Homo sapiens
tcttttgtaacattt

SEQ ID NO: 40327 - DNA, 15 bp, Homo sapiens
ctcttttgtaacatt

SEQ ID NO: 40328 - DNA, 15 bp, Homo sapiens
actcttttgtaacat

SEQ ID NO: 40329 - DNA, 15 bp, Homo sapiens
gactcttttgtaaca

SEQ ID NO: 40330 - DNA, 15 bp, Homo sapiens
tgactcttttgtaac

SEQ ID NO: 40331 - DNA, 15 bp, Homo sapiens
ctgactcttttgtaa

SEQ ID NO: 40332 - DNA, 15 bp, Homo sapiens
tctgactcttttgta

SEQ ID NO: 40333 - DNA, 15 bp, Homo sapiens
ctctgactcttttgt

SEQ ID NO: 40334 - DNA, 15 bp, Homo sapiens
actctgactcttttg

SEQ ID NO: 40335 - DNA, 15 bp, Homo sapiens
aactctgactctttt

SEQ ID NO: 40336 - DNA, 15 bp, Homo sapiens
taactctgactcttt

SEQ ID NO: 40337 - DNA, 15 bp, Homo sapiens
ttaactctgactctt

SEQ ID NO: 40338 - DNA, 15 bp, Homo sapiens
tttaactctgactct

SEQ ID NO: 40339 - DNA, 15 bp, Homo sapiens
atttaactctgactc

SEQ ID NO: 40340 - DNA, 15 bp, Homo sapiens
aatttaactctgact

SEQ ID NO: 40341 - DNA, 15 bp, Homo sapiens
aaatttaactctgac

SEQ ID NO: 40342 - DNA, 15 bp, Homo sapiens
aaaatttaactctga

SEQ ID NO: 40343 - DNA, 15 bp, Homo sapiens
aaaaatttaactctg

SEQ ID NO: 40344 - DNA, 15 bp, Homo sapiens
aaaaaatttaactct

SEQ ID NO: 40345 - DNA, 15 bp, Homo sapiens
aaaaaaatttaactc

SEQ ID NO: 40346 - DNA, 15 bp, Homo sapiens
taaaaaaatttaact

SEQ ID NO: 40347 - DNA, 15 bp, Homo sapiens
ataaaaaaatttaac

SEQ ID NO: 40348 - DNA, 15 bp, Homo sapiens
tataaaaaaatttaa

SEQ ID NO: 40349 - DNA, 15 bp, Homo sapiens
atataaaaaaattta

SEQ ID NO: 40350 - DNA, 15 bp, Homo sapiens
aatataaaaaaattt

SEQ ID NO: 40351 - DNA, 15 bp, Homo sapiens
aaatataaaaaaatt

SEQ ID NO: 40352 - DNA, 15 bp, Homo sapiens
taaatataaaaaaat

SEQ ID NO: 40353 - DNA, 15 bp, Homo sapiens
ataaatataaaaaaa

SEQ ID NO: 40354 - DNA, 15 bp, Homo sapiens
tataaatataaaaaa

SEQ ID NO: 40355 - DNA, 15 bp, Homo sapiens
ttataaatataaaaa

SEQ ID NO: 40356 - DNA, 15 bp, Homo sapiens
tttataaatataaaa

SEQ ID NO: 40357 - DNA, 15 bp, Homo sapiens
ctttataaatataaa

SEQ ID NO: 40358 - DNA, 15 bp, Homo sapiens
actttataaatataa

SEQ ID NO: 40359 - DNA, 15 bp, Homo sapiens
cactttataaatata

SEQ ID NO: 40360 - DNA, 15 bp, Homo sapiens
tcactttataaatat

SEQ ID NO: 40361 - DNA, 15 bp, Homo sapiens
ttcactttataaata

SEQ ID NO: 40362 - DNA, 15 bp, Homo sapiens
tttcactttataaat

SEQ ID NO: 40363 - DNA, 15 bp, Homo sapiens
ttttcactttataaa

SEQ ID NO: 40364 - DNA, 15 bp, Homo sapiens
tttttcactttataa

SEQ ID NO: 40365 - DNA, 15 bp, Homo sapiens
ctttttcactttata

SEQ ID NO: 40366 - DNA, 15 bp, Homo sapiens
actttttcactttat

SEQ ID NO: 40367 - DNA, 15 bp, Homo sapiens
aactttttcacttta

SEQ ID NO: 40368 - DNA, 15 bp, Homo sapiens
taactttttcacttt

SEQ ID NO: 40369 - DNA, 15 bp, Homo sapiens
ataactttttcactt

SEQ ID NO: 40370 - DNA, 15 bp, Homo sapiens
tataactttttcact

SEQ ID NO: 40371 - DNA, 15 bp, Homo sapiens
ttataactttttcac

SEQ ID NO: 40372 - DNA, 15 bp, Homo sapiens
tttataactttttca

SEQ ID NO: 40373 - DNA, 15 bp, Homo sapiens
ttttataactttttc

SEQ ID NO: 40374 - DNA, 15 bp, Homo sapiens
attttataacttttt

SEQ ID NO: 40375 - DNA, 15 bp, Homo sapiens
cattttataactttt

SEQ ID NO: 40376 - DNA, 15 bp, Homo sapiens
gcattttataacttt

SEQ ID NO: 40377 - DNA, 15 bp, Homo sapiens
agcattttataactt

SEQ ID NO: 40378 - DNA, 15 bp, Homo sapiens
tagcattttataact

SEQ ID NO: 40379 - DNA, 15 bp, Homo sapiens
ttagcattttataac

SEQ ID NO: 40380 - DNA, 15 bp, Homo sapiens
cttagcattttataa

SEQ ID NO: 40381 - DNA, 15 bp, Homo sapiens
ccttagcattttata

SEQ ID NO: 40382 - DNA, 15 bp, Homo sapiens
accttagcattttat

SEQ ID NO: 40383 - DNA, 15 bp, Homo sapiens
aaccttagcatttta

SEQ ID NO: 40384 - DNA, 15 bp, Homo sapiens
taaccttagcatttt

SEQ ID NO: 40385 - DNA, 15 bp, Homo sapiens
ttaaccttagcattt

SEQ ID NO: 40386 - DNA, 15 bp, Homo sapiens
attaaccttagcatt

SEQ ID NO: 40387 - DNA, 15 bp, Homo sapiens
aattaaccttagcat

SEQ ID NO: 40388 - DNA, 15 bp, Homo sapiens
aaattaaccttagca

SEQ ID NO: 40389 - DNA, 15 bp, Homo sapiens
taaattaaccttagc

SEQ ID NO: 40390 - DNA, 15 bp, Homo sapiens
gtaaattaaccttag

SEQ ID NO: 40391 - DNA, 15 bp, Homo sapiens
agtaaattaacctta

SEQ ID NO: 40392 - DNA, 15 bp, Homo sapiens
cagtaaattaacctt

SEQ ID NO: 40393 - DNA, 15 bp, Homo sapiens
tcagtaaattaacct

SEQ ID NO: 40394 - DNA, 15 bp, Homo sapiens
ttcagtaaattaacc

SEQ ID NO: 40395 - DNA, 15 bp, Homo sapiens
cttcagtaaattaac

SEQ ID NO: 40396 - DNA, 15 bp, Homo sapiens
tcttcagtaaattaa

SEQ ID NO: 40397 - DNA, 15 bp, Homo sapiens
ttcttcagtaaatta

SEQ ID NO: 40398 - DNA, 15 bp, Homo sapiens
tttcttcagtaaatt

SEQ ID NO: 40399 - DNA, 15 bp, Homo sapiens
ctttcttcagtaaat

SEQ ID NO: 40400 - DNA, 15 bp, Homo sapiens
tctttcttcagtaaa

SEQ ID NO: 40401 - DNA, 15 bp, Homo sapiens
ttctttcttcagtaa

SEQ ID NO: 40402 - DNA, 15 bp, Homo sapiens
tttctttcttcagta

SEQ ID NO: 40403 - DNA, 15 bp, Homo sapiens
ttttctttcttcagt

SEQ ID NO: 40404 - DNA, 15 bp, Homo sapiens
tttttctttcttcag

SEQ ID NO: 40405 - DNA, 15 bp, Homo sapiens
ttttttctttcttca

SEQ ID NO: 40406 - DNA, 15 bp, Homo sapiens
attttttctttcttc

SEQ ID NO: 40407 - DNA, 15 bp, Homo sapiens
aattttttctttctt

SEQ ID NO: 40408 - DNA, 15 bp, Homo sapiens
aaattttttctttct

SEQ ID NO: 40409 - DNA, 15 bp, Homo sapiens
aaaattttttctttc

SEQ ID NO: 40410 - DNA, 15 bp, Homo sapiens
aaaaattttttcttt

SEQ ID NO: 40411 - DNA, 15 bp, Homo sapiens
taaaaattttttctt

SEQ ID NO: 40412 - DNA, 15 bp, Homo sapiens
ttaaaaattttttct

SEQ ID NO: 40413 - DNA, 15 bp, Homo sapiens
tttaaaaattttttc

SEQ ID NO: 40414 - DNA, 15 bp, Homo sapiens
gtttaaaaatttttt

SEQ ID NO: 40415 - DNA, 15 bp, Homo sapiens
tgtttaaaaattttt

SEQ ID NO: 40416 - DNA, 15 bp, Homo sapiens
ctgtttaaaaatttt

SEQ ID NO: 40417 - DNA, 15 bp, Homo sapiens
tctgtttaaaaattt

SEQ ID NO: 40418 - DNA, 15 bp, Homo sapiens
atctgtttaaaaatt

SEQ ID NO: 40419 - DNA, 15 bp, Homo sapiens
aatctgtttaaaaat

SEQ ID NO: 40420 - DNA, 15 bp, Homo sapiens
aaatctgtttaaaaa

SEQ ID NO: 40421 - DNA, 15 bp, Homo sapiens
taaatctgtttaaaa

SEQ ID NO: 40422 - DNA, 15 bp, Homo sapiens
ctaaatctgtttaaa

SEQ ID NO: 40423 - DNA, 15 bp, Homo sapiens
tctaaatctgtttaa

SEQ ID NO: 40424 - DNA, 15 bp, Homo sapiens
ctctaaatctgttta

SEQ ID NO: 40425 - DNA, 15 bp, Homo sapiens
actctaaatctgttt

SEQ ID NO: 40426 - DNA, 15 bp, Homo sapiens
tactctaaatctgtt

SEQ ID NO: 40427 - DNA, 15 bp, Homo sapiens
ctactctaaatctgt

SEQ ID NO: 40428 - DNA, 15 bp, Homo sapiens
gctactctaaatctg

SEQ ID NO: 40429 - DNA, 15 bp, Homo sapiens
tgctactctaaatct

SEQ ID NO: 40430 - DNA, 15 bp, Homo sapiens
atgctactctaaatc

SEQ ID NO: 40431 - DNA, 15 bp, Homo sapiens
catgctactctaaat

SEQ ID NO: 40432 - DNA, 15 bp, Homo sapiens
acatgctactctaaa

SEQ ID NO: 40433 - DNA, 15 bp, Homo sapiens
aacatgctactctaa

SEQ ID NO: 40434 - DNA, 15 bp, Homo sapiens
aaacatgctactcta

SEQ ID NO: 40435 - DNA, 15 bp, Homo sapiens
taaacatgctactct

SEQ ID NO: 40436 - DNA, 15 bp, Homo sapiens
ataaacatgctactc

SEQ ID NO: 40437 - DNA, 15 bp, Homo sapiens
tataaacatgctact

SEQ ID NO: 40438 - DNA, 15 bp, Homo sapiens
ttataaacatgctac

SEQ ID NO: 40439 - DNA, 15 bp, Homo sapiens
tttataaacatgcta

SEQ ID NO: 40440 - DNA, 15 bp, Homo sapiens
ttttataaacatgct

SEQ ID NO: 40441 - DNA, 15 bp, Homo sapiens
attttataaacatgc

SEQ ID NO: 40442 - DNA, 15 bp, Homo sapiens
gattttataaacatg

SEQ ID NO: 40443 - DNA, 15 bp, Homo sapiens
agattttataaacat

SEQ ID NO: 40444 - DNA, 15 bp, Homo sapiens
tagattttataaaca

SEQ ID NO: 40445 - DNA, 15 bp, Homo sapiens
gtagattttataaac

SEQ ID NO: 40446 - DNA, 15 bp, Homo sapiens
tgtagattttataaa

SEQ ID NO: 40447 - DNA, 15 bp, Homo sapiens
ctgtagattttataa

SEQ ID NO: 40448 - DNA, 15 bp, Homo sapiens
actgtagattttata

SEQ ID NO: 40449 - DNA, 15 bp, Homo sapiens
tactgtagattttat

SEQ ID NO: 40450 - DNA, 15 bp, Homo sapiens
ctactgtagatttta

SEQ ID NO: 40451 - DNA, 15 bp, Homo sapiens
actactgtagatttt

SEQ ID NO: 40452 - DNA, 15 bp, Homo sapiens
aactactgtagattt

SEQ ID NO: 40453 - DNA, 15 bp, Homo sapiens
aaactactgtagatt

SEQ ID NO: 40454 - DNA, 15 bp, Homo sapiens
taaactactgtagat

SEQ ID NO: 40455 - DNA, 15 bp, Homo sapiens
gtaaactactgtaga

SEQ ID NO: 40456 - DNA, 15 bp, Homo sapiens
tgtaaactactgtag

SEQ ID NO: 40457 - DNA, 15 bp, Homo sapiens
ctgtaaactactgta

SEQ ID NO: 40458 - DNA, 15 bp, Homo sapiens
actgtaaactactgt

SEQ ID NO: 40459 - DNA, 15 bp, Homo sapiens
tactgtaaactactg

SEQ ID NO: 40460 - DNA, 15 bp, Homo sapiens
ttactgtaaactact

SEQ ID NO: 40461 - DNA, 15 bp, Homo sapiens
attactgtaaactac

SEQ ID NO: 40462 - DNA, 15 bp, Homo sapiens
tattactgtaaacta

SEQ ID NO: 40463 - DNA, 15 bp, Homo sapiens
atattactgtaaact

SEQ ID NO: 40464 - DNA, 15 bp, Homo sapiens
gatattactgtaaac

SEQ ID NO: 40465 - DNA, 15 bp, Homo sapiens
ggatattactgtaaa

SEQ ID NO: 40466 - DNA, 15 bp, Homo sapiens
aggatattactgtaa

SEQ ID NO: 40467 - DNA, 15 bp, Homo sapiens
taggatattactgta

SEQ ID NO: 40468 - DNA, 15 bp, Homo sapiens
ctaggatattactgt

SEQ ID NO: 40469 - DNA, 15 bp, Homo sapiens
cctaggatattactg

SEQ ID NO: 40470 - DNA, 15 bp, Homo sapiens
gcctaggatattact

SEQ ID NO: 40471 - DNA, 15 bp, Homo sapiens
ggcctaggatattac

SEQ ID NO: 40472 - DNA, 15 bp, Homo sapiens
aggcctaggatatta

SEQ ID NO: 40473 - DNA, 15 bp, Homo sapiens
aaggcctaggatatt

SEQ ID NO: 40474 - DNA, 15 bp, Homo sapiens
gaaggcctaggatat

SEQ ID NO: 40475 - DNA, 15 bp, Homo sapiens
tgaaggcctaggata

SEQ ID NO: 40476 - DNA, 15 bp, Homo sapiens
gtgaaggcctaggat

SEQ ID NO: 40477 - DNA, 15 bp, Homo sapiens
tgtgaaggcctagga

SEQ ID NO: 40478 - DNA, 15 bp, Homo sapiens
atgtgaaggcctagg

SEQ ID NO: 40479 - DNA, 15 bp, Homo sapiens
aatgtgaaggcctag

SEQ ID NO: 40480 - DNA, 15 bp, Homo sapiens
taatgtgaaggccta

SEQ ID NO: 40481 - DNA, 15 bp, Homo sapiens
ttaatgtgaaggcct

SEQ ID NO: 40482 - DNA, 15 bp, Homo sapiens
gttaatgtgaaggcc

SEQ ID NO: 40483 - DNA, 15 bp, Homo sapiens
agttaatgtgaaggc

SEQ ID NO: 40484 - DNA, 15 bp, Homo sapiens
gagttaatgtgaagg

SEQ ID NO: 40485 - DNA, 15 bp, Homo sapiens
tgagttaatgtgaag

SEQ ID NO: 40486 - DNA, 15 bp, Homo sapiens
gtgagttaatgtgaa

SEQ ID NO: 40487 - DNA, 15 bp, Homo sapiens
ggtgagttaatgtga

SEQ ID NO: 40488 - DNA, 15 bp, Homo sapiens
tggtgagttaatgtg

SEQ ID NO: 40489 - DNA, 15 bp, Homo sapiens
gtggtgagttaatgt

SEQ ID NO: 40490 - DNA, 15 bp, Homo sapiens
agtggtgagttaatg

SEQ ID NO: 40491 - DNA, 15 bp, Homo sapiens
gagtggtgagttaat

SEQ ID NO: 40492 - DNA, 15 bp, Homo sapiens
tgagtggtgagttaa

SEQ ID NO: 40493 - DNA, 15 bp, Homo sapiens
gtgagtggtgagtta

SEQ ID NO: 40494 - DNA, 15 bp, Homo sapiens
ggtgagtggtgagtt

SEQ ID NO: 40495 - DNA, 15 bp, Homo sapiens
gggtgagtggtgagt

SEQ ID NO: 40496 - DNA, 15 bp, Homo sapiens
tgggtgagtggtgag

SEQ ID NO: 40497 - DNA, 15 bp, Homo sapiens
gtgggtgagtggtga

SEQ ID NO: 40498 - DNA, 15 bp, Homo sapiens
agtgggtgagtggtg

SEQ ID NO: 40499 - DNA, 15 bp, Homo sapiens
cagtgggtgagtggt

SEQ ID NO: 40500 - DNA, 15 bp, Homo sapiens
tcagtgggtgagtgg

SEQ ID NO: 40501 - DNA, 15 bp, Homo sapiens
gtcagtgggtgagtg

SEQ ID NO: 40502 - DNA, 15 bp, Homo sapiens
agtcagtgggtgagt

SEQ ID NO: 40503 - DNA, 15 bp, Homo sapiens
gagtcagtgggtgag

SEQ ID NO: 40504 - DNA, 15 bp, Homo sapiens
tgagtcagtgggtga

SEQ ID NO: 40505 - DNA, 15 bp, Homo sapiens
gtgagtcagtgggtg

SEQ ID NO: 40506 - DNA, 15 bp, Homo sapiens
ggtgagtcagtgggt

SEQ ID NO: 40507 - DNA, 15 bp, Homo sapiens
gggtgagtcagtggg

SEQ ID NO: 40508 - DNA, 15 bp, Homo sapiens
tgggtgagtcagtgg

SEQ ID NO: 40509 - DNA, 15 bp, Homo sapiens
ctgggtgagtcagtg

SEQ ID NO: 40510 - DNA, 15 bp, Homo sapiens
tctgggtgagtcagt

SEQ ID NO: 40511 - DNA, 15 bp, Homo sapiens
ctctgggtgagtcag

SEQ ID NO: 40512 - DNA, 15 bp, Homo sapiens
gctctgggtgagtca

SEQ ID NO: 40513 - DNA, 15 bp, Homo sapiens
tgctctgggtgagtc

SEQ ID NO: 40514 - DNA, 15 bp, Homo sapiens
ctgctctgggtgagt

SEQ ID NO: 40515 - DNA, 15 bp, Homo sapiens
gctgctctgggtgag

SEQ ID NO: 40516 - DNA, 15 bp, Homo sapiens
agctgctctgggtga

SEQ ID NO: 40517 - DNA, 15 bp, Homo sapiens
aagctgctctgggtg

SEQ ID NO: 40518 - DNA, 15 bp, Homo sapiens
gaagctgctctgggt

SEQ ID NO: 40519 - DNA, 15 bp, Homo sapiens
ggaagctgctctggg

SEQ ID NO: 40520 - DNA, 15 bp, Homo sapiens
tggaagctgctctgg

SEQ ID NO: 40521 - DNA, 15 bp, Homo sapiens
ttggaagctgctctg

SEQ ID NO: 40522 - DNA, 15 bp, Homo sapiens
attggaagctgctct

SEQ ID NO: 40523 - DNA, 15 bp, Homo sapiens
gattggaagctgctc

SEQ ID NO: 40524 - DNA, 15 bp, Homo sapiens
ggattggaagctgct

SEQ ID NO: 40525 - DNA, 15 bp, Homo sapiens
aggattggaagctgc

SEQ ID NO: 40526 - DNA, 15 bp, Homo sapiens
caggattggaagctg

SEQ ID NO: 40527 - DNA, 15 bp, Homo sapiens
acaggattggaagct

SEQ ID NO: 40528 - DNA, 15 bp, Homo sapiens
tacaggattggaagc

SEQ ID NO: 40529 - DNA, 15 bp, Homo sapiens
ttacaggattggaag

SEQ ID NO: 40530 - DNA, 15 bp, Homo sapiens
cttacaggattggaa

SEQ ID NO: 40531 - DNA, 15 bp, Homo sapiens
gcttacaggattgga

SEQ ID NO: 40532 - DNA, 15 bp, Homo sapiens
agcttacaggattgg

SEQ ID NO: 40533 - DNA, 15 bp, Homo sapiens
gagcttacaggattg

SEQ ID NO: 40534 - DNA, 15 bp, Homo sapiens
ggagcttacaggatt

SEQ ID NO: 40535 - DNA, 15 bp, Homo sapiens
tggagcttacaggat

SEQ ID NO: 40536 - DNA, 15 bp, Homo sapiens
atggagcttacagga

SEQ ID NO: 40537 - DNA, 15 bp, Homo sapiens
aatggagcttacagg

SEQ ID NO: 40538 - DNA, 15 bp, Homo sapiens
gaatggagcttacag

SEQ ID NO: 40539 - DNA, 15 bp, Homo sapiens
cgaatggagcttaca

SEQ ID NO: 40540 - DNA, 15 bp, Homo sapiens
acgaatggagcttac

SEQ ID NO: 40541 - DNA, 15 bp, Homo sapiens
cacgaatggagctta

SEQ ID NO: 40542 - DNA, 15 bp, Homo sapiens
ccacgaatggagctt

SEQ ID NO: 40543 - DNA, 15 bp, Homo sapiens
accacgaatggagct

SEQ ID NO: 40544 - DNA, 15 bp, Homo sapiens
taccacgaatggagc

SEQ ID NO: 40545 - DNA, 15 bp, Homo sapiens
ttaccacgaatggag

SEQ ID NO: 40546 - DNA, 15 bp, Homo sapiens
cttaccacgaatgga

SEQ ID NO: 40547 - DNA, 15 bp, Homo sapiens
acttaccacgaatgg

SEQ ID NO: 40548 - DNA, 15 bp, Homo sapiens
cacttaccacgaatg

SEQ ID NO: 40549 - DNA, 15 bp, Homo sapiens
gcacttaccacgaat

SEQ ID NO: 40550 - DNA, 15 bp, Homo sapiens
ggcacttaccacgaa

SEQ ID NO: 40551 - DNA, 15 bp, Homo sapiens
gggcacttaccacga

SEQ ID NO: 40552 - DNA, 15 bp, Homo sapiens
agggcacttaccacg

SEQ ID NO: 40553 - DNA, 15 bp, Homo sapiens
tagggcacttaccac

SEQ ID NO: 40554 - DNA, 15 bp, Homo sapiens
atagggcacttacca

SEQ ID NO: 40555 - DNA, 15 bp, Homo sapiens
tatagggcacttacc

SEQ ID NO: 40556 - DNA, 15 bp, Homo sapiens
gtatagggcacttac

SEQ ID NO: 40557 - DNA, 15 bp, Homo sapiens
tgtatagggcactta

SEQ ID NO: 40558 - DNA, 15 bp, Homo sapiens
ctgtatagggcactt

SEQ ID NO: 40559 - DNA, 15 bp, Homo sapiens
cctgtatagggcact

SEQ ID NO: 40560 - DNA, 15 bp, Homo sapiens
acctgtatagggcac

SEQ ID NO: 40561 - DNA, 15 bp, Homo sapiens
cacctgtatagggca

SEQ ID NO: 40562 - DNA, 15 bp, Homo sapiens
acacctgtatagggc

SEQ ID NO: 40563 - DNA, 15 bp, Homo sapiens
tacacctgtataggg

SEQ ID NO: 40564 - DNA, 15 bp, Homo sapiens
gtacacctgtatagg

SEQ ID NO: 40565 - DNA, 15 bp, Homo sapiens
tgtacacctgtatag

SEQ ID NO: 40566 - DNA, 15 bp, Homo sapiens
ttgtacacctgtata

SEQ ID NO: 40567 - DNA, 15 bp, Homo sapiens
attgtacacctgtat

SEQ ID NO: 40568 - DNA, 15 bp, Homo sapiens
aattgtacacctgta

SEQ ID NO: 40569 - DNA, 15 bp, Homo sapiens
aaattgtacacctgt

SEQ ID NO: 40570 - DNA, 15 bp, Homo sapiens
aaaattgtacacctg

SEQ ID NO: 40571 - DNA, 15 bp, Homo sapiens
aaaaattgtacacct

SEQ ID NO: 40572 - DNA, 15 bp, Homo sapiens
taaaaattgtacacc

SEQ ID NO: 40573 - DNA, 15 bp, Homo sapiens
ataaaaattgtacac

SEQ ID NO: 40574 - DNA, 15 bp, Homo sapiens
tataaaaattgtaca

SEQ ID NO: 40575 - DNA, 15 bp, Homo sapiens
atataaaaattgtac

SEQ ID NO: 40576 - DNA, 15 bp, Homo sapiens
gatataaaaattgta

SEQ ID NO: 40577 - DNA, 15 bp, Homo sapiens
ggatataaaaattgt

SEQ ID NO: 40578 - DNA, 15 bp, Homo sapiens
aggatataaaaattg

SEQ ID NO: 40579 - DNA, 15 bp, Homo sapiens
aaggatataaaaatt

SEQ ID NO: 40580 - DNA, 15 bp, Homo sapiens
aaaggatataaaaat

SEQ ID NO: 40581 - DNA, 15 bp, Homo sapiens
taaaggatataaaaa

SEQ ID NO: 40582 - DNA, 15 bp, Homo sapiens
ataaaggatataaaa

SEQ ID NO: 40583 - DNA, 15 bp, Homo sapiens
tataaaggatataaa

SEQ ID NO: 40584 - DNA, 15 bp, Homo sapiens
gtataaaggatataa

SEQ ID NO: 40585 - DNA, 15 bp, Homo sapiens
ggtataaaggatata

SEQ ID NO: 40586 - DNA, 15 bp, Homo sapiens
tggtataaaggatat

SEQ ID NO: 40587 - DNA, 15 bp, Homo sapiens
atggtataaaggata

SEQ ID NO: 40588 - DNA, 15 bp, Homo sapiens
aatggtataaaggat

SEQ ID NO: 40589 - DNA, 15 bp, Homo sapiens
aaatggtataaagga

SEQ ID NO: 40590 - DNA, 15 bp, Homo sapiens
aaaatggtataaagg

SEQ ID NO: 40591 - DNA, 15 bp, Homo sapiens
aaaaatggtataaag

SEQ ID NO: 40592 - DNA, 15 bp, Homo sapiens
taaaaatggtataaa

SEQ ID NO: 40593 - DNA, 15 bp, Homo sapiens
gtaaaaatggtataa

SEQ ID NO: 40594 - DNA, 15 bp, Homo sapiens
agtaaaaatggtata

SEQ ID NO: 40595 - DNA, 15 bp, Homo sapiens
cagtaaaaatggtat

SEQ ID NO: 40596 - DNA, 15 bp, Homo sapiens
tcagtaaaaatggta

SEQ ID NO: 40597 - DNA, 15 bp, Homo sapiens
ttcagtaaaaatggt

SEQ ID NO: 40598 - DNA, 15 bp, Homo sapiens
gttcagtaaaaatgg

SEQ ID NO: 40599 - DNA, 15 bp, Homo sapiens
ggttcagtaaaaatg

SEQ ID NO: 40600 - DNA, 15 bp, Homo sapiens
aggttcagtaaaaat

SEQ ID NO: 40601 - DNA, 15 bp, Homo sapiens
aaggttcagtaaaaa

SEQ ID NO: 40602 - DNA, 15 bp, Homo sapiens
aaaggttcagtaaaa

SEQ ID NO: 40603 - DNA, 15 bp, Homo sapiens
aaaaggttcagtaaa

SEQ ID NO: 40604 - DNA, 15 bp, Homo sapiens
gaaaaggttcagtaa

SEQ ID NO: 40605 - DNA, 15 bp, Homo sapiens
agaaaaggttcagta

SEQ ID NO: 40606 - DNA, 15 bp, Homo sapiens
cagaaaaggttcagt

SEQ ID NO: 40607 - DNA, 15 bp, Homo sapiens
acagaaaaggttcag

SEQ ID NO: 40608 - DNA, 15 bp, Homo sapiens
gacagaaaaggttca

SEQ ID NO: 40609 - DNA, 15 bp, Homo sapiens
agacagaaaaggttc

SEQ ID NO: 40610 - DNA, 15 bp, Homo sapiens
aagacagaaaaggtt

SEQ ID NO: 40611 - DNA, 15 bp, Homo sapiens
aaagacagaaaaggt

SEQ ID NO: 40612 - DNA, 15 bp, Homo sapiens
aaaagacagaaaagg

SEQ ID NO: 40613 - DNA, 15 bp, Homo sapiens
taaaagacagaaaag

SEQ ID NO: 40614 - DNA, 15 bp, Homo sapiens
ctaaaagacagaaaa

SEQ ID NO: 40615 - DNA, 15 bp, Homo sapiens
tctaaaagacagaaa

SEQ ID NO: 40616 - DNA, 15 bp, Homo sapiens
atctaaaagacagaa

SEQ ID NO: 40617 - DNA, 15 bp, Homo sapiens
tatctaaaagacaga

SEQ ID NO: 40618 - DNA, 15 bp, Homo sapiens
gtatctaaaagacag

SEQ ID NO: 40619 - DNA, 15 bp, Homo sapiens
tgtatctaaaagaca

SEQ ID NO: 40620 - DNA, 15 bp, Homo sapiens
gtgtatctaaaagac

SEQ ID NO: 40621 - DNA, 15 bp, Homo sapiens
tgtgtatctaaaaga

SEQ ID NO: 40622 - DNA, 15 bp, Homo sapiens
ttgtgtatctaaaag

SEQ ID NO: 40623 - DNA, 15 bp, Homo sapiens
tttgtgtatctaaaa

SEQ ID NO: 40624 - DNA, 15 bp, Homo sapiens
atttgtgtatctaaa

SEQ ID NO: 40625 - DNA, 15 bp, Homo sapiens
tatttgtgtatctaa

SEQ ID NO: 40626 - DNA, 15 bp, Homo sapiens
ttatttgtgtatcta

SEQ ID NO: 40627 - DNA, 15 bp, Homo sapiens
gttatttgtgtatct

SEQ ID NO: 40628 - DNA, 15 bp, Homo sapiens
tgttatttgtgtatc

SEQ ID NO: 40629 - DNA, 15 bp, Homo sapiens
atgttatttgtgtat

SEQ ID NO: 40630 - DNA, 15 bp, Homo sapiens
aatgttatttgtgta

SEQ ID NO: 40631 - DNA, 15 bp, Homo sapiens
caatgttatttgtgt

SEQ ID NO: 40632 - DNA, 15 bp, Homo sapiens
acaatgttatttgtg

SEQ ID NO: 40633 - DNA, 15 bp, Homo sapiens
cacaatgttatttgt

SEQ ID NO: 40634 - DNA, 15 bp, Homo sapiens
acacaatgttatttg

SEQ ID NO: 40635 - DNA, 15 bp, Homo sapiens
aacacaatgttattt

SEQ ID NO: 40636 - DNA, 15 bp, Homo sapiens
taacacaatgttatt

SEQ ID NO: 40637 - DNA, 15 bp, Homo sapiens
gtaacacaatgttat

SEQ ID NO: 40638 - DNA, 15 bp, Homo sapiens
tgtaacacaatgtta

SEQ ID NO: 40639 - DNA, 15 bp, Homo sapiens
ctgtaacacaatgtt

SEQ ID NO: 40640 - DNA, 15 bp, Homo sapiens
actgtaacacaatgt

SEQ ID NO: 40641 - DNA, 15 bp, Homo sapiens
aactgtaacacaatg

SEQ ID NO: 40642 - DNA, 15 bp, Homo sapiens
caactgtaacacaat

SEQ ID NO: 40643 - DNA, 15 bp, Homo sapiens
gcaactgtaacacaa

SEQ ID NO: 40644 - DNA, 15 bp, Homo sapiens
ggcaactgtaacaca

SEQ ID NO: 40645 - DNA, 15 bp, Homo sapiens
aggcaactgtaacac

SEQ ID NO: 40646 - DNA, 15 bp, Homo sapiens
taggcaactgtaaca

SEQ ID NO: 40647 - DNA, 15 bp, Homo sapiens
ataggcaactgtaac

SEQ ID NO: 40648 - DNA, 15 bp, Homo sapiens
cataggcaactgtaa

SEQ ID NO: 40649 - DNA, 15 bp, Homo sapiens
tcataggcaactgta

SEQ ID NO: 40650 - DNA, 15 bp, Homo sapiens
atcataggcaactgt

SEQ ID NO: 40651 - DNA, 15 bp, Homo sapiens
tatcataggcaactg

SEQ ID NO: 40652 - DNA, 15 bp, Homo sapiens
atatcataggcaact

SEQ ID NO: 40653 - DNA, 15 bp, Homo sapiens
aatatcataggcaac

SEQ ID NO: 40654 - DNA, 15 bp, Homo sapiens
caatatcataggcaa

SEQ ID NO: 40655 - DNA, 15 bp, Homo sapiens
tcaatatcataggca

SEQ ID NO: 40656 - DNA, 15 bp, Homo sapiens
ttcaatatcataggc

SEQ ID NO: 40657 - DNA, 15 bp, Homo sapiens
attcaatatcatagg

SEQ ID NO: 40658 - DNA, 15 bp, Homo sapiens
tattcaatatcatag

SEQ ID NO: 40659 - DNA, 15 bp, Homo sapiens
gtattcaatatcata

SEQ ID NO: 40660 - DNA, 15 bp, Homo sapiens
tgtattcaatatcat

SEQ ID NO: 40661 - DNA, 15 bp, Homo sapiens
ctgtattcaatatca

SEQ ID NO: 40662 - DNA, 15 bp, Homo sapiens
actgtattcaatatc

SEQ ID NO: 40663 - DNA, 15 bp, Homo sapiens
tactgtattcaatat

SEQ ID NO: 40664 - DNA, 15 bp, Homo sapiens
ttactgtattcaata

SEQ ID NO: 40665 - DNA, 15 bp, Homo sapiens
gttactgtattcaat

SEQ ID NO: 40666 - DNA, 15 bp, Homo sapiens
agttactgtattcaa

SEQ ID NO: 40667 - DNA, 15 bp, Homo sapiens
aagttactgtattca

SEQ ID NO: 40668 - DNA, 15 bp, Homo sapiens
taagttactgtattc

SEQ ID NO: 40669 - DNA, 15 bp, Homo sapiens
gtaagttactgtatt

SEQ ID NO: 40670 - DNA, 15 bp, Homo sapiens
agtaagttactgtat

SEQ ID NO: 40671 - DNA, 15 bp, Homo sapiens
cagtaagttactgta

SEQ ID NO: 40672 - DNA, 15 bp, Homo sapiens
acagtaagttactgt

SEQ ID NO: 40673 - DNA, 15 bp, Homo sapiens
tacagtaagttactg

SEQ ID NO: 40674 - DNA, 15 bp, Homo sapiens
gtacagtaagttact

SEQ ID NO: 40675 - DNA, 15 bp, Homo sapiens
tgtacagtaagttac

SEQ ID NO: 40676 - DNA, 15 bp, Homo sapiens
ttgtacagtaagtta

SEQ ID NO: 40677 - DNA, 15 bp, Homo sapiens
cttgtacagtaagtt

SEQ ID NO: 40678 - DNA, 15 bp, Homo sapiens
acttgtacagtaagt

SEQ ID NO: 40679 - DNA, 15 bp, Homo sapiens
aacttgtacagtaag

SEQ ID NO: 40680 - DNA, 15 bp, Homo sapiens
aaacttgtacagtaa

SEQ ID NO: 40681 - DNA, 15 bp, Homo sapiens
caaacttgtacagta

SEQ ID NO: 40682 - DNA, 15 bp, Homo sapiens
acaaacttgtacagt

SEQ ID NO: 40683 - DNA, 15 bp, Homo sapiens
tacaaacttgtacag

SEQ ID NO: 40684 - DNA, 15 bp, Homo sapiens
ctacaaacttgtaca

SEQ ID NO: 40685 - DNA, 15 bp, Homo sapiens
gctacaaacttgtac

SEQ ID NO: 40686 - DNA, 15 bp, Homo sapiens
tgctacaaacttgta

SEQ ID NO: 40687 - DNA, 15 bp, Homo sapiens
atgctacaaacttgt

SEQ ID NO: 40688 - DNA, 15 bp, Homo sapiens
tatgctacaaacttg

SEQ ID NO: 40689 - DNA, 15 bp, Homo sapiens
ctatgctacaaactt

SEQ ID NO: 40690 - DNA, 15 bp, Homo sapiens
cctatgctacaaact

SEQ ID NO: 40691 - DNA, 15 bp, Homo sapiens
tcctatgctacaaac

SEQ ID NO: 40692 - DNA, 15 bp, Homo sapiens
ctcctatgctacaaa

SEQ ID NO: 40693 - DNA, 15 bp, Homo sapiens
gctcctatgctacaa

SEQ ID NO: 40694 - DNA, 15 bp, Homo sapiens
agctcctatgctaca

SEQ ID NO: 40695 - DNA, 15 bp, Homo sapiens
cagctcctatgctac

SEQ ID NO: 40696 - DNA, 15 bp, Homo sapiens
acagctcctatgcta

SEQ ID NO: 40697 - DNA, 15 bp, Homo sapiens
tacagctcctatgct

SEQ ID NO: 40698 - DNA, 15 bp, Homo sapiens
atacagctcctatgc

SEQ ID NO: 40699 - DNA, 15 bp, Homo sapiens
gatacagctcctatg

SEQ ID NO: 40700 - DNA, 15 bp, Homo sapiens
tgatacagctcctat

SEQ ID NO: 40701 - DNA, 15 bp, Homo sapiens
atgatacagctccta

SEQ ID NO: 40702 - DNA, 15 bp, Homo sapiens
tatgatacagctcct

SEQ ID NO: 40703 - DNA, 15 bp, Homo sapiens
atatgatacagctcc

SEQ ID NO: 40704 - DNA, 15 bp, Homo sapiens
tatatgatacagctc

SEQ ID NO: 40705 - DNA, 15 bp, Homo sapiens
ctatatgatacagct

SEQ ID NO: 40706 - DNA, 15 bp, Homo sapiens
gctatatgatacagc

SEQ ID NO: 40707 - DNA, 15 bp, Homo sapiens
ggctatatgatacag

SEQ ID NO: 40708 - DNA, 15 bp, Homo sapiens
aggctatatgataca

SEQ ID NO: 40709 - DNA, 15 bp, Homo sapiens
caggctatatgatac

SEQ ID NO: 40710 - DNA, 15 bp, Homo sapiens
ccaggctatatgata

SEQ ID NO: 40711 - DNA, 15 bp, Homo sapiens
cccaggctatatgat

SEQ ID NO: 40712 - DNA, 15 bp, Homo sapiens
acccaggctatatga

SEQ ID NO: 40713 - DNA, 15 bp, Homo sapiens
cacccaggctatatg

SEQ ID NO: 40714 - DNA, 15 bp, Homo sapiens
acacccaggctatat

SEQ ID NO: 40715 - DNA, 15 bp, Homo sapiens
cacacccaggctata

SEQ ID NO: 40716 - DNA, 15 bp, Homo sapiens
acacacccaggctat

SEQ ID NO: 40717 - DNA, 15 bp, Homo sapiens
tacacacccaggcta

SEQ ID NO: 40718 - DNA, 15 bp, Homo sapiens
ctacacacccaggct

SEQ ID NO: 40719 - DNA, 15 bp, Homo sapiens
actacacacccaggc

SEQ ID NO: 40720 - DNA, 15 bp, Homo sapiens
cactacacacccagg

SEQ ID NO: 40721 - DNA, 15 bp, Homo sapiens
tcactacacacccag

SEQ ID NO: 40722 - DNA, 15 bp, Homo sapiens
ttcactacacaccca

SEQ ID NO: 40723 - DNA, 15 bp, Homo sapiens
gttcactacacaccc

SEQ ID NO: 40724 - DNA, 15 bp, Homo sapiens
agttcactacacacc

SEQ ID NO: 40725 - DNA, 15 bp, Homo sapiens
tagttcactacacac

SEQ ID NO: 40726 - DNA, 15 bp, Homo sapiens
atagttcactacaca

SEQ ID NO: 40727 - DNA, 15 bp, Homo sapiens
tatagttcactacac

SEQ ID NO: 40728 - DNA, 15 bp, Homo sapiens
gtatagttcactaca

SEQ ID NO: 40729 - DNA, 15 bp, Homo sapiens
ggtatagttcactac

SEQ ID NO: 40730 - DNA, 15 bp, Homo sapiens
tggtatagttcacta

SEQ ID NO: 40731 - DNA, 15 bp, Homo sapiens
atggtatagttcact

SEQ ID NO: 40732 - DNA, 15 bp, Homo sapiens
gatggtatagttcac

SEQ ID NO: 40733 - DNA, 15 bp, Homo sapiens
agatggtatagttca

SEQ ID NO: 40734 - DNA, 15 bp, Homo sapiens
tagatggtatagttc

SEQ ID NO: 40735 - DNA, 15 bp, Homo sapiens
ctagatggtatagtt

SEQ ID NO: 40736 - DNA, 15 bp, Homo sapiens
cctagatggtatagt

SEQ ID NO: 40737 - DNA, 15 bp, Homo sapiens
gcctagatggtatag

SEQ ID NO: 40738 - DNA, 15 bp, Homo sapiens
agcctagatggtata

SEQ ID NO: 40739 - DNA, 15 bp, Homo sapiens
aagcctagatggtat

SEQ ID NO: 40740 - DNA, 15 bp, Homo sapiens
caagcctagatggta

SEQ ID NO: 40741 - DNA, 15 bp, Homo sapiens
acaagcctagatggt

SEQ ID NO: 40742 - DNA, 15 bp, Homo sapiens
cacaagcctagatgg

SEQ ID NO: 40743 - DNA, 15 bp, Homo sapiens
acacaagcctagatg

SEQ ID NO: 40744 - DNA, 15 bp, Homo sapiens
tacacaagcctagat

SEQ ID NO: 40745 - DNA, 15 bp, Homo sapiens
ttacacaagcctaga

SEQ ID NO: 40746 - DNA, 15 bp, Homo sapiens
cttacacaagcctag

SEQ ID NO: 40747 - DNA, 15 bp, Homo sapiens
acttacacaagccta

SEQ ID NO: 40748 - DNA, 15 bp, Homo sapiens
tacttacacaagcct

SEQ ID NO: 40749 - DNA, 15 bp, Homo sapiens
atacttacacaagcc

SEQ ID NO: 40750 - DNA, 15 bp, Homo sapiens
tatacttacacaagc

SEQ ID NO: 40751 - DNA, 15 bp, Homo sapiens
atatacttacacaag

SEQ ID NO: 40752 - DNA, 15 bp, Homo sapiens
aatatacttacacaa

SEQ ID NO: 40753 - DNA, 15 bp, Homo sapiens
aaatatacttacaca

SEQ ID NO: 40754 - DNA, 15 bp, Homo sapiens
aaaatatacttacac

SEQ ID NO: 40755 - DNA, 15 bp, Homo sapiens
taaaatatacttaca

SEQ ID NO: 40756 - DNA, 15 bp, Homo sapiens
ataaaatatacttac

SEQ ID NO: 40757 - DNA, 15 bp, Homo sapiens
cataaaatatactta

SEQ ID NO: 40758 - DNA, 15 bp, Homo sapiens
tcataaaatatactt

SEQ ID NO: 40759 - DNA, 15 bp, Homo sapiens
gtcataaaatatact

SEQ ID NO: 40760 - DNA, 15 bp, Homo sapiens
tgtcataaaatatac

SEQ ID NO: 40761 - DNA, 15 bp, Homo sapiens
gtgtcataaaatata

SEQ ID NO: 40762 - DNA, 15 bp, Homo sapiens
tgtgtcataaaatat

SEQ ID NO: 40763 - DNA, 15 bp, Homo sapiens
ctgtgtcataaaata

SEQ ID NO: 40764 - DNA, 15 bp, Homo sapiens
actgtgtcataaaat

SEQ ID NO: 40765 - DNA, 15 bp, Homo sapiens
cactgtgtcataaaa

SEQ ID NO: 40766 - DNA, 15 bp, Homo sapiens
tcactgtgtcataaa

SEQ ID NO: 40767 - DNA, 15 bp, Homo sapiens
atcactgtgtcataa

SEQ ID NO: 40768 - DNA, 15 bp, Homo sapiens
catcactgtgtcata

SEQ ID NO: 40769 - DNA, 15 bp, Homo sapiens
tcatcactgtgtcat

SEQ ID NO: 40770 - DNA, 15 bp, Homo sapiens
ttcatcactgtgtca

SEQ ID NO: 40771 - DNA, 15 bp, Homo sapiens
tttcatcactgtgtc

SEQ ID NO: 40772 - DNA, 15 bp, Homo sapiens
atttcatcactgtgt

SEQ ID NO: 40773 - DNA, 15 bp, Homo sapiens
gatttcatcactgtg

SEQ ID NO: 40774 - DNA, 15 bp, Homo sapiens
tgatttcatcactgt

SEQ ID NO: 40775 - DNA, 15 bp, Homo sapiens
atgatttcatcactg

SEQ ID NO: 40776 - DNA, 15 bp, Homo sapiens
gatgatttcatcact

SEQ ID NO: 40777 - DNA, 15 bp, Homo sapiens
ggatgatttcatcac

SEQ ID NO: 40778 - DNA, 15 bp, Homo sapiens
tggatgatttcatca

SEQ ID NO: 40779 - DNA, 15 bp, Homo sapiens
ctggatgatttcatc

SEQ ID NO: 40780 - DNA, 15 bp, Homo sapiens
tctggatgatttcat

SEQ ID NO: 40781 - DNA, 15 bp, Homo sapiens
atctggatgatttca

SEQ ID NO: 40782 - DNA, 15 bp, Homo sapiens
tatctggatgatttc

SEQ ID NO: 40783 - DNA, 15 bp, Homo sapiens
gtatctggatgattt

SEQ ID NO: 40784 - DNA, 15 bp, Homo sapiens
tgtatctggatgatt

SEQ ID NO: 40785 - DNA, 15 bp, Homo sapiens
ctgtatctggatgat

SEQ ID NO: 40786 - DNA, 15 bp, Homo sapiens
actgtatctggatga

SEQ ID NO: 40787 - DNA, 15 bp, Homo sapiens
aactgtatctggatg

SEQ ID NO: 40788 - DNA, 15 bp, Homo sapiens
aaactgtatctggat

SEQ ID NO: 40789 - DNA, 15 bp, Homo sapiens
gaaactgtatctgga

SEQ ID NO: 40790 - DNA, 15 bp, Homo sapiens
agaaactgtatctgg

SEQ ID NO: 40791 - DNA, 15 bp, Homo sapiens
gagaaactgtatctg

SEQ ID NO: 40792 - DNA, 15 bp, Homo sapiens
agagaaactgtatct

SEQ ID NO: 40793 - DNA, 15 bp, Homo sapiens
aagagaaactgtatc

SEQ ID NO: 40794 - DNA, 15 bp, Homo sapiens
taagagaaactgtat

SEQ ID NO: 40795 - DNA, 15 bp, Homo sapiens
ttaagagaaactgta

SEQ ID NO: 40796 - DNA, 15 bp, Homo sapiens
cttaagagaaactgt

SEQ ID NO: 40797 - DNA, 15 bp, Homo sapiens
gcttaagagaaactg

SEQ ID NO: 40798 - DNA, 15 bp, Homo sapiens
tgcttaagagaaact

SEQ ID NO: 40799 - DNA, 15 bp, Homo sapiens
ttgcttaagagaaac

SEQ ID NO: 40800 - DNA, 15 bp, Homo sapiens
gttgcttaagagaaa

SEQ ID NO: 40801 - DNA, 15 bp, Homo sapiens
tgttgcttaagagaa

SEQ ID NO: 40802 - DNA, 15 bp, Homo sapiens
gtgttgcttaagaga

SEQ ID NO: 40803 - DNA, 15 bp, Homo sapiens
tgtgttgcttaagag

SEQ ID NO: 40804 - DNA, 15 bp, Homo sapiens
atgtgttgcttaaga

SEQ ID NO: 40805 - DNA, 15 bp, Homo sapiens
tatgtgttgcttaag

SEQ ID NO: 40806 - DNA, 15 bp, Homo sapiens
ttatgtgttgcttaa

SEQ ID NO: 40807 - DNA, 15 bp, Homo sapiens
gttatgtgttgctta

SEQ ID NO: 40808 - DNA, 15 bp, Homo sapiens
agttatgtgttgctt

SEQ ID NO: 40809 - DNA, 15 bp, Homo sapiens
cagttatgtgttgct

SEQ ID NO: 40810 - DNA, 15 bp, Homo sapiens
acagttatgtgttgc

SEQ ID NO: 40811 - DNA, 15 bp, Homo sapiens
tacagttatgtgttg

SEQ ID NO: 40812 - DNA, 15 bp, Homo sapiens
atacagttatgtgtt

SEQ ID NO: 40813 - DNA, 15 bp, Homo sapiens
tatacagttatgtgt

SEQ ID NO: 40814 - DNA, 15 bp, Homo sapiens
atatacagttatgtg

SEQ ID NO: 40815 - DNA, 15 bp, Homo sapiens
tatatacagttatgt

SEQ ID NO: 40816 - DNA, 15 bp, Homo sapiens
atatatacagttatg

SEQ ID NO: 40817 - DNA, 15 bp, Homo sapiens
tatatatacagttat

SEQ ID NO: 40818 - DNA, 15 bp, Homo sapiens
atatatatacagtta

SEQ ID NO: 40819 - DNA, 15 bp, Homo sapiens
tatatatatacagtt

SEQ ID NO: 40820 - DNA, 15 bp, Homo sapiens
atatatatatacagt

SEQ ID NO: 40821 - DNA, 15 bp, Homo sapiens
tatatatatatacag

SEQ ID NO: 40822 - DNA, 15 bp, Homo sapiens
tatatatatatatac

SEQ ID NO: 40823 - DNA, 15 bp, Homo sapiens
atatatatatatata

SEQ ID NO: 40824 - DNA, 15 bp, Homo sapiens
tatatatatatatat

SEQ ID NO: 40825 - DNA, 15 bp, Homo sapiens
ctatatatatatata

SEQ ID NO: 40826 - DNA, 15 bp, Homo sapiens
cctatatatatatat

SEQ ID NO: 40827 - DNA, 15 bp, Homo sapiens
acctatatatatata

SEQ ID NO: 40828 - DNA, 15 bp, Homo sapiens
cacctatatatatat

SEQ ID NO: 40829 - DNA, 15 bp, Homo sapiens
ccacctatatatata

SEQ ID NO: 40830 - DNA, 15 bp, Homo sapiens
gccacctatatatat

SEQ ID NO: 40831 - DNA, 15 bp, Homo sapiens
agccacctatatata

SEQ ID NO: 40832 - DNA, 15 bp, Homo sapiens
aagccacctatatat

SEQ ID NO: 40833 - DNA, 15 bp, Homo sapiens
aaagccacctatata

SEQ ID NO: 40834 - DNA, 15 bp, Homo sapiens
taaagccacctatat

SEQ ID NO: 40835 - DNA, 15 bp, Homo sapiens
ttaaagccacctata

SEQ ID NO: 40836 - DNA, 15 bp, Homo sapiens
attaaagccacctat

SEQ ID NO: 40837 - DNA, 15 bp, Homo sapiens
tattaaagccaccta

SEQ ID NO: 40838 - DNA, 15 bp, Homo sapiens
ttattaaagccacct

SEQ ID NO: 40839 - DNA, 15 bp, Homo sapiens
attattaaagccacc

SEQ ID NO: 40840 - DNA, 15 bp, Homo sapiens
tattattaaagccac

SEQ ID NO: 40841 - DNA, 15 bp, Homo sapiens
ttattattaaagcca

SEQ ID NO: 40842 - DNA, 15 bp, Homo sapiens
tttattattaaagcc

SEQ ID NO: 40843 - DNA, 15 bp, Homo sapiens
ttttattattaaagc

SEQ ID NO: 40844 - DNA, 15 bp, Homo sapiens
attttattattaaag

SEQ ID NO: 40845 - DNA, 15 bp, Homo sapiens
tattttattattaaa

SEQ ID NO: 40846 - DNA, 15 bp, Homo sapiens
ttattttattattaa

SEQ ID NO: 40847 - DNA, 15 bp, Homo sapiens
attattttattatta

SEQ ID NO: 40848 - DNA, 15 bp, Homo sapiens
cattattttattatt

SEQ ID NO: 40849 - DNA, 15 bp, Homo sapiens
tcattattttattat

SEQ ID NO: 40850 - DNA, 15 bp, Homo sapiens
ttcattattttatta

SEQ ID NO: 40851 - DNA, 15 bp, Homo sapiens
tttcattattttatt

SEQ ID NO: 40852 - DNA, 15 bp, Homo sapiens
atttcattattttat

SEQ ID NO: 40853 - DNA, 15 bp, Homo sapiens
tatttcattatttta

SEQ ID NO: 40854 - DNA, 15 bp, Homo sapiens
atatttcattatttt

SEQ ID NO: 40855 - DNA, 15 bp, Homo sapiens
tatatttcattattt

SEQ ID NO: 40856 - DNA, 15 bp, Homo sapiens
atatatttcattatt

SEQ ID NO: 40857 - DNA, 15 bp, Homo sapiens
aatatatttcattat

SEQ ID NO: 40858 - DNA, 15 bp, Homo sapiens
aaatatatttcatta

SEQ ID NO: 40859 - DNA, 15 bp, Homo sapiens
gaaatatatttcatt

SEQ ID NO: 40860 - DNA, 15 bp, Homo sapiens
agaaatatatttcat

SEQ ID NO: 40861 - DNA, 15 bp, Homo sapiens
aagaaatatatttca

SEQ ID NO: 40862 - DNA, 15 bp, Homo sapiens
aaagaaatatatttc

SEQ ID NO: 40863 - DNA, 15 bp, Homo sapiens
aaaagaaatatattt

SEQ ID NO: 40864 - DNA, 15 bp, Homo sapiens
aaaaagaaatatatt

SEQ ID NO: 40865 - DNA, 15 bp, Homo sapiens
aaaaaagaaatatat

SEQ ID NO: 40866 - DNA, 15 bp, Homo sapiens
aaaaaaagaaatata

SEQ ID NO: 40867 - DNA, 15 bp, Homo sapiens
gaaaaaaagaaatat

SEQ ID NO: 40868 - DNA, 15 bp, Homo sapiens
agaaaaaaagaaata

SEQ ID NO: 40869 - DNA, 15 bp, Homo sapiens
cagaaaaaaagaaat

SEQ ID NO: 40870 - DNA, 15 bp, Homo sapiens
acagaaaaaaagaaa

SEQ ID NO: 40871 - DNA, 15 bp, Homo sapiens
gacagaaaaaaagaa

SEQ ID NO: 40872 - DNA, 15 bp, Homo sapiens
tgacagaaaaaaaga

SEQ ID NO: 40873 - DNA, 15 bp, Homo sapiens
atgacagaaaaaaag

SEQ ID NO: 40874 - DNA, 15 bp, Homo sapiens
aatgacagaaaaaaa

SEQ ID NO: 40875 - DNA, 15 bp, Homo sapiens
caatgacagaaaaaa

SEQ ID NO: 40876 - DNA, 15 bp, Homo sapiens
tcaatgacagaaaaa

SEQ ID NO: 40877 - DNA, 15 bp, Homo sapiens
gtcaatgacagaaaa

SEQ ID NO: 40878 - DNA, 15 bp, Homo sapiens
tgtcaatgacagaaa

SEQ ID NO: 40879 - DNA, 15 bp, Homo sapiens
ttgtcaatgacagaa

SEQ ID NO: 40880 - DNA, 15 bp, Homo sapiens
tttgtcaatgacaga

SEQ ID NO: 40881 - DNA, 15 bp, Homo sapiens
ttttgtcaatgacag

SEQ ID NO: 40882 - DNA, 15 bp, Homo sapiens
gttttgtcaatgaca

SEQ ID NO: 40883 - DNA, 15 bp, Homo sapiens
tgttttgtcaatgac

SEQ ID NO: 40884 - DNA, 15 bp, Homo sapiens
ttgttttgtcaatga

SEQ ID NO: 40885 - DNA, 15 bp, Homo sapiens
attgttttgtcaatg

SEQ ID NO: 40886 - DNA, 15 bp, Homo sapiens
aattgttttgtcaat

SEQ ID NO: 40887 - DNA, 15 bp, Homo sapiens
taattgttttgtcaa

SEQ ID NO: 40888 - DNA, 15 bp, Homo sapiens
gtaattgttttgtca

SEQ ID NO: 40889 - DNA, 15 bp, Homo sapiens
ggtaattgttttgtc

SEQ ID NO: 40890 - DNA, 15 bp, Homo sapiens
tggtaattgttttgt

SEQ ID NO: 40891 - DNA, 15 bp, Homo sapiens
ctggtaattgttttg

SEQ ID NO: 40892 - DNA, 15 bp, Homo sapiens
actggtaattgtttt

SEQ ID NO: 40893 - DNA, 15 bp, Homo sapiens
gactggtaattgttt

SEQ ID NO: 40894 - DNA, 15 bp, Homo sapiens
agactggtaattgtt

SEQ ID NO: 40895 - DNA, 15 bp, Homo sapiens
aagactggtaattgt

SEQ ID NO: 40896 - DNA, 15 bp, Homo sapiens
taagactggtaattg

SEQ ID NO: 40897 - DNA, 15 bp, Homo sapiens
gtaagactggtaatt

SEQ ID NO: 40898 - DNA, 15 bp, Homo sapiens
agtaagactggtaat

SEQ ID NO: 40899 - DNA, 15 bp, Homo sapiens
tagtaagactggtaa

SEQ ID NO: 40900 - DNA, 15 bp, Homo sapiens
ttagtaagactggta

SEQ ID NO: 40901 - DNA, 15 bp, Homo sapiens
attagtaagactggt

SEQ ID NO: 40902 - DNA, 15 bp, Homo sapiens
aattagtaagactgg

SEQ ID NO: 40903 - DNA, 15 bp, Homo sapiens
taattagtaagactg

SEQ ID NO: 40904 - DNA, 15 bp, Homo sapiens
ctaattagtaagact

SEQ ID NO: 40905 - DNA, 15 bp, Homo sapiens
tctaattagtaagac

SEQ ID NO: 40906 - DNA, 15 bp, Homo sapiens
atctaattagtaaga

SEQ ID NO: 40907 - DNA, 15 bp, Homo sapiens
gatctaattagtaag

SEQ ID NO: 40908 - DNA, 15 bp, Homo sapiens
tgatctaattagtaa

SEQ ID NO: 40909 - DNA, 15 bp, Homo sapiens
ttgatctaattagta

SEQ ID NO: 40910 - DNA, 15 bp, Homo sapiens
gttgatctaattagt

SEQ ID NO: 40911 - DNA, 15 bp, Homo sapiens
agttgatctaattag

SEQ ID NO: 40912 - DNA, 15 bp, Homo sapiens
cagttgatctaatta

SEQ ID NO: 40913 - DNA, 15 bp, Homo sapiens
gcagttgatctaatt

SEQ ID NO: 40914 - DNA, 15 bp, Homo sapiens
tgcagttgatctaat

SEQ ID NO: 40915 - DNA, 15 bp, Homo sapiens
ttgcagttgatctaa

SEQ ID NO: 40916 - DNA, 15 bp, Homo sapiens
tttgcagttgatcta

SEQ ID NO: 40917 - DNA, 15 bp, Homo sapiens
ttttgcagttgatct

SEQ ID NO: 40918 - DNA, 15 bp, Homo sapiens
gttttgcagttgatc

SEQ ID NO: 40919 - DNA, 15 bp, Homo sapiens
tgttttgcagttgat

SEQ ID NO: 40920 - DNA, 15 bp, Homo sapiens
ttgttttgcagttga

SEQ ID NO: 40921 - DNA, 15 bp, Homo sapiens
tttgttttgcagttg

SEQ ID NO: 40922 - DNA, 15 bp, Homo sapiens
ttttgttttgcagtt

SEQ ID NO: 40923 - DNA, 15 bp, Homo sapiens
attttgttttgcagt

SEQ ID NO: 40924 - DNA, 15 bp, Homo sapiens
gattttgttttgcag

SEQ ID NO: 40925 - DNA, 15 bp, Homo sapiens
agattttgttttgca

SEQ ID NO: 40926 - DNA, 15 bp, Homo sapiens
gagattttgttttgc

SEQ ID NO: 40927 - DNA, 15 bp, Homo sapiens
tgagattttgttttg

SEQ ID NO: 40928 - DNA, 15 bp, Homo sapiens
gtgagattttgtttt

SEQ ID NO: 40929 - DNA, 15 bp, Homo sapiens
agtgagattttgttt

SEQ ID NO: 40930 - DNA, 15 bp, Homo sapiens
gagtgagattttgtt

SEQ ID NO: 40931 - DNA, 15 bp, Homo sapiens
tgagtgagattttgt

SEQ ID NO: 40932 - DNA, 15 bp, Homo sapiens
ttgagtgagattttg

SEQ ID NO: 40933 - DNA, 15 bp, Homo sapiens
tttgagtgagatttt

SEQ ID NO: 40934 - DNA, 15 bp, Homo sapiens
ttttgagtgagattt

SEQ ID NO: 40935 - DNA, 15 bp, Homo sapiens
tttttgagtgagatt

SEQ ID NO: 40936 - DNA, 15 bp, Homo sapiens
atttttgagtgagat

SEQ ID NO: 40937 - DNA, 15 bp, Homo sapiens
tatttttgagtgaga

SEQ ID NO: 40938 - DNA, 15 bp, Homo sapiens
ttatttttgagtgag

SEQ ID NO: 40939 - DNA, 15 bp, Homo sapiens
tttatttttgagtga

SEQ ID NO: 40940 - DNA, 15 bp, Homo sapiens
ttttatttttgagtg

SEQ ID NO: 40941 - DNA, 15 bp, Homo sapiens
tttttatttttgagt

SEQ ID NO: 40942 - DNA, 15 bp, Homo sapiens
atttttatttttgag

SEQ ID NO: 40943 - DNA, 15 bp, Homo sapiens
tatttttatttttga

SEQ ID NO: 40944 - DNA, 15 bp, Homo sapiens
atatttttatttttg

SEQ ID NO: 40945 - DNA, 15 bp, Homo sapiens
catatttttattttt

SEQ ID NO: 40946 - DNA, 15 bp, Homo sapiens
acatatttttatttt

SEQ ID NO: 40947 - DNA, 15 bp, Homo sapiens
tacatatttttattt

SEQ ID NO: 40948 - DNA, 15 bp, Homo sapiens
ttacatatttttatt

SEQ ID NO: 40949 - DNA, 15 bp, Homo sapiens
cttacatatttttat

SEQ ID NO: 40950 - DNA, 15 bp, Homo sapiens
acttacatattttta

SEQ ID NO: 40951 - DNA, 15 bp, Homo sapiens
gacttacatattttt

SEQ ID NO: 40952 - DNA, 15 bp, Homo sapiens
ggacttacatatttt

SEQ ID NO: 40953 - DNA, 15 bp, Homo sapiens
gggacttacatattt

SEQ ID NO: 40954 - DNA, 15 bp, Homo sapiens
tgggacttacatatt

SEQ ID NO: 40955 - DNA, 15 bp, Homo sapiens
atgggacttacatat

SEQ ID NO: 40956 - DNA, 15 bp, Homo sapiens
aatgggacttacata

SEQ ID NO: 40957 - DNA, 15 bp, Homo sapiens
gaatgggacttacat

SEQ ID NO: 40958 - DNA, 15 bp, Homo sapiens
ggaatgggacttaca

SEQ ID NO: 40959 - DNA, 15 bp, Homo sapiens
aggaatgggacttac

SEQ ID NO: 40960 - DNA, 15 bp, Homo sapiens
aaggaatgggactta

SEQ ID NO: 40961 - DNA, 15 bp, Homo sapiens
caaggaatgggactt

SEQ ID NO: 40962 - DNA, 15 bp, Homo sapiens
tcaaggaatgggact

SEQ ID NO: 40963 - DNA, 15 bp, Homo sapiens
atcaaggaatgggac

SEQ ID NO: 40964 - DNA, 15 bp, Homo sapiens
aatcaaggaatggga

SEQ ID NO: 40965 - DNA, 15 bp, Homo sapiens
taatcaaggaatggg

SEQ ID NO: 40966 - DNA, 15 bp, Homo sapiens
gtaatcaaggaatgg

SEQ ID NO: 40967 - DNA, 15 bp, Homo sapiens
tgtaatcaaggaatg

SEQ ID NO: 40968 - DNA, 15 bp, Homo sapiens
ttgtaatcaaggaat

SEQ ID NO: 40969 - DNA, 15 bp, Homo sapiens
attgtaatcaaggaa

SEQ ID NO: 40970 - DNA, 15 bp, Homo sapiens
aattgtaatcaagga

SEQ ID NO: 40971 - DNA, 15 bp, Homo sapiens
gaattgtaatcaagg

SEQ ID NO: 40972 - DNA, 15 bp, Homo sapiens
tgaattgtaatcaag

SEQ ID NO: 40973 - DNA, 15 bp, Homo sapiens
atgaattgtaatcaa

SEQ ID NO: 40974 - DNA, 15 bp, Homo sapiens
aatgaattgtaatca

SEQ ID NO: 40975 - DNA, 15 bp, Homo sapiens
taatgaattgtaatc

SEQ ID NO: 40976 - DNA, 15 bp, Homo sapiens
ctaatgaattgtaat

SEQ ID NO: 40977 - DNA, 15 bp, Homo sapiens
tctaatgaattgtaa

SEQ ID NO: 40978 - DNA, 15 bp, Homo sapiens
ttctaatgaattgta

SEQ ID NO: 40979 - DNA, 15 bp, Homo sapiens
gttctaatgaattgt

SEQ ID NO: 40980 - DNA, 15 bp, Homo sapiens
agttctaatgaattg

SEQ ID NO: 40981 - DNA, 15 bp, Homo sapiens
cagttctaatgaatt

SEQ ID NO: 40982 - DNA, 15 bp, Homo sapiens
ccagttctaatgaat

SEQ ID NO: 40983 - DNA, 15 bp, Homo sapiens
tccagttctaatgaa

SEQ ID NO: 40984 - DNA, 15 bp, Homo sapiens
ctccagttctaatga

SEQ ID NO: 40985 - DNA, 15 bp, Homo sapiens
tctccagttctaatg

SEQ ID NO: 40986 - DNA, 15 bp, Homo sapiens
atctccagttctaat

SEQ ID NO: 40987 - DNA, 15 bp, Homo sapiens
aatctccagttctaa

SEQ ID NO: 40988 - DNA, 15 bp, Homo sapiens
aaatctccagttcta

SEQ ID NO: 40989 - DNA, 15 bp, Homo sapiens
aaaatctccagttct

SEQ ID NO: 40990 - DNA, 15 bp, Homo sapiens
aaaaatctccagttc

SEQ ID NO: 40991 - DNA, 15 bp, Homo sapiens
taaaaatctccagtt

SEQ ID NO: 40992 - DNA, 15 bp, Homo sapiens
ttaaaaatctccagt

SEQ ID NO: 40993 - DNA, 15 bp, Homo sapiens
tttaaaaatctccag

SEQ ID NO: 40994 - DNA, 15 bp, Homo sapiens
ttttaaaaatctcca

SEQ ID NO: 40995 - DNA, 15 bp, Homo sapiens
tttttaaaaatctcc

SEQ ID NO: 40996 - DNA, 15 bp, Homo sapiens
atttttaaaaatctc

SEQ ID NO: 40997 - DNA, 15 bp, Homo sapiens
catttttaaaaatct

SEQ ID NO: 40998 - DNA, 15 bp, Homo sapiens
acatttttaaaaatc

SEQ ID NO: 40999 - DNA, 15 bp, Homo sapiens
aacatttttaaaaat

SEQ ID NO: 41000 - DNA, 15 bp, Homo sapiens
aaacatttttaaaaa

SEQ ID NO: 41001 - DNA, 15 bp, Homo sapiens
taaacatttttaaaa

SEQ ID NO: 41002 - DNA, 15 bp, Homo sapiens
ttaaacatttttaaa

SEQ ID NO: 41003 - DNA, 15 bp, Homo sapiens
tttaaacatttttaa

SEQ ID NO: 41004 - DNA, 15 bp, Homo sapiens
atttaaacattttta

SEQ ID NO: 41005 - DNA, 15 bp, Homo sapiens
aatttaaacattttt

SEQ ID NO: 41006 - DNA, 15 bp, Homo sapiens
aaatttaaacatttt

SEQ ID NO: 41007 - DNA, 15 bp, Homo sapiens
taaatttaaacattt

SEQ ID NO: 41008 - DNA, 15 bp, Homo sapiens
ataaatttaaacatt

SEQ ID NO: 41009 - DNA, 15 bp, Homo sapiens
tataaatttaaacat

SEQ ID NO: 41010 - DNA, 15 bp, Homo sapiens
atataaatttaaaca

SEQ ID NO: 41011 - DNA, 15 bp, Homo sapiens
catataaatttaaac

SEQ ID NO: 41012 - DNA, 15 bp, Homo sapiens
ccatataaatttaaa

SEQ ID NO: 41013 - DNA, 15 bp, Homo sapiens
tccatataaatttaa

SEQ ID NO: 41014 - DNA, 15 bp, Homo sapiens
ttccatataaattta

SEQ ID NO: 41015 - DNA, 15 bp, Homo sapiens
tttccatataaattt

SEQ ID NO: 41016 - DNA, 15 bp, Homo sapiens
atttccatataaatt

SEQ ID NO: 41017 - DNA, 15 bp, Homo sapiens
tatttccatataaat

SEQ ID NO: 41018 - DNA, 15 bp, Homo sapiens
atatttccatataaa

SEQ ID NO: 41019 - DNA, 15 bp, Homo sapiens
tatatttccatataa

SEQ ID NO: 41020 - DNA, 15 bp, Homo sapiens
ttatatttccatata

SEQ ID NO: 41021 - DNA, 15 bp, Homo sapiens
tttatatttccatat

SEQ ID NO: 41022 - DNA, 15 bp, Homo sapiens
ttttatatttccata

SEQ ID NO: 41023 - DNA, 15 bp, Homo sapiens
attttatatttccat

SEQ ID NO: 41024 - DNA, 15 bp, Homo sapiens
gattttatatttcca

SEQ ID NO: 41025 - DNA, 15 bp, Homo sapiens
tgattttatatttcc

SEQ ID NO: 41026 - DNA, 15 bp, Homo sapiens
atgattttatatttc

SEQ ID NO: 41027 - DNA, 15 bp, Homo sapiens
catgattttatattt

SEQ ID NO: 41028 - DNA, 15 bp, Homo sapiens
acatgattttatatt

SEQ ID NO: 41029 - DNA, 15 bp, Homo sapiens
aacatgattttatat

SEQ ID NO: 41030 - DNA, 15 bp, Homo sapiens
aaacatgattttata

SEQ ID NO: 41031 - DNA, 15 bp, Homo sapiens
aaaacatgattttat

SEQ ID NO: 41032 - DNA, 15 bp, Homo sapiens
taaaacatgatttta

SEQ ID NO: 41033 - DNA, 15 bp, Homo sapiens
ttaaaacatgatttt

SEQ ID NO: 41034 - DNA, 15 bp, Homo sapiens
tttaaaacatgattt

SEQ ID NO: 41035 - DNA, 15 bp, Homo sapiens
atttaaaacatgatt

SEQ ID NO: 41036 - DNA, 15 bp, Homo sapiens
tatttaaaacatgat

SEQ ID NO: 41037 - DNA, 15 bp, Homo sapiens
ttatttaaaacatga

SEQ ID NO: 41038 - DNA, 15 bp, Homo sapiens
attatttaaaacatg

SEQ ID NO: 41039 - DNA, 15 bp, Homo sapiens
aattatttaaaacat

SEQ ID NO: 41040 - DNA, 15 bp, Homo sapiens
aaattatttaaaaca

SEQ ID NO: 41041 - DNA, 15 bp, Homo sapiens
aaaattatttaaaac

SEQ ID NO: 41042 - DNA, 15 bp, Homo sapiens
aaaaattatttaaaa

SEQ ID NO: 41043 - DNA, 15 bp, Homo sapiens
caaaaattatttaaa

SEQ ID NO: 41044 - DNA, 15 bp, Homo sapiens
tcaaaaattatttaa

SEQ ID NO: 41045 - DNA, 15 bp, Homo sapiens
atcaaaaattattta

SEQ ID NO: 41046 - DNA, 15 bp, Homo sapiens
aatcaaaaattattt

SEQ ID NO: 41047 - DNA, 15 bp, Homo sapiens
gaatcaaaaattatt

SEQ ID NO: 41048 - DNA, 15 bp, Homo sapiens
tgaatcaaaaattat

SEQ ID NO: 41049 - DNA, 15 bp, Homo sapiens
ttgaatcaaaaatta

SEQ ID NO: 41050 - DNA, 15 bp, Homo sapiens
attgaatcaaaaatt

SEQ ID NO: 41051 - DNA, 15 bp, Homo sapiens
cattgaatcaaaaat

SEQ ID NO: 41052 - DNA, 15 bp, Homo sapiens
tcattgaatcaaaaa

SEQ ID NO: 41053 - DNA, 15 bp, Homo sapiens
ctcattgaatcaaaa

SEQ ID NO: 41054 - DNA, 15 bp, Homo sapiens
cctcattgaatcaaa

SEQ ID NO: 41055 - DNA, 15 bp, Homo sapiens
tcctcattgaatcaa

SEQ ID NO: 41056 - DNA, 15 bp, Homo sapiens
ttcctcattgaatca

SEQ ID NO: 41057 - DNA, 15 bp, Homo sapiens
tttcctcattgaatc

SEQ ID NO: 41058 - DNA, 15 bp, Homo sapiens
atttcctcattgaat

SEQ ID NO: 41059 - DNA, 15 bp, Homo sapiens
catttcctcattgaa

SEQ ID NO: 41060 - DNA, 15 bp, Homo sapiens
acatttcctcattga

SEQ ID NO: 41061 - DNA, 15 bp, Homo sapiens
tacatttcctcattg

SEQ ID NO: 41062 - DNA, 15 bp, Homo sapiens
ttacatttcctcatt

SEQ ID NO: 41063 - DNA, 15 bp, Homo sapiens
tttacatttcctcat

SEQ ID NO: 41064 - DNA, 15 bp, Homo sapiens
atttacatttcctca

SEQ ID NO: 41065 - DNA, 15 bp, Homo sapiens
aatttacatttcctc

SEQ ID NO: 41066 - DNA, 15 bp, Homo sapiens
aaatttacatttcct

SEQ ID NO: 41067 - DNA, 15 bp, Homo sapiens
taaatttacatttcc

SEQ ID NO: 41068 - DNA, 15 bp, Homo sapiens
ctaaatttacatttc

SEQ ID NO: 41069 - DNA, 15 bp, Homo sapiens
tctaaatttacattt

SEQ ID NO: 41070 - DNA, 15 bp, Homo sapiens
ttctaaatttacatt

SEQ ID NO: 41071 - DNA, 15 bp, Homo sapiens
gttctaaatttacat

SEQ ID NO: 41072 - DNA, 15 bp, Homo sapiens
agttctaaatttaca

SEQ ID NO: 41073 - DNA, 15 bp, Homo sapiens
tagttctaaatttac

SEQ ID NO: 41074 - DNA, 15 bp, Homo sapiens
ttagttctaaattta

SEQ ID NO: 41075 - DNA, 15 bp, Homo sapiens
tttagttctaaattt

SEQ ID NO: 41076 - DNA, 15 bp, Homo sapiens
ctttagttctaaatt

SEQ ID NO: 41077 - DNA, 15 bp, Homo sapiens
tctttagttctaaat

SEQ ID NO: 41078 - DNA, 15 bp, Homo sapiens
atctttagttctaaa

SEQ ID NO: 41079 - DNA, 15 bp, Homo sapiens
aatctttagttctaa

SEQ ID NO: 41080 - DNA, 15 bp, Homo sapiens
taatctttagttcta

SEQ ID NO: 41081 - DNA, 15 bp, Homo sapiens
ttaatctttagttct

SEQ ID NO: 41082 - DNA, 15 bp, Homo sapiens
attaatctttagttc

SEQ ID NO: 41083 - DNA, 15 bp, Homo sapiens
tattaatctttagtt

SEQ ID NO: 41084 - DNA, 15 bp, Homo sapiens
ttattaatctttagt

SEQ ID NO: 41085 - DNA, 15 bp, Homo sapiens
gttattaatctttag

SEQ ID NO: 41086 - DNA, 15 bp, Homo sapiens
agttattaatcttta

SEQ ID NO: 41087 - DNA, 15 bp, Homo sapiens
tagttattaatcttt

SEQ ID NO: 41088 - DNA, 15 bp, Homo sapiens
ctagttattaatctt

SEQ ID NO: 41089 - DNA, 15 bp, Homo sapiens
tctagttattaatct

SEQ ID NO: 41090 - DNA, 15 bp, Homo sapiens
ctctagttattaatc

SEQ ID NO: 41091 - DNA, 15 bp, Homo sapiens
tctctagttattaat

SEQ ID NO: 41092 - DNA, 15 bp, Homo sapiens
atctctagttattaa

SEQ ID NO: 41093 - DNA, 15 bp, Homo sapiens
aatctctagttatta

SEQ ID NO: 41094 - DNA, 15 bp, Homo sapiens
aaatctctagttatt

SEQ ID NO: 41095 - DNA, 15 bp, Homo sapiens
taaatctctagttat

SEQ ID NO: 41096 - DNA, 15 bp, Homo sapiens
ataaatctctagtta

SEQ ID NO: 41097 - DNA, 15 bp, Homo sapiens
tataaatctctagtt

SEQ ID NO: 41098 - DNA, 15 bp, Homo sapiens
ttataaatctctagt

SEQ ID NO: 41099 - DNA, 15 bp, Homo sapiens
tttataaatctctag

SEQ ID NO: 41100 - DNA, 15 bp, Homo sapiens
ctttataaatctcta

SEQ ID NO: 41101 - DNA, 15 bp, Homo sapiens
cctttataaatctct

SEQ ID NO: 41102 - DNA, 15 bp, Homo sapiens
gcctttataaatctc

SEQ ID NO: 41103 - DNA, 15 bp, Homo sapiens
tgcctttataaatct

SEQ ID NO: 41104 - DNA, 15 bp, Homo sapiens
ttgcctttataaatc

SEQ ID NO: 41105 - DNA, 15 bp, Homo sapiens
tttgcctttataaat

SEQ ID NO: 41106 - DNA, 15 bp, Homo sapiens
ttttgcctttataaa

SEQ ID NO: 41107 - DNA, 15 bp, Homo sapiens
tttttgcctttataa

SEQ ID NO: 41108 - DNA, 15 bp, Homo sapiens
atttttgcctttata

SEQ ID NO: 41109 - DNA, 15 bp, Homo sapiens
catttttgcctttat

SEQ ID NO: 41110 - DNA, 15 bp, Homo sapiens
acatttttgccttta

SEQ ID NO: 41111 - DNA, 15 bp, Homo sapiens
aacatttttgccttt

SEQ ID NO: 41112 - DNA, 15 bp, Homo sapiens
taacatttttgcctt

SEQ ID NO: 41113 - DNA, 15 bp, Homo sapiens
ttaacatttttgcct

SEQ ID NO: 41114 - DNA, 15 bp, Homo sapiens
attaacatttttgcc

SEQ ID NO: 41115 - DNA, 15 bp, Homo sapiens
cattaacatttttgc

SEQ ID NO: 41116 - DNA, 15 bp, Homo sapiens
tcattaacatttttg

SEQ ID NO: 41117 - DNA, 15 bp, Homo sapiens
ttcattaacattttt

SEQ ID NO: 41118 - DNA, 15 bp, Homo sapiens
attcattaacatttt

SEQ ID NO: 41119 - DNA, 15 bp, Homo sapiens
aattcattaacattt

SEQ ID NO: 41120 - DNA, 15 bp, Homo sapiens
taattcattaacatt

SEQ ID NO: 41121 - DNA, 15 bp, Homo sapiens
ctaattcattaacat

SEQ ID NO: 41122 - DNA, 15 bp, Homo sapiens
cctaattcattaaca

SEQ ID NO: 41123 - DNA, 15 bp, Homo sapiens
tcctaattcattaac

SEQ ID NO: 41124 - DNA, 15 bp, Homo sapiens
ttcctaattcattaa

SEQ ID NO: 41125 - DNA, 15 bp, Homo sapiens
tttcctaattcatta

SEQ ID NO: 41126 - DNA, 15 bp, Homo sapiens
gtttcctaattcatt

SEQ ID NO: 41127 - DNA, 15 bp, Homo sapiens
tgtttcctaattcat

SEQ ID NO: 41128 - DNA, 15 bp, Homo sapiens
ctgtttcctaattca

SEQ ID NO: 41129 - DNA, 15 bp, Homo sapiens
actgtttcctaattc

SEQ ID NO: 41130 - DNA, 15 bp, Homo sapiens
tactgtttcctaatt

SEQ ID NO: 41131 - DNA, 15 bp, Homo sapiens
ttactgtttcctaat

SEQ ID NO: 41132 - DNA, 15 bp, Homo sapiens
tttactgtttcctaa

SEQ ID NO: 41133 - DNA, 15 bp, Homo sapiens
gtttactgtttccta

SEQ ID NO: 41134 - DNA, 15 bp, Homo sapiens
ggtttactgtttcct

SEQ ID NO: 41135 - DNA, 15 bp, Homo sapiens
tggtttactgtttcc

SEQ ID NO: 41136 - DNA, 15 bp, Homo sapiens
atggtttactgtttc

SEQ ID NO: 41137 - DNA, 15 bp, Homo sapiens
aatggtttactgttt

SEQ ID NO: 41138 - DNA, 15 bp, Homo sapiens
aaatggtttactgtt

SEQ ID NO: 41139 - DNA, 15 bp, Homo sapiens
caaatggtttactgt

SEQ ID NO: 41140 - DNA, 15 bp, Homo sapiens
tcaaatggtttactg

SEQ ID NO: 41141 - DNA, 15 bp, Homo sapiens
ttcaaatggtttact

SEQ ID NO: 41142 - DNA, 15 bp, Homo sapiens
gttcaaatggtttac

SEQ ID NO: 41143 - DNA, 15 bp, Homo sapiens
agttcaaatggttta

SEQ ID NO: 41144 - DNA, 15 bp, Homo sapiens
tagttcaaatggttt

SEQ ID NO: 41145 - DNA, 15 bp, Homo sapiens
ttagttcaaatggtt

SEQ ID NO: 41146 - DNA, 15 bp, Homo sapiens
attagttcaaatggt

SEQ ID NO: 41147 - DNA, 15 bp, Homo sapiens
gattagttcaaatgg

SEQ ID NO: 41148 - DNA, 15 bp, Homo sapiens
agattagttcaaatg

SEQ ID NO: 41149 - DNA, 15 bp, Homo sapiens
tagattagttcaaat

SEQ ID NO: 41150 - DNA, 15 bp, Homo sapiens
ttagattagttcaaa

SEQ ID NO: 41151 - DNA, 15 bp, Homo sapiens
tttagattagttcaa

SEQ ID NO: 41152 - DNA, 15 bp, Homo sapiens
atttagattagttca

SEQ ID NO: 41153 - DNA, 15 bp, Homo sapiens
tatttagattagttc

SEQ ID NO: 41154 - DNA, 15 bp, Homo sapiens
gtatttagattagtt

SEQ ID NO: 41155 - DNA, 15 bp, Homo sapiens
agtatttagattagt

SEQ ID NO: 41156 - DNA, 15 bp, Homo sapiens
cagtatttagattag

SEQ ID NO: 41157 - DNA, 15 bp, Homo sapiens
tcagtatttagatta

SEQ ID NO: 41158 - DNA, 15 bp, Homo sapiens
atcagtatttagatt

SEQ ID NO: 41159 - DNA, 15 bp, Homo sapiens
aatcagtatttagat

SEQ ID NO: 41160 - DNA, 15 bp, Homo sapiens
caatcagtatttaga

SEQ ID NO: 41161 - DNA, 15 bp, Homo sapiens
gcaatcagtatttag

SEQ ID NO: 41162 - DNA, 15 bp, Homo sapiens
tgcaatcagtattta

SEQ ID NO: 41163 - DNA, 15 bp, Homo sapiens
atgcaatcagtattt

SEQ ID NO: 41164 - DNA, 15 bp, Homo sapiens
catgcaatcagtatt

SEQ ID NO: 41165 - DNA, 15 bp, Homo sapiens
tcatgcaatcagtat

SEQ ID NO: 41166 - DNA, 15 bp, Homo sapiens
ttcatgcaatcagta

SEQ ID NO: 41167 - DNA, 15 bp, Homo sapiens
tttcatgcaatcagt

SEQ ID NO: 41168 - DNA, 15 bp, Homo sapiens
ttttcatgcaatcag

SEQ ID NO: 41169 - DNA, 15 bp, Homo sapiens
attttcatgcaatca

SEQ ID NO: 41170 - DNA, 15 bp, Homo sapiens
cattttcatgcaatc

SEQ ID NO: 41171 - DNA, 15 bp, Homo sapiens
gcattttcatgcaat

SEQ ID NO: 41172 - DNA, 15 bp, Homo sapiens
ggcattttcatgcaa

SEQ ID NO: 41173 - DNA, 15 bp, Homo sapiens
tggcattttcatgca

SEQ ID NO: 41174 - DNA, 15 bp, Homo sapiens
ttggcattttcatgc

SEQ ID NO: 41175 - DNA, 15 bp, Homo sapiens
attggcattttcatg

SEQ ID NO: 41176 - DNA, 15 bp, Homo sapiens
tattggcattttcat

SEQ ID NO: 41177 - DNA, 15 bp, Homo sapiens
ttattggcattttca

SEQ ID NO: 41178 - DNA, 15 bp, Homo sapiens
tttattggcattttc

SEQ ID NO: 41179 - DNA, 15 bp, Homo sapiens
ttttattggcatttt

SEQ ID NO: 41180 - DNA, 15 bp, Homo sapiens
attttattggcattt

SEQ ID NO: 41181 - DNA, 15 bp, Homo sapiens
gattttattggcatt

SEQ ID NO: 41182 - DNA, 15 bp, Homo sapiens
tgattttattggcat

SEQ ID NO: 41183 - DNA, 15 bp, Homo sapiens
ttgattttattggca

SEQ ID NO: 41184 - DNA, 15 bp, Homo sapiens
attgattttattggc

SEQ ID NO: 41185 - DNA, 15 bp, Homo sapiens
tattgattttattgg

SEQ ID NO: 41186 - DNA, 15 bp, Homo sapiens
gtattgattttattg

SEQ ID NO: 41187 - DNA, 15 bp, Homo sapiens
tgtattgattttatt

SEQ ID NO: 41188 - DNA, 15 bp, Homo sapiens
atgtattgattttat

SEQ ID NO: 41189 - DNA, 15 bp, Homo sapiens
tatgtattgatttta

SEQ ID NO: 41190 - DNA, 15 bp, Homo sapiens
atatgtattgatttt

SEQ ID NO: 41191 - DNA, 15 bp, Homo sapiens
aatatgtattgattt

SEQ ID NO: 41192 - DNA, 15 bp, Homo sapiens
aaatatgtattgatt

SEQ ID NO: 41193 - DNA, 15 bp, Homo sapiens
aaaatatgtattgat

SEQ ID NO: 41194 - DNA, 15 bp, Homo sapiens
aaaaatatgtattga

SEQ ID NO: 41195 - DNA, 15 bp, Homo sapiens
taaaaatatgtattg

SEQ ID NO: 41196 - DNA, 15 bp, Homo sapiens
ttaaaaatatgtatt

SEQ ID NO: 41197 - DNA, 15 bp, Homo sapiens
tttaaaaatatgtat

SEQ ID NO: 41198 - DNA, 15 bp, Homo sapiens
ttttaaaaatatgta

SEQ ID NO: 41199 - DNA, 15 bp, Homo sapiens
cttttaaaaatatgt

SEQ ID NO: 41200 - DNA, 15 bp, Homo sapiens
gcttttaaaaatatg

SEQ ID NO: 41201 - DNA, 15 bp, Homo sapiens
ggcttttaaaaatat

SEQ ID NO: 41202 - DNA, 15 bp, Homo sapiens
tggcttttaaaaata

SEQ ID NO: 41203 - DNA, 15 bp, Homo sapiens
ctggcttttaaaaat

SEQ ID NO: 41204 - DNA, 15 bp, Homo sapiens
actggcttttaaaaa

SEQ ID NO: 41205 - DNA, 15 bp, Homo sapiens
gactggcttttaaaa

SEQ ID NO: 41206 - DNA, 15 bp, Homo sapiens
tgactggcttttaaa

SEQ ID NO: 41207 - DNA, 15 bp, Homo sapiens
ttgactggcttttaa

SEQ ID NO: 41208 - DNA, 15 bp, Homo sapiens
cttgactggctttta

SEQ ID NO: 41209 - DNA, 15 bp, Homo sapiens
ccttgactggctttt

SEQ ID NO: 41210 - DNA, 15 bp, Homo sapiens
tccttgactggcttt

SEQ ID NO: 41211 - DNA, 15 bp, Homo sapiens
atccttgactggctt

SEQ ID NO: 41212 - DNA, 15 bp, Homo sapiens
tatccttgactggct

SEQ ID NO: 41213 - DNA, 15 bp, Homo sapiens
ttatccttgactggc

SEQ ID NO: 41214 - DNA, 15 bp, Homo sapiens
tttatccttgactgg

SEQ ID NO: 41215 - DNA, 15 bp, Homo sapiens
ttttatccttgactg

SEQ ID NO: 41216 - DNA, 15 bp, Homo sapiens
cttttatccttgact

SEQ ID NO: 41217 - DNA, 15 bp, Homo sapiens
tcttttatccttgac

SEQ ID NO: 41218 - DNA, 15 bp, Homo sapiens
ttcttttatccttga

SEQ ID NO: 41219 - DNA, 15 bp, Homo sapiens
tttcttttatccttg

SEQ ID NO: 41220 - DNA, 15 bp, Homo sapiens
ttttcttttatcctt

SEQ ID NO: 41221 - DNA, 15 bp, Homo sapiens
cttttcttttatcct

SEQ ID NO: 41222 - DNA, 15 bp, Homo sapiens
tcttttcttttatcc

SEQ ID NO: 41223 - DNA, 15 bp, Homo sapiens
ctcttttcttttatc

SEQ ID NO: 41224 - DNA, 15 bp, Homo sapiens
cctcttttcttttat

SEQ ID NO: 41225 - DNA, 15 bp, Homo sapiens
ccctcttttctttta

SEQ ID NO: 41226 - DNA, 15 bp, Homo sapiens
tccctcttttctttt

SEQ ID NO: 41227 - DNA, 15 bp, Homo sapiens
ttccctcttttcttt

SEQ ID NO: 41228 - DNA, 15 bp, Homo sapiens
tttccctcttttctt

SEQ ID NO: 41229 - DNA, 15 bp, Homo sapiens
gtttccctcttttct

SEQ ID NO: 41230 - DNA, 15 bp, Homo sapiens
agtttccctcttttc

SEQ ID NO: 41231 - DNA, 15 bp, Homo sapiens
tagtttccctctttt

SEQ ID NO: 41232 - DNA, 15 bp, Homo sapiens
ttagtttccctcttt

SEQ ID NO: 41233 - DNA, 15 bp, Homo sapiens
tttagtttccctctt

SEQ ID NO: 41234 - DNA, 15 bp, Homo sapiens
ttttagtttccctct

SEQ ID NO: 41235 - DNA, 15 bp, Homo sapiens
cttttagtttccctc

SEQ ID NO: 41236 - DNA, 15 bp, Homo sapiens
acttttagtttccct

SEQ ID NO: 41237 - DNA, 15 bp, Homo sapiens
cacttttagtttccc

SEQ ID NO: 41238 - DNA, 15 bp, Homo sapiens
tcacttttagtttcc

SEQ ID NO: 41239 - DNA, 15 bp, Homo sapiens
ctcacttttagtttc

SEQ ID NO: 41240 - DNA, 15 bp, Homo sapiens
tctcacttttagttt

SEQ ID NO: 41241 - DNA, 15 bp, Homo sapiens
gtctcacttttagtt

SEQ ID NO: 41242 - DNA, 15 bp, Homo sapiens
tgtctcacttttagt

SEQ ID NO: 41243 - DNA, 15 bp, Homo sapiens
atgtctcacttttag

SEQ ID NO: 41244 - DNA, 15 bp, Homo sapiens
aatgtctcactttta

SEQ ID NO: 41245 - DNA, 15 bp, Homo sapiens
taatgtctcactttt

SEQ ID NO: 41246 - DNA, 15 bp, Homo sapiens
ttaatgtctcacttt

SEQ ID NO: 41247 - DNA, 15 bp, Homo sapiens
cttaatgtctcactt

SEQ ID NO: 41248 - DNA, 15 bp, Homo sapiens
acttaatgtctcact

SEQ ID NO: 41249 - DNA, 15 bp, Homo sapiens
tacttaatgtctcac

SEQ ID NO: 41250 - DNA, 15 bp, Homo sapiens
atacttaatgtctca

SEQ ID NO: 41251 - DNA, 15 bp, Homo sapiens
catacttaatgtctc

SEQ ID NO: 41252 - DNA, 15 bp, Homo sapiens
tcatacttaatgtct

SEQ ID NO: 41253 - DNA, 15 bp, Homo sapiens
ctcatacttaatgtc

SEQ ID NO: 41254 - DNA, 15 bp, Homo sapiens
tctcatacttaatgt

SEQ ID NO: 41255 - DNA, 15 bp, Homo sapiens
ttctcatacttaatg

SEQ ID NO: 41256 - DNA, 15 bp, Homo sapiens
tttctcatacttaat

SEQ ID NO: 41257 - DNA, 15 bp, Homo sapiens
ctttctcatacttaa

SEQ ID NO: 41258 - DNA, 15 bp, Homo sapiens
cctttctcatactta

SEQ ID NO: 41259 - DNA, 15 bp, Homo sapiens
tcctttctcatactt

SEQ ID NO: 41260 - DNA, 15 bp, Homo sapiens
ctcctttctcatact

SEQ ID NO: 41261 - DNA, 15 bp, Homo sapiens
tctcctttctcatac

SEQ ID NO: 41262 - DNA, 15 bp, Homo sapiens
atctcctttctcata

SEQ ID NO: 41263 - DNA, 15 bp, Homo sapiens
tatctcctttctcat

SEQ ID NO: 41264 - DNA, 15 bp, Homo sapiens
ttatctcctttctca

SEQ ID NO: 41265 - DNA, 15 bp, Homo sapiens
tttatctcctttctc

SEQ ID NO: 41266 - DNA, 15 bp, Homo sapiens
ttttatctcctttct

SEQ ID NO: 41267 - DNA, 15 bp, Homo sapiens
gttttatctcctttc

SEQ ID NO: 41268 - DNA, 15 bp, Homo sapiens
agttttatctccttt

SEQ ID NO: 41269 - DNA, 15 bp, Homo sapiens
tagttttatctcctt

SEQ ID NO: 41270 - DNA, 15 bp, Homo sapiens
ttagttttatctcct

SEQ ID NO: 41271 - DNA, 15 bp, Homo sapiens
tttagttttatctcc

SEQ ID NO: 41272 - DNA, 15 bp, Homo sapiens
ctttagttttatctc

SEQ ID NO: 41273 - DNA, 15 bp, Homo sapiens
actttagttttatct

SEQ ID NO: 41274 - DNA, 15 bp, Homo sapiens
cactttagttttatc

SEQ ID NO: 41275 - DNA, 15 bp, Homo sapiens
acactttagttttat

SEQ ID NO: 41276 - DNA, 15 bp, Homo sapiens
cacactttagtttta

SEQ ID NO: 41277 - DNA, 15 bp, Homo sapiens
ccacactttagtttt

SEQ ID NO: 41278 - DNA, 15 bp, Homo sapiens
tccacactttagttt

SEQ ID NO: 41279 - DNA, 15 bp, Homo sapiens
ctccacactttagtt

SEQ ID NO: 41280 - DNA, 15 bp, Homo sapiens
cctccacactttagt

SEQ ID NO: 41281 - DNA, 15 bp, Homo sapiens
acctccacactttag

SEQ ID NO: 41282 - DNA, 15 bp, Homo sapiens
cacctccacacttta

SEQ ID NO: 41283 - DNA, 15 bp, Homo sapiens
tcacctccacacttt

SEQ ID NO: 41284 - DNA, 15 bp, Homo sapiens
atcacctccacactt

SEQ ID NO: 41285 - DNA, 15 bp, Homo sapiens
catcacctccacact

SEQ ID NO: 41286 - DNA, 15 bp, Homo sapiens
acatcacctccacac

SEQ ID NO: 41287 - DNA, 15 bp, Homo sapiens
aacatcacctccaca

SEQ ID NO: 41288 - DNA, 15 bp, Homo sapiens
taacatcacctccac

SEQ ID NO: 41289 - DNA, 15 bp, Homo sapiens
ttaacatcacctcca

SEQ ID NO: 41290 - DNA, 15 bp, Homo sapiens
tttaacatcacctcc

SEQ ID NO: 41291 - DNA, 15 bp, Homo sapiens
ttttaacatcacctc

SEQ ID NO: 41292 - DNA, 15 bp, Homo sapiens
tttttaacatcacct

SEQ ID NO: 41293 - DNA, 15 bp, Homo sapiens
atttttaacatcacc

SEQ ID NO: 41294 - DNA, 15 bp, Homo sapiens
aatttttaacatcac

SEQ ID NO: 41295 - DNA, 15 bp, Homo sapiens
taatttttaacatca

SEQ ID NO: 41296 - DNA, 15 bp, Homo sapiens
ataatttttaacatc

SEQ ID NO: 41297 - DNA, 15 bp, Homo sapiens
tataatttttaacat

SEQ ID NO: 41298 - DNA, 15 bp, Homo sapiens
atataatttttaaca

SEQ ID NO: 41299 - DNA, 15 bp, Homo sapiens
aatataatttttaac

SEQ ID NO: 41300 - DNA, 15 bp, Homo sapiens
gaatataatttttaa

SEQ ID NO: 41301 - DNA, 15 bp, Homo sapiens
tgaatataattttta

SEQ ID NO: 41302 - DNA, 15 bp, Homo sapiens
ctgaatataattttt

SEQ ID NO: 41303 - DNA, 15 bp, Homo sapiens
cctgaatataatttt

SEQ ID NO: 41304 - DNA, 15 bp, Homo sapiens
acctgaatataattt

SEQ ID NO: 41305 - DNA, 15 bp, Homo sapiens
gacctgaatataatt

SEQ ID NO: 41306 - DNA, 15 bp, Homo sapiens
agacctgaatataat

SEQ ID NO: 41307 - DNA, 15 bp, Homo sapiens
cagacctgaatataa

SEQ ID NO: 41308 - DNA, 15 bp, Homo sapiens
acagacctgaatata

SEQ ID NO: 41309 - DNA, 15 bp, Homo sapiens
cacagacctgaatat

SEQ ID NO: 41310 - DNA, 15 bp, Homo sapiens
gcacagacctgaata

SEQ ID NO: 41311 - DNA, 15 bp, Homo sapiens
agcacagacctgaat

SEQ ID NO: 41312 - DNA, 15 bp, Homo sapiens
tagcacagacctgaa

SEQ ID NO: 41313 - DNA, 15 bp, Homo sapiens
ttagcacagacctga

SEQ ID NO: 41314 - DNA, 15 bp, Homo sapiens
attagcacagacctg

SEQ ID NO: 41315 - DNA, 15 bp, Homo sapiens
gattagcacagacct

SEQ ID NO: 41316 - DNA, 15 bp, Homo sapiens
tgattagcacagacc

SEQ ID NO: 41317 - DNA, 15 bp, Homo sapiens
atgattagcacagac

SEQ ID NO: 41318 - DNA, 15 bp, Homo sapiens
aatgattagcacaga

SEQ ID NO: 41319 - DNA, 15 bp, Homo sapiens
aaatgattagcacag

SEQ ID NO: 41320 - DNA, 15 bp, Homo sapiens
aaaatgattagcaca

SEQ ID NO: 41321 - DNA, 15 bp, Homo sapiens
caaaatgattagcac

SEQ ID NO: 41322 - DNA, 15 bp, Homo sapiens
ccaaaatgattagca

SEQ ID NO: 41323 - DNA, 15 bp, Homo sapiens
tccaaaatgattagc

SEQ ID NO: 41324 - DNA, 15 bp, Homo sapiens
ttccaaaatgattag

SEQ ID NO: 41325 - DNA, 15 bp, Homo sapiens
tttccaaaatgatta

SEQ ID NO: 41326 - DNA, 15 bp, Homo sapiens
atttccaaaatgatt

SEQ ID NO: 41327 - DNA, 15 bp, Homo sapiens
aatttccaaaatgat

SEQ ID NO: 41328 - DNA, 15 bp, Homo sapiens
aaatttccaaaatga

SEQ ID NO: 41329 - DNA, 15 bp, Homo sapiens
gaaatttccaaaatg

SEQ ID NO: 41330 - DNA, 15 bp, Homo sapiens
tgaaatttccaaaat

SEQ ID NO: 41331 - DNA, 15 bp, Homo sapiens
ctgaaatttccaaaa

SEQ ID NO: 41332 - DNA, 15 bp, Homo sapiens
actgaaatttccaaa

SEQ ID NO: 41333 - DNA, 15 bp, Homo sapiens
cactgaaatttccaa

SEQ ID NO: 41334 - DNA, 15 bp, Homo sapiens
tcactgaaatttcca

SEQ ID NO: 41335 - DNA, 15 bp, Homo sapiens
ctcactgaaatttcc

SEQ ID NO: 41336 - DNA, 15 bp, Homo sapiens
tctcactgaaatttc

SEQ ID NO: 41337 - DNA, 15 bp, Homo sapiens
ttctcactgaaattt

SEQ ID NO: 41338 - DNA, 15 bp, Homo sapiens
cttctcactgaaatt

SEQ ID NO: 41339 - DNA, 15 bp, Homo sapiens
acttctcactgaaat

SEQ ID NO: 41340 - DNA, 15 bp, Homo sapiens
cacttctcactgaaa

SEQ ID NO: 41341 - DNA, 15 bp, Homo sapiens
ccacttctcactgaa

SEQ ID NO: 41342 - DNA, 15 bp, Homo sapiens
cccacttctcactga

SEQ ID NO: 41343 - DNA, 15 bp, Homo sapiens
gcccacttctcactg

SEQ ID NO: 41344 - DNA, 15 bp, Homo sapiens
tgcccacttctcact

SEQ ID NO: 41345 - DNA, 15 bp, Homo sapiens
ttgcccacttctcac

SEQ ID NO: 41346 - DNA, 15 bp, Homo sapiens
attgcccacttctca

SEQ ID NO: 41347 - DNA, 15 bp, Homo sapiens
aattgcccacttctc

SEQ ID NO: 41348 - DNA, 15 bp, Homo sapiens
aaattgcccacttct

SEQ ID NO: 41349 - DNA, 15 bp, Homo sapiens
aaaattgcccacttc

SEQ ID NO: 41350 - DNA, 15 bp, Homo sapiens
gaaaattgcccactt

SEQ ID NO: 41351 - DNA, 15 bp, Homo sapiens
tgaaaattgcccact

SEQ ID NO: 41352 - DNA, 15 bp, Homo sapiens
ctgaaaattgcccac

SEQ ID NO: 41353 - DNA, 15 bp, Homo sapiens
actgaaaattgccca

SEQ ID NO: 41354 - DNA, 15 bp, Homo sapiens
cactgaaaattgccc

SEQ ID NO: 41355 - DNA, 15 bp, Homo sapiens
tcactgaaaattgcc

SEQ ID NO: 41356 - DNA, 15 bp, Homo sapiens
ttcactgaaaattgc

SEQ ID NO: 41357 - DNA, 15 bp, Homo sapiens
attcactgaaaattg

SEQ ID NO: 41358 - DNA, 15 bp, Homo sapiens
tattcactgaaaatt

SEQ ID NO: 41359 - DNA, 15 bp, Homo sapiens
atattcactgaaaat

SEQ ID NO: 41360 - DNA, 15 bp, Homo sapiens
tatattcactgaaaa

SEQ ID NO: 41361 - DNA, 15 bp, Homo sapiens
atatattcactgaaa

SEQ ID NO: 41362 - DNA, 15 bp, Homo sapiens
gatatattcactgaa

SEQ ID NO: 41363 - DNA, 15 bp, Homo sapiens
tgatatattcactga

SEQ ID NO: 41364 - DNA, 15 bp, Homo sapiens
atgatatattcactg

SEQ ID NO: 41365 - DNA, 15 bp, Homo sapiens
aatgatatattcact

SEQ ID NO: 41366 - DNA, 15 bp, Homo sapiens
caatgatatattcac

SEQ ID NO: 41367 - DNA, 15 bp, Homo sapiens
acaatgatatattca

SEQ ID NO: 41368 - DNA, 15 bp, Homo sapiens
tacaatgatatattc

SEQ ID NO: 41369 - DNA, 15 bp, Homo sapiens
ttacaatgatatatt

SEQ ID NO: 41370 - DNA, 15 bp, Homo sapiens
tttacaatgatatat

SEQ ID NO: 41371 - DNA, 15 bp, Homo sapiens
atttacaatgatata

SEQ ID NO: 41372 - DNA, 15 bp, Homo sapiens
catttacaatgatat

SEQ ID NO: 41373 - DNA, 15 bp, Homo sapiens
gcatttacaatgata

SEQ ID NO: 41374 - DNA, 15 bp, Homo sapiens
agcatttacaatgat

SEQ ID NO: 41375 - DNA, 15 bp, Homo sapiens
aagcatttacaatga

SEQ ID NO: 41376 - DNA, 15 bp, Homo sapiens
aaagcatttacaatg

SEQ ID NO: 41377 - DNA, 15 bp, Homo sapiens
caaagcatttacaat

SEQ ID NO: 41378 - DNA, 15 bp, Homo sapiens
tcaaagcatttacaa

SEQ ID NO: 41379 - DNA, 15 bp, Homo sapiens
ctcaaagcatttaca

SEQ ID NO: 41380 - DNA, 15 bp, Homo sapiens
cctcaaagcatttac

SEQ ID NO: 41381 - DNA, 15 bp, Homo sapiens
tcctcaaagcattta

SEQ ID NO: 41382 - DNA, 15 bp, Homo sapiens
ctcctcaaagcattt

SEQ ID NO: 41383 - DNA, 15 bp, Homo sapiens
tctcctcaaagcatt

SEQ ID NO: 41384 - DNA, 15 bp, Homo sapiens
ctctcctcaaagcat

SEQ ID NO: 41385 - DNA, 15 bp, Homo sapiens
tctctcctcaaagca

SEQ ID NO: 41386 - DNA, 15 bp, Homo sapiens
gtctctcctcaaagc

SEQ ID NO: 41387 - DNA, 15 bp, Homo sapiens
tgtctctcctcaaag

SEQ ID NO: 41388 - DNA, 15 bp, Homo sapiens
ttgtctctcctcaaa

SEQ ID NO: 41389 - DNA, 15 bp, Homo sapiens
tttgtctctcctcaa

SEQ ID NO: 41390 - DNA, 15 bp, Homo sapiens
ttttgtctctcctca

SEQ ID NO: 41391 - DNA, 15 bp, Homo sapiens
attttgtctctcctc

SEQ ID NO: 41392 - DNA, 15 bp, Homo sapiens
gattttgtctctcct

SEQ ID NO: 41393 - DNA, 15 bp, Homo sapiens
agattttgtctctcc

SEQ ID NO: 41394 - DNA, 15 bp, Homo sapiens
cagattttgtctctc

SEQ ID NO: 41395 - DNA, 15 bp, Homo sapiens
tcagattttgtctct

SEQ ID NO: 41396 - DNA, 15 bp, Homo sapiens
ttcagattttgtctc

SEQ ID NO: 41397 - DNA, 15 bp, Homo sapiens
attcagattttgtct

SEQ ID NO: 41398 - DNA, 15 bp, Homo sapiens
tattcagattttgtc

SEQ ID NO: 41399 - DNA, 15 bp, Homo sapiens
ctattcagattttgt

SEQ ID NO: 41400 - DNA, 15 bp, Homo sapiens
tctattcagattttg

SEQ ID NO: 41401 - DNA, 15 bp, Homo sapiens
gtctattcagatttt

SEQ ID NO: 41402 - DNA, 15 bp, Homo sapiens
ggtctattcagattt

SEQ ID NO: 41403 - DNA, 15 bp, Homo sapiens
gggtctattcagatt

SEQ ID NO: 41404 - DNA, 15 bp, Homo sapiens
agggtctattcagat

SEQ ID NO: 41405 - DNA, 15 bp, Homo sapiens
cagggtctattcaga

SEQ ID NO: 41406 - DNA, 15 bp, Homo sapiens
gcagggtctattcag

SEQ ID NO: 41407 - DNA, 15 bp, Homo sapiens
tgcagggtctattca

SEQ ID NO: 41408 - DNA, 15 bp, Homo sapiens
ttgcagggtctattc

SEQ ID NO: 41409 - DNA, 15 bp, Homo sapiens
attgcagggtctatt

SEQ ID NO: 41410 - DNA, 15 bp, Homo sapiens
tattgcagggtctat

SEQ ID NO: 41411 - DNA, 15 bp, Homo sapiens
ttattgcagggtcta

SEQ ID NO: 41412 - DNA, 15 bp, Homo sapiens
attattgcagggtct

SEQ ID NO: 41413 - DNA, 15 bp, Homo sapiens
cattattgcagggtc

SEQ ID NO: 41414 - DNA, 15 bp, Homo sapiens
tcattattgcagggt

SEQ ID NO: 41415 - DNA, 15 bp, Homo sapiens
ttcattattgcaggg

SEQ ID NO: 41416 - DNA, 15 bp, Homo sapiens
tttcattattgcagg

SEQ ID NO: 41417 - DNA, 15 bp, Homo sapiens
ttttcattattgcag

SEQ ID NO: 41418 - DNA, 15 bp, Homo sapiens
attttcattattgca

SEQ ID NO: 41419 - DNA, 15 bp, Homo sapiens
cattttcattattgc

SEQ ID NO: 41420 - DNA, 15 bp, Homo sapiens
acattttcattattg

SEQ ID NO: 41421 - DNA, 15 bp, Homo sapiens
gacattttcattatt

SEQ ID NO: 41422 - DNA, 15 bp, Homo sapiens
agacattttcattat

SEQ ID NO: 41423 - DNA, 15 bp, Homo sapiens
tagacattttcatta

SEQ ID NO: 41424 - DNA, 15 bp, Homo sapiens
ctagacattttcatt

SEQ ID NO: 41425 - DNA, 15 bp, Homo sapiens
cctagacattttcat

SEQ ID NO: 41426 - DNA, 15 bp, Homo sapiens
tcctagacattttca

SEQ ID NO: 41427 - DNA, 15 bp, Homo sapiens
ctcctagacattttc

SEQ ID NO: 41428 - DNA, 15 bp, Homo sapiens
gctcctagacatttt

SEQ ID NO: 41429 - DNA, 15 bp, Homo sapiens
ggctcctagacattt

SEQ ID NO: 41430 - DNA, 15 bp, Homo sapiens
gggctcctagacatt

SEQ ID NO: 41431 - DNA, 15 bp, Homo sapiens
agggctcctagacat

SEQ ID NO: 41432 - DNA, 15 bp, Homo sapiens
gagggctcctagaca

SEQ ID NO: 41433 - DNA, 15 bp, Homo sapiens
tgagggctcctagac

SEQ ID NO: 41434 - DNA, 15 bp, Homo sapiens
ttgagggctcctaga

SEQ ID NO: 41435 - DNA, 15 bp, Homo sapiens
cttgagggctcctag

SEQ ID NO: 41436 - DNA, 15 bp, Homo sapiens
tcttgagggctccta

SEQ ID NO: 41437 - DNA, 15 bp, Homo sapiens
ttcttgagggctcct

SEQ ID NO: 41438 - DNA, 15 bp, Homo sapiens
tttcttgagggctcc

SEQ ID NO: 41439 - DNA, 15 bp, Homo sapiens
atttcttgagggctc

SEQ ID NO: 41440 - DNA, 15 bp, Homo sapiens
tatttcttgagggct

SEQ ID NO: 41441 - DNA, 15 bp, Homo sapiens
gtatttcttgagggc

SEQ ID NO: 41442 - DNA, 15 bp, Homo sapiens
ggtatttcttgaggg

SEQ ID NO: 41443 - DNA, 15 bp, Homo sapiens
aggtatttcttgagg

SEQ ID NO: 41444 - DNA, 15 bp, Homo sapiens
caggtatttcttgag

SEQ ID NO: 41445 - DNA, 15 bp, Homo sapiens
ccaggtatttcttga

SEQ ID NO: 41446 - DNA, 15 bp, Homo sapiens
accaggtatttcttg

SEQ ID NO: 41447 - DNA, 15 bp, Homo sapiens
aaccaggtatttctt

SEQ ID NO: 41448 - DNA, 15 bp, Homo sapiens
aaaccaggtatttct

SEQ ID NO: 41449 - DNA, 15 bp, Homo sapiens
taaaccaggtatttc

SEQ ID NO: 41450 - DNA, 15 bp, Homo sapiens
ttaaaccaggtattt

SEQ ID NO: 41451 - DNA, 15 bp, Homo sapiens
tttaaaccaggtatt

SEQ ID NO: 41452 - DNA, 15 bp, Homo sapiens
atttaaaccaggtat

SEQ ID NO: 41453 - DNA, 15 bp, Homo sapiens
aatttaaaccaggta

SEQ ID NO: 41454 - DNA, 15 bp, Homo sapiens
caatttaaaccaggt

SEQ ID NO: 41455 - DNA, 15 bp, Homo sapiens
gcaatttaaaccagg

SEQ ID NO: 41456 - DNA, 15 bp, Homo sapiens
tgcaatttaaaccag

SEQ ID NO: 41457 - DNA, 15 bp, Homo sapiens
atgcaatttaaacca

SEQ ID NO: 41458 - DNA, 15 bp, Homo sapiens
aatgcaatttaaacc

SEQ ID NO: 41459 - DNA, 15 bp, Homo sapiens
aaatgcaatttaaac

SEQ ID NO: 41460 - DNA, 15 bp, Homo sapiens
gaaatgcaatttaaa

SEQ ID NO: 41461 - DNA, 15 bp, Homo sapiens
tgaaatgcaatttaa

SEQ ID NO: 41462 - DNA, 15 bp, Homo sapiens
ctgaaatgcaattta

SEQ ID NO: 41463 - DNA, 15 bp, Homo sapiens
cctgaaatgcaattt

SEQ ID NO: 41464 - DNA, 15 bp, Homo sapiens
acctgaaatgcaatt

SEQ ID NO: 41465 - DNA, 15 bp, Homo sapiens
cacctgaaatgcaat

SEQ ID NO: 41466 - DNA, 15 bp, Homo sapiens
ccacctgaaatgcaa

SEQ ID NO: 41467 - DNA, 15 bp, Homo sapiens
gccacctgaaatgca

SEQ ID NO: 41468 - DNA, 15 bp, Homo sapiens
agccacctgaaatgc

SEQ ID NO: 41469 - DNA, 15 bp, Homo sapiens
cagccacctgaaatg

SEQ ID NO: 41470 - DNA, 15 bp, Homo sapiens
ccagccacctgaaat

SEQ ID NO: 41471 - DNA, 15 bp, Homo sapiens
accagccacctgaaa

SEQ ID NO: 41472 - DNA, 15 bp, Homo sapiens
aaccagccacctgaa

SEQ ID NO: 41473 - DNA, 15 bp, Homo sapiens
taaccagccacctga

SEQ ID NO: 41474 - DNA, 15 bp, Homo sapiens
ataaccagccacctg

SEQ ID NO: 41475 - DNA, 15 bp, Homo sapiens
gataaccagccacct

SEQ ID NO: 41476 - DNA, 15 bp, Homo sapiens
tgataaccagccacc

SEQ ID NO: 41477 - DNA, 15 bp, Homo sapiens
gtgataaccagccac

SEQ ID NO: 41478 - DNA, 15 bp, Homo sapiens
tgtgataaccagcca

SEQ ID NO: 41479 - DNA, 15 bp, Homo sapiens
gtgtgataaccagcc

SEQ ID NO: 41480 - DNA, 15 bp, Homo sapiens
ggtgtgataaccagc

SEQ ID NO: 41481 - DNA, 15 bp, Homo sapiens
aggtgtgataaccag

SEQ ID NO: 41482 - DNA, 15 bp, Homo sapiens
aaggtgtgataacca

SEQ ID NO: 41483 - DNA, 15 bp, Homo sapiens
caaggtgtgataacc

SEQ ID NO: 41484 - DNA, 15 bp, Homo sapiens
tcaaggtgtgataac

SEQ ID NO: 41485 - DNA, 15 bp, Homo sapiens
ttcaaggtgtgataa

SEQ ID NO: 41486 - DNA, 15 bp, Homo sapiens
cttcaaggtgtgata

SEQ ID NO: 41487 - DNA, 15 bp, Homo sapiens
acttcaaggtgtgat

SEQ ID NO: 41488 - DNA, 15 bp, Homo sapiens
tacttcaaggtgtga

SEQ ID NO: 41489 - DNA, 15 bp, Homo sapiens
atacttcaaggtgtg

SEQ ID NO: 41490 - DNA, 15 bp, Homo sapiens
gatacttcaaggtgt

SEQ ID NO: 41491 - DNA, 15 bp, Homo sapiens
tgatacttcaaggtg

SEQ ID NO: 41492 - DNA, 15 bp, Homo sapiens
ttgatacttcaaggt

SEQ ID NO: 41493 - DNA, 15 bp, Homo sapiens
cttgatacttcaagg

SEQ ID NO: 41494 - DNA, 15 bp, Homo sapiens
acttgatacttcaag

SEQ ID NO: 41495 - DNA, 15 bp, Homo sapiens
tacttgatacttcaa

SEQ ID NO: 41496 - DNA, 15 bp, Homo sapiens
ttacttgatacttca

SEQ ID NO: 41497 - DNA, 15 bp, Homo sapiens
attacttgatacttc

SEQ ID NO: 41498 - DNA, 15 bp, Homo sapiens
aattacttgatactt

SEQ ID NO: 41499 - DNA, 15 bp, Homo sapiens
taattacttgatact

SEQ ID NO: 41500 - DNA, 15 bp, Homo sapiens
ataattacttgatac

SEQ ID NO: 41501 - DNA, 15 bp, Homo sapiens
cataattacttgata

SEQ ID NO: 41502 - DNA, 15 bp, Homo sapiens
acataattacttgat

SEQ ID NO: 41503 - DNA, 15 bp, Homo sapiens
aacataattacttga

SEQ ID NO: 41504 - DNA, 15 bp, Homo sapiens
taacataattacttg

SEQ ID NO: 41505 - DNA, 15 bp, Homo sapiens
ataacataattactt

SEQ ID NO: 41506 - DNA, 15 bp, Homo sapiens
gataacataattact

SEQ ID NO: 41507 - DNA, 15 bp, Homo sapiens
agataacataattac

SEQ ID NO: 41508 - DNA, 15 bp, Homo sapiens
tagataacataatta

SEQ ID NO: 41509 - DNA, 15 bp, Homo sapiens
ttagataacataatt

SEQ ID NO: 41510 - DNA, 15 bp, Homo sapiens
tttagataacataat

SEQ ID NO: 41511 - DNA, 15 bp, Homo sapiens
atttagataacataa

SEQ ID NO: 41512 - DNA, 15 bp, Homo sapiens
aatttagataacata

SEQ ID NO: 41513 - DNA, 15 bp, Homo sapiens
caatttagataacat

SEQ ID NO: 41514 - DNA, 15 bp, Homo sapiens
ccaatttagataaca

SEQ ID NO: 41515 - DNA, 15 bp, Homo sapiens
tccaatttagataac

SEQ ID NO: 41516 - DNA, 15 bp, Homo sapiens
gtccaatttagataa

SEQ ID NO: 41517 - DNA, 15 bp, Homo sapiens
ggtccaatttagata

SEQ ID NO: 41518 - DNA, 15 bp, Homo sapiens
tggtccaatttagat

SEQ ID NO: 41519 - DNA, 15 bp, Homo sapiens
ctggtccaatttaga

SEQ ID NO: 41520 - DNA, 15 bp, Homo sapiens
cctggtccaatttag

SEQ ID NO: 41521 - DNA, 15 bp, Homo sapiens
acctggtccaattta

SEQ ID NO: 41522 - DNA, 15 bp, Homo sapiens
cacctggtccaattt

SEQ ID NO: 41523 - DNA, 15 bp, Homo sapiens
acacctggtccaatt

SEQ ID NO: 41524 - DNA, 15 bp, Homo sapiens
aacacctggtccaat

SEQ ID NO: 41525 - DNA, 15 bp, Homo sapiens
taacacctggtccaa

SEQ ID NO: 41526 - DNA, 15 bp, Homo sapiens
ctaacacctggtcca

SEQ ID NO: 41527 - DNA, 15 bp, Homo sapiens
tctaacacctggtcc

SEQ ID NO: 41528 - DNA, 15 bp, Homo sapiens
ttctaacacctggtc

SEQ ID NO: 41529 - DNA, 15 bp, Homo sapiens
tttctaacacctggt

SEQ ID NO: 41530 - DNA, 15 bp, Homo sapiens
ttttctaacacctgg

SEQ ID NO: 41531 - DNA, 15 bp, Homo sapiens
tttttctaacacctg

SEQ ID NO: 41532 - DNA, 15 bp, Homo sapiens
atttttctaacacct

SEQ ID NO: 41533 - DNA, 15 bp, Homo sapiens
tatttttctaacacc

SEQ ID NO: 41534 - DNA, 15 bp, Homo sapiens
atatttttctaacac

SEQ ID NO: 41535 - DNA, 15 bp, Homo sapiens
catatttttctaaca

SEQ ID NO: 41536 - DNA, 15 bp, Homo sapiens
acatatttttctaac

SEQ ID NO: 41537 - DNA, 15 bp, Homo sapiens
cacatatttttctaa

SEQ ID NO: 41538 - DNA, 15 bp, Homo sapiens
tcacatatttttcta

SEQ ID NO: 41539 - DNA, 15 bp, Homo sapiens
ctcacatatttttct

SEQ ID NO: 41540 - DNA, 15 bp, Homo sapiens
tctcacatatttttc

SEQ ID NO: 41541 - DNA, 15 bp, Homo sapiens
gtctcacatattttt

SEQ ID NO: 41542 - DNA, 15 bp, Homo sapiens
agtctcacatatttt

SEQ ID NO: 41543 - DNA, 15 bp, Homo sapiens
aagtctcacatattt

SEQ ID NO: 41544 - DNA, 15 bp, Homo sapiens
gaagtctcacatatt

SEQ ID NO: 41545 - DNA, 15 bp, Homo sapiens
tgaagtctcacatat

SEQ ID NO: 41546 - DNA, 15 bp, Homo sapiens
gtgaagtctcacata

SEQ ID NO: 41547 - DNA, 15 bp, Homo sapiens
tgtgaagtctcacat

SEQ ID NO: 41548 - DNA, 15 bp, Homo sapiens
ctgtgaagtctcaca

SEQ ID NO: 41549 - DNA, 15 bp, Homo sapiens
cctgtgaagtctcac

SEQ ID NO: 41550 - DNA, 15 bp, Homo sapiens
acctgtgaagtctca

SEQ ID NO: 41551 - DNA, 15 bp, Homo sapiens
cacctgtgaagtctc

SEQ ID NO: 41552 - DNA, 15 bp, Homo sapiens
ccacctgtgaagtct

SEQ ID NO: 41553 - DNA, 15 bp, Homo sapiens
gccacctgtgaagtc

SEQ ID NO: 41554 - DNA, 15 bp, Homo sapiens
agccacctgtgaagt

SEQ ID NO: 41555 - DNA, 15 bp, Homo sapiens
cagccacctgtgaag

SEQ ID NO: 41556 - DNA, 15 bp, Homo sapiens
gcagccacctgtgaa

SEQ ID NO: 41557 - DNA, 15 bp, Homo sapiens
agcagccacctgtga

SEQ ID NO: 41558 - DNA, 15 bp, Homo sapiens
aagcagccacctgtg

SEQ ID NO: 41559 - DNA, 15 bp, Homo sapiens
taagcagccacctgt

SEQ ID NO: 41560 - DNA, 15 bp, Homo sapiens
ataagcagccacctg

SEQ ID NO: 41561 - DNA, 15 bp, Homo sapiens
cataagcagccacct

SEQ ID NO: 41562 - DNA, 15 bp, Homo sapiens
acataagcagccacc

SEQ ID NO: 41563 - DNA, 15 bp, Homo sapiens
tacataagcagccac

SEQ ID NO: 41564 - DNA, 15 bp, Homo sapiens
ctacataagcagcca

SEQ ID NO: 41565 - DNA, 15 bp, Homo sapiens
gctacataagcagcc

SEQ ID NO: 41566 - DNA, 15 bp, Homo sapiens
ggctacataagcagc

SEQ ID NO: 41567 - DNA, 15 bp, Homo sapiens
gggctacataagcag

SEQ ID NO: 41568 - DNA, 15 bp, Homo sapiens
agggctacataagca

SEQ ID NO: 41569 - DNA, 15 bp, Homo sapiens
aagggctacataagc

SEQ ID NO: 41570 - DNA, 15 bp, Homo sapiens
taagggctacataag

SEQ ID NO: 41571 - DNA, 15 bp, Homo sapiens
ataagggctacataa

SEQ ID NO: 41572 - DNA, 15 bp, Homo sapiens
tataagggctacata

SEQ ID NO: 41573 - DNA, 15 bp, Homo sapiens
gtataagggctacat

SEQ ID NO: 41574 - DNA, 15 bp, Homo sapiens
ggtataagggctaca

SEQ ID NO: 41575 - DNA, 15 bp, Homo sapiens
aggtataagggctac

SEQ ID NO: 41576 - DNA, 15 bp, Homo sapiens
aaggtataagggcta

SEQ ID NO: 41577 - DNA, 15 bp, Homo sapiens
taaggtataagggct

SEQ ID NO: 41578 - DNA, 15 bp, Homo sapiens
ttaaggtataagggc

SEQ ID NO: 41579 - DNA, 15 bp, Homo sapiens
attaaggtataaggg

SEQ ID NO: 41580 - DNA, 15 bp, Homo sapiens
gattaaggtataagg

SEQ ID NO: 41581 - DNA, 15 bp, Homo sapiens
agattaaggtataag

SEQ ID NO: 41582 - DNA, 15 bp, Homo sapiens
cagattaaggtataa

SEQ ID NO: 41583 - DNA, 15 bp, Homo sapiens
tcagattaaggtata

SEQ ID NO: 41584 - DNA, 15 bp, Homo sapiens
atcagattaaggtat

SEQ ID NO: 41585 - DNA, 15 bp, Homo sapiens
tatcagattaaggta

SEQ ID NO: 41586 - DNA, 15 bp, Homo sapiens
ttatcagattaaggt

SEQ ID NO: 41587 - DNA, 15 bp, Homo sapiens
tttatcagattaagg

SEQ ID NO: 41588 - DNA, 15 bp, Homo sapiens
ctttatcagattaag

SEQ ID NO: 41589 - DNA, 15 bp, Homo sapiens
cctttatcagattaa

SEQ ID NO: 41590 - DNA, 15 bp, Homo sapiens
acctttatcagatta

SEQ ID NO: 41591 - DNA, 15 bp, Homo sapiens
tacctttatcagatt

SEQ ID NO: 41592 - DNA, 15 bp, Homo sapiens
ctacctttatcagat

SEQ ID NO: 41593 - DNA, 15 bp, Homo sapiens
gctacctttatcaga

SEQ ID NO: 41594 - DNA, 15 bp, Homo sapiens
tgctacctttatcag

SEQ ID NO: 41595 - DNA, 15 bp, Homo sapiens
atgctacctttatca

SEQ ID NO: 41596 - DNA, 15 bp, Homo sapiens
tatgctacctttatc

SEQ ID NO: 41597 - DNA, 15 bp, Homo sapiens
atatgctacctttat

SEQ ID NO: 41598 - DNA, 15 bp, Homo sapiens
tatatgctaccttta

SEQ ID NO: 41599 - DNA, 15 bp, Homo sapiens
atatatgctaccttt

SEQ ID NO: 41600 - DNA, 15 bp, Homo sapiens
aatatatgctacctt

SEQ ID NO: 41601 - DNA, 15 bp, Homo sapiens
aaatatatgctacct

SEQ ID NO: 41602 - DNA, 15 bp, Homo sapiens
taaatatatgctacc

SEQ ID NO: 41603 - DNA, 15 bp, Homo sapiens
ttaaatatatgctac

SEQ ID NO: 41604 - DNA, 15 bp, Homo sapiens
tttaaatatatgcta

SEQ ID NO: 41605 - DNA, 15 bp, Homo sapiens
ttttaaatatatgct

SEQ ID NO: 41606 - DNA, 15 bp, Homo sapiens
tttttaaatatatgc

SEQ ID NO: 41607 - DNA, 15 bp, Homo sapiens
ctttttaaatatatg

SEQ ID NO: 41608 - DNA, 15 bp, Homo sapiens
tctttttaaatatat

SEQ ID NO: 41609 - DNA, 15 bp, Homo sapiens
ctctttttaaatata

SEQ ID NO: 41610 - DNA, 15 bp, Homo sapiens
tctctttttaaatat

SEQ ID NO: 41611 - DNA, 15 bp, Homo sapiens
ctctctttttaaata

SEQ ID NO: 41612 - DNA, 15 bp, Homo sapiens
tctctctttttaaat

SEQ ID NO: 41613 - DNA, 15 bp, Homo sapiens
ttctctctttttaaa

SEQ ID NO: 41614 - DNA, 15 bp, Homo sapiens
tttctctctttttaa

SEQ ID NO: 41615 - DNA, 15 bp, Homo sapiens
ttttctctcttttta

SEQ ID NO: 41616 - DNA, 15 bp, Homo sapiens
gttttctctcttttt

SEQ ID NO: 41617 - DNA, 15 bp, Homo sapiens
ggttttctctctttt

SEQ ID NO: 41618 - DNA, 15 bp, Homo sapiens
tggttttctctcttt

SEQ ID NO: 41619 - DNA, 15 bp, Homo sapiens
ctggttttctctctt

SEQ ID NO: 41620 - DNA, 15 bp, Homo sapiens
tctggttttctctct

SEQ ID NO: 41621 - DNA, 15 bp, Homo sapiens
ttctggttttctctc

SEQ ID NO: 41622 - DNA, 15 bp, Homo sapiens
cttctggttttctct

SEQ ID NO: 41623 - DNA, 15 bp, Homo sapiens
ccttctggttttctc

SEQ ID NO: 41624 - DNA, 15 bp, Homo sapiens
accttctggttttct

SEQ ID NO: 41625 - DNA, 15 bp, Homo sapiens
attttatttctatat

SEQ ID NO: 41626 - DNA, 15 bp, Homo sapiens
aattttatttctata

SEQ ID NO: 41627 - DNA, 15 bp, Homo sapiens
gaattttatttctat

SEQ ID NO: 41628 - DNA, 15 bp, Homo sapiens
ggaattttatttcta

SEQ ID NO: 41629 - DNA, 15 bp, Homo sapiens
tggaattttatttct

SEQ ID NO: 41630 - DNA, 15 bp, Homo sapiens
ctggaattttatttc

SEQ ID NO: 41631 - DNA, 15 bp, Homo sapiens
gctggaattttattt

SEQ ID NO: 41632 - DNA, 15 bp, Homo sapiens
agctggaattttatt

SEQ ID NO: 41633 - DNA, 15 bp, Homo sapiens
tagctggaattttat

SEQ ID NO: 41634 - DNA, 15 bp, Homo sapiens
atagctggaatttta

SEQ ID NO: 41635 - DNA, 15 bp, Homo sapiens
aatagctggaatttt

SEQ ID NO: 41636 - DNA, 15 bp, Homo sapiens
gaatagctggaattt

SEQ ID NO: 41637 - DNA, 15 bp, Homo sapiens
ggaatagctggaatt

SEQ ID NO: 41638 - DNA, 15 bp, Homo sapiens
tggaatagctggaat

SEQ ID NO: 41639 - DNA, 15 bp, Homo sapiens
ttggaatagctggaa

SEQ ID NO: 41640 - DNA, 15 bp, Homo sapiens
tttggaatagctgga

SEQ ID NO: 41641 - DNA, 15 bp, Homo sapiens
ttttggaatagctgg

SEQ ID NO: 41642 - DNA, 15 bp, Homo sapiens
gttttggaatagctg

SEQ ID NO: 41643 - DNA, 15 bp, Homo sapiens
agttttggaatagct

SEQ ID NO: 41644 - DNA, 15 bp, Homo sapiens
cagttttggaatagc

SEQ ID NO: 41645 - DNA, 15 bp, Homo sapiens
gcagttttggaatag

SEQ ID NO: 41646 - DNA, 15 bp, Homo sapiens
tgcagttttggaata

SEQ ID NO: 41647 - DNA, 15 bp, Homo sapiens
gtgcagttttggaat

SEQ ID NO: 41648 - DNA, 15 bp, Homo sapiens
ggtgcagttttggaa

SEQ ID NO: 41649 - DNA, 15 bp, Homo sapiens
aggtgcagttttgga

SEQ ID NO: 41650 - DNA, 15 bp, Homo sapiens
aaggtgcagttttgg

SEQ ID NO: 41651 - DNA, 15 bp, Homo sapiens
caaggtgcagttttg

SEQ ID NO: 41652 - DNA, 15 bp, Homo sapiens
tcaaggtgcagtttt

SEQ ID NO: 41653 - DNA, 15 bp, Homo sapiens
ttcaaggtgcagttt

SEQ ID NO: 41654 - DNA, 15 bp, Homo sapiens
attcaaggtgcagtt

SEQ ID NO: 41655 - DNA, 15 bp, Homo sapiens
tattcaaggtgcagt

SEQ ID NO: 41656 - DNA, 15 bp, Homo sapiens
gtattcaaggtgcag

SEQ ID NO: 41657 - DNA, 15 bp, Homo sapiens
tgtattcaaggtgca

SEQ ID NO: 41658 - DNA, 15 bp, Homo sapiens
ctgtattcaaggtgc

SEQ ID NO: 41659 - DNA, 15 bp, Homo sapiens
cctgtattcaaggtg

SEQ ID NO: 41660 - DNA, 15 bp, Homo sapiens
acctgtattcaaggt

SEQ ID NO: 41661 - DNA, 15 bp, Homo sapiens
tacctgtattcaagg

SEQ ID NO: 41662 - DNA, 15 bp, Homo sapiens
gtacctgtattcaag

SEQ ID NO: 41663 - DNA, 15 bp, Homo sapiens
tgtacctgtattcaa

SEQ ID NO: 41664 - DNA, 15 bp, Homo sapiens
ctgtacctgtattca

SEQ ID NO: 41665 - DNA, 15 bp, Homo sapiens
tctgtacctgtattc

SEQ ID NO: 41666 - DNA, 15 bp, Homo sapiens
ttctgtacctgtatt

SEQ ID NO: 41667 - DNA, 15 bp, Homo sapiens
attctgtacctgtat

SEQ ID NO: 41668 - DNA, 15 bp, Homo sapiens
aattctgtacctgta

SEQ ID NO: 41669 - DNA, 15 bp, Homo sapiens
caattctgtacctgt

SEQ ID NO: 41670 - DNA, 15 bp, Homo sapiens
gcaattctgtacctg

SEQ ID NO: 41671 - DNA, 15 bp, Homo sapiens
agcaattctgtacct

SEQ ID NO: 41672 - DNA, 15 bp, Homo sapiens
tagcaattctgtacc

SEQ ID NO: 41673 - DNA, 15 bp, Homo sapiens
ttagcaattctgtac

SEQ ID NO: 41674 - DNA, 15 bp, Homo sapiens
tttagcaattctgta

SEQ ID NO: 41675 - DNA, 15 bp, Homo sapiens
ttttagcaattctgt

SEQ ID NO: 41676 - DNA, 15 bp, Homo sapiens
gttttagcaattctg

SEQ ID NO: 41677 - DNA, 15 bp, Homo sapiens
ggttttagcaattct

SEQ ID NO: 41678 - DNA, 15 bp, Homo sapiens
cggttttagcaattc

SEQ ID NO: 41679 - DNA, 15 bp, Homo sapiens
acggttttagcaatt

SEQ ID NO: 41680 - DNA, 15 bp, Homo sapiens
cacggttttagcaat

SEQ ID NO: 41681 - DNA, 15 bp, Homo sapiens
acacggttttagcaa

SEQ ID NO: 41682 - DNA, 15 bp, Homo sapiens
tacacggttttagca

SEQ ID NO: 41683 - DNA, 15 bp, Homo sapiens
gtacacggttttagc

SEQ ID NO: 41684 - DNA, 15 bp, Homo sapiens
ggtacacggttttag

SEQ ID NO: 41685 - DNA, 15 bp, Homo sapiens
tggtacacggtttta

SEQ ID NO: 41686 - DNA, 15 bp, Homo sapiens
atggtacacggtttt

SEQ ID NO: 41687 - DNA, 15 bp, Homo sapiens
aatggtacacggttt

SEQ ID NO: 41688 - DNA, 15 bp, Homo sapiens
aaatggtacacggtt

SEQ ID NO: 41689 - DNA, 15 bp, Homo sapiens
aaaatggtacacggt

SEQ ID NO: 41690 - DNA, 15 bp, Homo sapiens
caaaatggtacacgg

SEQ ID NO: 41691 - DNA, 15 bp, Homo sapiens
acaaaatggtacacg

SEQ ID NO: 41692 - DNA, 15 bp, Homo sapiens
tacaaaatggtacac

SEQ ID NO: 41693 - DNA, 15 bp, Homo sapiens
ctacaaaatggtaca

SEQ ID NO: 41694 - DNA, 15 bp, Homo sapiens
actacaaaatggtac

SEQ ID NO: 41695 - DNA, 15 bp, Homo sapiens
aactacaaaatggta

SEQ ID NO: 41696 - DNA, 15 bp, Homo sapiens
aaactacaaaatggt

SEQ ID NO: 41697 - DNA, 15 bp, Homo sapiens
aaaactacaaaatgg

SEQ ID NO: 41698 - DNA, 15 bp, Homo sapiens
taaaactacaaaatg

SEQ ID NO: 41699 - DNA, 15 bp, Homo sapiens
ctaaaactacaaaat

SEQ ID NO: 41700 - DNA, 15 bp, Homo sapiens
gctaaaactacaaaa

SEQ ID NO: 41701 - DNA, 15 bp, Homo sapiens
tgctaaaactacaaa

SEQ ID NO: 41702 - DNA, 15 bp, Homo sapiens
atgctaaaactacaa

SEQ ID NO: 41703 - DNA, 15 bp, Homo sapiens
catgctaaaactaca

SEQ ID NO: 41704 - DNA, 15 bp, Homo sapiens
gcatgctaaaactac

SEQ ID NO: 41705 - DNA, 15 bp, Homo sapiens
agcatgctaaaacta

SEQ ID NO: 41706 - DNA, 15 bp, Homo sapiens
aagcatgctaaaact

SEQ ID NO: 41707 - DNA, 15 bp, Homo sapiens
aaagcatgctaaaac

SEQ ID NO: 41708 - DNA, 15 bp, Homo sapiens
aaaagcatgctaaaa

SEQ ID NO: 41709 - DNA, 15 bp, Homo sapiens
caaaagcatgctaaa

SEQ ID NO: 41710 - DNA, 15 bp, Homo sapiens
acaaaagcatgctaa

SEQ ID NO: 41711 - DNA, 15 bp, Homo sapiens
cacaaaagcatgcta

SEQ ID NO: 41712 - DNA, 15 bp, Homo sapiens
acacaaaagcatgct

SEQ ID NO: 41713 - DNA, 15 bp, Homo sapiens
tacacaaaagcatgc

SEQ ID NO: 41714 - DNA, 15 bp, Homo sapiens
ttacacaaaagcatg

SEQ ID NO: 41715 - DNA, 15 bp, Homo sapiens
gttacacaaaagcat

SEQ ID NO: 41716 - DNA, 15 bp, Homo sapiens
agttacacaaaagca

SEQ ID NO: 41717 - DNA, 15 bp, Homo sapiens
cagttacacaaaagc

SEQ ID NO: 41718 - DNA, 15 bp, Homo sapiens
gcagttacacaaaag

SEQ ID NO: 41719 - DNA, 15 bp, Homo sapiens
tgcagttacacaaaa

SEQ ID NO: 41720 - DNA, 15 bp, Homo sapiens
atgcagttacacaaa

SEQ ID NO: 41721 - DNA, 15 bp, Homo sapiens
gatgcagttacacaa

SEQ ID NO: 41722 - DNA, 15 bp, Homo sapiens
agatgcagttacaca

SEQ ID NO: 41723 - DNA, 15 bp, Homo sapiens
cagatgcagttacac

SEQ ID NO: 41724 - DNA, 15 bp, Homo sapiens
ccagatgcagttaca

SEQ ID NO: 41725 - DNA, 15 bp, Homo sapiens
accagatgcagttac

SEQ ID NO: 41726 - DNA, 15 bp, Homo sapiens
caccagatgcagtta

SEQ ID NO: 41727 - DNA, 15 bp, Homo sapiens
acaccagatgcagtt

SEQ ID NO: 41728 - DNA, 15 bp, Homo sapiens
aacaccagatgcagt

SEQ ID NO: 41729 - DNA, 15 bp, Homo sapiens
aaacaccagatgcag

SEQ ID NO: 41730 - DNA, 15 bp, Homo sapiens
caaacaccagatgca

SEQ ID NO: 41731 - DNA, 15 bp, Homo sapiens
tcaaacaccagatgc

SEQ ID NO: 41732 - DNA, 15 bp, Homo sapiens
atcaaacaccagatg

SEQ ID NO: 41733 - DNA, 15 bp, Homo sapiens
gatcaaacaccagat

SEQ ID NO: 41734 - DNA, 15 bp, Homo sapiens
ggatcaaacaccaga

SEQ ID NO: 41735 - DNA, 15 bp, Homo sapiens
aggatcaaacaccag

SEQ ID NO: 41736 - DNA, 15 bp, Homo sapiens
gaggatcaaacacca

SEQ ID NO: 41737 - DNA, 15 bp, Homo sapiens
tgaggatcaaacacc

SEQ ID NO: 41738 - DNA, 15 bp, Homo sapiens
atgaggatcaaacac

SEQ ID NO: 41739 - DNA, 15 bp, Homo sapiens
catgaggatcaaaca

SEQ ID NO: 41740 - DNA, 15 bp, Homo sapiens
tcatgaggatcaaac

SEQ ID NO: 41741 - DNA, 15 bp, Homo sapiens
ctcatgaggatcaaa

SEQ ID NO: 41742 - DNA, 15 bp, Homo sapiens
tctcatgaggatcaa

SEQ ID NO: 41743 - DNA, 15 bp, Homo sapiens
ctctcatgaggatca

SEQ ID NO: 41744 - DNA, 15 bp, Homo sapiens
gctctcatgaggatc

SEQ ID NO: 41745 - DNA, 15 bp, Homo sapiens
ggctctcatgaggat

SEQ ID NO: 41746 - DNA, 15 bp, Homo sapiens
gggctctcatgagga

SEQ ID NO: 41747 - DNA, 15 bp, Homo sapiens
agggctctcatgagg

SEQ ID NO: 41748 - DNA, 15 bp, Homo sapiens
cagggctctcatgag

SEQ ID NO: 41749 - DNA, 15 bp, Homo sapiens
acagggctctcatga

SEQ ID NO: 41750 - DNA, 15 bp, Homo sapiens
aacagggctctcatg

SEQ ID NO: 41751 - DNA, 15 bp, Homo sapiens
taacagggctctcat

SEQ ID NO: 41752 - DNA, 15 bp, Homo sapiens
ttaacagggctctca

SEQ ID NO: 41753 - DNA, 15 bp, Homo sapiens
cttaacagggctctc

SEQ ID NO: 41754 - DNA, 15 bp, Homo sapiens
ccttaacagggctct

SEQ ID NO: 41755 - DNA, 15 bp, Homo sapiens
tccttaacagggctc

SEQ ID NO: 41756 - DNA, 15 bp, Homo sapiens
ttccttaacagggct

SEQ ID NO: 41757 - DNA, 15 bp, Homo sapiens
cttccttaacagggc

SEQ ID NO: 41758 - DNA, 15 bp, Homo sapiens
ccttccttaacaggg

SEQ ID NO: 41759 - DNA, 15 bp, Homo sapiens
cccttccttaacagg

SEQ ID NO: 41760 - DNA, 15 bp, Homo sapiens
acccttccttaacag

SEQ ID NO: 41761 - DNA, 15 bp, Homo sapiens
tacccttccttaaca

SEQ ID NO: 41762 - DNA, 15 bp, Homo sapiens
gtacccttccttaac

SEQ ID NO: 41763 - DNA, 15 bp, Homo sapiens
tgtacccttccttaa

SEQ ID NO: 41764 - DNA, 15 bp, Homo sapiens
atgtacccttcctta

SEQ ID NO: 41765 - DNA, 15 bp, Homo sapiens
tatgtacccttcctt

SEQ ID NO: 41766 - DNA, 15 bp, Homo sapiens
atatgtacccttcct

SEQ ID NO: 41767 - DNA, 15 bp, Homo sapiens
aatatgtacccttcc

SEQ ID NO: 41768 - DNA, 15 bp, Homo sapiens
taatatgtacccttc

SEQ ID NO: 41769 - DNA, 15 bp, Homo sapiens
ataatatgtaccctt

SEQ ID NO: 41770 - DNA, 15 bp, Homo sapiens
aataatatgtaccct

SEQ ID NO: 41771 - DNA, 15 bp, Homo sapiens
caataatatgtaccc

SEQ ID NO: 41772 - DNA, 15 bp, Homo sapiens
acaataatatgtacc

SEQ ID NO: 41773 - DNA, 15 bp, Homo sapiens
gacaataatatgtac

SEQ ID NO: 41774 - DNA, 15 bp, Homo sapiens
ggacaataatatgta

SEQ ID NO: 41775 - DNA, 15 bp, Homo sapiens
aggacaataatatgt

SEQ ID NO: 41776 - DNA, 15 bp, Homo sapiens
gaggacaataatatg

SEQ ID NO: 41777 - DNA, 15 bp, Homo sapiens
tgaggacaataatat

SEQ ID NO: 41778 - DNA, 15 bp, Homo sapiens
atgaggacaataata

SEQ ID NO: 41779 - DNA, 15 bp, Homo sapiens
aatgaggacaataat

SEQ ID NO: 41780 - DNA, 15 bp, Homo sapiens
aaatgaggacaataa

SEQ ID NO: 41781 - DNA, 15 bp, Homo sapiens
aaaatgaggacaata

SEQ ID NO: 41782 - DNA, 15 bp, Homo sapiens
gaaaatgaggacaat

SEQ ID NO: 41783 - DNA, 15 bp, Homo sapiens
ggaaaatgaggacaa

SEQ ID NO: 41784 - DNA, 15 bp, Homo sapiens
aggaaaatgaggaca

SEQ ID NO: 41785 - DNA, 15 bp, Homo sapiens
aaggaaaatgaggac

SEQ ID NO: 41786 - DNA, 15 bp, Homo sapiens
gaaggaaaatgagga

SEQ ID NO: 41787 - DNA, 15 bp, Homo sapiens
cgaaggaaaatgagg

SEQ ID NO: 41788 - DNA, 15 bp, Homo sapiens
tcgaaggaaaatgag

SEQ ID NO: 41789 - DNA, 15 bp, Homo sapiens
ttcgaaggaaaatga

SEQ ID NO: 41790 - DNA, 15 bp, Homo sapiens
tttcgaaggaaaatg

SEQ ID NO: 41791 - DNA, 15 bp, Homo sapiens
ttttcgaaggaaaat

SEQ ID NO: 41792 - DNA, 15 bp, Homo sapiens
gttttcgaaggaaaa

SEQ ID NO: 41793 - DNA, 15 bp, Homo sapiens
tgttttcgaaggaaa

SEQ ID NO: 41794 - DNA, 15 bp, Homo sapiens
gtgttttcgaaggaa

SEQ ID NO: 41795 - DNA, 15 bp, Homo sapiens
tgtgttttcgaagga

SEQ ID NO: 41796 - DNA, 15 bp, Homo sapiens
atgtgttttcgaagg

SEQ ID NO: 41797 - DNA, 15 bp, Homo sapiens
gatgtgttttcgaag

SEQ ID NO: 41798 - DNA, 15 bp, Homo sapiens
tgatgtgttttcgaa

SEQ ID NO: 41799 - DNA, 15 bp, Homo sapiens
ctgatgtgttttcga

SEQ ID NO: 41800 - DNA, 15 bp, Homo sapiens
tctgatgtgttttcg

SEQ ID NO: 41801 - DNA, 15 bp, Homo sapiens
ctctgatgtgttttc

SEQ ID NO: 41802 - DNA, 15 bp, Homo sapiens
actctgatgtgtttt

SEQ ID NO: 41803 - DNA, 15 bp, Homo sapiens
aactctgatgtgttt

SEQ ID NO: 41804 - DNA, 15 bp, Homo sapiens
aaactctgatgtgtt

SEQ ID NO: 41805 - DNA, 15 bp, Homo sapiens
caaactctgatgtgt

SEQ ID NO: 41806 - DNA, 15 bp, Homo sapiens
acaaactctgatgtg

SEQ ID NO: 41807 - DNA, 15 bp, Homo sapiens
tacaaactctgatgt

SEQ ID NO: 41808 - DNA, 15 bp, Homo sapiens
atacaaactctgatg

SEQ ID NO: 41809 - DNA, 15 bp, Homo sapiens
aatacaaactctgat

SEQ ID NO: 41810 - DNA, 15 bp, Homo sapiens
aaatacaaactctga

SEQ ID NO: 41811 - DNA, 15 bp, Homo sapiens
aaaatacaaactctg

SEQ ID NO: 41812 - DNA, 15 bp, Homo sapiens
caaaatacaaactct

SEQ ID NO: 41813 - DNA, 15 bp, Homo sapiens
tcaaaatacaaactc

SEQ ID NO: 41814 - DNA, 15 bp, Homo sapiens
gtcaaaatacaaact

SEQ ID NO: 41815 - DNA, 15 bp, Homo sapiens
agtcaaaatacaaac

SEQ ID NO: 41816 - DNA, 15 bp, Homo sapiens
cagtcaaaatacaaa

SEQ ID NO: 41817 - DNA, 15 bp, Homo sapiens
acagtcaaaatacaa

SEQ ID NO: 41818 - DNA, 15 bp, Homo sapiens
gacagtcaaaataca

SEQ ID NO: 41819 - DNA, 15 bp, Homo sapiens
tgacagtcaaaatac

SEQ ID NO: 41820 - DNA, 15 bp, Homo sapiens
ctgacagtcaaaata

SEQ ID NO: 41821 - DNA, 15 bp, Homo sapiens
gctgacagtcaaaat

SEQ ID NO: 41822 - DNA, 15 bp, Homo sapiens
tgctgacagtcaaaa

SEQ ID NO: 41823 - DNA, 15 bp, Homo sapiens
atgctgacagtcaaa

SEQ ID NO: 41824 - DNA, 15 bp, Homo sapiens
aatgctgacagtcaa

SEQ ID NO: 41825 - DNA, 15 bp, Homo sapiens
gaatgctgacagtca

SEQ ID NO: 41826 - DNA, 15 bp, Homo sapiens
tgaatgctgacagtc

SEQ ID NO: 41827 - DNA, 15 bp, Homo sapiens
ttgaatgctgacagt

SEQ ID NO: 41828 - DNA, 15 bp, Homo sapiens
tttgaatgctgacag

SEQ ID NO: 41829 - DNA, 15 bp, Homo sapiens
atttgaatgctgaca

SEQ ID NO: 41830 - DNA, 15 bp, Homo sapiens
tatttgaatgctgac

SEQ ID NO: 41831 - DNA, 15 bp, Homo sapiens
gtatttgaatgctga

SEQ ID NO: 41832 - DNA, 15 bp, Homo sapiens
tgtatttgaatgctg

SEQ ID NO: 41833 - DNA, 15 bp, Homo sapiens
ttgtatttgaatgct

SEQ ID NO: 41834 - DNA, 15 bp, Homo sapiens
cttgtatttgaatgc

SEQ ID NO: 41835 - DNA, 15 bp, Homo sapiens
acttgtatttgaatg

SEQ ID NO: 41836 - DNA, 15 bp, Homo sapiens
gacttgtatttgaat

SEQ ID NO: 41837 - DNA, 15 bp, Homo sapiens
agacttgtatttgaa

SEQ ID NO: 41838 - DNA, 15 bp, Homo sapiens
aagacttgtatttga

SEQ ID NO: 41839 - DNA, 15 bp, Homo sapiens
aaagacttgtatttg

SEQ ID NO: 41840 - DNA, 15 bp, Homo sapiens
aaaagacttgtattt

SEQ ID NO: 41841 - DNA, 15 bp, Homo sapiens
taaaagacttgtatt

SEQ ID NO: 41842 - DNA, 15 bp, Homo sapiens
ataaaagacttgtat

SEQ ID NO: 41843 - DNA, 15 bp, Homo sapiens
aataaaagacttgta

SEQ ID NO: 41844 - DNA, 15 bp, Homo sapiens
aaataaaagacttgt

SEQ ID NO: 41845 - DNA, 15 bp, Homo sapiens
taaataaaagacttg

SEQ ID NO: 41846 - DNA, 15 bp, Homo sapiens
ataaataaaagactt

SEQ ID NO: 41847 - DNA, 15 bp, Homo sapiens
tataaataaaagact

SEQ ID NO: 41848 - DNA, 15 bp, Homo sapiens
ttataaataaaagac

SEQ ID NO: 41849 - DNA, 15 bp, Homo sapiens
tttataaataaaaga

SEQ ID NO: 41850 - DNA, 15 bp, Homo sapiens
ttttataaataaaag

SEQ ID NO: 41851 - DNA, 15 bp, Homo sapiens
attttataaataaaa

SEQ ID NO: 41852 - DNA, 15 bp, Homo sapiens
aattttataaataaa

SEQ ID NO: 41853 - DNA, 15 bp, Homo sapiens
aaattttataaataa

SEQ ID NO: 41854 - DNA, 15 bp, Homo sapiens
aaaattttataaata

SEQ ID NO: 41855 - DNA, 15 bp, Homo sapiens
caaaattttataaat

SEQ ID NO: 41856 - DNA, 15 bp, Homo sapiens
ccaaaattttataaa

SEQ ID NO: 41857 - DNA, 15 bp, Homo sapiens
accaaaattttataa

SEQ ID NO: 41858 - DNA, 15 bp, Homo sapiens
gaccaaaattttata

SEQ ID NO: 41859 - DNA, 15 bp, Homo sapiens
agaccaaaattttat

SEQ ID NO: 41860 - DNA, 15 bp, Homo sapiens
aagaccaaaatttta

SEQ ID NO: 41861 - DNA, 15 bp, Homo sapiens
aaagaccaaaatttt

SEQ ID NO: 41862 - DNA, 15 bp, Homo sapiens
taaagaccaaaattt

SEQ ID NO: 41863 - DNA, 15 bp, Homo sapiens
ataaagaccaaaatt

SEQ ID NO: 41864 - DNA, 15 bp, Homo sapiens
tataaagaccaaaat

SEQ ID NO: 41865 - DNA, 15 bp, Homo sapiens
gtataaagaccaaaa

SEQ ID NO: 41866 - DNA, 15 bp, Homo sapiens
agtataaagaccaaa

SEQ ID NO: 41867 - DNA, 15 bp, Homo sapiens
cagtataaagaccaa

SEQ ID NO: 41868 - DNA, 15 bp, Homo sapiens
acagtataaagacca

SEQ ID NO: 41869 - DNA, 15 bp, Homo sapiens
cacagtataaagacc

SEQ ID NO: 41870 - DNA, 15 bp, Homo sapiens
ccacagtataaagac

SEQ ID NO: 41871 - DNA, 15 bp, Homo sapiens
gccacagtataaaga

SEQ ID NO: 41872 - DNA, 15 bp, Homo sapiens
agccacagtataaag

SEQ ID NO: 41873 - DNA, 15 bp, Homo sapiens
tagccacagtataaa

SEQ ID NO: 41874 - DNA, 15 bp, Homo sapiens
ttagccacagtataa

SEQ ID NO: 41875 - DNA, 15 bp, Homo sapiens
tttagccacagtata

SEQ ID NO: 41876 - DNA, 15 bp, Homo sapiens
ttttagccacagtat

SEQ ID NO: 41877 - DNA, 15 bp, Homo sapiens
tttttagccacagta

SEQ ID NO: 41878 - DNA, 15 bp, Homo sapiens
atttttagccacagt

SEQ ID NO: 41879 - DNA, 15 bp, Homo sapiens
gatttttagccacag

SEQ ID NO: 41880 - DNA, 15 bp, Homo sapiens
agatttttagccaca

SEQ ID NO: 41881 - DNA, 15 bp, Homo sapiens
aagatttttagccac

SEQ ID NO: 41882 - DNA, 15 bp, Homo sapiens
taagatttttagcca

SEQ ID NO: 41883 - DNA, 15 bp, Homo sapiens
ttaagatttttagcc

SEQ ID NO: 41884 - DNA, 15 bp, Homo sapiens
tttaagatttttagc

SEQ ID NO: 41885 - DNA, 15 bp, Homo sapiens
atttaagatttttag

SEQ ID NO: 41886 - DNA, 15 bp, Homo sapiens
gatttaagattttta

SEQ ID NO: 41887 - DNA, 15 bp, Homo sapiens
tgatttaagattttt

SEQ ID NO: 41888 - DNA, 15 bp, Homo sapiens
gtgatttaagatttt

SEQ ID NO: 41889 - DNA, 15 bp, Homo sapiens
agtgatttaagattt

SEQ ID NO: 41890 - DNA, 15 bp, Homo sapiens
aagtgatttaagatt

SEQ ID NO: 41891 - DNA, 15 bp, Homo sapiens
caagtgatttaagat

SEQ ID NO: 41892 - DNA, 15 bp, Homo sapiens
acaagtgatttaaga

SEQ ID NO: 41893 - DNA, 15 bp, Homo sapiens
gacaagtgatttaag

SEQ ID NO: 41894 - DNA, 15 bp, Homo sapiens
tgacaagtgatttaa

SEQ ID NO: 41895 - DNA, 15 bp, Homo sapiens
atgacaagtgattta

SEQ ID NO: 41896 - DNA, 15 bp, Homo sapiens
catgacaagtgattt

SEQ ID NO: 41897 - DNA, 15 bp, Homo sapiens
tcatgacaagtgatt

SEQ ID NO: 41898 - DNA, 15 bp, Homo sapiens
atcatgacaagtgat

SEQ ID NO: 41899 - DNA, 15 bp, Homo sapiens
aatcatgacaagtga

SEQ ID NO: 41900 - DNA, 15 bp, Homo sapiens
aaatcatgacaagtg

SEQ ID NO: 41901 - DNA, 15 bp, Homo sapiens
caaatcatgacaagt

SEQ ID NO: 41902 - DNA, 15 bp, Homo sapiens
tcaaatcatgacaag

SEQ ID NO: 41903 - DNA, 15 bp, Homo sapiens
ttcaaatcatgacaa

SEQ ID NO: 41904 - DNA, 15 bp, Homo sapiens
tttcaaatcatgaca

SEQ ID NO: 41905 - DNA, 15 bp, Homo sapiens
atttcaaatcatgac

SEQ ID NO: 41906 - DNA, 15 bp, Homo sapiens
catttcaaatcatga

SEQ ID NO: 41907 - DNA, 15 bp, Homo sapiens
ccatttcaaatcatg

SEQ ID NO: 41908 - DNA, 15 bp, Homo sapiens
accatttcaaatcat

SEQ ID NO: 41909 - DNA, 15 bp, Homo sapiens
aaccatttcaaatca

SEQ ID NO: 41910 - DNA, 15 bp, Homo sapiens
aaaccatttcaaatc

SEQ ID NO: 41911 - DNA, 15 bp, Homo sapiens
taaaccatttcaaat

SEQ ID NO: 41912 - DNA, 15 bp, Homo sapiens
ataaaccatttcaaa

SEQ ID NO: 41913 - DNA, 15 bp, Homo sapiens
tataaaccatttcaa

SEQ ID NO: 41914 - DNA, 15 bp, Homo sapiens
gtataaaccatttca

SEQ ID NO: 41915 - DNA, 15 bp, Homo sapiens
ggtataaaccatttc

SEQ ID NO: 41916 - DNA, 15 bp, Homo sapiens
cggtataaaccattt

SEQ ID NO: 41917 - DNA, 15 bp, Homo sapiens
tcggtataaaccatt

SEQ ID NO: 41918 - DNA, 15 bp, Homo sapiens
atcggtataaaccat

SEQ ID NO: 41919 - DNA, 15 bp, Homo sapiens
aatcggtataaacca

SEQ ID NO: 41920 - DNA, 15 bp, Homo sapiens
aaatcggtataaacc

SEQ ID NO: 41921 - DNA, 15 bp, Homo sapiens
aaaatcggtataaac

SEQ ID NO: 41922 - DNA, 15 bp, Homo sapiens
aaaaatcggtataaa

SEQ ID NO: 41923 - DNA, 15 bp, Homo sapiens
aaaaaatcggtataa

SEQ ID NO: 41924 - DNA, 15 bp, Homo sapiens
aaaaaaatcggtata

SEQ ID NO: 41925 - DNA, 15 bp, Homo sapiens
aaaaaaaatcggtat

SEQ ID NO: 41926 - DNA, 15 bp, Homo sapiens
caaaaaaaatcggta

SEQ ID NO: 41927 - DNA, 15 bp, Homo sapiens
tcaaaaaaaatcggt

SEQ ID NO: 41928 - DNA, 15 bp, Homo sapiens
gtcaaaaaaaatcgg

SEQ ID NO: 41929 - DNA, 15 bp, Homo sapiens
tgtcaaaaaaaatcg

SEQ ID NO: 41930 - DNA, 15 bp, Homo sapiens
atgtcaaaaaaaatc

SEQ ID NO: 41931 - DNA, 15 bp, Homo sapiens
aatgtcaaaaaaaat

SEQ ID NO: 41932 - DNA, 15 bp, Homo sapiens
aaatgtcaaaaaaaa

SEQ ID NO: 41933 - DNA, 15 bp, Homo sapiens
taaatgtcaaaaaaa

SEQ ID NO: 41934 - DNA, 15 bp, Homo sapiens
ataaatgtcaaaaaa

SEQ ID NO: 41935 - DNA, 15 bp, Homo sapiens
tataaatgtcaaaaa

SEQ ID NO: 41936 - DNA, 15 bp, Homo sapiens
gtataaatgtcaaaa

SEQ ID NO: 41937 - DNA, 15 bp, Homo sapiens
tgtataaatgtcaaa

SEQ ID NO: 41938 - DNA, 15 bp, Homo sapiens
gtgtataaatgtcaa

SEQ ID NO: 41939 - DNA, 15 bp, Homo sapiens
tgtgtataaatgtca

SEQ ID NO: 41940 - DNA, 15 bp, Homo sapiens
gtgtgtataaatgtc

SEQ ID NO: 41941 - DNA, 15 bp, Homo sapiens
tgtgtgtataaatgt

SEQ ID NO: 41942 - DNA, 15 bp, Homo sapiens
atgtgtgtataaatg

SEQ ID NO: 41943 - DNA, 15 bp, Homo sapiens
tatgtgtgtataaat

SEQ ID NO: 41944 - DNA, 15 bp, Homo sapiens
gtatgtgtgtataaa

SEQ ID NO: 41945 - DNA, 15 bp, Homo sapiens
tgtatgtgtgtataa

SEQ ID NO: 41946 - DNA, 15 bp, Homo sapiens
gtgtatgtgtgtata

SEQ ID NO: 41947 - DNA, 15 bp, Homo sapiens
tgtgtatgtgtgtat

SEQ ID NO: 41948 - DNA, 15 bp, Homo sapiens
atgtgtatgtgtgta

SEQ ID NO: 41949 - DNA, 15 bp, Homo sapiens
aatatgtgtatgtgt

SEQ ID NO: 41950 - DNA, 15 bp, Homo sapiens
aaatatgtgtatgtg

SEQ ID NO: 41951 - DNA, 15 bp, Homo sapiens
aaaatatgtgtatgt

SEQ ID NO: 41952 - DNA, 15 bp, Homo sapiens
aaaaatatgtgtatg

SEQ ID NO: 41953 - DNA, 15 bp, Homo sapiens
taaaaatatgtgtat

SEQ ID NO: 41954 - DNA, 15 bp, Homo sapiens
ttaaaaatatgtgta

SEQ ID NO: 41955 - DNA, 15 bp, Homo sapiens
tttaaaaatatgtgt

SEQ ID NO: 41956 - DNA, 15 bp, Homo sapiens
atttaaaaatatgtg

SEQ ID NO: 41957 - DNA, 15 bp, Homo sapiens
aatttaaaaatatgt

SEQ ID NO: 41958 - DNA, 15 bp, Homo sapiens
caatttaaaaatatg

SEQ ID NO: 41959 - DNA, 15 bp, Homo sapiens
acaatttaaaaatat

SEQ ID NO: 41960 - DNA, 15 bp, Homo sapiens
gacaatttaaaaata

SEQ ID NO: 41961 - DNA, 15 bp, Homo sapiens
agacaatttaaaaat

SEQ ID NO: 41962 - DNA, 15 bp, Homo sapiens
tagacaatttaaaaa

SEQ ID NO: 41963 - DNA, 15 bp, Homo sapiens
atagacaatttaaaa

SEQ ID NO: 41964 - DNA, 15 bp, Homo sapiens
tatagacaatttaaa

SEQ ID NO: 41965 - DNA, 15 bp, Homo sapiens
ttatagacaatttaa

SEQ ID NO: 41966 - DNA, 15 bp, Homo sapiens
attatagacaattta

SEQ ID NO: 41967 - DNA, 15 bp, Homo sapiens
tattatagacaattt

SEQ ID NO: 41968 - DNA, 15 bp, Homo sapiens
ttattatagacaatt

SEQ ID NO: 41969 - DNA, 15 bp, Homo sapiens
tttattatagacaat

SEQ ID NO: 41970 - DNA, 15 bp, Homo sapiens
ttttattatagacaa

SEQ ID NO: 41971 - DNA, 15 bp, Homo sapiens
attttattatagaca

SEQ ID NO: 41972 - DNA, 15 bp, Homo sapiens
gattttattatagac

SEQ ID NO: 41973 - DNA, 15 bp, Homo sapiens
tgattttattataga

SEQ ID NO: 41974 - DNA, 15 bp, Homo sapiens
atgattttattatag

SEQ ID NO: 41975 - DNA, 15 bp, Homo sapiens
catgattttattata

SEQ ID NO: 41976 - DNA, 15 bp, Homo sapiens
gcatgattttattat

SEQ ID NO: 41977 - DNA, 15 bp, Homo sapiens
agcatgattttatta

SEQ ID NO: 41978 - DNA, 15 bp, Homo sapiens
gagcatgattttatt

SEQ ID NO: 41979 - DNA, 15 bp, Homo sapiens
tgagcatgattttat

SEQ ID NO: 41980 - DNA, 15 bp, Homo sapiens
atgagcatgatttta

SEQ ID NO: 41981 - DNA, 15 bp, Homo sapiens
gatgagcatgatttt

SEQ ID NO: 41982 - DNA, 15 bp, Homo sapiens
agatgagcatgattt

SEQ ID NO: 41983 - DNA, 15 bp, Homo sapiens
aagatgagcatgatt

SEQ ID NO: 41984 - DNA, 15 bp, Homo sapiens
aaagatgagcatgat

SEQ ID NO: 41985 - DNA, 15 bp, Homo sapiens
caaagatgagcatga

SEQ ID NO: 41986 - DNA, 15 bp, Homo sapiens
tcaaagatgagcatg

SEQ ID NO: 41987 - DNA, 15 bp, Homo sapiens
ttcaaagatgagcat

SEQ ID NO: 41988 - DNA, 15 bp, Homo sapiens
tttcaaagatgagca

SEQ ID NO: 41989 - DNA, 15 bp, Homo sapiens
ttttcaaagatgagc

SEQ ID NO: 41990 - DNA, 15 bp, Homo sapiens
tttttcaaagatgag

SEQ ID NO: 41991 - DNA, 15 bp, Homo sapiens
ttttttcaaagatga

SEQ ID NO: 41992 - DNA, 15 bp, Homo sapiens
attttttcaaagatg

SEQ ID NO: 41993 - DNA, 15 bp, Homo sapiens
tattttttcaaagat

SEQ ID NO: 41994 - DNA, 15 bp, Homo sapiens
atattttttcaaaga

SEQ ID NO: 41995 - DNA, 15 bp, Homo sapiens
aatattttttcaaag

SEQ ID NO: 41996 - DNA, 15 bp, Homo sapiens
taatattttttcaaa

SEQ ID NO: 41997 - DNA, 15 bp, Homo sapiens
ctaatattttttcaa

SEQ ID NO: 41998 - DNA, 15 bp, Homo sapiens
cctaatattttttca

SEQ ID NO: 41999 - DNA, 15 bp, Homo sapiens
tcctaatattttttc

SEQ ID NO: 42000 - DNA, 15 bp, Homo sapiens
ctcctaatatttttt

SEQ ID NO: 42001 - DNA, 15 bp, Homo sapiens
actcctaatattttt

SEQ ID NO: 42002 - DNA, 15 bp, Homo sapiens
tactcctaatatttt

SEQ ID NO: 42003 - DNA, 15 bp, Homo sapiens
gtactcctaatattt

SEQ ID NO: 42004 - DNA, 15 bp, Homo sapiens
agtactcctaatatt

SEQ ID NO: 42005 - DNA, 15 bp, Homo sapiens
tagtactcctaatat

SEQ ID NO: 42006 - DNA, 15 bp, Homo sapiens
gtagtactcctaata

SEQ ID NO: 42007 - DNA, 15 bp, Homo sapiens
tgtagtactcctaat

SEQ ID NO: 42008 - DNA, 15 bp, Homo sapiens
ctgtagtactcctaa

SEQ ID NO: 42009 - DNA, 15 bp, Homo sapiens
actgtagtactccta

SEQ ID NO: 42010 - DNA, 15 bp, Homo sapiens
cactgtagtactcct

SEQ ID NO: 42011 - DNA, 15 bp, Homo sapiens
ccactgtagtactcc

SEQ ID NO: 42012 - DNA, 15 bp, Homo sapiens
tccactgtagtactc

SEQ ID NO: 42013 - DNA, 15 bp, Homo sapiens
atccactgtagtact

SEQ ID NO: 42014 - DNA, 15 bp, Homo sapiens
tatccactgtagtac

SEQ ID NO: 42015 - DNA, 15 bp, Homo sapiens
gtatccactgtagta

SEQ ID NO: 42016 - DNA, 15 bp, Homo sapiens
ggtatccactgtagt

SEQ ID NO: 42017 - DNA, 15 bp, Homo sapiens
aggtatccactgtag

SEQ ID NO: 42018 - DNA, 15 bp, Homo sapiens
taggtatccactgta

SEQ ID NO: 42019 - DNA, 15 bp, Homo sapiens
gtaggtatccactgt

SEQ ID NO: 42020 - DNA, 15 bp, Homo sapiens
tgtaggtatccactg

SEQ ID NO: 42021 - DNA, 15 bp, Homo sapiens
atgtaggtatccact

SEQ ID NO: 42022 - DNA, 15 bp, Homo sapiens
tatgtaggtatccac

SEQ ID NO: 42023 - DNA, 15 bp, Homo sapiens
gtatgtaggtatcca

SEQ ID NO: 42024 - DNA, 15 bp, Homo sapiens
agtatgtaggtatcc

SEQ ID NO: 42025 - DNA, 15 bp, Homo sapiens
aagtatgtaggtatc

SEQ ID NO: 42026 - DNA, 15 bp, Homo sapiens
caagtatgtaggtat

SEQ ID NO: 42027 - DNA, 15 bp, Homo sapiens
gcaagtatgtaggta

SEQ ID NO: 42028 - DNA, 15 bp, Homo sapiens
agcaagtatgtaggt

SEQ ID NO: 42029 - DNA, 15 bp, Homo sapiens
tagcaagtatgtagg

SEQ ID NO: 42030 - DNA, 15 bp, Homo sapiens
atagcaagtatgtag

SEQ ID NO: 42031 - DNA, 15 bp, Homo sapiens
aatagcaagtatgta

SEQ ID NO: 42032 - DNA, 15 bp, Homo sapiens
gaatagcaagtatgt

SEQ ID NO: 42033 - DNA, 15 bp, Homo sapiens
tgaatagcaagtatg

SEQ ID NO: 42034 - DNA, 15 bp, Homo sapiens
ctgaatagcaagtat

SEQ ID NO: 42035 - DNA, 15 bp, Homo sapiens
gctgaatagcaagta

SEQ ID NO: 42036 - DNA, 15 bp, Homo sapiens
tgctgaatagcaagt

SEQ ID NO: 42037 - DNA, 15 bp, Homo sapiens
atgctgaatagcaag

SEQ ID NO: 42038 - DNA, 15 bp, Homo sapiens
tatgctgaatagcaa

SEQ ID NO: 42039 - DNA, 15 bp, Homo sapiens
gtatgctgaatagca

SEQ ID NO: 42040 - DNA, 15 bp, Homo sapiens
ggtatgctgaatagc

SEQ ID NO: 42041 - DNA, 15 bp, Homo sapiens
aggtatgctgaatag

SEQ ID NO: 42042 - DNA, 15 bp, Homo sapiens
caggtatgctgaata

SEQ ID NO: 42043 - DNA, 15 bp, Homo sapiens
ccaggtatgctgaat

SEQ ID NO: 42044 - DNA, 15 bp, Homo sapiens
accaggtatgctgaa

SEQ ID NO: 42045 - DNA, 15 bp, Homo sapiens
aaccaggtatgctga

SEQ ID NO: 42046 - DNA, 15 bp, Homo sapiens
aaaccaggtatgctg

SEQ ID NO: 42047 - DNA, 15 bp, Homo sapiens
aaaaccaggtatgct

SEQ ID NO: 42048 - DNA, 15 bp, Homo sapiens
aaaaaccaggtatgc

SEQ ID NO: 42049 - DNA, 15 bp, Homo sapiens
aaaaaaccaggtatg

SEQ ID NO: 42050 - DNA, 15 bp, Homo sapiens
caaaaaaccaggtat

SEQ ID NO: 42051 - DNA, 15 bp, Homo sapiens
acaaaaaaccaggta

SEQ ID NO: 42052 - DNA, 15 bp, Homo sapiens
aacaaaaaaccaggt

SEQ ID NO: 42053 - DNA, 15 bp, Homo sapiens
aaacaaaaaaccagg

SEQ ID NO: 42054 - DNA, 15 bp, Homo sapiens
caaacaaaaaaccag

SEQ ID NO: 42055 - DNA, 15 bp, Homo sapiens
acaaacaaaaaacca

SEQ ID NO: 42056 - DNA, 15 bp, Homo sapiens
aacaaacaaaaaacc

SEQ ID NO: 42057 - DNA, 15 bp, Homo sapiens
aaacaaacaaaaaac

SEQ ID NO: 42058 - DNA, 15 bp, Homo sapiens
aaaacaaacaaaaaa

SEQ ID NO: 42059 - DNA, 15 bp, Homo sapiens
aaaaacaaacaaaaa

SEQ ID NO: 42060 - DNA, 15 bp, Homo sapiens
aaaaaacaaacaaaa

SEQ ID NO: 42061 - DNA, 15 bp, Homo sapiens
caaaaaacaaacaaa

SEQ ID NO: 42062 - DNA, 15 bp, Homo sapiens
tcaaaaaacaaacaa

SEQ ID NO: 42063 - DNA, 15 bp, Homo sapiens
ctcaaaaaacaaaca

SEQ ID NO: 42064 - DNA, 15 bp, Homo sapiens
tctcaaaaaacaaac

SEQ ID NO: 42065 - DNA, 15 bp, Homo sapiens
gtctcaaaaaacaaa

SEQ ID NO: 42066 - DNA, 15 bp, Homo sapiens
tgtctcaaaaaacaa

SEQ ID NO: 42067 - DNA, 15 bp, Homo sapiens
ctgtctcaaaaaaca

SEQ ID NO: 42068 - DNA, 15 bp, Homo sapiens
actgtctcaaaaaac

SEQ ID NO: 42069 - DNA, 15 bp, Homo sapiens
gactgtctcaaaaaa

SEQ ID NO: 42070 - DNA, 15 bp, Homo sapiens
agactgtctcaaaaa

SEQ ID NO: 42071 - DNA, 15 bp, Homo sapiens
aagactgtctcaaaa

SEQ ID NO: 42072 - DNA, 15 bp, Homo sapiens
gaagactgtctcaaa

SEQ ID NO: 42073 - DNA, 15 bp, Homo sapiens
agaagactgtctcaa

SEQ ID NO: 42074 - DNA, 15 bp, Homo sapiens
gagaagactgtctca

SEQ ID NO: 42075 - DNA, 15 bp, Homo sapiens
agagaagactgtctc

SEQ ID NO: 42076 - DNA, 15 bp, Homo sapiens
cagagaagactgtct

SEQ ID NO: 42077 - DNA, 15 bp, Homo sapiens
acagagaagactgtc

SEQ ID NO: 42078 - DNA, 15 bp, Homo sapiens
cacagagaagactgt

SEQ ID NO: 42079 - DNA, 15 bp, Homo sapiens
ccacagagaagactg

SEQ ID NO: 42080 - DNA, 15 bp, Homo sapiens
accacagagaagact

SEQ ID NO: 42081 - DNA, 15 bp, Homo sapiens
gaccacagagaagac

SEQ ID NO: 42082 - DNA, 15 bp, Homo sapiens
ggaccacagagaaga

SEQ ID NO: 42083 - DNA, 15 bp, Homo sapiens
tggaccacagagaag

SEQ ID NO: 42084 - DNA, 15 bp, Homo sapiens
ctggaccacagagaa

SEQ ID NO: 42085 - DNA, 15 bp, Homo sapiens
cctggaccacagaga

SEQ ID NO: 42086 - DNA, 15 bp, Homo sapiens
acctggaccacagag

SEQ ID NO: 42087 - DNA, 15 bp, Homo sapiens
aacctggaccacaga

SEQ ID NO: 42088 - DNA, 15 bp, Homo sapiens
caacctggaccacag

SEQ ID NO: 42089 - DNA, 15 bp, Homo sapiens
ccaacctggaccaca

SEQ ID NO: 42090 - DNA, 15 bp, Homo sapiens
tccaacctggaccac

SEQ ID NO: 42091 - DNA, 15 bp, Homo sapiens
ctccaacctggacca

SEQ ID NO: 42092 - DNA, 15 bp, Homo sapiens
actccaacctggacc

SEQ ID NO: 42093 - DNA, 15 bp, Homo sapiens
cactccaacctggac

SEQ ID NO: 42094 - DNA, 15 bp, Homo sapiens
gcactccaacctgga

SEQ ID NO: 42095 - DNA, 15 bp, Homo sapiens
tgcactccaacctgg

SEQ ID NO: 42096 - DNA, 15 bp, Homo sapiens
ctgcactccaacctg

SEQ ID NO: 42097 - DNA, 15 bp, Homo sapiens
actgcactccaacct

SEQ ID NO: 42098 - DNA, 15 bp, Homo sapiens
cactgcactccaacc

SEQ ID NO: 42099 - DNA, 15 bp, Homo sapiens
ccactgcactccaac

SEQ ID NO: 42100 - DNA, 15 bp, Homo sapiens
gccactgcactccaa

SEQ ID NO: 42101 - DNA, 15 bp, Homo sapiens
gagatcgtgccactg

SEQ ID NO: 42102 - DNA, 15 bp, Homo sapiens
tgagatcgtgccact

SEQ ID NO: 42103 - DNA, 15 bp, Homo sapiens
ctgagatcgtgccac

SEQ ID NO: 42104 - DNA, 15 bp, Homo sapiens
gctgagatcgtgcca

SEQ ID NO: 42105 - DNA, 15 bp, Homo sapiens
agctgagatcgtgcc

SEQ ID NO: 42106 - DNA, 15 bp, Homo sapiens
gagctgagatcgtgc

SEQ ID NO: 42107 - DNA, 15 bp, Homo sapiens
tgagctgagatcgtg

SEQ ID NO: 42108 - DNA, 15 bp, Homo sapiens
atgagctgagatcgt

SEQ ID NO: 42109 - DNA, 15 bp, Homo sapiens
aatgagctgagatcg

SEQ ID NO: 42110 - DNA, 15 bp, Homo sapiens
caatgagctgagatc

SEQ ID NO: 42111 - DNA, 15 bp, Homo sapiens
gcaatgagctgagat

SEQ ID NO: 42112 - DNA, 15 bp, Homo sapiens
tgcaatgagctgaga

SEQ ID NO: 42113 - DNA, 15 bp, Homo sapiens
ttgcaatgagctgag

SEQ ID NO: 42114 - DNA, 15 bp, Homo sapiens
gttgcaatgagctga

SEQ ID NO: 42115 - DNA, 15 bp, Homo sapiens
ggttgcaatgagctg

SEQ ID NO: 42116 - DNA, 15 bp, Homo sapiens
aggttgcaatgagct

SEQ ID NO: 42117 - DNA, 15 bp, Homo sapiens
gaggttgcaatgagc

SEQ ID NO: 42118 - DNA, 15 bp, Homo sapiens
ggaggttgcaatgag

SEQ ID NO: 42119 - DNA, 15 bp, Homo sapiens
cggaggttgcaatga

SEQ ID NO: 42120 - DNA, 15 bp, Homo sapiens
acggaggttgcaatg

SEQ ID NO: 42121 - DNA, 15 bp, Homo sapiens
gacggaggttgcaat

SEQ ID NO: 42122 - DNA, 15 bp, Homo sapiens
agacggaggttgcaa

SEQ ID NO: 42123 - DNA, 15 bp, Homo sapiens
gagacggaggttgca

SEQ ID NO: 42124 - DNA, 15 bp, Homo sapiens
ggagacggaggttgc

SEQ ID NO: 42125 - DNA, 15 bp, Homo sapiens
gggagacggaggttg

SEQ ID NO: 42126 - DNA, 15 bp, Homo sapiens
tgggagacggaggtt

SEQ ID NO: 42127 - DNA, 15 bp, Homo sapiens
ctgggagacggaggt

SEQ ID NO: 42128 - DNA, 15 bp, Homo sapiens
cctgggagacggagg

SEQ ID NO: 42129 - DNA, 15 bp, Homo sapiens
gcctgggagacggag

SEQ ID NO: 42130 - DNA, 15 bp, Homo sapiens
agcctgggagacgga

SEQ ID NO: 42131 - DNA, 15 bp, Homo sapiens
gagcctgggagacgg

SEQ ID NO: 42132 - DNA, 15 bp, Homo sapiens
tgagcctgggagacg

SEQ ID NO: 42133 - DNA, 15 bp, Homo sapiens
ttgagcctgggagac

SEQ ID NO: 42134 - DNA, 15 bp, Homo sapiens
cttgagcctgggaga

SEQ ID NO: 42135 - DNA, 15 bp, Homo sapiens
acttgagcctgggag

SEQ ID NO: 42136 - DNA, 15 bp, Homo sapiens
cacttgagcctggga

SEQ ID NO: 42137 - DNA, 15 bp, Homo sapiens
tcacttgagcctggg

SEQ ID NO: 42138 - DNA, 15 bp, Homo sapiens
atcacttgagcctgg

SEQ ID NO: 42139 - DNA, 15 bp, Homo sapiens
aatcacttgagcctg

SEQ ID NO: 42140 - DNA, 15 bp, Homo sapiens
caatcacttgagcct

SEQ ID NO: 42141 - DNA, 15 bp, Homo sapiens
acaatcacttgagcc

SEQ ID NO: 42142 - DNA, 15 bp, Homo sapiens
gacaatcacttgagc

SEQ ID NO: 42143 - DNA, 15 bp, Homo sapiens
ggacaatcacttgag

SEQ ID NO: 42144 - DNA, 15 bp, Homo sapiens
aggacaatcacttga

SEQ ID NO: 42145 - DNA, 15 bp, Homo sapiens
caggacaatcacttg

SEQ ID NO: 42146 - DNA, 15 bp, Homo sapiens
gcaggacaatcactt

SEQ ID NO: 42147 - DNA, 15 bp, Homo sapiens
ggcaggacaatcact

SEQ ID NO: 42148 - DNA, 15 bp, Homo sapiens
aggcaggacaatcac

SEQ ID NO: 42149 - DNA, 15 bp, Homo sapiens
gaggcaggacaatca

SEQ ID NO: 42150 - DNA, 15 bp, Homo sapiens
tgaggcaggacaatc

SEQ ID NO: 42151 - DNA, 15 bp, Homo sapiens
ctgaggcaggacaat

SEQ ID NO: 42152 - DNA, 15 bp, Homo sapiens
gctgaggcaggacaa

SEQ ID NO: 42153 - DNA, 15 bp, Homo sapiens
ggctgaggcaggaca

SEQ ID NO: 42154 - DNA, 15 bp, Homo sapiens
aggctgaggcaggac

SEQ ID NO: 42155 - DNA, 15 bp, Homo sapiens
cagtcccagctactt

SEQ ID NO: 42156 - DNA, 15 bp, Homo sapiens
gcagtcccagctact

SEQ ID NO: 42157 - DNA, 15 bp, Homo sapiens
tgcagtcccagctac

SEQ ID NO: 42158 - DNA, 15 bp, Homo sapiens
ctgcagtcccagcta

SEQ ID NO: 42159 - DNA, 15 bp, Homo sapiens
cctgcagtcccagct

SEQ ID NO: 42160 - DNA, 15 bp, Homo sapiens
acctgcagtcccagc

SEQ ID NO: 42161 - DNA, 15 bp, Homo sapiens
tacctgcagtcccag

SEQ ID NO: 42162 - DNA, 15 bp, Homo sapiens
gtacctgcagtccca

SEQ ID NO: 42163 - DNA, 15 bp, Homo sapiens
tgtacctgcagtccc

SEQ ID NO: 42164 - DNA, 15 bp, Homo sapiens
gtgtacctgcagtcc

SEQ ID NO: 42165 - DNA, 15 bp, Homo sapiens
tgtgtacctgcagtc

SEQ ID NO: 42166 - DNA, 15 bp, Homo sapiens
atgtgtacctgcagt

SEQ ID NO: 42167 - DNA, 15 bp, Homo sapiens
gatgtgtacctgcag

SEQ ID NO: 42168 - DNA, 15 bp, Homo sapiens
tgatgtgtacctgca

SEQ ID NO: 42169 - DNA, 15 bp, Homo sapiens
gtgatgtgtacctgc

SEQ ID NO: 42170 - DNA, 15 bp, Homo sapiens
ggtgatgtgtacctg

SEQ ID NO: 42171 - DNA, 15 bp, Homo sapiens
tggtgatgtgtacct

SEQ ID NO: 42172 - DNA, 15 bp, Homo sapiens
gtggtgatgtgtacc

SEQ ID NO: 42173 - DNA, 15 bp, Homo sapiens
cgtggtgatgtgtac

SEQ ID NO: 42174 - DNA, 15 bp, Homo sapiens
gcgtggtgatgtgta

SEQ ID NO: 42175 - DNA, 15 bp, Homo sapiens
ggcgtggtgatgtgt

SEQ ID NO: 42176 - DNA, 15 bp, Homo sapiens
gggcgtggtgatgtg

SEQ ID NO: 42177 - DNA, 15 bp, Homo sapiens
tgggcgtggtgatgt

SEQ ID NO: 42178 - DNA, 15 bp, Homo sapiens
ctgggcgtggtgatg

SEQ ID NO: 42179 - DNA, 15 bp, Homo sapiens
gctgggcgtggtgat

SEQ ID NO: 42180 - DNA, 15 bp, Homo sapiens
agctgggcgtggtga

SEQ ID NO: 42181 - DNA, 15 bp, Homo sapiens
tagctgggcgtggtg

SEQ ID NO: 42182 - DNA, 15 bp, Homo sapiens
ttagctgggcgtggt

SEQ ID NO: 42183 - DNA, 15 bp, Homo sapiens
attagctgggcgtgg

SEQ ID NO: 42184 - DNA, 15 bp, Homo sapiens
aattagctgggcgtg

SEQ ID NO: 42185 - DNA, 15 bp, Homo sapiens
aaattagctgggcgt

SEQ ID NO: 42186 - DNA, 15 bp, Homo sapiens
aaaattagctgggcg

SEQ ID NO: 42187 - DNA, 15 bp, Homo sapiens
aaaaaattagctggg

SEQ ID NO: 42188 - DNA, 15 bp, Homo sapiens
caaaaaattagctgg

SEQ ID NO: 42189 - DNA, 15 bp, Homo sapiens
acaaaaaattagctg

SEQ ID NO: 42190 - DNA, 15 bp, Homo sapiens
tacaaaaaattagct

SEQ ID NO: 42191 - DNA, 15 bp, Homo sapiens
caaaaatacaaaaaa

SEQ ID NO: 42192 - DNA, 15 bp, Homo sapiens
ccaaaaatacaaaaa

SEQ ID NO: 42193 - DNA, 15 bp, Homo sapiens
accaaaaatacaaaa

SEQ ID NO: 42194 - DNA, 15 bp, Homo sapiens
taccaaaaatacaaa

SEQ ID NO: 42195 - DNA, 15 bp, Homo sapiens
ctaccaaaaatacaa

SEQ ID NO: 42196 - DNA, 15 bp, Homo sapiens
tctaccaaaaataca

SEQ ID NO: 42197 - DNA, 15 bp, Homo sapiens
ctctaccaaaaatac

SEQ ID NO: 42198 - DNA, 15 bp, Homo sapiens
tctctaccaaaaata

SEQ ID NO: 42199 - DNA, 15 bp, Homo sapiens
gtctctaccaaaaat

SEQ ID NO: 42200 - DNA, 15 bp, Homo sapiens
cgtctctaccaaaaa

SEQ ID NO: 42201 - DNA, 15 bp, Homo sapiens
ccgtctctaccaaaa

SEQ ID NO: 42202 - DNA, 15 bp, Homo sapiens
cccgtctctaccaaa

SEQ ID NO: 42203 - DNA, 15 bp, Homo sapiens
ccccgtctctaccaa

SEQ ID NO: 42204 - DNA, 15 bp, Homo sapiens
accccgtctctacca

SEQ ID NO: 42205 - DNA, 15 bp, Homo sapiens
aaccccgtctctacc

SEQ ID NO: 42206 - DNA, 15 bp, Homo sapiens
tggtgaaaccccgtc

SEQ ID NO: 42207 - DNA, 15 bp, Homo sapiens
atggtgaaaccccgt

SEQ ID NO: 42208 - DNA, 15 bp, Homo sapiens
catggtgaaaccccg

SEQ ID NO: 42209 - DNA, 15 bp, Homo sapiens
acatggtgaaacccc

SEQ ID NO: 42210 - DNA, 15 bp, Homo sapiens
ggagaccagcctggc

SEQ ID NO: 42211 - DNA, 15 bp, Homo sapiens
tggagaccagcctgg

SEQ ID NO: 42212 - DNA, 15 bp, Homo sapiens
ttggagaccagcctg

SEQ ID NO: 42213 - DNA, 15 bp, Homo sapiens
gttggagaccagcct

SEQ ID NO: 42214 - DNA, 15 bp, Homo sapiens
agttggagaccagcc

SEQ ID NO: 42215 - DNA, 15 bp, Homo sapiens
gagttggagaccagc

SEQ ID NO: 42216 - DNA, 15 bp, Homo sapiens
ggagttggagaccag

SEQ ID NO: 42217 - DNA, 15 bp, Homo sapiens
aggagttggagacca

SEQ ID NO: 42218 - DNA, 15 bp, Homo sapiens
caggagttggagacc

SEQ ID NO: 42219 - DNA, 15 bp, Homo sapiens
tcaggagttggagac

SEQ ID NO: 42220 - DNA, 15 bp, Homo sapiens
gtcaggagttggaga

SEQ ID NO: 42221 - DNA, 15 bp, Homo sapiens
ggtcaggagttggag

SEQ ID NO: 42222 - DNA, 15 bp, Homo sapiens
aggtcaggagttgga

SEQ ID NO: 42223 - DNA, 15 bp, Homo sapiens
gaggtcaggagttgg

SEQ ID NO: 42224 - DNA, 15 bp, Homo sapiens
tgaggtcaggagttg

SEQ ID NO: 42225 - DNA, 15 bp, Homo sapiens
ttgaggtcaggagtt

SEQ ID NO: 42226 - DNA, 15 bp, Homo sapiens
cttgaggtcaggagt

SEQ ID NO: 42227 - DNA, 15 bp, Homo sapiens
acttgaggtcaggag

SEQ ID NO: 42228 - DNA, 15 bp, Homo sapiens
cacttgaggtcagga

SEQ ID NO: 42229 - DNA, 15 bp, Homo sapiens
tgatcacttgaggtc

SEQ ID NO: 42230 - DNA, 15 bp, Homo sapiens
ctgatcacttgaggt

SEQ ID NO: 42231 - DNA, 15 bp, Homo sapiens
gctgatcacttgagg

SEQ ID NO: 42232 - DNA, 15 bp, Homo sapiens
ggctgatcacttgag

SEQ ID NO: 42233 - DNA, 15 bp, Homo sapiens
gggctgatcacttga

SEQ ID NO: 42234 - DNA, 15 bp, Homo sapiens
tgggctgatcacttg

SEQ ID NO: 42235 - DNA, 15 bp, Homo sapiens
gtgggctgatcactt

SEQ ID NO: 42236 - DNA, 15 bp, Homo sapiens
ggtgggctgatcact

SEQ ID NO: 42237 - DNA, 15 bp, Homo sapiens
aggtgggctgatcac

SEQ ID NO: 42238 - DNA, 15 bp, Homo sapiens
gaggtgggctgatca

SEQ ID NO: 42239 - DNA, 15 bp, Homo sapiens
cgaggtgggctgatc

SEQ ID NO: 42240 - DNA, 15 bp, Homo sapiens
ccgaggtgggctgat

SEQ ID NO: 42241 - DNA, 15 bp, Homo sapiens
gccgaggtgggctga

SEQ ID NO: 42242 - DNA, 15 bp, Homo sapiens
ggccgaggtgggctg

SEQ ID NO: 42243 - DNA, 15 bp, Homo sapiens
aggccgaggtgggct

SEQ ID NO: 42244 - DNA, 15 bp, Homo sapiens
ctgggaggccgaggt

SEQ ID NO: 42245 - DNA, 15 bp, Homo sapiens
tctgggaggccgagg

SEQ ID NO: 42246 - DNA, 15 bp, Homo sapiens
ctctgggaggccgag

SEQ ID NO: 42247 - DNA, 15 bp, Homo sapiens
actctgggaggccga

SEQ ID NO: 42248 - DNA, 15 bp, Homo sapiens
cactctgggaggccg

SEQ ID NO: 42249 - DNA, 15 bp, Homo sapiens
gcactctgggaggcc

SEQ ID NO: 42250 - DNA, 15 bp, Homo sapiens
agcactctgggaggc

SEQ ID NO: 42251 - DNA, 15 bp, Homo sapiens
cagcactctgggagg

SEQ ID NO: 42252 - DNA, 15 bp, Homo sapiens
ccagcactctgggag

SEQ ID NO: 42253 - DNA, 15 bp, Homo sapiens
cccagcactctggga

SEQ ID NO: 42254 - DNA, 15 bp, Homo sapiens
tcccagcactctggg

SEQ ID NO: 42255 - DNA, 15 bp, Homo sapiens
atcccagcactctgg

SEQ ID NO: 42256 - DNA, 15 bp, Homo sapiens
aatcccagcactctg

SEQ ID NO: 42257 - DNA, 15 bp, Homo sapiens
taatcccagcactct

SEQ ID NO: 42258 - DNA, 15 bp, Homo sapiens
gtaatcccagcactc

SEQ ID NO: 42259 - DNA, 15 bp, Homo sapiens
aacctgtaatcccag

SEQ ID NO: 42260 - DNA, 15 bp, Homo sapiens
caacctgtaatccca

SEQ ID NO: 42261 - DNA, 15 bp, Homo sapiens
acaacctgtaatccc

SEQ ID NO: 42262 - DNA, 15 bp, Homo sapiens
cacaacctgtaatcc

SEQ ID NO: 42263 - DNA, 15 bp, Homo sapiens
tcacaacctgtaatc

SEQ ID NO: 42264 - DNA, 15 bp, Homo sapiens
ctcacaacctgtaat

SEQ ID NO: 42265 - DNA, 15 bp, Homo sapiens
gctcacaacctgtaa

SEQ ID NO: 42266 - DNA, 15 bp, Homo sapiens
ggctcacaacctgta

SEQ ID NO: 42267 - DNA, 15 bp, Homo sapiens
tggctcacaacctgt

SEQ ID NO: 42268 - DNA, 15 bp, Homo sapiens
gtggctcacaacctg

SEQ ID NO: 42269 - DNA, 15 bp, Homo sapiens
agtggctcacaacct

SEQ ID NO: 42270 - DNA, 15 bp, Homo sapiens
cagtggctcacaacc

SEQ ID NO: 42271 - DNA, 15 bp, Homo sapiens
gcagtggctcacaac

SEQ ID NO: 42272 - DNA, 15 bp, Homo sapiens
tgcagtggctcacaa

SEQ ID NO: 42273 - DNA, 15 bp, Homo sapiens
caggccaggtgcagt

SEQ ID NO: 42274 - DNA, 15 bp, Homo sapiens
acaggccaggtgcag

SEQ ID NO: 42275 - DNA, 15 bp, Homo sapiens
aacaggccaggtgca

SEQ ID NO: 42276 - DNA, 15 bp, Homo sapiens
aaacaggccaggtgc

SEQ ID NO: 42277 - DNA, 15 bp, Homo sapiens
aaaacaggccaggtg

SEQ ID NO: 42278 - DNA, 15 bp, Homo sapiens
aaaaacaggccaggt

SEQ ID NO: 42279 - DNA, 15 bp, Homo sapiens
taaaaacaggccagg

SEQ ID NO: 42280 - DNA, 15 bp, Homo sapiens
ttaaaaacaggccag

SEQ ID NO: 42281 - DNA, 15 bp, Homo sapiens
tttaaaaacaggcca

SEQ ID NO: 42282 - DNA, 15 bp, Homo sapiens
atttaaaaacaggcc

SEQ ID NO: 42283 - DNA, 15 bp, Homo sapiens
aatttaaaaacaggc

SEQ ID NO: 42284 - DNA, 15 bp, Homo sapiens
gaatttaaaaacagg

SEQ ID NO: 42285 - DNA, 15 bp, Homo sapiens
tgaatttaaaaacag

SEQ ID NO: 42286 - DNA, 15 bp, Homo sapiens
gtgaatttaaaaaca

SEQ ID NO: 42287 - DNA, 15 bp, Homo sapiens
tgtgaatttaaaaac

SEQ ID NO: 42288 - DNA, 15 bp, Homo sapiens
atgtgaatttaaaaa

SEQ ID NO: 42289 - DNA, 15 bp, Homo sapiens
tatgtgaatttaaaa

SEQ ID NO: 42290 - DNA, 15 bp, Homo sapiens
ttatgtgaatttaaa

SEQ ID NO: 42291 - DNA, 15 bp, Homo sapiens
tttatgtgaatttaa

SEQ ID NO: 42292 - DNA, 15 bp, Homo sapiens
atttatgtgaattta

SEQ ID NO: 42293 - DNA, 15 bp, Homo sapiens
tatttatgtgaattt

SEQ ID NO: 42294 - DNA, 15 bp, Homo sapiens
atatttatgtgaatt

SEQ ID NO: 42295 - DNA, 15 bp, Homo sapiens
catatttatgtgaat

SEQ ID NO: 42296 - DNA, 15 bp, Homo sapiens
acatatttatgtgaa

SEQ ID NO: 42297 - DNA, 15 bp, Homo sapiens
aacatatttatgtga

SEQ ID NO: 42298 - DNA, 15 bp, Homo sapiens
aaacatatttatgtg

SEQ ID NO: 42299 - DNA, 15 bp, Homo sapiens
aaaacatatttatgt

SEQ ID NO: 42300 - DNA, 15 bp, Homo sapiens
taaaacatatttatg

SEQ ID NO: 42301 - DNA, 15 bp, Homo sapiens
ataaaacatatttat

SEQ ID NO: 42302 - DNA, 15 bp, Homo sapiens
tataaaacatattta

SEQ ID NO: 42303 - DNA, 15 bp, Homo sapiens
atataaaacatattt

SEQ ID NO: 42304 - DNA, 15 bp, Homo sapiens
aatataaaacatatt

SEQ ID NO: 42305 - DNA, 15 bp, Homo sapiens
aaatataaaacatat

SEQ ID NO: 42306 - DNA, 15 bp, Homo sapiens
aaaatataaaacata

SEQ ID NO: 42307 - DNA, 15 bp, Homo sapiens
aaaaatataaaacat

SEQ ID NO: 42308 - DNA, 15 bp, Homo sapiens
gaaaaatataaaaca

SEQ ID NO: 42309 - DNA, 15 bp, Homo sapiens
tgaaaaatataaaac

SEQ ID NO: 42310 - DNA, 15 bp, Homo sapiens
atgaaaaatataaaa

SEQ ID NO: 42311 - DNA, 15 bp, Homo sapiens
aatgaaaaatataaa

SEQ ID NO: 42312 - DNA, 15 bp, Homo sapiens
taatgaaaaatataa

SEQ ID NO: 42313 - DNA, 15 bp, Homo sapiens
ctaatgaaaaatata

SEQ ID NO: 42314 - DNA, 15 bp, Homo sapiens
cctaatgaaaaatat

SEQ ID NO: 42315 - DNA, 15 bp, Homo sapiens
ccctaatgaaaaata

SEQ ID NO: 42316 - DNA, 15 bp, Homo sapiens
tccctaatgaaaaat

SEQ ID NO: 42317 - DNA, 15 bp, Homo sapiens
ctccctaatgaaaaa

SEQ ID NO: 42318 - DNA, 15 bp, Homo sapiens
tctccctaatgaaaa

SEQ ID NO: 42319 - DNA, 15 bp, Homo sapiens
ttctccctaatgaaa

SEQ ID NO: 42320 - DNA, 15 bp, Homo sapiens
cttctccctaatgaa

SEQ ID NO: 42321 - DNA, 15 bp, Homo sapiens
tcttctccctaatga

SEQ ID NO: 42322 - DNA, 15 bp, Homo sapiens
ttcttctccctaatg

SEQ ID NO: 42323 - DNA, 15 bp, Homo sapiens
cttcttctccctaat

SEQ ID NO: 42324 - DNA, 15 bp, Homo sapiens
ccttcttctccctaa

SEQ ID NO: 42325 - DNA, 15 bp, Homo sapiens
accttcttctcccta

SEQ ID NO: 42326 - DNA, 15 bp, Homo sapiens
aaccttcttctccct

SEQ ID NO: 42327 - DNA, 15 bp, Homo sapiens
caaccttcttctccc

SEQ ID NO: 42328 - DNA, 15 bp, Homo sapiens
acaaccttcttctcc

SEQ ID NO: 42329 - DNA, 15 bp, Homo sapiens
cacaaccttcttctc

SEQ ID NO: 42330 - DNA, 15 bp, Homo sapiens
acacaaccttcttct

SEQ ID NO: 42331 - DNA, 15 bp, Homo sapiens
gacacaaccttcttc

SEQ ID NO: 42332 - DNA, 15 bp, Homo sapiens
agacacaaccttctt

SEQ ID NO: 42333 - DNA, 15 bp, Homo sapiens
tagacacaaccttct

SEQ ID NO: 42334 - DNA, 15 bp, Homo sapiens
gtagacacaaccttc

SEQ ID NO: 42335 - DNA, 15 bp, Homo sapiens
tgtagacacaacctt

SEQ ID NO: 42336 - DNA, 15 bp, Homo sapiens
ttgtagacacaacct

SEQ ID NO: 42337 - DNA, 15 bp, Homo sapiens
attgtagacacaacc

SEQ ID NO: 42338 - DNA, 15 bp, Homo sapiens
aattgtagacacaac

SEQ ID NO: 42339 - DNA, 15 bp, Homo sapiens
aaattgtagacacaa

SEQ ID NO: 42340 - DNA, 15 bp, Homo sapiens
aaaattgtagacaca

SEQ ID NO: 42341 - DNA, 15 bp, Homo sapiens
aaaaattgtagacac

SEQ ID NO: 42342 - DNA, 15 bp, Homo sapiens
taaaaattgtagaca

SEQ ID NO: 42343 - DNA, 15 bp, Homo sapiens
ttaaaaattgtagac

SEQ ID NO: 42344 - DNA, 15 bp, Homo sapiens
cttaaaaattgtaga

SEQ ID NO: 42345 - DNA, 15 bp, Homo sapiens
tcttaaaaattgtag

SEQ ID NO: 42346 - DNA, 15 bp, Homo sapiens
gtcttaaaaattgta

SEQ ID NO: 42347 - DNA, 15 bp, Homo sapiens
tgtcttaaaaattgt

SEQ ID NO: 42348 - DNA, 15 bp, Homo sapiens
atgtcttaaaaattg

SEQ ID NO: 42349 - DNA, 15 bp, Homo sapiens
aatgtcttaaaaatt

SEQ ID NO: 42350 - DNA, 15 bp, Homo sapiens
caatgtcttaaaaat

SEQ ID NO: 42351 - DNA, 15 bp, Homo sapiens
ccaatgtcttaaaaa

SEQ ID NO: 42352 - DNA, 15 bp, Homo sapiens
cccaatgtcttaaaa

SEQ ID NO: 42353 - DNA, 15 bp, Homo sapiens
ccccaatgtcttaaa

SEQ ID NO: 42354 - DNA, 15 bp, Homo sapiens
tccccaatgtcttaa

SEQ ID NO: 42355 - DNA, 15 bp, Homo sapiens
ctccccaatgtctta

SEQ ID NO: 42356 - DNA, 15 bp, Homo sapiens
tctccccaatgtctt

SEQ ID NO: 42357 - DNA, 15 bp, Homo sapiens
atctccccaatgtct

SEQ ID NO: 42358 - DNA, 15 bp, Homo sapiens
aatctccccaatgtc

SEQ ID NO: 42359 - DNA, 15 bp, Homo sapiens
aaatctccccaatgt

SEQ ID NO: 42360 - DNA, 15 bp, Homo sapiens
taaatctccccaatg

SEQ ID NO: 42361 - DNA, 15 bp, Homo sapiens
ctaaatctccccaat

SEQ ID NO: 42362 - DNA, 15 bp, Homo sapiens
tctaaatctccccaa

SEQ ID NO: 42363 - DNA, 15 bp, Homo sapiens
atctaaatctcccca

SEQ ID NO: 42364 - DNA, 15 bp, Homo sapiens
catctaaatctcccc

SEQ ID NO: 42365 - DNA, 15 bp, Homo sapiens
gcatctaaatctccc

SEQ ID NO: 42366 - DNA, 15 bp, Homo sapiens
ggcatctaaatctcc

SEQ ID NO: 42367 - DNA, 15 bp, Homo sapiens
tggcatctaaatctc

SEQ ID NO: 42368 - DNA, 15 bp, Homo sapiens
ctggcatctaaatct

SEQ ID NO: 42369 - DNA, 15 bp, Homo sapiens
actggcatctaaatc

SEQ ID NO: 42370 - DNA, 15 bp, Homo sapiens
tactggcatctaaat

SEQ ID NO: 42371 - DNA, 15 bp, Homo sapiens
ctactggcatctaaa

SEQ ID NO: 42372 - DNA, 15 bp, Homo sapiens
actactggcatctaa

SEQ ID NO: 42373 - DNA, 15 bp, Homo sapiens
tactactggcatcta

SEQ ID NO: 42374 - DNA, 15 bp, Homo sapiens
ttactactggcatct

SEQ ID NO: 42375 - DNA, 15 bp, Homo sapiens
gttactactggcatc

SEQ ID NO: 42376 - DNA, 15 bp, Homo sapiens
agttactactggcat

SEQ ID NO: 42377 - DNA, 15 bp, Homo sapiens
aagttactactggca

SEQ ID NO: 42378 - DNA, 15 bp, Homo sapiens
taagttactactggc

SEQ ID NO: 42379 - DNA, 15 bp, Homo sapiens
ttaagttactactgg

SEQ ID NO: 42380 - DNA, 15 bp, Homo sapiens
tttaagttactactg

SEQ ID NO: 42381 - DNA, 15 bp, Homo sapiens
ttttaagttactact

SEQ ID NO: 42382 - DNA, 15 bp, Homo sapiens
cttttaagttactac

SEQ ID NO: 42383 - DNA, 15 bp, Homo sapiens
tcttttaagttacta

SEQ ID NO: 42384 - DNA, 15 bp, Homo sapiens
ctcttttaagttact

SEQ ID NO: 42385 - DNA, 15 bp, Homo sapiens
tctcttttaagttac

SEQ ID NO: 42386 - DNA, 15 bp, Homo sapiens
ttctcttttaagtta

SEQ ID NO: 42387 - DNA, 15 bp, Homo sapiens
tttctcttttaagtt

SEQ ID NO: 42388 - DNA, 15 bp, Homo sapiens
atttctcttttaagt

SEQ ID NO: 42389 - DNA, 15 bp, Homo sapiens
tatttctcttttaag

SEQ ID NO: 42390 - DNA, 15 bp, Homo sapiens
ttatttctcttttaa

SEQ ID NO: 42391 - DNA, 15 bp, Homo sapiens
attatttctctttta

SEQ ID NO: 42392 - DNA, 15 bp, Homo sapiens
aattatttctctttt

SEQ ID NO: 42393 - DNA, 15 bp, Homo sapiens
caattatttctcttt

SEQ ID NO: 42394 - DNA, 15 bp, Homo sapiens
gcaattatttctctt

SEQ ID NO: 42395 - DNA, 15 bp, Homo sapiens
tgcaattatttctct

SEQ ID NO: 42396 - DNA, 15 bp, Homo sapiens
ttgcaattatttctc

SEQ ID NO: 42397 - DNA, 15 bp, Homo sapiens
tttgcaattatttct

SEQ ID NO: 42398 - DNA, 15 bp, Homo sapiens
atttgcaattatttc

SEQ ID NO: 42399 - DNA, 15 bp, Homo sapiens
aatttgcaattattt

SEQ ID NO: 42400 - DNA, 15 bp, Homo sapiens
gaatttgcaattatt

SEQ ID NO: 42401 - DNA, 15 bp, Homo sapiens
agaatttgcaattat

SEQ ID NO: 42402 - DNA, 15 bp, Homo sapiens
aagaatttgcaatta

SEQ ID NO: 42403 - DNA, 15 bp, Homo sapiens
aaagaatttgcaatt

SEQ ID NO: 42404 - DNA, 15 bp, Homo sapiens
aaaagaatttgcaat

SEQ ID NO: 42405 - DNA, 15 bp, Homo sapiens
aaaaagaatttgcaa

SEQ ID NO: 42406 - DNA, 15 bp, Homo sapiens
gaaaaagaatttgca

SEQ ID NO: 42407 - DNA, 15 bp, Homo sapiens
ggaaaaagaatttgc

SEQ ID NO: 42408 - DNA, 15 bp, Homo sapiens
aggaaaaagaatttg

SEQ ID NO: 42409 - DNA, 15 bp, Homo sapiens
gaggaaaaagaattt

SEQ ID NO: 42410 - DNA, 15 bp, Homo sapiens
agaggaaaaagaatt

SEQ ID NO: 42411 - DNA, 15 bp, Homo sapiens
aagaggaaaaagaat

SEQ ID NO: 42412 - DNA, 15 bp, Homo sapiens
caagaggaaaaagaa

SEQ ID NO: 42413 - DNA, 15 bp, Homo sapiens
tcaagaggaaaaaga

SEQ ID NO: 42414 - DNA, 15 bp, Homo sapiens
ctcaagaggaaaaag

SEQ ID NO: 42415 - DNA, 15 bp, Homo sapiens
actcaagaggaaaaa

SEQ ID NO: 42416 - DNA, 15 bp, Homo sapiens
tactcaagaggaaaa

SEQ ID NO: 42417 - DNA, 15 bp, Homo sapiens
atactcaagaggaaa

SEQ ID NO: 42418 - DNA, 15 bp, Homo sapiens
tatactcaagaggaa

SEQ ID NO: 42419 - DNA, 15 bp, Homo sapiens
gtatactcaagagga

SEQ ID NO: 42420 - DNA, 15 bp, Homo sapiens
agtatactcaagagg

SEQ ID NO: 42421 - DNA, 15 bp, Homo sapiens
aagtatactcaagag

SEQ ID NO: 42422 - DNA, 15 bp, Homo sapiens
aaagtatactcaaga

SEQ ID NO: 42423 - DNA, 15 bp, Homo sapiens
gaaagtatactcaag

SEQ ID NO: 42424 - DNA, 15 bp, Homo sapiens
tgaaagtatactcaa

SEQ ID NO: 42425 - DNA, 15 bp, Homo sapiens
atgaaagtatactca

SEQ ID NO: 42426 - DNA, 15 bp, Homo sapiens
aatgaaagtatactc

SEQ ID NO: 42427 - DNA, 15 bp, Homo sapiens
aaatgaaagtatact

SEQ ID NO: 42428 - DNA, 15 bp, Homo sapiens
taaatgaaagtatac

SEQ ID NO: 42429 - DNA, 15 bp, Homo sapiens
ttaaatgaaagtata

SEQ ID NO: 42430 - DNA, 15 bp, Homo sapiens
cttaaatgaaagtat

SEQ ID NO: 42431 - DNA, 15 bp, Homo sapiens
ccttaaatgaaagta

SEQ ID NO: 42432 - DNA, 15 bp, Homo sapiens
accttaaatgaaagt

SEQ ID NO: 42433 - DNA, 15 bp, Homo sapiens
taccttaaatgaaag

SEQ ID NO: 42434 - DNA, 15 bp, Homo sapiens
gtaccttaaatgaaa

SEQ ID NO: 42435 - DNA, 15 bp, Homo sapiens
tgtaccttaaatgaa

SEQ ID NO: 42436 - DNA, 15 bp, Homo sapiens
ctgtaccttaaatga

SEQ ID NO: 42437 - DNA, 15 bp, Homo sapiens
actgtaccttaaatg

SEQ ID NO: 42438 - DNA, 15 bp, Homo sapiens
cactgtaccttaaat

SEQ ID NO: 42439 - DNA, 15 bp, Homo sapiens
acactgtaccttaaa

SEQ ID NO: 42440 - DNA, 15 bp, Homo sapiens
aacactgtaccttaa

SEQ ID NO: 42441 - DNA, 15 bp, Homo sapiens
gaacactgtacctta

SEQ ID NO: 42442 - DNA, 15 bp, Homo sapiens
agaacactgtacctt

SEQ ID NO: 42443 - DNA, 15 bp, Homo sapiens
cagaacactgtacct

SEQ ID NO: 42444 - DNA, 15 bp, Homo sapiens
acagaacactgtacc

SEQ ID NO: 42445 - DNA, 15 bp, Homo sapiens
tacagaacactgtac

SEQ ID NO: 42446 - DNA, 15 bp, Homo sapiens
ttacagaacactgta

SEQ ID NO: 42447 - DNA, 15 bp, Homo sapiens
cttacagaacactgt

SEQ ID NO: 42448 - DNA, 15 bp, Homo sapiens
acttacagaacactg

SEQ ID NO: 42449 - DNA, 15 bp, Homo sapiens
aacttacagaacact

SEQ ID NO: 42450 - DNA, 15 bp, Homo sapiens
taacttacagaacac

SEQ ID NO: 42451 - DNA, 15 bp, Homo sapiens
gtaacttacagaaca

SEQ ID NO: 42452 - DNA, 15 bp, Homo sapiens
agtaacttacagaac

SEQ ID NO: 42453 - DNA, 15 bp, Homo sapiens
aagtaacttacagaa

SEQ ID NO: 42454 - DNA, 15 bp, Homo sapiens
aaagtaacttacaga

SEQ ID NO: 42455 - DNA, 15 bp, Homo sapiens
aaaagtaacttacag

SEQ ID NO: 42456 - DNA, 15 bp, Homo sapiens
taaaagtaacttaca

SEQ ID NO: 42457 - DNA, 15 bp, Homo sapiens
gtaaaagtaacttac

SEQ ID NO: 42458 - DNA, 15 bp, Homo sapiens
ggtaaaagtaactta

SEQ ID NO: 42459 - DNA, 15 bp, Homo sapiens
cggtaaaagtaactt

SEQ ID NO: 42460 - DNA, 15 bp, Homo sapiens
acggtaaaagtaact

SEQ ID NO: 42461 - DNA, 15 bp, Homo sapiens
aacggtaaaagtaac

SEQ ID NO: 42462 - DNA, 15 bp, Homo sapiens
taacggtaaaagtaa

SEQ ID NO: 42463 - DNA, 15 bp, Homo sapiens
ttaacggtaaaagta

SEQ ID NO: 42464 - DNA, 15 bp, Homo sapiens
tttaacggtaaaagt

SEQ ID NO: 42465 - DNA, 15 bp, Homo sapiens
gtttaacggtaaaag

SEQ ID NO: 42466 - DNA, 15 bp, Homo sapiens
agtttaacggtaaaa

SEQ ID NO: 42467 - DNA, 15 bp, Homo sapiens
aagtttaacggtaaa

SEQ ID NO: 42468 - DNA, 15 bp, Homo sapiens
gaagtttaacggtaa

SEQ ID NO: 42469 - DNA, 15 bp, Homo sapiens
agaagtttaacggta

SEQ ID NO: 42470 - DNA, 15 bp, Homo sapiens
aagaagtttaacggt

SEQ ID NO: 42471 - DNA, 15 bp, Homo sapiens
taagaagtttaacgg

SEQ ID NO: 42472 - DNA, 15 bp, Homo sapiens
ttaagaagtttaacg

SEQ ID NO: 42473 - DNA, 15 bp, Homo sapiens
attaagaagtttaac

SEQ ID NO: 42474 - DNA, 15 bp, Homo sapiens
cattaagaagtttaa

SEQ ID NO: 42475 - DNA, 15 bp, Homo sapiens
acattaagaagttta

SEQ ID NO: 42476 - DNA, 15 bp, Homo sapiens
aacattaagaagttt

SEQ ID NO: 42477 - DNA, 15 bp, Homo sapiens
caacattaagaagtt

SEQ ID NO: 42478 - DNA, 15 bp, Homo sapiens
gcaacattaagaagt

SEQ ID NO: 42479 - DNA, 15 bp, Homo sapiens
agcaacattaagaag

SEQ ID NO: 42480 - DNA, 15 bp, Homo sapiens
aagcaacattaagaa

SEQ ID NO: 42481 - DNA, 15 bp, Homo sapiens
taagcaacattaaga

SEQ ID NO: 42482 - DNA, 15 bp, Homo sapiens
ataagcaacattaag

SEQ ID NO: 42483 - DNA, 15 bp, Homo sapiens
aataagcaacattaa

SEQ ID NO: 42484 - DNA, 15 bp, Homo sapiens
caataagcaacatta

SEQ ID NO: 42485 - DNA, 15 bp, Homo sapiens
acaataagcaacatt

SEQ ID NO: 42486 - DNA, 15 bp, Homo sapiens
aacaataagcaacat

SEQ ID NO: 42487 - DNA, 15 bp, Homo sapiens
aaacaataagcaaca

SEQ ID NO: 42488 - DNA, 15 bp, Homo sapiens
caaacaataagcaac

SEQ ID NO: 42489 - DNA, 15 bp, Homo sapiens
acaaacaataagcaa

SEQ ID NO: 42490 - DNA, 15 bp, Homo sapiens
gacaaacaataagca

SEQ ID NO: 42491 - DNA, 15 bp, Homo sapiens
agacaaacaataagc

SEQ ID NO: 42492 - DNA, 15 bp, Homo sapiens
aagacaaacaataag

SEQ ID NO: 42493 - DNA, 15 bp, Homo sapiens
taagacaaacaataa

SEQ ID NO: 42494 - DNA, 15 bp, Homo sapiens
gtaagacaaacaata

SEQ ID NO: 42495 - DNA, 15 bp, Homo sapiens
tgtaagacaaacaat

SEQ ID NO: 42496 - DNA, 15 bp, Homo sapiens
atgtaagacaaacaa

SEQ ID NO: 42497 - DNA, 15 bp, Homo sapiens
aatgtaagacaaaca

SEQ ID NO: 42498 - DNA, 15 bp, Homo sapiens
aaatgtaagacaaac

SEQ ID NO: 42499 - DNA, 15 bp, Homo sapiens
aaaatgtaagacaaa

SEQ ID NO: 42500 - DNA, 15 bp, Homo sapiens
aaaaatgtaagacaa

SEQ ID NO: 42501 - DNA, 15 bp, Homo sapiens
taaaaatgtaagaca

SEQ ID NO: 42502 - DNA, 15 bp, Homo sapiens
ctaaaaatgtaagac

SEQ ID NO: 42503 - DNA, 15 bp, Homo sapiens
cctaaaaatgtaaga

SEQ ID NO: 42504 - DNA, 15 bp, Homo sapiens
acctaaaaatgtaag

SEQ ID NO: 42505 - DNA, 15 bp, Homo sapiens
aacctaaaaatgtaa

SEQ ID NO: 42506 - DNA, 15 bp, Homo sapiens
caacctaaaaatgta

SEQ ID NO: 42507 - DNA, 15 bp, Homo sapiens
ccaacctaaaaatgt

SEQ ID NO: 42508 - DNA, 15 bp, Homo sapiens
tccaacctaaaaatg

SEQ ID NO: 42509 - DNA, 15 bp, Homo sapiens
atccaacctaaaaat

SEQ ID NO: 42510 - DNA, 15 bp, Homo sapiens
aatccaacctaaaaa

SEQ ID NO: 42511 - DNA, 15 bp, Homo sapiens
aaatccaacctaaaa

SEQ ID NO: 42512 - DNA, 15 bp, Homo sapiens
aaaatccaacctaaa

SEQ ID NO: 42513 - DNA, 15 bp, Homo sapiens
aaaaatccaacctaa

SEQ ID NO: 42514 - DNA, 15 bp, Homo sapiens
gaaaaatccaaccta

SEQ ID NO: 42515 - DNA, 15 bp, Homo sapiens
agaaaaatccaacct

SEQ ID NO: 42516 - DNA, 15 bp, Homo sapiens
aagaaaaatccaacc

SEQ ID NO: 42517 - DNA, 15 bp, Homo sapiens
taagaaaaatccaac

SEQ ID NO: 42518 - DNA, 15 bp, Homo sapiens
ttaagaaaaatccaa

SEQ ID NO: 42519 - DNA, 15 bp, Homo sapiens
cttaagaaaaatcca

SEQ ID NO: 42520 - DNA, 15 bp, Homo sapiens
acttaagaaaaatcc

SEQ ID NO: 42521 - DNA, 15 bp, Homo sapiens
gacttaagaaaaatc

SEQ ID NO: 42522 - DNA, 15 bp, Homo sapiens
tgacttaagaaaaat

SEQ ID NO: 42523 - DNA, 15 bp, Homo sapiens
gtgacttaagaaaaa

SEQ ID NO: 42524 - DNA, 15 bp, Homo sapiens
tgtgacttaagaaaa

SEQ ID NO: 42525 - DNA, 15 bp, Homo sapiens
atgtgacttaagaaa

SEQ ID NO: 42526 - DNA, 15 bp, Homo sapiens
catgtgacttaagaa

SEQ ID NO: 42527 - DNA, 15 bp, Homo sapiens
acatgtgacttaaga

SEQ ID NO: 42528 - DNA, 15 bp, Homo sapiens
gacatgtgacttaag

SEQ ID NO: 42529 - DNA, 15 bp, Homo sapiens
agacatgtgacttaa

SEQ ID NO: 42530 - DNA, 15 bp, Homo sapiens
tagacatgtgactta

SEQ ID NO: 42531 - DNA, 15 bp, Homo sapiens
ttagacatgtgactt

SEQ ID NO: 42532 - DNA, 15 bp, Homo sapiens
attagacatgtgact

SEQ ID NO: 42533 - DNA, 15 bp, Homo sapiens
tattagacatgtgac

SEQ ID NO: 42534 - DNA, 15 bp, Homo sapiens
ttattagacatgtga

SEQ ID NO: 42535 - DNA, 15 bp, Homo sapiens
tttattagacatgtg

SEQ ID NO: 42536 - DNA, 15 bp, Homo sapiens
ttttattagacatgt

SEQ ID NO: 42537 - DNA, 15 bp, Homo sapiens
tttttattagacatg

SEQ ID NO: 42538 - DNA, 15 bp, Homo sapiens
ttttttattagacat

SEQ ID NO: 42539 - DNA, 15 bp, Homo sapiens
tttttttattagaca

SEQ ID NO: 42540 - DNA, 15 bp, Homo sapiens
ttttttttattagac

SEQ ID NO: 42541 - DNA, 15 bp, Homo sapiens
gttttttttattaga

SEQ ID NO: 42542 - DNA, 15 bp, Homo sapiens
ggttttttttattag

SEQ ID NO: 42543 - DNA, 15 bp, Homo sapiens
gggttttttttatta

SEQ ID NO: 42544 - DNA, 15 bp, Homo sapiens
agggttttttttatt

SEQ ID NO: 42545 - DNA, 15 bp, Homo sapiens
aagggttttttttat

SEQ ID NO: 42546 - DNA, 15 bp, Homo sapiens
taagggtttttttta

SEQ ID NO: 42547 - DNA, 15 bp, Homo sapiens
ttaagggtttttttt

SEQ ID NO: 42548 - DNA, 15 bp, Homo sapiens
tttaagggttttttt

SEQ ID NO: 42549 - DNA, 15 bp, Homo sapiens
atttaagggtttttt

SEQ ID NO: 42550 - DNA, 15 bp, Homo sapiens
tatttaagggttttt

SEQ ID NO: 42551 - DNA, 15 bp, Homo sapiens
gtatttaagggtttt

SEQ ID NO: 42552 - DNA, 15 bp, Homo sapiens
ggtatttaagggttt

SEQ ID NO: 42553 - DNA, 15 bp, Homo sapiens
aggtatttaagggtt

SEQ ID NO: 42554 - DNA, 15 bp, Homo sapiens
gaggtatttaagggt

SEQ ID NO: 42555 - DNA, 15 bp, Homo sapiens
tgaggtatttaaggg

SEQ ID NO: 42556 - DNA, 15 bp, Homo sapiens
atgaggtatttaagg

SEQ ID NO: 42557 - DNA, 15 bp, Homo sapiens
aatgaggtatttaag

SEQ ID NO: 42558 - DNA, 15 bp, Homo sapiens
aaatgaggtatttaa

SEQ ID NO: 42559 - DNA, 15 bp, Homo sapiens
taaatgaggtattta

SEQ ID NO: 42560 - DNA, 15 bp, Homo sapiens
ataaatgaggtattt

SEQ ID NO: 42561 - DNA, 15 bp, Homo sapiens
aataaatgaggtatt

SEQ ID NO: 42562 - DNA, 15 bp, Homo sapiens
gaataaatgaggtat

SEQ ID NO: 42563 - DNA, 15 bp, Homo sapiens
cgaataaatgaggta

SEQ ID NO: 42564 - DNA, 15 bp, Homo sapiens
acgaataaatgaggt

SEQ ID NO: 42565 - DNA, 15 bp, Homo sapiens
gacgaataaatgagg

SEQ ID NO: 42566 - DNA, 15 bp, Homo sapiens
agacgaataaatgag

SEQ ID NO: 42567 - DNA, 15 bp, Homo sapiens
aagacgaataaatga

SEQ ID NO: 42568 - DNA, 15 bp, Homo sapiens
gaagacgaataaatg

SEQ ID NO: 42569 - DNA, 15 bp, Homo sapiens
cgaagacgaataaat

SEQ ID NO: 42570 - DNA, 15 bp, Homo sapiens
acgaagacgaataaa

SEQ ID NO: 42571 - DNA, 15 bp, Homo sapiens
aacgaagacgaataa

SEQ ID NO: 42572 - DNA, 15 bp, Homo sapiens
taacgaagacgaata

SEQ ID NO: 42573 - DNA, 15 bp, Homo sapiens
ctaacgaagacgaat

SEQ ID NO: 42574 - DNA, 15 bp, Homo sapiens
actaacgaagacgaa

SEQ ID NO: 42575 - DNA, 15 bp, Homo sapiens
cactaacgaagacga

SEQ ID NO: 42576 - DNA, 15 bp, Homo sapiens
tcactaacgaagacg

SEQ ID NO: 42577 - DNA, 15 bp, Homo sapiens
ttcactaacgaagac

SEQ ID NO: 42578 - DNA, 15 bp, Homo sapiens
attcactaacgaaga

SEQ ID NO: 42579 - DNA, 15 bp, Homo sapiens
cattcactaacgaag

SEQ ID NO: 42580 - DNA, 15 bp, Homo sapiens
gcattcactaacgaa

SEQ ID NO: 42581 - DNA, 15 bp, Homo sapiens
tgcattcactaacga

SEQ ID NO: 42582 - DNA, 15 bp, Homo sapiens
atgcattcactaacg

SEQ ID NO: 42583 - DNA, 15 bp, Homo sapiens
aatgcattcactaac

SEQ ID NO: 42584 - DNA, 15 bp, Homo sapiens
caatgcattcactaa

SEQ ID NO: 42585 - DNA, 15 bp, Homo sapiens
acaatgcattcacta

SEQ ID NO: 42586 - DNA, 15 bp, Homo sapiens
aacaatgcattcact

SEQ ID NO: 42587 - DNA, 15 bp, Homo sapiens
caacaatgcattcac

SEQ ID NO: 42588 - DNA, 15 bp, Homo sapiens
acaacaatgcattca

SEQ ID NO: 42589 - DNA, 15 bp, Homo sapiens
tacaacaatgcattc

SEQ ID NO: 42590 - DNA, 15 bp, Homo sapiens
gtacaacaatgcatt

SEQ ID NO: 42591 - DNA, 15 bp, Homo sapiens
tgtacaacaatgcat

SEQ ID NO: 42592 - DNA, 15 bp, Homo sapiens
atgtacaacaatgca

SEQ ID NO: 42593 - DNA, 15 bp, Homo sapiens
tatgtacaacaatgc

SEQ ID NO: 42594 - DNA, 15 bp, Homo sapiens
atatgtacaacaatg

SEQ ID NO: 42595 - DNA, 15 bp, Homo sapiens
aatatgtacaacaat

SEQ ID NO: 42596 - DNA, 15 bp, Homo sapiens
taatatgtacaacaa

SEQ ID NO: 42597 - DNA, 15 bp, Homo sapiens
ctaatatgtacaaca

SEQ ID NO: 42598 - DNA, 15 bp, Homo sapiens
tctaatatgtacaac

SEQ ID NO: 42599 - DNA, 15 bp, Homo sapiens
atctaatatgtacaa

SEQ ID NO: 42600 - DNA, 15 bp, Homo sapiens
aatctaatatgtaca

SEQ ID NO: 42601 - DNA, 15 bp, Homo sapiens
aaatctaatatgtac

SEQ ID NO: 42602 - DNA, 15 bp, Homo sapiens
aaaatctaatatgta

SEQ ID NO: 42603 - DNA, 15 bp, Homo sapiens
aaaaatctaatatgt

SEQ ID NO: 42604 - DNA, 15 bp, Homo sapiens
gaaaaatctaatatg

SEQ ID NO: 42605 - DNA, 15 bp, Homo sapiens
agaaaaatctaatat

SEQ ID NO: 42606 - DNA, 15 bp, Homo sapiens
gagaaaaatctaata

SEQ ID NO: 42607 - DNA, 15 bp, Homo sapiens
taaagagaaaaatct

SEQ ID NO: 42608 - DNA, 15 bp, Homo sapiens
ctaaagagaaaaatc

SEQ ID NO: 42609 - DNA, 15 bp, Homo sapiens
tctaaagagaaaaat

SEQ ID NO: 42610 - DNA, 15 bp, Homo sapiens
atctaaagagaaaaa

SEQ ID NO: 42611 - DNA, 15 bp, Homo sapiens
tatctaaagagaaaa

SEQ ID NO: 42612 - DNA, 15 bp, Homo sapiens
ttatctaaagagaaa

SEQ ID NO: 42613 - DNA, 15 bp, Homo sapiens
gttatctaaagagaa

SEQ ID NO: 42614 - DNA, 15 bp, Homo sapiens
agttatctaaagaga

SEQ ID NO: 42615 - DNA, 15 bp, Homo sapiens
gagttatctaaagag

SEQ ID NO: 42616 - DNA, 15 bp, Homo sapiens
tgagttatctaaaga

SEQ ID NO: 42617 - DNA, 15 bp, Homo sapiens
ctgagttatctaaag

SEQ ID NO: 42618 - DNA, 15 bp, Homo sapiens
gctgagttatctaaa

SEQ ID NO: 42619 - DNA, 15 bp, Homo sapiens
agctgagttatctaa

SEQ ID NO: 42620 - DNA, 15 bp, Homo sapiens
aagctgagttatcta

SEQ ID NO: 42621 - DNA, 15 bp, Homo sapiens
gaagctgagttatct

SEQ ID NO: 42622 - DNA, 15 bp, Homo sapiens
ggaagctgagttatc

SEQ ID NO: 42623 - DNA, 15 bp, Homo sapiens
gggaagctgagttat

SEQ ID NO: 42624 - DNA, 15 bp, Homo sapiens
ggggaagctgagtta

SEQ ID NO: 42625 - DNA, 15 bp, Homo sapiens
aggggaagctgagtt

SEQ ID NO: 42626 - DNA, 15 bp, Homo sapiens
taggggaagctgagt

SEQ ID NO: 42627 - DNA, 15 bp, Homo sapiens
ataggggaagctgag

SEQ ID NO: 42628 - DNA, 15 bp, Homo sapiens
aataggggaagctga

SEQ ID NO: 42629 - DNA, 15 bp, Homo sapiens
taataggggaagctg

SEQ ID NO: 42630 - DNA, 15 bp, Homo sapiens
ttaataggggaagct

SEQ ID NO: 42631 - DNA, 15 bp, Homo sapiens
cttaataggggaagc

SEQ ID NO: 42632 - DNA, 15 bp, Homo sapiens
acttaataggggaag

SEQ ID NO: 42633 - DNA, 15 bp, Homo sapiens
cacttaataggggaa

SEQ ID NO: 42634 - DNA, 15 bp, Homo sapiens
gcacttaatagggga

SEQ ID NO: 42635 - DNA, 15 bp, Homo sapiens
ggcacttaatagggg

SEQ ID NO: 42636 - DNA, 15 bp, Homo sapiens
tggcacttaataggg

SEQ ID NO: 42637 - DNA, 15 bp, Homo sapiens
gtggcacttaatagg

SEQ ID NO: 42638 - DNA, 15 bp, Homo sapiens
tgtggcacttaatag

SEQ ID NO: 42639 - DNA, 15 bp, Homo sapiens
atgtggcacttaata

SEQ ID NO: 42640 - DNA, 15 bp, Homo sapiens
catgtggcacttaat

SEQ ID NO: 42641 - DNA, 15 bp, Homo sapiens
acatgtggcacttaa

SEQ ID NO: 42642 - DNA, 15 bp, Homo sapiens
tacatgtggcactta

SEQ ID NO: 42643 - DNA, 15 bp, Homo sapiens
atacatgtggcactt

SEQ ID NO: 42644 - DNA, 15 bp, Homo sapiens
aatacatgtggcact

SEQ ID NO: 42645 - DNA, 15 bp, Homo sapiens
taatacatgtggcac

SEQ ID NO: 42646 - DNA, 15 bp, Homo sapiens
gtaatacatgtggca

SEQ ID NO: 42647 - DNA, 15 bp, Homo sapiens
tgtaatacatgtggc

SEQ ID NO: 42648 - DNA, 15 bp, Homo sapiens
ttgtaatacatgtgg

SEQ ID NO: 42649 - DNA, 15 bp, Homo sapiens
tttgtaatacatgtg

SEQ ID NO: 42650 - DNA, 15 bp, Homo sapiens
ttttgtaatacatgt

SEQ ID NO: 42651 - DNA, 15 bp, Homo sapiens
attttgtaatacatg

SEQ ID NO: 42652 - DNA, 15 bp, Homo sapiens
aattttgtaatacat

SEQ ID NO: 42653 - DNA, 15 bp, Homo sapiens
aaattttgtaataca

SEQ ID NO: 42654 - DNA, 15 bp, Homo sapiens
aaaattttgtaatac

SEQ ID NO: 42655 - DNA, 15 bp, Homo sapiens
taaaattttgtaata

SEQ ID NO: 42656 - DNA, 15 bp, Homo sapiens
ataaaattttgtaat

SEQ ID NO: 42657 - DNA, 15 bp, Homo sapiens
aataaaattttgtaa

SEQ ID NO: 42658 - DNA, 15 bp, Homo sapiens
aaataaaattttgta

SEQ ID NO: 42659 - DNA, 15 bp, Homo sapiens
taaataaaattttgt

SEQ ID NO: 42660 - DNA, 15 bp, Homo sapiens
ataaataaaattttg

SEQ ID NO: 42661 - DNA, 15 bp, Homo sapiens
cataaataaaatttt

SEQ ID NO: 42662 - DNA, 15 bp, Homo sapiens
acataaataaaattt

SEQ ID NO: 42663 - DNA, 15 bp, Homo sapiens
aacataaataaaatt

SEQ ID NO: 42664 - DNA, 15 bp, Homo sapiens
aaacataaataaaat

SEQ ID NO: 42665 - DNA, 15 bp, Homo sapiens
aaaacataaataaaa

SEQ ID NO: 42666 - DNA, 15 bp, Homo sapiens
taaaacataaataaa

SEQ ID NO: 42667 - DNA, 15 bp, Homo sapiens
ataaaacataaataa

SEQ ID NO: 42668 - DNA, 15 bp, Homo sapiens
aataaaacataaata

SEQ ID NO: 42669 - DNA, 15 bp, Homo sapiens
caataaaacataaat

SEQ ID NO: 42670 - DNA, 15 bp, Homo sapiens
acaataaaacataaa

SEQ ID NO: 42671 - DNA, 15 bp, Homo sapiens
aacaataaaacataa

SEQ ID NO: 42672 - DNA, 15 bp, Homo sapiens
aaacaataaaacata

SEQ ID NO: 42673 - DNA, 15 bp, Homo sapiens
taaacaataaaacat

SEQ ID NO: 42674 - DNA, 15 bp, Homo sapiens
ttaaacaataaaaca

SEQ ID NO: 42675 - DNA, 15 bp, Homo sapiens
attaaacaataaaac

SEQ ID NO: 42676 - DNA, 15 bp, Homo sapiens
tattaaacaataaaa

SEQ ID NO: 42677 - DNA, 15 bp, Homo sapiens
ttattaaacaataaa

SEQ ID NO: 42678 - DNA, 15 bp, Homo sapiens
tttattaaacaataa

SEQ ID NO: 42679 - DNA, 15 bp, Homo sapiens
gtttattaaacaata

SEQ ID NO: 42680 - DNA, 15 bp, Homo sapiens
agtttattaaacaat

SEQ ID NO: 42681 - DNA, 15 bp, Homo sapiens
gagtttattaaacaa

SEQ ID NO: 42682 - DNA, 15 bp, Homo sapiens
agagtttattaaaca

SEQ ID NO: 42683 - DNA, 15 bp, Homo sapiens
aagagtttattaaac

SEQ ID NO: 42684 - DNA, 15 bp, Homo sapiens
caagagtttattaaa

SEQ ID NO: 42685 - DNA, 15 bp, Homo sapiens
tcaagagtttattaa

SEQ ID NO: 42686 - DNA, 15 bp, Homo sapiens
ctcaagagtttatta

SEQ ID NO: 42687 - DNA, 15 bp, Homo sapiens
tctcaagagtttatt

SEQ ID NO: 42688 - DNA, 15 bp, Homo sapiens
ttctcaagagtttat

SEQ ID NO: 42689 - DNA, 15 bp, Homo sapiens
gttctcaagagttta

SEQ ID NO: 42690 - DNA, 15 bp, Homo sapiens
agttctcaagagttt

SEQ ID NO: 42691 - DNA, 15 bp, Homo sapiens
tagttctcaagagtt

SEQ ID NO: 42692 - DNA, 15 bp, Homo sapiens
ctagttctcaagagt

SEQ ID NO: 42693 - DNA, 15 bp, Homo sapiens
tctagttctcaagag

SEQ ID NO: 42694 - DNA, 15 bp, Homo sapiens
atctagttctcaaga

SEQ ID NO: 42695 - DNA, 15 bp, Homo sapiens
tatctagttctcaag

SEQ ID NO: 42696 - DNA, 15 bp, Homo sapiens
gtatctagttctcaa

SEQ ID NO: 42697 - DNA, 15 bp, Homo sapiens
tgtatctagttctca

SEQ ID NO: 42698 - DNA, 15 bp, Homo sapiens
atgtatctagttctc

SEQ ID NO: 42699 - DNA, 15 bp, Homo sapiens
aatgtatctagttct

SEQ ID NO: 42700 - DNA, 15 bp, Homo sapiens
aaatgtatctagttc

SEQ ID NO: 42701 - DNA, 15 bp, Homo sapiens
aaaatgtatctagtt

SEQ ID NO: 42702 - DNA, 15 bp, Homo sapiens
taaaatgtatctagt

SEQ ID NO: 42703 - DNA, 15 bp, Homo sapiens
ttaaaatgtatctag

SEQ ID NO: 42704 - DNA, 15 bp, Homo sapiens
attaaaatgtatcta

SEQ ID NO: 42705 - DNA, 15 bp, Homo sapiens
gattaaaatgtatct

SEQ ID NO: 42706 - DNA, 15 bp, Homo sapiens
tgattaaaatgtatc

SEQ ID NO: 42707 - DNA, 15 bp, Homo sapiens
atgattaaaatgtat

SEQ ID NO: 42708 - DNA, 15 bp, Homo sapiens
aatgattaaaatgta

SEQ ID NO: 42709 - DNA, 15 bp, Homo sapiens
aaatgattaaaatgt

SEQ ID NO: 42710 - DNA, 15 bp, Homo sapiens
caaatgattaaaatg

SEQ ID NO: 42711 - DNA, 15 bp, Homo sapiens
acaaatgattaaaat

SEQ ID NO: 42712 - DNA, 15 bp, Homo sapiens
tacaaatgattaaaa

SEQ ID NO: 42713 - DNA, 15 bp, Homo sapiens
ttacaaatgattaaa

SEQ ID NO: 42714 - DNA, 15 bp, Homo sapiens
attacaaatgattaa

SEQ ID NO: 42715 - DNA, 15 bp, Homo sapiens
tattacaaatgatta

SEQ ID NO: 42716 - DNA, 15 bp, Homo sapiens
gtattacaaatgatt

SEQ ID NO: 42717 - DNA, 15 bp, Homo sapiens
agtattacaaatgat

SEQ ID NO: 42718 - DNA, 15 bp, Homo sapiens
aagtattacaaatga

SEQ ID NO: 42719 - DNA, 15 bp, Homo sapiens
taagtattacaaatg

SEQ ID NO: 42720 - DNA, 15 bp, Homo sapiens
gtaagtattacaaat

SEQ ID NO: 42721 - DNA, 15 bp, Homo sapiens
tgtaagtattacaaa

SEQ ID NO: 42722 - DNA, 15 bp, Homo sapiens
atgtaagtattacaa

SEQ ID NO: 42723 - DNA, 15 bp, Homo sapiens
aatgtaagtattaca

SEQ ID NO: 42724 - DNA, 15 bp, Homo sapiens
aaatgtaagtattac

SEQ ID NO: 42725 - DNA, 15 bp, Homo sapiens
aaaatgtaagtatta

SEQ ID NO: 42726 - DNA, 15 bp, Homo sapiens
gaaaatgtaagtatt

SEQ ID NO: 42727 - DNA, 15 bp, Homo sapiens
agaaaatgtaagtat

SEQ ID NO: 42728 - DNA, 15 bp, Homo sapiens
tagaaaatgtaagta

SEQ ID NO: 42729 - DNA, 15 bp, Homo sapiens
ttagaaaatgtaagt

SEQ ID NO: 42730 - DNA, 15 bp, Homo sapiens
tttagaaaatgtaag

SEQ ID NO: 42731 - DNA, 15 bp, Homo sapiens
ttttagaaaatgtaa

SEQ ID NO: 42732 - DNA, 15 bp, Homo sapiens
gttttagaaaatgta

SEQ ID NO: 42733 - DNA, 15 bp, Homo sapiens
tgttttagaaaatgt

SEQ ID NO: 42734 - DNA, 15 bp, Homo sapiens
gtgttttagaaaatg

SEQ ID NO: 42735 - DNA, 15 bp, Homo sapiens
agtgttttagaaaat

SEQ ID NO: 42736 - DNA, 15 bp, Homo sapiens
aagtgttttagaaaa

SEQ ID NO: 42737 - DNA, 15 bp, Homo sapiens
gaagtgttttagaaa

SEQ ID NO: 42738 - DNA, 15 bp, Homo sapiens
tgaagtgttttagaa

SEQ ID NO: 42739 - DNA, 15 bp, Homo sapiens
atgaagtgttttaga

SEQ ID NO: 42740 - DNA, 15 bp, Homo sapiens
aatgaagtgttttag

SEQ ID NO: 42741 - DNA, 15 bp, Homo sapiens
aaatgaagtgtttta

SEQ ID NO: 42742 - DNA, 15 bp, Homo sapiens
aaaatgaagtgtttt

SEQ ID NO: 42743 - DNA, 15 bp, Homo sapiens
aaaaatgaagtgttt

SEQ ID NO: 42744 - DNA, 15 bp, Homo sapiens
gaaaaatgaagtgtt

SEQ ID NO: 42745 - DNA, 15 bp, Homo sapiens
ggaaaaatgaagtgt

SEQ ID NO: 42746 - DNA, 15 bp, Homo sapiens
gggaaaaatgaagtg

SEQ ID NO: 42747 - DNA, 15 bp, Homo sapiens
agggaaaaatgaagt

SEQ ID NO: 42748 - DNA, 15 bp, Homo sapiens
cagggaaaaatgaag

SEQ ID NO: 42749 - DNA, 15 bp, Homo sapiens
ccagggaaaaatgaa

SEQ ID NO: 42750 - DNA, 15 bp, Homo sapiens
accagggaaaaatga

SEQ ID NO: 42751 - DNA, 15 bp, Homo sapiens
aaccagggaaaaatg

SEQ ID NO: 42752 - DNA, 15 bp, Homo sapiens
aaaccagggaaaaat

SEQ ID NO: 42753 - DNA, 15 bp, Homo sapiens
gaaaccagggaaaaa

SEQ ID NO: 42754 - DNA, 15 bp, Homo sapiens
agaaaccagggaaaa

SEQ ID NO: 42755 - DNA, 15 bp, Homo sapiens
aagaaaccagggaaa

SEQ ID NO: 42756 - DNA, 15 bp, Homo sapiens
gaagaaaccagggaa

SEQ ID NO: 42757 - DNA, 15 bp, Homo sapiens
tgaagaaaccaggga

SEQ ID NO: 42758 - DNA, 15 bp, Homo sapiens
ttgaagaaaccaggg

SEQ ID NO: 42759 - DNA, 15 bp, Homo sapiens
gttgaagaaaccagg

SEQ ID NO: 42760 - DNA, 15 bp, Homo sapiens
tgttgaagaaaccag

SEQ ID NO: 42761 - DNA, 15 bp, Homo sapiens
ttgttgaagaaacca

SEQ ID NO: 42762 - DNA, 15 bp, Homo sapiens
tttgttgaagaaacc

SEQ ID NO: 42763 - DNA, 15 bp, Homo sapiens
ctttgttgaagaaac

SEQ ID NO: 42764 - DNA, 15 bp, Homo sapiens
tctttgttgaagaaa

SEQ ID NO: 42765 - DNA, 15 bp, Homo sapiens
ctctttgttgaagaa

SEQ ID NO: 42766 - DNA, 15 bp, Homo sapiens
tctctttgttgaaga

SEQ ID NO: 42767 - DNA, 15 bp, Homo sapiens
atctctttgttgaag

SEQ ID NO: 42768 - DNA, 15 bp, Homo sapiens
catctctttgttgaa

SEQ ID NO: 42769 - DNA, 15 bp, Homo sapiens
gcatctctttgttga

SEQ ID NO: 42770 - DNA, 15 bp, Homo sapiens
tgcatctctttgttg

SEQ ID NO: 42771 - DNA, 15 bp, Homo sapiens
atgcatctctttgtt

SEQ ID NO: 42772 - DNA, 15 bp, Homo sapiens
catgcatctctttgt

SEQ ID NO: 42773 - DNA, 15 bp, Homo sapiens
acatgcatctctttg

SEQ ID NO: 42774 - DNA, 15 bp, Homo sapiens
tacatgcatctcttt

SEQ ID NO: 42775 - DNA, 15 bp, Homo sapiens
ctacatgcatctctt

SEQ ID NO: 42776 - DNA, 15 bp, Homo sapiens
actacatgcatctct

SEQ ID NO: 42777 - DNA, 15 bp, Homo sapiens
tactacatgcatctc

SEQ ID NO: 42778 - DNA, 15 bp, Homo sapiens
gtactacatgcatct

SEQ ID NO: 42779 - DNA, 15 bp, Homo sapiens
tgtactacatgcatc

SEQ ID NO: 42780 - DNA, 15 bp, Homo sapiens
ttgtactacatgcat

SEQ ID NO: 42781 - DNA, 15 bp, Homo sapiens
cttgtactacatgca

SEQ ID NO: 42782 - DNA, 15 bp, Homo sapiens
ccttgtactacatgc

SEQ ID NO: 42783 - DNA, 15 bp, Homo sapiens
tccttgtactacatg

SEQ ID NO: 42784 - DNA, 15 bp, Homo sapiens
atccttgtactacat

SEQ ID NO: 42785 - DNA, 15 bp, Homo sapiens
tatccttgtactaca

SEQ ID NO: 42786 - DNA, 15 bp, Homo sapiens
ctatccttgtactac

SEQ ID NO: 42787 - DNA, 15 bp, Homo sapiens
gctatccttgtacta

SEQ ID NO: 42788 - DNA, 15 bp, Homo sapiens
agctatccttgtact

SEQ ID NO: 42789 - DNA, 15 bp, Homo sapiens
aagctatccttgtac

SEQ ID NO: 42790 - DNA, 15 bp, Homo sapiens
aaagctatccttgta

SEQ ID NO: 42791 - DNA, 15 bp, Homo sapiens
taaagctatccttgt

SEQ ID NO: 42792 - DNA, 15 bp, Homo sapiens
gtaaagctatccttg

SEQ ID NO: 42793 - DNA, 15 bp, Homo sapiens
ggtaaagctatcctt

SEQ ID NO: 42794 - DNA, 15 bp, Homo sapiens
aggtaaagctatcct

SEQ ID NO: 42795 - DNA, 15 bp, Homo sapiens
caggtaaagctatcc

SEQ ID NO: 42796 - DNA, 15 bp, Homo sapiens
acaggtaaagctatc

SEQ ID NO: 42797 - DNA, 15 bp, Homo sapiens
cacaggtaaagctat

SEQ ID NO: 42798 - DNA, 15 bp, Homo sapiens
acacaggtaaagcta

SEQ ID NO: 42799 - DNA, 15 bp, Homo sapiens
aacacaggtaaagct

SEQ ID NO: 42800 - DNA, 15 bp, Homo sapiens
taacacaggtaaagc

SEQ ID NO: 42801 - DNA, 15 bp, Homo sapiens
ctaacacaggtaaag

SEQ ID NO: 42802 - DNA, 15 bp, Homo sapiens
tctaacacaggtaaa

SEQ ID NO: 42803 - DNA, 15 bp, Homo sapiens
ttctaacacaggtaa

SEQ ID NO: 42804 - DNA, 15 bp, Homo sapiens
cttctaacacaggta

SEQ ID NO: 42805 - DNA, 15 bp, Homo sapiens
tcttctaacacaggt

SEQ ID NO: 42806 - DNA, 15 bp, Homo sapiens
atcttctaacacagg

SEQ ID NO: 42807 - DNA, 15 bp, Homo sapiens
aatcttctaacacag

SEQ ID NO: 42808 - DNA, 15 bp, Homo sapiens
caatcttctaacaca

SEQ ID NO: 42809 - DNA, 15 bp, Homo sapiens
acaatcttctaacac

SEQ ID NO: 42810 - DNA, 15 bp, Homo sapiens
aacaatcttctaaca

SEQ ID NO: 42811 - DNA, 15 bp, Homo sapiens
aaacaatcttctaac

SEQ ID NO: 42812 - DNA, 15 bp, Homo sapiens
gaaacaatcttctaa

SEQ ID NO: 42813 - DNA, 15 bp, Homo sapiens
tgaaacaatcttcta

SEQ ID NO: 42814 - DNA, 15 bp, Homo sapiens
gtgaaacaatcttct

SEQ ID NO: 42815 - DNA, 15 bp, Homo sapiens
tgtgaaacaatcttc

SEQ ID NO: 42816 - DNA, 15 bp, Homo sapiens
gtgtgaaacaatctt

SEQ ID NO: 42817 - DNA, 15 bp, Homo sapiens
tgtgtgaaacaatct

SEQ ID NO: 42818 - DNA, 15 bp, Homo sapiens
atgtgtgaaacaatc

SEQ ID NO: 42819 - DNA, 15 bp, Homo sapiens
aatgtgtgaaacaat

SEQ ID NO: 42820 - DNA, 15 bp, Homo sapiens
aaatgtgtgaaacaa

SEQ ID NO: 42821 - DNA, 15 bp, Homo sapiens
taaatgtgtgaaaca

SEQ ID NO: 42822 - DNA, 15 bp, Homo sapiens
gtaaatgtgtgaaac

SEQ ID NO: 42823 - DNA, 15 bp, Homo sapiens
tgtaaatgtgtgaaa

SEQ ID NO: 42824 - DNA, 15 bp, Homo sapiens
atgtaaatgtgtgaa

SEQ ID NO: 42825 - DNA, 15 bp, Homo sapiens
gatgtaaatgtgtga

SEQ ID NO: 42826 - DNA, 15 bp, Homo sapiens
tgatgtaaatgtgtg

SEQ ID NO: 42827 - DNA, 15 bp, Homo sapiens
ttgatgtaaatgtgt

SEQ ID NO: 42828 - DNA, 15 bp, Homo sapiens
gttgatgtaaatgtg

SEQ ID NO: 42829 - DNA, 15 bp, Homo sapiens
agttgatgtaaatgt

SEQ ID NO: 42830 - DNA, 15 bp, Homo sapiens
cagttgatgtaaatg

SEQ ID NO: 42831 - DNA, 15 bp, Homo sapiens
gcagttgatgtaaat

SEQ ID NO: 42832 - DNA, 15 bp, Homo sapiens
tgcagttgatgtaaa

SEQ ID NO: 42833 - DNA, 15 bp, Homo sapiens
atgcagttgatgtaa

SEQ ID NO: 42834 - DNA, 15 bp, Homo sapiens
tatgcagttgatgta

SEQ ID NO: 42835 - DNA, 15 bp, Homo sapiens
ctatgcagttgatgt

SEQ ID NO: 42836 - DNA, 15 bp, Homo sapiens
actatgcagttgatg

SEQ ID NO: 42837 - DNA, 15 bp, Homo sapiens
gactatgcagttgat

SEQ ID NO: 42838 - DNA, 15 bp, Homo sapiens
ggactatgcagttga

SEQ ID NO: 42839 - DNA, 15 bp, Homo sapiens
aggactatgcagttg

SEQ ID NO: 42840 - DNA, 15 bp, Homo sapiens
caggactatgcagtt

SEQ ID NO: 42841 - DNA, 15 bp, Homo sapiens
acaggactatgcagt

SEQ ID NO: 42842 - DNA, 15 bp, Homo sapiens
aacaggactatgcag

SEQ ID NO: 42843 - DNA, 15 bp, Homo sapiens
aaacaggactatgca

SEQ ID NO: 42844 - DNA, 15 bp, Homo sapiens
aaaacaggactatgc

SEQ ID NO: 42845 - DNA, 15 bp, Homo sapiens
aaaaacaggactatg

SEQ ID NO: 42846 - DNA, 15 bp, Homo sapiens
caaaaacaggactat

SEQ ID NO: 42847 - DNA, 15 bp, Homo sapiens
acaaaaacaggacta

SEQ ID NO: 42848 - DNA, 15 bp, Homo sapiens
aacaaaaacaggact

SEQ ID NO: 42849 - DNA, 15 bp, Homo sapiens
caacaaaaacaggac

SEQ ID NO: 42850 - DNA, 15 bp, Homo sapiens
ccaacaaaaacagga

SEQ ID NO: 42851 - DNA, 15 bp, Homo sapiens
cccaacaaaaacagg

SEQ ID NO: 42852 - DNA, 15 bp, Homo sapiens
gcccaacaaaaacag

SEQ ID NO: 42853 - DNA, 15 bp, Homo sapiens
ggcccaacaaaaaca

SEQ ID NO: 42854 - DNA, 15 bp, Homo sapiens
gggcccaacaaaaac

SEQ ID NO: 42855 - DNA, 15 bp, Homo sapiens
agggcccaacaaaaa

SEQ ID NO: 42856 - DNA, 15 bp, Homo sapiens
tagggcccaacaaaa

SEQ ID NO: 42857 - DNA, 15 bp, Homo sapiens
ttagggcccaacaaa

SEQ ID NO: 42858 - DNA, 15 bp, Homo sapiens
attagggcccaacaa

SEQ ID NO: 42859 - DNA, 15 bp, Homo sapiens
cattagggcccaaca

SEQ ID NO: 42860 - DNA, 15 bp, Homo sapiens
gcattagggcccaac

SEQ ID NO: 42861 - DNA, 15 bp, Homo sapiens
ggcattagggcccaa

SEQ ID NO: 42862 - DNA, 15 bp, Homo sapiens
tggcattagggccca

SEQ ID NO: 42863 - DNA, 15 bp, Homo sapiens
ctggcattagggccc

SEQ ID NO: 42864 - DNA, 15 bp, Homo sapiens
gctggcattagggcc

SEQ ID NO: 42865 - DNA, 15 bp, Homo sapiens
tgctggcattagggc

SEQ ID NO: 42866 - DNA, 15 bp, Homo sapiens
atgctggcattaggg

SEQ ID NO: 42867 - DNA, 15 bp, Homo sapiens
gatgctggcattagg

SEQ ID NO: 42868 - DNA, 15 bp, Homo sapiens
tgatgctggcattag

SEQ ID NO: 42869 - DNA, 15 bp, Homo sapiens
gtgatgctggcatta

SEQ ID NO: 42870 - DNA, 15 bp, Homo sapiens
agtgatgctggcatt

SEQ ID NO: 42871 - DNA, 15 bp, Homo sapiens
aagtgatgctggcat

SEQ ID NO: 42872 - DNA, 15 bp, Homo sapiens
aaagtgatgctggca

SEQ ID NO: 42873 - DNA, 15 bp, Homo sapiens
aaaagtgatgctggc

SEQ ID NO: 42874 - DNA, 15 bp, Homo sapiens
aaaaagtgatgctgg

SEQ ID NO: 42875 - DNA, 15 bp, Homo sapiens
caaaaagtgatgctg

SEQ ID NO: 42876 - DNA, 15 bp, Homo sapiens
gcaaaaagtgatgct

SEQ ID NO: 42877 - DNA, 15 bp, Homo sapiens
agcaaaaagtgatgc

SEQ ID NO: 42878 - DNA, 15 bp, Homo sapiens
tagcaaaaagtgatg

SEQ ID NO: 42879 - DNA, 15 bp, Homo sapiens
gtagcaaaaagtgat

SEQ ID NO: 42880 - DNA, 15 bp, Homo sapiens
agtagcaaaaagtga

SEQ ID NO: 42881 - DNA, 15 bp, Homo sapiens
cagtagcaaaaagtg

SEQ ID NO: 42882 - DNA, 15 bp, Homo sapiens
gcagtagcaaaaagt

SEQ ID NO: 42883 - DNA, 15 bp, Homo sapiens
agcagtagcaaaaag

SEQ ID NO: 42884 - DNA, 15 bp, Homo sapiens
cagcagtagcaaaaa

SEQ ID NO: 42885 - DNA, 15 bp, Homo sapiens
acagcagtagcaaaa

SEQ ID NO: 42886 - DNA, 15 bp, Homo sapiens
aacagcagtagcaaa

SEQ ID NO: 42887 - DNA, 15 bp, Homo sapiens
aaacagcagtagcaa

SEQ ID NO: 42888 - DNA, 15 bp, Homo sapiens
gaaacagcagtagca

SEQ ID NO: 42889 - DNA, 15 bp, Homo sapiens
agaaacagcagtagc

SEQ ID NO: 42890 - DNA, 15 bp, Homo sapiens
cagaaacagcagtag

SEQ ID NO: 42891 - DNA, 15 bp, Homo sapiens
gcagaaacagcagta

SEQ ID NO: 42892 - DNA, 15 bp, Homo sapiens
ggcagaaacagcagt

SEQ ID NO: 42893 - DNA, 15 bp, Homo sapiens
aggcagaaacagcag

SEQ ID NO: 42894 - DNA, 15 bp, Homo sapiens
aaggcagaaacagca

SEQ ID NO: 42895 - DNA, 15 bp, Homo sapiens
taaggcagaaacagc

SEQ ID NO: 42896 - DNA, 15 bp, Homo sapiens
ttaaggcagaaacag

SEQ ID NO: 42897 - DNA, 15 bp, Homo sapiens
tttaaggcagaaaca

SEQ ID NO: 42898 - DNA, 15 bp, Homo sapiens
ctttaaggcagaaac

SEQ ID NO: 42899 - DNA, 15 bp, Homo sapiens
cctttaaggcagaaa

SEQ ID NO: 42900 - DNA, 15 bp, Homo sapiens
gcctttaaggcagaa

SEQ ID NO: 42901 - DNA, 15 bp, Homo sapiens
tgcctttaaggcaga

SEQ ID NO: 42902 - DNA, 15 bp, Homo sapiens
ttgcctttaaggcag

SEQ ID NO: 42903 - DNA, 15 bp, Homo sapiens
attgcctttaaggca

SEQ ID NO: 42904 - DNA, 15 bp, Homo sapiens
tattgcctttaaggc

SEQ ID NO: 42905 - DNA, 15 bp, Homo sapiens
atattgcctttaagg

SEQ ID NO: 42906 - DNA, 15 bp, Homo sapiens
catattgcctttaag

SEQ ID NO: 42907 - DNA, 15 bp, Homo sapiens
gcatattgcctttaa

SEQ ID NO: 42908 - DNA, 15 bp, Homo sapiens
ggcatattgccttta

SEQ ID NO: 42909 - DNA, 15 bp, Homo sapiens
aggcatattgccttt

SEQ ID NO: 42910 - DNA, 15 bp, Homo sapiens
gaggcatattgcctt

SEQ ID NO: 42911 - DNA, 15 bp, Homo sapiens
agaggcatattgcct

SEQ ID NO: 42912 - DNA, 15 bp, Homo sapiens
cagaggcatattgcc

SEQ ID NO: 42913 - DNA, 15 bp, Homo sapiens
acagaggcatattgc

SEQ ID NO: 42914 - DNA, 15 bp, Homo sapiens
gacagaggcatattg

SEQ ID NO: 42915 - DNA, 15 bp, Homo sapiens
agacagaggcatatt

SEQ ID NO: 42916 - DNA, 15 bp, Homo sapiens
tagacagaggcatat

SEQ ID NO: 42917 - DNA, 15 bp, Homo sapiens
ctagacagaggcata

SEQ ID NO: 42918 - DNA, 15 bp, Homo sapiens
actagacagaggcat

SEQ ID NO: 42919 - DNA, 15 bp, Homo sapiens
aactagacagaggca

SEQ ID NO: 42920 - DNA, 15 bp, Homo sapiens
aaactagacagaggc

SEQ ID NO: 42921 - DNA, 15 bp, Homo sapiens
caaactagacagagg

SEQ ID NO: 42922 - DNA, 15 bp, Homo sapiens
gcaaactagacagag

SEQ ID NO: 42923 - DNA, 15 bp, Homo sapiens
agcaaactagacaga

SEQ ID NO: 42924 - DNA, 15 bp, Homo sapiens
cagcaaactagacag

SEQ ID NO: 42925 - DNA, 15 bp, Homo sapiens
tcagcaaactagaca

SEQ ID NO: 42926 - DNA, 15 bp, Homo sapiens
atcagcaaactagac

SEQ ID NO: 42927 - DNA, 15 bp, Homo sapiens
aatcagcaaactaga

SEQ ID NO: 42928 - DNA, 15 bp, Homo sapiens
gaatcagcaaactag

SEQ ID NO: 42929 - DNA, 15 bp, Homo sapiens
agaatcagcaaacta

SEQ ID NO: 42930 - DNA, 15 bp, Homo sapiens
cagaatcagcaaact

SEQ ID NO: 42931 - DNA, 15 bp, Homo sapiens
tcagaatcagcaaac

SEQ ID NO: 42932 - DNA, 15 bp, Homo sapiens
atcagaatcagcaaa

SEQ ID NO: 42933 - DNA, 15 bp, Homo sapiens
tatcagaatcagcaa

SEQ ID NO: 42934 - DNA, 15 bp, Homo sapiens
gtatcagaatcagca

SEQ ID NO: 42935 - DNA, 15 bp, Homo sapiens
agtatcagaatcagc

SEQ ID NO: 42936 - DNA, 15 bp, Homo sapiens
gagtatcagaatcag

SEQ ID NO: 42937 - DNA, 15 bp, Homo sapiens
agagtatcagaatca

SEQ ID NO: 42938 - DNA, 15 bp, Homo sapiens
aagagtatcagaatc

SEQ ID NO: 42939 - DNA, 15 bp, Homo sapiens
aaagagtatcagaat

SEQ ID NO: 42940 - DNA, 15 bp, Homo sapiens
gaaagagtatcagaa

SEQ ID NO: 42941 - DNA, 15 bp, Homo sapiens
ggaaagagtatcaga

SEQ ID NO: 42942 - DNA, 15 bp, Homo sapiens
gggaaagagtatcag

SEQ ID NO: 42943 - DNA, 15 bp, Homo sapiens
ggggaaagagtatca

SEQ ID NO: 42944 - DNA, 15 bp, Homo sapiens
aggggaaagagtatc

SEQ ID NO: 42945 - DNA, 15 bp, Homo sapiens
caggggaaagagtat

SEQ ID NO: 42946 - DNA, 15 bp, Homo sapiens
ccaggggaaagagta

SEQ ID NO: 42947 - DNA, 15 bp, Homo sapiens
tccaggggaaagagt

SEQ ID NO: 42948 - DNA, 15 bp, Homo sapiens
ttccaggggaaagag

SEQ ID NO: 42949 - DNA, 15 bp, Homo sapiens
tttccaggggaaaga

SEQ ID NO: 42950 - DNA, 15 bp, Homo sapiens
ctttccaggggaaag

SEQ ID NO: 42951 - DNA, 15 bp, Homo sapiens
actttccaggggaaa

SEQ ID NO: 42952 - DNA, 15 bp, Homo sapiens
tactttccaggggaa

SEQ ID NO: 42953 - DNA, 15 bp, Homo sapiens
ctactttccagggga

SEQ ID NO: 42954 - DNA, 15 bp, Homo sapiens
cctactttccagggg

SEQ ID NO: 42955 - DNA, 15 bp, Homo sapiens
acctactttccaggg

SEQ ID NO: 42956 - DNA, 15 bp, Homo sapiens
tacctactttccagg

SEQ ID NO: 42957 - DNA, 15 bp, Homo sapiens
ttacctactttccag

SEQ ID NO: 42958 - DNA, 15 bp, Homo sapiens
attacctactttcca

SEQ ID NO: 42959 - DNA, 15 bp, Homo sapiens
gattacctactttcc

SEQ ID NO: 42960 - DNA, 15 bp, Homo sapiens
tgattacctactttc

SEQ ID NO: 42961 - DNA, 15 bp, Homo sapiens
ttgattacctacttt

SEQ ID NO: 42962 - DNA, 15 bp, Homo sapiens
cttgattacctactt

SEQ ID NO: 42963 - DNA, 15 bp, Homo sapiens
acttgattacctact

SEQ ID NO: 42964 - DNA, 15 bp, Homo sapiens
aacttgattacctac

SEQ ID NO: 42965 - DNA, 15 bp, Homo sapiens
aaacttgattaccta

SEQ ID NO: 42966 - DNA, 15 bp, Homo sapiens
caaacttgattacct

SEQ ID NO: 42967 - DNA, 15 bp, Homo sapiens
acaaacttgattacc

SEQ ID NO: 42968 - DNA, 15 bp, Homo sapiens
cacaaacttgattac

SEQ ID NO: 42969 - DNA, 15 bp, Homo sapiens
tcacaaacttgatta

SEQ ID NO: 42970 - DNA, 15 bp, Homo sapiens
ctcacaaacttgatt

SEQ ID NO: 42971 - DNA, 15 bp, Homo sapiens
cctcacaaacttgat

SEQ ID NO: 42972 - DNA, 15 bp, Homo sapiens
tcctcacaaacttga

SEQ ID NO: 42973 - DNA, 15 bp, Homo sapiens
ctcctcacaaacttg

SEQ ID NO: 42974 - DNA, 15 bp, Homo sapiens
gctcctcacaaactt

SEQ ID NO: 42975 - DNA, 15 bp, Homo sapiens
agctcctcacaaact

SEQ ID NO: 42976 - DNA, 15 bp, Homo sapiens
cagctcctcacaaac

SEQ ID NO: 42977 - DNA, 15 bp, Homo sapiens
acagctcctcacaaa

SEQ ID NO: 42978 - DNA, 15 bp, Homo sapiens
cacagctcctcacaa

SEQ ID NO: 42979 - DNA, 15 bp, Homo sapiens
acacagctcctcaca

SEQ ID NO: 42980 - DNA, 15 bp, Homo sapiens
cacacagctcctcac

SEQ ID NO: 42981 - DNA, 15 bp, Homo sapiens
acacacagctcctca

SEQ ID NO: 42982 - DNA, 15 bp, Homo sapiens
aacacacagctcctc

SEQ ID NO: 42983 - DNA, 15 bp, Homo sapiens
aaacacacagctcct

SEQ ID NO: 42984 - DNA, 15 bp, Homo sapiens
taaacacacagctcc

SEQ ID NO: 42985 - DNA, 15 bp, Homo sapiens
ttaaacacacagctc

SEQ ID NO: 42986 - DNA, 15 bp, Homo sapiens
cttaaacacacagct

SEQ ID NO: 42987 - DNA, 15 bp, Homo sapiens
ccttaaacacacagc

SEQ ID NO: 42988 - DNA, 15 bp, Homo sapiens
tccttaaacacacag

SEQ ID NO: 42989 - DNA, 15 bp, Homo sapiens
ctccttaaacacaca

SEQ ID NO: 42990 - DNA, 15 bp, Homo sapiens
actccttaaacacac

SEQ ID NO: 42991 - DNA, 15 bp, Homo sapiens
gactccttaaacaca

SEQ ID NO: 42992 - DNA, 15 bp, Homo sapiens
ggactccttaaacac

SEQ ID NO: 42993 - DNA, 15 bp, Homo sapiens
tggactccttaaaca

SEQ ID NO: 42994 - DNA, 15 bp, Homo sapiens
atggactccttaaac

SEQ ID NO: 42995 - DNA, 15 bp, Homo sapiens
tatggactccttaaa

SEQ ID NO: 42996 - DNA, 15 bp, Homo sapiens
ttatggactccttaa

SEQ ID NO: 42997 - DNA, 15 bp, Homo sapiens
tttatggactcctta

SEQ ID NO: 42998 - DNA, 15 bp, Homo sapiens
atttatggactcctt

SEQ ID NO: 42999 - DNA, 15 bp, Homo sapiens
gatttatggactcct

SEQ ID NO: 43000 - DNA, 15 bp, Homo sapiens
ggatttatggactcc

SEQ ID NO: 43001 - DNA, 15 bp, Homo sapiens
aggatttatggactc

SEQ ID NO: 43002 - DNA, 15 bp, Homo sapiens
aaggatttatggact

SEQ ID NO: 43003 - DNA, 15 bp, Homo sapiens
caaggatttatggac

SEQ ID NO: 43004 - DNA, 15 bp, Homo sapiens
acaaggatttatgga

SEQ ID NO: 43005 - DNA, 15 bp, Homo sapiens
cacaaggatttatgg

SEQ ID NO: 43006 - DNA, 15 bp, Homo sapiens
ccacaaggatttatg

SEQ ID NO: 43007 - DNA, 15 bp, Homo sapiens
cccacaaggatttat

SEQ ID NO: 43008 - DNA, 15 bp, Homo sapiens
ccccacaaggattta

SEQ ID NO: 43009 - DNA, 15 bp, Homo sapiens
tccccacaaggattt

SEQ ID NO: 43010 - DNA, 15 bp, Homo sapiens
ctccccacaaggatt

SEQ ID NO: 43011 - DNA, 15 bp, Homo sapiens
gctccccacaaggat

SEQ ID NO: 43012 - DNA, 15 bp, Homo sapiens
ggctccccacaagga

SEQ ID NO: 43013 - DNA, 15 bp, Homo sapiens
gggctccccacaagg

SEQ ID NO: 43014 - DNA, 15 bp, Homo sapiens
agggctccccacaag

SEQ ID NO: 43015 - DNA, 15 bp, Homo sapiens
tagggctccccacaa

SEQ ID NO: 43016 - DNA, 15 bp, Homo sapiens
ctagggctccccaca

SEQ ID NO: 43017 - DNA, 15 bp, Homo sapiens
cctagggctccccac

SEQ ID NO: 43018 - DNA, 15 bp, Homo sapiens
acctagggctcccca

SEQ ID NO: 43019 - DNA, 15 bp, Homo sapiens
cacctagggctcccc

SEQ ID NO: 43020 - DNA, 15 bp, Homo sapiens
acacctagggctccc

SEQ ID NO: 43021 - DNA, 15 bp, Homo sapiens
tacacctagggctcc

SEQ ID NO: 43022 - DNA, 15 bp, Homo sapiens
atacacctagggctc

SEQ ID NO: 43023 - DNA, 15 bp, Homo sapiens
tatacacctagggct

SEQ ID NO: 43024 - DNA, 15 bp, Homo sapiens
ctatacacctagggc

SEQ ID NO: 43025 - DNA, 15 bp, Homo sapiens
tctatacacctaggg

SEQ ID NO: 43026 - DNA, 15 bp, Homo sapiens
ctctatacacctagg

SEQ ID NO: 43027 - DNA, 15 bp, Homo sapiens
gctctatacacctag

SEQ ID NO: 43028 - DNA, 15 bp, Homo sapiens
tgctctatacaccta

SEQ ID NO: 43029 - DNA, 15 bp, Homo sapiens
atgctctatacacct

SEQ ID NO: 43030 - DNA, 15 bp, Homo sapiens
tatgctctatacacc

SEQ ID NO: 43031 - DNA, 15 bp, Homo sapiens
ctatgctctatacac

SEQ ID NO: 43032 - DNA, 15 bp, Homo sapiens
gctatgctctataca

SEQ ID NO: 43033 - DNA, 15 bp, Homo sapiens
agctatgctctatac

SEQ ID NO: 43034 - DNA, 15 bp, Homo sapiens
cagctatgctctata

SEQ ID NO: 43035 - DNA, 15 bp, Homo sapiens
acagctatgctctat

SEQ ID NO: 43036 - DNA, 15 bp, Homo sapiens
tacagctatgctcta

SEQ ID NO: 43037 - DNA, 15 bp, Homo sapiens
ctacagctatgctct

SEQ ID NO: 43038 - DNA, 15 bp, Homo sapiens
cctacagctatgctc

SEQ ID NO: 43039 - DNA, 15 bp, Homo sapiens
ccctacagctatgct

SEQ ID NO: 43040 - DNA, 15 bp, Homo sapiens
gccctacagctatgc

SEQ ID NO: 43041 - DNA, 15 bp, Homo sapiens
tgccctacagctatg

SEQ ID NO: 43042 - DNA, 15 bp, Homo sapiens
ctgccctacagctat

SEQ ID NO: 43043 - DNA, 15 bp, Homo sapiens
tctgccctacagcta

SEQ ID NO: 43044 - DNA, 15 bp, Homo sapiens
ctctgccctacagct

SEQ ID NO: 43045 - DNA, 15 bp, Homo sapiens
cctctgccctacagc

SEQ ID NO: 43046 - DNA, 15 bp, Homo sapiens
gcctctgccctacag

SEQ ID NO: 43047 - DNA, 15 bp, Homo sapiens
ggcctctgccctaca

SEQ ID NO: 43048 - DNA, 15 bp, Homo sapiens
aggcctctgccctac

SEQ ID NO: 43049 - DNA, 15 bp, Homo sapiens
aaggcctctgcccta

SEQ ID NO: 43050 - DNA, 15 bp, Homo sapiens
aaaggcctctgccct

SEQ ID NO: 43051 - DNA, 15 bp, Homo sapiens
caaaggcctctgccc

SEQ ID NO: 43052 - DNA, 15 bp, Homo sapiens
tcaaaggcctctgcc

SEQ ID NO: 43053 - DNA, 15 bp, Homo sapiens
gtcaaaggcctctgc

SEQ ID NO: 43054 - DNA, 15 bp, Homo sapiens
tgtcaaaggcctctg

SEQ ID NO: 43055 - DNA, 15 bp, Homo sapiens
gtgtcaaaggcctct

SEQ ID NO: 43056 - DNA, 15 bp, Homo sapiens
agtgtcaaaggcctc

SEQ ID NO: 43057 - DNA, 15 bp, Homo sapiens
aagtgtcaaaggcct

SEQ ID NO: 43058 - DNA, 15 bp, Homo sapiens
taagtgtcaaaggcc

SEQ ID NO: 43059 - DNA, 15 bp, Homo sapiens
ataagtgtcaaaggc

SEQ ID NO: 43060 - DNA, 15 bp, Homo sapiens
aataagtgtcaaagg

SEQ ID NO: 43061 - DNA, 15 bp, Homo sapiens
gaataagtgtcaaag

SEQ ID NO: 43062 - DNA, 15 bp, Homo sapiens
agaataagtgtcaaa

SEQ ID NO: 43063 - DNA, 15 bp, Homo sapiens
cagaataagtgtcaa

SEQ ID NO: 43064 - DNA, 15 bp, Homo sapiens
ccagaataagtgtca

SEQ ID NO: 43065 - DNA, 15 bp, Homo sapiens
tccagaataagtgtc

SEQ ID NO: 43066 - DNA, 15 bp, Homo sapiens
atccagaataagtgt

SEQ ID NO: 43067 - DNA, 15 bp, Homo sapiens
tatccagaataagtg

SEQ ID NO: 43068 - DNA, 15 bp, Homo sapiens
atatccagaataagt

SEQ ID NO: 43069 - DNA, 15 bp, Homo sapiens
catatccagaataag

SEQ ID NO: 43070 - DNA, 15 bp, Homo sapiens
gcatatccagaataa

SEQ ID NO: 43071 - DNA, 15 bp, Homo sapiens
tgcatatccagaata

SEQ ID NO: 43072 - DNA, 15 bp, Homo sapiens
ctgcatatccagaat

SEQ ID NO: 43073 - DNA, 15 bp, Homo sapiens
actgcatatccagaa

SEQ ID NO: 43074 - DNA, 15 bp, Homo sapiens
cactgcatatccaga

SEQ ID NO: 43075 - DNA, 15 bp, Homo sapiens
ccactgcatatccag

SEQ ID NO: 43076 - DNA, 15 bp, Homo sapiens
gccactgcatatcca

SEQ ID NO: 43077 - DNA, 15 bp, Homo sapiens
ggccactgcatatcc

SEQ ID NO: 43078 - DNA, 15 bp, Homo sapiens
aggccactgcatatc

SEQ ID NO: 43079 - DNA, 15 bp, Homo sapiens
aaggccactgcatat

SEQ ID NO: 43080 - DNA, 15 bp, Homo sapiens
aaaggccactgcata

SEQ ID NO: 43081 - DNA, 15 bp, Homo sapiens
caaaggccactgcat

SEQ ID NO: 43082 - DNA, 15 bp, Homo sapiens
gcaaaggccactgca

SEQ ID NO: 43083 - DNA, 15 bp, Homo sapiens
ggcaaaggccactgc

SEQ ID NO: 43084 - DNA, 15 bp, Homo sapiens
aggcaaaggccactg

SEQ ID NO: 43085 - DNA, 15 bp, Homo sapiens
taggcaaaggccact

SEQ ID NO: 43086 - DNA, 15 bp, Homo sapiens
ataggcaaaggccac

SEQ ID NO: 43087 - DNA, 15 bp, Homo sapiens
cataggcaaaggcca

SEQ ID NO: 43088 - DNA, 15 bp, Homo sapiens
ccataggcaaaggcc

SEQ ID NO: 43089 - DNA, 15 bp, Homo sapiens
cccataggcaaaggc

SEQ ID NO: 43090 - DNA, 15 bp, Homo sapiens
ccccataggcaaagg

SEQ ID NO: 43091 - DNA, 15 bp, Homo sapiens
accccataggcaaag

SEQ ID NO: 43092 - DNA, 15 bp, Homo sapiens
aaccccataggcaaa

SEQ ID NO: 43093 - DNA, 15 bp, Homo sapiens
gaaccccataggcaa

SEQ ID NO: 43094 - DNA, 15 bp, Homo sapiens
tgaaccccataggca

SEQ ID NO: 43095 - DNA, 15 bp, Homo sapiens
atgaaccccataggc

SEQ ID NO: 43096 - DNA, 15 bp, Homo sapiens
catgaaccccatagg

SEQ ID NO: 43097 - DNA, 15 bp, Homo sapiens
ccatgaaccccatag

SEQ ID NO: 43098 - DNA, 15 bp, Homo sapiens
cccatgaaccccata

SEQ ID NO: 43099 - DNA, 15 bp, Homo sapiens
acccatgaaccccat

SEQ ID NO: 43100 - DNA, 15 bp, Homo sapiens
gacccatgaacccca

SEQ ID NO: 43101 - DNA, 15 bp, Homo sapiens
tgacccatgaacccc

SEQ ID NO: 43102 - DNA, 15 bp, Homo sapiens
ctgacccatgaaccc

SEQ ID NO: 43103 - DNA, 15 bp, Homo sapiens
tctgacccatgaacc

SEQ ID NO: 43104 - DNA, 15 bp, Homo sapiens
ctctgacccatgaac

SEQ ID NO: 43105 - DNA, 15 bp, Homo sapiens
gctctgacccatgaa

SEQ ID NO: 43106 - DNA, 15 bp, Homo sapiens
cgctctgacccatga

SEQ ID NO: 43107 - DNA, 15 bp, Homo sapiens
gcgctctgacccatg

SEQ ID NO: 43108 - DNA, 15 bp, Homo sapiens
agcgctctgacccat

SEQ ID NO: 43109 - DNA, 15 bp, Homo sapiens
cagcgctctgaccca

SEQ ID NO: 43110 - DNA, 15 bp, Homo sapiens
acagcgctctgaccc

SEQ ID NO: 43111 - DNA, 15 bp, Homo sapiens
aacagcgctctgacc

SEQ ID NO: 43112 - DNA, 15 bp, Homo sapiens
caacagcgctctgac

SEQ ID NO: 43113 - DNA, 15 bp, Homo sapiens
acaacagcgctctga

SEQ ID NO: 43114 - DNA, 15 bp, Homo sapiens
cacaacagcgctctg

SEQ ID NO: 43115 - DNA, 15 bp, Homo sapiens
tcacaacagcgctct

SEQ ID NO: 43116 - DNA, 15 bp, Homo sapiens
gtcacaacagcgctc

SEQ ID NO: 43117 - DNA, 15 bp, Homo sapiens
ggtcacaacagcgct

SEQ ID NO: 43118 - DNA, 15 bp, Homo sapiens
aggtcacaacagcgc

SEQ ID NO: 43119 - DNA, 15 bp, Homo sapiens
aaggtcacaacagcg

SEQ ID NO: 43120 - DNA, 15 bp, Homo sapiens
aaaggtcacaacagc

SEQ ID NO: 43121 - DNA, 15 bp, Homo sapiens
caaaggtcacaacag

SEQ ID NO: 43122 - DNA, 15 bp, Homo sapiens
tcaaaggtcacaaca

SEQ ID NO: 43123 - DNA, 15 bp, Homo sapiens
ttcaaaggtcacaac

SEQ ID NO: 43124 - DNA, 15 bp, Homo sapiens
attcaaaggtcacaa

SEQ ID NO: 43125 - DNA, 15 bp, Homo sapiens
tattcaaaggtcaca

SEQ ID NO: 43126 - DNA, 15 bp, Homo sapiens
ttattcaaaggtcac

SEQ ID NO: 43127 - DNA, 15 bp, Homo sapiens
tttattcaaaggtca

SEQ ID NO: 43128 - DNA, 15 bp, Homo sapiens
atttattcaaaggtc

SEQ ID NO: 43129 - DNA, 15 bp, Homo sapiens
catttattcaaaggt

SEQ ID NO: 43130 - DNA, 15 bp, Homo sapiens
ccatttattcaaagg

SEQ ID NO: 43131 - DNA, 15 bp, Homo sapiens
cccatttattcaaag

SEQ ID NO: 43132 - DNA, 15 bp, Homo sapiens
acccatttattcaaa

SEQ ID NO: 43133 - DNA, 15 bp, Homo sapiens
aacccatttattcaa

SEQ ID NO: 43134 - DNA, 15 bp, Homo sapiens
caacccatttattca

SEQ ID NO: 43135 - DNA, 15 bp, Homo sapiens
acaacccatttattc

SEQ ID NO: 43136 - DNA, 15 bp, Homo sapiens
aacaacccatttatt

SEQ ID NO: 43137 - DNA, 15 bp, Homo sapiens
taacaacccatttat

SEQ ID NO: 43138 - DNA, 15 bp, Homo sapiens
ataacaacccattta

SEQ ID NO: 43139 - DNA, 15 bp, Homo sapiens
cataacaacccattt

SEQ ID NO: 43140 - DNA, 15 bp, Homo sapiens
tcataacaacccatt

SEQ ID NO: 43141 - DNA, 15 bp, Homo sapiens
atcataacaacccat

SEQ ID NO: 43142 - DNA, 15 bp, Homo sapiens
tatcataacaaccca

SEQ ID NO: 43143 - DNA, 15 bp, Homo sapiens
ttatcataacaaccc

SEQ ID NO: 43144 - DNA, 15 bp, Homo sapiens
attatcataacaacc

SEQ ID NO: 43145 - DNA, 15 bp, Homo sapiens
aattatcataacaac

SEQ ID NO: 43146 - DNA, 15 bp, Homo sapiens
caattatcataacaa

SEQ ID NO: 43147 - DNA, 15 bp, Homo sapiens
acaattatcataaca

SEQ ID NO: 43148 - DNA, 15 bp, Homo sapiens
aacaattatcataac

SEQ ID NO: 43149 - DNA, 15 bp, Homo sapiens
aaacaattatcataa

SEQ ID NO: 43150 - DNA, 15 bp, Homo sapiens
aaaacaattatcata

SEQ ID NO: 43151 - DNA, 15 bp, Homo sapiens
taaaacaattatcat

SEQ ID NO: 43152 - DNA, 15 bp, Homo sapiens
ttaaaacaattatca

SEQ ID NO: 43153 - DNA, 15 bp, Homo sapiens
cttaaaacaattatc

SEQ ID NO: 43154 - DNA, 15 bp, Homo sapiens
ccttaaaacaattat

SEQ ID NO: 43155 - DNA, 15 bp, Homo sapiens
cccttaaaacaatta

SEQ ID NO: 43156 - DNA, 15 bp, Homo sapiens
tcccttaaaacaatt

SEQ ID NO: 43157 - DNA, 15 bp, Homo sapiens
ctcccttaaaacaat

SEQ ID NO: 43158 - DNA, 15 bp, Homo sapiens
cctcccttaaaacaa

SEQ ID NO: 43159 - DNA, 15 bp, Homo sapiens
tcctcccttaaaaca

SEQ ID NO: 43160 - DNA, 15 bp, Homo sapiens
ctcctcccttaaaac

SEQ ID NO: 43161 - DNA, 15 bp, Homo sapiens
tctcctcccttaaaa

SEQ ID NO: 43162 - DNA, 15 bp, Homo sapiens
ctctcctcccttaaa

SEQ ID NO: 43163 - DNA, 15 bp, Homo sapiens
actctcctcccttaa

SEQ ID NO: 43164 - DNA, 15 bp, Homo sapiens
aactctcctccctta

SEQ ID NO: 43165 - DNA, 15 bp, Homo sapiens
taactctcctccctt

SEQ ID NO: 43166 - DNA, 15 bp, Homo sapiens
ataactctcctccct

SEQ ID NO: 43167 - DNA, 15 bp, Homo sapiens
aataactctcctccc

SEQ ID NO: 43168 - DNA, 15 bp, Homo sapiens
gaataactctcctcc

SEQ ID NO: 43169 - DNA, 15 bp, Homo sapiens
agaataactctcctc

SEQ ID NO: 43170 - DNA, 15 bp, Homo sapiens
cagaataactctcct

SEQ ID NO: 43171 - DNA, 15 bp, Homo sapiens
tcagaataactctcc

SEQ ID NO: 43172 - DNA, 15 bp, Homo sapiens
atcagaataactctc

SEQ ID NO: 43173 - DNA, 15 bp, Homo sapiens
tatcagaataactct

SEQ ID NO: 43174 - DNA, 15 bp, Homo sapiens
atatcagaataactc

SEQ ID NO: 43175 - DNA, 15 bp, Homo sapiens
gatatcagaataact

SEQ ID NO: 43176 - DNA, 15 bp, Homo sapiens
ggatatcagaataac

SEQ ID NO: 43177 - DNA, 15 bp, Homo sapiens
aggatatcagaataa

SEQ ID NO: 43178 - DNA, 15 bp, Homo sapiens
aaggatatcagaata

SEQ ID NO: 43179 - DNA, 15 bp, Homo sapiens
aaaggatatcagaat

SEQ ID NO: 43180 - DNA, 15 bp, Homo sapiens
caaaggatatcagaa

SEQ ID NO: 43181 - DNA, 15 bp, Homo sapiens
acaaaggatatcaga

SEQ ID NO: 43182 - DNA, 15 bp, Homo sapiens
tacaaaggatatcag

SEQ ID NO: 43183 - DNA, 15 bp, Homo sapiens
atacaaaggatatca

SEQ ID NO: 43184 - DNA, 15 bp, Homo sapiens
aatacaaaggatatc

SEQ ID NO: 43185 - DNA, 15 bp, Homo sapiens
caatacaaaggatat

SEQ ID NO: 43186 - DNA, 15 bp, Homo sapiens
tcaatacaaaggata

SEQ ID NO: 43187 - DNA, 15 bp, Homo sapiens
atcaatacaaaggat

SEQ ID NO: 43188 - DNA, 15 bp, Homo sapiens
tatcaatacaaagga

SEQ ID NO: 43189 - DNA, 15 bp, Homo sapiens
atatcaatacaaagg

SEQ ID NO: 43190 - DNA, 15 bp, Homo sapiens
aatatcaatacaaag

SEQ ID NO: 43191 - DNA, 15 bp, Homo sapiens
caatatcaatacaaa

SEQ ID NO: 43192 - DNA, 15 bp, Homo sapiens
gcaatatcaatacaa

SEQ ID NO: 43193 - DNA, 15 bp, Homo sapiens
agcaatatcaataca

SEQ ID NO: 43194 - DNA, 15 bp, Homo sapiens
gagcaatatcaatac

SEQ ID NO: 43195 - DNA, 15 bp, Homo sapiens
agagcaatatcaata

SEQ ID NO: 43196 - DNA, 15 bp, Homo sapiens
aagagcaatatcaat

SEQ ID NO: 43197 - DNA, 15 bp, Homo sapiens
taagagcaatatcaa

SEQ ID NO: 43198 - DNA, 15 bp, Homo sapiens
ataagagcaatatca

SEQ ID NO: 43199 - DNA, 15 bp, Homo sapiens
aataagagcaatatc

SEQ ID NO: 43200 - DNA, 15 bp, Homo sapiens
taaataagagcaata

SEQ ID NO: 43201 - DNA, 15 bp, Homo sapiens
ataaataagagcaat

SEQ ID NO: 43202 - DNA, 15 bp, Homo sapiens
aataaataagagcaa

SEQ ID NO: 43203 - DNA, 15 bp, Homo sapiens
taataaataagagca

SEQ ID NO: 43204 - DNA, 15 bp, Homo sapiens
ataataaataagagc

SEQ ID NO: 43205 - DNA, 15 bp, Homo sapiens
aataataaataagag

SEQ ID NO: 43206 - DNA, 15 bp, Homo sapiens
caataataaataaga

SEQ ID NO: 43207 - DNA, 15 bp, Homo sapiens
tcaataataaataag

SEQ ID NO: 43208 - DNA, 15 bp, Homo sapiens
ctcaataataaataa

SEQ ID NO: 43209 - DNA, 15 bp, Homo sapiens
gctcaataataaata

SEQ ID NO: 43210 - DNA, 15 bp, Homo sapiens
agctcaataataaat

SEQ ID NO: 43211 - DNA, 15 bp, Homo sapiens
cagctcaataataaa

SEQ ID NO: 43212 - DNA, 15 bp, Homo sapiens
ccagctcaataataa

SEQ ID NO: 43213 - DNA, 15 bp, Homo sapiens
tccagctcaataata

SEQ ID NO: 43214 - DNA, 15 bp, Homo sapiens
atccagctcaataat

SEQ ID NO: 43215 - DNA, 15 bp, Homo sapiens
aatccagctcaataa

SEQ ID NO: 43216 - DNA, 15 bp, Homo sapiens
aaatccagctcaata

SEQ ID NO: 43217 - DNA, 15 bp, Homo sapiens
taaatccagctcaat

SEQ ID NO: 43218 - DNA, 15 bp, Homo sapiens
ttaaatccagctcaa

SEQ ID NO: 43219 - DNA, 15 bp, Homo sapiens
cttaaatccagctca

SEQ ID NO: 43220 - DNA, 15 bp, Homo sapiens
acttaaatccagctc

SEQ ID NO: 43221 - DNA, 15 bp, Homo sapiens
tacttaaatccagct

SEQ ID NO: 43222 - DNA, 15 bp, Homo sapiens
atacttaaatccagc

SEQ ID NO: 43223 - DNA, 15 bp, Homo sapiens
aatacttaaatccag

SEQ ID NO: 43224 - DNA, 15 bp, Homo sapiens
taatacttaaatcca

SEQ ID NO: 43225 - DNA, 15 bp, Homo sapiens
ttaatacttaaatcc

SEQ ID NO: 43226 - DNA, 15 bp, Homo sapiens
attaatacttaaatc

SEQ ID NO: 43227 - DNA, 15 bp, Homo sapiens
gattaatacttaaat

SEQ ID NO: 43228 - DNA, 15 bp, Homo sapiens
tgattaatacttaaa

SEQ ID NO: 43229 - DNA, 15 bp, Homo sapiens
atgattaatacttaa

SEQ ID NO: 43230 - DNA, 15 bp, Homo sapiens
aatgattaatactta

SEQ ID NO: 43231 - DNA, 15 bp, Homo sapiens
aaatgattaatactt

SEQ ID NO: 43232 - DNA, 15 bp, Homo sapiens
taaatgattaatact

SEQ ID NO: 43233 - DNA, 15 bp, Homo sapiens
cttaaatgattaata

SEQ ID NO: 43234 - DNA, 15 bp, Homo sapiens
ccttaaatgattaat

SEQ ID NO: 43235 - DNA, 15 bp, Homo sapiens
accttaaatgattaa

SEQ ID NO: 43236 - DNA, 15 bp, Homo sapiens
gaccttaaatgatta

SEQ ID NO: 43237 - DNA, 15 bp, Homo sapiens
tgaccttaaatgatt

SEQ ID NO: 43238 - DNA, 15 bp, Homo sapiens
ttgaccttaaatgat

SEQ ID NO: 43239 - DNA, 15 bp, Homo sapiens
tttgaccttaaatga

SEQ ID NO: 43240 - DNA, 15 bp, Homo sapiens
atttgaccttaaatg

SEQ ID NO: 43241 - DNA, 15 bp, Homo sapiens
aatttgaccttaaat

SEQ ID NO: 43242 - DNA, 15 bp, Homo sapiens
aaatttgaccttaaa

SEQ ID NO: 43243 - DNA, 15 bp, Homo sapiens
gaaatttgaccttaa

SEQ ID NO: 43244 - DNA, 15 bp, Homo sapiens
agaaatttgacctta

SEQ ID NO: 43245 - DNA, 15 bp, Homo sapiens
tagaaatttgacctt

SEQ ID NO: 43246 - DNA, 15 bp, Homo sapiens
ttagaaatttgacct

SEQ ID NO: 43247 - DNA, 15 bp, Homo sapiens
attagaaatttgacc

SEQ ID NO: 43248 - DNA, 15 bp, Homo sapiens
cattagaaatttgac

SEQ ID NO: 43249 - DNA, 15 bp, Homo sapiens
acattagaaatttga

SEQ ID NO: 43250 - DNA, 15 bp, Homo sapiens
tacattagaaatttg

SEQ ID NO: 43251 - DNA, 15 bp, Homo sapiens
atacattagaaattt

SEQ ID NO: 43252 - DNA, 15 bp, Homo sapiens
tatacattagaaatt

SEQ ID NO: 43253 - DNA, 15 bp, Homo sapiens
atatacattagaaat

SEQ ID NO: 43254 - DNA, 15 bp, Homo sapiens
tatatacattagaaa

SEQ ID NO: 43255 - DNA, 15 bp, Homo sapiens
atatatacattagaa

SEQ ID NO: 43256 - DNA, 15 bp, Homo sapiens
catatatacattaga

SEQ ID NO: 43257 - DNA, 15 bp, Homo sapiens
acatatatacattag

SEQ ID NO: 43258 - DNA, 15 bp, Homo sapiens
aacatatatacatta

SEQ ID NO: 43259 - DNA, 15 bp, Homo sapiens
gaacatatatacatt

SEQ ID NO: 43260 - DNA, 15 bp, Homo sapiens
agaacatatatacat

SEQ ID NO: 43261 - DNA, 15 bp, Homo sapiens
aagaacatatataca

SEQ ID NO: 43262 - DNA, 15 bp, Homo sapiens
taagaacatatatac

SEQ ID NO: 43263 - DNA, 15 bp, Homo sapiens
ttaagaacatatata

SEQ ID NO: 43264 - DNA, 15 bp, Homo sapiens
tttaagaacatatat

SEQ ID NO: 43265 - DNA, 15 bp, Homo sapiens
atttaagaacatata

SEQ ID NO: 43266 - DNA, 15 bp, Homo sapiens
catttaagaacatat

SEQ ID NO: 43267 - DNA, 15 bp, Homo sapiens
ccatttaagaacata

SEQ ID NO: 43268 - DNA, 15 bp, Homo sapiens
gccatttaagaacat

SEQ ID NO: 43269 - DNA, 15 bp, Homo sapiens
agccatttaagaaca

SEQ ID NO: 43270 - DNA, 15 bp, Homo sapiens
tagccatttaagaac

SEQ ID NO: 43271 - DNA, 15 bp, Homo sapiens
gtagccatttaagaa

SEQ ID NO: 43272 - DNA, 15 bp, Homo sapiens
cgtagccatttaaga

SEQ ID NO: 43273 - DNA, 15 bp, Homo sapiens
tcgtagccatttaag

SEQ ID NO: 43274 - DNA, 15 bp, Homo sapiens
gtcgtagccatttaa

SEQ ID NO: 43275 - DNA, 15 bp, Homo sapiens
ggtcgtagccattta

SEQ ID NO: 43276 - DNA, 15 bp, Homo sapiens
gggtcgtagccattt

SEQ ID NO: 43277 - DNA, 15 bp, Homo sapiens
tgggtcgtagccatt

SEQ ID NO: 43278 - DNA, 15 bp, Homo sapiens
ctgggtcgtagccat

SEQ ID NO: 43279 - DNA, 15 bp, Homo sapiens
actgggtcgtagcca

SEQ ID NO: 43280 - DNA, 15 bp, Homo sapiens
aactgggtcgtagcc

SEQ ID NO: 43281 - DNA, 15 bp, Homo sapiens
taactgggtcgtagc

SEQ ID NO: 43282 - DNA, 15 bp, Homo sapiens
gtaactgggtcgtag

SEQ ID NO: 43283 - DNA, 15 bp, Homo sapiens
ggtaactgggtcgta

SEQ ID NO: 43284 - DNA, 15 bp, Homo sapiens
tggtaactgggtcgt

SEQ ID NO: 43285 - DNA, 15 bp, Homo sapiens
atggtaactgggtcg

SEQ ID NO: 43286 - DNA, 15 bp, Homo sapiens
tatggtaactgggtc

SEQ ID NO: 43287 - DNA, 15 bp, Homo sapiens
ctatggtaactgggt

SEQ ID NO: 43288 - DNA, 15 bp, Homo sapiens
gctatggtaactggg

SEQ ID NO: 43289 - DNA, 15 bp, Homo sapiens
tgctatggtaactgg

SEQ ID NO: 43290 - DNA, 15 bp, Homo sapiens
ttgctatggtaactg

SEQ ID NO: 43291 - DNA, 15 bp, Homo sapiens
attgctatggtaact

SEQ ID NO: 43292 - DNA, 15 bp, Homo sapiens
aattgctatggtaac

SEQ ID NO: 43293 - DNA, 15 bp, Homo sapiens
aaattgctatggtaa

SEQ ID NO: 43294 - DNA, 15 bp, Homo sapiens
taaattgctatggta

SEQ ID NO: 43295 - DNA, 15 bp, Homo sapiens
ctaaattgctatggt

SEQ ID NO: 43296 - DNA, 15 bp, Homo sapiens
actaaattgctatgg

SEQ ID NO: 43297 - DNA, 15 bp, Homo sapiens
cactaaattgctatg

SEQ ID NO: 43298 - DNA, 15 bp, Homo sapiens
tcactaaattgctat

SEQ ID NO: 43299 - DNA, 15 bp, Homo sapiens
ttcactaaattgcta

SEQ ID NO: 43300 - DNA, 15 bp, Homo sapiens
tttcactaaattgct

SEQ ID NO: 43301 - DNA, 15 bp, Homo sapiens
atttcactaaattgc

SEQ ID NO: 43302 - DNA, 15 bp, Homo sapiens
tatttcactaaattg

SEQ ID NO: 43303 - DNA, 15 bp, Homo sapiens
ttatttcactaaatt

SEQ ID NO: 43304 - DNA, 15 bp, Homo sapiens
gttatttcactaaat

SEQ ID NO: 43305 - DNA, 15 bp, Homo sapiens
agttatttcactaaa

SEQ ID NO: 43306 - DNA, 15 bp, Homo sapiens
tagttatttcactaa

SEQ ID NO: 43307 - DNA, 15 bp, Homo sapiens
atagttatttcacta

SEQ ID NO: 43308 - DNA, 15 bp, Homo sapiens
tatagttatttcact

SEQ ID NO: 43309 - DNA, 15 bp, Homo sapiens
ttatagttatttcac

SEQ ID NO: 43310 - DNA, 15 bp, Homo sapiens
attatagttatttca

SEQ ID NO: 43311 - DNA, 15 bp, Homo sapiens
cattatagttatttc

SEQ ID NO: 43312 - DNA, 15 bp, Homo sapiens
ccattatagttattt

SEQ ID NO: 43313 - DNA, 15 bp, Homo sapiens
tccattatagttatt

SEQ ID NO: 43314 - DNA, 15 bp, Homo sapiens
ttccattatagttat

SEQ ID NO: 43315 - DNA, 15 bp, Homo sapiens
gttccattatagtta

SEQ ID NO: 43316 - DNA, 15 bp, Homo sapiens
tgttccattatagtt

SEQ ID NO: 43317 - DNA, 15 bp, Homo sapiens
atgttccattatagt

SEQ ID NO: 43318 - DNA, 15 bp, Homo sapiens
aatgttccattatag

SEQ ID NO: 43319 - DNA, 15 bp, Homo sapiens
aaatgttccattata

SEQ ID NO: 43320 - DNA, 15 bp, Homo sapiens
aaaatgttccattat

SEQ ID NO: 43321 - DNA, 15 bp, Homo sapiens
aaaaatgttccatta

SEQ ID NO: 43322 - DNA, 15 bp, Homo sapiens
aaaaaatgttccatt

SEQ ID NO: 43323 - DNA, 15 bp, Homo sapiens
aaaaaaatgttccat

SEQ ID NO: 43324 - DNA, 15 bp, Homo sapiens
aaaaaaaatgttcca

SEQ ID NO: 43325 - DNA, 15 bp, Homo sapiens
gaaaaaaaatgttcc

SEQ ID NO: 43326 - DNA, 15 bp, Homo sapiens
tgaaaaaaaatgttc

SEQ ID NO: 43327 - DNA, 15 bp, Homo sapiens
ttgaaaaaaaatgtt

SEQ ID NO: 43328 - DNA, 15 bp, Homo sapiens
attgaaaaaaaatgt

SEQ ID NO: 43329 - DNA, 15 bp, Homo sapiens
aattgaaaaaaaatg

SEQ ID NO: 43330 - DNA, 15 bp, Homo sapiens
aaattgaaaaaaaat

SEQ ID NO: 43331 - DNA, 15 bp, Homo sapiens
caaattgaaaaaaaa

SEQ ID NO: 43332 - DNA, 15 bp, Homo sapiens
ccaaattgaaaaaaa

SEQ ID NO: 43333 - DNA, 15 bp, Homo sapiens
gccaaattgaaaaaa

SEQ ID NO: 43334 - DNA, 15 bp, Homo sapiens
agccaaattgaaaaa

SEQ ID NO: 43335 - DNA, 15 bp, Homo sapiens
aagccaaattgaaaa

SEQ ID NO: 43336 - DNA, 15 bp, Homo sapiens
gaagccaaattgaaa

SEQ ID NO: 43337 - DNA, 15 bp, Homo sapiens
agaagccaaattgaa

SEQ ID NO: 43338 - DNA, 15 bp, Homo sapiens
gagaagccaaattga

SEQ ID NO: 43339 - DNA, 15 bp, Homo sapiens
agagaagccaaattg

SEQ ID NO: 43340 - DNA, 15 bp, Homo sapiens
aagagaagccaaatt

SEQ ID NO: 43341 - DNA, 15 bp, Homo sapiens
aaagagaagccaaat

SEQ ID NO: 43342 - DNA, 15 bp, Homo sapiens
aaaagagaagccaaa

SEQ ID NO: 43343 - DNA, 15 bp, Homo sapiens
aaaaagagaagccaa

SEQ ID NO: 43344 - DNA, 15 bp, Homo sapiens
aaaaaagagaagcca

SEQ ID NO: 43345 - DNA, 15 bp, Homo sapiens
aaaaaaagagaagcc

SEQ ID NO: 43346 - DNA, 15 bp, Homo sapiens
aaaaaaaagagaagc

SEQ ID NO: 43347 - DNA, 15 bp, Homo sapiens
gaaaaaaaagagaag

SEQ ID NO: 43348 - DNA, 15 bp, Homo sapiens
agaaaaaaaagagaa

SEQ ID NO: 43349 - DNA, 15 bp, Homo sapiens
cagaaaaaaaagaga

SEQ ID NO: 43350 - DNA, 15 bp, Homo sapiens
acagaaaaaaaagag

SEQ ID NO: 43351 - DNA, 15 bp, Homo sapiens
gacagaaaaaaaaga

SEQ ID NO: 43352 - DNA, 15 bp, Homo sapiens
ggacagaaaaaaaag

SEQ ID NO: 43353 - DNA, 15 bp, Homo sapiens
tggacagaaaaaaaa

SEQ ID NO: 43354 - DNA, 15 bp, Homo sapiens
gtggacagaaaaaaa

SEQ ID NO: 43355 - DNA, 15 bp, Homo sapiens
ggtggacagaaaaaa

SEQ ID NO: 43356 - DNA, 15 bp, Homo sapiens
tggtggacagaaaaa

SEQ ID NO: 43357 - DNA, 15 bp, Homo sapiens
ctggtggacagaaaa

SEQ ID NO: 43358 - DNA, 15 bp, Homo sapiens
cctggtggacagaaa

SEQ ID NO: 43359 - DNA, 15 bp, Homo sapiens
ccctggtggacagaa

SEQ ID NO: 43360 - DNA, 15 bp, Homo sapiens
tccctggtggacaga

SEQ ID NO: 43361 - DNA, 15 bp, Homo sapiens
ctccctggtggacag

SEQ ID NO: 43362 - DNA, 15 bp, Homo sapiens
actccctggtggaca

SEQ ID NO: 43363 - DNA, 15 bp, Homo sapiens
tactccctggtggac

SEQ ID NO: 43364 - DNA, 15 bp, Homo sapiens
ttactccctggtgga

SEQ ID NO: 43365 - DNA, 15 bp, Homo sapiens
gttactccctggtgg

SEQ ID NO: 43366 - DNA, 15 bp, Homo sapiens
agttactccctggtg

SEQ ID NO: 43367 - DNA, 15 bp, Homo sapiens
tagttactccctggt

SEQ ID NO: 43368 - DNA, 15 bp, Homo sapiens
atagttactccctgg

SEQ ID NO: 43369 - DNA, 15 bp, Homo sapiens
aatagttactccctg

SEQ ID NO: 43370 - DNA, 15 bp, Homo sapiens
gaatagttactccct

SEQ ID NO: 43371 - DNA, 15 bp, Homo sapiens
ggaatagttactccc

SEQ ID NO: 43372 - DNA, 15 bp, Homo sapiens
gggaatagttactcc

SEQ ID NO: 43373 - DNA, 15 bp, Homo sapiens
tgggaatagttactc

SEQ ID NO: 43374 - DNA, 15 bp, Homo sapiens
ctgggaatagttact

SEQ ID NO: 43375 - DNA, 15 bp, Homo sapiens
actgggaatagttac

SEQ ID NO: 43376 - DNA, 15 bp, Homo sapiens
gactgggaatagtta

SEQ ID NO: 43377 - DNA, 15 bp, Homo sapiens
tgactgggaatagtt

SEQ ID NO: 43378 - DNA, 15 bp, Homo sapiens
ctgactgggaatagt

SEQ ID NO: 43379 - DNA, 15 bp, Homo sapiens
tctgactgggaatag

SEQ ID NO: 43380 - DNA, 15 bp, Homo sapiens
ctctgactgggaata

SEQ ID NO: 43381 - DNA, 15 bp, Homo sapiens
cctctgactgggaat

SEQ ID NO: 43382 - DNA, 15 bp, Homo sapiens
gcctctgactgggaa

SEQ ID NO: 43383 - DNA, 15 bp, Homo sapiens
cgcctctgactggga

SEQ ID NO: 43384 - DNA, 15 bp, Homo sapiens
gcgcctctgactggg

SEQ ID NO: 43385 - DNA, 15 bp, Homo sapiens
agcgcctctgactgg

SEQ ID NO: 43386 - DNA, 15 bp, Homo sapiens
tagcgcctctgactg

SEQ ID NO: 43387 - DNA, 15 bp, Homo sapiens
atagcgcctctgact

SEQ ID NO: 43388 - DNA, 15 bp, Homo sapiens
catagcgcctctgac

SEQ ID NO: 43389 - DNA, 15 bp, Homo sapiens
acatagcgcctctga

SEQ ID NO: 43390 - DNA, 15 bp, Homo sapiens
cacatagcgcctctg

SEQ ID NO: 43391 - DNA, 15 bp, Homo sapiens
acacatagcgcctct

SEQ ID NO: 43392 - DNA, 15 bp, Homo sapiens
tacacatagcgcctc

SEQ ID NO: 43393 - DNA, 15 bp, Homo sapiens
atacacatagcgcct

SEQ ID NO: 43394 - DNA, 15 bp, Homo sapiens
aatacacatagcgcc

SEQ ID NO: 43395 - DNA, 15 bp, Homo sapiens
taatacacatagcgc

SEQ ID NO: 43396 - DNA, 15 bp, Homo sapiens
ataatacacatagcg

SEQ ID NO: 43397 - DNA, 15 bp, Homo sapiens
aataatacacatagc

SEQ ID NO: 43398 - DNA, 15 bp, Homo sapiens
taataatacacatag

SEQ ID NO: 43399 - DNA, 15 bp, Homo sapiens
ataataatacacata

SEQ ID NO: 43400 - DNA, 15 bp, Homo sapiens
tataataatacacat

SEQ ID NO: 43401 - DNA, 15 bp, Homo sapiens
ctataataatacaca

SEQ ID NO: 43402 - DNA, 15 bp, Homo sapiens
gctataataatacac

SEQ ID NO: 43403 - DNA, 15 bp, Homo sapiens
agctataataataca

SEQ ID NO: 43404 - DNA, 15 bp, Homo sapiens
tagctataataatac

SEQ ID NO: 43405 - DNA, 15 bp, Homo sapiens
gtagctataataata

SEQ ID NO: 43406 - DNA, 15 bp, Homo sapiens
ggtagctataataat

SEQ ID NO: 43407 - DNA, 15 bp, Homo sapiens
aggtagctataataa

SEQ ID NO: 43408 - DNA, 15 bp, Homo sapiens
caggtagctataata

SEQ ID NO: 43409 - DNA, 15 bp, Homo sapiens
acaggtagctataat

SEQ ID NO: 43410 - DNA, 15 bp, Homo sapiens
aacaggtagctataa

SEQ ID NO: 43411 - DNA, 15 bp, Homo sapiens
taacaggtagctata

SEQ ID NO: 43412 - DNA, 15 bp, Homo sapiens
ttaacaggtagctat

SEQ ID NO: 43413 - DNA, 15 bp, Homo sapiens
tttaacaggtagcta

SEQ ID NO: 43414 - DNA, 15 bp, Homo sapiens
ctttaacaggtagct

SEQ ID NO: 43415 - DNA, 15 bp, Homo sapiens
tctttaacaggtagc

SEQ ID NO: 43416 - DNA, 15 bp, Homo sapiens
ttctttaacaggtag

SEQ ID NO: 43417 - DNA, 15 bp, Homo sapiens
attctttaacaggta

SEQ ID NO: 43418 - DNA, 15 bp, Homo sapiens
gattctttaacaggt

SEQ ID NO: 43419 - DNA, 15 bp, Homo sapiens
tgattctttaacagg

SEQ ID NO: 43420 - DNA, 15 bp, Homo sapiens
atgattctttaacag

SEQ ID NO: 43421 - DNA, 15 bp, Homo sapiens
gatgattctttaaca

SEQ ID NO: 43422 - DNA, 15 bp, Homo sapiens
agatgattctttaac

SEQ ID NO: 43423 - DNA, 15 bp, Homo sapiens
cagatgattctttaa

SEQ ID NO: 43424 - DNA, 15 bp, Homo sapiens
ccagatgattcttta

SEQ ID NO: 43425 - DNA, 15 bp, Homo sapiens
tccagatgattcttt

SEQ ID NO: 43426 - DNA, 15 bp, Homo sapiens
atccagatgattctt

SEQ ID NO: 43427 - DNA, 15 bp, Homo sapiens
aatccagatgattct

SEQ ID NO: 43428 - DNA, 15 bp, Homo sapiens
taatccagatgattc

SEQ ID NO: 43429 - DNA, 15 bp, Homo sapiens
ataatccagatgatt

SEQ ID NO: 43430 - DNA, 15 bp, Homo sapiens
tataatccagatgat

SEQ ID NO: 43431 - DNA, 15 bp, Homo sapiens
ctataatccagatga

SEQ ID NO: 43432 - DNA, 15 bp, Homo sapiens
tctataatccagatg

SEQ ID NO: 43433 - DNA, 15 bp, Homo sapiens
gtctataatccagat

SEQ ID NO: 43434 - DNA, 15 bp, Homo sapiens
ggtctataatccaga

SEQ ID NO: 43435 - DNA, 15 bp, Homo sapiens
tggtctataatccag

SEQ ID NO: 43436 - DNA, 15 bp, Homo sapiens
ctggtctataatcca

SEQ ID NO: 43437 - DNA, 15 bp, Homo sapiens
actggtctataatcc

SEQ ID NO: 43438 - DNA, 15 bp, Homo sapiens
cactggtctataatc

SEQ ID NO: 43439 - DNA, 15 bp, Homo sapiens
ccactggtctataat

SEQ ID NO: 43440 - DNA, 15 bp, Homo sapiens
gccactggtctataa

SEQ ID NO: 43441 - DNA, 15 bp, Homo sapiens
tgccactggtctata

SEQ ID NO: 43442 - DNA, 15 bp, Homo sapiens
gtgccactggtctat

SEQ ID NO: 43443 - DNA, 15 bp, Homo sapiens
agtgccactggtcta

SEQ ID NO: 43444 - DNA, 15 bp, Homo sapiens
cagtgccactggtct

SEQ ID NO: 43445 - DNA, 15 bp, Homo sapiens
acagtgccactggtc

SEQ ID NO: 43446 - DNA, 15 bp, Homo sapiens
aacagtgccactggt

SEQ ID NO: 43447 - DNA, 15 bp, Homo sapiens
caacagtgccactgg

SEQ ID NO: 43448 - DNA, 15 bp, Homo sapiens
acaacagtgccactg

SEQ ID NO: 43449 - DNA, 15 bp, Homo sapiens
aacaacagtgccact

SEQ ID NO: 43450 - DNA, 15 bp, Homo sapiens
aaacaacagtgccac

SEQ ID NO: 43451 - DNA, 15 bp, Homo sapiens
gaaacaacagtgcca

SEQ ID NO: 43452 - DNA, 15 bp, Homo sapiens
tgaaacaacagtgcc

SEQ ID NO: 43453 - DNA, 15 bp, Homo sapiens
gtgaaacaacagtgc

SEQ ID NO: 43454 - DNA, 15 bp, Homo sapiens
tgtgaaacaacagtg

SEQ ID NO: 43455 - DNA, 15 bp, Homo sapiens
ttgtgaaacaacagt

SEQ ID NO: 43456 - DNA, 15 bp, Homo sapiens
cttgtgaaacaacag

SEQ ID NO: 43457 - DNA, 15 bp, Homo sapiens
tcttgtgaaacaaca

SEQ ID NO: 43458 - DNA, 15 bp, Homo sapiens
atcttgtgaaacaac

SEQ ID NO: 43459 - DNA, 15 bp, Homo sapiens
catcttgtgaaacaa

SEQ ID NO: 43460 - DNA, 15 bp, Homo sapiens
tcatcttgtgaaaca

SEQ ID NO: 43461 - DNA, 15 bp, Homo sapiens
atcatcttgtgaaac

SEQ ID NO: 43462 - DNA, 15 bp, Homo sapiens
catcatcttgtgaaa

SEQ ID NO: 43463 - DNA, 15 bp, Homo sapiens
acatcatcttgtgaa

SEQ ID NO: 43464 - DNA, 15 bp, Homo sapiens
aacatcatcttgtga

SEQ ID NO: 43465 - DNA, 15 bp, Homo sapiens
aaacatcatcttgtg

SEQ ID NO: 43466 - DNA, 15 bp, Homo sapiens
caaacatcatcttgt

SEQ ID NO: 43467 - DNA, 15 bp, Homo sapiens
tcaaacatcatcttg

SEQ ID NO: 43468 - DNA, 15 bp, Homo sapiens
ttcaaacatcatctt

SEQ ID NO: 43469 - DNA, 15 bp, Homo sapiens
tttcaaacatcatct

SEQ ID NO: 43470 - DNA, 15 bp, Homo sapiens
gtttcaaacatcatc

SEQ ID NO: 43471 - DNA, 15 bp, Homo sapiens
agtttcaaacatcat

SEQ ID NO: 43472 - DNA, 15 bp, Homo sapiens
tagtttcaaacatca

SEQ ID NO: 43473 - DNA, 15 bp, Homo sapiens
atagtttcaaacatc

SEQ ID NO: 43474 - DNA, 15 bp, Homo sapiens
aatagtttcaaacat

SEQ ID NO: 43475 - DNA, 15 bp, Homo sapiens
gaatagtttcaaaca

SEQ ID NO: 43476 - DNA, 15 bp, Homo sapiens
ggaatagtttcaaac

SEQ ID NO: 43477 - DNA, 15 bp, Homo sapiens
tggaatagtttcaaa

SEQ ID NO: 43478 - DNA, 15 bp, Homo sapiens
ttggaatagtttcaa

SEQ ID NO: 43479 - DNA, 15 bp, Homo sapiens
attggaatagtttca

SEQ ID NO: 43480 - DNA, 15 bp, Homo sapiens
cattggaatagtttc

SEQ ID NO: 43481 - DNA, 15 bp, Homo sapiens
acattggaatagttt

SEQ ID NO: 43482 - DNA, 15 bp, Homo sapiens
aacattggaatagtt

SEQ ID NO: 43483 - DNA, 15 bp, Homo sapiens
gaacattggaatagt

SEQ ID NO: 43484 - DNA, 15 bp, Homo sapiens
tgaacattggaatag

SEQ ID NO: 43485 - DNA, 15 bp, Homo sapiens
ctgaacattggaata

SEQ ID NO: 43486 - DNA, 15 bp, Homo sapiens
actgaacattggaat

SEQ ID NO: 43487 - DNA, 15 bp, Homo sapiens
cactgaacattggaa

SEQ ID NO: 43488 - DNA, 15 bp, Homo sapiens
ccactgaacattgga

SEQ ID NO: 43489 - DNA, 15 bp, Homo sapiens
gccactgaacattgg

SEQ ID NO: 43490 - DNA, 15 bp, Homo sapiens
cgccactgaacattg

SEQ ID NO: 43491 - DNA, 15 bp, Homo sapiens
ccgccactgaacatt

SEQ ID NO: 43492 - DNA, 15 bp, Homo sapiens
tccgccactgaacat

SEQ ID NO: 43493 - DNA, 15 bp, Homo sapiens
ttccgccactgaaca

SEQ ID NO: 43494 - DNA, 15 bp, Homo sapiens
gttccgccactgaac

SEQ ID NO: 43495 - DNA, 15 bp, Homo sapiens
agttccgccactgaa

SEQ ID NO: 43496 - DNA, 15 bp, Homo sapiens
aagttccgccactga

SEQ ID NO: 43497 - DNA, 15 bp, Homo sapiens
caagttccgccactg

SEQ ID NO: 43498 - DNA, 15 bp, Homo sapiens
gcaagttccgccact

SEQ ID NO: 43499 - DNA, 15 bp, Homo sapiens
tgcaagttccgccac

SEQ ID NO: 43500 - DNA, 15 bp, Homo sapiens
ctgcaagttccgcca

SEQ ID NO: 43501 - DNA, 15 bp, Homo sapiens
actgcaagttccgcc

SEQ ID NO: 43502 - DNA, 15 bp, Homo sapiens
tactgcaagttccgc

SEQ ID NO: 43503 - DNA, 15 bp, Homo sapiens
ttactgcaagttccg

SEQ ID NO: 43504 - DNA, 15 bp, Homo sapiens
cttactgcaagttcc

SEQ ID NO: 43505 - DNA, 15 bp, Homo sapiens
acttactgcaagttc

SEQ ID NO: 43506 - DNA, 15 bp, Homo sapiens
cacttactgcaagtt

SEQ ID NO: 43507 - DNA, 15 bp, Homo sapiens
gcacttactgcaagt

SEQ ID NO: 43508 - DNA, 15 bp, Homo sapiens
agcacttactgcaag

SEQ ID NO: 43509 - DNA, 15 bp, Homo sapiens
aagcacttactgcaa

SEQ ID NO: 43510 - DNA, 15 bp, Homo sapiens
caagcacttactgca

SEQ ID NO: 43511 - DNA, 15 bp, Homo sapiens
tcaagcacttactgc

SEQ ID NO: 43512 - DNA, 15 bp, Homo sapiens
ttcaagcacttactg

SEQ ID NO: 43513 - DNA, 15 bp, Homo sapiens
tttcaagcacttact

SEQ ID NO: 43514 - DNA, 15 bp, Homo sapiens
atttcaagcacttac

SEQ ID NO: 43515 - DNA, 15 bp, Homo sapiens
aatttcaagcactta

SEQ ID NO: 43516 - DNA, 15 bp, Homo sapiens
gaatttcaagcactt

SEQ ID NO: 43517 - DNA, 15 bp, Homo sapiens
agaatttcaagcact

SEQ ID NO: 43518 - DNA, 15 bp, Homo sapiens
gagaatttcaagcac

SEQ ID NO: 43519 - DNA, 15 bp, Homo sapiens
tgagaatttcaagca

SEQ ID NO: 43520 - DNA, 15 bp, Homo sapiens
atgagaatttcaagc

SEQ ID NO: 43521 - DNA, 15 bp, Homo sapiens
gatgagaatttcaag

SEQ ID NO: 43522 - DNA, 15 bp, Homo sapiens
ggatgagaatttcaa

SEQ ID NO: 43523 - DNA, 15 bp, Homo sapiens
aggatgagaatttca

SEQ ID NO: 43524 - DNA, 15 bp, Homo sapiens
aaggatgagaatttc

SEQ ID NO: 43525 - DNA, 15 bp, Homo sapiens
gaaggatgagaattt

SEQ ID NO: 43526 - DNA, 15 bp, Homo sapiens
ggaaggatgagaatt

SEQ ID NO: 43527 - DNA, 15 bp, Homo sapiens
tggaaggatgagaat

SEQ ID NO: 43528 - DNA, 15 bp, Homo sapiens
atggaaggatgagaa

SEQ ID NO: 43529 - DNA, 15 bp, Homo sapiens
catggaaggatgaga

SEQ ID NO: 43530 - DNA, 15 bp, Homo sapiens
acatggaaggatgag

SEQ ID NO: 43531 - DNA, 15 bp, Homo sapiens
tacatggaaggatga

SEQ ID NO: 43532 - DNA, 15 bp, Homo sapiens
atacatggaaggatg

SEQ ID NO: 43533 - DNA, 15 bp, Homo sapiens
aatacatggaaggat

SEQ ID NO: 43534 - DNA, 15 bp, Homo sapiens
caatacatggaagga

SEQ ID NO: 43535 - DNA, 15 bp, Homo sapiens
ccaatacatggaagg

SEQ ID NO: 43536 - DNA, 15 bp, Homo sapiens
tccaatacatggaag

SEQ ID NO: 43537 - DNA, 15 bp, Homo sapiens
ttccaatacatggaa

SEQ ID NO: 43538 - DNA, 15 bp, Homo sapiens
gttccaatacatgga

SEQ ID NO: 43539 - DNA, 15 bp, Homo sapiens
tgttccaatacatgg

SEQ ID NO: 43540 - DNA, 15 bp, Homo sapiens
ctgttccaatacatg

SEQ ID NO: 43541 - DNA, 15 bp, Homo sapiens
actgttccaatacat

SEQ ID NO: 43542 - DNA, 15 bp, Homo sapiens
aactgttccaataca

SEQ ID NO: 43543 - DNA, 15 bp, Homo sapiens
aaactgttccaatac

SEQ ID NO: 43544 - DNA, 15 bp, Homo sapiens
aaaactgttccaata

SEQ ID NO: 43545 - DNA, 15 bp, Homo sapiens
gaaaactgttccaat

SEQ ID NO: 43546 - DNA, 15 bp, Homo sapiens
agaaaactgttccaa

SEQ ID NO: 43547 - DNA, 15 bp, Homo sapiens
aagaaaactgttcca

SEQ ID NO: 43548 - DNA, 15 bp, Homo sapiens
taagaaaactgttcc

SEQ ID NO: 43549 - DNA, 15 bp, Homo sapiens
ttaagaaaactgttc

SEQ ID NO: 43550 - DNA, 15 bp, Homo sapiens
gttaagaaaactgtt

SEQ ID NO: 43551 - DNA, 15 bp, Homo sapiens
ggttaagaaaactgt

SEQ ID NO: 43552 - DNA, 15 bp, Homo sapiens
tggttaagaaaactg

SEQ ID NO: 43553 - DNA, 15 bp, Homo sapiens
atggttaagaaaact

SEQ ID NO: 43554 - DNA, 15 bp, Homo sapiens
tatggttaagaaaac

SEQ ID NO: 43555 - DNA, 15 bp, Homo sapiens
atatggttaagaaaa

SEQ ID NO: 43556 - DNA, 15 bp, Homo sapiens
gatatggttaagaaa

SEQ ID NO: 43557 - DNA, 15 bp, Homo sapiens
agatatggttaagaa

SEQ ID NO: 43558 - DNA, 15 bp, Homo sapiens
tagatatggttaaga

SEQ ID NO: 43559 - DNA, 15 bp, Homo sapiens
ctagatatggttaag

SEQ ID NO: 43560 - DNA, 15 bp, Homo sapiens
tctagatatggttaa

SEQ ID NO: 43561 - DNA, 15 bp, Homo sapiens
ttctagatatggtta

SEQ ID NO: 43562 - DNA, 15 bp, Homo sapiens
cttctagatatggtt

SEQ ID NO: 43563 - DNA, 15 bp, Homo sapiens
acttctagatatggt

SEQ ID NO: 43564 - DNA, 15 bp, Homo sapiens
aacttctagatatgg

SEQ ID NO: 43565 - DNA, 15 bp, Homo sapiens
aaacttctagatatg

SEQ ID NO: 43566 - DNA, 15 bp, Homo sapiens
taaacttctagatat

SEQ ID NO: 43567 - DNA, 15 bp, Homo sapiens
gtaaacttctagata

SEQ ID NO: 43568 - DNA, 15 bp, Homo sapiens
tgtaaacttctagat

SEQ ID NO: 43569 - DNA, 15 bp, Homo sapiens
atgtaaacttctaga

SEQ ID NO: 43570 - DNA, 15 bp, Homo sapiens
tatgtaaacttctag

SEQ ID NO: 43571 - DNA, 15 bp, Homo sapiens
ttatgtaaacttcta

SEQ ID NO: 43572 - DNA, 15 bp, Homo sapiens
tttatgtaaacttct

SEQ ID NO: 43573 - DNA, 15 bp, Homo sapiens
ttttatgtaaacttc

SEQ ID NO: 43574 - DNA, 15 bp, Homo sapiens
tttttatgtaaactt

SEQ ID NO: 43575 - DNA, 15 bp, Homo sapiens
atttttatgtaaact

SEQ ID NO: 43576 - DNA, 15 bp, Homo sapiens
aatttttatgtaaac

SEQ ID NO: 43577 - DNA, 15 bp, Homo sapiens
aaatttttatgtaaa

SEQ ID NO: 43578 - DNA, 15 bp, Homo sapiens
taaatttttatgtaa

SEQ ID NO: 43579 - DNA, 15 bp, Homo sapiens
ctaaatttttatgta

SEQ ID NO: 43580 - DNA, 15 bp, Homo sapiens
tctaaatttttatgt

SEQ ID NO: 43581 - DNA, 15 bp, Homo sapiens
ttctaaatttttatg

SEQ ID NO: 43582 - DNA, 15 bp, Homo sapiens
tttctaaatttttat

SEQ ID NO: 43583 - DNA, 15 bp, Homo sapiens
ctttctaaattttta

SEQ ID NO: 43584 - DNA, 15 bp, Homo sapiens
tctttctaaattttt

SEQ ID NO: 43585 - DNA, 15 bp, Homo sapiens
ttctttctaaatttt

SEQ ID NO: 43586 - DNA, 15 bp, Homo sapiens
tttctttctaaattt

SEQ ID NO: 43587 - DNA, 15 bp, Homo sapiens
atttctttctaaatt

SEQ ID NO: 43588 - DNA, 15 bp, Homo sapiens
aatttctttctaaat

SEQ ID NO: 43589 - DNA, 15 bp, Homo sapiens
aaatttctttctaaa

SEQ ID NO: 43590 - DNA, 15 bp, Homo sapiens
taaatttctttctaa

SEQ ID NO: 43591 - DNA, 15 bp, Homo sapiens
gtaaatttctttcta

SEQ ID NO: 43592 - DNA, 15 bp, Homo sapiens
ggtaaatttctttct

SEQ ID NO: 43593 - DNA, 15 bp, Homo sapiens
tggtaaatttctttc

SEQ ID NO: 43594 - DNA, 15 bp, Homo sapiens
gtggtaaatttcttt

SEQ ID NO: 43595 - DNA, 15 bp, Homo sapiens
tgtggtaaatttctt

SEQ ID NO: 43596 - DNA, 15 bp, Homo sapiens
atgtggtaaatttct

SEQ ID NO: 43597 - DNA, 15 bp, Homo sapiens
aatgtggtaaatttc

SEQ ID NO: 43598 - DNA, 15 bp, Homo sapiens
aaatgtggtaaattt

SEQ ID NO: 43599 - DNA, 15 bp, Homo sapiens
caaatgtggtaaatt

SEQ ID NO: 43600 - DNA, 15 bp, Homo sapiens
tcaaatgtggtaaat

SEQ ID NO: 43601 - DNA, 15 bp, Homo sapiens
ttcaaatgtggtaaa

SEQ ID NO: 43602 - DNA, 15 bp, Homo sapiens
tttcaaatgtggtaa

SEQ ID NO: 43603 - DNA, 15 bp, Homo sapiens
atttcaaatgtggta

SEQ ID NO: 43604 - DNA, 15 bp, Homo sapiens
aatttcaaatgtggt

SEQ ID NO: 43605 - DNA, 15 bp, Homo sapiens
aaatttcaaatgtgg

SEQ ID NO: 43606 - DNA, 15 bp, Homo sapiens
taaatttcaaatgtg

SEQ ID NO: 43607 - DNA, 15 bp, Homo sapiens
ataaatttcaaatgt

SEQ ID NO: 43608 - DNA, 15 bp, Homo sapiens
cataaatttcaaatg

SEQ ID NO: 43609 - DNA, 15 bp, Homo sapiens
gcataaatttcaaat

SEQ ID NO: 43610 - DNA, 15 bp, Homo sapiens
tgcataaatttcaaa

SEQ ID NO: 43611 - DNA, 15 bp, Homo sapiens
ctgcataaatttcaa

SEQ ID NO: 43612 - DNA, 15 bp, Homo sapiens
cctgcataaatttca

SEQ ID NO: 43613 - DNA, 15 bp, Homo sapiens
tcctgcataaatttc

SEQ ID NO: 43614 - DNA, 15 bp, Homo sapiens
ctcctgcataaattt

SEQ ID NO: 43615 - DNA, 15 bp, Homo sapiens
tctcctgcataaatt

SEQ ID NO: 43616 - DNA, 15 bp, Homo sapiens
gtctcctgcataaat

SEQ ID NO: 43617 - DNA, 15 bp, Homo sapiens
agtctcctgcataaa

SEQ ID NO: 43618 - DNA, 15 bp, Homo sapiens
tagtctcctgcataa

SEQ ID NO: 43619 - DNA, 15 bp, Homo sapiens
atagtctcctgcata

SEQ ID NO: 43620 - DNA, 15 bp, Homo sapiens
tatagtctcctgcat

SEQ ID NO: 43621 - DNA, 15 bp, Homo sapiens
atatagtctcctgca

SEQ ID NO: 43622 - DNA, 15 bp, Homo sapiens
aatatagtctcctgc

SEQ ID NO: 43623 - DNA, 15 bp, Homo sapiens
aaatatagtctcctg

SEQ ID NO: 43624 - DNA, 15 bp, Homo sapiens
gaaatatagtctcct

SEQ ID NO: 43625 - DNA, 15 bp, Homo sapiens
agaaatatagtctcc

SEQ ID NO: 43626 - DNA, 15 bp, Homo sapiens
cagaaatatagtctc

SEQ ID NO: 43627 - DNA, 15 bp, Homo sapiens
tcagaaatatagtct

SEQ ID NO: 43628 - DNA, 15 bp, Homo sapiens
ttcagaaatatagtc

SEQ ID NO: 43629 - DNA, 15 bp, Homo sapiens
cttcagaaatatagt

SEQ ID NO: 43630 - DNA, 15 bp, Homo sapiens
gcttcagaaatatag

SEQ ID NO: 43631 - DNA, 15 bp, Homo sapiens
tgcttcagaaatata

SEQ ID NO: 43632 - DNA, 15 bp, Homo sapiens
atgcttcagaaatat

SEQ ID NO: 43633 - DNA, 15 bp, Homo sapiens
aatgcttcagaaata

SEQ ID NO: 43634 - DNA, 15 bp, Homo sapiens
aaatgcttcagaaat

SEQ ID NO: 43635 - DNA, 15 bp, Homo sapiens
caaatgcttcagaaa

SEQ ID NO: 43636 - DNA, 15 bp, Homo sapiens
tcaaatgcttcagaa

SEQ ID NO: 43637 - DNA, 15 bp, Homo sapiens
ttcaaatgcttcaga

SEQ ID NO: 43638 - DNA, 15 bp, Homo sapiens
gttcaaatgcttcag

SEQ ID NO: 43639 - DNA, 15 bp, Homo sapiens
tgttcaaatgcttca

SEQ ID NO: 43640 - DNA, 15 bp, Homo sapiens
ttgttcaaatgcttc

SEQ ID NO: 43641 - DNA, 15 bp, Homo sapiens
tttgttcaaatgctt

SEQ ID NO: 43642 - DNA, 15 bp, Homo sapiens
atttgttcaaatgct

SEQ ID NO: 43643 - DNA, 15 bp, Homo sapiens
aatttgttcaaatgc

SEQ ID NO: 43644 - DNA, 15 bp, Homo sapiens
taatttgttcaaatg

SEQ ID NO: 43645 - DNA, 15 bp, Homo sapiens
ttaatttgttcaaat

SEQ ID NO: 43646 - DNA, 15 bp, Homo sapiens
attaatttgttcaaa

SEQ ID NO: 43647 - DNA, 15 bp, Homo sapiens
aattaatttgttcaa

SEQ ID NO: 43648 - DNA, 15 bp, Homo sapiens
taattaatttgttca

SEQ ID NO: 43649 - DNA, 15 bp, Homo sapiens
ctaattaatttgttc

SEQ ID NO: 43650 - DNA, 15 bp, Homo sapiens
gctaattaatttgtt

SEQ ID NO: 43651 - DNA, 15 bp, Homo sapiens
agctaattaatttgt

SEQ ID NO: 43652 - DNA, 15 bp, Homo sapiens
aagctaattaatttg

SEQ ID NO: 43653 - DNA, 15 bp, Homo sapiens
aaagctaattaattt

SEQ ID NO: 43654 - DNA, 15 bp, Homo sapiens
caaagctaattaatt

SEQ ID NO: 43655 - DNA, 15 bp, Homo sapiens
acaaagctaattaat

SEQ ID NO: 43656 - DNA, 15 bp, Homo sapiens
aacaaagctaattaa

SEQ ID NO: 43657 - DNA, 15 bp, Homo sapiens
caacaaagctaatta

SEQ ID NO: 43658 - DNA, 15 bp, Homo sapiens
acaacaaagctaatt

SEQ ID NO: 43659 - DNA, 15 bp, Homo sapiens
aacaacaaagctaat

SEQ ID NO: 43660 - DNA, 15 bp, Homo sapiens
gaacaacaaagctaa

SEQ ID NO: 43661 - DNA, 15 bp, Homo sapiens
tgaacaacaaagcta

SEQ ID NO: 43662 - DNA, 15 bp, Homo sapiens
ttgaacaacaaagct

SEQ ID NO: 43663 - DNA, 15 bp, Homo sapiens
gttgaacaacaaagc

SEQ ID NO: 43664 - DNA, 15 bp, Homo sapiens
agttgaacaacaaag

SEQ ID NO: 43665 - DNA, 15 bp, Homo sapiens
gagttgaacaacaaa

SEQ ID NO: 43666 - DNA, 15 bp, Homo sapiens
tgagttgaacaacaa

SEQ ID NO: 43667 - DNA, 15 bp, Homo sapiens
atgagttgaacaaca

SEQ ID NO: 43668 - DNA, 15 bp, Homo sapiens
aatgagttgaacaac

SEQ ID NO: 43669 - DNA, 15 bp, Homo sapiens
caatgagttgaacaa

SEQ ID NO: 43670 - DNA, 15 bp, Homo sapiens
ccaatgagttgaaca

SEQ ID NO: 43671 - DNA, 15 bp, Homo sapiens
cccaatgagttgaac

SEQ ID NO: 43672 - DNA, 15 bp, Homo sapiens
gcccaatgagttgaa

SEQ ID NO: 43673 - DNA, 15 bp, Homo sapiens
agcccaatgagttga

SEQ ID NO: 43674 - DNA, 15 bp, Homo sapiens
tagcccaatgagttg

SEQ ID NO: 43675 - DNA, 15 bp, Homo sapiens
ttagcccaatgagtt

SEQ ID NO: 43676 - DNA, 15 bp, Homo sapiens
tttagcccaatgagt

SEQ ID NO: 43677 - DNA, 15 bp, Homo sapiens
ctttagcccaatgag

SEQ ID NO: 43678 - DNA, 15 bp, Homo sapiens
tctttagcccaatga

SEQ ID NO: 43679 - DNA, 15 bp, Homo sapiens
ttctttagcccaatg

SEQ ID NO: 43680 - DNA, 15 bp, Homo sapiens
cttctttagcccaat

SEQ ID NO: 43681 - DNA, 15 bp, Homo sapiens
gcttctttagcccaa

SEQ ID NO: 43682 - DNA, 15 bp, Homo sapiens
ggcttctttagccca

SEQ ID NO: 43683 - DNA, 15 bp, Homo sapiens
tggcttctttagccc

SEQ ID NO: 43684 - DNA, 15 bp, Homo sapiens
ttggcttctttagcc

SEQ ID NO: 43685 - DNA, 15 bp, Homo sapiens
tttggcttctttagc

SEQ ID NO: 43686 - DNA, 15 bp, Homo sapiens
ttttggcttctttag

SEQ ID NO: 43687 - DNA, 15 bp, Homo sapiens
cttttggcttcttta

SEQ ID NO: 43688 - DNA, 15 bp, Homo sapiens
gcttttggcttcttt

SEQ ID NO: 43689 - DNA, 15 bp, Homo sapiens
tgcttttggcttctt

SEQ ID NO: 43690 - DNA, 15 bp, Homo sapiens
ttgcttttggcttct

SEQ ID NO: 43691 - DNA, 15 bp, Homo sapiens
attgcttttggcttc

SEQ ID NO: 43692 - DNA, 15 bp, Homo sapiens
cattgcttttggctt

SEQ ID NO: 43693 - DNA, 15 bp, Homo sapiens
ccattgcttttggct

SEQ ID NO: 43694 - DNA, 15 bp, Homo sapiens
cccattgcttttggc

SEQ ID NO: 43695 - DNA, 15 bp, Homo sapiens
acccattgcttttgg

SEQ ID NO: 43696 - DNA, 15 bp, Homo sapiens
aacccattgcttttg

SEQ ID NO: 43697 - DNA, 15 bp, Homo sapiens
aaacccattgctttt

SEQ ID NO: 43698 - DNA, 15 bp, Homo sapiens
aaaacccattgcttt

SEQ ID NO: 43699 - DNA, 15 bp, Homo sapiens
taaaacccattgctt

SEQ ID NO: 43700 - DNA, 15 bp, Homo sapiens
ttaaaacccattgct

SEQ ID NO: 43701 - DNA, 15 bp, Homo sapiens
attaaaacccattgc

SEQ ID NO: 43702 - DNA, 15 bp, Homo sapiens
cattaaaacccattg

SEQ ID NO: 43703 - DNA, 15 bp, Homo sapiens
acattaaaacccatt

SEQ ID NO: 43704 - DNA, 15 bp, Homo sapiens
tacattaaaacccat

SEQ ID NO: 43705 - DNA, 15 bp, Homo sapiens
ctacattaaaaccca

SEQ ID NO: 43706 - DNA, 15 bp, Homo sapiens
actacattaaaaccc

SEQ ID NO: 43707 - DNA, 15 bp, Homo sapiens
gactacattaaaacc

SEQ ID NO: 43708 - DNA, 15 bp, Homo sapiens
cgactacattaaaac

SEQ ID NO: 43709 - DNA, 15 bp, Homo sapiens
tcgactacattaaaa

SEQ ID NO: 43710 - DNA, 15 bp, Homo sapiens
ttcgactacattaaa

SEQ ID NO: 43711 - DNA, 15 bp, Homo sapiens
cttcgactacattaa

SEQ ID NO: 43712 - DNA, 15 bp, Homo sapiens
gcttcgactacatta

SEQ ID NO: 43713 - DNA, 15 bp, Homo sapiens
ggcttcgactacatt

SEQ ID NO: 43714 - DNA, 15 bp, Homo sapiens
tggcttcgactacat

SEQ ID NO: 43715 - DNA, 15 bp, Homo sapiens
ttggcttcgactaca

SEQ ID NO: 43716 - DNA, 15 bp, Homo sapiens
tttggcttcgactac

SEQ ID NO: 43717 - DNA, 15 bp, Homo sapiens
atttggcttcgacta

SEQ ID NO: 43718 - DNA, 15 bp, Homo sapiens
aatttggcttcgact

SEQ ID NO: 43719 - DNA, 15 bp, Homo sapiens
taatttggcttcgac

SEQ ID NO: 43720 - DNA, 15 bp, Homo sapiens
ataatttggcttcga

SEQ ID NO: 43721 - DNA, 15 bp, Homo sapiens
tataatttggcttcg

SEQ ID NO: 43722 - DNA, 15 bp, Homo sapiens
atataatttggcttc

SEQ ID NO: 43723 - DNA, 15 bp, Homo sapiens
aatataatttggctt

SEQ ID NO: 43724 - DNA, 15 bp, Homo sapiens
aaatataatttggct

SEQ ID NO: 43725 - DNA, 15 bp, Homo sapiens
taaatataatttggc

SEQ ID NO: 43726 - DNA, 15 bp, Homo sapiens
ataaatataatttgg

SEQ ID NO: 43727 - DNA, 15 bp, Homo sapiens
cataaatataatttg

SEQ ID NO: 43728 - DNA, 15 bp, Homo sapiens
tcataaatataattt

SEQ ID NO: 43729 - DNA, 15 bp, Homo sapiens
ttcataaatataatt

SEQ ID NO: 43730 - DNA, 15 bp, Homo sapiens
tttcataaatataat

SEQ ID NO: 43731 - DNA, 15 bp, Homo sapiens
ctttcataaatataa

SEQ ID NO: 43732 - DNA, 15 bp, Homo sapiens
tctttcataaatata

SEQ ID NO: 43733 - DNA, 15 bp, Homo sapiens
ttctttcataaatat

SEQ ID NO: 43734 - DNA, 15 bp, Homo sapiens
tttctttcataaata

SEQ ID NO: 43735 - DNA, 15 bp, Homo sapiens
atttctttcataaat

SEQ ID NO: 43736 - DNA, 15 bp, Homo sapiens
tatttctttcataaa

SEQ ID NO: 43737 - DNA, 15 bp, Homo sapiens
atatttctttcataa

SEQ ID NO: 43738 - DNA, 15 bp, Homo sapiens
aatatttctttcata

SEQ ID NO: 43739 - DNA, 15 bp, Homo sapiens
gaatatttctttcat

SEQ ID NO: 43740 - DNA, 15 bp, Homo sapiens
agaatatttctttca

SEQ ID NO: 43741 - DNA, 15 bp, Homo sapiens
cagaatatttctttc

SEQ ID NO: 43742 - DNA, 15 bp, Homo sapiens
acagaatatttcttt

SEQ ID NO: 43743 - DNA, 15 bp, Homo sapiens
cacagaatatttctt

SEQ ID NO: 43744 - DNA, 15 bp, Homo sapiens
acacagaatatttct

SEQ ID NO: 43745 - DNA, 15 bp, Homo sapiens
aacacagaatatttc

SEQ ID NO: 43746 - DNA, 15 bp, Homo sapiens
taacacagaatattt

SEQ ID NO: 43747 - DNA, 15 bp, Homo sapiens
ataacacagaatatt

SEQ ID NO: 43748 - DNA, 15 bp, Homo sapiens
tataacacagaatat

SEQ ID NO: 43749 - DNA, 15 bp, Homo sapiens
ttataacacagaata

SEQ ID NO: 43750 - DNA, 15 bp, Homo sapiens
gttataacacagaat

SEQ ID NO: 43751 - DNA, 15 bp, Homo sapiens
ggttataacacagaa

SEQ ID NO: 43752 - DNA, 15 bp, Homo sapiens
tggttataacacaga

SEQ ID NO: 43753 - DNA, 15 bp, Homo sapiens
gtggttataacacag

SEQ ID NO: 43754 - DNA, 15 bp, Homo sapiens
ggtggttataacaca

SEQ ID NO: 43755 - DNA, 15 bp, Homo sapiens
tggtggttataacac

SEQ ID NO: 43756 - DNA, 15 bp, Homo sapiens
ttggtggttataaca

SEQ ID NO: 43757 - DNA, 15 bp, Homo sapiens
tttggtggttataac

SEQ ID NO: 43758 - DNA, 15 bp, Homo sapiens
atttggtggttataa

SEQ ID NO: 43759 - DNA, 15 bp, Homo sapiens
tatttggtggttata

SEQ ID NO: 43760 - DNA, 15 bp, Homo sapiens
gtatttggtggttat

SEQ ID NO: 43761 - DNA, 15 bp, Homo sapiens
tgtatttggtggtta

SEQ ID NO: 43762 - DNA, 15 bp, Homo sapiens
ctgtatttggtggtt

SEQ ID NO: 43763 - DNA, 15 bp, Homo sapiens
gctgtatttggtggt

SEQ ID NO: 43764 - DNA, 15 bp, Homo sapiens
ggctgtatttggtgg

SEQ ID NO: 43765 - DNA, 15 bp, Homo sapiens
gggctgtatttggtg

SEQ ID NO: 43766 - DNA, 15 bp, Homo sapiens
tgggctgtatttggt

SEQ ID NO: 43767 - DNA, 15 bp, Homo sapiens
ttgggctgtatttgg

SEQ ID NO: 43768 - DNA, 15 bp, Homo sapiens
attgggctgtatttg

SEQ ID NO: 43769 - DNA, 15 bp, Homo sapiens
aattgggctgtattt

SEQ ID NO: 43770 - DNA, 15 bp, Homo sapiens
gaattgggctgtatt

SEQ ID NO: 43771 - DNA, 15 bp, Homo sapiens
agaattgggctgtat

SEQ ID NO: 43772 - DNA, 15 bp, Homo sapiens
cagaattgggctgta

SEQ ID NO: 43773 - DNA, 15 bp, Homo sapiens
tcagaattgggctgt

SEQ ID NO: 43774 - DNA, 15 bp, Homo sapiens
gtcagaattgggctg

SEQ ID NO: 43775 - DNA, 15 bp, Homo sapiens
agtcagaattgggct

SEQ ID NO: 43776 - DNA, 15 bp, Homo sapiens
tagtcagaattgggc

SEQ ID NO: 43777 - DNA, 15 bp, Homo sapiens
ctagtcagaattggg

SEQ ID NO: 43778 - DNA, 15 bp, Homo sapiens
tctagtcagaattgg

SEQ ID NO: 43779 - DNA, 15 bp, Homo sapiens
atctagtcagaattg

SEQ ID NO: 43780 - DNA, 15 bp, Homo sapiens
catctagtcagaatt

SEQ ID NO: 43781 - DNA, 15 bp, Homo sapiens
tcatctagtcagaat

SEQ ID NO: 43782 - DNA, 15 bp, Homo sapiens
atcatctagtcagaa

SEQ ID NO: 43783 - DNA, 15 bp, Homo sapiens
catcatctagtcaga

SEQ ID NO: 43784 - DNA, 15 bp, Homo sapiens
ccatcatctagtcag

SEQ ID NO: 43785 - DNA, 15 bp, Homo sapiens
tccatcatctagtca

SEQ ID NO: 43786 - DNA, 15 bp, Homo sapiens
ttccatcatctagtc

SEQ ID NO: 43787 - DNA, 15 bp, Homo sapiens
cttccatcatctagt

SEQ ID NO: 43788 - DNA, 15 bp, Homo sapiens
tcttccatcatctag

SEQ ID NO: 43789 - DNA, 15 bp, Homo sapiens
ttcttccatcatcta

SEQ ID NO: 43790 - DNA, 15 bp, Homo sapiens
gttcttccatcatct

SEQ ID NO: 43791 - DNA, 15 bp, Homo sapiens
ggttcttccatcatc

SEQ ID NO: 43792 - DNA, 15 bp, Homo sapiens
aggttcttccatcat

SEQ ID NO: 43793 - DNA, 15 bp, Homo sapiens
caggttcttccatca

SEQ ID NO: 43794 - DNA, 15 bp, Homo sapiens
acaggttcttccatc

SEQ ID NO: 43795 - DNA, 15 bp, Homo sapiens
gacaggttcttccat

SEQ ID NO: 43796 - DNA, 15 bp, Homo sapiens
ggacaggttcttcca

SEQ ID NO: 43797 - DNA, 15 bp, Homo sapiens
gggacaggttcttcc

SEQ ID NO: 43798 - DNA, 15 bp, Homo sapiens
tgggacaggttcttc

SEQ ID NO: 43799 - DNA, 15 bp, Homo sapiens
atgggacaggttctt

SEQ ID NO: 43800 - DNA, 15 bp, Homo sapiens
gatgggacaggttct

SEQ ID NO: 43801 - DNA, 15 bp, Homo sapiens
tgatgggacaggttc

SEQ ID NO: 43802 - DNA, 15 bp, Homo sapiens
ctgatgggacaggtt

SEQ ID NO: 43803 - DNA, 15 bp, Homo sapiens
tctgatgggacaggt

SEQ ID NO: 43804 - DNA, 15 bp, Homo sapiens
ctctgatgggacagg

SEQ ID NO: 43805 - DNA, 15 bp, Homo sapiens
cctctgatgggacag

SEQ ID NO: 43806 - DNA, 15 bp, Homo sapiens
acctctgatgggaca

SEQ ID NO: 43807 - DNA, 15 bp, Homo sapiens
gacctctgatgggac

SEQ ID NO: 43808 - DNA, 15 bp, Homo sapiens
ggacctctgatggga

SEQ ID NO: 43809 - DNA, 15 bp, Homo sapiens
tggacctctgatggg

SEQ ID NO: 43810 - DNA, 15 bp, Homo sapiens
ctggacctctgatgg

SEQ ID NO: 43811 - DNA, 15 bp, Homo sapiens
gctggacctctgatg

SEQ ID NO: 43812 - DNA, 15 bp, Homo sapiens
tgctggacctctgat

SEQ ID NO: 43813 - DNA, 15 bp, Homo sapiens
atgctggacctctga

SEQ ID NO: 43814 - DNA, 15 bp, Homo sapiens
catgctggacctctg

SEQ ID NO: 43815 - DNA, 15 bp, Homo sapiens
tcatgctggacctct

SEQ ID NO: 43816 - DNA, 15 bp, Homo sapiens
ctcatgctggacctc

SEQ ID NO: 43817 - DNA, 15 bp, Homo sapiens
cctcatgctggacct

SEQ ID NO: 43818 - DNA, 15 bp, Homo sapiens
acctcatgctggacc

SEQ ID NO: 43819 - DNA, 15 bp, Homo sapiens
gacctcatgctggac

SEQ ID NO: 43820 - DNA, 15 bp, Homo sapiens
ggacctcatgctgga

SEQ ID NO: 43821 - DNA, 15 bp, Homo sapiens
tggacctcatgctgg

SEQ ID NO: 43822 - DNA, 15 bp, Homo sapiens
ctggacctcatgctg

SEQ ID NO: 43823 - DNA, 15 bp, Homo sapiens
gctggacctcatgct

SEQ ID NO: 43824 - DNA, 15 bp, Homo sapiens
tgctggacctcatgc

SEQ ID NO: 43825 - DNA, 15 bp, Homo sapiens
ctgctggacctcatg

SEQ ID NO: 43826 - DNA, 15 bp, Homo sapiens
tctgctggacctcat

SEQ ID NO: 43827 - DNA, 15 bp, Homo sapiens
ctctgctggacctca

SEQ ID NO: 43828 - DNA, 15 bp, Homo sapiens
cctctgctggacctc

SEQ ID NO: 43829 - DNA, 15 bp, Homo sapiens
acctctgctggacct

SEQ ID NO: 43830 - DNA, 15 bp, Homo sapiens
gacctctgctggacc

SEQ ID NO: 43831 - DNA, 15 bp, Homo sapiens
ggacctctgctggac

SEQ ID NO: 43832 - DNA, 15 bp, Homo sapiens
tggacctctgctgga

SEQ ID NO: 43833 - DNA, 15 bp, Homo sapiens
gtggacctctgctgg

SEQ ID NO: 43834 - DNA, 15 bp, Homo sapiens
ggtggacctctgctg

SEQ ID NO: 43835 - DNA, 15 bp, Homo sapiens
tggtggacctctgct

SEQ ID NO: 43836 - DNA, 15 bp, Homo sapiens
ctggtggacctctgc

SEQ ID NO: 43837 - DNA, 15 bp, Homo sapiens
tctggtggacctctg

SEQ ID NO: 43838 - DNA, 15 bp, Homo sapiens
ctctggtggacctct

SEQ ID NO: 43839 - DNA, 15 bp, Homo sapiens
cctctggtggacctc

SEQ ID NO: 43840 - DNA, 15 bp, Homo sapiens
tcctctggtggacct

SEQ ID NO: 43841 - DNA, 15 bp, Homo sapiens
ctcctctggtggacc

SEQ ID NO: 43842 - DNA, 15 bp, Homo sapiens
actcctctggtggac

SEQ ID NO: 43843 - DNA, 15 bp, Homo sapiens
aactcctctggtgga

SEQ ID NO: 43844 - DNA, 15 bp, Homo sapiens
gaactcctctggtgg

SEQ ID NO: 43845 - DNA, 15 bp, Homo sapiens
tgaactcctctggtg

SEQ ID NO: 43846 - DNA, 15 bp, Homo sapiens
ctgaactcctctggt

SEQ ID NO: 43847 - DNA, 15 bp, Homo sapiens
gctgaactcctctgg

SEQ ID NO: 43848 - DNA, 15 bp, Homo sapiens
tgctgaactcctctg

SEQ ID NO: 43849 - DNA, 15 bp, Homo sapiens
ttgctgaactcctct

SEQ ID NO: 43850 - DNA, 15 bp, Homo sapiens
attgctgaactcctc

SEQ ID NO: 43851 - DNA, 15 bp, Homo sapiens
aattgctgaactcct

SEQ ID NO: 43852 - DNA, 15 bp, Homo sapiens
aaattgctgaactcc

SEQ ID NO: 43853 - DNA, 15 bp, Homo sapiens
caaattgctgaactc

SEQ ID NO: 43854 - DNA, 15 bp, Homo sapiens
gcaaattgctgaact

SEQ ID NO: 43855 - DNA, 15 bp, Homo sapiens
agcaaattgctgaac

SEQ ID NO: 43856 - DNA, 15 bp, Homo sapiens
cagcaaattgctgaa

SEQ ID NO: 43857 - DNA, 15 bp, Homo sapiens
gcagcaaattgctga

SEQ ID NO: 43858 - DNA, 15 bp, Homo sapiens
agcagcaaattgctg

SEQ ID NO: 43859 - DNA, 15 bp, Homo sapiens
gagcagcaaattgct

SEQ ID NO: 43860 - DNA, 15 bp, Homo sapiens
agagcagcaaattgc

SEQ ID NO: 43861 - DNA, 15 bp, Homo sapiens
aagagcagcaaattg

SEQ ID NO: 43862 - DNA, 15 bp, Homo sapiens
taagagcagcaaatt

SEQ ID NO: 43863 - DNA, 15 bp, Homo sapiens
ctaagagcagcaaat

SEQ ID NO: 43864 - DNA, 15 bp, Homo sapiens
cctaagagcagcaaa

SEQ ID NO: 43865 - DNA, 15 bp, Homo sapiens
ccctaagagcagcaa

SEQ ID NO: 43866 - DNA, 15 bp, Homo sapiens
gccctaagagcagca

SEQ ID NO: 43867 - DNA, 15 bp, Homo sapiens
tgccctaagagcagc

SEQ ID NO: 43868 - DNA, 15 bp, Homo sapiens
ctgccctaagagcag

SEQ ID NO: 43869 - DNA, 15 bp, Homo sapiens
cctgccctaagagca

SEQ ID NO: 43870 - DNA, 15 bp, Homo sapiens
ccctgccctaagagc

SEQ ID NO: 43871 - DNA, 15 bp, Homo sapiens
tccctgccctaagag

SEQ ID NO: 43872 - DNA, 15 bp, Homo sapiens
atccctgccctaaga

SEQ ID NO: 43873 - DNA, 15 bp, Homo sapiens
gatccctgccctaag

SEQ ID NO: 43874 - DNA, 15 bp, Homo sapiens
tgatccctgccctaa

SEQ ID NO: 43875 - DNA, 15 bp, Homo sapiens
ttgatccctgcccta

SEQ ID NO: 43876 - DNA, 15 bp, Homo sapiens
attgatccctgccct

SEQ ID NO: 43877 - DNA, 15 bp, Homo sapiens
aattgatccctgccc

SEQ ID NO: 43878 - DNA, 15 bp, Homo sapiens
gaattgatccctgcc

SEQ ID NO: 43879 - DNA, 15 bp, Homo sapiens
ggaattgatccctgc

SEQ ID NO: 43880 - DNA, 15 bp, Homo sapiens
aggaattgatccctg

SEQ ID NO: 43881 - DNA, 15 bp, Homo sapiens
aaggaattgatccct

SEQ ID NO: 43882 - DNA, 15 bp, Homo sapiens
taaggaattgatccc

SEQ ID NO: 43883 - DNA, 15 bp, Homo sapiens
ttaaggaattgatcc

SEQ ID NO: 43884 - DNA, 15 bp, Homo sapiens
attaaggaattgatc

SEQ ID NO: 43885 - DNA, 15 bp, Homo sapiens
tattaaggaattgat

SEQ ID NO: 43886 - DNA, 15 bp, Homo sapiens
atattaaggaattga

SEQ ID NO: 43887 - DNA, 15 bp, Homo sapiens
gatattaaggaattg

SEQ ID NO: 43888 - DNA, 15 bp, Homo sapiens
agatattaaggaatt

SEQ ID NO: 43889 - DNA, 15 bp, Homo sapiens
aagatattaaggaat

SEQ ID NO: 43890 - DNA, 15 bp, Homo sapiens
taagatattaaggaa

SEQ ID NO: 43891 - DNA, 15 bp, Homo sapiens
ctaagatattaagga

SEQ ID NO: 43892 - DNA, 15 bp, Homo sapiens
cctaagatattaagg

SEQ ID NO: 43893 - DNA, 15 bp, Homo sapiens
tcctaagatattaag

SEQ ID NO: 43894 - DNA, 15 bp, Homo sapiens
ttcctaagatattaa

SEQ ID NO: 43895 - DNA, 15 bp, Homo sapiens
cttcctaagatatta

SEQ ID NO: 43896 - DNA, 15 bp, Homo sapiens
tcttcctaagatatt

SEQ ID NO: 43897 - DNA, 15 bp, Homo sapiens
gtcttcctaagatat

SEQ ID NO: 43898 - DNA, 15 bp, Homo sapiens
agtcttcctaagata

SEQ ID NO: 43899 - DNA, 15 bp, Homo sapiens
tagtcttcctaagat

SEQ ID NO: 43900 - DNA, 15 bp, Homo sapiens
ctagtcttcctaaga

SEQ ID NO: 43901 - DNA, 15 bp, Homo sapiens
cctagtcttcctaag

SEQ ID NO: 43902 - DNA, 15 bp, Homo sapiens
acctagtcttcctaa

SEQ ID NO: 43903 - DNA, 15 bp, Homo sapiens
tacctagtcttccta

SEQ ID NO: 43904 - DNA, 15 bp, Homo sapiens
atacctagtcttcct

SEQ ID NO: 43905 - DNA, 15 bp, Homo sapiens
aatacctagtcttcc

SEQ ID NO: 43906 - DNA, 15 bp, Homo sapiens
caatacctagtcttc

SEQ ID NO: 43907 - DNA, 15 bp, Homo sapiens
tcaatacctagtctt

SEQ ID NO: 43908 - DNA, 15 bp, Homo sapiens
gtcaatacctagtct

SEQ ID NO: 43909 - DNA, 15 bp, Homo sapiens
tgtcaatacctagtc

SEQ ID NO: 43910 - DNA, 15 bp, Homo sapiens
ctgtcaatacctagt

SEQ ID NO: 43911 - DNA, 15 bp, Homo sapiens
actgtcaatacctag

SEQ ID NO: 43912 - DNA, 15 bp, Homo sapiens
tactgtcaataccta

SEQ ID NO: 43913 - DNA, 15 bp, Homo sapiens
ttactgtcaatacct

SEQ ID NO: 43914 - DNA, 15 bp, Homo sapiens
attactgtcaatacc

SEQ ID NO: 43915 - DNA, 15 bp, Homo sapiens
cattactgtcaatac

SEQ ID NO: 43916 - DNA, 15 bp, Homo sapiens
ccattactgtcaata

SEQ ID NO: 43917 - DNA, 15 bp, Homo sapiens
accattactgtcaat

SEQ ID NO: 43918 - DNA, 15 bp, Homo sapiens
caccattactgtcaa

SEQ ID NO: 43919 - DNA, 15 bp, Homo sapiens
tcaccattactgtca

SEQ ID NO: 43920 - DNA, 15 bp, Homo sapiens
gtcaccattactgtc

SEQ ID NO: 43921 - DNA, 15 bp, Homo sapiens
tgtcaccattactgt

SEQ ID NO: 43922 - DNA, 15 bp, Homo sapiens
ttgtcaccattactg

SEQ ID NO: 43923 - DNA, 15 bp, Homo sapiens
tttgtcaccattact

SEQ ID NO: 43924 - DNA, 15 bp, Homo sapiens
ctttgtcaccattac

SEQ ID NO: 43925 - DNA, 15 bp, Homo sapiens
gctttgtcaccatta

SEQ ID NO: 43926 - DNA, 15 bp, Homo sapiens
tgctttgtcaccatt

SEQ ID NO: 43927 - DNA, 15 bp, Homo sapiens
ttgctttgtcaccat

SEQ ID NO: 43928 - DNA, 15 bp, Homo sapiens
attgctttgtcacca

SEQ ID NO: 43929 - DNA, 15 bp, Homo sapiens
cattgctttgtcacc

SEQ ID NO: 43930 - DNA, 15 bp, Homo sapiens
tcattgctttgtcac

SEQ ID NO: 43931 - DNA, 15 bp, Homo sapiens
ttcattgctttgtca

SEQ ID NO: 43932 - DNA, 15 bp, Homo sapiens
tttcattgctttgtc

SEQ ID NO: 43933 - DNA, 15 bp, Homo sapiens
ttttcattgctttgt

SEQ ID NO: 43934 - DNA, 15 bp, Homo sapiens
cttttcattgctttg

SEQ ID NO: 43935 - DNA, 15 bp, Homo sapiens
ccttttcattgcttt

SEQ ID NO: 43936 - DNA, 15 bp, Homo sapiens
tccttttcattgctt

SEQ ID NO: 43937 - DNA, 15 bp, Homo sapiens
ttccttttcattgct

SEQ ID NO: 43938 - DNA, 15 bp, Homo sapiens
tttccttttcattgc

SEQ ID NO: 43939 - DNA, 15 bp, Homo sapiens
ctttccttttcattg

SEQ ID NO: 43940 - DNA, 15 bp, Homo sapiens
cctttccttttcatt

SEQ ID NO: 43941 - DNA, 15 bp, Homo sapiens
tcctttccttttcat

SEQ ID NO: 43942 - DNA, 15 bp, Homo sapiens
ttcctttccttttca

SEQ ID NO: 43943 - DNA, 15 bp, Homo sapiens
cttcctttccttttc

SEQ ID NO: 43944 - DNA, 15 bp, Homo sapiens
tcttcctttcctttt

SEQ ID NO: 43945 - DNA, 15 bp, Homo sapiens
ttcttcctttccttt

SEQ ID NO: 43946 - DNA, 15 bp, Homo sapiens
cttcttcctttcctt

SEQ ID NO: 43947 - DNA, 15 bp, Homo sapiens
acttcttcctttcct

SEQ ID NO: 43948 - DNA, 15 bp, Homo sapiens
cacttcttcctttcc

SEQ ID NO: 43949 - DNA, 15 bp, Homo sapiens
tcacttcttcctttc

SEQ ID NO: 43950 - DNA, 15 bp, Homo sapiens
atcacttcttccttt

SEQ ID NO: 43951 - DNA, 15 bp, Homo sapiens
tatcacttcttcctt

SEQ ID NO: 43952 - DNA, 15 bp, Homo sapiens
ttatcacttcttcct

SEQ ID NO: 43953 - DNA, 15 bp, Homo sapiens
cttatcacttcttcc

SEQ ID NO: 43954 - DNA, 15 bp, Homo sapiens
tcttatcacttcttc

SEQ ID NO: 43955 - DNA, 15 bp, Homo sapiens
gtcttatcacttctt

SEQ ID NO: 43956 - DNA, 15 bp, Homo sapiens
cgtcttatcacttct

SEQ ID NO: 43957 - DNA, 15 bp, Homo sapiens
acgtcttatcacttc

SEQ ID NO: 43958 - DNA, 15 bp, Homo sapiens
cacgtcttatcactt

SEQ ID NO: 43959 - DNA, 15 bp, Homo sapiens
ccacgtcttatcact

SEQ ID NO: 43960 - DNA, 15 bp, Homo sapiens
gccacgtcttatcac

SEQ ID NO: 43961 - DNA, 15 bp, Homo sapiens
tgccacgtcttatca

SEQ ID NO: 43962 - DNA, 15 bp, Homo sapiens
ctgccacgtcttatc

SEQ ID NO: 43963 - DNA, 15 bp, Homo sapiens
gctgccacgtcttat

SEQ ID NO: 43964 - DNA, 15 bp, Homo sapiens
tgctgccacgtctta

SEQ ID NO: 43965 - DNA, 15 bp, Homo sapiens
ttgctgccacgtctt

SEQ ID NO: 43966 - DNA, 15 bp, Homo sapiens
cttgctgccacgtct

SEQ ID NO: 43967 - DNA, 15 bp, Homo sapiens
gcttgctgccacgtc

SEQ ID NO: 43968 - DNA, 15 bp, Homo sapiens
agcttgctgccacgt

SEQ ID NO: 43969 - DNA, 15 bp, Homo sapiens
cagcttgctgccacg

SEQ ID NO: 43970 - DNA, 15 bp, Homo sapiens
tcagcttgctgccac

SEQ ID NO: 43971 - DNA, 15 bp, Homo sapiens
ttcagcttgctgcca

SEQ ID NO: 43972 - DNA, 15 bp, Homo sapiens
cttcagcttgctgcc

SEQ ID NO: 43973 - DNA, 15 bp, Homo sapiens
acttcagcttgctgc

SEQ ID NO: 43974 - DNA, 15 bp, Homo sapiens
tacttcagcttgctg

SEQ ID NO: 43975 - DNA, 15 bp, Homo sapiens
atacttcagcttgct

SEQ ID NO: 43976 - DNA, 15 bp, Homo sapiens
catacttcagcttgc

SEQ ID NO: 43977 - DNA, 15 bp, Homo sapiens
tcatacttcagcttg

SEQ ID NO: 43978 - DNA, 15 bp, Homo sapiens
atcatacttcagctt

SEQ ID NO: 43979 - DNA, 15 bp, Homo sapiens
catcatacttcagct

SEQ ID NO: 43980 - DNA, 15 bp, Homo sapiens
tcatcatacttcagc

SEQ ID NO: 43981 - DNA, 15 bp, Homo sapiens
ctcatcatacttcag

SEQ ID NO: 43982 - DNA, 15 bp, Homo sapiens
actcatcatacttca

SEQ ID NO: 43983 - DNA, 15 bp, Homo sapiens
tactcatcatacttc

SEQ ID NO: 43984 - DNA, 15 bp, Homo sapiens
ttactcatcatactt

SEQ ID NO: 43985 - DNA, 15 bp, Homo sapiens
tttactcatcatact

SEQ ID NO: 43986 - DNA, 15 bp, Homo sapiens
ctttactcatcatac

SEQ ID NO: 43987 - DNA, 15 bp, Homo sapiens
tctttactcatcata

SEQ ID NO: 43988 - DNA, 15 bp, Homo sapiens
ttctttactcatcat

SEQ ID NO: 43989 - DNA, 15 bp, Homo sapiens
attctttactcatca

SEQ ID NO: 43990 - DNA, 15 bp, Homo sapiens
tattctttactcatc

SEQ ID NO: 43991 - DNA, 15 bp, Homo sapiens
ctattctttactcat

SEQ ID NO: 43992 - DNA, 15 bp, Homo sapiens
cctattctttactca

SEQ ID NO: 43993 - DNA, 15 bp, Homo sapiens
tcctattctttactc

SEQ ID NO: 43994 - DNA, 15 bp, Homo sapiens
ttcctattctttact

SEQ ID NO: 43995 - DNA, 15 bp, Homo sapiens
attcctattctttac

SEQ ID NO: 43996 - DNA, 15 bp, Homo sapiens
gattcctattcttta

SEQ ID NO: 43997 - DNA, 15 bp, Homo sapiens
tgattcctattcttt

SEQ ID NO: 43998 - DNA, 15 bp, Homo sapiens
ttgattcctattctt

SEQ ID NO: 43999 - DNA, 15 bp, Homo sapiens
tttgattcctattct

SEQ ID NO: 44000 - DNA, 15 bp, Homo sapiens
ctttgattcctattc

SEQ ID NO: 44001 - DNA, 15 bp, Homo sapiens
actttgattcctatt

SEQ ID NO: 44002 - DNA, 15 bp, Homo sapiens
tactttgattcctat

SEQ ID NO: 44003 - DNA, 15 bp, Homo sapiens
atactttgattccta

SEQ ID NO: 44004 - DNA, 15 bp, Homo sapiens
catactttgattcct

SEQ ID NO: 44005 - DNA, 15 bp, Homo sapiens
acatactttgattcc

SEQ ID NO: 44006 - DNA, 15 bp, Homo sapiens
cacatactttgattc

SEQ ID NO: 44007 - DNA, 15 bp, Homo sapiens
ccacatactttgatt

SEQ ID NO: 44008 - DNA, 15 bp, Homo sapiens
tccacatactttgat

SEQ ID NO: 44009 - DNA, 15 bp, Homo sapiens
ctccacatactttga

SEQ ID NO: 44010 - DNA, 15 bp, Homo sapiens
actccacatactttg

SEQ ID NO: 44011 - DNA, 15 bp, Homo sapiens
cactccacatacttt

SEQ ID NO: 44012 - DNA, 15 bp, Homo sapiens
acactccacatactt

SEQ ID NO: 44013 - DNA, 15 bp, Homo sapiens
aacactccacatact

SEQ ID NO: 44014 - DNA, 15 bp, Homo sapiens
taacactccacatac

SEQ ID NO: 44015 - DNA, 15 bp, Homo sapiens
ctaacactccacata

SEQ ID NO: 44016 - DNA, 15 bp, Homo sapiens
tctaacactccacat

SEQ ID NO: 44017 - DNA, 15 bp, Homo sapiens
ctctaacactccaca

SEQ ID NO: 44018 - DNA, 15 bp, Homo sapiens
tctctaacactccac

SEQ ID NO: 44019 - DNA, 15 bp, Homo sapiens
ttctctaacactcca

SEQ ID NO: 44020 - DNA, 15 bp, Homo sapiens
tttctctaacactcc

SEQ ID NO: 44021 - DNA, 15 bp, Homo sapiens
ttttctctaacactc

SEQ ID NO: 44022 - DNA, 15 bp, Homo sapiens
gttttctctaacact

SEQ ID NO: 44023 - DNA, 15 bp, Homo sapiens
ggttttctctaacac

SEQ ID NO: 44024 - DNA, 15 bp, Homo sapiens
aggttttctctaaca

SEQ ID NO: 44025 - DNA, 15 bp, Homo sapiens
caggttttctctaac

SEQ ID NO: 44026 - DNA, 15 bp, Homo sapiens
ccaggttttctctaa

SEQ ID NO: 44027 - DNA, 15 bp, Homo sapiens
tccaggttttctcta

SEQ ID NO: 44028 - DNA, 15 bp, Homo sapiens
atccaggttttctct

SEQ ID NO: 44029 - DNA, 15 bp, Homo sapiens
aatccaggttttctc

SEQ ID NO: 44030 - DNA, 15 bp, Homo sapiens
aaatccaggttttct

SEQ ID NO: 44031 - DNA, 15 bp, Homo sapiens
taaatccaggttttc

SEQ ID NO: 44032 - DNA, 15 bp, Homo sapiens
ctaaatccaggtttt

SEQ ID NO: 44033 - DNA, 15 bp, Homo sapiens
tctaaatccaggttt

SEQ ID NO: 44034 - DNA, 15 bp, Homo sapiens
atctaaatccaggtt

SEQ ID NO: 44035 - DNA, 15 bp, Homo sapiens
gatctaaatccaggt

SEQ ID NO: 44036 - DNA, 15 bp, Homo sapiens
ggatctaaatccagg

SEQ ID NO: 44037 - DNA, 15 bp, Homo sapiens
tggatctaaatccag

SEQ ID NO: 44038 - DNA, 15 bp, Homo sapiens
ctggatctaaatcca

SEQ ID NO: 44039 - DNA, 15 bp, Homo sapiens
tctggatctaaatcc

SEQ ID NO: 44040 - DNA, 15 bp, Homo sapiens
atctggatctaaatc

SEQ ID NO: 44041 - DNA, 15 bp, Homo sapiens
aatctggatctaaat

SEQ ID NO: 44042 - DNA, 15 bp, Homo sapiens
gaatctggatctaaa

SEQ ID NO: 44043 - DNA, 15 bp, Homo sapiens
agaatctggatctaa

SEQ ID NO: 44044 - DNA, 15 bp, Homo sapiens
tagaatctggatcta

SEQ ID NO: 44045 - DNA, 15 bp, Homo sapiens
ctagaatctggatct

SEQ ID NO: 44046 - DNA, 15 bp, Homo sapiens
actagaatctggatc

SEQ ID NO: 44047 - DNA, 15 bp, Homo sapiens
gactagaatctggat

SEQ ID NO: 44048 - DNA, 15 bp, Homo sapiens
ggactagaatctgga

SEQ ID NO: 44049 - DNA, 15 bp, Homo sapiens
aggactagaatctgg

SEQ ID NO: 44050 - DNA, 15 bp, Homo sapiens
taggactagaatctg

SEQ ID NO: 44051 - DNA, 15 bp, Homo sapiens
ataggactagaatct

SEQ ID NO: 44052 - DNA, 15 bp, Homo sapiens
gataggactagaatc

SEQ ID NO: 44053 - DNA, 15 bp, Homo sapiens
agataggactagaat

SEQ ID NO: 44054 - DNA, 15 bp, Homo sapiens
gagataggactagaa

SEQ ID NO: 44055 - DNA, 15 bp, Homo sapiens
agagataggactaga

SEQ ID NO: 44056 - DNA, 15 bp, Homo sapiens
cagagataggactag

SEQ ID NO: 44057 - DNA, 15 bp, Homo sapiens
acagagataggacta

SEQ ID NO: 44058 - DNA, 15 bp, Homo sapiens
gacagagataggact

SEQ ID NO: 44059 - DNA, 15 bp, Homo sapiens
tgacagagataggac

SEQ ID NO: 44060 - DNA, 15 bp, Homo sapiens
atgacagagatagga

SEQ ID NO: 44061 - DNA, 15 bp, Homo sapiens
aatgacagagatagg

SEQ ID NO: 44062 - DNA, 15 bp, Homo sapiens
taatgacagagatag

SEQ ID NO: 44063 - DNA, 15 bp, Homo sapiens
ttaatgacagagata

SEQ ID NO: 44064 - DNA, 15 bp, Homo sapiens
attaatgacagagat

SEQ ID NO: 44065 - DNA, 15 bp, Homo sapiens
gattaatgacagaga

SEQ ID NO: 44066 - DNA, 15 bp, Homo sapiens
agattaatgacagag

SEQ ID NO: 44067 - DNA, 15 bp, Homo sapiens
tagattaatgacaga

SEQ ID NO: 44068 - DNA, 15 bp, Homo sapiens
atagattaatgacag

SEQ ID NO: 44069 - DNA, 15 bp, Homo sapiens
aatagattaatgaca

SEQ ID NO: 44070 - DNA, 15 bp, Homo sapiens
caatagattaatgac

SEQ ID NO: 44071 - DNA, 15 bp, Homo sapiens
gcaatagattaatga

SEQ ID NO: 44072 - DNA, 15 bp, Homo sapiens
cgcaatagattaatg

SEQ ID NO: 44073 - DNA, 15 bp, Homo sapiens
acgcaatagattaat

SEQ ID NO: 44074 - DNA, 15 bp, Homo sapiens
tacgcaatagattaa

SEQ ID NO: 44075 - DNA, 15 bp, Homo sapiens
ttacgcaatagatta

SEQ ID NO: 44076 - DNA, 15 bp, Homo sapiens
gttacgcaatagatt

SEQ ID NO: 44077 - DNA, 15 bp, Homo sapiens
ggttacgcaatagat

SEQ ID NO: 44078 - DNA, 15 bp, Homo sapiens
gggttacgcaataga

SEQ ID NO: 44079 - DNA, 15 bp, Homo sapiens
agggttacgcaatag

SEQ ID NO: 44080 - DNA, 15 bp, Homo sapiens
cagggttacgcaata

SEQ ID NO: 44081 - DNA, 15 bp, Homo sapiens
tcagggttacgcaat

SEQ ID NO: 44082 - DNA, 15 bp, Homo sapiens
ctcagggttacgcaa

SEQ ID NO: 44083 - DNA, 15 bp, Homo sapiens
gctcagggttacgca

SEQ ID NO: 44084 - DNA, 15 bp, Homo sapiens
tgctcagggttacgc

SEQ ID NO: 44085 - DNA, 15 bp, Homo sapiens
atgctcagggttacg

SEQ ID NO: 44086 - DNA, 15 bp, Homo sapiens
tatgctcagggttac

SEQ ID NO: 44087 - DNA, 15 bp, Homo sapiens
atatgctcagggtta

SEQ ID NO: 44088 - DNA, 15 bp, Homo sapiens
gatatgctcagggtt

SEQ ID NO: 44089 - DNA, 15 bp, Homo sapiens
tgatatgctcagggt

SEQ ID NO: 44090 - DNA, 15 bp, Homo sapiens
atgatatgctcaggg

SEQ ID NO: 44091 - DNA, 15 bp, Homo sapiens
gatgatatgctcagg

SEQ ID NO: 44092 - DNA, 15 bp, Homo sapiens
agatgatatgctcag

SEQ ID NO: 44093 - DNA, 15 bp, Homo sapiens
tagatgatatgctca

SEQ ID NO: 44094 - DNA, 15 bp, Homo sapiens
gtagatgatatgctc

SEQ ID NO: 44095 - DNA, 15 bp, Homo sapiens
ggtagatgatatgct

SEQ ID NO: 44096 - DNA, 15 bp, Homo sapiens
aggtagatgatatgc

SEQ ID NO: 44097 - DNA, 15 bp, Homo sapiens
gaggtagatgatatg

SEQ ID NO: 44098 - DNA, 15 bp, Homo sapiens
agaggtagatgatat

SEQ ID NO: 44099 - DNA, 15 bp, Homo sapiens
gagaggtagatgata

SEQ ID NO: 44100 - DNA, 15 bp, Homo sapiens
agagaggtagatgat

SEQ ID NO: 44101 - DNA, 15 bp, Homo sapiens
aagagaggtagatga

SEQ ID NO: 44102 - DNA, 15 bp, Homo sapiens
aaagagaggtagatg

SEQ ID NO: 44103 - DNA, 15 bp, Homo sapiens
caaagagaggtagat

SEQ ID NO: 44104 - DNA, 15 bp, Homo sapiens
tcaaagagaggtaga

SEQ ID NO: 44105 - DNA, 15 bp, Homo sapiens
ctcaaagagaggtag

SEQ ID NO: 44106 - DNA, 15 bp, Homo sapiens
actcaaagagaggta

SEQ ID NO: 44107 - DNA, 15 bp, Homo sapiens
aactcaaagagaggt

SEQ ID NO: 44108 - DNA, 15 bp, Homo sapiens
aaactcaaagagagg

SEQ ID NO: 44109 - DNA, 15 bp, Homo sapiens
caaactcaaagagag

SEQ ID NO: 44110 - DNA, 15 bp, Homo sapiens
gcaaactcaaagaga

SEQ ID NO: 44111 - DNA, 15 bp, Homo sapiens
agcaaactcaaagag

SEQ ID NO: 44112 - DNA, 15 bp, Homo sapiens
aagcaaactcaaaga

SEQ ID NO: 44113 - DNA, 15 bp, Homo sapiens
caagcaaactcaaag

SEQ ID NO: 44114 - DNA, 15 bp, Homo sapiens
acaagcaaactcaaa

SEQ ID NO: 44115 - DNA, 15 bp, Homo sapiens
gacaagcaaactcaa

SEQ ID NO: 44116 - DNA, 15 bp, Homo sapiens
tgacaagcaaactca

SEQ ID NO: 44117 - DNA, 15 bp, Homo sapiens
ttgacaagcaaactc

SEQ ID NO: 44118 - DNA, 15 bp, Homo sapiens
attgacaagcaaact

SEQ ID NO: 44119 - DNA, 15 bp, Homo sapiens
tattgacaagcaaac

SEQ ID NO: 44120 - DNA, 15 bp, Homo sapiens
ttattgacaagcaaa

SEQ ID NO: 44121 - DNA, 15 bp, Homo sapiens
tttattgacaagcaa

SEQ ID NO: 44122 - DNA, 15 bp, Homo sapiens
ttttattgacaagca

SEQ ID NO: 44123 - DNA, 15 bp, Homo sapiens
attttattgacaagc

SEQ ID NO: 44124 - DNA, 15 bp, Homo sapiens
cattttattgacaag

SEQ ID NO: 44125 - DNA, 15 bp, Homo sapiens
tcattttattgacaa

SEQ ID NO: 44126 - DNA, 15 bp, Homo sapiens
ttcattttattgaca

SEQ ID NO: 44127 - DNA, 15 bp, Homo sapiens
cttcattttattgac

SEQ ID NO: 44128 - DNA, 15 bp, Homo sapiens
tcttcattttattga

SEQ ID NO: 44129 - DNA, 15 bp, Homo sapiens
ctcttcattttattg

SEQ ID NO: 44130 - DNA, 15 bp, Homo sapiens
tctcttcattttatt

SEQ ID NO: 44131 - DNA, 15 bp, Homo sapiens
gtctcttcattttat

SEQ ID NO: 44132 - DNA, 15 bp, Homo sapiens
agtctcttcatttta

SEQ ID NO: 44133 - DNA, 15 bp, Homo sapiens
aagtctcttcatttt

SEQ ID NO: 44134 - DNA, 15 bp, Homo sapiens
aaagtctcttcattt

SEQ ID NO: 44135 - DNA, 15 bp, Homo sapiens
caaagtctcttcatt

SEQ ID NO: 44136 - DNA, 15 bp, Homo sapiens
tcaaagtctcttcat

SEQ ID NO: 44137 - DNA, 15 bp, Homo sapiens
ttcaaagtctcttca

SEQ ID NO: 44138 - DNA, 15 bp, Homo sapiens
tttcaaagtctcttc

SEQ ID NO: 44139 - DNA, 15 bp, Homo sapiens
atttcaaagtctctt

SEQ ID NO: 44140 - DNA, 15 bp, Homo sapiens
gatttcaaagtctct

SEQ ID NO: 44141 - DNA, 15 bp, Homo sapiens
agatttcaaagtctc

SEQ ID NO: 44142 - DNA, 15 bp, Homo sapiens
cagatttcaaagtct

SEQ ID NO: 44143 - DNA, 15 bp, Homo sapiens
tcagatttcaaagtc

SEQ ID NO: 44144 - DNA, 15 bp, Homo sapiens
ctcagatttcaaagt

SEQ ID NO: 44145 - DNA, 15 bp, Homo sapiens
tctcagatttcaaag

SEQ ID NO: 44146 - DNA, 15 bp, Homo sapiens
gtctcagatttcaaa

SEQ ID NO: 44147 - DNA, 15 bp, Homo sapiens
agtctcagatttcaa

SEQ ID NO: 44148 - DNA, 15 bp, Homo sapiens
aagtctcagatttca

SEQ ID NO: 44149 - DNA, 15 bp, Homo sapiens
gaagtctcagatttc

SEQ ID NO: 44150 - DNA, 15 bp, Homo sapiens
ggaagtctcagattt

SEQ ID NO: 44151 - DNA, 15 bp, Homo sapiens
aggaagtctcagatt

SEQ ID NO: 44152 - DNA, 15 bp, Homo sapiens
caggaagtctcagat

SEQ ID NO: 44153 - DNA, 15 bp, Homo sapiens
ccaggaagtctcaga

SEQ ID NO: 44154 - DNA, 15 bp, Homo sapiens
tccaggaagtctcag

SEQ ID NO: 44155 - DNA, 15 bp, Homo sapiens
atccaggaagtctca

SEQ ID NO: 44156 - DNA, 15 bp, Homo sapiens
tatccaggaagtctc

SEQ ID NO: 44157 - DNA, 15 bp, Homo sapiens
ttatccaggaagtct

SEQ ID NO: 44158 - DNA, 15 bp, Homo sapiens
cttatccaggaagtc

SEQ ID NO: 44159 - DNA, 15 bp, Homo sapiens
acttatccaggaagt

SEQ ID NO: 44160 - DNA, 15 bp, Homo sapiens
tacttatccaggaag

SEQ ID NO: 44161 - DNA, 15 bp, Homo sapiens
gtacttatccaggaa

SEQ ID NO: 44162 - DNA, 15 bp, Homo sapiens
agtacttatccagga

SEQ ID NO: 44163 - DNA, 15 bp, Homo sapiens
tagtacttatccagg

SEQ ID NO: 44164 - DNA, 15 bp, Homo sapiens
ttagtacttatccag

SEQ ID NO: 44165 - DNA, 15 bp, Homo sapiens
tttagtacttatcca

SEQ ID NO: 44166 - DNA, 15 bp, Homo sapiens
atttagtacttatcc

SEQ ID NO: 44167 - DNA, 15 bp, Homo sapiens
tatttagtacttatc

SEQ ID NO: 44168 - DNA, 15 bp, Homo sapiens
gtatttagtacttat

SEQ ID NO: 44169 - DNA, 15 bp, Homo sapiens
tgtatttagtactta

SEQ ID NO: 44170 - DNA, 15 bp, Homo sapiens
ctgtatttagtactt

SEQ ID NO: 44171 - DNA, 15 bp, Homo sapiens
tctgtatttagtact

SEQ ID NO: 44172 - DNA, 15 bp, Homo sapiens
atctgtatttagtac

SEQ ID NO: 44173 - DNA, 15 bp, Homo sapiens
aatctgtatttagta

SEQ ID NO: 44174 - DNA, 15 bp, Homo sapiens
taatctgtatttagt

SEQ ID NO: 44175 - DNA, 15 bp, Homo sapiens
ataatctgtatttag

SEQ ID NO: 44176 - DNA, 15 bp, Homo sapiens
cataatctgtattta

SEQ ID NO: 44177 - DNA, 15 bp, Homo sapiens
acataatctgtattt

SEQ ID NO: 44178 - DNA, 15 bp, Homo sapiens
gacataatctgtatt

SEQ ID NO: 44179 - DNA, 15 bp, Homo sapiens
tgacataatctgtat

SEQ ID NO: 44180 - DNA, 15 bp, Homo sapiens
gtgacataatctgta

SEQ ID NO: 44181 - DNA, 15 bp, Homo sapiens
agtgacataatctgt

SEQ ID NO: 44182 - DNA, 15 bp, Homo sapiens
cagtgacataatctg

SEQ ID NO: 44183 - DNA, 15 bp, Homo sapiens
tcagtgacataatct

SEQ ID NO: 44184 - DNA, 15 bp, Homo sapiens
atcagtgacataatc

SEQ ID NO: 44185 - DNA, 15 bp, Homo sapiens
catcagtgacataat

SEQ ID NO: 44186 - DNA, 15 bp, Homo sapiens
acatcagtgacataa

SEQ ID NO: 44187 - DNA, 15 bp, Homo sapiens
gacatcagtgacata

SEQ ID NO: 44188 - DNA, 15 bp, Homo sapiens
agacatcagtgacat

SEQ ID NO: 44189 - DNA, 15 bp, Homo sapiens
cagacatcagtgaca

SEQ ID NO: 44190 - DNA, 15 bp, Homo sapiens
gcagacatcagtgac

SEQ ID NO: 44191 - DNA, 15 bp, Homo sapiens
ggcagacatcagtga

SEQ ID NO: 44192 - DNA, 15 bp, Homo sapiens
aggcagacatcagtg

SEQ ID NO: 44193 - DNA, 15 bp, Homo sapiens
gaggcagacatcagt

SEQ ID NO: 44194 - DNA, 15 bp, Homo sapiens
agaggcagacatcag

SEQ ID NO: 44195 - DNA, 15 bp, Homo sapiens
tagaggcagacatca

SEQ ID NO: 44196 - DNA, 15 bp, Homo sapiens
atagaggcagacatc

SEQ ID NO: 44197 - DNA, 15 bp, Homo sapiens
aatagaggcagacat

SEQ ID NO: 44198 - DNA, 15 bp, Homo sapiens
aaatagaggcagaca

SEQ ID NO: 44199 - DNA, 15 bp, Homo sapiens
taaatagaggcagac

SEQ ID NO: 44200 - DNA, 15 bp, Homo sapiens
ataaatagaggcaga

SEQ ID NO: 44201 - DNA, 15 bp, Homo sapiens
aataaatagaggcag

SEQ ID NO: 44202 - DNA, 15 bp, Homo sapiens
aaataaatagaggca

SEQ ID NO: 44203 - DNA, 15 bp, Homo sapiens
gaaataaatagaggc

SEQ ID NO: 44204 - DNA, 15 bp, Homo sapiens
agaaataaatagagg

SEQ ID NO: 44205 - DNA, 15 bp, Homo sapiens
gagaaataaatagag

SEQ ID NO: 44206 - DNA, 15 bp, Homo sapiens
ggagaaataaataga

SEQ ID NO: 44207 - DNA, 15 bp, Homo sapiens
gggagaaataaatag

SEQ ID NO: 44208 - DNA, 15 bp, Homo sapiens
agggagaaataaata

SEQ ID NO: 44209 - DNA, 15 bp, Homo sapiens
aagggagaaataaat

SEQ ID NO: 44210 - DNA, 15 bp, Homo sapiens
aaagggagaaataaa

SEQ ID NO: 44211 - DNA, 15 bp, Homo sapiens
aaaagggagaaataa

SEQ ID NO: 44212 - DNA, 15 bp, Homo sapiens
taaaagggagaaata

SEQ ID NO: 44213 - DNA, 15 bp, Homo sapiens
gtaaaagggagaaat

SEQ ID NO: 44214 - DNA, 15 bp, Homo sapiens
ggtaaaagggagaaa

SEQ ID NO: 44215 - DNA, 15 bp, Homo sapiens
gggtaaaagggagaa

SEQ ID NO: 44216 - DNA, 15 bp, Homo sapiens
agggtaaaagggaga

SEQ ID NO: 44217 - DNA, 15 bp, Homo sapiens
tagggtaaaagggag

SEQ ID NO: 44218 - DNA, 15 bp, Homo sapiens
ttagggtaaaaggga

SEQ ID NO: 44219 - DNA, 15 bp, Homo sapiens
attagggtaaaaggg

SEQ ID NO: 44220 - DNA, 15 bp, Homo sapiens
gattagggtaaaagg

SEQ ID NO: 44221 - DNA, 15 bp, Homo sapiens
agattagggtaaaag

SEQ ID NO: 44222 - DNA, 15 bp, Homo sapiens
gagattagggtaaaa

SEQ ID NO: 44223 - DNA, 15 bp, Homo sapiens
agagattagggtaaa

SEQ ID NO: 44224 - DNA, 15 bp, Homo sapiens
tagagattagggtaa

SEQ ID NO: 44225 - DNA, 15 bp, Homo sapiens
atagagattagggta

SEQ ID NO: 44226 - DNA, 15 bp, Homo sapiens
tatagagattagggt

SEQ ID NO: 44227 - DNA, 15 bp, Homo sapiens
ttatagagattaggg

SEQ ID NO: 44228 - DNA, 15 bp, Homo sapiens
cttatagagattagg

SEQ ID NO: 44229 - DNA, 15 bp, Homo sapiens
acttatagagattag

SEQ ID NO: 44230 - DNA, 15 bp, Homo sapiens
gacttatagagatta

SEQ ID NO: 44231 - DNA, 15 bp, Homo sapiens
agacttatagagatt

SEQ ID NO: 44232 - DNA, 15 bp, Homo sapiens
tagacttatagagat

SEQ ID NO: 44233 - DNA, 15 bp, Homo sapiens
gtagacttatagaga

SEQ ID NO: 44234 - DNA, 15 bp, Homo sapiens
ggtagacttatagag

SEQ ID NO: 44235 - DNA, 15 bp, Homo sapiens
aggtagacttataga

SEQ ID NO: 44236 - DNA, 15 bp, Homo sapiens
gaggtagacttatag

SEQ ID NO: 44237 - DNA, 15 bp, Homo sapiens
tgaggtagacttata

SEQ ID NO: 44238 - DNA, 15 bp, Homo sapiens
ctgaggtagacttat

SEQ ID NO: 44239 - DNA, 15 bp, Homo sapiens
actgaggtagactta

SEQ ID NO: 44240 - DNA, 15 bp, Homo sapiens
gactgaggtagactt

SEQ ID NO: 44241 - DNA, 15 bp, Homo sapiens
tgactgaggtagact

SEQ ID NO: 44242 - DNA, 15 bp, Homo sapiens
atgactgaggtagac

SEQ ID NO: 44243 - DNA, 15 bp, Homo sapiens
gatgactgaggtaga

SEQ ID NO: 44244 - DNA, 15 bp, Homo sapiens
ggatgactgaggtag

SEQ ID NO: 44245 - DNA, 15 bp, Homo sapiens
aggatgactgaggta

SEQ ID NO: 44246 - DNA, 15 bp, Homo sapiens
caggatgactgaggt

SEQ ID NO: 44247 - DNA, 15 bp, Homo sapiens
tcaggatgactgagg

SEQ ID NO: 44248 - DNA, 15 bp, Homo sapiens
atcaggatgactgag

SEQ ID NO: 44249 - DNA, 15 bp, Homo sapiens
gatcaggatgactga

SEQ ID NO: 44250 - DNA, 15 bp, Homo sapiens
ggatcaggatgactg

SEQ ID NO: 44251 - DNA, 15 bp, Homo sapiens
aggatcaggatgact

SEQ ID NO: 44252 - DNA, 15 bp, Homo sapiens
taggatcaggatgac

SEQ ID NO: 44253 - DNA, 15 bp, Homo sapiens
ataggatcaggatga

SEQ ID NO: 44254 - DNA, 15 bp, Homo sapiens
aataggatcaggatg

SEQ ID NO: 44255 - DNA, 15 bp, Homo sapiens
gaataggatcaggat

SEQ ID NO: 44256 - DNA, 15 bp, Homo sapiens
agaataggatcagga

SEQ ID NO: 44257 - DNA, 15 bp, Homo sapiens
tagaataggatcagg

SEQ ID NO: 44258 - DNA, 15 bp, Homo sapiens
gtagaataggatcag

SEQ ID NO: 44259 - DNA, 15 bp, Homo sapiens
agtagaataggatca

SEQ ID NO: 44260 - DNA, 15 bp, Homo sapiens
aagtagaataggatc

SEQ ID NO: 44261 - DNA, 15 bp, Homo sapiens
gaagtagaataggat

SEQ ID NO: 44262 - DNA, 15 bp, Homo sapiens
agaagtagaatagga

SEQ ID NO: 44263 - DNA, 15 bp, Homo sapiens
gagaagtagaatagg

SEQ ID NO: 44264 - DNA, 15 bp, Homo sapiens
agagaagtagaatag

SEQ ID NO: 44265 - DNA, 15 bp, Homo sapiens
cagagaagtagaata

SEQ ID NO: 44266 - DNA, 15 bp, Homo sapiens
tcagagaagtagaat

SEQ ID NO: 44267 - DNA, 15 bp, Homo sapiens
atcagagaagtagaa

SEQ ID NO: 44268 - DNA, 15 bp, Homo sapiens
catcagagaagtaga

SEQ ID NO: 44269 - DNA, 15 bp, Homo sapiens
acatcagagaagtag

SEQ ID NO: 44270 - DNA, 15 bp, Homo sapiens
aacatcagagaagta

SEQ ID NO: 44271 - DNA, 15 bp, Homo sapiens
caacatcagagaagt

SEQ ID NO: 44272 - DNA, 15 bp, Homo sapiens
acaacatcagagaag

SEQ ID NO: 44273 - DNA, 15 bp, Homo sapiens
aacaacatcagagaa

SEQ ID NO: 44274 - DNA, 15 bp, Homo sapiens
caacaacatcagaga

SEQ ID NO: 44275 - DNA, 15 bp, Homo sapiens
acaacaacatcagag

SEQ ID NO: 44276 - DNA, 15 bp, Homo sapiens
gacaacaacatcaga

SEQ ID NO: 44277 - DNA, 15 bp, Homo sapiens
tgacaacaacatcag

SEQ ID NO: 44278 - DNA, 15 bp, Homo sapiens
ctgacaacaacatca

SEQ ID NO: 44279 - DNA, 15 bp, Homo sapiens
tctgacaacaacatc

SEQ ID NO: 44280 - DNA, 15 bp, Homo sapiens
atctgacaacaacat

SEQ ID NO: 44281 - DNA, 15 bp, Homo sapiens
tatctgacaacaaca

SEQ ID NO: 44282 - DNA, 15 bp, Homo sapiens
ctatctgacaacaac

SEQ ID NO: 44283 - DNA, 15 bp, Homo sapiens
cctatctgacaacaa

SEQ ID NO: 44284 - DNA, 15 bp, Homo sapiens
acctatctgacaaca

SEQ ID NO: 44285 - DNA, 15 bp, Homo sapiens
cacctatctgacaac

SEQ ID NO: 44286 - DNA, 15 bp, Homo sapiens
acacctatctgacaa

SEQ ID NO: 44287 - DNA, 15 bp, Homo sapiens
cacacctatctgaca

SEQ ID NO: 44288 - DNA, 15 bp, Homo sapiens
tcacacctatctgac

SEQ ID NO: 44289 - DNA, 15 bp, Homo sapiens
atcacacctatctga

SEQ ID NO: 44290 - DNA, 15 bp, Homo sapiens
gatcacacctatctg

SEQ ID NO: 44291 - DNA, 15 bp, Homo sapiens
tgatcacacctatct

SEQ ID NO: 44292 - DNA, 15 bp, Homo sapiens
atgatcacacctatc

SEQ ID NO: 44293 - DNA, 15 bp, Homo sapiens
gatgatcacacctat

SEQ ID NO: 44294 - DNA, 15 bp, Homo sapiens
ggatgatcacaccta

SEQ ID NO: 44295 - DNA, 15 bp, Homo sapiens
aggatgatcacacct

SEQ ID NO: 44296 - DNA, 15 bp, Homo sapiens
gaggatgatcacacc

SEQ ID NO: 44297 - DNA, 15 bp, Homo sapiens
tgaggatgatcacac

SEQ ID NO: 44298 - DNA, 15 bp, Homo sapiens
atgaggatgatcaca

SEQ ID NO: 44299 - DNA, 15 bp, Homo sapiens
gatgaggatgatcac

SEQ ID NO: 44300 - DNA, 15 bp, Homo sapiens
tgatgaggatgatca

SEQ ID NO: 44301 - DNA, 15 bp, Homo sapiens
ctgatgaggatgatc

SEQ ID NO: 44302 - DNA, 15 bp, Homo sapiens
tctgatgaggatgat

SEQ ID NO: 44303 - DNA, 15 bp, Homo sapiens
atctgatgaggatga

SEQ ID NO: 44304 - DNA, 15 bp, Homo sapiens
gatctgatgaggatg

SEQ ID NO: 44305 - DNA, 15 bp, Homo sapiens
agatctgatgaggat

SEQ ID NO: 44306 - DNA, 15 bp, Homo sapiens
aagatctgatgagga

SEQ ID NO: 44307 - DNA, 15 bp, Homo sapiens
aaagatctgatgagg

SEQ ID NO: 44308 - DNA, 15 bp, Homo sapiens
aaaagatctgatgag

SEQ ID NO: 44309 - DNA, 15 bp, Homo sapiens
gaaaagatctgatga

SEQ ID NO: 44310 - DNA, 15 bp, Homo sapiens
agaaaagatctgatg

SEQ ID NO: 44311 - DNA, 15 bp, Homo sapiens
cagaaaagatctgat

SEQ ID NO: 44312 - DNA, 15 bp, Homo sapiens
acagaaaagatctga

SEQ ID NO: 44313 - DNA, 15 bp, Homo sapiens
tacagaaaagatctg

SEQ ID NO: 44314 - DNA, 15 bp, Homo sapiens
atacagaaaagatct

SEQ ID NO: 44315 - DNA, 15 bp, Homo sapiens
aatacagaaaagatc

SEQ ID NO: 44316 - DNA, 15 bp, Homo sapiens
gaatacagaaaagat

SEQ ID NO: 44317 - DNA, 15 bp, Homo sapiens
agaatacagaaaaga

SEQ ID NO: 44318 - DNA, 15 bp, Homo sapiens
aagaatacagaaaag

SEQ ID NO: 44319 - DNA, 15 bp, Homo sapiens
taagaatacagaaaa

SEQ ID NO: 44320 - DNA, 15 bp, Homo sapiens
ctaagaatacagaaa

SEQ ID NO: 44321 - DNA, 15 bp, Homo sapiens
tctaagaatacagaa

SEQ ID NO: 44322 - DNA, 15 bp, Homo sapiens
ctctaagaatacaga

SEQ ID NO: 44323 - DNA, 15 bp, Homo sapiens
tctctaagaatacag

SEQ ID NO: 44324 - DNA, 15 bp, Homo sapiens
gtctctaagaataca

SEQ ID NO: 44325 - DNA, 15 bp, Homo sapiens
tgtctctaagaatac

SEQ ID NO: 44326 - DNA, 15 bp, Homo sapiens
ctgtctctaagaata

SEQ ID NO: 44327 - DNA, 15 bp, Homo sapiens
tctgtctctaagaat

SEQ ID NO: 44328 - DNA, 15 bp, Homo sapiens
atctgtctctaagaa

SEQ ID NO: 44329 - DNA, 15 bp, Homo sapiens
tatctgtctctaaga

SEQ ID NO: 44330 - DNA, 15 bp, Homo sapiens
ttatctgtctctaag

SEQ ID NO: 44331 - DNA, 15 bp, Homo sapiens
gttatctgtctctaa

SEQ ID NO: 44332 - DNA, 15 bp, Homo sapiens
agttatctgtctcta

SEQ ID NO: 44333 - DNA, 15 bp, Homo sapiens
aagttatctgtctct

SEQ ID NO: 44334 - DNA, 15 bp, Homo sapiens
aaagttatctgtctc

SEQ ID NO: 44335 - DNA, 15 bp, Homo sapiens
taaagttatctgtct

SEQ ID NO: 44336 - DNA, 15 bp, Homo sapiens
ataaagttatctgtc

SEQ ID NO: 44337 - DNA, 15 bp, Homo sapiens
gataaagttatctgt

SEQ ID NO: 44338 - DNA, 15 bp, Homo sapiens
tgataaagttatctg

SEQ ID NO: 44339 - DNA, 15 bp, Homo sapiens
ttgataaagttatct

SEQ ID NO: 44340 - DNA, 15 bp, Homo sapiens
tttgataaagttatc

SEQ ID NO: 44341 - DNA, 15 bp, Homo sapiens
ctttgataaagttat

SEQ ID NO: 44342 - DNA, 15 bp, Homo sapiens
tctttgataaagtta

SEQ ID NO: 44343 - DNA, 15 bp, Homo sapiens
gtctttgataaagtt

SEQ ID NO: 44344 - DNA, 15 bp, Homo sapiens
ggtctttgataaagt

SEQ ID NO: 44345 - DNA, 15 bp, Homo sapiens
tggtctttgataaag

SEQ ID NO: 44346 - DNA, 15 bp, Homo sapiens
gtggtctttgataaa

SEQ ID NO: 44347 - DNA, 15 bp, Homo sapiens
tgtggtctttgataa

SEQ ID NO: 44348 - DNA, 15 bp, Homo sapiens
ctgtggtctttgata

SEQ ID NO: 44349 - DNA, 15 bp, Homo sapiens
tctgtggtctttgat

SEQ ID NO: 44350 - DNA, 15 bp, Homo sapiens
atctgtggtctttga

SEQ ID NO: 44351 - DNA, 15 bp, Homo sapiens
aatctgtggtctttg

SEQ ID NO: 44352 - DNA, 15 bp, Homo sapiens
aaatctgtggtcttt

SEQ ID NO: 44353 - DNA, 15 bp, Homo sapiens
taaatctgtggtctt

SEQ ID NO: 44354 - DNA, 15 bp, Homo sapiens
ataaatctgtggtct

SEQ ID NO: 44355 - DNA, 15 bp, Homo sapiens
aataaatctgtggtc

SEQ ID NO: 44356 - DNA, 15 bp, Homo sapiens
taataaatctgtggt

SEQ ID NO: 44357 - DNA, 15 bp, Homo sapiens
ctaataaatctgtgg

SEQ ID NO: 44358 - DNA, 15 bp, Homo sapiens
actaataaatctgtg

SEQ ID NO: 44359 - DNA, 15 bp, Homo sapiens
tactaataaatctgt

SEQ ID NO: 44360 - DNA, 15 bp, Homo sapiens
atactaataaatctg

SEQ ID NO: 44361 - DNA, 15 bp, Homo sapiens
tatactaataaatct

SEQ ID NO: 44362 - DNA, 15 bp, Homo sapiens
ctatactaataaatc

SEQ ID NO: 44363 - DNA, 15 bp, Homo sapiens
gctatactaataaat

SEQ ID NO: 44364 - DNA, 15 bp, Homo sapiens
tgctatactaataaa

SEQ ID NO: 44365 - DNA, 15 bp, Homo sapiens
atgctatactaataa

SEQ ID NO: 44366 - DNA, 15 bp, Homo sapiens
catgctatactaata

SEQ ID NO: 44367 - DNA, 15 bp, Homo sapiens
acatgctatactaat

SEQ ID NO: 44368 - DNA, 15 bp, Homo sapiens
aacatgctatactaa

SEQ ID NO: 44369 - DNA, 15 bp, Homo sapiens
taacatgctatacta

SEQ ID NO: 44370 - DNA, 15 bp, Homo sapiens
ttaacatgctatact

SEQ ID NO: 44371 - DNA, 15 bp, Homo sapiens
tttaacatgctatac

SEQ ID NO: 44372 - DNA, 15 bp, Homo sapiens
ctttaacatgctata

SEQ ID NO: 44373 - DNA, 15 bp, Homo sapiens
actttaacatgctat

SEQ ID NO: 44374 - DNA, 15 bp, Homo sapiens
gactttaacatgcta

SEQ ID NO: 44375 - DNA, 15 bp, Homo sapiens
agactttaacatgct

SEQ ID NO: 44376 - DNA, 15 bp, Homo sapiens
aagactttaacatgc

SEQ ID NO: 44377 - DNA, 15 bp, Homo sapiens
gaagactttaacatg

SEQ ID NO: 44378 - DNA, 15 bp, Homo sapiens
agaagactttaacat

SEQ ID NO: 44379 - DNA, 15 bp, Homo sapiens
tagaagactttaaca

SEQ ID NO: 44380 - DNA, 15 bp, Homo sapiens
ttagaagactttaac

SEQ ID NO: 44381 - DNA, 15 bp, Homo sapiens
tttagaagactttaa

SEQ ID NO: 44382 - DNA, 15 bp, Homo sapiens
ctttagaagacttta

SEQ ID NO: 44383 - DNA, 15 bp, Homo sapiens
tctttagaagacttt

SEQ ID NO: 44384 - DNA, 15 bp, Homo sapiens
ctctttagaagactt

SEQ ID NO: 44385 - DNA, 15 bp, Homo sapiens
actctttagaagact

SEQ ID NO: 44386 - DNA, 15 bp, Homo sapiens
gactctttagaagac

SEQ ID NO: 44387 - DNA, 15 bp, Homo sapiens
agactctttagaaga

SEQ ID NO: 44388 - DNA, 15 bp, Homo sapiens
gagactctttagaag

SEQ ID NO: 44389 - DNA, 15 bp, Homo sapiens
tgagactctttagaa

SEQ ID NO: 44390 - DNA, 15 bp, Homo sapiens
atgagactctttaga

SEQ ID NO: 44391 - DNA, 15 bp, Homo sapiens
aatgagactctttag

SEQ ID NO: 44392 - DNA, 15 bp, Homo sapiens
caatgagactcttta

SEQ ID NO: 44393 - DNA, 15 bp, Homo sapiens
tcaatgagactcttt

SEQ ID NO: 44394 - DNA, 15 bp, Homo sapiens
atcaatgagactctt

SEQ ID NO: 44395 - DNA, 15 bp, Homo sapiens
catcaatgagactct

SEQ ID NO: 44396 - DNA, 15 bp, Homo sapiens
gcatcaatgagactc

SEQ ID NO: 44397 - DNA, 15 bp, Homo sapiens
agcatcaatgagact

SEQ ID NO: 44398 - DNA, 15 bp, Homo sapiens
gagcatcaatgagac

SEQ ID NO: 44399 - DNA, 15 bp, Homo sapiens
agagcatcaatgaga

SEQ ID NO: 44400 - DNA, 15 bp, Homo sapiens
aagagcatcaatgag

SEQ ID NO: 44401 - DNA, 15 bp, Homo sapiens
aaagagcatcaatga

SEQ ID NO: 44402 - DNA, 15 bp, Homo sapiens
aaaagagcatcaatg

SEQ ID NO: 44403 - DNA, 15 bp, Homo sapiens
gaaaagagcatcaat

SEQ ID NO: 44404 - DNA, 15 bp, Homo sapiens
tgaaaagagcatcaa

SEQ ID NO: 44405 - DNA, 15 bp, Homo sapiens
atgaaaagagcatca

SEQ ID NO: 44406 - DNA, 15 bp, Homo sapiens
gatgaaaagagcatc

SEQ ID NO: 44407 - DNA, 15 bp, Homo sapiens
agatgaaaagagcat

SEQ ID NO: 44408 - DNA, 15 bp, Homo sapiens
gagatgaaaagagca

SEQ ID NO: 44409 - DNA, 15 bp, Homo sapiens
tgagatgaaaagagc

SEQ ID NO: 44410 - DNA, 15 bp, Homo sapiens
ctgagatgaaaagag

SEQ ID NO: 44411 - DNA, 15 bp, Homo sapiens
actgagatgaaaaga

SEQ ID NO: 44412 - DNA, 15 bp, Homo sapiens
tactgagatgaaaag

SEQ ID NO: 44413 - DNA, 15 bp, Homo sapiens
gtactgagatgaaaa

SEQ ID NO: 44414 - DNA, 15 bp, Homo sapiens
tgtactgagatgaaa

SEQ ID NO: 44415 - DNA, 15 bp, Homo sapiens
ttgtactgagatgaa

SEQ ID NO: 44416 - DNA, 15 bp, Homo sapiens
attgtactgagatga

SEQ ID NO: 44417 - DNA, 15 bp, Homo sapiens
aattgtactgagatg

SEQ ID NO: 44418 - DNA, 15 bp, Homo sapiens
aaattgtactgagat

SEQ ID NO: 44419 - DNA, 15 bp, Homo sapiens
aaaattgtactgaga

SEQ ID NO: 44420 - DNA, 15 bp, Homo sapiens
aaaaattgtactgag

SEQ ID NO: 44421 - DNA, 15 bp, Homo sapiens
taaaaattgtactga

SEQ ID NO: 44422 - DNA, 15 bp, Homo sapiens
ttaaaaattgtactg

SEQ ID NO: 44423 - DNA, 15 bp, Homo sapiens
tttaaaaattgtact

SEQ ID NO: 44424 - DNA, 15 bp, Homo sapiens
ttttaaaaattgtac

SEQ ID NO: 44425 - DNA, 15 bp, Homo sapiens
gttttaaaaattgta

SEQ ID NO: 44426 - DNA, 15 bp, Homo sapiens
agttttaaaaattgt

SEQ ID NO: 44427 - DNA, 15 bp, Homo sapiens
cagttttaaaaattg

SEQ ID NO: 44428 - DNA, 15 bp, Homo sapiens
gcagttttaaaaatt

SEQ ID NO: 44429 - DNA, 15 bp, Homo sapiens
agcagttttaaaaat

SEQ ID NO: 44430 - DNA, 15 bp, Homo sapiens
cagcagttttaaaaa

SEQ ID NO: 44431 - DNA, 15 bp, Homo sapiens
tcagcagttttaaaa

SEQ ID NO: 44432 - DNA, 15 bp, Homo sapiens
ttcagcagttttaaa

SEQ ID NO: 44433 - DNA, 15 bp, Homo sapiens
attcagcagttttaa

SEQ ID NO: 44434 - DNA, 15 bp, Homo sapiens
cattcagcagtttta

SEQ ID NO: 44435 - DNA, 15 bp, Homo sapiens
gcattcagcagtttt

SEQ ID NO: 44436 - DNA, 15 bp, Homo sapiens
tgcattcagcagttt

SEQ ID NO: 44437 - DNA, 15 bp, Homo sapiens
ttgcattcagcagtt

SEQ ID NO: 44438 - DNA, 15 bp, Homo sapiens
cttgcattcagcagt

SEQ ID NO: 44439 - DNA, 15 bp, Homo sapiens
ccttgcattcagcag

SEQ ID NO: 44440 - DNA, 15 bp, Homo sapiens
accttgcattcagca

SEQ ID NO: 44441 - DNA, 15 bp, Homo sapiens
taccttgcattcagc

SEQ ID NO: 44442 - DNA, 15 bp, Homo sapiens
gtaccttgcattcag

SEQ ID NO: 44443 - DNA, 15 bp, Homo sapiens
agtaccttgcattca

SEQ ID NO: 44444 - DNA, 15 bp, Homo sapiens
cagtaccttgcattc

SEQ ID NO: 44445 - DNA, 15 bp, Homo sapiens
tcagtaccttgcatt

SEQ ID NO: 44446 - DNA, 15 bp, Homo sapiens
ctcagtaccttgcat

SEQ ID NO: 44447 - DNA, 15 bp, Homo sapiens
gctcagtaccttgca

SEQ ID NO: 44448 - DNA, 15 bp, Homo sapiens
agctcagtaccttgc

SEQ ID NO: 44449 - DNA, 15 bp, Homo sapiens
cagctcagtaccttg

SEQ ID NO: 44450 - DNA, 15 bp, Homo sapiens
acagctcagtacctt

SEQ ID NO: 44451 - DNA, 15 bp, Homo sapiens
aacagctcagtacct

SEQ ID NO: 44452 - DNA, 15 bp, Homo sapiens
caacagctcagtacc

SEQ ID NO: 44453 - DNA, 15 bp, Homo sapiens
ccaacagctcagtac

SEQ ID NO: 44454 - DNA, 15 bp, Homo sapiens
tccaacagctcagta

SEQ ID NO: 44455 - DNA, 15 bp, Homo sapiens
ttccaacagctcagt

SEQ ID NO: 44456 - DNA, 15 bp, Homo sapiens
cttccaacagctcag

SEQ ID NO: 44457 - DNA, 15 bp, Homo sapiens
acttccaacagctca

SEQ ID NO: 44458 - DNA, 15 bp, Homo sapiens
cacttccaacagctc

SEQ ID NO: 44459 - DNA, 15 bp, Homo sapiens
tcacttccaacagct

SEQ ID NO: 44460 - DNA, 15 bp, Homo sapiens
gtcacttccaacagc

SEQ ID NO: 44461 - DNA, 15 bp, Homo sapiens
agtcacttccaacag

SEQ ID NO: 44462 - DNA, 15 bp, Homo sapiens
cagtcacttccaaca

SEQ ID NO: 44463 - DNA, 15 bp, Homo sapiens
tcagtcacttccaac

SEQ ID NO: 44464 - DNA, 15 bp, Homo sapiens
gtcagtcacttccaa

SEQ ID NO: 44465 - DNA, 15 bp, Homo sapiens
tgtcagtcacttcca

SEQ ID NO: 44466 - DNA, 15 bp, Homo sapiens
ctgtcagtcacttcc

SEQ ID NO: 44467 - DNA, 15 bp, Homo sapiens
tctgtcagtcacttc

SEQ ID NO: 44468 - DNA, 15 bp, Homo sapiens
atctgtcagtcactt

SEQ ID NO: 44469 - DNA, 15 bp, Homo sapiens
catctgtcagtcact

SEQ ID NO: 44470 - DNA, 15 bp, Homo sapiens
tcatctgtcagtcac

SEQ ID NO: 44471 - DNA, 15 bp, Homo sapiens
ttcatctgtcagtca

SEQ ID NO: 44472 - DNA, 15 bp, Homo sapiens
attcatctgtcagtc

SEQ ID NO: 44473 - DNA, 15 bp, Homo sapiens
cattcatctgtcagt

SEQ ID NO: 44474 - DNA, 15 bp, Homo sapiens
acattcatctgtcag

SEQ ID NO: 44475 - DNA, 15 bp, Homo sapiens
tacattcatctgtca

SEQ ID NO: 44476 - DNA, 15 bp, Homo sapiens
ttacattcatctgtc

SEQ ID NO: 44477 - DNA, 15 bp, Homo sapiens
gttacattcatctgt

SEQ ID NO: 44478 - DNA, 15 bp, Homo sapiens
tgttacattcatctg

SEQ ID NO: 44479 - DNA, 15 bp, Homo sapiens
ctgttacattcatct

SEQ ID NO: 44480 - DNA, 15 bp, Homo sapiens
tctgttacattcatc

SEQ ID NO: 44481 - DNA, 15 bp, Homo sapiens
atctgttacattcat

SEQ ID NO: 44482 - DNA, 15 bp, Homo sapiens
aatctgttacattca

SEQ ID NO: 44483 - DNA, 15 bp, Homo sapiens
gaatctgttacattc

SEQ ID NO: 44484 - DNA, 15 bp, Homo sapiens
tgaatctgttacatt

SEQ ID NO: 44485 - DNA, 15 bp, Homo sapiens
atgaatctgttacat

SEQ ID NO: 44486 - DNA, 15 bp, Homo sapiens
tatgaatctgttaca

SEQ ID NO: 44487 - DNA, 15 bp, Homo sapiens
ctatgaatctgttac

SEQ ID NO: 44488 - DNA, 15 bp, Homo sapiens
tctatgaatctgtta

SEQ ID NO: 44489 - DNA, 15 bp, Homo sapiens
ctctatgaatctgtt

SEQ ID NO: 44490 - DNA, 15 bp, Homo sapiens
tctctatgaatctgt

SEQ ID NO: 44491 - DNA, 15 bp, Homo sapiens
ttctctatgaatctg

SEQ ID NO: 44492 - DNA, 15 bp, Homo sapiens
cttctctatgaatct

SEQ ID NO: 44493 - DNA, 15 bp, Homo sapiens
ccttctctatgaatc

SEQ ID NO: 44494 - DNA, 15 bp, Homo sapiens
tccttctctatgaat

SEQ ID NO: 44495 - DNA, 15 bp, Homo sapiens
ttccttctctatgaa

SEQ ID NO: 44496 - DNA, 15 bp, Homo sapiens
tttccttctctatga

SEQ ID NO: 44497 - DNA, 15 bp, Homo sapiens
ttttccttctctatg

SEQ ID NO: 44498 - DNA, 15 bp, Homo sapiens
tttttccttctctat

SEQ ID NO: 44499 - DNA, 15 bp, Homo sapiens
ctttttccttctcta

SEQ ID NO: 44500 - DNA, 15 bp, Homo sapiens
cctttttccttctct

SEQ ID NO: 44501 - DNA, 15 bp, Homo sapiens
tcctttttccttctc

SEQ ID NO: 44502 - DNA, 15 bp, Homo sapiens
ttcctttttccttct

SEQ ID NO: 44503 - DNA, 15 bp, Homo sapiens
cttcctttttccttc

SEQ ID NO: 44504 - DNA, 15 bp, Homo sapiens
tcttcctttttcctt

SEQ ID NO: 44505 - DNA, 15 bp, Homo sapiens
ttcttcctttttcct

SEQ ID NO: 44506 - DNA, 15 bp, Homo sapiens
tttcttcctttttcc

SEQ ID NO: 44507 - DNA, 15 bp, Homo sapiens
ttttcttcctttttc

SEQ ID NO: 44508 - DNA, 15 bp, Homo sapiens
tttttcttccttttt

SEQ ID NO: 44509 - DNA, 15 bp, Homo sapiens
gtttttcttcctttt

SEQ ID NO: 44510 - DNA, 15 bp, Homo sapiens
agtttttcttccttt

SEQ ID NO: 44511 - DNA, 15 bp, Homo sapiens
gagtttttcttcctt

SEQ ID NO: 44512 - DNA, 15 bp, Homo sapiens
tgagtttttcttcct

SEQ ID NO: 44513 - DNA, 15 bp, Homo sapiens
atgagtttttcttcc

SEQ ID NO: 44514 - DNA, 15 bp, Homo sapiens
catgagtttttcttc

SEQ ID NO: 44515 - DNA, 15 bp, Homo sapiens
gcatgagtttttctt

SEQ ID NO: 44516 - DNA, 15 bp, Homo sapiens
agcatgagtttttct

SEQ ID NO: 44517 - DNA, 15 bp, Homo sapiens
gagcatgagtttttc

SEQ ID NO: 44518 - DNA, 15 bp, Homo sapiens
agagcatgagttttt

SEQ ID NO: 44519 - DNA, 15 bp, Homo sapiens
aagagcatgagtttt

SEQ ID NO: 44520 - DNA, 15 bp, Homo sapiens
gaagagcatgagttt

SEQ ID NO: 44521 - DNA, 15 bp, Homo sapiens
ggaagagcatgagtt

SEQ ID NO: 44522 - DNA, 15 bp, Homo sapiens
aggaagagcatgagt

SEQ ID NO: 44523 - DNA, 15 bp, Homo sapiens
taggaagagcatgag

SEQ ID NO: 44524 - DNA, 15 bp, Homo sapiens
ataggaagagcatga

SEQ ID NO: 44525 - DNA, 15 bp, Homo sapiens
tataggaagagcatg

SEQ ID NO: 44526 - DNA, 15 bp, Homo sapiens
ctataggaagagcat

SEQ ID NO: 44527 - DNA, 15 bp, Homo sapiens
actataggaagagca

SEQ ID NO: 44528 - DNA, 15 bp, Homo sapiens
tactataggaagagc

SEQ ID NO: 44529 - DNA, 15 bp, Homo sapiens
atactataggaagag

SEQ ID NO: 44530 - DNA, 15 bp, Homo sapiens
aatactataggaaga

SEQ ID NO: 44531 - DNA, 15 bp, Homo sapiens
caatactataggaag

SEQ ID NO: 44532 - DNA, 15 bp, Homo sapiens
tcaatactataggaa

SEQ ID NO: 44533 - DNA, 15 bp, Homo sapiens
atcaatactatagga

SEQ ID NO: 44534 - DNA, 15 bp, Homo sapiens
tatcaatactatagg

SEQ ID NO: 44535 - DNA, 15 bp, Homo sapiens
atatcaatactatag

SEQ ID NO: 44536 - DNA, 15 bp, Homo sapiens
gatatcaatactata

SEQ ID NO: 44537 - DNA, 15 bp, Homo sapiens
tgatatcaatactat

SEQ ID NO: 44538 - DNA, 15 bp, Homo sapiens
ctgatatcaatacta

SEQ ID NO: 44539 - DNA, 15 bp, Homo sapiens
actgatatcaatact

SEQ ID NO: 44540 - DNA, 15 bp, Homo sapiens
cactgatatcaatac

SEQ ID NO: 44541 - DNA, 15 bp, Homo sapiens
acactgatatcaata

SEQ ID NO: 44542 - DNA, 15 bp, Homo sapiens
tacactgatatcaat

SEQ ID NO: 44543 - DNA, 15 bp, Homo sapiens
ttacactgatatcaa

SEQ ID NO: 44544 - DNA, 15 bp, Homo sapiens
cttacactgatatca

SEQ ID NO: 44545 - DNA, 15 bp, Homo sapiens
tcttacactgatatc

SEQ ID NO: 44546 - DNA, 15 bp, Homo sapiens
ctcttacactgatat

SEQ ID NO: 44547 - DNA, 15 bp, Homo sapiens
gctcttacactgata

SEQ ID NO: 44548 - DNA, 15 bp, Homo sapiens
ggctcttacactgat

SEQ ID NO: 44549 - DNA, 15 bp, Homo sapiens
tggctcttacactga

SEQ ID NO: 44550 - DNA, 15 bp, Homo sapiens
ttggctcttacactg

SEQ ID NO: 44551 - DNA, 15 bp, Homo sapiens
cttggctcttacact

SEQ ID NO: 44552 - DNA, 15 bp, Homo sapiens
tcttggctcttacac

SEQ ID NO: 44553 - DNA, 15 bp, Homo sapiens
ctcttggctcttaca

SEQ ID NO: 44554 - DNA, 15 bp, Homo sapiens
tctcttggctcttac

SEQ ID NO: 44555 - DNA, 15 bp, Homo sapiens
ttctcttggctctta

SEQ ID NO: 44556 - DNA, 15 bp, Homo sapiens
tttctcttggctctt

SEQ ID NO: 44557 - DNA, 15 bp, Homo sapiens
ctttctcttggctct

SEQ ID NO: 44558 - DNA, 15 bp, Homo sapiens
cctttctcttggctc

SEQ ID NO: 44559 - DNA, 15 bp, Homo sapiens
acctttctcttggct

SEQ ID NO: 44560 - DNA, 15 bp, Homo sapiens
tacctttctcttggc

SEQ ID NO: 44561 - DNA, 15 bp, Homo sapiens
atacctttctcttgg

SEQ ID NO: 44562 - DNA, 15 bp, Homo sapiens
tatacctttctcttg

SEQ ID NO: 44563 - DNA, 15 bp, Homo sapiens
ttatacctttctctt

SEQ ID NO: 44564 - DNA, 15 bp, Homo sapiens
tttatacctttctct

SEQ ID NO: 44565 - DNA, 15 bp, Homo sapiens
ctttatacctttctc

SEQ ID NO: 44566 - DNA, 15 bp, Homo sapiens
actttatacctttct

SEQ ID NO: 44567 - DNA, 15 bp, Homo sapiens
tactttatacctttc

SEQ ID NO: 44568 - DNA, 15 bp, Homo sapiens
atactttataccttt

SEQ ID NO: 44569 - DNA, 15 bp, Homo sapiens
gatactttatacctt

SEQ ID NO: 44570 - DNA, 15 bp, Homo sapiens
tgatactttatacct

SEQ ID NO: 44571 - DNA, 15 bp, Homo sapiens
atgatactttatacc

SEQ ID NO: 44572 - DNA, 15 bp, Homo sapiens
catgatactttatac

SEQ ID NO: 44573 - DNA, 15 bp, Homo sapiens
gcatgatactttata

SEQ ID NO: 44574 - DNA, 15 bp, Homo sapiens
tgcatgatactttat

SEQ ID NO: 44575 - DNA, 15 bp, Homo sapiens
ctgcatgatacttta

SEQ ID NO: 44576 - DNA, 15 bp, Homo sapiens
tctgcatgatacttt

SEQ ID NO: 44577 - DNA, 15 bp, Homo sapiens
atctgcatgatactt

SEQ ID NO: 44578 - DNA, 15 bp, Homo sapiens
tatctgcatgatact

SEQ ID NO: 44579 - DNA, 15 bp, Homo sapiens
atatctgcatgatac

SEQ ID NO: 44580 - DNA, 15 bp, Homo sapiens
aatatctgcatgata

SEQ ID NO: 44581 - DNA, 15 bp, Homo sapiens
taatatctgcatgat

SEQ ID NO: 44582 - DNA, 15 bp, Homo sapiens
ttaatatctgcatga

SEQ ID NO: 44583 - DNA, 15 bp, Homo sapiens
cttaatatctgcatg

SEQ ID NO: 44584 - DNA, 15 bp, Homo sapiens
ccttaatatctgcat

SEQ ID NO: 44585 - DNA, 15 bp, Homo sapiens
cccttaatatctgca

SEQ ID NO: 44586 - DNA, 15 bp, Homo sapiens
tcccttaatatctgc

SEQ ID NO: 44587 - DNA, 15 bp, Homo sapiens
ttcccttaatatctg

SEQ ID NO: 44588 - DNA, 15 bp, Homo sapiens
tttcccttaatatct

SEQ ID NO: 44589 - DNA, 15 bp, Homo sapiens
ctttcccttaatatc

SEQ ID NO: 44590 - DNA, 15 bp, Homo sapiens
tctttcccttaatat

SEQ ID NO: 44591 - DNA, 15 bp, Homo sapiens
ttctttcccttaata

SEQ ID NO: 44592 - DNA, 15 bp, Homo sapiens
tttctttcccttaat

SEQ ID NO: 44593 - DNA, 15 bp, Homo sapiens
ttttctttcccttaa

SEQ ID NO: 44594 - DNA, 15 bp, Homo sapiens
gttttctttccctta

SEQ ID NO: 44595 - DNA, 15 bp, Homo sapiens
tgttttctttccctt

SEQ ID NO: 44596 - DNA, 15 bp, Homo sapiens
atgttttctttccct

SEQ ID NO: 44597 - DNA, 15 bp, Homo sapiens
aatgttttctttccc

SEQ ID NO: 44598 - DNA, 15 bp, Homo sapiens
gaatgttttctttcc

SEQ ID NO: 44599 - DNA, 15 bp, Homo sapiens
tgaatgttttctttc

SEQ ID NO: 44600 - DNA, 15 bp, Homo sapiens
gtgaatgttttcttt

SEQ ID NO: 44601 - DNA, 15 bp, Homo sapiens
agtgaatgttttctt

SEQ ID NO: 44602 - DNA, 15 bp, Homo sapiens
aagtgaatgttttct

SEQ ID NO: 44603 - DNA, 15 bp, Homo sapiens
aaagtgaatgttttc

SEQ ID NO: 44604 - DNA, 15 bp, Homo sapiens
taaagtgaatgtttt

SEQ ID NO: 44605 - DNA, 15 bp, Homo sapiens
ctaaagtgaatgttt

SEQ ID NO: 44606 - DNA, 15 bp, Homo sapiens
actaaagtgaatgtt

SEQ ID NO: 44607 - DNA, 15 bp, Homo sapiens
tactaaagtgaatgt

SEQ ID NO: 44608 - DNA, 15 bp, Homo sapiens
ttactaaagtgaatg

SEQ ID NO: 44609 - DNA, 15 bp, Homo sapiens
attactaaagtgaat

SEQ ID NO: 44610 - DNA, 15 bp, Homo sapiens
gattactaaagtgaa

SEQ ID NO: 44611 - DNA, 15 bp, Homo sapiens
agattactaaagtga

SEQ ID NO: 44612 - DNA, 15 bp, Homo sapiens
aagattactaaagtg

SEQ ID NO: 44613 - DNA, 15 bp, Homo sapiens
aaagattactaaagt

SEQ ID NO: 44614 - DNA, 15 bp, Homo sapiens
gaaagattactaaag

SEQ ID NO: 44615 - DNA, 15 bp, Homo sapiens
ggaaagattactaaa

SEQ ID NO: 44616 - DNA, 15 bp, Homo sapiens
aggaaagattactaa

SEQ ID NO: 44617 - DNA, 15 bp, Homo sapiens
gaggaaagattacta

SEQ ID NO: 44618 - DNA, 15 bp, Homo sapiens
tgaggaaagattact

SEQ ID NO: 44619 - DNA, 15 bp, Homo sapiens
atgaggaaagattac

SEQ ID NO: 44620 - DNA, 15 bp, Homo sapiens
aatgaggaaagatta

SEQ ID NO: 44621 - DNA, 15 bp, Homo sapiens
aaatgaggaaagatt

SEQ ID NO: 44622 - DNA, 15 bp, Homo sapiens
aaaatgaggaaagat

SEQ ID NO: 44623 - DNA, 15 bp, Homo sapiens
gaaaatgaggaaaga

SEQ ID NO: 44624 - DNA, 15 bp, Homo sapiens
agaaaatgaggaaag

SEQ ID NO: 44625 - DNA, 15 bp, Homo sapiens
tagaaaatgaggaaa

SEQ ID NO: 44626 - DNA, 15 bp, Homo sapiens
ctagaaaatgaggaa

SEQ ID NO: 44627 - DNA, 15 bp, Homo sapiens
actagaaaatgagga

SEQ ID NO: 44628 - DNA, 15 bp, Homo sapiens
aactagaaaatgagg

SEQ ID NO: 44629 - DNA, 15 bp, Homo sapiens
aaactagaaaatgag

SEQ ID NO: 44630 - DNA, 15 bp, Homo sapiens
gaaactagaaaatga

SEQ ID NO: 44631 - DNA, 15 bp, Homo sapiens
ggaaactagaaaatg

SEQ ID NO: 44632 - DNA, 15 bp, Homo sapiens
aggaaactagaaaat

SEQ ID NO: 44633 - DNA, 15 bp, Homo sapiens
gaggaaactagaaaa

SEQ ID NO: 44634 - DNA, 15 bp, Homo sapiens
agaggaaactagaaa

SEQ ID NO: 44635 - DNA, 15 bp, Homo sapiens
aagaggaaactagaa

SEQ ID NO: 44636 - DNA, 15 bp, Homo sapiens
taagaggaaactaga

SEQ ID NO: 44637 - DNA, 15 bp, Homo sapiens
ataagaggaaactag

SEQ ID NO: 44638 - DNA, 15 bp, Homo sapiens
cataagaggaaacta

SEQ ID NO: 44639 - DNA, 15 bp, Homo sapiens
acataagaggaaact

SEQ ID NO: 44640 - DNA, 15 bp, Homo sapiens
tacataagaggaaac

SEQ ID NO: 44641 - DNA, 15 bp, Homo sapiens
gtacataagaggaaa

SEQ ID NO: 44642 - DNA, 15 bp, Homo sapiens
agtacataagaggaa

SEQ ID NO: 44643 - DNA, 15 bp, Homo sapiens
tagtacataagagga

SEQ ID NO: 44644 - DNA, 15 bp, Homo sapiens
atagtacataagagg

SEQ ID NO: 44645 - DNA, 15 bp, Homo sapiens
catagtacataagag

SEQ ID NO: 44646 - DNA, 15 bp, Homo sapiens
tcatagtacataaga

SEQ ID NO: 44647 - DNA, 15 bp, Homo sapiens
atcatagtacataag

SEQ ID NO: 44648 - DNA, 15 bp, Homo sapiens
aatcatagtacataa

SEQ ID NO: 44649 - DNA, 15 bp, Homo sapiens
aaatcatagtacata

SEQ ID NO: 44650 - DNA, 15 bp, Homo sapiens
taaatcatagtacat

SEQ ID NO: 44651 - DNA, 15 bp, Homo sapiens
ttaaatcatagtaca

SEQ ID NO: 44652 - DNA, 15 bp, Homo sapiens
attaaatcatagtac

SEQ ID NO: 44653 - DNA, 15 bp, Homo sapiens
tattaaatcatagta

SEQ ID NO: 44654 - DNA, 15 bp, Homo sapiens
gtattaaatcatagt

SEQ ID NO: 44655 - DNA, 15 bp, Homo sapiens
agtattaaatcatag

SEQ ID NO: 44656 - DNA, 15 bp, Homo sapiens
cagtattaaatcata

SEQ ID NO: 44657 - DNA, 15 bp, Homo sapiens
acagtattaaatcat

SEQ ID NO: 44658 - DNA, 15 bp, Homo sapiens
tacagtattaaatca

SEQ ID NO: 44659 - DNA, 15 bp, Homo sapiens
ctacagtattaaatc

SEQ ID NO: 44660 - DNA, 15 bp, Homo sapiens
actacagtattaaat

SEQ ID NO: 44661 - DNA, 15 bp, Homo sapiens
tactacagtattaaa

SEQ ID NO: 44662 - DNA, 15 bp, Homo sapiens
ttactacagtattaa

SEQ ID NO: 44663 - DNA, 15 bp, Homo sapiens
tttactacagtatta

SEQ ID NO: 44664 - DNA, 15 bp, Homo sapiens
ctttactacagtatt

SEQ ID NO: 44665 - DNA, 15 bp, Homo sapiens
actttactacagtat

SEQ ID NO: 44666 - DNA, 15 bp, Homo sapiens
aactttactacagta

SEQ ID NO: 44667 - DNA, 15 bp, Homo sapiens
aaactttactacagt

SEQ ID NO: 44668 - DNA, 15 bp, Homo sapiens
aaaactttactacag

SEQ ID NO: 44669 - DNA, 15 bp, Homo sapiens
taaaactttactaca

SEQ ID NO: 44670 - DNA, 15 bp, Homo sapiens
ttaaaactttactac

SEQ ID NO: 44671 - DNA, 15 bp, Homo sapiens
attaaaactttacta

SEQ ID NO: 44672 - DNA, 15 bp, Homo sapiens
tattaaaactttact

SEQ ID NO: 44673 - DNA, 15 bp, Homo sapiens
ttattaaaactttac

SEQ ID NO: 44674 - DNA, 15 bp, Homo sapiens
tttattaaaacttta

SEQ ID NO: 44675 - DNA, 15 bp, Homo sapiens
ttttattaaaacttt

SEQ ID NO: 44676 - DNA, 15 bp, Homo sapiens
attttattaaaactt

SEQ ID NO: 44677 - DNA, 15 bp, Homo sapiens
tattttattaaaact

SEQ ID NO: 44678 - DNA, 15 bp, Homo sapiens
atattttattaaaac

SEQ ID NO: 44679 - DNA, 15 bp, Homo sapiens
catattttattaaaa

SEQ ID NO: 44680 - DNA, 15 bp, Homo sapiens
tcatattttattaaa

SEQ ID NO: 44681 - DNA, 15 bp, Homo sapiens
ctcatattttattaa

SEQ ID NO: 44682 - DNA, 15 bp, Homo sapiens
gctcatattttatta

SEQ ID NO: 44683 - DNA, 15 bp, Homo sapiens
agctcatattttatt

SEQ ID NO: 44684 - DNA, 15 bp, Homo sapiens
tagctcatattttat

SEQ ID NO: 44685 - DNA, 15 bp, Homo sapiens
atagctcatatttta

SEQ ID NO: 44686 - DNA, 15 bp, Homo sapiens
tatagctcatatttt

SEQ ID NO: 44687 - DNA, 15 bp, Homo sapiens
atatagctcatattt

SEQ ID NO: 44688 - DNA, 15 bp, Homo sapiens
catatagctcatatt

SEQ ID NO: 44689 - DNA, 15 bp, Homo sapiens
acatatagctcatat

SEQ ID NO: 44690 - DNA, 15 bp, Homo sapiens
tacatatagctcata

SEQ ID NO: 44691 - DNA, 15 bp, Homo sapiens
ttacatatagctcat

SEQ ID NO: 44692 - DNA, 15 bp, Homo sapiens
attacatatagctca

SEQ ID NO: 44693 - DNA, 15 bp, Homo sapiens
aattacatatagctc

SEQ ID NO: 44694 - DNA, 15 bp, Homo sapiens
taattacatatagct

SEQ ID NO: 44695 - DNA, 15 bp, Homo sapiens
ttaattacatatagc

SEQ ID NO: 44696 - DNA, 15 bp, Homo sapiens
cttaattacatatag

SEQ ID NO: 44697 - DNA, 15 bp, Homo sapiens
acttaattacatata

SEQ ID NO: 44698 - DNA, 15 bp, Homo sapiens
cacttaattacatat

SEQ ID NO: 44699 - DNA, 15 bp, Homo sapiens
ccacttaattacata

SEQ ID NO: 44700 - DNA, 15 bp, Homo sapiens
cccacttaattacat

SEQ ID NO: 44701 - DNA, 15 bp, Homo sapiens
tcccacttaattaca

SEQ ID NO: 44702 - DNA, 15 bp, Homo sapiens
ctcccacttaattac

SEQ ID NO: 44703 - DNA, 15 bp, Homo sapiens
cctcccacttaatta

SEQ ID NO: 44704 - DNA, 15 bp, Homo sapiens
acctcccacttaatt

SEQ ID NO: 44705 - DNA, 15 bp, Homo sapiens
aacctcccacttaat

SEQ ID NO: 44706 - DNA, 15 bp, Homo sapiens
caacctcccacttaa

SEQ ID NO: 44707 - DNA, 15 bp, Homo sapiens
acaacctcccactta

SEQ ID NO: 44708 - DNA, 15 bp, Homo sapiens
cacaacctcccactt

SEQ ID NO: 44709 - DNA, 15 bp, Homo sapiens
ccacaacctcccact

SEQ ID NO: 44710 - DNA, 15 bp, Homo sapiens
cccacaacctcccac

SEQ ID NO: 44711 - DNA, 15 bp, Homo sapiens
ccccacaacctccca

SEQ ID NO: 44712 - DNA, 15 bp, Homo sapiens
gccccacaacctccc

SEQ ID NO: 44713 - DNA, 15 bp, Homo sapiens
agccccacaacctcc

SEQ ID NO: 44714 - DNA, 15 bp, Homo sapiens
tagccccacaacctc

SEQ ID NO: 44715 - DNA, 15 bp, Homo sapiens
ctagccccacaacct

SEQ ID NO: 44716 - DNA, 15 bp, Homo sapiens
cctagccccacaacc

SEQ ID NO: 44717 - DNA, 15 bp, Homo sapiens
gcctagccccacaac

SEQ ID NO: 44718 - DNA, 15 bp, Homo sapiens
tgcctagccccacaa

SEQ ID NO: 44719 - DNA, 15 bp, Homo sapiens
gtgcctagccccaca

SEQ ID NO: 44720 - DNA, 15 bp, Homo sapiens
cgtgcctagccccac

SEQ ID NO: 44721 - DNA, 15 bp, Homo sapiens
tcgtgcctagcccca

SEQ ID NO: 44722 - DNA, 15 bp, Homo sapiens
ctcgtgcctagcccc

SEQ ID NO: 44723 - DNA, 15 bp, Homo sapiens
cctcgtgcctagccc

SEQ ID NO: 44724 - DNA, 15 bp, Homo sapiens
gcctcgtgcctagcc

SEQ ID NO: 44725 - DNA, 15 bp, Homo sapiens
agcctcgtgcctagc

SEQ ID NO: 44726 - DNA, 15 bp, Homo sapiens
gagcctcgtgcctag

SEQ ID NO: 44727 - DNA, 15 bp, Homo sapiens
tgagcctcgtgccta

SEQ ID NO: 44728 - DNA, 15 bp, Homo sapiens
gtgagcctcgtgcct

SEQ ID NO: 44729 - DNA, 15 bp, Homo sapiens
tgtgagcctcgtgcc

SEQ ID NO: 44730 - DNA, 15 bp, Homo sapiens
gtgtgagcctcgtgc

SEQ ID NO: 44731 - DNA, 15 bp, Homo sapiens
cgtgtgagcctcgtg

SEQ ID NO: 44732 - DNA, 15 bp, Homo sapiens
acgtgtgagcctcgt

SEQ ID NO: 44733 - DNA, 15 bp, Homo sapiens
cacgtgtgagcctcg

SEQ ID NO: 44734 - DNA, 15 bp, Homo sapiens
acacgtgtgagcctc

SEQ ID NO: 44735 - DNA, 15 bp, Homo sapiens
tacacgtgtgagcct

SEQ ID NO: 44736 - DNA, 15 bp, Homo sapiens
ttacacgtgtgagcc

SEQ ID NO: 44737 - DNA, 15 bp, Homo sapiens
gttacacgtgtgagc

SEQ ID NO: 44738 - DNA, 15 bp, Homo sapiens
ggttacacgtgtgag

SEQ ID NO: 44739 - DNA, 15 bp, Homo sapiens
gggttacacgtgtga

SEQ ID NO: 44740 - DNA, 15 bp, Homo sapiens
ggggttacacgtgtg

SEQ ID NO: 44741 - DNA, 15 bp, Homo sapiens
tggggttacacgtgt

SEQ ID NO: 44742 - DNA, 15 bp, Homo sapiens
ctggggttacacgtg

SEQ ID NO: 44743 - DNA, 15 bp, Homo sapiens
gctggggttacacgt

SEQ ID NO: 44744 - DNA, 15 bp, Homo sapiens
tgctggggttacacg

SEQ ID NO: 44745 - DNA, 15 bp, Homo sapiens
gtgctggggttacac

SEQ ID NO: 44746 - DNA, 15 bp, Homo sapiens
agtgctggggttaca

SEQ ID NO: 44747 - DNA, 15 bp, Homo sapiens
aagtgctggggttac

SEQ ID NO: 44748 - DNA, 15 bp, Homo sapiens
aaagtgctggggtta

SEQ ID NO: 44749 - DNA, 15 bp, Homo sapiens
caaagtgctggggtt

SEQ ID NO: 44750 - DNA, 15 bp, Homo sapiens
ccaaagtgctggggt

SEQ ID NO: 44751 - DNA, 15 bp, Homo sapiens
cccaaagtgctgggg

SEQ ID NO: 44752 - DNA, 15 bp, Homo sapiens
agcctcccaaagtgc

SEQ ID NO: 44753 - DNA, 15 bp, Homo sapiens
cagcctcccaaagtg

SEQ ID NO: 44754 - DNA, 15 bp, Homo sapiens
tcagcctcccaaagt

SEQ ID NO: 44755 - DNA, 15 bp, Homo sapiens
ctcagcctcccaaag

SEQ ID NO: 44756 - DNA, 15 bp, Homo sapiens
atcaagcgatccgcc

SEQ ID NO: 44757 - DNA, 15 bp, Homo sapiens
gatcaagcgatccgc

SEQ ID NO: 44758 - DNA, 15 bp, Homo sapiens
agatcaagcgatccg

SEQ ID NO: 44759 - DNA, 15 bp, Homo sapiens
gagatcaagcgatcc

SEQ ID NO: 44760 - DNA, 15 bp, Homo sapiens
tgagatcaagcgatc

SEQ ID NO: 44761 - DNA, 15 bp, Homo sapiens
ctgagatcaagcgat

SEQ ID NO: 44762 - DNA, 15 bp, Homo sapiens
cctgagatcaagcga

SEQ ID NO: 44763 - DNA, 15 bp, Homo sapiens
tcctgagatcaagcg

SEQ ID NO: 44764 - DNA, 15 bp, Homo sapiens
ctcctgagatcaagc

SEQ ID NO: 44765 - DNA, 15 bp, Homo sapiens
actcctgagatcaag

SEQ ID NO: 44766 - DNA, 15 bp, Homo sapiens
aactcctgagatcaa

SEQ ID NO: 44767 - DNA, 15 bp, Homo sapiens
gaactcctgagatca

SEQ ID NO: 44768 - DNA, 15 bp, Homo sapiens
cgaactcctgagatc

SEQ ID NO: 44769 - DNA, 15 bp, Homo sapiens
tcgaactcctgagat

SEQ ID NO: 44770 - DNA, 15 bp, Homo sapiens
ctcgaactcctgaga

SEQ ID NO: 44771 - DNA, 15 bp, Homo sapiens
tctcgaactcctgag

SEQ ID NO: 44772 - DNA, 15 bp, Homo sapiens
gtctcgaactcctga

SEQ ID NO: 44773 - DNA, 15 bp, Homo sapiens
ggtctcgaactcctg

SEQ ID NO: 44774 - DNA, 15 bp, Homo sapiens
tggtctcgaactcct

SEQ ID NO: 44775 - DNA, 15 bp, Homo sapiens
ctggtctcgaactcc

SEQ ID NO: 44776 - DNA, 15 bp, Homo sapiens
gctggtctcgaactc

SEQ ID NO: 44777 - DNA, 15 bp, Homo sapiens
ggctggtctcgaact

SEQ ID NO: 44778 - DNA, 15 bp, Homo sapiens
aggctggtctcgaac

SEQ ID NO: 44779 - DNA, 15 bp, Homo sapiens
caggctggtctcgaa

SEQ ID NO: 44780 - DNA, 15 bp, Homo sapiens
ccaggctggtctcga

SEQ ID NO: 44781 - DNA, 15 bp, Homo sapiens
gtccaggctggtctc

SEQ ID NO: 44782 - DNA, 15 bp, Homo sapiens
tgtccaggctggtct

SEQ ID NO: 44783 - DNA, 15 bp, Homo sapiens
ttgtccaggctggtc

SEQ ID NO: 44784 - DNA, 15 bp, Homo sapiens
gttgtccaggctggt

SEQ ID NO: 44785 - DNA, 15 bp, Homo sapiens
tgttgtccaggctgg

SEQ ID NO: 44786 - DNA, 15 bp, Homo sapiens
ttgttgtccaggctg

SEQ ID NO: 44787 - DNA, 15 bp, Homo sapiens
cttgttgtccaggct

SEQ ID NO: 44788 - DNA, 15 bp, Homo sapiens
ccttgttgtccaggc

SEQ ID NO: 44789 - DNA, 15 bp, Homo sapiens
accttgttgtccagg

SEQ ID NO: 44790 - DNA, 15 bp, Homo sapiens
caccttgttgtccag

SEQ ID NO: 44791 - DNA, 15 bp, Homo sapiens
tcaccttgttgtcca

SEQ ID NO: 44792 - DNA, 15 bp, Homo sapiens
ttcaccttgttgtcc

SEQ ID NO: 44793 - DNA, 15 bp, Homo sapiens
tttcaccttgttgtc

SEQ ID NO: 44794 - DNA, 15 bp, Homo sapiens
gtttcaccttgttgt

SEQ ID NO: 44795 - DNA, 15 bp, Homo sapiens
ggtttcaccttgttg

SEQ ID NO: 44796 - DNA, 15 bp, Homo sapiens
gggtttcaccttgtt

SEQ ID NO: 44797 - DNA, 15 bp, Homo sapiens
ggggtttcaccttgt

SEQ ID NO: 44798 - DNA, 15 bp, Homo sapiens
tggggtttcaccttg

SEQ ID NO: 44799 - DNA, 15 bp, Homo sapiens
atggggtttcacctt

SEQ ID NO: 44800 - DNA, 15 bp, Homo sapiens
gatggggtttcacct

SEQ ID NO: 44801 - DNA, 15 bp, Homo sapiens
agatggggtttcacc

SEQ ID NO: 44802 - DNA, 15 bp, Homo sapiens
gtttttagtagagat

SEQ ID NO: 44803 - DNA, 15 bp, Homo sapiens
tgtttttagtagaga

SEQ ID NO: 44804 - DNA, 15 bp, Homo sapiens
gtgtttttagtagag

SEQ ID NO: 44805 - DNA, 15 bp, Homo sapiens
tgtgtttttagtaga

SEQ ID NO: 44806 - DNA, 15 bp, Homo sapiens
ttgtgtttttagtag

SEQ ID NO: 44807 - DNA, 15 bp, Homo sapiens
tttgtgtttttagta

SEQ ID NO: 44808 - DNA, 15 bp, Homo sapiens
ttttgtgtttttagt

SEQ ID NO: 44809 - DNA, 15 bp, Homo sapiens
tttttgtgtttttag

SEQ ID NO: 44810 - DNA, 15 bp, Homo sapiens
atttttgtgttttta

SEQ ID NO: 44811 - DNA, 15 bp, Homo sapiens
agctaatttttgtgt

SEQ ID NO: 44812 - DNA, 15 bp, Homo sapiens
cagctaatttttgtg

SEQ ID NO: 44813 - DNA, 15 bp, Homo sapiens
tatgcccagctaatt

SEQ ID NO: 44814 - DNA, 15 bp, Homo sapiens
ctatgcccagctaat

SEQ ID NO: 44815 - DNA, 15 bp, Homo sapiens
actatgcccagctaa

SEQ ID NO: 44816 - DNA, 15 bp, Homo sapiens
cactatgcccagcta

SEQ ID NO: 44817 - DNA, 15 bp, Homo sapiens
ccactatgcccagct

SEQ ID NO: 44818 - DNA, 15 bp, Homo sapiens
gccactatgcccagc

SEQ ID NO: 44819 - DNA, 15 bp, Homo sapiens
tgccactatgcccag

SEQ ID NO: 44820 - DNA, 15 bp, Homo sapiens
gtgccactatgccca

SEQ ID NO: 44821 - DNA, 15 bp, Homo sapiens
tgtgccactatgccc

SEQ ID NO: 44822 - DNA, 15 bp, Homo sapiens
gtgtgccactatgcc

SEQ ID NO: 44823 - DNA, 15 bp, Homo sapiens
tgtgtgccactatgc

SEQ ID NO: 44824 - DNA, 15 bp, Homo sapiens
gtgtgtgccactatg

SEQ ID NO: 44825 - DNA, 15 bp, Homo sapiens
ggtgtgtgccactat

SEQ ID NO: 44826 - DNA, 15 bp, Homo sapiens
aggtgtgtgccacta

SEQ ID NO: 44827 - DNA, 15 bp, Homo sapiens
caggtgtgtgccact

SEQ ID NO: 44828 - DNA, 15 bp, Homo sapiens
acaggtgtgtgccac

SEQ ID NO: 44829 - DNA, 15 bp, Homo sapiens
tacaggtgtgtgcca

SEQ ID NO: 44830 - DNA, 15 bp, Homo sapiens
ctacaggtgtgtgcc

SEQ ID NO: 44831 - DNA, 15 bp, Homo sapiens
actacaggtgtgtgc

SEQ ID NO: 44832 - DNA, 15 bp, Homo sapiens
gactacaggtgtgtg

SEQ ID NO: 44833 - DNA, 15 bp, Homo sapiens
ggactacaggtgtgt

SEQ ID NO: 44834 - DNA, 15 bp, Homo sapiens
aagctgggactacag

SEQ ID NO: 44835 - DNA, 15 bp, Homo sapiens
gaagctgggactaca

SEQ ID NO: 44836 - DNA, 15 bp, Homo sapiens
agaagctgggactac

SEQ ID NO: 44837 - DNA, 15 bp, Homo sapiens
aagaagctgggacta

SEQ ID NO: 44838 - DNA, 15 bp, Homo sapiens
caagaagctgggact

SEQ ID NO: 44839 - DNA, 15 bp, Homo sapiens
ccaagaagctgggac

SEQ ID NO: 44840 - DNA, 15 bp, Homo sapiens
cccaagaagctggga

SEQ ID NO: 44841 - DNA, 15 bp, Homo sapiens
tcccaagaagctggg

SEQ ID NO: 44842 - DNA, 15 bp, Homo sapiens
ctcccaagaagctgg

SEQ ID NO: 44843 - DNA, 15 bp, Homo sapiens
cctcccaagaagctg

SEQ ID NO: 44844 - DNA, 15 bp, Homo sapiens
gcctcccaagaagct

SEQ ID NO: 44845 - DNA, 15 bp, Homo sapiens
agcctcccaagaagc

SEQ ID NO: 44846 - DNA, 15 bp, Homo sapiens
cagcctcccaagaag

SEQ ID NO: 44847 - DNA, 15 bp, Homo sapiens
tcagcctcccaagaa

SEQ ID NO: 44848 - DNA, 15 bp, Homo sapiens
ctcagcctcccaaga

SEQ ID NO: 44849 - DNA, 15 bp, Homo sapiens
attcaagcgattctc

SEQ ID NO: 44850 - DNA, 15 bp, Homo sapiens
gattcaagcgattct

SEQ ID NO: 44851 - DNA, 15 bp, Homo sapiens
ggattcaagcgattc

SEQ ID NO: 44852 - DNA, 15 bp, Homo sapiens
tggattcaagcgatt

SEQ ID NO: 44853 - DNA, 15 bp, Homo sapiens
ctggattcaagcgat

SEQ ID NO: 44854 - DNA, 15 bp, Homo sapiens
cctggattcaagcga

SEQ ID NO: 44855 - DNA, 15 bp, Homo sapiens
tcctggattcaagcg

SEQ ID NO: 44856 - DNA, 15 bp, Homo sapiens
ctcctggattcaagc

SEQ ID NO: 44857 - DNA, 15 bp, Homo sapiens
cctcctggattcaag

SEQ ID NO: 44858 - DNA, 15 bp, Homo sapiens
gcctcctggattcaa

SEQ ID NO: 44859 - DNA, 15 bp, Homo sapiens
tgcctcctggattca

SEQ ID NO: 44860 - DNA, 15 bp, Homo sapiens
ctgcctcctggattc

SEQ ID NO: 44861 - DNA, 15 bp, Homo sapiens
tctgcctcctggatt

SEQ ID NO: 44862 - DNA, 15 bp, Homo sapiens
ctctgcctcctggat

SEQ ID NO: 44863 - DNA, 15 bp, Homo sapiens
cctctgcctcctgga

SEQ ID NO: 44864 - DNA, 15 bp, Homo sapiens
acctctgcctcctgg

SEQ ID NO: 44865 - DNA, 15 bp, Homo sapiens
aacctctgcctcctg

SEQ ID NO: 44866 - DNA, 15 bp, Homo sapiens
caacctctgcctcct

SEQ ID NO: 44867 - DNA, 15 bp, Homo sapiens
aactgcaacctctgc

SEQ ID NO: 44868 - DNA, 15 bp, Homo sapiens
taactgcaacctctg

SEQ ID NO: 44869 - DNA, 15 bp, Homo sapiens
ctaactgcaacctct

SEQ ID NO: 44870 - DNA, 15 bp, Homo sapiens
gctaactgcaacctc

SEQ ID NO: 44871 - DNA, 15 bp, Homo sapiens
ggctaactgcaacct

SEQ ID NO: 44872 - DNA, 15 bp, Homo sapiens
cggctaactgcaacc

SEQ ID NO: 44873 - DNA, 15 bp, Homo sapiens
tcggctaactgcaac

SEQ ID NO: 44874 - DNA, 15 bp, Homo sapiens
ctcggctaactgcaa

SEQ ID NO: 44875 - DNA, 15 bp, Homo sapiens
tctcggctaactgca

SEQ ID NO: 44876 - DNA, 15 bp, Homo sapiens
atctcggctaactgc

SEQ ID NO: 44877 - DNA, 15 bp, Homo sapiens
gatctcggctaactg

SEQ ID NO: 44878 - DNA, 15 bp, Homo sapiens
tgatctcggctaact

SEQ ID NO: 44879 - DNA, 15 bp, Homo sapiens
atgatctcggctaac

SEQ ID NO: 44880 - DNA, 15 bp, Homo sapiens
catgatctcggctaa

SEQ ID NO: 44881 - DNA, 15 bp, Homo sapiens
gcatgatctcggcta

SEQ ID NO: 44882 - DNA, 15 bp, Homo sapiens
ggcatgatctcggct

SEQ ID NO: 44883 - DNA, 15 bp, Homo sapiens
tggcatgatctcggc

SEQ ID NO: 44884 - DNA, 15 bp, Homo sapiens
cagtgcagtggcatg

SEQ ID NO: 44885 - DNA, 15 bp, Homo sapiens
gcagtgcagtggcat

SEQ ID NO: 44886 - DNA, 15 bp, Homo sapiens
tgcagtgcagtggca

SEQ ID NO: 44887 - DNA, 15 bp, Homo sapiens
ctgcagtgcagtggc

SEQ ID NO: 44888 - DNA, 15 bp, Homo sapiens
gctgcagtgcagtgg

SEQ ID NO: 44889 - DNA, 15 bp, Homo sapiens
ggctgcagtgcagtg

SEQ ID NO: 44890 - DNA, 15 bp, Homo sapiens
aggctgcagtgcagt

SEQ ID NO: 44891 - DNA, 15 bp, Homo sapiens
caggctgcagtgcag

SEQ ID NO: 44892 - DNA, 15 bp, Homo sapiens
ccaggctgcagtgca

SEQ ID NO: 44893 - DNA, 15 bp, Homo sapiens
tccaggctgcagtgc

SEQ ID NO: 44894 - DNA, 15 bp, Homo sapiens
gtccaggctgcagtg

SEQ ID NO: 44895 - DNA, 15 bp, Homo sapiens
tgtccaggctgcagt

SEQ ID NO: 44896 - DNA, 15 bp, Homo sapiens
atgtccaggctgcag

SEQ ID NO: 44897 - DNA, 15 bp, Homo sapiens
gatgtccaggctgca

SEQ ID NO: 44898 - DNA, 15 bp, Homo sapiens
cgatgtccaggctgc

SEQ ID NO: 44899 - DNA, 15 bp, Homo sapiens
ccgatgtccaggctg

SEQ ID NO: 44900 - DNA, 15 bp, Homo sapiens
tccgatgtccaggct

SEQ ID NO: 44901 - DNA, 15 bp, Homo sapiens
ctccgatgtccaggc

SEQ ID NO: 44902 - DNA, 15 bp, Homo sapiens
gctccgatgtccagg

SEQ ID NO: 44903 - DNA, 15 bp, Homo sapiens
tgctccgatgtccag

SEQ ID NO: 44904 - DNA, 15 bp, Homo sapiens
ttgctccgatgtcca

SEQ ID NO: 44905 - DNA, 15 bp, Homo sapiens
cttgctccgatgtcc

SEQ ID NO: 44906 - DNA, 15 bp, Homo sapiens
tcttgctccgatgtc

SEQ ID NO: 44907 - DNA, 15 bp, Homo sapiens
gtcttgctccgatgt

SEQ ID NO: 44908 - DNA, 15 bp, Homo sapiens
agtcttgctccgatg

SEQ ID NO: 44909 - DNA, 15 bp, Homo sapiens
aagtcttgctccgat

SEQ ID NO: 44910 - DNA, 15 bp, Homo sapiens
aaagtcttgctccga

SEQ ID NO: 44911 - DNA, 15 bp, Homo sapiens
caaagtcttgctccg

SEQ ID NO: 44912 - DNA, 15 bp, Homo sapiens
acaaagtcttgctcc

SEQ ID NO: 44913 - DNA, 15 bp, Homo sapiens
gacaaagtcttgctc

SEQ ID NO: 44914 - DNA, 15 bp, Homo sapiens
agacaaagtcttgct

SEQ ID NO: 44915 - DNA, 15 bp, Homo sapiens
aagacaaagtcttgc

SEQ ID NO: 44916 - DNA, 15 bp, Homo sapiens
taagacaaagtcttg

SEQ ID NO: 44917 - DNA, 15 bp, Homo sapiens
ctaagacaaagtctt

SEQ ID NO: 44918 - DNA, 15 bp, Homo sapiens
tctaagacaaagtct

SEQ ID NO: 44919 - DNA, 15 bp, Homo sapiens
ttctaagacaaagtc

SEQ ID NO: 44920 - DNA, 15 bp, Homo sapiens
tttctaagacaaagt

SEQ ID NO: 44921 - DNA, 15 bp, Homo sapiens
atttctaagacaaag

SEQ ID NO: 44922 - DNA, 15 bp, Homo sapiens
tatttctaagacaaa

SEQ ID NO: 44923 - DNA, 15 bp, Homo sapiens
ttatttctaagacaa

SEQ ID NO: 44924 - DNA, 15 bp, Homo sapiens
tttatttctaagaca

SEQ ID NO: 44925 - DNA, 15 bp, Homo sapiens
atttatttctaagac

SEQ ID NO: 44926 - DNA, 15 bp, Homo sapiens
tatttatttctaaga

SEQ ID NO: 44927 - DNA, 15 bp, Homo sapiens
ttatttatttctaag

SEQ ID NO: 44928 - DNA, 15 bp, Homo sapiens
tttatttatttctaa

SEQ ID NO: 44929 - DNA, 15 bp, Homo sapiens
atttatttatttcta

SEQ ID NO: 44930 - DNA, 15 bp, Homo sapiens
tatttatttatttct

SEQ ID NO: 44931 - DNA, 15 bp, Homo sapiens
ttatttatttatttc

SEQ ID NO: 44932 - DNA, 15 bp, Homo sapiens
atatttatttattta

SEQ ID NO: 44933 - DNA, 15 bp, Homo sapiens
tatatttatttattt

SEQ ID NO: 44934 - DNA, 15 bp, Homo sapiens
ttatatttatttatt

SEQ ID NO: 44935 - DNA, 15 bp, Homo sapiens
tttatatttatttat

SEQ ID NO: 44936 - DNA, 15 bp, Homo sapiens
ttttatatttattta

SEQ ID NO: 44937 - DNA, 15 bp, Homo sapiens
attttatatttattt

SEQ ID NO: 44938 - DNA, 15 bp, Homo sapiens
tattttatatttatt

SEQ ID NO: 44939 - DNA, 15 bp, Homo sapiens
ttattttatatttat

SEQ ID NO: 44940 - DNA, 15 bp, Homo sapiens
tttattttatattta

SEQ ID NO: 44941 - DNA, 15 bp, Homo sapiens
ttttattttatattt

SEQ ID NO: 44942 - DNA, 15 bp, Homo sapiens
attttattttatatt

SEQ ID NO: 44943 - DNA, 15 bp, Homo sapiens
tattttattttatat

SEQ ID NO: 44944 - DNA, 15 bp, Homo sapiens
ttattttattttata

SEQ ID NO: 44945 - DNA, 15 bp, Homo sapiens
catttattttatttt

SEQ ID NO: 44946 - DNA, 15 bp, Homo sapiens
ccatttattttattt

SEQ ID NO: 44947 - DNA, 15 bp, Homo sapiens
cccatttattttatt

SEQ ID NO: 44948 - DNA, 15 bp, Homo sapiens
tcccatttattttat

SEQ ID NO: 44949 - DNA, 15 bp, Homo sapiens
ttcccatttatttta

SEQ ID NO: 44950 - DNA, 15 bp, Homo sapiens
cttcccatttatttt

SEQ ID NO: 44951 - DNA, 15 bp, Homo sapiens
acttcccatttattt

SEQ ID NO: 44952 - DNA, 15 bp, Homo sapiens
aacttcccatttatt

SEQ ID NO: 44953 - DNA, 15 bp, Homo sapiens
caacttcccatttat

SEQ ID NO: 44954 - DNA, 15 bp, Homo sapiens
acaacttcccattta

SEQ ID NO: 44955 - DNA, 15 bp, Homo sapiens
cacaacttcccattt

SEQ ID NO: 44956 - DNA, 15 bp, Homo sapiens
acacaacttcccatt

SEQ ID NO: 44957 - DNA, 15 bp, Homo sapiens
tacacaacttcccat

SEQ ID NO: 44958 - DNA, 15 bp, Homo sapiens
atacacaacttccca

SEQ ID NO: 44959 - DNA, 15 bp, Homo sapiens
tatacacaacttccc

SEQ ID NO: 44960 - DNA, 15 bp, Homo sapiens
atatacacaacttcc

SEQ ID NO: 44961 - DNA, 15 bp, Homo sapiens
tatatacacaacttc

SEQ ID NO: 44962 - DNA, 15 bp, Homo sapiens
ttatatacacaactt

SEQ ID NO: 44963 - DNA, 15 bp, Homo sapiens
tttatatacacaact

SEQ ID NO: 44964 - DNA, 15 bp, Homo sapiens
atttatatacacaac

SEQ ID NO: 44965 - DNA, 15 bp, Homo sapiens
aatttatatacacaa

SEQ ID NO: 44966 - DNA, 15 bp, Homo sapiens
taatttatatacaca

SEQ ID NO: 44967 - DNA, 15 bp, Homo sapiens
ataatttatatacac

SEQ ID NO: 44968 - DNA, 15 bp, Homo sapiens
tataatttatataca

SEQ ID NO: 44969 - DNA, 15 bp, Homo sapiens
ttataatttatatac

SEQ ID NO: 44970 - DNA, 15 bp, Homo sapiens
tttataatttatata

SEQ ID NO: 44971 - DNA, 15 bp, Homo sapiens
atttataatttatat

SEQ ID NO: 44972 - DNA, 15 bp, Homo sapiens
catttataatttata

SEQ ID NO: 44973 - DNA, 15 bp, Homo sapiens
gcatttataatttat

SEQ ID NO: 44974 - DNA, 15 bp, Homo sapiens
agcatttataattta

SEQ ID NO: 44975 - DNA, 15 bp, Homo sapiens
tagcatttataattt

SEQ ID NO: 44976 - DNA, 15 bp, Homo sapiens
gtagcatttataatt

SEQ ID NO: 44977 - DNA, 15 bp, Homo sapiens
tgtagcatttataat

SEQ ID NO: 44978 - DNA, 15 bp, Homo sapiens
atgtagcatttataa

SEQ ID NO: 44979 - DNA, 15 bp, Homo sapiens
aatgtagcatttata

SEQ ID NO: 44980 - DNA, 15 bp, Homo sapiens
gaatgtagcatttat

SEQ ID NO: 44981 - DNA, 15 bp, Homo sapiens
tgaatgtagcattta

SEQ ID NO: 44982 - DNA, 15 bp, Homo sapiens
ctgaatgtagcattt

SEQ ID NO: 44983 - DNA, 15 bp, Homo sapiens
tctgaatgtagcatt

SEQ ID NO: 44984 - DNA, 15 bp, Homo sapiens
ttctgaatgtagcat

SEQ ID NO: 44985 - DNA, 15 bp, Homo sapiens
tttctgaatgtagca

SEQ ID NO: 44986 - DNA, 15 bp, Homo sapiens
ttttctgaatgtagc

SEQ ID NO: 44987 - DNA, 15 bp, Homo sapiens
cttttctgaatgtag

SEQ ID NO: 44988 - DNA, 15 bp, Homo sapiens
gcttttctgaatgta

SEQ ID NO: 44989 - DNA, 15 bp, Homo sapiens
agcttttctgaatgt

SEQ ID NO: 44990 - DNA, 15 bp, Homo sapiens
aagcttttctgaatg

SEQ ID NO: 44991 - DNA, 15 bp, Homo sapiens
aaagcttttctgaat

SEQ ID NO: 44992 - DNA, 15 bp, Homo sapiens
aaaagcttttctgaa

SEQ ID NO: 44993 - DNA, 15 bp, Homo sapiens
caaaagcttttctga

SEQ ID NO: 44994 - DNA, 15 bp, Homo sapiens
tcaaaagcttttctg

SEQ ID NO: 44995 - DNA, 15 bp, Homo sapiens
ttcaaaagcttttct

SEQ ID NO: 44996 - DNA, 15 bp, Homo sapiens
cttcaaaagcttttc

SEQ ID NO: 44997 - DNA, 15 bp, Homo sapiens
ccttcaaaagctttt

SEQ ID NO: 44998 - DNA, 15 bp, Homo sapiens
accttcaaaagcttt

SEQ ID NO: 44999 - DNA, 15 bp, Homo sapiens
aaccttcaaaagctt

SEQ ID NO: 45000 - DNA, 15 bp, Homo sapiens
caaccttcaaaagct

SEQ ID NO: 45001 - DNA, 15 bp, Homo sapiens
acaaccttcaaaagc

SEQ ID NO: 45002 - DNA, 15 bp, Homo sapiens
gacaaccttcaaaag

SEQ ID NO: 45003 - DNA, 15 bp, Homo sapiens
tgacaaccttcaaaa

SEQ ID NO: 45004 - DNA, 15 bp, Homo sapiens
ctgacaaccttcaaa

SEQ ID NO: 45005 - DNA, 15 bp, Homo sapiens
tctgacaaccttcaa

SEQ ID NO: 45006 - DNA, 15 bp, Homo sapiens
gtctgacaaccttca

SEQ ID NO: 45007 - DNA, 15 bp, Homo sapiens
tgtctgacaaccttc

SEQ ID NO: 45008 - DNA, 15 bp, Homo sapiens
ctgtctgacaacctt

SEQ ID NO: 45009 - DNA, 15 bp, Homo sapiens
actgtctgacaacct

SEQ ID NO: 45010 - DNA, 15 bp, Homo sapiens
aactgtctgacaacc

SEQ ID NO: 45011 - DNA, 15 bp, Homo sapiens
aaactgtctgacaac

SEQ ID NO: 45012 - DNA, 15 bp, Homo sapiens
gaaactgtctgacaa

SEQ ID NO: 45013 - DNA, 15 bp, Homo sapiens
agaaactgtctgaca

SEQ ID NO: 45014 - DNA, 15 bp, Homo sapiens
aagaaactgtctgac

SEQ ID NO: 45015 - DNA, 15 bp, Homo sapiens
taagaaactgtctga

SEQ ID NO: 45016 - DNA, 15 bp, Homo sapiens
ttaagaaactgtctg

SEQ ID NO: 45017 - DNA, 15 bp, Homo sapiens
tttaagaaactgtct

SEQ ID NO: 45018 - DNA, 15 bp, Homo sapiens
ctttaagaaactgtc

SEQ ID NO: 45019 - DNA, 15 bp, Homo sapiens
cctttaagaaactgt

SEQ ID NO: 45020 - DNA, 15 bp, Homo sapiens
tcctttaagaaactg

SEQ ID NO: 45021 - DNA, 15 bp, Homo sapiens
ttcctttaagaaact

SEQ ID NO: 45022 - DNA, 15 bp, Homo sapiens
cttcctttaagaaac

SEQ ID NO: 45023 - DNA, 15 bp, Homo sapiens
acttcctttaagaaa

SEQ ID NO: 45024 - DNA, 15 bp, Homo sapiens
aacttcctttaagaa

SEQ ID NO: 45025 - DNA, 15 bp, Homo sapiens
gaacttcctttaaga

SEQ ID NO: 45026 - DNA, 15 bp, Homo sapiens
tgaacttcctttaag

SEQ ID NO: 45027 - DNA, 15 bp, Homo sapiens
gtgaacttcctttaa

SEQ ID NO: 45028 - DNA, 15 bp, Homo sapiens
ggtgaacttccttta

SEQ ID NO: 45029 - DNA, 15 bp, Homo sapiens
tggtgaacttccttt

SEQ ID NO: 45030 - DNA, 15 bp, Homo sapiens
ctggtgaacttcctt

SEQ ID NO: 45031 - DNA, 15 bp, Homo sapiens
actggtgaacttcct

SEQ ID NO: 45032 - DNA, 15 bp, Homo sapiens
aactggtgaacttcc

SEQ ID NO: 45033 - DNA, 15 bp, Homo sapiens
gaactggtgaacttc

SEQ ID NO: 45034 - DNA, 15 bp, Homo sapiens
agaactggtgaactt

SEQ ID NO: 45035 - DNA, 15 bp, Homo sapiens
aagaactggtgaact

SEQ ID NO: 45036 - DNA, 15 bp, Homo sapiens
aaagaactggtgaac

SEQ ID NO: 45037 - DNA, 15 bp, Homo sapiens
taaagaactggtgaa

SEQ ID NO: 45038 - DNA, 15 bp, Homo sapiens
ataaagaactggtga

SEQ ID NO: 45039 - DNA, 15 bp, Homo sapiens
aataaagaactggtg

SEQ ID NO: 45040 - DNA, 15 bp, Homo sapiens
caataaagaactggt

SEQ ID NO: 45041 - DNA, 15 bp, Homo sapiens
tcaataaagaactgg

SEQ ID NO: 45042 - DNA, 15 bp, Homo sapiens
ttcaataaagaactg

SEQ ID NO: 45043 - DNA, 15 bp, Homo sapiens
gttcaataaagaact

SEQ ID NO: 45044 - DNA, 15 bp, Homo sapiens
tgttcaataaagaac

SEQ ID NO: 45045 - DNA, 15 bp, Homo sapiens
atgttcaataaagaa

SEQ ID NO: 45046 - DNA, 15 bp, Homo sapiens
aatgttcaataaaga

SEQ ID NO: 45047 - DNA, 15 bp, Homo sapiens
caatgttcaataaag

SEQ ID NO: 45048 - DNA, 15 bp, Homo sapiens
tcaatgttcaataaa

SEQ ID NO: 45049 - DNA, 15 bp, Homo sapiens
ttcaatgttcaataa

SEQ ID NO: 45050 - DNA, 15 bp, Homo sapiens
cttcaatgttcaata

SEQ ID NO: 45051 - DNA, 15 bp, Homo sapiens
tcttcaatgttcaat

SEQ ID NO: 45052 - DNA, 15 bp, Homo sapiens
ttcttcaatgttcaa

SEQ ID NO: 45053 - DNA, 15 bp, Homo sapiens
tttcttcaatgttca

SEQ ID NO: 45054 - DNA, 15 bp, Homo sapiens
ttttcttcaatgttc

SEQ ID NO: 45055 - DNA, 15 bp, Homo sapiens
gttttcttcaatgtt

SEQ ID NO: 45056 - DNA, 15 bp, Homo sapiens
tgttttcttcaatgt

SEQ ID NO: 45057 - DNA, 15 bp, Homo sapiens
atgttttcttcaatg

SEQ ID NO: 45058 - DNA, 15 bp, Homo sapiens
tatgttttcttcaat

SEQ ID NO: 45059 - DNA, 15 bp, Homo sapiens
gtatgttttcttcaa

SEQ ID NO: 45060 - DNA, 15 bp, Homo sapiens
tgtatgttttcttca

SEQ ID NO: 45061 - DNA, 15 bp, Homo sapiens
ctgtatgttttcttc

SEQ ID NO: 45062 - DNA, 15 bp, Homo sapiens
actgtatgttttctt

SEQ ID NO: 45063 - DNA, 15 bp, Homo sapiens
aactgtatgttttct

SEQ ID NO: 45064 - DNA, 15 bp, Homo sapiens
aaactgtatgttttc

SEQ ID NO: 45065 - DNA, 15 bp, Homo sapiens
taaactgtatgtttt

SEQ ID NO: 45066 - DNA, 15 bp, Homo sapiens
ctaaactgtatgttt

SEQ ID NO: 45067 - DNA, 15 bp, Homo sapiens
tctaaactgtatgtt

SEQ ID NO: 45068 - DNA, 15 bp, Homo sapiens
gtctaaactgtatgt

SEQ ID NO: 45069 - DNA, 15 bp, Homo sapiens
agtctaaactgtatg

SEQ ID NO: 45070 - DNA, 15 bp, Homo sapiens
cagtctaaactgtat

SEQ ID NO: 45071 - DNA, 15 bp, Homo sapiens
ccagtctaaactgta

SEQ ID NO: 45072 - DNA, 15 bp, Homo sapiens
gccagtctaaactgt

SEQ ID NO: 45073 - DNA, 15 bp, Homo sapiens
tgccagtctaaactg

SEQ ID NO: 45074 - DNA, 15 bp, Homo sapiens
atgccagtctaaact

SEQ ID NO: 45075 - DNA, 15 bp, Homo sapiens
aatgccagtctaaac

SEQ ID NO: 45076 - DNA, 15 bp, Homo sapiens
taatgccagtctaaa

SEQ ID NO: 45077 - DNA, 15 bp, Homo sapiens
ttaatgccagtctaa

SEQ ID NO: 45078 - DNA, 15 bp, Homo sapiens
tttaatgccagtcta

SEQ ID NO: 45079 - DNA, 15 bp, Homo sapiens
ttttaatgccagtct

SEQ ID NO: 45080 - DNA, 15 bp, Homo sapiens
gttttaatgccagtc

SEQ ID NO: 45081 - DNA, 15 bp, Homo sapiens
agttttaatgccagt

SEQ ID NO: 45082 - DNA, 15 bp, Homo sapiens
cagttttaatgccag

SEQ ID NO: 45083 - DNA, 15 bp, Homo sapiens
tcagttttaatgcca

SEQ ID NO: 45084 - DNA, 15 bp, Homo sapiens
ttcagttttaatgcc

SEQ ID NO: 45085 - DNA, 15 bp, Homo sapiens
tttcagttttaatgc

SEQ ID NO: 45086 - DNA, 15 bp, Homo sapiens
ctttcagttttaatg

SEQ ID NO: 45087 - DNA, 15 bp, Homo sapiens
tctttcagttttaat

SEQ ID NO: 45088 - DNA, 15 bp, Homo sapiens
ttctttcagttttaa

SEQ ID NO: 45089 - DNA, 15 bp, Homo sapiens
cttctttcagtttta

SEQ ID NO: 45090 - DNA, 15 bp, Homo sapiens
acttctttcagtttt

SEQ ID NO: 45091 - DNA, 15 bp, Homo sapiens
cacttctttcagttt

SEQ ID NO: 45092 - DNA, 15 bp, Homo sapiens
ccacttctttcagtt

SEQ ID NO: 45093 - DNA, 15 bp, Homo sapiens
gccacttctttcagt

SEQ ID NO: 45094 - DNA, 15 bp, Homo sapiens
ggccacttctttcag

SEQ ID NO: 45095 - DNA, 15 bp, Homo sapiens
tggccacttctttca

SEQ ID NO: 45096 - DNA, 15 bp, Homo sapiens
ctggccacttctttc

SEQ ID NO: 45097 - DNA, 15 bp, Homo sapiens
tctggccacttcttt

SEQ ID NO: 45098 - DNA, 15 bp, Homo sapiens
gtctggccacttctt

SEQ ID NO: 45099 - DNA, 15 bp, Homo sapiens
cgtctggccacttct

SEQ ID NO: 45100 - DNA, 15 bp, Homo sapiens
gcgtctggccacttc

SEQ ID NO: 45101 - DNA, 15 bp, Homo sapiens
tgcgtctggccactt

SEQ ID NO: 45102 - DNA, 15 bp, Homo sapiens
ctgcgtctggccact

SEQ ID NO: 45103 - DNA, 15 bp, Homo sapiens
actgcgtctggccac

SEQ ID NO: 45104 - DNA, 15 bp, Homo sapiens
cactgcgtctggcca

SEQ ID NO: 45105 - DNA, 15 bp, Homo sapiens
ccactgcgtctggcc

SEQ ID NO: 45106 - DNA, 15 bp, Homo sapiens
accactgcgtctggc

SEQ ID NO: 45107 - DNA, 15 bp, Homo sapiens
taccactgcgtctgg

SEQ ID NO: 45108 - DNA, 15 bp, Homo sapiens
ctaccactgcgtctg

SEQ ID NO: 45109 - DNA, 15 bp, Homo sapiens
tctaccactgcgtct

SEQ ID NO: 45110 - DNA, 15 bp, Homo sapiens
gtctaccactgcgtc

SEQ ID NO: 45111 - DNA, 15 bp, Homo sapiens
cgtctaccactgcgt

SEQ ID NO: 45112 - DNA, 15 bp, Homo sapiens
gcgtctaccactgcg

SEQ ID NO: 45113 - DNA, 15 bp, Homo sapiens
tgcgtctaccactgc

SEQ ID NO: 45114 - DNA, 15 bp, Homo sapiens
ctgcgtctaccactg

SEQ ID NO: 45115 - DNA, 15 bp, Homo sapiens
actgcgtctaccact

SEQ ID NO: 45116 - DNA, 15 bp, Homo sapiens
cactgcgtctaccac

SEQ ID NO: 45117 - DNA, 15 bp, Homo sapiens
ccactgcgtctacca

SEQ ID NO: 45118 - DNA, 15 bp, Homo sapiens
accactgcgtctacc

SEQ ID NO: 45119 - DNA, 15 bp, Homo sapiens
aaccactgcgtctac

SEQ ID NO: 45120 - DNA, 15 bp, Homo sapiens
gaaccactgcgtcta

SEQ ID NO: 45121 - DNA, 15 bp, Homo sapiens
tgaaccactgcgtct

SEQ ID NO: 45122 - DNA, 15 bp, Homo sapiens
gtgaaccactgcgtc

SEQ ID NO: 45123 - DNA, 15 bp, Homo sapiens
cgtgaaccactgcgt

SEQ ID NO: 45124 - DNA, 15 bp, Homo sapiens
gcgtgaaccactgcg

SEQ ID NO: 45125 - DNA, 15 bp, Homo sapiens
ggcgtgaaccactgc

SEQ ID NO: 45126 - DNA, 15 bp, Homo sapiens
aggcgtgaaccactg

SEQ ID NO: 45127 - DNA, 15 bp, Homo sapiens
caggcgtgaaccact

SEQ ID NO: 45128 - DNA, 15 bp, Homo sapiens
acaggcgtgaaccac

SEQ ID NO: 45129 - DNA, 15 bp, Homo sapiens
tacaggcgtgaacca

SEQ ID NO: 45130 - DNA, 15 bp, Homo sapiens
ttacaggcgtgaacc

SEQ ID NO: 45131 - DNA, 15 bp, Homo sapiens
attacaggcgtgaac

SEQ ID NO: 45132 - DNA, 15 bp, Homo sapiens
gattacaggcgtgaa

SEQ ID NO: 45133 - DNA, 15 bp, Homo sapiens
tccaccttgacctcc

SEQ ID NO: 45134 - DNA, 15 bp, Homo sapiens
atccaccttgacctc

SEQ ID NO: 45135 - DNA, 15 bp, Homo sapiens
catccaccttgacct

SEQ ID NO: 45136 - DNA, 15 bp, Homo sapiens
ccatccaccttgacc

SEQ ID NO: 45137 - DNA, 15 bp, Homo sapiens
tccatccaccttgac

SEQ ID NO: 45138 - DNA, 15 bp, Homo sapiens
atccatccaccttga

SEQ ID NO: 45139 - DNA, 15 bp, Homo sapiens
gatccatccaccttg

SEQ ID NO: 45140 - DNA, 15 bp, Homo sapiens
tgatccatccacctt

SEQ ID NO: 45141 - DNA, 15 bp, Homo sapiens
gtgatccatccacct

SEQ ID NO: 45142 - DNA, 15 bp, Homo sapiens
ggtgatccatccacc

SEQ ID NO: 45143 - DNA, 15 bp, Homo sapiens
aggtgatccatccac

SEQ ID NO: 45144 - DNA, 15 bp, Homo sapiens
caggtgatccatcca

SEQ ID NO: 45145 - DNA, 15 bp, Homo sapiens
tcaggtgatccatcc

SEQ ID NO: 45146 - DNA, 15 bp, Homo sapiens
ctcaggtgatccatc

SEQ ID NO: 45147 - DNA, 15 bp, Homo sapiens
cctcaggtgatccat

SEQ ID NO: 45148 - DNA, 15 bp, Homo sapiens
acctcaggtgatcca

SEQ ID NO: 45149 - DNA, 15 bp, Homo sapiens
gacctcaggtgatcc

SEQ ID NO: 45150 - DNA, 15 bp, Homo sapiens
tgacctcaggtgatc

SEQ ID NO: 45151 - DNA, 15 bp, Homo sapiens
ctgacctcaggtgat

SEQ ID NO: 45152 - DNA, 15 bp, Homo sapiens
cctgacctcaggtga

SEQ ID NO: 45153 - DNA, 15 bp, Homo sapiens
tcctgacctcaggtg

SEQ ID NO: 45154 - DNA, 15 bp, Homo sapiens
ctcctgacctcaggt

SEQ ID NO: 45155 - DNA, 15 bp, Homo sapiens
actcctgacctcagg

SEQ ID NO: 45156 - DNA, 15 bp, Homo sapiens
aactcctgacctcag

SEQ ID NO: 45157 - DNA, 15 bp, Homo sapiens
aaactcctgacctca

SEQ ID NO: 45158 - DNA, 15 bp, Homo sapiens
caaactcctgacctc

SEQ ID NO: 45159 - DNA, 15 bp, Homo sapiens
tcaaactcctgacct

SEQ ID NO: 45160 - DNA, 15 bp, Homo sapiens
ctcaaactcctgacc

SEQ ID NO: 45161 - DNA, 15 bp, Homo sapiens
tctcaaactcctgac

SEQ ID NO: 45162 - DNA, 15 bp, Homo sapiens
atctcaaactcctga

SEQ ID NO: 45163 - DNA, 15 bp, Homo sapiens
gatctcaaactcctg

SEQ ID NO: 45164 - DNA, 15 bp, Homo sapiens
tgatctcaaactcct

SEQ ID NO: 45165 - DNA, 15 bp, Homo sapiens
ctgatctcaaactcc

SEQ ID NO: 45166 - DNA, 15 bp, Homo sapiens
cctgatctcaaactc

SEQ ID NO: 45167 - DNA, 15 bp, Homo sapiens
gcctgatctcaaact

SEQ ID NO: 45168 - DNA, 15 bp, Homo sapiens
agcctgatctcaaac

SEQ ID NO: 45169 - DNA, 15 bp, Homo sapiens
cagcctgatctcaaa

SEQ ID NO: 45170 - DNA, 15 bp, Homo sapiens
ccagcctgatctcaa

SEQ ID NO: 45171 - DNA, 15 bp, Homo sapiens
gccagcctgatctca

SEQ ID NO: 45172 - DNA, 15 bp, Homo sapiens
ggccagcctgatctc

SEQ ID NO: 45173 - DNA, 15 bp, Homo sapiens
cggccagcctgatct

SEQ ID NO: 45174 - DNA, 15 bp, Homo sapiens
tcggccagcctgatc

SEQ ID NO: 45175 - DNA, 15 bp, Homo sapiens
gtcggccagcctgat

SEQ ID NO: 45176 - DNA, 15 bp, Homo sapiens
tgtcggccagcctga

SEQ ID NO: 45177 - DNA, 15 bp, Homo sapiens
atgtcggccagcctg

SEQ ID NO: 45178 - DNA, 15 bp, Homo sapiens
catgtcggccagcct

SEQ ID NO: 45179 - DNA, 15 bp, Homo sapiens
ccatgtcggccagcc

SEQ ID NO: 45180 - DNA, 15 bp, Homo sapiens
accatgtcggccagc

SEQ ID NO: 45181 - DNA, 15 bp, Homo sapiens
caccatgtcggccag

SEQ ID NO: 45182 - DNA, 15 bp, Homo sapiens
tcaccatgtcggcca

SEQ ID NO: 45183 - DNA, 15 bp, Homo sapiens
ttcaccatgtcggcc

SEQ ID NO: 45184 - DNA, 15 bp, Homo sapiens
tttcaccatgtcggc

SEQ ID NO: 45185 - DNA, 15 bp, Homo sapiens
gtttcaccatgtcgg

SEQ ID NO: 45186 - DNA, 15 bp, Homo sapiens
ggtttcaccatgtcg

SEQ ID NO: 45187 - DNA, 15 bp, Homo sapiens
gggtttcaccatgtc

SEQ ID NO: 45188 - DNA, 15 bp, Homo sapiens
gtagagacagggttt

SEQ ID NO: 45189 - DNA, 15 bp, Homo sapiens
agtagagacagggtt

SEQ ID NO: 45190 - DNA, 15 bp, Homo sapiens
tagtagagacagggt

SEQ ID NO: 45191 - DNA, 15 bp, Homo sapiens
ttagtagagacaggg

SEQ ID NO: 45192 - DNA, 15 bp, Homo sapiens
tttagtagagacagg

SEQ ID NO: 45193 - DNA, 15 bp, Homo sapiens
ttttagtagagacag

SEQ ID NO: 45194 - DNA, 15 bp, Homo sapiens
tttttagtagagaca

SEQ ID NO: 45195 - DNA, 15 bp, Homo sapiens
tcaccatgcctggct

SEQ ID NO: 45196 - DNA, 15 bp, Homo sapiens
atcaccatgcctggc

SEQ ID NO: 45197 - DNA, 15 bp, Homo sapiens
catcaccatgcctgg

SEQ ID NO: 45198 - DNA, 15 bp, Homo sapiens
gcatcaccatgcctg

SEQ ID NO: 45199 - DNA, 15 bp, Homo sapiens
cgcatcaccatgcct

SEQ ID NO: 45200 - DNA, 15 bp, Homo sapiens
acgcatcaccatgcc

SEQ ID NO: 45201 - DNA, 15 bp, Homo sapiens
cacgcatcaccatgc

SEQ ID NO: 45202 - DNA, 15 bp, Homo sapiens
gcacgcatcaccatg

SEQ ID NO: 45203 - DNA, 15 bp, Homo sapiens
ggcacgcatcaccat

SEQ ID NO: 45204 - DNA, 15 bp, Homo sapiens
aggcacgcatcacca

SEQ ID NO: 45205 - DNA, 15 bp, Homo sapiens
caggcacgcatcacc

SEQ ID NO: 45206 - DNA, 15 bp, Homo sapiens
acaggcacgcatcac

SEQ ID NO: 45207 - DNA, 15 bp, Homo sapiens
tacaggcacgcatca

SEQ ID NO: 45208 - DNA, 15 bp, Homo sapiens
ctacaggcacgcatc

SEQ ID NO: 45209 - DNA, 15 bp, Homo sapiens
actacaggcacgcat

SEQ ID NO: 45210 - DNA, 15 bp, Homo sapiens
gactacaggcacgca

SEQ ID NO: 45211 - DNA, 15 bp, Homo sapiens
cttcaagcaattctc

SEQ ID NO: 45212 - DNA, 15 bp, Homo sapiens
gcttcaagcaattct

SEQ ID NO: 45213 - DNA, 15 bp, Homo sapiens
ggcttcaagcaattc

SEQ ID NO: 45214 - DNA, 15 bp, Homo sapiens
cggcttcaagcaatt

SEQ ID NO: 45215 - DNA, 15 bp, Homo sapiens
tcggcttcaagcaat

SEQ ID NO: 45216 - DNA, 15 bp, Homo sapiens
ttcggcttcaagcaa

SEQ ID NO: 45217 - DNA, 15 bp, Homo sapiens
cttcggcttcaagca

SEQ ID NO: 45218 - DNA, 15 bp, Homo sapiens
ccttcggcttcaagc

SEQ ID NO: 45219 - DNA, 15 bp, Homo sapiens
accttcggcttcaag

SEQ ID NO: 45220 - DNA, 15 bp, Homo sapiens
caccttcggcttcaa

SEQ ID NO: 45221 - DNA, 15 bp, Homo sapiens
ccaccttcggcttca

SEQ ID NO: 45222 - DNA, 15 bp, Homo sapiens
tccaccttcggcttc

SEQ ID NO: 45223 - DNA, 15 bp, Homo sapiens
ctccaccttcggctt

SEQ ID NO: 45224 - DNA, 15 bp, Homo sapiens
cctccaccttcggct

SEQ ID NO: 45225 - DNA, 15 bp, Homo sapiens
acctccaccttcggc

SEQ ID NO: 45226 - DNA, 15 bp, Homo sapiens
aacctccaccttcgg

SEQ ID NO: 45227 - DNA, 15 bp, Homo sapiens
caacctccaccttcg

SEQ ID NO: 45228 - DNA, 15 bp, Homo sapiens
gcaacctccaccttc

SEQ ID NO: 45229 - DNA, 15 bp, Homo sapiens
tgcaacctccacctt

SEQ ID NO: 45230 - DNA, 15 bp, Homo sapiens
aatctcggctcactg

SEQ ID NO: 45231 - DNA, 15 bp, Homo sapiens
caatctcggctcact

SEQ ID NO: 45232 - DNA, 15 bp, Homo sapiens
cgcaatctcggctca

SEQ ID NO: 45233 - DNA, 15 bp, Homo sapiens
acgcaatctcggctc

SEQ ID NO: 45234 - DNA, 15 bp, Homo sapiens
gacgcaatctcggct

SEQ ID NO: 45235 - DNA, 15 bp, Homo sapiens
tgacgcaatctcggc

SEQ ID NO: 45236 - DNA, 15 bp, Homo sapiens
atgacgcaatctcgg

SEQ ID NO: 45237 - DNA, 15 bp, Homo sapiens
aatgacgcaatctcg

SEQ ID NO: 45238 - DNA, 15 bp, Homo sapiens
caatgacgcaatctc

SEQ ID NO: 45239 - DNA, 15 bp, Homo sapiens
gcaatgacgcaatct

SEQ ID NO: 45240 - DNA, 15 bp, Homo sapiens
tgcaatgacgcaatc

SEQ ID NO: 45241 - DNA, 15 bp, Homo sapiens
gtgcaatgacgcaat

SEQ ID NO: 45242 - DNA, 15 bp, Homo sapiens
agtgcaatgacgcaa

SEQ ID NO: 45243 - DNA, 15 bp, Homo sapiens
gagtgcaatgacgca

SEQ ID NO: 45244 - DNA, 15 bp, Homo sapiens
ggagtgcaatgacgc

SEQ ID NO: 45245 - DNA, 15 bp, Homo sapiens
tggagtgcaatgacg

SEQ ID NO: 45246 - DNA, 15 bp, Homo sapiens
ctggagtgcaatgac

SEQ ID NO: 45247 - DNA, 15 bp, Homo sapiens
gctggagtgcaatga

SEQ ID NO: 45248 - DNA, 15 bp, Homo sapiens
ggctggagtgcaatg

SEQ ID NO: 45249 - DNA, 15 bp, Homo sapiens
tggctggagtgcaat

SEQ ID NO: 45250 - DNA, 15 bp, Homo sapiens
ctggctggagtgcaa

SEQ ID NO: 45251 - DNA, 15 bp, Homo sapiens
cctggctggagtgca

SEQ ID NO: 45252 - DNA, 15 bp, Homo sapiens
ccctggctggagtgc

SEQ ID NO: 45253 - DNA, 15 bp, Homo sapiens
gccctggctggagtg

SEQ ID NO: 45254 - DNA, 15 bp, Homo sapiens
cgccctggctggagt

SEQ ID NO: 45255 - DNA, 15 bp, Homo sapiens
ccgccctggctggag

SEQ ID NO: 45256 - DNA, 15 bp, Homo sapiens
accgccctggctgga

SEQ ID NO: 45257 - DNA, 15 bp, Homo sapiens
taccgccctggctgg

SEQ ID NO: 45258 - DNA, 15 bp, Homo sapiens
ttaccgccctggctg

SEQ ID NO: 45259 - DNA, 15 bp, Homo sapiens
cttaccgccctggct

SEQ ID NO: 45260 - DNA, 15 bp, Homo sapiens
tcttaccgccctggc

SEQ ID NO: 45261 - DNA, 15 bp, Homo sapiens
ctcttaccgccctgg

SEQ ID NO: 45262 - DNA, 15 bp, Homo sapiens
actcttaccgccctg

SEQ ID NO: 45263 - DNA, 15 bp, Homo sapiens
cactcttaccgccct

SEQ ID NO: 45264 - DNA, 15 bp, Homo sapiens
tcactcttaccgccc

SEQ ID NO: 45265 - DNA, 15 bp, Homo sapiens
ctcactcttaccgcc

SEQ ID NO: 45266 - DNA, 15 bp, Homo sapiens
cctcactcttaccgc

SEQ ID NO: 45267 - DNA, 15 bp, Homo sapiens
gcctcactcttaccg

SEQ ID NO: 45268 - DNA, 15 bp, Homo sapiens
agcctcactcttacc

SEQ ID NO: 45269 - DNA, 15 bp, Homo sapiens
gagcctcactcttac

SEQ ID NO: 45270 - DNA, 15 bp, Homo sapiens
ggagcctcactctta

SEQ ID NO: 45271 - DNA, 15 bp, Homo sapiens
cggagcctcactctt

SEQ ID NO: 45272 - DNA, 15 bp, Homo sapiens
acggagcctcactct

SEQ ID NO: 45273 - DNA, 15 bp, Homo sapiens
gacggagcctcactc

SEQ ID NO: 45274 - DNA, 15 bp, Homo sapiens
agacggagcctcact

SEQ ID NO: 45275 - DNA, 15 bp, Homo sapiens
aagacggagcctcac

SEQ ID NO: 45276 - DNA, 15 bp, Homo sapiens
taagacggagcctca

SEQ ID NO: 45277 - DNA, 15 bp, Homo sapiens
ttaagacggagcctc

SEQ ID NO: 45278 - DNA, 15 bp, Homo sapiens
tttaagacggagcct

SEQ ID NO: 45279 - DNA, 15 bp, Homo sapiens
ttttaagacggagcc

SEQ ID NO: 45280 - DNA, 15 bp, Homo sapiens
tttttaagacggagc

SEQ ID NO: 45281 - DNA, 15 bp, Homo sapiens
ttttttaagacggag

SEQ ID NO: 45282 - DNA, 15 bp, Homo sapiens
tttttttaagacgga

SEQ ID NO: 45283 - DNA, 15 bp, Homo sapiens
ttttttttaagacgg

SEQ ID NO: 45284 - DNA, 15 bp, Homo sapiens
tttttttttaagacg

SEQ ID NO: 45285 - DNA, 15 bp, Homo sapiens
ttttttttttaagac

SEQ ID NO: 45286 - DNA, 15 bp, Homo sapiens
attttttttttaaga

SEQ ID NO: 45287 - DNA, 15 bp, Homo sapiens
tattttttttttaag

SEQ ID NO: 45288 - DNA, 15 bp, Homo sapiens
cttatttttttttta

SEQ ID NO: 45289 - DNA, 15 bp, Homo sapiens
acttatttttttttt

SEQ ID NO: 45290 - DNA, 15 bp, Homo sapiens
tacttattttttttt

SEQ ID NO: 45291 - DNA, 15 bp, Homo sapiens
ttacttatttttttt

SEQ ID NO: 45292 - DNA, 15 bp, Homo sapiens
tttacttattttttt

SEQ ID NO: 45293 - DNA, 15 bp, Homo sapiens
atttacttatttttt

SEQ ID NO: 45294 - DNA, 15 bp, Homo sapiens
tatttacttattttt

SEQ ID NO: 45295 - DNA, 15 bp, Homo sapiens
ttatttacttatttt

SEQ ID NO: 45296 - DNA, 15 bp, Homo sapiens
tttatttacttattt

SEQ ID NO: 45297 - DNA, 15 bp, Homo sapiens
atttatttacttatt

SEQ ID NO: 45298 - DNA, 15 bp, Homo sapiens
aatttatttacttat

SEQ ID NO: 45299 - DNA, 15 bp, Homo sapiens
taatttatttactta

SEQ ID NO: 45300 - DNA, 15 bp, Homo sapiens
ttaatttatttactt

SEQ ID NO: 45301 - DNA, 15 bp, Homo sapiens
tttaatttatttact

SEQ ID NO: 45302 - DNA, 15 bp, Homo sapiens
ttttaatttatttac

SEQ ID NO: 45303 - DNA, 15 bp, Homo sapiens
tttttaatttattta

SEQ ID NO: 45304 - DNA, 15 bp, Homo sapiens
gtttttaatttattt

SEQ ID NO: 45305 - DNA, 15 bp, Homo sapiens
agtttttaatttatt

SEQ ID NO: 45306 - DNA, 15 bp, Homo sapiens
tagtttttaatttat

SEQ ID NO: 45307 - DNA, 15 bp, Homo sapiens
gtagtttttaattta

SEQ ID NO: 45308 - DNA, 15 bp, Homo sapiens
agtagtttttaattt

SEQ ID NO: 45309 - DNA, 15 bp, Homo sapiens
cagtagtttttaatt

SEQ ID NO: 45310 - DNA, 15 bp, Homo sapiens
tcagtagtttttaat

SEQ ID NO: 45311 - DNA, 15 bp, Homo sapiens
ttcagtagtttttaa

SEQ ID NO: 45312 - DNA, 15 bp, Homo sapiens
tttcagtagttttta

SEQ ID NO: 45313 - DNA, 15 bp, Homo sapiens
ctttcagtagttttt

SEQ ID NO: 45314 - DNA, 15 bp, Homo sapiens
tctttcagtagtttt

SEQ ID NO: 45315 - DNA, 15 bp, Homo sapiens
ttctttcagtagttt

SEQ ID NO: 45316 - DNA, 15 bp, Homo sapiens
cttctttcagtagtt

SEQ ID NO: 45317 - DNA, 15 bp, Homo sapiens
acttctttcagtagt

SEQ ID NO: 45318 - DNA, 15 bp, Homo sapiens
tacttctttcagtag

SEQ ID NO: 45319 - DNA, 15 bp, Homo sapiens
atacttctttcagta

SEQ ID NO: 45320 - DNA, 15 bp, Homo sapiens
aatacttctttcagt

SEQ ID NO: 45321 - DNA, 15 bp, Homo sapiens
taatacttctttcag

SEQ ID NO: 45322 - DNA, 15 bp, Homo sapiens
gtaatacttctttca

SEQ ID NO: 45323 - DNA, 15 bp, Homo sapiens
tgtaatacttctttc

SEQ ID NO: 45324 - DNA, 15 bp, Homo sapiens
ctgtaatacttcttt

SEQ ID NO: 45325 - DNA, 15 bp, Homo sapiens
cctgtaatacttctt

SEQ ID NO: 45326 - DNA, 15 bp, Homo sapiens
gcctgtaatacttct

SEQ ID NO: 45327 - DNA, 15 bp, Homo sapiens
tgcctgtaatacttc

SEQ ID NO: 45328 - DNA, 15 bp, Homo sapiens
ttgcctgtaatactt

SEQ ID NO: 45329 - DNA, 15 bp, Homo sapiens
attgcctgtaatact

SEQ ID NO: 45330 - DNA, 15 bp, Homo sapiens
cattgcctgtaatac

SEQ ID NO: 45331 - DNA, 15 bp, Homo sapiens
ccattgcctgtaata

SEQ ID NO: 45332 - DNA, 15 bp, Homo sapiens
cccattgcctgtaat

SEQ ID NO: 45333 - DNA, 15 bp, Homo sapiens
tcccattgcctgtaa

SEQ ID NO: 45334 - DNA, 15 bp, Homo sapiens
ttcccattgcctgta

SEQ ID NO: 45335 - DNA, 15 bp, Homo sapiens
tttcccattgcctgt

SEQ ID NO: 45336 - DNA, 15 bp, Homo sapiens
atttcccattgcctg

SEQ ID NO: 45337 - DNA, 15 bp, Homo sapiens
tatttcccattgcct

SEQ ID NO: 45338 - DNA, 15 bp, Homo sapiens
ctatttcccattgcc

SEQ ID NO: 45339 - DNA, 15 bp, Homo sapiens
gctatttcccattgc

SEQ ID NO: 45340 - DNA, 15 bp, Homo sapiens
agctatttcccattg

SEQ ID NO: 45341 - DNA, 15 bp, Homo sapiens
aagctatttcccatt

SEQ ID NO: 45342 - DNA, 15 bp, Homo sapiens
caagctatttcccat

SEQ ID NO: 45343 - DNA, 15 bp, Homo sapiens
tcaagctatttccca

SEQ ID NO: 45344 - DNA, 15 bp, Homo sapiens
ctcaagctatttccc

SEQ ID NO: 45345 - DNA, 15 bp, Homo sapiens
actcaagctatttcc

SEQ ID NO: 45346 - DNA, 15 bp, Homo sapiens
cactcaagctatttc

SEQ ID NO: 45347 - DNA, 15 bp, Homo sapiens
ccactcaagctattt

SEQ ID NO: 45348 - DNA, 15 bp, Homo sapiens
tccactcaagctatt

SEQ ID NO: 45349 - DNA, 15 bp, Homo sapiens
ttccactcaagctat

SEQ ID NO: 45350 - DNA, 15 bp, Homo sapiens
cttccactcaagcta

SEQ ID NO: 45351 - DNA, 15 bp, Homo sapiens
acttccactcaagct

SEQ ID NO: 45352 - DNA, 15 bp, Homo sapiens
cacttccactcaagc

SEQ ID NO: 45353 - DNA, 15 bp, Homo sapiens
gcacttccactcaag

SEQ ID NO: 45354 - DNA, 15 bp, Homo sapiens
tgcacttccactcaa

SEQ ID NO: 45355 - DNA, 15 bp, Homo sapiens
ctgcacttccactca

SEQ ID NO: 45356 - DNA, 15 bp, Homo sapiens
gctgcacttccactc

SEQ ID NO: 45357 - DNA, 15 bp, Homo sapiens
tgctgcacttccact

SEQ ID NO: 45358 - DNA, 15 bp, Homo sapiens
ctgctgcacttccac

SEQ ID NO: 45359 - DNA, 15 bp, Homo sapiens
tctgctgcacttcca

SEQ ID NO: 45360 - DNA, 15 bp, Homo sapiens
ttctgctgcacttcc

SEQ ID NO: 45361 - DNA, 15 bp, Homo sapiens
cttctgctgcacttc

SEQ ID NO: 45362 - DNA, 15 bp, Homo sapiens
ccttctgctgcactt

SEQ ID NO: 45363 - DNA, 15 bp, Homo sapiens
tccttctgctgcact

SEQ ID NO: 45364 - DNA, 15 bp, Homo sapiens
ttccttctgctgcac

SEQ ID NO: 45365 - DNA, 15 bp, Homo sapiens
tttccttctgctgca

SEQ ID NO: 45366 - DNA, 15 bp, Homo sapiens
ttttccttctgctgc

SEQ ID NO: 45367 - DNA, 15 bp, Homo sapiens
tttttccttctgctg

SEQ ID NO: 45368 - DNA, 15 bp, Homo sapiens
ctttttccttctgct

SEQ ID NO: 45369 - DNA, 15 bp, Homo sapiens
gctttttccttctgc

SEQ ID NO: 45370 - DNA, 15 bp, Homo sapiens
agctttttccttctg

SEQ ID NO: 45371 - DNA, 15 bp, Homo sapiens
cagctttttccttct

SEQ ID NO: 45372 - DNA, 15 bp, Homo sapiens
ccagctttttccttc

SEQ ID NO: 45373 - DNA, 15 bp, Homo sapiens
tccagctttttcctt

SEQ ID NO: 45374 - DNA, 15 bp, Homo sapiens
gtccagctttttcct

SEQ ID NO: 45375 - DNA, 15 bp, Homo sapiens
tgtccagctttttcc

SEQ ID NO: 45376 - DNA, 15 bp, Homo sapiens
ttgtccagctttttc

SEQ ID NO: 45377 - DNA, 15 bp, Homo sapiens
cttgtccagcttttt

SEQ ID NO: 45378 - DNA, 15 bp, Homo sapiens
tcttgtccagctttt

SEQ ID NO: 45379 - DNA, 15 bp, Homo sapiens
ttcttgtccagcttt

SEQ ID NO: 45380 - DNA, 15 bp, Homo sapiens
attcttgtccagctt

SEQ ID NO: 45381 - DNA, 15 bp, Homo sapiens
cattcttgtccagct

SEQ ID NO: 45382 - DNA, 15 bp, Homo sapiens
acattcttgtccagc

SEQ ID NO: 45383 - DNA, 15 bp, Homo sapiens
tacattcttgtccag

SEQ ID NO: 45384 - DNA, 15 bp, Homo sapiens
ctacattcttgtcca

SEQ ID NO: 45385 - DNA, 15 bp, Homo sapiens
actacattcttgtcc

SEQ ID NO: 45386 - DNA, 15 bp, Homo sapiens
cactacattcttgtc

SEQ ID NO: 45387 - DNA, 15 bp, Homo sapiens
acactacattcttgt

SEQ ID NO: 45388 - DNA, 15 bp, Homo sapiens
gacactacattcttg

SEQ ID NO: 45389 - DNA, 15 bp, Homo sapiens
tgacactacattctt

SEQ ID NO: 45390 - DNA, 15 bp, Homo sapiens
ctgacactacattct

SEQ ID NO: 45391 - DNA, 15 bp, Homo sapiens
tctgacactacattc

SEQ ID NO: 45392 - DNA, 15 bp, Homo sapiens
ctctgacactacatt

SEQ ID NO: 45393 - DNA, 15 bp, Homo sapiens
tctctgacactacat

SEQ ID NO: 45394 - DNA, 15 bp, Homo sapiens
ttctctgacactaca

SEQ ID NO: 45395 - DNA, 15 bp, Homo sapiens
attctctgacactac

SEQ ID NO: 45396 - DNA, 15 bp, Homo sapiens
tattctctgacacta

SEQ ID NO: 45397 - DNA, 15 bp, Homo sapiens
ctattctctgacact

SEQ ID NO: 45398 - DNA, 15 bp, Homo sapiens
cctattctctgacac

SEQ ID NO: 45399 - DNA, 15 bp, Homo sapiens
acctattctctgaca

SEQ ID NO: 45400 - DNA, 15 bp, Homo sapiens
tacctattctctgac

SEQ ID NO: 45401 - DNA, 15 bp, Homo sapiens
atacctattctctga

SEQ ID NO: 45402 - DNA, 15 bp, Homo sapiens
catacctattctctg

SEQ ID NO: 45403 - DNA, 15 bp, Homo sapiens
ccatacctattctct

SEQ ID NO: 45404 - DNA, 15 bp, Homo sapiens
tccatacctattctc

SEQ ID NO: 45405 - DNA, 15 bp, Homo sapiens
ttccatacctattct

SEQ ID NO: 45406 - DNA, 15 bp, Homo sapiens
gttccatacctattc

SEQ ID NO: 45407 - DNA, 15 bp, Homo sapiens
cgttccatacctatt

SEQ ID NO: 45408 - DNA, 15 bp, Homo sapiens
acgttccatacctat

SEQ ID NO: 45409 - DNA, 15 bp, Homo sapiens
cacgttccataccta

SEQ ID NO: 45410 - DNA, 15 bp, Homo sapiens
acacgttccatacct

SEQ ID NO: 45411 - DNA, 15 bp, Homo sapiens
cacacgttccatacc

SEQ ID NO: 45412 - DNA, 15 bp, Homo sapiens
tcacacgttccatac

SEQ ID NO: 45413 - DNA, 15 bp, Homo sapiens
ctcacacgttccata

SEQ ID NO: 45414 - DNA, 15 bp, Homo sapiens
actcacacgttccat

SEQ ID NO: 45415 - DNA, 15 bp, Homo sapiens
cactcacacgttcca

SEQ ID NO: 45416 - DNA, 15 bp, Homo sapiens
tcactcacacgttcc

SEQ ID NO: 45417 - DNA, 15 bp, Homo sapiens
gtcactcacacgttc

SEQ ID NO: 45418 - DNA, 15 bp, Homo sapiens
agtcactcacacgtt

SEQ ID NO: 45419 - DNA, 15 bp, Homo sapiens
cagtcactcacacgt

SEQ ID NO: 45420 - DNA, 15 bp, Homo sapiens
acagtcactcacacg

SEQ ID NO: 45421 - DNA, 15 bp, Homo sapiens
aacagtcactcacac

SEQ ID NO: 45422 - DNA, 15 bp, Homo sapiens
taacagtcactcaca

SEQ ID NO: 45423 - DNA, 15 bp, Homo sapiens
ctaacagtcactcac

SEQ ID NO: 45424 - DNA, 15 bp, Homo sapiens
tctaacagtcactca

SEQ ID NO: 45425 - DNA, 15 bp, Homo sapiens
ctctaacagtcactc

SEQ ID NO: 45426 - DNA, 15 bp, Homo sapiens
cctctaacagtcact

SEQ ID NO: 45427 - DNA, 15 bp, Homo sapiens
tcctctaacagtcac

SEQ ID NO: 45428 - DNA, 15 bp, Homo sapiens
atcctctaacagtca

SEQ ID NO: 45429 - DNA, 15 bp, Homo sapiens
gatcctctaacagtc

SEQ ID NO: 45430 - DNA, 15 bp, Homo sapiens
agatcctctaacagt

SEQ ID NO: 45431 - DNA, 15 bp, Homo sapiens
aagatcctctaacag

SEQ ID NO: 45432 - DNA, 15 bp, Homo sapiens
caagatcctctaaca

SEQ ID NO: 45433 - DNA, 15 bp, Homo sapiens
tcaagatcctctaac

SEQ ID NO: 45434 - DNA, 15 bp, Homo sapiens
ttcaagatcctctaa

SEQ ID NO: 45435 - DNA, 15 bp, Homo sapiens
attcaagatcctcta

SEQ ID NO: 45436 - DNA, 15 bp, Homo sapiens
cattcaagatcctct

SEQ ID NO: 45437 - DNA, 15 bp, Homo sapiens
ccattcaagatcctc

SEQ ID NO: 45438 - DNA, 15 bp, Homo sapiens
cccattcaagatcct

SEQ ID NO: 45439 - DNA, 15 bp, Homo sapiens
ccccattcaagatcc

SEQ ID NO: 45440 - DNA, 15 bp, Homo sapiens
tccccattcaagatc

SEQ ID NO: 45441 - DNA, 15 bp, Homo sapiens
atccccattcaagat

SEQ ID NO: 45442 - DNA, 15 bp, Homo sapiens
tatccccattcaaga

SEQ ID NO: 45443 - DNA, 15 bp, Homo sapiens
ttatccccattcaag

SEQ ID NO: 45444 - DNA, 15 bp, Homo sapiens
gttatccccattcaa

SEQ ID NO: 45445 - DNA, 15 bp, Homo sapiens
tgttatccccattca

SEQ ID NO: 45446 - DNA, 15 bp, Homo sapiens
ctgttatccccattc

SEQ ID NO: 45447 - DNA, 15 bp, Homo sapiens
tctgttatccccatt

SEQ ID NO: 45448 - DNA, 15 bp, Homo sapiens
gtctgttatccccat

SEQ ID NO: 45449 - DNA, 15 bp, Homo sapiens
agtctgttatcccca

SEQ ID NO: 45450 - DNA, 15 bp, Homo sapiens
aagtctgttatcccc

SEQ ID NO: 45451 - DNA, 15 bp, Homo sapiens
caagtctgttatccc

SEQ ID NO: 45452 - DNA, 15 bp, Homo sapiens
tcaagtctgttatcc

SEQ ID NO: 45453 - DNA, 15 bp, Homo sapiens
atcaagtctgttatc

SEQ ID NO: 45454 - DNA, 15 bp, Homo sapiens
aatcaagtctgttat

SEQ ID NO: 45455 - DNA, 15 bp, Homo sapiens
aaatcaagtctgtta

SEQ ID NO: 45456 - DNA, 15 bp, Homo sapiens
gaaatcaagtctgtt

SEQ ID NO: 45457 - DNA, 15 bp, Homo sapiens
tgaaatcaagtctgt

SEQ ID NO: 45458 - DNA, 15 bp, Homo sapiens
atgaaatcaagtctg

SEQ ID NO: 45459 - DNA, 15 bp, Homo sapiens
tatgaaatcaagtct

SEQ ID NO: 45460 - DNA, 15 bp, Homo sapiens
ttatgaaatcaagtc

SEQ ID NO: 45461 - DNA, 15 bp, Homo sapiens
tttatgaaatcaagt

SEQ ID NO: 45462 - DNA, 15 bp, Homo sapiens
atttatgaaatcaag

SEQ ID NO: 45463 - DNA, 15 bp, Homo sapiens
tatttatgaaatcaa

SEQ ID NO: 45464 - DNA, 15 bp, Homo sapiens
gtatttatgaaatca

SEQ ID NO: 45465 - DNA, 15 bp, Homo sapiens
agtatttatgaaatc

SEQ ID NO: 45466 - DNA, 15 bp, Homo sapiens
cagtatttatgaaat

SEQ ID NO: 45467 - DNA, 15 bp, Homo sapiens
tcagtatttatgaaa

SEQ ID NO: 45468 - DNA, 15 bp, Homo sapiens
ctcagtatttatgaa

SEQ ID NO: 45469 - DNA, 15 bp, Homo sapiens
tctcagtatttatga

SEQ ID NO: 45470 - DNA, 15 bp, Homo sapiens
atctcagtatttatg

SEQ ID NO: 45471 - DNA, 15 bp, Homo sapiens
catctcagtatttat

SEQ ID NO: 45472 - DNA, 15 bp, Homo sapiens
acatctcagtattta

SEQ ID NO: 45473 - DNA, 15 bp, Homo sapiens
gacatctcagtattt

SEQ ID NO: 45474 - DNA, 15 bp, Homo sapiens
tgacatctcagtatt

SEQ ID NO: 45475 - DNA, 15 bp, Homo sapiens
atgacatctcagtat

SEQ ID NO: 45476 - DNA, 15 bp, Homo sapiens
catgacatctcagta

SEQ ID NO: 45477 - DNA, 15 bp, Homo sapiens
tcatgacatctcagt

SEQ ID NO: 45478 - DNA, 15 bp, Homo sapiens
atcatgacatctcag

SEQ ID NO: 45479 - DNA, 15 bp, Homo sapiens
tatcatgacatctca

SEQ ID NO: 45480 - DNA, 15 bp, Homo sapiens
ttatcatgacatctc

SEQ ID NO: 45481 - DNA, 15 bp, Homo sapiens
attatcatgacatct

SEQ ID NO: 45482 - DNA, 15 bp, Homo sapiens
tattatcatgacatc

SEQ ID NO: 45483 - DNA, 15 bp, Homo sapiens
gtattatcatgacat

SEQ ID NO: 45484 - DNA, 15 bp, Homo sapiens
agtattatcatgaca

SEQ ID NO: 45485 - DNA, 15 bp, Homo sapiens
aagtattatcatgac

SEQ ID NO: 45486 - DNA, 15 bp, Homo sapiens
caagtattatcatga

SEQ ID NO: 45487 - DNA, 15 bp, Homo sapiens
tcaagtattatcatg

SEQ ID NO: 45488 - DNA, 15 bp, Homo sapiens
ctcaagtattatcat

SEQ ID NO: 45489 - DNA, 15 bp, Homo sapiens
cctcaagtattatca

SEQ ID NO: 45490 - DNA, 15 bp, Homo sapiens
tcctcaagtattatc

SEQ ID NO: 45491 - DNA, 15 bp, Homo sapiens
gtcctcaagtattat

SEQ ID NO: 45492 - DNA, 15 bp, Homo sapiens
agtcctcaagtatta

SEQ ID NO: 45493 - DNA, 15 bp, Homo sapiens
tagtcctcaagtatt

SEQ ID NO: 45494 - DNA, 15 bp, Homo sapiens
ttagtcctcaagtat

SEQ ID NO: 45495 - DNA, 15 bp, Homo sapiens
tttagtcctcaagta

SEQ ID NO: 45496 - DNA, 15 bp, Homo sapiens
gtttagtcctcaagt

SEQ ID NO: 45497 - DNA, 15 bp, Homo sapiens
ggtttagtcctcaag

SEQ ID NO: 45498 - DNA, 15 bp, Homo sapiens
tggtttagtcctcaa

SEQ ID NO: 45499 - DNA, 15 bp, Homo sapiens
atggtttagtcctca

SEQ ID NO: 45500 - DNA, 15 bp, Homo sapiens
catggtttagtcctc

SEQ ID NO: 45501 - DNA, 15 bp, Homo sapiens
acatggtttagtcct

SEQ ID NO: 45502 - DNA, 15 bp, Homo sapiens
aacatggtttagtcc

SEQ ID NO: 45503 - DNA, 15 bp, Homo sapiens
aaacatggtttagtc

SEQ ID NO: 45504 - DNA, 15 bp, Homo sapiens
aaaacatggtttagt

SEQ ID NO: 45505 - DNA, 15 bp, Homo sapiens
taaaacatggtttag

SEQ ID NO: 45506 - DNA, 15 bp, Homo sapiens
ttaaaacatggttta

SEQ ID NO: 45507 - DNA, 15 bp, Homo sapiens
cttaaaacatggttt

SEQ ID NO: 45508 - DNA, 15 bp, Homo sapiens
ccttaaaacatggtt

SEQ ID NO: 45509 - DNA, 15 bp, Homo sapiens
tccttaaaacatggt

SEQ ID NO: 45510 - DNA, 15 bp, Homo sapiens
gtccttaaaacatgg

SEQ ID NO: 45511 - DNA, 15 bp, Homo sapiens
tgtccttaaaacatg

SEQ ID NO: 45512 - DNA, 15 bp, Homo sapiens
ctgtccttaaaacat

SEQ ID NO: 45513 - DNA, 15 bp, Homo sapiens
actgtccttaaaaca

SEQ ID NO: 45514 - DNA, 15 bp, Homo sapiens
aactgtccttaaaac

SEQ ID NO: 45515 - DNA, 15 bp, Homo sapiens
caactgtccttaaaa

SEQ ID NO: 45516 - DNA, 15 bp, Homo sapiens
acaactgtccttaaa

SEQ ID NO: 45517 - DNA, 15 bp, Homo sapiens
tacaactgtccttaa

SEQ ID NO: 45518 - DNA, 15 bp, Homo sapiens
atacaactgtcctta

SEQ ID NO: 45519 - DNA, 15 bp, Homo sapiens
catacaactgtcctt

SEQ ID NO: 45520 - DNA, 15 bp, Homo sapiens
gcatacaactgtcct

SEQ ID NO: 45521 - DNA, 15 bp, Homo sapiens
tgcatacaactgtcc

SEQ ID NO: 45522 - DNA, 15 bp, Homo sapiens
ttgcatacaactgtc

SEQ ID NO: 45523 - DNA, 15 bp, Homo sapiens
tttgcatacaactgt

SEQ ID NO: 45524 - DNA, 15 bp, Homo sapiens
ctttgcatacaactg

SEQ ID NO: 45525 - DNA, 15 bp, Homo sapiens
actttgcatacaact

SEQ ID NO: 45526 - DNA, 15 bp, Homo sapiens
aactttgcatacaac

SEQ ID NO: 45527 - DNA, 15 bp, Homo sapiens
caactttgcatacaa

SEQ ID NO: 45528 - DNA, 15 bp, Homo sapiens
acaactttgcataca

SEQ ID NO: 45529 - DNA, 15 bp, Homo sapiens
tacaactttgcatac

SEQ ID NO: 45530 - DNA, 15 bp, Homo sapiens
ttacaactttgcata

SEQ ID NO: 45531 - DNA, 15 bp, Homo sapiens
attacaactttgcat

SEQ ID NO: 45532 - DNA, 15 bp, Homo sapiens
gattacaactttgca

SEQ ID NO: 45533 - DNA, 15 bp, Homo sapiens
cgattacaactttgc

SEQ ID NO: 45534 - DNA, 15 bp, Homo sapiens
gcgattacaactttg

SEQ ID NO: 45535 - DNA, 15 bp, Homo sapiens
tgcgattacaacttt

SEQ ID NO: 45536 - DNA, 15 bp, Homo sapiens
ttgcgattacaactt

SEQ ID NO: 45537 - DNA, 15 bp, Homo sapiens
cttgcgattacaact

SEQ ID NO: 45538 - DNA, 15 bp, Homo sapiens
tcttgcgattacaac

SEQ ID NO: 45539 - DNA, 15 bp, Homo sapiens
ctcttgcgattacaa

SEQ ID NO: 45540 - DNA, 15 bp, Homo sapiens
cctcttgcgattaca

SEQ ID NO: 45541 - DNA, 15 bp, Homo sapiens
tcctcttgcgattac

SEQ ID NO: 45542 - DNA, 15 bp, Homo sapiens
ttcctcttgcgatta

SEQ ID NO: 45543 - DNA, 15 bp, Homo sapiens
tttcctcttgcgatt

SEQ ID NO: 45544 - DNA, 15 bp, Homo sapiens
ttttcctcttgcgat

SEQ ID NO: 45545 - DNA, 15 bp, Homo sapiens
tttttcctcttgcga

SEQ ID NO: 45546 - DNA, 15 bp, Homo sapiens
ttttttcctcttgcg

SEQ ID NO: 45547 - DNA, 15 bp, Homo sapiens
attttttcctcttgc

SEQ ID NO: 45548 - DNA, 15 bp, Homo sapiens
tattttttcctcttg

SEQ ID NO: 45549 - DNA, 15 bp, Homo sapiens
ctattttttcctctt

SEQ ID NO: 45550 - DNA, 15 bp, Homo sapiens
actattttttcctct

SEQ ID NO: 45551 - DNA, 15 bp, Homo sapiens
cactattttttcctc

SEQ ID NO: 45552 - DNA, 15 bp, Homo sapiens
ccactattttttcct

SEQ ID NO: 45553 - DNA, 15 bp, Homo sapiens
tccactattttttcc

SEQ ID NO: 45554 - DNA, 15 bp, Homo sapiens
ttccactattttttc

SEQ ID NO: 45555 - DNA, 15 bp, Homo sapiens
tttccactatttttt

SEQ ID NO: 45556 - DNA, 15 bp, Homo sapiens
ttttccactattttt

SEQ ID NO: 45557 - DNA, 15 bp, Homo sapiens
cttttccactatttt

SEQ ID NO: 45558 - DNA, 15 bp, Homo sapiens
tcttttccactattt

SEQ ID NO: 45559 - DNA, 15 bp, Homo sapiens
ttcttttccactatt

SEQ ID NO: 45560 - DNA, 15 bp, Homo sapiens
tttcttttccactat

SEQ ID NO: 45561 - DNA, 15 bp, Homo sapiens
gtttcttttccacta

SEQ ID NO: 45562 - DNA, 15 bp, Homo sapiens
ggtttcttttccact

SEQ ID NO: 45563 - DNA, 15 bp, Homo sapiens
tggtttcttttccac

SEQ ID NO: 45564 - DNA, 15 bp, Homo sapiens
ctggtttcttttcca

SEQ ID NO: 45565 - DNA, 15 bp, Homo sapiens
actggtttcttttcc

SEQ ID NO: 45566 - DNA, 15 bp, Homo sapiens
tactggtttcttttc

SEQ ID NO: 45567 - DNA, 15 bp, Homo sapiens
ttactggtttctttt

SEQ ID NO: 45568 - DNA, 15 bp, Homo sapiens
attactggtttcttt

SEQ ID NO: 45569 - DNA, 15 bp, Homo sapiens
tattactggtttctt

SEQ ID NO: 45570 - DNA, 15 bp, Homo sapiens
ttattactggtttct

SEQ ID NO: 45571 - DNA, 15 bp, Homo sapiens
tttattactggtttc

SEQ ID NO: 45572 - DNA, 15 bp, Homo sapiens
ttttattactggttt

SEQ ID NO: 45573 - DNA, 15 bp, Homo sapiens
gttttattactggtt

SEQ ID NO: 45574 - DNA, 15 bp, Homo sapiens
agttttattactggt

SEQ ID NO: 45575 - DNA, 15 bp, Homo sapiens
aagttttattactgg

SEQ ID NO: 45576 - DNA, 15 bp, Homo sapiens
caagttttattactg

SEQ ID NO: 45577 - DNA, 15 bp, Homo sapiens
gcaagttttattact

SEQ ID NO: 45578 - DNA, 15 bp, Homo sapiens
ggcaagttttattac

SEQ ID NO: 45579 - DNA, 15 bp, Homo sapiens
aggcaagttttatta

SEQ ID NO: 45580 - DNA, 15 bp, Homo sapiens
aaggcaagttttatt

SEQ ID NO: 45581 - DNA, 15 bp, Homo sapiens
taaggcaagttttat

SEQ ID NO: 45582 - DNA, 15 bp, Homo sapiens
ttaaggcaagtttta

SEQ ID NO: 45583 - DNA, 15 bp, Homo sapiens
attaaggcaagtttt

SEQ ID NO: 45584 - DNA, 15 bp, Homo sapiens
cattaaggcaagttt

SEQ ID NO: 45585 - DNA, 15 bp, Homo sapiens
gcattaaggcaagtt

SEQ ID NO: 45586 - DNA, 15 bp, Homo sapiens
tgcattaaggcaagt

SEQ ID NO: 45587 - DNA, 15 bp, Homo sapiens
ctgcattaaggcaag

SEQ ID NO: 45588 - DNA, 15 bp, Homo sapiens
cctgcattaaggcaa

SEQ ID NO: 45589 - DNA, 15 bp, Homo sapiens
acctgcattaaggca

SEQ ID NO: 45590 - DNA, 15 bp, Homo sapiens
tacctgcattaaggc

SEQ ID NO: 45591 - DNA, 15 bp, Homo sapiens
atacctgcattaagg

SEQ ID NO: 45592 - DNA, 15 bp, Homo sapiens
catacctgcattaag

SEQ ID NO: 45593 - DNA, 15 bp, Homo sapiens
gcatacctgcattaa

SEQ ID NO: 45594 - DNA, 15 bp, Homo sapiens
agcatacctgcatta

SEQ ID NO: 45595 - DNA, 15 bp, Homo sapiens
tagcatacctgcatt

SEQ ID NO: 45596 - DNA, 15 bp, Homo sapiens
ttagcatacctgcat

SEQ ID NO: 45597 - DNA, 15 bp, Homo sapiens
cttagcatacctgca

SEQ ID NO: 45598 - DNA, 15 bp, Homo sapiens
tcttagcatacctgc

SEQ ID NO: 45599 - DNA, 15 bp, Homo sapiens
gtcttagcatacctg

SEQ ID NO: 45600 - DNA, 15 bp, Homo sapiens
tgtcttagcatacct

SEQ ID NO: 45601 - DNA, 15 bp, Homo sapiens
ttgtcttagcatacc

SEQ ID NO: 45602 - DNA, 15 bp, Homo sapiens
attgtcttagcatac

SEQ ID NO: 45603 - DNA, 15 bp, Homo sapiens
gattgtcttagcata

SEQ ID NO: 45604 - DNA, 15 bp, Homo sapiens
tgattgtcttagcat

SEQ ID NO: 45605 - DNA, 15 bp, Homo sapiens
ttgattgtcttagca

SEQ ID NO: 45606 - DNA, 15 bp, Homo sapiens
tttgattgtcttagc

SEQ ID NO: 45607 - DNA, 15 bp, Homo sapiens
atttgattgtcttag

SEQ ID NO: 45608 - DNA, 15 bp, Homo sapiens
catttgattgtctta

SEQ ID NO: 45609 - DNA, 15 bp, Homo sapiens
ccatttgattgtctt

SEQ ID NO: 45610 - DNA, 15 bp, Homo sapiens
cccatttgattgtct

SEQ ID NO: 45611 - DNA, 15 bp, Homo sapiens
tcccatttgattgtc

SEQ ID NO: 45612 - DNA, 15 bp, Homo sapiens
atcccatttgattgt

SEQ ID NO: 45613 - DNA, 15 bp, Homo sapiens
aatcccatttgattg

SEQ ID NO: 45614 - DNA, 15 bp, Homo sapiens
aaatcccatttgatt

SEQ ID NO: 45615 - DNA, 15 bp, Homo sapiens
gaaatcccatttgat

SEQ ID NO: 45616 - DNA, 15 bp, Homo sapiens
tgaaatcccatttga

SEQ ID NO: 45617 - DNA, 15 bp, Homo sapiens
atgaaatcccatttg

SEQ ID NO: 45618 - DNA, 15 bp, Homo sapiens
aatgaaatcccattt

SEQ ID NO: 45619 - DNA, 15 bp, Homo sapiens
taatgaaatcccatt

SEQ ID NO: 45620 - DNA, 15 bp, Homo sapiens
ttaatgaaatcccat

SEQ ID NO: 45621 - DNA, 15 bp, Homo sapiens
attaatgaaatccca

SEQ ID NO: 45622 - DNA, 15 bp, Homo sapiens
aattaatgaaatccc

SEQ ID NO: 45623 - DNA, 15 bp, Homo sapiens
aaattaatgaaatcc

SEQ ID NO: 45624 - DNA, 15 bp, Homo sapiens
aaaattaatgaaatc

SEQ ID NO: 45625 - DNA, 15 bp, Homo sapiens
aaaaattaatgaaat

SEQ ID NO: 45626 - DNA, 15 bp, Homo sapiens
aaaaaattaatgaaa

SEQ ID NO: 45627 - DNA, 15 bp, Homo sapiens
taaaaaattaatgaa

SEQ ID NO: 45628 - DNA, 15 bp, Homo sapiens
ataaaaaattaatga

SEQ ID NO: 45629 - DNA, 15 bp, Homo sapiens
aataaaaaattaatg

SEQ ID NO: 45630 - DNA, 15 bp, Homo sapiens
aaataaaaaattaat

SEQ ID NO: 45631 - DNA, 15 bp, Homo sapiens
caaataaaaaattaa

SEQ ID NO: 45632 - DNA, 15 bp, Homo sapiens
gcaaataaaaaatta

SEQ ID NO: 45633 - DNA, 15 bp, Homo sapiens
ggcaaataaaaaatt

SEQ ID NO: 45634 - DNA, 15 bp, Homo sapiens
tggcaaataaaaaat

SEQ ID NO: 45635 - DNA, 15 bp, Homo sapiens
atggcaaataaaaaa

SEQ ID NO: 45636 - DNA, 15 bp, Homo sapiens
aatggcaaataaaaa

SEQ ID NO: 45637 - DNA, 15 bp, Homo sapiens
aaatggcaaataaaa

SEQ ID NO: 45638 - DNA, 15 bp, Homo sapiens
taaatggcaaataaa

SEQ ID NO: 45639 - DNA, 15 bp, Homo sapiens
ataaatggcaaataa

SEQ ID NO: 45640 - DNA, 15 bp, Homo sapiens
tataaatggcaaata

SEQ ID NO: 45641 - DNA, 15 bp, Homo sapiens
ctataaatggcaaat

SEQ ID NO: 45642 - DNA, 15 bp, Homo sapiens
gctataaatggcaaa

SEQ ID NO: 45643 - DNA, 15 bp, Homo sapiens
ggctataaatggcaa

SEQ ID NO: 45644 - DNA, 15 bp, Homo sapiens
tggctataaatggca

SEQ ID NO: 45645 - DNA, 15 bp, Homo sapiens
ttggctataaatggc

SEQ ID NO: 45646 - DNA, 15 bp, Homo sapiens
tttggctataaatgg

SEQ ID NO: 45647 - DNA, 15 bp, Homo sapiens
ctttggctataaatg

SEQ ID NO: 45648 - DNA, 15 bp, Homo sapiens
tctttggctataaat

SEQ ID NO: 45649 - DNA, 15 bp, Homo sapiens
atctttggctataaa

SEQ ID NO: 45650 - DNA, 15 bp, Homo sapiens
aatctttggctataa

SEQ ID NO: 45651 - DNA, 15 bp, Homo sapiens
aaatctttggctata

SEQ ID NO: 45652 - DNA, 15 bp, Homo sapiens
aaaatctttggctat

SEQ ID NO: 45653 - DNA, 15 bp, Homo sapiens
caaaatctttggcta

SEQ ID NO: 45654 - DNA, 15 bp, Homo sapiens
acaaaatctttggct

SEQ ID NO: 45655 - DNA, 15 bp, Homo sapiens
tacaaaatctttggc

SEQ ID NO: 45656 - DNA, 15 bp, Homo sapiens
ttacaaaatctttgg

SEQ ID NO: 45657 - DNA, 15 bp, Homo sapiens
tttacaaaatctttg

SEQ ID NO: 45658 - DNA, 15 bp, Homo sapiens
ttttacaaaatcttt

SEQ ID NO: 45659 - DNA, 15 bp, Homo sapiens
cttttacaaaatctt

SEQ ID NO: 45660 - DNA, 15 bp, Homo sapiens
acttttacaaaatct

SEQ ID NO: 45661 - DNA, 15 bp, Homo sapiens
aacttttacaaaatc

SEQ ID NO: 45662 - DNA, 15 bp, Homo sapiens
aaacttttacaaaat

SEQ ID NO: 45663 - DNA, 15 bp, Homo sapiens
aaaacttttacaaaa

SEQ ID NO: 45664 - DNA, 15 bp, Homo sapiens
caaaacttttacaaa

SEQ ID NO: 45665 - DNA, 15 bp, Homo sapiens
tcaaaacttttacaa

SEQ ID NO: 45666 - DNA, 15 bp, Homo sapiens
ctcaaaacttttaca

SEQ ID NO: 45667 - DNA, 15 bp, Homo sapiens
gctcaaaacttttac

SEQ ID NO: 45668 - DNA, 15 bp, Homo sapiens
ggctcaaaactttta

SEQ ID NO: 45669 - DNA, 15 bp, Homo sapiens
gggctcaaaactttt

SEQ ID NO: 45670 - DNA, 15 bp, Homo sapiens
tgggctcaaaacttt

SEQ ID NO: 45671 - DNA, 15 bp, Homo sapiens
ctgggctcaaaactt

SEQ ID NO: 45672 - DNA, 15 bp, Homo sapiens
actgggctcaaaact

SEQ ID NO: 45673 - DNA, 15 bp, Homo sapiens
gactgggctcaaaac

SEQ ID NO: 45674 - DNA, 15 bp, Homo sapiens
tgactgggctcaaaa

SEQ ID NO: 45675 - DNA, 15 bp, Homo sapiens
ctgactgggctcaaa

SEQ ID NO: 45676 - DNA, 15 bp, Homo sapiens
cctgactgggctcaa

SEQ ID NO: 45677 - DNA, 15 bp, Homo sapiens
acctgactgggctca

SEQ ID NO: 45678 - DNA, 15 bp, Homo sapiens
cacctgactgggctc

SEQ ID NO: 45679 - DNA, 15 bp, Homo sapiens
tcacctgactgggct

SEQ ID NO: 45680 - DNA, 15 bp, Homo sapiens
ttcacctgactgggc

SEQ ID NO: 45681 - DNA, 15 bp, Homo sapiens
tttcacctgactggg

SEQ ID NO: 45682 - DNA, 15 bp, Homo sapiens
atttcacctgactgg

SEQ ID NO: 45683 - DNA, 15 bp, Homo sapiens
tatttcacctgactg

SEQ ID NO: 45684 - DNA, 15 bp, Homo sapiens
ctatttcacctgact

SEQ ID NO: 45685 - DNA, 15 bp, Homo sapiens
actatttcacctgac

SEQ ID NO: 45686 - DNA, 15 bp, Homo sapiens
gactatttcacctga

SEQ ID NO: 45687 - DNA, 15 bp, Homo sapiens
agactatttcacctg

SEQ ID NO: 45688 - DNA, 15 bp, Homo sapiens
gagactatttcacct

SEQ ID NO: 45689 - DNA, 15 bp, Homo sapiens
tgagactatttcacc

SEQ ID NO: 45690 - DNA, 15 bp, Homo sapiens
ctgagactatttcac

SEQ ID NO: 45691 - DNA, 15 bp, Homo sapiens
tctgagactatttca

SEQ ID NO: 45692 - DNA, 15 bp, Homo sapiens
ttctgagactatttc

SEQ ID NO: 45693 - DNA, 15 bp, Homo sapiens
tttctgagactattt

SEQ ID NO: 45694 - DNA, 15 bp, Homo sapiens
ctttctgagactatt

SEQ ID NO: 45695 - DNA, 15 bp, Homo sapiens
tctttctgagactat

SEQ ID NO: 45696 - DNA, 15 bp, Homo sapiens
ttctttctgagacta

SEQ ID NO: 45697 - DNA, 15 bp, Homo sapiens
tttctttctgagact

SEQ ID NO: 45698 - DNA, 15 bp, Homo sapiens
ctttctttctgagac

SEQ ID NO: 45699 - DNA, 15 bp, Homo sapiens
tctttctttctgaga

SEQ ID NO: 45700 - DNA, 15 bp, Homo sapiens
ttctttctttctgag

SEQ ID NO: 45701 - DNA, 15 bp, Homo sapiens
tttctttctttctga

SEQ ID NO: 45702 - DNA, 15 bp, Homo sapiens
ttttctttctttctg

SEQ ID NO: 45703 - DNA, 15 bp, Homo sapiens
cttttctttctttct

SEQ ID NO: 45704 - DNA, 15 bp, Homo sapiens
acttttctttctttc

SEQ ID NO: 45705 - DNA, 15 bp, Homo sapiens
cacttttctttcttt

SEQ ID NO: 45706 - DNA, 15 bp, Homo sapiens
tcacttttctttctt

SEQ ID NO: 45707 - DNA, 15 bp, Homo sapiens
ttcacttttctttct

SEQ ID NO: 45708 - DNA, 15 bp, Homo sapiens
attcacttttctttc

SEQ ID NO: 45709 - DNA, 15 bp, Homo sapiens
gattcacttttcttt

SEQ ID NO: 45710 - DNA, 15 bp, Homo sapiens
agattcacttttctt

SEQ ID NO: 45711 - DNA, 15 bp, Homo sapiens
cagattcacttttct

SEQ ID NO: 45712 - DNA, 15 bp, Homo sapiens
tcagattcacttttc

SEQ ID NO: 45713 - DNA, 15 bp, Homo sapiens
ctcagattcactttt

SEQ ID NO: 45714 - DNA, 15 bp, Homo sapiens
tctcagattcacttt

SEQ ID NO: 45715 - DNA, 15 bp, Homo sapiens
gtctcagattcactt

SEQ ID NO: 45716 - DNA, 15 bp, Homo sapiens
agtctcagattcact

SEQ ID NO: 45717 - DNA, 15 bp, Homo sapiens
aagtctcagattcac

SEQ ID NO: 45718 - DNA, 15 bp, Homo sapiens
caagtctcagattca

SEQ ID NO: 45719 - DNA, 15 bp, Homo sapiens
ccaagtctcagattc

SEQ ID NO: 45720 - DNA, 15 bp, Homo sapiens
tccaagtctcagatt

SEQ ID NO: 45721 - DNA, 15 bp, Homo sapiens
ctccaagtctcagat

SEQ ID NO: 45722 - DNA, 15 bp, Homo sapiens
tctccaagtctcaga

SEQ ID NO: 45723 - DNA, 15 bp, Homo sapiens
gtctccaagtctcag

SEQ ID NO: 45724 - DNA, 15 bp, Homo sapiens
tgtctccaagtctca

SEQ ID NO: 45725 - DNA, 15 bp, Homo sapiens
atgtctccaagtctc

SEQ ID NO: 45726 - DNA, 15 bp, Homo sapiens
aatgtctccaagtct

SEQ ID NO: 45727 - DNA, 15 bp, Homo sapiens
taatgtctccaagtc

SEQ ID NO: 45728 - DNA, 15 bp, Homo sapiens
ttaatgtctccaagt

SEQ ID NO: 45729 - DNA, 15 bp, Homo sapiens
attaatgtctccaag

SEQ ID NO: 45730 - DNA, 15 bp, Homo sapiens
cattaatgtctccaa

SEQ ID NO: 45731 - DNA, 15 bp, Homo sapiens
acattaatgtctcca

SEQ ID NO: 45732 - DNA, 15 bp, Homo sapiens
aacattaatgtctcc

SEQ ID NO: 45733 - DNA, 15 bp, Homo sapiens
caacattaatgtctc

SEQ ID NO: 45734 - DNA, 15 bp, Homo sapiens
tcaacattaatgtct

SEQ ID NO: 45735 - DNA, 15 bp, Homo sapiens
atcaacattaatgtc

SEQ ID NO: 45736 - DNA, 15 bp, Homo sapiens
tatcaacattaatgt

SEQ ID NO: 45737 - DNA, 15 bp, Homo sapiens
atatcaacattaatg

SEQ ID NO: 45738 - DNA, 15 bp, Homo sapiens
aatatcaacattaat

SEQ ID NO: 45739 - DNA, 15 bp, Homo sapiens
aaatatcaacattaa

SEQ ID NO: 45740 - DNA, 15 bp, Homo sapiens
aaaatatcaacatta

SEQ ID NO: 45741 - DNA, 15 bp, Homo sapiens
caaaatatcaacatt

SEQ ID NO: 45742 - DNA, 15 bp, Homo sapiens
ccaaaatatcaacat

SEQ ID NO: 45743 - DNA, 15 bp, Homo sapiens
accaaaatatcaaca

SEQ ID NO: 45744 - DNA, 15 bp, Homo sapiens
aaccaaaatatcaac

SEQ ID NO: 45745 - DNA, 15 bp, Homo sapiens
aaaccaaaatatcaa

SEQ ID NO: 45746 - DNA, 15 bp, Homo sapiens
aaaaccaaaatatca

SEQ ID NO: 45747 - DNA, 15 bp, Homo sapiens
taaaaccaaaatatc

SEQ ID NO: 45748 - DNA, 15 bp, Homo sapiens
ttaaaaccaaaatat

SEQ ID NO: 45749 - DNA, 15 bp, Homo sapiens
tttaaaaccaaaata

SEQ ID NO: 45750 - DNA, 15 bp, Homo sapiens
gtttaaaaccaaaat

SEQ ID NO: 45751 - DNA, 15 bp, Homo sapiens
cgtttaaaaccaaaa

SEQ ID NO: 45752 - DNA, 15 bp, Homo sapiens
acgtttaaaaccaaa

SEQ ID NO: 45753 - DNA, 15 bp, Homo sapiens
cacgtttaaaaccaa

SEQ ID NO: 45754 - DNA, 15 bp, Homo sapiens
acacgtttaaaacca

SEQ ID NO: 45755 - DNA, 15 bp, Homo sapiens
aacacgtttaaaacc

SEQ ID NO: 45756 - DNA, 15 bp, Homo sapiens
aaacacgtttaaaac

SEQ ID NO: 45757 - DNA, 15 bp, Homo sapiens
aaaacacgtttaaaa

SEQ ID NO: 45758 - DNA, 15 bp, Homo sapiens
taaaacacgtttaaa

SEQ ID NO: 45759 - DNA, 15 bp, Homo sapiens
ttaaaacacgtttaa

SEQ ID NO: 45760 - DNA, 15 bp, Homo sapiens
tttaaaacacgttta

SEQ ID NO: 45761 - DNA, 15 bp, Homo sapiens
atttaaaacacgttt

SEQ ID NO: 45762 - DNA, 15 bp, Homo sapiens
gatttaaaacacgtt

SEQ ID NO: 45763 - DNA, 15 bp, Homo sapiens
ggatttaaaacacgt

SEQ ID NO: 45764 - DNA, 15 bp, Homo sapiens
cggatttaaaacacg

SEQ ID NO: 45765 - DNA, 15 bp, Homo sapiens
ccggatttaaaacac

SEQ ID NO: 45766 - DNA, 15 bp, Homo sapiens
accggatttaaaaca

SEQ ID NO: 45767 - DNA, 15 bp, Homo sapiens
taccggatttaaaac

SEQ ID NO: 45768 - DNA, 15 bp, Homo sapiens
ttaccggatttaaaa

SEQ ID NO: 45769 - DNA, 15 bp, Homo sapiens
tttaccggatttaaa

SEQ ID NO: 45770 - DNA, 15 bp, Homo sapiens
ttttaccggatttaa

SEQ ID NO: 45771 - DNA, 15 bp, Homo sapiens
cttttaccggattta

SEQ ID NO: 45772 - DNA, 15 bp, Homo sapiens
acttttaccggattt

SEQ ID NO: 45773 - DNA, 15 bp, Homo sapiens
cacttttaccggatt

SEQ ID NO: 45774 - DNA, 15 bp, Homo sapiens
tcacttttaccggat

SEQ ID NO: 45775 - DNA, 15 bp, Homo sapiens
ctcacttttaccgga

SEQ ID NO: 45776 - DNA, 15 bp, Homo sapiens
gctcacttttaccgg

SEQ ID NO: 45777 - DNA, 15 bp, Homo sapiens
agctcacttttaccg

SEQ ID NO: 45778 - DNA, 15 bp, Homo sapiens
aagctcacttttacc

SEQ ID NO: 45779 - DNA, 15 bp, Homo sapiens
gaagctcacttttac

SEQ ID NO: 45780 - DNA, 15 bp, Homo sapiens
agaagctcactttta

SEQ ID NO: 45781 - DNA, 15 bp, Homo sapiens
gagaagctcactttt

SEQ ID NO: 45782 - DNA, 15 bp, Homo sapiens
tgagaagctcacttt

SEQ ID NO: 45783 - DNA, 15 bp, Homo sapiens
gtgagaagctcactt

SEQ ID NO: 45784 - DNA, 15 bp, Homo sapiens
tgtgagaagctcact

SEQ ID NO: 45785 - DNA, 15 bp, Homo sapiens
atgtgagaagctcac

SEQ ID NO: 45786 - DNA, 15 bp, Homo sapiens
catgtgagaagctca

SEQ ID NO: 45787 - DNA, 15 bp, Homo sapiens
tcatgtgagaagctc

SEQ ID NO: 45788 - DNA, 15 bp, Homo sapiens
gtcatgtgagaagct

SEQ ID NO: 45789 - DNA, 15 bp, Homo sapiens
tgtcatgtgagaagc

SEQ ID NO: 45790 - DNA, 15 bp, Homo sapiens
ttgtcatgtgagaag

SEQ ID NO: 45791 - DNA, 15 bp, Homo sapiens
attgtcatgtgagaa

SEQ ID NO: 45792 - DNA, 15 bp, Homo sapiens
tattgtcatgtgaga

SEQ ID NO: 45793 - DNA, 15 bp, Homo sapiens
atattgtcatgtgag

SEQ ID NO: 45794 - DNA, 15 bp, Homo sapiens
aatattgtcatgtga

SEQ ID NO: 45795 - DNA, 15 bp, Homo sapiens
gaatattgtcatgtg

SEQ ID NO: 45796 - DNA, 15 bp, Homo sapiens
tgaatattgtcatgt

SEQ ID NO: 45797 - DNA, 15 bp, Homo sapiens
ctgaatattgtcatg

SEQ ID NO: 45798 - DNA, 15 bp, Homo sapiens
actgaatattgtcat

SEQ ID NO: 45799 - DNA, 15 bp, Homo sapiens
cactgaatattgtca

SEQ ID NO: 45800 - DNA, 15 bp, Homo sapiens
ccactgaatattgtc

SEQ ID NO: 45801 - DNA, 15 bp, Homo sapiens
cccactgaatattgt

SEQ ID NO: 45802 - DNA, 15 bp, Homo sapiens
acccactgaatattg

SEQ ID NO: 45803 - DNA, 15 bp, Homo sapiens
tacccactgaatatt

SEQ ID NO: 45804 - DNA, 15 bp, Homo sapiens
gtacccactgaatat

SEQ ID NO: 45805 - DNA, 15 bp, Homo sapiens
agtacccactgaata

SEQ ID NO: 45806 - DNA, 15 bp, Homo sapiens
aagtacccactgaat

SEQ ID NO: 45807 - DNA, 15 bp, Homo sapiens
caagtacccactgaa

SEQ ID NO: 45808 - DNA, 15 bp, Homo sapiens
ccaagtacccactga

SEQ ID NO: 45809 - DNA, 15 bp, Homo sapiens
cccaagtacccactg

SEQ ID NO: 45810 - DNA, 15 bp, Homo sapiens
tcccaagtacccact

SEQ ID NO: 45811 - DNA, 15 bp, Homo sapiens
ctcccaagtacccac

SEQ ID NO: 45812 - DNA, 15 bp, Homo sapiens
actcccaagtaccca

SEQ ID NO: 45813 - DNA, 15 bp, Homo sapiens
tactcccaagtaccc

SEQ ID NO: 45814 - DNA, 15 bp, Homo sapiens
atactcccaagtacc

SEQ ID NO: 45815 - DNA, 15 bp, Homo sapiens
catactcccaagtac

SEQ ID NO: 45816 - DNA, 15 bp, Homo sapiens
ccatactcccaagta

SEQ ID NO: 45817 - DNA, 15 bp, Homo sapiens
cccatactcccaagt

SEQ ID NO: 45818 - DNA, 15 bp, Homo sapiens
acccatactcccaag

SEQ ID NO: 45819 - DNA, 15 bp, Homo sapiens
aacccatactcccaa

SEQ ID NO: 45820 - DNA, 15 bp, Homo sapiens
gaacccatactccca

SEQ ID NO: 45821 - DNA, 15 bp, Homo sapiens
cgaacccatactccc

SEQ ID NO: 45822 - DNA, 15 bp, Homo sapiens
tcgaacccatactcc

SEQ ID NO: 45823 - DNA, 15 bp, Homo sapiens
ttcgaacccatactc

SEQ ID NO: 45824 - DNA, 15 bp, Homo sapiens
attcgaacccatact

SEQ ID NO: 45825 - DNA, 15 bp, Homo sapiens
gattcgaacccatac

SEQ ID NO: 45826 - DNA, 15 bp, Homo sapiens
agattcgaacccata

SEQ ID NO: 45827 - DNA, 15 bp, Homo sapiens
tagattcgaacccat

SEQ ID NO: 45828 - DNA, 15 bp, Homo sapiens
ctagattcgaaccca

SEQ ID NO: 45829 - DNA, 15 bp, Homo sapiens
cctagattcgaaccc

SEQ ID NO: 45830 - DNA, 15 bp, Homo sapiens
acctagattcgaacc

SEQ ID NO: 45831 - DNA, 15 bp, Homo sapiens
tacctagattcgaac

SEQ ID NO: 45832 - DNA, 15 bp, Homo sapiens
ctacctagattcgaa

SEQ ID NO: 45833 - DNA, 15 bp, Homo sapiens
cctacctagattcga

SEQ ID NO: 45834 - DNA, 15 bp, Homo sapiens
tcctacctagattcg

SEQ ID NO: 45835 - DNA, 15 bp, Homo sapiens
ctcctacctagattc

SEQ ID NO: 45836 - DNA, 15 bp, Homo sapiens
tctcctacctagatt

SEQ ID NO: 45837 - DNA, 15 bp, Homo sapiens
atctcctacctagat

SEQ ID NO: 45838 - DNA, 15 bp, Homo sapiens
tatctcctacctaga

SEQ ID NO: 45839 - DNA, 15 bp, Homo sapiens
atatctcctacctag

SEQ ID NO: 45840 - DNA, 15 bp, Homo sapiens
tatatctcctaccta

SEQ ID NO: 45841 - DNA, 15 bp, Homo sapiens
atatatctcctacct

SEQ ID NO: 45842 - DNA, 15 bp, Homo sapiens
gatatatctcctacc

SEQ ID NO: 45843 - DNA, 15 bp, Homo sapiens
cgatatatctcctac

SEQ ID NO: 45844 - DNA, 15 bp, Homo sapiens
tcgatatatctccta

SEQ ID NO: 45845 - DNA, 15 bp, Homo sapiens
atcgatatatctcct

SEQ ID NO: 45846 - DNA, 15 bp, Homo sapiens
tatcgatatatctcc

SEQ ID NO: 45847 - DNA, 15 bp, Homo sapiens
atatcgatatatctc

SEQ ID NO: 45848 - DNA, 15 bp, Homo sapiens
aatatcgatatatct

SEQ ID NO: 45849 - DNA, 15 bp, Homo sapiens
aaatatcgatatatc

SEQ ID NO: 45850 - DNA, 15 bp, Homo sapiens
aaaatatcgatatat

SEQ ID NO: 45851 - DNA, 15 bp, Homo sapiens
caaaatatcgatata

SEQ ID NO: 45852 - DNA, 15 bp, Homo sapiens
ccaaaatatcgatat

SEQ ID NO: 45853 - DNA, 15 bp, Homo sapiens
cccaaaatatcgata

SEQ ID NO: 45854 - DNA, 15 bp, Homo sapiens
gcccaaaatatcgat

SEQ ID NO: 45855 - DNA, 15 bp, Homo sapiens
tgcccaaaatatcga

SEQ ID NO: 45856 - DNA, 15 bp, Homo sapiens
atgcccaaaatatcg

SEQ ID NO: 45857 - DNA, 15 bp, Homo sapiens
gatgcccaaaatatc

SEQ ID NO: 45858 - DNA, 15 bp, Homo sapiens
tgatgcccaaaatat

SEQ ID NO: 45859 - DNA, 15 bp, Homo sapiens
atgatgcccaaaata

SEQ ID NO: 45860 - DNA, 15 bp, Homo sapiens
gatgatgcccaaaat

SEQ ID NO: 45861 - DNA, 15 bp, Homo sapiens
tgatgatgcccaaaa

SEQ ID NO: 45862 - DNA, 15 bp, Homo sapiens
ctgatgatgcccaaa

SEQ ID NO: 45863 - DNA, 15 bp, Homo sapiens
cctgatgatgcccaa

SEQ ID NO: 45864 - DNA, 15 bp, Homo sapiens
tcctgatgatgccca

SEQ ID NO: 45865 - DNA, 15 bp, Homo sapiens
ttcctgatgatgccc

SEQ ID NO: 45866 - DNA, 15 bp, Homo sapiens
tttcctgatgatgcc

SEQ ID NO: 45867 - DNA, 15 bp, Homo sapiens
ctttcctgatgatgc

SEQ ID NO: 45868 - DNA, 15 bp, Homo sapiens
cctttcctgatgatg

SEQ ID NO: 45869 - DNA, 15 bp, Homo sapiens
ccctttcctgatgat

SEQ ID NO: 45870 - DNA, 15 bp, Homo sapiens
tccctttcctgatga

SEQ ID NO: 45871 - DNA, 15 bp, Homo sapiens
ctccctttcctgatg

SEQ ID NO: 45872 - DNA, 15 bp, Homo sapiens
tctccctttcctgat

SEQ ID NO: 45873 - DNA, 15 bp, Homo sapiens
ctctccctttcctga

SEQ ID NO: 45874 - DNA, 15 bp, Homo sapiens
actctccctttcctg

SEQ ID NO: 45875 - DNA, 15 bp, Homo sapiens
tactctccctttcct

SEQ ID NO: 45876 - DNA, 15 bp, Homo sapiens
ctactctccctttcc

SEQ ID NO: 45877 - DNA, 15 bp, Homo sapiens
actactctccctttc

SEQ ID NO: 45878 - DNA, 15 bp, Homo sapiens
aactactctcccttt

SEQ ID NO: 45879 - DNA, 15 bp, Homo sapiens
taactactctccctt

SEQ ID NO: 45880 - DNA, 15 bp, Homo sapiens
ttaactactctccct

SEQ ID NO: 45881 - DNA, 15 bp, Homo sapiens
cttaactactctccc

SEQ ID NO: 45882 - DNA, 15 bp, Homo sapiens
gcttaactactctcc

SEQ ID NO: 45883 - DNA, 15 bp, Homo sapiens
ggcttaactactctc

SEQ ID NO: 45884 - DNA, 15 bp, Homo sapiens
aggcttaactactct

SEQ ID NO: 45885 - DNA, 15 bp, Homo sapiens
aaggcttaactactc

SEQ ID NO: 45886 - DNA, 15 bp, Homo sapiens
aaaggcttaactact

SEQ ID NO: 45887 - DNA, 15 bp, Homo sapiens
gaaaggcttaactac

SEQ ID NO: 45888 - DNA, 15 bp, Homo sapiens
tgaaaggcttaacta

SEQ ID NO: 45889 - DNA, 15 bp, Homo sapiens
atgaaaggcttaact

SEQ ID NO: 45890 - DNA, 15 bp, Homo sapiens
tatgaaaggcttaac

SEQ ID NO: 45891 - DNA, 15 bp, Homo sapiens
atatgaaaggcttaa

SEQ ID NO: 45892 - DNA, 15 bp, Homo sapiens
tatatgaaaggctta

SEQ ID NO: 45893 - DNA, 15 bp, Homo sapiens
ttatatgaaaggctt

SEQ ID NO: 45894 - DNA, 15 bp, Homo sapiens
tttatatgaaaggct

SEQ ID NO: 45895 - DNA, 15 bp, Homo sapiens
atttatatgaaaggc

SEQ ID NO: 45896 - DNA, 15 bp, Homo sapiens
tatttatatgaaagg

SEQ ID NO: 45897 - DNA, 15 bp, Homo sapiens
ttatttatatgaaag

SEQ ID NO: 45898 - DNA, 15 bp, Homo sapiens
attatttatatgaaa

SEQ ID NO: 45899 - DNA, 15 bp, Homo sapiens
cattatttatatgaa

SEQ ID NO: 45900 - DNA, 15 bp, Homo sapiens
ccattatttatatga

SEQ ID NO: 45901 - DNA, 15 bp, Homo sapiens
accattatttatatg

SEQ ID NO: 45902 - DNA, 15 bp, Homo sapiens
caccattatttatat

SEQ ID NO: 45903 - DNA, 15 bp, Homo sapiens
acaccattatttata

SEQ ID NO: 45904 - DNA, 15 bp, Homo sapiens
cacaccattatttat

SEQ ID NO: 45905 - DNA, 15 bp, Homo sapiens
ccacaccattattta

SEQ ID NO: 45906 - DNA, 15 bp, Homo sapiens
gccacaccattattt

SEQ ID NO: 45907 - DNA, 15 bp, Homo sapiens
cgccacaccattatt

SEQ ID NO: 45908 - DNA, 15 bp, Homo sapiens
acgccacaccattat

SEQ ID NO: 45909 - DNA, 15 bp, Homo sapiens
aacgccacaccatta

SEQ ID NO: 45910 - DNA, 15 bp, Homo sapiens
aaacgccacaccatt

SEQ ID NO: 45911 - DNA, 15 bp, Homo sapiens
caaacgccacaccat

SEQ ID NO: 45912 - DNA, 15 bp, Homo sapiens
ccaaacgccacacca

SEQ ID NO: 45913 - DNA, 15 bp, Homo sapiens
cccaaacgccacacc

SEQ ID NO: 45914 - DNA, 15 bp, Homo sapiens
gcccaaacgccacac

SEQ ID NO: 45915 - DNA, 15 bp, Homo sapiens
tgcccaaacgccaca

SEQ ID NO: 45916 - DNA, 15 bp, Homo sapiens
atgcccaaacgccac

SEQ ID NO: 45917 - DNA, 15 bp, Homo sapiens
catgcccaaacgcca

SEQ ID NO: 45918 - DNA, 15 bp, Homo sapiens
ccatgcccaaacgcc

SEQ ID NO: 45919 - DNA, 15 bp, Homo sapiens
cccatgcccaaacgc

SEQ ID NO: 45920 - DNA, 15 bp, Homo sapiens
tcccatgcccaaacg

SEQ ID NO: 45921 - DNA, 15 bp, Homo sapiens
ttcccatgcccaaac

SEQ ID NO: 45922 - DNA, 15 bp, Homo sapiens
cttcccatgcccaaa

SEQ ID NO: 45923 - DNA, 15 bp, Homo sapiens
acttcccatgcccaa

SEQ ID NO: 45924 - DNA, 15 bp, Homo sapiens
gacttcccatgccca

SEQ ID NO: 45925 - DNA, 15 bp, Homo sapiens
agacttcccatgccc

SEQ ID NO: 45926 - DNA, 15 bp, Homo sapiens
aagacttcccatgcc

SEQ ID NO: 45927 - DNA, 15 bp, Homo sapiens
caagacttcccatgc

SEQ ID NO: 45928 - DNA, 15 bp, Homo sapiens
ccaagacttcccatg

SEQ ID NO: 45929 - DNA, 15 bp, Homo sapiens
tccaagacttcccat

SEQ ID NO: 45930 - DNA, 15 bp, Homo sapiens
ctccaagacttccca

SEQ ID NO: 45931 - DNA, 15 bp, Homo sapiens
cctccaagacttccc

SEQ ID NO: 45932 - DNA, 15 bp, Homo sapiens
tcctccaagacttcc

SEQ ID NO: 45933 - DNA, 15 bp, Homo sapiens
ttcctccaagacttc

SEQ ID NO: 45934 - DNA, 15 bp, Homo sapiens
tttcctccaagactt

SEQ ID NO: 45935 - DNA, 15 bp, Homo sapiens
ctttcctccaagact

SEQ ID NO: 45936 - DNA, 15 bp, Homo sapiens
cctttcctccaagac

SEQ ID NO: 45937 - DNA, 15 bp, Homo sapiens
tcctttcctccaaga

SEQ ID NO: 45938 - DNA, 15 bp, Homo sapiens
ttcctttcctccaag

SEQ ID NO: 45939 - DNA, 15 bp, Homo sapiens
cttcctttcctccaa

SEQ ID NO: 45940 - DNA, 15 bp, Homo sapiens
tcttcctttcctcca

SEQ ID NO: 45941 - DNA, 15 bp, Homo sapiens
ttcttcctttcctcc

SEQ ID NO: 45942 - DNA, 15 bp, Homo sapiens
tttcttcctttcctc

SEQ ID NO: 45943 - DNA, 15 bp, Homo sapiens
ttttcttcctttcct

SEQ ID NO: 45944 - DNA, 15 bp, Homo sapiens
cttttcttcctttcc

SEQ ID NO: 45945 - DNA, 15 bp, Homo sapiens
ccttttcttcctttc

SEQ ID NO: 45946 - DNA, 15 bp, Homo sapiens
tccttttcttccttt

SEQ ID NO: 45947 - DNA, 15 bp, Homo sapiens
ctccttttcttcctt

SEQ ID NO: 45948 - DNA, 15 bp, Homo sapiens
tctccttttcttcct

SEQ ID NO: 45949 - DNA, 15 bp, Homo sapiens
ctctccttttcttcc

SEQ ID NO: 45950 - DNA, 15 bp, Homo sapiens
cctctccttttcttc

SEQ ID NO: 45951 - DNA, 15 bp, Homo sapiens
ccctctccttttctt

SEQ ID NO: 45952 - DNA, 15 bp, Homo sapiens
accctctccttttct

SEQ ID NO: 45953 - DNA, 15 bp, Homo sapiens
caccctctccttttc

SEQ ID NO: 45954 - DNA, 15 bp, Homo sapiens
tcaccctctcctttt

SEQ ID NO: 45955 - DNA, 15 bp, Homo sapiens
ctcaccctctccttt

SEQ ID NO: 45956 - DNA, 15 bp, Homo sapiens
cctcaccctctcctt

SEQ ID NO: 45957 - DNA, 15 bp, Homo sapiens
tcctcaccctctcct

SEQ ID NO: 45958 - DNA, 15 bp, Homo sapiens
gtcctcaccctctcc

SEQ ID NO: 45959 - DNA, 15 bp, Homo sapiens
agtcctcaccctctc

SEQ ID NO: 45960 - DNA, 15 bp, Homo sapiens
cagtcctcaccctct

SEQ ID NO: 45961 - DNA, 15 bp, Homo sapiens
tcagtcctcaccctc

SEQ ID NO: 45962 - DNA, 15 bp, Homo sapiens
ctcagtcctcaccct

SEQ ID NO: 45963 - DNA, 15 bp, Homo sapiens
tctcagtcctcaccc

SEQ ID NO: 45964 - DNA, 15 bp, Homo sapiens
atctcagtcctcacc

SEQ ID NO: 45965 - DNA, 15 bp, Homo sapiens
tatctcagtcctcac

SEQ ID NO: 45966 - DNA, 15 bp, Homo sapiens
ttatctcagtcctca

SEQ ID NO: 45967 - DNA, 15 bp, Homo sapiens
cttatctcagtcctc

SEQ ID NO: 45968 - DNA, 15 bp, Homo sapiens
tcttatctcagtcct

SEQ ID NO: 45969 - DNA, 15 bp, Homo sapiens
ttcttatctcagtcc

SEQ ID NO: 45970 - DNA, 15 bp, Homo sapiens
attcttatctcagtc

SEQ ID NO: 45971 - DNA, 15 bp, Homo sapiens
cattcttatctcagt

SEQ ID NO: 45972 - DNA, 15 bp, Homo sapiens
ccattcttatctcag

SEQ ID NO: 45973 - DNA, 15 bp, Homo sapiens
gccattcttatctca

SEQ ID NO: 45974 - DNA, 15 bp, Homo sapiens
tgccattcttatctc

SEQ ID NO: 45975 - DNA, 15 bp, Homo sapiens
ttgccattcttatct

SEQ ID NO: 45976 - DNA, 15 bp, Homo sapiens
gttgccattcttatc

SEQ ID NO: 45977 - DNA, 15 bp, Homo sapiens
agttgccattcttat

SEQ ID NO: 45978 - DNA, 15 bp, Homo sapiens
aagttgccattctta

SEQ ID NO: 45979 - DNA, 15 bp, Homo sapiens
caagttgccattctt

SEQ ID NO: 45980 - DNA, 15 bp, Homo sapiens
ccaagttgccattct

SEQ ID NO: 45981 - DNA, 15 bp, Homo sapiens
cccaagttgccattc

SEQ ID NO: 45982 - DNA, 15 bp, Homo sapiens
acccaagttgccatt

SEQ ID NO: 45983 - DNA, 15 bp, Homo sapiens
aacccaagttgccat

SEQ ID NO: 45984 - DNA, 15 bp, Homo sapiens
aaacccaagttgcca

SEQ ID NO: 45985 - DNA, 15 bp, Homo sapiens
taaacccaagttgcc

SEQ ID NO: 45986 - DNA, 15 bp, Homo sapiens
ctaaacccaagttgc

SEQ ID NO: 45987 - DNA, 15 bp, Homo sapiens
cctaaacccaagttg

SEQ ID NO: 45988 - DNA, 15 bp, Homo sapiens
tcctaaacccaagtt

SEQ ID NO: 45989 - DNA, 15 bp, Homo sapiens
ttcctaaacccaagt

SEQ ID NO: 45990 - DNA, 15 bp, Homo sapiens
cttcctaaacccaag

SEQ ID NO: 45991 - DNA, 15 bp, Homo sapiens
tcttcctaaacccaa

SEQ ID NO: 45992 - DNA, 15 bp, Homo sapiens
ttcttcctaaaccca

SEQ ID NO: 45993 - DNA, 15 bp, Homo sapiens
cttcttcctaaaccc

SEQ ID NO: 45994 - DNA, 15 bp, Homo sapiens
tcttcttcctaaacc

SEQ ID NO: 45995 - DNA, 15 bp, Homo sapiens
ttcttcttcctaaac

SEQ ID NO: 45996 - DNA, 15 bp, Homo sapiens
cttcttcttcctaaa

SEQ ID NO: 45997 - DNA, 15 bp, Homo sapiens
tcttcttcttcctaa

SEQ ID NO: 45998 - DNA, 15 bp, Homo sapiens
ctcttcttcttccta

SEQ ID NO: 45999 - DNA, 15 bp, Homo sapiens
cctcttcttcttcct

SEQ ID NO: 46000 - DNA, 15 bp, Homo sapiens
tcctcttcttcttcc

SEQ ID NO: 46001 - DNA, 15 bp, Homo sapiens
ttcctcttcttcttc

SEQ ID NO: 46002 - DNA, 15 bp, Homo sapiens
attcctcttcttctt

SEQ ID NO: 46003 - DNA, 15 bp, Homo sapiens
gattcctcttcttct

SEQ ID NO: 46004 - DNA, 15 bp, Homo sapiens
tgattcctcttcttc

SEQ ID NO: 46005 - DNA, 15 bp, Homo sapiens
ttgattcctcttctt

SEQ ID NO: 46006 - DNA, 15 bp, Homo sapiens
attgattcctcttct

SEQ ID NO: 46007 - DNA, 15 bp, Homo sapiens
cattgattcctcttc

SEQ ID NO: 46008 - DNA, 15 bp, Homo sapiens
acattgattcctctt

SEQ ID NO: 46009 - DNA, 15 bp, Homo sapiens
tacattgattcctct

SEQ ID NO: 46010 - DNA, 15 bp, Homo sapiens
ctacattgattcctc

SEQ ID NO: 46011 - DNA, 15 bp, Homo sapiens
tctacattgattcct

SEQ ID NO: 46012 - DNA, 15 bp, Homo sapiens
ctctacattgattcc

SEQ ID NO: 46013 - DNA, 15 bp, Homo sapiens
tctctacattgattc

SEQ ID NO: 46014 - DNA, 15 bp, Homo sapiens
ttctctacattgatt

SEQ ID NO: 46015 - DNA, 15 bp, Homo sapiens
gttctctacattgat

SEQ ID NO: 46016 - DNA, 15 bp, Homo sapiens
tgttctctacattga

SEQ ID NO: 46017 - DNA, 15 bp, Homo sapiens
ctgttctctacattg

SEQ ID NO: 46018 - DNA, 15 bp, Homo sapiens
tctgttctctacatt

SEQ ID NO: 46019 - DNA, 15 bp, Homo sapiens
atctgttctctacat

SEQ ID NO: 46020 - DNA, 15 bp, Homo sapiens
tatctgttctctaca

SEQ ID NO: 46021 - DNA, 15 bp, Homo sapiens
ctatctgttctctac

SEQ ID NO: 46022 - DNA, 15 bp, Homo sapiens
actatctgttctcta

SEQ ID NO: 46023 - DNA, 15 bp, Homo sapiens
cactatctgttctct

SEQ ID NO: 46024 - DNA, 15 bp, Homo sapiens
gcactatctgttctc

SEQ ID NO: 46025 - DNA, 15 bp, Homo sapiens
agcactatctgttct

SEQ ID NO: 46026 - DNA, 15 bp, Homo sapiens
cagcactatctgttc

SEQ ID NO: 46027 - DNA, 15 bp, Homo sapiens
tcagcactatctgtt

SEQ ID NO: 46028 - DNA, 15 bp, Homo sapiens
ttcagcactatctgt

SEQ ID NO: 46029 - DNA, 15 bp, Homo sapiens
tttcagcactatctg

SEQ ID NO: 46030 - DNA, 15 bp, Homo sapiens
ttttcagcactatct

SEQ ID NO: 46031 - DNA, 15 bp, Homo sapiens
tttttcagcactatc

SEQ ID NO: 46032 - DNA, 15 bp, Homo sapiens
atttttcagcactat

SEQ ID NO: 46033 - DNA, 15 bp, Homo sapiens
tatttttcagcacta

SEQ ID NO: 46034 - DNA, 15 bp, Homo sapiens
gtatttttcagcact

SEQ ID NO: 46035 - DNA, 15 bp, Homo sapiens
tgtatttttcagcac

SEQ ID NO: 46036 - DNA, 15 bp, Homo sapiens
ctgtatttttcagca

SEQ ID NO: 46037 - DNA, 15 bp, Homo sapiens
gctgtatttttcagc

SEQ ID NO: 46038 - DNA, 15 bp, Homo sapiens
tgctgtatttttcag

SEQ ID NO: 46039 - DNA, 15 bp, Homo sapiens
atgctgtatttttca

SEQ ID NO: 46040 - DNA, 15 bp, Homo sapiens
gatgctgtatttttc

SEQ ID NO: 46041 - DNA, 15 bp, Homo sapiens
agatgctgtattttt

SEQ ID NO: 46042 - DNA, 15 bp, Homo sapiens
aagatgctgtatttt

SEQ ID NO: 46043 - DNA, 15 bp, Homo sapiens
gaagatgctgtattt

SEQ ID NO: 46044 - DNA, 15 bp, Homo sapiens
agaagatgctgtatt

SEQ ID NO: 46045 - DNA, 15 bp, Homo sapiens
cagaagatgctgtat

SEQ ID NO: 46046 - DNA, 15 bp, Homo sapiens
acagaagatgctgta

SEQ ID NO: 46047 - DNA, 15 bp, Homo sapiens
tacagaagatgctgt

SEQ ID NO: 46048 - DNA, 15 bp, Homo sapiens
ctacagaagatgctg

SEQ ID NO: 46049 - DNA, 15 bp, Homo sapiens
cctacagaagatgct

SEQ ID NO: 46050 - DNA, 15 bp, Homo sapiens
ccctacagaagatgc

SEQ ID NO: 46051 - DNA, 15 bp, Homo sapiens
tccctacagaagatg

SEQ ID NO: 46052 - DNA, 15 bp, Homo sapiens
atccctacagaagat

SEQ ID NO: 46053 - DNA, 15 bp, Homo sapiens
aatccctacagaaga

SEQ ID NO: 46054 - DNA, 15 bp, Homo sapiens
caatccctacagaag

SEQ ID NO: 46055 - DNA, 15 bp, Homo sapiens
ccaatccctacagaa

SEQ ID NO: 46056 - DNA, 15 bp, Homo sapiens
gccaatccctacaga

SEQ ID NO: 46057 - DNA, 15 bp, Homo sapiens
tgccaatccctacag

SEQ ID NO: 46058 - DNA, 15 bp, Homo sapiens
ctgccaatccctaca

SEQ ID NO: 46059 - DNA, 15 bp, Homo sapiens
gctgccaatccctac

SEQ ID NO: 46060 - DNA, 15 bp, Homo sapiens
agctgccaatcccta

SEQ ID NO: 46061 - DNA, 15 bp, Homo sapiens
aagctgccaatccct

SEQ ID NO: 46062 - DNA, 15 bp, Homo sapiens
aaagctgccaatccc

SEQ ID NO: 46063 - DNA, 15 bp, Homo sapiens
aaaagctgccaatcc

SEQ ID NO: 46064 - DNA, 15 bp, Homo sapiens
aaaaagctgccaatc

SEQ ID NO: 46065 - DNA, 15 bp, Homo sapiens
gaaaaagctgccaat

SEQ ID NO: 46066 - DNA, 15 bp, Homo sapiens
agaaaaagctgccaa

SEQ ID NO: 46067 - DNA, 15 bp, Homo sapiens
aagaaaaagctgcca

SEQ ID NO: 46068 - DNA, 15 bp, Homo sapiens
caagaaaaagctgcc

SEQ ID NO: 46069 - DNA, 15 bp, Homo sapiens
tcaagaaaaagctgc

SEQ ID NO: 46070 - DNA, 15 bp, Homo sapiens
atcaagaaaaagctg

SEQ ID NO: 46071 - DNA, 15 bp, Homo sapiens
aatcaagaaaaagct

SEQ ID NO: 46072 - DNA, 15 bp, Homo sapiens
aaatcaagaaaaagc

SEQ ID NO: 46073 - DNA, 15 bp, Homo sapiens
aaaatcaagaaaaag

SEQ ID NO: 46074 - DNA, 15 bp, Homo sapiens
aaaaatcaagaaaaa

SEQ ID NO: 46075 - DNA, 15 bp, Homo sapiens
caaaaatcaagaaaa

SEQ ID NO: 46076 - DNA, 15 bp, Homo sapiens
acaaaaatcaagaaa

SEQ ID NO: 46077 - DNA, 15 bp, Homo sapiens
gacaaaaatcaagaa

SEQ ID NO: 46078 - DNA, 15 bp, Homo sapiens
agacaaaaatcaaga

SEQ ID NO: 46079 - DNA, 15 bp, Homo sapiens
aagacaaaaatcaag

SEQ ID NO: 46080 - DNA, 15 bp, Homo sapiens
taagacaaaaatcaa

SEQ ID NO: 46081 - DNA, 15 bp, Homo sapiens
ttaagacaaaaatca

SEQ ID NO: 46082 - DNA, 15 bp, Homo sapiens
attaagacaaaaatc

SEQ ID NO: 46083 - DNA, 15 bp, Homo sapiens
tattaagacaaaaat

SEQ ID NO: 46084 - DNA, 15 bp, Homo sapiens
atattaagacaaaaa

SEQ ID NO: 46085 - DNA, 15 bp, Homo sapiens
aatattaagacaaaa

SEQ ID NO: 46086 - DNA, 15 bp, Homo sapiens
aaatattaagacaaa

SEQ ID NO: 46087 - DNA, 15 bp, Homo sapiens
gaaatattaagacaa

SEQ ID NO: 46088 - DNA, 15 bp, Homo sapiens
agaaatattaagaca

SEQ ID NO: 46089 - DNA, 15 bp, Homo sapiens
tagaaatattaagac

SEQ ID NO: 46090 - DNA, 15 bp, Homo sapiens
ttagaaatattaaga

SEQ ID NO: 46091 - DNA, 15 bp, Homo sapiens
cttagaaatattaag

SEQ ID NO: 46092 - DNA, 15 bp, Homo sapiens
tcttagaaatattaa

SEQ ID NO: 46093 - DNA, 15 bp, Homo sapiens
ctcttagaaatatta

SEQ ID NO: 46094 - DNA, 15 bp, Homo sapiens
tctcttagaaatatt

SEQ ID NO: 46095 - DNA, 15 bp, Homo sapiens
atctcttagaaatat

SEQ ID NO: 46096 - DNA, 15 bp, Homo sapiens
catctcttagaaata

SEQ ID NO: 46097 - DNA, 15 bp, Homo sapiens
ccatctcttagaaat

SEQ ID NO: 46098 - DNA, 15 bp, Homo sapiens
tccatctcttagaaa

SEQ ID NO: 46099 - DNA, 15 bp, Homo sapiens
ttccatctcttagaa

SEQ ID NO: 46100 - DNA, 15 bp, Homo sapiens
tttccatctcttaga

SEQ ID NO: 46101 - DNA, 15 bp, Homo sapiens
ttttccatctcttag

SEQ ID NO: 46102 - DNA, 15 bp, Homo sapiens
tttttccatctctta

SEQ ID NO: 46103 - DNA, 15 bp, Homo sapiens
ctttttccatctctt

SEQ ID NO: 46104 - DNA, 15 bp, Homo sapiens
gctttttccatctct

SEQ ID NO: 46105 - DNA, 15 bp, Homo sapiens
agctttttccatctc

SEQ ID NO: 46106 - DNA, 15 bp, Homo sapiens
tagctttttccatct

SEQ ID NO: 46107 - DNA, 15 bp, Homo sapiens
gtagctttttccatc

SEQ ID NO: 46108 - DNA, 15 bp, Homo sapiens
agtagctttttccat

SEQ ID NO: 46109 - DNA, 15 bp, Homo sapiens
tagtagctttttcca

SEQ ID NO: 46110 - DNA, 15 bp, Homo sapiens
atagtagctttttcc

SEQ ID NO: 46111 - DNA, 15 bp, Homo sapiens
tatagtagctttttc

SEQ ID NO: 46112 - DNA, 15 bp, Homo sapiens
atatagtagcttttt

SEQ ID NO: 46113 - DNA, 15 bp, Homo sapiens
aatatagtagctttt

SEQ ID NO: 46114 - DNA, 15 bp, Homo sapiens
gaatatagtagcttt

SEQ ID NO: 46115 - DNA, 15 bp, Homo sapiens
agaatatagtagctt

SEQ ID NO: 46116 - DNA, 15 bp, Homo sapiens
tagaatatagtagct

SEQ ID NO: 46117 - DNA, 15 bp, Homo sapiens
ctagaatatagtagc

SEQ ID NO: 46118 - DNA, 15 bp, Homo sapiens
tctagaatatagtag

SEQ ID NO: 46119 - DNA, 15 bp, Homo sapiens
gtctagaatatagta

SEQ ID NO: 46120 - DNA, 15 bp, Homo sapiens
tgtctagaatatagt

SEQ ID NO: 46121 - DNA, 15 bp, Homo sapiens
atgtctagaatatag

SEQ ID NO: 46122 - DNA, 15 bp, Homo sapiens
aatgtctagaatata

SEQ ID NO: 46123 - DNA, 15 bp, Homo sapiens
aaatgtctagaatat

SEQ ID NO: 46124 - DNA, 15 bp, Homo sapiens
taaatgtctagaata

SEQ ID NO: 46125 - DNA, 15 bp, Homo sapiens
ttaaatgtctagaat

SEQ ID NO: 46126 - DNA, 15 bp, Homo sapiens
gttaaatgtctagaa

SEQ ID NO: 46127 - DNA, 15 bp, Homo sapiens
tgttaaatgtctaga

SEQ ID NO: 46128 - DNA, 15 bp, Homo sapiens
ctgttaaatgtctag

SEQ ID NO: 46129 - DNA, 15 bp, Homo sapiens
cctgttaaatgtcta

SEQ ID NO: 46130 - DNA, 15 bp, Homo sapiens
ccctgttaaatgtct

SEQ ID NO: 46131 - DNA, 15 bp, Homo sapiens
accctgttaaatgtc

SEQ ID NO: 46132 - DNA, 15 bp, Homo sapiens
aaccctgttaaatgt

SEQ ID NO: 46133 - DNA, 15 bp, Homo sapiens
taaccctgttaaatg

SEQ ID NO: 46134 - DNA, 15 bp, Homo sapiens
ttaaccctgttaaat

SEQ ID NO: 46135 - DNA, 15 bp, Homo sapiens
tttaaccctgttaaa

SEQ ID NO: 46136 - DNA, 15 bp, Homo sapiens
ttttaaccctgttaa

SEQ ID NO: 46137 - DNA, 15 bp, Homo sapiens
tttttaaccctgtta

SEQ ID NO: 46138 - DNA, 15 bp, Homo sapiens
atttttaaccctgtt

SEQ ID NO: 46139 - DNA, 15 bp, Homo sapiens
catttttaaccctgt

SEQ ID NO: 46140 - DNA, 15 bp, Homo sapiens
acatttttaaccctg

SEQ ID NO: 46141 - DNA, 15 bp, Homo sapiens
aacatttttaaccct

SEQ ID NO: 46142 - DNA, 15 bp, Homo sapiens
taacatttttaaccc

SEQ ID NO: 46143 - DNA, 15 bp, Homo sapiens
gtaacatttttaacc

SEQ ID NO: 46144 - DNA, 15 bp, Homo sapiens
agtaacatttttaac

SEQ ID NO: 46145 - DNA, 15 bp, Homo sapiens
tagtaacatttttaa

SEQ ID NO: 46146 - DNA, 15 bp, Homo sapiens
ttagtaacattttta

SEQ ID NO: 46147 - DNA, 15 bp, Homo sapiens
tttagtaacattttt

SEQ ID NO: 46148 - DNA, 15 bp, Homo sapiens
ttttagtaacatttt

SEQ ID NO: 46149 - DNA, 15 bp, Homo sapiens
cttttagtaacattt

SEQ ID NO: 46150 - DNA, 15 bp, Homo sapiens
tcttttagtaacatt

SEQ ID NO: 46151 - DNA, 15 bp, Homo sapiens
atcttttagtaacat

SEQ ID NO: 46152 - DNA, 15 bp, Homo sapiens
catcttttagtaaca

SEQ ID NO: 46153 - DNA, 15 bp, Homo sapiens
tcatcttttagtaac

SEQ ID NO: 46154 - DNA, 15 bp, Homo sapiens
atcatcttttagtaa

SEQ ID NO: 46155 - DNA, 15 bp, Homo sapiens
gatcatcttttagta

SEQ ID NO: 46156 - DNA, 15 bp, Homo sapiens
tgatcatcttttagt

SEQ ID NO: 46157 - DNA, 15 bp, Homo sapiens
ttgatcatcttttag

SEQ ID NO: 46158 - DNA, 15 bp, Homo sapiens
attgatcatctttta

SEQ ID NO: 46159 - DNA, 15 bp, Homo sapiens
cattgatcatctttt

SEQ ID NO: 46160 - DNA, 15 bp, Homo sapiens
acattgatcatcttt

SEQ ID NO: 46161 - DNA, 15 bp, Homo sapiens
cacattgatcatctt

SEQ ID NO: 46162 - DNA, 15 bp, Homo sapiens
ccacattgatcatct

SEQ ID NO: 46163 - DNA, 15 bp, Homo sapiens
accacattgatcatc

SEQ ID NO: 46164 - DNA, 15 bp, Homo sapiens
aaccacattgatcat

SEQ ID NO: 46165 - DNA, 15 bp, Homo sapiens
aaaccacattgatca

SEQ ID NO: 46166 - DNA, 15 bp, Homo sapiens
aaaaccacattgatc

SEQ ID NO: 46167 - DNA, 15 bp, Homo sapiens
gaaaaccacattgat

SEQ ID NO: 46168 - DNA, 15 bp, Homo sapiens
tgaaaaccacattga

SEQ ID NO: 46169 - DNA, 15 bp, Homo sapiens
atgaaaaccacattg

SEQ ID NO: 46170 - DNA, 15 bp, Homo sapiens
aatgaaaaccacatt

SEQ ID NO: 46171 - DNA, 15 bp, Homo sapiens
gaatgaaaaccacat

SEQ ID NO: 46172 - DNA, 15 bp, Homo sapiens
tgaatgaaaaccaca

SEQ ID NO: 46173 - DNA, 15 bp, Homo sapiens
ttgaatgaaaaccac

SEQ ID NO: 46174 - DNA, 15 bp, Homo sapiens
cttgaatgaaaacca

SEQ ID NO: 46175 - DNA, 15 bp, Homo sapiens
tcttgaatgaaaacc

SEQ ID NO: 46176 - DNA, 15 bp, Homo sapiens
gtcttgaatgaaaac

SEQ ID NO: 46177 - DNA, 15 bp, Homo sapiens
agtcttgaatgaaaa

SEQ ID NO: 46178 - DNA, 15 bp, Homo sapiens
tagtcttgaatgaaa

SEQ ID NO: 46179 - DNA, 15 bp, Homo sapiens
atagtcttgaatgaa

SEQ ID NO: 46180 - DNA, 15 bp, Homo sapiens
tatagtcttgaatga

SEQ ID NO: 46181 - DNA, 15 bp, Homo sapiens
ttatagtcttgaatg

SEQ ID NO: 46182 - DNA, 15 bp, Homo sapiens
gttatagtcttgaat

SEQ ID NO: 46183 - DNA, 15 bp, Homo sapiens
tgttatagtcttgaa

SEQ ID NO: 46184 - DNA, 15 bp, Homo sapiens
ttgttatagtcttga

SEQ ID NO: 46185 - DNA, 15 bp, Homo sapiens
attgttatagtcttg

SEQ ID NO: 46186 - DNA, 15 bp, Homo sapiens
tattgttatagtctt

SEQ ID NO: 46187 - DNA, 15 bp, Homo sapiens
atattgttatagtct

SEQ ID NO: 46188 - DNA, 15 bp, Homo sapiens
catattgttatagtc

SEQ ID NO: 46189 - DNA, 15 bp, Homo sapiens
acatattgttatagt

SEQ ID NO: 46190 - DNA, 15 bp, Homo sapiens
tacatattgttatag

SEQ ID NO: 46191 - DNA, 15 bp, Homo sapiens
atacatattgttata

SEQ ID NO: 46192 - DNA, 15 bp, Homo sapiens
tatacatattgttat

SEQ ID NO: 46193 - DNA, 15 bp, Homo sapiens
atatacatattgtta

SEQ ID NO: 46194 - DNA, 15 bp, Homo sapiens
tatatacatattgtt

SEQ ID NO: 46195 - DNA, 15 bp, Homo sapiens
atatatacatattgt

SEQ ID NO: 46196 - DNA, 15 bp, Homo sapiens
gatatatacatattg

SEQ ID NO: 46197 - DNA, 15 bp, Homo sapiens
ggatatatacatatt

SEQ ID NO: 46198 - DNA, 15 bp, Homo sapiens
tggatatatacatat

SEQ ID NO: 46199 - DNA, 15 bp, Homo sapiens
ttggatatatacata

SEQ ID NO: 46200 - DNA, 15 bp, Homo sapiens
cttggatatatacat

SEQ ID NO: 46201 - DNA, 15 bp, Homo sapiens
ccttggatatataca

SEQ ID NO: 46202 - DNA, 15 bp, Homo sapiens
tccttggatatatac

SEQ ID NO: 46203 - DNA, 15 bp, Homo sapiens
ttccttggatatata

SEQ ID NO: 46204 - DNA, 15 bp, Homo sapiens
tttccttggatatat

SEQ ID NO: 46205 - DNA, 15 bp, Homo sapiens
atttccttggatata

SEQ ID NO: 46206 - DNA, 15 bp, Homo sapiens
aatttccttggatat

SEQ ID NO: 46207 - DNA, 15 bp, Homo sapiens
aaatttccttggata

SEQ ID NO: 46208 - DNA, 15 bp, Homo sapiens
taaatttccttggat

SEQ ID NO: 46209 - DNA, 15 bp, Homo sapiens
ttaaatttccttgga

SEQ ID NO: 46210 - DNA, 15 bp, Homo sapiens
attaaatttccttgg

SEQ ID NO: 46211 - DNA, 15 bp, Homo sapiens
aattaaatttccttg

SEQ ID NO: 46212 - DNA, 15 bp, Homo sapiens
gaattaaatttcctt

SEQ ID NO: 46213 - DNA, 15 bp, Homo sapiens
agaattaaatttcct

SEQ ID NO: 46214 - DNA, 15 bp, Homo sapiens
cagaattaaatttcc

SEQ ID NO: 46215 - DNA, 15 bp, Homo sapiens
tcagaattaaatttc

SEQ ID NO: 46216 - DNA, 15 bp, Homo sapiens
gtcagaattaaattt

SEQ ID NO: 46217 - DNA, 15 bp, Homo sapiens
agtcagaattaaatt

SEQ ID NO: 46218 - DNA, 15 bp, Homo sapiens
aagtcagaattaaat

SEQ ID NO: 46219 - DNA, 15 bp, Homo sapiens
taagtcagaattaaa

SEQ ID NO: 46220 - DNA, 15 bp, Homo sapiens
ttaagtcagaattaa

SEQ ID NO: 46221 - DNA, 15 bp, Homo sapiens
tttaagtcagaatta

SEQ ID NO: 46222 - DNA, 15 bp, Homo sapiens
ttttaagtcagaatt

SEQ ID NO: 46223 - DNA, 15 bp, Homo sapiens
tttttaagtcagaat

SEQ ID NO: 46224 - DNA, 15 bp, Homo sapiens
ttttttaagtcagaa

SEQ ID NO: 46225 - DNA, 15 bp, Homo sapiens
tttttttaagtcaga

SEQ ID NO: 46226 - DNA, 15 bp, Homo sapiens
atttttttaagtcag

SEQ ID NO: 46227 - DNA, 15 bp, Homo sapiens
aatttttttaagtca

SEQ ID NO: 46228 - DNA, 15 bp, Homo sapiens
caatttttttaagtc

SEQ ID NO: 46229 - DNA, 15 bp, Homo sapiens
acaatttttttaagt

SEQ ID NO: 46230 - DNA, 15 bp, Homo sapiens
aacaatttttttaag

SEQ ID NO: 46231 - DNA, 15 bp, Homo sapiens
aaacaatttttttaa

SEQ ID NO: 46232 - DNA, 15 bp, Homo sapiens
aaaacaattttttta

SEQ ID NO: 46233 - DNA, 15 bp, Homo sapiens
caaaacaattttttt

SEQ ID NO: 46234 - DNA, 15 bp, Homo sapiens
gcaaaacaatttttt

SEQ ID NO: 46235 - DNA, 15 bp, Homo sapiens
agcaaaacaattttt

SEQ ID NO: 46236 - DNA, 15 bp, Homo sapiens
aagcaaaacaatttt

SEQ ID NO: 46237 - DNA, 15 bp, Homo sapiens
caagcaaaacaattt

SEQ ID NO: 46238 - DNA, 15 bp, Homo sapiens
acaagcaaaacaatt

SEQ ID NO: 46239 - DNA, 15 bp, Homo sapiens
tacaagcaaaacaat

SEQ ID NO: 46240 - DNA, 15 bp, Homo sapiens
atacaagcaaaacaa

SEQ ID NO: 46241 - DNA, 15 bp, Homo sapiens
tatacaagcaaaaca

SEQ ID NO: 46242 - DNA, 15 bp, Homo sapiens
ctatacaagcaaaac

SEQ ID NO: 46243 - DNA, 15 bp, Homo sapiens
tctatacaagcaaaa

SEQ ID NO: 46244 - DNA, 15 bp, Homo sapiens
atctatacaagcaaa

SEQ ID NO: 46245 - DNA, 15 bp, Homo sapiens
aatctatacaagcaa

SEQ ID NO: 46246 - DNA, 15 bp, Homo sapiens
aaatctatacaagca

SEQ ID NO: 46247 - DNA, 15 bp, Homo sapiens
taaatctatacaagc

SEQ ID NO: 46248 - DNA, 15 bp, Homo sapiens
ctaaatctatacaag

SEQ ID NO: 46249 - DNA, 15 bp, Homo sapiens
cctaaatctatacaa

SEQ ID NO: 46250 - DNA, 15 bp, Homo sapiens
ccctaaatctataca

SEQ ID NO: 46251 - DNA, 15 bp, Homo sapiens
tccctaaatctatac

SEQ ID NO: 46252 - DNA, 15 bp, Homo sapiens
gtccctaaatctata

SEQ ID NO: 46253 - DNA, 15 bp, Homo sapiens
tgtccctaaatctat

SEQ ID NO: 46254 - DNA, 15 bp, Homo sapiens
gtgtccctaaatcta

SEQ ID NO: 46255 - DNA, 15 bp, Homo sapiens
tgtgtccctaaatct

SEQ ID NO: 46256 - DNA, 15 bp, Homo sapiens
ttgtgtccctaaatc

SEQ ID NO: 46257 - DNA, 15 bp, Homo sapiens
cttgtgtccctaaat

SEQ ID NO: 46258 - DNA, 15 bp, Homo sapiens
acttgtgtccctaaa

SEQ ID NO: 46259 - DNA, 15 bp, Homo sapiens
cacttgtgtccctaa

SEQ ID NO: 46260 - DNA, 15 bp, Homo sapiens
acacttgtgtcccta

SEQ ID NO: 46261 - DNA, 15 bp, Homo sapiens
tacacttgtgtccct

SEQ ID NO: 46262 - DNA, 15 bp, Homo sapiens
ttacacttgtgtccc

SEQ ID NO: 46263 - DNA, 15 bp, Homo sapiens
attacacttgtgtcc

SEQ ID NO: 46264 - DNA, 15 bp, Homo sapiens
aattacacttgtgtc

SEQ ID NO: 46265 - DNA, 15 bp, Homo sapiens
aaattacacttgtgt

SEQ ID NO: 46266 - DNA, 15 bp, Homo sapiens
aaaattacacttgtg

SEQ ID NO: 46267 - DNA, 15 bp, Homo sapiens
caaaattacacttgt

SEQ ID NO: 46268 - DNA, 15 bp, Homo sapiens
acaaaattacacttg

SEQ ID NO: 46269 - DNA, 15 bp, Homo sapiens
aacaaaattacactt

SEQ ID NO: 46270 - DNA, 15 bp, Homo sapiens
taacaaaattacact

SEQ ID NO: 46271 - DNA, 15 bp, Homo sapiens
gtaacaaaattacac

SEQ ID NO: 46272 - DNA, 15 bp, Homo sapiens
tgtaacaaaattaca

SEQ ID NO: 46273 - DNA, 15 bp, Homo sapiens
atgtaacaaaattac

SEQ ID NO: 46274 - DNA, 15 bp, Homo sapiens
catgtaacaaaatta

SEQ ID NO: 46275 - DNA, 15 bp, Homo sapiens
gcatgtaacaaaatt

SEQ ID NO: 46276 - DNA, 15 bp, Homo sapiens
tgcatgtaacaaaat

SEQ ID NO: 46277 - DNA, 15 bp, Homo sapiens
atgcatgtaacaaaa

SEQ ID NO: 46278 - DNA, 15 bp, Homo sapiens
tatgcatgtaacaaa

SEQ ID NO: 46279 - DNA, 15 bp, Homo sapiens
ctatgcatgtaacaa

SEQ ID NO: 46280 - DNA, 15 bp, Homo sapiens
tctatgcatgtaaca

SEQ ID NO: 46281 - DNA, 15 bp, Homo sapiens
ctctatgcatgtaac

SEQ ID NO: 46282 - DNA, 15 bp, Homo sapiens
actctatgcatgtaa

SEQ ID NO: 46283 - DNA, 15 bp, Homo sapiens
cactctatgcatgta

SEQ ID NO: 46284 - DNA, 15 bp, Homo sapiens
acactctatgcatgt

SEQ ID NO: 46285 - DNA, 15 bp, Homo sapiens
tacactctatgcatg

SEQ ID NO: 46286 - DNA, 15 bp, Homo sapiens
atacactctatgcat

SEQ ID NO: 46287 - DNA, 15 bp, Homo sapiens
tatacactctatgca

SEQ ID NO: 46288 - DNA, 15 bp, Homo sapiens
ctatacactctatgc

SEQ ID NO: 46289 - DNA, 15 bp, Homo sapiens
actatacactctatg

SEQ ID NO: 46290 - DNA, 15 bp, Homo sapiens
aactatacactctat

SEQ ID NO: 46291 - DNA, 15 bp, Homo sapiens
aaactatacactcta

SEQ ID NO: 46292 - DNA, 15 bp, Homo sapiens
gaaactatacactct

SEQ ID NO: 46293 - DNA, 15 bp, Homo sapiens
tgaaactatacactc

SEQ ID NO: 46294 - DNA, 15 bp, Homo sapiens
ttgaaactatacact

SEQ ID NO: 46295 - DNA, 15 bp, Homo sapiens
cttgaaactatacac

SEQ ID NO: 46296 - DNA, 15 bp, Homo sapiens
acttgaaactataca

SEQ ID NO: 46297 - DNA, 15 bp, Homo sapiens
gacttgaaactatac

SEQ ID NO: 46298 - DNA, 15 bp, Homo sapiens
tgacttgaaactata

SEQ ID NO: 46299 - DNA, 15 bp, Homo sapiens
ctgacttgaaactat

SEQ ID NO: 46300 - DNA, 15 bp, Homo sapiens
cctgacttgaaacta

SEQ ID NO: 46301 - DNA, 15 bp, Homo sapiens
ccctgacttgaaact

SEQ ID NO: 46302 - DNA, 15 bp, Homo sapiens
gccctgacttgaaac

SEQ ID NO: 46303 - DNA, 15 bp, Homo sapiens
agccctgacttgaaa

SEQ ID NO: 46304 - DNA, 15 bp, Homo sapiens
aagccctgacttgaa

SEQ ID NO: 46305 - DNA, 15 bp, Homo sapiens
aaagccctgacttga

SEQ ID NO: 46306 - DNA, 15 bp, Homo sapiens
aaaagccctgacttg

SEQ ID NO: 46307 - DNA, 15 bp, Homo sapiens
taaaagccctgactt

SEQ ID NO: 46308 - DNA, 15 bp, Homo sapiens
ctaaaagccctgact

SEQ ID NO: 46309 - DNA, 15 bp, Homo sapiens
cctaaaagccctgac

SEQ ID NO: 46310 - DNA, 15 bp, Homo sapiens
acctaaaagccctga

SEQ ID NO: 46311 - DNA, 15 bp, Homo sapiens
aacctaaaagccctg

SEQ ID NO: 46312 - DNA, 15 bp, Homo sapiens
caacctaaaagccct

SEQ ID NO: 46313 - DNA, 15 bp, Homo sapiens
acaacctaaaagccc

SEQ ID NO: 46314 - DNA, 15 bp, Homo sapiens
gacaacctaaaagcc

SEQ ID NO: 46315 - DNA, 15 bp, Homo sapiens
ggacaacctaaaagc

SEQ ID NO: 46316 - DNA, 15 bp, Homo sapiens
tggacaacctaaaag

SEQ ID NO: 46317 - DNA, 15 bp, Homo sapiens
atggacaacctaaaa

SEQ ID NO: 46318 - DNA, 15 bp, Homo sapiens
gatggacaacctaaa

SEQ ID NO: 46319 - DNA, 15 bp, Homo sapiens
tgatggacaacctaa

SEQ ID NO: 46320 - DNA, 15 bp, Homo sapiens
atgatggacaaccta

SEQ ID NO: 46321 - DNA, 15 bp, Homo sapiens
gatgatggacaacct

SEQ ID NO: 46322 - DNA, 15 bp, Homo sapiens
agatgatggacaacc

SEQ ID NO: 46323 - DNA, 15 bp, Homo sapiens
cagatgatggacaac

SEQ ID NO: 46324 - DNA, 15 bp, Homo sapiens
tcagatgatggacaa

SEQ ID NO: 46325 - DNA, 15 bp, Homo sapiens
ttcagatgatggaca

SEQ ID NO: 46326 - DNA, 15 bp, Homo sapiens
attcagatgatggac

SEQ ID NO: 46327 - DNA, 15 bp, Homo sapiens
tattcagatgatgga

SEQ ID NO: 46328 - DNA, 15 bp, Homo sapiens
ttattcagatgatgg

SEQ ID NO: 46329 - DNA, 15 bp, Homo sapiens
attattcagatgatg

SEQ ID NO: 46330 - DNA, 15 bp, Homo sapiens
tattattcagatgat

SEQ ID NO: 46331 - DNA, 15 bp, Homo sapiens
atattattcagatga

SEQ ID NO: 46332 - DNA, 15 bp, Homo sapiens
tatattattcagatg

SEQ ID NO: 46333 - DNA, 15 bp, Homo sapiens
gtatattattcagat

SEQ ID NO: 46334 - DNA, 15 bp, Homo sapiens
tgtatattattcaga

SEQ ID NO: 46335 - DNA, 15 bp, Homo sapiens
atgtatattattcag

SEQ ID NO: 46336 - DNA, 15 bp, Homo sapiens
aatgtatattattca

SEQ ID NO: 46337 - DNA, 15 bp, Homo sapiens
caatgtatattattc

SEQ ID NO: 46338 - DNA, 15 bp, Homo sapiens
acaatgtatattatt

SEQ ID NO: 46339 - DNA, 15 bp, Homo sapiens
tacaatgtatattat

SEQ ID NO: 46340 - DNA, 15 bp, Homo sapiens
gtacaatgtatatta

SEQ ID NO: 46341 - DNA, 15 bp, Homo sapiens
ggtacaatgtatatt

SEQ ID NO: 46342 - DNA, 15 bp, Homo sapiens
gggtacaatgtatat

SEQ ID NO: 46343 - DNA, 15 bp, Homo sapiens
tgggtacaatgtata

SEQ ID NO: 46344 - DNA, 15 bp, Homo sapiens
atgggtacaatgtat

SEQ ID NO: 46345 - DNA, 15 bp, Homo sapiens
aatgggtacaatgta

SEQ ID NO: 46346 - DNA, 15 bp, Homo sapiens
taatgggtacaatgt

SEQ ID NO: 46347 - DNA, 15 bp, Homo sapiens
ttaatgggtacaatg

SEQ ID NO: 46348 - DNA, 15 bp, Homo sapiens
cttaatgggtacaat

SEQ ID NO: 46349 - DNA, 15 bp, Homo sapiens
acttaatgggtacaa

SEQ ID NO: 46350 - DNA, 15 bp, Homo sapiens
tacttaatgggtaca

SEQ ID NO: 46351 - DNA, 15 bp, Homo sapiens
ttacttaatgggtac

SEQ ID NO: 46352 - DNA, 15 bp, Homo sapiens
attacttaatgggta

SEQ ID NO: 46353 - DNA, 15 bp, Homo sapiens
aattacttaatgggt

SEQ ID NO: 46354 - DNA, 15 bp, Homo sapiens
aaattacttaatggg

SEQ ID NO: 46355 - DNA, 15 bp, Homo sapiens
gaaattacttaatgg

SEQ ID NO: 46356 - DNA, 15 bp, Homo sapiens
agaaattacttaatg

SEQ ID NO: 46357 - DNA, 15 bp, Homo sapiens
gagaaattacttaat

SEQ ID NO: 46358 - DNA, 15 bp, Homo sapiens
tgagaaattacttaa

SEQ ID NO: 46359 - DNA, 15 bp, Homo sapiens
atgagaaattactta

SEQ ID NO: 46360 - DNA, 15 bp, Homo sapiens
gatgagaaattactt

SEQ ID NO: 46361 - DNA, 15 bp, Homo sapiens
agatgagaaattact

SEQ ID NO: 46362 - DNA, 15 bp, Homo sapiens
aagatgagaaattac

SEQ ID NO: 46363 - DNA, 15 bp, Homo sapiens
gaagatgagaaatta

SEQ ID NO: 46364 - DNA, 15 bp, Homo sapiens
agaagatgagaaatt

SEQ ID NO: 46365 - DNA, 15 bp, Homo sapiens
tagaagatgagaaat

SEQ ID NO: 46366 - DNA, 15 bp, Homo sapiens
gtagaagatgagaaa

SEQ ID NO: 46367 - DNA, 15 bp, Homo sapiens
agtagaagatgagaa

SEQ ID NO: 46368 - DNA, 15 bp, Homo sapiens
gagtagaagatgaga

SEQ ID NO: 46369 - DNA, 15 bp, Homo sapiens
tgagtagaagatgag

SEQ ID NO: 46370 - DNA, 15 bp, Homo sapiens
gtgagtagaagatga

SEQ ID NO: 46371 - DNA, 15 bp, Homo sapiens
ggtgagtagaagatg

SEQ ID NO: 46372 - DNA, 15 bp, Homo sapiens
cggtgagtagaagat

SEQ ID NO: 46373 - DNA, 15 bp, Homo sapiens
acggtgagtagaaga

SEQ ID NO: 46374 - DNA, 15 bp, Homo sapiens
aacggtgagtagaag

SEQ ID NO: 46375 - DNA, 15 bp, Homo sapiens
aaacggtgagtagaa

SEQ ID NO: 46376 - DNA, 15 bp, Homo sapiens
gaaacggtgagtaga

SEQ ID NO: 46377 - DNA, 15 bp, Homo sapiens
tgaaacggtgagtag

SEQ ID NO: 46378 - DNA, 15 bp, Homo sapiens
ttgaaacggtgagta

SEQ ID NO: 46379 - DNA, 15 bp, Homo sapiens
cttgaaacggtgagt

SEQ ID NO: 46380 - DNA, 15 bp, Homo sapiens
acttgaaacggtgag

SEQ ID NO: 46381 - DNA, 15 bp, Homo sapiens
gacttgaaacggtga

SEQ ID NO: 46382 - DNA, 15 bp, Homo sapiens
agacttgaaacggtg

SEQ ID NO: 46383 - DNA, 15 bp, Homo sapiens
gagacttgaaacggt

SEQ ID NO: 46384 - DNA, 15 bp, Homo sapiens
ggagacttgaaacgg

SEQ ID NO: 46385 - DNA, 15 bp, Homo sapiens
tggagacttgaaacg

SEQ ID NO: 46386 - DNA, 15 bp, Homo sapiens
gtggagacttgaaac

SEQ ID NO: 46387 - DNA, 15 bp, Homo sapiens
agtggagacttgaaa

SEQ ID NO: 46388 - DNA, 15 bp, Homo sapiens
tagtggagacttgaa

SEQ ID NO: 46389 - DNA, 15 bp, Homo sapiens
atagtggagacttga

SEQ ID NO: 46390 - DNA, 15 bp, Homo sapiens
aatagtggagacttg

SEQ ID NO: 46391 - DNA, 15 bp, Homo sapiens
aaatagtggagactt

SEQ ID NO: 46392 - DNA, 15 bp, Homo sapiens
taaatagtggagact

SEQ ID NO: 46393 - DNA, 15 bp, Homo sapiens
ataaatagtggagac

SEQ ID NO: 46394 - DNA, 15 bp, Homo sapiens
gataaatagtggaga

SEQ ID NO: 46395 - DNA, 15 bp, Homo sapiens
tgataaatagtggag

SEQ ID NO: 46396 - DNA, 15 bp, Homo sapiens
atgataaatagtgga

SEQ ID NO: 46397 - DNA, 15 bp, Homo sapiens
aatgataaatagtgg

SEQ ID NO: 46398 - DNA, 15 bp, Homo sapiens
gaatgataaatagtg

SEQ ID NO: 46399 - DNA, 15 bp, Homo sapiens
ggaatgataaatagt

SEQ ID NO: 46400 - DNA, 15 bp, Homo sapiens
tggaatgataaatag

SEQ ID NO: 46401 - DNA, 15 bp, Homo sapiens
atggaatgataaata

SEQ ID NO: 46402 - DNA, 15 bp, Homo sapiens
aatggaatgataaat

SEQ ID NO: 46403 - DNA, 15 bp, Homo sapiens
gaatggaatgataaa

SEQ ID NO: 46404 - DNA, 15 bp, Homo sapiens
agaatggaatgataa

SEQ ID NO: 46405 - DNA, 15 bp, Homo sapiens
aagaatggaatgata

SEQ ID NO: 46406 - DNA, 15 bp, Homo sapiens
aaagaatggaatgat

SEQ ID NO: 46407 - DNA, 15 bp, Homo sapiens
taaagaatggaatga

SEQ ID NO: 46408 - DNA, 15 bp, Homo sapiens
gtaaagaatggaatg

SEQ ID NO: 46409 - DNA, 15 bp, Homo sapiens
tgtaaagaatggaat

SEQ ID NO: 46410 - DNA, 15 bp, Homo sapiens
atgtaaagaatggaa

SEQ ID NO: 46411 - DNA, 15 bp, Homo sapiens
aatgtaaagaatgga

SEQ ID NO: 46412 - DNA, 15 bp, Homo sapiens
gaatgtaaagaatgg

SEQ ID NO: 46413 - DNA, 15 bp, Homo sapiens
agaatgtaaagaatg

SEQ ID NO: 46414 - DNA, 15 bp, Homo sapiens
cagaatgtaaagaat

SEQ ID NO: 46415 - DNA, 15 bp, Homo sapiens
tcagaatgtaaagaa

SEQ ID NO: 46416 - DNA, 15 bp, Homo sapiens
atcagaatgtaaaga

SEQ ID NO: 46417 - DNA, 15 bp, Homo sapiens
aatcagaatgtaaag

SEQ ID NO: 46418 - DNA, 15 bp, Homo sapiens
aaatcagaatgtaaa

SEQ ID NO: 46419 - DNA, 15 bp, Homo sapiens
aaaatcagaatgtaa

SEQ ID NO: 46420 - DNA, 15 bp, Homo sapiens
gaaaatcagaatgta

SEQ ID NO: 46421 - DNA, 15 bp, Homo sapiens
tgaaaatcagaatgt

SEQ ID NO: 46422 - DNA, 15 bp, Homo sapiens
atgaaaatcagaatg

SEQ ID NO: 46423 - DNA, 15 bp, Homo sapiens
aatgaaaatcagaat

SEQ ID NO: 46424 - DNA, 15 bp, Homo sapiens
taaatgaaaatcaga

SEQ ID NO: 46425 - DNA, 15 bp, Homo sapiens
gtaaatgaaaatcag

SEQ ID NO: 46426 - DNA, 15 bp, Homo sapiens
agtaaatgaaaatca

SEQ ID NO: 46427 - DNA, 15 bp, Homo sapiens
tagtaaatgaaaatc

SEQ ID NO: 46428 - DNA, 15 bp, Homo sapiens
ctagtaaatgaaaat

SEQ ID NO: 46429 - DNA, 15 bp, Homo sapiens
cctagtaaatgaaaa

SEQ ID NO: 46430 - DNA, 15 bp, Homo sapiens
acctagtaaatgaaa

SEQ ID NO: 46431 - DNA, 15 bp, Homo sapiens
cacctagtaaatgaa

SEQ ID NO: 46432 - DNA, 15 bp, Homo sapiens
acacctagtaaatga

SEQ ID NO: 46433 - DNA, 15 bp, Homo sapiens
tacacctagtaaatg

SEQ ID NO: 46434 - DNA, 15 bp, Homo sapiens
atacacctagtaaat

SEQ ID NO: 46435 - DNA, 15 bp, Homo sapiens
aatacacctagtaaa

SEQ ID NO: 46436 - DNA, 15 bp, Homo sapiens
taatacacctagtaa

SEQ ID NO: 46437 - DNA, 15 bp, Homo sapiens
ctaatacacctagta

SEQ ID NO: 46438 - DNA, 15 bp, Homo sapiens
actaatacacctagt

SEQ ID NO: 46439 - DNA, 15 bp, Homo sapiens
gactaatacacctag

SEQ ID NO: 46440 - DNA, 15 bp, Homo sapiens
agactaatacaccta

SEQ ID NO: 46441 - DNA, 15 bp, Homo sapiens
cagactaatacacct

SEQ ID NO: 46442 - DNA, 15 bp, Homo sapiens
acagactaatacacc

SEQ ID NO: 46443 - DNA, 15 bp, Homo sapiens
aacagactaatacac

SEQ ID NO: 46444 - DNA, 15 bp, Homo sapiens
aaacagactaataca

SEQ ID NO: 46445 - DNA, 15 bp, Homo sapiens
aaaacagactaatac

SEQ ID NO: 46446 - DNA, 15 bp, Homo sapiens
aaaaacagactaata

SEQ ID NO: 46447 - DNA, 15 bp, Homo sapiens
caaaaacagactaat

SEQ ID NO: 46448 - DNA, 15 bp, Homo sapiens
gcaaaaacagactaa

SEQ ID NO: 46449 - DNA, 15 bp, Homo sapiens
tgcaaaaacagacta

SEQ ID NO: 46450 - DNA, 15 bp, Homo sapiens
atgcaaaaacagact

SEQ ID NO: 46451 - DNA, 15 bp, Homo sapiens
aatgcaaaaacagac

SEQ ID NO: 46452 - DNA, 15 bp, Homo sapiens
caatgcaaaaacaga

SEQ ID NO: 46453 - DNA, 15 bp, Homo sapiens
gcaatgcaaaaacag

SEQ ID NO: 46454 - DNA, 15 bp, Homo sapiens
agcaatgcaaaaaca

SEQ ID NO: 46455 - DNA, 15 bp, Homo sapiens
aagcaatgcaaaaac

SEQ ID NO: 46456 - DNA, 15 bp, Homo sapiens
aaagcaatgcaaaaa

SEQ ID NO: 46457 - DNA, 15 bp, Homo sapiens
taaagcaatgcaaaa

SEQ ID NO: 46458 - DNA, 15 bp, Homo sapiens
ttaaagcaatgcaaa

SEQ ID NO: 46459 - DNA, 15 bp, Homo sapiens
tttaaagcaatgcaa

SEQ ID NO: 46460 - DNA, 15 bp, Homo sapiens
ctttaaagcaatgca

SEQ ID NO: 46461 - DNA, 15 bp, Homo sapiens
tctttaaagcaatgc

SEQ ID NO: 46462 - DNA, 15 bp, Homo sapiens
ttctttaaagcaatg

SEQ ID NO: 46463 - DNA, 15 bp, Homo sapiens
tttctttaaagcaat

SEQ ID NO: 46464 - DNA, 15 bp, Homo sapiens
atttctttaaagcaa

SEQ ID NO: 46465 - DNA, 15 bp, Homo sapiens
tatttctttaaagca

SEQ ID NO: 46466 - DNA, 15 bp, Homo sapiens
gtatttctttaaagc

SEQ ID NO: 46467 - DNA, 15 bp, Homo sapiens
ggtatttctttaaag

SEQ ID NO: 46468 - DNA, 15 bp, Homo sapiens
aggtatttctttaaa

SEQ ID NO: 46469 - DNA, 15 bp, Homo sapiens
caggtatttctttaa

SEQ ID NO: 46470 - DNA, 15 bp, Homo sapiens
tcaggtatttcttta

SEQ ID NO: 46471 - DNA, 15 bp, Homo sapiens
ctcaggtatttcttt

SEQ ID NO: 46472 - DNA, 15 bp, Homo sapiens
tctcaggtatttctt

SEQ ID NO: 46473 - DNA, 15 bp, Homo sapiens
gtctcaggtatttct

SEQ ID NO: 46474 - DNA, 15 bp, Homo sapiens
agtctcaggtatttc

SEQ ID NO: 46475 - DNA, 15 bp, Homo sapiens
cagtctcaggtattt

SEQ ID NO: 46476 - DNA, 15 bp, Homo sapiens
tcagtctcaggtatt

SEQ ID NO: 46477 - DNA, 15 bp, Homo sapiens
ctcagtctcaggtat

SEQ ID NO: 46478 - DNA, 15 bp, Homo sapiens
actcagtctcaggta

SEQ ID NO: 46479 - DNA, 15 bp, Homo sapiens
tactcagtctcaggt

SEQ ID NO: 46480 - DNA, 15 bp, Homo sapiens
atactcagtctcagg

SEQ ID NO: 46481 - DNA, 15 bp, Homo sapiens
aatactcagtctcag

SEQ ID NO: 46482 - DNA, 15 bp, Homo sapiens
taatactcagtctca

SEQ ID NO: 46483 - DNA, 15 bp, Homo sapiens
ttaatactcagtctc

SEQ ID NO: 46484 - DNA, 15 bp, Homo sapiens
tttaatactcagtct

SEQ ID NO: 46485 - DNA, 15 bp, Homo sapiens
gtttaatactcagtc

SEQ ID NO: 46486 - DNA, 15 bp, Homo sapiens
tgtttaatactcagt

SEQ ID NO: 46487 - DNA, 15 bp, Homo sapiens
ctgtttaatactcag

SEQ ID NO: 46488 - DNA, 15 bp, Homo sapiens
cctgtttaatactca

SEQ ID NO: 46489 - DNA, 15 bp, Homo sapiens
acctgtttaatactc

SEQ ID NO: 46490 - DNA, 15 bp, Homo sapiens
aacctgtttaatact

SEQ ID NO: 46491 - DNA, 15 bp, Homo sapiens
aaacctgtttaatac

SEQ ID NO: 46492 - DNA, 15 bp, Homo sapiens
taaacctgtttaata

SEQ ID NO: 46493 - DNA, 15 bp, Homo sapiens
ttaaacctgtttaat

SEQ ID NO: 46494 - DNA, 15 bp, Homo sapiens
gttaaacctgtttaa

SEQ ID NO: 46495 - DNA, 15 bp, Homo sapiens
ggttaaacctgttta

SEQ ID NO: 46496 - DNA, 15 bp, Homo sapiens
aggttaaacctgttt

SEQ ID NO: 46497 - DNA, 15 bp, Homo sapiens
caggttaaacctgtt

SEQ ID NO: 46498 - DNA, 15 bp, Homo sapiens
acaggttaaacctgt

SEQ ID NO: 46499 - DNA, 15 bp, Homo sapiens
aacaggttaaacctg

SEQ ID NO: 46500 - DNA, 15 bp, Homo sapiens
aaacaggttaaacct

SEQ ID NO: 46501 - DNA, 15 bp, Homo sapiens
aaaacaggttaaacc

SEQ ID NO: 46502 - DNA, 15 bp, Homo sapiens
gaaaacaggttaaac

SEQ ID NO: 46503 - DNA, 15 bp, Homo sapiens
agaaaacaggttaaa

SEQ ID NO: 46504 - DNA, 15 bp, Homo sapiens
aagaaaacaggttaa

SEQ ID NO: 46505 - DNA, 15 bp, Homo sapiens
aaagaaaacaggtta

SEQ ID NO: 46506 - DNA, 15 bp, Homo sapiens
taaagaaaacaggtt

SEQ ID NO: 46507 - DNA, 15 bp, Homo sapiens
ataaagaaaacaggt

SEQ ID NO: 46508 - DNA, 15 bp, Homo sapiens
cataaagaaaacagg

SEQ ID NO: 46509 - DNA, 15 bp, Homo sapiens
tcataaagaaaacag

SEQ ID NO: 46510 - DNA, 15 bp, Homo sapiens
ttcataaagaaaaca

SEQ ID NO: 46511 - DNA, 15 bp, Homo sapiens
attcataaagaaaac

SEQ ID NO: 46512 - DNA, 15 bp, Homo sapiens
aattcataaagaaaa

SEQ ID NO: 46513 - DNA, 15 bp, Homo sapiens
gaattcataaagaaa

SEQ ID NO: 46514 - DNA, 15 bp, Homo sapiens
agaattcataaagaa

SEQ ID NO: 46515 - DNA, 15 bp, Homo sapiens
aagaattcataaaga

SEQ ID NO: 46516 - DNA, 15 bp, Homo sapiens
gaagaattcataaag

SEQ ID NO: 46517 - DNA, 15 bp, Homo sapiens
agaagaattcataaa

SEQ ID NO: 46518 - DNA, 15 bp, Homo sapiens
aagaagaattcataa

SEQ ID NO: 46519 - DNA, 15 bp, Homo sapiens
aaagaagaattcata

SEQ ID NO: 46520 - DNA, 15 bp, Homo sapiens
taaagaagaattcat

SEQ ID NO: 46521 - DNA, 15 bp, Homo sapiens
ttaaagaagaattca

SEQ ID NO: 46522 - DNA, 15 bp, Homo sapiens
attaaagaagaattc

SEQ ID NO: 46523 - DNA, 15 bp, Homo sapiens
aattaaagaagaatt

SEQ ID NO: 46524 - DNA, 15 bp, Homo sapiens
caattaaagaagaat

SEQ ID NO: 46525 - DNA, 15 bp, Homo sapiens
ccaattaaagaagaa

SEQ ID NO: 46526 - DNA, 15 bp, Homo sapiens
gccaattaaagaaga

SEQ ID NO: 46527 - DNA, 15 bp, Homo sapiens
agccaattaaagaag

SEQ ID NO: 46528 - DNA, 15 bp, Homo sapiens
gagccaattaaagaa

SEQ ID NO: 46529 - DNA, 15 bp, Homo sapiens
tgagccaattaaaga

SEQ ID NO: 46530 - DNA, 15 bp, Homo sapiens
atgagccaattaaag

SEQ ID NO: 46531 - DNA, 15 bp, Homo sapiens
catgagccaattaaa

SEQ ID NO: 46532 - DNA, 15 bp, Homo sapiens
ccatgagccaattaa

SEQ ID NO: 46533 - DNA, 15 bp, Homo sapiens
accatgagccaatta

SEQ ID NO: 46534 - DNA, 15 bp, Homo sapiens
aaccatgagccaatt

SEQ ID NO: 46535 - DNA, 15 bp, Homo sapiens
gaaccatgagccaat

SEQ ID NO: 46536 - DNA, 15 bp, Homo sapiens
agaaccatgagccaa

SEQ ID NO: 46537 - DNA, 15 bp, Homo sapiens
cagaaccatgagcca

SEQ ID NO: 46538 - DNA, 15 bp, Homo sapiens
gcagaaccatgagcc

SEQ ID NO: 46539 - DNA, 15 bp, Homo sapiens
tgcagaaccatgagc

SEQ ID NO: 46540 - DNA, 15 bp, Homo sapiens
gtgcagaaccatgag

SEQ ID NO: 46541 - DNA, 15 bp, Homo sapiens
cgtgcagaaccatga

SEQ ID NO: 46542 - DNA, 15 bp, Homo sapiens
gcgtgcagaaccatg

SEQ ID NO: 46543 - DNA, 15 bp, Homo sapiens
agcgtgcagaaccat

SEQ ID NO: 46544 - DNA, 15 bp, Homo sapiens
cagcgtgcagaacca

SEQ ID NO: 46545 - DNA, 15 bp, Homo sapiens
acagcgtgcagaacc

SEQ ID NO: 46546 - DNA, 15 bp, Homo sapiens
tacagcgtgcagaac

SEQ ID NO: 46547 - DNA, 15 bp, Homo sapiens
gtacagcgtgcagaa

SEQ ID NO: 46548 - DNA, 15 bp, Homo sapiens
tgtacagcgtgcaga

SEQ ID NO: 46549 - DNA, 15 bp, Homo sapiens
ctgtacagcgtgcag

SEQ ID NO: 46550 - DNA, 15 bp, Homo sapiens
tctgtacagcgtgca

SEQ ID NO: 46551 - DNA, 15 bp, Homo sapiens
ttctgtacagcgtgc

SEQ ID NO: 46552 - DNA, 15 bp, Homo sapiens
tttctgtacagcgtg

SEQ ID NO: 46553 - DNA, 15 bp, Homo sapiens
ctttctgtacagcgt

SEQ ID NO: 46554 - DNA, 15 bp, Homo sapiens
gctttctgtacagcg

SEQ ID NO: 46555 - DNA, 15 bp, Homo sapiens
tgctttctgtacagc

SEQ ID NO: 46556 - DNA, 15 bp, Homo sapiens
atgctttctgtacag

SEQ ID NO: 46557 - DNA, 15 bp, Homo sapiens
tatgctttctgtaca

SEQ ID NO: 46558 - DNA, 15 bp, Homo sapiens
ctatgctttctgtac

SEQ ID NO: 46559 - DNA, 15 bp, Homo sapiens
gctatgctttctgta

SEQ ID NO: 46560 - DNA, 15 bp, Homo sapiens
tgctatgctttctgt

SEQ ID NO: 46561 - DNA, 15 bp, Homo sapiens
ctgctatgctttctg

SEQ ID NO: 46562 - DNA, 15 bp, Homo sapiens
gctgctatgctttct

SEQ ID NO: 46563 - DNA, 15 bp, Homo sapiens
tgctgctatgctttc

SEQ ID NO: 46564 - DNA, 15 bp, Homo sapiens
atgctgctatgcttt

SEQ ID NO: 46565 - DNA, 15 bp, Homo sapiens
gatgctgctatgctt

SEQ ID NO: 46566 - DNA, 15 bp, Homo sapiens
agatgctgctatgct

SEQ ID NO: 46567 - DNA, 15 bp, Homo sapiens
cagatgctgctatgc

SEQ ID NO: 46568 - DNA, 15 bp, Homo sapiens
gcagatgctgctatg

SEQ ID NO: 46569 - DNA, 15 bp, Homo sapiens
agcagatgctgctat

SEQ ID NO: 46570 - DNA, 15 bp, Homo sapiens
aagcagatgctgcta

SEQ ID NO: 46571 - DNA, 15 bp, Homo sapiens
gaagcagatgctgct

SEQ ID NO: 46572 - DNA, 15 bp, Homo sapiens
agaagcagatgctgc

SEQ ID NO: 46573 - DNA, 15 bp, Homo sapiens
cagaagcagatgctg

SEQ ID NO: 46574 - DNA, 15 bp, Homo sapiens
ccagaagcagatgct

SEQ ID NO: 46575 - DNA, 15 bp, Homo sapiens
cccagaagcagatgc

SEQ ID NO: 46576 - DNA, 15 bp, Homo sapiens
ccccagaagcagatg

SEQ ID NO: 46577 - DNA, 15 bp, Homo sapiens
tccccagaagcagat

SEQ ID NO: 46578 - DNA, 15 bp, Homo sapiens
ctccccagaagcaga

SEQ ID NO: 46579 - DNA, 15 bp, Homo sapiens
cctccccagaagcag

SEQ ID NO: 46580 - DNA, 15 bp, Homo sapiens
gcctccccagaagca

SEQ ID NO: 46581 - DNA, 15 bp, Homo sapiens
ggcctccccagaagc

SEQ ID NO: 46582 - DNA, 15 bp, Homo sapiens
aggcctccccagaag

SEQ ID NO: 46583 - DNA, 15 bp, Homo sapiens
gaggcctccccagaa

SEQ ID NO: 46584 - DNA, 15 bp, Homo sapiens
tgaggcctccccaga

SEQ ID NO: 46585 - DNA, 15 bp, Homo sapiens
ctgaggcctccccag

SEQ ID NO: 46586 - DNA, 15 bp, Homo sapiens
cctgaggcctcccca

SEQ ID NO: 46587 - DNA, 15 bp, Homo sapiens
tcctgaggcctcccc

SEQ ID NO: 46588 - DNA, 15 bp, Homo sapiens
ttcctgaggcctccc

SEQ ID NO: 46589 - DNA, 15 bp, Homo sapiens
cttcctgaggcctcc

SEQ ID NO: 46590 - DNA, 15 bp, Homo sapiens
gcttcctgaggcctc

SEQ ID NO: 46591 - DNA, 15 bp, Homo sapiens
ggcttcctgaggcct

SEQ ID NO: 46592 - DNA, 15 bp, Homo sapiens
aggcttcctgaggcc

SEQ ID NO: 46593 - DNA, 15 bp, Homo sapiens
gaggcttcctgaggc

SEQ ID NO: 46594 - DNA, 15 bp, Homo sapiens
ggaggcttcctgagg

SEQ ID NO: 46595 - DNA, 15 bp, Homo sapiens
tggaggcttcctgag

SEQ ID NO: 46596 - DNA, 15 bp, Homo sapiens
ttggaggcttcctga

SEQ ID NO: 46597 - DNA, 15 bp, Homo sapiens
attggaggcttcctg

SEQ ID NO: 46598 - DNA, 15 bp, Homo sapiens
gattggaggcttcct

SEQ ID NO: 46599 - DNA, 15 bp, Homo sapiens
tgattggaggcttcc

SEQ ID NO: 46600 - DNA, 15 bp, Homo sapiens
atgattggaggcttc

SEQ ID NO: 46601 - DNA, 15 bp, Homo sapiens
catgattggaggctt

SEQ ID NO: 46602 - DNA, 15 bp, Homo sapiens
ccatgattggaggct

SEQ ID NO: 46603 - DNA, 15 bp, Homo sapiens
gccatgattggaggc

SEQ ID NO: 46604 - DNA, 15 bp, Homo sapiens
agccatgattggagg

SEQ ID NO: 46605 - DNA, 15 bp, Homo sapiens
cagccatgattggag

SEQ ID NO: 46606 - DNA, 15 bp, Homo sapiens
tcagccatgattgga

SEQ ID NO: 46607 - DNA, 15 bp, Homo sapiens
ttcagccatgattgg

SEQ ID NO: 46608 - DNA, 15 bp, Homo sapiens
cttcagccatgattg

SEQ ID NO: 46609 - DNA, 15 bp, Homo sapiens
ccttcagccatgatt

SEQ ID NO: 46610 - DNA, 15 bp, Homo sapiens
gccttcagccatgat

SEQ ID NO: 46611 - DNA, 15 bp, Homo sapiens
tgccttcagccatga

SEQ ID NO: 46612 - DNA, 15 bp, Homo sapiens
ttgccttcagccatg

SEQ ID NO: 46613 - DNA, 15 bp, Homo sapiens
tttgccttcagccat

SEQ ID NO: 46614 - DNA, 15 bp, Homo sapiens
ttttgccttcagcca

SEQ ID NO: 46615 - DNA, 15 bp, Homo sapiens
cttttgccttcagcc

SEQ ID NO: 46616 - DNA, 15 bp, Homo sapiens
ccttttgccttcagc

SEQ ID NO: 46617 - DNA, 15 bp, Homo sapiens
cccttttgccttcag

SEQ ID NO: 46618 - DNA, 15 bp, Homo sapiens
ccccttttgccttca

SEQ ID NO: 46619 - DNA, 15 bp, Homo sapiens
tccccttttgccttc

SEQ ID NO: 46620 - DNA, 15 bp, Homo sapiens
ctccccttttgcctt

SEQ ID NO: 46621 - DNA, 15 bp, Homo sapiens
gctccccttttgcct

SEQ ID NO: 46622 - DNA, 15 bp, Homo sapiens
tgctccccttttgcc

SEQ ID NO: 46623 - DNA, 15 bp, Homo sapiens
atgctccccttttgc

SEQ ID NO: 46624 - DNA, 15 bp, Homo sapiens
catgctccccttttg

SEQ ID NO: 46625 - DNA, 15 bp, Homo sapiens
ccatgctcccctttt

SEQ ID NO: 46626 - DNA, 15 bp, Homo sapiens
accatgctccccttt

SEQ ID NO: 46627 - DNA, 15 bp, Homo sapiens
caccatgctcccctt

SEQ ID NO: 46628 - DNA, 15 bp, Homo sapiens
tcaccatgctcccct

SEQ ID NO: 46629 - DNA, 15 bp, Homo sapiens
ctcaccatgctcccc

SEQ ID NO: 46630 - DNA, 15 bp, Homo sapiens
tctcaccatgctccc

SEQ ID NO: 46631 - DNA, 15 bp, Homo sapiens
ttctcaccatgctcc

SEQ ID NO: 46632 - DNA, 15 bp, Homo sapiens
attctcaccatgctc

SEQ ID NO: 46633 - DNA, 15 bp, Homo sapiens
cattctcaccatgct

SEQ ID NO: 46634 - DNA, 15 bp, Homo sapiens
ccattctcaccatgc

SEQ ID NO: 46635 - DNA, 15 bp, Homo sapiens
cccattctcaccatg

SEQ ID NO: 46636 - DNA, 15 bp, Homo sapiens
tcccattctcaccat

SEQ ID NO: 46637 - DNA, 15 bp, Homo sapiens
ctcccattctcacca

SEQ ID NO: 46638 - DNA, 15 bp, Homo sapiens
gctcccattctcacc

SEQ ID NO: 46639 - DNA, 15 bp, Homo sapiens
tgctcccattctcac

SEQ ID NO: 46640 - DNA, 15 bp, Homo sapiens
ttgctcccattctca

SEQ ID NO: 46641 - DNA, 15 bp, Homo sapiens
cttgctcccattctc

SEQ ID NO: 46642 - DNA, 15 bp, Homo sapiens
tcttgctcccattct

SEQ ID NO: 46643 - DNA, 15 bp, Homo sapiens
ttcttgctcccattc

SEQ ID NO: 46644 - DNA, 15 bp, Homo sapiens
tttcttgctcccatt

SEQ ID NO: 46645 - DNA, 15 bp, Homo sapiens
ctttcttgctcccat

SEQ ID NO: 46646 - DNA, 15 bp, Homo sapiens
tctttcttgctccca

SEQ ID NO: 46647 - DNA, 15 bp, Homo sapiens
ctctttcttgctccc

SEQ ID NO: 46648 - DNA, 15 bp, Homo sapiens
tctctttcttgctcc

SEQ ID NO: 46649 - DNA, 15 bp, Homo sapiens
ttctctttcttgctc

SEQ ID NO: 46650 - DNA, 15 bp, Homo sapiens
cttctctttcttgct

SEQ ID NO: 46651 - DNA, 15 bp, Homo sapiens
ccttctctttcttgc

SEQ ID NO: 46652 - DNA, 15 bp, Homo sapiens
tccttctctttcttg

SEQ ID NO: 46653 - DNA, 15 bp, Homo sapiens
ctccttctctttctt

SEQ ID NO: 46654 - DNA, 15 bp, Homo sapiens
actccttctctttct

SEQ ID NO: 46655 - DNA, 15 bp, Homo sapiens
cactccttctctttc

SEQ ID NO: 46656 - DNA, 15 bp, Homo sapiens
ccactccttctcttt

SEQ ID NO: 46657 - DNA, 15 bp, Homo sapiens
accactccttctctt

SEQ ID NO: 46658 - DNA, 15 bp, Homo sapiens
caccactccttctct

SEQ ID NO: 46659 - DNA, 15 bp, Homo sapiens
ccaccactccttctc

SEQ ID NO: 46660 - DNA, 15 bp, Homo sapiens
cccaccactccttct

SEQ ID NO: 46661 - DNA, 15 bp, Homo sapiens
ccccaccactccttc

SEQ ID NO: 46662 - DNA, 15 bp, Homo sapiens
tccccaccactcctt

SEQ ID NO: 46663 - DNA, 15 bp, Homo sapiens
ctccccaccactcct

SEQ ID NO: 46664 - DNA, 15 bp, Homo sapiens
tctccccaccactcc

SEQ ID NO: 46665 - DNA, 15 bp, Homo sapiens
ttctccccaccactc

SEQ ID NO: 46666 - DNA, 15 bp, Homo sapiens
cttctccccaccact

SEQ ID NO: 46667 - DNA, 15 bp, Homo sapiens
ccttctccccaccac

SEQ ID NO: 46668 - DNA, 15 bp, Homo sapiens
accttctccccacca

SEQ ID NO: 46669 - DNA, 15 bp, Homo sapiens
caccttctccccacc

SEQ ID NO: 46670 - DNA, 15 bp, Homo sapiens
gcaccttctccccac

SEQ ID NO: 46671 - DNA, 15 bp, Homo sapiens
ggcaccttctcccca

SEQ ID NO: 46672 - DNA, 15 bp, Homo sapiens
tggcaccttctcccc

SEQ ID NO: 46673 - DNA, 15 bp, Homo sapiens
gtggcaccttctccc

SEQ ID NO: 46674 - DNA, 15 bp, Homo sapiens
ggtggcaccttctcc

SEQ ID NO: 46675 - DNA, 15 bp, Homo sapiens
gggtggcaccttctc

SEQ ID NO: 46676 - DNA, 15 bp, Homo sapiens
tgggtggcaccttct

SEQ ID NO: 46677 - DNA, 15 bp, Homo sapiens
gtgggtggcaccttc

SEQ ID NO: 46678 - DNA, 15 bp, Homo sapiens
agtgggtggcacctt

SEQ ID NO: 46679 - DNA, 15 bp, Homo sapiens
aagtgggtggcacct

SEQ ID NO: 46680 - DNA, 15 bp, Homo sapiens
aaagtgggtggcacc

SEQ ID NO: 46681 - DNA, 15 bp, Homo sapiens
aaaagtgggtggcac

SEQ ID NO: 46682 - DNA, 15 bp, Homo sapiens
taaaagtgggtggca

SEQ ID NO: 46683 - DNA, 15 bp, Homo sapiens
ttaaaagtgggtggc

SEQ ID NO: 46684 - DNA, 15 bp, Homo sapiens
tttaaaagtgggtgg

SEQ ID NO: 46685 - DNA, 15 bp, Homo sapiens
atttaaaagtgggtg

SEQ ID NO: 46686 - DNA, 15 bp, Homo sapiens
catttaaaagtgggt

SEQ ID NO: 46687 - DNA, 15 bp, Homo sapiens
gcatttaaaagtggg

SEQ ID NO: 46688 - DNA, 15 bp, Homo sapiens
ggcatttaaaagtgg

SEQ ID NO: 46689 - DNA, 15 bp, Homo sapiens
tggcatttaaaagtg

SEQ ID NO: 46690 - DNA, 15 bp, Homo sapiens
ctggcatttaaaagt

SEQ ID NO: 46691 - DNA, 15 bp, Homo sapiens
gctggcatttaaaag

SEQ ID NO: 46692 - DNA, 15 bp, Homo sapiens
agctggcatttaaaa

SEQ ID NO: 46693 - DNA, 15 bp, Homo sapiens
gagctggcatttaaa

SEQ ID NO: 46694 - DNA, 15 bp, Homo sapiens
tgagctggcatttaa

SEQ ID NO: 46695 - DNA, 15 bp, Homo sapiens
gtgagctggcattta

SEQ ID NO: 46696 - DNA, 15 bp, Homo sapiens
agtgagctggcattt

SEQ ID NO: 46697 - DNA, 15 bp, Homo sapiens
aagtgagctggcatt

SEQ ID NO: 46698 - DNA, 15 bp, Homo sapiens
taagtgagctggcat

SEQ ID NO: 46699 - DNA, 15 bp, Homo sapiens
gtaagtgagctggca

SEQ ID NO: 46700 - DNA, 15 bp, Homo sapiens
ggtaagtgagctggc

SEQ ID NO: 46701 - DNA, 15 bp, Homo sapiens
tggtaagtgagctgg

SEQ ID NO: 46702 - DNA, 15 bp, Homo sapiens
gtggtaagtgagctg

SEQ ID NO: 46703 - DNA, 15 bp, Homo sapiens
ggtggtaagtgagct

SEQ ID NO: 46704 - DNA, 15 bp, Homo sapiens
tggtggtaagtgagc

SEQ ID NO: 46705 - DNA, 15 bp, Homo sapiens
ttggtggtaagtgag

SEQ ID NO: 46706 - DNA, 15 bp, Homo sapiens
cttggtggtaagtga

SEQ ID NO: 46707 - DNA, 15 bp, Homo sapiens
tcttggtggtaagtg

SEQ ID NO: 46708 - DNA, 15 bp, Homo sapiens
ctcttggtggtaagt

SEQ ID NO: 46709 - DNA, 15 bp, Homo sapiens
cctcttggtggtaag

SEQ ID NO: 46710 - DNA, 15 bp, Homo sapiens
tcctcttggtggtaa

SEQ ID NO: 46711 - DNA, 15 bp, Homo sapiens
atcctcttggtggta

SEQ ID NO: 46712 - DNA, 15 bp, Homo sapiens
catcctcttggtggt

SEQ ID NO: 46713 - DNA, 15 bp, Homo sapiens
ccatcctcttggtgg

SEQ ID NO: 46714 - DNA, 15 bp, Homo sapiens
gccatcctcttggtg

SEQ ID NO: 46715 - DNA, 15 bp, Homo sapiens
ggccatcctcttggt

SEQ ID NO: 46716 - DNA, 15 bp, Homo sapiens
gggccatcctcttgg

SEQ ID NO: 46717 - DNA, 15 bp, Homo sapiens
tgggccatcctcttg

SEQ ID NO: 46718 - DNA, 15 bp, Homo sapiens
ttgggccatcctctt

SEQ ID NO: 46719 - DNA, 15 bp, Homo sapiens
cttgggccatcctct

SEQ ID NO: 46720 - DNA, 15 bp, Homo sapiens
gcttgggccatcctc

SEQ ID NO: 46721 - DNA, 15 bp, Homo sapiens
ggcttgggccatcct

SEQ ID NO: 46722 - DNA, 15 bp, Homo sapiens
tggcttgggccatcc

SEQ ID NO: 46723 - DNA, 15 bp, Homo sapiens
atggcttgggccatc

SEQ ID NO: 46724 - DNA, 15 bp, Homo sapiens
aatggcttgggccat

SEQ ID NO: 46725 - DNA, 15 bp, Homo sapiens
gaatggcttgggcca

SEQ ID NO: 46726 - DNA, 15 bp, Homo sapiens
tgaatggcttgggcc

SEQ ID NO: 46727 - DNA, 15 bp, Homo sapiens
atgaatggcttgggc

SEQ ID NO: 46728 - DNA, 15 bp, Homo sapiens
catgaatggcttggg

SEQ ID NO: 46729 - DNA, 15 bp, Homo sapiens
acatgaatggcttgg

SEQ ID NO: 46730 - DNA, 15 bp, Homo sapiens
cacatgaatggcttg

SEQ ID NO: 46731 - DNA, 15 bp, Homo sapiens
ccacatgaatggctt

SEQ ID NO: 46732 - DNA, 15 bp, Homo sapiens
cccacatgaatggct

SEQ ID NO: 46733 - DNA, 15 bp, Homo sapiens
tcccacatgaatggc

SEQ ID NO: 46734 - DNA, 15 bp, Homo sapiens
atcccacatgaatgg

SEQ ID NO: 46735 - DNA, 15 bp, Homo sapiens
gatcccacatgaatg

SEQ ID NO: 46736 - DNA, 15 bp, Homo sapiens
agatcccacatgaat

SEQ ID NO: 46737 - DNA, 15 bp, Homo sapiens
cagatcccacatgaa

SEQ ID NO: 46738 - DNA, 15 bp, Homo sapiens
gcagatcccacatga

SEQ ID NO: 46739 - DNA, 15 bp, Homo sapiens
ggcagatcccacatg

SEQ ID NO: 46740 - DNA, 15 bp, Homo sapiens
gggcagatcccacat

SEQ ID NO: 46741 - DNA, 15 bp, Homo sapiens
ggggcagatcccaca

SEQ ID NO: 46742 - DNA, 15 bp, Homo sapiens
gggggcagatcccac

SEQ ID NO: 46743 - DNA, 15 bp, Homo sapiens
tgggggcagatccca

SEQ ID NO: 46744 - DNA, 15 bp, Homo sapiens
atgggggcagatccc

SEQ ID NO: 46745 - DNA, 15 bp, Homo sapiens
catgggggcagatcc

SEQ ID NO: 46746 - DNA, 15 bp, Homo sapiens
tcatgggggcagatc

SEQ ID NO: 46747 - DNA, 15 bp, Homo sapiens
atcatgggggcagat

SEQ ID NO: 46748 - DNA, 15 bp, Homo sapiens
aatcatgggggcaga

SEQ ID NO: 46749 - DNA, 15 bp, Homo sapiens
gaatcatgggggcag

SEQ ID NO: 46750 - DNA, 15 bp, Homo sapiens
tgaatcatgggggca

SEQ ID NO: 46751 - DNA, 15 bp, Homo sapiens
ttgaatcatgggggc

SEQ ID NO: 46752 - DNA, 15 bp, Homo sapiens
cttgaatcatggggg

SEQ ID NO: 46753 - DNA, 15 bp, Homo sapiens
gcttgaatcatgggg

SEQ ID NO: 46754 - DNA, 15 bp, Homo sapiens
agcttgaatcatggg

SEQ ID NO: 46755 - DNA, 15 bp, Homo sapiens
aagcttgaatcatgg

SEQ ID NO: 46756 - DNA, 15 bp, Homo sapiens
gaagcttgaatcatg

SEQ ID NO: 46757 - DNA, 15 bp, Homo sapiens
agaagcttgaatcat

SEQ ID NO: 46758 - DNA, 15 bp, Homo sapiens
aagaagcttgaatca

SEQ ID NO: 46759 - DNA, 15 bp, Homo sapiens
gaagaagcttgaatc

SEQ ID NO: 46760 - DNA, 15 bp, Homo sapiens
ggaagaagcttgaat

SEQ ID NO: 46761 - DNA, 15 bp, Homo sapiens
tggaagaagcttgaa

SEQ ID NO: 46762 - DNA, 15 bp, Homo sapiens
gtggaagaagcttga

SEQ ID NO: 46763 - DNA, 15 bp, Homo sapiens
ggtggaagaagcttg

SEQ ID NO: 46764 - DNA, 15 bp, Homo sapiens
tggtggaagaagctt

SEQ ID NO: 46765 - DNA, 15 bp, Homo sapiens
ctggtggaagaagct

SEQ ID NO: 46766 - DNA, 15 bp, Homo sapiens
cctggtggaagaagc

SEQ ID NO: 46767 - DNA, 15 bp, Homo sapiens
gcctggtggaagaag

SEQ ID NO: 46768 - DNA, 15 bp, Homo sapiens
ggcctggtggaagaa

SEQ ID NO: 46769 - DNA, 15 bp, Homo sapiens
gggcctggtggaaga

SEQ ID NO: 46770 - DNA, 15 bp, Homo sapiens
ggggcctggtggaag

SEQ ID NO: 46771 - DNA, 15 bp, Homo sapiens
tggggcctggtggaa

SEQ ID NO: 46772 - DNA, 15 bp, Homo sapiens
gtggggcctggtgga

SEQ ID NO: 46773 - DNA, 15 bp, Homo sapiens
ggtggggcctggtgg

SEQ ID NO: 46774 - DNA, 15 bp, Homo sapiens
aggtggggcctggtg

SEQ ID NO: 46775 - DNA, 15 bp, Homo sapiens
gaggtggggcctggt

SEQ ID NO: 46776 - DNA, 15 bp, Homo sapiens
agaggtggggcctgg

SEQ ID NO: 46777 - DNA, 15 bp, Homo sapiens
tagaggtggggcctg

SEQ ID NO: 46778 - DNA, 15 bp, Homo sapiens
ctagaggtggggcct

SEQ ID NO: 46779 - DNA, 15 bp, Homo sapiens
gctagaggtggggcc

SEQ ID NO: 46780 - DNA, 15 bp, Homo sapiens
tgctagaggtggggc

SEQ ID NO: 46781 - DNA, 15 bp, Homo sapiens
gtgctagaggtgggg

SEQ ID NO: 46782 - DNA, 15 bp, Homo sapiens
agtgctagaggtggg

SEQ ID NO: 46783 - DNA, 15 bp, Homo sapiens
cagtgctagaggtgg

SEQ ID NO: 46784 - DNA, 15 bp, Homo sapiens
ccagtgctagaggtg

SEQ ID NO: 46785 - DNA, 15 bp, Homo sapiens
cccagtgctagaggt

SEQ ID NO: 46786 - DNA, 15 bp, Homo sapiens
ccccagtgctagagg

SEQ ID NO: 46787 - DNA, 15 bp, Homo sapiens
tccccagtgctagag

SEQ ID NO: 46788 - DNA, 15 bp, Homo sapiens
atccccagtgctaga

SEQ ID NO: 46789 - DNA, 15 bp, Homo sapiens
aatccccagtgctag

SEQ ID NO: 46790 - DNA, 15 bp, Homo sapiens
taatccccagtgcta

SEQ ID NO: 46791 - DNA, 15 bp, Homo sapiens
gtaatccccagtgct

SEQ ID NO: 46792 - DNA, 15 bp, Homo sapiens
tgtaatccccagtgc

SEQ ID NO: 46793 - DNA, 15 bp, Homo sapiens
ttgtaatccccagtg

SEQ ID NO: 46794 - DNA, 15 bp, Homo sapiens
attgtaatccccagt

SEQ ID NO: 46795 - DNA, 15 bp, Homo sapiens
aattgtaatccccag

SEQ ID NO: 46796 - DNA, 15 bp, Homo sapiens
gaattgtaatcccca

SEQ ID NO: 46797 - DNA, 15 bp, Homo sapiens
tgaattgtaatcccc

SEQ ID NO: 46798 - DNA, 15 bp, Homo sapiens
ttgaattgtaatccc

SEQ ID NO: 46799 - DNA, 15 bp, Homo sapiens
gttgaattgtaatcc

SEQ ID NO: 46800 - DNA, 15 bp, Homo sapiens
ggttgaattgtaatc

SEQ ID NO: 46801 - DNA, 15 bp, Homo sapiens
aggttgaattgtaat

SEQ ID NO: 46802 - DNA, 15 bp, Homo sapiens
caggttgaattgtaa

SEQ ID NO: 46803 - DNA, 15 bp, Homo sapiens
tcaggttgaattgta

SEQ ID NO: 46804 - DNA, 15 bp, Homo sapiens
ctcaggttgaattgt

SEQ ID NO: 46805 - DNA, 15 bp, Homo sapiens
tctcaggttgaattg

SEQ ID NO: 46806 - DNA, 15 bp, Homo sapiens
atctcaggttgaatt

SEQ ID NO: 46807 - DNA, 15 bp, Homo sapiens
aatctcaggttgaat

SEQ ID NO: 46808 - DNA, 15 bp, Homo sapiens
aaatctcaggttgaa

SEQ ID NO: 46809 - DNA, 15 bp, Homo sapiens
caaatctcaggttga

SEQ ID NO: 46810 - DNA, 15 bp, Homo sapiens
ccaaatctcaggttg

SEQ ID NO: 46811 - DNA, 15 bp, Homo sapiens
cccaaatctcaggtt

SEQ ID NO: 46812 - DNA, 15 bp, Homo sapiens
tcccaaatctcaggt

SEQ ID NO: 46813 - DNA, 15 bp, Homo sapiens
ctcccaaatctcagg

SEQ ID NO: 46814 - DNA, 15 bp, Homo sapiens
cctcccaaatctcag

SEQ ID NO: 46815 - DNA, 15 bp, Homo sapiens
ccctcccaaatctca

SEQ ID NO: 46816 - DNA, 15 bp, Homo sapiens
tccctcccaaatctc

SEQ ID NO: 46817 - DNA, 15 bp, Homo sapiens
ttccctcccaaatct

SEQ ID NO: 46818 - DNA, 15 bp, Homo sapiens
tttccctcccaaatc

SEQ ID NO: 46819 - DNA, 15 bp, Homo sapiens
ctttccctcccaaat

SEQ ID NO: 46820 - DNA, 15 bp, Homo sapiens
tctttccctcccaaa

SEQ ID NO: 46821 - DNA, 15 bp, Homo sapiens
atctttccctcccaa

SEQ ID NO: 46822 - DNA, 15 bp, Homo sapiens
tatctttccctccca

SEQ ID NO: 46823 - DNA, 15 bp, Homo sapiens
atatctttccctccc

SEQ ID NO: 46824 - DNA, 15 bp, Homo sapiens
gatatctttccctcc

SEQ ID NO: 46825 - DNA, 15 bp, Homo sapiens
ggatatctttccctc

SEQ ID NO: 46826 - DNA, 15 bp, Homo sapiens
tggatatctttccct

SEQ ID NO: 46827 - DNA, 15 bp, Homo sapiens
ttggatatctttccc

SEQ ID NO: 46828 - DNA, 15 bp, Homo sapiens
tttggatatctttcc

SEQ ID NO: 46829 - DNA, 15 bp, Homo sapiens
gtttggatatctttc

SEQ ID NO: 46830 - DNA, 15 bp, Homo sapiens
agtttggatatcttt

SEQ ID NO: 46831 - DNA, 15 bp, Homo sapiens
tagtttggatatctt

SEQ ID NO: 46832 - DNA, 15 bp, Homo sapiens
atagtttggatatct

SEQ ID NO: 46833 - DNA, 15 bp, Homo sapiens
tatagtttggatatc

SEQ ID NO: 46834 - DNA, 15 bp, Homo sapiens
atatagtttggatat

SEQ ID NO: 46835 - DNA, 15 bp, Homo sapiens
gatatagtttggata

SEQ ID NO: 46836 - DNA, 15 bp, Homo sapiens
tgatatagtttggat

SEQ ID NO: 46837 - DNA, 15 bp, Homo sapiens
gtgatatagtttgga

SEQ ID NO: 46838 - DNA, 15 bp, Homo sapiens
agtgatatagtttgg

SEQ ID NO: 46839 - DNA, 15 bp, Homo sapiens
tagtgatatagtttg

SEQ ID NO: 46840 - DNA, 15 bp, Homo sapiens
ctagtgatatagttt

SEQ ID NO: 46841 - DNA, 15 bp, Homo sapiens
cctagtgatatagtt

SEQ ID NO: 46842 - DNA, 15 bp, Homo sapiens
acctagtgatatagt

SEQ ID NO: 46843 - DNA, 15 bp, Homo sapiens
gacctagtgatatag

SEQ ID NO: 46844 - DNA, 15 bp, Homo sapiens
agacctagtgatata

SEQ ID NO: 46845 - DNA, 15 bp, Homo sapiens
cagacctagtgatat

SEQ ID NO: 46846 - DNA, 15 bp, Homo sapiens
ccagacctagtgata

SEQ ID NO: 46847 - DNA, 15 bp, Homo sapiens
tccagacctagtgat

SEQ ID NO: 46848 - DNA, 15 bp, Homo sapiens
atccagacctagtga

SEQ ID NO: 46849 - DNA, 15 bp, Homo sapiens
gatccagacctagtg

SEQ ID NO: 46850 - DNA, 15 bp, Homo sapiens
agatccagacctagt

SEQ ID NO: 46851 - DNA, 15 bp, Homo sapiens
aagatccagacctag

SEQ ID NO: 46852 - DNA, 15 bp, Homo sapiens
caagatccagaccta

SEQ ID NO: 46853 - DNA, 15 bp, Homo sapiens
acaagatccagacct

SEQ ID NO: 46854 - DNA, 15 bp, Homo sapiens
aacaagatccagacc

SEQ ID NO: 46855 - DNA, 15 bp, Homo sapiens
taacaagatccagac

SEQ ID NO: 46856 - DNA, 15 bp, Homo sapiens
ataacaagatccaga

SEQ ID NO: 46857 - DNA, 15 bp, Homo sapiens
aataacaagatccag

SEQ ID NO: 46858 - DNA, 15 bp, Homo sapiens
aaataacaagatcca

SEQ ID NO: 46859 - DNA, 15 bp, Homo sapiens
taaataacaagatcc

SEQ ID NO: 46860 - DNA, 15 bp, Homo sapiens
ataaataacaagatc

SEQ ID NO: 46861 - DNA, 15 bp, Homo sapiens
aataaataacaagat

SEQ ID NO: 46862 - DNA, 15 bp, Homo sapiens
aaataaataacaaga

SEQ ID NO: 46863 - DNA, 15 bp, Homo sapiens
aaaataaataacaag

SEQ ID NO: 46864 - DNA, 15 bp, Homo sapiens
aaaaataaataacaa

SEQ ID NO: 46865 - DNA, 15 bp, Homo sapiens
aaaaaataaataaca

SEQ ID NO: 46866 - DNA, 15 bp, Homo sapiens
caaaaaataaataac

SEQ ID NO: 46867 - DNA, 15 bp, Homo sapiens
ccaaaaaataaataa

SEQ ID NO: 46868 - DNA, 15 bp, Homo sapiens
tccaaaaaataaata

SEQ ID NO: 46869 - DNA, 15 bp, Homo sapiens
ttccaaaaaataaat

SEQ ID NO: 46870 - DNA, 15 bp, Homo sapiens
gttccaaaaaataaa

SEQ ID NO: 46871 - DNA, 15 bp, Homo sapiens
tgttccaaaaaataa

SEQ ID NO: 46872 - DNA, 15 bp, Homo sapiens
atgttccaaaaaata

SEQ ID NO: 46873 - DNA, 15 bp, Homo sapiens
tatgttccaaaaaat

SEQ ID NO: 46874 - DNA, 15 bp, Homo sapiens
ctatgttccaaaaaa

SEQ ID NO: 46875 - DNA, 15 bp, Homo sapiens
actatgttccaaaaa

SEQ ID NO: 46876 - DNA, 15 bp, Homo sapiens
gactatgttccaaaa

SEQ ID NO: 46877 - DNA, 15 bp, Homo sapiens
tgactatgttccaaa

SEQ ID NO: 46878 - DNA, 15 bp, Homo sapiens
atgactatgttccaa

SEQ ID NO: 46879 - DNA, 15 bp, Homo sapiens
tatgactatgttcca

SEQ ID NO: 46880 - DNA, 15 bp, Homo sapiens
atatgactatgttcc

SEQ ID NO: 46881 - DNA, 15 bp, Homo sapiens
tatatgactatgttc

SEQ ID NO: 46882 - DNA, 15 bp, Homo sapiens
atatatgactatgtt

SEQ ID NO: 46883 - DNA, 15 bp, Homo sapiens
tatatatgactatgt

SEQ ID NO: 46884 - DNA, 15 bp, Homo sapiens
atatatatgactatg

SEQ ID NO: 46885 - DNA, 15 bp, Homo sapiens
gatatatatgactat

SEQ ID NO: 46886 - DNA, 15 bp, Homo sapiens
ggatatatatgacta

SEQ ID NO: 46887 - DNA, 15 bp, Homo sapiens
tggatatatatgact

SEQ ID NO: 46888 - DNA, 15 bp, Homo sapiens
ttggatatatatgac

SEQ ID NO: 46889 - DNA, 15 bp, Homo sapiens
cttggatatatatga

SEQ ID NO: 46890 - DNA, 15 bp, Homo sapiens
ccttggatatatatg

SEQ ID NO: 46891 - DNA, 15 bp, Homo sapiens
tccttggatatatat

SEQ ID NO: 46892 - DNA, 15 bp, Homo sapiens
atccttggatatata

SEQ ID NO: 46893 - DNA, 15 bp, Homo sapiens
tatccttggatatat

SEQ ID NO: 46894 - DNA, 15 bp, Homo sapiens
atatccttggatata

SEQ ID NO: 46895 - DNA, 15 bp, Homo sapiens
tatatccttggatat

SEQ ID NO: 46896 - DNA, 15 bp, Homo sapiens
atatatccttggata

SEQ ID NO: 46897 - DNA, 15 bp, Homo sapiens
tatatatccttggat

SEQ ID NO: 46898 - DNA, 15 bp, Homo sapiens
atatatatccttgga

SEQ ID NO: 46899 - DNA, 15 bp, Homo sapiens
aatatatatccttgg

SEQ ID NO: 46900 - DNA, 15 bp, Homo sapiens
caatatatatccttg

SEQ ID NO: 46901 - DNA, 15 bp, Homo sapiens
acaatatatatcctt

SEQ ID NO: 46902 - DNA, 15 bp, Homo sapiens
tacaatatatatcct

SEQ ID NO: 46903 - DNA, 15 bp, Homo sapiens
ctacaatatatatcc

SEQ ID NO: 46904 - DNA, 15 bp, Homo sapiens
tctacaatatatatc

SEQ ID NO: 46905 - DNA, 15 bp, Homo sapiens
ttctacaatatatat

SEQ ID NO: 46906 - DNA, 15 bp, Homo sapiens
cttctacaatatata

SEQ ID NO: 46907 - DNA, 15 bp, Homo sapiens
acttctacaatatat

SEQ ID NO: 46908 - DNA, 15 bp, Homo sapiens
gacttctacaatata

SEQ ID NO: 46909 - DNA, 15 bp, Homo sapiens
ggacttctacaatat

SEQ ID NO: 46910 - DNA, 15 bp, Homo sapiens
tggacttctacaata

SEQ ID NO: 46911 - DNA, 15 bp, Homo sapiens
gtggacttctacaat

SEQ ID NO: 46912 - DNA, 15 bp, Homo sapiens
tgtggacttctacaa

SEQ ID NO: 46913 - DNA, 15 bp, Homo sapiens
ctgtggacttctaca

SEQ ID NO: 46914 - DNA, 15 bp, Homo sapiens
tctgtggacttctac

SEQ ID NO: 46915 - DNA, 15 bp, Homo sapiens
ttctgtggacttcta

SEQ ID NO: 46916 - DNA, 15 bp, Homo sapiens
gttctgtggacttct

SEQ ID NO: 46917 - DNA, 15 bp, Homo sapiens
ggttctgtggacttc

SEQ ID NO: 46918 - DNA, 15 bp, Homo sapiens
tggttctgtggactt

SEQ ID NO: 46919 - DNA, 15 bp, Homo sapiens
atggttctgtggact

SEQ ID NO: 46920 - DNA, 15 bp, Homo sapiens
tatggttctgtggac

SEQ ID NO: 46921 - DNA, 15 bp, Homo sapiens
gtatggttctgtgga

SEQ ID NO: 46922 - DNA, 15 bp, Homo sapiens
agtatggttctgtgg

SEQ ID NO: 46923 - DNA, 15 bp, Homo sapiens
tagtatggttctgtg

SEQ ID NO: 46924 - DNA, 15 bp, Homo sapiens
ttagtatggttctgt

SEQ ID NO: 46925 - DNA, 15 bp, Homo sapiens
attagtatggttctg

SEQ ID NO: 46926 - DNA, 15 bp, Homo sapiens
tattagtatggttct

SEQ ID NO: 46927 - DNA, 15 bp, Homo sapiens
atattagtatggttc

SEQ ID NO: 46928 - DNA, 15 bp, Homo sapiens
aatattagtatggtt

SEQ ID NO: 46929 - DNA, 15 bp, Homo sapiens
caatattagtatggt

SEQ ID NO: 46930 - DNA, 15 bp, Homo sapiens
ccaatattagtatgg

SEQ ID NO: 46931 - DNA, 15 bp, Homo sapiens
tccaatattagtatg

SEQ ID NO: 46932 - DNA, 15 bp, Homo sapiens
gtccaatattagtat

SEQ ID NO: 46933 - DNA, 15 bp, Homo sapiens
agtccaatattagta

SEQ ID NO: 46934 - DNA, 15 bp, Homo sapiens
aagtccaatattagt

SEQ ID NO: 46935 - DNA, 15 bp, Homo sapiens
gaagtccaatattag

SEQ ID NO: 46936 - DNA, 15 bp, Homo sapiens
agaagtccaatatta

SEQ ID NO: 46937 - DNA, 15 bp, Homo sapiens
cagaagtccaatatt

SEQ ID NO: 46938 - DNA, 15 bp, Homo sapiens
gcagaagtccaatat

SEQ ID NO: 46939 - DNA, 15 bp, Homo sapiens
agcagaagtccaata

SEQ ID NO: 46940 - DNA, 15 bp, Homo sapiens
aagcagaagtccaat

SEQ ID NO: 46941 - DNA, 15 bp, Homo sapiens
taagcagaagtccaa

SEQ ID NO: 46942 - DNA, 15 bp, Homo sapiens
ctaagcagaagtcca

SEQ ID NO: 46943 - DNA, 15 bp, Homo sapiens
actaagcagaagtcc

SEQ ID NO: 46944 - DNA, 15 bp, Homo sapiens
aactaagcagaagtc

SEQ ID NO: 46945 - DNA, 15 bp, Homo sapiens
taactaagcagaagt

SEQ ID NO: 46946 - DNA, 15 bp, Homo sapiens
ctaactaagcagaag

SEQ ID NO: 46947 - DNA, 15 bp, Homo sapiens
cctaactaagcagaa

SEQ ID NO: 46948 - DNA, 15 bp, Homo sapiens
acctaactaagcaga

SEQ ID NO: 46949 - DNA, 15 bp, Homo sapiens
gacctaactaagcag

SEQ ID NO: 46950 - DNA, 15 bp, Homo sapiens
agacctaactaagca

SEQ ID NO: 46951 - DNA, 15 bp, Homo sapiens
aagacctaactaagc

SEQ ID NO: 46952 - DNA, 15 bp, Homo sapiens
taagacctaactaag

SEQ ID NO: 46953 - DNA, 15 bp, Homo sapiens
ataagacctaactaa

SEQ ID NO: 46954 - DNA, 15 bp, Homo sapiens
gataagacctaacta

SEQ ID NO: 46955 - DNA, 15 bp, Homo sapiens
agataagacctaact

SEQ ID NO: 46956 - DNA, 15 bp, Homo sapiens
tagataagacctaac

SEQ ID NO: 46957 - DNA, 15 bp, Homo sapiens
atagataagacctaa

SEQ ID NO: 46958 - DNA, 15 bp, Homo sapiens
gatagataagaccta

SEQ ID NO: 46959 - DNA, 15 bp, Homo sapiens
agatagataagacct

SEQ ID NO: 46960 - DNA, 15 bp, Homo sapiens
cagatagataagacc

SEQ ID NO: 46961 - DNA, 15 bp, Homo sapiens
tcagatagataagac

SEQ ID NO: 46962 - DNA, 15 bp, Homo sapiens
ttcagatagataaga

SEQ ID NO: 46963 - DNA, 15 bp, Homo sapiens
tttcagatagataag

SEQ ID NO: 46964 - DNA, 15 bp, Homo sapiens
gtttcagatagataa

SEQ ID NO: 46965 - DNA, 15 bp, Homo sapiens
tgtttcagatagata

SEQ ID NO: 46966 - DNA, 15 bp, Homo sapiens
atgtttcagatagat

SEQ ID NO: 46967 - DNA, 15 bp, Homo sapiens
catgtttcagataga

SEQ ID NO: 46968 - DNA, 15 bp, Homo sapiens
tcatgtttcagatag

SEQ ID NO: 46969 - DNA, 15 bp, Homo sapiens
atcatgtttcagata

SEQ ID NO: 46970 - DNA, 15 bp, Homo sapiens
tatcatgtttcagat

SEQ ID NO: 46971 - DNA, 15 bp, Homo sapiens
atatcatgtttcaga

SEQ ID NO: 46972 - DNA, 15 bp, Homo sapiens
aatatcatgtttcag

SEQ ID NO: 46973 - DNA, 15 bp, Homo sapiens
gaatatcatgtttca

SEQ ID NO: 46974 - DNA, 15 bp, Homo sapiens
tgaatatcatgtttc

SEQ ID NO: 46975 - DNA, 15 bp, Homo sapiens
atgaatatcatgttt

SEQ ID NO: 46976 - DNA, 15 bp, Homo sapiens
tatgaatatcatgtt

SEQ ID NO: 46977 - DNA, 15 bp, Homo sapiens
atatgaatatcatgt

SEQ ID NO: 46978 - DNA, 15 bp, Homo sapiens
aatatgaatatcatg

SEQ ID NO: 46979 - DNA, 15 bp, Homo sapiens
caatatgaatatcat

SEQ ID NO: 46980 - DNA, 15 bp, Homo sapiens
gcaatatgaatatca

SEQ ID NO: 46981 - DNA, 15 bp, Homo sapiens
tgcaatatgaatatc

SEQ ID NO: 46982 - DNA, 15 bp, Homo sapiens
ctgcaatatgaatat

SEQ ID NO: 46983 - DNA, 15 bp, Homo sapiens
tctgcaatatgaata

SEQ ID NO: 46984 - DNA, 15 bp, Homo sapiens
ctctgcaatatgaat

SEQ ID NO: 46985 - DNA, 15 bp, Homo sapiens
tctctgcaatatgaa

SEQ ID NO: 46986 - DNA, 15 bp, Homo sapiens
ttctctgcaatatga

SEQ ID NO: 46987 - DNA, 15 bp, Homo sapiens
cttctctgcaatatg

SEQ ID NO: 46988 - DNA, 15 bp, Homo sapiens
tcttctctgcaatat

SEQ ID NO: 46989 - DNA, 15 bp, Homo sapiens
atcttctctgcaata

SEQ ID NO: 46990 - DNA, 15 bp, Homo sapiens
aatcttctctgcaat

SEQ ID NO: 46991 - DNA, 15 bp, Homo sapiens
taatcttctctgcaa

SEQ ID NO: 46992 - DNA, 15 bp, Homo sapiens
ataatcttctctgca

SEQ ID NO: 46993 - DNA, 15 bp, Homo sapiens
aataatcttctctgc

SEQ ID NO: 46994 - DNA, 15 bp, Homo sapiens
aaataatcttctctg

SEQ ID NO: 46995 - DNA, 15 bp, Homo sapiens
aaaataatcttctct

SEQ ID NO: 46996 - DNA, 15 bp, Homo sapiens
gaaaataatcttctc

SEQ ID NO: 46997 - DNA, 15 bp, Homo sapiens
agaaaataatcttct

SEQ ID NO: 46998 - DNA, 15 bp, Homo sapiens
aagaaaataatcttc

SEQ ID NO: 46999 - DNA, 15 bp, Homo sapiens
aaagaaaataatctt

SEQ ID NO: 47000 - DNA, 15 bp, Homo sapiens
taaagaaaataatct

SEQ ID NO: 47001 - DNA, 15 bp, Homo sapiens
ctaaagaaaataatc

SEQ ID NO: 47002 - DNA, 15 bp, Homo sapiens
actaaagaaaataat

SEQ ID NO: 47003 - DNA, 15 bp, Homo sapiens
cactaaagaaaataa

SEQ ID NO: 47004 - DNA, 15 bp, Homo sapiens
tcactaaagaaaata

SEQ ID NO: 47005 - DNA, 15 bp, Homo sapiens
atcactaaagaaaat

SEQ ID NO: 47006 - DNA, 15 bp, Homo sapiens
aatcactaaagaaaa

SEQ ID NO: 47007 - DNA, 15 bp, Homo sapiens
caatcactaaagaaa

SEQ ID NO: 47008 - DNA, 15 bp, Homo sapiens
tcaatcactaaagaa

SEQ ID NO: 47009 - DNA, 15 bp, Homo sapiens
ctcaatcactaaaga

SEQ ID NO: 47010 - DNA, 15 bp, Homo sapiens
cctcaatcactaaag

SEQ ID NO: 47011 - DNA, 15 bp, Homo sapiens
tcctcaatcactaaa

SEQ ID NO: 47012 - DNA, 15 bp, Homo sapiens
ttcctcaatcactaa

SEQ ID NO: 47013 - DNA, 15 bp, Homo sapiens
tttcctcaatcacta

SEQ ID NO: 47014 - DNA, 15 bp, Homo sapiens
atttcctcaatcact

SEQ ID NO: 47015 - DNA, 15 bp, Homo sapiens
gatttcctcaatcac

SEQ ID NO: 47016 - DNA, 15 bp, Homo sapiens
agatttcctcaatca

SEQ ID NO: 47017 - DNA, 15 bp, Homo sapiens
aagatttcctcaatc

SEQ ID NO: 47018 - DNA, 15 bp, Homo sapiens
aaagatttcctcaat

SEQ ID NO: 47019 - DNA, 15 bp, Homo sapiens
taaagatttcctcaa

SEQ ID NO: 47020 - DNA, 15 bp, Homo sapiens
gtaaagatttcctca

SEQ ID NO: 47021 - DNA, 15 bp, Homo sapiens
agtaaagatttcctc

SEQ ID NO: 47022 - DNA, 15 bp, Homo sapiens
tagtaaagatttcct

SEQ ID NO: 47023 - DNA, 15 bp, Homo sapiens
gtagtaaagatttcc

SEQ ID NO: 47024 - DNA, 15 bp, Homo sapiens
agtagtaaagatttc

SEQ ID NO: 47025 - DNA, 15 bp, Homo sapiens
aagtagtaaagattt

SEQ ID NO: 47026 - DNA, 15 bp, Homo sapiens
taagtagtaaagatt

SEQ ID NO: 47027 - DNA, 15 bp, Homo sapiens
ataagtagtaaagat

SEQ ID NO: 47028 - DNA, 15 bp, Homo sapiens
tataagtagtaaaga

SEQ ID NO: 47029 - DNA, 15 bp, Homo sapiens
gtataagtagtaaag

SEQ ID NO: 47030 - DNA, 15 bp, Homo sapiens
tgtataagtagtaaa

SEQ ID NO: 47031 - DNA, 15 bp, Homo sapiens
atgtataagtagtaa

SEQ ID NO: 47032 - DNA, 15 bp, Homo sapiens
aatgtataagtagta

SEQ ID NO: 47033 - DNA, 15 bp, Homo sapiens
aaatgtataagtagt

SEQ ID NO: 47034 - DNA, 15 bp, Homo sapiens
aaaatgtataagtag

SEQ ID NO: 47035 - DNA, 15 bp, Homo sapiens
aaaaatgtataagta

SEQ ID NO: 47036 - DNA, 15 bp, Homo sapiens
taaaaatgtataagt

SEQ ID NO: 47037 - DNA, 15 bp, Homo sapiens
ttaaaaatgtataag

SEQ ID NO: 47038 - DNA, 15 bp, Homo sapiens
attaaaaatgtataa

SEQ ID NO: 47039 - DNA, 15 bp, Homo sapiens
tattaaaaatgtata

SEQ ID NO: 47040 - DNA, 15 bp, Homo sapiens
atattaaaaatgtat

SEQ ID NO: 47041 - DNA, 15 bp, Homo sapiens
tatattaaaaatgta

SEQ ID NO: 47042 - DNA, 15 bp, Homo sapiens
ttatattaaaaatgt

SEQ ID NO: 47043 - DNA, 15 bp, Homo sapiens
attatattaaaaatg

SEQ ID NO: 47044 - DNA, 15 bp, Homo sapiens
tattatattaaaaat

SEQ ID NO: 47045 - DNA, 15 bp, Homo sapiens
gtattatattaaaaa

SEQ ID NO: 47046 - DNA, 15 bp, Homo sapiens
agtattatattaaaa

SEQ ID NO: 47047 - DNA, 15 bp, Homo sapiens
tagtattatattaaa

SEQ ID NO: 47048 - DNA, 15 bp, Homo sapiens
atagtattatattaa

SEQ ID NO: 47049 - DNA, 15 bp, Homo sapiens
tatagtattatatta

SEQ ID NO: 47050 - DNA, 15 bp, Homo sapiens
ttatagtattatatt

SEQ ID NO: 47051 - DNA, 15 bp, Homo sapiens
attatagtattatat

SEQ ID NO: 47052 - DNA, 15 bp, Homo sapiens
tattatagtattata

SEQ ID NO: 47053 - DNA, 15 bp, Homo sapiens
atattatagtattat

SEQ ID NO: 47054 - DNA, 15 bp, Homo sapiens
aatattatagtatta

SEQ ID NO: 47055 - DNA, 15 bp, Homo sapiens
aaatattatagtatt

SEQ ID NO: 47056 - DNA, 15 bp, Homo sapiens
caaatattatagtat

SEQ ID NO: 47057 - DNA, 15 bp, Homo sapiens
tcaaatattatagta

SEQ ID NO: 47058 - DNA, 15 bp, Homo sapiens
ttcaaatattatagt

SEQ ID NO: 47059 - DNA, 15 bp, Homo sapiens
cttcaaatattatag

SEQ ID NO: 47060 - DNA, 15 bp, Homo sapiens
tcttcaaatattata

SEQ ID NO: 47061 - DNA, 15 bp, Homo sapiens
atcttcaaatattat

SEQ ID NO: 47062 - DNA, 15 bp, Homo sapiens
catcttcaaatatta

SEQ ID NO: 47063 - DNA, 15 bp, Homo sapiens
gcatcttcaaatatt

SEQ ID NO: 47064 - DNA, 15 bp, Homo sapiens
tgcatcttcaaatat

SEQ ID NO: 47065 - DNA, 15 bp, Homo sapiens
gtgcatcttcaaata

SEQ ID NO: 47066 - DNA, 15 bp, Homo sapiens
tgtgcatcttcaaat

SEQ ID NO: 47067 - DNA, 15 bp, Homo sapiens
atgtgcatcttcaaa

SEQ ID NO: 47068 - DNA, 15 bp, Homo sapiens
aatgtgcatcttcaa

SEQ ID NO: 47069 - DNA, 15 bp, Homo sapiens
aaatgtgcatcttca

SEQ ID NO: 47070 - DNA, 15 bp, Homo sapiens
aaaatgtgcatcttc

SEQ ID NO: 47071 - DNA, 15 bp, Homo sapiens
taaaatgtgcatctt

SEQ ID NO: 47072 - DNA, 15 bp, Homo sapiens
ctaaaatgtgcatct

SEQ ID NO: 47073 - DNA, 15 bp, Homo sapiens
tctaaaatgtgcatc

SEQ ID NO: 47074 - DNA, 15 bp, Homo sapiens
atctaaaatgtgcat

SEQ ID NO: 47075 - DNA, 15 bp, Homo sapiens
catctaaaatgtgca

SEQ ID NO: 47076 - DNA, 15 bp, Homo sapiens
acatctaaaatgtgc

SEQ ID NO: 47077 - DNA, 15 bp, Homo sapiens
tacatctaaaatgtg

SEQ ID NO: 47078 - DNA, 15 bp, Homo sapiens
ctacatctaaaatgt

SEQ ID NO: 47079 - DNA, 15 bp, Homo sapiens
actacatctaaaatg

SEQ ID NO: 47080 - DNA, 15 bp, Homo sapiens
aactacatctaaaat

SEQ ID NO: 47081 - DNA, 15 bp, Homo sapiens
aaactacatctaaaa

SEQ ID NO: 47082 - DNA, 15 bp, Homo sapiens
taaactacatctaaa

SEQ ID NO: 47083 - DNA, 15 bp, Homo sapiens
ttaaactacatctaa

SEQ ID NO: 47084 - DNA, 15 bp, Homo sapiens
attaaactacatcta

SEQ ID NO: 47085 - DNA, 15 bp, Homo sapiens
aattaaactacatct

SEQ ID NO: 47086 - DNA, 15 bp, Homo sapiens
caattaaactacatc

SEQ ID NO: 47087 - DNA, 15 bp, Homo sapiens
tcaattaaactacat

SEQ ID NO: 47088 - DNA, 15 bp, Homo sapiens
ttcaattaaactaca

SEQ ID NO: 47089 - DNA, 15 bp, Homo sapiens
tttcaattaaactac

SEQ ID NO: 47090 - DNA, 15 bp, Homo sapiens
gtttcaattaaacta

SEQ ID NO: 47091 - DNA, 15 bp, Homo sapiens
ggtttcaattaaact

SEQ ID NO: 47092 - DNA, 15 bp, Homo sapiens
aggtttcaattaaac

SEQ ID NO: 47093 - DNA, 15 bp, Homo sapiens
caggtttcaattaaa

SEQ ID NO: 47094 - DNA, 15 bp, Homo sapiens
ccaggtttcaattaa

SEQ ID NO: 47095 - DNA, 15 bp, Homo sapiens
tccaggtttcaatta

SEQ ID NO: 47096 - DNA, 15 bp, Homo sapiens
ttccaggtttcaatt

SEQ ID NO: 47097 - DNA, 15 bp, Homo sapiens
tttccaggtttcaat

SEQ ID NO: 47098 - DNA, 15 bp, Homo sapiens
atttccaggtttcaa

SEQ ID NO: 47099 - DNA, 15 bp, Homo sapiens
tatttccaggtttca

SEQ ID NO: 47100 - DNA, 15 bp, Homo sapiens
gtatttccaggtttc

SEQ ID NO: 47101 - DNA, 15 bp, Homo sapiens
agtatttccaggttt

SEQ ID NO: 47102 - DNA, 15 bp, Homo sapiens
tagtatttccaggtt

SEQ ID NO: 47103 - DNA, 15 bp, Homo sapiens
atagtatttccaggt

SEQ ID NO: 47104 - DNA, 15 bp, Homo sapiens
aatagtatttccagg

SEQ ID NO: 47105 - DNA, 15 bp, Homo sapiens
taatagtatttccag

SEQ ID NO: 47106 - DNA, 15 bp, Homo sapiens
ttaatagtatttcca

SEQ ID NO: 47107 - DNA, 15 bp, Homo sapiens
attaatagtatttcc

SEQ ID NO: 47108 - DNA, 15 bp, Homo sapiens
aattaatagtatttc

SEQ ID NO: 47109 - DNA, 15 bp, Homo sapiens
aaattaatagtattt

SEQ ID NO: 47110 - DNA, 15 bp, Homo sapiens
caaattaatagtatt

SEQ ID NO: 47111 - DNA, 15 bp, Homo sapiens
gcaaattaatagtat

SEQ ID NO: 47112 - DNA, 15 bp, Homo sapiens
agcaaattaatagta

SEQ ID NO: 47113 - DNA, 15 bp, Homo sapiens
aagcaaattaatagt

SEQ ID NO: 47114 - DNA, 15 bp, Homo sapiens
aaagcaaattaatag

SEQ ID NO: 47115 - DNA, 15 bp, Homo sapiens
aaaagcaaattaata

SEQ ID NO: 47116 - DNA, 15 bp, Homo sapiens
aaaaagcaaattaat

SEQ ID NO: 47117 - DNA, 15 bp, Homo sapiens
taaaaagcaaattaa

SEQ ID NO: 47118 - DNA, 15 bp, Homo sapiens
ttaaaaagcaaatta

SEQ ID NO: 47119 - DNA, 15 bp, Homo sapiens
tttaaaaagcaaatt

SEQ ID NO: 47120 - DNA, 15 bp, Homo sapiens
ctttaaaaagcaaat

SEQ ID NO: 47121 - DNA, 15 bp, Homo sapiens
actttaaaaagcaaa

SEQ ID NO: 47122 - DNA, 15 bp, Homo sapiens
gactttaaaaagcaa

SEQ ID NO: 47123 - DNA, 15 bp, Homo sapiens
ggactttaaaaagca

SEQ ID NO: 47124 - DNA, 15 bp, Homo sapiens
aggactttaaaaagc

SEQ ID NO: 47125 - DNA, 15 bp, Homo sapiens
taggactttaaaaag

SEQ ID NO: 47126 - DNA, 15 bp, Homo sapiens
ttaggactttaaaaa

SEQ ID NO: 47127 - DNA, 15 bp, Homo sapiens
tttaggactttaaaa

SEQ ID NO: 47128 - DNA, 15 bp, Homo sapiens
ttttaggactttaaa

SEQ ID NO: 47129 - DNA, 15 bp, Homo sapiens
attttaggactttaa

SEQ ID NO: 47130 - DNA, 15 bp, Homo sapiens
gattttaggacttta

SEQ ID NO: 47131 - DNA, 15 bp, Homo sapiens
tgattttaggacttt

SEQ ID NO: 47132 - DNA, 15 bp, Homo sapiens
ctgattttaggactt

SEQ ID NO: 47133 - DNA, 15 bp, Homo sapiens
cctgattttaggact

SEQ ID NO: 47134 - DNA, 15 bp, Homo sapiens
tcctgattttaggac

SEQ ID NO: 47135 - DNA, 15 bp, Homo sapiens
atcctgattttagga

SEQ ID NO: 47136 - DNA, 15 bp, Homo sapiens
aatcctgattttagg

SEQ ID NO: 47137 - DNA, 15 bp, Homo sapiens
taatcctgattttag

SEQ ID NO: 47138 - DNA, 15 bp, Homo sapiens
ataatcctgatttta

SEQ ID NO: 47139 - DNA, 15 bp, Homo sapiens
gataatcctgatttt

SEQ ID NO: 47140 - DNA, 15 bp, Homo sapiens
tgataatcctgattt

SEQ ID NO: 47141 - DNA, 15 bp, Homo sapiens
ctgataatcctgatt

SEQ ID NO: 47142 - DNA, 15 bp, Homo sapiens
tctgataatcctgat

SEQ ID NO: 47143 - DNA, 15 bp, Homo sapiens
atctgataatcctga

SEQ ID NO: 47144 - DNA, 15 bp, Homo sapiens
aatctgataatcctg

SEQ ID NO: 47145 - DNA, 15 bp, Homo sapiens
gaatctgataatcct

SEQ ID NO: 47146 - DNA, 15 bp, Homo sapiens
agaatctgataatcc

SEQ ID NO: 47147 - DNA, 15 bp, Homo sapiens
cagaatctgataatc

SEQ ID NO: 47148 - DNA, 15 bp, Homo sapiens
tcagaatctgataat

SEQ ID NO: 47149 - DNA, 15 bp, Homo sapiens
ttcagaatctgataa

SEQ ID NO: 47150 - DNA, 15 bp, Homo sapiens
attcagaatctgata

SEQ ID NO: 47151 - DNA, 15 bp, Homo sapiens
aattcagaatctgat

SEQ ID NO: 47152 - DNA, 15 bp, Homo sapiens
taattcagaatctga

SEQ ID NO: 47153 - DNA, 15 bp, Homo sapiens
ttaattcagaatctg

SEQ ID NO: 47154 - DNA, 15 bp, Homo sapiens
attaattcagaatct

SEQ ID NO: 47155 - DNA, 15 bp, Homo sapiens
cattaattcagaatc

SEQ ID NO: 47156 - DNA, 15 bp, Homo sapiens
ccattaattcagaat

SEQ ID NO: 47157 - DNA, 15 bp, Homo sapiens
tccattaattcagaa

SEQ ID NO: 47158 - DNA, 15 bp, Homo sapiens
ctccattaattcaga

SEQ ID NO: 47159 - DNA, 15 bp, Homo sapiens
actccattaattcag

SEQ ID NO: 47160 - DNA, 15 bp, Homo sapiens
aactccattaattca

SEQ ID NO: 47161 - DNA, 15 bp, Homo sapiens
aaactccattaattc

SEQ ID NO: 47162 - DNA, 15 bp, Homo sapiens
taaactccattaatt

SEQ ID NO: 47163 - DNA, 15 bp, Homo sapiens
ttaaactccattaat

SEQ ID NO: 47164 - DNA, 15 bp, Homo sapiens
tttaaactccattaa

SEQ ID NO: 47165 - DNA, 15 bp, Homo sapiens
atttaaactccatta

SEQ ID NO: 47166 - DNA, 15 bp, Homo sapiens
gatttaaactccatt

SEQ ID NO: 47167 - DNA, 15 bp, Homo sapiens
tgatttaaactccat

SEQ ID NO: 47168 - DNA, 15 bp, Homo sapiens
ttgatttaaactcca

SEQ ID NO: 47169 - DNA, 15 bp, Homo sapiens
tttgatttaaactcc

SEQ ID NO: 47170 - DNA, 15 bp, Homo sapiens
ttttgatttaaactc

SEQ ID NO: 47171 - DNA, 15 bp, Homo sapiens
tttttgatttaaact

SEQ ID NO: 47172 - DNA, 15 bp, Homo sapiens
ctttttgatttaaac

SEQ ID NO: 47173 - DNA, 15 bp, Homo sapiens
tctttttgatttaaa

SEQ ID NO: 47174 - DNA, 15 bp, Homo sapiens
atctttttgatttaa

SEQ ID NO: 47175 - DNA, 15 bp, Homo sapiens
aatctttttgattta

SEQ ID NO: 47176 - DNA, 15 bp, Homo sapiens
taatctttttgattt

SEQ ID NO: 47177 - DNA, 15 bp, Homo sapiens
gtaatctttttgatt

SEQ ID NO: 47178 - DNA, 15 bp, Homo sapiens
tgtaatctttttgat

SEQ ID NO: 47179 - DNA, 15 bp, Homo sapiens
ttgtaatctttttga

SEQ ID NO: 47180 - DNA, 15 bp, Homo sapiens
cttgtaatctttttg

SEQ ID NO: 47181 - DNA, 15 bp, Homo sapiens
ccttgtaatcttttt

SEQ ID NO: 47182 - DNA, 15 bp, Homo sapiens
gccttgtaatctttt

SEQ ID NO: 47183 - DNA, 15 bp, Homo sapiens
tgccttgtaatcttt

SEQ ID NO: 47184 - DNA, 15 bp, Homo sapiens
ctgccttgtaatctt

SEQ ID NO: 47185 - DNA, 15 bp, Homo sapiens
actgccttgtaatct

SEQ ID NO: 47186 - DNA, 15 bp, Homo sapiens
aactgccttgtaatc

SEQ ID NO: 47187 - DNA, 15 bp, Homo sapiens
aaactgccttgtaat

SEQ ID NO: 47188 - DNA, 15 bp, Homo sapiens
aaaactgccttgtaa

SEQ ID NO: 47189 - DNA, 15 bp, Homo sapiens
aaaaactgccttgta

SEQ ID NO: 47190 - DNA, 15 bp, Homo sapiens
gaaaaactgccttgt

SEQ ID NO: 47191 - DNA, 15 bp, Homo sapiens
tgaaaaactgccttg

SEQ ID NO: 47192 - DNA, 15 bp, Homo sapiens
ctgaaaaactgcctt

SEQ ID NO: 47193 - DNA, 15 bp, Homo sapiens
actgaaaaactgcct

SEQ ID NO: 47194 - DNA, 15 bp, Homo sapiens
aactgaaaaactgcc

SEQ ID NO: 47195 - DNA, 15 bp, Homo sapiens
aaactgaaaaactgc

SEQ ID NO: 47196 - DNA, 15 bp, Homo sapiens
aaaactgaaaaactg

SEQ ID NO: 47197 - DNA, 15 bp, Homo sapiens
taaaactgaaaaact

SEQ ID NO: 47198 - DNA, 15 bp, Homo sapiens
ataaaactgaaaaac

SEQ ID NO: 47199 - DNA, 15 bp, Homo sapiens
aataaaactgaaaaa

SEQ ID NO: 47200 - DNA, 15 bp, Homo sapiens
gaataaaactgaaaa

SEQ ID NO: 47201 - DNA, 15 bp, Homo sapiens
agaataaaactgaaa

SEQ ID NO: 47202 - DNA, 15 bp, Homo sapiens
cagaataaaactgaa

SEQ ID NO: 47203 - DNA, 15 bp, Homo sapiens
ccagaataaaactga

SEQ ID NO: 47204 - DNA, 15 bp, Homo sapiens
accagaataaaactg

SEQ ID NO: 47205 - DNA, 15 bp, Homo sapiens
aaccagaataaaact

SEQ ID NO: 47206 - DNA, 15 bp, Homo sapiens
taaccagaataaaac

SEQ ID NO: 47207 - DNA, 15 bp, Homo sapiens
ttaaccagaataaaa

SEQ ID NO: 47208 - DNA, 15 bp, Homo sapiens
attaaccagaataaa

SEQ ID NO: 47209 - DNA, 15 bp, Homo sapiens
aattaaccagaataa

SEQ ID NO: 47210 - DNA, 15 bp, Homo sapiens
aaattaaccagaata

SEQ ID NO: 47211 - DNA, 15 bp, Homo sapiens
aaaattaaccagaat

SEQ ID NO: 47212 - DNA, 15 bp, Homo sapiens
taaaattaaccagaa

SEQ ID NO: 47213 - DNA, 15 bp, Homo sapiens
ataaaattaaccaga

SEQ ID NO: 47214 - DNA, 15 bp, Homo sapiens
gataaaattaaccag

SEQ ID NO: 47215 - DNA, 15 bp, Homo sapiens
tgataaaattaacca

SEQ ID NO: 47216 - DNA, 15 bp, Homo sapiens
gtgataaaattaacc

SEQ ID NO: 47217 - DNA, 15 bp, Homo sapiens
tgtgataaaattaac

SEQ ID NO: 47218 - DNA, 15 bp, Homo sapiens
ctgtgataaaattaa

SEQ ID NO: 47219 - DNA, 15 bp, Homo sapiens
gctgtgataaaatta

SEQ ID NO: 47220 - DNA, 15 bp, Homo sapiens
agctgtgataaaatt

SEQ ID NO: 47221 - DNA, 15 bp, Homo sapiens
aagctgtgataaaat

SEQ ID NO: 47222 - DNA, 15 bp, Homo sapiens
aaagctgtgataaaa

SEQ ID NO: 47223 - DNA, 15 bp, Homo sapiens
caaagctgtgataaa

SEQ ID NO: 47224 - DNA, 15 bp, Homo sapiens
ccaaagctgtgataa

SEQ ID NO: 47225 - DNA, 15 bp, Homo sapiens
tccaaagctgtgata

SEQ ID NO: 47226 - DNA, 15 bp, Homo sapiens
ttccaaagctgtgat

SEQ ID NO: 47227 - DNA, 15 bp, Homo sapiens
attccaaagctgtga

SEQ ID NO: 47228 - DNA, 15 bp, Homo sapiens
gattccaaagctgtg

SEQ ID NO: 47229 - DNA, 15 bp, Homo sapiens
ggattccaaagctgt

SEQ ID NO: 47230 - DNA, 15 bp, Homo sapiens
aggattccaaagctg

SEQ ID NO: 47231 - DNA, 15 bp, Homo sapiens
taggattccaaagct

SEQ ID NO: 47232 - DNA, 15 bp, Homo sapiens
gtaggattccaaagc

SEQ ID NO: 47233 - DNA, 15 bp, Homo sapiens
agtaggattccaaag

SEQ ID NO: 47234 - DNA, 15 bp, Homo sapiens
aagtaggattccaaa

SEQ ID NO: 47235 - DNA, 15 bp, Homo sapiens
aaagtaggattccaa

SEQ ID NO: 47236 - DNA, 15 bp, Homo sapiens
caaagtaggattcca

SEQ ID NO: 47237 - DNA, 15 bp, Homo sapiens
acaaagtaggattcc

SEQ ID NO: 47238 - DNA, 15 bp, Homo sapiens
aacaaagtaggattc

SEQ ID NO: 47239 - DNA, 15 bp, Homo sapiens
aaacaaagtaggatt

SEQ ID NO: 47240 - DNA, 15 bp, Homo sapiens
taaacaaagtaggat

SEQ ID NO: 47241 - DNA, 15 bp, Homo sapiens
ataaacaaagtagga

SEQ ID NO: 47242 - DNA, 15 bp, Homo sapiens
aataaacaaagtagg

SEQ ID NO: 47243 - DNA, 15 bp, Homo sapiens
aaataaacaaagtag

SEQ ID NO: 47244 - DNA, 15 bp, Homo sapiens
caaataaacaaagta

SEQ ID NO: 47245 - DNA, 15 bp, Homo sapiens
gcaaataaacaaagt

SEQ ID NO: 47246 - DNA, 15 bp, Homo sapiens
agcaaataaacaaag

SEQ ID NO: 47247 - DNA, 15 bp, Homo sapiens
aagcaaataaacaaa

SEQ ID NO: 47248 - DNA, 15 bp, Homo sapiens
gaagcaaataaacaa

SEQ ID NO: 47249 - DNA, 15 bp, Homo sapiens
agaagcaaataaaca

SEQ ID NO: 47250 - DNA, 15 bp, Homo sapiens
aagaagcaaataaac

SEQ ID NO: 47251 - DNA, 15 bp, Homo sapiens
caagaagcaaataaa

SEQ ID NO: 47252 - DNA, 15 bp, Homo sapiens
tcaagaagcaaataa

SEQ ID NO: 47253 - DNA, 15 bp, Homo sapiens
ttcaagaagcaaata

SEQ ID NO: 47254 - DNA, 15 bp, Homo sapiens
cttcaagaagcaaat

SEQ ID NO: 47255 - DNA, 15 bp, Homo sapiens
acttcaagaagcaaa

SEQ ID NO: 47256 - DNA, 15 bp, Homo sapiens
aacttcaagaagcaa

SEQ ID NO: 47257 - DNA, 15 bp, Homo sapiens
taacttcaagaagca

SEQ ID NO: 47258 - DNA, 15 bp, Homo sapiens
ctaacttcaagaagc

SEQ ID NO: 47259 - DNA, 15 bp, Homo sapiens
tctaacttcaagaag

SEQ ID NO: 47260 - DNA, 15 bp, Homo sapiens
atctaacttcaagaa

SEQ ID NO: 47261 - DNA, 15 bp, Homo sapiens
aatctaacttcaaga

SEQ ID NO: 47262 - DNA, 15 bp, Homo sapiens
aaatctaacttcaag

SEQ ID NO: 47263 - DNA, 15 bp, Homo sapiens
gaaatctaacttcaa

SEQ ID NO: 47264 - DNA, 15 bp, Homo sapiens
ggaaatctaacttca

SEQ ID NO: 47265 - DNA, 15 bp, Homo sapiens
gggaaatctaacttc

SEQ ID NO: 47266 - DNA, 15 bp, Homo sapiens
tgggaaatctaactt

SEQ ID NO: 47267 - DNA, 15 bp, Homo sapiens
ctgggaaatctaact

SEQ ID NO: 47268 - DNA, 15 bp, Homo sapiens
actgggaaatctaac

SEQ ID NO: 47269 - DNA, 15 bp, Homo sapiens
cactgggaaatctaa

SEQ ID NO: 47270 - DNA, 15 bp, Homo sapiens
tcactgggaaatcta

SEQ ID NO: 47271 - DNA, 15 bp, Homo sapiens
ttcactgggaaatct

SEQ ID NO: 47272 - DNA, 15 bp, Homo sapiens
tttcactgggaaatc

SEQ ID NO: 47273 - DNA, 15 bp, Homo sapiens
atttcactgggaaat

SEQ ID NO: 47274 - DNA, 15 bp, Homo sapiens
aatttcactgggaaa

SEQ ID NO: 47275 - DNA, 15 bp, Homo sapiens
aaatttcactgggaa

SEQ ID NO: 47276 - DNA, 15 bp, Homo sapiens
gaaatttcactggga

SEQ ID NO: 47277 - DNA, 15 bp, Homo sapiens
tgaaatttcactggg

SEQ ID NO: 47278 - DNA, 15 bp, Homo sapiens
ctgaaatttcactgg

SEQ ID NO: 47279 - DNA, 15 bp, Homo sapiens
actgaaatttcactg

SEQ ID NO: 47280 - DNA, 15 bp, Homo sapiens
tactgaaatttcact

SEQ ID NO: 47281 - DNA, 15 bp, Homo sapiens
atactgaaatttcac

SEQ ID NO: 47282 - DNA, 15 bp, Homo sapiens
gatactgaaatttca

SEQ ID NO: 47283 - DNA, 15 bp, Homo sapiens
tgatactgaaatttc

SEQ ID NO: 47284 - DNA, 15 bp, Homo sapiens
gtgatactgaaattt

SEQ ID NO: 47285 - DNA, 15 bp, Homo sapiens
tgtgatactgaaatt

SEQ ID NO: 47286 - DNA, 15 bp, Homo sapiens
atgtgatactgaaat

SEQ ID NO: 47287 - DNA, 15 bp, Homo sapiens
tatgtgatactgaaa

SEQ ID NO: 47288 - DNA, 15 bp, Homo sapiens
ttatgtgatactgaa

SEQ ID NO: 47289 - DNA, 15 bp, Homo sapiens
tttatgtgatactga

SEQ ID NO: 47290 - DNA, 15 bp, Homo sapiens
ctttatgtgatactg

SEQ ID NO: 47291 - DNA, 15 bp, Homo sapiens
actttatgtgatact

SEQ ID NO: 47292 - DNA, 15 bp, Homo sapiens
gactttatgtgatac

SEQ ID NO: 47293 - DNA, 15 bp, Homo sapiens
agactttatgtgata

SEQ ID NO: 47294 - DNA, 15 bp, Homo sapiens
aagactttatgtgat

SEQ ID NO: 47295 - DNA, 15 bp, Homo sapiens
taagactttatgtga

SEQ ID NO: 47296 - DNA, 15 bp, Homo sapiens
ataagactttatgtg

SEQ ID NO: 47297 - DNA, 15 bp, Homo sapiens
cataagactttatgt

SEQ ID NO: 47298 - DNA, 15 bp, Homo sapiens
tcataagactttatg

SEQ ID NO: 47299 - DNA, 15 bp, Homo sapiens
ttcataagactttat

SEQ ID NO: 47300 - DNA, 15 bp, Homo sapiens
tttcataagacttta

SEQ ID NO: 47301 - DNA, 15 bp, Homo sapiens
atttcataagacttt

SEQ ID NO: 47302 - DNA, 15 bp, Homo sapiens
catttcataagactt

SEQ ID NO: 47303 - DNA, 15 bp, Homo sapiens
ccatttcataagact

SEQ ID NO: 47304 - DNA, 15 bp, Homo sapiens
gccatttcataagac

SEQ ID NO: 47305 - DNA, 15 bp, Homo sapiens
agccatttcataaga

SEQ ID NO: 47306 - DNA, 15 bp, Homo sapiens
gagccatttcataag

SEQ ID NO: 47307 - DNA, 15 bp, Homo sapiens
tgagccatttcataa

SEQ ID NO: 47308 - DNA, 15 bp, Homo sapiens
atgagccatttcata

SEQ ID NO: 47309 - DNA, 15 bp, Homo sapiens
aatgagccatttcat

SEQ ID NO: 47310 - DNA, 15 bp, Homo sapiens
caatgagccatttca

SEQ ID NO: 47311 - DNA, 15 bp, Homo sapiens
gcaatgagccatttc

SEQ ID NO: 47312 - DNA, 15 bp, Homo sapiens
tgcaatgagccattt

SEQ ID NO: 47313 - DNA, 15 bp, Homo sapiens
gtgcaatgagccatt

SEQ ID NO: 47314 - DNA, 15 bp, Homo sapiens
agtgcaatgagccat

SEQ ID NO: 47315 - DNA, 15 bp, Homo sapiens
aagtgcaatgagcca

SEQ ID NO: 47316 - DNA, 15 bp, Homo sapiens
aaagtgcaatgagcc

SEQ ID NO: 47317 - DNA, 15 bp, Homo sapiens
caaagtgcaatgagc

SEQ ID NO: 47318 - DNA, 15 bp, Homo sapiens
tcaaagtgcaatgag

SEQ ID NO: 47319 - DNA, 15 bp, Homo sapiens
ttcaaagtgcaatga

SEQ ID NO: 47320 - DNA, 15 bp, Homo sapiens
gttcaaagtgcaatg

SEQ ID NO: 47321 - DNA, 15 bp, Homo sapiens
agttcaaagtgcaat

SEQ ID NO: 47322 - DNA, 15 bp, Homo sapiens
aagttcaaagtgcaa

SEQ ID NO: 47323 - DNA, 15 bp, Homo sapiens
aaagttcaaagtgca

SEQ ID NO: 47324 - DNA, 15 bp, Homo sapiens
caaagttcaaagtgc

SEQ ID NO: 47325 - DNA, 15 bp, Homo sapiens
tcaaagttcaaagtg

SEQ ID NO: 47326 - DNA, 15 bp, Homo sapiens
ctcaaagttcaaagt

SEQ ID NO: 47327 - DNA, 15 bp, Homo sapiens
actcaaagttcaaag

SEQ ID NO: 47328 - DNA, 15 bp, Homo sapiens
gactcaaagttcaaa

SEQ ID NO: 47329 - DNA, 15 bp, Homo sapiens
tgactcaaagttcaa

SEQ ID NO: 47330 - DNA, 15 bp, Homo sapiens
ttgactcaaagttca

SEQ ID NO: 47331 - DNA, 15 bp, Homo sapiens
cttgactcaaagttc

SEQ ID NO: 47332 - DNA, 15 bp, Homo sapiens
ccttgactcaaagtt

SEQ ID NO: 47333 - DNA, 15 bp, Homo sapiens
tccttgactcaaagt

SEQ ID NO: 47334 - DNA, 15 bp, Homo sapiens
ttccttgactcaaag

SEQ ID NO: 47335 - DNA, 15 bp, Homo sapiens
cttccttgactcaaa

SEQ ID NO: 47336 - DNA, 15 bp, Homo sapiens
acttccttgactcaa

SEQ ID NO: 47337 - DNA, 15 bp, Homo sapiens
cacttccttgactca

SEQ ID NO: 47338 - DNA, 15 bp, Homo sapiens
tcacttccttgactc

SEQ ID NO: 47339 - DNA, 15 bp, Homo sapiens
ttcacttccttgact

SEQ ID NO: 47340 - DNA, 15 bp, Homo sapiens
tttcacttccttgac

SEQ ID NO: 47341 - DNA, 15 bp, Homo sapiens
atttcacttccttga

SEQ ID NO: 47342 - DNA, 15 bp, Homo sapiens
aatttcacttccttg

SEQ ID NO: 47343 - DNA, 15 bp, Homo sapiens
aaatttcacttcctt

SEQ ID NO: 47344 - DNA, 15 bp, Homo sapiens
taaatttcacttcct

SEQ ID NO: 47345 - DNA, 15 bp, Homo sapiens
ataaatttcacttcc

SEQ ID NO: 47346 - DNA, 15 bp, Homo sapiens
aataaatttcacttc

SEQ ID NO: 47347 - DNA, 15 bp, Homo sapiens
caataaatttcactt

SEQ ID NO: 47348 - DNA, 15 bp, Homo sapiens
tcaataaatttcact

SEQ ID NO: 47349 - DNA, 15 bp, Homo sapiens
atcaataaatttcac

SEQ ID NO: 47350 - DNA, 15 bp, Homo sapiens
tatcaataaatttca

SEQ ID NO: 47351 - DNA, 15 bp, Homo sapiens
ctatcaataaatttc

SEQ ID NO: 47352 - DNA, 15 bp, Homo sapiens
tctatcaataaattt

SEQ ID NO: 47353 - DNA, 15 bp, Homo sapiens
atctatcaataaatt

SEQ ID NO: 47354 - DNA, 15 bp, Homo sapiens
aatctatcaataaat

SEQ ID NO: 47355 - DNA, 15 bp, Homo sapiens
caatctatcaataaa

SEQ ID NO: 47356 - DNA, 15 bp, Homo sapiens
acaatctatcaataa

SEQ ID NO: 47357 - DNA, 15 bp, Homo sapiens
aacaatctatcaata

SEQ ID NO: 47358 - DNA, 15 bp, Homo sapiens
caacaatctatcaat

SEQ ID NO: 47359 - DNA, 15 bp, Homo sapiens
ccaacaatctatcaa

SEQ ID NO: 47360 - DNA, 15 bp, Homo sapiens
accaacaatctatca

SEQ ID NO: 47361 - DNA, 15 bp, Homo sapiens
caccaacaatctatc

SEQ ID NO: 47362 - DNA, 15 bp, Homo sapiens
acaccaacaatctat

SEQ ID NO: 47363 - DNA, 15 bp, Homo sapiens
tacaccaacaatcta

SEQ ID NO: 47364 - DNA, 15 bp, Homo sapiens
ttacaccaacaatct

SEQ ID NO: 47365 - DNA, 15 bp, Homo sapiens
attacaccaacaatc

SEQ ID NO: 47366 - DNA, 15 bp, Homo sapiens
tattacaccaacaat

SEQ ID NO: 47367 - DNA, 15 bp, Homo sapiens
atattacaccaacaa

SEQ ID NO: 47368 - DNA, 15 bp, Homo sapiens
aatattacaccaaca

SEQ ID NO: 47369 - DNA, 15 bp, Homo sapiens
aaatattacaccaac

SEQ ID NO: 47370 - DNA, 15 bp, Homo sapiens
taaatattacaccaa

SEQ ID NO: 47371 - DNA, 15 bp, Homo sapiens
ataaatattacacca

SEQ ID NO: 47372 - DNA, 15 bp, Homo sapiens
gataaatattacacc

SEQ ID NO: 47373 - DNA, 15 bp, Homo sapiens
ggataaatattacac

SEQ ID NO: 47374 - DNA, 15 bp, Homo sapiens
aggataaatattaca

SEQ ID NO: 47375 - DNA, 15 bp, Homo sapiens
caggataaatattac

SEQ ID NO: 47376 - DNA, 15 bp, Homo sapiens
acaggataaatatta

SEQ ID NO: 47377 - DNA, 15 bp, Homo sapiens
aacaggataaatatt

SEQ ID NO: 47378 - DNA, 15 bp, Homo sapiens
aaacaggataaatat

SEQ ID NO: 47379 - DNA, 15 bp, Homo sapiens
caaacaggataaata

SEQ ID NO: 47380 - DNA, 15 bp, Homo sapiens
acaaacaggataaat

SEQ ID NO: 47381 - DNA, 15 bp, Homo sapiens
cacaaacaggataaa

SEQ ID NO: 47382 - DNA, 15 bp, Homo sapiens
ccacaaacaggataa

SEQ ID NO: 47383 - DNA, 15 bp, Homo sapiens
accacaaacaggata

SEQ ID NO: 47384 - DNA, 15 bp, Homo sapiens
taccacaaacaggat

SEQ ID NO: 47385 - DNA, 15 bp, Homo sapiens
ctaccacaaacagga

SEQ ID NO: 47386 - DNA, 15 bp, Homo sapiens
gctaccacaaacagg

SEQ ID NO: 47387 - DNA, 15 bp, Homo sapiens
agctaccacaaacag

SEQ ID NO: 47388 - DNA, 15 bp, Homo sapiens
aagctaccacaaaca

SEQ ID NO: 47389 - DNA, 15 bp, Homo sapiens
aaagctaccacaaac

SEQ ID NO: 47390 - DNA, 15 bp, Homo sapiens
aaaagctaccacaaa

SEQ ID NO: 47391 - DNA, 15 bp, Homo sapiens
aaaaagctaccacaa

SEQ ID NO: 47392 - DNA, 15 bp, Homo sapiens
aaaaaagctaccaca

SEQ ID NO: 47393 - DNA, 15 bp, Homo sapiens
caaaaaagctaccac

SEQ ID NO: 47394 - DNA, 15 bp, Homo sapiens
tcaaaaaagctacca

SEQ ID NO: 47395 - DNA, 15 bp, Homo sapiens
ttcaaaaaagctacc

SEQ ID NO: 47396 - DNA, 15 bp, Homo sapiens
attcaaaaaagctac

SEQ ID NO: 47397 - DNA, 15 bp, Homo sapiens
tattcaaaaaagcta

SEQ ID NO: 47398 - DNA, 15 bp, Homo sapiens
ttattcaaaaaagct

SEQ ID NO: 47399 - DNA, 15 bp, Homo sapiens
attattcaaaaaagc

SEQ ID NO: 47400 - DNA, 15 bp, Homo sapiens
tattattcaaaaaag

SEQ ID NO: 47401 - DNA, 15 bp, Homo sapiens
ttattattcaaaaaa

SEQ ID NO: 47402 - DNA, 15 bp, Homo sapiens
cttattattcaaaaa

SEQ ID NO: 47403 - DNA, 15 bp, Homo sapiens
acttattattcaaaa

SEQ ID NO: 47404 - DNA, 15 bp, Homo sapiens
cacttattattcaaa

SEQ ID NO: 47405 - DNA, 15 bp, Homo sapiens
acacttattattcaa

SEQ ID NO: 47406 - DNA, 15 bp, Homo sapiens
gacacttattattca

SEQ ID NO: 47407 - DNA, 15 bp, Homo sapiens
agacacttattattc

SEQ ID NO: 47408 - DNA, 15 bp, Homo sapiens
aagacacttattatt

SEQ ID NO: 47409 - DNA, 15 bp, Homo sapiens
taagacacttattat

SEQ ID NO: 47410 - DNA, 15 bp, Homo sapiens
ctaagacacttatta

SEQ ID NO: 47411 - DNA, 15 bp, Homo sapiens
tctaagacacttatt

SEQ ID NO: 47412 - DNA, 15 bp, Homo sapiens
ttctaagacacttat

SEQ ID NO: 47413 - DNA, 15 bp, Homo sapiens
cttctaagacactta

SEQ ID NO: 47414 - DNA, 15 bp, Homo sapiens
tcttctaagacactt

SEQ ID NO: 47415 - DNA, 15 bp, Homo sapiens
gtcttctaagacact

SEQ ID NO: 47416 - DNA, 15 bp, Homo sapiens
ggtcttctaagacac

SEQ ID NO: 47417 - DNA, 15 bp, Homo sapiens
tggtcttctaagaca

SEQ ID NO: 47418 - DNA, 15 bp, Homo sapiens
atggtcttctaagac

SEQ ID NO: 47419 - DNA, 15 bp, Homo sapiens
catggtcttctaaga

SEQ ID NO: 47420 - DNA, 15 bp, Homo sapiens
acatggtcttctaag

SEQ ID NO: 47421 - DNA, 15 bp, Homo sapiens
aacatggtcttctaa

SEQ ID NO: 47422 - DNA, 15 bp, Homo sapiens
caacatggtcttcta

SEQ ID NO: 47423 - DNA, 15 bp, Homo sapiens
ccaacatggtcttct

SEQ ID NO: 47424 - DNA, 15 bp, Homo sapiens
tccaacatggtcttc

SEQ ID NO: 47425 - DNA, 15 bp, Homo sapiens
ctccaacatggtctt

SEQ ID NO: 47426 - DNA, 15 bp, Homo sapiens
actccaacatggtct

SEQ ID NO: 47427 - DNA, 15 bp, Homo sapiens
tactccaacatggtc

SEQ ID NO: 47428 - DNA, 15 bp, Homo sapiens
ctactccaacatggt

SEQ ID NO: 47429 - DNA, 15 bp, Homo sapiens
gctactccaacatgg

SEQ ID NO: 47430 - DNA, 15 bp, Homo sapiens
ggctactccaacatg

SEQ ID NO: 47431 - DNA, 15 bp, Homo sapiens
aggctactccaacat

SEQ ID NO: 47432 - DNA, 15 bp, Homo sapiens
caggctactccaaca

SEQ ID NO: 47433 - DNA, 15 bp, Homo sapiens
gcaggctactccaac

SEQ ID NO: 47434 - DNA, 15 bp, Homo sapiens
tgcaggctactccaa

SEQ ID NO: 47435 - DNA, 15 bp, Homo sapiens
atgcaggctactcca

SEQ ID NO: 47436 - DNA, 15 bp, Homo sapiens
catgcaggctactcc

SEQ ID NO: 47437 - DNA, 15 bp, Homo sapiens
gcatgcaggctactc

SEQ ID NO: 47438 - DNA, 15 bp, Homo sapiens
agcatgcaggctact

SEQ ID NO: 47439 - DNA, 15 bp, Homo sapiens
aagcatgcaggctac

SEQ ID NO: 47440 - DNA, 15 bp, Homo sapiens
aaagcatgcaggcta

SEQ ID NO: 47441 - DNA, 15 bp, Homo sapiens
aaaagcatgcaggct

SEQ ID NO: 47442 - DNA, 15 bp, Homo sapiens
taaaagcatgcaggc

SEQ ID NO: 47443 - DNA, 15 bp, Homo sapiens
ataaaagcatgcagg

SEQ ID NO: 47444 - DNA, 15 bp, Homo sapiens
gataaaagcatgcag

SEQ ID NO: 47445 - DNA, 15 bp, Homo sapiens
tgataaaagcatgca

SEQ ID NO: 47446 - DNA, 15 bp, Homo sapiens
ttgataaaagcatgc

SEQ ID NO: 47447 - DNA, 15 bp, Homo sapiens
tttgataaaagcatg

SEQ ID NO: 47448 - DNA, 15 bp, Homo sapiens
gtttgataaaagcat

SEQ ID NO: 47449 - DNA, 15 bp, Homo sapiens
tgtttgataaaagca

SEQ ID NO: 47450 - DNA, 15 bp, Homo sapiens
atgtttgataaaagc

SEQ ID NO: 47451 - DNA, 15 bp, Homo sapiens
tatgtttgataaaag

SEQ ID NO: 47452 - DNA, 15 bp, Homo sapiens
atatgtttgataaaa

SEQ ID NO: 47453 - DNA, 15 bp, Homo sapiens
aatatgtttgataaa

SEQ ID NO: 47454 - DNA, 15 bp, Homo sapiens
taatatgtttgataa

SEQ ID NO: 47455 - DNA, 15 bp, Homo sapiens
ttaatatgtttgata

SEQ ID NO: 47456 - DNA, 15 bp, Homo sapiens
attaatatgtttgat

SEQ ID NO: 47457 - DNA, 15 bp, Homo sapiens
aattaatatgtttga

SEQ ID NO: 47458 - DNA, 15 bp, Homo sapiens
taattaatatgtttg

SEQ ID NO: 47459 - DNA, 15 bp, Homo sapiens
ataattaatatgttt

SEQ ID NO: 47460 - DNA, 15 bp, Homo sapiens
cataattaatatgtt

SEQ ID NO: 47461 - DNA, 15 bp, Homo sapiens
acataattaatatgt

SEQ ID NO: 47462 - DNA, 15 bp, Homo sapiens
cacataattaatatg

SEQ ID NO: 47463 - DNA, 15 bp, Homo sapiens
tcacataattaatat

SEQ ID NO: 47464 - DNA, 15 bp, Homo sapiens
atcacataattaata

SEQ ID NO: 47465 - DNA, 15 bp, Homo sapiens
catcacataattaat

SEQ ID NO: 47466 - DNA, 15 bp, Homo sapiens
ccatcacataattaa

SEQ ID NO: 47467 - DNA, 15 bp, Homo sapiens
gccatcacataatta

SEQ ID NO: 47468 - DNA, 15 bp, Homo sapiens
agccatcacataatt

SEQ ID NO: 47469 - DNA, 15 bp, Homo sapiens
cagccatcacataat

SEQ ID NO: 47470 - DNA, 15 bp, Homo sapiens
tcagccatcacataa

SEQ ID NO: 47471 - DNA, 15 bp, Homo sapiens
atcagccatcacata

SEQ ID NO: 47472 - DNA, 15 bp, Homo sapiens
tatcagccatcacat

SEQ ID NO: 47473 - DNA, 15 bp, Homo sapiens
gtatcagccatcaca

SEQ ID NO: 47474 - DNA, 15 bp, Homo sapiens
agtatcagccatcac

SEQ ID NO: 47475 - DNA, 15 bp, Homo sapiens
cagtatcagccatca

SEQ ID NO: 47476 - DNA, 15 bp, Homo sapiens
gcagtatcagccatc

SEQ ID NO: 47477 - DNA, 15 bp, Homo sapiens
agcagtatcagccat

SEQ ID NO: 47478 - DNA, 15 bp, Homo sapiens
aagcagtatcagcca

SEQ ID NO: 47479 - DNA, 15 bp, Homo sapiens
aaagcagtatcagcc

SEQ ID NO: 47480 - DNA, 15 bp, Homo sapiens
taaagcagtatcagc

SEQ ID NO: 47481 - DNA, 15 bp, Homo sapiens
ctaaagcagtatcag

SEQ ID NO: 47482 - DNA, 15 bp, Homo sapiens
tctaaagcagtatca

SEQ ID NO: 47483 - DNA, 15 bp, Homo sapiens
atctaaagcagtatc

SEQ ID NO: 47484 - DNA, 15 bp, Homo sapiens
tatctaaagcagtat

SEQ ID NO: 47485 - DNA, 15 bp, Homo sapiens
atatctaaagcagta

SEQ ID NO: 47486 - DNA, 15 bp, Homo sapiens
aatatctaaagcagt

SEQ ID NO: 47487 - DNA, 15 bp, Homo sapiens
taatatctaaagcag

SEQ ID NO: 47488 - DNA, 15 bp, Homo sapiens
gtaatatctaaagca

SEQ ID NO: 47489 - DNA, 15 bp, Homo sapiens
tgtaatatctaaagc

SEQ ID NO: 47490 - DNA, 15 bp, Homo sapiens
atgtaatatctaaag

SEQ ID NO: 47491 - DNA, 15 bp, Homo sapiens
tatgtaatatctaaa

SEQ ID NO: 47492 - DNA, 15 bp, Homo sapiens
ctatgtaatatctaa

SEQ ID NO: 47493 - DNA, 15 bp, Homo sapiens
tctatgtaatatcta

SEQ ID NO: 47494 - DNA, 15 bp, Homo sapiens
ttctatgtaatatct

SEQ ID NO: 47495 - DNA, 15 bp, Homo sapiens
tttctatgtaatatc

SEQ ID NO: 47496 - DNA, 15 bp, Homo sapiens
atttctatgtaatat

SEQ ID NO: 47497 - DNA, 15 bp, Homo sapiens
tatttctatgtaata

SEQ ID NO: 47498 - DNA, 15 bp, Homo sapiens
ctatttctatgtaat

SEQ ID NO: 47499 - DNA, 15 bp, Homo sapiens
actatttctatgtaa

SEQ ID NO: 47500 - DNA, 15 bp, Homo sapiens
tactatttctatgta

SEQ ID NO: 47501 - DNA, 15 bp, Homo sapiens
ctactatttctatgt

SEQ ID NO: 47502 - DNA, 15 bp, Homo sapiens
actactatttctatg

SEQ ID NO: 47503 - DNA, 15 bp, Homo sapiens
tactactatttctat

SEQ ID NO: 47504 - DNA, 15 bp, Homo sapiens
ctactactatttcta

SEQ ID NO: 47505 - DNA, 15 bp, Homo sapiens
cctactactatttct

SEQ ID NO: 47506 - DNA, 15 bp, Homo sapiens
acctactactatttc

SEQ ID NO: 47507 - DNA, 15 bp, Homo sapiens
cacctactactattt

SEQ ID NO: 47508 - DNA, 15 bp, Homo sapiens
acacctactactatt

SEQ ID NO: 47509 - DNA, 15 bp, Homo sapiens
aacacctactactat

SEQ ID NO: 47510 - DNA, 15 bp, Homo sapiens
aaacacctactacta

SEQ ID NO: 47511 - DNA, 15 bp, Homo sapiens
taaacacctactact

SEQ ID NO: 47512 - DNA, 15 bp, Homo sapiens
gtaaacacctactac

SEQ ID NO: 47513 - DNA, 15 bp, Homo sapiens
agtaaacacctacta

SEQ ID NO: 47514 - DNA, 15 bp, Homo sapiens
tagtaaacacctact

SEQ ID NO: 47515 - DNA, 15 bp, Homo sapiens
ttagtaaacacctac

SEQ ID NO: 47516 - DNA, 15 bp, Homo sapiens
tttagtaaacaccta

SEQ ID NO: 47517 - DNA, 15 bp, Homo sapiens
gtttagtaaacacct

SEQ ID NO: 47518 - DNA, 15 bp, Homo sapiens
agtttagtaaacacc

SEQ ID NO: 47519 - DNA, 15 bp, Homo sapiens
cagtttagtaaacac

SEQ ID NO: 47520 - DNA, 15 bp, Homo sapiens
ccagtttagtaaaca

SEQ ID NO: 47521 - DNA, 15 bp, Homo sapiens
tccagtttagtaaac

SEQ ID NO: 47522 - DNA, 15 bp, Homo sapiens
ttccagtttagtaaa

SEQ ID NO: 47523 - DNA, 15 bp, Homo sapiens
tttccagtttagtaa

SEQ ID NO: 47524 - DNA, 15 bp, Homo sapiens
atttccagtttagta

SEQ ID NO: 47525 - DNA, 15 bp, Homo sapiens
aatttccagtttagt

SEQ ID NO: 47526 - DNA, 15 bp, Homo sapiens
aaatttccagtttag

SEQ ID NO: 47527 - DNA, 15 bp, Homo sapiens
gaaatttccagttta

SEQ ID NO: 47528 - DNA, 15 bp, Homo sapiens
tgaaatttccagttt

SEQ ID NO: 47529 - DNA, 15 bp, Homo sapiens
atgaaatttccagtt

SEQ ID NO: 47530 - DNA, 15 bp, Homo sapiens
aatgaaatttccagt

SEQ ID NO: 47531 - DNA, 15 bp, Homo sapiens
aaatgaaatttccag

SEQ ID NO: 47532 - DNA, 15 bp, Homo sapiens
taaatgaaatttcca

SEQ ID NO: 47533 - DNA, 15 bp, Homo sapiens
ttaaatgaaatttcc

SEQ ID NO: 47534 - DNA, 15 bp, Homo sapiens
gttaaatgaaatttc

SEQ ID NO: 47535 - DNA, 15 bp, Homo sapiens
agttaaatgaaattt

SEQ ID NO: 47536 - DNA, 15 bp, Homo sapiens
aagttaaatgaaatt

SEQ ID NO: 47537 - DNA, 15 bp, Homo sapiens
caagttaaatgaaat

SEQ ID NO: 47538 - DNA, 15 bp, Homo sapiens
ccaagttaaatgaaa

SEQ ID NO: 47539 - DNA, 15 bp, Homo sapiens
accaagttaaatgaa

SEQ ID NO: 47540 - DNA, 15 bp, Homo sapiens
aaccaagttaaatga

SEQ ID NO: 47541 - DNA, 15 bp, Homo sapiens
aaaccaagttaaatg

SEQ ID NO: 47542 - DNA, 15 bp, Homo sapiens
taaaccaagttaaat

SEQ ID NO: 47543 - DNA, 15 bp, Homo sapiens
ctaaaccaagttaaa

SEQ ID NO: 47544 - DNA, 15 bp, Homo sapiens
gctaaaccaagttaa

SEQ ID NO: 47545 - DNA, 15 bp, Homo sapiens
agctaaaccaagtta

SEQ ID NO: 47546 - DNA, 15 bp, Homo sapiens
aagctaaaccaagtt

SEQ ID NO: 47547 - DNA, 15 bp, Homo sapiens
aaagctaaaccaagt

SEQ ID NO: 47548 - DNA, 15 bp, Homo sapiens
caaagctaaaccaag

SEQ ID NO: 47549 - DNA, 15 bp, Homo sapiens
gcaaagctaaaccaa

SEQ ID NO: 47550 - DNA, 15 bp, Homo sapiens
ggcaaagctaaacca

SEQ ID NO: 47551 - DNA, 15 bp, Homo sapiens
aggcaaagctaaacc

SEQ ID NO: 47552 - DNA, 15 bp, Homo sapiens
aaggcaaagctaaac

SEQ ID NO: 47553 - DNA, 15 bp, Homo sapiens
caaggcaaagctaaa

SEQ ID NO: 47554 - DNA, 15 bp, Homo sapiens
acaaggcaaagctaa

SEQ ID NO: 47555 - DNA, 15 bp, Homo sapiens
aacaaggcaaagcta

SEQ ID NO: 47556 - DNA, 15 bp, Homo sapiens
gaacaaggcaaagct

SEQ ID NO: 47557 - DNA, 15 bp, Homo sapiens
agaacaaggcaaagc

SEQ ID NO: 47558 - DNA, 15 bp, Homo sapiens
gagaacaaggcaaag

SEQ ID NO: 47559 - DNA, 15 bp, Homo sapiens
tgagaacaaggcaaa

SEQ ID NO: 47560 - DNA, 15 bp, Homo sapiens
ctgagaacaaggcaa

SEQ ID NO: 47561 - DNA, 15 bp, Homo sapiens
actgagaacaaggca

SEQ ID NO: 47562 - DNA, 15 bp, Homo sapiens
gactgagaacaaggc

SEQ ID NO: 47563 - DNA, 15 bp, Homo sapiens
tgactgagaacaagg

SEQ ID NO: 47564 - DNA, 15 bp, Homo sapiens
gtgactgagaacaag

SEQ ID NO: 47565 - DNA, 15 bp, Homo sapiens
tgtgactgagaacaa

SEQ ID NO: 47566 - DNA, 15 bp, Homo sapiens
atgtgactgagaaca

SEQ ID NO: 47567 - DNA, 15 bp, Homo sapiens
aatgtgactgagaac

SEQ ID NO: 47568 - DNA, 15 bp, Homo sapiens
caatgtgactgagaa

SEQ ID NO: 47569 - DNA, 15 bp, Homo sapiens
tcaatgtgactgaga

SEQ ID NO: 47570 - DNA, 15 bp, Homo sapiens
atcaatgtgactgag

SEQ ID NO: 47571 - DNA, 15 bp, Homo sapiens
tatcaatgtgactga

SEQ ID NO: 47572 - DNA, 15 bp, Homo sapiens
ttatcaatgtgactg

SEQ ID NO: 47573 - DNA, 15 bp, Homo sapiens
tttatcaatgtgact

SEQ ID NO: 47574 - DNA, 15 bp, Homo sapiens
ttttatcaatgtgac

SEQ ID NO: 47575 - DNA, 15 bp, Homo sapiens
tttttatcaatgtga

SEQ ID NO: 47576 - DNA, 15 bp, Homo sapiens
atttttatcaatgtg

SEQ ID NO: 47577 - DNA, 15 bp, Homo sapiens
catttttatcaatgt

SEQ ID NO: 47578 - DNA, 15 bp, Homo sapiens
acatttttatcaatg

SEQ ID NO: 47579 - DNA, 15 bp, Homo sapiens
tacatttttatcaat

SEQ ID NO: 47580 - DNA, 15 bp, Homo sapiens
ttacatttttatcaa

SEQ ID NO: 47581 - DNA, 15 bp, Homo sapiens
cttacatttttatca

SEQ ID NO: 47582 - DNA, 15 bp, Homo sapiens
tcttacatttttatc

SEQ ID NO: 47583 - DNA, 15 bp, Homo sapiens
gtcttacatttttat

SEQ ID NO: 47584 - DNA, 15 bp, Homo sapiens
agtcttacattttta

SEQ ID NO: 47585 - DNA, 15 bp, Homo sapiens
aagtcttacattttt

SEQ ID NO: 47586 - DNA, 15 bp, Homo sapiens
aaagtcttacatttt

SEQ ID NO: 47587 - DNA, 15 bp, Homo sapiens
aaaagtcttacattt

SEQ ID NO: 47588 - DNA, 15 bp, Homo sapiens
caaaagtcttacatt

SEQ ID NO: 47589 - DNA, 15 bp, Homo sapiens
acaaaagtcttacat

SEQ ID NO: 47590 - DNA, 15 bp, Homo sapiens
aacaaaagtcttaca

SEQ ID NO: 47591 - DNA, 15 bp, Homo sapiens
aaacaaaagtcttac

SEQ ID NO: 47592 - DNA, 15 bp, Homo sapiens
taaacaaaagtctta

SEQ ID NO: 47593 - DNA, 15 bp, Homo sapiens
ataaacaaaagtctt

SEQ ID NO: 47594 - DNA, 15 bp, Homo sapiens
gataaacaaaagtct

SEQ ID NO: 47595 - DNA, 15 bp, Homo sapiens
agataaacaaaagtc

SEQ ID NO: 47596 - DNA, 15 bp, Homo sapiens
aagataaacaaaagt

SEQ ID NO: 47597 - DNA, 15 bp, Homo sapiens
aaagataaacaaaag

SEQ ID NO: 47598 - DNA, 15 bp, Homo sapiens
aaaagataaacaaaa

SEQ ID NO: 47599 - DNA, 15 bp, Homo sapiens
taaaagataaacaaa

SEQ ID NO: 47600 - DNA, 15 bp, Homo sapiens
ctaaaagataaacaa

SEQ ID NO: 47601 - DNA, 15 bp, Homo sapiens
tctaaaagataaaca

SEQ ID NO: 47602 - DNA, 15 bp, Homo sapiens
ttctaaaagataaac

SEQ ID NO: 47603 - DNA, 15 bp, Homo sapiens
attctaaaagataaa

SEQ ID NO: 47604 - DNA, 15 bp, Homo sapiens
tattctaaaagataa

SEQ ID NO: 47605 - DNA, 15 bp, Homo sapiens
ttattctaaaagata

SEQ ID NO: 47606 - DNA, 15 bp, Homo sapiens
attattctaaaagat

SEQ ID NO: 47607 - DNA, 15 bp, Homo sapiens
cattattctaaaaga

SEQ ID NO: 47608 - DNA, 15 bp, Homo sapiens
tcattattctaaaag

SEQ ID NO: 47609 - DNA, 15 bp, Homo sapiens
gtcattattctaaaa

SEQ ID NO: 47610 - DNA, 15 bp, Homo sapiens
tgtcattattctaaa

SEQ ID NO: 47611 - DNA, 15 bp, Homo sapiens
gtgtcattattctaa

SEQ ID NO: 47612 - DNA, 15 bp, Homo sapiens
ggtgtcattattcta

SEQ ID NO: 47613 - DNA, 15 bp, Homo sapiens
aggtgtcattattct

SEQ ID NO: 47614 - DNA, 15 bp, Homo sapiens
aaggtgtcattattc

SEQ ID NO: 47615 - DNA, 15 bp, Homo sapiens
aaaggtgtcattatt

SEQ ID NO: 47616 - DNA, 15 bp, Homo sapiens
aaaaggtgtcattat

SEQ ID NO: 47617 - DNA, 15 bp, Homo sapiens
caaaaggtgtcatta

SEQ ID NO: 47618 - DNA, 15 bp, Homo sapiens
ccaaaaggtgtcatt

SEQ ID NO: 47619 - DNA, 15 bp, Homo sapiens
accaaaaggtgtcat

SEQ ID NO: 47620 - DNA, 15 bp, Homo sapiens
caccaaaaggtgtca

SEQ ID NO: 47621 - DNA, 15 bp, Homo sapiens
gcaccaaaaggtgtc

SEQ ID NO: 47622 - DNA, 15 bp, Homo sapiens
agcaccaaaaggtgt

SEQ ID NO: 47623 - DNA, 15 bp, Homo sapiens
cagcaccaaaaggtg

SEQ ID NO: 47624 - DNA, 15 bp, Homo sapiens
tcagcaccaaaaggt

SEQ ID NO: 47625 - DNA, 15 bp, Homo sapiens
ctcagcaccaaaagg

SEQ ID NO: 47626 - DNA, 15 bp, Homo sapiens
tctcagcaccaaaag

SEQ ID NO: 47627 - DNA, 15 bp, Homo sapiens
ttctcagcaccaaaa

SEQ ID NO: 47628 - DNA, 15 bp, Homo sapiens
attctcagcaccaaa

SEQ ID NO: 47629 - DNA, 15 bp, Homo sapiens
aattctcagcaccaa

SEQ ID NO: 47630 - DNA, 15 bp, Homo sapiens
aaattctcagcacca

SEQ ID NO: 47631 - DNA, 15 bp, Homo sapiens
aaaattctcagcacc

SEQ ID NO: 47632 - DNA, 15 bp, Homo sapiens
aaaaattctcagcac

SEQ ID NO: 47633 - DNA, 15 bp, Homo sapiens
aaaaaattctcagca

SEQ ID NO: 47634 - DNA, 15 bp, Homo sapiens
caaaaaattctcagc

SEQ ID NO: 47635 - DNA, 15 bp, Homo sapiens
acaaaaaattctcag

SEQ ID NO: 47636 - DNA, 15 bp, Homo sapiens
aacaaaaaattctca

SEQ ID NO: 47637 - DNA, 15 bp, Homo sapiens
aaacaaaaaattctc

SEQ ID NO: 47638 - DNA, 15 bp, Homo sapiens
aaaacaaaaaattct

SEQ ID NO: 47639 - DNA, 15 bp, Homo sapiens
taaaacaaaaaattc

SEQ ID NO: 47640 - DNA, 15 bp, Homo sapiens
ataaaacaaaaaatt

SEQ ID NO: 47641 - DNA, 15 bp, Homo sapiens
tataaaacaaaaaat

SEQ ID NO: 47642 - DNA, 15 bp, Homo sapiens
atataaaacaaaaaa

SEQ ID NO: 47643 - DNA, 15 bp, Homo sapiens
tatataaaacaaaaa

SEQ ID NO: 47644 - DNA, 15 bp, Homo sapiens
atatataaaacaaaa

SEQ ID NO: 47645 - DNA, 15 bp, Homo sapiens
tatatataaaacaaa

SEQ ID NO: 47646 - DNA, 15 bp, Homo sapiens
atatatataaaacaa

SEQ ID NO: 47647 - DNA, 15 bp, Homo sapiens
tatatatatatataa

SEQ ID NO: 47648 - DNA, 15 bp, Homo sapiens
gtatatatatatata

SEQ ID NO: 47649 - DNA, 15 bp, Homo sapiens
cgtatatatatatat

SEQ ID NO: 47650 - DNA, 15 bp, Homo sapiens
acgtatatatatata

SEQ ID NO: 47651 - DNA, 15 bp, Homo sapiens
tacgtatatatatat

SEQ ID NO: 47652 - DNA, 15 bp, Homo sapiens
ttacgtatatatata

SEQ ID NO: 47653 - DNA, 15 bp, Homo sapiens
attacgtatatatat

SEQ ID NO: 47654 - DNA, 15 bp, Homo sapiens
tattacgtatatata

SEQ ID NO: 47655 - DNA, 15 bp, Homo sapiens
atattacgtatatat

SEQ ID NO: 47656 - DNA, 15 bp, Homo sapiens
tatattacgtatata

SEQ ID NO: 47657 - DNA, 15 bp, Homo sapiens
ttatattacgtatat

SEQ ID NO: 47658 - DNA, 15 bp, Homo sapiens
tttatattacgtata

SEQ ID NO: 47659 - DNA, 15 bp, Homo sapiens
atttatattacgtat

SEQ ID NO: 47660 - DNA, 15 bp, Homo sapiens
tatttatattacgta

SEQ ID NO: 47661 - DNA, 15 bp, Homo sapiens
gtatttatattacgt

SEQ ID NO: 47662 - DNA, 15 bp, Homo sapiens
tgtatttatattacg

SEQ ID NO: 47663 - DNA, 15 bp, Homo sapiens
ttgtatttatattac

SEQ ID NO: 47664 - DNA, 15 bp, Homo sapiens
tttgtatttatatta

SEQ ID NO: 47665 - DNA, 15 bp, Homo sapiens
ttttgtatttatatt

SEQ ID NO: 47666 - DNA, 15 bp, Homo sapiens
attttgtatttatat

SEQ ID NO: 47667 - DNA, 15 bp, Homo sapiens
tattttgtatttata

SEQ ID NO: 47668 - DNA, 15 bp, Homo sapiens
atattttgtatttat

SEQ ID NO: 47669 - DNA, 15 bp, Homo sapiens
tatattttgtattta

SEQ ID NO: 47670 - DNA, 15 bp, Homo sapiens
atatattttgtattt

SEQ ID NO: 47671 - DNA, 15 bp, Homo sapiens
aatatattttgtatt

SEQ ID NO: 47672 - DNA, 15 bp, Homo sapiens
aaatatattttgtat

SEQ ID NO: 47673 - DNA, 15 bp, Homo sapiens
taaatatattttgta

SEQ ID NO: 47674 - DNA, 15 bp, Homo sapiens
ttaaatatattttgt

SEQ ID NO: 47675 - DNA, 15 bp, Homo sapiens
tttaaatatattttg

SEQ ID NO: 47676 - DNA, 15 bp, Homo sapiens
atttaaatatatttt

SEQ ID NO: 47677 - DNA, 15 bp, Homo sapiens
tatttaaatatattt

SEQ ID NO: 47678 - DNA, 15 bp, Homo sapiens
atatttaaatatatt

SEQ ID NO: 47679 - DNA, 15 bp, Homo sapiens
catatttaaatatat

SEQ ID NO: 47680 - DNA, 15 bp, Homo sapiens
acatatttaaatata

SEQ ID NO: 47681 - DNA, 15 bp, Homo sapiens
tacatatttaaatat

SEQ ID NO: 47682 - DNA, 15 bp, Homo sapiens
atacatatttaaata

SEQ ID NO: 47683 - DNA, 15 bp, Homo sapiens
tatacatatttaaat

SEQ ID NO: 47684 - DNA, 15 bp, Homo sapiens
ttatacatatttaaa

SEQ ID NO: 47685 - DNA, 15 bp, Homo sapiens
attatacatatttaa

SEQ ID NO: 47686 - DNA, 15 bp, Homo sapiens
tattatacatattta

SEQ ID NO: 47687 - DNA, 15 bp, Homo sapiens
atattatacatattt

SEQ ID NO: 47688 - DNA, 15 bp, Homo sapiens
aatattatacatatt

SEQ ID NO: 47689 - DNA, 15 bp, Homo sapiens
aaatattatacatat

SEQ ID NO: 47690 - DNA, 15 bp, Homo sapiens
gaaatattatacata

SEQ ID NO: 47691 - DNA, 15 bp, Homo sapiens
agaaatattatacat

SEQ ID NO: 47692 - DNA, 15 bp, Homo sapiens
gagaaatattataca

SEQ ID NO: 47693 - DNA, 15 bp, Homo sapiens
tgagaaatattatac

SEQ ID NO: 47694 - DNA, 15 bp, Homo sapiens
atgagaaatattata

SEQ ID NO: 47695 - DNA, 15 bp, Homo sapiens
tatgagaaatattat

SEQ ID NO: 47696 - DNA, 15 bp, Homo sapiens
gtatgagaaatatta

SEQ ID NO: 47697 - DNA, 15 bp, Homo sapiens
tgtatgagaaatatt

SEQ ID NO: 47698 - DNA, 15 bp, Homo sapiens
gtgtatgagaaatat

SEQ ID NO: 47699 - DNA, 15 bp, Homo sapiens
agtgtatgagaaata

SEQ ID NO: 47700 - DNA, 15 bp, Homo sapiens
aagtgtatgagaaat

SEQ ID NO: 47701 - DNA, 15 bp, Homo sapiens
aaagtgtatgagaaa

SEQ ID NO: 47702 - DNA, 15 bp, Homo sapiens
taaagtgtatgagaa

SEQ ID NO: 47703 - DNA, 15 bp, Homo sapiens
ataaagtgtatgaga

SEQ ID NO: 47704 - DNA, 15 bp, Homo sapiens
cataaagtgtatgag

SEQ ID NO: 47705 - DNA, 15 bp, Homo sapiens
acataaagtgtatga

SEQ ID NO: 47706 - DNA, 15 bp, Homo sapiens
tacataaagtgtatg

SEQ ID NO: 47707 - DNA, 15 bp, Homo sapiens
ttacataaagtgtat

SEQ ID NO: 47708 - DNA, 15 bp, Homo sapiens
gttacataaagtgta

SEQ ID NO: 47709 - DNA, 15 bp, Homo sapiens
agttacataaagtgt

SEQ ID NO: 47710 - DNA, 15 bp, Homo sapiens
aagttacataaagtg

SEQ ID NO: 47711 - DNA, 15 bp, Homo sapiens
aaagttacataaagt

SEQ ID NO: 47712 - DNA, 15 bp, Homo sapiens
caaagttacataaag

SEQ ID NO: 47713 - DNA, 15 bp, Homo sapiens
acaaagttacataaa

SEQ ID NO: 47714 - DNA, 15 bp, Homo sapiens
cacaaagttacataa

SEQ ID NO: 47715 - DNA, 15 bp, Homo sapiens
acacaaagttacata

SEQ ID NO: 47716 - DNA, 15 bp, Homo sapiens
aacacaaagttacat

SEQ ID NO: 47717 - DNA, 15 bp, Homo sapiens
gaacacaaagttaca

SEQ ID NO: 47718 - DNA, 15 bp, Homo sapiens
ggaacacaaagttac

SEQ ID NO: 47719 - DNA, 15 bp, Homo sapiens
aggaacacaaagtta

SEQ ID NO: 47720 - DNA, 15 bp, Homo sapiens
caggaacacaaagtt

SEQ ID NO: 47721 - DNA, 15 bp, Homo sapiens
acaggaacacaaagt

SEQ ID NO: 47722 - DNA, 15 bp, Homo sapiens
aacaggaacacaaag

SEQ ID NO: 47723 - DNA, 15 bp, Homo sapiens
aaacaggaacacaaa

SEQ ID NO: 47724 - DNA, 15 bp, Homo sapiens
gaaacaggaacacaa

SEQ ID NO: 47725 - DNA, 15 bp, Homo sapiens
agaaacaggaacaca

SEQ ID NO: 47726 - DNA, 15 bp, Homo sapiens
agagaaacaggaaca

SEQ ID NO: 47727 - DNA, 15 bp, Homo sapiens
tagagaaacaggaac

SEQ ID NO: 47728 - DNA, 15 bp, Homo sapiens
atagagaaacaggaa

SEQ ID NO: 47729 - DNA, 15 bp, Homo sapiens
aatagagaaacagga

SEQ ID NO: 47730 - DNA, 15 bp, Homo sapiens
taatagagaaacagg

SEQ ID NO: 47731 - DNA, 15 bp, Homo sapiens
ataatagagaaacag

SEQ ID NO: 47732 - DNA, 15 bp, Homo sapiens
gataatagagaaaca

SEQ ID NO: 47733 - DNA, 15 bp, Homo sapiens
agataatagagaaac

SEQ ID NO: 47734 - DNA, 15 bp, Homo sapiens
aagataatagagaaa

SEQ ID NO: 47735 - DNA, 15 bp, Homo sapiens
caagataatagagaa

SEQ ID NO: 47736 - DNA, 15 bp, Homo sapiens
ccaagataatagaga

SEQ ID NO: 47737 - DNA, 15 bp, Homo sapiens
gccaagataatagag

SEQ ID NO: 47738 - DNA, 15 bp, Homo sapiens
tgccaagataataga

SEQ ID NO: 47739 - DNA, 15 bp, Homo sapiens
atgccaagataatag

SEQ ID NO: 47740 - DNA, 15 bp, Homo sapiens
catgccaagataata

SEQ ID NO: 47741 - DNA, 15 bp, Homo sapiens
acatgccaagataat

SEQ ID NO: 47742 - DNA, 15 bp, Homo sapiens
aacatgccaagataa

SEQ ID NO: 47743 - DNA, 15 bp, Homo sapiens
aaacatgccaagata

SEQ ID NO: 47744 - DNA, 15 bp, Homo sapiens
aaaacatgccaagat

SEQ ID NO: 47745 - DNA, 15 bp, Homo sapiens
gaaaacatgccaaga

SEQ ID NO: 47746 - DNA, 15 bp, Homo sapiens
agaaaacatgccaag

SEQ ID NO: 47747 - DNA, 15 bp, Homo sapiens
aagaaaacatgccaa

SEQ ID NO: 47748 - DNA, 15 bp, Homo sapiens
gaagaaaacatgcca

SEQ ID NO: 47749 - DNA, 15 bp, Homo sapiens
tgaagaaaacatgcc

SEQ ID NO: 47750 - DNA, 15 bp, Homo sapiens
ttgaagaaaacatgc

SEQ ID NO: 47751 - DNA, 15 bp, Homo sapiens
tttgaagaaaacatg

SEQ ID NO: 47752 - DNA, 15 bp, Homo sapiens
atttgaagaaaacat

SEQ ID NO: 47753 - DNA, 15 bp, Homo sapiens
catttgaagaaaaca

SEQ ID NO: 47754 - DNA, 15 bp, Homo sapiens
ccatttgaagaaaac

SEQ ID NO: 47755 - DNA, 15 bp, Homo sapiens
gccatttgaagaaaa

SEQ ID NO: 47756 - DNA, 15 bp, Homo sapiens
tgccatttgaagaaa

SEQ ID NO: 47757 - DNA, 15 bp, Homo sapiens
gtgccatttgaagaa

SEQ ID NO: 47758 - DNA, 15 bp, Homo sapiens
agtgccatttgaaga

SEQ ID NO: 47759 - DNA, 15 bp, Homo sapiens
aagtgccatttgaag

SEQ ID NO: 47760 - DNA, 15 bp, Homo sapiens
gaagtgccatttgaa

SEQ ID NO: 47761 - DNA, 15 bp, Homo sapiens
agaagtgccatttga

SEQ ID NO: 47762 - DNA, 15 bp, Homo sapiens
aagaagtgccatttg

SEQ ID NO: 47763 - DNA, 15 bp, Homo sapiens
taagaagtgccattt

SEQ ID NO: 47764 - DNA, 15 bp, Homo sapiens
ttaagaagtgccatt

SEQ ID NO: 47765 - DNA, 15 bp, Homo sapiens
gttaagaagtgccat

SEQ ID NO: 47766 - DNA, 15 bp, Homo sapiens
ggttaagaagtgcca

SEQ ID NO: 47767 - DNA, 15 bp, Homo sapiens
aggttaagaagtgcc

SEQ ID NO: 47768 - DNA, 15 bp, Homo sapiens
gaggttaagaagtgc

SEQ ID NO: 47769 - DNA, 15 bp, Homo sapiens
ggaggttaagaagtg

SEQ ID NO: 47770 - DNA, 15 bp, Homo sapiens
aggaggttaagaagt

SEQ ID NO: 47771 - DNA, 15 bp, Homo sapiens
taggaggttaagaag

SEQ ID NO: 47772 - DNA, 15 bp, Homo sapiens
ttaggaggttaagaa

SEQ ID NO: 47773 - DNA, 15 bp, Homo sapiens
cttaggaggttaaga

SEQ ID NO: 47774 - DNA, 15 bp, Homo sapiens
ccttaggaggttaag

SEQ ID NO: 47775 - DNA, 15 bp, Homo sapiens
accttaggaggttaa

SEQ ID NO: 47776 - DNA, 15 bp, Homo sapiens
aaccttaggaggtta

SEQ ID NO: 47777 - DNA, 15 bp, Homo sapiens
taaccttaggaggtt

SEQ ID NO: 47778 - DNA, 15 bp, Homo sapiens
ttaaccttaggaggt

SEQ ID NO: 47779 - DNA, 15 bp, Homo sapiens
attaaccttaggagg

SEQ ID NO: 47780 - DNA, 15 bp, Homo sapiens
tattaaccttaggag

SEQ ID NO: 47781 - DNA, 15 bp, Homo sapiens
ttattaaccttagga

SEQ ID NO: 47782 - DNA, 15 bp, Homo sapiens
tttattaaccttagg

SEQ ID NO: 47783 - DNA, 15 bp, Homo sapiens
atttattaaccttag

SEQ ID NO: 47784 - DNA, 15 bp, Homo sapiens
aatttattaacctta

SEQ ID NO: 47785 - DNA, 15 bp, Homo sapiens
aaatttattaacctt

SEQ ID NO: 47786 - DNA, 15 bp, Homo sapiens
gaaatttattaacct

SEQ ID NO: 47787 - DNA, 15 bp, Homo sapiens
agaaatttattaacc

SEQ ID NO: 47788 - DNA, 15 bp, Homo sapiens
aagaaatttattaac

SEQ ID NO: 47789 - DNA, 15 bp, Homo sapiens
aaagaaatttattaa

SEQ ID NO: 47790 - DNA, 15 bp, Homo sapiens
caaagaaatttatta

SEQ ID NO: 47791 - DNA, 15 bp, Homo sapiens
acaaagaaatttatt

SEQ ID NO: 47792 - DNA, 15 bp, Homo sapiens
tacaaagaaatttat

SEQ ID NO: 47793 - DNA, 15 bp, Homo sapiens
ttacaaagaaattta

SEQ ID NO: 47794 - DNA, 15 bp, Homo sapiens
attacaaagaaattt

SEQ ID NO: 47795 - DNA, 15 bp, Homo sapiens
cattacaaagaaatt

SEQ ID NO: 47796 - DNA, 15 bp, Homo sapiens
ccattacaaagaaat

SEQ ID NO: 47797 - DNA, 15 bp, Homo sapiens
tccattacaaagaaa

SEQ ID NO: 47798 - DNA, 15 bp, Homo sapiens
gtccattacaaagaa

SEQ ID NO: 47799 - DNA, 15 bp, Homo sapiens
agtccattacaaaga

SEQ ID NO: 47800 - DNA, 15 bp, Homo sapiens
aagtccattacaaag

SEQ ID NO: 47801 - DNA, 15 bp, Homo sapiens
aaagtccattacaaa

SEQ ID NO: 47802 - DNA, 15 bp, Homo sapiens
aaaagtccattacaa

SEQ ID NO: 47803 - DNA, 15 bp, Homo sapiens
caaaagtccattaca

SEQ ID NO: 47804 - DNA, 15 bp, Homo sapiens
acaaaagtccattac

SEQ ID NO: 47805 - DNA, 15 bp, Homo sapiens
aacaaaagtccatta

SEQ ID NO: 47806 - DNA, 15 bp, Homo sapiens
aaacaaaagtccatt

SEQ ID NO: 47807 - DNA, 15 bp, Homo sapiens
aaaacaaaagtccat

SEQ ID NO: 47808 - DNA, 15 bp, Homo sapiens
gaaaacaaaagtcca

SEQ ID NO: 47809 - DNA, 15 bp, Homo sapiens
agaaaacaaaagtcc

SEQ ID NO: 47810 - DNA, 15 bp, Homo sapiens
tagaaaacaaaagtc

SEQ ID NO: 47811 - DNA, 15 bp, Homo sapiens
ttagaaaacaaaagt

SEQ ID NO: 47812 - DNA, 15 bp, Homo sapiens
attagaaaacaaaag

SEQ ID NO: 47813 - DNA, 15 bp, Homo sapiens
aattagaaaacaaaa

SEQ ID NO: 47814 - DNA, 15 bp, Homo sapiens
gaattagaaaacaaa

SEQ ID NO: 47815 - DNA, 15 bp, Homo sapiens
ggaattagaaaacaa

SEQ ID NO: 47816 - DNA, 15 bp, Homo sapiens
aggaattagaaaaca

SEQ ID NO: 47817 - DNA, 15 bp, Homo sapiens
gaggaattagaaaac

SEQ ID NO: 47818 - DNA, 15 bp, Homo sapiens
tgaggaattagaaaa

SEQ ID NO: 47819 - DNA, 15 bp, Homo sapiens
ctgaggaattagaaa

SEQ ID NO: 47820 - DNA, 15 bp, Homo sapiens
gctgaggaattagaa

SEQ ID NO: 47821 - DNA, 15 bp, Homo sapiens
cgctgaggaattaga

SEQ ID NO: 47822 - DNA, 15 bp, Homo sapiens
acgctgaggaattag

SEQ ID NO: 47823 - DNA, 15 bp, Homo sapiens
tacgctgaggaatta

SEQ ID NO: 47824 - DNA, 15 bp, Homo sapiens
atacgctgaggaatt

SEQ ID NO: 47825 - DNA, 15 bp, Homo sapiens
catacgctgaggaat

SEQ ID NO: 47826 - DNA, 15 bp, Homo sapiens
tcatacgctgaggaa

SEQ ID NO: 47827 - DNA, 15 bp, Homo sapiens
gtcatacgctgagga

SEQ ID NO: 47828 - DNA, 15 bp, Homo sapiens
tgtcatacgctgagg

SEQ ID NO: 47829 - DNA, 15 bp, Homo sapiens
ttgtcatacgctgag

SEQ ID NO: 47830 - DNA, 15 bp, Homo sapiens
tttgtcatacgctga

SEQ ID NO: 47831 - DNA, 15 bp, Homo sapiens
atttgtcatacgctg

SEQ ID NO: 47832 - DNA, 15 bp, Homo sapiens
catttgtcatacgct

SEQ ID NO: 47833 - DNA, 15 bp, Homo sapiens
tcatttgtcatacgc

SEQ ID NO: 47834 - DNA, 15 bp, Homo sapiens
ttcatttgtcatacg

SEQ ID NO: 47835 - DNA, 15 bp, Homo sapiens
attcatttgtcatac

SEQ ID NO: 47836 - DNA, 15 bp, Homo sapiens
aattcatttgtcata

SEQ ID NO: 47837 - DNA, 15 bp, Homo sapiens
taattcatttgtcat

SEQ ID NO: 47838 - DNA, 15 bp, Homo sapiens
ataattcatttgtca

SEQ ID NO: 47839 - DNA, 15 bp, Homo sapiens
tataattcatttgtc

SEQ ID NO: 47840 - DNA, 15 bp, Homo sapiens
gtataattcatttgt

SEQ ID NO: 47841 - DNA, 15 bp, Homo sapiens
agtataattcatttg

SEQ ID NO: 47842 - DNA, 15 bp, Homo sapiens
aagtataattcattt

SEQ ID NO: 47843 - DNA, 15 bp, Homo sapiens
aaagtataattcatt

SEQ ID NO: 47844 - DNA, 15 bp, Homo sapiens
caaagtataattcat

SEQ ID NO: 47845 - DNA, 15 bp, Homo sapiens
acaaagtataattca

SEQ ID NO: 47846 - DNA, 15 bp, Homo sapiens
gacaaagtataattc

SEQ ID NO: 47847 - DNA, 15 bp, Homo sapiens
tgacaaagtataatt

SEQ ID NO: 47848 - DNA, 15 bp, Homo sapiens
ttgacaaagtataat

SEQ ID NO: 47849 - DNA, 15 bp, Homo sapiens
tttgacaaagtataa

SEQ ID NO: 47850 - DNA, 15 bp, Homo sapiens
atttgacaaagtata

SEQ ID NO: 47851 - DNA, 15 bp, Homo sapiens
aatttgacaaagtat

SEQ ID NO: 47852 - DNA, 15 bp, Homo sapiens
taatttgacaaagta

SEQ ID NO: 47853 - DNA, 15 bp, Homo sapiens
ataatttgacaaagt

SEQ ID NO: 47854 - DNA, 15 bp, Homo sapiens
aataatttgacaaag

SEQ ID NO: 47855 - DNA, 15 bp, Homo sapiens
aaataatttgacaaa

SEQ ID NO: 47856 - DNA, 15 bp, Homo sapiens
taaataatttgacaa

SEQ ID NO: 47857 - DNA, 15 bp, Homo sapiens
ctaaataatttgaca

SEQ ID NO: 47858 - DNA, 15 bp, Homo sapiens
cctaaataatttgac

SEQ ID NO: 47859 - DNA, 15 bp, Homo sapiens
acctaaataatttga

SEQ ID NO: 47860 - DNA, 15 bp, Homo sapiens
tacctaaataatttg

SEQ ID NO: 47861 - DNA, 15 bp, Homo sapiens
ttacctaaataattt

SEQ ID NO: 47862 - DNA, 15 bp, Homo sapiens
gttacctaaataatt

SEQ ID NO: 47863 - DNA, 15 bp, Homo sapiens
agttacctaaataat

SEQ ID NO: 47864 - DNA, 15 bp, Homo sapiens
aagttacctaaataa

SEQ ID NO: 47865 - DNA, 15 bp, Homo sapiens
aaagttacctaaata

SEQ ID NO: 47866 - DNA, 15 bp, Homo sapiens
gaaagttacctaaat

SEQ ID NO: 47867 - DNA, 15 bp, Homo sapiens
tgaaagttacctaaa

SEQ ID NO: 47868 - DNA, 15 bp, Homo sapiens
ctgaaagttacctaa

SEQ ID NO: 47869 - DNA, 15 bp, Homo sapiens
actgaaagttaccta

SEQ ID NO: 47870 - DNA, 15 bp, Homo sapiens
aactgaaagttacct

SEQ ID NO: 47871 - DNA, 15 bp, Homo sapiens
aaactgaaagttacc

SEQ ID NO: 47872 - DNA, 15 bp, Homo sapiens
aaaactgaaagttac

SEQ ID NO: 47873 - DNA, 15 bp, Homo sapiens
aaaaactgaaagtta

SEQ ID NO: 47874 - DNA, 15 bp, Homo sapiens
caaaaactgaaagtt

SEQ ID NO: 47875 - DNA, 15 bp, Homo sapiens
tcaaaaactgaaagt

SEQ ID NO: 47876 - DNA, 15 bp, Homo sapiens
ttcaaaaactgaaag

SEQ ID NO: 47877 - DNA, 15 bp, Homo sapiens
cttcaaaaactgaaa

SEQ ID NO: 47878 - DNA, 15 bp, Homo sapiens
acttcaaaaactgaa

SEQ ID NO: 47879 - DNA, 15 bp, Homo sapiens
gacttcaaaaactga

SEQ ID NO: 47880 - DNA, 15 bp, Homo sapiens
ggacttcaaaaactg

SEQ ID NO: 47881 - DNA, 15 bp, Homo sapiens
aggacttcaaaaact

SEQ ID NO: 47882 - DNA, 15 bp, Homo sapiens
caggacttcaaaaac

SEQ ID NO: 47883 - DNA, 15 bp, Homo sapiens
ccaggacttcaaaaa

SEQ ID NO: 47884 - DNA, 15 bp, Homo sapiens
cccaggacttcaaaa

SEQ ID NO: 47885 - DNA, 15 bp, Homo sapiens
tcccaggacttcaaa

SEQ ID NO: 47886 - DNA, 15 bp, Homo sapiens
atcccaggacttcaa

SEQ ID NO: 47887 - DNA, 15 bp, Homo sapiens
gatcccaggacttca

SEQ ID NO: 47888 - DNA, 15 bp, Homo sapiens
tgatcccaggacttc

SEQ ID NO: 47889 - DNA, 15 bp, Homo sapiens
atgatcccaggactt

SEQ ID NO: 47890 - DNA, 15 bp, Homo sapiens
tatgatcccaggact

SEQ ID NO: 47891 - DNA, 15 bp, Homo sapiens
ttatgatcccaggac

SEQ ID NO: 47892 - DNA, 15 bp, Homo sapiens
gttatgatcccagga

SEQ ID NO: 47893 - DNA, 15 bp, Homo sapiens
tgttatgatcccagg

SEQ ID NO: 47894 - DNA, 15 bp, Homo sapiens
atgttatgatcccag

SEQ ID NO: 47895 - DNA, 15 bp, Homo sapiens
aatgttatgatccca

SEQ ID NO: 47896 - DNA, 15 bp, Homo sapiens
gaatgttatgatccc

SEQ ID NO: 47897 - DNA, 15 bp, Homo sapiens
tgaatgttatgatcc

SEQ ID NO: 47898 - DNA, 15 bp, Homo sapiens
atgaatgttatgatc

SEQ ID NO: 47899 - DNA, 15 bp, Homo sapiens
gatgaatgttatgat

SEQ ID NO: 47900 - DNA, 15 bp, Homo sapiens
tgatgaatgttatga

SEQ ID NO: 47901 - DNA, 15 bp, Homo sapiens
ctgatgaatgttatg

SEQ ID NO: 47902 - DNA, 15 bp, Homo sapiens
actgatgaatgttat

SEQ ID NO: 47903 - DNA, 15 bp, Homo sapiens
gactgatgaatgtta

SEQ ID NO: 47904 - DNA, 15 bp, Homo sapiens
agactgatgaatgtt

SEQ ID NO: 47905 - DNA, 15 bp, Homo sapiens
aagactgatgaatgt

SEQ ID NO: 47906 - DNA, 15 bp, Homo sapiens
aaagactgatgaatg

SEQ ID NO: 47907 - DNA, 15 bp, Homo sapiens
taaagactgatgaat

SEQ ID NO: 47908 - DNA, 15 bp, Homo sapiens
ttaaagactgatgaa

SEQ ID NO: 47909 - DNA, 15 bp, Homo sapiens
attaaagactgatga

SEQ ID NO: 47910 - DNA, 15 bp, Homo sapiens
aattaaagactgatg

SEQ ID NO: 47911 - DNA, 15 bp, Homo sapiens
aaattaaagactgat

SEQ ID NO: 47912 - DNA, 15 bp, Homo sapiens
gaaattaaagactga

SEQ ID NO: 47913 - DNA, 15 bp, Homo sapiens
agaaattaaagactg

SEQ ID NO: 47914 - DNA, 15 bp, Homo sapiens
cagaaattaaagact

SEQ ID NO: 47915 - DNA, 15 bp, Homo sapiens
acagaaattaaagac

SEQ ID NO: 47916 - DNA, 15 bp, Homo sapiens
gacagaaattaaaga

SEQ ID NO: 47917 - DNA, 15 bp, Homo sapiens
tgacagaaattaaag

SEQ ID NO: 47918 - DNA, 15 bp, Homo sapiens
atgacagaaattaaa

SEQ ID NO: 47919 - DNA, 15 bp, Homo sapiens
aatgacagaaattaa

SEQ ID NO: 47920 - DNA, 15 bp, Homo sapiens
taatgacagaaatta

SEQ ID NO: 47921 - DNA, 15 bp, Homo sapiens
ttaatgacagaaatt

SEQ ID NO: 47922 - DNA, 15 bp, Homo sapiens
cttaatgacagaaat

SEQ ID NO: 47923 - DNA, 15 bp, Homo sapiens
ccttaatgacagaaa

SEQ ID NO: 47924 - DNA, 15 bp, Homo sapiens
accttaatgacagaa

SEQ ID NO: 47925 - DNA, 15 bp, Homo sapiens
gaccttaatgacaga

SEQ ID NO: 47926 - DNA, 15 bp, Homo sapiens
tgaccttaatgacag

SEQ ID NO: 47927 - DNA, 15 bp, Homo sapiens
atgaccttaatgaca

SEQ ID NO: 47928 - DNA, 15 bp, Homo sapiens
aatgaccttaatgac

SEQ ID NO: 47929 - DNA, 15 bp, Homo sapiens
taatgaccttaatga

SEQ ID NO: 47930 - DNA, 15 bp, Homo sapiens
ctaatgaccttaatg

SEQ ID NO: 47931 - DNA, 15 bp, Homo sapiens
gctaatgaccttaat

SEQ ID NO: 47932 - DNA, 15 bp, Homo sapiens
agctaatgaccttaa

SEQ ID NO: 47933 - DNA, 15 bp, Homo sapiens
tagctaatgacctta

SEQ ID NO: 47934 - DNA, 15 bp, Homo sapiens
atagctaatgacctt

SEQ ID NO: 47935 - DNA, 15 bp, Homo sapiens
tatagctaatgacct

SEQ ID NO: 47936 - DNA, 15 bp, Homo sapiens
ttatagctaatgacc

SEQ ID NO: 47937 - DNA, 15 bp, Homo sapiens
tttatagctaatgac

SEQ ID NO: 47938 - DNA, 15 bp, Homo sapiens
atttatagctaatga

SEQ ID NO: 47939 - DNA, 15 bp, Homo sapiens
catttatagctaatg

SEQ ID NO: 47940 - DNA, 15 bp, Homo sapiens
tcatttatagctaat

SEQ ID NO: 47941 - DNA, 15 bp, Homo sapiens
ttcatttatagctaa

SEQ ID NO: 47942 - DNA, 15 bp, Homo sapiens
attcatttatagcta

SEQ ID NO: 47943 - DNA, 15 bp, Homo sapiens
aattcatttatagct

SEQ ID NO: 47944 - DNA, 15 bp, Homo sapiens
aaattcatttatagc

SEQ ID NO: 47945 - DNA, 15 bp, Homo sapiens
taaattcatttatag

SEQ ID NO: 47946 - DNA, 15 bp, Homo sapiens
ataaattcatttata

SEQ ID NO: 47947 - DNA, 15 bp, Homo sapiens
cataaattcatttat

SEQ ID NO: 47948 - DNA, 15 bp, Homo sapiens
tcataaattcattta

SEQ ID NO: 47949 - DNA, 15 bp, Homo sapiens
ctcataaattcattt

SEQ ID NO: 47950 - DNA, 15 bp, Homo sapiens
actcataaattcatt

SEQ ID NO: 47951 - DNA, 15 bp, Homo sapiens
tactcataaattcat

SEQ ID NO: 47952 - DNA, 15 bp, Homo sapiens
ctactcataaattca

SEQ ID NO: 47953 - DNA, 15 bp, Homo sapiens
tctactcataaattc

SEQ ID NO: 47954 - DNA, 15 bp, Homo sapiens
atctactcataaatt

SEQ ID NO: 47955 - DNA, 15 bp, Homo sapiens
aatctactcataaat

SEQ ID NO: 47956 - DNA, 15 bp, Homo sapiens
aaatctactcataaa

SEQ ID NO: 47957 - DNA, 15 bp, Homo sapiens
taaatctactcataa

SEQ ID NO: 47958 - DNA, 15 bp, Homo sapiens
ttaaatctactcata

SEQ ID NO: 47959 - DNA, 15 bp, Homo sapiens
tttaaatctactcat

SEQ ID NO: 47960 - DNA, 15 bp, Homo sapiens
ttttaaatctactca

SEQ ID NO: 47961 - DNA, 15 bp, Homo sapiens
tttttaaatctactc

SEQ ID NO: 47962 - DNA, 15 bp, Homo sapiens
ttttttaaatctact

SEQ ID NO: 47963 - DNA, 15 bp, Homo sapiens
attttttaaatctac

SEQ ID NO: 47964 - DNA, 15 bp, Homo sapiens
tattttttaaatcta

SEQ ID NO: 47965 - DNA, 15 bp, Homo sapiens
ttattttttaaatct

SEQ ID NO: 47966 - DNA, 15 bp, Homo sapiens
tttattttttaaatc

SEQ ID NO: 47967 - DNA, 15 bp, Homo sapiens
ttttattttttaaat

SEQ ID NO: 47968 - DNA, 15 bp, Homo sapiens
gttttattttttaaa

SEQ ID NO: 47969 - DNA, 15 bp, Homo sapiens
tgttttattttttaa

SEQ ID NO: 47970 - DNA, 15 bp, Homo sapiens
atgttttatttttta

SEQ ID NO: 47971 - DNA, 15 bp, Homo sapiens
tatgttttatttttt

SEQ ID NO: 47972 - DNA, 15 bp, Homo sapiens
gtatgttttattttt

SEQ ID NO: 47973 - DNA, 15 bp, Homo sapiens
tgtatgttttatttt

SEQ ID NO: 47974 - DNA, 15 bp, Homo sapiens
ttgtatgttttattt

SEQ ID NO: 47975 - DNA, 15 bp, Homo sapiens
attgtatgttttatt

SEQ ID NO: 47976 - DNA, 15 bp, Homo sapiens
gattgtatgttttat

SEQ ID NO: 47977 - DNA, 15 bp, Homo sapiens
ggattgtatgtttta

SEQ ID NO: 47978 - DNA, 15 bp, Homo sapiens
aggattgtatgtttt

SEQ ID NO: 47979 - DNA, 15 bp, Homo sapiens
aaggattgtatgttt

SEQ ID NO: 47980 - DNA, 15 bp, Homo sapiens
gaaggattgtatgtt

SEQ ID NO: 47981 - DNA, 15 bp, Homo sapiens
ggaaggattgtatgt

SEQ ID NO: 47982 - DNA, 15 bp, Homo sapiens
gggaaggattgtatg

SEQ ID NO: 47983 - DNA, 15 bp, Homo sapiens
agggaaggattgtat

SEQ ID NO: 47984 - DNA, 15 bp, Homo sapiens
aagggaaggattgta

SEQ ID NO: 47985 - DNA, 15 bp, Homo sapiens
taagggaaggattgt

SEQ ID NO: 47986 - DNA, 15 bp, Homo sapiens
ttaagggaaggattg

SEQ ID NO: 47987 - DNA, 15 bp, Homo sapiens
gttaagggaaggatt

SEQ ID NO: 47988 - DNA, 15 bp, Homo sapiens
tgttaagggaaggat

SEQ ID NO: 47989 - DNA, 15 bp, Homo sapiens
gtgttaagggaagga

SEQ ID NO: 47990 - DNA, 15 bp, Homo sapiens
tgtgttaagggaagg

SEQ ID NO: 47991 - DNA, 15 bp, Homo sapiens
gtgtgttaagggaag

SEQ ID NO: 47992 - DNA, 15 bp, Homo sapiens
agtgtgttaagggaa

SEQ ID NO: 47993 - DNA, 15 bp, Homo sapiens
aagtgtgttaaggga

SEQ ID NO: 47994 - DNA, 15 bp, Homo sapiens
aaagtgtgttaaggg

SEQ ID NO: 47995 - DNA, 15 bp, Homo sapiens
gaaagtgtgttaagg

SEQ ID NO: 47996 - DNA, 15 bp, Homo sapiens
ggaaagtgtgttaag

SEQ ID NO: 47997 - DNA, 15 bp, Homo sapiens
gggaaagtgtgttaa

SEQ ID NO: 47998 - DNA, 15 bp, Homo sapiens
tgggaaagtgtgtta

SEQ ID NO: 47999 - DNA, 15 bp, Homo sapiens
gtgggaaagtgtgtt

SEQ ID NO: 48000 - DNA, 15 bp, Homo sapiens
ggtgggaaagtgtgt

SEQ ID NO: 48001 - DNA, 15 bp, Homo sapiens
tggtgggaaagtgtg

SEQ ID NO: 48002 - DNA, 15 bp, Homo sapiens
atggtgggaaagtgt

SEQ ID NO: 48003 - DNA, 15 bp, Homo sapiens
aatggtgggaaagtg

SEQ ID NO: 48004 - DNA, 15 bp, Homo sapiens
aaatggtgggaaagt

SEQ ID NO: 48005 - DNA, 15 bp, Homo sapiens
caaatggtgggaaag

SEQ ID NO: 48006 - DNA, 15 bp, Homo sapiens
ccaaatggtgggaaa

SEQ ID NO: 48007 - DNA, 15 bp, Homo sapiens
accaaatggtgggaa

SEQ ID NO: 48008 - DNA, 15 bp, Homo sapiens
aaccaaatggtggga

SEQ ID NO: 48009 - DNA, 15 bp, Homo sapiens
gaaccaaatggtggg

SEQ ID NO: 48010 - DNA, 15 bp, Homo sapiens
tgaaccaaatggtgg

SEQ ID NO: 48011 - DNA, 15 bp, Homo sapiens
ttgaaccaaatggtg

SEQ ID NO: 48012 - DNA, 15 bp, Homo sapiens
gttgaaccaaatggt

SEQ ID NO: 48013 - DNA, 15 bp, Homo sapiens
agttgaaccaaatgg

SEQ ID NO: 48014 - DNA, 15 bp, Homo sapiens
cagttgaaccaaatg

SEQ ID NO: 48015 - DNA, 15 bp, Homo sapiens
gcagttgaaccaaat

SEQ ID NO: 48016 - DNA, 15 bp, Homo sapiens
agcagttgaaccaaa

SEQ ID NO: 48017 - DNA, 15 bp, Homo sapiens
tagcagttgaaccaa

SEQ ID NO: 48018 - DNA, 15 bp, Homo sapiens
ctagcagttgaacca

SEQ ID NO: 48019 - DNA, 15 bp, Homo sapiens
actagcagttgaacc

SEQ ID NO: 48020 - DNA, 15 bp, Homo sapiens
cactagcagttgaac

SEQ ID NO: 48021 - DNA, 15 bp, Homo sapiens
acactagcagttgaa

SEQ ID NO: 48022 - DNA, 15 bp, Homo sapiens
tacactagcagttga

SEQ ID NO: 48023 - DNA, 15 bp, Homo sapiens
ttacactagcagttg

SEQ ID NO: 48024 - DNA, 15 bp, Homo sapiens
tttacactagcagtt

SEQ ID NO: 48025 - DNA, 15 bp, Homo sapiens
ttttacactagcagt

SEQ ID NO: 48026 - DNA, 15 bp, Homo sapiens
cttttacactagcag

SEQ ID NO: 48027 - DNA, 15 bp, Homo sapiens
gcttttacactagca

SEQ ID NO: 48028 - DNA, 15 bp, Homo sapiens
tgcttttacactagc

SEQ ID NO: 48029 - DNA, 15 bp, Homo sapiens
atgcttttacactag

SEQ ID NO: 48030 - DNA, 15 bp, Homo sapiens
catgcttttacacta

SEQ ID NO: 48031 - DNA, 15 bp, Homo sapiens
tcatgcttttacact

SEQ ID NO: 48032 - DNA, 15 bp, Homo sapiens
atcatgcttttacac

SEQ ID NO: 48033 - DNA, 15 bp, Homo sapiens
catcatgcttttaca

SEQ ID NO: 48034 - DNA, 15 bp, Homo sapiens
tcatcatgcttttac

SEQ ID NO: 48035 - DNA, 15 bp, Homo sapiens
ttcatcatgctttta

SEQ ID NO: 48036 - DNA, 15 bp, Homo sapiens
attcatcatgctttt

SEQ ID NO: 48037 - DNA, 15 bp, Homo sapiens
aattcatcatgcttt

SEQ ID NO: 48038 - DNA, 15 bp, Homo sapiens
aaattcatcatgctt

SEQ ID NO: 48039 - DNA, 15 bp, Homo sapiens
aaaattcatcatgct

SEQ ID NO: 48040 - DNA, 15 bp, Homo sapiens
caaaattcatcatgc

SEQ ID NO: 48041 - DNA, 15 bp, Homo sapiens
tcaaaattcatcatg

SEQ ID NO: 48042 - DNA, 15 bp, Homo sapiens
ctcaaaattcatcat

SEQ ID NO: 48043 - DNA, 15 bp, Homo sapiens
tctcaaaattcatca

SEQ ID NO: 48044 - DNA, 15 bp, Homo sapiens
ttctcaaaattcatc

SEQ ID NO: 48045 - DNA, 15 bp, Homo sapiens
cttctcaaaattcat

SEQ ID NO: 48046 - DNA, 15 bp, Homo sapiens
acttctcaaaattca

SEQ ID NO: 48047 - DNA, 15 bp, Homo sapiens
aacttctcaaaattc

SEQ ID NO: 48048 - DNA, 15 bp, Homo sapiens
taacttctcaaaatt

SEQ ID NO: 48049 - DNA, 15 bp, Homo sapiens
ataacttctcaaaat

SEQ ID NO: 48050 - DNA, 15 bp, Homo sapiens
tataacttctcaaaa

SEQ ID NO: 48051 - DNA, 15 bp, Homo sapiens
atataacttctcaaa

SEQ ID NO: 48052 - DNA, 15 bp, Homo sapiens
aatataacttctcaa

SEQ ID NO: 48053 - DNA, 15 bp, Homo sapiens
aaatataacttctca

SEQ ID NO: 48054 - DNA, 15 bp, Homo sapiens
aaaatataacttctc

SEQ ID NO: 48055 - DNA, 15 bp, Homo sapiens
taaaatataacttct

SEQ ID NO: 48056 - DNA, 15 bp, Homo sapiens
gtaaaatataacttc

SEQ ID NO: 48057 - DNA, 15 bp, Homo sapiens
ggtaaaatataactt

SEQ ID NO: 48058 - DNA, 15 bp, Homo sapiens
tggtaaaatataact

SEQ ID NO: 48059 - DNA, 15 bp, Homo sapiens
ctggtaaaatataac

SEQ ID NO: 48060 - DNA, 15 bp, Homo sapiens
actggtaaaatataa

SEQ ID NO: 48061 - DNA, 15 bp, Homo sapiens
aactggtaaaatata

SEQ ID NO: 48062 - DNA, 15 bp, Homo sapiens
taactggtaaaatat

SEQ ID NO: 48063 - DNA, 15 bp, Homo sapiens
gtaactggtaaaata

SEQ ID NO: 48064 - DNA, 15 bp, Homo sapiens
agtaactggtaaaat

SEQ ID NO: 48065 - DNA, 15 bp, Homo sapiens
aagtaactggtaaaa

SEQ ID NO: 48066 - DNA, 15 bp, Homo sapiens
aaagtaactggtaaa

SEQ ID NO: 48067 - DNA, 15 bp, Homo sapiens
taaagtaactggtaa

SEQ ID NO: 48068 - DNA, 15 bp, Homo sapiens
ataaagtaactggta

SEQ ID NO: 48069 - DNA, 15 bp, Homo sapiens
aataaagtaactggt

SEQ ID NO: 48070 - DNA, 15 bp, Homo sapiens
aaataaagtaactgg

SEQ ID NO: 48071 - DNA, 15 bp, Homo sapiens
aaaataaagtaactg

SEQ ID NO: 48072 - DNA, 15 bp, Homo sapiens
aaaaataaagtaact

SEQ ID NO: 48073 - DNA, 15 bp, Homo sapiens
aaaaaataaagtaac

SEQ ID NO: 48074 - DNA, 15 bp, Homo sapiens
taaaaaataaagtaa

SEQ ID NO: 48075 - DNA, 15 bp, Homo sapiens
gtaaaaaataaagta

SEQ ID NO: 48076 - DNA, 15 bp, Homo sapiens
ggtaaaaaataaagt

SEQ ID NO: 48077 - DNA, 15 bp, Homo sapiens
tggtaaaaaataaag

SEQ ID NO: 48078 - DNA, 15 bp, Homo sapiens
ctggtaaaaaataaa

SEQ ID NO: 48079 - DNA, 15 bp, Homo sapiens
actggtaaaaaataa

SEQ ID NO: 48080 - DNA, 15 bp, Homo sapiens
aactggtaaaaaata

SEQ ID NO: 48081 - DNA, 15 bp, Homo sapiens
taactggtaaaaaat

SEQ ID NO: 48082 - DNA, 15 bp, Homo sapiens
ataactggtaaaaaa

SEQ ID NO: 48083 - DNA, 15 bp, Homo sapiens
aataactggtaaaaa

SEQ ID NO: 48084 - DNA, 15 bp, Homo sapiens
aaataactggtaaaa

SEQ ID NO: 48085 - DNA, 15 bp, Homo sapiens
taaataactggtaaa

SEQ ID NO: 48086 - DNA, 15 bp, Homo sapiens
ttaaataactggtaa

SEQ ID NO: 48087 - DNA, 15 bp, Homo sapiens
tttaaataactggta

SEQ ID NO: 48088 - DNA, 15 bp, Homo sapiens
ttttaaataactggt

SEQ ID NO: 48089 - DNA, 15 bp, Homo sapiens
gttttaaataactgg

SEQ ID NO: 48090 - DNA, 15 bp, Homo sapiens
tgttttaaataactg

SEQ ID NO: 48091 - DNA, 15 bp, Homo sapiens
ctgttttaaataact

SEQ ID NO: 48092 - DNA, 15 bp, Homo sapiens
tctgttttaaataac

SEQ ID NO: 48093 - DNA, 15 bp, Homo sapiens
gtctgttttaaataa

SEQ ID NO: 48094 - DNA, 15 bp, Homo sapiens
tgtctgttttaaata

SEQ ID NO: 48095 - DNA, 15 bp, Homo sapiens
atgtctgttttaaat

SEQ ID NO: 48096 - DNA, 15 bp, Homo sapiens
catgtctgttttaaa

SEQ ID NO: 48097 - DNA, 15 bp, Homo sapiens
tcatgtctgttttaa

SEQ ID NO: 48098 - DNA, 15 bp, Homo sapiens
ctcatgtctgtttta

SEQ ID NO: 48099 - DNA, 15 bp, Homo sapiens
gctcatgtctgtttt

SEQ ID NO: 48100 - DNA, 15 bp, Homo sapiens
ggctcatgtctgttt

SEQ ID NO: 48101 - DNA, 15 bp, Homo sapiens
tggctcatgtctgtt

SEQ ID NO: 48102 - DNA, 15 bp, Homo sapiens
ttggctcatgtctgt

SEQ ID NO: 48103 - DNA, 15 bp, Homo sapiens
tttggctcatgtctg

SEQ ID NO: 48104 - DNA, 15 bp, Homo sapiens
ctttggctcatgtct

SEQ ID NO: 48105 - DNA, 15 bp, Homo sapiens
gctttggctcatgtc

SEQ ID NO: 48106 - DNA, 15 bp, Homo sapiens
ggctttggctcatgt

SEQ ID NO: 48107 - DNA, 15 bp, Homo sapiens
tggctttggctcatg

SEQ ID NO: 48108 - DNA, 15 bp, Homo sapiens
ctggctttggctcat

SEQ ID NO: 48109 - DNA, 15 bp, Homo sapiens
tctggctttggctca

SEQ ID NO: 48110 - DNA, 15 bp, Homo sapiens
ttctggctttggctc

SEQ ID NO: 48111 - DNA, 15 bp, Homo sapiens
attctggctttggct

SEQ ID NO: 48112 - DNA, 15 bp, Homo sapiens
tattctggctttggc

SEQ ID NO: 48113 - DNA, 15 bp, Homo sapiens
gtattctggctttgg

SEQ ID NO: 48114 - DNA, 15 bp, Homo sapiens
agtattctggctttg

SEQ ID NO: 48115 - DNA, 15 bp, Homo sapiens
aagtattctggcttt

SEQ ID NO: 48116 - DNA, 15 bp, Homo sapiens
caagtattctggctt

SEQ ID NO: 48117 - DNA, 15 bp, Homo sapiens
acaagtattctggct

SEQ ID NO: 48118 - DNA, 15 bp, Homo sapiens
aacaagtattctggc

SEQ ID NO: 48119 - DNA, 15 bp, Homo sapiens
taacaagtattctgg

SEQ ID NO: 48120 - DNA, 15 bp, Homo sapiens
ttaacaagtattctg

SEQ ID NO: 48121 - DNA, 15 bp, Homo sapiens
attaacaagtattct

SEQ ID NO: 48122 - DNA, 15 bp, Homo sapiens
cattaacaagtattc

SEQ ID NO: 48123 - DNA, 15 bp, Homo sapiens
tcattaacaagtatt

SEQ ID NO: 48124 - DNA, 15 bp, Homo sapiens
ttcattaacaagtat

SEQ ID NO: 48125 - DNA, 15 bp, Homo sapiens
tttcattaacaagta

SEQ ID NO: 48126 - DNA, 15 bp, Homo sapiens
ttttcattaacaagt

SEQ ID NO: 48127 - DNA, 15 bp, Homo sapiens
attttcattaacaag

SEQ ID NO: 48128 - DNA, 15 bp, Homo sapiens
cattttcattaacaa

SEQ ID NO: 48129 - DNA, 15 bp, Homo sapiens
tcattttcattaaca

SEQ ID NO: 48130 - DNA, 15 bp, Homo sapiens
ctcattttcattaac

SEQ ID NO: 48131 - DNA, 15 bp, Homo sapiens
cctcattttcattaa

SEQ ID NO: 48132 - DNA, 15 bp, Homo sapiens
acctcattttcatta

SEQ ID NO: 48133 - DNA, 15 bp, Homo sapiens
cacctcattttcatt

SEQ ID NO: 48134 - DNA, 15 bp, Homo sapiens
acacctcattttcat

SEQ ID NO: 48135 - DNA, 15 bp, Homo sapiens
aacacctcattttca

SEQ ID NO: 48136 - DNA, 15 bp, Homo sapiens
aaacacctcattttc

SEQ ID NO: 48137 - DNA, 15 bp, Homo sapiens
aaaacacctcatttt

SEQ ID NO: 48138 - DNA, 15 bp, Homo sapiens
caaaacacctcattt

SEQ ID NO: 48139 - DNA, 15 bp, Homo sapiens
ccaaaacacctcatt

SEQ ID NO: 48140 - DNA, 15 bp, Homo sapiens
tccaaaacacctcat

SEQ ID NO: 48141 - DNA, 15 bp, Homo sapiens
ctccaaaacacctca

SEQ ID NO: 48142 - DNA, 15 bp, Homo sapiens
cctccaaaacacctc

SEQ ID NO: 48143 - DNA, 15 bp, Homo sapiens
tcctccaaaacacct

SEQ ID NO: 48144 - DNA, 15 bp, Homo sapiens
ttcctccaaaacacc

SEQ ID NO: 48145 - DNA, 15 bp, Homo sapiens
tttcctccaaaacac

SEQ ID NO: 48146 - DNA, 15 bp, Homo sapiens
ctttcctccaaaaca

SEQ ID NO: 48147 - DNA, 15 bp, Homo sapiens
cctttcctccaaaac

SEQ ID NO: 48148 - DNA, 15 bp, Homo sapiens
tcctttcctccaaaa

SEQ ID NO: 48149 - DNA, 15 bp, Homo sapiens
ttcctttcctccaaa

SEQ ID NO: 48150 - DNA, 15 bp, Homo sapiens
ccttcctttcctcca

SEQ ID NO: 48151 - DNA, 15 bp, Homo sapiens
accttcctttcctcc

SEQ ID NO: 48152 - DNA, 15 bp, Homo sapiens
aaccttcctttcctc

SEQ ID NO: 48153 - DNA, 15 bp, Homo sapiens
caaccttcctttcct

SEQ ID NO: 48154 - DNA, 15 bp, Homo sapiens
acaaccttcctttcc

SEQ ID NO: 48155 - DNA, 15 bp, Homo sapiens
cacaaccttcctttc

SEQ ID NO: 48156 - DNA, 15 bp, Homo sapiens
gcacaaccttccttt

SEQ ID NO: 48157 - DNA, 15 bp, Homo sapiens
agcacaaccttcctt

SEQ ID NO: 48158 - DNA, 15 bp, Homo sapiens
cagcacaaccttcct

SEQ ID NO: 48159 - DNA, 15 bp, Homo sapiens
gcagcacaaccttcc

SEQ ID NO: 48160 - DNA, 15 bp, Homo sapiens
tgcagcacaaccttc

SEQ ID NO: 48161 - DNA, 15 bp, Homo sapiens
ctgcagcacaacctt

SEQ ID NO: 48162 - DNA, 15 bp, Homo sapiens
actgcagcacaacct

SEQ ID NO: 48163 - DNA, 15 bp, Homo sapiens
aactgcagcacaacc

SEQ ID NO: 48164 - DNA, 15 bp, Homo sapiens
aaactgcagcacaac

SEQ ID NO: 48165 - DNA, 15 bp, Homo sapiens
aaaactgcagcacaa

SEQ ID NO: 48166 - DNA, 15 bp, Homo sapiens
aaaaactgcagcaca

SEQ ID NO: 48167 - DNA, 15 bp, Homo sapiens
taaaaactgcagcac

SEQ ID NO: 48168 - DNA, 15 bp, Homo sapiens
gtaaaaactgcagca

SEQ ID NO: 48169 - DNA, 15 bp, Homo sapiens
agtaaaaactgcagc

SEQ ID NO: 48170 - DNA, 15 bp, Homo sapiens
aagtaaaaactgcag

SEQ ID NO: 48171 - DNA, 15 bp, Homo sapiens
caagtaaaaactgca

SEQ ID NO: 48172 - DNA, 15 bp, Homo sapiens
tcaagtaaaaactgc

SEQ ID NO: 48173 - DNA, 15 bp, Homo sapiens
ttcaagtaaaaactg

SEQ ID NO: 48174 - DNA, 15 bp, Homo sapiens
tttcaagtaaaaact

SEQ ID NO: 48175 - DNA, 15 bp, Homo sapiens
atttcaagtaaaaac

SEQ ID NO: 48176 - DNA, 15 bp, Homo sapiens
gatttcaagtaaaaa

SEQ ID NO: 48177 - DNA, 15 bp, Homo sapiens
agatttcaagtaaaa

SEQ ID NO: 48178 - DNA, 15 bp, Homo sapiens
cagatttcaagtaaa

SEQ ID NO: 48179 - DNA, 15 bp, Homo sapiens
acagatttcaagtaa

SEQ ID NO: 48180 - DNA, 15 bp, Homo sapiens
aacagatttcaagta

SEQ ID NO: 48181 - DNA, 15 bp, Homo sapiens
taacagatttcaagt

SEQ ID NO: 48182 - DNA, 15 bp, Homo sapiens
gtaacagatttcaag

SEQ ID NO: 48183 - DNA, 15 bp, Homo sapiens
tgtaacagatttcaa

SEQ ID NO: 48184 - DNA, 15 bp, Homo sapiens
atgtaacagatttca

SEQ ID NO: 48185 - DNA, 15 bp, Homo sapiens
aatgtaacagatttc

SEQ ID NO: 48186 - DNA, 15 bp, Homo sapiens
aaatgtaacagattt

SEQ ID NO: 48187 - DNA, 15 bp, Homo sapiens
gaaatgtaacagatt

SEQ ID NO: 48188 - DNA, 15 bp, Homo sapiens
agaaatgtaacagat

SEQ ID NO: 48189 - DNA, 15 bp, Homo sapiens
aagaaatgtaacaga

SEQ ID NO: 48190 - DNA, 15 bp, Homo sapiens
aaagaaatgtaacag

SEQ ID NO: 48191 - DNA, 15 bp, Homo sapiens
taaagaaatgtaaca

SEQ ID NO: 48192 - DNA, 15 bp, Homo sapiens
gtaaagaaatgtaac

SEQ ID NO: 48193 - DNA, 15 bp, Homo sapiens
tgtaaagaaatgtaa

SEQ ID NO: 48194 - DNA, 15 bp, Homo sapiens
ctgtaaagaaatgta

SEQ ID NO: 48195 - DNA, 15 bp, Homo sapiens
tctgtaaagaaatgt

SEQ ID NO: 48196 - DNA, 15 bp, Homo sapiens
ttctgtaaagaaatg

SEQ ID NO: 48197 - DNA, 15 bp, Homo sapiens
tttctgtaaagaaat

SEQ ID NO: 48198 - DNA, 15 bp, Homo sapiens
atttctgtaaagaaa

SEQ ID NO: 48199 - DNA, 15 bp, Homo sapiens
aatttctgtaaagaa

SEQ ID NO: 48200 - DNA, 15 bp, Homo sapiens
aaatttctgtaaaga

SEQ ID NO: 48201 - DNA, 15 bp, Homo sapiens
gaaatttctgtaaag

SEQ ID NO: 48202 - DNA, 15 bp, Homo sapiens
tgaaatttctgtaaa

SEQ ID NO: 48203 - DNA, 15 bp, Homo sapiens
ttgaaatttctgtaa

SEQ ID NO: 48204 - DNA, 15 bp, Homo sapiens
tttgaaatttctgta

SEQ ID NO: 48205 - DNA, 15 bp, Homo sapiens
atttgaaatttctgt

SEQ ID NO: 48206 - DNA, 15 bp, Homo sapiens
gatttgaaatttctg

SEQ ID NO: 48207 - DNA, 15 bp, Homo sapiens
agatttgaaatttct

SEQ ID NO: 48208 - DNA, 15 bp, Homo sapiens
gagatttgaaatttc

SEQ ID NO: 48209 - DNA, 15 bp, Homo sapiens
agagatttgaaattt

SEQ ID NO: 48210 - DNA, 15 bp, Homo sapiens
aagagatttgaaatt

SEQ ID NO: 48211 - DNA, 15 bp, Homo sapiens
caagagatttgaaat

SEQ ID NO: 48212 - DNA, 15 bp, Homo sapiens
acaagagatttgaaa

SEQ ID NO: 48213 - DNA, 15 bp, Homo sapiens
aacaagagatttgaa

SEQ ID NO: 48214 - DNA, 15 bp, Homo sapiens
aaacaagagatttga

SEQ ID NO: 48215 - DNA, 15 bp, Homo sapiens
gaaacaagagatttg

SEQ ID NO: 48216 - DNA, 15 bp, Homo sapiens
ggaaacaagagattt

SEQ ID NO: 48217 - DNA, 15 bp, Homo sapiens
aggaaacaagagatt

SEQ ID NO: 48218 - DNA, 15 bp, Homo sapiens
caggaaacaagagat

SEQ ID NO: 48219 - DNA, 15 bp, Homo sapiens
acaggaaacaagaga

SEQ ID NO: 48220 - DNA, 15 bp, Homo sapiens
aacaggaaacaagag

SEQ ID NO: 48221 - DNA, 15 bp, Homo sapiens
taacaggaaacaaga

SEQ ID NO: 48222 - DNA, 15 bp, Homo sapiens
ataacaggaaacaag

SEQ ID NO: 48223 - DNA, 15 bp, Homo sapiens
cataacaggaaacaa

SEQ ID NO: 48224 - DNA, 15 bp, Homo sapiens
tcataacaggaaaca

SEQ ID NO: 48225 - DNA, 15 bp, Homo sapiens
atcataacaggaaac

SEQ ID NO: 48226 - DNA, 15 bp, Homo sapiens
catcataacaggaaa

SEQ ID NO: 48227 - DNA, 15 bp, Homo sapiens
ccatcataacaggaa

SEQ ID NO: 48228 - DNA, 15 bp, Homo sapiens
accatcataacagga

SEQ ID NO: 48229 - DNA, 15 bp, Homo sapiens
caccatcataacagg

SEQ ID NO: 48230 - DNA, 15 bp, Homo sapiens
ccaccatcataacag

SEQ ID NO: 48231 - DNA, 15 bp, Homo sapiens
gccaccatcataaca

SEQ ID NO: 48232 - DNA, 15 bp, Homo sapiens
tgccaccatcataac

SEQ ID NO: 48233 - DNA, 15 bp, Homo sapiens
atgccaccatcataa

SEQ ID NO: 48234 - DNA, 15 bp, Homo sapiens
aatgccaccatcata

SEQ ID NO: 48235 - DNA, 15 bp, Homo sapiens
taatgccaccatcat

SEQ ID NO: 48236 - DNA, 15 bp, Homo sapiens
ataatgccaccatca

SEQ ID NO: 48237 - DNA, 15 bp, Homo sapiens
tataatgccaccatc

SEQ ID NO: 48238 - DNA, 15 bp, Homo sapiens
atataatgccaccat

SEQ ID NO: 48239 - DNA, 15 bp, Homo sapiens
tatataatgccacca

SEQ ID NO: 48240 - DNA, 15 bp, Homo sapiens
gtatataatgccacc

SEQ ID NO: 48241 - DNA, 15 bp, Homo sapiens
ggtatataatgccac

SEQ ID NO: 48242 - DNA, 15 bp, Homo sapiens
aggtatataatgcca

SEQ ID NO: 48243 - DNA, 15 bp, Homo sapiens
aaggtatataatgcc

SEQ ID NO: 48244 - DNA, 15 bp, Homo sapiens
aaaggtatataatgc

SEQ ID NO: 48245 - DNA, 15 bp, Homo sapiens
taaaggtatataatg

SEQ ID NO: 48246 - DNA, 15 bp, Homo sapiens
ttaaaggtatataat

SEQ ID NO: 48247 - DNA, 15 bp, Homo sapiens
tttaaaggtatataa

SEQ ID NO: 48248 - DNA, 15 bp, Homo sapiens
ttttaaaggtatata

SEQ ID NO: 48249 - DNA, 15 bp, Homo sapiens
attttaaaggtatat

SEQ ID NO: 48250 - DNA, 15 bp, Homo sapiens
cattttaaaggtata

SEQ ID NO: 48251 - DNA, 15 bp, Homo sapiens
acattttaaaggtat

SEQ ID NO: 48252 - DNA, 15 bp, Homo sapiens
cacattttaaaggta

SEQ ID NO: 48253 - DNA, 15 bp, Homo sapiens
tcacattttaaaggt

SEQ ID NO: 48254 - DNA, 15 bp, Homo sapiens
ctcacattttaaagg

SEQ ID NO: 48255 - DNA, 15 bp, Homo sapiens
gctcacattttaaag

SEQ ID NO: 48256 - DNA, 15 bp, Homo sapiens
agctcacattttaaa

SEQ ID NO: 48257 - DNA, 15 bp, Homo sapiens
tagctcacattttaa

SEQ ID NO: 48258 - DNA, 15 bp, Homo sapiens
atagctcacatttta

SEQ ID NO: 48259 - DNA, 15 bp, Homo sapiens
tatagctcacatttt

SEQ ID NO: 48260 - DNA, 15 bp, Homo sapiens
ctatagctcacattt

SEQ ID NO: 48261 - DNA, 15 bp, Homo sapiens
cctatagctcacatt

SEQ ID NO: 48262 - DNA, 15 bp, Homo sapiens
tcctatagctcacat

SEQ ID NO: 48263 - DNA, 15 bp, Homo sapiens
ttcctatagctcaca

SEQ ID NO: 48264 - DNA, 15 bp, Homo sapiens
tttcctatagctcac

SEQ ID NO: 48265 - DNA, 15 bp, Homo sapiens
ttttcctatagctca

SEQ ID NO: 48266 - DNA, 15 bp, Homo sapiens
attttcctatagctc

SEQ ID NO: 48267 - DNA, 15 bp, Homo sapiens
cattttcctatagct

SEQ ID NO: 48268 - DNA, 15 bp, Homo sapiens
tcattttcctatagc

SEQ ID NO: 48269 - DNA, 15 bp, Homo sapiens
ttcattttcctatag

SEQ ID NO: 48270 - DNA, 15 bp, Homo sapiens
attcattttcctata

SEQ ID NO: 48271 - DNA, 15 bp, Homo sapiens
cattcattttcctat

SEQ ID NO: 48272 - DNA, 15 bp, Homo sapiens
tcattcattttccta

SEQ ID NO: 48273 - DNA, 15 bp, Homo sapiens
atcattcattttcct

SEQ ID NO: 48274 - DNA, 15 bp, Homo sapiens
catcattcattttcc

SEQ ID NO: 48275 - DNA, 15 bp, Homo sapiens
ccatcattcattttc

SEQ ID NO: 48276 - DNA, 15 bp, Homo sapiens
accatcattcatttt

SEQ ID NO: 48277 - DNA, 15 bp, Homo sapiens
aaccatcattcattt

SEQ ID NO: 48278 - DNA, 15 bp, Homo sapiens
taaccatcattcatt

SEQ ID NO: 48279 - DNA, 15 bp, Homo sapiens
ttaaccatcattcat

SEQ ID NO: 48280 - DNA, 15 bp, Homo sapiens
attaaccatcattca

SEQ ID NO: 48281 - DNA, 15 bp, Homo sapiens
aattaaccatcattc

SEQ ID NO: 48282 - DNA, 15 bp, Homo sapiens
aaattaaccatcatt

SEQ ID NO: 48283 - DNA, 15 bp, Homo sapiens
aaaattaaccatcat

SEQ ID NO: 48284 - DNA, 15 bp, Homo sapiens
aaaaattaaccatca

SEQ ID NO: 48285 - DNA, 15 bp, Homo sapiens
aaaaaattaaccatc

SEQ ID NO: 48286 - DNA, 15 bp, Homo sapiens
taaaaaattaaccat

SEQ ID NO: 48287 - DNA, 15 bp, Homo sapiens
ttaaaaaattaacca

SEQ ID NO: 48288 - DNA, 15 bp, Homo sapiens
attaaaaaattaacc

SEQ ID NO: 48289 - DNA, 15 bp, Homo sapiens
tattaaaaaattaac

SEQ ID NO: 48290 - DNA, 15 bp, Homo sapiens
ttattaaaaaattaa

SEQ ID NO: 48291 - DNA, 15 bp, Homo sapiens
tttattaaaaaatta

SEQ ID NO: 48292 - DNA, 15 bp, Homo sapiens
atttattaaaaaatt

SEQ ID NO: 48293 - DNA, 15 bp, Homo sapiens
tatttattaaaaaat

SEQ ID NO: 48294 - DNA, 15 bp, Homo sapiens
aaatatttattaaaa

SEQ ID NO: 48295 - DNA, 15 bp, Homo sapiens
taaatatttattaaa

SEQ ID NO: 48296 - DNA, 15 bp, Homo sapiens
ctaaatatttattaa

SEQ ID NO: 48297 - DNA, 15 bp, Homo sapiens
tctaaatatttatta

SEQ ID NO: 48298 - DNA, 15 bp, Homo sapiens
gtctaaatatttatt

SEQ ID NO: 48299 - DNA, 15 bp, Homo sapiens
agtctaaatatttat

SEQ ID NO: 48300 - DNA, 15 bp, Homo sapiens
aagtctaaatattta

SEQ ID NO: 48301 - DNA, 15 bp, Homo sapiens
caagtctaaatattt

SEQ ID NO: 48302 - DNA, 15 bp, Homo sapiens
acaagtctaaatatt

SEQ ID NO: 48303 - DNA, 15 bp, Homo sapiens
cacaagtctaaatat

SEQ ID NO: 48304 - DNA, 15 bp, Homo sapiens
acacaagtctaaata

SEQ ID NO: 48305 - DNA, 15 bp, Homo sapiens
aacacaagtctaaat

SEQ ID NO: 48306 - DNA, 15 bp, Homo sapiens
aaacacaagtctaaa

SEQ ID NO: 48307 - DNA, 15 bp, Homo sapiens
aaaacacaagtctaa

SEQ ID NO: 48308 - DNA, 15 bp, Homo sapiens
aaaaacacaagtcta

SEQ ID NO: 48309 - DNA, 15 bp, Homo sapiens
caaaaacacaagtct

SEQ ID NO: 48310 - DNA, 15 bp, Homo sapiens
tcaaaaacacaagtc

SEQ ID NO: 48311 - DNA, 15 bp, Homo sapiens
ttcaaaaacacaagt

SEQ ID NO: 48312 - DNA, 15 bp, Homo sapiens
tttcaaaaacacaag

SEQ ID NO: 48313 - DNA, 15 bp, Homo sapiens
atttcaaaaacacaa

SEQ ID NO: 48314 - DNA, 15 bp, Homo sapiens
aatttcaaaaacaca

SEQ ID NO: 48315 - DNA, 15 bp, Homo sapiens
aaatttcaaaaacac

SEQ ID NO: 48316 - DNA, 15 bp, Homo sapiens
aaaatttcaaaaaca

SEQ ID NO: 48317 - DNA, 15 bp, Homo sapiens
aaaaatttcaaaaac

SEQ ID NO: 48318 - DNA, 15 bp, Homo sapiens
aaaaaatttcaaaaa

SEQ ID NO: 48319 - DNA, 15 bp, Homo sapiens
taaaaaatttcaaaa

SEQ ID NO: 48320 - DNA, 15 bp, Homo sapiens
ataaaaaatttcaaa

SEQ ID NO: 48321 - DNA, 15 bp, Homo sapiens
tataaaaaatttcaa

SEQ ID NO: 48322 - DNA, 15 bp, Homo sapiens
ttataaaaaatttca

SEQ ID NO: 48323 - DNA, 15 bp, Homo sapiens
gttataaaaaatttc

SEQ ID NO: 48324 - DNA, 15 bp, Homo sapiens
tgttataaaaaattt

SEQ ID NO: 48325 - DNA, 15 bp, Homo sapiens
atgttataaaaaatt

SEQ ID NO: 48326 - DNA, 15 bp, Homo sapiens
aatgttataaaaaat

SEQ ID NO: 48327 - DNA, 15 bp, Homo sapiens
caatgttataaaaaa

SEQ ID NO: 48328 - DNA, 15 bp, Homo sapiens
acaatgttataaaaa

SEQ ID NO: 48329 - DNA, 15 bp, Homo sapiens
aacaatgttataaaa

SEQ ID NO: 48330 - DNA, 15 bp, Homo sapiens
taacaatgttataaa

SEQ ID NO: 48331 - DNA, 15 bp, Homo sapiens
ataacaatgttataa

SEQ ID NO: 48332 - DNA, 15 bp, Homo sapiens
tataacaatgttata

SEQ ID NO: 48333 - DNA, 15 bp, Homo sapiens
ctataacaatgttat

SEQ ID NO: 48334 - DNA, 15 bp, Homo sapiens
cctataacaatgtta

SEQ ID NO: 48335 - DNA, 15 bp, Homo sapiens
acctataacaatgtt

SEQ ID NO: 48336 - DNA, 15 bp, Homo sapiens
aacctataacaatgt

SEQ ID NO: 48337 - DNA, 15 bp, Homo sapiens
aaacctataacaatg

SEQ ID NO: 48338 - DNA, 15 bp, Homo sapiens
aaaacctataacaat

SEQ ID NO: 48339 - DNA, 15 bp, Homo sapiens
taaaacctataacaa

SEQ ID NO: 48340 - DNA, 15 bp, Homo sapiens
ataaaacctataaca

SEQ ID NO: 48341 - DNA, 15 bp, Homo sapiens
gataaaacctataac

SEQ ID NO: 48342 - DNA, 15 bp, Homo sapiens
ggataaaacctataa

SEQ ID NO: 48343 - DNA, 15 bp, Homo sapiens
aggataaaacctata

SEQ ID NO: 48344 - DNA, 15 bp, Homo sapiens
gaggataaaacctat

SEQ ID NO: 48345 - DNA, 15 bp, Homo sapiens
agaggataaaaccta

SEQ ID NO: 48346 - DNA, 15 bp, Homo sapiens
aagaggataaaacct

SEQ ID NO: 48347 - DNA, 15 bp, Homo sapiens
aaagaggataaaacc

SEQ ID NO: 48348 - DNA, 15 bp, Homo sapiens
gaaagaggataaaac

SEQ ID NO: 48349 - DNA, 15 bp, Homo sapiens
agaaagaggataaaa

SEQ ID NO: 48350 - DNA, 15 bp, Homo sapiens
gagaaagaggataaa

SEQ ID NO: 48351 - DNA, 15 bp, Homo sapiens
agagaaagaggataa

SEQ ID NO: 48352 - DNA, 15 bp, Homo sapiens
aagagaaagaggata

SEQ ID NO: 48353 - DNA, 15 bp, Homo sapiens
caagagaaagaggat

SEQ ID NO: 48354 - DNA, 15 bp, Homo sapiens
acaagagaaagagga

SEQ ID NO: 48355 - DNA, 15 bp, Homo sapiens
cacaagagaaagagg

SEQ ID NO: 48356 - DNA, 15 bp, Homo sapiens
tcacaagagaaagag

SEQ ID NO: 48357 - DNA, 15 bp, Homo sapiens
ttcacaagagaaaga

SEQ ID NO: 48358 - DNA, 15 bp, Homo sapiens
gttcacaagagaaag

SEQ ID NO: 48359 - DNA, 15 bp, Homo sapiens
tgttcacaagagaaa

SEQ ID NO: 48360 - DNA, 15 bp, Homo sapiens
atgttcacaagagaa

SEQ ID NO: 48361 - DNA, 15 bp, Homo sapiens
catgttcacaagaga

SEQ ID NO: 48362 - DNA, 15 bp, Homo sapiens
acatgttcacaagag

SEQ ID NO: 48363 - DNA, 15 bp, Homo sapiens
tacatgttcacaaga

SEQ ID NO: 48364 - DNA, 15 bp, Homo sapiens
ctacatgttcacaag

SEQ ID NO: 48365 - DNA, 15 bp, Homo sapiens
actacatgttcacaa

SEQ ID NO: 48366 - DNA, 15 bp, Homo sapiens
cactacatgttcaca

SEQ ID NO: 48367 - DNA, 15 bp, Homo sapiens
tcactacatgttcac

SEQ ID NO: 48368 - DNA, 15 bp, Homo sapiens
atcactacatgttca

SEQ ID NO: 48369 - DNA, 15 bp, Homo sapiens
aatcactacatgttc

SEQ ID NO: 48370 - DNA, 15 bp, Homo sapiens
aaatcactacatgtt

SEQ ID NO: 48371 - DNA, 15 bp, Homo sapiens
caaatcactacatgt

SEQ ID NO: 48372 - DNA, 15 bp, Homo sapiens
acaaatcactacatg

SEQ ID NO: 48373 - DNA, 15 bp, Homo sapiens
tacaaatcactacat

SEQ ID NO: 48374 - DNA, 15 bp, Homo sapiens
atacaaatcactaca

SEQ ID NO: 48375 - DNA, 15 bp, Homo sapiens
aatacaaatcactac

SEQ ID NO: 48376 - DNA, 15 bp, Homo sapiens
aaatacaaatcacta

SEQ ID NO: 48377 - DNA, 15 bp, Homo sapiens
aaaatacaaatcact

SEQ ID NO: 48378 - DNA, 15 bp, Homo sapiens
caaaatacaaatcac

SEQ ID NO: 48379 - DNA, 15 bp, Homo sapiens
acaaaatacaaatca

SEQ ID NO: 48380 - DNA, 15 bp, Homo sapiens
cacaaaatacaaatc

SEQ ID NO: 48381 - DNA, 15 bp, Homo sapiens
tcacaaaatacaaat

SEQ ID NO: 48382 - DNA, 15 bp, Homo sapiens
atcacaaaatacaaa

SEQ ID NO: 48383 - DNA, 15 bp, Homo sapiens
gatcacaaaatacaa

SEQ ID NO: 48384 - DNA, 15 bp, Homo sapiens
agatcacaaaataca

SEQ ID NO: 48385 - DNA, 15 bp, Homo sapiens
aagatcacaaaatac

SEQ ID NO: 48386 - DNA, 15 bp, Homo sapiens
aaagatcacaaaata

SEQ ID NO: 48387 - DNA, 15 bp, Homo sapiens
caaagatcacaaaat

SEQ ID NO: 48388 - DNA, 15 bp, Homo sapiens
gcaaagatcacaaaa

SEQ ID NO: 48389 - DNA, 15 bp, Homo sapiens
ggcaaagatcacaaa

SEQ ID NO: 48390 - DNA, 15 bp, Homo sapiens
cggcaaagatcacaa

SEQ ID NO: 48391 - DNA, 15 bp, Homo sapiens
gcggcaaagatcaca

SEQ ID NO: 48392 - DNA, 15 bp, Homo sapiens
tgcggcaaagatcac

SEQ ID NO: 48393 - DNA, 15 bp, Homo sapiens
atgcggcaaagatca

SEQ ID NO: 48394 - DNA, 15 bp, Homo sapiens
catgcggcaaagatc

SEQ ID NO: 48395 - DNA, 15 bp, Homo sapiens
gcatgcggcaaagat

SEQ ID NO: 48396 - DNA, 15 bp, Homo sapiens
agcatgcggcaaaga

SEQ ID NO: 48397 - DNA, 15 bp, Homo sapiens
tagcatgcggcaaag

SEQ ID NO: 48398 - DNA, 15 bp, Homo sapiens
ctagcatgcggcaaa

SEQ ID NO: 48399 - DNA, 15 bp, Homo sapiens
tctagcatgcggcaa

SEQ ID NO: 48400 - DNA, 15 bp, Homo sapiens
ctctagcatgcggca

SEQ ID NO: 48401 - DNA, 15 bp, Homo sapiens
tctctagcatgcggc

SEQ ID NO: 48402 - DNA, 15 bp, Homo sapiens
gtctctagcatgcgg

SEQ ID NO: 48403 - DNA, 15 bp, Homo sapiens
agtctctagcatgcg

SEQ ID NO: 48404 - DNA, 15 bp, Homo sapiens
aagtctctagcatgc

SEQ ID NO: 48405 - DNA, 15 bp, Homo sapiens
taagtctctagcatg

SEQ ID NO: 48406 - DNA, 15 bp, Homo sapiens
ttaagtctctagcat

SEQ ID NO: 48407 - DNA, 15 bp, Homo sapiens
cttaagtctctagca

SEQ ID NO: 48408 - DNA, 15 bp, Homo sapiens
tcttaagtctctagc

SEQ ID NO: 48409 - DNA, 15 bp, Homo sapiens
ttcttaagtctctag

SEQ ID NO: 48410 - DNA, 15 bp, Homo sapiens
attcttaagtctcta

SEQ ID NO: 48411 - DNA, 15 bp, Homo sapiens
tattcttaagtctct

SEQ ID NO: 48412 - DNA, 15 bp, Homo sapiens
gtattcttaagtctc

SEQ ID NO: 48413 - DNA, 15 bp, Homo sapiens
agtattcttaagtct

SEQ ID NO: 48414 - DNA, 15 bp, Homo sapiens
tagtattcttaagtc

SEQ ID NO: 48415 - DNA, 15 bp, Homo sapiens
atagtattcttaagt

SEQ ID NO: 48416 - DNA, 15 bp, Homo sapiens
tatagtattcttaag

SEQ ID NO: 48417 - DNA, 15 bp, Homo sapiens
ctatagtattcttaa

SEQ ID NO: 48418 - DNA, 15 bp, Homo sapiens
gctatagtattctta

SEQ ID NO: 48419 - DNA, 15 bp, Homo sapiens
tgctatagtattctt

SEQ ID NO: 48420 - DNA, 15 bp, Homo sapiens
ttgctatagtattct

SEQ ID NO: 48421 - DNA, 15 bp, Homo sapiens
tttgctatagtattc

SEQ ID NO: 48422 - DNA, 15 bp, Homo sapiens
atttgctatagtatt

SEQ ID NO: 48423 - DNA, 15 bp, Homo sapiens
tatttgctatagtat

SEQ ID NO: 48424 - DNA, 15 bp, Homo sapiens
atatttgctatagta

SEQ ID NO: 48425 - DNA, 15 bp, Homo sapiens
gatatttgctatagt

SEQ ID NO: 48426 - DNA, 15 bp, Homo sapiens
agatatttgctatag

SEQ ID NO: 48427 - DNA, 15 bp, Homo sapiens
cagatatttgctata

SEQ ID NO: 48428 - DNA, 15 bp, Homo sapiens
acagatatttgctat

SEQ ID NO: 48429 - DNA, 15 bp, Homo sapiens
gacagatatttgcta

SEQ ID NO: 48430 - DNA, 15 bp, Homo sapiens
agacagatatttgct

SEQ ID NO: 48431 - DNA, 15 bp, Homo sapiens
aagacagatatttgc

SEQ ID NO: 48432 - DNA, 15 bp, Homo sapiens
gaagacagatatttg

SEQ ID NO: 48433 - DNA, 15 bp, Homo sapiens
agaagacagatattt

SEQ ID NO: 48434 - DNA, 15 bp, Homo sapiens
aagaagacagatatt

SEQ ID NO: 48435 - DNA, 15 bp, Homo sapiens
aaagaagacagatat

SEQ ID NO: 48436 - DNA, 15 bp, Homo sapiens
taaagaagacagata

SEQ ID NO: 48437 - DNA, 15 bp, Homo sapiens
gtaaagaagacagat

SEQ ID NO: 48438 - DNA, 15 bp, Homo sapiens
tgtaaagaagacaga

SEQ ID NO: 48439 - DNA, 15 bp, Homo sapiens
atgtaaagaagacag

SEQ ID NO: 48440 - DNA, 15 bp, Homo sapiens
aatgtaaagaagaca

SEQ ID NO: 48441 - DNA, 15 bp, Homo sapiens
aaatgtaaagaagac

SEQ ID NO: 48442 - DNA, 15 bp, Homo sapiens
taaatgtaaagaaga

SEQ ID NO: 48443 - DNA, 15 bp, Homo sapiens
ttaaatgtaaagaag

SEQ ID NO: 48444 - DNA, 15 bp, Homo sapiens
tttaaatgtaaagaa

SEQ ID NO: 48445 - DNA, 15 bp, Homo sapiens
ttttaaatgtaaaga

SEQ ID NO: 48446 - DNA, 15 bp, Homo sapiens
tttttaaatgtaaag

SEQ ID NO: 48447 - DNA, 15 bp, Homo sapiens
atttttaaatgtaaa

SEQ ID NO: 48448 - DNA, 15 bp, Homo sapiens
aatttttaaatgtaa

SEQ ID NO: 48449 - DNA, 15 bp, Homo sapiens
aaatttttaaatgta

SEQ ID NO: 48450 - DNA, 15 bp, Homo sapiens
aaaatttttaaatgt

SEQ ID NO: 48451 - DNA, 15 bp, Homo sapiens
aaaaatttttaaatg

SEQ ID NO: 48452 - DNA, 15 bp, Homo sapiens
gaaaaatttttaaat

SEQ ID NO: 48453 - DNA, 15 bp, Homo sapiens
cgaaaaatttttaaa

SEQ ID NO: 48454 - DNA, 15 bp, Homo sapiens
acgaaaaatttttaa

SEQ ID NO: 48455 - DNA, 15 bp, Homo sapiens
cacgaaaaattttta

SEQ ID NO: 48456 - DNA, 15 bp, Homo sapiens
tcacgaaaaattttt

SEQ ID NO: 48457 - DNA, 15 bp, Homo sapiens
gtcacgaaaaatttt

SEQ ID NO: 48458 - DNA, 15 bp, Homo sapiens
agtcacgaaaaattt

SEQ ID NO: 48459 - DNA, 15 bp, Homo sapiens
tagtcacgaaaaatt

SEQ ID NO: 48460 - DNA, 15 bp, Homo sapiens
gtagtcacgaaaaat

SEQ ID NO: 48461 - DNA, 15 bp, Homo sapiens
agtagtcacgaaaaa

SEQ ID NO: 48462 - DNA, 15 bp, Homo sapiens
gagtagtcacgaaaa

SEQ ID NO: 48463 - DNA, 15 bp, Homo sapiens
ggagtagtcacgaaa

SEQ ID NO: 48464 - DNA, 15 bp, Homo sapiens
gggagtagtcacgaa

SEQ ID NO: 48465 - DNA, 15 bp, Homo sapiens
agggagtagtcacga

SEQ ID NO: 48466 - DNA, 15 bp, Homo sapiens
cagggagtagtcacg

SEQ ID NO: 48467 - DNA, 15 bp, Homo sapiens
acagggagtagtcac

SEQ ID NO: 48468 - DNA, 15 bp, Homo sapiens
aacagggagtagtca

SEQ ID NO: 48469 - DNA, 15 bp, Homo sapiens
caacagggagtagtc

SEQ ID NO: 48470 - DNA, 15 bp, Homo sapiens
tcaacagggagtagt

SEQ ID NO: 48471 - DNA, 15 bp, Homo sapiens
atcaacagggagtag

SEQ ID NO: 48472 - DNA, 15 bp, Homo sapiens
tatcaacagggagta

SEQ ID NO: 48473 - DNA, 15 bp, Homo sapiens
atatcaacagggagt

SEQ ID NO: 48474 - DNA, 15 bp, Homo sapiens
gatatcaacagggag

SEQ ID NO: 48475 - DNA, 15 bp, Homo sapiens
agatatcaacaggga

SEQ ID NO: 48476 - DNA, 15 bp, Homo sapiens
cagatatcaacaggg

SEQ ID NO: 48477 - DNA, 15 bp, Homo sapiens
acagatatcaacagg

SEQ ID NO: 48478 - DNA, 15 bp, Homo sapiens
gacagatatcaacag

SEQ ID NO: 48479 - DNA, 15 bp, Homo sapiens
agacagatatcaaca

SEQ ID NO: 48480 - DNA, 15 bp, Homo sapiens
aagacagatatcaac

SEQ ID NO: 48481 - DNA, 15 bp, Homo sapiens
taagacagatatcaa

SEQ ID NO: 48482 - DNA, 15 bp, Homo sapiens
ttaagacagatatca

SEQ ID NO: 48483 - DNA, 15 bp, Homo sapiens
tttaagacagatatc

SEQ ID NO: 48484 - DNA, 15 bp, Homo sapiens
ttttaagacagatat

SEQ ID NO: 48485 - DNA, 15 bp, Homo sapiens
cttttaagacagata

SEQ ID NO: 48486 - DNA, 15 bp, Homo sapiens
acttttaagacagat

SEQ ID NO: 48487 - DNA, 15 bp, Homo sapiens
aacttttaagacaga

SEQ ID NO: 48488 - DNA, 15 bp, Homo sapiens
taacttttaagacag

SEQ ID NO: 48489 - DNA, 15 bp, Homo sapiens
gtaacttttaagaca

SEQ ID NO: 48490 - DNA, 15 bp, Homo sapiens
agtaacttttaagac

SEQ ID NO: 48491 - DNA, 15 bp, Homo sapiens
aagtaacttttaaga

SEQ ID NO: 48492 - DNA, 15 bp, Homo sapiens
aaagtaacttttaag

SEQ ID NO: 48493 - DNA, 15 bp, Homo sapiens
aaaagtaacttttaa

SEQ ID NO: 48494 - DNA, 15 bp, Homo sapiens
caaaagtaactttta

SEQ ID NO: 48495 - DNA, 15 bp, Homo sapiens
tcaaaagtaactttt

SEQ ID NO: 48496 - DNA, 15 bp, Homo sapiens
atcaaaagtaacttt

SEQ ID NO: 48497 - DNA, 15 bp, Homo sapiens
catcaaaagtaactt

SEQ ID NO: 48498 - DNA, 15 bp, Homo sapiens
acatcaaaagtaact

SEQ ID NO: 48499 - DNA, 15 bp, Homo sapiens
tacatcaaaagtaac

SEQ ID NO: 48500 - DNA, 15 bp, Homo sapiens
ctacatcaaaagtaa

SEQ ID NO: 48501 - DNA, 15 bp, Homo sapiens
actacatcaaaagta

SEQ ID NO: 48502 - DNA, 15 bp, Homo sapiens
aactacatcaaaagt

SEQ ID NO: 48503 - DNA, 15 bp, Homo sapiens
gaactacatcaaaag

SEQ ID NO: 48504 - DNA, 15 bp, Homo sapiens
tgaactacatcaaaa

SEQ ID NO: 48505 - DNA, 15 bp, Homo sapiens
gtgaactacatcaaa

SEQ ID NO: 48506 - DNA, 15 bp, Homo sapiens
tgtgaactacatcaa

SEQ ID NO: 48507 - DNA, 15 bp, Homo sapiens
ttgtgaactacatca

SEQ ID NO: 48508 - DNA, 15 bp, Homo sapiens
tttgtgaactacatc

SEQ ID NO: 48509 - DNA, 15 bp, Homo sapiens
atttgtgaactacat

SEQ ID NO: 48510 - DNA, 15 bp, Homo sapiens
catttgtgaactaca

SEQ ID NO: 48511 - DNA, 15 bp, Homo sapiens
acatttgtgaactac

SEQ ID NO: 48512 - DNA, 15 bp, Homo sapiens
tacatttgtgaacta

SEQ ID NO: 48513 - DNA, 15 bp, Homo sapiens
gtacatttgtgaact

SEQ ID NO: 48514 - DNA, 15 bp, Homo sapiens
ggtacatttgtgaac

SEQ ID NO: 48515 - DNA, 15 bp, Homo sapiens
tggtacatttgtgaa

SEQ ID NO: 48516 - DNA, 15 bp, Homo sapiens
ctggtacatttgtga

SEQ ID NO: 48517 - DNA, 15 bp, Homo sapiens
tctggtacatttgtg

SEQ ID NO: 48518 - DNA, 15 bp, Homo sapiens
atctggtacatttgt

SEQ ID NO: 48519 - DNA, 15 bp, Homo sapiens
tatctggtacatttg

SEQ ID NO: 48520 - DNA, 15 bp, Homo sapiens
ttatctggtacattt

SEQ ID NO: 48521 - DNA, 15 bp, Homo sapiens
attatctggtacatt

SEQ ID NO: 48522 - DNA, 15 bp, Homo sapiens
aattatctggtacat

SEQ ID NO: 48523 - DNA, 15 bp, Homo sapiens
taattatctggtaca

SEQ ID NO: 48524 - DNA, 15 bp, Homo sapiens
ataattatctggtac

SEQ ID NO: 48525 - DNA, 15 bp, Homo sapiens
aataattatctggta

SEQ ID NO: 48526 - DNA, 15 bp, Homo sapiens
aaataattatctggt

SEQ ID NO: 48527 - DNA, 15 bp, Homo sapiens
gaaataattatctgg

SEQ ID NO: 48528 - DNA, 15 bp, Homo sapiens
tgaaataattatctg

SEQ ID NO: 48529 - DNA, 15 bp, Homo sapiens
atgaaataattatct

SEQ ID NO: 48530 - DNA, 15 bp, Homo sapiens
gatgaaataattatc

SEQ ID NO: 48531 - DNA, 15 bp, Homo sapiens
cgatgaaataattat

SEQ ID NO: 48532 - DNA, 15 bp, Homo sapiens
acgatgaaataatta

SEQ ID NO: 48533 - DNA, 15 bp, Homo sapiens
aacgatgaaataatt

SEQ ID NO: 48534 - DNA, 15 bp, Homo sapiens
aaacgatgaaataat

SEQ ID NO: 48535 - DNA, 15 bp, Homo sapiens
aaaacgatgaaataa

SEQ ID NO: 48536 - DNA, 15 bp, Homo sapiens
aaaaacgatgaaata

SEQ ID NO: 48537 - DNA, 15 bp, Homo sapiens
taaaaacgatgaaat

SEQ ID NO: 48538 - DNA, 15 bp, Homo sapiens
ttaaaaacgatgaaa

SEQ ID NO: 48539 - DNA, 15 bp, Homo sapiens
attaaaaacgatgaa

SEQ ID NO: 48540 - DNA, 15 bp, Homo sapiens
cattaaaaacgatga

SEQ ID NO: 48541 - DNA, 15 bp, Homo sapiens
gcattaaaaacgatg

SEQ ID NO: 48542 - DNA, 15 bp, Homo sapiens
agcattaaaaacgat

SEQ ID NO: 48543 - DNA, 15 bp, Homo sapiens
aagcattaaaaacga

SEQ ID NO: 48544 - DNA, 15 bp, Homo sapiens
taagcattaaaaacg

SEQ ID NO: 48545 - DNA, 15 bp, Homo sapiens
ttaagcattaaaaac

SEQ ID NO: 48546 - DNA, 15 bp, Homo sapiens
tttaagcattaaaaa

SEQ ID NO: 48547 - DNA, 15 bp, Homo sapiens
ctttaagcattaaaa

SEQ ID NO: 48548 - DNA, 15 bp, Homo sapiens
actttaagcattaaa

SEQ ID NO: 48549 - DNA, 15 bp, Homo sapiens
aactttaagcattaa

SEQ ID NO: 48550 - DNA, 15 bp, Homo sapiens
aaactttaagcatta

SEQ ID NO: 48551 - DNA, 15 bp, Homo sapiens
aaaactttaagcatt

SEQ ID NO: 48552 - DNA, 15 bp, Homo sapiens
aaaaactttaagcat

SEQ ID NO: 48553 - DNA, 15 bp, Homo sapiens
taaaaactttaagca

SEQ ID NO: 48554 - DNA, 15 bp, Homo sapiens
ataaaaactttaagc

SEQ ID NO: 48555 - DNA, 15 bp, Homo sapiens
aataaaaactttaag

SEQ ID NO: 48556 - DNA, 15 bp, Homo sapiens
aaataaaaactttaa

SEQ ID NO: 48557 - DNA, 15 bp, Homo sapiens
caaataaaaacttta

SEQ ID NO: 48558 - DNA, 15 bp, Homo sapiens
acaaataaaaacttt

SEQ ID NO: 48559 - DNA, 15 bp, Homo sapiens
tacaaataaaaactt

SEQ ID NO: 48560 - DNA, 15 bp, Homo sapiens
atacaaataaaaact

SEQ ID NO: 48561 - DNA, 15 bp, Homo sapiens
aatacaaataaaaac

SEQ ID NO: 48562 - DNA, 15 bp, Homo sapiens
taatacaaataaaaa

SEQ ID NO: 48563 - DNA, 15 bp, Homo sapiens
ctaatacaaataaaa

SEQ ID NO: 48564 - DNA, 15 bp, Homo sapiens
cctaatacaaataaa

SEQ ID NO: 48565 - DNA, 15 bp, Homo sapiens
tcctaatacaaataa

SEQ ID NO: 48566 - DNA, 15 bp, Homo sapiens
atcctaatacaaata

SEQ ID NO: 48567 - DNA, 15 bp, Homo sapiens
aatcctaatacaaat

SEQ ID NO: 48568 - DNA, 15 bp, Homo sapiens
aaatcctaatacaaa

SEQ ID NO: 48569 - DNA, 15 bp, Homo sapiens
aaaatcctaatacaa

SEQ ID NO: 48570 - DNA, 15 bp, Homo sapiens
aaaaatcctaataca

SEQ ID NO: 48571 - DNA, 15 bp, Homo sapiens
taaaaatcctaatac

SEQ ID NO: 48572 - DNA, 15 bp, Homo sapiens
ctaaaaatcctaata

SEQ ID NO: 48573 - DNA, 15 bp, Homo sapiens
actaaaaatcctaat

SEQ ID NO: 48574 - DNA, 15 bp, Homo sapiens
tactaaaaatcctaa

SEQ ID NO: 48575 - DNA, 15 bp, Homo sapiens
atactaaaaatccta

SEQ ID NO: 48576 - DNA, 15 bp, Homo sapiens
catactaaaaatcct

SEQ ID NO: 48577 - DNA, 15 bp, Homo sapiens
tcatactaaaaatcc

SEQ ID NO: 48578 - DNA, 15 bp, Homo sapiens
atcatactaaaaatc

SEQ ID NO: 48579 - DNA, 15 bp, Homo sapiens
aatcatactaaaaat

SEQ ID NO: 48580 - DNA, 15 bp, Homo sapiens
aaatcatactaaaaa

SEQ ID NO: 48581 - DNA, 15 bp, Homo sapiens
aaaatcatactaaaa

SEQ ID NO: 48582 - DNA, 15 bp, Homo sapiens
taaaatcatactaaa

SEQ ID NO: 48583 - DNA, 15 bp, Homo sapiens
ttaaaatcatactaa

SEQ ID NO: 48584 - DNA, 15 bp, Homo sapiens
attaaaatcatacta

SEQ ID NO: 48585 - DNA, 15 bp, Homo sapiens
cattaaaatcatact

SEQ ID NO: 48586 - DNA, 15 bp, Homo sapiens
acattaaaatcatac

SEQ ID NO: 48587 - DNA, 15 bp, Homo sapiens
aacattaaaatcata

SEQ ID NO: 48588 - DNA, 15 bp, Homo sapiens
taacattaaaatcat

SEQ ID NO: 48589 - DNA, 15 bp, Homo sapiens
ttaacattaaaatca

SEQ ID NO: 48590 - DNA, 15 bp, Homo sapiens
tttaacattaaaatc

SEQ ID NO: 48591 - DNA, 15 bp, Homo sapiens
ctttaacattaaaat

SEQ ID NO: 48592 - DNA, 15 bp, Homo sapiens
actttaacattaaaa

SEQ ID NO: 48593 - DNA, 15 bp, Homo sapiens
aactttaacattaaa

SEQ ID NO: 48594 - DNA, 15 bp, Homo sapiens
aaactttaacattaa

SEQ ID NO: 48595 - DNA, 15 bp, Homo sapiens
aaaactttaacatta

SEQ ID NO: 48596 - DNA, 15 bp, Homo sapiens
caaaactttaacatt

SEQ ID NO: 48597 - DNA, 15 bp, Homo sapiens
tcaaaactttaacat

SEQ ID NO: 48598 - DNA, 15 bp, Homo sapiens
ttcaaaactttaaca

SEQ ID NO: 48599 - DNA, 15 bp, Homo sapiens
cttcaaaactttaac

SEQ ID NO: 48600 - DNA, 15 bp, Homo sapiens
acttcaaaactttaa

SEQ ID NO: 48601 - DNA, 15 bp, Homo sapiens
aacttcaaaacttta

SEQ ID NO: 48602 - DNA, 15 bp, Homo sapiens
taacttcaaaacttt

SEQ ID NO: 48603 - DNA, 15 bp, Homo sapiens
gtaacttcaaaactt

SEQ ID NO: 48604 - DNA, 15 bp, Homo sapiens
agtaacttcaaaact

SEQ ID NO: 48605 - DNA, 15 bp, Homo sapiens
gagtaacttcaaaac

SEQ ID NO: 48606 - DNA, 15 bp, Homo sapiens
agagtaacttcaaaa

SEQ ID NO: 48607 - DNA, 15 bp, Homo sapiens
cagagtaacttcaaa

SEQ ID NO: 48608 - DNA, 15 bp, Homo sapiens
gcagagtaacttcaa

SEQ ID NO: 48609 - DNA, 15 bp, Homo sapiens
ggcagagtaacttca

SEQ ID NO: 48610 - DNA, 15 bp, Homo sapiens
tggcagagtaacttc

SEQ ID NO: 48611 - DNA, 15 bp, Homo sapiens
gtggcagagtaactt

SEQ ID NO: 48612 - DNA, 15 bp, Homo sapiens
agtggcagagtaact

SEQ ID NO: 48613 - DNA, 15 bp, Homo sapiens
tagtggcagagtaac

SEQ ID NO: 48614 - DNA, 15 bp, Homo sapiens
ctagtggcagagtaa

SEQ ID NO: 48615 - DNA, 15 bp, Homo sapiens
tctagtggcagagta

SEQ ID NO: 48616 - DNA, 15 bp, Homo sapiens
ttctagtggcagagt

SEQ ID NO: 48617 - DNA, 15 bp, Homo sapiens
cttctagtggcagag

SEQ ID NO: 48618 - DNA, 15 bp, Homo sapiens
acttctagtggcaga

SEQ ID NO: 48619 - DNA, 15 bp, Homo sapiens
gacttctagtggcag

SEQ ID NO: 48620 - DNA, 15 bp, Homo sapiens
agacttctagtggca

SEQ ID NO: 48621 - DNA, 15 bp, Homo sapiens
tagacttctagtggc

SEQ ID NO: 48622 - DNA, 15 bp, Homo sapiens
ttagacttctagtgg

SEQ ID NO: 48623 - DNA, 15 bp, Homo sapiens
attagacttctagtg

SEQ ID NO: 48624 - DNA, 15 bp, Homo sapiens
aattagacttctagt

SEQ ID NO: 48625 - DNA, 15 bp, Homo sapiens
aaattagacttctag

SEQ ID NO: 48626 - DNA, 15 bp, Homo sapiens
aaaattagacttcta

SEQ ID NO: 48627 - DNA, 15 bp, Homo sapiens
caaaattagacttct

SEQ ID NO: 48628 - DNA, 15 bp, Homo sapiens
ccaaaattagacttc

SEQ ID NO: 48629 - DNA, 15 bp, Homo sapiens
cccaaaattagactt

SEQ ID NO: 48630 - DNA, 15 bp, Homo sapiens
tcccaaaattagact

SEQ ID NO: 48631 - DNA, 15 bp, Homo sapiens
gtcccaaaattagac

SEQ ID NO: 48632 - DNA, 15 bp, Homo sapiens
agtcccaaaattaga

SEQ ID NO: 48633 - DNA, 15 bp, Homo sapiens
aagtcccaaaattag

SEQ ID NO: 48634 - DNA, 15 bp, Homo sapiens
taagtcccaaaatta

SEQ ID NO: 48635 - DNA, 15 bp, Homo sapiens
gtaagtcccaaaatt

SEQ ID NO: 48636 - DNA, 15 bp, Homo sapiens
agtaagtcccaaaat

SEQ ID NO: 48637 - DNA, 15 bp, Homo sapiens
tagtaagtcccaaaa

SEQ ID NO: 48638 - DNA, 15 bp, Homo sapiens
atagtaagtcccaaa

SEQ ID NO: 48639 - DNA, 15 bp, Homo sapiens
aatagtaagtcccaa

SEQ ID NO: 48640 - DNA, 15 bp, Homo sapiens
gaatagtaagtccca

SEQ ID NO: 48641 - DNA, 15 bp, Homo sapiens
tgaatagtaagtccc

SEQ ID NO: 48642 - DNA, 15 bp, Homo sapiens
atgaatagtaagtcc

SEQ ID NO: 48643 - DNA, 15 bp, Homo sapiens
catgaatagtaagtc

SEQ ID NO: 48644 - DNA, 15 bp, Homo sapiens
tcatgaatagtaagt

SEQ ID NO: 48645 - DNA, 15 bp, Homo sapiens
ttcatgaatagtaag

SEQ ID NO: 48646 - DNA, 15 bp, Homo sapiens
tttcatgaatagtaa

SEQ ID NO: 48647 - DNA, 15 bp, Homo sapiens
atttcatgaatagta

SEQ ID NO: 48648 - DNA, 15 bp, Homo sapiens
tatttcatgaatagt

SEQ ID NO: 48649 - DNA, 15 bp, Homo sapiens
ctatttcatgaatag

SEQ ID NO: 48650 - DNA, 15 bp, Homo sapiens
cctatttcatgaata

SEQ ID NO: 48651 - DNA, 15 bp, Homo sapiens
tcctatttcatgaat

SEQ ID NO: 48652 - DNA, 15 bp, Homo sapiens
ttcctatttcatgaa

SEQ ID NO: 48653 - DNA, 15 bp, Homo sapiens
attcctatttcatga

SEQ ID NO: 48654 - DNA, 15 bp, Homo sapiens
aattcctatttcatg

SEQ ID NO: 48655 - DNA, 15 bp, Homo sapiens
caattcctatttcat

SEQ ID NO: 48656 - DNA, 15 bp, Homo sapiens
tcaattcctatttca

SEQ ID NO: 48657 - DNA, 15 bp, Homo sapiens
gtcaattcctatttc

SEQ ID NO: 48658 - DNA, 15 bp, Homo sapiens
agtcaattcctattt

SEQ ID NO: 48659 - DNA, 15 bp, Homo sapiens
aagtcaattcctatt

SEQ ID NO: 48660 - DNA, 15 bp, Homo sapiens
aaagtcaattcctat

SEQ ID NO: 48661 - DNA, 15 bp, Homo sapiens
aaaagtcaattccta

SEQ ID NO: 48662 - DNA, 15 bp, Homo sapiens
taaaagtcaattcct

SEQ ID NO: 48663 - DNA, 15 bp, Homo sapiens
ataaaagtcaattcc

SEQ ID NO: 48664 - DNA, 15 bp, Homo sapiens
tataaaagtcaattc

SEQ ID NO: 48665 - DNA, 15 bp, Homo sapiens
atataaaagtcaatt

SEQ ID NO: 48666 - DNA, 15 bp, Homo sapiens
tatataaaagtcaat

SEQ ID NO: 48667 - DNA, 15 bp, Homo sapiens
ttatataaaagtcaa

SEQ ID NO: 48668 - DNA, 15 bp, Homo sapiens
cttatataaaagtca

SEQ ID NO: 48669 - DNA, 15 bp, Homo sapiens
acttatataaaagtc

SEQ ID NO: 48670 - DNA, 15 bp, Homo sapiens
tacttatataaaagt

SEQ ID NO: 48671 - DNA, 15 bp, Homo sapiens
ttacttatataaaag

SEQ ID NO: 48672 - DNA, 15 bp, Homo sapiens
attacttatataaaa

SEQ ID NO: 48673 - DNA, 15 bp, Homo sapiens
tattacttatataaa

SEQ ID NO: 48674 - DNA, 15 bp, Homo sapiens
ctattacttatataa

SEQ ID NO: 48675 - DNA, 15 bp, Homo sapiens
cctattacttatata

SEQ ID NO: 48676 - DNA, 15 bp, Homo sapiens
tcctattacttatat

SEQ ID NO: 48677 - DNA, 15 bp, Homo sapiens
gtcctattacttata

SEQ ID NO: 48678 - DNA, 15 bp, Homo sapiens
ggtcctattacttat

SEQ ID NO: 48679 - DNA, 15 bp, Homo sapiens
aggtcctattactta

SEQ ID NO: 48680 - DNA, 15 bp, Homo sapiens
aaggtcctattactt

SEQ ID NO: 48681 - DNA, 15 bp, Homo sapiens
taaggtcctattact

SEQ ID NO: 48682 - DNA, 15 bp, Homo sapiens
ataaggtcctattac

SEQ ID NO: 48683 - DNA, 15 bp, Homo sapiens
aataaggtcctatta

SEQ ID NO: 48684 - DNA, 15 bp, Homo sapiens
aaataaggtcctatt

SEQ ID NO: 48685 - DNA, 15 bp, Homo sapiens
aaaataaggtcctat

SEQ ID NO: 48686 - DNA, 15 bp, Homo sapiens
caaaataaggtccta

SEQ ID NO: 48687 - DNA, 15 bp, Homo sapiens
tcaaaataaggtcct

SEQ ID NO: 48688 - DNA, 15 bp, Homo sapiens
ttcaaaataaggtcc

SEQ ID NO: 48689 - DNA, 15 bp, Homo sapiens
cttcaaaataaggtc

SEQ ID NO: 48690 - DNA, 15 bp, Homo sapiens
ccttcaaaataaggt

SEQ ID NO: 48691 - DNA, 15 bp, Homo sapiens
accttcaaaataagg

SEQ ID NO: 48692 - DNA, 15 bp, Homo sapiens
aaccttcaaaataag

SEQ ID NO: 48693 - DNA, 15 bp, Homo sapiens
gaaccttcaaaataa

SEQ ID NO: 48694 - DNA, 15 bp, Homo sapiens
tgaaccttcaaaata

SEQ ID NO: 48695 - DNA, 15 bp, Homo sapiens
ttgaaccttcaaaat

SEQ ID NO: 48696 - DNA, 15 bp, Homo sapiens
tttgaaccttcaaaa

SEQ ID NO: 48697 - DNA, 15 bp, Homo sapiens
gtttgaaccttcaaa

SEQ ID NO: 48698 - DNA, 15 bp, Homo sapiens
agtttgaaccttcaa

SEQ ID NO: 48699 - DNA, 15 bp, Homo sapiens
cagtttgaaccttca

SEQ ID NO: 48700 - DNA, 15 bp, Homo sapiens
ccagtttgaaccttc

SEQ ID NO: 48701 - DNA, 15 bp, Homo sapiens
tccagtttgaacctt

SEQ ID NO: 48702 - DNA, 15 bp, Homo sapiens
ctccagtttgaacct

SEQ ID NO: 48703 - DNA, 15 bp, Homo sapiens
tctccagtttgaacc

SEQ ID NO: 48704 - DNA, 15 bp, Homo sapiens
ttctccagtttgaac

SEQ ID NO: 48705 - DNA, 15 bp, Homo sapiens
tttctccagtttgaa

SEQ ID NO: 48706 - DNA, 15 bp, Homo sapiens
ttttctccagtttga

SEQ ID NO: 48707 - DNA, 15 bp, Homo sapiens
attttctccagtttg

SEQ ID NO: 48708 - DNA, 15 bp, Homo sapiens
gattttctccagttt

SEQ ID NO: 48709 - DNA, 15 bp, Homo sapiens
agattttctccagtt

SEQ ID NO: 48710 - DNA, 15 bp, Homo sapiens
aagattttctccagt

SEQ ID NO: 48711 - DNA, 15 bp, Homo sapiens
taagattttctccag

SEQ ID NO: 48712 - DNA, 15 bp, Homo sapiens
gtaagattttctcca

SEQ ID NO: 48713 - DNA, 15 bp, Homo sapiens
tgtaagattttctcc

SEQ ID NO: 48714 - DNA, 15 bp, Homo sapiens
atgtaagattttctc

SEQ ID NO: 48715 - DNA, 15 bp, Homo sapiens
aatgtaagattttct

SEQ ID NO: 48716 - DNA, 15 bp, Homo sapiens
caatgtaagattttc

SEQ ID NO: 48717 - DNA, 15 bp, Homo sapiens
acaatgtaagatttt

SEQ ID NO: 48718 - DNA, 15 bp, Homo sapiens
aacaatgtaagattt

SEQ ID NO: 48719 - DNA, 15 bp, Homo sapiens
aaacaatgtaagatt

SEQ ID NO: 48720 - DNA, 15 bp, Homo sapiens
taaacaatgtaagat

SEQ ID NO: 48721 - DNA, 15 bp, Homo sapiens
ataaacaatgtaaga

SEQ ID NO: 48722 - DNA, 15 bp, Homo sapiens
tataaacaatgtaag

SEQ ID NO: 48723 - DNA, 15 bp, Homo sapiens
atataaacaatgtaa

SEQ ID NO: 48724 - DNA, 15 bp, Homo sapiens
aatataaacaatgta

SEQ ID NO: 48725 - DNA, 15 bp, Homo sapiens
aaatataaacaatgt

SEQ ID NO: 48726 - DNA, 15 bp, Homo sapiens
aaaatataaacaatg

SEQ ID NO: 48727 - DNA, 15 bp, Homo sapiens
aaaaatataaacaat

SEQ ID NO: 48728 - DNA, 15 bp, Homo sapiens
taaaaatataaacaa

SEQ ID NO: 48729 - DNA, 15 bp, Homo sapiens
ataaaaatataaaca

SEQ ID NO: 48730 - DNA, 15 bp, Homo sapiens
aataaaaatataaac

SEQ ID NO: 48731 - DNA, 15 bp, Homo sapiens
gaaataaaaatataa

SEQ ID NO: 48732 - DNA, 15 bp, Homo sapiens
tgaaataaaaatata

SEQ ID NO: 48733 - DNA, 15 bp, Homo sapiens
atgaaataaaaatat

SEQ ID NO: 48734 - DNA, 15 bp, Homo sapiens
aatgaaataaaaata

SEQ ID NO: 48735 - DNA, 15 bp, Homo sapiens
aaatgaaataaaaat

SEQ ID NO: 48736 - DNA, 15 bp, Homo sapiens
taaatgaaataaaaa

SEQ ID NO: 48737 - DNA, 15 bp, Homo sapiens
ataaatgaaataaaa

SEQ ID NO: 48738 - DNA, 15 bp, Homo sapiens
aataaatgaaataaa

SEQ ID NO: 48739 - DNA, 15 bp, Homo sapiens
aaataaatgaaataa

SEQ ID NO: 48740 - DNA, 15 bp, Homo sapiens
gaaataaatgaaata

SEQ ID NO: 48741 - DNA, 15 bp, Homo sapiens
tgaaataaatgaaat

SEQ ID NO: 48742 - DNA, 15 bp, Homo sapiens
ctgaaataaatgaaa

SEQ ID NO: 48743 - DNA, 15 bp, Homo sapiens
actgaaataaatgaa

SEQ ID NO: 48744 - DNA, 15 bp, Homo sapiens
aactgaaataaatga

SEQ ID NO: 48745 - DNA, 15 bp, Homo sapiens
caactgaaataaatg

SEQ ID NO: 48746 - DNA, 15 bp, Homo sapiens
tcaactgaaataaat

SEQ ID NO: 48747 - DNA, 15 bp, Homo sapiens
atcaactgaaataaa

SEQ ID NO: 48748 - DNA, 15 bp, Homo sapiens
aatcaactgaaataa

SEQ ID NO: 48749 - DNA, 15 bp, Homo sapiens
aaatcaactgaaata

SEQ ID NO: 48750 - DNA, 15 bp, Homo sapiens
caaatcaactgaaat

SEQ ID NO: 48751 - DNA, 15 bp, Homo sapiens
gcaaatcaactgaaa

SEQ ID NO: 48752 - DNA, 15 bp, Homo sapiens
agcaaatcaactgaa

SEQ ID NO: 48753 - DNA, 15 bp, Homo sapiens
aagcaaatcaactga

SEQ ID NO: 48754 - DNA, 15 bp, Homo sapiens
caagcaaatcaactg

SEQ ID NO: 48755 - DNA, 15 bp, Homo sapiens
tcaagcaaatcaact

SEQ ID NO: 48756 - DNA, 15 bp, Homo sapiens
ctcaagcaaatcaac

SEQ ID NO: 48757 - DNA, 15 bp, Homo sapiens
tctcaagcaaatcaa

SEQ ID NO: 48758 - DNA, 15 bp, Homo sapiens
atctcaagcaaatca

SEQ ID NO: 48759 - DNA, 15 bp, Homo sapiens
gatctcaagcaaatc

SEQ ID NO: 48760 - DNA, 15 bp, Homo sapiens
tgatctcaagcaaat

SEQ ID NO: 48761 - DNA, 15 bp, Homo sapiens
ttgatctcaagcaaa

SEQ ID NO: 48762 - DNA, 15 bp, Homo sapiens
cttgatctcaagcaa

SEQ ID NO: 48763 - DNA, 15 bp, Homo sapiens
tcttgatctcaagca

SEQ ID NO: 48764 - DNA, 15 bp, Homo sapiens
atcttgatctcaagc

SEQ ID NO: 48765 - DNA, 15 bp, Homo sapiens
aatcttgatctcaag

SEQ ID NO: 48766 - DNA, 15 bp, Homo sapiens
caatcttgatctcaa

SEQ ID NO: 48767 - DNA, 15 bp, Homo sapiens
gcaatcttgatctca

SEQ ID NO: 48768 - DNA, 15 bp, Homo sapiens
tgcaatcttgatctc

SEQ ID NO: 48769 - DNA, 15 bp, Homo sapiens
ctgcaatcttgatct

SEQ ID NO: 48770 - DNA, 15 bp, Homo sapiens
tctgcaatcttgatc

SEQ ID NO: 48771 - DNA, 15 bp, Homo sapiens
atctgcaatcttgat

SEQ ID NO: 48772 - DNA, 15 bp, Homo sapiens
tatctgcaatcttga

SEQ ID NO: 48773 - DNA, 15 bp, Homo sapiens
gtatctgcaatcttg

SEQ ID NO: 48774 - DNA, 15 bp, Homo sapiens
tgtatctgcaatctt

SEQ ID NO: 48775 - DNA, 15 bp, Homo sapiens
ctgtatctgcaatct

SEQ ID NO: 48776 - DNA, 15 bp, Homo sapiens
tctgtatctgcaatc

SEQ ID NO: 48777 - DNA, 15 bp, Homo sapiens
ttctgtatctgcaat

SEQ ID NO: 48778 - DNA, 15 bp, Homo sapiens
attctgtatctgcaa

SEQ ID NO: 48779 - DNA, 15 bp, Homo sapiens
gattctgtatctgca

SEQ ID NO: 48780 - DNA, 15 bp, Homo sapiens
ggattctgtatctgc

SEQ ID NO: 48781 - DNA, 15 bp, Homo sapiens
tggattctgtatctg

SEQ ID NO: 48782 - DNA, 15 bp, Homo sapiens
atggattctgtatct

SEQ ID NO: 48783 - DNA, 15 bp, Homo sapiens
tatggattctgtatc

SEQ ID NO: 48784 - DNA, 15 bp, Homo sapiens
atatggattctgtat

SEQ ID NO: 48785 - DNA, 15 bp, Homo sapiens
aatatggattctgta

SEQ ID NO: 48786 - DNA, 15 bp, Homo sapiens
aaatatggattctgt

SEQ ID NO: 48787 - DNA, 15 bp, Homo sapiens
gaaatatggattctg

SEQ ID NO: 48788 - DNA, 15 bp, Homo sapiens
cgaaatatggattct

SEQ ID NO: 48789 - DNA, 15 bp, Homo sapiens
acgaaatatggattc

SEQ ID NO: 48790 - DNA, 15 bp, Homo sapiens
cacgaaatatggatt

SEQ ID NO: 48791 - DNA, 15 bp, Homo sapiens
acacgaaatatggat

SEQ ID NO: 48792 - DNA, 15 bp, Homo sapiens
tacacgaaatatgga

SEQ ID NO: 48793 - DNA, 15 bp, Homo sapiens
atacacgaaatatgg

SEQ ID NO: 48794 - DNA, 15 bp, Homo sapiens
tatacacgaaatatg

SEQ ID NO: 48795 - DNA, 15 bp, Homo sapiens
atatacacgaaatat

SEQ ID NO: 48796 - DNA, 15 bp, Homo sapiens
aatatacacgaaata

SEQ ID NO: 48797 - DNA, 15 bp, Homo sapiens
caatatacacgaaat

SEQ ID NO: 48798 - DNA, 15 bp, Homo sapiens
gcaatatacacgaaa

SEQ ID NO: 48799 - DNA, 15 bp, Homo sapiens
agcaatatacacgaa

SEQ ID NO: 48800 - DNA, 15 bp, Homo sapiens
cagcaatatacacga

SEQ ID NO: 48801 - DNA, 15 bp, Homo sapiens
tcagcaatatacacg

SEQ ID NO: 48802 - DNA, 15 bp, Homo sapiens
atcagcaatatacac

SEQ ID NO: 48803 - DNA, 15 bp, Homo sapiens
tatcagcaatataca

SEQ ID NO: 48804 - DNA, 15 bp, Homo sapiens
atatcagcaatatac

SEQ ID NO: 48805 - DNA, 15 bp, Homo sapiens
aatatcagcaatata

SEQ ID NO: 48806 - DNA, 15 bp, Homo sapiens
taatatcagcaatat

SEQ ID NO: 48807 - DNA, 15 bp, Homo sapiens
ttaatatcagcaata

SEQ ID NO: 48808 - DNA, 15 bp, Homo sapiens
attaatatcagcaat

SEQ ID NO: 48809 - DNA, 15 bp, Homo sapiens
gattaatatcagcaa

SEQ ID NO: 48810 - DNA, 15 bp, Homo sapiens
tgattaatatcagca

SEQ ID NO: 48811 - DNA, 15 bp, Homo sapiens
atgattaatatcagc

SEQ ID NO: 48812 - DNA, 15 bp, Homo sapiens
aatgattaatatcag

SEQ ID NO: 48813 - DNA, 15 bp, Homo sapiens
taatgattaatatca

SEQ ID NO: 48814 - DNA, 15 bp, Homo sapiens
ttaatgattaatatc

SEQ ID NO: 48815 - DNA, 15 bp, Homo sapiens
tttaatgattaatat

SEQ ID NO: 48816 - DNA, 15 bp, Homo sapiens
ttttaatgattaata

SEQ ID NO: 48817 - DNA, 15 bp, Homo sapiens
attttaatgattaat

SEQ ID NO: 48818 - DNA, 15 bp, Homo sapiens
gattttaatgattaa

SEQ ID NO: 48819 - DNA, 15 bp, Homo sapiens
cgattttaatgatta

SEQ ID NO: 48820 - DNA, 15 bp, Homo sapiens
acgattttaatgatt

SEQ ID NO: 48821 - DNA, 15 bp, Homo sapiens
aacgattttaatgat

SEQ ID NO: 48822 - DNA, 15 bp, Homo sapiens
aaacgattttaatga

SEQ ID NO: 48823 - DNA, 15 bp, Homo sapiens
aaaacgattttaatg

SEQ ID NO: 48824 - DNA, 15 bp, Homo sapiens
aaaaacgattttaat

SEQ ID NO: 48825 - DNA, 15 bp, Homo sapiens
caaaaacgattttaa

SEQ ID NO: 48826 - DNA, 15 bp, Homo sapiens
tcaaaaacgatttta

SEQ ID NO: 48827 - DNA, 15 bp, Homo sapiens
gtcaaaaacgatttt

SEQ ID NO: 48828 - DNA, 15 bp, Homo sapiens
tgtcaaaaacgattt

SEQ ID NO: 48829 - DNA, 15 bp, Homo sapiens
ctgtcaaaaacgatt

SEQ ID NO: 48830 - DNA, 15 bp, Homo sapiens
actgtcaaaaacgat

SEQ ID NO: 48831 - DNA, 15 bp, Homo sapiens
aactgtcaaaaacga

SEQ ID NO: 48832 - DNA, 15 bp, Homo sapiens
aaactgtcaaaaacg

SEQ ID NO: 48833 - DNA, 15 bp, Homo sapiens
caaactgtcaaaaac

SEQ ID NO: 48834 - DNA, 15 bp, Homo sapiens
tcaaactgtcaaaaa

SEQ ID NO: 48835 - DNA, 15 bp, Homo sapiens
gtcaaactgtcaaaa

SEQ ID NO: 48836 - DNA, 15 bp, Homo sapiens
tgtcaaactgtcaaa

SEQ ID NO: 48837 - DNA, 15 bp, Homo sapiens
ctgtcaaactgtcaa

SEQ ID NO: 48838 - DNA, 15 bp, Homo sapiens
actgtcaaactgtca

SEQ ID NO: 48839 - DNA, 15 bp, Homo sapiens
aactgtcaaactgtc

SEQ ID NO: 48840 - DNA, 15 bp, Homo sapiens
taactgtcaaactgt

SEQ ID NO: 48841 - DNA, 15 bp, Homo sapiens
ttaactgtcaaactg

SEQ ID NO: 48842 - DNA, 15 bp, Homo sapiens
tttaactgtcaaact

SEQ ID NO: 48843 - DNA, 15 bp, Homo sapiens
ctttaactgtcaaac

SEQ ID NO: 48844 - DNA, 15 bp, Homo sapiens
cctttaactgtcaaa

SEQ ID NO: 48845 - DNA, 15 bp, Homo sapiens
gcctttaactgtcaa

SEQ ID NO: 48846 - DNA, 15 bp, Homo sapiens
tgcctttaactgtca

SEQ ID NO: 48847 - DNA, 15 bp, Homo sapiens
atgcctttaactgtc

SEQ ID NO: 48848 - DNA, 15 bp, Homo sapiens
aatgcctttaactgt

SEQ ID NO: 48849 - DNA, 15 bp, Homo sapiens
aaatgcctttaactg

SEQ ID NO: 48850 - DNA, 15 bp, Homo sapiens
gaaatgcctttaact

SEQ ID NO: 48851 - DNA, 15 bp, Homo sapiens
ggaaatgcctttaac

SEQ ID NO: 48852 - DNA, 15 bp, Homo sapiens
aggaaatgcctttaa

SEQ ID NO: 48853 - DNA, 15 bp, Homo sapiens
caggaaatgccttta

SEQ ID NO: 48854 - DNA, 15 bp, Homo sapiens
acaggaaatgccttt

SEQ ID NO: 48855 - DNA, 15 bp, Homo sapiens
cacaggaaatgcctt

SEQ ID NO: 48856 - DNA, 15 bp, Homo sapiens
tcacaggaaatgcct

SEQ ID NO: 48857 - DNA, 15 bp, Homo sapiens
ttcacaggaaatgcc

SEQ ID NO: 48858 - DNA, 15 bp, Homo sapiens
tttcacaggaaatgc

SEQ ID NO: 48859 - DNA, 15 bp, Homo sapiens
atttcacaggaaatg

SEQ ID NO: 48860 - DNA, 15 bp, Homo sapiens
tatttcacaggaaat

SEQ ID NO: 48861 - DNA, 15 bp, Homo sapiens
ttatttcacaggaaa

SEQ ID NO: 48862 - DNA, 15 bp, Homo sapiens
attatttcacaggaa

SEQ ID NO: 48863 - DNA, 15 bp, Homo sapiens
tattatttcacagga

SEQ ID NO: 48864 - DNA, 15 bp, Homo sapiens
gtattatttcacagg

SEQ ID NO: 48865 - DNA, 15 bp, Homo sapiens
agtattatttcacag

SEQ ID NO: 48866 - DNA, 15 bp, Homo sapiens
cagtattatttcaca

SEQ ID NO: 48867 - DNA, 15 bp, Homo sapiens
ccagtattatttcac

SEQ ID NO: 48868 - DNA, 15 bp, Homo sapiens
accagtattatttca

SEQ ID NO: 48869 - DNA, 15 bp, Homo sapiens
taccagtattatttc

SEQ ID NO: 48870 - DNA, 15 bp, Homo sapiens
ataccagtattattt

SEQ ID NO: 48871 - DNA, 15 bp, Homo sapiens
cataccagtattatt

SEQ ID NO: 48872 - DNA, 15 bp, Homo sapiens
acataccagtattat

SEQ ID NO: 48873 - DNA, 15 bp, Homo sapiens
tacataccagtatta

SEQ ID NO: 48874 - DNA, 15 bp, Homo sapiens
atacataccagtatt

SEQ ID NO: 48875 - DNA, 15 bp, Homo sapiens
aatacataccagtat

SEQ ID NO: 48876 - DNA, 15 bp, Homo sapiens
aaatacataccagta

SEQ ID NO: 48877 - DNA, 15 bp, Homo sapiens
taaatacataccagt

SEQ ID NO: 48878 - DNA, 15 bp, Homo sapiens
ttaaatacataccag

SEQ ID NO: 48879 - DNA, 15 bp, Homo sapiens
gttaaatacatacca

SEQ ID NO: 48880 - DNA, 15 bp, Homo sapiens
ggttaaatacatacc

SEQ ID NO: 48881 - DNA, 15 bp, Homo sapiens
tggttaaatacatac

SEQ ID NO: 48882 - DNA, 15 bp, Homo sapiens
atggttaaatacata

SEQ ID NO: 48883 - DNA, 15 bp, Homo sapiens
catggttaaatacat

SEQ ID NO: 48884 - DNA, 15 bp, Homo sapiens
gcatggttaaataca

SEQ ID NO: 48885 - DNA, 15 bp, Homo sapiens
tgcatggttaaatac

SEQ ID NO: 48886 - DNA, 15 bp, Homo sapiens
ctgcatggttaaata

SEQ ID NO: 48887 - DNA, 15 bp, Homo sapiens
tctgcatggttaaat

SEQ ID NO: 48888 - DNA, 15 bp, Homo sapiens
atctgcatggttaaa

SEQ ID NO: 48889 - DNA, 15 bp, Homo sapiens
gatctgcatggttaa

SEQ ID NO: 48890 - DNA, 15 bp, Homo sapiens
ggatctgcatggtta

SEQ ID NO: 48891 - DNA, 15 bp, Homo sapiens
aggatctgcatggtt

SEQ ID NO: 48892 - DNA, 15 bp, Homo sapiens
gaggatctgcatggt

SEQ ID NO: 48893 - DNA, 15 bp, Homo sapiens
tgaggatctgcatgg

SEQ ID NO: 48894 - DNA, 15 bp, Homo sapiens
ctgaggatctgcatg

SEQ ID NO: 48895 - DNA, 15 bp, Homo sapiens
actgaggatctgcat

SEQ ID NO: 48896 - DNA, 15 bp, Homo sapiens
aactgaggatctgca

SEQ ID NO: 48897 - DNA, 15 bp, Homo sapiens
aaactgaggatctgc

SEQ ID NO: 48898 - DNA, 15 bp, Homo sapiens
caaactgaggatctg

SEQ ID NO: 48899 - DNA, 15 bp, Homo sapiens
acaaactgaggatct

SEQ ID NO: 48900 - DNA, 15 bp, Homo sapiens
cacaaactgaggatc

SEQ ID NO: 48901 - DNA, 15 bp, Homo sapiens
ccacaaactgaggat

SEQ ID NO: 48902 - DNA, 15 bp, Homo sapiens
accacaaactgagga

SEQ ID NO: 48903 - DNA, 15 bp, Homo sapiens
gaccacaaactgagg

SEQ ID NO: 48904 - DNA, 15 bp, Homo sapiens
agaccacaaactgag

SEQ ID NO: 48905 - DNA, 15 bp, Homo sapiens
cagaccacaaactga

SEQ ID NO: 48906 - DNA, 15 bp, Homo sapiens
gcagaccacaaactg

SEQ ID NO: 48907 - DNA, 15 bp, Homo sapiens
ggcagaccacaaact

SEQ ID NO: 48908 - DNA, 15 bp, Homo sapiens
tggcagaccacaaac

SEQ ID NO: 48909 - DNA, 15 bp, Homo sapiens
ctggcagaccacaaa

SEQ ID NO: 48910 - DNA, 15 bp, Homo sapiens
gctggcagaccacaa

SEQ ID NO: 48911 - DNA, 15 bp, Homo sapiens
agctggcagaccaca

SEQ ID NO: 48912 - DNA, 15 bp, Homo sapiens
tagctggcagaccac

SEQ ID NO: 48913 - DNA, 15 bp, Homo sapiens
ttagctggcagacca

SEQ ID NO: 48914 - DNA, 15 bp, Homo sapiens
tttagctggcagacc

SEQ ID NO: 48915 - DNA, 15 bp, Homo sapiens
ctttagctggcagac

SEQ ID NO: 48916 - DNA, 15 bp, Homo sapiens
cctttagctggcaga

SEQ ID NO: 48917 - DNA, 15 bp, Homo sapiens
acctttagctggcag

SEQ ID NO: 48918 - DNA, 15 bp, Homo sapiens
cacctttagctggca

SEQ ID NO: 48919 - DNA, 15 bp, Homo sapiens
tcacctttagctggc

SEQ ID NO: 48920 - DNA, 15 bp, Homo sapiens
ttcacctttagctgg

SEQ ID NO: 48921 - DNA, 15 bp, Homo sapiens
cttcacctttagctg

SEQ ID NO: 48922 - DNA, 15 bp, Homo sapiens
tcttcacctttagct

SEQ ID NO: 48923 - DNA, 15 bp, Homo sapiens
atcttcacctttagc

SEQ ID NO: 48924 - DNA, 15 bp, Homo sapiens
tatcttcacctttag

SEQ ID NO: 48925 - DNA, 15 bp, Homo sapiens
atatcttcaccttta

SEQ ID NO: 48926 - DNA, 15 bp, Homo sapiens
tatatcttcaccttt

SEQ ID NO: 48927 - DNA, 15 bp, Homo sapiens
atatatcttcacctt

SEQ ID NO: 48928 - DNA, 15 bp, Homo sapiens
aatatatcttcacct

SEQ ID NO: 48929 - DNA, 15 bp, Homo sapiens
gaatatatcttcacc

SEQ ID NO: 48930 - DNA, 15 bp, Homo sapiens
ggaatatatcttcac

SEQ ID NO: 48931 - DNA, 15 bp, Homo sapiens
aggaatatatcttca

SEQ ID NO: 48932 - DNA, 15 bp, Homo sapiens
gaggaatatatcttc

SEQ ID NO: 48933 - DNA, 15 bp, Homo sapiens
ggaggaatatatctt

SEQ ID NO: 48934 - DNA, 15 bp, Homo sapiens
tggaggaatatatct

SEQ ID NO: 48935 - DNA, 15 bp, Homo sapiens
ttggaggaatatatc

SEQ ID NO: 48936 - DNA, 15 bp, Homo sapiens
attggaggaatatat

SEQ ID NO: 48937 - DNA, 15 bp, Homo sapiens
aattggaggaatata

SEQ ID NO: 48938 - DNA, 15 bp, Homo sapiens
gaattggaggaatat

SEQ ID NO: 48939 - DNA, 15 bp, Homo sapiens
tgaattggaggaata

SEQ ID NO: 48940 - DNA, 15 bp, Homo sapiens
ctgaattggaggaat

SEQ ID NO: 48941 - DNA, 15 bp, Homo sapiens
cctgaattggaggaa

SEQ ID NO: 48942 - DNA, 15 bp, Homo sapiens
tcctgaattggagga

SEQ ID NO: 48943 - DNA, 15 bp, Homo sapiens
gtcctgaattggagg

SEQ ID NO: 48944 - DNA, 15 bp, Homo sapiens
ggtcctgaattggag

SEQ ID NO: 48945 - DNA, 15 bp, Homo sapiens
gggtcctgaattgga

SEQ ID NO: 48946 - DNA, 15 bp, Homo sapiens
tgggtcctgaattgg

SEQ ID NO: 48947 - DNA, 15 bp, Homo sapiens
gtgggtcctgaattg

SEQ ID NO: 48948 - DNA, 15 bp, Homo sapiens
tgtgggtcctgaatt

SEQ ID NO: 48949 - DNA, 15 bp, Homo sapiens
gtgtgggtcctgaat

SEQ ID NO: 48950 - DNA, 15 bp, Homo sapiens
cgtgtgggtcctgaa

SEQ ID NO: 48951 - DNA, 15 bp, Homo sapiens
tcgtgtgggtcctga

SEQ ID NO: 48952 - DNA, 15 bp, Homo sapiens
gtcgtgtgggtcctg

SEQ ID NO: 48953 - DNA, 15 bp, Homo sapiens
cgtcgtgtgggtcct

SEQ ID NO: 48954 - DNA, 15 bp, Homo sapiens
ccgtcgtgtgggtcc

SEQ ID NO: 48955 - DNA, 15 bp, Homo sapiens
cccgtcgtgtgggtc

SEQ ID NO: 48956 - DNA, 15 bp, Homo sapiens
tcccgtcgtgtgggt

SEQ ID NO: 48957 - DNA, 15 bp, Homo sapiens
ttcccgtcgtgtggg

SEQ ID NO: 48958 - DNA, 15 bp, Homo sapiens
cttcccgtcgtgtgg

SEQ ID NO: 48959 - DNA, 15 bp, Homo sapiens
tcttcccgtcgtgtg

SEQ ID NO: 48960 - DNA, 15 bp, Homo sapiens
gtcttcccgtcgtgt

SEQ ID NO: 48961 - DNA, 15 bp, Homo sapiens
tgtcttcccgtcgtg

SEQ ID NO: 48962 - DNA, 15 bp, Homo sapiens
ttgtcttcccgtcgt

SEQ ID NO: 48963 - DNA, 15 bp, Homo sapiens
cttgtcttcccgtcg

SEQ ID NO: 48964 - DNA, 15 bp, Homo sapiens
acttgtcttcccgtc

SEQ ID NO: 48965 - DNA, 15 bp, Homo sapiens
aacttgtcttcccgt

SEQ ID NO: 48966 - DNA, 15 bp, Homo sapiens
gaacttgtcttcccg

SEQ ID NO: 48967 - DNA, 15 bp, Homo sapiens
tgaacttgtcttccc

SEQ ID NO: 48968 - DNA, 15 bp, Homo sapiens
atgaacttgtcttcc

SEQ ID NO: 48969 - DNA, 15 bp, Homo sapiens
catgaacttgtcttc

SEQ ID NO: 48970 - DNA, 15 bp, Homo sapiens
acatgaacttgtctt

SEQ ID NO: 48971 - DNA, 15 bp, Homo sapiens
tacatgaacttgtct

SEQ ID NO: 48972 - DNA, 15 bp, Homo sapiens
gtacatgaacttgtc

SEQ ID NO: 48973 - DNA, 15 bp, Homo sapiens
agtacatgaacttgt

SEQ ID NO: 48974 - DNA, 15 bp, Homo sapiens
aagtacatgaacttg

SEQ ID NO: 48975 - DNA, 15 bp, Homo sapiens
aaagtacatgaactt

SEQ ID NO: 48976 - DNA, 15 bp, Homo sapiens
caaagtacatgaact

SEQ ID NO: 48977 - DNA, 15 bp, Homo sapiens
tcaaagtacatgaac

SEQ ID NO: 48978 - DNA, 15 bp, Homo sapiens
ctcaaagtacatgaa

SEQ ID NO: 48979 - DNA, 15 bp, Homo sapiens
actcaaagtacatga

SEQ ID NO: 48980 - DNA, 15 bp, Homo sapiens
aactcaaagtacatg

SEQ ID NO: 48981 - DNA, 15 bp, Homo sapiens
gaactcaaagtacat

SEQ ID NO: 48982 - DNA, 15 bp, Homo sapiens
ggaactcaaagtaca

SEQ ID NO: 48983 - DNA, 15 bp, Homo sapiens
gggaactcaaagtac

SEQ ID NO: 48984 - DNA, 15 bp, Homo sapiens
agggaactcaaagta

SEQ ID NO: 48985 - DNA, 15 bp, Homo sapiens
gagggaactcaaagt

SEQ ID NO: 48986 - DNA, 15 bp, Homo sapiens
tgagggaactcaaag

SEQ ID NO: 48987 - DNA, 15 bp, Homo sapiens
ctgagggaactcaaa

SEQ ID NO: 48988 - DNA, 15 bp, Homo sapiens
gctgagggaactcaa

SEQ ID NO: 48989 - DNA, 15 bp, Homo sapiens
ggctgagggaactca

SEQ ID NO: 48990 - DNA, 15 bp, Homo sapiens
cggctgagggaactc

SEQ ID NO: 48991 - DNA, 15 bp, Homo sapiens
acggctgagggaact

SEQ ID NO: 48992 - DNA, 15 bp, Homo sapiens
aacggctgagggaac

SEQ ID NO: 48993 - DNA, 15 bp, Homo sapiens
taacggctgagggaa

SEQ ID NO: 48994 - DNA, 15 bp, Homo sapiens
gtaacggctgaggga

SEQ ID NO: 48995 - DNA, 15 bp, Homo sapiens
ggtaacggctgaggg

SEQ ID NO: 48996 - DNA, 15 bp, Homo sapiens
aggtaacggctgagg

SEQ ID NO: 48997 - DNA, 15 bp, Homo sapiens
caggtaacggctgag

SEQ ID NO: 48998 - DNA, 15 bp, Homo sapiens
acaggtaacggctga

SEQ ID NO: 48999 - DNA, 15 bp, Homo sapiens
cacaggtaacggctg

SEQ ID NO: 49000 - DNA, 15 bp, Homo sapiens
acacaggtaacggct

SEQ ID NO: 49001 - DNA, 15 bp, Homo sapiens
cacacaggtaacggc

SEQ ID NO: 49002 - DNA, 15 bp, Homo sapiens
acacacaggtaacgg

SEQ ID NO: 49003 - DNA, 15 bp, Homo sapiens
cacacacaggtaacg

SEQ ID NO: 49004 - DNA, 15 bp, Homo sapiens
ccacacacaggtaac

SEQ ID NO: 49005 - DNA, 15 bp, Homo sapiens
accacacacaggtaa

SEQ ID NO: 49006 - DNA, 15 bp, Homo sapiens
caccacacacaggta

SEQ ID NO: 49007 - DNA, 15 bp, Homo sapiens
tcaccacacacaggt

SEQ ID NO: 49008 - DNA, 15 bp, Homo sapiens
atcaccacacacagg

SEQ ID NO: 49009 - DNA, 15 bp, Homo sapiens
tatcaccacacacag

SEQ ID NO: 49010 - DNA, 15 bp, Homo sapiens
atatcaccacacaca

SEQ ID NO: 49011 - DNA, 15 bp, Homo sapiens
gatatcaccacacac

SEQ ID NO: 49012 - DNA, 15 bp, Homo sapiens
tgatatcaccacaca

SEQ ID NO: 49013 - DNA, 15 bp, Homo sapiens
ttgatatcaccacac

SEQ ID NO: 49014 - DNA, 15 bp, Homo sapiens
tttgatatcaccaca

SEQ ID NO: 49015 - DNA, 15 bp, Homo sapiens
ctttgatatcaccac

SEQ ID NO: 49016 - DNA, 15 bp, Homo sapiens
actttgatatcacca

SEQ ID NO: 49017 - DNA, 15 bp, Homo sapiens
tactttgatatcacc

SEQ ID NO: 49018 - DNA, 15 bp, Homo sapiens
ctactttgatatcac

SEQ ID NO: 49019 - DNA, 15 bp, Homo sapiens
tctactttgatatca

SEQ ID NO: 49020 - DNA, 15 bp, Homo sapiens
ctctactttgatatc

SEQ ID NO: 49021 - DNA, 15 bp, Homo sapiens
actctactttgatat

SEQ ID NO: 49022 - DNA, 15 bp, Homo sapiens
aactctactttgata

SEQ ID NO: 49023 - DNA, 15 bp, Homo sapiens
gaactctactttgat

SEQ ID NO: 49024 - DNA, 15 bp, Homo sapiens
agaactctactttga

SEQ ID NO: 49025 - DNA, 15 bp, Homo sapiens
aagaactctactttg

SEQ ID NO: 49026 - DNA, 15 bp, Homo sapiens
gaagaactctacttt

SEQ ID NO: 49027 - DNA, 15 bp, Homo sapiens
ggaagaactctactt

SEQ ID NO: 49028 - DNA, 15 bp, Homo sapiens
tggaagaactctact

SEQ ID NO: 49029 - DNA, 15 bp, Homo sapiens
gtggaagaactctac

SEQ ID NO: 49030 - DNA, 15 bp, Homo sapiens
tgtggaagaactcta

SEQ ID NO: 49031 - DNA, 15 bp, Homo sapiens
ttgtggaagaactct

SEQ ID NO: 49032 - DNA, 15 bp, Homo sapiens
tttgtggaagaactc

SEQ ID NO: 49033 - DNA, 15 bp, Homo sapiens
gtttgtggaagaact

SEQ ID NO: 49034 - DNA, 15 bp, Homo sapiens
tgtttgtggaagaac

SEQ ID NO: 49035 - DNA, 15 bp, Homo sapiens
ctgtttgtggaagaa

SEQ ID NO: 49036 - DNA, 15 bp, Homo sapiens
tctgtttgtggaaga

SEQ ID NO: 49037 - DNA, 15 bp, Homo sapiens
ttctgtttgtggaag

SEQ ID NO: 49038 - DNA, 15 bp, Homo sapiens
gttctgtttgtggaa

SEQ ID NO: 49039 - DNA, 15 bp, Homo sapiens
tgttctgtttgtgga

SEQ ID NO: 49040 - DNA, 15 bp, Homo sapiens
ttgttctgtttgtgg

SEQ ID NO: 49041 - DNA, 15 bp, Homo sapiens
cttgttctgtttgtg

SEQ ID NO: 49042 - DNA, 15 bp, Homo sapiens
tcttgttctgtttgt

SEQ ID NO: 49043 - DNA, 15 bp, Homo sapiens
atcttgttctgtttg

SEQ ID NO: 49044 - DNA, 15 bp, Homo sapiens
catcttgttctgttt

SEQ ID NO: 49045 - DNA, 15 bp, Homo sapiens
gcatcttgttctgtt

SEQ ID NO: 49046 - DNA, 15 bp, Homo sapiens
agcatcttgttctgt

SEQ ID NO: 49047 - DNA, 15 bp, Homo sapiens
tagcatcttgttctg

SEQ ID NO: 49048 - DNA, 15 bp, Homo sapiens
ttagcatcttgttct

SEQ ID NO: 49049 - DNA, 15 bp, Homo sapiens
tttagcatcttgttc

SEQ ID NO: 49050 - DNA, 15 bp, Homo sapiens
ttttagcatcttgtt

SEQ ID NO: 49051 - DNA, 15 bp, Homo sapiens
tttttagcatcttgt

SEQ ID NO: 49052 - DNA, 15 bp, Homo sapiens
ttttttagcatcttg

SEQ ID NO: 49053 - DNA, 15 bp, Homo sapiens
cttttttagcatctt

SEQ ID NO: 49054 - DNA, 15 bp, Homo sapiens
ccttttttagcatct

SEQ ID NO: 49055 - DNA, 15 bp, Homo sapiens
accttttttagcatc

SEQ ID NO: 49056 - DNA, 15 bp, Homo sapiens
aaccttttttagcat

SEQ ID NO: 49057 - DNA, 15 bp, Homo sapiens
aaaccttttttagca

SEQ ID NO: 49058 - DNA, 15 bp, Homo sapiens
caaaccttttttagc

SEQ ID NO: 49059 - DNA, 15 bp, Homo sapiens
acaaaccttttttag

SEQ ID NO: 49060 - DNA, 15 bp, Homo sapiens
tacaaacctttttta

SEQ ID NO: 49061 - DNA, 15 bp, Homo sapiens
gtacaaacctttttt

SEQ ID NO: 49062 - DNA, 15 bp, Homo sapiens
agtacaaaccttttt

SEQ ID NO: 49063 - DNA, 15 bp, Homo sapiens
aagtacaaacctttt

SEQ ID NO: 49064 - DNA, 15 bp, Homo sapiens
aaagtacaaaccttt

SEQ ID NO: 49065 - DNA, 15 bp, Homo sapiens
taaagtacaaacctt

SEQ ID NO: 49066 - DNA, 15 bp, Homo sapiens
gtaaagtacaaacct

SEQ ID NO: 49067 - DNA, 15 bp, Homo sapiens
agtaaagtacaaacc

SEQ ID NO: 49068 - DNA, 15 bp, Homo sapiens
aagtaaagtacaaac

SEQ ID NO: 49069 - DNA, 15 bp, Homo sapiens
aaagtaaagtacaaa

SEQ ID NO: 49070 - DNA, 15 bp, Homo sapiens
gaaagtaaagtacaa

SEQ ID NO: 49071 - DNA, 15 bp, Homo sapiens
tgaaagtaaagtaca

SEQ ID NO: 49072 - DNA, 15 bp, Homo sapiens
atgaaagtaaagtac

SEQ ID NO: 49073 - DNA, 15 bp, Homo sapiens
aatgaaagtaaagta

SEQ ID NO: 49074 - DNA, 15 bp, Homo sapiens
caatgaaagtaaagt

SEQ ID NO: 49075 - DNA, 15 bp, Homo sapiens
ccaatgaaagtaaag

SEQ ID NO: 49076 - DNA, 15 bp, Homo sapiens
cccaatgaaagtaaa

SEQ ID NO: 49077 - DNA, 15 bp, Homo sapiens
tcccaatgaaagtaa

SEQ ID NO: 49078 - DNA, 15 bp, Homo sapiens
ctcccaatgaaagta

SEQ ID NO: 49079 - DNA, 15 bp, Homo sapiens
tctcccaatgaaagt

SEQ ID NO: 49080 - DNA, 15 bp, Homo sapiens
ttctcccaatgaaag

SEQ ID NO: 49081 - DNA, 15 bp, Homo sapiens
tttctcccaatgaaa

SEQ ID NO: 49082 - DNA, 15 bp, Homo sapiens
atttctcccaatgaa

SEQ ID NO: 49083 - DNA, 15 bp, Homo sapiens
tatttctcccaatga

SEQ ID NO: 49084 - DNA, 15 bp, Homo sapiens
atatttctcccaatg

SEQ ID NO: 49085 - DNA, 15 bp, Homo sapiens
gatatttctcccaat

SEQ ID NO: 49086 - DNA, 15 bp, Homo sapiens
ggatatttctcccaa

SEQ ID NO: 49087 - DNA, 15 bp, Homo sapiens
tggatatttctccca

SEQ ID NO: 49088 - DNA, 15 bp, Homo sapiens
ttggatatttctccc

SEQ ID NO: 49089 - DNA, 15 bp, Homo sapiens
tttggatatttctcc

SEQ ID NO: 49090 - DNA, 15 bp, Homo sapiens
ttttggatatttctc

SEQ ID NO: 49091 - DNA, 15 bp, Homo sapiens
attttggatatttct

SEQ ID NO: 49092 - DNA, 15 bp, Homo sapiens
tattttggatatttc

SEQ ID NO: 49093 - DNA, 15 bp, Homo sapiens
ttattttggatattt

SEQ ID NO: 49094 - DNA, 15 bp, Homo sapiens
cttattttggatatt

SEQ ID NO: 49095 - DNA, 15 bp, Homo sapiens
ccttattttggatat

SEQ ID NO: 49096 - DNA, 15 bp, Homo sapiens
tccttattttggata

SEQ ID NO: 49097 - DNA, 15 bp, Homo sapiens
gtccttattttggat

SEQ ID NO: 49098 - DNA, 15 bp, Homo sapiens
tgtccttattttgga

SEQ ID NO: 49099 - DNA, 15 bp, Homo sapiens
ctgtccttattttgg

SEQ ID NO: 49100 - DNA, 15 bp, Homo sapiens
tctgtccttattttg

SEQ ID NO: 49101 - DNA, 15 bp, Homo sapiens
atctgtccttatttt

SEQ ID NO: 49102 - DNA, 15 bp, Homo sapiens
aatctgtccttattt

SEQ ID NO: 49103 - DNA, 15 bp, Homo sapiens
taatctgtccttatt

SEQ ID NO: 49104 - DNA, 15 bp, Homo sapiens
ttaatctgtccttat

SEQ ID NO: 49105 - DNA, 15 bp, Homo sapiens
tttaatctgtcctta

SEQ ID NO: 49106 - DNA, 15 bp, Homo sapiens
ttttaatctgtcctt

SEQ ID NO: 49107 - DNA, 15 bp, Homo sapiens
cttttaatctgtcct

SEQ ID NO: 49108 - DNA, 15 bp, Homo sapiens
gcttttaatctgtcc

SEQ ID NO: 49109 - DNA, 15 bp, Homo sapiens
agcttttaatctgtc

SEQ ID NO: 49110 - DNA, 15 bp, Homo sapiens
tagcttttaatctgt

SEQ ID NO: 49111 - DNA, 15 bp, Homo sapiens
atagcttttaatctg

SEQ ID NO: 49112 - DNA, 15 bp, Homo sapiens
tatagcttttaatct

SEQ ID NO: 49113 - DNA, 15 bp, Homo sapiens
atatagcttttaatc

SEQ ID NO: 49114 - DNA, 15 bp, Homo sapiens
aatatagcttttaat

SEQ ID NO: 49115 - DNA, 15 bp, Homo sapiens
aaatatagcttttaa

SEQ ID NO: 49116 - DNA, 15 bp, Homo sapiens
aaaatatagctttta

SEQ ID NO: 49117 - DNA, 15 bp, Homo sapiens
taaaatatagctttt

SEQ ID NO: 49118 - DNA, 15 bp, Homo sapiens
ataaaatatagcttt

SEQ ID NO: 49119 - DNA, 15 bp, Homo sapiens
aataaaatatagctt

SEQ ID NO: 49120 - DNA, 15 bp, Homo sapiens
aaataaaatatagct

SEQ ID NO: 49121 - DNA, 15 bp, Homo sapiens
aaaataaaatatagc

SEQ ID NO: 49122 - DNA, 15 bp, Homo sapiens
taaaataaaatatag

SEQ ID NO: 49123 - DNA, 15 bp, Homo sapiens
ataaaataaaatata

SEQ ID NO: 49124 - DNA, 15 bp, Homo sapiens
cataaaataaaatat

SEQ ID NO: 49125 - DNA, 15 bp, Homo sapiens
tcataaaataaaata

SEQ ID NO: 49126 - DNA, 15 bp, Homo sapiens
gtcataaaataaaat

SEQ ID NO: 49127 - DNA, 15 bp, Homo sapiens
tgtcataaaataaaa

SEQ ID NO: 49128 - DNA, 15 bp, Homo sapiens
atgtcataaaataaa

SEQ ID NO: 49129 - DNA, 15 bp, Homo sapiens
catgtcataaaataa

SEQ ID NO: 49130 - DNA, 15 bp, Homo sapiens
acatgtcataaaata

SEQ ID NO: 49131 - DNA, 15 bp, Homo sapiens
tacatgtcataaaat

SEQ ID NO: 49132 - DNA, 15 bp, Homo sapiens
ttacatgtcataaaa

SEQ ID NO: 49133 - DNA, 15 bp, Homo sapiens
cttacatgtcataaa

SEQ ID NO: 49134 - DNA, 15 bp, Homo sapiens
ccttacatgtcataa

SEQ ID NO: 49135 - DNA, 15 bp, Homo sapiens
tccttacatgtcata

SEQ ID NO: 49136 - DNA, 15 bp, Homo sapiens
ttccttacatgtcat

SEQ ID NO: 49137 - DNA, 15 bp, Homo sapiens
gttccttacatgtca

SEQ ID NO: 49138 - DNA, 15 bp, Homo sapiens
agttccttacatgtc

SEQ ID NO: 49139 - DNA, 15 bp, Homo sapiens
tagttccttacatgt

SEQ ID NO: 49140 - DNA, 15 bp, Homo sapiens
atagttccttacatg

SEQ ID NO: 49141 - DNA, 15 bp, Homo sapiens
tatagttccttacat

SEQ ID NO: 49142 - DNA, 15 bp, Homo sapiens
ttatagttccttaca

SEQ ID NO: 49143 - DNA, 15 bp, Homo sapiens
attatagttccttac

SEQ ID NO: 49144 - DNA, 15 bp, Homo sapiens
aattatagttcctta

SEQ ID NO: 49145 - DNA, 15 bp, Homo sapiens
aaattatagttcctt

SEQ ID NO: 49146 - DNA, 15 bp, Homo sapiens
caaattatagttcct

SEQ ID NO: 49147 - DNA, 15 bp, Homo sapiens
acaaattatagttcc

SEQ ID NO: 49148 - DNA, 15 bp, Homo sapiens
aacaaattatagttc

SEQ ID NO: 49149 - DNA, 15 bp, Homo sapiens
aaacaaattatagtt

SEQ ID NO: 49150 - DNA, 15 bp, Homo sapiens
aaaacaaattatagt

SEQ ID NO: 49151 - DNA, 15 bp, Homo sapiens
gaaaacaaattatag

SEQ ID NO: 49152 - DNA, 15 bp, Homo sapiens
agaaaacaaattata

SEQ ID NO: 49153 - DNA, 15 bp, Homo sapiens
tagaaaacaaattat

SEQ ID NO: 49154 - DNA, 15 bp, Homo sapiens
atagaaaacaaatta

SEQ ID NO: 49155 - DNA, 15 bp, Homo sapiens
aatagaaaacaaatt

SEQ ID NO: 49156 - DNA, 15 bp, Homo sapiens
taatagaaaacaaat

SEQ ID NO: 49157 - DNA, 15 bp, Homo sapiens
ctaatagaaaacaaa

SEQ ID NO: 49158 - DNA, 15 bp, Homo sapiens
tctaatagaaaacaa

SEQ ID NO: 49159 - DNA, 15 bp, Homo sapiens
atctaatagaaaaca

SEQ ID NO: 49160 - DNA, 15 bp, Homo sapiens
gatctaatagaaaac

SEQ ID NO: 49161 - DNA, 15 bp, Homo sapiens
agatctaatagaaaa

SEQ ID NO: 49162 - DNA, 15 bp, Homo sapiens
cagatctaatagaaa

SEQ ID NO: 49163 - DNA, 15 bp, Homo sapiens
gcagatctaatagaa

SEQ ID NO: 49164 - DNA, 15 bp, Homo sapiens
tgcagatctaataga

SEQ ID NO: 49165 - DNA, 15 bp, Homo sapiens
ctgcagatctaatag

SEQ ID NO: 49166 - DNA, 15 bp, Homo sapiens
cctgcagatctaata

SEQ ID NO: 49167 - DNA, 15 bp, Homo sapiens
acctgcagatctaat

SEQ ID NO: 49168 - DNA, 15 bp, Homo sapiens
cacctgcagatctaa

SEQ ID NO: 49169 - DNA, 15 bp, Homo sapiens
acacctgcagatcta

SEQ ID NO: 49170 - DNA, 15 bp, Homo sapiens
aacacctgcagatct

SEQ ID NO: 49171 - DNA, 15 bp, Homo sapiens
aaacacctgcagatc

SEQ ID NO: 49172 - DNA, 15 bp, Homo sapiens
aaaacacctgcagat

SEQ ID NO: 49173 - DNA, 15 bp, Homo sapiens
caaaacacctgcaga

SEQ ID NO: 49174 - DNA, 15 bp, Homo sapiens
gcaaaacacctgcag

SEQ ID NO: 49175 - DNA, 15 bp, Homo sapiens
agcaaaacacctgca

SEQ ID NO: 49176 - DNA, 15 bp, Homo sapiens
aagcaaaacacctgc

SEQ ID NO: 49177 - DNA, 15 bp, Homo sapiens
taagcaaaacacctg

SEQ ID NO: 49178 - DNA, 15 bp, Homo sapiens
gtaagcaaaacacct

SEQ ID NO: 49179 - DNA, 15 bp, Homo sapiens
agtaagcaaaacacc

SEQ ID NO: 49180 - DNA, 15 bp, Homo sapiens
gagtaagcaaaacac

SEQ ID NO: 49181 - DNA, 15 bp, Homo sapiens
agagtaagcaaaaca

SEQ ID NO: 49182 - DNA, 15 bp, Homo sapiens
cagagtaagcaaaac

SEQ ID NO: 49183 - DNA, 15 bp, Homo sapiens
ccagagtaagcaaaa

SEQ ID NO: 49184 - DNA, 15 bp, Homo sapiens
gccagagtaagcaaa

SEQ ID NO: 49185 - DNA, 15 bp, Homo sapiens
tgccagagtaagcaa

SEQ ID NO: 49186 - DNA, 15 bp, Homo sapiens
atgccagagtaagca

SEQ ID NO: 49187 - DNA, 15 bp, Homo sapiens
aatgccagagtaagc

SEQ ID NO: 49188 - DNA, 15 bp, Homo sapiens
caatgccagagtaag

SEQ ID NO: 49189 - DNA, 15 bp, Homo sapiens
ccaatgccagagtaa

SEQ ID NO: 49190 - DNA, 15 bp, Homo sapiens
accaatgccagagta

SEQ ID NO: 49191 - DNA, 15 bp, Homo sapiens
caccaatgccagagt

SEQ ID NO: 49192 - DNA, 15 bp, Homo sapiens
tcaccaatgccagag

SEQ ID NO: 49193 - DNA, 15 bp, Homo sapiens
ctcaccaatgccaga

SEQ ID NO: 49194 - DNA, 15 bp, Homo sapiens
tctcaccaatgccag

SEQ ID NO: 49195 - DNA, 15 bp, Homo sapiens
gtctcaccaatgcca

SEQ ID NO: 49196 - DNA, 15 bp, Homo sapiens
tgtctcaccaatgcc

SEQ ID NO: 49197 - DNA, 15 bp, Homo sapiens
atgtctcaccaatgc

SEQ ID NO: 49198 - DNA, 15 bp, Homo sapiens
aatgtctcaccaatg

SEQ ID NO: 49199 - DNA, 15 bp, Homo sapiens
taatgtctcaccaat

SEQ ID NO: 49200 - DNA, 15 bp, Homo sapiens
ataatgtctcaccaa

SEQ ID NO: 49201 - DNA, 15 bp, Homo sapiens
tataatgtctcacca

SEQ ID NO: 49202 - DNA, 15 bp, Homo sapiens
ttataatgtctcacc

SEQ ID NO: 49203 - DNA, 15 bp, Homo sapiens
cttataatgtctcac

SEQ ID NO: 49204 - DNA, 15 bp, Homo sapiens
ccttataatgtctca

SEQ ID NO: 49205 - DNA, 15 bp, Homo sapiens
cccttataatgtctc

SEQ ID NO: 49206 - DNA, 15 bp, Homo sapiens
acccttataatgtct

SEQ ID NO: 49207 - DNA, 15 bp, Homo sapiens
tacccttataatgtc

SEQ ID NO: 49208 - DNA, 15 bp, Homo sapiens
ttacccttataatgt

SEQ ID NO: 49209 - DNA, 15 bp, Homo sapiens
tttacccttataatg

SEQ ID NO: 49210 - DNA, 15 bp, Homo sapiens
atttacccttataat

SEQ ID NO: 49211 - DNA, 15 bp, Homo sapiens
tatttacccttataa

SEQ ID NO: 49212 - DNA, 15 bp, Homo sapiens
ttatttacccttata

SEQ ID NO: 49213 - DNA, 15 bp, Homo sapiens
attatttacccttat

SEQ ID NO: 49214 - DNA, 15 bp, Homo sapiens
gattatttaccctta

SEQ ID NO: 49215 - DNA, 15 bp, Homo sapiens
ggattatttaccctt

SEQ ID NO: 49216 - DNA, 15 bp, Homo sapiens
aggattatttaccct

SEQ ID NO: 49217 - DNA, 15 bp, Homo sapiens
caggattatttaccc

SEQ ID NO: 49218 - DNA, 15 bp, Homo sapiens
acaggattatttacc

SEQ ID NO: 49219 - DNA, 15 bp, Homo sapiens
aacaggattatttac

SEQ ID NO: 49220 - DNA, 15 bp, Homo sapiens
aaacaggattattta

SEQ ID NO: 49221 - DNA, 15 bp, Homo sapiens
caaacaggattattt

SEQ ID NO: 49222 - DNA, 15 bp, Homo sapiens
tcaaacaggattatt

SEQ ID NO: 49223 - DNA, 15 bp, Homo sapiens
ttcaaacaggattat

SEQ ID NO: 49224 - DNA, 15 bp, Homo sapiens
cttcaaacaggatta

SEQ ID NO: 49225 - DNA, 15 bp, Homo sapiens
ccttcaaacaggatt

SEQ ID NO: 49226 - DNA, 15 bp, Homo sapiens
tccttcaaacaggat

SEQ ID NO: 49227 - DNA, 15 bp, Homo sapiens
ttccttcaaacagga

SEQ ID NO: 49228 - DNA, 15 bp, Homo sapiens
tttccttcaaacagg

SEQ ID NO: 49229 - DNA, 15 bp, Homo sapiens
ttttccttcaaacag

SEQ ID NO: 49230 - DNA, 15 bp, Homo sapiens
cttttccttcaaaca

SEQ ID NO: 49231 - DNA, 15 bp, Homo sapiens
ccttttccttcaaac

SEQ ID NO: 49232 - DNA, 15 bp, Homo sapiens
gccttttccttcaaa

SEQ ID NO: 49233 - DNA, 15 bp, Homo sapiens
ggccttttccttcaa

SEQ ID NO: 49234 - DNA, 15 bp, Homo sapiens
aggccttttccttca

SEQ ID NO: 49235 - DNA, 15 bp, Homo sapiens
aaggccttttccttc

SEQ ID NO: 49236 - DNA, 15 bp, Homo sapiens
taaggccttttcctt

SEQ ID NO: 49237 - DNA, 15 bp, Homo sapiens
ataaggccttttcct

SEQ ID NO: 49238 - DNA, 15 bp, Homo sapiens
cataaggccttttcc

SEQ ID NO: 49239 - DNA, 15 bp, Homo sapiens
ccataaggccttttc

SEQ ID NO: 49240 - DNA, 15 bp, Homo sapiens
gccataaggcctttt

SEQ ID NO: 49241 - DNA, 15 bp, Homo sapiens
tgccataaggccttt

SEQ ID NO: 49242 - DNA, 15 bp, Homo sapiens
atgccataaggcctt

SEQ ID NO: 49243 - DNA, 15 bp, Homo sapiens
aatgccataaggcct

SEQ ID NO: 49244 - DNA, 15 bp, Homo sapiens
caatgccataaggcc

SEQ ID NO: 49245 - DNA, 15 bp, Homo sapiens
acaatgccataaggc

SEQ ID NO: 49246 - DNA, 15 bp, Homo sapiens
tacaatgccataagg

SEQ ID NO: 49247 - DNA, 15 bp, Homo sapiens
ttacaatgccataag

SEQ ID NO: 49248 - DNA, 15 bp, Homo sapiens
gttacaatgccataa

SEQ ID NO: 49249 - DNA, 15 bp, Homo sapiens
tgttacaatgccata

SEQ ID NO: 49250 - DNA, 15 bp, Homo sapiens
atgttacaatgccat

SEQ ID NO: 49251 - DNA, 15 bp, Homo sapiens
catgttacaatgcca

SEQ ID NO: 49252 - DNA, 15 bp, Homo sapiens
tcatgttacaatgcc

SEQ ID NO: 49253 - DNA, 15 bp, Homo sapiens
ctcatgttacaatgc

SEQ ID NO: 49254 - DNA, 15 bp, Homo sapiens
tctcatgttacaatg

SEQ ID NO: 49255 - DNA, 15 bp, Homo sapiens
ctctcatgttacaat

SEQ ID NO: 49256 - DNA, 15 bp, Homo sapiens
cctctcatgttacaa

SEQ ID NO: 49257 - DNA, 15 bp, Homo sapiens
tcctctcatgttaca

SEQ ID NO: 49258 - DNA, 15 bp, Homo sapiens
ttcctctcatgttac

SEQ ID NO: 49259 - DNA, 15 bp, Homo sapiens
attcctctcatgtta

SEQ ID NO: 49260 - DNA, 15 bp, Homo sapiens
aattcctctcatgtt

SEQ ID NO: 49261 - DNA, 15 bp, Homo sapiens
aaattcctctcatgt

SEQ ID NO: 49262 - DNA, 15 bp, Homo sapiens
aaaattcctctcatg

SEQ ID NO: 49263 - DNA, 15 bp, Homo sapiens
aaaaattcctctcat

SEQ ID NO: 49264 - DNA, 15 bp, Homo sapiens
gaaaaattcctctca

SEQ ID NO: 49265 - DNA, 15 bp, Homo sapiens
agaaaaattcctctc

SEQ ID NO: 49266 - DNA, 15 bp, Homo sapiens
aagaaaaattcctct

SEQ ID NO: 49267 - DNA, 15 bp, Homo sapiens
taagaaaaattcctc

SEQ ID NO: 49268 - DNA, 15 bp, Homo sapiens
ttaagaaaaattcct

SEQ ID NO: 49269 - DNA, 15 bp, Homo sapiens
gttaagaaaaattcc

SEQ ID NO: 49270 - DNA, 15 bp, Homo sapiens
tgttaagaaaaattc

SEQ ID NO: 49271 - DNA, 15 bp, Homo sapiens
ttgttaagaaaaatt

SEQ ID NO: 49272 - DNA, 15 bp, Homo sapiens
cttgttaagaaaaat

SEQ ID NO: 49273 - DNA, 15 bp, Homo sapiens
ccttgttaagaaaaa

SEQ ID NO: 49274 - DNA, 15 bp, Homo sapiens
tccttgttaagaaaa

SEQ ID NO: 49275 - DNA, 15 bp, Homo sapiens
atccttgttaagaaa

SEQ ID NO: 49276 - DNA, 15 bp, Homo sapiens
catccttgttaagaa

SEQ ID NO: 49277 - DNA, 15 bp, Homo sapiens
ccatccttgttaaga

SEQ ID NO: 49278 - DNA, 15 bp, Homo sapiens
accatccttgttaag

SEQ ID NO: 49279 - DNA, 15 bp, Homo sapiens
aaccatccttgttaa

SEQ ID NO: 49280 - DNA, 15 bp, Homo sapiens
taaccatccttgtta

SEQ ID NO: 49281 - DNA, 15 bp, Homo sapiens
ttaaccatccttgtt

SEQ ID NO: 49282 - DNA, 15 bp, Homo sapiens
gttaaccatccttgt

SEQ ID NO: 49283 - DNA, 15 bp, Homo sapiens
agttaaccatccttg

SEQ ID NO: 49284 - DNA, 15 bp, Homo sapiens
cagttaaccatcctt

SEQ ID NO: 49285 - DNA, 15 bp, Homo sapiens
tcagttaaccatcct

SEQ ID NO: 49286 - DNA, 15 bp, Homo sapiens
ctcagttaaccatcc

SEQ ID NO: 49287 - DNA, 15 bp, Homo sapiens
tctcagttaaccatc

SEQ ID NO: 49288 - DNA, 15 bp, Homo sapiens
ttctcagttaaccat

SEQ ID NO: 49289 - DNA, 15 bp, Homo sapiens
cttctcagttaacca

SEQ ID NO: 49290 - DNA, 15 bp, Homo sapiens
tcttctcagttaacc

SEQ ID NO: 49291 - DNA, 15 bp, Homo sapiens
ttcttctcagttaac

SEQ ID NO: 49292 - DNA, 15 bp, Homo sapiens
tttcttctcagttaa

SEQ ID NO: 49293 - DNA, 15 bp, Homo sapiens
atttcttctcagtta

SEQ ID NO: 49294 - DNA, 15 bp, Homo sapiens
aatttcttctcagtt

SEQ ID NO: 49295 - DNA, 15 bp, Homo sapiens
taatttcttctcagt

SEQ ID NO: 49296 - DNA, 15 bp, Homo sapiens
ctaatttcttctcag

SEQ ID NO: 49297 - DNA, 15 bp, Homo sapiens
gctaatttcttctca

SEQ ID NO: 49298 - DNA, 15 bp, Homo sapiens
tgctaatttcttctc

SEQ ID NO: 49299 - DNA, 15 bp, Homo sapiens
atgctaatttcttct

SEQ ID NO: 49300 - DNA, 15 bp, Homo sapiens
catgctaatttcttc

SEQ ID NO: 49301 - DNA, 15 bp, Homo sapiens
ccatgctaatttctt

SEQ ID NO: 49302 - DNA, 15 bp, Homo sapiens
cccatgctaatttct

SEQ ID NO: 49303 - DNA, 15 bp, Homo sapiens
tcccatgctaatttc

SEQ ID NO: 49304 - DNA, 15 bp, Homo sapiens
gtcccatgctaattt

SEQ ID NO: 49305 - DNA, 15 bp, Homo sapiens
ggtcccatgctaatt

SEQ ID NO: 49306 - DNA, 15 bp, Homo sapiens
tggtcccatgctaat

SEQ ID NO: 49307 - DNA, 15 bp, Homo sapiens
ttggtcccatgctaa

SEQ ID NO: 49308 - DNA, 15 bp, Homo sapiens
attggtcccatgcta

SEQ ID NO: 49309 - DNA, 15 bp, Homo sapiens
tattggtcccatgct

SEQ ID NO: 49310 - DNA, 15 bp, Homo sapiens
atattggtcccatgc

SEQ ID NO: 49311 - DNA, 15 bp, Homo sapiens
aatattggtcccatg

SEQ ID NO: 49312 - DNA, 15 bp, Homo sapiens
aaatattggtcccat

SEQ ID NO: 49313 - DNA, 15 bp, Homo sapiens
aaaatattggtccca

SEQ ID NO: 49314 - DNA, 15 bp, Homo sapiens
taaaatattggtccc

SEQ ID NO: 49315 - DNA, 15 bp, Homo sapiens
ttaaaatattggtcc

SEQ ID NO: 49316 - DNA, 15 bp, Homo sapiens
tttaaaatattggtc

SEQ ID NO: 49317 - DNA, 15 bp, Homo sapiens
ttttaaaatattggt

SEQ ID NO: 49318 - DNA, 15 bp, Homo sapiens
tttttaaaatattgg

SEQ ID NO: 49319 - DNA, 15 bp, Homo sapiens
atttttaaaatattg

SEQ ID NO: 49320 - DNA, 15 bp, Homo sapiens
aatttttaaaatatt

SEQ ID NO: 49321 - DNA, 15 bp, Homo sapiens
aaatttttaaaatat

SEQ ID NO: 49322 - DNA, 15 bp, Homo sapiens
aaaatttttaaaata

SEQ ID NO: 49323 - DNA, 15 bp, Homo sapiens
caaaatttttaaaat

SEQ ID NO: 49324 - DNA, 15 bp, Homo sapiens
ccaaaatttttaaaa

SEQ ID NO: 49325 - DNA, 15 bp, Homo sapiens
accaaaatttttaaa

SEQ ID NO: 49326 - DNA, 15 bp, Homo sapiens
gaccaaaatttttaa

SEQ ID NO: 49327 - DNA, 15 bp, Homo sapiens
agaccaaaattttta

SEQ ID NO: 49328 - DNA, 15 bp, Homo sapiens
tagaccaaaattttt

SEQ ID NO: 49329 - DNA, 15 bp, Homo sapiens
atagaccaaaatttt

SEQ ID NO: 49330 - DNA, 15 bp, Homo sapiens
tatagaccaaaattt

SEQ ID NO: 49331 - DNA, 15 bp, Homo sapiens
ctatagaccaaaatt

SEQ ID NO: 49332 - DNA, 15 bp, Homo sapiens
cctatagaccaaaat

SEQ ID NO: 49333 - DNA, 15 bp, Homo sapiens
acctatagaccaaaa

SEQ ID NO: 49334 - DNA, 15 bp, Homo sapiens
tacctatagaccaaa

SEQ ID NO: 49335 - DNA, 15 bp, Homo sapiens
ctacctatagaccaa

SEQ ID NO: 49336 - DNA, 15 bp, Homo sapiens
tctacctatagacca

SEQ ID NO: 49337 - DNA, 15 bp, Homo sapiens
ttctacctatagacc

SEQ ID NO: 49338 - DNA, 15 bp, Homo sapiens
tttctacctatagac

SEQ ID NO: 49339 - DNA, 15 bp, Homo sapiens
atttctacctataga

SEQ ID NO: 49340 - DNA, 15 bp, Homo sapiens
catttctacctatag

SEQ ID NO: 49341 - DNA, 15 bp, Homo sapiens
tcatttctacctata

SEQ ID NO: 49342 - DNA, 15 bp, Homo sapiens
ctcatttctacctat

SEQ ID NO: 49343 - DNA, 15 bp, Homo sapiens
tctcatttctaccta

SEQ ID NO: 49344 - DNA, 15 bp, Homo sapiens
atctcatttctacct

SEQ ID NO: 49345 - DNA, 15 bp, Homo sapiens
gatctcatttctacc

SEQ ID NO: 49346 - DNA, 15 bp, Homo sapiens
agatctcatttctac

SEQ ID NO: 49347 - DNA, 15 bp, Homo sapiens
cagatctcatttcta

SEQ ID NO: 49348 - DNA, 15 bp, Homo sapiens
acagatctcatttct

SEQ ID NO: 49349 - DNA, 15 bp, Homo sapiens
aacagatctcatttc

SEQ ID NO: 49350 - DNA, 15 bp, Homo sapiens
gaacagatctcattt

SEQ ID NO: 49351 - DNA, 15 bp, Homo sapiens
agaacagatctcatt

SEQ ID NO: 49352 - DNA, 15 bp, Homo sapiens
cagaacagatctcat

SEQ ID NO: 49353 - DNA, 15 bp, Homo sapiens
acagaacagatctca

SEQ ID NO: 49354 - DNA, 15 bp, Homo sapiens
cacagaacagatctc

SEQ ID NO: 49355 - DNA, 15 bp, Homo sapiens
ccacagaacagatct

SEQ ID NO: 49356 - DNA, 15 bp, Homo sapiens
accacagaacagatc

SEQ ID NO: 49357 - DNA, 15 bp, Homo sapiens
gaccacagaacagat

SEQ ID NO: 49358 - DNA, 15 bp, Homo sapiens
agaccacagaacaga

SEQ ID NO: 49359 - DNA, 15 bp, Homo sapiens
aagaccacagaacag

SEQ ID NO: 49360 - DNA, 15 bp, Homo sapiens
taagaccacagaaca

SEQ ID NO: 49361 - DNA, 15 bp, Homo sapiens
ataagaccacagaac

SEQ ID NO: 49362 - DNA, 15 bp, Homo sapiens
cataagaccacagaa

SEQ ID NO: 49363 - DNA, 15 bp, Homo sapiens
acataagaccacaga

SEQ ID NO: 49364 - DNA, 15 bp, Homo sapiens
tacataagaccacag

SEQ ID NO: 49365 - DNA, 15 bp, Homo sapiens
ctacataagaccaca

SEQ ID NO: 49366 - DNA, 15 bp, Homo sapiens
actacataagaccac

SEQ ID NO: 49367 - DNA, 15 bp, Homo sapiens
cactacataagacca

SEQ ID NO: 49368 - DNA, 15 bp, Homo sapiens
tcactacataagacc

SEQ ID NO: 49369 - DNA, 15 bp, Homo sapiens
gtcactacataagac

SEQ ID NO: 49370 - DNA, 15 bp, Homo sapiens
tgtcactacataaga

SEQ ID NO: 49371 - DNA, 15 bp, Homo sapiens
gtgtcactacataag

SEQ ID NO: 49372 - DNA, 15 bp, Homo sapiens
tgtgtcactacataa

SEQ ID NO: 49373 - DNA, 15 bp, Homo sapiens
ttgtgtcactacata

SEQ ID NO: 49374 - DNA, 15 bp, Homo sapiens
tttgtgtcactacat

SEQ ID NO: 49375 - DNA, 15 bp, Homo sapiens
gtttgtgtcactaca

SEQ ID NO: 49376 - DNA, 15 bp, Homo sapiens
ggtttgtgtcactac

SEQ ID NO: 49377 - DNA, 15 bp, Homo sapiens
tggtttgtgtcacta

SEQ ID NO: 49378 - DNA, 15 bp, Homo sapiens
gtggtttgtgtcact

SEQ ID NO: 49379 - DNA, 15 bp, Homo sapiens
agtggtttgtgtcac

SEQ ID NO: 49380 - DNA, 15 bp, Homo sapiens
aagtggtttgtgtca

SEQ ID NO: 49381 - DNA, 15 bp, Homo sapiens
aaagtggtttgtgtc

SEQ ID NO: 49382 - DNA, 15 bp, Homo sapiens
aaaagtggtttgtgt

SEQ ID NO: 49383 - DNA, 15 bp, Homo sapiens
aaaaagtggtttgtg

SEQ ID NO: 49384 - DNA, 15 bp, Homo sapiens
gaaaaagtggtttgt

SEQ ID NO: 49385 - DNA, 15 bp, Homo sapiens
agaaaaagtggtttg

SEQ ID NO: 49386 - DNA, 15 bp, Homo sapiens
gagaaaaagtggttt

SEQ ID NO: 49387 - DNA, 15 bp, Homo sapiens
ggagaaaaagtggtt

SEQ ID NO: 49388 - DNA, 15 bp, Homo sapiens
tggagaaaaagtggt

SEQ ID NO: 49389 - DNA, 15 bp, Homo sapiens
atggagaaaaagtgg

SEQ ID NO: 49390 - DNA, 15 bp, Homo sapiens
aatggagaaaaagtg

SEQ ID NO: 49391 - DNA, 15 bp, Homo sapiens
aaatggagaaaaagt

SEQ ID NO: 49392 - DNA, 15 bp, Homo sapiens
aaaatggagaaaaag

SEQ ID NO: 49393 - DNA, 15 bp, Homo sapiens
caaaatggagaaaaa

SEQ ID NO: 49394 - DNA, 15 bp, Homo sapiens
ccaaaatggagaaaa

SEQ ID NO: 49395 - DNA, 15 bp, Homo sapiens
gccaaaatggagaaa

SEQ ID NO: 49396 - DNA, 15 bp, Homo sapiens
agccaaaatggagaa

SEQ ID NO: 49397 - DNA, 15 bp, Homo sapiens
aagccaaaatggaga

SEQ ID NO: 49398 - DNA, 15 bp, Homo sapiens
taagccaaaatggag

SEQ ID NO: 49399 - DNA, 15 bp, Homo sapiens
ataagccaaaatgga

SEQ ID NO: 49400 - DNA, 15 bp, Homo sapiens
cataagccaaaatgg

SEQ ID NO: 49401 - DNA, 15 bp, Homo sapiens
acataagccaaaatg

SEQ ID NO: 49402 - DNA, 15 bp, Homo sapiens
aacataagccaaaat

SEQ ID NO: 49403 - DNA, 15 bp, Homo sapiens
aaacataagccaaaa

SEQ ID NO: 49404 - DNA, 15 bp, Homo sapiens
gaaacataagccaaa

SEQ ID NO: 49405 - DNA, 15 bp, Homo sapiens
agaaacataagccaa

SEQ ID NO: 49406 - DNA, 15 bp, Homo sapiens
aagaaacataagcca

SEQ ID NO: 49407 - DNA, 15 bp, Homo sapiens
aaagaaacataagcc

SEQ ID NO: 49408 - DNA, 15 bp, Homo sapiens
aaaagaaacataagc

SEQ ID NO: 49409 - DNA, 15 bp, Homo sapiens
aaaaagaaacataag

SEQ ID NO: 49410 - DNA, 15 bp, Homo sapiens
gaaaaagaaacataa

SEQ ID NO: 49411 - DNA, 15 bp, Homo sapiens
agaaaaagaaacata

SEQ ID NO: 49412 - DNA, 15 bp, Homo sapiens
aagaaaaagaaacat

SEQ ID NO: 49413 - DNA, 15 bp, Homo sapiens
aaagaaaaagaaaca

SEQ ID NO: 49414 - DNA, 15 bp, Homo sapiens
gaaagaaaaagaaac

SEQ ID NO: 49415 - DNA, 15 bp, Homo sapiens
ggaaagaaaaagaaa

SEQ ID NO: 49416 - DNA, 15 bp, Homo sapiens
aggaaagaaaaagaa

SEQ ID NO: 49417 - DNA, 15 bp, Homo sapiens
aaggaaagaaaaaga

SEQ ID NO: 49418 - DNA, 15 bp, Homo sapiens
aaaggaaagaaaaag

SEQ ID NO: 49419 - DNA, 15 bp, Homo sapiens
aaaaggaaagaaaaa

SEQ ID NO: 49420 - DNA, 15 bp, Homo sapiens
aaaaaggaaagaaaa

SEQ ID NO: 49421 - DNA, 15 bp, Homo sapiens
aaaaaaggaaagaaa

SEQ ID NO: 49422 - DNA, 15 bp, Homo sapiens
aaaaaaaggaaagaa

SEQ ID NO: 49423 - DNA, 15 bp, Homo sapiens
aaaaaaaaggaaaga

SEQ ID NO: 49424 - DNA, 15 bp, Homo sapiens
aaaaaaaaaggaaag

SEQ ID NO: 49425 - DNA, 15 bp, Homo sapiens
aaaaaaaaaaggaaa

SEQ ID NO: 49426 - DNA, 15 bp, Homo sapiens
aaaaaaaaaaaggaa

SEQ ID NO: 49427 - DNA, 15 bp, Homo sapiens
aaaaaaaaaaaagga

SEQ ID NO: 49428 - DNA, 15 bp, Homo sapiens
ggaaaaaaaaaaaaa

SEQ ID NO: 49429 - DNA, 15 bp, Homo sapiens
aggaaaaaaaaaaaa

SEQ ID NO: 49430 - DNA, 15 bp, Homo sapiens
aaggaaaaaaaaaaa

SEQ ID NO: 49431 - DNA, 15 bp, Homo sapiens
aaaggaaaaaaaaaa

SEQ ID NO: 49432 - DNA, 15 bp, Homo sapiens
aaaaggaaaaaaaaa

SEQ ID NO: 49433 - DNA, 15 bp, Homo sapiens
aaaaaggaaaaaaaa

SEQ ID NO: 49434 - DNA, 15 bp, Homo sapiens
caaaaaggaaaaaaa

SEQ ID NO: 49435 - DNA, 15 bp, Homo sapiens
acaaaaaggaaaaaa

SEQ ID NO: 49436 - DNA, 15 bp, Homo sapiens
aacaaaaaggaaaaa

SEQ ID NO: 49437 - DNA, 15 bp, Homo sapiens
taacaaaaaggaaaa

SEQ ID NO: 49438 - DNA, 15 bp, Homo sapiens
ctaacaaaaaggaaa

SEQ ID NO: 49439 - DNA, 15 bp, Homo sapiens
tctaacaaaaaggaa

SEQ ID NO: 49440 - DNA, 15 bp, Homo sapiens
ctctaacaaaaagga

SEQ ID NO: 49441 - DNA, 15 bp, Homo sapiens
tctctaacaaaaagg

SEQ ID NO: 49442 - DNA, 15 bp, Homo sapiens
gtctctaacaaaaag

SEQ ID NO: 49443 - DNA, 15 bp, Homo sapiens
tgtctctaacaaaaa

SEQ ID NO: 49444 - DNA, 15 bp, Homo sapiens
ctgtctctaacaaaa

SEQ ID NO: 49445 - DNA, 15 bp, Homo sapiens
cctgtctctaacaaa

SEQ ID NO: 49446 - DNA, 15 bp, Homo sapiens
ccctgtctctaacaa

SEQ ID NO: 49447 - DNA, 15 bp, Homo sapiens
accctgtctctaaca

SEQ ID NO: 49448 - DNA, 15 bp, Homo sapiens
gaccctgtctctaac

SEQ ID NO: 49449 - DNA, 15 bp, Homo sapiens
agaccctgtctctaa

SEQ ID NO: 49450 - DNA, 15 bp, Homo sapiens
aagaccctgtctcta

SEQ ID NO: 49451 - DNA, 15 bp, Homo sapiens
caagaccctgtctct

SEQ ID NO: 49452 - DNA, 15 bp, Homo sapiens
acaagaccctgtctc

SEQ ID NO: 49453 - DNA, 15 bp, Homo sapiens
aacaagaccctgtct

SEQ ID NO: 49454 - DNA, 15 bp, Homo sapiens
gaacaagaccctgtc

SEQ ID NO: 49455 - DNA, 15 bp, Homo sapiens
agaacaagaccctgt

SEQ ID NO: 49456 - DNA, 15 bp, Homo sapiens
tagaacaagaccctg

SEQ ID NO: 49457 - DNA, 15 bp, Homo sapiens
atagaacaagaccct

SEQ ID NO: 49458 - DNA, 15 bp, Homo sapiens
aatagaacaagaccc

SEQ ID NO: 49459 - DNA, 15 bp, Homo sapiens
caatagaacaagacc

SEQ ID NO: 49460 - DNA, 15 bp, Homo sapiens
gcaatagaacaagac

SEQ ID NO: 49461 - DNA, 15 bp, Homo sapiens
ggcaatagaacaaga

SEQ ID NO: 49462 - DNA, 15 bp, Homo sapiens
gggcaatagaacaag

SEQ ID NO: 49463 - DNA, 15 bp, Homo sapiens
tgggcaatagaacaa

SEQ ID NO: 49464 - DNA, 15 bp, Homo sapiens
ctgggcaatagaaca

SEQ ID NO: 49465 - DNA, 15 bp, Homo sapiens
cctgggcaatagaac

SEQ ID NO: 49466 - DNA, 15 bp, Homo sapiens
gcctgggcaatagaa

SEQ ID NO: 49467 - DNA, 15 bp, Homo sapiens
agcctgggcaataga

SEQ ID NO: 49468 - DNA, 15 bp, Homo sapiens
cagcctgggcaatag

SEQ ID NO: 49469 - DNA, 15 bp, Homo sapiens
tcagcctgggcaata

SEQ ID NO: 49470 - DNA, 15 bp, Homo sapiens
ctcagcctgggcaat

SEQ ID NO: 49471 - DNA, 15 bp, Homo sapiens
actcagcctgggcaa

SEQ ID NO: 49472 - DNA, 15 bp, Homo sapiens
tactcagcctgggca

SEQ ID NO: 49473 - DNA, 15 bp, Homo sapiens
ctactcagcctgggc

SEQ ID NO: 49474 - DNA, 15 bp, Homo sapiens
gctactcagcctggg

SEQ ID NO: 49475 - DNA, 15 bp, Homo sapiens
agctactcagcctgg

SEQ ID NO: 49476 - DNA, 15 bp, Homo sapiens
tagctactcagcctg

SEQ ID NO: 49477 - DNA, 15 bp, Homo sapiens
ttagctactcagcct

SEQ ID NO: 49478 - DNA, 15 bp, Homo sapiens
cttagctactcagcc

SEQ ID NO: 49479 - DNA, 15 bp, Homo sapiens
tcttagctactcagc

SEQ ID NO: 49480 - DNA, 15 bp, Homo sapiens
gtcttagctactcag

SEQ ID NO: 49481 - DNA, 15 bp, Homo sapiens
agtcttagctactca

SEQ ID NO: 49482 - DNA, 15 bp, Homo sapiens
tagtcttagctactc

SEQ ID NO: 49483 - DNA, 15 bp, Homo sapiens
gtagtcttagctact

SEQ ID NO: 49484 - DNA, 15 bp, Homo sapiens
tgtagtcttagctac

SEQ ID NO: 49485 - DNA, 15 bp, Homo sapiens
ttgtagtcttagcta

SEQ ID NO: 49486 - DNA, 15 bp, Homo sapiens
cttgtagtcttagct

SEQ ID NO: 49487 - DNA, 15 bp, Homo sapiens
gcttgtagtcttagc

SEQ ID NO: 49488 - DNA, 15 bp, Homo sapiens
tgcttgtagtcttag

SEQ ID NO: 49489 - DNA, 15 bp, Homo sapiens
atgcttgtagtctta

SEQ ID NO: 49490 - DNA, 15 bp, Homo sapiens
catgcttgtagtctt

SEQ ID NO: 49491 - DNA, 15 bp, Homo sapiens
acatgcttgtagtct

SEQ ID NO: 49492 - DNA, 15 bp, Homo sapiens
cacatgcttgtagtc

SEQ ID NO: 49493 - DNA, 15 bp, Homo sapiens
gcacatgcttgtagt

SEQ ID NO: 49494 - DNA, 15 bp, Homo sapiens
ggcacatgcttgtag

SEQ ID NO: 49495 - DNA, 15 bp, Homo sapiens
tggcacatgcttgta

SEQ ID NO: 49496 - DNA, 15 bp, Homo sapiens
gtggcacatgcttgt

SEQ ID NO: 49497 - DNA, 15 bp, Homo sapiens
ggtggcacatgcttg

SEQ ID NO: 49498 - DNA, 15 bp, Homo sapiens
tggtggcacatgctt

SEQ ID NO: 49499 - DNA, 15 bp, Homo sapiens
gtggtggcacatgct

SEQ ID NO: 49500 - DNA, 15 bp, Homo sapiens
tgtggtggcacatgc

SEQ ID NO: 49501 - DNA, 15 bp, Homo sapiens
gtgtggtggcacatg

SEQ ID NO: 49502 - DNA, 15 bp, Homo sapiens
ggtgtggtggcacat

SEQ ID NO: 49503 - DNA, 15 bp, Homo sapiens
gggtgtggtggcaca

SEQ ID NO: 49504 - DNA, 15 bp, Homo sapiens
tgggtgtggtggcac

SEQ ID NO: 49505 - DNA, 15 bp, Homo sapiens
ctgggtgtggtggca

SEQ ID NO: 49506 - DNA, 15 bp, Homo sapiens
aaaaaaattagctgg

SEQ ID NO: 49507 - DNA, 15 bp, Homo sapiens
aaaaaaaattagctg

SEQ ID NO: 49508 - DNA, 15 bp, Homo sapiens
taaaaaaaattagct

SEQ ID NO: 49509 - DNA, 15 bp, Homo sapiens
ataaaaaaaattagc

SEQ ID NO: 49510 - DNA, 15 bp, Homo sapiens
aataaaaaaaattag

SEQ ID NO: 49511 - DNA, 15 bp, Homo sapiens
aaataaaaaaaatta

SEQ ID NO: 49512 - DNA, 15 bp, Homo sapiens
aaaataaaaaaaatt

SEQ ID NO: 49513 - DNA, 15 bp, Homo sapiens
aaaaataaaaaaaat

SEQ ID NO: 49514 - DNA, 15 bp, Homo sapiens
taaaaataaaaaaaa

SEQ ID NO: 49515 - DNA, 15 bp, Homo sapiens
ataaaaataaaaaaa

SEQ ID NO: 49516 - DNA, 15 bp, Homo sapiens
aataaaaataaaaaa

SEQ ID NO: 49517 - DNA, 15 bp, Homo sapiens
aaataaaaataaaaa

SEQ ID NO: 49518 - DNA, 15 bp, Homo sapiens
aaaataaaaataaaa

SEQ ID NO: 49519 - DNA, 15 bp, Homo sapiens
aaaaataaaaataaa

SEQ ID NO: 49520 - DNA, 15 bp, Homo sapiens
caaaaataaaaataa

SEQ ID NO: 49521 - DNA, 15 bp, Homo sapiens
acaaaaataaaaata

SEQ ID NO: 49522 - DNA, 15 bp, Homo sapiens
tacaaaaataaaaat

SEQ ID NO: 49523 - DNA, 15 bp, Homo sapiens
ctacaaaaataaaaa

SEQ ID NO: 49524 - DNA, 15 bp, Homo sapiens
cctacaaaaataaaa

SEQ ID NO: 49525 - DNA, 15 bp, Homo sapiens
ccctacaaaaataaa

SEQ ID NO: 49526 - DNA, 15 bp, Homo sapiens
tccctacaaaaataa

SEQ ID NO: 49527 - DNA, 15 bp, Homo sapiens
gtccctacaaaaata

SEQ ID NO: 49528 - DNA, 15 bp, Homo sapiens
tgtccctacaaaaat

SEQ ID NO: 49529 - DNA, 15 bp, Homo sapiens
ctgtccctacaaaaa

SEQ ID NO: 49530 - DNA, 15 bp, Homo sapiens
cctgtccctacaaaa

SEQ ID NO: 49531 - DNA, 15 bp, Homo sapiens
ccctgtccctacaaa

SEQ ID NO: 49532 - DNA, 15 bp, Homo sapiens
accctgtccctacaa

SEQ ID NO: 49533 - DNA, 15 bp, Homo sapiens
gaccctgtccctaca

SEQ ID NO: 49534 - DNA, 15 bp, Homo sapiens
agaccctgtccctac

SEQ ID NO: 49535 - DNA, 15 bp, Homo sapiens
gagaccctgtcccta

SEQ ID NO: 49536 - DNA, 15 bp, Homo sapiens
tgagaccctgtccct

SEQ ID NO: 49537 - DNA, 15 bp, Homo sapiens
gtgagaccctgtccc

SEQ ID NO: 49538 - DNA, 15 bp, Homo sapiens
agtgagaccctgtcc

SEQ ID NO: 49539 - DNA, 15 bp, Homo sapiens
tagtgagaccctgtc

SEQ ID NO: 49540 - DNA, 15 bp, Homo sapiens
atagtgagaccctgt

SEQ ID NO: 49541 - DNA, 15 bp, Homo sapiens
catagtgagaccctg

SEQ ID NO: 49542 - DNA, 15 bp, Homo sapiens
acatagtgagaccct

SEQ ID NO: 49543 - DNA, 15 bp, Homo sapiens
gcctgggcaacatag

SEQ ID NO: 49544 - DNA, 15 bp, Homo sapiens
agcctgggcaacata

SEQ ID NO: 49545 - DNA, 15 bp, Homo sapiens
cagcctgggcaacat

SEQ ID NO: 49546 - DNA, 15 bp, Homo sapiens
ccaggagtttgagac

SEQ ID NO: 49547 - DNA, 15 bp, Homo sapiens
cccaggagtttgaga

SEQ ID NO: 49548 - DNA, 15 bp, Homo sapiens
tgcccaggagtttga

SEQ ID NO: 49549 - DNA, 15 bp, Homo sapiens
gtgcccaggagtttg

SEQ ID NO: 49550 - DNA, 15 bp, Homo sapiens
tgtgcccaggagttt

SEQ ID NO: 49551 - DNA, 15 bp, Homo sapiens
ttgtgcccaggagtt

SEQ ID NO: 49552 - DNA, 15 bp, Homo sapiens
cttgtgcccaggagt

SEQ ID NO: 49553 - DNA, 15 bp, Homo sapiens
gcttgtgcccaggag

SEQ ID NO: 49554 - DNA, 15 bp, Homo sapiens
tgcttgtgcccagga

SEQ ID NO: 49555 - DNA, 15 bp, Homo sapiens
ctgcttgtgcccagg

SEQ ID NO: 49556 - DNA, 15 bp, Homo sapiens
actgcttgtgcccag

SEQ ID NO: 49557 - DNA, 15 bp, Homo sapiens
gactgcttgtgccca

SEQ ID NO: 49558 - DNA, 15 bp, Homo sapiens
ggactgcttgtgccc

SEQ ID NO: 49559 - DNA, 15 bp, Homo sapiens
aggactgcttgtgcc

SEQ ID NO: 49560 - DNA, 15 bp, Homo sapiens
gaggactgcttgtgc

SEQ ID NO: 49561 - DNA, 15 bp, Homo sapiens
tgaggactgcttgtg

SEQ ID NO: 49562 - DNA, 15 bp, Homo sapiens
gtgaggactgcttgt

SEQ ID NO: 49563 - DNA, 15 bp, Homo sapiens
cgtgaggactgcttg

SEQ ID NO: 49564 - DNA, 15 bp, Homo sapiens
gcgtgaggactgctt

SEQ ID NO: 49565 - DNA, 15 bp, Homo sapiens
agcgtgaggactgct

SEQ ID NO: 49566 - DNA, 15 bp, Homo sapiens
aagcgtgaggactgc

SEQ ID NO: 49567 - DNA, 15 bp, Homo sapiens
aaagcgtgaggactg

SEQ ID NO: 49568 - DNA, 15 bp, Homo sapiens
caaagcgtgaggact

SEQ ID NO: 49569 - DNA, 15 bp, Homo sapiens
ccaaagcgtgaggac

SEQ ID NO: 49570 - DNA, 15 bp, Homo sapiens
gccaaagcgtgagga

SEQ ID NO: 49571 - DNA, 15 bp, Homo sapiens
tgccaaagcgtgagg

SEQ ID NO: 49572 - DNA, 15 bp, Homo sapiens
atgccaaagcgtgag

SEQ ID NO: 49573 - DNA, 15 bp, Homo sapiens
gatgccaaagcgtga

SEQ ID NO: 49574 - DNA, 15 bp, Homo sapiens
ggatgccaaagcgtg

SEQ ID NO: 49575 - DNA, 15 bp, Homo sapiens
gggatgccaaagcgt

SEQ ID NO: 49576 - DNA, 15 bp, Homo sapiens
tgggatgccaaagcg

SEQ ID NO: 49577 - DNA, 15 bp, Homo sapiens
ttgggatgccaaagc

SEQ ID NO: 49578 - DNA, 15 bp, Homo sapiens
tttgggatgccaaag

SEQ ID NO: 49579 - DNA, 15 bp, Homo sapiens
ctttgggatgccaaa

SEQ ID NO: 49580 - DNA, 15 bp, Homo sapiens
tctttgggatgccaa

SEQ ID NO: 49581 - DNA, 15 bp, Homo sapiens
ctctttgggatgcca

SEQ ID NO: 49582 - DNA, 15 bp, Homo sapiens
actctttgggatgcc

SEQ ID NO: 49583 - DNA, 15 bp, Homo sapiens
aactctttgggatgc

SEQ ID NO: 49584 - DNA, 15 bp, Homo sapiens
caactctttgggatg

SEQ ID NO: 49585 - DNA, 15 bp, Homo sapiens
ccaactctttgggat

SEQ ID NO: 49586 - DNA, 15 bp, Homo sapiens
tccaactctttggga

SEQ ID NO: 49587 - DNA, 15 bp, Homo sapiens
ttccaactctttggg

SEQ ID NO: 49588 - DNA, 15 bp, Homo sapiens
attccaactctttgg

SEQ ID NO: 49589 - DNA, 15 bp, Homo sapiens
aattccaactctttg

SEQ ID NO: 49590 - DNA, 15 bp, Homo sapiens
taattccaactcttt

SEQ ID NO: 49591 - DNA, 15 bp, Homo sapiens
gtaattccaactctt

SEQ ID NO: 49592 - DNA, 15 bp, Homo sapiens
tgtaattccaactct

SEQ ID NO: 49593 - DNA, 15 bp, Homo sapiens
ctgtaattccaactc

SEQ ID NO: 49594 - DNA, 15 bp, Homo sapiens
cctgtaattccaact

SEQ ID NO: 49595 - DNA, 15 bp, Homo sapiens
acctgtaattccaac

SEQ ID NO: 49596 - DNA, 15 bp, Homo sapiens
cacctgtaattccaa

SEQ ID NO: 49597 - DNA, 15 bp, Homo sapiens
gcacacctgtaattc

SEQ ID NO: 49598 - DNA, 15 bp, Homo sapiens
cgcacacctgtaatt

SEQ ID NO: 49599 - DNA, 15 bp, Homo sapiens
gcgcacacctgtaat

SEQ ID NO: 49600 - DNA, 15 bp, Homo sapiens
ggcgcacacctgtaa

SEQ ID NO: 49601 - DNA, 15 bp, Homo sapiens
tggcgcacacctgta

SEQ ID NO: 49602 - DNA, 15 bp, Homo sapiens
atggcgcacacctgt

SEQ ID NO: 49603 - DNA, 15 bp, Homo sapiens
gatggcgcacacctg

SEQ ID NO: 49604 - DNA, 15 bp, Homo sapiens
tgatggcgcacacct

SEQ ID NO: 49605 - DNA, 15 bp, Homo sapiens
atgatggcgcacacc

SEQ ID NO: 49606 - DNA, 15 bp, Homo sapiens
catgatggcgcacac

SEQ ID NO: 49607 - DNA, 15 bp, Homo sapiens
gcatgatggcgcaca

SEQ ID NO: 49608 - DNA, 15 bp, Homo sapiens
ggcatgatggcgcac

SEQ ID NO: 49609 - DNA, 15 bp, Homo sapiens
aggcatgatggcgca

SEQ ID NO: 49610 - DNA, 15 bp, Homo sapiens
caggcatgatggcgc

SEQ ID NO: 49611 - DNA, 15 bp, Homo sapiens
ccaggcatgatggcg

SEQ ID NO: 49612 - DNA, 15 bp, Homo sapiens
gccaggcatgatggc

SEQ ID NO: 49613 - DNA, 15 bp, Homo sapiens
ggccaggcatgatgg

SEQ ID NO: 49614 - DNA, 15 bp, Homo sapiens
aggccaggcatgatg

SEQ ID NO: 49615 - DNA, 15 bp, Homo sapiens
aaggccaggcatgat

SEQ ID NO: 49616 - DNA, 15 bp, Homo sapiens
taaggccaggcatga

SEQ ID NO: 49617 - DNA, 15 bp, Homo sapiens
ttaaggccaggcatg

SEQ ID NO: 49618 - DNA, 15 bp, Homo sapiens
gttaaggccaggcat

SEQ ID NO: 49619 - DNA, 15 bp, Homo sapiens
cgttaaggccaggca

SEQ ID NO: 49620 - DNA, 15 bp, Homo sapiens
acgttaaggccaggc

SEQ ID NO: 49621 - DNA, 15 bp, Homo sapiens
aacgttaaggccagg

SEQ ID NO: 49622 - DNA, 15 bp, Homo sapiens
aaacgttaaggccag

SEQ ID NO: 49623 - DNA, 15 bp, Homo sapiens
gaaacgttaaggcca

SEQ ID NO: 49624 - DNA, 15 bp, Homo sapiens
agaaacgttaaggcc

SEQ ID NO: 49625 - DNA, 15 bp, Homo sapiens
aagaaacgttaaggc

SEQ ID NO: 49626 - DNA, 15 bp, Homo sapiens
taagaaacgttaagg

SEQ ID NO: 49627 - DNA, 15 bp, Homo sapiens
ttaagaaacgttaag

SEQ ID NO: 49628 - DNA, 15 bp, Homo sapiens
cttaagaaacgttaa

SEQ ID NO: 49629 - DNA, 15 bp, Homo sapiens
tcttaagaaacgtta

SEQ ID NO: 49630 - DNA, 15 bp, Homo sapiens
gtcttaagaaacgtt

SEQ ID NO: 49631 - DNA, 15 bp, Homo sapiens
agtcttaagaaacgt

SEQ ID NO: 49632 - DNA, 15 bp, Homo sapiens
aagtcttaagaaacg

SEQ ID NO: 49633 - DNA, 15 bp, Homo sapiens
caagtcttaagaaac

SEQ ID NO: 49634 - DNA, 15 bp, Homo sapiens
tcaagtcttaagaaa

SEQ ID NO: 49635 - DNA, 15 bp, Homo sapiens
atcaagtcttaagaa

SEQ ID NO: 49636 - DNA, 15 bp, Homo sapiens
aatcaagtcttaaga

SEQ ID NO: 49637 - DNA, 15 bp, Homo sapiens
taatcaagtcttaag

SEQ ID NO: 49638 - DNA, 15 bp, Homo sapiens
ataatcaagtcttaa

SEQ ID NO: 49639 - DNA, 15 bp, Homo sapiens
aataatcaagtctta

SEQ ID NO: 49640 - DNA, 15 bp, Homo sapiens
aaataatcaagtctt

SEQ ID NO: 49641 - DNA, 15 bp, Homo sapiens
aaaataatcaagtct

SEQ ID NO: 49642 - DNA, 15 bp, Homo sapiens
gaaaataatcaagtc

SEQ ID NO: 49643 - DNA, 15 bp, Homo sapiens
agaaaataatcaagt

SEQ ID NO: 49644 - DNA, 15 bp, Homo sapiens
tagaaaataatcaag

SEQ ID NO: 49645 - DNA, 15 bp, Homo sapiens
atagaaaataatcaa

SEQ ID NO: 49646 - DNA, 15 bp, Homo sapiens
aatagaaaataatca

SEQ ID NO: 49647 - DNA, 15 bp, Homo sapiens
aaatagaaaataatc

SEQ ID NO: 49648 - DNA, 15 bp, Homo sapiens
taaatagaaaataat

SEQ ID NO: 49649 - DNA, 15 bp, Homo sapiens
ctaaatagaaaataa

SEQ ID NO: 49650 - DNA, 15 bp, Homo sapiens
gctaaatagaaaata

SEQ ID NO: 49651 - DNA, 15 bp, Homo sapiens
agctaaatagaaaat

SEQ ID NO: 49652 - DNA, 15 bp, Homo sapiens
aagctaaatagaaaa

SEQ ID NO: 49653 - DNA, 15 bp, Homo sapiens
gaagctaaatagaaa

SEQ ID NO: 49654 - DNA, 15 bp, Homo sapiens
agaagctaaatagaa

SEQ ID NO: 49655 - DNA, 15 bp, Homo sapiens
cagaagctaaataga

SEQ ID NO: 49656 - DNA, 15 bp, Homo sapiens
acagaagctaaatag

SEQ ID NO: 49657 - DNA, 15 bp, Homo sapiens
cacagaagctaaata

SEQ ID NO: 49658 - DNA, 15 bp, Homo sapiens
ccacagaagctaaat

SEQ ID NO: 49659 - DNA, 15 bp, Homo sapiens
tccacagaagctaaa

SEQ ID NO: 49660 - DNA, 15 bp, Homo sapiens
atccacagaagctaa

SEQ ID NO: 49661 - DNA, 15 bp, Homo sapiens
aatccacagaagcta

SEQ ID NO: 49662 - DNA, 15 bp, Homo sapiens
aaatccacagaagct

SEQ ID NO: 49663 - DNA, 15 bp, Homo sapiens
taaatccacagaagc

SEQ ID NO: 49664 - DNA, 15 bp, Homo sapiens
gtaaatccacagaag

SEQ ID NO: 49665 - DNA, 15 bp, Homo sapiens
agtaaatccacagaa

SEQ ID NO: 49666 - DNA, 15 bp, Homo sapiens
cagtaaatccacaga

SEQ ID NO: 49667 - DNA, 15 bp, Homo sapiens
tcagtaaatccacag

SEQ ID NO: 49668 - DNA, 15 bp, Homo sapiens
atcagtaaatccaca

SEQ ID NO: 49669 - DNA, 15 bp, Homo sapiens
aatcagtaaatccac

SEQ ID NO: 49670 - DNA, 15 bp, Homo sapiens
taatcagtaaatcca

SEQ ID NO: 49671 - DNA, 15 bp, Homo sapiens
ttaatcagtaaatcc

SEQ ID NO: 49672 - DNA, 15 bp, Homo sapiens
attaatcagtaaatc

SEQ ID NO: 49673 - DNA, 15 bp, Homo sapiens
aattaatcagtaaat

SEQ ID NO: 49674 - DNA, 15 bp, Homo sapiens
aaattaatcagtaaa

SEQ ID NO: 49675 - DNA, 15 bp, Homo sapiens
aaaattaatcagtaa

SEQ ID NO: 49676 - DNA, 15 bp, Homo sapiens
aaaaattaatcagta

SEQ ID NO: 49677 - DNA, 15 bp, Homo sapiens
aaaaaattaatcagt

SEQ ID NO: 49678 - DNA, 15 bp, Homo sapiens
taaaaaattaatcag

SEQ ID NO: 49679 - DNA, 15 bp, Homo sapiens
ttaaaaaattaatca

SEQ ID NO: 49680 - DNA, 15 bp, Homo sapiens
gttaaaaaattaatc

SEQ ID NO: 49681 - DNA, 15 bp, Homo sapiens
agttaaaaaattaat

SEQ ID NO: 49682 - DNA, 15 bp, Homo sapiens
tagttaaaaaattaa

SEQ ID NO: 49683 - DNA, 15 bp, Homo sapiens
ctagttaaaaaatta

SEQ ID NO: 49684 - DNA, 15 bp, Homo sapiens
cctagttaaaaaatt

SEQ ID NO: 49685 - DNA, 15 bp, Homo sapiens
tcctagttaaaaaat

SEQ ID NO: 49686 - DNA, 15 bp, Homo sapiens
ctcctagttaaaaaa

SEQ ID NO: 49687 - DNA, 15 bp, Homo sapiens
tctcctagttaaaaa

SEQ ID NO: 49688 - DNA, 15 bp, Homo sapiens
ctctcctagttaaaa

SEQ ID NO: 49689 - DNA, 15 bp, Homo sapiens
tctctcctagttaaa

SEQ ID NO: 49690 - DNA, 15 bp, Homo sapiens
ttctctcctagttaa

SEQ ID NO: 49691 - DNA, 15 bp, Homo sapiens
tttctctcctagtta

SEQ ID NO: 49692 - DNA, 15 bp, Homo sapiens
atttctctcctagtt

SEQ ID NO: 49693 - DNA, 15 bp, Homo sapiens
gatttctctcctagt

SEQ ID NO: 49694 - DNA, 15 bp, Homo sapiens
tgatttctctcctag

SEQ ID NO: 49695 - DNA, 15 bp, Homo sapiens
ctgatttctctccta

SEQ ID NO: 49696 - DNA, 15 bp, Homo sapiens
actgatttctctcct

SEQ ID NO: 49697 - DNA, 15 bp, Homo sapiens
tactgatttctctcc

SEQ ID NO: 49698 - DNA, 15 bp, Homo sapiens
atactgatttctctc

SEQ ID NO: 49699 - DNA, 15 bp, Homo sapiens
catactgatttctct

SEQ ID NO: 49700 - DNA, 15 bp, Homo sapiens
tcatactgatttctc

SEQ ID NO: 49701 - DNA, 15 bp, Homo sapiens
ttcatactgatttct

SEQ ID NO: 49702 - DNA, 15 bp, Homo sapiens
cttcatactgatttc

SEQ ID NO: 49703 - DNA, 15 bp, Homo sapiens
tcttcatactgattt

SEQ ID NO: 49704 - DNA, 15 bp, Homo sapiens
ctcttcatactgatt

SEQ ID NO: 49705 - DNA, 15 bp, Homo sapiens
cctcttcatactgat

SEQ ID NO: 49706 - DNA, 15 bp, Homo sapiens
tcctcttcatactga

SEQ ID NO: 49707 - DNA, 15 bp, Homo sapiens
ttcctcttcatactg

SEQ ID NO: 49708 - DNA, 15 bp, Homo sapiens
cttcctcttcatact

SEQ ID NO: 49709 - DNA, 15 bp, Homo sapiens
acttcctcttcatac

SEQ ID NO: 49710 - DNA, 15 bp, Homo sapiens
tacttcctcttcata

SEQ ID NO: 49711 - DNA, 15 bp, Homo sapiens
ttacttcctcttcat

SEQ ID NO: 49712 - DNA, 15 bp, Homo sapiens
attacttcctcttca

SEQ ID NO: 49713 - DNA, 15 bp, Homo sapiens
tattacttcctcttc

SEQ ID NO: 49714 - DNA, 15 bp, Homo sapiens
ttattacttcctctt

SEQ ID NO: 49715 - DNA, 15 bp, Homo sapiens
tttattacttcctct

SEQ ID NO: 49716 - DNA, 15 bp, Homo sapiens
ctttattacttcctc

SEQ ID NO: 49717 - DNA, 15 bp, Homo sapiens
tctttattacttcct

SEQ ID NO: 49718 - DNA, 15 bp, Homo sapiens
ttctttattacttcc

SEQ ID NO: 49719 - DNA, 15 bp, Homo sapiens
attctttattacttc

SEQ ID NO: 49720 - DNA, 15 bp, Homo sapiens
cattctttattactt

SEQ ID NO: 49721 - DNA, 15 bp, Homo sapiens
tcattctttattact

SEQ ID NO: 49722 - DNA, 15 bp, Homo sapiens
ttcattctttattac

SEQ ID NO: 49723 - DNA, 15 bp, Homo sapiens
tttcattctttatta

SEQ ID NO: 49724 - DNA, 15 bp, Homo sapiens
ttttcattctttatt

SEQ ID NO: 49725 - DNA, 15 bp, Homo sapiens
gttttcattctttat

SEQ ID NO: 49726 - DNA, 15 bp, Homo sapiens
tgttttcattcttta

SEQ ID NO: 49727 - DNA, 15 bp, Homo sapiens
atgttttcattcttt

SEQ ID NO: 49728 - DNA, 15 bp, Homo sapiens
catgttttcattctt

SEQ ID NO: 49729 - DNA, 15 bp, Homo sapiens
ccatgttttcattct

SEQ ID NO: 49730 - DNA, 15 bp, Homo sapiens
accatgttttcattc

SEQ ID NO: 49731 - DNA, 15 bp, Homo sapiens
taccatgttttcatt

SEQ ID NO: 49732 - DNA, 15 bp, Homo sapiens
ataccatgttttcat

SEQ ID NO: 49733 - DNA, 15 bp, Homo sapiens
aataccatgttttca

SEQ ID NO: 49734 - DNA, 15 bp, Homo sapiens
aaataccatgttttc

SEQ ID NO: 49735 - DNA, 15 bp, Homo sapiens
taaataccatgtttt

SEQ ID NO: 49736 - DNA, 15 bp, Homo sapiens
ttaaataccatgttt

SEQ ID NO: 49737 - DNA, 15 bp, Homo sapiens
tttaaataccatgtt

SEQ ID NO: 49738 - DNA, 15 bp, Homo sapiens
atttaaataccatgt

SEQ ID NO: 49739 - DNA, 15 bp, Homo sapiens
catttaaataccatg

SEQ ID NO: 49740 - DNA, 15 bp, Homo sapiens
acatttaaataccat

SEQ ID NO: 49741 - DNA, 15 bp, Homo sapiens
cacatttaaatacca

SEQ ID NO: 49742 - DNA, 15 bp, Homo sapiens
gcacatttaaatacc

SEQ ID NO: 49743 - DNA, 15 bp, Homo sapiens
tgcacatttaaatac

SEQ ID NO: 49744 - DNA, 15 bp, Homo sapiens
ctgcacatttaaata

SEQ ID NO: 49745 - DNA, 15 bp, Homo sapiens
cctgcacatttaaat

SEQ ID NO: 49746 - DNA, 15 bp, Homo sapiens
acctgcacatttaaa

SEQ ID NO: 49747 - DNA, 15 bp, Homo sapiens
aacctgcacatttaa

SEQ ID NO: 49748 - DNA, 15 bp, Homo sapiens
aaacctgcacattta

SEQ ID NO: 49749 - DNA, 15 bp, Homo sapiens
taaacctgcacattt

SEQ ID NO: 49750 - DNA, 15 bp, Homo sapiens
ctaaacctgcacatt

SEQ ID NO: 49751 - DNA, 15 bp, Homo sapiens
tctaaacctgcacat

SEQ ID NO: 49752 - DNA, 15 bp, Homo sapiens
ttctaaacctgcaca

SEQ ID NO: 49753 - DNA, 15 bp, Homo sapiens
tttctaaacctgcac

SEQ ID NO: 49754 - DNA, 15 bp, Homo sapiens
ctttctaaacctgca

SEQ ID NO: 49755 - DNA, 15 bp, Homo sapiens
actttctaaacctgc

SEQ ID NO: 49756 - DNA, 15 bp, Homo sapiens
aactttctaaacctg

SEQ ID NO: 49757 - DNA, 15 bp, Homo sapiens
taactttctaaacct

SEQ ID NO: 49758 - DNA, 15 bp, Homo sapiens
ttaactttctaaacc

SEQ ID NO: 49759 - DNA, 15 bp, Homo sapiens
attaactttctaaac

SEQ ID NO: 49760 - DNA, 15 bp, Homo sapiens
cattaactttctaaa

SEQ ID NO: 49761 - DNA, 15 bp, Homo sapiens
tcattaactttctaa

SEQ ID NO: 49762 - DNA, 15 bp, Homo sapiens
ttcattaactttcta

SEQ ID NO: 49763 - DNA, 15 bp, Homo sapiens
cttcattaactttct

SEQ ID NO: 49764 - DNA, 15 bp, Homo sapiens
acttcattaactttc

SEQ ID NO: 49765 - DNA, 15 bp, Homo sapiens
aacttcattaacttt

SEQ ID NO: 49766 - DNA, 15 bp, Homo sapiens
aaacttcattaactt

SEQ ID NO: 49767 - DNA, 15 bp, Homo sapiens
caaacttcattaact

SEQ ID NO: 49768 - DNA, 15 bp, Homo sapiens
tcaaacttcattaac

SEQ ID NO: 49769 - DNA, 15 bp, Homo sapiens
ttcaaacttcattaa

SEQ ID NO: 49770 - DNA, 15 bp, Homo sapiens
attcaaacttcatta

SEQ ID NO: 49771 - DNA, 15 bp, Homo sapiens
aattcaaacttcatt

SEQ ID NO: 49772 - DNA, 15 bp, Homo sapiens
aaattcaaacttcat

SEQ ID NO: 49773 - DNA, 15 bp, Homo sapiens
caaattcaaacttca

SEQ ID NO: 49774 - DNA, 15 bp, Homo sapiens
tcaaattcaaacttc

SEQ ID NO: 49775 - DNA, 15 bp, Homo sapiens
atcaaattcaaactt

SEQ ID NO: 49776 - DNA, 15 bp, Homo sapiens
aatcaaattcaaact

SEQ ID NO: 49777 - DNA, 15 bp, Homo sapiens
caatcaaattcaaac

SEQ ID NO: 49778 - DNA, 15 bp, Homo sapiens
tcaatcaaattcaaa

SEQ ID NO: 49779 - DNA, 15 bp, Homo sapiens
atcaatcaaattcaa

SEQ ID NO: 49780 - DNA, 15 bp, Homo sapiens
gatcaatcaaattca

SEQ ID NO: 49781 - DNA, 15 bp, Homo sapiens
agatcaatcaaattc

SEQ ID NO: 49782 - DNA, 15 bp, Homo sapiens
cagatcaatcaaatt

SEQ ID NO: 49783 - DNA, 15 bp, Homo sapiens
acagatcaatcaaat

SEQ ID NO: 49784 - DNA, 15 bp, Homo sapiens
tacagatcaatcaaa

SEQ ID NO: 49785 - DNA, 15 bp, Homo sapiens
atacagatcaatcaa

SEQ ID NO: 49786 - DNA, 15 bp, Homo sapiens
aatacagatcaatca

SEQ ID NO: 49787 - DNA, 15 bp, Homo sapiens
aaatacagatcaatc

SEQ ID NO: 49788 - DNA, 15 bp, Homo sapiens
taaatacagatcaat

SEQ ID NO: 49789 - DNA, 15 bp, Homo sapiens
ctaaatacagatcaa

SEQ ID NO: 49790 - DNA, 15 bp, Homo sapiens
tctaaatacagatca

SEQ ID NO: 49791 - DNA, 15 bp, Homo sapiens
ctctaaatacagatc

SEQ ID NO: 49792 - DNA, 15 bp, Homo sapiens
tctctaaatacagat

SEQ ID NO: 49793 - DNA, 15 bp, Homo sapiens
ttctctaaatacaga

SEQ ID NO: 49794 - DNA, 15 bp, Homo sapiens
cttctctaaatacag

SEQ ID NO: 49795 - DNA, 15 bp, Homo sapiens
ccttctctaaataca

SEQ ID NO: 49796 - DNA, 15 bp, Homo sapiens
gccttctctaaatac

SEQ ID NO: 49797 - DNA, 15 bp, Homo sapiens
tgccttctctaaata

SEQ ID NO: 49798 - DNA, 15 bp, Homo sapiens
ttgccttctctaaat

SEQ ID NO: 49799 - DNA, 15 bp, Homo sapiens
gttgccttctctaaa

SEQ ID NO: 49800 - DNA, 15 bp, Homo sapiens
cgttgccttctctaa

SEQ ID NO: 49801 - DNA, 15 bp, Homo sapiens
acgttgccttctcta

SEQ ID NO: 49802 - DNA, 15 bp, Homo sapiens
gacgttgccttctct

SEQ ID NO: 49803 - DNA, 15 bp, Homo sapiens
agacgttgccttctc

SEQ ID NO: 49804 - DNA, 15 bp, Homo sapiens
aagacgttgccttct

SEQ ID NO: 49805 - DNA, 15 bp, Homo sapiens
taagacgttgccttc

SEQ ID NO: 49806 - DNA, 15 bp, Homo sapiens
ataagacgttgcctt

SEQ ID NO: 49807 - DNA, 15 bp, Homo sapiens
aataagacgttgcct

SEQ ID NO: 49808 - DNA, 15 bp, Homo sapiens
taataagacgttgcc

SEQ ID NO: 49809 - DNA, 15 bp, Homo sapiens
ataataagacgttgc

SEQ ID NO: 49810 - DNA, 15 bp, Homo sapiens
aataataagacgttg

SEQ ID NO: 49811 - DNA, 15 bp, Homo sapiens
aaataataagacgtt

SEQ ID NO: 49812 - DNA, 15 bp, Homo sapiens
aaaataataagacgt

SEQ ID NO: 49813 - DNA, 15 bp, Homo sapiens
taaaataataagacg

SEQ ID NO: 49814 - DNA, 15 bp, Homo sapiens
ttaaaataataagac

SEQ ID NO: 49815 - DNA, 15 bp, Homo sapiens
tttaaaataataaga

SEQ ID NO: 49816 - DNA, 15 bp, Homo sapiens
ttttaaaataataag

SEQ ID NO: 49817 - DNA, 15 bp, Homo sapiens
gttttaaaataataa

SEQ ID NO: 49818 - DNA, 15 bp, Homo sapiens
ggttttaaaataata

SEQ ID NO: 49819 - DNA, 15 bp, Homo sapiens
tggttttaaaataat

SEQ ID NO: 49820 - DNA, 15 bp, Homo sapiens
ttggttttaaaataa

SEQ ID NO: 49821 - DNA, 15 bp, Homo sapiens
gttggttttaaaata

SEQ ID NO: 49822 - DNA, 15 bp, Homo sapiens
agttggttttaaaat

SEQ ID NO: 49823 - DNA, 15 bp, Homo sapiens
tagttggttttaaaa

SEQ ID NO: 49824 - DNA, 15 bp, Homo sapiens
atagttggttttaaa

SEQ ID NO: 49825 - DNA, 15 bp, Homo sapiens
gatagttggttttaa

SEQ ID NO: 49826 - DNA, 15 bp, Homo sapiens
ggatagttggtttta

SEQ ID NO: 49827 - DNA, 15 bp, Homo sapiens
cggatagttggtttt

SEQ ID NO: 49828 - DNA, 15 bp, Homo sapiens
gcggatagttggttt

SEQ ID NO: 49829 - DNA, 15 bp, Homo sapiens
ggcggatagttggtt

SEQ ID NO: 49830 - DNA, 15 bp, Homo sapiens
gggcggatagttggt

SEQ ID NO: 49831 - DNA, 15 bp, Homo sapiens
agggcggatagttgg

SEQ ID NO: 49832 - DNA, 15 bp, Homo sapiens
cagggcggatagttg

SEQ ID NO: 49833 - DNA, 15 bp, Homo sapiens
acagggcggatagtt

SEQ ID NO: 49834 - DNA, 15 bp, Homo sapiens
cacagggcggatagt

SEQ ID NO: 49835 - DNA, 15 bp, Homo sapiens
gcacagggcggatag

SEQ ID NO: 49836 - DNA, 15 bp, Homo sapiens
cgcacagggcggata

SEQ ID NO: 49837 - DNA, 15 bp, Homo sapiens
ccgcacagggcggat

SEQ ID NO: 49838 - DNA, 15 bp, Homo sapiens
accgcacagggcgga

SEQ ID NO: 49839 - DNA, 15 bp, Homo sapiens
caccgcacagggcgg

SEQ ID NO: 49840 - DNA, 15 bp, Homo sapiens
ccaccgcacagggcg

SEQ ID NO: 49841 - DNA, 15 bp, Homo sapiens
gccaccgcacagggc

SEQ ID NO: 49842 - DNA, 15 bp, Homo sapiens
agccaccgcacaggg

SEQ ID NO: 49843 - DNA, 15 bp, Homo sapiens
gagccaccgcacagg

SEQ ID NO: 49844 - DNA, 15 bp, Homo sapiens
tgagccaccgcacag

SEQ ID NO: 49845 - DNA, 15 bp, Homo sapiens
gtgagccaccgcaca

SEQ ID NO: 49846 - DNA, 15 bp, Homo sapiens
cgtgagccaccgcac

SEQ ID NO: 49847 - DNA, 15 bp, Homo sapiens
gcgtgagccaccgca

SEQ ID NO: 49848 - DNA, 15 bp, Homo sapiens
aattacaggcgtgag

SEQ ID NO: 49849 - DNA, 15 bp, Homo sapiens
gaattacaggcgtga

SEQ ID NO: 49850 - DNA, 15 bp, Homo sapiens
ggaattacaggcgtg

SEQ ID NO: 49851 - DNA, 15 bp, Homo sapiens
tggaattacaggcgt

SEQ ID NO: 49852 - DNA, 15 bp, Homo sapiens
ctggaattacaggcg

SEQ ID NO: 49853 - DNA, 15 bp, Homo sapiens
gctggaattacaggc

SEQ ID NO: 49854 - DNA, 15 bp, Homo sapiens
tgctggaattacagg

SEQ ID NO: 49855 - DNA, 15 bp, Homo sapiens
gtgctggaattacag

SEQ ID NO: 49856 - DNA, 15 bp, Homo sapiens
agtgctggaattaca

SEQ ID NO: 49857 - DNA, 15 bp, Homo sapiens
aagtgctggaattac

SEQ ID NO: 49858 - DNA, 15 bp, Homo sapiens
aaagtgctggaatta

SEQ ID NO: 49859 - DNA, 15 bp, Homo sapiens
caaagtgctggaatt

SEQ ID NO: 49860 - DNA, 15 bp, Homo sapiens
ccaaagtgctggaat

SEQ ID NO: 49861 - DNA, 15 bp, Homo sapiens
cccaaagtgctggaa

SEQ ID NO: 49862 - DNA, 15 bp, Homo sapiens
tcccaaagtgctgga

SEQ ID NO: 49863 - DNA, 15 bp, Homo sapiens
gcccacctcagcctc

SEQ ID NO: 49864 - DNA, 15 bp, Homo sapiens
tgcccacctcagcct

SEQ ID NO: 49865 - DNA, 15 bp, Homo sapiens
ctgcccacctcagcc

SEQ ID NO: 49866 - DNA, 15 bp, Homo sapiens
tctgcccacctcagc

SEQ ID NO: 49867 - DNA, 15 bp, Homo sapiens
atctgcccacctcag

SEQ ID NO: 49868 - DNA, 15 bp, Homo sapiens
gatctgcccacctca

SEQ ID NO: 49869 - DNA, 15 bp, Homo sapiens
tgatctgcccacctc

SEQ ID NO: 49870 - DNA, 15 bp, Homo sapiens
ctgatctgcccacct

SEQ ID NO: 49871 - DNA, 15 bp, Homo sapiens
gctgatctgcccacc

SEQ ID NO: 49872 - DNA, 15 bp, Homo sapiens
agctgatctgcccac

SEQ ID NO: 49873 - DNA, 15 bp, Homo sapiens
cagctgatctgccca

SEQ ID NO: 49874 - DNA, 15 bp, Homo sapiens
tcagctgatctgccc

SEQ ID NO: 49875 - DNA, 15 bp, Homo sapiens
ctcagctgatctgcc

SEQ ID NO: 49876 - DNA, 15 bp, Homo sapiens
cctcagctgatctgc

SEQ ID NO: 49877 - DNA, 15 bp, Homo sapiens
acctcagctgatctg

SEQ ID NO: 49878 - DNA, 15 bp, Homo sapiens
gacctcagctgatct

SEQ ID NO: 49879 - DNA, 15 bp, Homo sapiens
tgacctcagctgatc

SEQ ID NO: 49880 - DNA, 15 bp, Homo sapiens
ctgacctcagctgat

SEQ ID NO: 49881 - DNA, 15 bp, Homo sapiens
cctgacctcagctga

SEQ ID NO: 49882 - DNA, 15 bp, Homo sapiens
tcctgacctcagctg

SEQ ID NO: 49883 - DNA, 15 bp, Homo sapiens
ctcctgacctcagct

SEQ ID NO: 49884 - DNA, 15 bp, Homo sapiens
actcctgacctcagc

SEQ ID NO: 49885 - DNA, 15 bp, Homo sapiens
cgaactcctgacctc

SEQ ID NO: 49886 - DNA, 15 bp, Homo sapiens
tcgaactcctgacct

SEQ ID NO: 49887 - DNA, 15 bp, Homo sapiens
ctcgaactcctgacc

SEQ ID NO: 49888 - DNA, 15 bp, Homo sapiens
tctcgaactcctgac

SEQ ID NO: 49889 - DNA, 15 bp, Homo sapiens
gccaggctggtctcg

SEQ ID NO: 49890 - DNA, 15 bp, Homo sapiens
aaccatgttggccag

SEQ ID NO: 49891 - DNA, 15 bp, Homo sapiens
taaccatgttggcca

SEQ ID NO: 49892 - DNA, 15 bp, Homo sapiens
ttaaccatgttggcc

SEQ ID NO: 49893 - DNA, 15 bp, Homo sapiens
tttaaccatgttggc

SEQ ID NO: 49894 - DNA, 15 bp, Homo sapiens
gtttaaccatgttgg

SEQ ID NO: 49895 - DNA, 15 bp, Homo sapiens
ggtttaaccatgttg

SEQ ID NO: 49896 - DNA, 15 bp, Homo sapiens
gggtttaaccatgtt

SEQ ID NO: 49897 - DNA, 15 bp, Homo sapiens
ggggtttaaccatgt

SEQ ID NO: 49898 - DNA, 15 bp, Homo sapiens
tggggtttaaccatg

SEQ ID NO: 49899 - DNA, 15 bp, Homo sapiens
atggggtttaaccat

SEQ ID NO: 49900 - DNA, 15 bp, Homo sapiens
gatggggtttaacca

SEQ ID NO: 49901 - DNA, 15 bp, Homo sapiens
agatggggtttaacc

SEQ ID NO: 49902 - DNA, 15 bp, Homo sapiens
gagatggggtttaac

SEQ ID NO: 49903 - DNA, 15 bp, Homo sapiens
agagatggggtttaa

SEQ ID NO: 49904 - DNA, 15 bp, Homo sapiens
tagagatggggttta

SEQ ID NO: 49905 - DNA, 15 bp, Homo sapiens
ttttttgtattttta

SEQ ID NO: 49906 - DNA, 15 bp, Homo sapiens
tttttttgtattttt

SEQ ID NO: 49907 - DNA, 15 bp, Homo sapiens
atttttttgtatttt

SEQ ID NO: 49908 - DNA, 15 bp, Homo sapiens
aatttttttgtattt

SEQ ID NO: 49909 - DNA, 15 bp, Homo sapiens
taatttttttgtatt

SEQ ID NO: 49910 - DNA, 15 bp, Homo sapiens
ctaatttttttgtat

SEQ ID NO: 49911 - DNA, 15 bp, Homo sapiens
gctaatttttttgta

SEQ ID NO: 49912 - DNA, 15 bp, Homo sapiens
ggctaatttttttgt

SEQ ID NO: 49913 - DNA, 15 bp, Homo sapiens
cggctaatttttttg

SEQ ID NO: 49914 - DNA, 15 bp, Homo sapiens
ccggctaattttttt

SEQ ID NO: 49915 - DNA, 15 bp, Homo sapiens
cccggctaatttttt

SEQ ID NO: 49916 - DNA, 15 bp, Homo sapiens
acccggctaattttt

SEQ ID NO: 49917 - DNA, 15 bp, Homo sapiens
cacccggctaatttt

SEQ ID NO: 49918 - DNA, 15 bp, Homo sapiens
acacccggctaattt

SEQ ID NO: 49919 - DNA, 15 bp, Homo sapiens
cacacccggctaatt

SEQ ID NO: 49920 - DNA, 15 bp, Homo sapiens
ccacacccggctaat

SEQ ID NO: 49921 - DNA, 15 bp, Homo sapiens
accacacccggctaa

SEQ ID NO: 49922 - DNA, 15 bp, Homo sapiens
caccacacccggcta

SEQ ID NO: 49923 - DNA, 15 bp, Homo sapiens
ccaccacacccggct

SEQ ID NO: 49924 - DNA, 15 bp, Homo sapiens
gccaccacacccggc

SEQ ID NO: 49925 - DNA, 15 bp, Homo sapiens
tgccaccacacccgg

SEQ ID NO: 49926 - DNA, 15 bp, Homo sapiens
ctgccaccacacccg

SEQ ID NO: 49927 - DNA, 15 bp, Homo sapiens
cctgccaccacaccc

SEQ ID NO: 49928 - DNA, 15 bp, Homo sapiens
gcctgccaccacacc

SEQ ID NO: 49929 - DNA, 15 bp, Homo sapiens
cgcctgccaccacac

SEQ ID NO: 49930 - DNA, 15 bp, Homo sapiens
gcgcctgccaccaca

SEQ ID NO: 49931 - DNA, 15 bp, Homo sapiens
ggcgcctgccaccac

SEQ ID NO: 49932 - DNA, 15 bp, Homo sapiens
aggcgcctgccacca

SEQ ID NO: 49933 - DNA, 15 bp, Homo sapiens
caggcgcctgccacc

SEQ ID NO: 49934 - DNA, 15 bp, Homo sapiens
acaggcgcctgccac

SEQ ID NO: 49935 - DNA, 15 bp, Homo sapiens
aacaggcgcctgcca

SEQ ID NO: 49936 - DNA, 15 bp, Homo sapiens
aaacaggcgcctgcc

SEQ ID NO: 49937 - DNA, 15 bp, Homo sapiens
aaaacaggcgcctgc

SEQ ID NO: 49938 - DNA, 15 bp, Homo sapiens
gaaaacaggcgcctg

SEQ ID NO: 49939 - DNA, 15 bp, Homo sapiens
ggaaaacaggcgcct

SEQ ID NO: 49940 - DNA, 15 bp, Homo sapiens
gggaaaacaggcgcc

SEQ ID NO: 49941 - DNA, 15 bp, Homo sapiens
tgggaaaacaggcgc

SEQ ID NO: 49942 - DNA, 15 bp, Homo sapiens
ctgggaaaacaggcg

SEQ ID NO: 49943 - DNA, 15 bp, Homo sapiens
gctgggaaaacaggc

SEQ ID NO: 49944 - DNA, 15 bp, Homo sapiens
agctgggaaaacagg

SEQ ID NO: 49945 - DNA, 15 bp, Homo sapiens
tagctgggaaaacag

SEQ ID NO: 49946 - DNA, 15 bp, Homo sapiens
gtagctgggaaaaca

SEQ ID NO: 49947 - DNA, 15 bp, Homo sapiens
agtagctgggaaaac

SEQ ID NO: 49948 - DNA, 15 bp, Homo sapiens
gagtagctgggaaaa

SEQ ID NO: 49949 - DNA, 15 bp, Homo sapiens
tgagtagctgggaaa

SEQ ID NO: 49950 - DNA, 15 bp, Homo sapiens
aagcctcctgagtag

SEQ ID NO: 49951 - DNA, 15 bp, Homo sapiens
caagcctcctgagta

SEQ ID NO: 49952 - DNA, 15 bp, Homo sapiens
tcaagcctcctgagt

SEQ ID NO: 49953 - DNA, 15 bp, Homo sapiens
ctcaagcctcctgag

SEQ ID NO: 49954 - DNA, 15 bp, Homo sapiens
cctcaagcctcctga

SEQ ID NO: 49955 - DNA, 15 bp, Homo sapiens
gcctcaagcctcctg

SEQ ID NO: 49956 - DNA, 15 bp, Homo sapiens
tgcctcaagcctcct

SEQ ID NO: 49957 - DNA, 15 bp, Homo sapiens
ctgcctcaagcctcc

SEQ ID NO: 49958 - DNA, 15 bp, Homo sapiens
cctgcctcaagcctc

SEQ ID NO: 49959 - DNA, 15 bp, Homo sapiens
tcctgcctcaagcct

SEQ ID NO: 49960 - DNA, 15 bp, Homo sapiens
atcctgcctcaagcc

SEQ ID NO: 49961 - DNA, 15 bp, Homo sapiens
tatcctgcctcaagc

SEQ ID NO: 49962 - DNA, 15 bp, Homo sapiens
ttatcctgcctcaag

SEQ ID NO: 49963 - DNA, 15 bp, Homo sapiens
attatcctgcctcaa

SEQ ID NO: 49964 - DNA, 15 bp, Homo sapiens
aattatcctgcctca

SEQ ID NO: 49965 - DNA, 15 bp, Homo sapiens
caattatcctgcctc

SEQ ID NO: 49966 - DNA, 15 bp, Homo sapiens
gcaattatcctgcct

SEQ ID NO: 49967 - DNA, 15 bp, Homo sapiens
agcaattatcctgcc

SEQ ID NO: 49968 - DNA, 15 bp, Homo sapiens
cagcaattatcctgc

SEQ ID NO: 49969 - DNA, 15 bp, Homo sapiens
tcagcaattatcctg

SEQ ID NO: 49970 - DNA, 15 bp, Homo sapiens
ttcagcaattatcct

SEQ ID NO: 49971 - DNA, 15 bp, Homo sapiens
gttcagcaattatcc

SEQ ID NO: 49972 - DNA, 15 bp, Homo sapiens
ggttcagcaattatc

SEQ ID NO: 49973 - DNA, 15 bp, Homo sapiens
gggttcagcaattat

SEQ ID NO: 49974 - DNA, 15 bp, Homo sapiens
cgggttcagcaatta

SEQ ID NO: 49975 - DNA, 15 bp, Homo sapiens
tcgggttcagcaatt

SEQ ID NO: 49976 - DNA, 15 bp, Homo sapiens
ctcgggttcagcaat

SEQ ID NO: 49977 - DNA, 15 bp, Homo sapiens
tctcgggttcagcaa

SEQ ID NO: 49978 - DNA, 15 bp, Homo sapiens
ctctcgggttcagca

SEQ ID NO: 49979 - DNA, 15 bp, Homo sapiens
cctctcgggttcagc

SEQ ID NO: 49980 - DNA, 15 bp, Homo sapiens
gcctctcgggttcag

SEQ ID NO: 49981 - DNA, 15 bp, Homo sapiens
cgcctctcgggttca

SEQ ID NO: 49982 - DNA, 15 bp, Homo sapiens
ccgcctctcgggttc

SEQ ID NO: 49983 - DNA, 15 bp, Homo sapiens
tccgcctctcgggtt

SEQ ID NO: 49984 - DNA, 15 bp, Homo sapiens
ctccgcctctcgggt

SEQ ID NO: 49985 - DNA, 15 bp, Homo sapiens
cctccgcctctcggg

SEQ ID NO: 49986 - DNA, 15 bp, Homo sapiens
acctccgcctctcgg

SEQ ID NO: 49987 - DNA, 15 bp, Homo sapiens
aacctccgcctctcg

SEQ ID NO: 49988 - DNA, 15 bp, Homo sapiens
caacctccgcctctc

SEQ ID NO: 49989 - DNA, 15 bp, Homo sapiens
gcaacctccgcctct

SEQ ID NO: 49990 - DNA, 15 bp, Homo sapiens
tactgcaacctccgc

SEQ ID NO: 49991 - DNA, 15 bp, Homo sapiens
ttactgcaacctccg

SEQ ID NO: 49992 - DNA, 15 bp, Homo sapiens
cttactgcaacctcc

SEQ ID NO: 49993 - DNA, 15 bp, Homo sapiens
gcttactgcaacctc

SEQ ID NO: 49994 - DNA, 15 bp, Homo sapiens
ggcttactgcaacct

SEQ ID NO: 49995 - DNA, 15 bp, Homo sapiens
tggcttactgcaacc

SEQ ID NO: 49996 - DNA, 15 bp, Homo sapiens
ttggcttactgcaac

SEQ ID NO: 49997 - DNA, 15 bp, Homo sapiens
cttggcttactgcaa

SEQ ID NO: 49998 - DNA, 15 bp, Homo sapiens
tcttggcttactgca

SEQ ID NO: 49999 - DNA, 15 bp, Homo sapiens
ttcttggcttactgc

SEQ ID NO: 50000 - DNA, 15 bp, Homo sapiens
attcttggcttactg

SEQ ID NO: 50001 - DNA, 15 bp, Homo sapiens
cattcttggcttact

SEQ ID NO: 50002 - DNA, 15 bp, Homo sapiens
gcattcttggcttac

SEQ ID NO: 50003 - DNA, 15 bp, Homo sapiens
tgcattcttggctta

SEQ ID NO: 50004 - DNA, 15 bp, Homo sapiens
gtgcattcttggctt

SEQ ID NO: 50005 - DNA, 15 bp, Homo sapiens
ggtgcattcttggct

SEQ ID NO: 50006 - DNA, 15 bp, Homo sapiens
tggtgcattcttggc

SEQ ID NO: 50007 - DNA, 15 bp, Homo sapiens
atggtgcattcttgg

SEQ ID NO: 50008 - DNA, 15 bp, Homo sapiens
aatggtgcattcttg

SEQ ID NO: 50009 - DNA, 15 bp, Homo sapiens
caatggtgcattctt

SEQ ID NO: 50010 - DNA, 15 bp, Homo sapiens
acaatggtgcattct

SEQ ID NO: 50011 - DNA, 15 bp, Homo sapiens
tacaatggtgcattc

SEQ ID NO: 50012 - DNA, 15 bp, Homo sapiens
gtacaatggtgcatt

SEQ ID NO: 50013 - DNA, 15 bp, Homo sapiens
agtacaatggtgcat

SEQ ID NO: 50014 - DNA, 15 bp, Homo sapiens
gagtacaatggtgca

SEQ ID NO: 50015 - DNA, 15 bp, Homo sapiens
ggagtacaatggtgc

SEQ ID NO: 50016 - DNA, 15 bp, Homo sapiens
tggagtacaatggtg

SEQ ID NO: 50017 - DNA, 15 bp, Homo sapiens
ctggagtacaatggt

SEQ ID NO: 50018 - DNA, 15 bp, Homo sapiens
gctggagtacaatgg

SEQ ID NO: 50019 - DNA, 15 bp, Homo sapiens
ggctggagtacaatg

SEQ ID NO: 50020 - DNA, 15 bp, Homo sapiens
aggctggagtacaat

SEQ ID NO: 50021 - DNA, 15 bp, Homo sapiens
caggctggagtacaa

SEQ ID NO: 50022 - DNA, 15 bp, Homo sapiens
ccaggctggagtaca

SEQ ID NO: 50023 - DNA, 15 bp, Homo sapiens
cccaggctggagtac

SEQ ID NO: 50024 - DNA, 15 bp, Homo sapiens
gcccaggctggagta

SEQ ID NO: 50025 - DNA, 15 bp, Homo sapiens
ttgttgcccaggctg

SEQ ID NO: 50026 - DNA, 15 bp, Homo sapiens
cttgttgcccaggct

SEQ ID NO: 50027 - DNA, 15 bp, Homo sapiens
tcttgttgcccaggc

SEQ ID NO: 50028 - DNA, 15 bp, Homo sapiens
ctcttgttgcccagg

SEQ ID NO: 50029 - DNA, 15 bp, Homo sapiens
actcttgttgcccag

SEQ ID NO: 50030 - DNA, 15 bp, Homo sapiens
cactcttgttgccca

SEQ ID NO: 50031 - DNA, 15 bp, Homo sapiens
tcactcttgttgccc

SEQ ID NO: 50032 - DNA, 15 bp, Homo sapiens
ttcactcttgttgcc

SEQ ID NO: 50033 - DNA, 15 bp, Homo sapiens
tttcactcttgttgc

SEQ ID NO: 50034 - DNA, 15 bp, Homo sapiens
gtttcactcttgttg

SEQ ID NO: 50035 - DNA, 15 bp, Homo sapiens
agtttcactcttgtt

SEQ ID NO: 50036 - DNA, 15 bp, Homo sapiens
gagtttcactcttgt

SEQ ID NO: 50037 - DNA, 15 bp, Homo sapiens
ggagtttcactcttg

SEQ ID NO: 50038 - DNA, 15 bp, Homo sapiens
tggagtttcactctt

SEQ ID NO: 50039 - DNA, 15 bp, Homo sapiens
atggagtttcactct

SEQ ID NO: 50040 - DNA, 15 bp, Homo sapiens
gatggagtttcactc

SEQ ID NO: 50041 - DNA, 15 bp, Homo sapiens
agatggagtttcact

SEQ ID NO: 50042 - DNA, 15 bp, Homo sapiens
gagatggagtttcac

SEQ ID NO: 50043 - DNA, 15 bp, Homo sapiens
tgagatggagtttca

SEQ ID NO: 50044 - DNA, 15 bp, Homo sapiens
ttgagatggagtttc

SEQ ID NO: 50045 - DNA, 15 bp, Homo sapiens
tttgagatggagttt

SEQ ID NO: 50046 - DNA, 15 bp, Homo sapiens
ttttgagatggagtt

SEQ ID NO: 50047 - DNA, 15 bp, Homo sapiens
ctttttttttgagat

SEQ ID NO: 50048 - DNA, 15 bp, Homo sapiens
gttttttttttcttt

SEQ ID NO: 50049 - DNA, 15 bp, Homo sapiens
tgttttttttttctt

SEQ ID NO: 50050 - DNA, 15 bp, Homo sapiens
ttgttttttttttct

SEQ ID NO: 50051 - DNA, 15 bp, Homo sapiens
gttgttttttttttc

SEQ ID NO: 50052 - DNA, 15 bp, Homo sapiens
tgttgtttttttttt

SEQ ID NO: 50053 - DNA, 15 bp, Homo sapiens
ttgttgttttttttt

SEQ ID NO: 50054 - DNA, 15 bp, Homo sapiens
gttgttgtttttttt

SEQ ID NO: 50055 - DNA, 15 bp, Homo sapiens
agttgttgttttttt

SEQ ID NO: 50056 - DNA, 15 bp, Homo sapiens
tagttgttgtttttt

SEQ ID NO: 50057 - DNA, 15 bp, Homo sapiens
atagttgttgttttt

SEQ ID NO: 50058 - DNA, 15 bp, Homo sapiens
gatagttgttgtttt

SEQ ID NO: 50059 - DNA, 15 bp, Homo sapiens
agatagttgttgttt

SEQ ID NO: 50060 - DNA, 15 bp, Homo sapiens
aagatagttgttgtt

SEQ ID NO: 50061 - DNA, 15 bp, Homo sapiens
gaagatagttgttgt

SEQ ID NO: 50062 - DNA, 15 bp, Homo sapiens
tgaagatagttgttg

SEQ ID NO: 50063 - DNA, 15 bp, Homo sapiens
atgaagatagttgtt

SEQ ID NO: 50064 - DNA, 15 bp, Homo sapiens
aatgaagatagttgt

SEQ ID NO: 50065 - DNA, 15 bp, Homo sapiens
aaatgaagatagttg

SEQ ID NO: 50066 - DNA, 15 bp, Homo sapiens
taaatgaagatagtt

SEQ ID NO: 50067 - DNA, 15 bp, Homo sapiens
ttaaatgaagatagt

SEQ ID NO: 50068 - DNA, 15 bp, Homo sapiens
tttaaatgaagatag

SEQ ID NO: 50069 - DNA, 15 bp, Homo sapiens
ttttaaatgaagata

SEQ ID NO: 50070 - DNA, 15 bp, Homo sapiens
attttaaatgaagat

SEQ ID NO: 50071 - DNA, 15 bp, Homo sapiens
tattttaaatgaaga

SEQ ID NO: 50072 - DNA, 15 bp, Homo sapiens
atattttaaatgaag

SEQ ID NO: 50073 - DNA, 15 bp, Homo sapiens
aatattttaaatgaa

SEQ ID NO: 50074 - DNA, 15 bp, Homo sapiens
taatattttaaatga

SEQ ID NO: 50075 - DNA, 15 bp, Homo sapiens
ttaatattttaaatg

SEQ ID NO: 50076 - DNA, 15 bp, Homo sapiens
tttaatattttaaat

SEQ ID NO: 50077 - DNA, 15 bp, Homo sapiens
atttaatattttaaa

SEQ ID NO: 50078 - DNA, 15 bp, Homo sapiens
catttaatattttaa

SEQ ID NO: 50079 - DNA, 15 bp, Homo sapiens
acatttaatatttta

SEQ ID NO: 50080 - DNA, 15 bp, Homo sapiens
cacatttaatatttt

SEQ ID NO: 50081 - DNA, 15 bp, Homo sapiens
tcacatttaatattt

SEQ ID NO: 50082 - DNA, 15 bp, Homo sapiens
ttcacatttaatatt

SEQ ID NO: 50083 - DNA, 15 bp, Homo sapiens
attcacatttaatat

SEQ ID NO: 50084 - DNA, 15 bp, Homo sapiens
tattcacatttaata

SEQ ID NO: 50085 - DNA, 15 bp, Homo sapiens
atattcacatttaat

SEQ ID NO: 50086 - DNA, 15 bp, Homo sapiens
aatattcacatttaa

SEQ ID NO: 50087 - DNA, 15 bp, Homo sapiens
aaatattcacattta

SEQ ID NO: 50088 - DNA, 15 bp, Homo sapiens
taaatattcacattt

SEQ ID NO: 50089 - DNA, 15 bp, Homo sapiens
ttaaatattcacatt

SEQ ID NO: 50090 - DNA, 15 bp, Homo sapiens
tttaaatattcacat

SEQ ID NO: 50091 - DNA, 15 bp, Homo sapiens
ctttaaatattcaca

SEQ ID NO: 50092 - DNA, 15 bp, Homo sapiens
actttaaatattcac

SEQ ID NO: 50093 - DNA, 15 bp, Homo sapiens
cactttaaatattca

SEQ ID NO: 50094 - DNA, 15 bp, Homo sapiens
tcactttaaatattc

SEQ ID NO: 50095 - DNA, 15 bp, Homo sapiens
ctcactttaaatatt

SEQ ID NO: 50096 - DNA, 15 bp, Homo sapiens
tctcactttaaatat

SEQ ID NO: 50097 - DNA, 15 bp, Homo sapiens
gtctcactttaaata

SEQ ID NO: 50098 - DNA, 15 bp, Homo sapiens
agtctcactttaaat

SEQ ID NO: 50099 - DNA, 15 bp, Homo sapiens
tagtctcactttaaa

SEQ ID NO: 50100 - DNA, 15 bp, Homo sapiens
ttagtctcactttaa

SEQ ID NO: 50101 - DNA, 15 bp, Homo sapiens
cttagtctcacttta

SEQ ID NO: 50102 - DNA, 15 bp, Homo sapiens
ccttagtctcacttt

SEQ ID NO: 50103 - DNA, 15 bp, Homo sapiens
accttagtctcactt

SEQ ID NO: 50104 - DNA, 15 bp, Homo sapiens
caccttagtctcact

SEQ ID NO: 50105 - DNA, 15 bp, Homo sapiens
gcaccttagtctcac

SEQ ID NO: 50106 - DNA, 15 bp, Homo sapiens
tgcaccttagtctca

SEQ ID NO: 50107 - DNA, 15 bp, Homo sapiens
ttgcaccttagtctc

SEQ ID NO: 50108 - DNA, 15 bp, Homo sapiens
gttgcaccttagtct

SEQ ID NO: 50109 - DNA, 15 bp, Homo sapiens
tgttgcaccttagtc

SEQ ID NO: 50110 - DNA, 15 bp, Homo sapiens
atgttgcaccttagt

SEQ ID NO: 50111 - DNA, 15 bp, Homo sapiens
aatgttgcaccttag

SEQ ID NO: 50112 - DNA, 15 bp, Homo sapiens
aaatgttgcacctta

SEQ ID NO: 50113 - DNA, 15 bp, Homo sapiens
aaaatgttgcacctt

SEQ ID NO: 50114 - DNA, 15 bp, Homo sapiens
aaaaatgttgcacct

SEQ ID NO: 50115 - DNA, 15 bp, Homo sapiens
taaaaatgttgcacc

SEQ ID NO: 50116 - DNA, 15 bp, Homo sapiens
ctaaaaatgttgcac

SEQ ID NO: 50117 - DNA, 15 bp, Homo sapiens
tctaaaaatgttgca

SEQ ID NO: 50118 - DNA, 15 bp, Homo sapiens
atctaaaaatgttgc

SEQ ID NO: 50119 - DNA, 15 bp, Homo sapiens
tatctaaaaatgttg

SEQ ID NO: 50120 - DNA, 15 bp, Homo sapiens
ctatctaaaaatgtt

SEQ ID NO: 50121 - DNA, 15 bp, Homo sapiens
actatctaaaaatgt

SEQ ID NO: 50122 - DNA, 15 bp, Homo sapiens
tactatctaaaaatg

SEQ ID NO: 50123 - DNA, 15 bp, Homo sapiens
ttactatctaaaaat

SEQ ID NO: 50124 - DNA, 15 bp, Homo sapiens
attactatctaaaaa

SEQ ID NO: 50125 - DNA, 15 bp, Homo sapiens
cattactatctaaaa

SEQ ID NO: 50126 - DNA, 15 bp, Homo sapiens
tcattactatctaaa

SEQ ID NO: 50127 - DNA, 15 bp, Homo sapiens
ttcattactatctaa

SEQ ID NO: 50128 - DNA, 15 bp, Homo sapiens
cttcattactatcta

SEQ ID NO: 50129 - DNA, 15 bp, Homo sapiens
tcttcattactatct

SEQ ID NO: 50130 - DNA, 15 bp, Homo sapiens
ttcttcattactatc

SEQ ID NO: 50131 - DNA, 15 bp, Homo sapiens
tttcttcattactat

SEQ ID NO: 50132 - DNA, 15 bp, Homo sapiens
ttttcttcattacta

SEQ ID NO: 50133 - DNA, 15 bp, Homo sapiens
cttttcttcattact

SEQ ID NO: 50134 - DNA, 15 bp, Homo sapiens
ccttttcttcattac

SEQ ID NO: 50135 - DNA, 15 bp, Homo sapiens
tccttttcttcatta

SEQ ID NO: 50136 - DNA, 15 bp, Homo sapiens
gtccttttcttcatt

SEQ ID NO: 50137 - DNA, 15 bp, Homo sapiens
agtccttttcttcat

SEQ ID NO: 50138 - DNA, 15 bp, Homo sapiens
tagtccttttcttca

SEQ ID NO: 50139 - DNA, 15 bp, Homo sapiens
ttagtccttttcttc

SEQ ID NO: 50140 - DNA, 15 bp, Homo sapiens
gttagtccttttctt

SEQ ID NO: 50141 - DNA, 15 bp, Homo sapiens
agttagtccttttct

SEQ ID NO: 50142 - DNA, 15 bp, Homo sapiens
aagttagtccttttc

SEQ ID NO: 50143 - DNA, 15 bp, Homo sapiens
aaagttagtcctttt

SEQ ID NO: 50144 - DNA, 15 bp, Homo sapiens
caaagttagtccttt

SEQ ID NO: 50145 - DNA, 15 bp, Homo sapiens
acaaagttagtcctt

SEQ ID NO: 50146 - DNA, 15 bp, Homo sapiens
tacaaagttagtcct

SEQ ID NO: 50147 - DNA, 15 bp, Homo sapiens
ctacaaagttagtcc

SEQ ID NO: 50148 - DNA, 15 bp, Homo sapiens
actacaaagttagtc

SEQ ID NO: 50149 - DNA, 15 bp, Homo sapiens
cactacaaagttagt

SEQ ID NO: 50150 - DNA, 15 bp, Homo sapiens
acactacaaagttag

SEQ ID NO: 50151 - DNA, 15 bp, Homo sapiens
aacactacaaagtta

SEQ ID NO: 50152 - DNA, 15 bp, Homo sapiens
caacactacaaagtt

SEQ ID NO: 50153 - DNA, 15 bp, Homo sapiens
gcaacactacaaagt

SEQ ID NO: 50154 - DNA, 15 bp, Homo sapiens
agcaacactacaaag

SEQ ID NO: 50155 - DNA, 15 bp, Homo sapiens
cagcaacactacaaa

SEQ ID NO: 50156 - DNA, 15 bp, Homo sapiens
gcagcaacactacaa

SEQ ID NO: 50157 - DNA, 15 bp, Homo sapiens
ggcagcaacactaca

SEQ ID NO: 50158 - DNA, 15 bp, Homo sapiens
aggcagcaacactac

SEQ ID NO: 50159 - DNA, 15 bp, Homo sapiens
aaggcagcaacacta

SEQ ID NO: 50160 - DNA, 15 bp, Homo sapiens
caaggcagcaacact

SEQ ID NO: 50161 - DNA, 15 bp, Homo sapiens
acaaggcagcaacac

SEQ ID NO: 50162 - DNA, 15 bp, Homo sapiens
aacaaggcagcaaca

SEQ ID NO: 50163 - DNA, 15 bp, Homo sapiens
taacaaggcagcaac

SEQ ID NO: 50164 - DNA, 15 bp, Homo sapiens
ttaacaaggcagcaa

SEQ ID NO: 50165 - DNA, 15 bp, Homo sapiens
tttaacaaggcagca

SEQ ID NO: 50166 - DNA, 15 bp, Homo sapiens
gtttaacaaggcagc

SEQ ID NO: 50167 - DNA, 15 bp, Homo sapiens
tgtttaacaaggcag

SEQ ID NO: 50168 - DNA, 15 bp, Homo sapiens
atgtttaacaaggca

SEQ ID NO: 50169 - DNA, 15 bp, Homo sapiens
tatgtttaacaaggc

SEQ ID NO: 50170 - DNA, 15 bp, Homo sapiens
gtatgtttaacaagg

SEQ ID NO: 50171 - DNA, 15 bp, Homo sapiens
agtatgtttaacaag

SEQ ID NO: 50172 - DNA, 15 bp, Homo sapiens
tagtatgtttaacaa

SEQ ID NO: 50173 - DNA, 15 bp, Homo sapiens
ctagtatgtttaaca

SEQ ID NO: 50174 - DNA, 15 bp, Homo sapiens
tctagtatgtttaac

SEQ ID NO: 50175 - DNA, 15 bp, Homo sapiens
atctagtatgtttaa

SEQ ID NO: 50176 - DNA, 15 bp, Homo sapiens
tatctagtatgttta

SEQ ID NO: 50177 - DNA, 15 bp, Homo sapiens
ctatctagtatgttt

SEQ ID NO: 50178 - DNA, 15 bp, Homo sapiens
gctatctagtatgtt

SEQ ID NO: 50179 - DNA, 15 bp, Homo sapiens
tgctatctagtatgt

SEQ ID NO: 50180 - DNA, 15 bp, Homo sapiens
atgctatctagtatg

SEQ ID NO: 50181 - DNA, 15 bp, Homo sapiens
tatgctatctagtat

SEQ ID NO: 50182 - DNA, 15 bp, Homo sapiens
atatgctatctagta

SEQ ID NO: 50183 - DNA, 15 bp, Homo sapiens
aatatgctatctagt

SEQ ID NO: 50184 - DNA, 15 bp, Homo sapiens
caatatgctatctag

SEQ ID NO: 50185 - DNA, 15 bp, Homo sapiens
gcaatatgctatcta

SEQ ID NO: 50186 - DNA, 15 bp, Homo sapiens
ggcaatatgctatct

SEQ ID NO: 50187 - DNA, 15 bp, Homo sapiens
tggcaatatgctatc

SEQ ID NO: 50188 - DNA, 15 bp, Homo sapiens
ttggcaatatgctat

SEQ ID NO: 50189 - DNA, 15 bp, Homo sapiens
attggcaatatgcta

SEQ ID NO: 50190 - DNA, 15 bp, Homo sapiens
gattggcaatatgct

SEQ ID NO: 50191 - DNA, 15 bp, Homo sapiens
agattggcaatatgc

SEQ ID NO: 50192 - DNA, 15 bp, Homo sapiens
aagattggcaatatg

SEQ ID NO: 50193 - DNA, 15 bp, Homo sapiens
aaagattggcaatat

SEQ ID NO: 50194 - DNA, 15 bp, Homo sapiens
taaagattggcaata

SEQ ID NO: 50195 - DNA, 15 bp, Homo sapiens
ttaaagattggcaat

SEQ ID NO: 50196 - DNA, 15 bp, Homo sapiens
tttaaagattggcaa

SEQ ID NO: 50197 - DNA, 15 bp, Homo sapiens
gtttaaagattggca

SEQ ID NO: 50198 - DNA, 15 bp, Homo sapiens
tgtttaaagattggc

SEQ ID NO: 50199 - DNA, 15 bp, Homo sapiens
atgtttaaagattgg

SEQ ID NO: 50200 - DNA, 15 bp, Homo sapiens
aatgtttaaagattg

SEQ ID NO: 50201 - DNA, 15 bp, Homo sapiens
gaatgtttaaagatt

SEQ ID NO: 50202 - DNA, 15 bp, Homo sapiens
agaatgtttaaagat

SEQ ID NO: 50203 - DNA, 15 bp, Homo sapiens
gagaatgtttaaaga

SEQ ID NO: 50204 - DNA, 15 bp, Homo sapiens
tgagaatgtttaaag

SEQ ID NO: 50205 - DNA, 15 bp, Homo sapiens
ttgagaatgtttaaa

SEQ ID NO: 50206 - DNA, 15 bp, Homo sapiens
attgagaatgtttaa

SEQ ID NO: 50207 - DNA, 15 bp, Homo sapiens
cattgagaatgttta

SEQ ID NO: 50208 - DNA, 15 bp, Homo sapiens
tcattgagaatgttt

SEQ ID NO: 50209 - DNA, 15 bp, Homo sapiens
atcattgagaatgtt

SEQ ID NO: 50210 - DNA, 15 bp, Homo sapiens
tatcattgagaatgt

SEQ ID NO: 50211 - DNA, 15 bp, Homo sapiens
ctatcattgagaatg

SEQ ID NO: 50212 - DNA, 15 bp, Homo sapiens
cctatcattgagaat

SEQ ID NO: 50213 - DNA, 15 bp, Homo sapiens
tcctatcattgagaa

SEQ ID NO: 50214 - DNA, 15 bp, Homo sapiens
atcctatcattgaga

SEQ ID NO: 50215 - DNA, 15 bp, Homo sapiens
aatcctatcattgag

SEQ ID NO: 50216 - DNA, 15 bp, Homo sapiens
aaatcctatcattga

SEQ ID NO: 50217 - DNA, 15 bp, Homo sapiens
taaatcctatcattg

SEQ ID NO: 50218 - DNA, 15 bp, Homo sapiens
ataaatcctatcatt

SEQ ID NO: 50219 - DNA, 15 bp, Homo sapiens
aataaatcctatcat

SEQ ID NO: 50220 - DNA, 15 bp, Homo sapiens
aaataaatcctatca

SEQ ID NO: 50221 - DNA, 15 bp, Homo sapiens
taaataaatcctatc

SEQ ID NO: 50222 - DNA, 15 bp, Homo sapiens
gtaaataaatcctat

SEQ ID NO: 50223 - DNA, 15 bp, Homo sapiens
agtaaataaatccta

SEQ ID NO: 50224 - DNA, 15 bp, Homo sapiens
aagtaaataaatcct

SEQ ID NO: 50225 - DNA, 15 bp, Homo sapiens
aaagtaaataaatcc

SEQ ID NO: 50226 - DNA, 15 bp, Homo sapiens
aaaagtaaataaatc

SEQ ID NO: 50227 - DNA, 15 bp, Homo sapiens
aaaaagtaaataaat

SEQ ID NO: 50228 - DNA, 15 bp, Homo sapiens
gaaaaagtaaataaa

SEQ ID NO: 50229 - DNA, 15 bp, Homo sapiens
agaaaaagtaaataa

SEQ ID NO: 50230 - DNA, 15 bp, Homo sapiens
cagaaaaagtaaata

SEQ ID NO: 50231 - DNA, 15 bp, Homo sapiens
tcagaaaaagtaaat

SEQ ID NO: 50232 - DNA, 15 bp, Homo sapiens
atcagaaaaagtaaa

SEQ ID NO: 50233 - DNA, 15 bp, Homo sapiens
aatcagaaaaagtaa

SEQ ID NO: 50234 - DNA, 15 bp, Homo sapiens
aaatcagaaaaagta

SEQ ID NO: 50235 - DNA, 15 bp, Homo sapiens
aaaatcagaaaaagt

SEQ ID NO: 50236 - DNA, 15 bp, Homo sapiens
aaaaatcagaaaaag

SEQ ID NO: 50237 - DNA, 15 bp, Homo sapiens
taaaaatcagaaaaa

SEQ ID NO: 50238 - DNA, 15 bp, Homo sapiens
ctaaaaatcagaaaa

SEQ ID NO: 50239 - DNA, 15 bp, Homo sapiens
gctaaaaatcagaaa

SEQ ID NO: 50240 - DNA, 15 bp, Homo sapiens
agctaaaaatcagaa

SEQ ID NO: 50241 - DNA, 15 bp, Homo sapiens
aagctaaaaatcaga

SEQ ID NO: 50242 - DNA, 15 bp, Homo sapiens
aaagctaaaaatcag

SEQ ID NO: 50243 - DNA, 15 bp, Homo sapiens
aaaagctaaaaatca

SEQ ID NO: 50244 - DNA, 15 bp, Homo sapiens
gaaaagctaaaaatc

SEQ ID NO: 50245 - DNA, 15 bp, Homo sapiens
agaaaagctaaaaat

SEQ ID NO: 50246 - DNA, 15 bp, Homo sapiens
aagaaaagctaaaaa

SEQ ID NO: 50247 - DNA, 15 bp, Homo sapiens
aaagaaaagctaaaa

SEQ ID NO: 50248 - DNA, 15 bp, Homo sapiens
aaaagaaaagctaaa

SEQ ID NO: 50249 - DNA, 15 bp, Homo sapiens
caaaagaaaagctaa

SEQ ID NO: 50250 - DNA, 15 bp, Homo sapiens
tcaaaagaaaagcta

SEQ ID NO: 50251 - DNA, 15 bp, Homo sapiens
ttcaaaagaaaagct

SEQ ID NO: 50252 - DNA, 15 bp, Homo sapiens
tttcaaaagaaaagc

SEQ ID NO: 50253 - DNA, 15 bp, Homo sapiens
ctttcaaaagaaaag

SEQ ID NO: 50254 - DNA, 15 bp, Homo sapiens
tctttcaaaagaaaa

SEQ ID NO: 50255 - DNA, 15 bp, Homo sapiens
ttctttcaaaagaaa

SEQ ID NO: 50256 - DNA, 15 bp, Homo sapiens
tttctttcaaaagaa

SEQ ID NO: 50257 - DNA, 15 bp, Homo sapiens
ttttctttcaaaaga

SEQ ID NO: 50258 - DNA, 15 bp, Homo sapiens
attttctttcaaaag

SEQ ID NO: 50259 - DNA, 15 bp, Homo sapiens
tattttctttcaaaa

SEQ ID NO: 50260 - DNA, 15 bp, Homo sapiens
ttattttctttcaaa

SEQ ID NO: 50261 - DNA, 15 bp, Homo sapiens
cttattttctttcaa

SEQ ID NO: 50262 - DNA, 15 bp, Homo sapiens
tcttattttctttca

SEQ ID NO: 50263 - DNA, 15 bp, Homo sapiens
ctcttattttctttc

SEQ ID NO: 50264 - DNA, 15 bp, Homo sapiens
cctcttattttcttt

SEQ ID NO: 50265 - DNA, 15 bp, Homo sapiens
tcctcttattttctt

SEQ ID NO: 50266 - DNA, 15 bp, Homo sapiens
ttcctcttattttct

SEQ ID NO: 50267 - DNA, 15 bp, Homo sapiens
cttcctcttattttc

SEQ ID NO: 50268 - DNA, 15 bp, Homo sapiens
acttcctcttatttt

SEQ ID NO: 50269 - DNA, 15 bp, Homo sapiens
aacttcctcttattt

SEQ ID NO: 50270 - DNA, 15 bp, Homo sapiens
aaacttcctcttatt

SEQ ID NO: 50271 - DNA, 15 bp, Homo sapiens
gaaacttcctcttat

SEQ ID NO: 50272 - DNA, 15 bp, Homo sapiens
tgaaacttcctctta

SEQ ID NO: 50273 - DNA, 15 bp, Homo sapiens
atgaaacttcctctt

SEQ ID NO: 50274 - DNA, 15 bp, Homo sapiens
aatgaaacttcctct

SEQ ID NO: 50275 - DNA, 15 bp, Homo sapiens
aaatgaaacttcctc

SEQ ID NO: 50276 - DNA, 15 bp, Homo sapiens
taaatgaaacttcct

SEQ ID NO: 50277 - DNA, 15 bp, Homo sapiens
gtaaatgaaacttcc

SEQ ID NO: 50278 - DNA, 15 bp, Homo sapiens
agtaaatgaaacttc

SEQ ID NO: 50279 - DNA, 15 bp, Homo sapiens
cagtaaatgaaactt

SEQ ID NO: 50280 - DNA, 15 bp, Homo sapiens
gcagtaaatgaaact

SEQ ID NO: 50281 - DNA, 15 bp, Homo sapiens
tgcagtaaatgaaac

SEQ ID NO: 50282 - DNA, 15 bp, Homo sapiens
ttgcagtaaatgaaa

SEQ ID NO: 50283 - DNA, 15 bp, Homo sapiens
tttgcagtaaatgaa

SEQ ID NO: 50284 - DNA, 15 bp, Homo sapiens
ttttgcagtaaatga

SEQ ID NO: 50285 - DNA, 15 bp, Homo sapiens
attttgcagtaaatg

SEQ ID NO: 50286 - DNA, 15 bp, Homo sapiens
aattttgcagtaaat

SEQ ID NO: 50287 - DNA, 15 bp, Homo sapiens
aaattttgcagtaaa

SEQ ID NO: 50288 - DNA, 15 bp, Homo sapiens
aaaattttgcagtaa

SEQ ID NO: 50289 - DNA, 15 bp, Homo sapiens
taaaattttgcagta

SEQ ID NO: 50290 - DNA, 15 bp, Homo sapiens
ttaaaattttgcagt

SEQ ID NO: 50291 - DNA, 15 bp, Homo sapiens
tttaaaattttgcag

SEQ ID NO: 50292 - DNA, 15 bp, Homo sapiens
atttaaaattttgca

SEQ ID NO: 50293 - DNA, 15 bp, Homo sapiens
catttaaaattttgc

SEQ ID NO: 50294 - DNA, 15 bp, Homo sapiens
gcatttaaaattttg

SEQ ID NO: 50295 - DNA, 15 bp, Homo sapiens
agcatttaaaatttt

SEQ ID NO: 50296 - DNA, 15 bp, Homo sapiens
cagcatttaaaattt

SEQ ID NO: 50297 - DNA, 15 bp, Homo sapiens
gcagcatttaaaatt

SEQ ID NO: 50298 - DNA, 15 bp, Homo sapiens
agcagcatttaaaat

SEQ ID NO: 50299 - DNA, 15 bp, Homo sapiens
aagcagcatttaaaa

SEQ ID NO: 50300 - DNA, 15 bp, Homo sapiens
aaagcagcatttaaa

SEQ ID NO: 50301 - DNA, 15 bp, Homo sapiens
caaagcagcatttaa

SEQ ID NO: 50302 - DNA, 15 bp, Homo sapiens
tcaaagcagcattta

SEQ ID NO: 50303 - DNA, 15 bp, Homo sapiens
atcaaagcagcattt

SEQ ID NO: 50304 - DNA, 15 bp, Homo sapiens
catcaaagcagcatt

SEQ ID NO: 50305 - DNA, 15 bp, Homo sapiens
acatcaaagcagcat

SEQ ID NO: 50306 - DNA, 15 bp, Homo sapiens
tacatcaaagcagca

SEQ ID NO: 50307 - DNA, 15 bp, Homo sapiens
atacatcaaagcagc

SEQ ID NO: 50308 - DNA, 15 bp, Homo sapiens
gatacatcaaagcag

SEQ ID NO: 50309 - DNA, 15 bp, Homo sapiens
tgatacatcaaagca

SEQ ID NO: 50310 - DNA, 15 bp, Homo sapiens
ctgatacatcaaagc

SEQ ID NO: 50311 - DNA, 15 bp, Homo sapiens
actgatacatcaaag

SEQ ID NO: 50312 - DNA, 15 bp, Homo sapiens
tactgatacatcaaa

SEQ ID NO: 50313 - DNA, 15 bp, Homo sapiens
ctactgatacatcaa

SEQ ID NO: 50314 - DNA, 15 bp, Homo sapiens
tctactgatacatca

SEQ ID NO: 50315 - DNA, 15 bp, Homo sapiens
ctctactgatacatc

SEQ ID NO: 50316 - DNA, 15 bp, Homo sapiens
tctctactgatacat

SEQ ID NO: 50317 - DNA, 15 bp, Homo sapiens
atctctactgataca

SEQ ID NO: 50318 - DNA, 15 bp, Homo sapiens
tatctctactgatac

SEQ ID NO: 50319 - DNA, 15 bp, Homo sapiens
atatctctactgata

SEQ ID NO: 50320 - DNA, 15 bp, Homo sapiens
tatatctctactgat

SEQ ID NO: 50321 - DNA, 15 bp, Homo sapiens
ttatatctctactga

SEQ ID NO: 50322 - DNA, 15 bp, Homo sapiens
attatatctctactg

SEQ ID NO: 50323 - DNA, 15 bp, Homo sapiens
aattatatctctact

SEQ ID NO: 50324 - DNA, 15 bp, Homo sapiens
aaattatatctctac

SEQ ID NO: 50325 - DNA, 15 bp, Homo sapiens
aaaattatatctcta

SEQ ID NO: 50326 - DNA, 15 bp, Homo sapiens
gaaaattatatctct

SEQ ID NO: 50327 - DNA, 15 bp, Homo sapiens
ggaaaattatatctc

SEQ ID NO: 50328 - DNA, 15 bp, Homo sapiens
aggaaaattatatct

SEQ ID NO: 50329 - DNA, 15 bp, Homo sapiens
aaggaaaattatatc

SEQ ID NO: 50330 - DNA, 15 bp, Homo sapiens
aaaggaaaattatat

SEQ ID NO: 50331 - DNA, 15 bp, Homo sapiens
taaaggaaaattata

SEQ ID NO: 50332 - DNA, 15 bp, Homo sapiens
ataaaggaaaattat

SEQ ID NO: 50333 - DNA, 15 bp, Homo sapiens
gataaaggaaaatta

SEQ ID NO: 50334 - DNA, 15 bp, Homo sapiens
ggataaaggaaaatt

SEQ ID NO: 50335 - DNA, 15 bp, Homo sapiens
tggataaaggaaaat

SEQ ID NO: 50336 - DNA, 15 bp, Homo sapiens
ctggataaaggaaaa

SEQ ID NO: 50337 - DNA, 15 bp, Homo sapiens
tctggataaaggaaa

SEQ ID NO: 50338 - DNA, 15 bp, Homo sapiens
ttctggataaaggaa

SEQ ID NO: 50339 - DNA, 15 bp, Homo sapiens
attctggataaagga

SEQ ID NO: 50340 - DNA, 15 bp, Homo sapiens
gattctggataaagg

SEQ ID NO: 50341 - DNA, 15 bp, Homo sapiens
ggattctggataaag

SEQ ID NO: 50342 - DNA, 15 bp, Homo sapiens
tggattctggataaa

SEQ ID NO: 50343 - DNA, 15 bp, Homo sapiens
ttggattctggataa

SEQ ID NO: 50344 - DNA, 15 bp, Homo sapiens
cttggattctggata

SEQ ID NO: 50345 - DNA, 15 bp, Homo sapiens
acttggattctggat

SEQ ID NO: 50346 - DNA, 15 bp, Homo sapiens
tacttggattctgga

SEQ ID NO: 50347 - DNA, 15 bp, Homo sapiens
ctacttggattctgg

SEQ ID NO: 50348 - DNA, 15 bp, Homo sapiens
gctacttggattctg

SEQ ID NO: 50349 - DNA, 15 bp, Homo sapiens
agctacttggattct

SEQ ID NO: 50350 - DNA, 15 bp, Homo sapiens
cagctacttggattc

SEQ ID NO: 50351 - DNA, 15 bp, Homo sapiens
ccagctacttggatt

SEQ ID NO: 50352 - DNA, 15 bp, Homo sapiens
tccagctacttggat

SEQ ID NO: 50353 - DNA, 15 bp, Homo sapiens
ttccagctacttgga

SEQ ID NO: 50354 - DNA, 15 bp, Homo sapiens
tttccagctacttgg

SEQ ID NO: 50355 - DNA, 15 bp, Homo sapiens
ttttccagctacttg

SEQ ID NO: 50356 - DNA, 15 bp, Homo sapiens
tttttccagctactt

SEQ ID NO: 50357 - DNA, 15 bp, Homo sapiens
ttttttccagctact

SEQ ID NO: 50358 - DNA, 15 bp, Homo sapiens
tttttttccagctac

SEQ ID NO: 50359 - DNA, 15 bp, Homo sapiens
ttttttttccagcta

SEQ ID NO: 50360 - DNA, 15 bp, Homo sapiens
tttttttttccagct

SEQ ID NO: 50361 - DNA, 15 bp, Homo sapiens
atttttttttccagc

SEQ ID NO: 50362 - DNA, 15 bp, Homo sapiens
gatttttttttccag

SEQ ID NO: 50363 - DNA, 15 bp, Homo sapiens
tgatttttttttcca

SEQ ID NO: 50364 - DNA, 15 bp, Homo sapiens
ttgatttttttttcc

SEQ ID NO: 50365 - DNA, 15 bp, Homo sapiens
tttgatttttttttc

SEQ ID NO: 50366 - DNA, 15 bp, Homo sapiens
ttttgattttttttt

SEQ ID NO: 50367 - DNA, 15 bp, Homo sapiens
attttgatttttttt

SEQ ID NO: 50368 - DNA, 15 bp, Homo sapiens
tattttgattttttt

SEQ ID NO: 50369 - DNA, 15 bp, Homo sapiens
atattttgatttttt

SEQ ID NO: 50370 - DNA, 15 bp, Homo sapiens
catattttgattttt

SEQ ID NO: 50371 - DNA, 15 bp, Homo sapiens
gcatattttgatttt

SEQ ID NO: 50372 - DNA, 15 bp, Homo sapiens
agcatattttgattt

SEQ ID NO: 50373 - DNA, 15 bp, Homo sapiens
cagcatattttgatt

SEQ ID NO: 50374 - DNA, 15 bp, Homo sapiens
tcagcatattttgat

SEQ ID NO: 50375 - DNA, 15 bp, Homo sapiens
ttcagcatattttga

SEQ ID NO: 50376 - DNA, 15 bp, Homo sapiens
gttcagcatattttg

SEQ ID NO: 50377 - DNA, 15 bp, Homo sapiens
agttcagcatatttt

SEQ ID NO: 50378 - DNA, 15 bp, Homo sapiens
aagttcagcatattt

SEQ ID NO: 50379 - DNA, 15 bp, Homo sapiens
aaagttcagcatatt

SEQ ID NO: 50380 - DNA, 15 bp, Homo sapiens
aaaagttcagcatat

SEQ ID NO: 50381 - DNA, 15 bp, Homo sapiens
aaaaagttcagcata

SEQ ID NO: 50382 - DNA, 15 bp, Homo sapiens
aaaaaagttcagcat

SEQ ID NO: 50383 - DNA, 15 bp, Homo sapiens
aaaaaaagttcagca

SEQ ID NO: 50384 - DNA, 15 bp, Homo sapiens
aaaaaaaagttcagc

SEQ ID NO: 50385 - DNA, 15 bp, Homo sapiens
aaaaaaaaagttcag

SEQ ID NO: 50386 - DNA, 15 bp, Homo sapiens
aaaaaaaaaagttca

SEQ ID NO: 50387 - DNA, 15 bp, Homo sapiens
aaaaaaaaaaagttc

SEQ ID NO: 50388 - DNA, 15 bp, Homo sapiens
taaaaaaaaaaaagt

SEQ ID NO: 50389 - DNA, 15 bp, Homo sapiens
ctaaaaaaaaaaaag

SEQ ID NO: 50390 - DNA, 15 bp, Homo sapiens
gctaaaaaaaaaaaa

SEQ ID NO: 50391 - DNA, 15 bp, Homo sapiens
ggctaaaaaaaaaaa

SEQ ID NO: 50392 - DNA, 15 bp, Homo sapiens
tggctaaaaaaaaaa

SEQ ID NO: 50393 - DNA, 15 bp, Homo sapiens
ctggctaaaaaaaaa

SEQ ID NO: 50394 - DNA, 15 bp, Homo sapiens
tctggctaaaaaaaa

SEQ ID NO: 50395 - DNA, 15 bp, Homo sapiens
ttctggctaaaaaaa

SEQ ID NO: 50396 - DNA, 15 bp, Homo sapiens
tttctggctaaaaaa

SEQ ID NO: 50397 - DNA, 15 bp, Homo sapiens
gtttctggctaaaaa

SEQ ID NO: 50398 - DNA, 15 bp, Homo sapiens
ggtttctggctaaaa

SEQ ID NO: 50399 - DNA, 15 bp, Homo sapiens
gggtttctggctaaa

SEQ ID NO: 50400 - DNA, 15 bp, Homo sapiens
tgggtttctggctaa

SEQ ID NO: 50401 - DNA, 15 bp, Homo sapiens
atgggtttctggcta

SEQ ID NO: 50402 - DNA, 15 bp, Homo sapiens
aatgggtttctggct

SEQ ID NO: 50403 - DNA, 15 bp, Homo sapiens
aaatgggtttctggc

SEQ ID NO: 50404 - DNA, 15 bp, Homo sapiens
gaaatgggtttctgg

SEQ ID NO: 50405 - DNA, 15 bp, Homo sapiens
ggaaatgggtttctg

SEQ ID NO: 50406 - DNA, 15 bp, Homo sapiens
aggaaatgggtttct

SEQ ID NO: 50407 - DNA, 15 bp, Homo sapiens
taggaaatgggtttc

SEQ ID NO: 50408 - DNA, 15 bp, Homo sapiens
ataggaaatgggttt

SEQ ID NO: 50409 - DNA, 15 bp, Homo sapiens
gataggaaatgggtt

SEQ ID NO: 50410 - DNA, 15 bp, Homo sapiens
cgataggaaatgggt

SEQ ID NO: 50411 - DNA, 15 bp, Homo sapiens
acgataggaaatggg

SEQ ID NO: 50412 - DNA, 15 bp, Homo sapiens
gacgataggaaatgg

SEQ ID NO: 50413 - DNA, 15 bp, Homo sapiens
agacgataggaaatg

SEQ ID NO: 50414 - DNA, 15 bp, Homo sapiens
cagacgataggaaat

SEQ ID NO: 50415 - DNA, 15 bp, Homo sapiens
acagacgataggaaa

SEQ ID NO: 50416 - DNA, 15 bp, Homo sapiens
tacagacgataggaa

SEQ ID NO: 50417 - DNA, 15 bp, Homo sapiens
gtacagacgatagga

SEQ ID NO: 50418 - DNA, 15 bp, Homo sapiens
tgtacagacgatagg

SEQ ID NO: 50419 - DNA, 15 bp, Homo sapiens
ttgtacagacgatag

SEQ ID NO: 50420 - DNA, 15 bp, Homo sapiens
tttgtacagacgata

SEQ ID NO: 50421 - DNA, 15 bp, Homo sapiens
atttgtacagacgat

SEQ ID NO: 50422 - DNA, 15 bp, Homo sapiens
tatttgtacagacga

SEQ ID NO: 50423 - DNA, 15 bp, Homo sapiens
ttatttgtacagacg

SEQ ID NO: 50424 - DNA, 15 bp, Homo sapiens
tttatttgtacagac

SEQ ID NO: 50425 - DNA, 15 bp, Homo sapiens
ttttatttgtacaga

SEQ ID NO: 50426 - DNA, 15 bp, Homo sapiens
cttttatttgtacag

SEQ ID NO: 50427 - DNA, 15 bp, Homo sapiens
acttttatttgtaca

SEQ ID NO: 50428 - DNA, 15 bp, Homo sapiens
aacttttatttgtac

SEQ ID NO: 50429 - DNA, 15 bp, Homo sapiens
taacttttatttgta

SEQ ID NO: 50430 - DNA, 15 bp, Homo sapiens
ttaacttttatttgt

SEQ ID NO: 50431 - DNA, 15 bp, Homo sapiens
tttaacttttatttg

SEQ ID NO: 50432 - DNA, 15 bp, Homo sapiens
atttaacttttattt

SEQ ID NO: 50433 - DNA, 15 bp, Homo sapiens
tatttaacttttatt

SEQ ID NO: 50434 - DNA, 15 bp, Homo sapiens
atatttaacttttat

SEQ ID NO: 50435 - DNA, 15 bp, Homo sapiens
tatatttaactttta

SEQ ID NO: 50436 - DNA, 15 bp, Homo sapiens
atatatttaactttt

SEQ ID NO: 50437 - DNA, 15 bp, Homo sapiens
gatatatttaacttt

SEQ ID NO: 50438 - DNA, 15 bp, Homo sapiens
agatatatttaactt

SEQ ID NO: 50439 - DNA, 15 bp, Homo sapiens
gagatatatttaact

SEQ ID NO: 50440 - DNA, 15 bp, Homo sapiens
tgagatatatttaac

SEQ ID NO: 50441 - DNA, 15 bp, Homo sapiens
ttgagatatatttaa

SEQ ID NO: 50442 - DNA, 15 bp, Homo sapiens
attgagatatattta

SEQ ID NO: 50443 - DNA, 15 bp, Homo sapiens
tattgagatatattt

SEQ ID NO: 50444 - DNA, 15 bp, Homo sapiens
ttattgagatatatt

SEQ ID NO: 50445 - DNA, 15 bp, Homo sapiens
gttattgagatatat

SEQ ID NO: 50446 - DNA, 15 bp, Homo sapiens
agttattgagatata

SEQ ID NO: 50447 - DNA, 15 bp, Homo sapiens
aagttattgagatat

SEQ ID NO: 50448 - DNA, 15 bp, Homo sapiens
taagttattgagata

SEQ ID NO: 50449 - DNA, 15 bp, Homo sapiens
ctaagttattgagat

SEQ ID NO: 50450 - DNA, 15 bp, Homo sapiens
tctaagttattgaga

SEQ ID NO: 50451 - DNA, 15 bp, Homo sapiens
ttctaagttattgag

SEQ ID NO: 50452 - DNA, 15 bp, Homo sapiens
tttctaagttattga

SEQ ID NO: 50453 - DNA, 15 bp, Homo sapiens
ttttctaagttattg

SEQ ID NO: 50454 - DNA, 15 bp, Homo sapiens
tttttctaagttatt

SEQ ID NO: 50455 - DNA, 15 bp, Homo sapiens
atttttctaagttat

SEQ ID NO: 50456 - DNA, 15 bp, Homo sapiens
aatttttctaagtta

SEQ ID NO: 50457 - DNA, 15 bp, Homo sapiens
taatttttctaagtt

SEQ ID NO: 50458 - DNA, 15 bp, Homo sapiens
ataatttttctaagt

SEQ ID NO: 50459 - DNA, 15 bp, Homo sapiens
aataatttttctaag

SEQ ID NO: 50460 - DNA, 15 bp, Homo sapiens
aaataatttttctaa

SEQ ID NO: 50461 - DNA, 15 bp, Homo sapiens
aaaataatttttcta

SEQ ID NO: 50462 - DNA, 15 bp, Homo sapiens
aaaaataatttttct

SEQ ID NO: 50463 - DNA, 15 bp, Homo sapiens
aaaaaataatttttc

SEQ ID NO: 50464 - DNA, 15 bp, Homo sapiens
caaaaaataattttt

SEQ ID NO: 50465 - DNA, 15 bp, Homo sapiens
tcaaaaaataatttt

SEQ ID NO: 50466 - DNA, 15 bp, Homo sapiens
atcaaaaaataattt

SEQ ID NO: 50467 - DNA, 15 bp, Homo sapiens
tatcaaaaaataatt

SEQ ID NO: 50468 - DNA, 15 bp, Homo sapiens
ttatcaaaaaataat

SEQ ID NO: 50469 - DNA, 15 bp, Homo sapiens
attatcaaaaaataa

SEQ ID NO: 50470 - DNA, 15 bp, Homo sapiens
gattatcaaaaaata

SEQ ID NO: 50471 - DNA, 15 bp, Homo sapiens
ggattatcaaaaaat

SEQ ID NO: 50472 - DNA, 15 bp, Homo sapiens
tggattatcaaaaaa

SEQ ID NO: 50473 - DNA, 15 bp, Homo sapiens
ctggattatcaaaaa

SEQ ID NO: 50474 - DNA, 15 bp, Homo sapiens
cctggattatcaaaa

SEQ ID NO: 50475 - DNA, 15 bp, Homo sapiens
tcctggattatcaaa

SEQ ID NO: 50476 - DNA, 15 bp, Homo sapiens
ttcctggattatcaa

SEQ ID NO: 50477 - DNA, 15 bp, Homo sapiens
cttcctggattatca

SEQ ID NO: 50478 - DNA, 15 bp, Homo sapiens
acttcctggattatc

SEQ ID NO: 50479 - DNA, 15 bp, Homo sapiens
tacttcctggattat

SEQ ID NO: 50480 - DNA, 15 bp, Homo sapiens
atacttcctggatta

SEQ ID NO: 50481 - DNA, 15 bp, Homo sapiens
aatacttcctggatt

SEQ ID NO: 50482 - DNA, 15 bp, Homo sapiens
taatacttcctggat

SEQ ID NO: 50483 - DNA, 15 bp, Homo sapiens
ctaatacttcctgga

SEQ ID NO: 50484 - DNA, 15 bp, Homo sapiens
gctaatacttcctgg

SEQ ID NO: 50485 - DNA, 15 bp, Homo sapiens
tgctaatacttcctg

SEQ ID NO: 50486 - DNA, 15 bp, Homo sapiens
gttgctaatacttcc

SEQ ID NO: 50487 - DNA, 15 bp, Homo sapiens
agttgctaatacttc

SEQ ID NO: 50488 - DNA, 15 bp, Homo sapiens
cagttgctaatactt

SEQ ID NO: 50489 - DNA, 15 bp, Homo sapiens
acagttgctaatact

SEQ ID NO: 50490 - DNA, 15 bp, Homo sapiens
aacagttgctaatac

SEQ ID NO: 50491 - DNA, 15 bp, Homo sapiens
aaacagttgctaata

SEQ ID NO: 50492 - DNA, 15 bp, Homo sapiens
aaaacagttgctaat

SEQ ID NO: 50493 - DNA, 15 bp, Homo sapiens
taaaacagttgctaa

SEQ ID NO: 50494 - DNA, 15 bp, Homo sapiens
ttaaaacagttgcta

SEQ ID NO: 50495 - DNA, 15 bp, Homo sapiens
tttaaaacagttgct

SEQ ID NO: 50496 - DNA, 15 bp, Homo sapiens
ttttaaaacagttgc

SEQ ID NO: 50497 - DNA, 15 bp, Homo sapiens
attttaaaacagttg

SEQ ID NO: 50498 - DNA, 15 bp, Homo sapiens
aattttaaaacagtt

SEQ ID NO: 50499 - DNA, 15 bp, Homo sapiens
taattttaaaacagt

SEQ ID NO: 50500 - DNA, 15 bp, Homo sapiens
ttaattttaaaacag

SEQ ID NO: 50501 - DNA, 15 bp, Homo sapiens
cttaattttaaaaca

SEQ ID NO: 50502 - DNA, 15 bp, Homo sapiens
tcttaattttaaaac

SEQ ID NO: 50503 - DNA, 15 bp, Homo sapiens
atcttaattttaaaa

SEQ ID NO: 50504 - DNA, 15 bp, Homo sapiens
tatcttaattttaaa

SEQ ID NO: 50505 - DNA, 15 bp, Homo sapiens
ttatcttaattttaa

SEQ ID NO: 50506 - DNA, 15 bp, Homo sapiens
gttatcttaatttta

SEQ ID NO: 50507 - DNA, 15 bp, Homo sapiens
agttatcttaatttt

SEQ ID NO: 50508 - DNA, 15 bp, Homo sapiens
tagttatcttaattt

SEQ ID NO: 50509 - DNA, 15 bp, Homo sapiens
ctagttatcttaatt

SEQ ID NO: 50510 - DNA, 15 bp, Homo sapiens
actagttatcttaat

SEQ ID NO: 50511 - DNA, 15 bp, Homo sapiens
tactagttatcttaa

SEQ ID NO: 50512 - DNA, 15 bp, Homo sapiens
ttactagttatctta

SEQ ID NO: 50513 - DNA, 15 bp, Homo sapiens
cttactagttatctt

SEQ ID NO: 50514 - DNA, 15 bp, Homo sapiens
acttactagttatct

SEQ ID NO: 50515 - DNA, 15 bp, Homo sapiens
aacttactagttatc

SEQ ID NO: 50516 - DNA, 15 bp, Homo sapiens
aaacttactagttat

SEQ ID NO: 50517 - DNA, 15 bp, Homo sapiens
aaaacttactagtta

SEQ ID NO: 50518 - DNA, 15 bp, Homo sapiens
taaaacttactagtt

SEQ ID NO: 50519 - DNA, 15 bp, Homo sapiens
ataaaacttactagt

SEQ ID NO: 50520 - DNA, 15 bp, Homo sapiens
aataaaacttactag

SEQ ID NO: 50521 - DNA, 15 bp, Homo sapiens
aaataaaacttacta

SEQ ID NO: 50522 - DNA, 15 bp, Homo sapiens
taaataaaacttact

SEQ ID NO: 50523 - DNA, 15 bp, Homo sapiens
ctaaataaaacttac

SEQ ID NO: 50524 - DNA, 15 bp, Homo sapiens
gctaaataaaactta

SEQ ID NO: 50525 - DNA, 15 bp, Homo sapiens
agctaaataaaactt

SEQ ID NO: 50526 - DNA, 15 bp, Homo sapiens
aagctaaataaaact

SEQ ID NO: 50527 - DNA, 15 bp, Homo sapiens
aaagctaaataaaac

SEQ ID NO: 50528 - DNA, 15 bp, Homo sapiens
gaaagctaaataaaa

SEQ ID NO: 50529 - DNA, 15 bp, Homo sapiens
tgaaagctaaataaa

SEQ ID NO: 50530 - DNA, 15 bp, Homo sapiens
ttgaaagctaaataa

SEQ ID NO: 50531 - DNA, 15 bp, Homo sapiens
tttgaaagctaaata

SEQ ID NO: 50532 - DNA, 15 bp, Homo sapiens
ttttgaaagctaaat

SEQ ID NO: 50533 - DNA, 15 bp, Homo sapiens
tttttgaaagctaaa

SEQ ID NO: 50534 - DNA, 15 bp, Homo sapiens
atttttgaaagctaa

SEQ ID NO: 50535 - DNA, 15 bp, Homo sapiens
tatttttgaaagcta

SEQ ID NO: 50536 - DNA, 15 bp, Homo sapiens
ctatttttgaaagct

SEQ ID NO: 50537 - DNA, 15 bp, Homo sapiens
cctatttttgaaagc

SEQ ID NO: 50538 - DNA, 15 bp, Homo sapiens
gcctatttttgaaag

SEQ ID NO: 50539 - DNA, 15 bp, Homo sapiens
tgcctatttttgaaa

SEQ ID NO: 50540 - DNA, 15 bp, Homo sapiens
atgcctatttttgaa

SEQ ID NO: 50541 - DNA, 15 bp, Homo sapiens
gatgcctatttttga

SEQ ID NO: 50542 - DNA, 15 bp, Homo sapiens
agatgcctatttttg

SEQ ID NO: 50543 - DNA, 15 bp, Homo sapiens
tagatgcctattttt

SEQ ID NO: 50544 - DNA, 15 bp, Homo sapiens
gtagatgcctatttt

SEQ ID NO: 50545 - DNA, 15 bp, Homo sapiens
tgtagatgcctattt

SEQ ID NO: 50546 - DNA, 15 bp, Homo sapiens
atgtagatgcctatt

SEQ ID NO: 50547 - DNA, 15 bp, Homo sapiens
gatgtagatgcctat

SEQ ID NO: 50548 - DNA, 15 bp, Homo sapiens
tgatgtagatgccta

SEQ ID NO: 50549 - DNA, 15 bp, Homo sapiens
atgatgtagatgcct

SEQ ID NO: 50550 - DNA, 15 bp, Homo sapiens
gatgatgtagatgcc

SEQ ID NO: 50551 - DNA, 15 bp, Homo sapiens
tgatgatgtagatgc

SEQ ID NO: 50552 - DNA, 15 bp, Homo sapiens
atgatgatgtagatg

SEQ ID NO: 50553 - DNA, 15 bp, Homo sapiens
gatgatgatgtagat

SEQ ID NO: 50554 - DNA, 15 bp, Homo sapiens
agatgatgatgtaga

SEQ ID NO: 50555 - DNA, 15 bp, Homo sapiens
gagatgatgatgtag

SEQ ID NO: 50556 - DNA, 15 bp, Homo sapiens
agagatgatgatgta

SEQ ID NO: 50557 - DNA, 15 bp, Homo sapiens
cagagatgatgatgt

SEQ ID NO: 50558 - DNA, 15 bp, Homo sapiens
gcagagatgatgatg

SEQ ID NO: 50559 - DNA, 15 bp, Homo sapiens
tgcagagatgatgat

SEQ ID NO: 50560 - DNA, 15 bp, Homo sapiens
atgcagagatgatga

SEQ ID NO: 50561 - DNA, 15 bp, Homo sapiens
tatgcagagatgatg

SEQ ID NO: 50562 - DNA, 15 bp, Homo sapiens
gtatgcagagatgat

SEQ ID NO: 50563 - DNA, 15 bp, Homo sapiens
ggtatgcagagatga

SEQ ID NO: 50564 - DNA, 15 bp, Homo sapiens
aggtatgcagagatg

SEQ ID NO: 50565 - DNA, 15 bp, Homo sapiens
aaggtatgcagagat

SEQ ID NO: 50566 - DNA, 15 bp, Homo sapiens
aaaggtatgcagaga

SEQ ID NO: 50567 - DNA, 15 bp, Homo sapiens
taaaggtatgcagag

SEQ ID NO: 50568 - DNA, 15 bp, Homo sapiens
ctaaaggtatgcaga

SEQ ID NO: 50569 - DNA, 15 bp, Homo sapiens
cctaaaggtatgcag

SEQ ID NO: 50570 - DNA, 15 bp, Homo sapiens
tcctaaaggtatgca

SEQ ID NO: 50571 - DNA, 15 bp, Homo sapiens
ttcctaaaggtatgc

SEQ ID NO: 50572 - DNA, 15 bp, Homo sapiens
attcctaaaggtatg

SEQ ID NO: 50573 - DNA, 15 bp, Homo sapiens
aattcctaaaggtat

SEQ ID NO: 50574 - DNA, 15 bp, Homo sapiens
aaattcctaaaggta

SEQ ID NO: 50575 - DNA, 15 bp, Homo sapiens
gaaattcctaaaggt

SEQ ID NO: 50576 - DNA, 15 bp, Homo sapiens
ggaaattcctaaagg

SEQ ID NO: 50577 - DNA, 15 bp, Homo sapiens
aggaaattcctaaag

SEQ ID NO: 50578 - DNA, 15 bp, Homo sapiens
taggaaattcctaaa

SEQ ID NO: 50579 - DNA, 15 bp, Homo sapiens
ttaggaaattcctaa

SEQ ID NO: 50580 - DNA, 15 bp, Homo sapiens
attaggaaattccta

SEQ ID NO: 50581 - DNA, 15 bp, Homo sapiens
aattaggaaattcct

SEQ ID NO: 50582 - DNA, 15 bp, Homo sapiens
gaattaggaaattcc

SEQ ID NO: 50583 - DNA, 15 bp, Homo sapiens
agaattaggaaattc

SEQ ID NO: 50584 - DNA, 15 bp, Homo sapiens
aagaattaggaaatt

SEQ ID NO: 50585 - DNA, 15 bp, Homo sapiens
taagaattaggaaat

SEQ ID NO: 50586 - DNA, 15 bp, Homo sapiens
ataagaattaggaaa

SEQ ID NO: 50587 - DNA, 15 bp, Homo sapiens
aataagaattaggaa

SEQ ID NO: 50588 - DNA, 15 bp, Homo sapiens
aaataagaattagga

SEQ ID NO: 50589 - DNA, 15 bp, Homo sapiens
gaaataagaattagg

SEQ ID NO: 50590 - DNA, 15 bp, Homo sapiens
ggaaataagaattag

SEQ ID NO: 50591 - DNA, 15 bp, Homo sapiens
gggaaataagaatta

SEQ ID NO: 50592 - DNA, 15 bp, Homo sapiens
agggaaataagaatt

SEQ ID NO: 50593 - DNA, 15 bp, Homo sapiens
aagggaaataagaat

SEQ ID NO: 50594 - DNA, 15 bp, Homo sapiens
gaagggaaataagaa

SEQ ID NO: 50595 - DNA, 15 bp, Homo sapiens
tgaagggaaataaga

SEQ ID NO: 50596 - DNA, 15 bp, Homo sapiens
atgaagggaaataag

SEQ ID NO: 50597 - DNA, 15 bp, Homo sapiens
gatgaagggaaataa

SEQ ID NO: 50598 - DNA, 15 bp, Homo sapiens
agatgaagggaaata

SEQ ID NO: 50599 - DNA, 15 bp, Homo sapiens
cagatgaagggaaat

SEQ ID NO: 50600 - DNA, 15 bp, Homo sapiens
acagatgaagggaaa

SEQ ID NO: 50601 - DNA, 15 bp, Homo sapiens
tacagatgaagggaa

SEQ ID NO: 50602 - DNA, 15 bp, Homo sapiens
gtacagatgaaggga

SEQ ID NO: 50603 - DNA, 15 bp, Homo sapiens
agtacagatgaaggg

SEQ ID NO: 50604 - DNA, 15 bp, Homo sapiens
aagtacagatgaagg

SEQ ID NO: 50605 - DNA, 15 bp, Homo sapiens
aaagtacagatgaag

SEQ ID NO: 50606 - DNA, 15 bp, Homo sapiens
taaagtacagatgaa

SEQ ID NO: 50607 - DNA, 15 bp, Homo sapiens
ttaaagtacagatga

SEQ ID NO: 50608 - DNA, 15 bp, Homo sapiens
gttaaagtacagatg

SEQ ID NO: 50609 - DNA, 15 bp, Homo sapiens
tgttaaagtacagat

SEQ ID NO: 50610 - DNA, 15 bp, Homo sapiens
gtgttaaagtacaga

SEQ ID NO: 50611 - DNA, 15 bp, Homo sapiens
tgtgttaaagtacag

SEQ ID NO: 50612 - DNA, 15 bp, Homo sapiens
atgtgttaaagtaca

SEQ ID NO: 50613 - DNA, 15 bp, Homo sapiens
catgtgttaaagtac

SEQ ID NO: 50614 - DNA, 15 bp, Homo sapiens
gcatgtgttaaagta

SEQ ID NO: 50615 - DNA, 15 bp, Homo sapiens
tgcatgtgttaaagt

SEQ ID NO: 50616 - DNA, 15 bp, Homo sapiens
ttgcatgtgttaaag

SEQ ID NO: 50617 - DNA, 15 bp, Homo sapiens
tttgcatgtgttaaa

SEQ ID NO: 50618 - DNA, 15 bp, Homo sapiens
ttttgcatgtgttaa

SEQ ID NO: 50619 - DNA, 15 bp, Homo sapiens
attttgcatgtgtta

SEQ ID NO: 50620 - DNA, 15 bp, Homo sapiens
aattttgcatgtgtt

SEQ ID NO: 50621 - DNA, 15 bp, Homo sapiens
caattttgcatgtgt

SEQ ID NO: 50622 - DNA, 15 bp, Homo sapiens
tcaattttgcatgtg

SEQ ID NO: 50623 - DNA, 15 bp, Homo sapiens
ttcaattttgcatgt

SEQ ID NO: 50624 - DNA, 15 bp, Homo sapiens
cttcaattttgcatg

SEQ ID NO: 50625 - DNA, 15 bp, Homo sapiens
ccttcaattttgcat

SEQ ID NO: 50626 - DNA, 15 bp, Homo sapiens
accttcaattttgca

SEQ ID NO: 50627 - DNA, 15 bp, Homo sapiens
aaccttcaattttgc

SEQ ID NO: 50628 - DNA, 15 bp, Homo sapiens
taaccttcaattttg

SEQ ID NO: 50629 - DNA, 15 bp, Homo sapiens
ctaaccttcaatttt

SEQ ID NO: 50630 - DNA, 15 bp, Homo sapiens
tctaaccttcaattt

SEQ ID NO: 50631 - DNA, 15 bp, Homo sapiens
atctaaccttcaatt

SEQ ID NO: 50632 - DNA, 15 bp, Homo sapiens
aatctaaccttcaat

SEQ ID NO: 50633 - DNA, 15 bp, Homo sapiens
taatctaaccttcaa

SEQ ID NO: 50634 - DNA, 15 bp, Homo sapiens
ttaatctaaccttca

SEQ ID NO: 50635 - DNA, 15 bp, Homo sapiens
tttaatctaaccttc

SEQ ID NO: 50636 - DNA, 15 bp, Homo sapiens
atttaatctaacctt

SEQ ID NO: 50637 - DNA, 15 bp, Homo sapiens
tatttaatctaacct

SEQ ID NO: 50638 - DNA, 15 bp, Homo sapiens
atatttaatctaacc

SEQ ID NO: 50639 - DNA, 15 bp, Homo sapiens
aatatttaatctaac

SEQ ID NO: 50640 - DNA, 15 bp, Homo sapiens
aaatatttaatctaa

SEQ ID NO: 50641 - DNA, 15 bp, Homo sapiens
taaatatttaatcta

SEQ ID NO: 50642 - DNA, 15 bp, Homo sapiens
ataaatatttaatct

SEQ ID NO: 50643 - DNA, 15 bp, Homo sapiens
cataaatatttaatc

SEQ ID NO: 50644 - DNA, 15 bp, Homo sapiens
tcataaatatttaat

SEQ ID NO: 50645 - DNA, 15 bp, Homo sapiens
atcataaatatttaa

SEQ ID NO: 50646 - DNA, 15 bp, Homo sapiens
aatcataaatattta

SEQ ID NO: 50647 - DNA, 15 bp, Homo sapiens
aaatcataaatattt

SEQ ID NO: 50648 - DNA, 15 bp, Homo sapiens
taaatcataaatatt

SEQ ID NO: 50649 - DNA, 15 bp, Homo sapiens
ataaatcataaatat

SEQ ID NO: 50650 - DNA, 15 bp, Homo sapiens
aataaatcataaata

SEQ ID NO: 50651 - DNA, 15 bp, Homo sapiens
aaataaatcataaat

SEQ ID NO: 50652 - DNA, 15 bp, Homo sapiens
caaataaatcataaa

SEQ ID NO: 50653 - DNA, 15 bp, Homo sapiens
acaaataaatcataa

SEQ ID NO: 50654 - DNA, 15 bp, Homo sapiens
aacaaataaatcata

SEQ ID NO: 50655 - DNA, 15 bp, Homo sapiens
aaacaaataaatcat

SEQ ID NO: 50656 - DNA, 15 bp, Homo sapiens
taaacaaataaatca

SEQ ID NO: 50657 - DNA, 15 bp, Homo sapiens
ataaacaaataaatc

SEQ ID NO: 50658 - DNA, 15 bp, Homo sapiens
gataaacaaataaat

SEQ ID NO: 50659 - DNA, 15 bp, Homo sapiens
ggataaacaaataaa

SEQ ID NO: 50660 - DNA, 15 bp, Homo sapiens
aggataaacaaataa

SEQ ID NO: 50661 - DNA, 15 bp, Homo sapiens
aaggataaacaaata

SEQ ID NO: 50662 - DNA, 15 bp, Homo sapiens
caaggataaacaaat

SEQ ID NO: 50663 - DNA, 15 bp, Homo sapiens
tcaaggataaacaaa

SEQ ID NO: 50664 - DNA, 15 bp, Homo sapiens
gtcaaggataaacaa

SEQ ID NO: 50665 - DNA, 15 bp, Homo sapiens
agtcaaggataaaca

SEQ ID NO: 50666 - DNA, 15 bp, Homo sapiens
tagtcaaggataaac

SEQ ID NO: 50667 - DNA, 15 bp, Homo sapiens
gtagtcaaggataaa

SEQ ID NO: 50668 - DNA, 15 bp, Homo sapiens
tgtagtcaaggataa

SEQ ID NO: 50669 - DNA, 15 bp, Homo sapiens
atgtagtcaaggata

SEQ ID NO: 50670 - DNA, 15 bp, Homo sapiens
tatgtagtcaaggat

SEQ ID NO: 50671 - DNA, 15 bp, Homo sapiens
ttatgtagtcaagga

SEQ ID NO: 50672 - DNA, 15 bp, Homo sapiens
tttatgtagtcaagg

SEQ ID NO: 50673 - DNA, 15 bp, Homo sapiens
atttatgtagtcaag

SEQ ID NO: 50674 - DNA, 15 bp, Homo sapiens
aatttatgtagtcaa

SEQ ID NO: 50675 - DNA, 15 bp, Homo sapiens
aaatttatgtagtca

SEQ ID NO: 50676 - DNA, 15 bp, Homo sapiens
gaaatttatgtagtc

SEQ ID NO: 50677 - DNA, 15 bp, Homo sapiens
ggaaatttatgtagt

SEQ ID NO: 50678 - DNA, 15 bp, Homo sapiens
tggaaatttatgtag

SEQ ID NO: 50679 - DNA, 15 bp, Homo sapiens
atggaaatttatgta

SEQ ID NO: 50680 - DNA, 15 bp, Homo sapiens
aatggaaatttatgt

SEQ ID NO: 50681 - DNA, 15 bp, Homo sapiens
aaatggaaatttatg

SEQ ID NO: 50682 - DNA, 15 bp, Homo sapiens
aaaatggaaatttat

SEQ ID NO: 50683 - DNA, 15 bp, Homo sapiens
taaaatggaaattta

SEQ ID NO: 50684 - DNA, 15 bp, Homo sapiens
ataaaatggaaattt

SEQ ID NO: 50685 - DNA, 15 bp, Homo sapiens
aataaaatggaaatt

SEQ ID NO: 50686 - DNA, 15 bp, Homo sapiens
caataaaatggaaat

SEQ ID NO: 50687 - DNA, 15 bp, Homo sapiens
tcaataaaatggaaa

SEQ ID NO: 50688 - DNA, 15 bp, Homo sapiens
atcaataaaatggaa

SEQ ID NO: 50689 - DNA, 15 bp, Homo sapiens
aatcaataaaatgga

SEQ ID NO: 50690 - DNA, 15 bp, Homo sapiens
aaatcaataaaatgg

SEQ ID NO: 50691 - DNA, 15 bp, Homo sapiens
aaaatcaataaaatg

SEQ ID NO: 50692 - DNA, 15 bp, Homo sapiens
ggaaaatcaataaaa

SEQ ID NO: 50693 - DNA, 15 bp, Homo sapiens
gggaaaatcaataaa

SEQ ID NO: 50694 - DNA, 15 bp, Homo sapiens
agggaaaatcaataa

SEQ ID NO: 50695 - DNA, 15 bp, Homo sapiens
cagggaaaatcaata

SEQ ID NO: 50696 - DNA, 15 bp, Homo sapiens
gcagggaaaatcaat

SEQ ID NO: 50697 - DNA, 15 bp, Homo sapiens
ggcagggaaaatcaa

SEQ ID NO: 50698 - DNA, 15 bp, Homo sapiens
aggcagggaaaatca

SEQ ID NO: 50699 - DNA, 15 bp, Homo sapiens
aaggcagggaaaatc

SEQ ID NO: 50700 - DNA, 15 bp, Homo sapiens
taaggcagggaaaat

SEQ ID NO: 50701 - DNA, 15 bp, Homo sapiens
ataaggcagggaaaa

SEQ ID NO: 50702 - DNA, 15 bp, Homo sapiens
aataaggcagggaaa

SEQ ID NO: 50703 - DNA, 15 bp, Homo sapiens
aaataaggcagggaa

SEQ ID NO: 50704 - DNA, 15 bp, Homo sapiens
taaataaggcaggga

SEQ ID NO: 50705 - DNA, 15 bp, Homo sapiens
ttaaataaggcaggg

SEQ ID NO: 50706 - DNA, 15 bp, Homo sapiens
cttaaataaggcagg

SEQ ID NO: 50707 - DNA, 15 bp, Homo sapiens
tcttaaataaggcag

SEQ ID NO: 50708 - DNA, 15 bp, Homo sapiens
ttcttaaataaggca

SEQ ID NO: 50709 - DNA, 15 bp, Homo sapiens
attcttaaataaggc

SEQ ID NO: 50710 - DNA, 15 bp, Homo sapiens
tattcttaaataagg

SEQ ID NO: 50711 - DNA, 15 bp, Homo sapiens
atattcttaaataag

SEQ ID NO: 50712 - DNA, 15 bp, Homo sapiens
catattcttaaataa

SEQ ID NO: 50713 - DNA, 15 bp, Homo sapiens
gcatattcttaaata

SEQ ID NO: 50714 - DNA, 15 bp, Homo sapiens
agcatattcttaaat

SEQ ID NO: 50715 - DNA, 15 bp, Homo sapiens
tagcatattcttaaa

SEQ ID NO: 50716 - DNA, 15 bp, Homo sapiens
atagcatattcttaa

SEQ ID NO: 50717 - DNA, 15 bp, Homo sapiens
catagcatattctta

SEQ ID NO: 50718 - DNA, 15 bp, Homo sapiens
tcatagcatattctt

SEQ ID NO: 50719 - DNA, 15 bp, Homo sapiens
atcatagcatattct

SEQ ID NO: 50720 - DNA, 15 bp, Homo sapiens
aatcatagcatattc

SEQ ID NO: 50721 - DNA, 15 bp, Homo sapiens
taatcatagcatatt

SEQ ID NO: 50722 - DNA, 15 bp, Homo sapiens
ttaatcatagcatat

SEQ ID NO: 50723 - DNA, 15 bp, Homo sapiens
tttaatcatagcata

SEQ ID NO: 50724 - DNA, 15 bp, Homo sapiens
ttttaatcatagcat

SEQ ID NO: 50725 - DNA, 15 bp, Homo sapiens
gttttaatcatagca

SEQ ID NO: 50726 - DNA, 15 bp, Homo sapiens
tgttttaatcatagc

SEQ ID NO: 50727 - DNA, 15 bp, Homo sapiens
gtgttttaatcatag

SEQ ID NO: 50728 - DNA, 15 bp, Homo sapiens
tgtgttttaatcata

SEQ ID NO: 50729 - DNA, 15 bp, Homo sapiens
ttgtgttttaatcat

SEQ ID NO: 50730 - DNA, 15 bp, Homo sapiens
tttgtgttttaatca

SEQ ID NO: 50731 - DNA, 15 bp, Homo sapiens
ttttgtgttttaatc

SEQ ID NO: 50732 - DNA, 15 bp, Homo sapiens
tttttgtgttttaat

SEQ ID NO: 50733 - DNA, 15 bp, Homo sapiens
ttttttgtgttttaa

SEQ ID NO: 50734 - DNA, 15 bp, Homo sapiens
attttttgtgtttta

SEQ ID NO: 50735 - DNA, 15 bp, Homo sapiens
aattttttgtgtttt

SEQ ID NO: 50736 - DNA, 15 bp, Homo sapiens
aaattttttgtgttt

SEQ ID NO: 50737 - DNA, 15 bp, Homo sapiens
aaaattttttgtgtt

SEQ ID NO: 50738 - DNA, 15 bp, Homo sapiens
taaaattttttgtgt

SEQ ID NO: 50739 - DNA, 15 bp, Homo sapiens
ctaaaattttttgtg

SEQ ID NO: 50740 - DNA, 15 bp, Homo sapiens
actaaaattttttgt

SEQ ID NO: 50741 - DNA, 15 bp, Homo sapiens
tactaaaattttttg

SEQ ID NO: 50742 - DNA, 15 bp, Homo sapiens
atactaaaatttttt

SEQ ID NO: 50743 - DNA, 15 bp, Homo sapiens
tatactaaaattttt

SEQ ID NO: 50744 - DNA, 15 bp, Homo sapiens
ttatactaaaatttt

SEQ ID NO: 50745 - DNA, 15 bp, Homo sapiens
gttatactaaaattt

SEQ ID NO: 50746 - DNA, 15 bp, Homo sapiens
ggttatactaaaatt

SEQ ID NO: 50747 - DNA, 15 bp, Homo sapiens
gggttatactaaaat

SEQ ID NO: 50748 - DNA, 15 bp, Homo sapiens
tgggttatactaaaa

SEQ ID NO: 50749 - DNA, 15 bp, Homo sapiens
atgggttatactaaa

SEQ ID NO: 50750 - DNA, 15 bp, Homo sapiens
tatgggttatactaa

SEQ ID NO: 50751 - DNA, 15 bp, Homo sapiens
atatgggttatacta

SEQ ID NO: 50752 - DNA, 15 bp, Homo sapiens
tatatgggttatact

SEQ ID NO: 50753 - DNA, 15 bp, Homo sapiens
atatatgggttatac

SEQ ID NO: 50754 - DNA, 15 bp, Homo sapiens
tatatatgggttata

SEQ ID NO: 50755 - DNA, 15 bp, Homo sapiens
atatatatgggttat

SEQ ID NO: 50756 - DNA, 15 bp, Homo sapiens
tatatatatgggtta

SEQ ID NO: 50757 - DNA, 15 bp, Homo sapiens
atatatatatgggtt

SEQ ID NO: 50758 - DNA, 15 bp, Homo sapiens
tatatatatatgggt

SEQ ID NO: 50759 - DNA, 15 bp, Homo sapiens
ctatatatatatggg

SEQ ID NO: 50760 - DNA, 15 bp, Homo sapiens
tctatatatatatgg

SEQ ID NO: 50761 - DNA, 15 bp, Homo sapiens
ttctatatatatatg

SEQ ID NO: 50762 - DNA, 15 bp, Homo sapiens
attctatatatatat

SEQ ID NO: 50763 - DNA, 15 bp, Homo sapiens
aattctatatatata

SEQ ID NO: 50764 - DNA, 15 bp, Homo sapiens
gaattctatatatat

SEQ ID NO: 50765 - DNA, 15 bp, Homo sapiens
tgaattctatatata

SEQ ID NO: 50766 - DNA, 15 bp, Homo sapiens
gtgaattctatatat

SEQ ID NO: 50767 - DNA, 15 bp, Homo sapiens
ggtgaattctatata

SEQ ID NO: 50768 - DNA, 15 bp, Homo sapiens
aggtgaattctatat

SEQ ID NO: 50769 - DNA, 15 bp, Homo sapiens
aaggtgaattctata

SEQ ID NO: 50770 - DNA, 15 bp, Homo sapiens
aaaggtgaattctat

SEQ ID NO: 50771 - DNA, 15 bp, Homo sapiens
aaaaggtgaattcta

SEQ ID NO: 50772 - DNA, 15 bp, Homo sapiens
aaaaaggtgaattct

SEQ ID NO: 50773 - DNA, 15 bp, Homo sapiens
caaaaaggtgaattc

SEQ ID NO: 50774 - DNA, 15 bp, Homo sapiens
acaaaaaggtgaatt

SEQ ID NO: 50775 - DNA, 15 bp, Homo sapiens
aacaaaaaggtgaat

SEQ ID NO: 50776 - DNA, 15 bp, Homo sapiens
taacaaaaaggtgaa

SEQ ID NO: 50777 - DNA, 15 bp, Homo sapiens
ataacaaaaaggtga

SEQ ID NO: 50778 - DNA, 15 bp, Homo sapiens
aataacaaaaaggtg

SEQ ID NO: 50779 - DNA, 15 bp, Homo sapiens
aaataacaaaaaggt

SEQ ID NO: 50780 - DNA, 15 bp, Homo sapiens
taaataacaaaaagg

SEQ ID NO: 50781 - DNA, 15 bp, Homo sapiens
ttaaataacaaaaag

SEQ ID NO: 50782 - DNA, 15 bp, Homo sapiens
tttaaataacaaaaa

SEQ ID NO: 50783 - DNA, 15 bp, Homo sapiens
atttaaataacaaaa

SEQ ID NO: 50784 - DNA, 15 bp, Homo sapiens
tatttaaataacaaa

SEQ ID NO: 50785 - DNA, 15 bp, Homo sapiens
atatttaaataacaa

SEQ ID NO: 50786 - DNA, 15 bp, Homo sapiens
aatatttaaataaca

SEQ ID NO: 50787 - DNA, 15 bp, Homo sapiens
taatatttaaataac

SEQ ID NO: 50788 - DNA, 15 bp, Homo sapiens
ataatatttaaataa

SEQ ID NO: 50789 - DNA, 15 bp, Homo sapiens
aataatatttaaata

SEQ ID NO: 50790 - DNA, 15 bp, Homo sapiens
caataatatttaaat

SEQ ID NO: 50791 - DNA, 15 bp, Homo sapiens
ccaataatatttaaa

SEQ ID NO: 50792 - DNA, 15 bp, Homo sapiens
gccaataatatttaa

SEQ ID NO: 50793 - DNA, 15 bp, Homo sapiens
agccaataatattta

SEQ ID NO: 50794 - DNA, 15 bp, Homo sapiens
aagccaataatattt

SEQ ID NO: 50795 - DNA, 15 bp, Homo sapiens
taagccaataatatt

SEQ ID NO: 50796 - DNA, 15 bp, Homo sapiens
ataagccaataatat

SEQ ID NO: 50797 - DNA, 15 bp, Homo sapiens
aataagccaataata

SEQ ID NO: 50798 - DNA, 15 bp, Homo sapiens
aaataagccaataat

SEQ ID NO: 50799 - DNA, 15 bp, Homo sapiens
aaaataagccaataa

SEQ ID NO: 50800 - DNA, 15 bp, Homo sapiens
gaaaataagccaata

SEQ ID NO: 50801 - DNA, 15 bp, Homo sapiens
agaaaataagccaat

SEQ ID NO: 50802 - DNA, 15 bp, Homo sapiens
aagaaaataagccaa

SEQ ID NO: 50803 - DNA, 15 bp, Homo sapiens
gaagaaaataagcca

SEQ ID NO: 50804 - DNA, 15 bp, Homo sapiens
agaagaaaataagcc

SEQ ID NO: 50805 - DNA, 15 bp, Homo sapiens
tagaagaaaataagc

SEQ ID NO: 50806 - DNA, 15 bp, Homo sapiens
ttagaagaaaataag

SEQ ID NO: 50807 - DNA, 15 bp, Homo sapiens
cttagaagaaaataa

SEQ ID NO: 50808 - DNA, 15 bp, Homo sapiens
acttagaagaaaata

SEQ ID NO: 50809 - DNA, 15 bp, Homo sapiens
tacttagaagaaaat

SEQ ID NO: 50810 - DNA, 15 bp, Homo sapiens
ttacttagaagaaaa

SEQ ID NO: 50811 - DNA, 15 bp, Homo sapiens
tttacttagaagaaa

SEQ ID NO: 50812 - DNA, 15 bp, Homo sapiens
ttttacttagaagaa

SEQ ID NO: 50813 - DNA, 15 bp, Homo sapiens
attttacttagaaga

SEQ ID NO: 50814 - DNA, 15 bp, Homo sapiens
tattttacttagaag

SEQ ID NO: 50815 - DNA, 15 bp, Homo sapiens
gtattttacttagaa

SEQ ID NO: 50816 - DNA, 15 bp, Homo sapiens
tgtattttacttaga

SEQ ID NO: 50817 - DNA, 15 bp, Homo sapiens
ttgtattttacttag

SEQ ID NO: 50818 - DNA, 15 bp, Homo sapiens
attgtattttactta

SEQ ID NO: 50819 - DNA, 15 bp, Homo sapiens
aattgtattttactt

SEQ ID NO: 50820 - DNA, 15 bp, Homo sapiens
taattgtattttact

SEQ ID NO: 50821 - DNA, 15 bp, Homo sapiens
gtaattgtattttac

SEQ ID NO: 50822 - DNA, 15 bp, Homo sapiens
agtaattgtatttta

SEQ ID NO: 50823 - DNA, 15 bp, Homo sapiens
cagtaattgtatttt

SEQ ID NO: 50824 - DNA, 15 bp, Homo sapiens
ccagtaattgtattt

SEQ ID NO: 50825 - DNA, 15 bp, Homo sapiens
gccagtaattgtatt

SEQ ID NO: 50826 - DNA, 15 bp, Homo sapiens
agccagtaattgtat

SEQ ID NO: 50827 - DNA, 15 bp, Homo sapiens
tagccagtaattgta

SEQ ID NO: 50828 - DNA, 15 bp, Homo sapiens
ttagccagtaattgt

SEQ ID NO: 50829 - DNA, 15 bp, Homo sapiens
tttagccagtaattg

SEQ ID NO: 50830 - DNA, 15 bp, Homo sapiens
ttttagccagtaatt

SEQ ID NO: 50831 - DNA, 15 bp, Homo sapiens
attttagccagtaat

SEQ ID NO: 50832 - DNA, 15 bp, Homo sapiens
tattttagccagtaa

SEQ ID NO: 50833 - DNA, 15 bp, Homo sapiens
ttattttagccagta

SEQ ID NO: 50834 - DNA, 15 bp, Homo sapiens
attattttagccagt

SEQ ID NO: 50835 - DNA, 15 bp, Homo sapiens
aattattttagccag

SEQ ID NO: 50836 - DNA, 15 bp, Homo sapiens
caattattttagcca

SEQ ID NO: 50837 - DNA, 15 bp, Homo sapiens
tcaattattttagcc

SEQ ID NO: 50838 - DNA, 15 bp, Homo sapiens
ttcaattattttagc

SEQ ID NO: 50839 - DNA, 15 bp, Homo sapiens
tttcaattattttag

SEQ ID NO: 50840 - DNA, 15 bp, Homo sapiens
atttcaattatttta

SEQ ID NO: 50841 - DNA, 15 bp, Homo sapiens
tatttcaattatttt

SEQ ID NO: 50842 - DNA, 15 bp, Homo sapiens
ttatttcaattattt

SEQ ID NO: 50843 - DNA, 15 bp, Homo sapiens
cttatttcaattatt

SEQ ID NO: 50844 - DNA, 15 bp, Homo sapiens
gcttatttcaattat

SEQ ID NO: 50845 - DNA, 15 bp, Homo sapiens
tgcttatttcaatta

SEQ ID NO: 50846 - DNA, 15 bp, Homo sapiens
ttgcttatttcaatt

SEQ ID NO: 50847 - DNA, 15 bp, Homo sapiens
tttgcttatttcaat

SEQ ID NO: 50848 - DNA, 15 bp, Homo sapiens
ttttgcttatttcaa

SEQ ID NO: 50849 - DNA, 15 bp, Homo sapiens
tttttgcttatttca

SEQ ID NO: 50850 - DNA, 15 bp, Homo sapiens
ttttttgcttatttc

SEQ ID NO: 50851 - DNA, 15 bp, Homo sapiens
tttttttgcttattt

SEQ ID NO: 50852 - DNA, 15 bp, Homo sapiens
ttttttttgcttatt

SEQ ID NO: 50853 - DNA, 15 bp, Homo sapiens
tttttttttgcttat

SEQ ID NO: 50854 - DNA, 15 bp, Homo sapiens
ttttttttttgctta

SEQ ID NO: 50855 - DNA, 15 bp, Homo sapiens
attttttttttgctt

SEQ ID NO: 50856 - DNA, 15 bp, Homo sapiens
aattttttttttgct

SEQ ID NO: 50857 - DNA, 15 bp, Homo sapiens
aaattttttttttgc

SEQ ID NO: 50858 - DNA, 15 bp, Homo sapiens
aaaattttttttttg

SEQ ID NO: 50859 - DNA, 15 bp, Homo sapiens
taaaatttttttttt

SEQ ID NO: 50860 - DNA, 15 bp, Homo sapiens
ttaaaattttttttt

SEQ ID NO: 50861 - DNA, 15 bp, Homo sapiens
tttaaaatttttttt

SEQ ID NO: 50862 - DNA, 15 bp, Homo sapiens
ctttaaaattttttt

SEQ ID NO: 50863 - DNA, 15 bp, Homo sapiens
tctttaaaatttttt

SEQ ID NO: 50864 - DNA, 15 bp, Homo sapiens
gtctttaaaattttt

SEQ ID NO: 50865 - DNA, 15 bp, Homo sapiens
ggtctttaaaatttt

SEQ ID NO: 50866 - DNA, 15 bp, Homo sapiens
aggtctttaaaattt

SEQ ID NO: 50867 - DNA, 15 bp, Homo sapiens
aaggtctttaaaatt

SEQ ID NO: 50868 - DNA, 15 bp, Homo sapiens
caaggtctttaaaat

SEQ ID NO: 50869 - DNA, 15 bp, Homo sapiens
acaaggtctttaaaa

SEQ ID NO: 50870 - DNA, 15 bp, Homo sapiens
tacaaggtctttaaa

SEQ ID NO: 50871 - DNA, 15 bp, Homo sapiens
atacaaggtctttaa

SEQ ID NO: 50872 - DNA, 15 bp, Homo sapiens
tatacaaggtcttta

SEQ ID NO: 50873 - DNA, 15 bp, Homo sapiens
gtatacaaggtcttt

SEQ ID NO: 50874 - DNA, 15 bp, Homo sapiens
tgtatacaaggtctt

SEQ ID NO: 50875 - DNA, 15 bp, Homo sapiens
ttgtatacaaggtct

SEQ ID NO: 50876 - DNA, 15 bp, Homo sapiens
cttgtatacaaggtc

SEQ ID NO: 50877 - DNA, 15 bp, Homo sapiens
tcttgtatacaaggt

SEQ ID NO: 50878 - DNA, 15 bp, Homo sapiens
atcttgtatacaagg

SEQ ID NO: 50879 - DNA, 15 bp, Homo sapiens
aatcttgtatacaag

SEQ ID NO: 50880 - DNA, 15 bp, Homo sapiens
taatcttgtatacaa

SEQ ID NO: 50881 - DNA, 15 bp, Homo sapiens
gtaatcttgtataca

SEQ ID NO: 50882 - DNA, 15 bp, Homo sapiens
agtaatcttgtatac

SEQ ID NO: 50883 - DNA, 15 bp, Homo sapiens
aagtaatcttgtata

SEQ ID NO: 50884 - DNA, 15 bp, Homo sapiens
aaagtaatcttgtat

SEQ ID NO: 50885 - DNA, 15 bp, Homo sapiens
caaagtaatcttgta

SEQ ID NO: 50886 - DNA, 15 bp, Homo sapiens
gcaaagtaatcttgt

SEQ ID NO: 50887 - DNA, 15 bp, Homo sapiens
ggcaaagtaatcttg

SEQ ID NO: 50888 - DNA, 15 bp, Homo sapiens
tggcaaagtaatctt

SEQ ID NO: 50889 - DNA, 15 bp, Homo sapiens
ctggcaaagtaatct

SEQ ID NO: 50890 - DNA, 15 bp, Homo sapiens
cctggcaaagtaatc

SEQ ID NO: 50891 - DNA, 15 bp, Homo sapiens
acctggcaaagtaat

SEQ ID NO: 50892 - DNA, 15 bp, Homo sapiens
tacctggcaaagtaa

SEQ ID NO: 50893 - DNA, 15 bp, Homo sapiens
gtacctggcaaagta

SEQ ID NO: 50894 - DNA, 15 bp, Homo sapiens
agtacctggcaaagt

SEQ ID NO: 50895 - DNA, 15 bp, Homo sapiens
cagtacctggcaaag

SEQ ID NO: 50896 - DNA, 15 bp, Homo sapiens
acagtacctggcaaa

SEQ ID NO: 50897 - DNA, 15 bp, Homo sapiens
aacagtacctggcaa

SEQ ID NO: 50898 - DNA, 15 bp, Homo sapiens
taacagtacctggca

SEQ ID NO: 50899 - DNA, 15 bp, Homo sapiens
ttaacagtacctggc

SEQ ID NO: 50900 - DNA, 15 bp, Homo sapiens
tttaacagtacctgg

SEQ ID NO: 50901 - DNA, 15 bp, Homo sapiens
ttttaacagtacctg

SEQ ID NO: 50902 - DNA, 15 bp, Homo sapiens
cttttaacagtacct

SEQ ID NO: 50903 - DNA, 15 bp, Homo sapiens
tcttttaacagtacc

SEQ ID NO: 50904 - DNA, 15 bp, Homo sapiens
atcttttaacagtac

SEQ ID NO: 50905 - DNA, 15 bp, Homo sapiens
catcttttaacagta

SEQ ID NO: 50906 - DNA, 15 bp, Homo sapiens
gcatcttttaacagt

SEQ ID NO: 50907 - DNA, 15 bp, Homo sapiens
tgcatcttttaacag

SEQ ID NO: 50908 - DNA, 15 bp, Homo sapiens
ttgcatcttttaaca

SEQ ID NO: 50909 - DNA, 15 bp, Homo sapiens
attgcatcttttaac

SEQ ID NO: 50910 - DNA, 15 bp, Homo sapiens
cattgcatcttttaa

SEQ ID NO: 50911 - DNA, 15 bp, Homo sapiens
tcattgcatctttta

SEQ ID NO: 50912 - DNA, 15 bp, Homo sapiens
gtcattgcatctttt

SEQ ID NO: 50913 - DNA, 15 bp, Homo sapiens
tgtcattgcatcttt

SEQ ID NO: 50914 - DNA, 15 bp, Homo sapiens
atgtcattgcatctt

SEQ ID NO: 50915 - DNA, 15 bp, Homo sapiens
aatgtcattgcatct

SEQ ID NO: 50916 - DNA, 15 bp, Homo sapiens
aaatgtcattgcatc

SEQ ID NO: 50917 - DNA, 15 bp, Homo sapiens
taaatgtcattgcat

SEQ ID NO: 50918 - DNA, 15 bp, Homo sapiens
ttaaatgtcattgca

SEQ ID NO: 50919 - DNA, 15 bp, Homo sapiens
cttaaatgtcattgc

SEQ ID NO: 50920 - DNA, 15 bp, Homo sapiens
tcttaaatgtcattg

SEQ ID NO: 50921 - DNA, 15 bp, Homo sapiens
gtcttaaatgtcatt

SEQ ID NO: 50922 - DNA, 15 bp, Homo sapiens
cgtcttaaatgtcat

SEQ ID NO: 50923 - DNA, 15 bp, Homo sapiens
acgtcttaaatgtca

SEQ ID NO: 50924 - DNA, 15 bp, Homo sapiens
tacgtcttaaatgtc

SEQ ID NO: 50925 - DNA, 15 bp, Homo sapiens
ttacgtcttaaatgt

SEQ ID NO: 50926 - DNA, 15 bp, Homo sapiens
gttacgtcttaaatg

SEQ ID NO: 50927 - DNA, 15 bp, Homo sapiens
tgttacgtcttaaat

SEQ ID NO: 50928 - DNA, 15 bp, Homo sapiens
atgttacgtcttaaa

SEQ ID NO: 50929 - DNA, 15 bp, Homo sapiens
gatgttacgtcttaa

SEQ ID NO: 50930 - DNA, 15 bp, Homo sapiens
ggatgttacgtctta

SEQ ID NO: 50931 - DNA, 15 bp, Homo sapiens
aggatgttacgtctt

SEQ ID NO: 50932 - DNA, 15 bp, Homo sapiens
aaggatgttacgtct

SEQ ID NO: 50933 - DNA, 15 bp, Homo sapiens
taaggatgttacgtc

SEQ ID NO: 50934 - DNA, 15 bp, Homo sapiens
ttaaggatgttacgt

SEQ ID NO: 50935 - DNA, 15 bp, Homo sapiens
cttaaggatgttacg

SEQ ID NO: 50936 - DNA, 15 bp, Homo sapiens
ccttaaggatgttac

SEQ ID NO: 50937 - DNA, 15 bp, Homo sapiens
tccttaaggatgtta

SEQ ID NO: 50938 - DNA, 15 bp, Homo sapiens
atccttaaggatgtt

SEQ ID NO: 50939 - DNA, 15 bp, Homo sapiens
gatccttaaggatgt

SEQ ID NO: 50940 - DNA, 15 bp, Homo sapiens
agatccttaaggatg

SEQ ID NO: 50941 - DNA, 15 bp, Homo sapiens
aagatccttaaggat

SEQ ID NO: 50942 - DNA, 15 bp, Homo sapiens
taagatccttaagga

SEQ ID NO: 50943 - DNA, 15 bp, Homo sapiens
ataagatccttaagg

SEQ ID NO: 50944 - DNA, 15 bp, Homo sapiens
aataagatccttaag

SEQ ID NO: 50945 - DNA, 15 bp, Homo sapiens
aaataagatccttaa

SEQ ID NO: 50946 - DNA, 15 bp, Homo sapiens
aaaataagatcctta

SEQ ID NO: 50947 - DNA, 15 bp, Homo sapiens
gaaaataagatcctt

SEQ ID NO: 50948 - DNA, 15 bp, Homo sapiens
agaaaataagatcct

SEQ ID NO: 50949 - DNA, 15 bp, Homo sapiens
cagaaaataagatcc

SEQ ID NO: 50950 - DNA, 15 bp, Homo sapiens
ccagaaaataagatc

SEQ ID NO: 50951 - DNA, 15 bp, Homo sapiens
cccagaaaataagat

SEQ ID NO: 50952 - DNA, 15 bp, Homo sapiens
ccccagaaaataaga

SEQ ID NO: 50953 - DNA, 15 bp, Homo sapiens
cccccagaaaataag

SEQ ID NO: 50954 - DNA, 15 bp, Homo sapiens
tcccccagaaaataa

SEQ ID NO: 50955 - DNA, 15 bp, Homo sapiens
atcccccagaaaata

SEQ ID NO: 50956 - DNA, 15 bp, Homo sapiens
tatcccccagaaaat

SEQ ID NO: 50957 - DNA, 15 bp, Homo sapiens
ttatcccccagaaaa

SEQ ID NO: 50958 - DNA, 15 bp, Homo sapiens
tttatcccccagaaa

SEQ ID NO: 50959 - DNA, 15 bp, Homo sapiens
ttttatcccccagaa

SEQ ID NO: 50960 - DNA, 15 bp, Homo sapiens
tttttatcccccaga

SEQ ID NO: 50961 - DNA, 15 bp, Homo sapiens
ttttttatcccccag

SEQ ID NO: 50962 - DNA, 15 bp, Homo sapiens
gttttttatccccca

SEQ ID NO: 50963 - DNA, 15 bp, Homo sapiens
agttttttatccccc

SEQ ID NO: 50964 - DNA, 15 bp, Homo sapiens
aagttttttatcccc

SEQ ID NO: 50965 - DNA, 15 bp, Homo sapiens
aaagttttttatccc

SEQ ID NO: 50966 - DNA, 15 bp, Homo sapiens
taaagttttttatcc

SEQ ID NO: 50967 - DNA, 15 bp, Homo sapiens
ttaaagttttttatc

SEQ ID NO: 50968 - DNA, 15 bp, Homo sapiens
cttaaagttttttat

SEQ ID NO: 50969 - DNA, 15 bp, Homo sapiens
tcttaaagtttttta

SEQ ID NO: 50970 - DNA, 15 bp, Homo sapiens
atcttaaagtttttt

SEQ ID NO: 50971 - DNA, 15 bp, Homo sapiens
tatcttaaagttttt

SEQ ID NO: 50972 - DNA, 15 bp, Homo sapiens
ttatcttaaagtttt

SEQ ID NO: 50973 - DNA, 15 bp, Homo sapiens
tttatcttaaagttt

SEQ ID NO: 50974 - DNA, 15 bp, Homo sapiens
atttatcttaaagtt

SEQ ID NO: 50975 - DNA, 15 bp, Homo sapiens
aatttatcttaaagt

SEQ ID NO: 50976 - DNA, 15 bp, Homo sapiens
taatttatcttaaag

SEQ ID NO: 50977 - DNA, 15 bp, Homo sapiens
ctaatttatcttaaa

SEQ ID NO: 50978 - DNA, 15 bp, Homo sapiens
tctaatttatcttaa

SEQ ID NO: 50979 - DNA, 15 bp, Homo sapiens
ttctaatttatctta

SEQ ID NO: 50980 - DNA, 15 bp, Homo sapiens
attctaatttatctt

SEQ ID NO: 50981 - DNA, 15 bp, Homo sapiens
tattctaatttatct

SEQ ID NO: 50982 - DNA, 15 bp, Homo sapiens
ttattctaatttatc

SEQ ID NO: 50983 - DNA, 15 bp, Homo sapiens
tttattctaatttat

SEQ ID NO: 50984 - DNA, 15 bp, Homo sapiens
ttttattctaattta

SEQ ID NO: 50985 - DNA, 15 bp, Homo sapiens
cttttattctaattt

SEQ ID NO: 50986 - DNA, 15 bp, Homo sapiens
tcttttattctaatt

SEQ ID NO: 50987 - DNA, 15 bp, Homo sapiens
atcttttattctaat

SEQ ID NO: 50988 - DNA, 15 bp, Homo sapiens
aatcttttattctaa

SEQ ID NO: 50989 - DNA, 15 bp, Homo sapiens
aaatcttttattcta

SEQ ID NO: 50990 - DNA, 15 bp, Homo sapiens
taaatcttttattct

SEQ ID NO: 50991 - DNA, 15 bp, Homo sapiens
ttaaatcttttattc

SEQ ID NO: 50992 - DNA, 15 bp, Homo sapiens
tttaaatcttttatt

SEQ ID NO: 50993 - DNA, 15 bp, Homo sapiens
atttaaatcttttat

SEQ ID NO: 50994 - DNA, 15 bp, Homo sapiens
catttaaatctttta

SEQ ID NO: 50995 - DNA, 15 bp, Homo sapiens
ccatttaaatctttt

SEQ ID NO: 50996 - DNA, 15 bp, Homo sapiens
gccatttaaatcttt

SEQ ID NO: 50997 - DNA, 15 bp, Homo sapiens
tgccatttaaatctt

SEQ ID NO: 50998 - DNA, 15 bp, Homo sapiens
atgccatttaaatct

SEQ ID NO: 50999 - DNA, 15 bp, Homo sapiens
aatgccatttaaatc

SEQ ID NO: 51000 - DNA, 15 bp, Homo sapiens
aaatgccatttaaat

SEQ ID NO: 51001 - DNA, 15 bp, Homo sapiens
aaaatgccatttaaa

SEQ ID NO: 51002 - DNA, 15 bp, Homo sapiens
taaaatgccatttaa

SEQ ID NO: 51003 - DNA, 15 bp, Homo sapiens
ttaaaatgccattta

SEQ ID NO: 51004 - DNA, 15 bp, Homo sapiens
cttaaaatgccattt

SEQ ID NO: 51005 - DNA, 15 bp, Homo sapiens
ccttaaaatgccatt

SEQ ID NO: 51006 - DNA, 15 bp, Homo sapiens
accttaaaatgccat

SEQ ID NO: 51007 - DNA, 15 bp, Homo sapiens
taccttaaaatgcca

SEQ ID NO: 51008 - DNA, 15 bp, Homo sapiens
gtaccttaaaatgcc

SEQ ID NO: 51009 - DNA, 15 bp, Homo sapiens
ggtaccttaaaatgc

SEQ ID NO: 51010 - DNA, 15 bp, Homo sapiens
tggtaccttaaaatg

SEQ ID NO: 51011 - DNA, 15 bp, Homo sapiens
ctggtaccttaaaat

SEQ ID NO: 51012 - DNA, 15 bp, Homo sapiens
cctggtaccttaaaa

SEQ ID NO: 51013 - DNA, 15 bp, Homo sapiens
acctggtaccttaaa

SEQ ID NO: 51014 - DNA, 15 bp, Homo sapiens
tacctggtaccttaa

SEQ ID NO: 51015 - DNA, 15 bp, Homo sapiens
gtacctggtacctta

SEQ ID NO: 51016 - DNA, 15 bp, Homo sapiens
ggtacctggtacctt

SEQ ID NO: 51017 - DNA, 15 bp, Homo sapiens
tggtacctggtacct

SEQ ID NO: 51018 - DNA, 15 bp, Homo sapiens
ctggtacctggtacc

SEQ ID NO: 51019 - DNA, 15 bp, Homo sapiens
tctggtacctggtac

SEQ ID NO: 51020 - DNA, 15 bp, Homo sapiens
atctggtacctggta

SEQ ID NO: 51021 - DNA, 15 bp, Homo sapiens
tatctggtacctggt

SEQ ID NO: 51022 - DNA, 15 bp, Homo sapiens
ttatctggtacctgg

SEQ ID NO: 51023 - DNA, 15 bp, Homo sapiens
cttatctggtacctg

SEQ ID NO: 51024 - DNA, 15 bp, Homo sapiens
tcttatctggtacct

SEQ ID NO: 51025 - DNA, 15 bp, Homo sapiens
atcttatctggtacc

SEQ ID NO: 51026 - DNA, 15 bp, Homo sapiens
catcttatctggtac

SEQ ID NO: 51027 - DNA, 15 bp, Homo sapiens
acatcttatctggta

SEQ ID NO: 51028 - DNA, 15 bp, Homo sapiens
gacatcttatctggt

SEQ ID NO: 51029 - DNA, 15 bp, Homo sapiens
tgacatcttatctgg

SEQ ID NO: 51030 - DNA, 15 bp, Homo sapiens
gtgacatcttatctg

SEQ ID NO: 51031 - DNA, 15 bp, Homo sapiens
tgtgacatcttatct

SEQ ID NO: 51032 - DNA, 15 bp, Homo sapiens
ttgtgacatcttatc

SEQ ID NO: 51033 - DNA, 15 bp, Homo sapiens
cttgtgacatcttat

SEQ ID NO: 51034 - DNA, 15 bp, Homo sapiens
ccttgtgacatctta

SEQ ID NO: 51035 - DNA, 15 bp, Homo sapiens
gccttgtgacatctt

SEQ ID NO: 51036 - DNA, 15 bp, Homo sapiens
agccttgtgacatct

SEQ ID NO: 51037 - DNA, 15 bp, Homo sapiens
cagccttgtgacatc

SEQ ID NO: 51038 - DNA, 15 bp, Homo sapiens
acagccttgtgacat

SEQ ID NO: 51039 - DNA, 15 bp, Homo sapiens
tacagccttgtgaca

SEQ ID NO: 51040 - DNA, 15 bp, Homo sapiens
atacagccttgtgac

SEQ ID NO: 51041 - DNA, 15 bp, Homo sapiens
tatacagccttgtga

SEQ ID NO: 51042 - DNA, 15 bp, Homo sapiens
atatacagccttgtg

SEQ ID NO: 51043 - DNA, 15 bp, Homo sapiens
gatatacagccttgt

SEQ ID NO: 51044 - DNA, 15 bp, Homo sapiens
tgatatacagccttg

SEQ ID NO: 51045 - DNA, 15 bp, Homo sapiens
atgatatacagcctt

SEQ ID NO: 51046 - DNA, 15 bp, Homo sapiens
aatgatatacagcct

SEQ ID NO: 51047 - DNA, 15 bp, Homo sapiens
taatgatatacagcc

SEQ ID NO: 51048 - DNA, 15 bp, Homo sapiens
ttaatgatatacagc

SEQ ID NO: 51049 - DNA, 15 bp, Homo sapiens
attaatgatatacag

SEQ ID NO: 51050 - DNA, 15 bp, Homo sapiens
aattaatgatataca

SEQ ID NO: 51051 - DNA, 15 bp, Homo sapiens
caattaatgatatac

SEQ ID NO: 51052 - DNA, 15 bp, Homo sapiens
gcaattaatgatata

SEQ ID NO: 51053 - DNA, 15 bp, Homo sapiens
ggcaattaatgatat

SEQ ID NO: 51054 - DNA, 15 bp, Homo sapiens
tggcaattaatgata

SEQ ID NO: 51055 - DNA, 15 bp, Homo sapiens
ttggcaattaatgat

SEQ ID NO: 51056 - DNA, 15 bp, Homo sapiens
tttggcaattaatga

SEQ ID NO: 51057 - DNA, 15 bp, Homo sapiens
atttggcaattaatg

SEQ ID NO: 51058 - DNA, 15 bp, Homo sapiens
catttggcaattaat

SEQ ID NO: 51059 - DNA, 15 bp, Homo sapiens
tcatttggcaattaa

SEQ ID NO: 51060 - DNA, 15 bp, Homo sapiens
atcatttggcaatta

SEQ ID NO: 51061 - DNA, 15 bp, Homo sapiens
aatcatttggcaatt

SEQ ID NO: 51062 - DNA, 15 bp, Homo sapiens
aaatcatttggcaat

SEQ ID NO: 51063 - DNA, 15 bp, Homo sapiens
taaatcatttggcaa

SEQ ID NO: 51064 - DNA, 15 bp, Homo sapiens
ataaatcatttggca

SEQ ID NO: 51065 - DNA, 15 bp, Homo sapiens
tataaatcatttggc

SEQ ID NO: 51066 - DNA, 15 bp, Homo sapiens
gtataaatcatttgg

SEQ ID NO: 51067 - DNA, 15 bp, Homo sapiens
tgtataaatcatttg

SEQ ID NO: 51068 - DNA, 15 bp, Homo sapiens
ctgtataaatcattt

SEQ ID NO: 51069 - DNA, 15 bp, Homo sapiens
cctgtataaatcatt

SEQ ID NO: 51070 - DNA, 15 bp, Homo sapiens
gcctgtataaatcat

SEQ ID NO: 51071 - DNA, 15 bp, Homo sapiens
ggcctgtataaatca

SEQ ID NO: 51072 - DNA, 15 bp, Homo sapiens
tggcctgtataaatc

SEQ ID NO: 51073 - DNA, 15 bp, Homo sapiens
ctggcctgtataaat

SEQ ID NO: 51074 - DNA, 15 bp, Homo sapiens
tctggcctgtataaa

SEQ ID NO: 51075 - DNA, 15 bp, Homo sapiens
atctggcctgtataa

SEQ ID NO: 51076 - DNA, 15 bp, Homo sapiens
aatctggcctgtata

SEQ ID NO: 51077 - DNA, 15 bp, Homo sapiens
aaatctggcctgtat

SEQ ID NO: 51078 - DNA, 15 bp, Homo sapiens
gaaatctggcctgta

SEQ ID NO: 51079 - DNA, 15 bp, Homo sapiens
agaaatctggcctgt

SEQ ID NO: 51080 - DNA, 15 bp, Homo sapiens
aagaaatctggcctg

SEQ ID NO: 51081 - DNA, 15 bp, Homo sapiens
aaagaaatctggcct

SEQ ID NO: 51082 - DNA, 15 bp, Homo sapiens
caaagaaatctggcc

SEQ ID NO: 51083 - DNA, 15 bp, Homo sapiens
acaaagaaatctggc

SEQ ID NO: 51084 - DNA, 15 bp, Homo sapiens
aacaaagaaatctgg

SEQ ID NO: 51085 - DNA, 15 bp, Homo sapiens
caacaaagaaatctg

SEQ ID NO: 51086 - DNA, 15 bp, Homo sapiens
ccaacaaagaaatct

SEQ ID NO: 51087 - DNA, 15 bp, Homo sapiens
accaacaaagaaatc

SEQ ID NO: 51088 - DNA, 15 bp, Homo sapiens
gaccaacaaagaaat

SEQ ID NO: 51089 - DNA, 15 bp, Homo sapiens
tgaccaacaaagaaa

SEQ ID NO: 51090 - DNA, 15 bp, Homo sapiens
ttgaccaacaaagaa

SEQ ID NO: 51091 - DNA, 15 bp, Homo sapiens
attgaccaacaaaga

SEQ ID NO: 51092 - DNA, 15 bp, Homo sapiens
tattgaccaacaaag

SEQ ID NO: 51093 - DNA, 15 bp, Homo sapiens
ctattgaccaacaaa

SEQ ID NO: 51094 - DNA, 15 bp, Homo sapiens
tctattgaccaacaa

SEQ ID NO: 51095 - DNA, 15 bp, Homo sapiens
ctctattgaccaaca

SEQ ID NO: 51096 - DNA, 15 bp, Homo sapiens
cctctattgaccaac

SEQ ID NO: 51097 - DNA, 15 bp, Homo sapiens
aacctctattgacca

SEQ ID NO: 51098 - DNA, 15 bp, Homo sapiens
aaacctctattgacc

SEQ ID NO: 51099 - DNA, 15 bp, Homo sapiens
taaacctctattgac

SEQ ID NO: 51100 - DNA, 15 bp, Homo sapiens
ttaaacctctattga

SEQ ID NO: 51101 - DNA, 15 bp, Homo sapiens
tttaaacctctattg

SEQ ID NO: 51102 - DNA, 15 bp, Homo sapiens
ctttaaacctctatt

SEQ ID NO: 51103 - DNA, 15 bp, Homo sapiens
actttaaacctctat

SEQ ID NO: 51104 - DNA, 15 bp, Homo sapiens
cactttaaacctcta

SEQ ID NO: 51105 - DNA, 15 bp, Homo sapiens
tcactttaaacctct

SEQ ID NO: 51106 - DNA, 15 bp, Homo sapiens
atcactttaaacctc

SEQ ID NO: 51107 - DNA, 15 bp, Homo sapiens
catcactttaaacct

SEQ ID NO: 51108 - DNA, 15 bp, Homo sapiens
tcatcactttaaacc

SEQ ID NO: 51109 - DNA, 15 bp, Homo sapiens
ttcatcactttaaac

SEQ ID NO: 51110 - DNA, 15 bp, Homo sapiens
gttcatcactttaaa

SEQ ID NO: 51111 - DNA, 15 bp, Homo sapiens
agttcatcactttaa

SEQ ID NO: 51112 - DNA, 15 bp, Homo sapiens
aagttcatcacttta

SEQ ID NO: 51113 - DNA, 15 bp, Homo sapiens
gaagttcatcacttt

SEQ ID NO: 51114 - DNA, 15 bp, Homo sapiens
agaagttcatcactt

SEQ ID NO: 51115 - DNA, 15 bp, Homo sapiens
cagaagttcatcact

SEQ ID NO: 51116 - DNA, 15 bp, Homo sapiens
acagaagttcatcac

SEQ ID NO: 51117 - DNA, 15 bp, Homo sapiens
aacagaagttcatca

SEQ ID NO: 51118 - DNA, 15 bp, Homo sapiens
caacagaagttcatc

SEQ ID NO: 51119 - DNA, 15 bp, Homo sapiens
acaacagaagttcat

SEQ ID NO: 51120 - DNA, 15 bp, Homo sapiens
cacaacagaagttca

SEQ ID NO: 51121 - DNA, 15 bp, Homo sapiens
acacaacagaagttc

SEQ ID NO: 51122 - DNA, 15 bp, Homo sapiens
aacacaacagaagtt

SEQ ID NO: 51123 - DNA, 15 bp, Homo sapiens
aaacacaacagaagt

SEQ ID NO: 51124 - DNA, 15 bp, Homo sapiens
aaaacacaacagaag

SEQ ID NO: 51125 - DNA, 15 bp, Homo sapiens
aaaaacacaacagaa

SEQ ID NO: 51126 - DNA, 15 bp, Homo sapiens
aaaaaacacaacaga

SEQ ID NO: 51127 - DNA, 15 bp, Homo sapiens
aaaaaaacacaacag

SEQ ID NO: 51128 - DNA, 15 bp, Homo sapiens
taaaaaaacacaaca

SEQ ID NO: 51129 - DNA, 15 bp, Homo sapiens
ataaaaaaacacaac

SEQ ID NO: 51130 - DNA, 15 bp, Homo sapiens
aataaaaaaacacaa

SEQ ID NO: 51131 - DNA, 15 bp, Homo sapiens
taataaaaaaacaca

SEQ ID NO: 51132 - DNA, 15 bp, Homo sapiens
ttaataaaaaaacac

SEQ ID NO: 51133 - DNA, 15 bp, Homo sapiens
cttaataaaaaaaca

SEQ ID NO: 51134 - DNA, 15 bp, Homo sapiens
tcttaataaaaaaac

SEQ ID NO: 51135 - DNA, 15 bp, Homo sapiens
ttcttaataaaaaaa

SEQ ID NO: 51136 - DNA, 15 bp, Homo sapiens
cttcttaataaaaaa

SEQ ID NO: 51137 - DNA, 15 bp, Homo sapiens
ccttcttaataaaaa

SEQ ID NO: 51138 - DNA, 15 bp, Homo sapiens
accttcttaataaaa

SEQ ID NO: 51139 - DNA, 15 bp, Homo sapiens
taccttcttaataaa

SEQ ID NO: 51140 - DNA, 15 bp, Homo sapiens
ataccttcttaataa

SEQ ID NO: 51141 - DNA, 15 bp, Homo sapiens
aataccttcttaata

SEQ ID NO: 51142 - DNA, 15 bp, Homo sapiens
taataccttcttaat

SEQ ID NO: 51143 - DNA, 15 bp, Homo sapiens
ataataccttcttaa

SEQ ID NO: 51144 - DNA, 15 bp, Homo sapiens
gataataccttctta

SEQ ID NO: 51145 - DNA, 15 bp, Homo sapiens
agataataccttctt

SEQ ID NO: 51146 - DNA, 15 bp, Homo sapiens
aagataataccttct

SEQ ID NO: 51147 - DNA, 15 bp, Homo sapiens
taagataataccttc

SEQ ID NO: 51148 - DNA, 15 bp, Homo sapiens
ataagataatacctt

SEQ ID NO: 51149 - DNA, 15 bp, Homo sapiens
aataagataatacct

SEQ ID NO: 51150 - DNA, 15 bp, Homo sapiens
taataagataatacc

SEQ ID NO: 51151 - DNA, 15 bp, Homo sapiens
ctaataagataatac

SEQ ID NO: 51152 - DNA, 15 bp, Homo sapiens
actaataagataata

SEQ ID NO: 51153 - DNA, 15 bp, Homo sapiens
tactaataagataat

SEQ ID NO: 51154 - DNA, 15 bp, Homo sapiens
ttactaataagataa

SEQ ID NO: 51155 - DNA, 15 bp, Homo sapiens
cttactaataagata

SEQ ID NO: 51156 - DNA, 15 bp, Homo sapiens
tcttactaataagat

SEQ ID NO: 51157 - DNA, 15 bp, Homo sapiens
ttcttactaataaga

SEQ ID NO: 51158 - DNA, 15 bp, Homo sapiens
cttcttactaataag

SEQ ID NO: 51159 - DNA, 15 bp, Homo sapiens
acttcttactaataa

SEQ ID NO: 51160 - DNA, 15 bp, Homo sapiens
cacttcttactaata

SEQ ID NO: 51161 - DNA, 15 bp, Homo sapiens
tcacttcttactaat

SEQ ID NO: 51162 - DNA, 15 bp, Homo sapiens
atcacttcttactaa

SEQ ID NO: 51163 - DNA, 15 bp, Homo sapiens
aatcacttcttacta

SEQ ID NO: 51164 - DNA, 15 bp, Homo sapiens
aaatcacttcttact

SEQ ID NO: 51165 - DNA, 15 bp, Homo sapiens
aaaatcacttcttac

SEQ ID NO: 51166 - DNA, 15 bp, Homo sapiens
aaaaatcacttctta

SEQ ID NO: 51167 - DNA, 15 bp, Homo sapiens
aaaaaatcacttctt

SEQ ID NO: 51168 - DNA, 15 bp, Homo sapiens
aaaaaaatcacttct

SEQ ID NO: 51169 - DNA, 15 bp, Homo sapiens
aaaaaaaatcacttc

SEQ ID NO: 51170 - DNA, 15 bp, Homo sapiens
taaaaaaaatcactt

SEQ ID NO: 51171 - DNA, 15 bp, Homo sapiens
ttaaaaaaaatcact

SEQ ID NO: 51172 - DNA, 15 bp, Homo sapiens
cttaaaaaaaatcac

SEQ ID NO: 51173 - DNA, 15 bp, Homo sapiens
tcttaaaaaaaatca

SEQ ID NO: 51174 - DNA, 15 bp, Homo sapiens
ttcttaaaaaaaatc

SEQ ID NO: 51175 - DNA, 15 bp, Homo sapiens
gttcttaaaaaaaat

SEQ ID NO: 51176 - DNA, 15 bp, Homo sapiens
tgttcttaaaaaaaa

SEQ ID NO: 51177 - DNA, 15 bp, Homo sapiens
ttgttcttaaaaaaa

SEQ ID NO: 51178 - DNA, 15 bp, Homo sapiens
cttgttcttaaaaaa

SEQ ID NO: 51179 - DNA, 15 bp, Homo sapiens
gcttgttcttaaaaa

SEQ ID NO: 51180 - DNA, 15 bp, Homo sapiens
tgcttgttcttaaaa

SEQ ID NO: 51181 - DNA, 15 bp, Homo sapiens
atgcttgttcttaaa

SEQ ID NO: 51182 - DNA, 15 bp, Homo sapiens
aatgcttgttcttaa

SEQ ID NO: 51183 - DNA, 15 bp, Homo sapiens
aaatgcttgttctta

SEQ ID NO: 51184 - DNA, 15 bp, Homo sapiens
aaaatgcttgttctt

SEQ ID NO: 51185 - DNA, 15 bp, Homo sapiens
taaaatgcttgttct

SEQ ID NO: 51186 - DNA, 15 bp, Homo sapiens
ataaaatgcttgttc

SEQ ID NO: 51187 - DNA, 15 bp, Homo sapiens
tataaaatgcttgtt

SEQ ID NO: 51188 - DNA, 15 bp, Homo sapiens
ttataaaatgcttgt

SEQ ID NO: 51189 - DNA, 15 bp, Homo sapiens
gttataaaatgcttg

SEQ ID NO: 51190 - DNA, 15 bp, Homo sapiens
tgttataaaatgctt

SEQ ID NO: 51191 - DNA, 15 bp, Homo sapiens
atgttataaaatgct

SEQ ID NO: 51192 - DNA, 15 bp, Homo sapiens
gatgttataaaatgc

SEQ ID NO: 51193 - DNA, 15 bp, Homo sapiens
tgatgttataaaatg

SEQ ID NO: 51194 - DNA, 15 bp, Homo sapiens
ttgatgttataaaat

SEQ ID NO: 51195 - DNA, 15 bp, Homo sapiens
tttgatgttataaaa

SEQ ID NO: 51196 - DNA, 15 bp, Homo sapiens
ttttgatgttataaa

SEQ ID NO: 51197 - DNA, 15 bp, Homo sapiens
cttttgatgttataa

SEQ ID NO: 51198 - DNA, 15 bp, Homo sapiens
tcttttgatgttata

SEQ ID NO: 51199 - DNA, 15 bp, Homo sapiens
ttcttttgatgttat

SEQ ID NO: 51200 - DNA, 15 bp, Homo sapiens
tttcttttgatgtta

SEQ ID NO: 51201 - DNA, 15 bp, Homo sapiens
atttcttttgatgtt

SEQ ID NO: 51202 - DNA, 15 bp, Homo sapiens
gatttcttttgatgt

SEQ ID NO: 51203 - DNA, 15 bp, Homo sapiens
tgatttcttttgatg

SEQ ID NO: 51204 - DNA, 15 bp, Homo sapiens
ctgatttcttttgat

SEQ ID NO: 51205 - DNA, 15 bp, Homo sapiens
actgatttcttttga

SEQ ID NO: 51206 - DNA, 15 bp, Homo sapiens
tactgatttcttttg

SEQ ID NO: 51207 - DNA, 15 bp, Homo sapiens
ctactgatttctttt

SEQ ID NO: 51208 - DNA, 15 bp, Homo sapiens
actactgatttcttt

SEQ ID NO: 51209 - DNA, 15 bp, Homo sapiens
tactactgatttctt

SEQ ID NO: 51210 - DNA, 15 bp, Homo sapiens
gtactactgatttct

SEQ ID NO: 51211 - DNA, 15 bp, Homo sapiens
agtactactgatttc

SEQ ID NO: 51212 - DNA, 15 bp, Homo sapiens
gagtactactgattt

SEQ ID NO: 51213 - DNA, 15 bp, Homo sapiens
agagtactactgatt

SEQ ID NO: 51214 - DNA, 15 bp, Homo sapiens
aagagtactactgat

SEQ ID NO: 51215 - DNA, 15 bp, Homo sapiens
aaagagtactactga

SEQ ID NO: 51216 - DNA, 15 bp, Homo sapiens
gaaagagtactactg

SEQ ID NO: 51217 - DNA, 15 bp, Homo sapiens
ggaaagagtactact

SEQ ID NO: 51218 - DNA, 15 bp, Homo sapiens
aggaaagagtactac

SEQ ID NO: 51219 - DNA, 15 bp, Homo sapiens
taggaaagagtacta

SEQ ID NO: 51220 - DNA, 15 bp, Homo sapiens
gtaggaaagagtact

SEQ ID NO: 51221 - DNA, 15 bp, Homo sapiens
ggtaggaaagagtac

SEQ ID NO: 51222 - DNA, 15 bp, Homo sapiens
gggtaggaaagagta

SEQ ID NO: 51223 - DNA, 15 bp, Homo sapiens
ggggtaggaaagagt

SEQ ID NO: 51224 - DNA, 15 bp, Homo sapiens
gggggtaggaaagag

SEQ ID NO: 51225 - DNA, 15 bp, Homo sapiens
agggggtaggaaaga

SEQ ID NO: 51226 - DNA, 15 bp, Homo sapiens
gagggggtaggaaag

SEQ ID NO: 51227 - DNA, 15 bp, Homo sapiens
tgagggggtaggaaa

SEQ ID NO: 51228 - DNA, 15 bp, Homo sapiens
atgagggggtaggaa

SEQ ID NO: 51229 - DNA, 15 bp, Homo sapiens
tatgagggggtagga

SEQ ID NO: 51230 - DNA, 15 bp, Homo sapiens
atatgagggggtagg

SEQ ID NO: 51231 - DNA, 15 bp, Homo sapiens
aatatgagggggtag

SEQ ID NO: 51232 - DNA, 15 bp, Homo sapiens
aaatatgagggggta

SEQ ID NO: 51233 - DNA, 15 bp, Homo sapiens
taaatatgagggggt

SEQ ID NO: 51234 - DNA, 15 bp, Homo sapiens
ataaatatgaggggg

SEQ ID NO: 51235 - DNA, 15 bp, Homo sapiens
aataaatatgagggg

SEQ ID NO: 51236 - DNA, 15 bp, Homo sapiens
gaataaatatgaggg

SEQ ID NO: 51237 - DNA, 15 bp, Homo sapiens
agaataaatatgagg

SEQ ID NO: 51238 - DNA, 15 bp, Homo sapiens
cagaataaatatgag

SEQ ID NO: 51239 - DNA, 15 bp, Homo sapiens
tcagaataaatatga

SEQ ID NO: 51240 - DNA, 15 bp, Homo sapiens
ttcagaataaatatg

SEQ ID NO: 51241 - DNA, 15 bp, Homo sapiens
tttcagaataaatat

SEQ ID NO: 51242 - DNA, 15 bp, Homo sapiens
ctttcagaataaata

SEQ ID NO: 51243 - DNA, 15 bp, Homo sapiens
actttcagaataaat

SEQ ID NO: 51244 - DNA, 15 bp, Homo sapiens
tactttcagaataaa

SEQ ID NO: 51245 - DNA, 15 bp, Homo sapiens
atactttcagaataa

SEQ ID NO: 51246 - DNA, 15 bp, Homo sapiens
aatactttcagaata

SEQ ID NO: 51247 - DNA, 15 bp, Homo sapiens
gaatactttcagaat

SEQ ID NO: 51248 - DNA, 15 bp, Homo sapiens
tgaatactttcagaa

SEQ ID NO: 51249 - DNA, 15 bp, Homo sapiens
ttgaatactttcaga

SEQ ID NO: 51250 - DNA, 15 bp, Homo sapiens
cttgaatactttcag

SEQ ID NO: 51251 - DNA, 15 bp, Homo sapiens
gcttgaatactttca

SEQ ID NO: 51252 - DNA, 15 bp, Homo sapiens
tgcttgaatactttc

SEQ ID NO: 51253 - DNA, 15 bp, Homo sapiens
atgcttgaatacttt

SEQ ID NO: 51254 - DNA, 15 bp, Homo sapiens
aatgcttgaatactt

SEQ ID NO: 51255 - DNA, 15 bp, Homo sapiens
taatgcttgaatact

SEQ ID NO: 51256 - DNA, 15 bp, Homo sapiens
ataatgcttgaatac

SEQ ID NO: 51257 - DNA, 15 bp, Homo sapiens
tataatgcttgaata

SEQ ID NO: 51258 - DNA, 15 bp, Homo sapiens
atataatgcttgaat

SEQ ID NO: 51259 - DNA, 15 bp, Homo sapiens
aatataatgcttgaa

SEQ ID NO: 51260 - DNA, 15 bp, Homo sapiens
caatataatgcttga

SEQ ID NO: 51261 - DNA, 15 bp, Homo sapiens
acaatataatgcttg

SEQ ID NO: 51262 - DNA, 15 bp, Homo sapiens
gacaatataatgctt

SEQ ID NO: 51263 - DNA, 15 bp, Homo sapiens
tgacaatataatgct

SEQ ID NO: 51264 - DNA, 15 bp, Homo sapiens
atgacaatataatgc

SEQ ID NO: 51265 - DNA, 15 bp, Homo sapiens
catgacaatataatg

SEQ ID NO: 51266 - DNA, 15 bp, Homo sapiens
acatgacaatataat

SEQ ID NO: 51267 - DNA, 15 bp, Homo sapiens
tacatgacaatataa

SEQ ID NO: 51268 - DNA, 15 bp, Homo sapiens
ttacatgacaatata

SEQ ID NO: 51269 - DNA, 15 bp, Homo sapiens
cttacatgacaatat

SEQ ID NO: 51270 - DNA, 15 bp, Homo sapiens
tcttacatgacaata

SEQ ID NO: 51271 - DNA, 15 bp, Homo sapiens
ttcttacatgacaat

SEQ ID NO: 51272 - DNA, 15 bp, Homo sapiens
tttcttacatgacaa

SEQ ID NO: 51273 - DNA, 15 bp, Homo sapiens
gtttcttacatgaca

SEQ ID NO: 51274 - DNA, 15 bp, Homo sapiens
agtttcttacatgac

SEQ ID NO: 51275 - DNA, 15 bp, Homo sapiens
cagtttcttacatga

SEQ ID NO: 51276 - DNA, 15 bp, Homo sapiens
ccagtttcttacatg

SEQ ID NO: 51277 - DNA, 15 bp, Homo sapiens
tccagtttcttacat

SEQ ID NO: 51278 - DNA, 15 bp, Homo sapiens
ctccagtttcttaca

SEQ ID NO: 51279 - DNA, 15 bp, Homo sapiens
gctccagtttcttac

SEQ ID NO: 51280 - DNA, 15 bp, Homo sapiens
agctccagtttctta

SEQ ID NO: 51281 - DNA, 15 bp, Homo sapiens
aagctccagtttctt

SEQ ID NO: 51282 - DNA, 15 bp, Homo sapiens
gaagctccagtttct

SEQ ID NO: 51283 - DNA, 15 bp, Homo sapiens
agaagctccagtttc

SEQ ID NO: 51284 - DNA, 15 bp, Homo sapiens
gagaagctccagttt

SEQ ID NO: 51285 - DNA, 15 bp, Homo sapiens
tgagaagctccagtt

SEQ ID NO: 51286 - DNA, 15 bp, Homo sapiens
atgagaagctccagt

SEQ ID NO: 51287 - DNA, 15 bp, Homo sapiens
catgagaagctccag

SEQ ID NO: 51288 - DNA, 15 bp, Homo sapiens
acatgagaagctcca

SEQ ID NO: 51289 - DNA, 15 bp, Homo sapiens
aacatgagaagctcc

SEQ ID NO: 51290 - DNA, 15 bp, Homo sapiens
aaacatgagaagctc

SEQ ID NO: 51291 - DNA, 15 bp, Homo sapiens
caaacatgagaagct

SEQ ID NO: 51292 - DNA, 15 bp, Homo sapiens
acaaacatgagaagc

SEQ ID NO: 51293 - DNA, 15 bp, Homo sapiens
tacaaacatgagaag

SEQ ID NO: 51294 - DNA, 15 bp, Homo sapiens
atacaaacatgagaa

SEQ ID NO: 51295 - DNA, 15 bp, Homo sapiens
aatacaaacatgaga

SEQ ID NO: 51296 - DNA, 15 bp, Homo sapiens
caatacaaacatgag

SEQ ID NO: 51297 - DNA, 15 bp, Homo sapiens
gcaatacaaacatga

SEQ ID NO: 51298 - DNA, 15 bp, Homo sapiens
agcaatacaaacatg

SEQ ID NO: 51299 - DNA, 15 bp, Homo sapiens
cagcaatacaaacat

SEQ ID NO: 51300 - DNA, 15 bp, Homo sapiens
acagcaatacaaaca

SEQ ID NO: 51301 - DNA, 15 bp, Homo sapiens
tacagcaatacaaac

SEQ ID NO: 51302 - DNA, 15 bp, Homo sapiens
ctacagcaatacaaa

SEQ ID NO: 51303 - DNA, 15 bp, Homo sapiens
tctacagcaatacaa

SEQ ID NO: 51304 - DNA, 15 bp, Homo sapiens
ttctacagcaataca

SEQ ID NO: 51305 - DNA, 15 bp, Homo sapiens
cttctacagcaatac

SEQ ID NO: 51306 - DNA, 15 bp, Homo sapiens
acttctacagcaata

SEQ ID NO: 51307 - DNA, 15 bp, Homo sapiens
tacttctacagcaat

SEQ ID NO: 51308 - DNA, 15 bp, Homo sapiens
ttacttctacagcaa

SEQ ID NO: 51309 - DNA, 15 bp, Homo sapiens
tttacttctacagca

SEQ ID NO: 51310 - DNA, 15 bp, Homo sapiens
gtttacttctacagc

SEQ ID NO: 51311 - DNA, 15 bp, Homo sapiens
tgtttacttctacag

SEQ ID NO: 51312 - DNA, 15 bp, Homo sapiens
atgtttacttctaca

SEQ ID NO: 51313 - DNA, 15 bp, Homo sapiens
catgtttacttctac

SEQ ID NO: 51314 - DNA, 15 bp, Homo sapiens
acatgtttacttcta

SEQ ID NO: 51315 - DNA, 15 bp, Homo sapiens
tacatgtttacttct

SEQ ID NO: 51316 - DNA, 15 bp, Homo sapiens
atacatgtttacttc

SEQ ID NO: 51317 - DNA, 15 bp, Homo sapiens
aatacatgtttactt

SEQ ID NO: 51318 - DNA, 15 bp, Homo sapiens
aaatacatgtttact

SEQ ID NO: 51319 - DNA, 15 bp, Homo sapiens
caaatacatgtttac

SEQ ID NO: 51320 - DNA, 15 bp, Homo sapiens
gcaaatacatgttta

SEQ ID NO: 51321 - DNA, 15 bp, Homo sapiens
ggcaaatacatgttt

SEQ ID NO: 51322 - DNA, 15 bp, Homo sapiens
tggcaaatacatgtt

SEQ ID NO: 51323 - DNA, 15 bp, Homo sapiens
atggcaaatacatgt

SEQ ID NO: 51324 - DNA, 15 bp, Homo sapiens
catggcaaatacatg

SEQ ID NO: 51325 - DNA, 15 bp, Homo sapiens
gcatggcaaatacat

SEQ ID NO: 51326 - DNA, 15 bp, Homo sapiens
cgcatggcaaataca

SEQ ID NO: 51327 - DNA, 15 bp, Homo sapiens
acgcatggcaaatac

SEQ ID NO: 51328 - DNA, 15 bp, Homo sapiens
gacgcatggcaaata

SEQ ID NO: 51329 - DNA, 15 bp, Homo sapiens
tgacgcatggcaaat

SEQ ID NO: 51330 - DNA, 15 bp, Homo sapiens
atgacgcatggcaaa

SEQ ID NO: 51331 - DNA, 15 bp, Homo sapiens
gatgacgcatggcaa

SEQ ID NO: 51332 - DNA, 15 bp, Homo sapiens
tgatgacgcatggca

SEQ ID NO: 51333 - DNA, 15 bp, Homo sapiens
ctgatgacgcatggc

SEQ ID NO: 51334 - DNA, 15 bp, Homo sapiens
cctgatgacgcatgg

SEQ ID NO: 51335 - DNA, 15 bp, Homo sapiens
ccctgatgacgcatg

SEQ ID NO: 51336 - DNA, 15 bp, Homo sapiens
tccctgatgacgcat

SEQ ID NO: 51337 - DNA, 15 bp, Homo sapiens
ttccctgatgacgca

SEQ ID NO: 51338 - DNA, 15 bp, Homo sapiens
cttccctgatgacgc

SEQ ID NO: 51339 - DNA, 15 bp, Homo sapiens
acttccctgatgacg

SEQ ID NO: 51340 - DNA, 15 bp, Homo sapiens
aacttccctgatgac

SEQ ID NO: 51341 - DNA, 15 bp, Homo sapiens
caacttccctgatga

SEQ ID NO: 51342 - DNA, 15 bp, Homo sapiens
gcaacttccctgatg

SEQ ID NO: 51343 - DNA, 15 bp, Homo sapiens
tgcaacttccctgat

SEQ ID NO: 51344 - DNA, 15 bp, Homo sapiens
gtgcaacttccctga

SEQ ID NO: 51345 - DNA, 15 bp, Homo sapiens
agtgcaacttccctg

SEQ ID NO: 51346 - DNA, 15 bp, Homo sapiens
gagtgcaacttccct

SEQ ID NO: 51347 - DNA, 15 bp, Homo sapiens
tgagtgcaacttccc

SEQ ID NO: 51348 - DNA, 15 bp, Homo sapiens
gtgagtgcaacttcc

SEQ ID NO: 51349 - DNA, 15 bp, Homo sapiens
ggtgagtgcaacttc

SEQ ID NO: 51350 - DNA, 15 bp, Homo sapiens
cggtgagtgcaactt

SEQ ID NO: 51351 - DNA, 15 bp, Homo sapiens
acggtgagtgcaact

SEQ ID NO: 51352 - DNA, 15 bp, Homo sapiens
gacggtgagtgcaac

SEQ ID NO: 51353 - DNA, 15 bp, Homo sapiens
ggacggtgagtgcaa

SEQ ID NO: 51354 - DNA, 15 bp, Homo sapiens
tggacggtgagtgca

SEQ ID NO: 51355 - DNA, 15 bp, Homo sapiens
ttggacggtgagtgc

SEQ ID NO: 51356 - DNA, 15 bp, Homo sapiens
cttggacggtgagtg

SEQ ID NO: 51357 - DNA, 15 bp, Homo sapiens
tcttggacggtgagt

SEQ ID NO: 51358 - DNA, 15 bp, Homo sapiens
ttcttggacggtgag

SEQ ID NO: 51359 - DNA, 15 bp, Homo sapiens
gttcttggacggtga

SEQ ID NO: 51360 - DNA, 15 bp, Homo sapiens
agttcttggacggtg

SEQ ID NO: 51361 - DNA, 15 bp, Homo sapiens
aagttcttggacggt

SEQ ID NO: 51362 - DNA, 15 bp, Homo sapiens
aaagttcttggacgg

SEQ ID NO: 51363 - DNA, 15 bp, Homo sapiens
aaaagttcttggacg

SEQ ID NO: 51364 - DNA, 15 bp, Homo sapiens
caaaagttcttggac

SEQ ID NO: 51365 - DNA, 15 bp, Homo sapiens
acaaaagttcttgga

SEQ ID NO: 51366 - DNA, 15 bp, Homo sapiens
aacaaaagttcttgg

SEQ ID NO: 51367 - DNA, 15 bp, Homo sapiens
taacaaaagttcttg

SEQ ID NO: 51368 - DNA, 15 bp, Homo sapiens
ttaacaaaagttctt

SEQ ID NO: 51369 - DNA, 15 bp, Homo sapiens
tttaacaaaagttct

SEQ ID NO: 51370 - DNA, 15 bp, Homo sapiens
ctttaacaaaagttc

SEQ ID NO: 51371 - DNA, 15 bp, Homo sapiens
actttaacaaaagtt

SEQ ID NO: 51372 - DNA, 15 bp, Homo sapiens
tactttaacaaaagt

SEQ ID NO: 51373 - DNA, 15 bp, Homo sapiens
ttactttaacaaaag

SEQ ID NO: 51374 - DNA, 15 bp, Homo sapiens
tttactttaacaaaa

SEQ ID NO: 51375 - DNA, 15 bp, Homo sapiens
atttactttaacaaa

SEQ ID NO: 51376 - DNA, 15 bp, Homo sapiens
gatttactttaacaa

SEQ ID NO: 51377 - DNA, 15 bp, Homo sapiens
agatttactttaaca

SEQ ID NO: 51378 - DNA, 15 bp, Homo sapiens
aagatttactttaac

SEQ ID NO: 51379 - DNA, 15 bp, Homo sapiens
caagatttactttaa

SEQ ID NO: 51380 - DNA, 15 bp, Homo sapiens
ccaagatttacttta

SEQ ID NO: 51381 - DNA, 15 bp, Homo sapiens
tccaagatttacttt

SEQ ID NO: 51382 - DNA, 15 bp, Homo sapiens
ttccaagatttactt

SEQ ID NO: 51383 - DNA, 15 bp, Homo sapiens
attccaagatttact

SEQ ID NO: 51384 - DNA, 15 bp, Homo sapiens
tattccaagatttac

SEQ ID NO: 51385 - DNA, 15 bp, Homo sapiens
ctattccaagattta

SEQ ID NO: 51386 - DNA, 15 bp, Homo sapiens
cctattccaagattt

SEQ ID NO: 51387 - DNA, 15 bp, Homo sapiens
acctattccaagatt

SEQ ID NO: 51388 - DNA, 15 bp, Homo sapiens
tacctattccaagat

SEQ ID NO: 51389 - DNA, 15 bp, Homo sapiens
ctacctattccaaga

SEQ ID NO: 51390 - DNA, 15 bp, Homo sapiens
gctacctattccaag

SEQ ID NO: 51391 - DNA, 15 bp, Homo sapiens
agctacctattccaa

SEQ ID NO: 51392 - DNA, 15 bp, Homo sapiens
gagctacctattcca

SEQ ID NO: 51393 - DNA, 15 bp, Homo sapiens
tgagctacctattcc

SEQ ID NO: 51394 - DNA, 15 bp, Homo sapiens
atgagctacctattc

SEQ ID NO: 51395 - DNA, 15 bp, Homo sapiens
aatgagctacctatt

SEQ ID NO: 51396 - DNA, 15 bp, Homo sapiens
aaatgagctacctat

SEQ ID NO: 51397 - DNA, 15 bp, Homo sapiens
caaatgagctaccta

SEQ ID NO: 51398 - DNA, 15 bp, Homo sapiens
tcaaatgagctacct

SEQ ID NO: 51399 - DNA, 15 bp, Homo sapiens
ttcaaatgagctacc

SEQ ID NO: 51400 - DNA, 15 bp, Homo sapiens
tttcaaatgagctac

SEQ ID NO: 51401 - DNA, 15 bp, Homo sapiens
atttcaaatgagcta

SEQ ID NO: 51402 - DNA, 15 bp, Homo sapiens
catttcaaatgagct

SEQ ID NO: 51403 - DNA, 15 bp, Homo sapiens
acatttcaaatgagc

SEQ ID NO: 51404 - DNA, 15 bp, Homo sapiens
tacatttcaaatgag

SEQ ID NO: 51405 - DNA, 15 bp, Homo sapiens
ctacatttcaaatga

SEQ ID NO: 51406 - DNA, 15 bp, Homo sapiens
tctacatttcaaatg

SEQ ID NO: 51407 - DNA, 15 bp, Homo sapiens
ttctacatttcaaat

SEQ ID NO: 51408 - DNA, 15 bp, Homo sapiens
tttctacatttcaaa

SEQ ID NO: 51409 - DNA, 15 bp, Homo sapiens
ttttctacatttcaa

SEQ ID NO: 51410 - DNA, 15 bp, Homo sapiens
tttttctacatttca

SEQ ID NO: 51411 - DNA, 15 bp, Homo sapiens
ttttttctacatttc

SEQ ID NO: 51412 - DNA, 15 bp, Homo sapiens
attttttctacattt

SEQ ID NO: 51413 - DNA, 15 bp, Homo sapiens
aattttttctacatt

SEQ ID NO: 51414 - DNA, 15 bp, Homo sapiens
taattttttctacat

SEQ ID NO: 51415 - DNA, 15 bp, Homo sapiens
ttaattttttctaca

SEQ ID NO: 51416 - DNA, 15 bp, Homo sapiens
tttaattttttctac

SEQ ID NO: 51417 - DNA, 15 bp, Homo sapiens
atttaattttttcta

SEQ ID NO: 51418 - DNA, 15 bp, Homo sapiens
gatttaattttttct

SEQ ID NO: 51419 - DNA, 15 bp, Homo sapiens
ggatttaattttttc

SEQ ID NO: 51420 - DNA, 15 bp, Homo sapiens
tggatttaatttttt

SEQ ID NO: 51421 - DNA, 15 bp, Homo sapiens
atggatttaattttt

SEQ ID NO: 51422 - DNA, 15 bp, Homo sapiens
tatggatttaatttt

SEQ ID NO: 51423 - DNA, 15 bp, Homo sapiens
atatggatttaattt

SEQ ID NO: 51424 - DNA, 15 bp, Homo sapiens
gatatggatttaatt

SEQ ID NO: 51425 - DNA, 15 bp, Homo sapiens
agatatggatttaat

SEQ ID NO: 51426 - DNA, 15 bp, Homo sapiens
cagatatggatttaa

SEQ ID NO: 51427 - DNA, 15 bp, Homo sapiens
tcagatatggattta

SEQ ID NO: 51428 - DNA, 15 bp, Homo sapiens
ttcagatatggattt

SEQ ID NO: 51429 - DNA, 15 bp, Homo sapiens
attcagatatggatt

SEQ ID NO: 51430 - DNA, 15 bp, Homo sapiens
aattcagatatggat

SEQ ID NO: 51431 - DNA, 15 bp, Homo sapiens
aaattcagatatgga

SEQ ID NO: 51432 - DNA, 15 bp, Homo sapiens
aaaattcagatatgg

SEQ ID NO: 51433 - DNA, 15 bp, Homo sapiens
caaaattcagatatg

SEQ ID NO: 51434 - DNA, 15 bp, Homo sapiens
acaaaattcagatat

SEQ ID NO: 51435 - DNA, 15 bp, Homo sapiens
aacaaaattcagata

SEQ ID NO: 51436 - DNA, 15 bp, Homo sapiens
aaacaaaattcagat

SEQ ID NO: 51437 - DNA, 15 bp, Homo sapiens
taaacaaaattcaga

SEQ ID NO: 51438 - DNA, 15 bp, Homo sapiens
ataaacaaaattcag

SEQ ID NO: 51439 - DNA, 15 bp, Homo sapiens
tataaacaaaattca

SEQ ID NO: 51440 - DNA, 15 bp, Homo sapiens
atataaacaaaattc

SEQ ID NO: 51441 - DNA, 15 bp, Homo sapiens
catataaacaaaatt

SEQ ID NO: 51442 - DNA, 15 bp, Homo sapiens
acatataaacaaaat

SEQ ID NO: 51443 - DNA, 15 bp, Homo sapiens
tacatataaacaaaa

SEQ ID NO: 51444 - DNA, 15 bp, Homo sapiens
atacatataaacaaa

SEQ ID NO: 51445 - DNA, 15 bp, Homo sapiens
catacatataaacaa

SEQ ID NO: 51446 - DNA, 15 bp, Homo sapiens
acatacatataaaca

SEQ ID NO: 51447 - DNA, 15 bp, Homo sapiens
tacatacatataaac

SEQ ID NO: 51448 - DNA, 15 bp, Homo sapiens
gtacatacatataaa

SEQ ID NO: 51449 - DNA, 15 bp, Homo sapiens
tgtacatacatataa

SEQ ID NO: 51450 - DNA, 15 bp, Homo sapiens
gtgtacatacatata

SEQ ID NO: 51451 - DNA, 15 bp, Homo sapiens
cgtgtacatacatat

SEQ ID NO: 51452 - DNA, 15 bp, Homo sapiens
acgtgtacatacata

SEQ ID NO: 51453 - DNA, 15 bp, Homo sapiens
tacgtgtacatacat

SEQ ID NO: 51454 - DNA, 15 bp, Homo sapiens
ttacgtgtacataca

SEQ ID NO: 51455 - DNA, 15 bp, Homo sapiens
tttacgtgtacatac

SEQ ID NO: 51456 - DNA, 15 bp, Homo sapiens
gtttacgtgtacata

SEQ ID NO: 51457 - DNA, 15 bp, Homo sapiens
agtttacgtgtacat

SEQ ID NO: 51458 - DNA, 15 bp, Homo sapiens
tagtttacgtgtaca

SEQ ID NO: 51459 - DNA, 15 bp, Homo sapiens
ttagtttacgtgtac

SEQ ID NO: 51460 - DNA, 15 bp, Homo sapiens
tttagtttacgtgta

SEQ ID NO: 51461 - DNA, 15 bp, Homo sapiens
ttttagtttacgtgt

SEQ ID NO: 51462 - DNA, 15 bp, Homo sapiens
tttttagtttacgtg

SEQ ID NO: 51463 - DNA, 15 bp, Homo sapiens
gtttttagtttacgt

SEQ ID NO: 51464 - DNA, 15 bp, Homo sapiens
cgtttttagtttacg

SEQ ID NO: 51465 - DNA, 15 bp, Homo sapiens
acgtttttagtttac

SEQ ID NO: 51466 - DNA, 15 bp, Homo sapiens
tacgtttttagttta

SEQ ID NO: 51467 - DNA, 15 bp, Homo sapiens
atacgtttttagttt

SEQ ID NO: 51468 - DNA, 15 bp, Homo sapiens
aatacgtttttagtt

SEQ ID NO: 51469 - DNA, 15 bp, Homo sapiens
aaatacgtttttagt

SEQ ID NO: 51470 - DNA, 15 bp, Homo sapiens
taaatacgtttttag

SEQ ID NO: 51471 - DNA, 15 bp, Homo sapiens
ttaaatacgttttta

SEQ ID NO: 51472 - DNA, 15 bp, Homo sapiens
tttaaatacgttttt

SEQ ID NO: 51473 - DNA, 15 bp, Homo sapiens
ctttaaatacgtttt

SEQ ID NO: 51474 - DNA, 15 bp, Homo sapiens
gctttaaatacgttt

SEQ ID NO: 51475 - DNA, 15 bp, Homo sapiens
agctttaaatacgtt

SEQ ID NO: 51476 - DNA, 15 bp, Homo sapiens
tagctttaaatacgt

SEQ ID NO: 51477 - DNA, 15 bp, Homo sapiens
ctagctttaaatacg

SEQ ID NO: 51478 - DNA, 15 bp, Homo sapiens
actagctttaaatac

SEQ ID NO: 51479 - DNA, 15 bp, Homo sapiens
tactagctttaaata

SEQ ID NO: 51480 - DNA, 15 bp, Homo sapiens
atactagctttaaat

SEQ ID NO: 51481 - DNA, 15 bp, Homo sapiens
aatactagctttaaa

SEQ ID NO: 51482 - DNA, 15 bp, Homo sapiens
taatactagctttaa

SEQ ID NO: 51483 - DNA, 15 bp, Homo sapiens
ctaatactagcttta

SEQ ID NO: 51484 - DNA, 15 bp, Homo sapiens
tctaatactagcttt

SEQ ID NO: 51485 - DNA, 15 bp, Homo sapiens
atctaatactagctt

SEQ ID NO: 51486 - DNA, 15 bp, Homo sapiens
catctaatactagct

SEQ ID NO: 51487 - DNA, 15 bp, Homo sapiens
tcatctaatactagc

SEQ ID NO: 51488 - DNA, 15 bp, Homo sapiens
ctcatctaatactag

SEQ ID NO: 51489 - DNA, 15 bp, Homo sapiens
tctcatctaatacta

SEQ ID NO: 51490 - DNA, 15 bp, Homo sapiens
ttctcatctaatact

SEQ ID NO: 51491 - DNA, 15 bp, Homo sapiens
tttctcatctaatac

SEQ ID NO: 51492 - DNA, 15 bp, Homo sapiens
ttttctcatctaata

SEQ ID NO: 51493 - DNA, 15 bp, Homo sapiens
cttttctcatctaat

SEQ ID NO: 51494 - DNA, 15 bp, Homo sapiens
tcttttctcatctaa

SEQ ID NO: 51495 - DNA, 15 bp, Homo sapiens
ctcttttctcatcta

SEQ ID NO: 51496 - DNA, 15 bp, Homo sapiens
cctcttttctcatct

SEQ ID NO: 51497 - DNA, 15 bp, Homo sapiens
acctcttttctcatc

SEQ ID NO: 51498 - DNA, 15 bp, Homo sapiens
aacctcttttctcat

SEQ ID NO: 51499 - DNA, 15 bp, Homo sapiens
aaacctcttttctca

SEQ ID NO: 51500 - DNA, 15 bp, Homo sapiens
aaaacctcttttctc

SEQ ID NO: 51501 - DNA, 15 bp, Homo sapiens
aaaaacctcttttct

SEQ ID NO: 51502 - DNA, 15 bp, Homo sapiens
aaaaaacctcttttc

SEQ ID NO: 51503 - DNA, 15 bp, Homo sapiens
aaaaaaacctctttt

SEQ ID NO: 51504 - DNA, 15 bp, Homo sapiens
taaaaaaacctcttt

SEQ ID NO: 51505 - DNA, 15 bp, Homo sapiens
gtaaaaaaacctctt

SEQ ID NO: 51506 - DNA, 15 bp, Homo sapiens
agtaaaaaaacctct

SEQ ID NO: 51507 - DNA, 15 bp, Homo sapiens
aagtaaaaaaacctc

SEQ ID NO: 51508 - DNA, 15 bp, Homo sapiens
taagtaaaaaaacct

SEQ ID NO: 51509 - DNA, 15 bp, Homo sapiens
ttaagtaaaaaaacc

SEQ ID NO: 51510 - DNA, 15 bp, Homo sapiens
tttaagtaaaaaaac

SEQ ID NO: 51511 - DNA, 15 bp, Homo sapiens
ttttaagtaaaaaaa

SEQ ID NO: 51512 - DNA, 15 bp, Homo sapiens
attttaagtaaaaaa

SEQ ID NO: 51513 - DNA, 15 bp, Homo sapiens
aattttaagtaaaaa

SEQ ID NO: 51514 - DNA, 15 bp, Homo sapiens
aaattttaagtaaaa

SEQ ID NO: 51515 - DNA, 15 bp, Homo sapiens
aaaattttaagtaaa

SEQ ID NO: 51516 - DNA, 15 bp, Homo sapiens
taaaattttaagtaa

SEQ ID NO: 51517 - DNA, 15 bp, Homo sapiens
ttaaaattttaagta

SEQ ID NO: 51518 - DNA, 15 bp, Homo sapiens
cttaaaattttaagt

SEQ ID NO: 51519 - DNA, 15 bp, Homo sapiens
ccttaaaattttaag

SEQ ID NO: 51520 - DNA, 15 bp, Homo sapiens
gccttaaaattttaa

SEQ ID NO: 51521 - DNA, 15 bp, Homo sapiens
tgccttaaaatttta

SEQ ID NO: 51522 - DNA, 15 bp, Homo sapiens
ttgccttaaaatttt

SEQ ID NO: 51523 - DNA, 15 bp, Homo sapiens
tttgccttaaaattt

SEQ ID NO: 51524 - DNA, 15 bp, Homo sapiens
ttttgccttaaaatt

SEQ ID NO: 51525 - DNA, 15 bp, Homo sapiens
cttttgccttaaaat

SEQ ID NO: 51526 - DNA, 15 bp, Homo sapiens
acttttgccttaaaa

SEQ ID NO: 51527 - DNA, 15 bp, Homo sapiens
tacttttgccttaaa

SEQ ID NO: 51528 - DNA, 15 bp, Homo sapiens
ctacttttgccttaa

SEQ ID NO: 51529 - DNA, 15 bp, Homo sapiens
actacttttgcctta

SEQ ID NO: 51530 - DNA, 15 bp, Homo sapiens
aactacttttgcctt

SEQ ID NO: 51531 - DNA, 15 bp, Homo sapiens
aaactacttttgcct

SEQ ID NO: 51532 - DNA, 15 bp, Homo sapiens
taaactacttttgcc

SEQ ID NO: 51533 - DNA, 15 bp, Homo sapiens
ataaactacttttgc

SEQ ID NO: 51534 - DNA, 15 bp, Homo sapiens
gataaactacttttg

SEQ ID NO: 51535 - DNA, 15 bp, Homo sapiens
agataaactactttt

SEQ ID NO: 51536 - DNA, 15 bp, Homo sapiens
aagataaactacttt

SEQ ID NO: 51537 - DNA, 15 bp, Homo sapiens
taagataaactactt

SEQ ID NO: 51538 - DNA, 15 bp, Homo sapiens
ctaagataaactact

SEQ ID NO: 51539 - DNA, 15 bp, Homo sapiens
tctaagataaactac

SEQ ID NO: 51540 - DNA, 15 bp, Homo sapiens
atctaagataaacta

SEQ ID NO: 51541 - DNA, 15 bp, Homo sapiens
gatctaagataaact

SEQ ID NO: 51542 - DNA, 15 bp, Homo sapiens
agatctaagataaac

SEQ ID NO: 51543 - DNA, 15 bp, Homo sapiens
aagatctaagataaa

SEQ ID NO: 51544 - DNA, 15 bp, Homo sapiens
caagatctaagataa

SEQ ID NO: 51545 - DNA, 15 bp, Homo sapiens
acaagatctaagata

SEQ ID NO: 51546 - DNA, 15 bp, Homo sapiens
cacaagatctaagat

SEQ ID NO: 51547 - DNA, 15 bp, Homo sapiens
tcacaagatctaaga

SEQ ID NO: 51548 - DNA, 15 bp, Homo sapiens
ctcacaagatctaag

SEQ ID NO: 51549 - DNA, 15 bp, Homo sapiens
tctcacaagatctaa

SEQ ID NO: 51550 - DNA, 15 bp, Homo sapiens
atctcacaagatcta

SEQ ID NO: 51551 - DNA, 15 bp, Homo sapiens
aatctcacaagatct

SEQ ID NO: 51552 - DNA, 15 bp, Homo sapiens
caatctcacaagatc

SEQ ID NO: 51553 - DNA, 15 bp, Homo sapiens
acaatctcacaagat

SEQ ID NO: 51554 - DNA, 15 bp, Homo sapiens
tacaatctcacaaga

SEQ ID NO: 51555 - DNA, 15 bp, Homo sapiens
atacaatctcacaag

SEQ ID NO: 51556 - DNA, 15 bp, Homo sapiens
aatacaatctcacaa

SEQ ID NO: 51557 - DNA, 15 bp, Homo sapiens
aaatacaatctcaca

SEQ ID NO: 51558 - DNA, 15 bp, Homo sapiens
aaaatacaatctcac

SEQ ID NO: 51559 - DNA, 15 bp, Homo sapiens
aaaaatacaatctca

SEQ ID NO: 51560 - DNA, 15 bp, Homo sapiens
caaaaatacaatctc

SEQ ID NO: 51561 - DNA, 15 bp, Homo sapiens
ccaaaaatacaatct

SEQ ID NO: 51562 - DNA, 15 bp, Homo sapiens
accaaaaatacaatc

SEQ ID NO: 51563 - DNA, 15 bp, Homo sapiens
aaccaaaaatacaat

SEQ ID NO: 51564 - DNA, 15 bp, Homo sapiens
aaaccaaaaatacaa

SEQ ID NO: 51565 - DNA, 15 bp, Homo sapiens
taaaccaaaaataca

SEQ ID NO: 51566 - DNA, 15 bp, Homo sapiens
ttaaaccaaaaatac

SEQ ID NO: 51567 - DNA, 15 bp, Homo sapiens
tttaaaccaaaaata

SEQ ID NO: 51568 - DNA, 15 bp, Homo sapiens
ttttaaaccaaaaat

SEQ ID NO: 51569 - DNA, 15 bp, Homo sapiens
attttaaaccaaaaa

SEQ ID NO: 51570 - DNA, 15 bp, Homo sapiens
aattttaaaccaaaa

SEQ ID NO: 51571 - DNA, 15 bp, Homo sapiens
aaattttaaaccaaa

SEQ ID NO: 51572 - DNA, 15 bp, Homo sapiens
caaattttaaaccaa

SEQ ID NO: 51573 - DNA, 15 bp, Homo sapiens
tcaaattttaaacca

SEQ ID NO: 51574 - DNA, 15 bp, Homo sapiens
ctcaaattttaaacc

SEQ ID NO: 51575 - DNA, 15 bp, Homo sapiens
tctcaaattttaaac

SEQ ID NO: 51576 - DNA, 15 bp, Homo sapiens
ttctcaaattttaaa

SEQ ID NO: 51577 - DNA, 15 bp, Homo sapiens
attctcaaattttaa

SEQ ID NO: 51578 - DNA, 15 bp, Homo sapiens
aattctcaaatttta

SEQ ID NO: 51579 - DNA, 15 bp, Homo sapiens
aaattctcaaatttt

SEQ ID NO: 51580 - DNA, 15 bp, Homo sapiens
caaattctcaaattt

SEQ ID NO: 51581 - DNA, 15 bp, Homo sapiens
tcaaattctcaaatt

SEQ ID NO: 51582 - DNA, 15 bp, Homo sapiens
ctcaaattctcaaat

SEQ ID NO: 51583 - DNA, 15 bp, Homo sapiens
actcaaattctcaaa

SEQ ID NO: 51584 - DNA, 15 bp, Homo sapiens
cactcaaattctcaa

SEQ ID NO: 51585 - DNA, 15 bp, Homo sapiens
tcactcaaattctca

SEQ ID NO: 51586 - DNA, 15 bp, Homo sapiens
ttcactcaaattctc

SEQ ID NO: 51587 - DNA, 15 bp, Homo sapiens
cttcactcaaattct

SEQ ID NO: 51588 - DNA, 15 bp, Homo sapiens
tcttcactcaaattc

SEQ ID NO: 51589 - DNA, 15 bp, Homo sapiens
ttcttcactcaaatt

SEQ ID NO: 51590 - DNA, 15 bp, Homo sapiens
tttcttcactcaaat

SEQ ID NO: 51591 - DNA, 15 bp, Homo sapiens
ttttcttcactcaaa

SEQ ID NO: 51592 - DNA, 15 bp, Homo sapiens
tttttcttcactcaa

SEQ ID NO: 51593 - DNA, 15 bp, Homo sapiens
atttttcttcactca

SEQ ID NO: 51594 - DNA, 15 bp, Homo sapiens
gatttttcttcactc

SEQ ID NO: 51595 - DNA, 15 bp, Homo sapiens
tgatttttcttcact

SEQ ID NO: 51596 - DNA, 15 bp, Homo sapiens
atgatttttcttcac

SEQ ID NO: 51597 - DNA, 15 bp, Homo sapiens
catgatttttcttca

SEQ ID NO: 51598 - DNA, 15 bp, Homo sapiens
acatgatttttcttc

SEQ ID NO: 51599 - DNA, 15 bp, Homo sapiens
cacatgatttttctt

SEQ ID NO: 51600 - DNA, 15 bp, Homo sapiens
tcacatgatttttct

SEQ ID NO: 51601 - DNA, 15 bp, Homo sapiens
ttcacatgatttttc

SEQ ID NO: 51602 - DNA, 15 bp, Homo sapiens
attcacatgattttt

SEQ ID NO: 51603 - DNA, 15 bp, Homo sapiens
cattcacatgatttt

SEQ ID NO: 51604 - DNA, 15 bp, Homo sapiens
tcattcacatgattt

SEQ ID NO: 51605 - DNA, 15 bp, Homo sapiens
ttcattcacatgatt

SEQ ID NO: 51606 - DNA, 15 bp, Homo sapiens
tttcattcacatgat

SEQ ID NO: 51607 - DNA, 15 bp, Homo sapiens
ttttcattcacatga

SEQ ID NO: 51608 - DNA, 15 bp, Homo sapiens
attttcattcacatg

SEQ ID NO: 51609 - DNA, 15 bp, Homo sapiens
cattttcattcacat

SEQ ID NO: 51610 - DNA, 15 bp, Homo sapiens
gcattttcattcaca

SEQ ID NO: 51611 - DNA, 15 bp, Homo sapiens
tgcattttcattcac

SEQ ID NO: 51612 - DNA, 15 bp, Homo sapiens
ttgcattttcattca

SEQ ID NO: 51613 - DNA, 15 bp, Homo sapiens
gttgcattttcattc

SEQ ID NO: 51614 - DNA, 15 bp, Homo sapiens
tgttgcattttcatt

SEQ ID NO: 51615 - DNA, 15 bp, Homo sapiens
ctgttgcattttcat

SEQ ID NO: 51616 - DNA, 15 bp, Homo sapiens
tctgttgcattttca

SEQ ID NO: 51617 - DNA, 15 bp, Homo sapiens
atctgttgcattttc

SEQ ID NO: 51618 - DNA, 15 bp, Homo sapiens
tatctgttgcatttt

SEQ ID NO: 51619 - DNA, 15 bp, Homo sapiens
ttatctgttgcattt

SEQ ID NO: 51620 - DNA, 15 bp, Homo sapiens
gttatctgttgcatt

SEQ ID NO: 51621 - DNA, 15 bp, Homo sapiens
agttatctgttgcat

SEQ ID NO: 51622 - DNA, 15 bp, Homo sapiens
gagttatctgttgca

SEQ ID NO: 51623 - DNA, 15 bp, Homo sapiens
tgagttatctgttgc

SEQ ID NO: 51624 - DNA, 15 bp, Homo sapiens
ctgagttatctgttg

SEQ ID NO: 51625 - DNA, 15 bp, Homo sapiens
tctgagttatctgtt

SEQ ID NO: 51626 - DNA, 15 bp, Homo sapiens
atctgagttatctgt

SEQ ID NO: 51627 - DNA, 15 bp, Homo sapiens
aatctgagttatctg

SEQ ID NO: 51628 - DNA, 15 bp, Homo sapiens
caatctgagttatct

SEQ ID NO: 51629 - DNA, 15 bp, Homo sapiens
gcaatctgagttatc

SEQ ID NO: 51630 - DNA, 15 bp, Homo sapiens
ggcaatctgagttat

SEQ ID NO: 51631 - DNA, 15 bp, Homo sapiens
aggcaatctgagtta

SEQ ID NO: 51632 - DNA, 15 bp, Homo sapiens
aaggcaatctgagtt

SEQ ID NO: 51633 - DNA, 15 bp, Homo sapiens
taaggcaatctgagt

SEQ ID NO: 51634 - DNA, 15 bp, Homo sapiens
ataaggcaatctgag

SEQ ID NO: 51635 - DNA, 15 bp, Homo sapiens
tataaggcaatctga

SEQ ID NO: 51636 - DNA, 15 bp, Homo sapiens
ttataaggcaatctg

SEQ ID NO: 51637 - DNA, 15 bp, Homo sapiens
attataaggcaatct

SEQ ID NO: 51638 - DNA, 15 bp, Homo sapiens
tattataaggcaatc

SEQ ID NO: 51639 - DNA, 15 bp, Homo sapiens
ctattataaggcaat

SEQ ID NO: 51640 - DNA, 15 bp, Homo sapiens
actattataaggcaa

SEQ ID NO: 51641 - DNA, 15 bp, Homo sapiens
gactattataaggca

SEQ ID NO: 51642 - DNA, 15 bp, Homo sapiens
agactattataaggc

SEQ ID NO: 51643 - DNA, 15 bp, Homo sapiens
aagactattataagg

SEQ ID NO: 51644 - DNA, 15 bp, Homo sapiens
aaagactattataag

SEQ ID NO: 51645 - DNA, 15 bp, Homo sapiens
caaagactattataa

SEQ ID NO: 51646 - DNA, 15 bp, Homo sapiens
acaaagactattata

SEQ ID NO: 51647 - DNA, 15 bp, Homo sapiens
cacaaagactattat

SEQ ID NO: 51648 - DNA, 15 bp, Homo sapiens
acacaaagactatta

SEQ ID NO: 51649 - DNA, 15 bp, Homo sapiens
aacacaaagactatt

SEQ ID NO: 51650 - DNA, 15 bp, Homo sapiens
aaacacaaagactat

SEQ ID NO: 51651 - DNA, 15 bp, Homo sapiens
taaacacaaagacta

SEQ ID NO: 51652 - DNA, 15 bp, Homo sapiens
gtaaacacaaagact

SEQ ID NO: 51653 - DNA, 15 bp, Homo sapiens
ggtaaacacaaagac

SEQ ID NO: 51654 - DNA, 15 bp, Homo sapiens
aggtaaacacaaaga

SEQ ID NO: 51655 - DNA, 15 bp, Homo sapiens
aaggtaaacacaaag

SEQ ID NO: 51656 - DNA, 15 bp, Homo sapiens
aaaggtaaacacaaa

SEQ ID NO: 51657 - DNA, 15 bp, Homo sapiens
taaaggtaaacacaa

SEQ ID NO: 51658 - DNA, 15 bp, Homo sapiens
ataaaggtaaacaca

SEQ ID NO: 51659 - DNA, 15 bp, Homo sapiens
aataaaggtaaacac

SEQ ID NO: 51660 - DNA, 15 bp, Homo sapiens
gaataaaggtaaaca

SEQ ID NO: 51661 - DNA, 15 bp, Homo sapiens
tgaataaaggtaaac

SEQ ID NO: 51662 - DNA, 15 bp, Homo sapiens
ctgaataaaggtaaa

SEQ ID NO: 51663 - DNA, 15 bp, Homo sapiens
tctgaataaaggtaa

SEQ ID NO: 51664 - DNA, 15 bp, Homo sapiens
ttctgaataaaggta

SEQ ID NO: 51665 - DNA, 15 bp, Homo sapiens
attctgaataaaggt

SEQ ID NO: 51666 - DNA, 15 bp, Homo sapiens
tattctgaataaagg

SEQ ID NO: 51667 - DNA, 15 bp, Homo sapiens
atattctgaataaag

SEQ ID NO: 51668 - DNA, 15 bp, Homo sapiens
gatattctgaataaa

SEQ ID NO: 51669 - DNA, 15 bp, Homo sapiens
tgatattctgaataa

SEQ ID NO: 51670 - DNA, 15 bp, Homo sapiens
ttgatattctgaata

SEQ ID NO: 51671 - DNA, 15 bp, Homo sapiens
tttgatattctgaat

SEQ ID NO: 51672 - DNA, 15 bp, Homo sapiens
atttgatattctgaa

SEQ ID NO: 51673 - DNA, 15 bp, Homo sapiens
catttgatattctga

SEQ ID NO: 51674 - DNA, 15 bp, Homo sapiens
tcatttgatattctg

SEQ ID NO: 51675 - DNA, 15 bp, Homo sapiens
atcatttgatattct

SEQ ID NO: 51676 - DNA, 15 bp, Homo sapiens
tatcatttgatattc

SEQ ID NO: 51677 - DNA, 15 bp, Homo sapiens
ctatcatttgatatt

SEQ ID NO: 51678 - DNA, 15 bp, Homo sapiens
actatcatttgatat

SEQ ID NO: 51679 - DNA, 15 bp, Homo sapiens
aactatcatttgata

SEQ ID NO: 51680 - DNA, 15 bp, Homo sapiens
aaactatcatttgat

SEQ ID NO: 51681 - DNA, 15 bp, Homo sapiens
taaactatcatttga

SEQ ID NO: 51682 - DNA, 15 bp, Homo sapiens
ataaactatcatttg

SEQ ID NO: 51683 - DNA, 15 bp, Homo sapiens
aataaactatcattt

SEQ ID NO: 51684 - DNA, 15 bp, Homo sapiens
aaataaactatcatt

SEQ ID NO: 51685 - DNA, 15 bp, Homo sapiens
aaaataaactatcat

SEQ ID NO: 51686 - DNA, 15 bp, Homo sapiens
caaaataaactatca

SEQ ID NO: 51687 - DNA, 15 bp, Homo sapiens
acaaaataaactatc

SEQ ID NO: 51688 - DNA, 15 bp, Homo sapiens
aacaaaataaactat

SEQ ID NO: 51689 - DNA, 15 bp, Homo sapiens
caacaaaataaacta

SEQ ID NO: 51690 - DNA, 15 bp, Homo sapiens
tcaacaaaataaact

SEQ ID NO: 51691 - DNA, 15 bp, Homo sapiens
gtcaacaaaataaac

SEQ ID NO: 51692 - DNA, 15 bp, Homo sapiens
agtcaacaaaataaa

SEQ ID NO: 51693 - DNA, 15 bp, Homo sapiens
aagtcaacaaaataa

SEQ ID NO: 51694 - DNA, 15 bp, Homo sapiens
aaagtcaacaaaata

SEQ ID NO: 51695 - DNA, 15 bp, Homo sapiens
aaaagtcaacaaaat

SEQ ID NO: 51696 - DNA, 15 bp, Homo sapiens
aaaaagtcaacaaaa

SEQ ID NO: 51697 - DNA, 15 bp, Homo sapiens
caaaaagtcaacaaa

SEQ ID NO: 51698 - DNA, 15 bp, Homo sapiens
gcaaaaagtcaacaa

SEQ ID NO: 51699 - DNA, 15 bp, Homo sapiens
tgcaaaaagtcaaca

SEQ ID NO: 51700 - DNA, 15 bp, Homo sapiens
ttgcaaaaagtcaac

SEQ ID NO: 51701 - DNA, 15 bp, Homo sapiens
tttgcaaaaagtcaa

SEQ ID NO: 51702 - DNA, 15 bp, Homo sapiens
atttgcaaaaagtca

SEQ ID NO: 51703 - DNA, 15 bp, Homo sapiens
catttgcaaaaagtc

SEQ ID NO: 51704 - DNA, 15 bp, Homo sapiens
acatttgcaaaaagt

SEQ ID NO: 51705 - DNA, 15 bp, Homo sapiens
aacatttgcaaaaag

SEQ ID NO: 51706 - DNA, 15 bp, Homo sapiens
aaacatttgcaaaaa

SEQ ID NO: 51707 - DNA, 15 bp, Homo sapiens
taaacatttgcaaaa

SEQ ID NO: 51708 - DNA, 15 bp, Homo sapiens
ttaaacatttgcaaa

SEQ ID NO: 51709 - DNA, 15 bp, Homo sapiens
gttaaacatttgcaa

SEQ ID NO: 51710 - DNA, 15 bp, Homo sapiens
tgttaaacatttgca

SEQ ID NO: 51711 - DNA, 15 bp, Homo sapiens
atgttaaacatttgc

SEQ ID NO: 51712 - DNA, 15 bp, Homo sapiens
tatgttaaacatttg

SEQ ID NO: 51713 - DNA, 15 bp, Homo sapiens
ctatgttaaacattt

SEQ ID NO: 51714 - DNA, 15 bp, Homo sapiens
cctatgttaaacatt

SEQ ID NO: 51715 - DNA, 15 bp, Homo sapiens
acctatgttaaacat

SEQ ID NO: 51716 - DNA, 15 bp, Homo sapiens
cacctatgttaaaca

SEQ ID NO: 51717 - DNA, 15 bp, Homo sapiens
tcacctatgttaaac

SEQ ID NO: 51718 - DNA, 15 bp, Homo sapiens
gtcacctatgttaaa

SEQ ID NO: 51719 - DNA, 15 bp, Homo sapiens
tgtcacctatgttaa

SEQ ID NO: 51720 - DNA, 15 bp, Homo sapiens
ctgtcacctatgtta

SEQ ID NO: 51721 - DNA, 15 bp, Homo sapiens
tctgtcacctatgtt

SEQ ID NO: 51722 - DNA, 15 bp, Homo sapiens
atctgtcacctatgt

SEQ ID NO: 51723 - DNA, 15 bp, Homo sapiens
aatctgtcacctatg

SEQ ID NO: 51724 - DNA, 15 bp, Homo sapiens
aaatctgtcacctat

SEQ ID NO: 51725 - DNA, 15 bp, Homo sapiens
aaaatctgtcaccta

SEQ ID NO: 51726 - DNA, 15 bp, Homo sapiens
gaaaatctgtcacct

SEQ ID NO: 51727 - DNA, 15 bp, Homo sapiens
agaaaatctgtcacc

SEQ ID NO: 51728 - DNA, 15 bp, Homo sapiens
aagaaaatctgtcac

SEQ ID NO: 51729 - DNA, 15 bp, Homo sapiens
aaagaaaatctgtca

SEQ ID NO: 51730 - DNA, 15 bp, Homo sapiens
aaaagaaaatctgtc

SEQ ID NO: 51731 - DNA, 15 bp, Homo sapiens
aaaaagaaaatctgt

SEQ ID NO: 51732 - DNA, 15 bp, Homo sapiens
aaaaaagaaaatctg

SEQ ID NO: 51733 - DNA, 15 bp, Homo sapiens
taaaaaagaaaatct

SEQ ID NO: 51734 - DNA, 15 bp, Homo sapiens
ttaaaaaagaaaatc

SEQ ID NO: 51735 - DNA, 15 bp, Homo sapiens
tttaaaaaagaaaat

SEQ ID NO: 51736 - DNA, 15 bp, Homo sapiens
ttttaaaaaagaaaa

SEQ ID NO: 51737 - DNA, 15 bp, Homo sapiens
tttttaaaaaagaaa

SEQ ID NO: 51738 - DNA, 15 bp, Homo sapiens
ttttttaaaaaagaa

SEQ ID NO: 51739 - DNA, 15 bp, Homo sapiens
tttttttaaaaaaga

SEQ ID NO: 51740 - DNA, 15 bp, Homo sapiens
atttttttaaaaaag

SEQ ID NO: 51741 - DNA, 15 bp, Homo sapiens
tatttttttaaaaaa

SEQ ID NO: 51742 - DNA, 15 bp, Homo sapiens
ttatttttttaaaaa

SEQ ID NO: 51743 - DNA, 15 bp, Homo sapiens
tttatttttttaaaa

SEQ ID NO: 51744 - DNA, 15 bp, Homo sapiens
ttttatttttttaaa

SEQ ID NO: 51745 - DNA, 15 bp, Homo sapiens
gttttatttttttaa

SEQ ID NO: 51746 - DNA, 15 bp, Homo sapiens
tgttttattttttta

SEQ ID NO: 51747 - DNA, 15 bp, Homo sapiens
atgttttattttttt

SEQ ID NO: 51748 - DNA, 15 bp, Homo sapiens
gatgttttatttttt

SEQ ID NO: 51749 - DNA, 15 bp, Homo sapiens
tgatgttttattttt

SEQ ID NO: 51750 - DNA, 15 bp, Homo sapiens
atgatgttttatttt

SEQ ID NO: 51751 - DNA, 15 bp, Homo sapiens
aatgatgttttattt

SEQ ID NO: 51752 - DNA, 15 bp, Homo sapiens
taatgatgttttatt

SEQ ID NO: 51753 - DNA, 15 bp, Homo sapiens
ttaatgatgttttat

SEQ ID NO: 51754 - DNA, 15 bp, Homo sapiens
attaatgatgtttta

SEQ ID NO: 51755 - DNA, 15 bp, Homo sapiens
aattaatgatgtttt

SEQ ID NO: 51756 - DNA, 15 bp, Homo sapiens
taattaatgatgttt

SEQ ID NO: 51757 - DNA, 15 bp, Homo sapiens
ttaattaatgatgtt

SEQ ID NO: 51758 - DNA, 15 bp, Homo sapiens
tttaattaatgatgt

SEQ ID NO: 51759 - DNA, 15 bp, Homo sapiens
atttaattaatgatg

SEQ ID NO: 51760 - DNA, 15 bp, Homo sapiens
tatttaattaatgat

SEQ ID NO: 51761 - DNA, 15 bp, Homo sapiens
atatttaattaatga

SEQ ID NO: 51762 - DNA, 15 bp, Homo sapiens
catatttaattaatg

SEQ ID NO: 51763 - DNA, 15 bp, Homo sapiens
acatatttaattaat

SEQ ID NO: 51764 - DNA, 15 bp, Homo sapiens
gacatatttaattaa

SEQ ID NO: 51765 - DNA, 15 bp, Homo sapiens
tgacatatttaatta

SEQ ID NO: 51766 - DNA, 15 bp, Homo sapiens
atgacatatttaatt

SEQ ID NO: 51767 - DNA, 15 bp, Homo sapiens
aatgacatatttaat

SEQ ID NO: 51768 - DNA, 15 bp, Homo sapiens
aaatgacatatttaa

SEQ ID NO: 51769 - DNA, 15 bp, Homo sapiens
gaaatgacatattta

SEQ ID NO: 51770 - DNA, 15 bp, Homo sapiens
tgaaatgacatattt

SEQ ID NO: 51771 - DNA, 15 bp, Homo sapiens
atgaaatgacatatt

SEQ ID NO: 51772 - DNA, 15 bp, Homo sapiens
aatgaaatgacatat

SEQ ID NO: 51773 - DNA, 15 bp, Homo sapiens
aaatgaaatgacata

SEQ ID NO: 51774 - DNA, 15 bp, Homo sapiens
gaaatgaaatgacat

SEQ ID NO: 51775 - DNA, 15 bp, Homo sapiens
agaaatgaaatgaca

SEQ ID NO: 51776 - DNA, 15 bp, Homo sapiens
aagaaatgaaatgac

SEQ ID NO: 51777 - DNA, 15 bp, Homo sapiens
aaagaaatgaaatga

SEQ ID NO: 51778 - DNA, 15 bp, Homo sapiens
aaaagaaatgaaatg

SEQ ID NO: 51779 - DNA, 15 bp, Homo sapiens
aaaaagaaatgaaat

SEQ ID NO: 51780 - DNA, 15 bp, Homo sapiens
gaaaaagaaatgaaa

SEQ ID NO: 51781 - DNA, 15 bp, Homo sapiens
agaaaaagaaatgaa

SEQ ID NO: 51782 - DNA, 15 bp, Homo sapiens
aagaaaaagaaatga

SEQ ID NO: 51783 - DNA, 15 bp, Homo sapiens
aaagaaaaagaaatg

SEQ ID NO: 51784 - DNA, 15 bp, Homo sapiens
aaaagaaaaagaaat

SEQ ID NO: 51785 - DNA, 15 bp, Homo sapiens
gaaaagaaaaagaaa

SEQ ID NO: 51786 - DNA, 15 bp, Homo sapiens
agaaaagaaaaagaa

SEQ ID NO: 51787 - DNA, 15 bp, Homo sapiens
aagaaaagaaaaaga

SEQ ID NO: 51788 - DNA, 15 bp, Homo sapiens
aaaagaaaagaaaaa

SEQ ID NO: 51789 - DNA, 15 bp, Homo sapiens
aaaaagaaaagaaaa

SEQ ID NO: 51790 - DNA, 15 bp, Homo sapiens
aaaaaaaaaaaaaga

SEQ ID NO: 51791 - DNA, 15 bp, Homo sapiens
ctaaaaaaaaaaaaa

SEQ ID NO: 51792 - DNA, 15 bp, Homo sapiens
cctaaaaaaaaaaaa

SEQ ID NO: 51793 - DNA, 15 bp, Homo sapiens
tcctaaaaaaaaaaa

SEQ ID NO: 51794 - DNA, 15 bp, Homo sapiens
gtcctaaaaaaaaaa

SEQ ID NO: 51795 - DNA, 15 bp, Homo sapiens
tgtcctaaaaaaaaa

SEQ ID NO: 51796 - DNA, 15 bp, Homo sapiens
ttgtcctaaaaaaaa

SEQ ID NO: 51797 - DNA, 15 bp, Homo sapiens
tttgtcctaaaaaaa

SEQ ID NO: 51798 - DNA, 15 bp, Homo sapiens
ttttgtcctaaaaaa

SEQ ID NO: 51799 - DNA, 15 bp, Homo sapiens
attttgtcctaaaaa

SEQ ID NO: 51800 - DNA, 15 bp, Homo sapiens
cattttgtcctaaaa

SEQ ID NO: 51801 - DNA, 15 bp, Homo sapiens
acattttgtcctaaa

SEQ ID NO: 51802 - DNA, 15 bp, Homo sapiens
aacattttgtcctaa

SEQ ID NO: 51803 - DNA, 15 bp, Homo sapiens
aaacattttgtccta

SEQ ID NO: 51804 - DNA, 15 bp, Homo sapiens
gaaacattttgtcct

SEQ ID NO: 51805 - DNA, 15 bp, Homo sapiens
tgaaacattttgtcc

SEQ ID NO: 51806 - DNA, 15 bp, Homo sapiens
gtgaaacattttgtc

SEQ ID NO: 51807 - DNA, 15 bp, Homo sapiens
agtgaaacattttgt

SEQ ID NO: 51808 - DNA, 15 bp, Homo sapiens
aagtgaaacattttg

SEQ ID NO: 51809 - DNA, 15 bp, Homo sapiens
aaagtgaaacatttt

SEQ ID NO: 51810 - DNA, 15 bp, Homo sapiens
aaaagtgaaacattt

SEQ ID NO: 51811 - DNA, 15 bp, Homo sapiens
caaaagtgaaacatt

SEQ ID NO: 51812 - DNA, 15 bp, Homo sapiens
ccaaaagtgaaacat

SEQ ID NO: 51813 - DNA, 15 bp, Homo sapiens
cccaaaagtgaaaca

SEQ ID NO: 51814 - DNA, 15 bp, Homo sapiens
acccaaaagtgaaac

SEQ ID NO: 51815 - DNA, 15 bp, Homo sapiens
tacccaaaagtgaaa

SEQ ID NO: 51816 - DNA, 15 bp, Homo sapiens
ttacccaaaagtgaa

SEQ ID NO: 51817 - DNA, 15 bp, Homo sapiens
tttacccaaaagtga

SEQ ID NO: 51818 - DNA, 15 bp, Homo sapiens
atttacccaaaagtg

SEQ ID NO: 51819 - DNA, 15 bp, Homo sapiens
tatttacccaaaagt

SEQ ID NO: 51820 - DNA, 15 bp, Homo sapiens
gtatttacccaaaag

SEQ ID NO: 51821 - DNA, 15 bp, Homo sapiens
tgtatttacccaaaa

SEQ ID NO: 51822 - DNA, 15 bp, Homo sapiens
atgtatttacccaaa

SEQ ID NO: 51823 - DNA, 15 bp, Homo sapiens
aatgtatttacccaa

SEQ ID NO: 51824 - DNA, 15 bp, Homo sapiens
gaatgtatttaccca

SEQ ID NO: 51825 - DNA, 15 bp, Homo sapiens
agaatgtatttaccc

SEQ ID NO: 51826 - DNA, 15 bp, Homo sapiens
aagaatgtatttacc

SEQ ID NO: 51827 - DNA, 15 bp, Homo sapiens
gaagaatgtatttac

SEQ ID NO: 51828 - DNA, 15 bp, Homo sapiens
tgaagaatgtattta

SEQ ID NO: 51829 - DNA, 15 bp, Homo sapiens
atgaagaatgtattt

SEQ ID NO: 51830 - DNA, 15 bp, Homo sapiens
tatgaagaatgtatt

SEQ ID NO: 51831 - DNA, 15 bp, Homo sapiens
gtatgaagaatgtat

SEQ ID NO: 51832 - DNA, 15 bp, Homo sapiens
ggtatgaagaatgta

SEQ ID NO: 51833 - DNA, 15 bp, Homo sapiens
tggtatgaagaatgt

SEQ ID NO: 51834 - DNA, 15 bp, Homo sapiens
ctggtatgaagaatg

SEQ ID NO: 51835 - DNA, 15 bp, Homo sapiens
cctggtatgaagaat

SEQ ID NO: 51836 - DNA, 15 bp, Homo sapiens
tcctggtatgaagaa

SEQ ID NO: 51837 - DNA, 15 bp, Homo sapiens
gtcctggtatgaaga

SEQ ID NO: 51838 - DNA, 15 bp, Homo sapiens
ggtcctggtatgaag

SEQ ID NO: 51839 - DNA, 15 bp, Homo sapiens
tggtcctggtatgaa

SEQ ID NO: 51840 - DNA, 15 bp, Homo sapiens
ctggtcctggtatga

SEQ ID NO: 51841 - DNA, 15 bp, Homo sapiens
tctggtcctggtatg

SEQ ID NO: 51842 - DNA, 15 bp, Homo sapiens
ctctggtcctggtat

SEQ ID NO: 51843 - DNA, 15 bp, Homo sapiens
cctctggtcctggta

SEQ ID NO: 51844 - DNA, 15 bp, Homo sapiens
tcctctggtcctggt

SEQ ID NO: 51845 - DNA, 15 bp, Homo sapiens
ttcctctggtcctgg

SEQ ID NO: 51846 - DNA, 15 bp, Homo sapiens
tttcctctggtcctg

SEQ ID NO: 51847 - DNA, 15 bp, Homo sapiens
gtttcctctggtcct

SEQ ID NO: 51848 - DNA, 15 bp, Homo sapiens
ggtttcctctggtcc

SEQ ID NO: 51849 - DNA, 15 bp, Homo sapiens
aggtttcctctggtc

SEQ ID NO: 51850 - DNA, 15 bp, Homo sapiens
gaggtttcctctggt

SEQ ID NO: 51851 - DNA, 15 bp, Homo sapiens
tgaggtttcctctgg

SEQ ID NO: 51852 - DNA, 15 bp, Homo sapiens
ctgaggtttcctctg

SEQ ID NO: 51853 - DNA, 15 bp, Homo sapiens
tctgaggtttcctct

SEQ ID NO: 51854 - DNA, 15 bp, Homo sapiens
ttctgaggtttcctc

SEQ ID NO: 51855 - DNA, 15 bp, Homo sapiens
tttctgaggtttcct

SEQ ID NO: 51856 - DNA, 15 bp, Homo sapiens
ttttctgaggtttcc

SEQ ID NO: 51857 - DNA, 15 bp, Homo sapiens
tttttctgaggtttc

SEQ ID NO: 51858 - DNA, 15 bp, Homo sapiens
ctttttctgaggttt

SEQ ID NO: 51859 - DNA, 15 bp, Homo sapiens
actttttctgaggtt

SEQ ID NO: 51860 - DNA, 15 bp, Homo sapiens
tactttttctgaggt

SEQ ID NO: 51861 - DNA, 15 bp, Homo sapiens
ctactttttctgagg

SEQ ID NO: 51862 - DNA, 15 bp, Homo sapiens
tctactttttctgag

SEQ ID NO: 51863 - DNA, 15 bp, Homo sapiens
ttctactttttctga

SEQ ID NO: 51864 - DNA, 15 bp, Homo sapiens
tttctactttttctg

SEQ ID NO: 51865 - DNA, 15 bp, Homo sapiens
ttttctactttttct

SEQ ID NO: 51866 - DNA, 15 bp, Homo sapiens
attttctactttttc

SEQ ID NO: 51867 - DNA, 15 bp, Homo sapiens
cattttctacttttt

SEQ ID NO: 51868 - DNA, 15 bp, Homo sapiens
ccattttctactttt

SEQ ID NO: 51869 - DNA, 15 bp, Homo sapiens
tccattttctacttt

SEQ ID NO: 51870 - DNA, 15 bp, Homo sapiens
ttccattttctactt

SEQ ID NO: 51871 - DNA, 15 bp, Homo sapiens
cttccattttctact

SEQ ID NO: 51872 - DNA, 15 bp, Homo sapiens
acttccattttctac

SEQ ID NO: 51873 - DNA, 15 bp, Homo sapiens
gacttccattttcta

SEQ ID NO: 51874 - DNA, 15 bp, Homo sapiens
agacttccattttct

SEQ ID NO: 51875 - DNA, 15 bp, Homo sapiens
tagacttccattttc

SEQ ID NO: 51876 - DNA, 15 bp, Homo sapiens
atagacttccatttt

SEQ ID NO: 51877 - DNA, 15 bp, Homo sapiens
catagacttccattt

SEQ ID NO: 51878 - DNA, 15 bp, Homo sapiens
acatagacttccatt

SEQ ID NO: 51879 - DNA, 15 bp, Homo sapiens
cacatagacttccat

SEQ ID NO: 51880 - DNA, 15 bp, Homo sapiens
tcacatagacttcca

SEQ ID NO: 51881 - DNA, 15 bp, Homo sapiens
atcacatagacttcc

SEQ ID NO: 51882 - DNA, 15 bp, Homo sapiens
gatcacatagacttc

SEQ ID NO: 51883 - DNA, 15 bp, Homo sapiens
tgatcacatagactt

SEQ ID NO: 51884 - DNA, 15 bp, Homo sapiens
ttgatcacatagact

SEQ ID NO: 51885 - DNA, 15 bp, Homo sapiens
cttgatcacatagac

SEQ ID NO: 51886 - DNA, 15 bp, Homo sapiens
tcttgatcacataga

SEQ ID NO: 51887 - DNA, 15 bp, Homo sapiens
ttcttgatcacatag

SEQ ID NO: 51888 - DNA, 15 bp, Homo sapiens
tttcttgatcacata

SEQ ID NO: 51889 - DNA, 15 bp, Homo sapiens
atttcttgatcacat

SEQ ID NO: 51890 - DNA, 15 bp, Homo sapiens
gatttcttgatcaca

SEQ ID NO: 51891 - DNA, 15 bp, Homo sapiens
cgatttcttgatcac

SEQ ID NO: 51892 - DNA, 15 bp, Homo sapiens
tcgatttcttgatca

SEQ ID NO: 51893 - DNA, 15 bp, Homo sapiens
atcgatttcttgatc

SEQ ID NO: 51894 - DNA, 15 bp, Homo sapiens
tatcgatttcttgat

SEQ ID NO: 51895 - DNA, 15 bp, Homo sapiens
ctatcgatttcttga

SEQ ID NO: 51896 - DNA, 15 bp, Homo sapiens
gctatcgatttcttg

SEQ ID NO: 51897 - DNA, 15 bp, Homo sapiens
tgctatcgatttctt

SEQ ID NO: 51898 - DNA, 15 bp, Homo sapiens
atgctatcgatttct

SEQ ID NO: 51899 - DNA, 15 bp, Homo sapiens
aatgctatcgatttc

SEQ ID NO: 51900 - DNA, 15 bp, Homo sapiens
aaatgctatcgattt

SEQ ID NO: 51901 - DNA, 15 bp, Homo sapiens
caaatgctatcgatt

SEQ ID NO: 51902 - DNA, 15 bp, Homo sapiens
gcaaatgctatcgat

SEQ ID NO: 51903 - DNA, 15 bp, Homo sapiens
tgcaaatgctatcga

SEQ ID NO: 51904 - DNA, 15 bp, Homo sapiens
ctgcaaatgctatcg

SEQ ID NO: 51905 - DNA, 15 bp, Homo sapiens
actgcaaatgctatc

SEQ ID NO: 51906 - DNA, 15 bp, Homo sapiens
tactgcaaatgctat

SEQ ID NO: 51907 - DNA, 15 bp, Homo sapiens
atactgcaaatgcta

SEQ ID NO: 51908 - DNA, 15 bp, Homo sapiens
tatactgcaaatgct

SEQ ID NO: 51909 - DNA, 15 bp, Homo sapiens
ctatactgcaaatgc

SEQ ID NO: 51910 - DNA, 15 bp, Homo sapiens
tctatactgcaaatg

SEQ ID NO: 51911 - DNA, 15 bp, Homo sapiens
ctctatactgcaaat

SEQ ID NO: 51912 - DNA, 15 bp, Homo sapiens
gctctatactgcaaa

SEQ ID NO: 51913 - DNA, 15 bp, Homo sapiens
cgctctatactgcaa

SEQ ID NO: 51914 - DNA, 15 bp, Homo sapiens
acgctctatactgca

SEQ ID NO: 51915 - DNA, 15 bp, Homo sapiens
cacgctctatactgc

SEQ ID NO: 51916 - DNA, 15 bp, Homo sapiens
gcacgctctatactg

SEQ ID NO: 51917 - DNA, 15 bp, Homo sapiens
tgcacgctctatact

SEQ ID NO: 51918 - DNA, 15 bp, Homo sapiens
ctgcacgctctatac

SEQ ID NO: 51919 - DNA, 15 bp, Homo sapiens
tctgcacgctctata

SEQ ID NO: 51920 - DNA, 15 bp, Homo sapiens
atctgcacgctctat

SEQ ID NO: 51921 - DNA, 15 bp, Homo sapiens
tatctgcacgctcta

SEQ ID NO: 51922 - DNA, 15 bp, Homo sapiens
ttatctgcacgctct

SEQ ID NO: 51923 - DNA, 15 bp, Homo sapiens
attatctgcacgctc

SEQ ID NO: 51924 - DNA, 15 bp, Homo sapiens
cattatctgcacgct

SEQ ID NO: 51925 - DNA, 15 bp, Homo sapiens
tcattatctgcacgc

SEQ ID NO: 51926 - DNA, 15 bp, Homo sapiens
gtcattatctgcacg

SEQ ID NO: 51927 - DNA, 15 bp, Homo sapiens
tgtcattatctgcac

SEQ ID NO: 51928 - DNA, 15 bp, Homo sapiens
ttgtcattatctgca

SEQ ID NO: 51929 - DNA, 15 bp, Homo sapiens
cttgtcattatctgc

SEQ ID NO: 51930 - DNA, 15 bp, Homo sapiens
ccttgtcattatctg

SEQ ID NO: 51931 - DNA, 15 bp, Homo sapiens
tccttgtcattatct

SEQ ID NO: 51932 - DNA, 15 bp, Homo sapiens
ttccttgtcattatc

SEQ ID NO: 51933 - DNA, 15 bp, Homo sapiens
attccttgtcattat

SEQ ID NO: 51934 - DNA, 15 bp, Homo sapiens
tattccttgtcatta

SEQ ID NO: 51935 - DNA, 15 bp, Homo sapiens
atattccttgtcatt

SEQ ID NO: 51936 - DNA, 15 bp, Homo sapiens
gatattccttgtcat

SEQ ID NO: 51937 - DNA, 15 bp, Homo sapiens
agatattccttgtca

SEQ ID NO: 51938 - DNA, 15 bp, Homo sapiens
tagatattccttgtc

SEQ ID NO: 51939 - DNA, 15 bp, Homo sapiens
ctagatattccttgt

SEQ ID NO: 51940 - DNA, 15 bp, Homo sapiens
actagatattccttg

SEQ ID NO: 51941 - DNA, 15 bp, Homo sapiens
tactagatattcctt

SEQ ID NO: 51942 - DNA, 15 bp, Homo sapiens
gtactagatattcct

SEQ ID NO: 51943 - DNA, 15 bp, Homo sapiens
agtactagatattcc

SEQ ID NO: 51944 - DNA, 15 bp, Homo sapiens
aagtactagatattc

SEQ ID NO: 51945 - DNA, 15 bp, Homo sapiens
taagtactagatatt

SEQ ID NO: 51946 - DNA, 15 bp, Homo sapiens
gtaagtactagatat

SEQ ID NO: 51947 - DNA, 15 bp, Homo sapiens
agtaagtactagata

SEQ ID NO: 51948 - DNA, 15 bp, Homo sapiens
aagtaagtactagat

SEQ ID NO: 51949 - DNA, 15 bp, Homo sapiens
aaagtaagtactaga

SEQ ID NO: 51950 - DNA, 15 bp, Homo sapiens
taaagtaagtactag

SEQ ID NO: 51951 - DNA, 15 bp, Homo sapiens
ttaaagtaagtacta

SEQ ID NO: 51952 - DNA, 15 bp, Homo sapiens
gttaaagtaagtact

SEQ ID NO: 51953 - DNA, 15 bp, Homo sapiens
tgttaaagtaagtac

SEQ ID NO: 51954 - DNA, 15 bp, Homo sapiens
ttgttaaagtaagta

SEQ ID NO: 51955 - DNA, 15 bp, Homo sapiens
tttgttaaagtaagt

SEQ ID NO: 51956 - DNA, 15 bp, Homo sapiens
ttttgttaaagtaag

SEQ ID NO: 51957 - DNA, 15 bp, Homo sapiens
tttttgttaaagtaa

SEQ ID NO: 51958 - DNA, 15 bp, Homo sapiens
ttttttgttaaagta

SEQ ID NO: 51959 - DNA, 15 bp, Homo sapiens
attttttgttaaagt

SEQ ID NO: 51960 - DNA, 15 bp, Homo sapiens
cattttttgttaaag

SEQ ID NO: 51961 - DNA, 15 bp, Homo sapiens
tcattttttgttaaa

SEQ ID NO: 51962 - DNA, 15 bp, Homo sapiens
atcattttttgttaa

SEQ ID NO: 51963 - DNA, 15 bp, Homo sapiens
gatcattttttgtta

SEQ ID NO: 51964 - DNA, 15 bp, Homo sapiens
agatcattttttgtt

SEQ ID NO: 51965 - DNA, 15 bp, Homo sapiens
aagatcattttttgt

SEQ ID NO: 51966 - DNA, 15 bp, Homo sapiens
caagatcattttttg

SEQ ID NO: 51967 - DNA, 15 bp, Homo sapiens
tcaagatcatttttt

SEQ ID NO: 51968 - DNA, 15 bp, Homo sapiens
gtcaagatcattttt

SEQ ID NO: 51969 - DNA, 15 bp, Homo sapiens
tgtcaagatcatttt

SEQ ID NO: 51970 - DNA, 15 bp, Homo sapiens
ttgtcaagatcattt

SEQ ID NO: 51971 - DNA, 15 bp, Homo sapiens
tttgtcaagatcatt

SEQ ID NO: 51972 - DNA, 15 bp, Homo sapiens
ctttgtcaagatcat

SEQ ID NO: 51973 - DNA, 15 bp, Homo sapiens
gctttgtcaagatca

SEQ ID NO: 51974 - DNA, 15 bp, Homo sapiens
tgctttgtcaagatc

SEQ ID NO: 51975 - DNA, 15 bp, Homo sapiens
ttgctttgtcaagat

SEQ ID NO: 51976 - DNA, 15 bp, Homo sapiens
tttgctttgtcaaga

SEQ ID NO: 51977 - DNA, 15 bp, Homo sapiens
atttgctttgtcaag

SEQ ID NO: 51978 - DNA, 15 bp, Homo sapiens
tatttgctttgtcaa

SEQ ID NO: 51979 - DNA, 15 bp, Homo sapiens
ttatttgctttgtca

SEQ ID NO: 51980 - DNA, 15 bp, Homo sapiens
tttatttgctttgtc

SEQ ID NO: 51981 - DNA, 15 bp, Homo sapiens
ctttatttgctttgt

SEQ ID NO: 51982 - DNA, 15 bp, Homo sapiens
tctttatttgctttg

SEQ ID NO: 51983 - DNA, 15 bp, Homo sapiens
gtctttatttgcttt

SEQ ID NO: 51984 - DNA, 15 bp, Homo sapiens
tgtctttatttgctt

SEQ ID NO: 51985 - DNA, 15 bp, Homo sapiens
ttgtctttatttgct

SEQ ID NO: 51986 - DNA, 15 bp, Homo sapiens
tttgtctttatttgc

SEQ ID NO: 51987 - DNA, 15 bp, Homo sapiens
ctttgtctttatttg

SEQ ID NO: 51988 - DNA, 15 bp, Homo sapiens
gctttgtctttattt

SEQ ID NO: 51989 - DNA, 15 bp, Homo sapiens
ggctttgtctttatt

SEQ ID NO: 51990 - DNA, 15 bp, Homo sapiens
tggctttgtctttat

SEQ ID NO: 51991 - DNA, 15 bp, Homo sapiens
ttggctttgtcttta

SEQ ID NO: 51992 - DNA, 15 bp, Homo sapiens
gttggctttgtcttt

SEQ ID NO: 51993 - DNA, 15 bp, Homo sapiens
ggttggctttgtctt

SEQ ID NO: 51994 - DNA, 15 bp, Homo sapiens
cggttggctttgtct

SEQ ID NO: 51995 - DNA, 15 bp, Homo sapiens
tcggttggctttgtc

SEQ ID NO: 51996 - DNA, 15 bp, Homo sapiens
atcggttggctttgt

SEQ ID NO: 51997 - DNA, 15 bp, Homo sapiens
tatcggttggctttg

SEQ ID NO: 51998 - DNA, 15 bp, Homo sapiens
gtatcggttggcttt

SEQ ID NO: 51999 - DNA, 15 bp, Homo sapiens
agtatcggttggctt

SEQ ID NO: 52000 - DNA, 15 bp, Homo sapiens
aagtatcggttggct

SEQ ID NO: 52001 - DNA, 15 bp, Homo sapiens
aaagtatcggttggc

SEQ ID NO: 52002 - DNA, 15 bp, Homo sapiens
aaaagtatcggttgg

SEQ ID NO: 52003 - DNA, 15 bp, Homo sapiens
gaaaagtatcggttg

SEQ ID NO: 52004 - DNA, 15 bp, Homo sapiens
agaaaagtatcggtt

SEQ ID NO: 52005 - DNA, 15 bp, Homo sapiens
gagaaaagtatcggt

SEQ ID NO: 52006 - DNA, 15 bp, Homo sapiens
ggagaaaagtatcgg

SEQ ID NO: 52007 - DNA, 15 bp, Homo sapiens
tggagaaaagtatcg

SEQ ID NO: 52008 - DNA, 15 bp, Homo sapiens
ttggagaaaagtatc

SEQ ID NO: 52009 - DNA, 15 bp, Homo sapiens
tttggagaaaagtat

SEQ ID NO: 52010 - DNA, 15 bp, Homo sapiens
atttggagaaaagta

SEQ ID NO: 52011 - DNA, 15 bp, Homo sapiens
aatttggagaaaagt

SEQ ID NO: 52012 - DNA, 15 bp, Homo sapiens
aaatttggagaaaag

SEQ ID NO: 52013 - DNA, 15 bp, Homo sapiens
aaaatttggagaaaa

SEQ ID NO: 52014 - DNA, 15 bp, Homo sapiens
taaaatttggagaaa

SEQ ID NO: 52015 - DNA, 15 bp, Homo sapiens
ttaaaatttggagaa

SEQ ID NO: 52016 - DNA, 15 bp, Homo sapiens
cttaaaatttggaga

SEQ ID NO: 52017 - DNA, 15 bp, Homo sapiens
ccttaaaatttggag

SEQ ID NO: 52018 - DNA, 15 bp, Homo sapiens
accttaaaatttgga

SEQ ID NO: 52019 - DNA, 15 bp, Homo sapiens
gaccttaaaatttgg

SEQ ID NO: 52020 - DNA, 15 bp, Homo sapiens
tgaccttaaaatttg

SEQ ID NO: 52021 - DNA, 15 bp, Homo sapiens
ctgaccttaaaattt

SEQ ID NO: 52022 - DNA, 15 bp, Homo sapiens
actgaccttaaaatt

SEQ ID NO: 52023 - DNA, 15 bp, Homo sapiens
aactgaccttaaaat

SEQ ID NO: 52024 - DNA, 15 bp, Homo sapiens
taactgaccttaaaa

SEQ ID NO: 52025 - DNA, 15 bp, Homo sapiens
ttaactgaccttaaa

SEQ ID NO: 52026 - DNA, 15 bp, Homo sapiens
tttaactgaccttaa

SEQ ID NO: 52027 - DNA, 15 bp, Homo sapiens
atttaactgacctta

SEQ ID NO: 52028 - DNA, 15 bp, Homo sapiens
aatttaactgacctt

SEQ ID NO: 52029 - DNA, 15 bp, Homo sapiens
taatttaactgacct

SEQ ID NO: 52030 - DNA, 15 bp, Homo sapiens
ttaatttaactgacc

SEQ ID NO: 52031 - DNA, 15 bp, Homo sapiens
tttaatttaactgac

SEQ ID NO: 52032 - DNA, 15 bp, Homo sapiens
gtttaatttaactga

SEQ ID NO: 52033 - DNA, 15 bp, Homo sapiens
tgtttaatttaactg

SEQ ID NO: 52034 - DNA, 15 bp, Homo sapiens
atgtttaatttaact

SEQ ID NO: 52035 - DNA, 15 bp, Homo sapiens
aatgtttaatttaac

SEQ ID NO: 52036 - DNA, 15 bp, Homo sapiens
aaatgtttaatttaa

SEQ ID NO: 52037 - DNA, 15 bp, Homo sapiens
aaaatgtttaattta

SEQ ID NO: 52038 - DNA, 15 bp, Homo sapiens
caaaatgtttaattt

SEQ ID NO: 52039 - DNA, 15 bp, Homo sapiens
acaaaatgtttaatt

SEQ ID NO: 52040 - DNA, 15 bp, Homo sapiens
cacaaaatgtttaat

SEQ ID NO: 52041 - DNA, 15 bp, Homo sapiens
ccacaaaatgtttaa

SEQ ID NO: 52042 - DNA, 15 bp, Homo sapiens
cccacaaaatgttta

SEQ ID NO: 52043 - DNA, 15 bp, Homo sapiens
ccccacaaaatgttt

SEQ ID NO: 52044 - DNA, 15 bp, Homo sapiens
cccccacaaaatgtt

SEQ ID NO: 52045 - DNA, 15 bp, Homo sapiens
acccccacaaaatgt

SEQ ID NO: 52046 - DNA, 15 bp, Homo sapiens
aacccccacaaaatg

SEQ ID NO: 52047 - DNA, 15 bp, Homo sapiens
caacccccacaaaat

SEQ ID NO: 52048 - DNA, 15 bp, Homo sapiens
acaacccccacaaaa

SEQ ID NO: 52049 - DNA, 15 bp, Homo sapiens
aacaacccccacaaa

SEQ ID NO: 52050 - DNA, 15 bp, Homo sapiens
caacaacccccacaa

SEQ ID NO: 52051 - DNA, 15 bp, Homo sapiens
tcaacaacccccaca

SEQ ID NO: 52052 - DNA, 15 bp, Homo sapiens
gtcaacaacccccac

SEQ ID NO: 52053 - DNA, 15 bp, Homo sapiens
agtcaacaaccccca

SEQ ID NO: 52054 - DNA, 15 bp, Homo sapiens
aagtcaacaaccccc

SEQ ID NO: 52055 - DNA, 15 bp, Homo sapiens
caagtcaacaacccc

SEQ ID NO: 52056 - DNA, 15 bp, Homo sapiens
acaagtcaacaaccc

SEQ ID NO: 52057 - DNA, 15 bp, Homo sapiens
tacaagtcaacaacc

SEQ ID NO: 52058 - DNA, 15 bp, Homo sapiens
atacaagtcaacaac

SEQ ID NO: 52059 - DNA, 15 bp, Homo sapiens
catacaagtcaacaa

SEQ ID NO: 52060 - DNA, 15 bp, Homo sapiens
acatacaagtcaaca

SEQ ID NO: 52061 - DNA, 15 bp, Homo sapiens
tacatacaagtcaac

SEQ ID NO: 52062 - DNA, 15 bp, Homo sapiens
atacatacaagtcaa

SEQ ID NO: 52063 - DNA, 15 bp, Homo sapiens
catacatacaagtca

SEQ ID NO: 52064 - DNA, 15 bp, Homo sapiens
acatacatacaagtc

SEQ ID NO: 52065 - DNA, 15 bp, Homo sapiens
cacatacatacaagt

SEQ ID NO: 52066 - DNA, 15 bp, Homo sapiens
tcacatacatacaag

SEQ ID NO: 52067 - DNA, 15 bp, Homo sapiens
atcacatacatacaa

SEQ ID NO: 52068 - DNA, 15 bp, Homo sapiens
catcacatacataca

SEQ ID NO: 52069 - DNA, 15 bp, Homo sapiens
acatcacatacatac

SEQ ID NO: 52070 - DNA, 15 bp, Homo sapiens
cacatcacatacata

SEQ ID NO: 52071 - DNA, 15 bp, Homo sapiens
acacatcacatacat

SEQ ID NO: 52072 - DNA, 15 bp, Homo sapiens
cacacatcacataca

SEQ ID NO: 52073 - DNA, 15 bp, Homo sapiens
acacacatcacatac

SEQ ID NO: 52074 - DNA, 15 bp, Homo sapiens
aacacacatcacata

SEQ ID NO: 52075 - DNA, 15 bp, Homo sapiens
aaacacacatcacat

SEQ ID NO: 52076 - DNA, 15 bp, Homo sapiens
taaacacacatcaca

SEQ ID NO: 52077 - DNA, 15 bp, Homo sapiens
ttaaacacacatcac

SEQ ID NO: 52078 - DNA, 15 bp, Homo sapiens
attaaacacacatca

SEQ ID NO: 52079 - DNA, 15 bp, Homo sapiens
aattaaacacacatc

SEQ ID NO: 52080 - DNA, 15 bp, Homo sapiens
gaattaaacacacat

SEQ ID NO: 52081 - DNA, 15 bp, Homo sapiens
agaattaaacacaca

SEQ ID NO: 52082 - DNA, 15 bp, Homo sapiens
tagaattaaacacac

SEQ ID NO: 52083 - DNA, 15 bp, Homo sapiens
ctagaattaaacaca

SEQ ID NO: 52084 - DNA, 15 bp, Homo sapiens
cctagaattaaacac

SEQ ID NO: 52085 - DNA, 15 bp, Homo sapiens
tcctagaattaaaca

SEQ ID NO: 52086 - DNA, 15 bp, Homo sapiens
ctcctagaattaaac

SEQ ID NO: 52087 - DNA, 15 bp, Homo sapiens
actcctagaattaaa

SEQ ID NO: 52088 - DNA, 15 bp, Homo sapiens
tactcctagaattaa

SEQ ID NO: 52089 - DNA, 15 bp, Homo sapiens
gtactcctagaatta

SEQ ID NO: 52090 - DNA, 15 bp, Homo sapiens
tgtactcctagaatt

SEQ ID NO: 52091 - DNA, 15 bp, Homo sapiens
ctgtactcctagaat

SEQ ID NO: 52092 - DNA, 15 bp, Homo sapiens
gctgtactcctagaa

SEQ ID NO: 52093 - DNA, 15 bp, Homo sapiens
agctgtactcctaga

SEQ ID NO: 52094 - DNA, 15 bp, Homo sapiens
cagctgtactcctag

SEQ ID NO: 52095 - DNA, 15 bp, Homo sapiens
tcagctgtactccta

SEQ ID NO: 52096 - DNA, 15 bp, Homo sapiens
atcagctgtactcct

SEQ ID NO: 52097 - DNA, 15 bp, Homo sapiens
catcagctgtactcc

SEQ ID NO: 52098 - DNA, 15 bp, Homo sapiens
tcatcagctgtactc

SEQ ID NO: 52099 - DNA, 15 bp, Homo sapiens
ttcatcagctgtact

SEQ ID NO: 52100 - DNA, 15 bp, Homo sapiens
cttcatcagctgtac

SEQ ID NO: 52101 - DNA, 15 bp, Homo sapiens
tcttcatcagctgta

SEQ ID NO: 52102 - DNA, 15 bp, Homo sapiens
ttcttcatcagctgt

SEQ ID NO: 52103 - DNA, 15 bp, Homo sapiens
gttcttcatcagctg

SEQ ID NO: 52104 - DNA, 15 bp, Homo sapiens
agttcttcatcagct

SEQ ID NO: 52105 - DNA, 15 bp, Homo sapiens
aagttcttcatcagc

SEQ ID NO: 52106 - DNA, 15 bp, Homo sapiens
caagttcttcatcag

SEQ ID NO: 52107 - DNA, 15 bp, Homo sapiens
gcaagttcttcatca

SEQ ID NO: 52108 - DNA, 15 bp, Homo sapiens
agcaagttcttcatc

SEQ ID NO: 52109 - DNA, 15 bp, Homo sapiens
aagcaagttcttcat

SEQ ID NO: 52110 - DNA, 15 bp, Homo sapiens
caagcaagttcttca

SEQ ID NO: 52111 - DNA, 15 bp, Homo sapiens
tcaagcaagttcttc

SEQ ID NO: 52112 - DNA, 15 bp, Homo sapiens
gtcaagcaagttctt

SEQ ID NO: 52113 - DNA, 15 bp, Homo sapiens
tgtcaagcaagttct

SEQ ID NO: 52114 - DNA, 15 bp, Homo sapiens
ttgtcaagcaagttc

SEQ ID NO: 52115 - DNA, 15 bp, Homo sapiens
cttgtcaagcaagtt

SEQ ID NO: 52116 - DNA, 15 bp, Homo sapiens
acttgtcaagcaagt

SEQ ID NO: 52117 - DNA, 15 bp, Homo sapiens
aacttgtcaagcaag

SEQ ID NO: 52118 - DNA, 15 bp, Homo sapiens
aaacttgtcaagcaa

SEQ ID NO: 52119 - DNA, 15 bp, Homo sapiens
aaaacttgtcaagca

SEQ ID NO: 52120 - DNA, 15 bp, Homo sapiens
aaaaacttgtcaagc

SEQ ID NO: 52121 - DNA, 15 bp, Homo sapiens
taaaaacttgtcaag

SEQ ID NO: 52122 - DNA, 15 bp, Homo sapiens
ttaaaaacttgtcaa

SEQ ID NO: 52123 - DNA, 15 bp, Homo sapiens
gttaaaaacttgtca

SEQ ID NO: 52124 - DNA, 15 bp, Homo sapiens
agttaaaaacttgtc

SEQ ID NO: 52125 - DNA, 15 bp, Homo sapiens
aagttaaaaacttgt

SEQ ID NO: 52126 - DNA, 15 bp, Homo sapiens
taagttaaaaacttg

SEQ ID NO: 52127 - DNA, 15 bp, Homo sapiens
ataagttaaaaactt

SEQ ID NO: 52128 - DNA, 15 bp, Homo sapiens
cataagttaaaaact

SEQ ID NO: 52129 - DNA, 15 bp, Homo sapiens
acataagttaaaaac

SEQ ID NO: 52130 - DNA, 15 bp, Homo sapiens
tacataagttaaaaa

SEQ ID NO: 52131 - DNA, 15 bp, Homo sapiens
atacataagttaaaa

SEQ ID NO: 52132 - DNA, 15 bp, Homo sapiens
aatacataagttaaa

SEQ ID NO: 52133 - DNA, 15 bp, Homo sapiens
taatacataagttaa

SEQ ID NO: 52134 - DNA, 15 bp, Homo sapiens
ataatacataagtta

SEQ ID NO: 52135 - DNA, 15 bp, Homo sapiens
aataatacataagtt

SEQ ID NO: 52136 - DNA, 15 bp, Homo sapiens
aaataatacataagt

SEQ ID NO: 52137 - DNA, 15 bp, Homo sapiens
gaaataatacataag

SEQ ID NO: 52138 - DNA, 15 bp, Homo sapiens
cgaaataatacataa

SEQ ID NO: 52139 - DNA, 15 bp, Homo sapiens
tcgaaataatacata

SEQ ID NO: 52140 - DNA, 15 bp, Homo sapiens
ttcgaaataatacat

SEQ ID NO: 52141 - DNA, 15 bp, Homo sapiens
cttcgaaataataca

SEQ ID NO: 52142 - DNA, 15 bp, Homo sapiens
gcttcgaaataatac

SEQ ID NO: 52143 - DNA, 15 bp, Homo sapiens
tgcttcgaaataata

SEQ ID NO: 52144 - DNA, 15 bp, Homo sapiens
ctgcttcgaaataat

SEQ ID NO: 52145 - DNA, 15 bp, Homo sapiens
actgcttcgaaataa

SEQ ID NO: 52146 - DNA, 15 bp, Homo sapiens
cactgcttcgaaata

SEQ ID NO: 52147 - DNA, 15 bp, Homo sapiens
acactgcttcgaaat

SEQ ID NO: 52148 - DNA, 15 bp, Homo sapiens
aacactgcttcgaaa

SEQ ID NO: 52149 - DNA, 15 bp, Homo sapiens
aaacactgcttcgaa

SEQ ID NO: 52150 - DNA, 15 bp, Homo sapiens
taaacactgcttcga

SEQ ID NO: 52151 - DNA, 15 bp, Homo sapiens
gtaaacactgcttcg

SEQ ID NO: 52152 - DNA, 15 bp, Homo sapiens
cgtaaacactgcttc

SEQ ID NO: 52153 - DNA, 15 bp, Homo sapiens
acgtaaacactgctt

SEQ ID NO: 52154 - DNA, 15 bp, Homo sapiens
tacgtaaacactgct

SEQ ID NO: 52155 - DNA, 15 bp, Homo sapiens
ctacgtaaacactgc

SEQ ID NO: 52156 - DNA, 15 bp, Homo sapiens
gctacgtaaacactg

SEQ ID NO: 52157 - DNA, 15 bp, Homo sapiens
tgctacgtaaacact

SEQ ID NO: 52158 - DNA, 15 bp, Homo sapiens
ctgctacgtaaacac

SEQ ID NO: 52159 - DNA, 15 bp, Homo sapiens
actgctacgtaaaca

SEQ ID NO: 52160 - DNA, 15 bp, Homo sapiens
tactgctacgtaaac

SEQ ID NO: 52161 - DNA, 15 bp, Homo sapiens
ttactgctacgtaaa

SEQ ID NO: 52162 - DNA, 15 bp, Homo sapiens
gttactgctacgtaa

SEQ ID NO: 52163 - DNA, 15 bp, Homo sapiens
tgttactgctacgta

SEQ ID NO: 52164 - DNA, 15 bp, Homo sapiens
atgttactgctacgt

SEQ ID NO: 52165 - DNA, 15 bp, Homo sapiens
catgttactgctacg

SEQ ID NO: 52166 - DNA, 15 bp, Homo sapiens
tcatgttactgctac

SEQ ID NO: 52167 - DNA, 15 bp, Homo sapiens
ttcatgttactgcta

SEQ ID NO: 52168 - DNA, 15 bp, Homo sapiens
tttcatgttactgct

SEQ ID NO: 52169 - DNA, 15 bp, Homo sapiens
ctttcatgttactgc

SEQ ID NO: 52170 - DNA, 15 bp, Homo sapiens
actttcatgttactg

SEQ ID NO: 52171 - DNA, 15 bp, Homo sapiens
aactttcatgttact

SEQ ID NO: 52172 - DNA, 15 bp, Homo sapiens
aaactttcatgttac

SEQ ID NO: 52173 - DNA, 15 bp, Homo sapiens
gaaactttcatgtta

SEQ ID NO: 52174 - DNA, 15 bp, Homo sapiens
agaaactttcatgtt

SEQ ID NO: 52175 - DNA, 15 bp, Homo sapiens
tagaaactttcatgt

SEQ ID NO: 52176 - DNA, 15 bp, Homo sapiens
ttagaaactttcatg

SEQ ID NO: 52177 - DNA, 15 bp, Homo sapiens
attagaaactttcat

SEQ ID NO: 52178 - DNA, 15 bp, Homo sapiens
tattagaaactttca

SEQ ID NO: 52179 - DNA, 15 bp, Homo sapiens
ttattagaaactttc

SEQ ID NO: 52180 - DNA, 15 bp, Homo sapiens
tttattagaaacttt

SEQ ID NO: 52181 - DNA, 15 bp, Homo sapiens
ttttattagaaactt

SEQ ID NO: 52182 - DNA, 15 bp, Homo sapiens
attttattagaaact

SEQ ID NO: 52183 - DNA, 15 bp, Homo sapiens
tattttattagaaac

SEQ ID NO: 52184 - DNA, 15 bp, Homo sapiens
gtattttattagaaa

SEQ ID NO: 52185 - DNA, 15 bp, Homo sapiens
ggtattttattagaa

SEQ ID NO: 52186 - DNA, 15 bp, Homo sapiens
gggtattttattaga

SEQ ID NO: 52187 - DNA, 15 bp, Homo sapiens
tgggtattttattag

SEQ ID NO: 52188 - DNA, 15 bp, Homo sapiens
ttgggtattttatta

SEQ ID NO: 52189 - DNA, 15 bp, Homo sapiens
attgggtattttatt

SEQ ID NO: 52190 - DNA, 15 bp, Homo sapiens
cattgggtattttat

SEQ ID NO: 52191 - DNA, 15 bp, Homo sapiens
acattgggtatttta

SEQ ID NO: 52192 - DNA, 15 bp, Homo sapiens
tacattgggtatttt

SEQ ID NO: 52193 - DNA, 15 bp, Homo sapiens
gtacattgggtattt

SEQ ID NO: 52194 - DNA, 15 bp, Homo sapiens
tgtacattgggtatt

SEQ ID NO: 52195 - DNA, 15 bp, Homo sapiens
gtgtacattgggtat

SEQ ID NO: 52196 - DNA, 15 bp, Homo sapiens
tgtgtacattgggta

SEQ ID NO: 52197 - DNA, 15 bp, Homo sapiens
ctgtgtacattgggt

SEQ ID NO: 52198 - DNA, 15 bp, Homo sapiens
gctgtgtacattggg

SEQ ID NO: 52199 - DNA, 15 bp, Homo sapiens
cgctgtgtacattgg

SEQ ID NO: 52200 - DNA, 15 bp, Homo sapiens
acgctgtgtacattg

SEQ ID NO: 52201 - DNA, 15 bp, Homo sapiens
gacgctgtgtacatt

SEQ ID NO: 52202 - DNA, 15 bp, Homo sapiens
tgacgctgtgtacat

SEQ ID NO: 52203 - DNA, 15 bp, Homo sapiens
ttgacgctgtgtaca

SEQ ID NO: 52204 - DNA, 15 bp, Homo sapiens
tttgacgctgtgtac

SEQ ID NO: 52205 - DNA, 15 bp, Homo sapiens
ttttgacgctgtgta

SEQ ID NO: 52206 - DNA, 15 bp, Homo sapiens
tttttgacgctgtgt

SEQ ID NO: 52207 - DNA, 15 bp, Homo sapiens
ttttttgacgctgtg

SEQ ID NO: 52208 - DNA, 15 bp, Homo sapiens
cttttttgacgctgt

SEQ ID NO: 52209 - DNA, 15 bp, Homo sapiens
gcttttttgacgctg

SEQ ID NO: 52210 - DNA, 15 bp, Homo sapiens
agcttttttgacgct

SEQ ID NO: 52211 - DNA, 15 bp, Homo sapiens
cagcttttttgacgc

SEQ ID NO: 52212 - DNA, 15 bp, Homo sapiens
gcagcttttttgacg

SEQ ID NO: 52213 - DNA, 15 bp, Homo sapiens
tgcagcttttttgac

SEQ ID NO: 52214 - DNA, 15 bp, Homo sapiens
atgcagcttttttga

SEQ ID NO: 52215 - DNA, 15 bp, Homo sapiens
aatgcagcttttttg

SEQ ID NO: 52216 - DNA, 15 bp, Homo sapiens
aaatgcagctttttt

SEQ ID NO: 52217 - DNA, 15 bp, Homo sapiens
aaaatgcagcttttt

SEQ ID NO: 52218 - DNA, 15 bp, Homo sapiens
aaaaatgcagctttt

SEQ ID NO: 52219 - DNA, 15 bp, Homo sapiens
gaaaaatgcagcttt

SEQ ID NO: 52220 - DNA, 15 bp, Homo sapiens
ggaaaaatgcagctt

SEQ ID NO: 52221 - DNA, 15 bp, Homo sapiens
aggaaaaatgcagct

SEQ ID NO: 52222 - DNA, 15 bp, Homo sapiens
aaggaaaaatgcagc

SEQ ID NO: 52223 - DNA, 15 bp, Homo sapiens
aaaggaaaaatgcag

SEQ ID NO: 52224 - DNA, 15 bp, Homo sapiens
aaaaggaaaaatgca

SEQ ID NO: 52225 - DNA, 15 bp, Homo sapiens
gaaaaggaaaaatgc

SEQ ID NO: 52226 - DNA, 15 bp, Homo sapiens
ggaaaaggaaaaatg

SEQ ID NO: 52227 - DNA, 15 bp, Homo sapiens
aggaaaaggaaaaat

SEQ ID NO: 52228 - DNA, 15 bp, Homo sapiens
taggaaaaggaaaaa

SEQ ID NO: 52229 - DNA, 15 bp, Homo sapiens
ttaggaaaaggaaaa

SEQ ID NO: 52230 - DNA, 15 bp, Homo sapiens
attaggaaaaggaaa

SEQ ID NO: 52231 - DNA, 15 bp, Homo sapiens
aattaggaaaaggaa

SEQ ID NO: 52232 - DNA, 15 bp, Homo sapiens
gaattaggaaaagga

SEQ ID NO: 52233 - DNA, 15 bp, Homo sapiens
agaattaggaaaagg

SEQ ID NO: 52234 - DNA, 15 bp, Homo sapiens
aagaattaggaaaag

SEQ ID NO: 52235 - DNA, 15 bp, Homo sapiens
gaagaattaggaaaa

SEQ ID NO: 52236 - DNA, 15 bp, Homo sapiens
cgaagaattaggaaa

SEQ ID NO: 52237 - DNA, 15 bp, Homo sapiens
acgaagaattaggaa

SEQ ID NO: 52238 - DNA, 15 bp, Homo sapiens
aacgaagaattagga

SEQ ID NO: 52239 - DNA, 15 bp, Homo sapiens
caacgaagaattagg

SEQ ID NO: 52240 - DNA, 15 bp, Homo sapiens
acaacgaagaattag

SEQ ID NO: 52241 - DNA, 15 bp, Homo sapiens
aacaacgaagaatta

SEQ ID NO: 52242 - DNA, 15 bp, Homo sapiens
aaacaacgaagaatt

SEQ ID NO: 52243 - DNA, 15 bp, Homo sapiens
caaacaacgaagaat

SEQ ID NO: 52244 - DNA, 15 bp, Homo sapiens
gcaaacaacgaagaa

SEQ ID NO: 52245 - DNA, 15 bp, Homo sapiens
agcaaacaacgaaga

SEQ ID NO: 52246 - DNA, 15 bp, Homo sapiens
cagcaaacaacgaag

SEQ ID NO: 52247 - DNA, 15 bp, Homo sapiens
tcagcaaacaacgaa

SEQ ID NO: 52248 - DNA, 15 bp, Homo sapiens
ttcagcaaacaacga

SEQ ID NO: 52249 - DNA, 15 bp, Homo sapiens
tttcagcaaacaacg

SEQ ID NO: 52250 - DNA, 15 bp, Homo sapiens
gatttcagcaaacaa

SEQ ID NO: 52251 - DNA, 15 bp, Homo sapiens
agatttcagcaaaca

SEQ ID NO: 52252 - DNA, 15 bp, Homo sapiens
cagatttcagcaaac

SEQ ID NO: 52253 - DNA, 15 bp, Homo sapiens
ccagatttcagcaaa

SEQ ID NO: 52254 - DNA, 15 bp, Homo sapiens
cccagatttcagcaa

SEQ ID NO: 52255 - DNA, 15 bp, Homo sapiens
ccccagatttcagca

SEQ ID NO: 52256 - DNA, 15 bp, Homo sapiens
gccccagatttcagc

SEQ ID NO: 52257 - DNA, 15 bp, Homo sapiens
tgccccagatttcag

SEQ ID NO: 52258 - DNA, 15 bp, Homo sapiens
ttgccccagatttca

SEQ ID NO: 52259 - DNA, 15 bp, Homo sapiens
tttgccccagatttc

SEQ ID NO: 52260 - DNA, 15 bp, Homo sapiens
ctttgccccagattt

SEQ ID NO: 52261 - DNA, 15 bp, Homo sapiens
cctttgccccagatt

SEQ ID NO: 52262 - DNA, 15 bp, Homo sapiens
acctttgccccagat

SEQ ID NO: 52263 - DNA, 15 bp, Homo sapiens
cacctttgccccaga

SEQ ID NO: 52264 - DNA, 15 bp, Homo sapiens
gcacctttgccccag

SEQ ID NO: 52265 - DNA, 15 bp, Homo sapiens
cgcacctttgcccca

SEQ ID NO: 52266 - DNA, 15 bp, Homo sapiens
ccgcacctttgcccc

SEQ ID NO: 52267 - DNA, 15 bp, Homo sapiens
cccgcacctttgccc

SEQ ID NO: 52268 - DNA, 15 bp, Homo sapiens
tcccgcacctttgcc

SEQ ID NO: 52269 - DNA, 15 bp, Homo sapiens
ctcccgcacctttgc

SEQ ID NO: 52270 - DNA, 15 bp, Homo sapiens
cctcccgcacctttg

SEQ ID NO: 52271 - DNA, 15 bp, Homo sapiens
ccctcccgcaccttt

SEQ ID NO: 52272 - DNA, 15 bp, Homo sapiens
cccctcccgcacctt

SEQ ID NO: 52273 - DNA, 15 bp, Homo sapiens
ccccctcccgcacct

SEQ ID NO: 52274 - DNA, 15 bp, Homo sapiens
gccccctcccgcacc

SEQ ID NO: 52275 - DNA, 15 bp, Homo sapiens
agccccctcccgcac

SEQ ID NO: 52276 - DNA, 15 bp, Homo sapiens
tagccccctcccgca

SEQ ID NO: 52277 - DNA, 15 bp, Homo sapiens
ttagccccctcccgc

SEQ ID NO: 52278 - DNA, 15 bp, Homo sapiens
tttagccccctcccg

SEQ ID NO: 52279 - DNA, 15 bp, Homo sapiens
atttagccccctccc

SEQ ID NO: 52280 - DNA, 15 bp, Homo sapiens
catttagccccctcc

SEQ ID NO: 52281 - DNA, 15 bp, Homo sapiens
tcatttagccccctc

SEQ ID NO: 52282 - DNA, 15 bp, Homo sapiens
gtcatttagccccct

SEQ ID NO: 52283 - DNA, 15 bp, Homo sapiens
agtcatttagccccc

SEQ ID NO: 52284 - DNA, 15 bp, Homo sapiens
cagtcatttagcccc

SEQ ID NO: 52285 - DNA, 15 bp, Homo sapiens
ccagtcatttagccc

SEQ ID NO: 52286 - DNA, 15 bp, Homo sapiens
cccagtcatttagcc

SEQ ID NO: 52287 - DNA, 15 bp, Homo sapiens
tcccagtcatttagc

SEQ ID NO: 52288 - DNA, 15 bp, Homo sapiens
atcccagtcatttag

SEQ ID NO: 52289 - DNA, 15 bp, Homo sapiens
tatcccagtcattta

SEQ ID NO: 52290 - DNA, 15 bp, Homo sapiens
atatcccagtcattt

SEQ ID NO: 52291 - DNA, 15 bp, Homo sapiens
catatcccagtcatt

SEQ ID NO: 52292 - DNA, 15 bp, Homo sapiens
tcatatcccagtcat

SEQ ID NO: 52293 - DNA, 15 bp, Homo sapiens
ttcatatcccagtca

SEQ ID NO: 52294 - DNA, 15 bp, Homo sapiens
cttcatatcccagtc

SEQ ID NO: 52295 - DNA, 15 bp, Homo sapiens
acttcatatcccagt

SEQ ID NO: 52296 - DNA, 15 bp, Homo sapiens
tacttcatatcccag

SEQ ID NO: 52297 - DNA, 15 bp, Homo sapiens
ctacttcatatccca

SEQ ID NO: 52298 - DNA, 15 bp, Homo sapiens
cctacttcatatccc

SEQ ID NO: 52299 - DNA, 15 bp, Homo sapiens
tcctacttcatatcc

SEQ ID NO: 52300 - DNA, 15 bp, Homo sapiens
ttcctacttcatatc

SEQ ID NO: 52301 - DNA, 15 bp, Homo sapiens
attcctacttcatat

SEQ ID NO: 52302 - DNA, 15 bp, Homo sapiens
cattcctacttcata

SEQ ID NO: 52303 - DNA, 15 bp, Homo sapiens
ccattcctacttcat

SEQ ID NO: 52304 - DNA, 15 bp, Homo sapiens
cccattcctacttca

SEQ ID NO: 52305 - DNA, 15 bp, Homo sapiens
tcccattcctacttc

SEQ ID NO: 52306 - DNA, 15 bp, Homo sapiens
ctcccattcctactt

SEQ ID NO: 52307 - DNA, 15 bp, Homo sapiens
tctcccattcctact

SEQ ID NO: 52308 - DNA, 15 bp, Homo sapiens
ctctcccattcctac

SEQ ID NO: 52309 - DNA, 15 bp, Homo sapiens
cctctcccattccta

SEQ ID NO: 52310 - DNA, 15 bp, Homo sapiens
tcctctcccattcct

SEQ ID NO: 52311 - DNA, 15 bp, Homo sapiens
ttcctctcccattcc

SEQ ID NO: 52312 - DNA, 15 bp, Homo sapiens
tttcctctcccattc

SEQ ID NO: 52313 - DNA, 15 bp, Homo sapiens
ctttcctctcccatt

SEQ ID NO: 52314 - DNA, 15 bp, Homo sapiens
tctttcctctcccat

SEQ ID NO: 52315 - DNA, 15 bp, Homo sapiens
ttctttcctctccca

SEQ ID NO: 52316 - DNA, 15 bp, Homo sapiens
tttctttcctctccc

SEQ ID NO: 52317 - DNA, 15 bp, Homo sapiens
atttctttcctctcc

SEQ ID NO: 52318 - DNA, 15 bp, Homo sapiens
tatttctttcctctc

SEQ ID NO: 52319 - DNA, 15 bp, Homo sapiens
ctatttctttcctct

SEQ ID NO: 52320 - DNA, 15 bp, Homo sapiens
tctatttctttcctc

SEQ ID NO: 52321 - DNA, 15 bp, Homo sapiens
atctatttctttcct

SEQ ID NO: 52322 - DNA, 15 bp, Homo sapiens
catctatttctttcc

SEQ ID NO: 52323 - DNA, 15 bp, Homo sapiens
ccatctatttctttc

SEQ ID NO: 52324 - DNA, 15 bp, Homo sapiens
cccatctatttcttt

SEQ ID NO: 52325 - DNA, 15 bp, Homo sapiens
tcccatctatttctt

SEQ ID NO: 52326 - DNA, 15 bp, Homo sapiens
ttcccatctatttct

SEQ ID NO: 52327 - DNA, 15 bp, Homo sapiens
gttcccatctatttc

SEQ ID NO: 52328 - DNA, 15 bp, Homo sapiens
agttcccatctattt

SEQ ID NO: 52329 - DNA, 15 bp, Homo sapiens
gagttcccatctatt

SEQ ID NO: 52330 - DNA, 15 bp, Homo sapiens
tgagttcccatctat

SEQ ID NO: 52331 - DNA, 15 bp, Homo sapiens
ctgagttcccatcta

SEQ ID NO: 52332 - DNA, 15 bp, Homo sapiens
actgagttcccatct

SEQ ID NO: 52333 - DNA, 15 bp, Homo sapiens
gactgagttcccatc

SEQ ID NO: 52334 - DNA, 15 bp, Homo sapiens
tgactgagttcccat

SEQ ID NO: 52335 - DNA, 15 bp, Homo sapiens
atgactgagttccca

SEQ ID NO: 52336 - DNA, 15 bp, Homo sapiens
aatgactgagttccc

SEQ ID NO: 52337 - DNA, 15 bp, Homo sapiens
aaatgactgagttcc

SEQ ID NO: 52338 - DNA, 15 bp, Homo sapiens
caaatgactgagttc

SEQ ID NO: 52339 - DNA, 15 bp, Homo sapiens
ccaaatgactgagtt

SEQ ID NO: 52340 - DNA, 15 bp, Homo sapiens
cccaaatgactgagt

SEQ ID NO: 52341 - DNA, 15 bp, Homo sapiens
tcccaaatgactgag

SEQ ID NO: 52342 - DNA, 15 bp, Homo sapiens
ttcccaaatgactga

SEQ ID NO: 52343 - DNA, 15 bp, Homo sapiens
attcccaaatgactg

SEQ ID NO: 52344 - DNA, 15 bp, Homo sapiens
cattcccaaatgact

SEQ ID NO: 52345 - DNA, 15 bp, Homo sapiens
tcattcccaaatgac

SEQ ID NO: 52346 - DNA, 15 bp, Homo sapiens
atcattcccaaatga

SEQ ID NO: 52347 - DNA, 15 bp, Homo sapiens
aatcattcccaaatg

SEQ ID NO: 52348 - DNA, 15 bp, Homo sapiens
gaatcattcccaaat

SEQ ID NO: 52349 - DNA, 15 bp, Homo sapiens
tgaatcattcccaaa

SEQ ID NO: 52350 - DNA, 15 bp, Homo sapiens
atgaatcattcccaa

SEQ ID NO: 52351 - DNA, 15 bp, Homo sapiens
tatgaatcattccca

SEQ ID NO: 52352 - DNA, 15 bp, Homo sapiens
atatgaatcattccc

SEQ ID NO: 52353 - DNA, 15 bp, Homo sapiens
catatgaatcattcc

SEQ ID NO: 52354 - DNA, 15 bp, Homo sapiens
ccatatgaatcattc

SEQ ID NO: 52355 - DNA, 15 bp, Homo sapiens
tccatatgaatcatt

SEQ ID NO: 52356 - DNA, 15 bp, Homo sapiens
ttccatatgaatcat

SEQ ID NO: 52357 - DNA, 15 bp, Homo sapiens
attccatatgaatca

SEQ ID NO: 52358 - DNA, 15 bp, Homo sapiens
cattccatatgaatc

SEQ ID NO: 52359 - DNA, 15 bp, Homo sapiens
acattccatatgaat

SEQ ID NO: 52360 - DNA, 15 bp, Homo sapiens
aacattccatatgaa

SEQ ID NO: 52361 - DNA, 15 bp, Homo sapiens
aaacattccatatga

SEQ ID NO: 52362 - DNA, 15 bp, Homo sapiens
aaaacattccatatg

SEQ ID NO: 52363 - DNA, 15 bp, Homo sapiens
aaaaacattccatat

SEQ ID NO: 52364 - DNA, 15 bp, Homo sapiens
taaaaacattccata

SEQ ID NO: 52365 - DNA, 15 bp, Homo sapiens
gtaaaaacattccat

SEQ ID NO: 52366 - DNA, 15 bp, Homo sapiens
agtaaaaacattcca

SEQ ID NO: 52367 - DNA, 15 bp, Homo sapiens
cagtaaaaacattcc

SEQ ID NO: 52368 - DNA, 15 bp, Homo sapiens
gcagtaaaaacattc

SEQ ID NO: 52369 - DNA, 15 bp, Homo sapiens
agcagtaaaaacatt

SEQ ID NO: 52370 - DNA, 15 bp, Homo sapiens
aagcagtaaaaacat

SEQ ID NO: 52371 - DNA, 15 bp, Homo sapiens
gaagcagtaaaaaca

SEQ ID NO: 52372 - DNA, 15 bp, Homo sapiens
ggaagcagtaaaaac

SEQ ID NO: 52373 - DNA, 15 bp, Homo sapiens
tggaagcagtaaaaa

SEQ ID NO: 52374 - DNA, 15 bp, Homo sapiens
gtggaagcagtaaaa

SEQ ID NO: 52375 - DNA, 15 bp, Homo sapiens
agtggaagcagtaaa

SEQ ID NO: 52376 - DNA, 15 bp, Homo sapiens
gagtggaagcagtaa

SEQ ID NO: 52377 - DNA, 15 bp, Homo sapiens
ggagtggaagcagta

SEQ ID NO: 52378 - DNA, 15 bp, Homo sapiens
aggagtggaagcagt

SEQ ID NO: 52379 - DNA, 15 bp, Homo sapiens
caggagtggaagcag

SEQ ID NO: 52380 - DNA, 15 bp, Homo sapiens
acaggagtggaagca

SEQ ID NO: 52381 - DNA, 15 bp, Homo sapiens
gacaggagtggaagc

SEQ ID NO: 52382 - DNA, 15 bp, Homo sapiens
agacaggagtggaag

SEQ ID NO: 52383 - DNA, 15 bp, Homo sapiens
cagacaggagtggaa

SEQ ID NO: 52384 - DNA, 15 bp, Homo sapiens
gcagacaggagtgga

SEQ ID NO: 52385 - DNA, 15 bp, Homo sapiens
ggcagacaggagtgg

SEQ ID NO: 52386 - DNA, 15 bp, Homo sapiens
aggcagacaggagtg

SEQ ID NO: 52387 - DNA, 15 bp, Homo sapiens
aaggcagacaggagt

SEQ ID NO: 52388 - DNA, 15 bp, Homo sapiens
gaaggcagacaggag

SEQ ID NO: 52389 - DNA, 15 bp, Homo sapiens
ggaaggcagacagga

SEQ ID NO: 52390 - DNA, 15 bp, Homo sapiens
tggaaggcagacagg

SEQ ID NO: 52391 - DNA, 15 bp, Homo sapiens
ttggaaggcagacag

SEQ ID NO: 52392 - DNA, 15 bp, Homo sapiens
attggaaggcagaca

SEQ ID NO: 52393 - DNA, 15 bp, Homo sapiens
aattggaaggcagac

SEQ ID NO: 52394 - DNA, 15 bp, Homo sapiens
aaattggaaggcaga

SEQ ID NO: 52395 - DNA, 15 bp, Homo sapiens
taaattggaaggcag

SEQ ID NO: 52396 - DNA, 15 bp, Homo sapiens
ataaattggaaggca

SEQ ID NO: 52397 - DNA, 15 bp, Homo sapiens
aataaattggaaggc

SEQ ID NO: 52398 - DNA, 15 bp, Homo sapiens
gaataaattggaagg

SEQ ID NO: 52399 - DNA, 15 bp, Homo sapiens
agaataaattggaag

SEQ ID NO: 52400 - DNA, 15 bp, Homo sapiens
gagaataaattggaa

SEQ ID NO: 52401 - DNA, 15 bp, Homo sapiens
tgagaataaattgga

SEQ ID NO: 52402 - DNA, 15 bp, Homo sapiens
ttgagaataaattgg

SEQ ID NO: 52403 - DNA, 15 bp, Homo sapiens
attgagaataaattg

SEQ ID NO: 52404 - DNA, 15 bp, Homo sapiens
gattgagaataaatt

SEQ ID NO: 52405 - DNA, 15 bp, Homo sapiens
ggattgagaataaat

SEQ ID NO: 52406 - DNA, 15 bp, Homo sapiens
gggattgagaataaa

SEQ ID NO: 52407 - DNA, 15 bp, Homo sapiens
agggattgagaataa

SEQ ID NO: 52408 - DNA, 15 bp, Homo sapiens
gagggattgagaata

SEQ ID NO: 52409 - DNA, 15 bp, Homo sapiens
tgagggattgagaat

SEQ ID NO: 52410 - DNA, 15 bp, Homo sapiens
ctgagggattgagaa

SEQ ID NO: 52411 - DNA, 15 bp, Homo sapiens
tctgagggattgaga

SEQ ID NO: 52412 - DNA, 15 bp, Homo sapiens
ctctgagggattgag

SEQ ID NO: 52413 - DNA, 15 bp, Homo sapiens
actctgagggattga

SEQ ID NO: 52414 - DNA, 15 bp, Homo sapiens
cactctgagggattg

SEQ ID NO: 52415 - DNA, 15 bp, Homo sapiens
tcactctgagggatt

SEQ ID NO: 52416 - DNA, 15 bp, Homo sapiens
atcactctgagggat

SEQ ID NO: 52417 - DNA, 15 bp, Homo sapiens
gatcactctgaggga

SEQ ID NO: 52418 - DNA, 15 bp, Homo sapiens
agatcactctgaggg

SEQ ID NO: 52419 - DNA, 15 bp, Homo sapiens
aagatcactctgagg

SEQ ID NO: 52420 - DNA, 15 bp, Homo sapiens
taagatcactctgag

SEQ ID NO: 52421 - DNA, 15 bp, Homo sapiens
ttaagatcactctga

SEQ ID NO: 52422 - DNA, 15 bp, Homo sapiens
tttaagatcactctg

SEQ ID NO: 52423 - DNA, 15 bp, Homo sapiens
ttttaagatcactct

SEQ ID NO: 52424 - DNA, 15 bp, Homo sapiens
tttttaagatcactc

SEQ ID NO: 52425 - DNA, 15 bp, Homo sapiens
atttttaagatcact

SEQ ID NO: 52426 - DNA, 15 bp, Homo sapiens
tatttttaagatcac

SEQ ID NO: 52427 - DNA, 15 bp, Homo sapiens
ctatttttaagatca

SEQ ID NO: 52428 - DNA, 15 bp, Homo sapiens
tctatttttaagatc

SEQ ID NO: 52429 - DNA, 15 bp, Homo sapiens
gtctatttttaagat

SEQ ID NO: 52430 - DNA, 15 bp, Homo sapiens
agtctatttttaaga

SEQ ID NO: 52431 - DNA, 15 bp, Homo sapiens
aagtctatttttaag

SEQ ID NO: 52432 - DNA, 15 bp, Homo sapiens
caagtctatttttaa

SEQ ID NO: 52433 - DNA, 15 bp, Homo sapiens
tcaagtctattttta

SEQ ID NO: 52434 - DNA, 15 bp, Homo sapiens
atcaagtctattttt

SEQ ID NO: 52435 - DNA, 15 bp, Homo sapiens
aatcaagtctatttt

SEQ ID NO: 52436 - DNA, 15 bp, Homo sapiens
caatcaagtctattt

SEQ ID NO: 52437 - DNA, 15 bp, Homo sapiens
acaatcaagtctatt

SEQ ID NO: 52438 - DNA, 15 bp, Homo sapiens
cacaatcaagtctat

SEQ ID NO: 52439 - DNA, 15 bp, Homo sapiens
acacaatcaagtcta

SEQ ID NO: 52440 - DNA, 15 bp, Homo sapiens
gacacaatcaagtct

SEQ ID NO: 52441 - DNA, 15 bp, Homo sapiens
tgacacaatcaagtc

SEQ ID NO: 52442 - DNA, 15 bp, Homo sapiens
gtgacacaatcaagt

SEQ ID NO: 52443 - DNA, 15 bp, Homo sapiens
agtgacacaatcaag

SEQ ID NO: 52444 - DNA, 15 bp, Homo sapiens
aagtgacacaatcaa

SEQ ID NO: 52445 - DNA, 15 bp, Homo sapiens
gaagtgacacaatca

SEQ ID NO: 52446 - DNA, 15 bp, Homo sapiens
agaagtgacacaatc

SEQ ID NO: 52447 - DNA, 15 bp, Homo sapiens
cagaagtgacacaat

SEQ ID NO: 52448 - DNA, 15 bp, Homo sapiens
acagaagtgacacaa

SEQ ID NO: 52449 - DNA, 15 bp, Homo sapiens
aacagaagtgacaca

SEQ ID NO: 52450 - DNA, 15 bp, Homo sapiens
aaacagaagtgacac

SEQ ID NO: 52451 - DNA, 15 bp, Homo sapiens
taaacagaagtgaca

SEQ ID NO: 52452 - DNA, 15 bp, Homo sapiens
gtaaacagaagtgac

SEQ ID NO: 52453 - DNA, 15 bp, Homo sapiens
tgtaaacagaagtga

SEQ ID NO: 52454 - DNA, 15 bp, Homo sapiens
gtgtaaacagaagtg

SEQ ID NO: 52455 - DNA, 15 bp, Homo sapiens
agtgtaaacagaagt

SEQ ID NO: 52456 - DNA, 15 bp, Homo sapiens
aagtgtaaacagaag

SEQ ID NO: 52457 - DNA, 15 bp, Homo sapiens
aaagtgtaaacagaa

SEQ ID NO: 52458 - DNA, 15 bp, Homo sapiens
taaagtgtaaacaga

SEQ ID NO: 52459 - DNA, 15 bp, Homo sapiens
ataaagtgtaaacag

SEQ ID NO: 52460 - DNA, 15 bp, Homo sapiens
tataaagtgtaaaca

SEQ ID NO: 52461 - DNA, 15 bp, Homo sapiens
ttataaagtgtaaac

SEQ ID NO: 52462 - DNA, 15 bp, Homo sapiens
cttataaagtgtaaa

SEQ ID NO: 52463 - DNA, 15 bp, Homo sapiens
ccttataaagtgtaa

SEQ ID NO: 52464 - DNA, 15 bp, Homo sapiens
tccttataaagtgta

SEQ ID NO: 52465 - DNA, 15 bp, Homo sapiens
gtccttataaagtgt

SEQ ID NO: 52466 - DNA, 15 bp, Homo sapiens
ggtccttataaagtg

SEQ ID NO: 52467 - DNA, 15 bp, Homo sapiens
aggtccttataaagt

SEQ ID NO: 52468 - DNA, 15 bp, Homo sapiens
aaggtccttataaag

SEQ ID NO: 52469 - DNA, 15 bp, Homo sapiens
caaggtccttataaa

SEQ ID NO: 52470 - DNA, 15 bp, Homo sapiens
acaaggtccttataa

SEQ ID NO: 52471 - DNA, 15 bp, Homo sapiens
cacaaggtccttata

SEQ ID NO: 52472 - DNA, 15 bp, Homo sapiens
acacaaggtccttat

SEQ ID NO: 52473 - DNA, 15 bp, Homo sapiens
aacacaaggtcctta

SEQ ID NO: 52474 - DNA, 15 bp, Homo sapiens
aaacacaaggtcctt

SEQ ID NO: 52475 - DNA, 15 bp, Homo sapiens
aaaacacaaggtcct

SEQ ID NO: 52476 - DNA, 15 bp, Homo sapiens
aaaaacacaaggtcc

SEQ ID NO: 52477 - DNA, 15 bp, Homo sapiens
aaaaaacacaaggtc

SEQ ID NO: 52478 - DNA, 15 bp, Homo sapiens
aaaaaaacacaaggt

SEQ ID NO: 52479 - DNA, 15 bp, Homo sapiens
aaaaaaaacacaagg

SEQ ID NO: 52480 - DNA, 15 bp, Homo sapiens
aaaaaaaaacacaag

SEQ ID NO: 52481 - DNA, 15 bp, Homo sapiens
aaaaaaaaaacacaa

SEQ ID NO: 52482 - DNA, 15 bp, Homo sapiens
aaaaaaaaaaacaca

SEQ ID NO: 52483 - DNA, 15 bp, Homo sapiens
taaaaaaaaaaacac

SEQ ID NO: 52484 - DNA, 15 bp, Homo sapiens
gtaaaaaaaaaaaca

SEQ ID NO: 52485 - DNA, 15 bp, Homo sapiens
ggtaaaaaaaaaaac

SEQ ID NO: 52486 - DNA, 15 bp, Homo sapiens
tggtaaaaaaaaaaa

SEQ ID NO: 52487 - DNA, 15 bp, Homo sapiens
atggtaaaaaaaaaa

SEQ ID NO: 52488 - DNA, 15 bp, Homo sapiens
catggtaaaaaaaaa

SEQ ID NO: 52489 - DNA, 15 bp, Homo sapiens
tcatggtaaaaaaaa

SEQ ID NO: 52490 - DNA, 15 bp, Homo sapiens
gtcatggtaaaaaaa

SEQ ID NO: 52491 - DNA, 15 bp, Homo sapiens
ggtcatggtaaaaaa

SEQ ID NO: 52492 - DNA, 15 bp, Homo sapiens
aggtcatggtaaaaa

SEQ ID NO: 52493 - DNA, 15 bp, Homo sapiens
taggtcatggtaaaa

SEQ ID NO: 52494 - DNA, 15 bp, Homo sapiens
gtaggtcatggtaaa

SEQ ID NO: 52495 - DNA, 15 bp, Homo sapiens
tgtaggtcatggtaa

SEQ ID NO: 52496 - DNA, 15 bp, Homo sapiens
ttgtaggtcatggta

SEQ ID NO: 52497 - DNA, 15 bp, Homo sapiens
cttgtaggtcatggt

SEQ ID NO: 52498 - DNA, 15 bp, Homo sapiens
ccttgtaggtcatgg

SEQ ID NO: 52499 - DNA, 15 bp, Homo sapiens
gccttgtaggtcatg

SEQ ID NO: 52500 - DNA, 15 bp, Homo sapiens
ggccttgtaggtcat

SEQ ID NO: 52501 - DNA, 15 bp, Homo sapiens
gggccttgtaggtca

SEQ ID NO: 52502 - DNA, 15 bp, Homo sapiens
tgggccttgtaggtc

SEQ ID NO: 52503 - DNA, 15 bp, Homo sapiens
ctgggccttgtaggt

SEQ ID NO: 52504 - DNA, 15 bp, Homo sapiens
gctgggccttgtagg

SEQ ID NO: 52505 - DNA, 15 bp, Homo sapiens
tgctgggccttgtag

SEQ ID NO: 52506 - DNA, 15 bp, Homo sapiens
atgctgggccttgta

SEQ ID NO: 52507 - DNA, 15 bp, Homo sapiens
tatgctgggccttgt

SEQ ID NO: 52508 - DNA, 15 bp, Homo sapiens
ttatgctgggccttg

SEQ ID NO: 52509 - DNA, 15 bp, Homo sapiens
attatgctgggcctt

SEQ ID NO: 52510 - DNA, 15 bp, Homo sapiens
aattatgctgggcct

SEQ ID NO: 52511 - DNA, 15 bp, Homo sapiens
aaattatgctgggcc

SEQ ID NO: 52512 - DNA, 15 bp, Homo sapiens
taaattatgctgggc

SEQ ID NO: 52513 - DNA, 15 bp, Homo sapiens
ctaaattatgctggg

SEQ ID NO: 52514 - DNA, 15 bp, Homo sapiens
gctaaattatgctgg

SEQ ID NO: 52515 - DNA, 15 bp, Homo sapiens
tgctaaattatgctg

SEQ ID NO: 52516 - DNA, 15 bp, Homo sapiens
gtgctaaattatgct

SEQ ID NO: 52517 - DNA, 15 bp, Homo sapiens
tgtgctaaattatgc

SEQ ID NO: 52518 - DNA, 15 bp, Homo sapiens
ctgtgctaaattatg

SEQ ID NO: 52519 - DNA, 15 bp, Homo sapiens
cctgtgctaaattat

SEQ ID NO: 52520 - DNA, 15 bp, Homo sapiens
ccctgtgctaaatta

SEQ ID NO: 52521 - DNA, 15 bp, Homo sapiens
gccctgtgctaaatt

SEQ ID NO: 52522 - DNA, 15 bp, Homo sapiens
agccctgtgctaaat

SEQ ID NO: 52523 - DNA, 15 bp, Homo sapiens
tagccctgtgctaaa

SEQ ID NO: 52524 - DNA, 15 bp, Homo sapiens
gtagccctgtgctaa

SEQ ID NO: 52525 - DNA, 15 bp, Homo sapiens
ggtagccctgtgcta

SEQ ID NO: 52526 - DNA, 15 bp, Homo sapiens
aggtagccctgtgct

SEQ ID NO: 52527 - DNA, 15 bp, Homo sapiens
gaggtagccctgtgc

SEQ ID NO: 52528 - DNA, 15 bp, Homo sapiens
ggaggtagccctgtg

SEQ ID NO: 52529 - DNA, 15 bp, Homo sapiens
aggaggtagccctgt

SEQ ID NO: 52530 - DNA, 15 bp, Homo sapiens
taggaggtagccctg

SEQ ID NO: 52531 - DNA, 15 bp, Homo sapiens
gtaggaggtagccct

SEQ ID NO: 52532 - DNA, 15 bp, Homo sapiens
tgtaggaggtagccc

SEQ ID NO: 52533 - DNA, 15 bp, Homo sapiens
atgtaggaggtagcc

SEQ ID NO: 52534 - DNA, 15 bp, Homo sapiens
gatgtaggaggtagc

SEQ ID NO: 52535 - DNA, 15 bp, Homo sapiens
tgatgtaggaggtag

SEQ ID NO: 52536 - DNA, 15 bp, Homo sapiens
ctgatgtaggaggta

SEQ ID NO: 52537 - DNA, 15 bp, Homo sapiens
gctgatgtaggaggt

SEQ ID NO: 52538 - DNA, 15 bp, Homo sapiens
tgctgatgtaggagg

SEQ ID NO: 52539 - DNA, 15 bp, Homo sapiens
gtgctgatgtaggag

SEQ ID NO: 52540 - DNA, 15 bp, Homo sapiens
agtgctgatgtagga

SEQ ID NO: 52541 - DNA, 15 bp, Homo sapiens
tagtgctgatgtagg

SEQ ID NO: 52542 - DNA, 15 bp, Homo sapiens
ctagtgctgatgtag

SEQ ID NO: 52543 - DNA, 15 bp, Homo sapiens
actagtgctgatgta

SEQ ID NO: 52544 - DNA, 15 bp, Homo sapiens
gactagtgctgatgt

SEQ ID NO: 52545 - DNA, 15 bp, Homo sapiens
tgactagtgctgatg

SEQ ID NO: 52546 - DNA, 15 bp, Homo sapiens
gtgactagtgctgat

SEQ ID NO: 52547 - DNA, 15 bp, Homo sapiens
ggtgactagtgctga

SEQ ID NO: 52548 - DNA, 15 bp, Homo sapiens
aggtgactagtgctg

SEQ ID NO: 52549 - DNA, 15 bp, Homo sapiens
aaggtgactagtgct

SEQ ID NO: 52550 - DNA, 15 bp, Homo sapiens
gaaggtgactagtgc

SEQ ID NO: 52551 - DNA, 15 bp, Homo sapiens
agaaggtgactagtg

SEQ ID NO: 52552 - DNA, 15 bp, Homo sapiens
gagaaggtgactagt

SEQ ID NO: 52553 - DNA, 15 bp, Homo sapiens
agagaaggtgactag

SEQ ID NO: 52554 - DNA, 15 bp, Homo sapiens
gagagaaggtgacta

SEQ ID NO: 52555 - DNA, 15 bp, Homo sapiens
ggagagaaggtgact

SEQ ID NO: 52556 - DNA, 15 bp, Homo sapiens
aggagagaaggtgac

SEQ ID NO: 52557 - DNA, 15 bp, Homo sapiens
aaggagagaaggtga

SEQ ID NO: 52558 - DNA, 15 bp, Homo sapiens
caaggagagaaggtg

SEQ ID NO: 52559 - DNA, 15 bp, Homo sapiens
acaaggagagaaggt

SEQ ID NO: 52560 - DNA, 15 bp, Homo sapiens
aacaaggagagaagg

SEQ ID NO: 52561 - DNA, 15 bp, Homo sapiens
aaacaaggagagaag

SEQ ID NO: 52562 - DNA, 15 bp, Homo sapiens
gaaacaaggagagaa

SEQ ID NO: 52563 - DNA, 15 bp, Homo sapiens
agaaacaaggagaga

SEQ ID NO: 52564 - DNA, 15 bp, Homo sapiens
aagaaacaaggagag

SEQ ID NO: 52565 - DNA, 15 bp, Homo sapiens
caagaaacaaggaga

SEQ ID NO: 52566 - DNA, 15 bp, Homo sapiens
tcaagaaacaaggag

SEQ ID NO: 52567 - DNA, 15 bp, Homo sapiens
ctcaagaaacaagga

SEQ ID NO: 52568 - DNA, 15 bp, Homo sapiens
tctcaagaaacaagg

SEQ ID NO: 52569 - DNA, 15 bp, Homo sapiens
atctcaagaaacaag

SEQ ID NO: 52570 - DNA, 15 bp, Homo sapiens
aatctcaagaaacaa

SEQ ID NO: 52571 - DNA, 15 bp, Homo sapiens
gaatctcaagaaaca

SEQ ID NO: 52572 - DNA, 15 bp, Homo sapiens
tgaatctcaagaaac

SEQ ID NO: 52573 - DNA, 15 bp, Homo sapiens
ctgaatctcaagaaa

SEQ ID NO: 52574 - DNA, 15 bp, Homo sapiens
actgaatctcaagaa

SEQ ID NO: 52575 - DNA, 15 bp, Homo sapiens
gactgaatctcaaga

SEQ ID NO: 52576 - DNA, 15 bp, Homo sapiens
tgactgaatctcaag

SEQ ID NO: 52577 - DNA, 15 bp, Homo sapiens
atgactgaatctcaa

SEQ ID NO: 52578 - DNA, 15 bp, Homo sapiens
tatgactgaatctca

SEQ ID NO: 52579 - DNA, 15 bp, Homo sapiens
gtatgactgaatctc

SEQ ID NO: 52580 - DNA, 15 bp, Homo sapiens
agtatgactgaatct

SEQ ID NO: 52581 - DNA, 15 bp, Homo sapiens
cagtatgactgaatc

SEQ ID NO: 52582 - DNA, 15 bp, Homo sapiens
ccagtatgactgaat

SEQ ID NO: 52583 - DNA, 15 bp, Homo sapiens
accagtatgactgaa

SEQ ID NO: 52584 - DNA, 15 bp, Homo sapiens
gaccagtatgactga

SEQ ID NO: 52585 - DNA, 15 bp, Homo sapiens
agaccagtatgactg

SEQ ID NO: 52586 - DNA, 15 bp, Homo sapiens
aagaccagtatgact

SEQ ID NO: 52587 - DNA, 15 bp, Homo sapiens
aaagaccagtatgac

SEQ ID NO: 52588 - DNA, 15 bp, Homo sapiens
gaaagaccagtatga

SEQ ID NO: 52589 - DNA, 15 bp, Homo sapiens
agaaagaccagtatg

SEQ ID NO: 52590 - DNA, 15 bp, Homo sapiens
aagaaagaccagtat

SEQ ID NO: 52591 - DNA, 15 bp, Homo sapiens
gaagaaagaccagta

SEQ ID NO: 52592 - DNA, 15 bp, Homo sapiens
tgaagaaagaccagt

SEQ ID NO: 52593 - DNA, 15 bp, Homo sapiens
ctgaagaaagaccag

SEQ ID NO: 52594 - DNA, 15 bp, Homo sapiens
actgaagaaagacca

SEQ ID NO: 52595 - DNA, 15 bp, Homo sapiens
aactgaagaaagacc

SEQ ID NO: 52596 - DNA, 15 bp, Homo sapiens
gaactgaagaaagac

SEQ ID NO: 52597 - DNA, 15 bp, Homo sapiens
agaactgaagaaaga

SEQ ID NO: 52598 - DNA, 15 bp, Homo sapiens
aagaactgaagaaag

SEQ ID NO: 52599 - DNA, 15 bp, Homo sapiens
gaagaactgaagaaa

SEQ ID NO: 52600 - DNA, 15 bp, Homo sapiens
tgaagaactgaagaa

SEQ ID NO: 52601 - DNA, 15 bp, Homo sapiens
ttgaagaactgaaga

SEQ ID NO: 52602 - DNA, 15 bp, Homo sapiens
tttgaagaactgaag

SEQ ID NO: 52603 - DNA, 15 bp, Homo sapiens
ttttgaagaactgaa

SEQ ID NO: 52604 - DNA, 15 bp, Homo sapiens
attttgaagaactga

SEQ ID NO: 52605 - DNA, 15 bp, Homo sapiens
cattttgaagaactg

SEQ ID NO: 52606 - DNA, 15 bp, Homo sapiens
gcattttgaagaact

SEQ ID NO: 52607 - DNA, 15 bp, Homo sapiens
agcattttgaagaac

SEQ ID NO: 52608 - DNA, 15 bp, Homo sapiens
tagcattttgaagaa

SEQ ID NO: 52609 - DNA, 15 bp, Homo sapiens
ttagcattttgaaga

SEQ ID NO: 52610 - DNA, 15 bp, Homo sapiens
cttagcattttgaag

SEQ ID NO: 52611 - DNA, 15 bp, Homo sapiens
gcttagcattttgaa

SEQ ID NO: 52612 - DNA, 15 bp, Homo sapiens
agcttagcattttga

SEQ ID NO: 52613 - DNA, 15 bp, Homo sapiens
aagcttagcattttg

SEQ ID NO: 52614 - DNA, 15 bp, Homo sapiens
gaagcttagcatttt

SEQ ID NO: 52615 - DNA, 15 bp, Homo sapiens
agaagcttagcattt

SEQ ID NO: 52616 - DNA, 15 bp, Homo sapiens
cagaagcttagcatt

SEQ ID NO: 52617 - DNA, 15 bp, Homo sapiens
gcagaagcttagcat

SEQ ID NO: 52618 - DNA, 15 bp, Homo sapiens
ggcagaagcttagca

SEQ ID NO: 52619 - DNA, 15 bp, Homo sapiens
aggcagaagcttagc

SEQ ID NO: 52620 - DNA, 15 bp, Homo sapiens
gaggcagaagcttag

SEQ ID NO: 52621 - DNA, 15 bp, Homo sapiens
agaggcagaagctta

SEQ ID NO: 52622 - DNA, 15 bp, Homo sapiens
aagaggcagaagctt

SEQ ID NO: 52623 - DNA, 15 bp, Homo sapiens
gaagaggcagaagct

SEQ ID NO: 52624 - DNA, 15 bp, Homo sapiens
agaagaggcagaagc

SEQ ID NO: 52625 - DNA, 15 bp, Homo sapiens
tagaagaggcagaag

SEQ ID NO: 52626 - DNA, 15 bp, Homo sapiens
ctagaagaggcagaa

SEQ ID NO: 52627 - DNA, 15 bp, Homo sapiens
actagaagaggcaga

SEQ ID NO: 52628 - DNA, 15 bp, Homo sapiens
gactagaagaggcag

SEQ ID NO: 52629 - DNA, 15 bp, Homo sapiens
agactagaagaggca

SEQ ID NO: 52630 - DNA, 15 bp, Homo sapiens
aagactagaagaggc

SEQ ID NO: 52631 - DNA, 15 bp, Homo sapiens
aaagactagaagagg

SEQ ID NO: 52632 - DNA, 15 bp, Homo sapiens
gaaagactagaagag

SEQ ID NO: 52633 - DNA, 15 bp, Homo sapiens
ggaaagactagaaga

SEQ ID NO: 52634 - DNA, 15 bp, Homo sapiens
tggaaagactagaag

SEQ ID NO: 52635 - DNA, 15 bp, Homo sapiens
ctggaaagactagaa

SEQ ID NO: 52636 - DNA, 15 bp, Homo sapiens
actggaaagactaga

SEQ ID NO: 52637 - DNA, 15 bp, Homo sapiens
aactggaaagactag

SEQ ID NO: 52638 - DNA, 15 bp, Homo sapiens
taactggaaagacta

SEQ ID NO: 52639 - DNA, 15 bp, Homo sapiens
ataactggaaagact

SEQ ID NO: 52640 - DNA, 15 bp, Homo sapiens
aataactggaaagac

SEQ ID NO: 52641 - DNA, 15 bp, Homo sapiens
aaataactggaaaga

SEQ ID NO: 52642 - DNA, 15 bp, Homo sapiens
aaaataactggaaag

SEQ ID NO: 52643 - DNA, 15 bp, Homo sapiens
gaaaataactggaaa

SEQ ID NO: 52644 - DNA, 15 bp, Homo sapiens
ggaaaataactggaa

SEQ ID NO: 52645 - DNA, 15 bp, Homo sapiens
aggaaaataactgga

SEQ ID NO: 52646 - DNA, 15 bp, Homo sapiens
aaggaaaataactgg

SEQ ID NO: 52647 - DNA, 15 bp, Homo sapiens
gaaggaaaataactg

SEQ ID NO: 52648 - DNA, 15 bp, Homo sapiens
agaaggaaaataact

SEQ ID NO: 52649 - DNA, 15 bp, Homo sapiens
gagaaggaaaataac

SEQ ID NO: 52650 - DNA, 15 bp, Homo sapiens
ggagaaggaaaataa

SEQ ID NO: 52651 - DNA, 15 bp, Homo sapiens
gggagaaggaaaata

SEQ ID NO: 52652 - DNA, 15 bp, Homo sapiens
agggagaaggaaaat

SEQ ID NO: 52653 - DNA, 15 bp, Homo sapiens
cagggagaaggaaaa

SEQ ID NO: 52654 - DNA, 15 bp, Homo sapiens
acagggagaaggaaa

SEQ ID NO: 52655 - DNA, 15 bp, Homo sapiens
tacagggagaaggaa

SEQ ID NO: 52656 - DNA, 15 bp, Homo sapiens
gtacagggagaagga

SEQ ID NO: 52657 - DNA, 15 bp, Homo sapiens
ggtacagggagaagg

SEQ ID NO: 52658 - DNA, 15 bp, Homo sapiens
aggtacagggagaag

SEQ ID NO: 52659 - DNA, 15 bp, Homo sapiens
aaggtacagggagaa

SEQ ID NO: 52660 - DNA, 15 bp, Homo sapiens
aaaggtacagggaga

SEQ ID NO: 52661 - DNA, 15 bp, Homo sapiens
aaaaggtacagggag

SEQ ID NO: 52662 - DNA, 15 bp, Homo sapiens
gaaaaggtacaggga

SEQ ID NO: 52663 - DNA, 15 bp, Homo sapiens
tgaaaaggtacaggg

SEQ ID NO: 52664 - DNA, 15 bp, Homo sapiens
atgaaaaggtacagg

SEQ ID NO: 52665 - DNA, 15 bp, Homo sapiens
gatgaaaaggtacag

SEQ ID NO: 52666 - DNA, 15 bp, Homo sapiens
agatgaaaaggtaca

SEQ ID NO: 52667 - DNA, 15 bp, Homo sapiens
gagatgaaaaggtac

SEQ ID NO: 52668 - DNA, 15 bp, Homo sapiens
tgagatgaaaaggta

SEQ ID NO: 52669 - DNA, 15 bp, Homo sapiens
ctgagatgaaaaggt

SEQ ID NO: 52670 - DNA, 15 bp, Homo sapiens
gctgagatgaaaagg

SEQ ID NO: 52671 - DNA, 15 bp, Homo sapiens
ggctgagatgaaaag

SEQ ID NO: 52672 - DNA, 15 bp, Homo sapiens
aggctgagatgaaaa

SEQ ID NO: 52673 - DNA, 15 bp, Homo sapiens
aaggctgagatgaaa

SEQ ID NO: 52674 - DNA, 15 bp, Homo sapiens
aaaggctgagatgaa

SEQ ID NO: 52675 - DNA, 15 bp, Homo sapiens
aaaaggctgagatga

SEQ ID NO: 52676 - DNA, 15 bp, Homo sapiens
gaaaaggctgagatg

SEQ ID NO: 52677 - DNA, 15 bp, Homo sapiens
ggaaaaggctgagat

SEQ ID NO: 52678 - DNA, 15 bp, Homo sapiens
gggaaaaggctgaga

SEQ ID NO: 52679 - DNA, 15 bp, Homo sapiens
ggggaaaaggctgag

SEQ ID NO: 52680 - DNA, 15 bp, Homo sapiens
aggggaaaaggctga

SEQ ID NO: 52681 - DNA, 15 bp, Homo sapiens
caggggaaaaggctg

SEQ ID NO: 52682 - DNA, 15 bp, Homo sapiens
tcaggggaaaaggct

SEQ ID NO: 52683 - DNA, 15 bp, Homo sapiens
gtcaggggaaaaggc

SEQ ID NO: 52684 - DNA, 15 bp, Homo sapiens
ggtcaggggaaaagg

SEQ ID NO: 52685 - DNA, 15 bp, Homo sapiens
aggtcaggggaaaag

SEQ ID NO: 52686 - DNA, 15 bp, Homo sapiens
aaggtcaggggaaaa

SEQ ID NO: 52687 - DNA, 15 bp, Homo sapiens
gaaggtcaggggaaa

SEQ ID NO: 52688 - DNA, 15 bp, Homo sapiens
ggaaggtcaggggaa

SEQ ID NO: 52689 - DNA, 15 bp, Homo sapiens
tggaaggtcagggga

SEQ ID NO: 52690 - DNA, 15 bp, Homo sapiens
atggaaggtcagggg

SEQ ID NO: 52691 - DNA, 15 bp, Homo sapiens
tatggaaggtcaggg

SEQ ID NO: 52692 - DNA, 15 bp, Homo sapiens
ctatggaaggtcagg

SEQ ID NO: 52693 - DNA, 15 bp, Homo sapiens
gctatggaaggtcag

SEQ ID NO: 52694 - DNA, 15 bp, Homo sapiens
agctatggaaggtca

SEQ ID NO: 52695 - DNA, 15 bp, Homo sapiens
tagctatggaaggtc

SEQ ID NO: 52696 - DNA, 15 bp, Homo sapiens
atagctatggaaggt

SEQ ID NO: 52697 - DNA, 15 bp, Homo sapiens
gatagctatggaagg

SEQ ID NO: 52698 - DNA, 15 bp, Homo sapiens
agatagctatggaag

SEQ ID NO: 52699 - DNA, 15 bp, Homo sapiens
aagatagctatggaa

SEQ ID NO: 52700 - DNA, 15 bp, Homo sapiens
gaagatagctatgga

SEQ ID NO: 52701 - DNA, 15 bp, Homo sapiens
tgaagatagctatgg

SEQ ID NO: 52702 - DNA, 15 bp, Homo sapiens
atgaagatagctatg

SEQ ID NO: 52703 - DNA, 15 bp, Homo sapiens
tatgaagatagctat

SEQ ID NO: 52704 - DNA, 15 bp, Homo sapiens
atatgaagatagcta

SEQ ID NO: 52705 - DNA, 15 bp, Homo sapiens
aatatgaagatagct

SEQ ID NO: 52706 - DNA, 15 bp, Homo sapiens
aaatatgaagatagc

SEQ ID NO: 52707 - DNA, 15 bp, Homo sapiens
gaaatatgaagatag

SEQ ID NO: 52708 - DNA, 15 bp, Homo sapiens
ggaaatatgaagata

SEQ ID NO: 52709 - DNA, 15 bp, Homo sapiens
tggaaatatgaagat

SEQ ID NO: 52710 - DNA, 15 bp, Homo sapiens
ctggaaatatgaaga

SEQ ID NO: 52711 - DNA, 15 bp, Homo sapiens
gctggaaatatgaag

SEQ ID NO: 52712 - DNA, 15 bp, Homo sapiens
ggctggaaatatgaa

SEQ ID NO: 52713 - DNA, 15 bp, Homo sapiens
aggctggaaatatga

SEQ ID NO: 52714 - DNA, 15 bp, Homo sapiens
aaggctggaaatatg

SEQ ID NO: 52715 - DNA, 15 bp, Homo sapiens
taaggctggaaatat

SEQ ID NO: 52716 - DNA, 15 bp, Homo sapiens
ctaaggctggaaata

SEQ ID NO: 52717 - DNA, 15 bp, Homo sapiens
gctaaggctggaaat

SEQ ID NO: 52718 - DNA, 15 bp, Homo sapiens
agctaaggctggaaa

SEQ ID NO: 52719 - DNA, 15 bp, Homo sapiens
aagctaaggctggaa

SEQ ID NO: 52720 - DNA, 15 bp, Homo sapiens
gaagctaaggctgga

SEQ ID NO: 52721 - DNA, 15 bp, Homo sapiens
tgaagctaaggctgg

SEQ ID NO: 52722 - DNA, 15 bp, Homo sapiens
ttgaagctaaggctg

SEQ ID NO: 52723 - DNA, 15 bp, Homo sapiens
attgaagctaaggct

SEQ ID NO: 52724 - DNA, 15 bp, Homo sapiens
gattgaagctaaggc

SEQ ID NO: 52725 - DNA, 15 bp, Homo sapiens
agattgaagctaagg

SEQ ID NO: 52726 - DNA, 15 bp, Homo sapiens
gagattgaagctaag

SEQ ID NO: 52727 - DNA, 15 bp, Homo sapiens
tgagattgaagctaa

SEQ ID NO: 52728 - DNA, 15 bp, Homo sapiens
atgagattgaagcta

SEQ ID NO: 52729 - DNA, 15 bp, Homo sapiens
tatgagattgaagct

SEQ ID NO: 52730 - DNA, 15 bp, Homo sapiens
atatgagattgaagc

SEQ ID NO: 52731 - DNA, 15 bp, Homo sapiens
aatatgagattgaag

SEQ ID NO: 52732 - DNA, 15 bp, Homo sapiens
gaatatgagattgaa

SEQ ID NO: 52733 - DNA, 15 bp, Homo sapiens
agaatatgagattga

SEQ ID NO: 52734 - DNA, 15 bp, Homo sapiens
gagaatatgagattg

SEQ ID NO: 52735 - DNA, 15 bp, Homo sapiens
agagaatatgagatt

SEQ ID NO: 52736 - DNA, 15 bp, Homo sapiens
cagagaatatgagat

SEQ ID NO: 52737 - DNA, 15 bp, Homo sapiens
tcagagaatatgaga

SEQ ID NO: 52738 - DNA, 15 bp, Homo sapiens
ttcagagaatatgag

SEQ ID NO: 52739 - DNA, 15 bp, Homo sapiens
cttcagagaatatga

SEQ ID NO: 52740 - DNA, 15 bp, Homo sapiens
acttcagagaatatg

SEQ ID NO: 52741 - DNA, 15 bp, Homo sapiens
gacttcagagaatat

SEQ ID NO: 52742 - DNA, 15 bp, Homo sapiens
ggacttcagagaata

SEQ ID NO: 52743 - DNA, 15 bp, Homo sapiens
aggacttcagagaat

SEQ ID NO: 52744 - DNA, 15 bp, Homo sapiens
aaggacttcagagaa

SEQ ID NO: 52745 - DNA, 15 bp, Homo sapiens
aaaggacttcagaga

SEQ ID NO: 52746 - DNA, 15 bp, Homo sapiens
caaaggacttcagag

SEQ ID NO: 52747 - DNA, 15 bp, Homo sapiens
tcaaaggacttcaga

SEQ ID NO: 52748 - DNA, 15 bp, Homo sapiens
atcaaaggacttcag

SEQ ID NO: 52749 - DNA, 15 bp, Homo sapiens
aatcaaaggacttca

SEQ ID NO: 52750 - DNA, 15 bp, Homo sapiens
caatcaaaggacttc

SEQ ID NO: 52751 - DNA, 15 bp, Homo sapiens
acaatcaaaggactt

SEQ ID NO: 52752 - DNA, 15 bp, Homo sapiens
gacaatcaaaggact

SEQ ID NO: 52753 - DNA, 15 bp, Homo sapiens
ggacaatcaaaggac

SEQ ID NO: 52754 - DNA, 15 bp, Homo sapiens
aggacaatcaaagga

SEQ ID NO: 52755 - DNA, 15 bp, Homo sapiens
gaggacaatcaaagg

SEQ ID NO: 52756 - DNA, 15 bp, Homo sapiens
ggaggacaatcaaag

SEQ ID NO: 52757 - DNA, 15 bp, Homo sapiens
gggaggacaatcaaa

SEQ ID NO: 52758 - DNA, 15 bp, Homo sapiens
cgggaggacaatcaa

SEQ ID NO: 52759 - DNA, 15 bp, Homo sapiens
acgggaggacaatca

SEQ ID NO: 52760 - DNA, 15 bp, Homo sapiens
aacgggaggacaatc

SEQ ID NO: 52761 - DNA, 15 bp, Homo sapiens
taacgggaggacaat

SEQ ID NO: 52762 - DNA, 15 bp, Homo sapiens
ataacgggaggacaa

SEQ ID NO: 52763 - DNA, 15 bp, Homo sapiens
aataacgggaggaca

SEQ ID NO: 52764 - DNA, 15 bp, Homo sapiens
gaataacgggaggac

SEQ ID NO: 52765 - DNA, 15 bp, Homo sapiens
agaataacgggagga

SEQ ID NO: 52766 - DNA, 15 bp, Homo sapiens
aagaataacgggagg

SEQ ID NO: 52767 - DNA, 15 bp, Homo sapiens
aaagaataacgggag

SEQ ID NO: 52768 - DNA, 15 bp, Homo sapiens
aaaagaataacggga

SEQ ID NO: 52769 - DNA, 15 bp, Homo sapiens
aaaaagaataacggg

SEQ ID NO: 52770 - DNA, 15 bp, Homo sapiens
aaaaaagaataacgg

SEQ ID NO: 52771 - DNA, 15 bp, Homo sapiens
aaaaaaagaataacg

SEQ ID NO: 52772 - DNA, 15 bp, Homo sapiens
taaaaaaagaataac

SEQ ID NO: 52773 - DNA, 15 bp, Homo sapiens
ttaaaaaaagaataa

SEQ ID NO: 52774 - DNA, 15 bp, Homo sapiens
tttaaaaaaagaata

SEQ ID NO: 52775 - DNA, 15 bp, Homo sapiens
ttttaaaaaaagaat

SEQ ID NO: 52776 - DNA, 15 bp, Homo sapiens
tttttaaaaaaagaa

SEQ ID NO: 52777 - DNA, 15 bp, Homo sapiens
atttttaaaaaaaga

SEQ ID NO: 52778 - DNA, 15 bp, Homo sapiens
gatttttaaaaaaag

SEQ ID NO: 52779 - DNA, 15 bp, Homo sapiens
ggatttttaaaaaaa

SEQ ID NO: 52780 - DNA, 15 bp, Homo sapiens
aggatttttaaaaaa

SEQ ID NO: 52781 - DNA, 15 bp, Homo sapiens
taggatttttaaaaa

SEQ ID NO: 52782 - DNA, 15 bp, Homo sapiens
ataggatttttaaaa

SEQ ID NO: 52783 - DNA, 15 bp, Homo sapiens
aataggatttttaaa

SEQ ID NO: 52784 - DNA, 15 bp, Homo sapiens
aaataggatttttaa

SEQ ID NO: 52785 - DNA, 15 bp, Homo sapiens
gaaataggattttta

SEQ ID NO: 52786 - DNA, 15 bp, Homo sapiens
ggaaataggattttt

SEQ ID NO: 52787 - DNA, 15 bp, Homo sapiens
aggaaataggatttt

SEQ ID NO: 52788 - DNA, 15 bp, Homo sapiens
aaggaaataggattt

SEQ ID NO: 52789 - DNA, 15 bp, Homo sapiens
taaggaaataggatt

SEQ ID NO: 52790 - DNA, 15 bp, Homo sapiens
ataaggaaataggat

SEQ ID NO: 52791 - DNA, 15 bp, Homo sapiens
tataaggaaatagga

SEQ ID NO: 52792 - DNA, 15 bp, Homo sapiens
atataaggaaatagg

SEQ ID NO: 52793 - DNA, 15 bp, Homo sapiens
aatataaggaaatag

SEQ ID NO: 52794 - DNA, 15 bp, Homo sapiens
caatataaggaaata

SEQ ID NO: 52795 - DNA, 15 bp, Homo sapiens
acaatataaggaaat

SEQ ID NO: 52796 - DNA, 15 bp, Homo sapiens
tacaatataaggaaa

SEQ ID NO: 52797 - DNA, 15 bp, Homo sapiens
atacaatataaggaa

SEQ ID NO: 52798 - DNA, 15 bp, Homo sapiens
gatacaatataagga

SEQ ID NO: 52799 - DNA, 15 bp, Homo sapiens
agatacaatataagg

SEQ ID NO: 52800 - DNA, 15 bp, Homo sapiens
aagatacaatataag

SEQ ID NO: 52801 - DNA, 15 bp, Homo sapiens
taagatacaatataa

SEQ ID NO: 52802 - DNA, 15 bp, Homo sapiens
ctaagatacaatata

SEQ ID NO: 52803 - DNA, 15 bp, Homo sapiens
tctaagatacaatat

SEQ ID NO: 52804 - DNA, 15 bp, Homo sapiens
ttctaagatacaata

SEQ ID NO: 52805 - DNA, 15 bp, Homo sapiens
attctaagatacaat

SEQ ID NO: 52806 - DNA, 15 bp, Homo sapiens
aattctaagatacaa

SEQ ID NO: 52807 - DNA, 15 bp, Homo sapiens
taattctaagataca

SEQ ID NO: 52808 - DNA, 15 bp, Homo sapiens
ataattctaagatac

SEQ ID NO: 52809 - DNA, 15 bp, Homo sapiens
aataattctaagata

SEQ ID NO: 52810 - DNA, 15 bp, Homo sapiens
aaataattctaagat

SEQ ID NO: 52811 - DNA, 15 bp, Homo sapiens
caaataattctaaga

SEQ ID NO: 52812 - DNA, 15 bp, Homo sapiens
ccaaataattctaag

SEQ ID NO: 52813 - DNA, 15 bp, Homo sapiens
accaaataattctaa

SEQ ID NO: 52814 - DNA, 15 bp, Homo sapiens
aaccaaataattcta

SEQ ID NO: 52815 - DNA, 15 bp, Homo sapiens
aaaccaaataattct

SEQ ID NO: 52816 - DNA, 15 bp, Homo sapiens
caaaccaaataattc

SEQ ID NO: 52817 - DNA, 15 bp, Homo sapiens
acaaaccaaataatt

SEQ ID NO: 52818 - DNA, 15 bp, Homo sapiens
aacaaaccaaataat

SEQ ID NO: 52819 - DNA, 15 bp, Homo sapiens
aaacaaaccaaataa

SEQ ID NO: 52820 - DNA, 15 bp, Homo sapiens
gaaacaaaccaaata

SEQ ID NO: 52821 - DNA, 15 bp, Homo sapiens
tgaaacaaaccaaat

SEQ ID NO: 52822 - DNA, 15 bp, Homo sapiens
atgaaacaaaccaaa

SEQ ID NO: 52823 - DNA, 15 bp, Homo sapiens
aatgaaacaaaccaa

SEQ ID NO: 52824 - DNA, 15 bp, Homo sapiens
aaatgaaacaaacca

SEQ ID NO: 52825 - DNA, 15 bp, Homo sapiens
aaaatgaaacaaacc

SEQ ID NO: 52826 - DNA, 15 bp, Homo sapiens
aaaaatgaaacaaac

SEQ ID NO: 52827 - DNA, 15 bp, Homo sapiens
caaaaatgaaacaaa

SEQ ID NO: 52828 - DNA, 15 bp, Homo sapiens
gcaaaaatgaaacaa

SEQ ID NO: 52829 - DNA, 15 bp, Homo sapiens
ggcaaaaatgaaaca

SEQ ID NO: 52830 - DNA, 15 bp, Homo sapiens
aggcaaaaatgaaac

SEQ ID NO: 52831 - DNA, 15 bp, Homo sapiens
taggcaaaaatgaaa

SEQ ID NO: 52832 - DNA, 15 bp, Homo sapiens
ataggcaaaaatgaa

SEQ ID NO: 52833 - DNA, 15 bp, Homo sapiens
cataggcaaaaatga

SEQ ID NO: 52834 - DNA, 15 bp, Homo sapiens
acataggcaaaaatg

SEQ ID NO: 52835 - DNA, 15 bp, Homo sapiens
cacataggcaaaaat

SEQ ID NO: 52836 - DNA, 15 bp, Homo sapiens
acacataggcaaaaa

SEQ ID NO: 52837 - DNA, 15 bp, Homo sapiens
cacacataggcaaaa

SEQ ID NO: 52838 - DNA, 15 bp, Homo sapiens
tcacacataggcaaa

SEQ ID NO: 52839 - DNA, 15 bp, Homo sapiens
atcacacataggcaa

SEQ ID NO: 52840 - DNA, 15 bp, Homo sapiens
tatcacacataggca

SEQ ID NO: 52841 - DNA, 15 bp, Homo sapiens
atatcacacataggc

SEQ ID NO: 52842 - DNA, 15 bp, Homo sapiens
tatatcacacatagg

SEQ ID NO: 52843 - DNA, 15 bp, Homo sapiens
atatatcacacatag

SEQ ID NO: 52844 - DNA, 15 bp, Homo sapiens
catatatcacacata

SEQ ID NO: 52845 - DNA, 15 bp, Homo sapiens
acatatatcacacat

SEQ ID NO: 52846 - DNA, 15 bp, Homo sapiens
tacatatatcacaca

SEQ ID NO: 52847 - DNA, 15 bp, Homo sapiens
atacatatatcacac

SEQ ID NO: 52848 - DNA, 15 bp, Homo sapiens
aatacatatatcaca

SEQ ID NO: 52849 - DNA, 15 bp, Homo sapiens
aaatacatatatcac

SEQ ID NO: 52850 - DNA, 15 bp, Homo sapiens
gaaatacatatatca

SEQ ID NO: 52851 - DNA, 15 bp, Homo sapiens
agaaatacatatatc

SEQ ID NO: 52852 - DNA, 15 bp, Homo sapiens
tagaaatacatatat

SEQ ID NO: 52853 - DNA, 15 bp, Homo sapiens
gtagaaatacatata

SEQ ID NO: 52854 - DNA, 15 bp, Homo sapiens
tgtagaaatacatat

SEQ ID NO: 52855 - DNA, 15 bp, Homo sapiens
atgtagaaatacata

SEQ ID NO: 52856 - DNA, 15 bp, Homo sapiens
tatgtagaaatacat

SEQ ID NO: 52857 - DNA, 15 bp, Homo sapiens
ctatgtagaaataca

SEQ ID NO: 52858 - DNA, 15 bp, Homo sapiens
cctatgtagaaatac

SEQ ID NO: 52859 - DNA, 15 bp, Homo sapiens
acctatgtagaaata

SEQ ID NO: 52860 - DNA, 15 bp, Homo sapiens
tacctatgtagaaat

SEQ ID NO: 52861 - DNA, 15 bp, Homo sapiens
atacctatgtagaaa

SEQ ID NO: 52862 - DNA, 15 bp, Homo sapiens
tatacctatgtagaa

SEQ ID NO: 52863 - DNA, 15 bp, Homo sapiens
atatacctatgtaga

SEQ ID NO: 52864 - DNA, 15 bp, Homo sapiens
tatatacctatgtag

SEQ ID NO: 52865 - DNA, 15 bp, Homo sapiens
atatatacctatgta

SEQ ID NO: 52866 - DNA, 15 bp, Homo sapiens
tatatatacctatgt

SEQ ID NO: 52867 - DNA, 15 bp, Homo sapiens
atatatatacctatg

SEQ ID NO: 52868 - DNA, 15 bp, Homo sapiens
gatatatatacctat

SEQ ID NO: 52869 - DNA, 15 bp, Homo sapiens
agatatatataccta

SEQ ID NO: 52870 - DNA, 15 bp, Homo sapiens
tagatatatatacct

SEQ ID NO: 52871 - DNA, 15 bp, Homo sapiens
gtagatatatatacc

SEQ ID NO: 52872 - DNA, 15 bp, Homo sapiens
agtagatatatatac

SEQ ID NO: 52873 - DNA, 15 bp, Homo sapiens
aagtagatatatata

SEQ ID NO: 52874 - DNA, 15 bp, Homo sapiens
taagtagatatatat

SEQ ID NO: 52875 - DNA, 15 bp, Homo sapiens
ataagtagatatata

SEQ ID NO: 52876 - DNA, 15 bp, Homo sapiens
tataagtagatatat

SEQ ID NO: 52877 - DNA, 15 bp, Homo sapiens
ctataagtagatata

SEQ ID NO: 52878 - DNA, 15 bp, Homo sapiens
tctataagtagatat

SEQ ID NO: 52879 - DNA, 15 bp, Homo sapiens
gtctataagtagata

SEQ ID NO: 52880 - DNA, 15 bp, Homo sapiens
tgtctataagtagat

SEQ ID NO: 52881 - DNA, 15 bp, Homo sapiens
ttgtctataagtaga

SEQ ID NO: 52882 - DNA, 15 bp, Homo sapiens
cttgtctataagtag

SEQ ID NO: 52883 - DNA, 15 bp, Homo sapiens
tcttgtctataagta

SEQ ID NO: 52884 - DNA, 15 bp, Homo sapiens
ttcttgtctataagt

SEQ ID NO: 52885 - DNA, 15 bp, Homo sapiens
attcttgtctataag

SEQ ID NO: 52886 - DNA, 15 bp, Homo sapiens
aattcttgtctataa

SEQ ID NO: 52887 - DNA, 15 bp, Homo sapiens
gaattcttgtctata

SEQ ID NO: 52888 - DNA, 15 bp, Homo sapiens
agaattcttgtctat

SEQ ID NO: 52889 - DNA, 15 bp, Homo sapiens
aagaattcttgtcta

SEQ ID NO: 52890 - DNA, 15 bp, Homo sapiens
gaagaattcttgtct

SEQ ID NO: 52891 - DNA, 15 bp, Homo sapiens
tgaagaattcttgtc

SEQ ID NO: 52892 - DNA, 15 bp, Homo sapiens
ctgaagaattcttgt

SEQ ID NO: 52893 - DNA, 15 bp, Homo sapiens
tctgaagaattcttg

SEQ ID NO: 52894 - DNA, 15 bp, Homo sapiens
atctgaagaattctt

SEQ ID NO: 52895 - DNA, 15 bp, Homo sapiens
aatctgaagaattct

SEQ ID NO: 52896 - DNA, 15 bp, Homo sapiens
taatctgaagaattc

SEQ ID NO: 52897 - DNA, 15 bp, Homo sapiens
ttaatctgaagaatt

SEQ ID NO: 52898 - DNA, 15 bp, Homo sapiens
tttaatctgaagaat

SEQ ID NO: 52899 - DNA, 15 bp, Homo sapiens
ttttaatctgaagaa

SEQ ID NO: 52900 - DNA, 15 bp, Homo sapiens
tttttaatctgaaga

SEQ ID NO: 52901 - DNA, 15 bp, Homo sapiens
ttttttaatctgaag

SEQ ID NO: 52902 - DNA, 15 bp, Homo sapiens
tttttttaatctgaa

SEQ ID NO: 52903 - DNA, 15 bp, Homo sapiens
atttttttaatctga

SEQ ID NO: 52904 - DNA, 15 bp, Homo sapiens
gatttttttaatctg

SEQ ID NO: 52905 - DNA, 15 bp, Homo sapiens
agatttttttaatct

SEQ ID NO: 52906 - DNA, 15 bp, Homo sapiens
cagatttttttaatc

SEQ ID NO: 52907 - DNA, 15 bp, Homo sapiens
tcagatttttttaat

SEQ ID NO: 52908 - DNA, 15 bp, Homo sapiens
atcagatttttttaa

SEQ ID NO: 52909 - DNA, 15 bp, Homo sapiens
aatcagattttttta

SEQ ID NO: 52910 - DNA, 15 bp, Homo sapiens
aaatcagattttttt

SEQ ID NO: 52911 - DNA, 15 bp, Homo sapiens
caaatcagatttttt

SEQ ID NO: 52912 - DNA, 15 bp, Homo sapiens
acaaatcagattttt

SEQ ID NO: 52913 - DNA, 15 bp, Homo sapiens
tacaaatcagatttt

SEQ ID NO: 52914 - DNA, 15 bp, Homo sapiens
ttacaaatcagattt

SEQ ID NO: 52915 - DNA, 15 bp, Homo sapiens
tttacaaatcagatt

SEQ ID NO: 52916 - DNA, 15 bp, Homo sapiens
gtttacaaatcagat

SEQ ID NO: 52917 - DNA, 15 bp, Homo sapiens
tgtttacaaatcaga

SEQ ID NO: 52918 - DNA, 15 bp, Homo sapiens
atgtttacaaatcag

SEQ ID NO: 52919 - DNA, 15 bp, Homo sapiens
aatgtttacaaatca

SEQ ID NO: 52920 - DNA, 15 bp, Homo sapiens
gaatgtttacaaatc

SEQ ID NO: 52921 - DNA, 15 bp, Homo sapiens
ggaatgtttacaaat

SEQ ID NO: 52922 - DNA, 15 bp, Homo sapiens
gggaatgtttacaaa

SEQ ID NO: 52923 - DNA, 15 bp, Homo sapiens
tgggaatgtttacaa

SEQ ID NO: 52924 - DNA, 15 bp, Homo sapiens
ttgggaatgtttaca

SEQ ID NO: 52925 - DNA, 15 bp, Homo sapiens
cttgggaatgtttac

SEQ ID NO: 52926 - DNA, 15 bp, Homo sapiens
acttgggaatgttta

SEQ ID NO: 52927 - DNA, 15 bp, Homo sapiens
cacttgggaatgttt

SEQ ID NO: 52928 - DNA, 15 bp, Homo sapiens
ccacttgggaatgtt

SEQ ID NO: 52929 - DNA, 15 bp, Homo sapiens
accacttgggaatgt

SEQ ID NO: 52930 - DNA, 15 bp, Homo sapiens
aaccacttgggaatg

SEQ ID NO: 52931 - DNA, 15 bp, Homo sapiens
caaccacttgggaat

SEQ ID NO: 52932 - DNA, 15 bp, Homo sapiens
acaaccacttgggaa

SEQ ID NO: 52933 - DNA, 15 bp, Homo sapiens
aacaaccacttggga

SEQ ID NO: 52934 - DNA, 15 bp, Homo sapiens
aaacaaccacttggg

SEQ ID NO: 52935 - DNA, 15 bp, Homo sapiens
taaacaaccacttgg

SEQ ID NO: 52936 - DNA, 15 bp, Homo sapiens
gtaaacaaccacttg

SEQ ID NO: 52937 - DNA, 15 bp, Homo sapiens
ggtaaacaaccactt

SEQ ID NO: 52938 - DNA, 15 bp, Homo sapiens
tggtaaacaaccact

SEQ ID NO: 52939 - DNA, 15 bp, Homo sapiens
atggtaaacaaccac

SEQ ID NO: 52940 - DNA, 15 bp, Homo sapiens
aatggtaaacaacca

SEQ ID NO: 52941 - DNA, 15 bp, Homo sapiens
aaatggtaaacaacc

SEQ ID NO: 52942 - DNA, 15 bp, Homo sapiens
aaaatggtaaacaac

SEQ ID NO: 52943 - DNA, 15 bp, Homo sapiens
aaaaatggtaaacaa

SEQ ID NO: 52944 - DNA, 15 bp, Homo sapiens
aaaaaatggtaaaca

SEQ ID NO: 52945 - DNA, 15 bp, Homo sapiens
aaaaaaatggtaaac

SEQ ID NO: 52946 - DNA, 15 bp, Homo sapiens
gaaaaaaatggtaaa

SEQ ID NO: 52947 - DNA, 15 bp, Homo sapiens
agaaaaaaatggtaa

SEQ ID NO: 52948 - DNA, 15 bp, Homo sapiens
aagaaaaaaatggta

SEQ ID NO: 52949 - DNA, 15 bp, Homo sapiens
gaagaaaaaaatggt

SEQ ID NO: 52950 - DNA, 15 bp, Homo sapiens
ggaagaaaaaaatgg

SEQ ID NO: 52951 - DNA, 15 bp, Homo sapiens
gggaagaaaaaaatg

SEQ ID NO: 52952 - DNA, 15 bp, Homo sapiens
ggggaagaaaaaaat

SEQ ID NO: 52953 - DNA, 15 bp, Homo sapiens
gggggaagaaaaaaa

SEQ ID NO: 52954 - DNA, 15 bp, Homo sapiens
agggggaagaaaaaa

SEQ ID NO: 52955 - DNA, 15 bp, Homo sapiens
aagggggaagaaaaa

SEQ ID NO: 52956 - DNA, 15 bp, Homo sapiens
gaagggggaagaaaa

SEQ ID NO: 52957 - DNA, 15 bp, Homo sapiens
ggaagggggaagaaa

SEQ ID NO: 52958 - DNA, 15 bp, Homo sapiens
aggaagggggaagaa

SEQ ID NO: 52959 - DNA, 15 bp, Homo sapiens
taggaagggggaaga

SEQ ID NO: 52960 - DNA, 15 bp, Homo sapiens
ataggaagggggaag

SEQ ID NO: 52961 - DNA, 15 bp, Homo sapiens
aataggaagggggaa

SEQ ID NO: 52962 - DNA, 15 bp, Homo sapiens
aaataggaaggggga

SEQ ID NO: 52963 - DNA, 15 bp, Homo sapiens
gaaataggaaggggg

SEQ ID NO: 52964 - DNA, 15 bp, Homo sapiens
agaaataggaagggg

SEQ ID NO: 52965 - DNA, 15 bp, Homo sapiens
aagaaataggaaggg

SEQ ID NO: 52966 - DNA, 15 bp, Homo sapiens
taagaaataggaagg

SEQ ID NO: 52967 - DNA, 15 bp, Homo sapiens
ataagaaataggaag

SEQ ID NO: 52968 - DNA, 15 bp, Homo sapiens
aataagaaataggaa

SEQ ID NO: 52969 - DNA, 15 bp, Homo sapiens
gaataagaaatagga

SEQ ID NO: 52970 - DNA, 15 bp, Homo sapiens
agaataagaaatagg

SEQ ID NO: 52971 - DNA, 15 bp, Homo sapiens
tagaataagaaatag

SEQ ID NO: 52972 - DNA, 15 bp, Homo sapiens
gtagaataagaaata

SEQ ID NO: 52973 - DNA, 15 bp, Homo sapiens
ggtagaataagaaat

SEQ ID NO: 52974 - DNA, 15 bp, Homo sapiens
aggtagaataagaaa

SEQ ID NO: 52975 - DNA, 15 bp, Homo sapiens
caggtagaataagaa

SEQ ID NO: 52976 - DNA, 15 bp, Homo sapiens
tcaggtagaataaga

SEQ ID NO: 52977 - DNA, 15 bp, Homo sapiens
atcaggtagaataag

SEQ ID NO: 52978 - DNA, 15 bp, Homo sapiens
aatcaggtagaataa

SEQ ID NO: 52979 - DNA, 15 bp, Homo sapiens
aaatcaggtagaata

SEQ ID NO: 52980 - DNA, 15 bp, Homo sapiens
aaaatcaggtagaat

SEQ ID NO: 52981 - DNA, 15 bp, Homo sapiens
gaaaatcaggtagaa

SEQ ID NO: 52982 - DNA, 15 bp, Homo sapiens
ggaaaatcaggtaga

SEQ ID NO: 52983 - DNA, 15 bp, Homo sapiens
gggaaaatcaggtag

SEQ ID NO: 52984 - DNA, 15 bp, Homo sapiens
ggggaaaatcaggta

SEQ ID NO: 52985 - DNA, 15 bp, Homo sapiens
aggggaaaatcaggt

SEQ ID NO: 52986 - DNA, 15 bp, Homo sapiens
caggggaaaatcagg

SEQ ID NO: 52987 - DNA, 15 bp, Homo sapiens
acaggggaaaatcag

SEQ ID NO: 52988 - DNA, 15 bp, Homo sapiens
aacaggggaaaatca

SEQ ID NO: 52989 - DNA, 15 bp, Homo sapiens
gaacaggggaaaatc

SEQ ID NO: 52990 - DNA, 15 bp, Homo sapiens
tgaacaggggaaaat

SEQ ID NO: 52991 - DNA, 15 bp, Homo sapiens
atgaacaggggaaaa

SEQ ID NO: 52992 - DNA, 15 bp, Homo sapiens
aatgaacaggggaaa

SEQ ID NO: 52993 - DNA, 15 bp, Homo sapiens
gaatgaacaggggaa

SEQ ID NO: 52994 - DNA, 15 bp, Homo sapiens
tgaatgaacagggga

SEQ ID NO: 52995 - DNA, 15 bp, Homo sapiens
gtgaatgaacagggg

SEQ ID NO: 52996 - DNA, 15 bp, Homo sapiens
ggtgaatgaacaggg

SEQ ID NO: 52997 - DNA, 15 bp, Homo sapiens
tggtgaatgaacagg

SEQ ID NO: 52998 - DNA, 15 bp, Homo sapiens
gtggtgaatgaacag

SEQ ID NO: 52999 - DNA, 15 bp, Homo sapiens
tgtggtgaatgaaca

SEQ ID NO: 53000 - DNA, 15 bp, Homo sapiens
gtgtggtgaatgaac

SEQ ID NO: 53001 - DNA, 15 bp, Homo sapiens
agtgtggtgaatgaa

SEQ ID NO: 53002 - DNA, 15 bp, Homo sapiens
gagtgtggtgaatga

SEQ ID NO: 53003 - DNA, 15 bp, Homo sapiens
cgagtgtggtgaatg

SEQ ID NO: 53004 - DNA, 15 bp, Homo sapiens
acgagtgtggtgaat

SEQ ID NO: 53005 - DNA, 15 bp, Homo sapiens
aacgagtgtggtgaa

SEQ ID NO: 53006 - DNA, 15 bp, Homo sapiens
aaacgagtgtggtga

SEQ ID NO: 53007 - DNA, 15 bp, Homo sapiens
gaaacgagtgtggtg

SEQ ID NO: 53008 - DNA, 15 bp, Homo sapiens
agaaacgagtgtggt

SEQ ID NO: 53009 - DNA, 15 bp, Homo sapiens
aagaaacgagtgtgg

SEQ ID NO: 53010 - DNA, 15 bp, Homo sapiens
aaagaaacgagtgtg

SEQ ID NO: 53011 - DNA, 15 bp, Homo sapiens
gaaagaaacgagtgt

SEQ ID NO: 53012 - DNA, 15 bp, Homo sapiens
agaaagaaacgagtg

SEQ ID NO: 53013 - DNA, 15 bp, Homo sapiens
gagaaagaaacgagt

SEQ ID NO: 53014 - DNA, 15 bp, Homo sapiens
agagaaagaaacgag

SEQ ID NO: 53015 - DNA, 15 bp, Homo sapiens
aagagaaagaaacga

SEQ ID NO: 53016 - DNA, 15 bp, Homo sapiens
aaagagaaagaaacg

SEQ ID NO: 53017 - DNA, 15 bp, Homo sapiens
aaaagagaaagaaac

SEQ ID NO: 53018 - DNA, 15 bp, Homo sapiens
aaaaagagaaagaaa

SEQ ID NO: 53019 - DNA, 15 bp, Homo sapiens
aaaaaagagaaagaa

SEQ ID NO: 53020 - DNA, 15 bp, Homo sapiens
taaaaaagagaaaga

SEQ ID NO: 53021 - DNA, 15 bp, Homo sapiens
gtaaaaaagagaaag

SEQ ID NO: 53022 - DNA, 15 bp, Homo sapiens
agtaaaaaagagaaa

SEQ ID NO: 53023 - DNA, 15 bp, Homo sapiens
gagtaaaaaagagaa

SEQ ID NO: 53024 - DNA, 15 bp, Homo sapiens
agagtaaaaaagaga

SEQ ID NO: 53025 - DNA, 15 bp, Homo sapiens
gagagtaaaaaagag

SEQ ID NO: 53026 - DNA, 15 bp, Homo sapiens
agagagtaaaaaaga

SEQ ID NO: 53027 - DNA, 15 bp, Homo sapiens
gagagagtaaaaaag

SEQ ID NO: 53028 - DNA, 15 bp, Homo sapiens
agagagagtaaaaaa

SEQ ID NO: 53029 - DNA, 15 bp, Homo sapiens
aagagagagtaaaaa

SEQ ID NO: 53030 - DNA, 15 bp, Homo sapiens
taagagagagtaaaa

SEQ ID NO: 53031 - DNA, 15 bp, Homo sapiens
ttaagagagagtaaa

SEQ ID NO: 53032 - DNA, 15 bp, Homo sapiens
attaagagagagtaa

SEQ ID NO: 53033 - DNA, 15 bp, Homo sapiens
aattaagagagagta

SEQ ID NO: 53034 - DNA, 15 bp, Homo sapiens
aaattaagagagagt

SEQ ID NO: 53035 - DNA, 15 bp, Homo sapiens
aaaattaagagagag

SEQ ID NO: 53036 - DNA, 15 bp, Homo sapiens
aaaaattaagagaga

SEQ ID NO: 53037 - DNA, 15 bp, Homo sapiens
gaaaaattaagagag

SEQ ID NO: 53038 - DNA, 15 bp, Homo sapiens
tgaaaaattaagaga

SEQ ID NO: 53039 - DNA, 15 bp, Homo sapiens
atgaaaaattaagag

SEQ ID NO: 53040 - DNA, 15 bp, Homo sapiens
aatgaaaaattaaga

SEQ ID NO: 53041 - DNA, 15 bp, Homo sapiens
gaatgaaaaattaag

SEQ ID NO: 53042 - DNA, 15 bp, Homo sapiens
tgaatgaaaaattaa

SEQ ID NO: 53043 - DNA, 15 bp, Homo sapiens
ttgaatgaaaaatta

SEQ ID NO: 53044 - DNA, 15 bp, Homo sapiens
attgaatgaaaaatt

SEQ ID NO: 53045 - DNA, 15 bp, Homo sapiens
aattgaatgaaaaat

SEQ ID NO: 53046 - DNA, 15 bp, Homo sapiens
aaattgaatgaaaaa

SEQ ID NO: 53047 - DNA, 15 bp, Homo sapiens
aaaattgaatgaaaa

SEQ ID NO: 53048 - DNA, 15 bp, Homo sapiens
aaaaattgaatgaaa

SEQ ID NO: 53049 - DNA, 15 bp, Homo sapiens
taaaaattgaatgaa

SEQ ID NO: 53050 - DNA, 15 bp, Homo sapiens
ataaaaattgaatga

SEQ ID NO: 53051 - DNA, 15 bp, Homo sapiens
tataaaaattgaatg

SEQ ID NO: 53052 - DNA, 15 bp, Homo sapiens
ttataaaaattgaat

SEQ ID NO: 53053 - DNA, 15 bp, Homo sapiens
gttataaaaattgaa

SEQ ID NO: 53054 - DNA, 15 bp, Homo sapiens
tgttataaaaattga

SEQ ID NO: 53055 - DNA, 15 bp, Homo sapiens
atgttataaaaattg

SEQ ID NO: 53056 - DNA, 15 bp, Homo sapiens
catgttataaaaatt

SEQ ID NO: 53057 - DNA, 15 bp, Homo sapiens
acatgttataaaaat

SEQ ID NO: 53058 - DNA, 15 bp, Homo sapiens
tacatgttataaaaa

SEQ ID NO: 53059 - DNA, 15 bp, Homo sapiens
ttacatgttataaaa

SEQ ID NO: 53060 - DNA, 15 bp, Homo sapiens
attacatgttataaa

SEQ ID NO: 53061 - DNA, 15 bp, Homo sapiens
tattacatgttataa

SEQ ID NO: 53062 - DNA, 15 bp, Homo sapiens
ttattacatgttata

SEQ ID NO: 53063 - DNA, 15 bp, Homo sapiens
tttattacatgttat

SEQ ID NO: 53064 - DNA, 15 bp, Homo sapiens
atttattacatgtta

SEQ ID NO: 53065 - DNA, 15 bp, Homo sapiens
gatttattacatgtt

SEQ ID NO: 53066 - DNA, 15 bp, Homo sapiens
agatttattacatgt

SEQ ID NO: 53067 - DNA, 15 bp, Homo sapiens
tagatttattacatg

SEQ ID NO: 53068 - DNA, 15 bp, Homo sapiens
ttagatttattacat

SEQ ID NO: 53069 - DNA, 15 bp, Homo sapiens
gttagatttattaca

SEQ ID NO: 53070 - DNA, 15 bp, Homo sapiens
agttagatttattac

SEQ ID NO: 53071 - DNA, 15 bp, Homo sapiens
cagttagatttatta

SEQ ID NO: 53072 - DNA, 15 bp, Homo sapiens
acagttagatttatt

SEQ ID NO: 53073 - DNA, 15 bp, Homo sapiens
tacagttagatttat

SEQ ID NO: 53074 - DNA, 15 bp, Homo sapiens
ctacagttagattta

SEQ ID NO: 53075 - DNA, 15 bp, Homo sapiens
gctacagttagattt

SEQ ID NO: 53076 - DNA, 15 bp, Homo sapiens
cgctacagttagatt

SEQ ID NO: 53077 - DNA, 15 bp, Homo sapiens
acgctacagttagat

SEQ ID NO: 53078 - DNA, 15 bp, Homo sapiens
gacgctacagttaga

SEQ ID NO: 53079 - DNA, 15 bp, Homo sapiens
agacgctacagttag

SEQ ID NO: 53080 - DNA, 15 bp, Homo sapiens
cagacgctacagtta

SEQ ID NO: 53081 - DNA, 15 bp, Homo sapiens
tcagacgctacagtt

SEQ ID NO: 53082 - DNA, 15 bp, Homo sapiens
ctcagacgctacagt

SEQ ID NO: 53083 - DNA, 15 bp, Homo sapiens
actcagacgctacag

SEQ ID NO: 53084 - DNA, 15 bp, Homo sapiens
tactcagacgctaca

SEQ ID NO: 53085 - DNA, 15 bp, Homo sapiens
atactcagacgctac

SEQ ID NO: 53086 - DNA, 15 bp, Homo sapiens
aatactcagacgcta

SEQ ID NO: 53087 - DNA, 15 bp, Homo sapiens
taatactcagacgct

SEQ ID NO: 53088 - DNA, 15 bp, Homo sapiens
ttaatactcagacgc

SEQ ID NO: 53089 - DNA, 15 bp, Homo sapiens
cttaatactcagacg

SEQ ID NO: 53090 - DNA, 15 bp, Homo sapiens
tcttaatactcagac

SEQ ID NO: 53091 - DNA, 15 bp, Homo sapiens
ttcttaatactcaga

SEQ ID NO: 53092 - DNA, 15 bp, Homo sapiens
attcttaatactcag

SEQ ID NO: 53093 - DNA, 15 bp, Homo sapiens
tattcttaatactca

SEQ ID NO: 53094 - DNA, 15 bp, Homo sapiens
atattcttaatactc

SEQ ID NO: 53095 - DNA, 15 bp, Homo sapiens
aatattcttaatact

SEQ ID NO: 53096 - DNA, 15 bp, Homo sapiens
caatattcttaatac

SEQ ID NO: 53097 - DNA, 15 bp, Homo sapiens
gcaatattcttaata

SEQ ID NO: 53098 - DNA, 15 bp, Homo sapiens
agcaatattcttaat

SEQ ID NO: 53099 - DNA, 15 bp, Homo sapiens
tagcaatattcttaa

SEQ ID NO: 53100 - DNA, 15 bp, Homo sapiens
ctagcaatattctta

SEQ ID NO: 53101 - DNA, 15 bp, Homo sapiens
actagcaatattctt

SEQ ID NO: 53102 - DNA, 15 bp, Homo sapiens
tactagcaatattct

SEQ ID NO: 53103 - DNA, 15 bp, Homo sapiens
ttactagcaatattc

SEQ ID NO: 53104 - DNA, 15 bp, Homo sapiens
attactagcaatatt

SEQ ID NO: 53105 - DNA, 15 bp, Homo sapiens
tattactagcaatat

SEQ ID NO: 53106 - DNA, 15 bp, Homo sapiens
gtattactagcaata

SEQ ID NO: 53107 - DNA, 15 bp, Homo sapiens
agtattactagcaat

SEQ ID NO: 53108 - DNA, 15 bp, Homo sapiens
aagtattactagcaa

SEQ ID NO: 53109 - DNA, 15 bp, Homo sapiens
gaagtattactagca

SEQ ID NO: 53110 - DNA, 15 bp, Homo sapiens
tgaagtattactagc

SEQ ID NO: 53111 - DNA, 15 bp, Homo sapiens
gtgaagtattactag

SEQ ID NO: 53112 - DNA, 15 bp, Homo sapiens
ggtgaagtattacta

SEQ ID NO: 53113 - DNA, 15 bp, Homo sapiens
aggtgaagtattact

SEQ ID NO: 53114 - DNA, 15 bp, Homo sapiens
caggtgaagtattac

SEQ ID NO: 53115 - DNA, 15 bp, Homo sapiens
acaggtgaagtatta

SEQ ID NO: 53116 - DNA, 15 bp, Homo sapiens
tacaggtgaagtatt

SEQ ID NO: 53117 - DNA, 15 bp, Homo sapiens
ttacaggtgaagtat

SEQ ID NO: 53118 - DNA, 15 bp, Homo sapiens
attacaggtgaagta

SEQ ID NO: 53119 - DNA, 15 bp, Homo sapiens
gattacaggtgaagt

SEQ ID NO: 53120 - DNA, 15 bp, Homo sapiens
ggattacaggtgaag

SEQ ID NO: 53121 - DNA, 15 bp, Homo sapiens
gggattacaggtgaa

SEQ ID NO: 53122 - DNA, 15 bp, Homo sapiens
tgggattacaggtga

SEQ ID NO: 53123 - DNA, 15 bp, Homo sapiens
ctgggattacaggtg

SEQ ID NO: 53124 - DNA, 15 bp, Homo sapiens
gctgggattacaggt

SEQ ID NO: 53125 - DNA, 15 bp, Homo sapiens
tagcctcccaaagtg

SEQ ID NO: 53126 - DNA, 15 bp, Homo sapiens
ttagcctcccaaagt

SEQ ID NO: 53127 - DNA, 15 bp, Homo sapiens
cttagcctcccaaag

SEQ ID NO: 53128 - DNA, 15 bp, Homo sapiens
ccttagcctcccaaa

SEQ ID NO: 53129 - DNA, 15 bp, Homo sapiens
gccttagcctcccaa

SEQ ID NO: 53130 - DNA, 15 bp, Homo sapiens
tgccttagcctccca

SEQ ID NO: 53131 - DNA, 15 bp, Homo sapiens
ctgccttagcctccc

SEQ ID NO: 53132 - DNA, 15 bp, Homo sapiens
cctgccttagcctcc

SEQ ID NO: 53133 - DNA, 15 bp, Homo sapiens
gcctgccttagcctc

SEQ ID NO: 53134 - DNA, 15 bp, Homo sapiens
cgcctgccttagcct

SEQ ID NO: 53135 - DNA, 15 bp, Homo sapiens
ccgcctgccttagcc

SEQ ID NO: 53136 - DNA, 15 bp, Homo sapiens
tccgcctgccttagc

SEQ ID NO: 53137 - DNA, 15 bp, Homo sapiens
atccgcctgccttag

SEQ ID NO: 53138 - DNA, 15 bp, Homo sapiens
gatccgcctgcctta

SEQ ID NO: 53139 - DNA, 15 bp, Homo sapiens
tgatccgcctgcctt

SEQ ID NO: 53140 - DNA, 15 bp, Homo sapiens
gtgatccgcctgcct

SEQ ID NO: 53141 - DNA, 15 bp, Homo sapiens
agtgatccgcctgcc

SEQ ID NO: 53142 - DNA, 15 bp, Homo sapiens
aagtgatccgcctgc

SEQ ID NO: 53143 - DNA, 15 bp, Homo sapiens
caagtgatccgcctg

SEQ ID NO: 53144 - DNA, 15 bp, Homo sapiens
tcaagtgatccgcct

SEQ ID NO: 53145 - DNA, 15 bp, Homo sapiens
ctcaagtgatccgcc

SEQ ID NO: 53146 - DNA, 15 bp, Homo sapiens
cctcaagtgatccgc

SEQ ID NO: 53147 - DNA, 15 bp, Homo sapiens
gcctcaagtgatccg

SEQ ID NO: 53148 - DNA, 15 bp, Homo sapiens
ggcctcaagtgatcc

SEQ ID NO: 53149 - DNA, 15 bp, Homo sapiens
gggcctcaagtgatc

SEQ ID NO: 53150 - DNA, 15 bp, Homo sapiens
tgggcctcaagtgat

SEQ ID NO: 53151 - DNA, 15 bp, Homo sapiens
ctgggcctcaagtga

SEQ ID NO: 53152 - DNA, 15 bp, Homo sapiens
cctgggcctcaagtg

SEQ ID NO: 53153 - DNA, 15 bp, Homo sapiens
tcctgggcctcaagt

SEQ ID NO: 53154 - DNA, 15 bp, Homo sapiens
ctcctgggcctcaag

SEQ ID NO: 53155 - DNA, 15 bp, Homo sapiens
actcctgggcctcaa

SEQ ID NO: 53156 - DNA, 15 bp, Homo sapiens
aactcctgggcctca

SEQ ID NO: 53157 - DNA, 15 bp, Homo sapiens
aaactcctgggcctc

SEQ ID NO: 53158 - DNA, 15 bp, Homo sapiens
taaactcctgggcct

SEQ ID NO: 53159 - DNA, 15 bp, Homo sapiens
ttaaactcctgggcc

SEQ ID NO: 53160 - DNA, 15 bp, Homo sapiens
cttaaactcctgggc

SEQ ID NO: 53161 - DNA, 15 bp, Homo sapiens
tcttaaactcctggg

SEQ ID NO: 53162 - DNA, 15 bp, Homo sapiens
gtcttaaactcctgg

SEQ ID NO: 53163 - DNA, 15 bp, Homo sapiens
ggtcttaaactcctg

SEQ ID NO: 53164 - DNA, 15 bp, Homo sapiens
tggtcttaaactcct

SEQ ID NO: 53165 - DNA, 15 bp, Homo sapiens
ctggtcttaaactcc

SEQ ID NO: 53166 - DNA, 15 bp, Homo sapiens
gctggtcttaaactc

SEQ ID NO: 53167 - DNA, 15 bp, Homo sapiens
ggctggtcttaaact

SEQ ID NO: 53168 - DNA, 15 bp, Homo sapiens
cggctggtcttaaac

SEQ ID NO: 53169 - DNA, 15 bp, Homo sapiens
ccggctggtcttaaa

SEQ ID NO: 53170 - DNA, 15 bp, Homo sapiens
gccggctggtcttaa

SEQ ID NO: 53171 - DNA, 15 bp, Homo sapiens
ggccggctggtctta

SEQ ID NO: 53172 - DNA, 15 bp, Homo sapiens
tggccggctggtctt

SEQ ID NO: 53173 - DNA, 15 bp, Homo sapiens
ttggccggctggtct

SEQ ID NO: 53174 - DNA, 15 bp, Homo sapiens
attggccggctggtc

SEQ ID NO: 53175 - DNA, 15 bp, Homo sapiens
tattggccggctggt

SEQ ID NO: 53176 - DNA, 15 bp, Homo sapiens
atattggccggctgg

SEQ ID NO: 53177 - DNA, 15 bp, Homo sapiens
catattggccggctg

SEQ ID NO: 53178 - DNA, 15 bp, Homo sapiens
ccatattggccggct

SEQ ID NO: 53179 - DNA, 15 bp, Homo sapiens
gccatattggccggc

SEQ ID NO: 53180 - DNA, 15 bp, Homo sapiens
cgccatattggccgg

SEQ ID NO: 53181 - DNA, 15 bp, Homo sapiens
tcgccatattggccg

SEQ ID NO: 53182 - DNA, 15 bp, Homo sapiens
ttcgccatattggcc

SEQ ID NO: 53183 - DNA, 15 bp, Homo sapiens
tttcgccatattggc

SEQ ID NO: 53184 - DNA, 15 bp, Homo sapiens
gtttcgccatattgg

SEQ ID NO: 53185 - DNA, 15 bp, Homo sapiens
ggtttcgccatattg

SEQ ID NO: 53186 - DNA, 15 bp, Homo sapiens
gggtttcgccatatt

SEQ ID NO: 53187 - DNA, 15 bp, Homo sapiens
agggtttcgccatat

SEQ ID NO: 53188 - DNA, 15 bp, Homo sapiens
tagggtttcgccata

SEQ ID NO: 53189 - DNA, 15 bp, Homo sapiens
atagggtttcgccat

SEQ ID NO: 53190 - DNA, 15 bp, Homo sapiens
gatagggtttcgcca

SEQ ID NO: 53191 - DNA, 15 bp, Homo sapiens
agatagggtttcgcc

SEQ ID NO: 53192 - DNA, 15 bp, Homo sapiens
cagatagggtttcgc

SEQ ID NO: 53193 - DNA, 15 bp, Homo sapiens
gcagatagggtttcg

SEQ ID NO: 53194 - DNA, 15 bp, Homo sapiens
tgcagatagggtttc

SEQ ID NO: 53195 - DNA, 15 bp, Homo sapiens
gtgcagatagggttt

SEQ ID NO: 53196 - DNA, 15 bp, Homo sapiens
agtgcagatagggtt

SEQ ID NO: 53197 - DNA, 15 bp, Homo sapiens
tagtgcagatagggt

SEQ ID NO: 53198 - DNA, 15 bp, Homo sapiens
gtagtgcagataggg

SEQ ID NO: 53199 - DNA, 15 bp, Homo sapiens
tgtagtgcagatagg

SEQ ID NO: 53200 - DNA, 15 bp, Homo sapiens
ttgtagtgcagatag

SEQ ID NO: 53201 - DNA, 15 bp, Homo sapiens
tttgtagtgcagata

SEQ ID NO: 53202 - DNA, 15 bp, Homo sapiens
atttgtagtgcagat

SEQ ID NO: 53203 - DNA, 15 bp, Homo sapiens
tatttgtagtgcaga

SEQ ID NO: 53204 - DNA, 15 bp, Homo sapiens
gtatttgtagtgcag

SEQ ID NO: 53205 - DNA, 15 bp, Homo sapiens
tgtatttgtagtgca

SEQ ID NO: 53206 - DNA, 15 bp, Homo sapiens
ttgtatttgtagtgc

SEQ ID NO: 53207 - DNA, 15 bp, Homo sapiens
tttgtatttgtagtg

SEQ ID NO: 53208 - DNA, 15 bp, Homo sapiens
ttttgtatttgtagt

SEQ ID NO: 53209 - DNA, 15 bp, Homo sapiens
tttttgtatttgtag

SEQ ID NO: 53210 - DNA, 15 bp, Homo sapiens
atttttgtatttgta

SEQ ID NO: 53211 - DNA, 15 bp, Homo sapiens
aatttttgtatttgt

SEQ ID NO: 53212 - DNA, 15 bp, Homo sapiens
taatttttgtatttg

SEQ ID NO: 53213 - DNA, 15 bp, Homo sapiens
acaccatgcccagct

SEQ ID NO: 53214 - DNA, 15 bp, Homo sapiens
gacaccatgcccagc

SEQ ID NO: 53215 - DNA, 15 bp, Homo sapiens
cgacaccatgcccag

SEQ ID NO: 53216 - DNA, 15 bp, Homo sapiens
gcgacaccatgccca

SEQ ID NO: 53217 - DNA, 15 bp, Homo sapiens
tgcgacaccatgccc

SEQ ID NO: 53218 - DNA, 15 bp, Homo sapiens
gtgcgacaccatgcc

SEQ ID NO: 53219 - DNA, 15 bp, Homo sapiens
tgtgcgacaccatgc

SEQ ID NO: 53220 - DNA, 15 bp, Homo sapiens
gtgtgcgacaccatg

SEQ ID NO: 53221 - DNA, 15 bp, Homo sapiens
ggtgtgcgacaccat

SEQ ID NO: 53222 - DNA, 15 bp, Homo sapiens
aggtgtgcgacacca

SEQ ID NO: 53223 - DNA, 15 bp, Homo sapiens
caggtgtgcgacacc

SEQ ID NO: 53224 - DNA, 15 bp, Homo sapiens
acaggtgtgcgacac

SEQ ID NO: 53225 - DNA, 15 bp, Homo sapiens
tacaggtgtgcgaca

SEQ ID NO: 53226 - DNA, 15 bp, Homo sapiens
ttacaggtgtgcgac

SEQ ID NO: 53227 - DNA, 15 bp, Homo sapiens
attacaggtgtgcga

SEQ ID NO: 53228 - DNA, 15 bp, Homo sapiens
gattacaggtgtgcg

SEQ ID NO: 53229 - DNA, 15 bp, Homo sapiens
ggattacaggtgtgc

SEQ ID NO: 53230 - DNA, 15 bp, Homo sapiens
gggattacaggtgtg

SEQ ID NO: 53231 - DNA, 15 bp, Homo sapiens
tgggattacaggtgt

SEQ ID NO: 53232 - DNA, 15 bp, Homo sapiens
gtgcctcagcctccc

SEQ ID NO: 53233 - DNA, 15 bp, Homo sapiens
tgtgcctcagcctcc

SEQ ID NO: 53234 - DNA, 15 bp, Homo sapiens
ttgtgcctcagcctc

SEQ ID NO: 53235 - DNA, 15 bp, Homo sapiens
cttgtgcctcagcct

SEQ ID NO: 53236 - DNA, 15 bp, Homo sapiens
tcttgtgcctcagcc

SEQ ID NO: 53237 - DNA, 15 bp, Homo sapiens
ttcttgtgcctcagc

SEQ ID NO: 53238 - DNA, 15 bp, Homo sapiens
attcttgtgcctcag

SEQ ID NO: 53239 - DNA, 15 bp, Homo sapiens
aattcttgtgcctca

SEQ ID NO: 53240 - DNA, 15 bp, Homo sapiens
caattcttgtgcctc

SEQ ID NO: 53241 - DNA, 15 bp, Homo sapiens
gcaattcttgtgcct

SEQ ID NO: 53242 - DNA, 15 bp, Homo sapiens
agcaattcttgtgcc

SEQ ID NO: 53243 - DNA, 15 bp, Homo sapiens
aagcaattcttgtgc

SEQ ID NO: 53244 - DNA, 15 bp, Homo sapiens
caagcaattcttgtg

SEQ ID NO: 53245 - DNA, 15 bp, Homo sapiens
tcaagcaattcttgt

SEQ ID NO: 53246 - DNA, 15 bp, Homo sapiens
ctcaagcaattcttg

SEQ ID NO: 53247 - DNA, 15 bp, Homo sapiens
gctcaagcaattctt

SEQ ID NO: 53248 - DNA, 15 bp, Homo sapiens
ggctcaagcaattct

SEQ ID NO: 53249 - DNA, 15 bp, Homo sapiens
aggctcaagcaattc

SEQ ID NO: 53250 - DNA, 15 bp, Homo sapiens
caggctcaagcaatt

SEQ ID NO: 53251 - DNA, 15 bp, Homo sapiens
acaggctcaagcaat

SEQ ID NO: 53252 - DNA, 15 bp, Homo sapiens
cacaggctcaagcaa

SEQ ID NO: 53253 - DNA, 15 bp, Homo sapiens
tcacaggctcaagca

SEQ ID NO: 53254 - DNA, 15 bp, Homo sapiens
ctcacaggctcaagc

SEQ ID NO: 53255 - DNA, 15 bp, Homo sapiens
tctcacaggctcaag

SEQ ID NO: 53256 - DNA, 15 bp, Homo sapiens
atctcacaggctcaa

SEQ ID NO: 53257 - DNA, 15 bp, Homo sapiens
catctcacaggctca

SEQ ID NO: 53258 - DNA, 15 bp, Homo sapiens
ccatctcacaggctc

SEQ ID NO: 53259 - DNA, 15 bp, Homo sapiens
tccatctcacaggct

SEQ ID NO: 53260 - DNA, 15 bp, Homo sapiens
ctccatctcacaggc

SEQ ID NO: 53261 - DNA, 15 bp, Homo sapiens
cctccatctcacagg

SEQ ID NO: 53262 - DNA, 15 bp, Homo sapiens
acctccatctcacag

SEQ ID NO: 53263 - DNA, 15 bp, Homo sapiens
aacctccatctcaca

SEQ ID NO: 53264 - DNA, 15 bp, Homo sapiens
caacctccatctcac

SEQ ID NO: 53265 - DNA, 15 bp, Homo sapiens
gcaacctccatctca

SEQ ID NO: 53266 - DNA, 15 bp, Homo sapiens
tgcaacctccatctc

SEQ ID NO: 53267 - DNA, 15 bp, Homo sapiens
ctgcaacctccatct

SEQ ID NO: 53268 - DNA, 15 bp, Homo sapiens
actgcaacctccatc

SEQ ID NO: 53269 - DNA, 15 bp, Homo sapiens
cactgcaacctccat

SEQ ID NO: 53270 - DNA, 15 bp, Homo sapiens
tgatctcggctcact

SEQ ID NO: 53271 - DNA, 15 bp, Homo sapiens
gtgatctcggctcac

SEQ ID NO: 53272 - DNA, 15 bp, Homo sapiens
tgtgatctcggctca

SEQ ID NO: 53273 - DNA, 15 bp, Homo sapiens
gtgtgatctcggctc

SEQ ID NO: 53274 - DNA, 15 bp, Homo sapiens
ggtgtgatctcggct

SEQ ID NO: 53275 - DNA, 15 bp, Homo sapiens
tggtgtgatctcggc

SEQ ID NO: 53276 - DNA, 15 bp, Homo sapiens
ctggtgtgatctcgg

SEQ ID NO: 53277 - DNA, 15 bp, Homo sapiens
actggtgtgatctcg

SEQ ID NO: 53278 - DNA, 15 bp, Homo sapiens
cactggtgtgatctc

SEQ ID NO: 53279 - DNA, 15 bp, Homo sapiens
gcactggtgtgatct

SEQ ID NO: 53280 - DNA, 15 bp, Homo sapiens
tgcactggtgtgatc

SEQ ID NO: 53281 - DNA, 15 bp, Homo sapiens
gtgcactggtgtgat

SEQ ID NO: 53282 - DNA, 15 bp, Homo sapiens
cgtgcactggtgtga

SEQ ID NO: 53283 - DNA, 15 bp, Homo sapiens
acgtgcactggtgtg

SEQ ID NO: 53284 - DNA, 15 bp, Homo sapiens
cacgtgcactggtgt

SEQ ID NO: 53285 - DNA, 15 bp, Homo sapiens
gcacgtgcactggtg

SEQ ID NO: 53286 - DNA, 15 bp, Homo sapiens
tgcacgtgcactggt

SEQ ID NO: 53287 - DNA, 15 bp, Homo sapiens
gtgcacgtgcactgg

SEQ ID NO: 53288 - DNA, 15 bp, Homo sapiens
agtgcacgtgcactg

SEQ ID NO: 53289 - DNA, 15 bp, Homo sapiens
aagtgcacgtgcact

SEQ ID NO: 53290 - DNA, 15 bp, Homo sapiens
gaagtgcacgtgcac

SEQ ID NO: 53291 - DNA, 15 bp, Homo sapiens
tgaagtgcacgtgca

SEQ ID NO: 53292 - DNA, 15 bp, Homo sapiens
ctgaagtgcacgtgc

SEQ ID NO: 53293 - DNA, 15 bp, Homo sapiens
gctgaagtgcacgtg

SEQ ID NO: 53294 - DNA, 15 bp, Homo sapiens
ggctgaagtgcacgt

SEQ ID NO: 53295 - DNA, 15 bp, Homo sapiens
aggctgaagtgcacg

SEQ ID NO: 53296 - DNA, 15 bp, Homo sapiens
caggctgaagtgcac

SEQ ID NO: 53297 - DNA, 15 bp, Homo sapiens
ccaggctgaagtgca

SEQ ID NO: 53298 - DNA, 15 bp, Homo sapiens
cccaggctgaagtgc

SEQ ID NO: 53299 - DNA, 15 bp, Homo sapiens
gcccaggctgaagtg

SEQ ID NO: 53300 - DNA, 15 bp, Homo sapiens
tgcccaggctgaagt

SEQ ID NO: 53301 - DNA, 15 bp, Homo sapiens
ttgcccaggctgaag

SEQ ID NO: 53302 - DNA, 15 bp, Homo sapiens
gttgcccaggctgaa

SEQ ID NO: 53303 - DNA, 15 bp, Homo sapiens
tgttgcccaggctga

SEQ ID NO: 53304 - DNA, 15 bp, Homo sapiens
tgctctgttgcccag

SEQ ID NO: 53305 - DNA, 15 bp, Homo sapiens
ttgctctgttgccca

SEQ ID NO: 53306 - DNA, 15 bp, Homo sapiens
cttgctctgttgccc

SEQ ID NO: 53307 - DNA, 15 bp, Homo sapiens
tcttgctctgttgcc

SEQ ID NO: 53308 - DNA, 15 bp, Homo sapiens
gtcttgctctgttgc

SEQ ID NO: 53309 - DNA, 15 bp, Homo sapiens
agtcttgctctgttg

SEQ ID NO: 53310 - DNA, 15 bp, Homo sapiens
gagtcttgctctgtt

SEQ ID NO: 53311 - DNA, 15 bp, Homo sapiens
agagtcttgctctgt

SEQ ID NO: 53312 - DNA, 15 bp, Homo sapiens
cagagtcttgctctg

SEQ ID NO: 53313 - DNA, 15 bp, Homo sapiens
acagagtcttgctct

SEQ ID NO: 53314 - DNA, 15 bp, Homo sapiens
gacagagtcttgctc

SEQ ID NO: 53315 - DNA, 15 bp, Homo sapiens
agacagagtcttgct

SEQ ID NO: 53316 - DNA, 15 bp, Homo sapiens
aagacagagtcttgc

SEQ ID NO: 53317 - DNA, 15 bp, Homo sapiens
taagacagagtcttg

SEQ ID NO: 53318 - DNA, 15 bp, Homo sapiens
ttaagacagagtctt

SEQ ID NO: 53319 - DNA, 15 bp, Homo sapiens
tttaagacagagtct

SEQ ID NO: 53320 - DNA, 15 bp, Homo sapiens
ttttaagacagagtc

SEQ ID NO: 53321 - DNA, 15 bp, Homo sapiens
tttttaagacagagt

SEQ ID NO: 53322 - DNA, 15 bp, Homo sapiens
ttttttaagacagag

SEQ ID NO: 53323 - DNA, 15 bp, Homo sapiens
tttttttaagacaga

SEQ ID NO: 53324 - DNA, 15 bp, Homo sapiens
tttttttttttaaga

SEQ ID NO: 53325 - DNA, 15 bp, Homo sapiens
tattttttttttttt

SEQ ID NO: 53326 - DNA, 15 bp, Homo sapiens
atatttttttttttt

SEQ ID NO: 53327 - DNA, 15 bp, Homo sapiens
tatattttttttttt

SEQ ID NO: 53328 - DNA, 15 bp, Homo sapiens
atatatttttttttt

SEQ ID NO: 53329 - DNA, 15 bp, Homo sapiens
tatatattttttttt

SEQ ID NO: 53330 - DNA, 15 bp, Homo sapiens
gtatatatttttttt

SEQ ID NO: 53331 - DNA, 15 bp, Homo sapiens
tgtatatattttttt

SEQ ID NO: 53332 - DNA, 15 bp, Homo sapiens
gtgtatatatttttt

SEQ ID NO: 53333 - DNA, 15 bp, Homo sapiens
tgtgtatatattttt

SEQ ID NO: 53334 - DNA, 15 bp, Homo sapiens
gtgtgtatatatttt

SEQ ID NO: 53335 - DNA, 15 bp, Homo sapiens
tgtgtgtatatattt

SEQ ID NO: 53336 - DNA, 15 bp, Homo sapiens
gtgtgtgtatatatt

SEQ ID NO: 53337 - DNA, 15 bp, Homo sapiens
tgtgtgtgtatatat

SEQ ID NO: 53338 - DNA, 15 bp, Homo sapiens
gtgtgtgtgtatata

SEQ ID NO: 53339 - DNA, 15 bp, Homo sapiens
tgtgtgtgtgtatat

SEQ ID NO: 53340 - DNA, 15 bp, Homo sapiens
gtgtgtgtgtgtata

SEQ ID NO: 53341 - DNA, 15 bp, Homo sapiens
agtgtgtgtgtgtgt

SEQ ID NO: 53342 - DNA, 15 bp, Homo sapiens
tagtgtgtgtgtgtg

SEQ ID NO: 53343 - DNA, 15 bp, Homo sapiens
atagtgtgtgtgtgt

SEQ ID NO: 53344 - DNA, 15 bp, Homo sapiens
aatagtgtgtgtgtg

SEQ ID NO: 53345 - DNA, 15 bp, Homo sapiens
taatagtgtgtgtgt

SEQ ID NO: 53346 - DNA, 15 bp, Homo sapiens
gtaatagtgtgtgtg

SEQ ID NO: 53347 - DNA, 15 bp, Homo sapiens
agtaatagtgtgtgt

SEQ ID NO: 53348 - DNA, 15 bp, Homo sapiens
tagtaatagtgtgtg

SEQ ID NO: 53349 - DNA, 15 bp, Homo sapiens
gtagtaatagtgtgt

SEQ ID NO: 53350 - DNA, 15 bp, Homo sapiens
ggtagtaatagtgtg

SEQ ID NO: 53351 - DNA, 15 bp, Homo sapiens
tggtagtaatagtgt

SEQ ID NO: 53352 - DNA, 15 bp, Homo sapiens
ttggtagtaatagtg

SEQ ID NO: 53353 - DNA, 15 bp, Homo sapiens
atatgtatgtatatt

SEQ ID NO: 53354 - DNA, 15 bp, Homo sapiens
tatatgtatgtatat

SEQ ID NO: 53355 - DNA, 15 bp, Homo sapiens
atatatgtatgtata

SEQ ID NO: 53356 - DNA, 15 bp, Homo sapiens
catacatacatatat

SEQ ID NO: 53357 - DNA, 15 bp, Homo sapiens
acatacatacatata

SEQ ID NO: 53358 - DNA, 15 bp, Homo sapiens
tacatacatacatat

SEQ ID NO: 53359 - DNA, 15 bp, Homo sapiens
atacatacatacata

SEQ ID NO: 53360 - DNA, 15 bp, Homo sapiens
catacatacatacat

SEQ ID NO: 53361 - DNA, 15 bp, Homo sapiens
acatacatacataca

SEQ ID NO: 53362 - DNA, 15 bp, Homo sapiens
tacatacatacatac

SEQ ID NO: 53363 - DNA, 15 bp, Homo sapiens
tatacatacatacat

SEQ ID NO: 53364 - DNA, 15 bp, Homo sapiens
atatacatacataca

SEQ ID NO: 53365 - DNA, 15 bp, Homo sapiens
aatatacatacatac

SEQ ID NO: 53366 - DNA, 15 bp, Homo sapiens
tactattactaccaa

SEQ ID NO: 53367 - DNA, 15 bp, Homo sapiens
ttactattactacca

SEQ ID NO: 53368 - DNA, 15 bp, Homo sapiens
attactattactacc

SEQ ID NO: 53369 - DNA, 15 bp, Homo sapiens
tattactattactac

SEQ ID NO: 53370 - DNA, 15 bp, Homo sapiens
gtattactattacta

SEQ ID NO: 53371 - DNA, 15 bp, Homo sapiens
agtattactattact

SEQ ID NO: 53372 - DNA, 15 bp, Homo sapiens
aagtattactattac

SEQ ID NO: 53373 - DNA, 15 bp, Homo sapiens
caagtattactatta

SEQ ID NO: 53374 - DNA, 15 bp, Homo sapiens
ccaagtattactatt

SEQ ID NO: 53375 - DNA, 15 bp, Homo sapiens
cccaagtattactat

SEQ ID NO: 53376 - DNA, 15 bp, Homo sapiens
gcccaagtattacta

SEQ ID NO: 53377 - DNA, 15 bp, Homo sapiens
ggcccaagtattact

SEQ ID NO: 53378 - DNA, 15 bp, Homo sapiens
gggcccaagtattac

SEQ ID NO: 53379 - DNA, 15 bp, Homo sapiens
ggggcccaagtatta

SEQ ID NO: 53380 - DNA, 15 bp, Homo sapiens
aggggcccaagtatt

SEQ ID NO: 53381 - DNA, 15 bp, Homo sapiens
caggggcccaagtat

SEQ ID NO: 53382 - DNA, 15 bp, Homo sapiens
gcaggggcccaagta

SEQ ID NO: 53383 - DNA, 15 bp, Homo sapiens
tgcaggggcccaagt

SEQ ID NO: 53384 - DNA, 15 bp, Homo sapiens
gtgcaggggcccaag

SEQ ID NO: 53385 - DNA, 15 bp, Homo sapiens
cgtgcaggggcccaa

SEQ ID NO: 53386 - DNA, 15 bp, Homo sapiens
acgtgcaggggccca

SEQ ID NO: 53387 - DNA, 15 bp, Homo sapiens
aacgtgcaggggccc

SEQ ID NO: 53388 - DNA, 15 bp, Homo sapiens
aaacgtgcaggggcc

SEQ ID NO: 53389 - DNA, 15 bp, Homo sapiens
aaaacgtgcaggggc

SEQ ID NO: 53390 - DNA, 15 bp, Homo sapiens
taaaacgtgcagggg

SEQ ID NO: 53391 - DNA, 15 bp, Homo sapiens
ttaaaacgtgcaggg

SEQ ID NO: 53392 - DNA, 15 bp, Homo sapiens
cttaaaacgtgcagg

SEQ ID NO: 53393 - DNA, 15 bp, Homo sapiens
acttaaaacgtgcag

SEQ ID NO: 53394 - DNA, 15 bp, Homo sapiens
cacttaaaacgtgca

SEQ ID NO: 53395 - DNA, 15 bp, Homo sapiens
tcacttaaaacgtgc

SEQ ID NO: 53396 - DNA, 15 bp, Homo sapiens
ttcacttaaaacgtg

SEQ ID NO: 53397 - DNA, 15 bp, Homo sapiens
tttcacttaaaacgt

SEQ ID NO: 53398 - DNA, 15 bp, Homo sapiens
ttttcacttaaaacg

SEQ ID NO: 53399 - DNA, 15 bp, Homo sapiens
attttcacttaaaac

SEQ ID NO: 53400 - DNA, 15 bp, Homo sapiens
tattttcacttaaaa

SEQ ID NO: 53401 - DNA, 15 bp, Homo sapiens
ctattttcacttaaa

SEQ ID NO: 53402 - DNA, 15 bp, Homo sapiens
tctattttcacttaa

SEQ ID NO: 53403 - DNA, 15 bp, Homo sapiens
atctattttcactta

SEQ ID NO: 53404 - DNA, 15 bp, Homo sapiens
gatctattttcactt

SEQ ID NO: 53405 - DNA, 15 bp, Homo sapiens
agatctattttcact

SEQ ID NO: 53406 - DNA, 15 bp, Homo sapiens
tagatctattttcac

SEQ ID NO: 53407 - DNA, 15 bp, Homo sapiens
ttagatctattttca

SEQ ID NO: 53408 - DNA, 15 bp, Homo sapiens
attagatctattttc

SEQ ID NO: 53409 - DNA, 15 bp, Homo sapiens
tattagatctatttt

SEQ ID NO: 53410 - DNA, 15 bp, Homo sapiens
atattagatctattt

SEQ ID NO: 53411 - DNA, 15 bp, Homo sapiens
aatattagatctatt

SEQ ID NO: 53412 - DNA, 15 bp, Homo sapiens
taatattagatctat

SEQ ID NO: 53413 - DNA, 15 bp, Homo sapiens
ttaatattagatcta

SEQ ID NO: 53414 - DNA, 15 bp, Homo sapiens
tttaatattagatct

SEQ ID NO: 53415 - DNA, 15 bp, Homo sapiens
atttaatattagatc

SEQ ID NO: 53416 - DNA, 15 bp, Homo sapiens
catttaatattagat

SEQ ID NO: 53417 - DNA, 15 bp, Homo sapiens
acatttaatattaga

SEQ ID NO: 53418 - DNA, 15 bp, Homo sapiens
gacatttaatattag

SEQ ID NO: 53419 - DNA, 15 bp, Homo sapiens
agacatttaatatta

SEQ ID NO: 53420 - DNA, 15 bp, Homo sapiens
aagacatttaatatt

SEQ ID NO: 53421 - DNA, 15 bp, Homo sapiens
aaagacatttaatat

SEQ ID NO: 53422 - DNA, 15 bp, Homo sapiens
taaagacatttaata

SEQ ID NO: 53423 - DNA, 15 bp, Homo sapiens
ctaaagacatttaat

SEQ ID NO: 53424 - DNA, 15 bp, Homo sapiens
gctaaagacatttaa

SEQ ID NO: 53425 - DNA, 15 bp, Homo sapiens
ggctaaagacattta

SEQ ID NO: 53426 - DNA, 15 bp, Homo sapiens
gggctaaagacattt

SEQ ID NO: 53427 - DNA, 15 bp, Homo sapiens
agggctaaagacatt

SEQ ID NO: 53428 - DNA, 15 bp, Homo sapiens
aagggctaaagacat

SEQ ID NO: 53429 - DNA, 15 bp, Homo sapiens
taagggctaaagaca

SEQ ID NO: 53430 - DNA, 15 bp, Homo sapiens
ttaagggctaaagac

SEQ ID NO: 53431 - DNA, 15 bp, Homo sapiens
tttaagggctaaaga

SEQ ID NO: 53432 - DNA, 15 bp, Homo sapiens
atttaagggctaaag

SEQ ID NO: 53433 - DNA, 15 bp, Homo sapiens
aatttaagggctaaa

SEQ ID NO: 53434 - DNA, 15 bp, Homo sapiens
aaatttaagggctaa

SEQ ID NO: 53435 - DNA, 15 bp, Homo sapiens
aaaatttaagggcta

SEQ ID NO: 53436 - DNA, 15 bp, Homo sapiens
aaaaatttaagggct

SEQ ID NO: 53437 - DNA, 15 bp, Homo sapiens
aaaaaatttaagggc

SEQ ID NO: 53438 - DNA, 15 bp, Homo sapiens
aaaaaaatttaaggg

SEQ ID NO: 53439 - DNA, 15 bp, Homo sapiens
aaaaaaaatttaagg

SEQ ID NO: 53440 - DNA, 15 bp, Homo sapiens
taaaaaaaatttaag

SEQ ID NO: 53441 - DNA, 15 bp, Homo sapiens
ttaaaaaaaatttaa

SEQ ID NO: 53442 - DNA, 15 bp, Homo sapiens
cttaaaaaaaattta

SEQ ID NO: 53443 - DNA, 15 bp, Homo sapiens
acttaaaaaaaattt

SEQ ID NO: 53444 - DNA, 15 bp, Homo sapiens
cacttaaaaaaaatt

SEQ ID NO: 53445 - DNA, 15 bp, Homo sapiens
acacttaaaaaaaat

SEQ ID NO: 53446 - DNA, 15 bp, Homo sapiens
aacacttaaaaaaaa

SEQ ID NO: 53447 - DNA, 15 bp, Homo sapiens
gaacacttaaaaaaa

SEQ ID NO: 53448 - DNA, 15 bp, Homo sapiens
tgaacacttaaaaaa

SEQ ID NO: 53449 - DNA, 15 bp, Homo sapiens
ctgaacacttaaaaa

SEQ ID NO: 53450 - DNA, 15 bp, Homo sapiens
tctgaacacttaaaa

SEQ ID NO: 53451 - DNA, 15 bp, Homo sapiens
ttctgaacacttaaa

SEQ ID NO: 53452 - DNA, 15 bp, Homo sapiens
cttctgaacacttaa

SEQ ID NO: 53453 - DNA, 15 bp, Homo sapiens
acttctgaacactta

SEQ ID NO: 53454 - DNA, 15 bp, Homo sapiens
aacttctgaacactt

SEQ ID NO: 53455 - DNA, 15 bp, Homo sapiens
aaacttctgaacact

SEQ ID NO: 53456 - DNA, 15 bp, Homo sapiens
gaaacttctgaacac

SEQ ID NO: 53457 - DNA, 15 bp, Homo sapiens
ggaaacttctgaaca

SEQ ID NO: 53458 - DNA, 15 bp, Homo sapiens
gggaaacttctgaac

SEQ ID NO: 53459 - DNA, 15 bp, Homo sapiens
agggaaacttctgaa

SEQ ID NO: 53460 - DNA, 15 bp, Homo sapiens
aagggaaacttctga

SEQ ID NO: 53461 - DNA, 15 bp, Homo sapiens
aaagggaaacttctg

SEQ ID NO: 53462 - DNA, 15 bp, Homo sapiens
taaagggaaacttct

SEQ ID NO: 53463 - DNA, 15 bp, Homo sapiens
ttaaagggaaacttc

SEQ ID NO: 53464 - DNA, 15 bp, Homo sapiens
tttaaagggaaactt

SEQ ID NO: 53465 - DNA, 15 bp, Homo sapiens
ttttaaagggaaact

SEQ ID NO: 53466 - DNA, 15 bp, Homo sapiens
tttttaaagggaaac

SEQ ID NO: 53467 - DNA, 15 bp, Homo sapiens
ttttttaaagggaaa

SEQ ID NO: 53468 - DNA, 15 bp, Homo sapiens
tttttttaaagggaa

SEQ ID NO: 53469 - DNA, 15 bp, Homo sapiens
atttttttaaaggga

SEQ ID NO: 53470 - DNA, 15 bp, Homo sapiens
aatttttttaaaggg

SEQ ID NO: 53471 - DNA, 15 bp, Homo sapiens
aaatttttttaaagg

SEQ ID NO: 53472 - DNA, 15 bp, Homo sapiens
aaaatttttttaaag

SEQ ID NO: 53473 - DNA, 15 bp, Homo sapiens
aaaaatttttttaaa

SEQ ID NO: 53474 - DNA, 15 bp, Homo sapiens
taaaaatttttttaa

SEQ ID NO: 53475 - DNA, 15 bp, Homo sapiens
ttaaaaattttttta

SEQ ID NO: 53476 - DNA, 15 bp, Homo sapiens
attaaaaattttttt

SEQ ID NO: 53477 - DNA, 15 bp, Homo sapiens
tattaaaaatttttt

SEQ ID NO: 53478 - DNA, 15 bp, Homo sapiens
atattaaaaattttt

SEQ ID NO: 53479 - DNA, 15 bp, Homo sapiens
tatattaaaaatttt

SEQ ID NO: 53480 - DNA, 15 bp, Homo sapiens
atatattaaaaattt

SEQ ID NO: 53481 - DNA, 15 bp, Homo sapiens
tatatattaaaaatt

SEQ ID NO: 53482 - DNA, 15 bp, Homo sapiens
ttatatattaaaaat

SEQ ID NO: 53483 - DNA, 15 bp, Homo sapiens
attatatattaaaaa

SEQ ID NO: 53484 - DNA, 15 bp, Homo sapiens
tattatatattaaaa

SEQ ID NO: 53485 - DNA, 15 bp, Homo sapiens
ttattatatattaaa

SEQ ID NO: 53486 - DNA, 15 bp, Homo sapiens
attattatatattaa

SEQ ID NO: 53487 - DNA, 15 bp, Homo sapiens
aattattatatatta

SEQ ID NO: 53488 - DNA, 15 bp, Homo sapiens
caattattatatatt

SEQ ID NO: 53489 - DNA, 15 bp, Homo sapiens
acaattattatatat

SEQ ID NO: 53490 - DNA, 15 bp, Homo sapiens
tacaattattatata

SEQ ID NO: 53491 - DNA, 15 bp, Homo sapiens
gtacaattattatat

SEQ ID NO: 53492 - DNA, 15 bp, Homo sapiens
tgtacaattattata

SEQ ID NO: 53493 - DNA, 15 bp, Homo sapiens
atgtacaattattat

SEQ ID NO: 53494 - DNA, 15 bp, Homo sapiens
tatgtacaattatta

SEQ ID NO: 53495 - DNA, 15 bp, Homo sapiens
atatgtacaattatt

SEQ ID NO: 53496 - DNA, 15 bp, Homo sapiens
aatatgtacaattat

SEQ ID NO: 53497 - DNA, 15 bp, Homo sapiens
aaatatgtacaatta

SEQ ID NO: 53498 - DNA, 15 bp, Homo sapiens
taaatatgtacaatt

SEQ ID NO: 53499 - DNA, 15 bp, Homo sapiens
ataaatatgtacaat

SEQ ID NO: 53500 - DNA, 15 bp, Homo sapiens
cataaatatgtacaa

SEQ ID NO: 53501 - DNA, 15 bp, Homo sapiens
ccataaatatgtaca

SEQ ID NO: 53502 - DNA, 15 bp, Homo sapiens
cccataaatatgtac

SEQ ID NO: 53503 - DNA, 15 bp, Homo sapiens
tcccataaatatgta

SEQ ID NO: 53504 - DNA, 15 bp, Homo sapiens
atcccataaatatgt

SEQ ID NO: 53505 - DNA, 15 bp, Homo sapiens
tatcccataaatatg

SEQ ID NO: 53506 - DNA, 15 bp, Homo sapiens
gtatcccataaatat

SEQ ID NO: 53507 - DNA, 15 bp, Homo sapiens
tgtatcccataaata

SEQ ID NO: 53508 - DNA, 15 bp, Homo sapiens
ctgtatcccataaat

SEQ ID NO: 53509 - DNA, 15 bp, Homo sapiens
tctgtatcccataaa

SEQ ID NO: 53510 - DNA, 15 bp, Homo sapiens
ctctgtatcccataa

SEQ ID NO: 53511 - DNA, 15 bp, Homo sapiens
actctgtatcccata

SEQ ID NO: 53512 - DNA, 15 bp, Homo sapiens
cactctgtatcccat

SEQ ID NO: 53513 - DNA, 15 bp, Homo sapiens
tcactctgtatccca

SEQ ID NO: 53514 - DNA, 15 bp, Homo sapiens
atcactctgtatccc

SEQ ID NO: 53515 - DNA, 15 bp, Homo sapiens
tatcactctgtatcc

SEQ ID NO: 53516 - DNA, 15 bp, Homo sapiens
atatcactctgtatc

SEQ ID NO: 53517 - DNA, 15 bp, Homo sapiens
aatatcactctgtat

SEQ ID NO: 53518 - DNA, 15 bp, Homo sapiens
aaatatcactctgta

SEQ ID NO: 53519 - DNA, 15 bp, Homo sapiens
aaaatatcactctgt

SEQ ID NO: 53520 - DNA, 15 bp, Homo sapiens
gaaaatatcactctg

SEQ ID NO: 53521 - DNA, 15 bp, Homo sapiens
tgaaaatatcactct

SEQ ID NO: 53522 - DNA, 15 bp, Homo sapiens
atgaaaatatcactc

SEQ ID NO: 53523 - DNA, 15 bp, Homo sapiens
catgaaaatatcact

SEQ ID NO: 53524 - DNA, 15 bp, Homo sapiens
acatgaaaatatcac

SEQ ID NO: 53525 - DNA, 15 bp, Homo sapiens
tacatgaaaatatca

SEQ ID NO: 53526 - DNA, 15 bp, Homo sapiens
catacatgaaaatat

SEQ ID NO: 53527 - DNA, 15 bp, Homo sapiens
gcatacatgaaaata

SEQ ID NO: 53528 - DNA, 15 bp, Homo sapiens
tgcatacatgaaaat

SEQ ID NO: 53529 - DNA, 15 bp, Homo sapiens
ctgcatacatgaaaa

SEQ ID NO: 53530 - DNA, 15 bp, Homo sapiens
actgcatacatgaaa

SEQ ID NO: 53531 - DNA, 15 bp, Homo sapiens
cactgcatacatgaa

SEQ ID NO: 53532 - DNA, 15 bp, Homo sapiens
acactgcatacatga

SEQ ID NO: 53533 - DNA, 15 bp, Homo sapiens
cacactgcatacatg

SEQ ID NO: 53534 - DNA, 15 bp, Homo sapiens
acacactgcatacat

SEQ ID NO: 53535 - DNA, 15 bp, Homo sapiens
cacacactgcataca

SEQ ID NO: 53536 - DNA, 15 bp, Homo sapiens
tcacacactgcatac

SEQ ID NO: 53537 - DNA, 15 bp, Homo sapiens
atcacacactgcata

SEQ ID NO: 53538 - DNA, 15 bp, Homo sapiens
catcacacactgcat

SEQ ID NO: 53539 - DNA, 15 bp, Homo sapiens
tcatcacacactgca

SEQ ID NO: 53540 - DNA, 15 bp, Homo sapiens
atcatcacacactgc

SEQ ID NO: 53541 - DNA, 15 bp, Homo sapiens
gatcatcacacactg

SEQ ID NO: 53542 - DNA, 15 bp, Homo sapiens
tgatcatcacacact

SEQ ID NO: 53543 - DNA, 15 bp, Homo sapiens
ttgatcatcacacac

SEQ ID NO: 53544 - DNA, 15 bp, Homo sapiens
tttgatcatcacaca

SEQ ID NO: 53545 - DNA, 15 bp, Homo sapiens
atttgatcatcacac

SEQ ID NO: 53546 - DNA, 15 bp, Homo sapiens
gatttgatcatcaca

SEQ ID NO: 53547 - DNA, 15 bp, Homo sapiens
tgatttgatcatcac

SEQ ID NO: 53548 - DNA, 15 bp, Homo sapiens
ctgatttgatcatca

SEQ ID NO: 53549 - DNA, 15 bp, Homo sapiens
cctgatttgatcatc

SEQ ID NO: 53550 - DNA, 15 bp, Homo sapiens
tcctgatttgatcat

SEQ ID NO: 53551 - DNA, 15 bp, Homo sapiens
atcctgatttgatca

SEQ ID NO: 53552 - DNA, 15 bp, Homo sapiens
tatcctgatttgatc

SEQ ID NO: 53553 - DNA, 15 bp, Homo sapiens
ttatcctgatttgat

SEQ ID NO: 53554 - DNA, 15 bp, Homo sapiens
attatcctgatttga

SEQ ID NO: 53555 - DNA, 15 bp, Homo sapiens
aattatcctgatttg

SEQ ID NO: 53556 - DNA, 15 bp, Homo sapiens
taattatcctgattt

SEQ ID NO: 53557 - DNA, 15 bp, Homo sapiens
ctaattatcctgatt

SEQ ID NO: 53558 - DNA, 15 bp, Homo sapiens
gctaattatcctgat

SEQ ID NO: 53559 - DNA, 15 bp, Homo sapiens
tgctaattatcctga

SEQ ID NO: 53560 - DNA, 15 bp, Homo sapiens
atgctaattatcctg

SEQ ID NO: 53561 - DNA, 15 bp, Homo sapiens
tatgctaattatcct

SEQ ID NO: 53562 - DNA, 15 bp, Homo sapiens
atatgctaattatcc

SEQ ID NO: 53563 - DNA, 15 bp, Homo sapiens
catatgctaattatc

SEQ ID NO: 53564 - DNA, 15 bp, Homo sapiens
ccatatgctaattat

SEQ ID NO: 53565 - DNA, 15 bp, Homo sapiens
tccatatgctaatta

SEQ ID NO: 53566 - DNA, 15 bp, Homo sapiens
atccatatgctaatt

SEQ ID NO: 53567 - DNA, 15 bp, Homo sapiens
gatccatatgctaat

SEQ ID NO: 53568 - DNA, 15 bp, Homo sapiens
tgatccatatgctaa

SEQ ID NO: 53569 - DNA, 15 bp, Homo sapiens
gtgatccatatgcta

SEQ ID NO: 53570 - DNA, 15 bp, Homo sapiens
ggtgatccatatgct

SEQ ID NO: 53571 - DNA, 15 bp, Homo sapiens
aggtgatccatatgc

SEQ ID NO: 53572 - DNA, 15 bp, Homo sapiens
gaggtgatccatatg

SEQ ID NO: 53573 - DNA, 15 bp, Homo sapiens
tgaggtgatccatat

SEQ ID NO: 53574 - DNA, 15 bp, Homo sapiens
ttgaggtgatccata

SEQ ID NO: 53575 - DNA, 15 bp, Homo sapiens
tttgaggtgatccat

SEQ ID NO: 53576 - DNA, 15 bp, Homo sapiens
gtttgaggtgatcca

SEQ ID NO: 53577 - DNA, 15 bp, Homo sapiens
tgtttgaggtgatcc

SEQ ID NO: 53578 - DNA, 15 bp, Homo sapiens
atgtttgaggtgatc

SEQ ID NO: 53579 - DNA, 15 bp, Homo sapiens
aatgtttgaggtgat

SEQ ID NO: 53580 - DNA, 15 bp, Homo sapiens
aaatgtttgaggtga

SEQ ID NO: 53581 - DNA, 15 bp, Homo sapiens
caaatgtttgaggtg

SEQ ID NO: 53582 - DNA, 15 bp, Homo sapiens
acaaatgtttgaggt

SEQ ID NO: 53583 - DNA, 15 bp, Homo sapiens
gacaaatgtttgagg

SEQ ID NO: 53584 - DNA, 15 bp, Homo sapiens
tgacaaatgtttgag

SEQ ID NO: 53585 - DNA, 15 bp, Homo sapiens
atgacaaatgtttga

SEQ ID NO: 53586 - DNA, 15 bp, Homo sapiens
aatgacaaatgtttg

SEQ ID NO: 53587 - DNA, 15 bp, Homo sapiens
aaatgacaaatgttt

SEQ ID NO: 53588 - DNA, 15 bp, Homo sapiens
gaaatgacaaatgtt

SEQ ID NO: 53589 - DNA, 15 bp, Homo sapiens
agaaatgacaaatgt

SEQ ID NO: 53590 - DNA, 15 bp, Homo sapiens
aagaaatgacaaatg

SEQ ID NO: 53591 - DNA, 15 bp, Homo sapiens
aaagaaatgacaaat

SEQ ID NO: 53592 - DNA, 15 bp, Homo sapiens
caaagaaatgacaaa

SEQ ID NO: 53593 - DNA, 15 bp, Homo sapiens
acaaagaaatgacaa

SEQ ID NO: 53594 - DNA, 15 bp, Homo sapiens
cacaaagaaatgaca

SEQ ID NO: 53595 - DNA, 15 bp, Homo sapiens
acacaaagaaatgac

SEQ ID NO: 53596 - DNA, 15 bp, Homo sapiens
aacacaaagaaatga

SEQ ID NO: 53597 - DNA, 15 bp, Homo sapiens
taacacaaagaaatg

SEQ ID NO: 53598 - DNA, 15 bp, Homo sapiens
ctaacacaaagaaat

SEQ ID NO: 53599 - DNA, 15 bp, Homo sapiens
cctaacacaaagaaa

SEQ ID NO: 53600 - DNA, 15 bp, Homo sapiens
tcctaacacaaagaa

SEQ ID NO: 53601 - DNA, 15 bp, Homo sapiens
ttcctaacacaaaga

SEQ ID NO: 53602 - DNA, 15 bp, Homo sapiens
gttcctaacacaaag

SEQ ID NO: 53603 - DNA, 15 bp, Homo sapiens
tgttcctaacacaaa

SEQ ID NO: 53604 - DNA, 15 bp, Homo sapiens
atgttcctaacacaa

SEQ ID NO: 53605 - DNA, 15 bp, Homo sapiens
aatgttcctaacaca

SEQ ID NO: 53606 - DNA, 15 bp, Homo sapiens
gaatgttcctaacac

SEQ ID NO: 53607 - DNA, 15 bp, Homo sapiens
tgaatgttcctaaca

SEQ ID NO: 53608 - DNA, 15 bp, Homo sapiens
ttgaatgttcctaac

SEQ ID NO: 53609 - DNA, 15 bp, Homo sapiens
tttgaatgttcctaa

SEQ ID NO: 53610 - DNA, 15 bp, Homo sapiens
ttttgaatgttccta

SEQ ID NO: 53611 - DNA, 15 bp, Homo sapiens
attttgaatgttcct

SEQ ID NO: 53612 - DNA, 15 bp, Homo sapiens
aattttgaatgttcc

SEQ ID NO: 53613 - DNA, 15 bp, Homo sapiens
gaattttgaatgttc

SEQ ID NO: 53614 - DNA, 15 bp, Homo sapiens
agaattttgaatgtt

SEQ ID NO: 53615 - DNA, 15 bp, Homo sapiens
cagaattttgaatgt

SEQ ID NO: 53616 - DNA, 15 bp, Homo sapiens
acagaattttgaatg

SEQ ID NO: 53617 - DNA, 15 bp, Homo sapiens
gacagaattttgaat

SEQ ID NO: 53618 - DNA, 15 bp, Homo sapiens
agacagaattttgaa

SEQ ID NO: 53619 - DNA, 15 bp, Homo sapiens
aagacagaattttga

SEQ ID NO: 53620 - DNA, 15 bp, Homo sapiens
gaagacagaattttg

SEQ ID NO: 53621 - DNA, 15 bp, Homo sapiens
agaagacagaatttt

SEQ ID NO: 53622 - DNA, 15 bp, Homo sapiens
tagaagacagaattt

SEQ ID NO: 53623 - DNA, 15 bp, Homo sapiens
ctagaagacagaatt

SEQ ID NO: 53624 - DNA, 15 bp, Homo sapiens
gctagaagacagaat

SEQ ID NO: 53625 - DNA, 15 bp, Homo sapiens
agctagaagacagaa

SEQ ID NO: 53626 - DNA, 15 bp, Homo sapiens
tagctagaagacaga

SEQ ID NO: 53627 - DNA, 15 bp, Homo sapiens
atagctagaagacag

SEQ ID NO: 53628 - DNA, 15 bp, Homo sapiens
aatagctagaagaca

SEQ ID NO: 53629 - DNA, 15 bp, Homo sapiens
aaatagctagaagac

SEQ ID NO: 53630 - DNA, 15 bp, Homo sapiens
caaatagctagaaga

SEQ ID NO: 53631 - DNA, 15 bp, Homo sapiens
tcaaatagctagaag

SEQ ID NO: 53632 - DNA, 15 bp, Homo sapiens
ttcaaatagctagaa

SEQ ID NO: 53633 - DNA, 15 bp, Homo sapiens
tttcaaatagctaga

SEQ ID NO: 53634 - DNA, 15 bp, Homo sapiens
ttttcaaatagctag

SEQ ID NO: 53635 - DNA, 15 bp, Homo sapiens
attttcaaatagcta

SEQ ID NO: 53636 - DNA, 15 bp, Homo sapiens
tattttcaaatagct

SEQ ID NO: 53637 - DNA, 15 bp, Homo sapiens
atattttcaaatagc

SEQ ID NO: 53638 - DNA, 15 bp, Homo sapiens
tatattttcaaatag

SEQ ID NO: 53639 - DNA, 15 bp, Homo sapiens
gtatattttcaaata

SEQ ID NO: 53640 - DNA, 15 bp, Homo sapiens
tgtatattttcaaat

SEQ ID NO: 53641 - DNA, 15 bp, Homo sapiens
ctgtatattttcaaa

SEQ ID NO: 53642 - DNA, 15 bp, Homo sapiens
actgtatattttcaa

SEQ ID NO: 53643 - DNA, 15 bp, Homo sapiens
tactgtatattttca

SEQ ID NO: 53644 - DNA, 15 bp, Homo sapiens
ttactgtatattttc

SEQ ID NO: 53645 - DNA, 15 bp, Homo sapiens
tttactgtatatttt

SEQ ID NO: 53646 - DNA, 15 bp, Homo sapiens
atttactgtatattt

SEQ ID NO: 53647 - DNA, 15 bp, Homo sapiens
aatttactgtatatt

SEQ ID NO: 53648 - DNA, 15 bp, Homo sapiens
taatttactgtatat

SEQ ID NO: 53649 - DNA, 15 bp, Homo sapiens
ataatttactgtata

SEQ ID NO: 53650 - DNA, 15 bp, Homo sapiens
aataatttactgtat

SEQ ID NO: 53651 - DNA, 15 bp, Homo sapiens
caataatttactgta

SEQ ID NO: 53652 - DNA, 15 bp, Homo sapiens
acaataatttactgt

SEQ ID NO: 53653 - DNA, 15 bp, Homo sapiens
aacaataatttactg

SEQ ID NO: 53654 - DNA, 15 bp, Homo sapiens
caacaataatttact

SEQ ID NO: 53655 - DNA, 15 bp, Homo sapiens
tcaacaataatttac

SEQ ID NO: 53656 - DNA, 15 bp, Homo sapiens
gtcaacaataattta

SEQ ID NO: 53657 - DNA, 15 bp, Homo sapiens
agtcaacaataattt

SEQ ID NO: 53658 - DNA, 15 bp, Homo sapiens
tagtcaacaataatt

SEQ ID NO: 53659 - DNA, 15 bp, Homo sapiens
ctagtcaacaataat

SEQ ID NO: 53660 - DNA, 15 bp, Homo sapiens
actagtcaacaataa

SEQ ID NO: 53661 - DNA, 15 bp, Homo sapiens
aactagtcaacaata

SEQ ID NO: 53662 - DNA, 15 bp, Homo sapiens
taactagtcaacaat

SEQ ID NO: 53663 - DNA, 15 bp, Homo sapiens
gtaactagtcaacaa

SEQ ID NO: 53664 - DNA, 15 bp, Homo sapiens
tgtaactagtcaaca

SEQ ID NO: 53665 - DNA, 15 bp, Homo sapiens
ctgtaactagtcaac

SEQ ID NO: 53666 - DNA, 15 bp, Homo sapiens
actgtaactagtcaa

SEQ ID NO: 53667 - DNA, 15 bp, Homo sapiens
aactgtaactagtca

SEQ ID NO: 53668 - DNA, 15 bp, Homo sapiens
gaactgtaactagtc

SEQ ID NO: 53669 - DNA, 15 bp, Homo sapiens
agaactgtaactagt

SEQ ID NO: 53670 - DNA, 15 bp, Homo sapiens
tagaactgtaactag

SEQ ID NO: 53671 - DNA, 15 bp, Homo sapiens
atagaactgtaacta

SEQ ID NO: 53672 - DNA, 15 bp, Homo sapiens
tatagaactgtaact

SEQ ID NO: 53673 - DNA, 15 bp, Homo sapiens
ctatagaactgtaac

SEQ ID NO: 53674 - DNA, 15 bp, Homo sapiens
tctatagaactgtaa

SEQ ID NO: 53675 - DNA, 15 bp, Homo sapiens
ttctatagaactgta

SEQ ID NO: 53676 - DNA, 15 bp, Homo sapiens
gttctatagaactgt

SEQ ID NO: 53677 - DNA, 15 bp, Homo sapiens
tgttctatagaactg

SEQ ID NO: 53678 - DNA, 15 bp, Homo sapiens
gtgttctatagaact

SEQ ID NO: 53679 - DNA, 15 bp, Homo sapiens
agtgttctatagaac

SEQ ID NO: 53680 - DNA, 15 bp, Homo sapiens
tagtgttctatagaa

SEQ ID NO: 53681 - DNA, 15 bp, Homo sapiens
atagtgttctataga

SEQ ID NO: 53682 - DNA, 15 bp, Homo sapiens
tatagtgttctatag

SEQ ID NO: 53683 - DNA, 15 bp, Homo sapiens
ttatagtgttctata

SEQ ID NO: 53684 - DNA, 15 bp, Homo sapiens
attatagtgttctat

SEQ ID NO: 53685 - DNA, 15 bp, Homo sapiens
aattatagtgttcta

SEQ ID NO: 53686 - DNA, 15 bp, Homo sapiens
aaattatagtgttct

SEQ ID NO: 53687 - DNA, 15 bp, Homo sapiens
taaattatagtgttc

SEQ ID NO: 53688 - DNA, 15 bp, Homo sapiens
ataaattatagtgtt

SEQ ID NO: 53689 - DNA, 15 bp, Homo sapiens
aataaattatagtgt

SEQ ID NO: 53690 - DNA, 15 bp, Homo sapiens
gaataaattatagtg

SEQ ID NO: 53691 - DNA, 15 bp, Homo sapiens
ggaataaattatagt

SEQ ID NO: 53692 - DNA, 15 bp, Homo sapiens
aggaataaattatag

SEQ ID NO: 53693 - DNA, 15 bp, Homo sapiens
gaggaataaattata

SEQ ID NO: 53694 - DNA, 15 bp, Homo sapiens
ggaggaataaattat

SEQ ID NO: 53695 - DNA, 15 bp, Homo sapiens
aggaggaataaatta

SEQ ID NO: 53696 - DNA, 15 bp, Homo sapiens
caggaggaataaatt

SEQ ID NO: 53697 - DNA, 15 bp, Homo sapiens
acaggaggaataaat

SEQ ID NO: 53698 - DNA, 15 bp, Homo sapiens
cacaggaggaataaa

SEQ ID NO: 53699 - DNA, 15 bp, Homo sapiens
acacaggaggaataa

SEQ ID NO: 53700 - DNA, 15 bp, Homo sapiens
cacacaggaggaata

SEQ ID NO: 53701 - DNA, 15 bp, Homo sapiens
acacacaggaggaat

SEQ ID NO: 53702 - DNA, 15 bp, Homo sapiens
tacacacaggaggaa

SEQ ID NO: 53703 - DNA, 15 bp, Homo sapiens
ttacacacaggagga

SEQ ID NO: 53704 - DNA, 15 bp, Homo sapiens
attacacacaggagg

SEQ ID NO: 53705 - DNA, 15 bp, Homo sapiens
aattacacacaggag

SEQ ID NO: 53706 - DNA, 15 bp, Homo sapiens
aaattacacacagga

SEQ ID NO: 53707 - DNA, 15 bp, Homo sapiens
aaaattacacacagg

SEQ ID NO: 53708 - DNA, 15 bp, Homo sapiens
aaaaattacacacag

SEQ ID NO: 53709 - DNA, 15 bp, Homo sapiens
aaaaaattacacaca

SEQ ID NO: 53710 - DNA, 15 bp, Homo sapiens
taaaaaattacacac

SEQ ID NO: 53711 - DNA, 15 bp, Homo sapiens
ataaaaaattacaca

SEQ ID NO: 53712 - DNA, 15 bp, Homo sapiens
gataaaaaattacac

SEQ ID NO: 53713 - DNA, 15 bp, Homo sapiens
agataaaaaattaca

SEQ ID NO: 53714 - DNA, 15 bp, Homo sapiens
aagataaaaaattac

SEQ ID NO: 53715 - DNA, 15 bp, Homo sapiens
aaagataaaaaatta

SEQ ID NO: 53716 - DNA, 15 bp, Homo sapiens
aaaagataaaaaatt

SEQ ID NO: 53717 - DNA, 15 bp, Homo sapiens
taaaagataaaaaat

SEQ ID NO: 53718 - DNA, 15 bp, Homo sapiens
ttaaaagataaaaaa

SEQ ID NO: 53719 - DNA, 15 bp, Homo sapiens
gttaaaagataaaaa

SEQ ID NO: 53720 - DNA, 15 bp, Homo sapiens
ggttaaaagataaaa

SEQ ID NO: 53721 - DNA, 15 bp, Homo sapiens
tggttaaaagataaa

SEQ ID NO: 53722 - DNA, 15 bp, Homo sapiens
ttggttaaaagataa

SEQ ID NO: 53723 - DNA, 15 bp, Homo sapiens
gttggttaaaagata

SEQ ID NO: 53724 - DNA, 15 bp, Homo sapiens
tgttggttaaaagat

SEQ ID NO: 53725 - DNA, 15 bp, Homo sapiens
atgttggttaaaaga

SEQ ID NO: 53726 - DNA, 15 bp, Homo sapiens
gatgttggttaaaag

SEQ ID NO: 53727 - DNA, 15 bp, Homo sapiens
agatgttggttaaaa

SEQ ID NO: 53728 - DNA, 15 bp, Homo sapiens
gagatgttggttaaa

SEQ ID NO: 53729 - DNA, 15 bp, Homo sapiens
ggagatgttggttaa

SEQ ID NO: 53730 - DNA, 15 bp, Homo sapiens
gggagatgttggtta

SEQ ID NO: 53731 - DNA, 15 bp, Homo sapiens
agggagatgttggtt

SEQ ID NO: 53732 - DNA, 15 bp, Homo sapiens
tagggagatgttggt

SEQ ID NO: 53733 - DNA, 15 bp, Homo sapiens
atagggagatgttgg

SEQ ID NO: 53734 - DNA, 15 bp, Homo sapiens
gatagggagatgttg

SEQ ID NO: 53735 - DNA, 15 bp, Homo sapiens
ggatagggagatgtt

SEQ ID NO: 53736 - DNA, 15 bp, Homo sapiens
aggatagggagatgt

SEQ ID NO: 53737 - DNA, 15 bp, Homo sapiens
gaggatagggagatg

SEQ ID NO: 53738 - DNA, 15 bp, Homo sapiens
ggaggatagggagat

SEQ ID NO: 53739 - DNA, 15 bp, Homo sapiens
gggaggatagggaga

SEQ ID NO: 53740 - DNA, 15 bp, Homo sapiens
ggggaggatagggag

SEQ ID NO: 53741 - DNA, 15 bp, Homo sapiens
aggggaggataggga

SEQ ID NO: 53742 - DNA, 15 bp, Homo sapiens
gaggggaggataggg

SEQ ID NO: 53743 - DNA, 15 bp, Homo sapiens
ggaggggaggatagg

SEQ ID NO: 53744 - DNA, 15 bp, Homo sapiens
gggaggggaggatag

SEQ ID NO: 53745 - DNA, 15 bp, Homo sapiens
tgggaggggaggata

SEQ ID NO: 53746 - DNA, 15 bp, Homo sapiens
gtgggaggggaggat

SEQ ID NO: 53747 - DNA, 15 bp, Homo sapiens
agtgggaggggagga

SEQ ID NO: 53748 - DNA, 15 bp, Homo sapiens
gagtgggaggggagg

SEQ ID NO: 53749 - DNA, 15 bp, Homo sapiens
ggagtgggaggggag

SEQ ID NO: 53750 - DNA, 15 bp, Homo sapiens
gggagtgggagggga

SEQ ID NO: 53751 - DNA, 15 bp, Homo sapiens
agggagtgggagggg

SEQ ID NO: 53752 - DNA, 15 bp, Homo sapiens
aagggagtgggaggg

SEQ ID NO: 53753 - DNA, 15 bp, Homo sapiens
aaagggagtgggagg

SEQ ID NO: 53754 - DNA, 15 bp, Homo sapiens
gaaagggagtgggag

SEQ ID NO: 53755 - DNA, 15 bp, Homo sapiens
ggaaagggagtggga

SEQ ID NO: 53756 - DNA, 15 bp, Homo sapiens
gggaaagggagtggg

SEQ ID NO: 53757 - DNA, 15 bp, Homo sapiens
cgggaaagggagtgg

SEQ ID NO: 53758 - DNA, 15 bp, Homo sapiens
ccgggaaagggagtg

SEQ ID NO: 53759 - DNA, 15 bp, Homo sapiens
gccgggaaagggagt

SEQ ID NO: 53760 - DNA, 15 bp, Homo sapiens
ggccgggaaagggag

SEQ ID NO: 53761 - DNA, 15 bp, Homo sapiens
aggccgggaaaggga

SEQ ID NO: 53762 - DNA, 15 bp, Homo sapiens
gaggccgggaaaggg

SEQ ID NO: 53763 - DNA, 15 bp, Homo sapiens
agaggccgggaaagg

SEQ ID NO: 53764 - DNA, 15 bp, Homo sapiens
tagaggccgggaaag

SEQ ID NO: 53765 - DNA, 15 bp, Homo sapiens
ttagaggccgggaaa

SEQ ID NO: 53766 - DNA, 15 bp, Homo sapiens
attagaggccgggaa

SEQ ID NO: 53767 - DNA, 15 bp, Homo sapiens
tattagaggccggga

SEQ ID NO: 53768 - DNA, 15 bp, Homo sapiens
ttattagaggccggg

SEQ ID NO: 53769 - DNA, 15 bp, Homo sapiens
gttattagaggccgg

SEQ ID NO: 53770 - DNA, 15 bp, Homo sapiens
ggttattagaggccg

SEQ ID NO: 53771 - DNA, 15 bp, Homo sapiens
tggttattagaggcc

SEQ ID NO: 53772 - DNA, 15 bp, Homo sapiens
gtggttattagaggc

SEQ ID NO: 53773 - DNA, 15 bp, Homo sapiens
tgtggttattagagg

SEQ ID NO: 53774 - DNA, 15 bp, Homo sapiens
gtgtggttattagag

SEQ ID NO: 53775 - DNA, 15 bp, Homo sapiens
agtgtggttattaga

SEQ ID NO: 53776 - DNA, 15 bp, Homo sapiens
gagtgtggttattag

SEQ ID NO: 53777 - DNA, 15 bp, Homo sapiens
agagtgtggttatta

SEQ ID NO: 53778 - DNA, 15 bp, Homo sapiens
aagagtgtggttatt

SEQ ID NO: 53779 - DNA, 15 bp, Homo sapiens
taagagtgtggttat

SEQ ID NO: 53780 - DNA, 15 bp, Homo sapiens
ataagagtgtggtta

SEQ ID NO: 53781 - DNA, 15 bp, Homo sapiens
cataagagtgtggtt

SEQ ID NO: 53782 - DNA, 15 bp, Homo sapiens
tcataagagtgtggt

SEQ ID NO: 53783 - DNA, 15 bp, Homo sapiens
ctcataagagtgtgg

SEQ ID NO: 53784 - DNA, 15 bp, Homo sapiens
gctcataagagtgtg

SEQ ID NO: 53785 - DNA, 15 bp, Homo sapiens
agctcataagagtgt

SEQ ID NO: 53786 - DNA, 15 bp, Homo sapiens
gagctcataagagtg

SEQ ID NO: 53787 - DNA, 15 bp, Homo sapiens
tgagctcataagagt

SEQ ID NO: 53788 - DNA, 15 bp, Homo sapiens
ttgagctcataagag

SEQ ID NO: 53789 - DNA, 15 bp, Homo sapiens
gttgagctcataaga

SEQ ID NO: 53790 - DNA, 15 bp, Homo sapiens
agttgagctcataag

SEQ ID NO: 53791 - DNA, 15 bp, Homo sapiens
aagttgagctcataa

SEQ ID NO: 53792 - DNA, 15 bp, Homo sapiens
aaagttgagctcata

SEQ ID NO: 53793 - DNA, 15 bp, Homo sapiens
aaaagttgagctcat

SEQ ID NO: 53794 - DNA, 15 bp, Homo sapiens
aaaaagttgagctca

SEQ ID NO: 53795 - DNA, 15 bp, Homo sapiens
aaaaaagttgagctc

SEQ ID NO: 53796 - DNA, 15 bp, Homo sapiens
taaaaaagttgagct

SEQ ID NO: 53797 - DNA, 15 bp, Homo sapiens
ctaaaaaagttgagc

SEQ ID NO: 53798 - DNA, 15 bp, Homo sapiens
gctaaaaaagttgag

SEQ ID NO: 53799 - DNA, 15 bp, Homo sapiens
agctaaaaaagttga

SEQ ID NO: 53800 - DNA, 15 bp, Homo sapiens
aagctaaaaaagttg

SEQ ID NO: 53801 - DNA, 15 bp, Homo sapiens
gaagctaaaaaagtt

SEQ ID NO: 53802 - DNA, 15 bp, Homo sapiens
ggaagctaaaaaagt

SEQ ID NO: 53803 - DNA, 15 bp, Homo sapiens
tggaagctaaaaaag

SEQ ID NO: 53804 - DNA, 15 bp, Homo sapiens
atggaagctaaaaaa

SEQ ID NO: 53805 - DNA, 15 bp, Homo sapiens
tatggaagctaaaaa

SEQ ID NO: 53806 - DNA, 15 bp, Homo sapiens
atatggaagctaaaa

SEQ ID NO: 53807 - DNA, 15 bp, Homo sapiens
tatatggaagctaaa

SEQ ID NO: 53808 - DNA, 15 bp, Homo sapiens
atatatggaagctaa

SEQ ID NO: 53809 - DNA, 15 bp, Homo sapiens
catatatggaagcta

SEQ ID NO: 53810 - DNA, 15 bp, Homo sapiens
tcatatatggaagct

SEQ ID NO: 53811 - DNA, 15 bp, Homo sapiens
ctcatatatggaagc

SEQ ID NO: 53812 - DNA, 15 bp, Homo sapiens
actcatatatggaag

SEQ ID NO: 53813 - DNA, 15 bp, Homo sapiens
cactcatatatggaa

SEQ ID NO: 53814 - DNA, 15 bp, Homo sapiens
tcactcatatatgga

SEQ ID NO: 53815 - DNA, 15 bp, Homo sapiens
ctcactcatatatgg

SEQ ID NO: 53816 - DNA, 15 bp, Homo sapiens
tctcactcatatatg

SEQ ID NO: 53817 - DNA, 15 bp, Homo sapiens
ttctcactcatatat

SEQ ID NO: 53818 - DNA, 15 bp, Homo sapiens
gttctcactcatata

SEQ ID NO: 53819 - DNA, 15 bp, Homo sapiens
tgttctcactcatat

SEQ ID NO: 53820 - DNA, 15 bp, Homo sapiens
tatgttctcactcat

SEQ ID NO: 53821 - DNA, 15 bp, Homo sapiens
gtatgttctcactca

SEQ ID NO: 53822 - DNA, 15 bp, Homo sapiens
cgtatgttctcactc

SEQ ID NO: 53823 - DNA, 15 bp, Homo sapiens
ccgtatgttctcact

SEQ ID NO: 53824 - DNA, 15 bp, Homo sapiens
accgtatgttctcac

SEQ ID NO: 53825 - DNA, 15 bp, Homo sapiens
taccgtatgttctca

SEQ ID NO: 53826 - DNA, 15 bp, Homo sapiens
ataccgtatgttctc

SEQ ID NO: 53827 - DNA, 15 bp, Homo sapiens
aataccgtatgttct

SEQ ID NO: 53828 - DNA, 15 bp, Homo sapiens
aaataccgtatgttc

SEQ ID NO: 53829 - DNA, 15 bp, Homo sapiens
taaataccgtatgtt

SEQ ID NO: 53830 - DNA, 15 bp, Homo sapiens
ataaataccgtatgt

SEQ ID NO: 53831 - DNA, 15 bp, Homo sapiens
gataaataccgtatg

SEQ ID NO: 53832 - DNA, 15 bp, Homo sapiens
agataaataccgtat

SEQ ID NO: 53833 - DNA, 15 bp, Homo sapiens
aagataaataccgta

SEQ ID NO: 53834 - DNA, 15 bp, Homo sapiens
aaagataaataccgt

SEQ ID NO: 53835 - DNA, 15 bp, Homo sapiens
gaaagataaataccg

SEQ ID NO: 53836 - DNA, 15 bp, Homo sapiens
agaaagataaatacc

SEQ ID NO: 53837 - DNA, 15 bp, Homo sapiens
cagaaagataaatac

SEQ ID NO: 53838 - DNA, 15 bp, Homo sapiens
acagaaagataaata

SEQ ID NO: 53839 - DNA, 15 bp, Homo sapiens
tacagaaagataaat

SEQ ID NO: 53840 - DNA, 15 bp, Homo sapiens
gtacagaaagataaa

SEQ ID NO: 53841 - DNA, 15 bp, Homo sapiens
ggtacagaaagataa

SEQ ID NO: 53842 - DNA, 15 bp, Homo sapiens
aggtacagaaagata

SEQ ID NO: 53843 - DNA, 15 bp, Homo sapiens
caggtacagaaagat

SEQ ID NO: 53844 - DNA, 15 bp, Homo sapiens
tcaggtacagaaaga

SEQ ID NO: 53845 - DNA, 15 bp, Homo sapiens
gtcaggtacagaaag

SEQ ID NO: 53846 - DNA, 15 bp, Homo sapiens
agtcaggtacagaaa

SEQ ID NO: 53847 - DNA, 15 bp, Homo sapiens
aagtcaggtacagaa

SEQ ID NO: 53848 - DNA, 15 bp, Homo sapiens
taagtcaggtacaga

SEQ ID NO: 53849 - DNA, 15 bp, Homo sapiens
ataagtcaggtacag

SEQ ID NO: 53850 - DNA, 15 bp, Homo sapiens
aataagtcaggtaca

SEQ ID NO: 53851 - DNA, 15 bp, Homo sapiens
aaataagtcaggtac

SEQ ID NO: 53852 - DNA, 15 bp, Homo sapiens
aaaataagtcaggta

SEQ ID NO: 53853 - DNA, 15 bp, Homo sapiens
taaaataagtcaggt

SEQ ID NO: 53854 - DNA, 15 bp, Homo sapiens
gtaaaataagtcagg

SEQ ID NO: 53855 - DNA, 15 bp, Homo sapiens
agtaaaataagtcag

SEQ ID NO: 53856 - DNA, 15 bp, Homo sapiens
aagtaaaataagtca

SEQ ID NO: 53857 - DNA, 15 bp, Homo sapiens
taagtaaaataagtc

SEQ ID NO: 53858 - DNA, 15 bp, Homo sapiens
ttaagtaaaataagt

SEQ ID NO: 53859 - DNA, 15 bp, Homo sapiens
gttaagtaaaataag

SEQ ID NO: 53860 - DNA, 15 bp, Homo sapiens
tgttaagtaaaataa

SEQ ID NO: 53861 - DNA, 15 bp, Homo sapiens
atgttaagtaaaata

SEQ ID NO: 53862 - DNA, 15 bp, Homo sapiens
gatgttaagtaaaat

SEQ ID NO: 53863 - DNA, 15 bp, Homo sapiens
tgatgttaagtaaaa

SEQ ID NO: 53864 - DNA, 15 bp, Homo sapiens
atgatgttaagtaaa

SEQ ID NO: 53865 - DNA, 15 bp, Homo sapiens
catgatgttaagtaa

SEQ ID NO: 53866 - DNA, 15 bp, Homo sapiens
acatgatgttaagta

SEQ ID NO: 53867 - DNA, 15 bp, Homo sapiens
gacatgatgttaagt

SEQ ID NO: 53868 - DNA, 15 bp, Homo sapiens
ggacatgatgttaag

SEQ ID NO: 53869 - DNA, 15 bp, Homo sapiens
aggacatgatgttaa

SEQ ID NO: 53870 - DNA, 15 bp, Homo sapiens
gaggacatgatgtta

SEQ ID NO: 53871 - DNA, 15 bp, Homo sapiens
ggaggacatgatgtt

SEQ ID NO: 53872 - DNA, 15 bp, Homo sapiens
cggaggacatgatgt

SEQ ID NO: 53873 - DNA, 15 bp, Homo sapiens
ccggaggacatgatg

SEQ ID NO: 53874 - DNA, 15 bp, Homo sapiens
cccggaggacatgat

SEQ ID NO: 53875 - DNA, 15 bp, Homo sapiens
gcccggaggacatga

SEQ ID NO: 53876 - DNA, 15 bp, Homo sapiens
agcccggaggacatg

SEQ ID NO: 53877 - DNA, 15 bp, Homo sapiens
tagcccggaggacat

SEQ ID NO: 53878 - DNA, 15 bp, Homo sapiens
ctagcccggaggaca

SEQ ID NO: 53879 - DNA, 15 bp, Homo sapiens
tctagcccggaggac

SEQ ID NO: 53880 - DNA, 15 bp, Homo sapiens
gtctagcccggagga

SEQ ID NO: 53881 - DNA, 15 bp, Homo sapiens
tgtctagcccggagg

SEQ ID NO: 53882 - DNA, 15 bp, Homo sapiens
atgtctagcccggag

SEQ ID NO: 53883 - DNA, 15 bp, Homo sapiens
aatgtctagcccgga

SEQ ID NO: 53884 - DNA, 15 bp, Homo sapiens
gaatgtctagcccgg

SEQ ID NO: 53885 - DNA, 15 bp, Homo sapiens
agaatgtctagcccg

SEQ ID NO: 53886 - DNA, 15 bp, Homo sapiens
gagaatgtctagccc

SEQ ID NO: 53887 - DNA, 15 bp, Homo sapiens
agagaatgtctagcc

SEQ ID NO: 53888 - DNA, 15 bp, Homo sapiens
aagagaatgtctagc

SEQ ID NO: 53889 - DNA, 15 bp, Homo sapiens
aaagagaatgtctag

SEQ ID NO: 53890 - DNA, 15 bp, Homo sapiens
taaagagaatgtcta

SEQ ID NO: 53891 - DNA, 15 bp, Homo sapiens
ctaaagagaatgtct

SEQ ID NO: 53892 - DNA, 15 bp, Homo sapiens
tctaaagagaatgtc

SEQ ID NO: 53893 - DNA, 15 bp, Homo sapiens
ttctaaagagaatgt

SEQ ID NO: 53894 - DNA, 15 bp, Homo sapiens
attctaaagagaatg

SEQ ID NO: 53895 - DNA, 15 bp, Homo sapiens
gattctaaagagaat

SEQ ID NO: 53896 - DNA, 15 bp, Homo sapiens
ggattctaaagagaa

SEQ ID NO: 53897 - DNA, 15 bp, Homo sapiens
tggattctaaagaga

SEQ ID NO: 53898 - DNA, 15 bp, Homo sapiens
gtggattctaaagag

SEQ ID NO: 53899 - DNA, 15 bp, Homo sapiens
tgtggattctaaaga

SEQ ID NO: 53900 - DNA, 15 bp, Homo sapiens
ctgtggattctaaag

SEQ ID NO: 53901 - DNA, 15 bp, Homo sapiens
cctgtggattctaaa

SEQ ID NO: 53902 - DNA, 15 bp, Homo sapiens
acctgtggattctaa

SEQ ID NO: 53903 - DNA, 15 bp, Homo sapiens
aacctgtggattcta

SEQ ID NO: 53904 - DNA, 15 bp, Homo sapiens
aaacctgtggattct

SEQ ID NO: 53905 - DNA, 15 bp, Homo sapiens
gaaacctgtggattc

SEQ ID NO: 53906 - DNA, 15 bp, Homo sapiens
ggaaacctgtggatt

SEQ ID NO: 53907 - DNA, 15 bp, Homo sapiens
aggaaacctgtggat

SEQ ID NO: 53908 - DNA, 15 bp, Homo sapiens
aaggaaacctgtgga

SEQ ID NO: 53909 - DNA, 15 bp, Homo sapiens
aaaggaaacctgtgg

SEQ ID NO: 53910 - DNA, 15 bp, Homo sapiens
gaaaggaaacctgtg

SEQ ID NO: 53911 - DNA, 15 bp, Homo sapiens
agaaaggaaacctgt

SEQ ID NO: 53912 - DNA, 15 bp, Homo sapiens
aagaaaggaaacctg

SEQ ID NO: 53913 - DNA, 15 bp, Homo sapiens
aaagaaaggaaacct

SEQ ID NO: 53914 - DNA, 15 bp, Homo sapiens
aaaagaaaggaaacc

SEQ ID NO: 53915 - DNA, 15 bp, Homo sapiens
gaaaagaaaggaaac

SEQ ID NO: 53916 - DNA, 15 bp, Homo sapiens
agaaaagaaaggaaa

SEQ ID NO: 53917 - DNA, 15 bp, Homo sapiens
gagaaaagaaaggaa

SEQ ID NO: 53918 - DNA, 15 bp, Homo sapiens
agagaaaagaaagga

SEQ ID NO: 53919 - DNA, 15 bp, Homo sapiens
tagagaaaagaaagg

SEQ ID NO: 53920 - DNA, 15 bp, Homo sapiens
ttagagaaaagaaag

SEQ ID NO: 53921 - DNA, 15 bp, Homo sapiens
tttagagaaaagaaa

SEQ ID NO: 53922 - DNA, 15 bp, Homo sapiens
atttagagaaaagaa

SEQ ID NO: 53923 - DNA, 15 bp, Homo sapiens
gatttagagaaaaga

SEQ ID NO: 53924 - DNA, 15 bp, Homo sapiens
agatttagagaaaag

SEQ ID NO: 53925 - DNA, 15 bp, Homo sapiens
cagatttagagaaaa

SEQ ID NO: 53926 - DNA, 15 bp, Homo sapiens
gcagatttagagaaa

SEQ ID NO: 53927 - DNA, 15 bp, Homo sapiens
tgcagatttagagaa

SEQ ID NO: 53928 - DNA, 15 bp, Homo sapiens
atgcagatttagaga

SEQ ID NO: 53929 - DNA, 15 bp, Homo sapiens
aatgcagatttagag

SEQ ID NO: 53930 - DNA, 15 bp, Homo sapiens
aaatgcagatttaga

SEQ ID NO: 53931 - DNA, 15 bp, Homo sapiens
aaaatgcagatttag

SEQ ID NO: 53932 - DNA, 15 bp, Homo sapiens
caaaatgcagattta

SEQ ID NO: 53933 - DNA, 15 bp, Homo sapiens
gcaaaatgcagattt

SEQ ID NO: 53934 - DNA, 15 bp, Homo sapiens
agcaaaatgcagatt

SEQ ID NO: 53935 - DNA, 15 bp, Homo sapiens
gagcaaaatgcagat

SEQ ID NO: 53936 - DNA, 15 bp, Homo sapiens
tgagcaaaatgcaga

SEQ ID NO: 53937 - DNA, 15 bp, Homo sapiens
ctgagcaaaatgcag

SEQ ID NO: 53938 - DNA, 15 bp, Homo sapiens
gctgagcaaaatgca

SEQ ID NO: 53939 - DNA, 15 bp, Homo sapiens
ggctgagcaaaatgc

SEQ ID NO: 53940 - DNA, 15 bp, Homo sapiens
tggctgagcaaaatg

SEQ ID NO: 53941 - DNA, 15 bp, Homo sapiens
atggctgagcaaaat

SEQ ID NO: 53942 - DNA, 15 bp, Homo sapiens
aatggctgagcaaaa

SEQ ID NO: 53943 - DNA, 15 bp, Homo sapiens
taatggctgagcaaa

SEQ ID NO: 53944 - DNA, 15 bp, Homo sapiens
ttaatggctgagcaa

SEQ ID NO: 53945 - DNA, 15 bp, Homo sapiens
gttaatggctgagca

SEQ ID NO: 53946 - DNA, 15 bp, Homo sapiens
agttaatggctgagc

SEQ ID NO: 53947 - DNA, 15 bp, Homo sapiens
aagttaatggctgag

SEQ ID NO: 53948 - DNA, 15 bp, Homo sapiens
aaagttaatggctga

SEQ ID NO: 53949 - DNA, 15 bp, Homo sapiens
aaaagttaatggctg

SEQ ID NO: 53950 - DNA, 15 bp, Homo sapiens
taaaagttaatggct

SEQ ID NO: 53951 - DNA, 15 bp, Homo sapiens
ttaaaagttaatggc

SEQ ID NO: 53952 - DNA, 15 bp, Homo sapiens
tttaaaagttaatgg

SEQ ID NO: 53953 - DNA, 15 bp, Homo sapiens
ttttaaaagttaatg

SEQ ID NO: 53954 - DNA, 15 bp, Homo sapiens
attttaaaagttaat

SEQ ID NO: 53955 - DNA, 15 bp, Homo sapiens
cattttaaaagttaa

SEQ ID NO: 53956 - DNA, 15 bp, Homo sapiens
acattttaaaagtta

SEQ ID NO: 53957 - DNA, 15 bp, Homo sapiens
gacattttaaaagtt

SEQ ID NO: 53958 - DNA, 15 bp, Homo sapiens
agacattttaaaagt

SEQ ID NO: 53959 - DNA, 15 bp, Homo sapiens
aagacattttaaaag

SEQ ID NO: 53960 - DNA, 15 bp, Homo sapiens
aaagacattttaaaa

SEQ ID NO: 53961 - DNA, 15 bp, Homo sapiens
aaaagacattttaaa

SEQ ID NO: 53962 - DNA, 15 bp, Homo sapiens
aaaaagacattttaa

SEQ ID NO: 53963 - DNA, 15 bp, Homo sapiens
gaaaaagacatttta

SEQ ID NO: 53964 - DNA, 15 bp, Homo sapiens
ggaaaaagacatttt

SEQ ID NO: 53965 - DNA, 15 bp, Homo sapiens
gggaaaaagacattt

SEQ ID NO: 53966 - DNA, 15 bp, Homo sapiens
agggaaaaagacatt

SEQ ID NO: 53967 - DNA, 15 bp, Homo sapiens
aagggaaaaagacat

SEQ ID NO: 53968 - DNA, 15 bp, Homo sapiens
aaagggaaaaagaca

SEQ ID NO: 53969 - DNA, 15 bp, Homo sapiens
taaagggaaaaagac

SEQ ID NO: 53970 - DNA, 15 bp, Homo sapiens
ctaaagggaaaaaga

SEQ ID NO: 53971 - DNA, 15 bp, Homo sapiens
actaaagggaaaaag

SEQ ID NO: 53972 - DNA, 15 bp, Homo sapiens
aactaaagggaaaaa

SEQ ID NO: 53973 - DNA, 15 bp, Homo sapiens
aaactaaagggaaaa

SEQ ID NO: 53974 - DNA, 15 bp, Homo sapiens
aaaactaaagggaaa

SEQ ID NO: 53975 - DNA, 15 bp, Homo sapiens
taaaactaaagggaa

SEQ ID NO: 53976 - DNA, 15 bp, Homo sapiens
ataaaactaaaggga

SEQ ID NO: 53977 - DNA, 15 bp, Homo sapiens
aataaaactaaaggg

SEQ ID NO: 53978 - DNA, 15 bp, Homo sapiens
caataaaactaaagg

SEQ ID NO: 53979 - DNA, 15 bp, Homo sapiens
acaataaaactaaag

SEQ ID NO: 53980 - DNA, 15 bp, Homo sapiens
aacaataaaactaaa

SEQ ID NO: 53981 - DNA, 15 bp, Homo sapiens
aaacaataaaactaa

SEQ ID NO: 53982 - DNA, 15 bp, Homo sapiens
aaaacaataaaacta

SEQ ID NO: 53983 - DNA, 15 bp, Homo sapiens
gaaaacaataaaact

SEQ ID NO: 53984 - DNA, 15 bp, Homo sapiens
agaaaacaataaaac

SEQ ID NO: 53985 - DNA, 15 bp, Homo sapiens
tagaaaacaataaaa

SEQ ID NO: 53986 - DNA, 15 bp, Homo sapiens
atagaaaacaataaa

SEQ ID NO: 53987 - DNA, 15 bp, Homo sapiens
aatagaaaacaataa

SEQ ID NO: 53988 - DNA, 15 bp, Homo sapiens
aaatagaaaacaata

SEQ ID NO: 53989 - DNA, 15 bp, Homo sapiens
aaaatagaaaacaat

SEQ ID NO: 53990 - DNA, 15 bp, Homo sapiens
taaaatagaaaacaa

SEQ ID NO: 53991 - DNA, 15 bp, Homo sapiens
ttaaaatagaaaaca

SEQ ID NO: 53992 - DNA, 15 bp, Homo sapiens
attaaaatagaaaac

SEQ ID NO: 53993 - DNA, 15 bp, Homo sapiens
tattaaaatagaaaa

SEQ ID NO: 53994 - DNA, 15 bp, Homo sapiens
atattaaaatagaaa

SEQ ID NO: 53995 - DNA, 15 bp, Homo sapiens
aatattaaaatagaa

SEQ ID NO: 53996 - DNA, 15 bp, Homo sapiens
caatattaaaataga

SEQ ID NO: 53997 - DNA, 15 bp, Homo sapiens
gcaatattaaaatag

SEQ ID NO: 53998 - DNA, 15 bp, Homo sapiens
tgcaatattaaaata

SEQ ID NO: 53999 - DNA, 15 bp, Homo sapiens
ttgcaatattaaaat

SEQ ID NO: 54000 - DNA, 15 bp, Homo sapiens
cttgcaatattaaaa

SEQ ID NO: 54001 - DNA, 15 bp, Homo sapiens
tcttgcaatattaaa

SEQ ID NO: 54002 - DNA, 15 bp, Homo sapiens
atcttgcaatattaa

SEQ ID NO: 54003 - DNA, 15 bp, Homo sapiens
catcttgcaatatta

SEQ ID NO: 54004 - DNA, 15 bp, Homo sapiens
acatcttgcaatatt

SEQ ID NO: 54005 - DNA, 15 bp, Homo sapiens
aacatcttgcaatat

SEQ ID NO: 54006 - DNA, 15 bp, Homo sapiens
aaacatcttgcaata

SEQ ID NO: 54007 - DNA, 15 bp, Homo sapiens
aaaacatcttgcaat

SEQ ID NO: 54008 - DNA, 15 bp, Homo sapiens
taaaacatcttgcaa

SEQ ID NO: 54009 - DNA, 15 bp, Homo sapiens
ataaaacatcttgca

SEQ ID NO: 54010 - DNA, 15 bp, Homo sapiens
tataaaacatcttgc

SEQ ID NO: 54011 - DNA, 15 bp, Homo sapiens
atataaaacatcttg

SEQ ID NO: 54012 - DNA, 15 bp, Homo sapiens
aatataaaacatctt

SEQ ID NO: 54013 - DNA, 15 bp, Homo sapiens
aaatataaaacatct

SEQ ID NO: 54014 - DNA, 15 bp, Homo sapiens
caaatataaaacatc

SEQ ID NO: 54015 - DNA, 15 bp, Homo sapiens
acaaatataaaacat

SEQ ID NO: 54016 - DNA, 15 bp, Homo sapiens
cacaaatataaaaca

SEQ ID NO: 54017 - DNA, 15 bp, Homo sapiens
tcacaaatataaaac

SEQ ID NO: 54018 - DNA, 15 bp, Homo sapiens
atcacaaatataaaa

SEQ ID NO: 54019 - DNA, 15 bp, Homo sapiens
aatcacaaatataaa

SEQ ID NO: 54020 - DNA, 15 bp, Homo sapiens
taatcacaaatataa

SEQ ID NO: 54021 - DNA, 15 bp, Homo sapiens
gtaatcacaaatata

SEQ ID NO: 54022 - DNA, 15 bp, Homo sapiens
tgtaatcacaaatat

SEQ ID NO: 54023 - DNA, 15 bp, Homo sapiens
ttgtaatcacaaata

SEQ ID NO: 54024 - DNA, 15 bp, Homo sapiens
tttgtaatcacaaat

SEQ ID NO: 54025 - DNA, 15 bp, Homo sapiens
atttgtaatcacaaa

SEQ ID NO: 54026 - DNA, 15 bp, Homo sapiens
tatttgtaatcacaa

SEQ ID NO: 54027 - DNA, 15 bp, Homo sapiens
ttatttgtaatcaca

SEQ ID NO: 54028 - DNA, 15 bp, Homo sapiens
tttatttgtaatcac

SEQ ID NO: 54029 - DNA, 15 bp, Homo sapiens
ttttatttgtaatca

SEQ ID NO: 54030 - DNA, 15 bp, Homo sapiens
tttttatttgtaatc

SEQ ID NO: 54031 - DNA, 15 bp, Homo sapiens
gtttttatttgtaat

SEQ ID NO: 54032 - DNA, 15 bp, Homo sapiens
agtttttatttgtaa

SEQ ID NO: 54033 - DNA, 15 bp, Homo sapiens
gagtttttatttgta

SEQ ID NO: 54034 - DNA, 15 bp, Homo sapiens
ggagtttttatttgt

SEQ ID NO: 54035 - DNA, 15 bp, Homo sapiens
tggagtttttatttg

SEQ ID NO: 54036 - DNA, 15 bp, Homo sapiens
atggagtttttattt

SEQ ID NO: 54037 - DNA, 15 bp, Homo sapiens
aatggagtttttatt

SEQ ID NO: 54038 - DNA, 15 bp, Homo sapiens
taatggagtttttat

SEQ ID NO: 54039 - DNA, 15 bp, Homo sapiens
ataatggagttttta

SEQ ID NO: 54040 - DNA, 15 bp, Homo sapiens
aataatggagttttt

SEQ ID NO: 54041 - DNA, 15 bp, Homo sapiens
taataatggagtttt

SEQ ID NO: 54042 - DNA, 15 bp, Homo sapiens
ctaataatggagttt

SEQ ID NO: 54043 - DNA, 15 bp, Homo sapiens
actaataatggagtt

SEQ ID NO: 54044 - DNA, 15 bp, Homo sapiens
tactaataatggagt

SEQ ID NO: 54045 - DNA, 15 bp, Homo sapiens
ttactaataatggag

SEQ ID NO: 54046 - DNA, 15 bp, Homo sapiens
tttactaataatgga

SEQ ID NO: 54047 - DNA, 15 bp, Homo sapiens
gtttactaataatgg

SEQ ID NO: 54048 - DNA, 15 bp, Homo sapiens
tgtttactaataatg

SEQ ID NO: 54049 - DNA, 15 bp, Homo sapiens
ttgtttactaataat

SEQ ID NO: 54050 - DNA, 15 bp, Homo sapiens
tttgtttactaataa

SEQ ID NO: 54051 - DNA, 15 bp, Homo sapiens
atttgtttactaata

SEQ ID NO: 54052 - DNA, 15 bp, Homo sapiens
tatttgtttactaat

SEQ ID NO: 54053 - DNA, 15 bp, Homo sapiens
gtatttgtttactaa

SEQ ID NO: 54054 - DNA, 15 bp, Homo sapiens
tgtatttgtttacta

SEQ ID NO: 54055 - DNA, 15 bp, Homo sapiens
ttgtatttgtttact

SEQ ID NO: 54056 - DNA, 15 bp, Homo sapiens
attgtatttgtttac

SEQ ID NO: 54057 - DNA, 15 bp, Homo sapiens
cattgtatttgttta

SEQ ID NO: 54058 - DNA, 15 bp, Homo sapiens
acattgtatttgttt

SEQ ID NO: 54059 - DNA, 15 bp, Homo sapiens
gacattgtatttgtt

SEQ ID NO: 54060 - DNA, 15 bp, Homo sapiens
tgacattgtatttgt

SEQ ID NO: 54061 - DNA, 15 bp, Homo sapiens
atgacattgtatttg

SEQ ID NO: 54062 - DNA, 15 bp, Homo sapiens
tatgacattgtattt

SEQ ID NO: 54063 - DNA, 15 bp, Homo sapiens
atatgacattgtatt

SEQ ID NO: 54064 - DNA, 15 bp, Homo sapiens
tatatgacattgtat

SEQ ID NO: 54065 - DNA, 15 bp, Homo sapiens
ctatatgacattgta

SEQ ID NO: 54066 - DNA, 15 bp, Homo sapiens
actatatgacattgt

SEQ ID NO: 54067 - DNA, 15 bp, Homo sapiens
tactatatgacattg

SEQ ID NO: 54068 - DNA, 15 bp, Homo sapiens
ctactatatgacatt

SEQ ID NO: 54069 - DNA, 15 bp, Homo sapiens
actactatatgacat

SEQ ID NO: 54070 - DNA, 15 bp, Homo sapiens
tactactatatgaca

SEQ ID NO: 54071 - DNA, 15 bp, Homo sapiens
ttactactatatgac

SEQ ID NO: 54072 - DNA, 15 bp, Homo sapiens
cttactactatatga

SEQ ID NO: 54073 - DNA, 15 bp, Homo sapiens
acttactactatatg

SEQ ID NO: 54074 - DNA, 15 bp, Homo sapiens
cacttactactatat

SEQ ID NO: 54075 - DNA, 15 bp, Homo sapiens
gcacttactactata

SEQ ID NO: 54076 - DNA, 15 bp, Homo sapiens
agcacttactactat

SEQ ID NO: 54077 - DNA, 15 bp, Homo sapiens
tagcacttactacta

SEQ ID NO: 54078 - DNA, 15 bp, Homo sapiens
atagcacttactact

SEQ ID NO: 54079 - DNA, 15 bp, Homo sapiens
tatagcacttactac

SEQ ID NO: 54080 - DNA, 15 bp, Homo sapiens
ttatagcacttacta

SEQ ID NO: 54081 - DNA, 15 bp, Homo sapiens
tttatagcacttact

SEQ ID NO: 54082 - DNA, 15 bp, Homo sapiens
ttttatagcacttac

SEQ ID NO: 54083 - DNA, 15 bp, Homo sapiens
tttttatagcactta

SEQ ID NO: 54084 - DNA, 15 bp, Homo sapiens
ttttttatagcactt

SEQ ID NO: 54085 - DNA, 15 bp, Homo sapiens
attttttatagcact

SEQ ID NO: 54086 - DNA, 15 bp, Homo sapiens
tattttttatagcac

SEQ ID NO: 54087 - DNA, 15 bp, Homo sapiens
ctattttttatagca

SEQ ID NO: 54088 - DNA, 15 bp, Homo sapiens
tctattttttatagc

SEQ ID NO: 54089 - DNA, 15 bp, Homo sapiens
gtctattttttatag

SEQ ID NO: 54090 - DNA, 15 bp, Homo sapiens
tgtctattttttata

SEQ ID NO: 54091 - DNA, 15 bp, Homo sapiens
ctgtctattttttat

SEQ ID NO: 54092 - DNA, 15 bp, Homo sapiens
cctgtctatttttta

SEQ ID NO: 54093 - DNA, 15 bp, Homo sapiens
tcctgtctatttttt

SEQ ID NO: 54094 - DNA, 15 bp, Homo sapiens
atcctgtctattttt

SEQ ID NO: 54095 - DNA, 15 bp, Homo sapiens
tatcctgtctatttt

SEQ ID NO: 54096 - DNA, 15 bp, Homo sapiens
ctatcctgtctattt

SEQ ID NO: 54097 - DNA, 15 bp, Homo sapiens
tctatcctgtctatt

SEQ ID NO: 54098 - DNA, 15 bp, Homo sapiens
ttctatcctgtctat

SEQ ID NO: 54099 - DNA, 15 bp, Homo sapiens
tttctatcctgtcta

SEQ ID NO: 54100 - DNA, 15 bp, Homo sapiens
ctttctatcctgtct

SEQ ID NO: 54101 - DNA, 15 bp, Homo sapiens
actttctatcctgtc

SEQ ID NO: 54102 - DNA, 15 bp, Homo sapiens
tactttctatcctgt

SEQ ID NO: 54103 - DNA, 15 bp, Homo sapiens
ttactttctatcctg

SEQ ID NO: 54104 - DNA, 15 bp, Homo sapiens
attactttctatcct

SEQ ID NO: 54105 - DNA, 15 bp, Homo sapiens
gattactttctatcc

SEQ ID NO: 54106 - DNA, 15 bp, Homo sapiens
agattactttctatc

SEQ ID NO: 54107 - DNA, 15 bp, Homo sapiens
aagattactttctat

SEQ ID NO: 54108 - DNA, 15 bp, Homo sapiens
caagattactttcta

SEQ ID NO: 54109 - DNA, 15 bp, Homo sapiens
ccaagattactttct

SEQ ID NO: 54110 - DNA, 15 bp, Homo sapiens
accaagattactttc

SEQ ID NO: 54111 - DNA, 15 bp, Homo sapiens
aaccaagattacttt

SEQ ID NO: 54112 - DNA, 15 bp, Homo sapiens
aaaccaagattactt

SEQ ID NO: 54113 - DNA, 15 bp, Homo sapiens
caaaccaagattact

SEQ ID NO: 54114 - DNA, 15 bp, Homo sapiens
acaaaccaagattac

SEQ ID NO: 54115 - DNA, 15 bp, Homo sapiens
tacaaaccaagatta

SEQ ID NO: 54116 - DNA, 15 bp, Homo sapiens
atacaaaccaagatt

SEQ ID NO: 54117 - DNA, 15 bp, Homo sapiens
catacaaaccaagat

SEQ ID NO: 54118 - DNA, 15 bp, Homo sapiens
acatacaaaccaaga

SEQ ID NO: 54119 - DNA, 15 bp, Homo sapiens
aacatacaaaccaag

SEQ ID NO: 54120 - DNA, 15 bp, Homo sapiens
aaacatacaaaccaa

SEQ ID NO: 54121 - DNA, 15 bp, Homo sapiens
aaaacatacaaacca

SEQ ID NO: 54122 - DNA, 15 bp, Homo sapiens
aaaaacatacaaacc

SEQ ID NO: 54123 - DNA, 15 bp, Homo sapiens
aaaaaacatacaaac

SEQ ID NO: 54124 - DNA, 15 bp, Homo sapiens
caaaaaacatacaaa

SEQ ID NO: 54125 - DNA, 15 bp, Homo sapiens
acaaaaaacatacaa

SEQ ID NO: 54126 - DNA, 15 bp, Homo sapiens
aacaaaaaacataca

SEQ ID NO: 54127 - DNA, 15 bp, Homo sapiens
aaacaaaaaacatac

SEQ ID NO: 54128 - DNA, 15 bp, Homo sapiens
aaaacaaaaaacata

SEQ ID NO: 54129 - DNA, 15 bp, Homo sapiens
aaaaacaaaaaacat

SEQ ID NO: 54130 - DNA, 15 bp, Homo sapiens
aaaaaacaaaaaaca

SEQ ID NO: 54131 - DNA, 15 bp, Homo sapiens
taaaaaacaaaaaac

SEQ ID NO: 54132 - DNA, 15 bp, Homo sapiens
ctaaaaaacaaaaaa

SEQ ID NO: 54133 - DNA, 15 bp, Homo sapiens
gctaaaaaacaaaaa

SEQ ID NO: 54134 - DNA, 15 bp, Homo sapiens
tgctaaaaaacaaaa

SEQ ID NO: 54135 - DNA, 15 bp, Homo sapiens
ttgctaaaaaacaaa

SEQ ID NO: 54136 - DNA, 15 bp, Homo sapiens
tttgctaaaaaacaa

SEQ ID NO: 54137 - DNA, 15 bp, Homo sapiens
ctttgctaaaaaaca

SEQ ID NO: 54138 - DNA, 15 bp, Homo sapiens
tctttgctaaaaaac

SEQ ID NO: 54139 - DNA, 15 bp, Homo sapiens
atctttgctaaaaaa

SEQ ID NO: 54140 - DNA, 15 bp, Homo sapiens
catctttgctaaaaa

SEQ ID NO: 54141 - DNA, 15 bp, Homo sapiens
tcatctttgctaaaa

SEQ ID NO: 54142 - DNA, 15 bp, Homo sapiens
atcatctttgctaaa

SEQ ID NO: 54143 - DNA, 15 bp, Homo sapiens
aatcatctttgctaa

SEQ ID NO: 54144 - DNA, 15 bp, Homo sapiens
taatcatctttgcta

SEQ ID NO: 54145 - DNA, 15 bp, Homo sapiens
ctaatcatctttgct

SEQ ID NO: 54146 - DNA, 15 bp, Homo sapiens
tctaatcatctttgc

SEQ ID NO: 54147 - DNA, 15 bp, Homo sapiens
ctctaatcatctttg

SEQ ID NO: 54148 - DNA, 15 bp, Homo sapiens
tctctaatcatcttt

SEQ ID NO: 54149 - DNA, 15 bp, Homo sapiens
ttctctaatcatctt

SEQ ID NO: 54150 - DNA, 15 bp, Homo sapiens
cttctctaatcatct

SEQ ID NO: 54151 - DNA, 15 bp, Homo sapiens
ccttctctaatcatc

SEQ ID NO: 54152 - DNA, 15 bp, Homo sapiens
gccttctctaatcat

SEQ ID NO: 54153 - DNA, 15 bp, Homo sapiens
ggccttctctaatca

SEQ ID NO: 54154 - DNA, 15 bp, Homo sapiens
gggccttctctaatc

SEQ ID NO: 54155 - DNA, 15 bp, Homo sapiens
tgggccttctctaat

SEQ ID NO: 54156 - DNA, 15 bp, Homo sapiens
ttgggccttctctaa

SEQ ID NO: 54157 - DNA, 15 bp, Homo sapiens
gttgggccttctcta

SEQ ID NO: 54158 - DNA, 15 bp, Homo sapiens
ggttgggccttctct

SEQ ID NO: 54159 - DNA, 15 bp, Homo sapiens
tggttgggccttctc

SEQ ID NO: 54160 - DNA, 15 bp, Homo sapiens
ttggttgggccttct

SEQ ID NO: 54161 - DNA, 15 bp, Homo sapiens
cttggttgggccttc

SEQ ID NO: 54162 - DNA, 15 bp, Homo sapiens
gcttggttgggcctt

SEQ ID NO: 54163 - DNA, 15 bp, Homo sapiens
tgcttggttgggcct

SEQ ID NO: 54164 - DNA, 15 bp, Homo sapiens
ctgcttggttgggcc

SEQ ID NO: 54165 - DNA, 15 bp, Homo sapiens
tctgcttggttgggc

SEQ ID NO: 54166 - DNA, 15 bp, Homo sapiens
atctgcttggttggg

SEQ ID NO: 54167 - DNA, 15 bp, Homo sapiens
tatctgcttggttgg

SEQ ID NO: 54168 - DNA, 15 bp, Homo sapiens
ttatctgcttggttg

SEQ ID NO: 54169 - DNA, 15 bp, Homo sapiens
gttatctgcttggtt

SEQ ID NO: 54170 - DNA, 15 bp, Homo sapiens
tgttatctgcttggt

SEQ ID NO: 54171 - DNA, 15 bp, Homo sapiens
atgttatctgcttgg

SEQ ID NO: 54172 - DNA, 15 bp, Homo sapiens
aatgttatctgcttg

SEQ ID NO: 54173 - DNA, 15 bp, Homo sapiens
aaatgttatctgctt

SEQ ID NO: 54174 - DNA, 15 bp, Homo sapiens
taaatgttatctgct

SEQ ID NO: 54175 - DNA, 15 bp, Homo sapiens
ttaaatgttatctgc

SEQ ID NO: 54176 - DNA, 15 bp, Homo sapiens
cttaaatgttatctg

SEQ ID NO: 54177 - DNA, 15 bp, Homo sapiens
gcttaaatgttatct

SEQ ID NO: 54178 - DNA, 15 bp, Homo sapiens
tgcttaaatgttatc

SEQ ID NO: 54179 - DNA, 15 bp, Homo sapiens
ctgcttaaatgttat

SEQ ID NO: 54180 - DNA, 15 bp, Homo sapiens
tctgcttaaatgtta

SEQ ID NO: 54181 - DNA, 15 bp, Homo sapiens
ctctgcttaaatgtt

SEQ ID NO: 54182 - DNA, 15 bp, Homo sapiens
cctctgcttaaatgt

SEQ ID NO: 54183 - DNA, 15 bp, Homo sapiens
gcctctgcttaaatg

SEQ ID NO: 54184 - DNA, 15 bp, Homo sapiens
ggcctctgcttaaat

SEQ ID NO: 54185 - DNA, 15 bp, Homo sapiens
aggcctctgcttaaa

SEQ ID NO: 54186 - DNA, 15 bp, Homo sapiens
taggcctctgcttaa

SEQ ID NO: 54187 - DNA, 15 bp, Homo sapiens
ttaggcctctgctta

SEQ ID NO: 54188 - DNA, 15 bp, Homo sapiens
tttaggcctctgctt

SEQ ID NO: 54189 - DNA, 15 bp, Homo sapiens
atttaggcctctgct

SEQ ID NO: 54190 - DNA, 15 bp, Homo sapiens
gatttaggcctctgc

SEQ ID NO: 54191 - DNA, 15 bp, Homo sapiens
tgatttaggcctctg

SEQ ID NO: 54192 - DNA, 15 bp, Homo sapiens
atgatttaggcctct

SEQ ID NO: 54193 - DNA, 15 bp, Homo sapiens
tatgatttaggcctc

SEQ ID NO: 54194 - DNA, 15 bp, Homo sapiens
atatgatttaggcct

SEQ ID NO: 54195 - DNA, 15 bp, Homo sapiens
tatatgatttaggcc

SEQ ID NO: 54196 - DNA, 15 bp, Homo sapiens
ttatatgatttaggc

SEQ ID NO: 54197 - DNA, 15 bp, Homo sapiens
cttatatgatttagg

SEQ ID NO: 54198 - DNA, 15 bp, Homo sapiens
acttatatgatttag

SEQ ID NO: 54199 - DNA, 15 bp, Homo sapiens
cacttatatgattta

SEQ ID NO: 54200 - DNA, 15 bp, Homo sapiens
tcacttatatgattt

SEQ ID NO: 54201 - DNA, 15 bp, Homo sapiens
ctcacttatatgatt

SEQ ID NO: 54202 - DNA, 15 bp, Homo sapiens
actcacttatatgat

SEQ ID NO: 54203 - DNA, 15 bp, Homo sapiens
aactcacttatatga

SEQ ID NO: 54204 - DNA, 15 bp, Homo sapiens
taactcacttatatg

SEQ ID NO: 54205 - DNA, 15 bp, Homo sapiens
ataactcacttatat

SEQ ID NO: 54206 - DNA, 15 bp, Homo sapiens
tataactcacttata

SEQ ID NO: 54207 - DNA, 15 bp, Homo sapiens
gtataactcacttat

SEQ ID NO: 54208 - DNA, 15 bp, Homo sapiens
tgtataactcactta

SEQ ID NO: 54209 - DNA, 15 bp, Homo sapiens
ttgtataactcactt

SEQ ID NO: 54210 - DNA, 15 bp, Homo sapiens
tttgtataactcact

SEQ ID NO: 54211 - DNA, 15 bp, Homo sapiens
atttgtataactcac

SEQ ID NO: 54212 - DNA, 15 bp, Homo sapiens
tatttgtataactca

SEQ ID NO: 54213 - DNA, 15 bp, Homo sapiens
atatttgtataactc

SEQ ID NO: 54214 - DNA, 15 bp, Homo sapiens
gatatttgtataact

SEQ ID NO: 54215 - DNA, 15 bp, Homo sapiens
agatatttgtataac

SEQ ID NO: 54216 - DNA, 15 bp, Homo sapiens
cagatatttgtataa

SEQ ID NO: 54217 - DNA, 15 bp, Homo sapiens
ccagatatttgtata

SEQ ID NO: 54218 - DNA, 15 bp, Homo sapiens
cccagatatttgtat

SEQ ID NO: 54219 - DNA, 15 bp, Homo sapiens
tcccagatatttgta

SEQ ID NO: 54220 - DNA, 15 bp, Homo sapiens
ttcccagatatttgt

SEQ ID NO: 54221 - DNA, 15 bp, Homo sapiens
tttcccagatatttg

SEQ ID NO: 54222 - DNA, 15 bp, Homo sapiens
ttttcccagatattt

SEQ ID NO: 54223 - DNA, 15 bp, Homo sapiens
cttttcccagatatt

SEQ ID NO: 54224 - DNA, 15 bp, Homo sapiens
tcttttcccagatat

SEQ ID NO: 54225 - DNA, 15 bp, Homo sapiens
ctcttttcccagata

SEQ ID NO: 54226 - DNA, 15 bp, Homo sapiens
actcttttcccagat

SEQ ID NO: 54227 - DNA, 15 bp, Homo sapiens
aactcttttcccaga

SEQ ID NO: 54228 - DNA, 15 bp, Homo sapiens
taactcttttcccag

SEQ ID NO: 54229 - DNA, 15 bp, Homo sapiens
ttaactcttttccca

SEQ ID NO: 54230 - DNA, 15 bp, Homo sapiens
cttaactcttttccc

SEQ ID NO: 54231 - DNA, 15 bp, Homo sapiens
tcttaactcttttcc

SEQ ID NO: 54232 - DNA, 15 bp, Homo sapiens
ctcttaactcttttc

SEQ ID NO: 54233 - DNA, 15 bp, Homo sapiens
actcttaactctttt

SEQ ID NO: 54234 - DNA, 15 bp, Homo sapiens
tactcttaactcttt

SEQ ID NO: 54235 - DNA, 15 bp, Homo sapiens
gtactcttaactctt

SEQ ID NO: 54236 - DNA, 15 bp, Homo sapiens
tgtactcttaactct

SEQ ID NO: 54237 - DNA, 15 bp, Homo sapiens
ctgtactcttaactc

SEQ ID NO: 54238 - DNA, 15 bp, Homo sapiens
tctgtactcttaact

SEQ ID NO: 54239 - DNA, 15 bp, Homo sapiens
atctgtactcttaac

SEQ ID NO: 54240 - DNA, 15 bp, Homo sapiens
catctgtactcttaa

SEQ ID NO: 54241 - DNA, 15 bp, Homo sapiens
gcatctgtactctta

SEQ ID NO: 54242 - DNA, 15 bp, Homo sapiens
tgcatctgtactctt

SEQ ID NO: 54243 - DNA, 15 bp, Homo sapiens
ttgcatctgtactct

SEQ ID NO: 54244 - DNA, 15 bp, Homo sapiens
tttgcatctgtactc

SEQ ID NO: 54245 - DNA, 15 bp, Homo sapiens
ttttgcatctgtact

SEQ ID NO: 54246 - DNA, 15 bp, Homo sapiens
cttttgcatctgtac

SEQ ID NO: 54247 - DNA, 15 bp, Homo sapiens
gcttttgcatctgta

SEQ ID NO: 54248 - DNA, 15 bp, Homo sapiens
ggcttttgcatctgt

SEQ ID NO: 54249 - DNA, 15 bp, Homo sapiens
gggcttttgcatctg

SEQ ID NO: 54250 - DNA, 15 bp, Homo sapiens
agggcttttgcatct

SEQ ID NO: 54251 - DNA, 15 bp, Homo sapiens
aagggcttttgcatc

SEQ ID NO: 54252 - DNA, 15 bp, Homo sapiens
taagggcttttgcat

SEQ ID NO: 54253 - DNA, 15 bp, Homo sapiens
ctaagggcttttgca

SEQ ID NO: 54254 - DNA, 15 bp, Homo sapiens
tctaagggcttttgc

SEQ ID NO: 54255 - DNA, 15 bp, Homo sapiens
gtctaagggcttttg

SEQ ID NO: 54256 - DNA, 15 bp, Homo sapiens
tgtctaagggctttt

SEQ ID NO: 54257 - DNA, 15 bp, Homo sapiens
ttgtctaagggcttt

SEQ ID NO: 54258 - DNA, 15 bp, Homo sapiens
cttgtctaagggctt

SEQ ID NO: 54259 - DNA, 15 bp, Homo sapiens
tcttgtctaagggct

SEQ ID NO: 54260 - DNA, 15 bp, Homo sapiens
ctcttgtctaagggc

SEQ ID NO: 54261 - DNA, 15 bp, Homo sapiens
tctcttgtctaaggg

SEQ ID NO: 54262 - DNA, 15 bp, Homo sapiens
ttctcttgtctaagg

SEQ ID NO: 54263 - DNA, 15 bp, Homo sapiens
attctcttgtctaag

SEQ ID NO: 54264 - DNA, 15 bp, Homo sapiens
cattctcttgtctaa

SEQ ID NO: 54265 - DNA, 15 bp, Homo sapiens
tcattctcttgtcta

SEQ ID NO: 54266 - DNA, 15 bp, Homo sapiens
ctcattctcttgtct

SEQ ID NO: 54267 - DNA, 15 bp, Homo sapiens
gctcattctcttgtc

SEQ ID NO: 54268 - DNA, 15 bp, Homo sapiens
agctcattctcttgt

SEQ ID NO: 54269 - DNA, 15 bp, Homo sapiens
aagctcattctcttg

SEQ ID NO: 54270 - DNA, 15 bp, Homo sapiens
caagctcattctctt

SEQ ID NO: 54271 - DNA, 15 bp, Homo sapiens
ccaagctcattctct

SEQ ID NO: 54272 - DNA, 15 bp, Homo sapiens
accaagctcattctc

SEQ ID NO: 54273 - DNA, 15 bp, Homo sapiens
taccaagctcattct

SEQ ID NO: 54274 - DNA, 15 bp, Homo sapiens
ataccaagctcattc

SEQ ID NO: 54275 - DNA, 15 bp, Homo sapiens
tataccaagctcatt

SEQ ID NO: 54276 - DNA, 15 bp, Homo sapiens
atataccaagctcat

SEQ ID NO: 54277 - DNA, 15 bp, Homo sapiens
gatataccaagctca

SEQ ID NO: 54278 - DNA, 15 bp, Homo sapiens
agatataccaagctc

SEQ ID NO: 54279 - DNA, 15 bp, Homo sapiens
cagatataccaagct

SEQ ID NO: 54280 - DNA, 15 bp, Homo sapiens
tcagatataccaagc

SEQ ID NO: 54281 - DNA, 15 bp, Homo sapiens
ttcagatataccaag

SEQ ID NO: 54282 - DNA, 15 bp, Homo sapiens
cttcagatataccaa

SEQ ID NO: 54283 - DNA, 15 bp, Homo sapiens
tcttcagatatacca

SEQ ID NO: 54284 - DNA, 15 bp, Homo sapiens
ctcttcagatatacc

SEQ ID NO: 54285 - DNA, 15 bp, Homo sapiens
actcttcagatatac

SEQ ID NO: 54286 - DNA, 15 bp, Homo sapiens
cactcttcagatata

SEQ ID NO: 54287 - DNA, 15 bp, Homo sapiens
ccactcttcagatat

SEQ ID NO: 54288 - DNA, 15 bp, Homo sapiens
tccactcttcagata

SEQ ID NO: 54289 - DNA, 15 bp, Homo sapiens
atccactcttcagat

SEQ ID NO: 54290 - DNA, 15 bp, Homo sapiens
tatccactcttcaga

SEQ ID NO: 54291 - DNA, 15 bp, Homo sapiens
ttatccactcttcag

SEQ ID NO: 54292 - DNA, 15 bp, Homo sapiens
cttatccactcttca

SEQ ID NO: 54293 - DNA, 15 bp, Homo sapiens
acttatccactcttc

SEQ ID NO: 54294 - DNA, 15 bp, Homo sapiens
gacttatccactctt

SEQ ID NO: 54295 - DNA, 15 bp, Homo sapiens
tgacttatccactct

SEQ ID NO: 54296 - DNA, 15 bp, Homo sapiens
atgacttatccactc

SEQ ID NO: 54297 - DNA, 15 bp, Homo sapiens
aatgacttatccact

SEQ ID NO: 54298 - DNA, 15 bp, Homo sapiens
aaatgacttatccac

SEQ ID NO: 54299 - DNA, 15 bp, Homo sapiens
aaaatgacttatcca

SEQ ID NO: 54300 - DNA, 15 bp, Homo sapiens
caaaatgacttatcc

SEQ ID NO: 54301 - DNA, 15 bp, Homo sapiens
tcaaaatgacttatc

SEQ ID NO: 54302 - DNA, 15 bp, Homo sapiens
gtcaaaatgacttat

SEQ ID NO: 54303 - DNA, 15 bp, Homo sapiens
agtcaaaatgactta

SEQ ID NO: 54304 - DNA, 15 bp, Homo sapiens
cagtcaaaatgactt

SEQ ID NO: 54305 - DNA, 15 bp, Homo sapiens
tcagtcaaaatgact

SEQ ID NO: 54306 - DNA, 15 bp, Homo sapiens
ttcagtcaaaatgac

SEQ ID NO: 54307 - DNA, 15 bp, Homo sapiens
tttcagtcaaaatga

SEQ ID NO: 54308 - DNA, 15 bp, Homo sapiens
gtttcagtcaaaatg

SEQ ID NO: 54309 - DNA, 15 bp, Homo sapiens
tgtttcagtcaaaat

SEQ ID NO: 54310 - DNA, 15 bp, Homo sapiens
ctgtttcagtcaaaa

SEQ ID NO: 54311 - DNA, 15 bp, Homo sapiens
tctgtttcagtcaaa

SEQ ID NO: 54312 - DNA, 15 bp, Homo sapiens
ctctgtttcagtcaa

SEQ ID NO: 54313 - DNA, 15 bp, Homo sapiens
actctgtttcagtca

SEQ ID NO: 54314 - DNA, 15 bp, Homo sapiens
cactctgtttcagtc

SEQ ID NO: 54315 - DNA, 15 bp, Homo sapiens
ccactctgtttcagt

SEQ ID NO: 54316 - DNA, 15 bp, Homo sapiens
tccactctgtttcag

SEQ ID NO: 54317 - DNA, 15 bp, Homo sapiens
gtccactctgtttca

SEQ ID NO: 54318 - DNA, 15 bp, Homo sapiens
tgtccactctgtttc

SEQ ID NO: 54319 - DNA, 15 bp, Homo sapiens
ttgtccactctgttt

SEQ ID NO: 54320 - DNA, 15 bp, Homo sapiens
cttgtccactctgtt

SEQ ID NO: 54321 - DNA, 15 bp, Homo sapiens
tcttgtccactctgt

SEQ ID NO: 54322 - DNA, 15 bp, Homo sapiens
ttcttgtccactctg

SEQ ID NO: 54323 - DNA, 15 bp, Homo sapiens
tttcttgtccactct

SEQ ID NO: 54324 - DNA, 15 bp, Homo sapiens
ttttcttgtccactc

SEQ ID NO: 54325 - DNA, 15 bp, Homo sapiens
gttttcttgtccact

SEQ ID NO: 54326 - DNA, 15 bp, Homo sapiens
ggttttcttgtccac

SEQ ID NO: 54327 - DNA, 15 bp, Homo sapiens
tggttttcttgtcca

SEQ ID NO: 54328 - DNA, 15 bp, Homo sapiens
ctggttttcttgtcc

SEQ ID NO: 54329 - DNA, 15 bp, Homo sapiens
actggttttcttgtc

SEQ ID NO: 54330 - DNA, 15 bp, Homo sapiens
gactggttttcttgt

SEQ ID NO: 54331 - DNA, 15 bp, Homo sapiens
ggactggttttcttg

SEQ ID NO: 54332 - DNA, 15 bp, Homo sapiens
tggactggttttctt

SEQ ID NO: 54333 - DNA, 15 bp, Homo sapiens
ttggactggttttct

SEQ ID NO: 54334 - DNA, 15 bp, Homo sapiens
cttggactggttttc

SEQ ID NO: 54335 - DNA, 15 bp, Homo sapiens
acttggactggtttt

SEQ ID NO: 54336 - DNA, 15 bp, Homo sapiens
cacttggactggttt

SEQ ID NO: 54337 - DNA, 15 bp, Homo sapiens
acacttggactggtt

SEQ ID NO: 54338 - DNA, 15 bp, Homo sapiens
tacacttggactggt

SEQ ID NO: 54339 - DNA, 15 bp, Homo sapiens
ttacacttggactgg

SEQ ID NO: 54340 - DNA, 15 bp, Homo sapiens
tttacacttggactg

SEQ ID NO: 54341 - DNA, 15 bp, Homo sapiens
ctttacacttggact

SEQ ID NO: 54342 - DNA, 15 bp, Homo sapiens
tctttacacttggac

SEQ ID NO: 54343 - DNA, 15 bp, Homo sapiens
gtctttacacttgga

SEQ ID NO: 54344 - DNA, 15 bp, Homo sapiens
tgtctttacacttgg

SEQ ID NO: 54345 - DNA, 15 bp, Homo sapiens
gtgtctttacacttg

SEQ ID NO: 54346 - DNA, 15 bp, Homo sapiens
agtgtctttacactt

SEQ ID NO: 54347 - DNA, 15 bp, Homo sapiens
tagtgtctttacact

SEQ ID NO: 54348 - DNA, 15 bp, Homo sapiens
ctagtgtctttacac

SEQ ID NO: 54349 - DNA, 15 bp, Homo sapiens
actagtgtctttaca

SEQ ID NO: 54350 - DNA, 15 bp, Homo sapiens
cactagtgtctttac

SEQ ID NO: 54351 - DNA, 15 bp, Homo sapiens
acactagtgtcttta

SEQ ID NO: 54352 - DNA, 15 bp, Homo sapiens
cacactagtgtcttt

SEQ ID NO: 54353 - DNA, 15 bp, Homo sapiens
acacactagtgtctt

SEQ ID NO: 54354 - DNA, 15 bp, Homo sapiens
cacacactagtgtct

SEQ ID NO: 54355 - DNA, 15 bp, Homo sapiens
acacacactagtgtc

SEQ ID NO: 54356 - DNA, 15 bp, Homo sapiens
aacacacactagtgt

SEQ ID NO: 54357 - DNA, 15 bp, Homo sapiens
gaacacacactagtg

SEQ ID NO: 54358 - DNA, 15 bp, Homo sapiens
tgaacacacactagt

SEQ ID NO: 54359 - DNA, 15 bp, Homo sapiens
ctgaacacacactag

SEQ ID NO: 54360 - DNA, 15 bp, Homo sapiens
gctgaacacacacta

SEQ ID NO: 54361 - DNA, 15 bp, Homo sapiens
tgctgaacacacact

SEQ ID NO: 54362 - DNA, 15 bp, Homo sapiens
atgctgaacacacac

SEQ ID NO: 54363 - DNA, 15 bp, Homo sapiens
tatgctgaacacaca

SEQ ID NO: 54364 - DNA, 15 bp, Homo sapiens
ctatgctgaacacac

SEQ ID NO: 54365 - DNA, 15 bp, Homo sapiens
cctatgctgaacaca

SEQ ID NO: 54366 - DNA, 15 bp, Homo sapiens
tcctatgctgaacac

SEQ ID NO: 54367 - DNA, 15 bp, Homo sapiens
ttcctatgctgaaca

SEQ ID NO: 54368 - DNA, 15 bp, Homo sapiens
cttcctatgctgaac

SEQ ID NO: 54369 - DNA, 15 bp, Homo sapiens
ccttcctatgctgaa

SEQ ID NO: 54370 - DNA, 15 bp, Homo sapiens
tccttcctatgctga

SEQ ID NO: 54371 - DNA, 15 bp, Homo sapiens
atccttcctatgctg

SEQ ID NO: 54372 - DNA, 15 bp, Homo sapiens
catccttcctatgct

SEQ ID NO: 54373 - DNA, 15 bp, Homo sapiens
acatccttcctatgc

SEQ ID NO: 54374 - DNA, 15 bp, Homo sapiens
tacatccttcctatg

SEQ ID NO: 54375 - DNA, 15 bp, Homo sapiens
ttacatccttcctat

SEQ ID NO: 54376 - DNA, 15 bp, Homo sapiens
attacatccttccta

SEQ ID NO: 54377 - DNA, 15 bp, Homo sapiens
gattacatccttcct

SEQ ID NO: 54378 - DNA, 15 bp, Homo sapiens
agattacatccttcc

SEQ ID NO: 54379 - DNA, 15 bp, Homo sapiens
cagattacatccttc

SEQ ID NO: 54380 - DNA, 15 bp, Homo sapiens
tcagattacatcctt

SEQ ID NO: 54381 - DNA, 15 bp, Homo sapiens
ttcagattacatcct

SEQ ID NO: 54382 - DNA, 15 bp, Homo sapiens
attcagattacatcc

SEQ ID NO: 54383 - DNA, 15 bp, Homo sapiens
aattcagattacatc

SEQ ID NO: 54384 - DNA, 15 bp, Homo sapiens
aaattcagattacat

SEQ ID NO: 54385 - DNA, 15 bp, Homo sapiens
aaaattcagattaca

SEQ ID NO: 54386 - DNA, 15 bp, Homo sapiens
caaaattcagattac

SEQ ID NO: 54387 - DNA, 15 bp, Homo sapiens
acaaaattcagatta

SEQ ID NO: 54388 - DNA, 15 bp, Homo sapiens
cacaaaattcagatt

SEQ ID NO: 54389 - DNA, 15 bp, Homo sapiens
acacaaaattcagat

SEQ ID NO: 54390 - DNA, 15 bp, Homo sapiens
aacacaaaattcaga

SEQ ID NO: 54391 - DNA, 15 bp, Homo sapiens
aaacacaaaattcag

SEQ ID NO: 54392 - DNA, 15 bp, Homo sapiens
taaacacaaaattca

SEQ ID NO: 54393 - DNA, 15 bp, Homo sapiens
ttaaacacaaaattc

SEQ ID NO: 54394 - DNA, 15 bp, Homo sapiens
attaaacacaaaatt

SEQ ID NO: 54395 - DNA, 15 bp, Homo sapiens
tattaaacacaaaat

SEQ ID NO: 54396 - DNA, 15 bp, Homo sapiens
atattaaacacaaaa

SEQ ID NO: 54397 - DNA, 15 bp, Homo sapiens
aatattaaacacaaa

SEQ ID NO: 54398 - DNA, 15 bp, Homo sapiens
gaatattaaacacaa

SEQ ID NO: 54399 - DNA, 15 bp, Homo sapiens
ggaatattaaacaca

SEQ ID NO: 54400 - DNA, 15 bp, Homo sapiens
gggaatattaaacac

SEQ ID NO: 54401 - DNA, 15 bp, Homo sapiens
agggaatattaaaca

SEQ ID NO: 54402 - DNA, 15 bp, Homo sapiens
cagggaatattaaac

SEQ ID NO: 54403 - DNA, 15 bp, Homo sapiens
acagggaatattaaa

SEQ ID NO: 54404 - DNA, 15 bp, Homo sapiens
cacagggaatattaa

SEQ ID NO: 54405 - DNA, 15 bp, Homo sapiens
acacagggaatatta

SEQ ID NO: 54406 - DNA, 15 bp, Homo sapiens
aacacagggaatatt

SEQ ID NO: 54407 - DNA, 15 bp, Homo sapiens
gaacacagggaatat

SEQ ID NO: 54408 - DNA, 15 bp, Homo sapiens
tgaacacagggaata

SEQ ID NO: 54409 - DNA, 15 bp, Homo sapiens
atgaacacagggaat

SEQ ID NO: 54410 - DNA, 15 bp, Homo sapiens
catgaacacagggaa

SEQ ID NO: 54411 - DNA, 15 bp, Homo sapiens
gcatgaacacaggga

SEQ ID NO: 54412 - DNA, 15 bp, Homo sapiens
agcatgaacacaggg

SEQ ID NO: 54413 - DNA, 15 bp, Homo sapiens
aagcatgaacacagg

SEQ ID NO: 54414 - DNA, 15 bp, Homo sapiens
aaagcatgaacacag

SEQ ID NO: 54415 - DNA, 15 bp, Homo sapiens
gaaagcatgaacaca

SEQ ID NO: 54416 - DNA, 15 bp, Homo sapiens
tgaaagcatgaacac

SEQ ID NO: 54417 - DNA, 15 bp, Homo sapiens
ttgaaagcatgaaca

SEQ ID NO: 54418 - DNA, 15 bp, Homo sapiens
tttgaaagcatgaac

SEQ ID NO: 54419 - DNA, 15 bp, Homo sapiens
ttttgaaagcatgaa

SEQ ID NO: 54420 - DNA, 15 bp, Homo sapiens
attttgaaagcatga

SEQ ID NO: 54421 - DNA, 15 bp, Homo sapiens
tattttgaaagcatg

SEQ ID NO: 54422 - DNA, 15 bp, Homo sapiens
gtattttgaaagcat

SEQ ID NO: 54423 - DNA, 15 bp, Homo sapiens
tgtattttgaaagca

SEQ ID NO: 54424 - DNA, 15 bp, Homo sapiens
ctgtattttgaaagc

SEQ ID NO: 54425 - DNA, 15 bp, Homo sapiens
tctgtattttgaaag

SEQ ID NO: 54426 - DNA, 15 bp, Homo sapiens
atctgtattttgaaa

SEQ ID NO: 54427 - DNA, 15 bp, Homo sapiens
catctgtattttgaa

SEQ ID NO: 54428 - DNA, 15 bp, Homo sapiens
tcatctgtattttga

SEQ ID NO: 54429 - DNA, 15 bp, Homo sapiens
ctcatctgtattttg

SEQ ID NO: 54430 - DNA, 15 bp, Homo sapiens
actcatctgtatttt

SEQ ID NO: 54431 - DNA, 15 bp, Homo sapiens
cactcatctgtattt

SEQ ID NO: 54432 - DNA, 15 bp, Homo sapiens
tcactcatctgtatt

SEQ ID NO: 54433 - DNA, 15 bp, Homo sapiens
ctcactcatctgtat

SEQ ID NO: 54434 - DNA, 15 bp, Homo sapiens
cctcactcatctgta

SEQ ID NO: 54435 - DNA, 15 bp, Homo sapiens
tcctcactcatctgt

SEQ ID NO: 54436 - DNA, 15 bp, Homo sapiens
ttcctcactcatctg

SEQ ID NO: 54437 - DNA, 15 bp, Homo sapiens
tttcctcactcatct

SEQ ID NO: 54438 - DNA, 15 bp, Homo sapiens
ctttcctcactcatc

SEQ ID NO: 54439 - DNA, 15 bp, Homo sapiens
actttcctcactcat

SEQ ID NO: 54440 - DNA, 15 bp, Homo sapiens
tactttcctcactca

SEQ ID NO: 54441 - DNA, 15 bp, Homo sapiens
ctactttcctcactc

SEQ ID NO: 54442 - DNA, 15 bp, Homo sapiens
cctactttcctcact

SEQ ID NO: 54443 - DNA, 15 bp, Homo sapiens
ccctactttcctcac

SEQ ID NO: 54444 - DNA, 15 bp, Homo sapiens
tccctactttcctca

SEQ ID NO: 54445 - DNA, 15 bp, Homo sapiens
ctccctactttcctc

SEQ ID NO: 54446 - DNA, 15 bp, Homo sapiens
tctccctactttcct

SEQ ID NO: 54447 - DNA, 15 bp, Homo sapiens
ttctccctactttcc

SEQ ID NO: 54448 - DNA, 15 bp, Homo sapiens
cttctccctactttc

SEQ ID NO: 54449 - DNA, 15 bp, Homo sapiens
ccttctccctacttt

SEQ ID NO: 54450 - DNA, 15 bp, Homo sapiens
cccttctccctactt

SEQ ID NO: 54451 - DNA, 15 bp, Homo sapiens
ccccttctccctact

SEQ ID NO: 54452 - DNA, 15 bp, Homo sapiens
accccttctccctac

SEQ ID NO: 54453 - DNA, 15 bp, Homo sapiens
taccccttctcccta

SEQ ID NO: 54454 - DNA, 15 bp, Homo sapiens
ttaccccttctccct

SEQ ID NO: 54455 - DNA, 15 bp, Homo sapiens
attaccccttctccc

SEQ ID NO: 54456 - DNA, 15 bp, Homo sapiens
tattaccccttctcc

SEQ ID NO: 54457 - DNA, 15 bp, Homo sapiens
ttattaccccttctc

SEQ ID NO: 54458 - DNA, 15 bp, Homo sapiens
tttattaccccttct

SEQ ID NO: 54459 - DNA, 15 bp, Homo sapiens
ctttattaccccttc

SEQ ID NO: 54460 - DNA, 15 bp, Homo sapiens
cctttattacccctt

SEQ ID NO: 54461 - DNA, 15 bp, Homo sapiens
tcctttattacccct

SEQ ID NO: 54462 - DNA, 15 bp, Homo sapiens
ttcctttattacccc

SEQ ID NO: 54463 - DNA, 15 bp, Homo sapiens
cttcctttattaccc

SEQ ID NO: 54464 - DNA, 15 bp, Homo sapiens
gcttcctttattacc

SEQ ID NO: 54465 - DNA, 15 bp, Homo sapiens
agcttcctttattac

SEQ ID NO: 54466 - DNA, 15 bp, Homo sapiens
cagcttcctttatta

SEQ ID NO: 54467 - DNA, 15 bp, Homo sapiens
tcagcttcctttatt

SEQ ID NO: 54468 - DNA, 15 bp, Homo sapiens
ctcagcttcctttat

SEQ ID NO: 54469 - DNA, 15 bp, Homo sapiens
tctcagcttccttta

SEQ ID NO: 54470 - DNA, 15 bp, Homo sapiens
ctctcagcttccttt

SEQ ID NO: 54471 - DNA, 15 bp, Homo sapiens
tctctcagcttcctt

SEQ ID NO: 54472 - DNA, 15 bp, Homo sapiens
atctctcagcttcct

SEQ ID NO: 54473 - DNA, 15 bp, Homo sapiens
gatctctcagcttcc

SEQ ID NO: 54474 - DNA, 15 bp, Homo sapiens
tgatctctcagcttc

SEQ ID NO: 54475 - DNA, 15 bp, Homo sapiens
ctgatctctcagctt

SEQ ID NO: 54476 - DNA, 15 bp, Homo sapiens
actgatctctcagct

SEQ ID NO: 54477 - DNA, 15 bp, Homo sapiens
aactgatctctcagc

SEQ ID NO: 54478 - DNA, 15 bp, Homo sapiens
taactgatctctcag

SEQ ID NO: 54479 - DNA, 15 bp, Homo sapiens
ttaactgatctctca

SEQ ID NO: 54480 - DNA, 15 bp, Homo sapiens
cttaactgatctctc

SEQ ID NO: 54481 - DNA, 15 bp, Homo sapiens
tcttaactgatctct

SEQ ID NO: 54482 - DNA, 15 bp, Homo sapiens
ctcttaactgatctc

SEQ ID NO: 54483 - DNA, 15 bp, Homo sapiens
cctcttaactgatct

SEQ ID NO: 54484 - DNA, 15 bp, Homo sapiens
acctcttaactgatc

SEQ ID NO: 54485 - DNA, 15 bp, Homo sapiens
tacctcttaactgat

SEQ ID NO: 54486 - DNA, 15 bp, Homo sapiens
gtacctcttaactga

SEQ ID NO: 54487 - DNA, 15 bp, Homo sapiens
agtacctcttaactg

SEQ ID NO: 54488 - DNA, 15 bp, Homo sapiens
aagtacctcttaact

SEQ ID NO: 54489 - DNA, 15 bp, Homo sapiens
caagtacctcttaac

SEQ ID NO: 54490 - DNA, 15 bp, Homo sapiens
tcaagtacctcttaa

SEQ ID NO: 54491 - DNA, 15 bp, Homo sapiens
ttcaagtacctctta

SEQ ID NO: 54492 - DNA, 15 bp, Homo sapiens
attcaagtacctctt

SEQ ID NO: 54493 - DNA, 15 bp, Homo sapiens
tattcaagtacctct

SEQ ID NO: 54494 - DNA, 15 bp, Homo sapiens
ctattcaagtacctc

SEQ ID NO: 54495 - DNA, 15 bp, Homo sapiens
actattcaagtacct

SEQ ID NO: 54496 - DNA, 15 bp, Homo sapiens
aactattcaagtacc

SEQ ID NO: 54497 - DNA, 15 bp, Homo sapiens
aaactattcaagtac

SEQ ID NO: 54498 - DNA, 15 bp, Homo sapiens
taaactattcaagta

SEQ ID NO: 54499 - DNA, 15 bp, Homo sapiens
ctaaactattcaagt

SEQ ID NO: 54500 - DNA, 15 bp, Homo sapiens
actaaactattcaag

SEQ ID NO: 54501 - DNA, 15 bp, Homo sapiens
tactaaactattcaa

SEQ ID NO: 54502 - DNA, 15 bp, Homo sapiens
ttactaaactattca

SEQ ID NO: 54503 - DNA, 15 bp, Homo sapiens
tttactaaactattc

SEQ ID NO: 54504 - DNA, 15 bp, Homo sapiens
ctttactaaactatt

SEQ ID NO: 54505 - DNA, 15 bp, Homo sapiens
tctttactaaactat

SEQ ID NO: 54506 - DNA, 15 bp, Homo sapiens
atctttactaaacta

SEQ ID NO: 54507 - DNA, 15 bp, Homo sapiens
catctttactaaact

SEQ ID NO: 54508 - DNA, 15 bp, Homo sapiens
tcatctttactaaac

SEQ ID NO: 54509 - DNA, 15 bp, Homo sapiens
ctcatctttactaaa

SEQ ID NO: 54510 - DNA, 15 bp, Homo sapiens
tctcatctttactaa

SEQ ID NO: 54511 - DNA, 15 bp, Homo sapiens
ctctcatctttacta

SEQ ID NO: 54512 - DNA, 15 bp, Homo sapiens
tctctcatctttact

SEQ ID NO: 54513 - DNA, 15 bp, Homo sapiens
ttctctcatctttac

SEQ ID NO: 54514 - DNA, 15 bp, Homo sapiens
cttctctcatcttta

SEQ ID NO: 54515 - DNA, 15 bp, Homo sapiens
tcttctctcatcttt

SEQ ID NO: 54516 - DNA, 15 bp, Homo sapiens
atcttctctcatctt

SEQ ID NO: 54517 - DNA, 15 bp, Homo sapiens
catcttctctcatct

SEQ ID NO: 54518 - DNA, 15 bp, Homo sapiens
acatcttctctcatc

SEQ ID NO: 54519 - DNA, 15 bp, Homo sapiens
aacatcttctctcat

SEQ ID NO: 54520 - DNA, 15 bp, Homo sapiens
aaacatcttctctca

SEQ ID NO: 54521 - DNA, 15 bp, Homo sapiens
caaacatcttctctc

SEQ ID NO: 54522 - DNA, 15 bp, Homo sapiens
gcaaacatcttctct

SEQ ID NO: 54523 - DNA, 15 bp, Homo sapiens
agcaaacatcttctc

SEQ ID NO: 54524 - DNA, 15 bp, Homo sapiens
aagcaaacatcttct

SEQ ID NO: 54525 - DNA, 15 bp, Homo sapiens
gaagcaaacatcttc

SEQ ID NO: 54526 - DNA, 15 bp, Homo sapiens
agaagcaaacatctt

SEQ ID NO: 54527 - DNA, 15 bp, Homo sapiens
aagaagcaaacatct

SEQ ID NO: 54528 - DNA, 15 bp, Homo sapiens
caagaagcaaacatc

SEQ ID NO: 54529 - DNA, 15 bp, Homo sapiens
acaagaagcaaacat

SEQ ID NO: 54530 - DNA, 15 bp, Homo sapiens
aacaagaagcaaaca

SEQ ID NO: 54531 - DNA, 15 bp, Homo sapiens
caacaagaagcaaac

SEQ ID NO: 54532 - DNA, 15 bp, Homo sapiens
gcaacaagaagcaaa

SEQ ID NO: 54533 - DNA, 15 bp, Homo sapiens
ggcaacaagaagcaa

SEQ ID NO: 54534 - DNA, 15 bp, Homo sapiens
gggcaacaagaagca

SEQ ID NO: 54535 - DNA, 15 bp, Homo sapiens
ggggcaacaagaagc

SEQ ID NO: 54536 - DNA, 15 bp, Homo sapiens
aggggcaacaagaag

SEQ ID NO: 54537 - DNA, 15 bp, Homo sapiens
gaggggcaacaagaa

SEQ ID NO: 54538 - DNA, 15 bp, Homo sapiens
tgaggggcaacaaga

SEQ ID NO: 54539 - DNA, 15 bp, Homo sapiens
gtgaggggcaacaag

SEQ ID NO: 54540 - DNA, 15 bp, Homo sapiens
agtgaggggcaacaa

SEQ ID NO: 54541 - DNA, 15 bp, Homo sapiens
cagtgaggggcaaca

SEQ ID NO: 54542 - DNA, 15 bp, Homo sapiens
gcagtgaggggcaac

SEQ ID NO: 54543 - DNA, 15 bp, Homo sapiens
agcagtgaggggcaa

SEQ ID NO: 54544 - DNA, 15 bp, Homo sapiens
aagcagtgaggggca

SEQ ID NO: 54545 - DNA, 15 bp, Homo sapiens
taagcagtgaggggc

SEQ ID NO: 54546 - DNA, 15 bp, Homo sapiens
ctaagcagtgagggg

SEQ ID NO: 54547 - DNA, 15 bp, Homo sapiens
tctaagcagtgaggg

SEQ ID NO: 54548 - DNA, 15 bp, Homo sapiens
ttctaagcagtgagg

SEQ ID NO: 54549 - DNA, 15 bp, Homo sapiens
attctaagcagtgag

SEQ ID NO: 54550 - DNA, 15 bp, Homo sapiens
tattctaagcagtga

SEQ ID NO: 54551 - DNA, 15 bp, Homo sapiens
ctattctaagcagtg

SEQ ID NO: 54552 - DNA, 15 bp, Homo sapiens
actattctaagcagt

SEQ ID NO: 54553 - DNA, 15 bp, Homo sapiens
cactattctaagcag

SEQ ID NO: 54554 - DNA, 15 bp, Homo sapiens
ccactattctaagca

SEQ ID NO: 54555 - DNA, 15 bp, Homo sapiens
gccactattctaagc

SEQ ID NO: 54556 - DNA, 15 bp, Homo sapiens
tgccactattctaag

SEQ ID NO: 54557 - DNA, 15 bp, Homo sapiens
ctgccactattctaa

SEQ ID NO: 54558 - DNA, 15 bp, Homo sapiens
actgccactattcta

SEQ ID NO: 54559 - DNA, 15 bp, Homo sapiens
cactgccactattct

SEQ ID NO: 54560 - DNA, 15 bp, Homo sapiens
tcactgccactattc

SEQ ID NO: 54561 - DNA, 15 bp, Homo sapiens
ttcactgccactatt

SEQ ID NO: 54562 - DNA, 15 bp, Homo sapiens
cttcactgccactat

SEQ ID NO: 54563 - DNA, 15 bp, Homo sapiens
ccttcactgccacta

SEQ ID NO: 54564 - DNA, 15 bp, Homo sapiens
cccttcactgccact

SEQ ID NO: 54565 - DNA, 15 bp, Homo sapiens
acccttcactgccac

SEQ ID NO: 54566 - DNA, 15 bp, Homo sapiens
tacccttcactgcca

SEQ ID NO: 54567 - DNA, 15 bp, Homo sapiens
ttacccttcactgcc

SEQ ID NO: 54568 - DNA, 15 bp, Homo sapiens
gttacccttcactgc

SEQ ID NO: 54569 - DNA, 15 bp, Homo sapiens
tgttacccttcactg

SEQ ID NO: 54570 - DNA, 15 bp, Homo sapiens
ttgttacccttcact

SEQ ID NO: 54571 - DNA, 15 bp, Homo sapiens
cttgttacccttcac

SEQ ID NO: 54572 - DNA, 15 bp, Homo sapiens
tcttgttacccttca

SEQ ID NO: 54573 - DNA, 15 bp, Homo sapiens
ttcttgttacccttc

SEQ ID NO: 54574 - DNA, 15 bp, Homo sapiens
cttcttgttaccctt

SEQ ID NO: 54575 - DNA, 15 bp, Homo sapiens
gcttcttgttaccct

SEQ ID NO: 54576 - DNA, 15 bp, Homo sapiens
agcttcttgttaccc

SEQ ID NO: 54577 - DNA, 15 bp, Homo sapiens
cagcttcttgttacc

SEQ ID NO: 54578 - DNA, 15 bp, Homo sapiens
acagcttcttgttac

SEQ ID NO: 54579 - DNA, 15 bp, Homo sapiens
gacagcttcttgtta

SEQ ID NO: 54580 - DNA, 15 bp, Homo sapiens
tgacagcttcttgtt

SEQ ID NO: 54581 - DNA, 15 bp, Homo sapiens
ctgacagcttcttgt

SEQ ID NO: 54582 - DNA, 15 bp, Homo sapiens
tctgacagcttcttg

SEQ ID NO: 54583 - DNA, 15 bp, Homo sapiens
atctgacagcttctt

SEQ ID NO: 54584 - DNA, 15 bp, Homo sapiens
aatctgacagcttct

SEQ ID NO: 54585 - DNA, 15 bp, Homo sapiens
taatctgacagcttc

SEQ ID NO: 54586 - DNA, 15 bp, Homo sapiens
ttaatctgacagctt

SEQ ID NO: 54587 - DNA, 15 bp, Homo sapiens
gttaatctgacagct

SEQ ID NO: 54588 - DNA, 15 bp, Homo sapiens
agttaatctgacagc

SEQ ID NO: 54589 - DNA, 15 bp, Homo sapiens
aagttaatctgacag

SEQ ID NO: 54590 - DNA, 15 bp, Homo sapiens
taagttaatctgaca

SEQ ID NO: 54591 - DNA, 15 bp, Homo sapiens
ttaagttaatctgac

SEQ ID NO: 54592 - DNA, 15 bp, Homo sapiens
tttaagttaatctga

SEQ ID NO: 54593 - DNA, 15 bp, Homo sapiens
ctttaagttaatctg

SEQ ID NO: 54594 - DNA, 15 bp, Homo sapiens
tctttaagttaatct

SEQ ID NO: 54595 - DNA, 15 bp, Homo sapiens
ctctttaagttaatc

SEQ ID NO: 54596 - DNA, 15 bp, Homo sapiens
actctttaagttaat

SEQ ID NO: 54597 - DNA, 15 bp, Homo sapiens
aactctttaagttaa

SEQ ID NO: 54598 - DNA, 15 bp, Homo sapiens
aaactctttaagtta

SEQ ID NO: 54599 - DNA, 15 bp, Homo sapiens
taaactctttaagtt

SEQ ID NO: 54600 - DNA, 15 bp, Homo sapiens
gtaaactctttaagt

SEQ ID NO: 54601 - DNA, 15 bp, Homo sapiens
agtaaactctttaag

SEQ ID NO: 54602 - DNA, 15 bp, Homo sapiens
cagtaaactctttaa

SEQ ID NO: 54603 - DNA, 15 bp, Homo sapiens
tcagtaaactcttta

SEQ ID NO: 54604 - DNA, 15 bp, Homo sapiens
atcagtaaactcttt

SEQ ID NO: 54605 - DNA, 15 bp, Homo sapiens
catcagtaaactctt

SEQ ID NO: 54606 - DNA, 15 bp, Homo sapiens
gcatcagtaaactct

SEQ ID NO: 54607 - DNA, 15 bp, Homo sapiens
tgcatcagtaaactc

SEQ ID NO: 54608 - DNA, 15 bp, Homo sapiens
ctgcatcagtaaact

SEQ ID NO: 54609 - DNA, 15 bp, Homo sapiens
actgcatcagtaaac

SEQ ID NO: 54610 - DNA, 15 bp, Homo sapiens
cactgcatcagtaaa

SEQ ID NO: 54611 - DNA, 15 bp, Homo sapiens
ccactgcatcagtaa

SEQ ID NO: 54612 - DNA, 15 bp, Homo sapiens
tccactgcatcagta

SEQ ID NO: 54613 - DNA, 15 bp, Homo sapiens
atccactgcatcagt

SEQ ID NO: 54614 - DNA, 15 bp, Homo sapiens
catccactgcatcag

SEQ ID NO: 54615 - DNA, 15 bp, Homo sapiens
acatccactgcatca

SEQ ID NO: 54616 - DNA, 15 bp, Homo sapiens
aacatccactgcatc

SEQ ID NO: 54617 - DNA, 15 bp, Homo sapiens
caacatccactgcat

SEQ ID NO: 54618 - DNA, 15 bp, Homo sapiens
ccaacatccactgca

SEQ ID NO: 54619 - DNA, 15 bp, Homo sapiens
accaacatccactgc

SEQ ID NO: 54620 - DNA, 15 bp, Homo sapiens
aaccaacatccactg

SEQ ID NO: 54621 - DNA, 15 bp, Homo sapiens
caaccaacatccact

SEQ ID NO: 54622 - DNA, 15 bp, Homo sapiens
acaaccaacatccac

SEQ ID NO: 54623 - DNA, 15 bp, Homo sapiens
tacaaccaacatcca

SEQ ID NO: 54624 - DNA, 15 bp, Homo sapiens
ttacaaccaacatcc

SEQ ID NO: 54625 - DNA, 15 bp, Homo sapiens
cttacaaccaacatc

SEQ ID NO: 54626 - DNA, 15 bp, Homo sapiens
tcttacaaccaacat

SEQ ID NO: 54627 - DNA, 15 bp, Homo sapiens
ctcttacaaccaaca

SEQ ID NO: 54628 - DNA, 15 bp, Homo sapiens
tctcttacaaccaac

SEQ ID NO: 54629 - DNA, 15 bp, Homo sapiens
ttctcttacaaccaa

SEQ ID NO: 54630 - DNA, 15 bp, Homo sapiens
cttctcttacaacca

SEQ ID NO: 54631 - DNA, 15 bp, Homo sapiens
tcttctcttacaacc

SEQ ID NO: 54632 - DNA, 15 bp, Homo sapiens
ttcttctcttacaac

SEQ ID NO: 54633 - DNA, 15 bp, Homo sapiens
attcttctcttacaa

SEQ ID NO: 54634 - DNA, 15 bp, Homo sapiens
aattcttctcttaca

SEQ ID NO: 54635 - DNA, 15 bp, Homo sapiens
caattcttctcttac

SEQ ID NO: 54636 - DNA, 15 bp, Homo sapiens
tcaattcttctctta

SEQ ID NO: 54637 - DNA, 15 bp, Homo sapiens
atcaattcttctctt

SEQ ID NO: 54638 - DNA, 15 bp, Homo sapiens
tatcaattcttctct

SEQ ID NO: 54639 - DNA, 15 bp, Homo sapiens
ttatcaattcttctc

SEQ ID NO: 54640 - DNA, 15 bp, Homo sapiens
attatcaattcttct

SEQ ID NO: 54641 - DNA, 15 bp, Homo sapiens
cattatcaattcttc

SEQ ID NO: 54642 - DNA, 15 bp, Homo sapiens
tcattatcaattctt

SEQ ID NO: 54643 - DNA, 15 bp, Homo sapiens
gtcattatcaattct

SEQ ID NO: 54644 - DNA, 15 bp, Homo sapiens
agtcattatcaattc

SEQ ID NO: 54645 - DNA, 15 bp, Homo sapiens
gagtcattatcaatt

SEQ ID NO: 54646 - DNA, 15 bp, Homo sapiens
agagtcattatcaat

SEQ ID NO: 54647 - DNA, 15 bp, Homo sapiens
aagagtcattatcaa

SEQ ID NO: 54648 - DNA, 15 bp, Homo sapiens
caagagtcattatca

SEQ ID NO: 54649 - DNA, 15 bp, Homo sapiens
ccaagagtcattatc

SEQ ID NO: 54650 - DNA, 15 bp, Homo sapiens
tccaagagtcattat

SEQ ID NO: 54651 - DNA, 15 bp, Homo sapiens
atccaagagtcatta

SEQ ID NO: 54652 - DNA, 15 bp, Homo sapiens
tatccaagagtcatt

SEQ ID NO: 54653 - DNA, 15 bp, Homo sapiens
ttatccaagagtcat

SEQ ID NO: 54654 - DNA, 15 bp, Homo sapiens
attatccaagagtca

SEQ ID NO: 54655 - DNA, 15 bp, Homo sapiens
tattatccaagagtc

SEQ ID NO: 54656 - DNA, 15 bp, Homo sapiens
ctattatccaagagt

SEQ ID NO: 54657 - DNA, 15 bp, Homo sapiens
cctattatccaagag

SEQ ID NO: 54658 - DNA, 15 bp, Homo sapiens
ccctattatccaaga

SEQ ID NO: 54659 - DNA, 15 bp, Homo sapiens
cccctattatccaag

SEQ ID NO: 54660 - DNA, 15 bp, Homo sapiens
tcccctattatccaa

SEQ ID NO: 54661 - DNA, 15 bp, Homo sapiens
ctcccctattatcca

SEQ ID NO: 54662 - DNA, 15 bp, Homo sapiens
cctcccctattatcc

SEQ ID NO: 54663 - DNA, 15 bp, Homo sapiens
ccctcccctattatc

SEQ ID NO: 54664 - DNA, 15 bp, Homo sapiens
tccctcccctattat

SEQ ID NO: 54665 - DNA, 15 bp, Homo sapiens
ctccctcccctatta

SEQ ID NO: 54666 - DNA, 15 bp, Homo sapiens
cctccctcccctatt

SEQ ID NO: 54667 - DNA, 15 bp, Homo sapiens
ccctccctcccctat

SEQ ID NO: 54668 - DNA, 15 bp, Homo sapiens
cccctccctccccta

SEQ ID NO: 54669 - DNA, 15 bp, Homo sapiens
gcccctccctcccct

SEQ ID NO: 54670 - DNA, 15 bp, Homo sapiens
agcccctccctcccc

SEQ ID NO: 54671 - DNA, 15 bp, Homo sapiens
cagcccctccctccc

SEQ ID NO: 54672 - DNA, 15 bp, Homo sapiens
acagcccctccctcc

SEQ ID NO: 54673 - DNA, 15 bp, Homo sapiens
gacagcccctccctc

SEQ ID NO: 54674 - DNA, 15 bp, Homo sapiens
tgacagcccctccct

SEQ ID NO: 54675 - DNA, 15 bp, Homo sapiens
ttgacagcccctccc

SEQ ID NO: 54676 - DNA, 15 bp, Homo sapiens
attgacagcccctcc

SEQ ID NO: 54677 - DNA, 15 bp, Homo sapiens
tattgacagcccctc

SEQ ID NO: 54678 - DNA, 15 bp, Homo sapiens
atattgacagcccct

SEQ ID NO: 54679 - DNA, 15 bp, Homo sapiens
tatattgacagcccc

SEQ ID NO: 54680 - DNA, 15 bp, Homo sapiens
ttatattgacagccc

SEQ ID NO: 54681 - DNA, 15 bp, Homo sapiens
attatattgacagcc

SEQ ID NO: 54682 - DNA, 15 bp, Homo sapiens
tattatattgacagc

SEQ ID NO: 54683 - DNA, 15 bp, Homo sapiens
atattatattgacag

SEQ ID NO: 54684 - DNA, 15 bp, Homo sapiens
tatattatattgaca

SEQ ID NO: 54685 - DNA, 15 bp, Homo sapiens
ttatattatattgac

SEQ ID NO: 54686 - DNA, 15 bp, Homo sapiens
attatattatattga

SEQ ID NO: 54687 - DNA, 15 bp, Homo sapiens
cattatattatattg

SEQ ID NO: 54688 - DNA, 15 bp, Homo sapiens
tcattatattatatt

SEQ ID NO: 54689 - DNA, 15 bp, Homo sapiens
ttcattatattatat

SEQ ID NO: 54690 - DNA, 15 bp, Homo sapiens
cttcattatattata

SEQ ID NO: 54691 - DNA, 15 bp, Homo sapiens
tcttcattatattat

SEQ ID NO: 54692 - DNA, 15 bp, Homo sapiens
ttcttcattatatta

SEQ ID NO: 54693 - DNA, 15 bp, Homo sapiens
cttcttcattatatt

SEQ ID NO: 54694 - DNA, 15 bp, Homo sapiens
ccttcttcattatat

SEQ ID NO: 54695 - DNA, 15 bp, Homo sapiens
cccttcttcattata

SEQ ID NO: 54696 - DNA, 15 bp, Homo sapiens
tcccttcttcattat

SEQ ID NO: 54697 - DNA, 15 bp, Homo sapiens
atcccttcttcatta

SEQ ID NO: 54698 - DNA, 15 bp, Homo sapiens
aatcccttcttcatt

SEQ ID NO: 54699 - DNA, 15 bp, Homo sapiens
aaatcccttcttcat

SEQ ID NO: 54700 - DNA, 15 bp, Homo sapiens
caaatcccttcttca

SEQ ID NO: 54701 - DNA, 15 bp, Homo sapiens
tcaaatcccttcttc

SEQ ID NO: 54702 - DNA, 15 bp, Homo sapiens
ttcaaatcccttctt

SEQ ID NO: 54703 - DNA, 15 bp, Homo sapiens
cttcaaatcccttct

SEQ ID NO: 54704 - DNA, 15 bp, Homo sapiens
acttcaaatcccttc

SEQ ID NO: 54705 - DNA, 15 bp, Homo sapiens
gacttcaaatccctt

SEQ ID NO: 54706 - DNA, 15 bp, Homo sapiens
tgacttcaaatccct

SEQ ID NO: 54707 - DNA, 15 bp, Homo sapiens
atgacttcaaatccc

SEQ ID NO: 54708 - DNA, 15 bp, Homo sapiens
aatgacttcaaatcc

SEQ ID NO: 54709 - DNA, 15 bp, Homo sapiens
aaatgacttcaaatc

SEQ ID NO: 54710 - DNA, 15 bp, Homo sapiens
gaaatgacttcaaat

SEQ ID NO: 54711 - DNA, 15 bp, Homo sapiens
agaaatgacttcaaa

SEQ ID NO: 54712 - DNA, 15 bp, Homo sapiens
cagaaatgacttcaa

SEQ ID NO: 54713 - DNA, 15 bp, Homo sapiens
tcagaaatgacttca

SEQ ID NO: 54714 - DNA, 15 bp, Homo sapiens
atcagaaatgacttc

SEQ ID NO: 54715 - DNA, 15 bp, Homo sapiens
aatcagaaatgactt

SEQ ID NO: 54716 - DNA, 15 bp, Homo sapiens
aaatcagaaatgact

SEQ ID NO: 54717 - DNA, 15 bp, Homo sapiens
taaatcagaaatgac

SEQ ID NO: 54718 - DNA, 15 bp, Homo sapiens
ttaaatcagaaatga

SEQ ID NO: 54719 - DNA, 15 bp, Homo sapiens
tttaaatcagaaatg

SEQ ID NO: 54720 - DNA, 15 bp, Homo sapiens
atttaaatcagaaat

SEQ ID NO: 54721 - DNA, 15 bp, Homo sapiens
gatttaaatcagaaa

SEQ ID NO: 54722 - DNA, 15 bp, Homo sapiens
agatttaaatcagaa

SEQ ID NO: 54723 - DNA, 15 bp, Homo sapiens
gagatttaaatcaga

SEQ ID NO: 54724 - DNA, 15 bp, Homo sapiens
tgagatttaaatcag

SEQ ID NO: 54725 - DNA, 15 bp, Homo sapiens
gtgagatttaaatca

SEQ ID NO: 54726 - DNA, 15 bp, Homo sapiens
tgtgagatttaaatc

SEQ ID NO: 54727 - DNA, 15 bp, Homo sapiens
atgtgagatttaaat

SEQ ID NO: 54728 - DNA, 15 bp, Homo sapiens
gatgtgagatttaaa

SEQ ID NO: 54729 - DNA, 15 bp, Homo sapiens
ggatgtgagatttaa

SEQ ID NO: 54730 - DNA, 15 bp, Homo sapiens
tggatgtgagattta

SEQ ID NO: 54731 - DNA, 15 bp, Homo sapiens
gtggatgtgagattt

SEQ ID NO: 54732 - DNA, 15 bp, Homo sapiens
agtggatgtgagatt

SEQ ID NO: 54733 - DNA, 15 bp, Homo sapiens
tagtggatgtgagat

SEQ ID NO: 54734 - DNA, 15 bp, Homo sapiens
gtagtggatgtgaga

SEQ ID NO: 54735 - DNA, 15 bp, Homo sapiens
ggtagtggatgtgag

SEQ ID NO: 54736 - DNA, 15 bp, Homo sapiens
aggtagtggatgtga

SEQ ID NO: 54737 - DNA, 15 bp, Homo sapiens
taggtagtggatgtg

SEQ ID NO: 54738 - DNA, 15 bp, Homo sapiens
gtaggtagtggatgt

SEQ ID NO: 54739 - DNA, 15 bp, Homo sapiens
agtaggtagtggatg

SEQ ID NO: 54740 - DNA, 15 bp, Homo sapiens
aagtaggtagtggat

SEQ ID NO: 54741 - DNA, 15 bp, Homo sapiens
aaagtaggtagtgga

SEQ ID NO: 54742 - DNA, 15 bp, Homo sapiens
aaaagtaggtagtgg

SEQ ID NO: 54743 - DNA, 15 bp, Homo sapiens
taaaagtaggtagtg

SEQ ID NO: 54744 - DNA, 15 bp, Homo sapiens
ttaaaagtaggtagt

SEQ ID NO: 54745 - DNA, 15 bp, Homo sapiens
attaaaagtaggtag

SEQ ID NO: 54746 - DNA, 15 bp, Homo sapiens
tattaaaagtaggta

SEQ ID NO: 54747 - DNA, 15 bp, Homo sapiens
ctattaaaagtaggt

SEQ ID NO: 54748 - DNA, 15 bp, Homo sapiens
tctattaaaagtagg

SEQ ID NO: 54749 - DNA, 15 bp, Homo sapiens
atctattaaaagtag

SEQ ID NO: 54750 - DNA, 15 bp, Homo sapiens
tatctattaaaagta

SEQ ID NO: 54751 - DNA, 15 bp, Homo sapiens
atatctattaaaagt

SEQ ID NO: 54752 - DNA, 15 bp, Homo sapiens
catatctattaaaag

SEQ ID NO: 54753 - DNA, 15 bp, Homo sapiens
acatatctattaaaa

SEQ ID NO: 54754 - DNA, 15 bp, Homo sapiens
tacatatctattaaa

SEQ ID NO: 54755 - DNA, 15 bp, Homo sapiens
ctacatatctattaa

SEQ ID NO: 54756 - DNA, 15 bp, Homo sapiens
gctacatatctatta

SEQ ID NO: 54757 - DNA, 15 bp, Homo sapiens
ggctacatatctatt

SEQ ID NO: 54758 - DNA, 15 bp, Homo sapiens
aggctacatatctat

SEQ ID NO: 54759 - DNA, 15 bp, Homo sapiens
aaggctacatatcta

SEQ ID NO: 54760 - DNA, 15 bp, Homo sapiens
aaaggctacatatct

SEQ ID NO: 54761 - DNA, 15 bp, Homo sapiens
taaaggctacatatc

SEQ ID NO: 54762 - DNA, 15 bp, Homo sapiens
ttaaaggctacatat

SEQ ID NO: 54763 - DNA, 15 bp, Homo sapiens
gttaaaggctacata

SEQ ID NO: 54764 - DNA, 15 bp, Homo sapiens
tgttaaaggctacat

SEQ ID NO: 54765 - DNA, 15 bp, Homo sapiens
ttgttaaaggctaca

SEQ ID NO: 54766 - DNA, 15 bp, Homo sapiens
cttgttaaaggctac

SEQ ID NO: 54767 - DNA, 15 bp, Homo sapiens
acttgttaaaggcta

SEQ ID NO: 54768 - DNA, 15 bp, Homo sapiens
aacttgttaaaggct

SEQ ID NO: 54769 - DNA, 15 bp, Homo sapiens
gaacttgttaaaggc

SEQ ID NO: 54770 - DNA, 15 bp, Homo sapiens
ggaacttgttaaagg

SEQ ID NO: 54771 - DNA, 15 bp, Homo sapiens
gggaacttgttaaag

SEQ ID NO: 54772 - DNA, 15 bp, Homo sapiens
agggaacttgttaaa

SEQ ID NO: 54773 - DNA, 15 bp, Homo sapiens
tagggaacttgttaa

SEQ ID NO: 54774 - DNA, 15 bp, Homo sapiens
ttagggaacttgtta

SEQ ID NO: 54775 - DNA, 15 bp, Homo sapiens
gttagggaacttgtt

SEQ ID NO: 54776 - DNA, 15 bp, Homo sapiens
ggttagggaacttgt

SEQ ID NO: 54777 - DNA, 15 bp, Homo sapiens
aggttagggaacttg

SEQ ID NO: 54778 - DNA, 15 bp, Homo sapiens
aaggttagggaactt

SEQ ID NO: 54779 - DNA, 15 bp, Homo sapiens
aaaggttagggaact

SEQ ID NO: 54780 - DNA, 15 bp, Homo sapiens
gaaaggttagggaac

SEQ ID NO: 54781 - DNA, 15 bp, Homo sapiens
agaaaggttagggaa

SEQ ID NO: 54782 - DNA, 15 bp, Homo sapiens
cagaaaggttaggga

SEQ ID NO: 54783 - DNA, 15 bp, Homo sapiens
ccagaaaggttaggg

SEQ ID NO: 54784 - DNA, 15 bp, Homo sapiens
cccagaaaggttagg

SEQ ID NO: 54785 - DNA, 15 bp, Homo sapiens
gcccagaaaggttag

SEQ ID NO: 54786 - DNA, 15 bp, Homo sapiens
ggcccagaaaggtta

SEQ ID NO: 54787 - DNA, 15 bp, Homo sapiens
aggcccagaaaggtt

SEQ ID NO: 54788 - DNA, 15 bp, Homo sapiens
aaggcccagaaaggt

SEQ ID NO: 54789 - DNA, 15 bp, Homo sapiens
taaggcccagaaagg

SEQ ID NO: 54790 - DNA, 15 bp, Homo sapiens
ctaaggcccagaaag

SEQ ID NO: 54791 - DNA, 15 bp, Homo sapiens
gctaaggcccagaaa

SEQ ID NO: 54792 - DNA, 15 bp, Homo sapiens
agctaaggcccagaa

SEQ ID NO: 54793 - DNA, 15 bp, Homo sapiens
tagctaaggcccaga

SEQ ID NO: 54794 - DNA, 15 bp, Homo sapiens
gtagctaaggcccag

SEQ ID NO: 54795 - DNA, 15 bp, Homo sapiens
ggtagctaaggccca

SEQ ID NO: 54796 - DNA, 15 bp, Homo sapiens
aggtagctaaggccc

SEQ ID NO: 54797 - DNA, 15 bp, Homo sapiens
gaggtagctaaggcc

SEQ ID NO: 54798 - DNA, 15 bp, Homo sapiens
ggaggtagctaaggc

SEQ ID NO: 54799 - DNA, 15 bp, Homo sapiens
gggaggtagctaagg

SEQ ID NO: 54800 - DNA, 15 bp, Homo sapiens
ggggaggtagctaag

SEQ ID NO: 54801 - DNA, 15 bp, Homo sapiens
aggggaggtagctaa

SEQ ID NO: 54802 - DNA, 15 bp, Homo sapiens
aaggggaggtagcta

SEQ ID NO: 54803 - DNA, 15 bp, Homo sapiens
caaggggaggtagct

SEQ ID NO: 54804 - DNA, 15 bp, Homo sapiens
ccaaggggaggtagc

SEQ ID NO: 54805 - DNA, 15 bp, Homo sapiens
tccaaggggaggtag

SEQ ID NO: 54806 - DNA, 15 bp, Homo sapiens
ttccaaggggaggta

SEQ ID NO: 54807 - DNA, 15 bp, Homo sapiens
tttccaaggggaggt

SEQ ID NO: 54808 - DNA, 15 bp, Homo sapiens
atttccaaggggagg

SEQ ID NO: 54809 - DNA, 15 bp, Homo sapiens
catttccaaggggag

SEQ ID NO: 54810 - DNA, 15 bp, Homo sapiens
ccatttccaagggga

SEQ ID NO: 54811 - DNA, 15 bp, Homo sapiens
tccatttccaagggg

SEQ ID NO: 54812 - DNA, 15 bp, Homo sapiens
ttccatttccaaggg

SEQ ID NO: 54813 - DNA, 15 bp, Homo sapiens
tttccatttccaagg

SEQ ID NO: 54814 - DNA, 15 bp, Homo sapiens
atttccatttccaag

SEQ ID NO: 54815 - DNA, 15 bp, Homo sapiens
tatttccatttccaa

SEQ ID NO: 54816 - DNA, 15 bp, Homo sapiens
gtatttccatttcca

SEQ ID NO: 54817 - DNA, 15 bp, Homo sapiens
ggtatttccatttcc

SEQ ID NO: 54818 - DNA, 15 bp, Homo sapiens
aggtatttccatttc

SEQ ID NO: 54819 - DNA, 15 bp, Homo sapiens
taggtatttccattt

SEQ ID NO: 54820 - DNA, 15 bp, Homo sapiens
ttaggtatttccatt

SEQ ID NO: 54821 - DNA, 15 bp, Homo sapiens
gttaggtatttccat

SEQ ID NO: 54822 - DNA, 15 bp, Homo sapiens
tgttaggtatttcca

SEQ ID NO: 54823 - DNA, 15 bp, Homo sapiens
atgttaggtatttcc

SEQ ID NO: 54824 - DNA, 15 bp, Homo sapiens
catgttaggtatttc

SEQ ID NO: 54825 - DNA, 15 bp, Homo sapiens
acatgttaggtattt

SEQ ID NO: 54826 - DNA, 15 bp, Homo sapiens
tacatgttaggtatt

SEQ ID NO: 54827 - DNA, 15 bp, Homo sapiens
ttacatgttaggtat

SEQ ID NO: 54828 - DNA, 15 bp, Homo sapiens
cttacatgttaggta

SEQ ID NO: 54829 - DNA, 15 bp, Homo sapiens
ccttacatgttaggt

SEQ ID NO: 54830 - DNA, 15 bp, Homo sapiens
accttacatgttagg

SEQ ID NO: 54831 - DNA, 15 bp, Homo sapiens
aaccttacatgttag

SEQ ID NO: 54832 - DNA, 15 bp, Homo sapiens
caaccttacatgtta

SEQ ID NO: 54833 - DNA, 15 bp, Homo sapiens
acaaccttacatgtt

SEQ ID NO: 54834 - DNA, 15 bp, Homo sapiens
aacaaccttacatgt

SEQ ID NO: 54835 - DNA, 15 bp, Homo sapiens
aaacaaccttacatg

SEQ ID NO: 54836 - DNA, 15 bp, Homo sapiens
aaaacaaccttacat

SEQ ID NO: 54837 - DNA, 15 bp, Homo sapiens
caaaacaaccttaca

SEQ ID NO: 54838 - DNA, 15 bp, Homo sapiens
tcaaaacaaccttac

SEQ ID NO: 54839 - DNA, 15 bp, Homo sapiens
gtcaaaacaacctta

SEQ ID NO: 54840 - DNA, 15 bp, Homo sapiens
tgtcaaaacaacctt

SEQ ID NO: 54841 - DNA, 15 bp, Homo sapiens
ctgtcaaaacaacct

SEQ ID NO: 54842 - DNA, 15 bp, Homo sapiens
actgtcaaaacaacc

SEQ ID NO: 54843 - DNA, 15 bp, Homo sapiens
aactgtcaaaacaac

SEQ ID NO: 54844 - DNA, 15 bp, Homo sapiens
taactgtcaaaacaa

SEQ ID NO: 54845 - DNA, 15 bp, Homo sapiens
ataactgtcaaaaca

SEQ ID NO: 54846 - DNA, 15 bp, Homo sapiens
aataactgtcaaaac

SEQ ID NO: 54847 - DNA, 15 bp, Homo sapiens
aaataactgtcaaaa

SEQ ID NO: 54848 - DNA, 15 bp, Homo sapiens
aaaataactgtcaaa

SEQ ID NO: 54849 - DNA, 15 bp, Homo sapiens
gaaaataactgtcaa

SEQ ID NO: 54850 - DNA, 15 bp, Homo sapiens
tgaaaataactgtca

SEQ ID NO: 54851 - DNA, 15 bp, Homo sapiens
gtgaaaataactgtc

SEQ ID NO: 54852 - DNA, 15 bp, Homo sapiens
agtgaaaataactgt

SEQ ID NO: 54853 - DNA, 15 bp, Homo sapiens
tagtgaaaataactg

SEQ ID NO: 54854 - DNA, 15 bp, Homo sapiens
ctagtgaaaataact

SEQ ID NO: 54855 - DNA, 15 bp, Homo sapiens
cctagtgaaaataac

SEQ ID NO: 54856 - DNA, 15 bp, Homo sapiens
gcctagtgaaaataa

SEQ ID NO: 54857 - DNA, 15 bp, Homo sapiens
tgcctagtgaaaata

SEQ ID NO: 54858 - DNA, 15 bp, Homo sapiens
atgcctagtgaaaat

SEQ ID NO: 54859 - DNA, 15 bp, Homo sapiens
catgcctagtgaaaa

SEQ ID NO: 54860 - DNA, 15 bp, Homo sapiens
acatgcctagtgaaa

SEQ ID NO: 54861 - DNA, 15 bp, Homo sapiens
tacatgcctagtgaa

SEQ ID NO: 54862 - DNA, 15 bp, Homo sapiens
ttacatgcctagtga

SEQ ID NO: 54863 - DNA, 15 bp, Homo sapiens
tttacatgcctagtg

SEQ ID NO: 54864 - DNA, 15 bp, Homo sapiens
ctttacatgcctagt

SEQ ID NO: 54865 - DNA, 15 bp, Homo sapiens
cctttacatgcctag

SEQ ID NO: 54866 - DNA, 15 bp, Homo sapiens
gcctttacatgccta

SEQ ID NO: 54867 - DNA, 15 bp, Homo sapiens
tgcctttacatgcct

SEQ ID NO: 54868 - DNA, 15 bp, Homo sapiens
gtgcctttacatgcc

SEQ ID NO: 54869 - DNA, 15 bp, Homo sapiens
agtgcctttacatgc

SEQ ID NO: 54870 - DNA, 15 bp, Homo sapiens
aagtgcctttacatg

SEQ ID NO: 54871 - DNA, 15 bp, Homo sapiens
caagtgcctttacat

SEQ ID NO: 54872 - DNA, 15 bp, Homo sapiens
tcaagtgcctttaca

SEQ ID NO: 54873 - DNA, 15 bp, Homo sapiens
gtcaagtgcctttac

SEQ ID NO: 54874 - DNA, 15 bp, Homo sapiens
agtcaagtgccttta

SEQ ID NO: 54875 - DNA, 15 bp, Homo sapiens
gagtcaagtgccttt

SEQ ID NO: 54876 - DNA, 15 bp, Homo sapiens
agagtcaagtgcctt

SEQ ID NO: 54877 - DNA, 15 bp, Homo sapiens
gagagtcaagtgcct

SEQ ID NO: 54878 - DNA, 15 bp, Homo sapiens
agagagtcaagtgcc

SEQ ID NO: 54879 - DNA, 15 bp, Homo sapiens
cagagagtcaagtgc

SEQ ID NO: 54880 - DNA, 15 bp, Homo sapiens
acagagagtcaagtg

SEQ ID NO: 54881 - DNA, 15 bp, Homo sapiens
aacagagagtcaagt

SEQ ID NO: 54882 - DNA, 15 bp, Homo sapiens
taacagagagtcaag

SEQ ID NO: 54883 - DNA, 15 bp, Homo sapiens
ataacagagagtcaa

SEQ ID NO: 54884 - DNA, 15 bp, Homo sapiens
tataacagagagtca

SEQ ID NO: 54885 - DNA, 15 bp, Homo sapiens
ctataacagagagtc

SEQ ID NO: 54886 - DNA, 15 bp, Homo sapiens
tctataacagagagt

SEQ ID NO: 54887 - DNA, 15 bp, Homo sapiens
gtctataacagagag

SEQ ID NO: 54888 - DNA, 15 bp, Homo sapiens
ggtctataacagaga

SEQ ID NO: 54889 - DNA, 15 bp, Homo sapiens
tggtctataacagag

SEQ ID NO: 54890 - DNA, 15 bp, Homo sapiens
gtggtctataacaga

SEQ ID NO: 54891 - DNA, 15 bp, Homo sapiens
agtggtctataacag

SEQ ID NO: 54892 - DNA, 15 bp, Homo sapiens
cagtggtctataaca

SEQ ID NO: 54893 - DNA, 15 bp, Homo sapiens
acagtggtctataac

SEQ ID NO: 54894 - DNA, 15 bp, Homo sapiens
tacagtggtctataa

SEQ ID NO: 54895 - DNA, 15 bp, Homo sapiens
atacagtggtctata

SEQ ID NO: 54896 - DNA, 15 bp, Homo sapiens
aatacagtggtctat

SEQ ID NO: 54897 - DNA, 15 bp, Homo sapiens
taatacagtggtcta

SEQ ID NO: 54898 - DNA, 15 bp, Homo sapiens
ataatacagtggtct

SEQ ID NO: 54899 - DNA, 15 bp, Homo sapiens
cataatacagtggtc

SEQ ID NO: 54900 - DNA, 15 bp, Homo sapiens
acataatacagtggt

SEQ ID NO: 54901 - DNA, 15 bp, Homo sapiens
aacataatacagtgg

SEQ ID NO: 54902 - DNA, 15 bp, Homo sapiens
taacataatacagtg

SEQ ID NO: 54903 - DNA, 15 bp, Homo sapiens
ttaacataatacagt

SEQ ID NO: 54904 - DNA, 15 bp, Homo sapiens
attaacataatacag

SEQ ID NO: 54905 - DNA, 15 bp, Homo sapiens
cattaacataataca

SEQ ID NO: 54906 - DNA, 15 bp, Homo sapiens
acattaacataatac

SEQ ID NO: 54907 - DNA, 15 bp, Homo sapiens
gacattaacataata

SEQ ID NO: 54908 - DNA, 15 bp, Homo sapiens
ggacattaacataat

SEQ ID NO: 54909 - DNA, 15 bp, Homo sapiens
gggacattaacataa

SEQ ID NO: 54910 - DNA, 15 bp, Homo sapiens
agggacattaacata

SEQ ID NO: 54911 - DNA, 15 bp, Homo sapiens
gagggacattaacat

SEQ ID NO: 54912 - DNA, 15 bp, Homo sapiens
agagggacattaaca

SEQ ID NO: 54913 - DNA, 15 bp, Homo sapiens
gagagggacattaac

SEQ ID NO: 54914 - DNA, 15 bp, Homo sapiens
ggagagggacattaa

SEQ ID NO: 54915 - DNA, 15 bp, Homo sapiens
aggagagggacatta

SEQ ID NO: 54916 - DNA, 15 bp, Homo sapiens
aaggagagggacatt

SEQ ID NO: 54917 - DNA, 15 bp, Homo sapiens
gaaggagagggacat

SEQ ID NO: 54918 - DNA, 15 bp, Homo sapiens
ggaaggagagggaca

SEQ ID NO: 54919 - DNA, 15 bp, Homo sapiens
aggaaggagagggac

SEQ ID NO: 54920 - DNA, 15 bp, Homo sapiens
gaggaaggagaggga

SEQ ID NO: 54921 - DNA, 15 bp, Homo sapiens
ggaggaaggagaggg

SEQ ID NO: 54922 - DNA, 15 bp, Homo sapiens
gggaggaaggagagg

SEQ ID NO: 54923 - DNA, 15 bp, Homo sapiens
agggaggaaggagag

SEQ ID NO: 54924 - DNA, 15 bp, Homo sapiens
aagggaggaaggaga

SEQ ID NO: 54925 - DNA, 15 bp, Homo sapiens
aaagggaggaaggag

SEQ ID NO: 54926 - DNA, 15 bp, Homo sapiens
taaagggaggaagga

SEQ ID NO: 54927 - DNA, 15 bp, Homo sapiens
ctaaagggaggaagg

SEQ ID NO: 54928 - DNA, 15 bp, Homo sapiens
cctaaagggaggaag

SEQ ID NO: 54929 - DNA, 15 bp, Homo sapiens
acctaaagggaggaa

SEQ ID NO: 54930 - DNA, 15 bp, Homo sapiens
tacctaaagggagga

SEQ ID NO: 54931 - DNA, 15 bp, Homo sapiens
ttacctaaagggagg

SEQ ID NO: 54932 - DNA, 15 bp, Homo sapiens
tttacctaaagggag

SEQ ID NO: 54933 - DNA, 15 bp, Homo sapiens
ctttacctaaaggga

SEQ ID NO: 54934 - DNA, 15 bp, Homo sapiens
actttacctaaaggg

SEQ ID NO: 54935 - DNA, 15 bp, Homo sapiens
aactttacctaaagg

SEQ ID NO: 54936 - DNA, 15 bp, Homo sapiens
aaactttacctaaag

SEQ ID NO: 54937 - DNA, 15 bp, Homo sapiens
aaaactttacctaaa

SEQ ID NO: 54938 - DNA, 15 bp, Homo sapiens
aaaaactttacctaa

SEQ ID NO: 54939 - DNA, 15 bp, Homo sapiens
taaaaactttaccta

SEQ ID NO: 54940 - DNA, 15 bp, Homo sapiens
ctaaaaactttacct

SEQ ID NO: 54941 - DNA, 15 bp, Homo sapiens
cctaaaaactttacc

SEQ ID NO: 54942 - DNA, 15 bp, Homo sapiens
ccctaaaaactttac

SEQ ID NO: 54943 - DNA, 15 bp, Homo sapiens
gccctaaaaacttta

SEQ ID NO: 54944 - DNA, 15 bp, Homo sapiens
agccctaaaaacttt

SEQ ID NO: 54945 - DNA, 15 bp, Homo sapiens
tagccctaaaaactt

SEQ ID NO: 54946 - DNA, 15 bp, Homo sapiens
ttagccctaaaaact

SEQ ID NO: 54947 - DNA, 15 bp, Homo sapiens
attagccctaaaaac

SEQ ID NO: 54948 - DNA, 15 bp, Homo sapiens
tattagccctaaaaa

SEQ ID NO: 54949 - DNA, 15 bp, Homo sapiens
ttattagccctaaaa

SEQ ID NO: 54950 - DNA, 15 bp, Homo sapiens
tttattagccctaaa

SEQ ID NO: 54951 - DNA, 15 bp, Homo sapiens
atttattagccctaa

SEQ ID NO: 54952 - DNA, 15 bp, Homo sapiens
gatttattagcccta

SEQ ID NO: 54953 - DNA, 15 bp, Homo sapiens
ggatttattagccct

SEQ ID NO: 54954 - DNA, 15 bp, Homo sapiens
gggatttattagccc

SEQ ID NO: 54955 - DNA, 15 bp, Homo sapiens
tgggatttattagcc

SEQ ID NO: 54956 - DNA, 15 bp, Homo sapiens
ttgggatttattagc

SEQ ID NO: 54957 - DNA, 15 bp, Homo sapiens
tttgggatttattag

SEQ ID NO: 54958 - DNA, 15 bp, Homo sapiens
atttgggatttatta

SEQ ID NO: 54959 - DNA, 15 bp, Homo sapiens
tatttgggatttatt

SEQ ID NO: 54960 - DNA, 15 bp, Homo sapiens
atatttgggatttat

SEQ ID NO: 54961 - DNA, 15 bp, Homo sapiens
gatatttgggattta

SEQ ID NO: 54962 - DNA, 15 bp, Homo sapiens
tgatatttgggattt

SEQ ID NO: 54963 - DNA, 15 bp, Homo sapiens
ttgatatttgggatt

SEQ ID NO: 54964 - DNA, 15 bp, Homo sapiens
attgatatttgggat

SEQ ID NO: 54965 - DNA, 15 bp, Homo sapiens
cattgatatttggga

SEQ ID NO: 54966 - DNA, 15 bp, Homo sapiens
acattgatatttggg

SEQ ID NO: 54967 - DNA, 15 bp, Homo sapiens
aacattgatatttgg

SEQ ID NO: 54968 - DNA, 15 bp, Homo sapiens
caacattgatatttg

SEQ ID NO: 54969 - DNA, 15 bp, Homo sapiens
tcaacattgatattt

SEQ ID NO: 54970 - DNA, 15 bp, Homo sapiens
atcaacattgatatt

SEQ ID NO: 54971 - DNA, 15 bp, Homo sapiens
gatcaacattgatat

SEQ ID NO: 54972 - DNA, 15 bp, Homo sapiens
tgatcaacattgata

SEQ ID NO: 54973 - DNA, 15 bp, Homo sapiens
ctgatcaacattgat

SEQ ID NO: 54974 - DNA, 15 bp, Homo sapiens
actgatcaacattga

SEQ ID NO: 54975 - DNA, 15 bp, Homo sapiens
tactgatcaacattg

SEQ ID NO: 54976 - DNA, 15 bp, Homo sapiens
ctactgatcaacatt

SEQ ID NO: 54977 - DNA, 15 bp, Homo sapiens
actactgatcaacat

SEQ ID NO: 54978 - DNA, 15 bp, Homo sapiens
aactactgatcaaca

SEQ ID NO: 54979 - DNA, 15 bp, Homo sapiens
aaactactgatcaac

SEQ ID NO: 54980 - DNA, 15 bp, Homo sapiens
caaactactgatcaa

SEQ ID NO: 54981 - DNA, 15 bp, Homo sapiens
acaaactactgatca

SEQ ID NO: 54982 - DNA, 15 bp, Homo sapiens
cacaaactactgatc

SEQ ID NO: 54983 - DNA, 15 bp, Homo sapiens
acacaaactactgat

SEQ ID NO: 54984 - DNA, 15 bp, Homo sapiens
aacacaaactactga

SEQ ID NO: 54985 - DNA, 15 bp, Homo sapiens
aaacacaaactactg

SEQ ID NO: 54986 - DNA, 15 bp, Homo sapiens
caaacacaaactact

SEQ ID NO: 54987 - DNA, 15 bp, Homo sapiens
acaaacacaaactac

SEQ ID NO: 54988 - DNA, 15 bp, Homo sapiens
cacaaacacaaacta

SEQ ID NO: 54989 - DNA, 15 bp, Homo sapiens
acacaaacacaaact

SEQ ID NO: 54990 - DNA, 15 bp, Homo sapiens
tacacaaacacaaac

SEQ ID NO: 54991 - DNA, 15 bp, Homo sapiens
ctacacaaacacaaa

SEQ ID NO: 54992 - DNA, 15 bp, Homo sapiens
actacacaaacacaa

SEQ ID NO: 54993 - DNA, 15 bp, Homo sapiens
cactacacaaacaca

SEQ ID NO: 54994 - DNA, 15 bp, Homo sapiens
acactacacaaacac

SEQ ID NO: 54995 - DNA, 15 bp, Homo sapiens
aacactacacaaaca

SEQ ID NO: 54996 - DNA, 15 bp, Homo sapiens
caacactacacaaac

SEQ ID NO: 54997 - DNA, 15 bp, Homo sapiens
acaacactacacaaa

SEQ ID NO: 54998 - DNA, 15 bp, Homo sapiens
aacaacactacacaa

SEQ ID NO: 54999 - DNA, 15 bp, Homo sapiens
aaacaacactacaca

SEQ ID NO: 55000 - DNA, 15 bp, Homo sapiens
taaacaacactacac

SEQ ID NO: 55001 - DNA, 15 bp, Homo sapiens
ataaacaacactaca

SEQ ID NO: 55002 - DNA, 15 bp, Homo sapiens
tataaacaacactac

SEQ ID NO: 55003 - DNA, 15 bp, Homo sapiens
atataaacaacacta

SEQ ID NO: 55004 - DNA, 15 bp, Homo sapiens
gatataaacaacact

SEQ ID NO: 55005 - DNA, 15 bp, Homo sapiens
tgatataaacaacac

SEQ ID NO: 55006 - DNA, 15 bp, Homo sapiens
ttgatataaacaaca

SEQ ID NO: 55007 - DNA, 15 bp, Homo sapiens
tttgatataaacaac

SEQ ID NO: 55008 - DNA, 15 bp, Homo sapiens
ttttgatataaacaa

SEQ ID NO: 55009 - DNA, 15 bp, Homo sapiens
tttttgatataaaca

SEQ ID NO: 55010 - DNA, 15 bp, Homo sapiens
gtttttgatataaac

SEQ ID NO: 55011 - DNA, 15 bp, Homo sapiens
agtttttgatataaa

SEQ ID NO: 55012 - DNA, 15 bp, Homo sapiens
tagtttttgatataa

SEQ ID NO: 55013 - DNA, 15 bp, Homo sapiens
gtagtttttgatata

SEQ ID NO: 55014 - DNA, 15 bp, Homo sapiens
tgtagtttttgatat

SEQ ID NO: 55015 - DNA, 15 bp, Homo sapiens
atgtagtttttgata

SEQ ID NO: 55016 - DNA, 15 bp, Homo sapiens
aatgtagtttttgat

SEQ ID NO: 55017 - DNA, 15 bp, Homo sapiens
caatgtagtttttga

SEQ ID NO: 55018 - DNA, 15 bp, Homo sapiens
tcaatgtagtttttg

SEQ ID NO: 55019 - DNA, 15 bp, Homo sapiens
ttcaatgtagttttt

SEQ ID NO: 55020 - DNA, 15 bp, Homo sapiens
cttcaatgtagtttt

SEQ ID NO: 55021 - DNA, 15 bp, Homo sapiens
gcttcaatgtagttt

SEQ ID NO: 55022 - DNA, 15 bp, Homo sapiens
ggcttcaatgtagtt

SEQ ID NO: 55023 - DNA, 15 bp, Homo sapiens
cggcttcaatgtagt

SEQ ID NO: 55024 - DNA, 15 bp, Homo sapiens
ccggcttcaatgtag

SEQ ID NO: 55025 - DNA, 15 bp, Homo sapiens
cccggcttcaatgta

SEQ ID NO: 55026 - DNA, 15 bp, Homo sapiens
gcccggcttcaatgt

SEQ ID NO: 55027 - DNA, 15 bp, Homo sapiens
tgcccggcttcaatg

SEQ ID NO: 55028 - DNA, 15 bp, Homo sapiens
gtgcccggcttcaat

SEQ ID NO: 55029 - DNA, 15 bp, Homo sapiens
tgtgcccggcttcaa

SEQ ID NO: 55030 - DNA, 15 bp, Homo sapiens
ctgtgcccggcttca

SEQ ID NO: 55031 - DNA, 15 bp, Homo sapiens
actgtgcccggcttc

SEQ ID NO: 55032 - DNA, 15 bp, Homo sapiens
cactgtgcccggctt

SEQ ID NO: 55033 - DNA, 15 bp, Homo sapiens
ccactgtgcccggct

SEQ ID NO: 55034 - DNA, 15 bp, Homo sapiens
accactgtgcccggc

SEQ ID NO: 55035 - DNA, 15 bp, Homo sapiens
aaccactgtgcccgg

SEQ ID NO: 55036 - DNA, 15 bp, Homo sapiens
gaaccactgtgcccg

SEQ ID NO: 55037 - DNA, 15 bp, Homo sapiens
tgaaccactgtgccc

SEQ ID NO: 55038 - DNA, 15 bp, Homo sapiens
gtgaaccactgtgcc

SEQ ID NO: 55039 - DNA, 15 bp, Homo sapiens
cgtgaaccactgtgc

SEQ ID NO: 55040 - DNA, 15 bp, Homo sapiens
gcgtgaaccactgtg

SEQ ID NO: 55041 - DNA, 15 bp, Homo sapiens
ggcgtgaaccactgt

SEQ ID NO: 55042 - DNA, 15 bp, Homo sapiens
taggcgtgaaccact

SEQ ID NO: 55043 - DNA, 15 bp, Homo sapiens
ttaggcgtgaaccac

SEQ ID NO: 55044 - DNA, 15 bp, Homo sapiens
tttaggcgtgaacca

SEQ ID NO: 55045 - DNA, 15 bp, Homo sapiens
ttttaggcgtgaacc

SEQ ID NO: 55046 - DNA, 15 bp, Homo sapiens
attttaggcgtgaac

SEQ ID NO: 55047 - DNA, 15 bp, Homo sapiens
gattttaggcgtgaa

SEQ ID NO: 55048 - DNA, 15 bp, Homo sapiens
cgattttaggcgtga

SEQ ID NO: 55049 - DNA, 15 bp, Homo sapiens
gcgattttaggcgtg

SEQ ID NO: 55050 - DNA, 15 bp, Homo sapiens
tgcgattttaggcgt

SEQ ID NO: 55051 - DNA, 15 bp, Homo sapiens
ttgcgattttaggcg

SEQ ID NO: 55052 - DNA, 15 bp, Homo sapiens
gttgcgattttaggc

SEQ ID NO: 55053 - DNA, 15 bp, Homo sapiens
tgttgcgattttagg

SEQ ID NO: 55054 - DNA, 15 bp, Homo sapiens
gtgttgcgattttag

SEQ ID NO: 55055 - DNA, 15 bp, Homo sapiens
agtgttgcgatttta

SEQ ID NO: 55056 - DNA, 15 bp, Homo sapiens
aagtgttgcgatttt

SEQ ID NO: 55057 - DNA, 15 bp, Homo sapiens
aaagtgttgcgattt

SEQ ID NO: 55058 - DNA, 15 bp, Homo sapiens
caaagtgttgcgatt

SEQ ID NO: 55059 - DNA, 15 bp, Homo sapiens
ccaaagtgttgcgat

SEQ ID NO: 55060 - DNA, 15 bp, Homo sapiens
cccaaagtgttgcga

SEQ ID NO: 55061 - DNA, 15 bp, Homo sapiens
tcccaaagtgttgcg

SEQ ID NO: 55062 - DNA, 15 bp, Homo sapiens
ctcccaaagtgttgc

SEQ ID NO: 55063 - DNA, 15 bp, Homo sapiens
cctcccaaagtgttg

SEQ ID NO: 55064 - DNA, 15 bp, Homo sapiens
caccttggcctccca

SEQ ID NO: 55065 - DNA, 15 bp, Homo sapiens
ccaccttggcctccc

SEQ ID NO: 55066 - DNA, 15 bp, Homo sapiens
cccaccttggcctcc

SEQ ID NO: 55067 - DNA, 15 bp, Homo sapiens
gcccaccttggcctc

SEQ ID NO: 55068 - DNA, 15 bp, Homo sapiens
ggcccaccttggcct

SEQ ID NO: 55069 - DNA, 15 bp, Homo sapiens
aggcccaccttggcc

SEQ ID NO: 55070 - DNA, 15 bp, Homo sapiens
gaggcccaccttggc

SEQ ID NO: 55071 - DNA, 15 bp, Homo sapiens
ggaggcccaccttgg

SEQ ID NO: 55072 - DNA, 15 bp, Homo sapiens
gggaggcccaccttg

SEQ ID NO: 55073 - DNA, 15 bp, Homo sapiens
tgggaggcccacctt

SEQ ID NO: 55074 - DNA, 15 bp, Homo sapiens
gtgggaggcccacct

SEQ ID NO: 55075 - DNA, 15 bp, Homo sapiens
ggtgggaggcccacc

SEQ ID NO: 55076 - DNA, 15 bp, Homo sapiens
aggtgggaggcccac

SEQ ID NO: 55077 - DNA, 15 bp, Homo sapiens
aaggtgggaggccca

SEQ ID NO: 55078 - DNA, 15 bp, Homo sapiens
caaggtgggaggccc

SEQ ID NO: 55079 - DNA, 15 bp, Homo sapiens
tcaaggtgggaggcc

SEQ ID NO: 55080 - DNA, 15 bp, Homo sapiens
ttcaaggtgggaggc

SEQ ID NO: 55081 - DNA, 15 bp, Homo sapiens
gttcaaggtgggagg

SEQ ID NO: 55082 - DNA, 15 bp, Homo sapiens
agttcaaggtgggag

SEQ ID NO: 55083 - DNA, 15 bp, Homo sapiens
tagttcaaggtggga

SEQ ID NO: 55084 - DNA, 15 bp, Homo sapiens
ttagttcaaggtggg

SEQ ID NO: 55085 - DNA, 15 bp, Homo sapiens
cttagttcaaggtgg

SEQ ID NO: 55086 - DNA, 15 bp, Homo sapiens
ccttagttcaaggtg

SEQ ID NO: 55087 - DNA, 15 bp, Homo sapiens
tccttagttcaaggt

SEQ ID NO: 55088 - DNA, 15 bp, Homo sapiens
ctccttagttcaagg

SEQ ID NO: 55089 - DNA, 15 bp, Homo sapiens
actccttagttcaag

SEQ ID NO: 55090 - DNA, 15 bp, Homo sapiens
aactccttagttcaa

SEQ ID NO: 55091 - DNA, 15 bp, Homo sapiens
aaactccttagttca

SEQ ID NO: 55092 - DNA, 15 bp, Homo sapiens
caaactccttagttc

SEQ ID NO: 55093 - DNA, 15 bp, Homo sapiens
tcaaactccttagtt

SEQ ID NO: 55094 - DNA, 15 bp, Homo sapiens
ctcaaactccttagt

SEQ ID NO: 55095 - DNA, 15 bp, Homo sapiens
tctcaaactccttag

SEQ ID NO: 55096 - DNA, 15 bp, Homo sapiens
gtctcaaactcctta

SEQ ID NO: 55097 - DNA, 15 bp, Homo sapiens
ggtctcaaactcctt

SEQ ID NO: 55098 - DNA, 15 bp, Homo sapiens
atttcaccatgttgc

SEQ ID NO: 55099 - DNA, 15 bp, Homo sapiens
gatttcaccatgttg

SEQ ID NO: 55100 - DNA, 15 bp, Homo sapiens
ggatttcaccatgtt

SEQ ID NO: 55101 - DNA, 15 bp, Homo sapiens
gggatttcaccatgt

SEQ ID NO: 55102 - DNA, 15 bp, Homo sapiens
tgggatttcaccatg

SEQ ID NO: 55103 - DNA, 15 bp, Homo sapiens
atgggatttcaccat

SEQ ID NO: 55104 - DNA, 15 bp, Homo sapiens
gatgggatttcacca

SEQ ID NO: 55105 - DNA, 15 bp, Homo sapiens
agatgggatttcacc

SEQ ID NO: 55106 - DNA, 15 bp, Homo sapiens
gagatgggatttcac

SEQ ID NO: 55107 - DNA, 15 bp, Homo sapiens
agagatgggatttca

SEQ ID NO: 55108 - DNA, 15 bp, Homo sapiens
tagagatgggatttc

SEQ ID NO: 55109 - DNA, 15 bp, Homo sapiens
gtagagatgggattt

SEQ ID NO: 55110 - DNA, 15 bp, Homo sapiens
tgtagagatgggatt

SEQ ID NO: 55111 - DNA, 15 bp, Homo sapiens
ttgtagagatgggat

SEQ ID NO: 55112 - DNA, 15 bp, Homo sapiens
tttgtagagatggga

SEQ ID NO: 55113 - DNA, 15 bp, Homo sapiens
ttttgtagagatggg

SEQ ID NO: 55114 - DNA, 15 bp, Homo sapiens
tttttgtagagatgg

SEQ ID NO: 55115 - DNA, 15 bp, Homo sapiens
ttttttgtagagatg

SEQ ID NO: 55116 - DNA, 15 bp, Homo sapiens
attttttgtagagat

SEQ ID NO: 55117 - DNA, 15 bp, Homo sapiens
tattttttgtagaga

SEQ ID NO: 55118 - DNA, 15 bp, Homo sapiens
atattttttgtagag

SEQ ID NO: 55119 - DNA, 15 bp, Homo sapiens
tatattttttgtaga

SEQ ID NO: 55120 - DNA, 15 bp, Homo sapiens
ttatattttttgtag

SEQ ID NO: 55121 - DNA, 15 bp, Homo sapiens
tttatattttttgta

SEQ ID NO: 55122 - DNA, 15 bp, Homo sapiens
ttttatattttttgt

SEQ ID NO: 55123 - DNA, 15 bp, Homo sapiens
cttttatattttttg

SEQ ID NO: 55124 - DNA, 15 bp, Homo sapiens
gcttttatatttttt

SEQ ID NO: 55125 - DNA, 15 bp, Homo sapiens
agcttttatattttt

SEQ ID NO: 55126 - DNA, 15 bp, Homo sapiens
tagcttttatatttt

SEQ ID NO: 55127 - DNA, 15 bp, Homo sapiens
ctagcttttatattt

SEQ ID NO: 55128 - DNA, 15 bp, Homo sapiens
gctagcttttatatt

SEQ ID NO: 55129 - DNA, 15 bp, Homo sapiens
agctagcttttatat

SEQ ID NO: 55130 - DNA, 15 bp, Homo sapiens
cagctagcttttata

SEQ ID NO: 55131 - DNA, 15 bp, Homo sapiens
ccagctagcttttat

SEQ ID NO: 55132 - DNA, 15 bp, Homo sapiens
cccagctagctttta

SEQ ID NO: 55133 - DNA, 15 bp, Homo sapiens
acccagctagctttt

SEQ ID NO: 55134 - DNA, 15 bp, Homo sapiens
cacccagctagcttt

SEQ ID NO: 55135 - DNA, 15 bp, Homo sapiens
acacccagctagctt

SEQ ID NO: 55136 - DNA, 15 bp, Homo sapiens
cacacccagctagct

SEQ ID NO: 55137 - DNA, 15 bp, Homo sapiens
ccacacccagctagc

SEQ ID NO: 55138 - DNA, 15 bp, Homo sapiens
accacacccagctag

SEQ ID NO: 55139 - DNA, 15 bp, Homo sapiens
tgccaccacacccag

SEQ ID NO: 55140 - DNA, 15 bp, Homo sapiens
atgccaccacaccca

SEQ ID NO: 55141 - DNA, 15 bp, Homo sapiens
catgccaccacaccc

SEQ ID NO: 55142 - DNA, 15 bp, Homo sapiens
gcatgccaccacacc

SEQ ID NO: 55143 - DNA, 15 bp, Homo sapiens
tgcatgccaccacac

SEQ ID NO: 55144 - DNA, 15 bp, Homo sapiens
gtgcatgccaccaca

SEQ ID NO: 55145 - DNA, 15 bp, Homo sapiens
caggtgcatgccacc

SEQ ID NO: 55146 - DNA, 15 bp, Homo sapiens
acaggtgcatgccac

SEQ ID NO: 55147 - DNA, 15 bp, Homo sapiens
tagctaggactacag

SEQ ID NO: 55148 - DNA, 15 bp, Homo sapiens
gtagctaggactaca

SEQ ID NO: 55149 - DNA, 15 bp, Homo sapiens
agtagctaggactac

SEQ ID NO: 55150 - DNA, 15 bp, Homo sapiens
aagtagctaggacta

SEQ ID NO: 55151 - DNA, 15 bp, Homo sapiens
caagtagctaggact

SEQ ID NO: 55152 - DNA, 15 bp, Homo sapiens
ccaagtagctaggac

SEQ ID NO: 55153 - DNA, 15 bp, Homo sapiens
cccaagtagctagga

SEQ ID NO: 55154 - DNA, 15 bp, Homo sapiens
tcccaagtagctagg

SEQ ID NO: 55155 - DNA, 15 bp, Homo sapiens
ctcccaagtagctag

SEQ ID NO: 55156 - DNA, 15 bp, Homo sapiens
cctcccaagtagcta

SEQ ID NO: 55157 - DNA, 15 bp, Homo sapiens
aacctcagcctccca

SEQ ID NO: 55158 - DNA, 15 bp, Homo sapiens
caacctcagcctccc

SEQ ID NO: 55159 - DNA, 15 bp, Homo sapiens
tcaacctcagcctcc

SEQ ID NO: 55160 - DNA, 15 bp, Homo sapiens
atcaacctcagcctc

SEQ ID NO: 55161 - DNA, 15 bp, Homo sapiens
gatcaacctcagcct

SEQ ID NO: 55162 - DNA, 15 bp, Homo sapiens
ggatcaacctcagcc

SEQ ID NO: 55163 - DNA, 15 bp, Homo sapiens
aggatcaacctcagc

SEQ ID NO: 55164 - DNA, 15 bp, Homo sapiens
caggatcaacctcag

SEQ ID NO: 55165 - DNA, 15 bp, Homo sapiens
ccaggatcaacctca

SEQ ID NO: 55166 - DNA, 15 bp, Homo sapiens
cccaggatcaacctc

SEQ ID NO: 55167 - DNA, 15 bp, Homo sapiens
tcccaggatcaacct

SEQ ID NO: 55168 - DNA, 15 bp, Homo sapiens
ctcccaggatcaacc

SEQ ID NO: 55169 - DNA, 15 bp, Homo sapiens
actcccaggatcaac

SEQ ID NO: 55170 - DNA, 15 bp, Homo sapiens
aactcccaggatcaa

SEQ ID NO: 55171 - DNA, 15 bp, Homo sapiens
aaactcccaggatca

SEQ ID NO: 55172 - DNA, 15 bp, Homo sapiens
caaactcccaggatc

SEQ ID NO: 55173 - DNA, 15 bp, Homo sapiens
tcaaactcccaggat

SEQ ID NO: 55174 - DNA, 15 bp, Homo sapiens
ctcaaactcccagga

SEQ ID NO: 55175 - DNA, 15 bp, Homo sapiens
gctcaaactcccagg

SEQ ID NO: 55176 - DNA, 15 bp, Homo sapiens
ggctcaaactcccag

SEQ ID NO: 55177 - DNA, 15 bp, Homo sapiens
aggctcaaactccca

SEQ ID NO: 55178 - DNA, 15 bp, Homo sapiens
caggctcaaactccc

SEQ ID NO: 55179 - DNA, 15 bp, Homo sapiens
gcaggctcaaactcc

SEQ ID NO: 55180 - DNA, 15 bp, Homo sapiens
tgcaggctcaaactc

SEQ ID NO: 55181 - DNA, 15 bp, Homo sapiens
ctgcaggctcaaact

SEQ ID NO: 55182 - DNA, 15 bp, Homo sapiens
actgcaggctcaaac

SEQ ID NO: 55183 - DNA, 15 bp, Homo sapiens
cactgcaggctcaaa

SEQ ID NO: 55184 - DNA, 15 bp, Homo sapiens
tcactgcaggctcaa

SEQ ID NO: 55185 - DNA, 15 bp, Homo sapiens
ctcactgcaggctca

SEQ ID NO: 55186 - DNA, 15 bp, Homo sapiens
gctcactgcaggctc

SEQ ID NO: 55187 - DNA, 15 bp, Homo sapiens
agctcactgcaggct

SEQ ID NO: 55188 - DNA, 15 bp, Homo sapiens
cagctcactgcaggc

SEQ ID NO: 55189 - DNA, 15 bp, Homo sapiens
acagctcactgcagg

SEQ ID NO: 55190 - DNA, 15 bp, Homo sapiens
ttcacagctcactgc

SEQ ID NO: 55191 - DNA, 15 bp, Homo sapiens
cttcacagctcactg

SEQ ID NO: 55192 - DNA, 15 bp, Homo sapiens
tcttcacagctcact

SEQ ID NO: 55193 - DNA, 15 bp, Homo sapiens
atcttcacagctcac

SEQ ID NO: 55194 - DNA, 15 bp, Homo sapiens
catcttcacagctca

SEQ ID NO: 55195 - DNA, 15 bp, Homo sapiens
gcatcttcacagctc

SEQ ID NO: 55196 - DNA, 15 bp, Homo sapiens
ggcatcttcacagct

SEQ ID NO: 55197 - DNA, 15 bp, Homo sapiens
tggcatcttcacagc

SEQ ID NO: 55198 - DNA, 15 bp, Homo sapiens
gtggcatcttcacag

SEQ ID NO: 55199 - DNA, 15 bp, Homo sapiens
agtggcatcttcaca

SEQ ID NO: 55200 - DNA, 15 bp, Homo sapiens
cagtggcatcttcac

SEQ ID NO: 55201 - DNA, 15 bp, Homo sapiens
gcagtggcatcttca

SEQ ID NO: 55202 - DNA, 15 bp, Homo sapiens
tgcagtggcatcttc

SEQ ID NO: 55203 - DNA, 15 bp, Homo sapiens
gtgcagtggcatctt

SEQ ID NO: 55204 - DNA, 15 bp, Homo sapiens
agtgcagtggcatct

SEQ ID NO: 55205 - DNA, 15 bp, Homo sapiens
gagtgcagtggcatc

SEQ ID NO: 55206 - DNA, 15 bp, Homo sapiens
agagtgcagtggcat

SEQ ID NO: 55207 - DNA, 15 bp, Homo sapiens
tagagtgcagtggca

SEQ ID NO: 55208 - DNA, 15 bp, Homo sapiens
ctagagtgcagtggc

SEQ ID NO: 55209 - DNA, 15 bp, Homo sapiens
actagagtgcagtgg

SEQ ID NO: 55210 - DNA, 15 bp, Homo sapiens
gactagagtgcagtg

SEQ ID NO: 55211 - DNA, 15 bp, Homo sapiens
agactagagtgcagt

SEQ ID NO: 55212 - DNA, 15 bp, Homo sapiens
cagactagagtgcag

SEQ ID NO: 55213 - DNA, 15 bp, Homo sapiens
ccagactagagtgca

SEQ ID NO: 55214 - DNA, 15 bp, Homo sapiens
cccagactagagtgc

SEQ ID NO: 55215 - DNA, 15 bp, Homo sapiens
acccagactagagtg

SEQ ID NO: 55216 - DNA, 15 bp, Homo sapiens
cacccagactagagt

SEQ ID NO: 55217 - DNA, 15 bp, Homo sapiens
tcacccagactagag

SEQ ID NO: 55218 - DNA, 15 bp, Homo sapiens
gtcacccagactaga

SEQ ID NO: 55219 - DNA, 15 bp, Homo sapiens
tgtcacccagactag

SEQ ID NO: 55220 - DNA, 15 bp, Homo sapiens
ctgtcacccagacta

SEQ ID NO: 55221 - DNA, 15 bp, Homo sapiens
tctgtcacccagact

SEQ ID NO: 55222 - DNA, 15 bp, Homo sapiens
ctctgtcacccagac

SEQ ID NO: 55223 - DNA, 15 bp, Homo sapiens
gctctgtcacccaga

SEQ ID NO: 55224 - DNA, 15 bp, Homo sapiens
gtcttgctctgtcac

SEQ ID NO: 55225 - DNA, 15 bp, Homo sapiens
ggtcttgctctgtca

SEQ ID NO: 55226 - DNA, 15 bp, Homo sapiens
gggtcttgctctgtc

SEQ ID NO: 55227 - DNA, 15 bp, Homo sapiens
agggtcttgctctgt

SEQ ID NO: 55228 - DNA, 15 bp, Homo sapiens
cagggtcttgctctg

SEQ ID NO: 55229 - DNA, 15 bp, Homo sapiens
acagggtcttgctct

SEQ ID NO: 55230 - DNA, 15 bp, Homo sapiens
gacagggtcttgctc

SEQ ID NO: 55231 - DNA, 15 bp, Homo sapiens
agacagggtcttgct

SEQ ID NO: 55232 - DNA, 15 bp, Homo sapiens
gagacagggtcttgc

SEQ ID NO: 55233 - DNA, 15 bp, Homo sapiens
tgagacagggtcttg

SEQ ID NO: 55234 - DNA, 15 bp, Homo sapiens
ttgagacagggtctt

SEQ ID NO: 55235 - DNA, 15 bp, Homo sapiens
tttgagacagggtct

SEQ ID NO: 55236 - DNA, 15 bp, Homo sapiens
ttttgagacagggtc

SEQ ID NO: 55237 - DNA, 15 bp, Homo sapiens
tttttgagacagggt

SEQ ID NO: 55238 - DNA, 15 bp, Homo sapiens
gtttttgagacaggg

SEQ ID NO: 55239 - DNA, 15 bp, Homo sapiens
tgtttttgagacagg

SEQ ID NO: 55240 - DNA, 15 bp, Homo sapiens
gtgtttttgagacag

SEQ ID NO: 55241 - DNA, 15 bp, Homo sapiens
tgtgtttttgagaca

SEQ ID NO: 55242 - DNA, 15 bp, Homo sapiens
gtgtgtttttgagac

SEQ ID NO: 55243 - DNA, 15 bp, Homo sapiens
tgtgtgtttttgaga

SEQ ID NO: 55244 - DNA, 15 bp, Homo sapiens
gtgtgtgtttttgag

SEQ ID NO: 55245 - DNA, 15 bp, Homo sapiens
tgtgtgtgtttttga

SEQ ID NO: 55246 - DNA, 15 bp, Homo sapiens
gtgtgtgtgtttttg

SEQ ID NO: 55247 - DNA, 15 bp, Homo sapiens
tgtgtgtgtgttttt

SEQ ID NO: 55248 - DNA, 15 bp, Homo sapiens
gtgtgtgtgtgtttt

SEQ ID NO: 55249 - DNA, 15 bp, Homo sapiens
tgtgtgtgtgtgttt

SEQ ID NO: 55250 - DNA, 15 bp, Homo sapiens
gtgtgtgtgtgtgtt

SEQ ID NO: 55251 - DNA, 15 bp, Homo sapiens
ttgtgtgtgtgtgtg

SEQ ID NO: 55252 - DNA, 15 bp, Homo sapiens
tttgtgtgtgtgtgt

SEQ ID NO: 55253 - DNA, 15 bp, Homo sapiens
ctttgtgtgtgtgtg

SEQ ID NO: 55254 - DNA, 15 bp, Homo sapiens
tctttgtgtgtgtgt

SEQ ID NO: 55255 - DNA, 15 bp, Homo sapiens
ttctttgtgtgtgtg

SEQ ID NO: 55256 - DNA, 15 bp, Homo sapiens
tttctttgtgtgtgt

SEQ ID NO: 55257 - DNA, 15 bp, Homo sapiens
atttctttgtgtgtg

SEQ ID NO: 55258 - DNA, 15 bp, Homo sapiens
tatttctttgtgtgt

SEQ ID NO: 55259 - DNA, 15 bp, Homo sapiens
gtatttctttgtgtg

SEQ ID NO: 55260 - DNA, 15 bp, Homo sapiens
tgtatttctttgtgt

SEQ ID NO: 55261 - DNA, 15 bp, Homo sapiens
atgtatttctttgtg

SEQ ID NO: 55262 - DNA, 15 bp, Homo sapiens
aatgtatttctttgt

SEQ ID NO: 55263 - DNA, 15 bp, Homo sapiens
caatgtatttctttg

SEQ ID NO: 55264 - DNA, 15 bp, Homo sapiens
tcaatgtatttcttt

SEQ ID NO: 55265 - DNA, 15 bp, Homo sapiens
atcaatgtatttctt

SEQ ID NO: 55266 - DNA, 15 bp, Homo sapiens
aatcaatgtatttct

SEQ ID NO: 55267 - DNA, 15 bp, Homo sapiens
aaatcaatgtatttc

SEQ ID NO: 55268 - DNA, 15 bp, Homo sapiens
aaaatcaatgtattt

SEQ ID NO: 55269 - DNA, 15 bp, Homo sapiens
aaaaatcaatgtatt

SEQ ID NO: 55270 - DNA, 15 bp, Homo sapiens
gaaaaatcaatgtat

SEQ ID NO: 55271 - DNA, 15 bp, Homo sapiens
tgaaaaatcaatgta

SEQ ID NO: 55272 - DNA, 15 bp, Homo sapiens
gtgaaaaatcaatgt

SEQ ID NO: 55273 - DNA, 15 bp, Homo sapiens
tgtgaaaaatcaatg

SEQ ID NO: 55274 - DNA, 15 bp, Homo sapiens
atgtgaaaaatcaat

SEQ ID NO: 55275 - DNA, 15 bp, Homo sapiens
tatgtgaaaaatcaa

SEQ ID NO: 55276 - DNA, 15 bp, Homo sapiens
ctatgtgaaaaatca

SEQ ID NO: 55277 - DNA, 15 bp, Homo sapiens
cctatgtgaaaaatc

SEQ ID NO: 55278 - DNA, 15 bp, Homo sapiens
acctatgtgaaaaat

SEQ ID NO: 55279 - DNA, 15 bp, Homo sapiens
tacctatgtgaaaaa

SEQ ID NO: 55280 - DNA, 15 bp, Homo sapiens
ctacctatgtgaaaa

SEQ ID NO: 55281 - DNA, 15 bp, Homo sapiens
actacctatgtgaaa

SEQ ID NO: 55282 - DNA, 15 bp, Homo sapiens
tactacctatgtgaa

SEQ ID NO: 55283 - DNA, 15 bp, Homo sapiens
ttactacctatgtga

SEQ ID NO: 55284 - DNA, 15 bp, Homo sapiens
cttactacctatgtg

SEQ ID NO: 55285 - DNA, 15 bp, Homo sapiens
tcttactacctatgt

SEQ ID NO: 55286 - DNA, 15 bp, Homo sapiens
ctcttactacctatg

SEQ ID NO: 55287 - DNA, 15 bp, Homo sapiens
tctcttactacctat

SEQ ID NO: 55288 - DNA, 15 bp, Homo sapiens
ttctcttactaccta

SEQ ID NO: 55289 - DNA, 15 bp, Homo sapiens
tttctcttactacct

SEQ ID NO: 55290 - DNA, 15 bp, Homo sapiens
gtttctcttactacc

SEQ ID NO: 55291 - DNA, 15 bp, Homo sapiens
tgtttctcttactac

SEQ ID NO: 55292 - DNA, 15 bp, Homo sapiens
atgtttctcttacta

SEQ ID NO: 55293 - DNA, 15 bp, Homo sapiens
aatgtttctcttact

SEQ ID NO: 55294 - DNA, 15 bp, Homo sapiens
gaatgtttctcttac

SEQ ID NO: 55295 - DNA, 15 bp, Homo sapiens
agaatgtttctctta

SEQ ID NO: 55296 - DNA, 15 bp, Homo sapiens
aagaatgtttctctt

SEQ ID NO: 55297 - DNA, 15 bp, Homo sapiens
aaagaatgtttctct

SEQ ID NO: 55298 - DNA, 15 bp, Homo sapiens
aaaagaatgtttctc

SEQ ID NO: 55299 - DNA, 15 bp, Homo sapiens
aaaaagaatgtttct

SEQ ID NO: 55300 - DNA, 15 bp, Homo sapiens
caaaaagaatgtttc

SEQ ID NO: 55301 - DNA, 15 bp, Homo sapiens
tcaaaaagaatgttt

SEQ ID NO: 55302 - DNA, 15 bp, Homo sapiens
ttcaaaaagaatgtt

SEQ ID NO: 55303 - DNA, 15 bp, Homo sapiens
gttcaaaaagaatgt

SEQ ID NO: 55304 - DNA, 15 bp, Homo sapiens
agttcaaaaagaatg

SEQ ID NO: 55305 - DNA, 15 bp, Homo sapiens
gagttcaaaaagaat

SEQ ID NO: 55306 - DNA, 15 bp, Homo sapiens
tgagttcaaaaagaa

SEQ ID NO: 55307 - DNA, 15 bp, Homo sapiens
ctgagttcaaaaaga

SEQ ID NO: 55308 - DNA, 15 bp, Homo sapiens
gctgagttcaaaaag

SEQ ID NO: 55309 - DNA, 15 bp, Homo sapiens
agctgagttcaaaaa

SEQ ID NO: 55310 - DNA, 15 bp, Homo sapiens
cagctgagttcaaaa

SEQ ID NO: 55311 - DNA, 15 bp, Homo sapiens
acagctgagttcaaa

SEQ ID NO: 55312 - DNA, 15 bp, Homo sapiens
aacagctgagttcaa

SEQ ID NO: 55313 - DNA, 15 bp, Homo sapiens
aaacagctgagttca

SEQ ID NO: 55314 - DNA, 15 bp, Homo sapiens
caaacagctgagttc

SEQ ID NO: 55315 - DNA, 15 bp, Homo sapiens
acaaacagctgagtt

SEQ ID NO: 55316 - DNA, 15 bp, Homo sapiens
cacaaacagctgagt

SEQ ID NO: 55317 - DNA, 15 bp, Homo sapiens
tcacaaacagctgag

SEQ ID NO: 55318 - DNA, 15 bp, Homo sapiens
ttcacaaacagctga

SEQ ID NO: 55319 - DNA, 15 bp, Homo sapiens
attcacaaacagctg

SEQ ID NO: 55320 - DNA, 15 bp, Homo sapiens
aattcacaaacagct

SEQ ID NO: 55321 - DNA, 15 bp, Homo sapiens
caattcacaaacagc

SEQ ID NO: 55322 - DNA, 15 bp, Homo sapiens
tcaattcacaaacag

SEQ ID NO: 55323 - DNA, 15 bp, Homo sapiens
ttcaattcacaaaca

SEQ ID NO: 55324 - DNA, 15 bp, Homo sapiens
attcaattcacaaac

SEQ ID NO: 55325 - DNA, 15 bp, Homo sapiens
aattcaattcacaaa

SEQ ID NO: 55326 - DNA, 15 bp, Homo sapiens
aaattcaattcacaa

SEQ ID NO: 55327 - DNA, 15 bp, Homo sapiens
aaaattcaattcaca

SEQ ID NO: 55328 - DNA, 15 bp, Homo sapiens
caaaattcaattcac

SEQ ID NO: 55329 - DNA, 15 bp, Homo sapiens
acaaaattcaattca

SEQ ID NO: 55330 - DNA, 15 bp, Homo sapiens
tacaaaattcaattc

SEQ ID NO: 55331 - DNA, 15 bp, Homo sapiens
ttacaaaattcaatt

SEQ ID NO: 55332 - DNA, 15 bp, Homo sapiens
attacaaaattcaat

SEQ ID NO: 55333 - DNA, 15 bp, Homo sapiens
aattacaaaattcaa

SEQ ID NO: 55334 - DNA, 15 bp, Homo sapiens
gaattacaaaattca

SEQ ID NO: 55335 - DNA, 15 bp, Homo sapiens
tgaattacaaaattc

SEQ ID NO: 55336 - DNA, 15 bp, Homo sapiens
ttgaattacaaaatt

SEQ ID NO: 55337 - DNA, 15 bp, Homo sapiens
tttgaattacaaaat

SEQ ID NO: 55338 - DNA, 15 bp, Homo sapiens
atttgaattacaaaa

SEQ ID NO: 55339 - DNA, 15 bp, Homo sapiens
catttgaattacaaa

SEQ ID NO: 55340 - DNA, 15 bp, Homo sapiens
gcatttgaattacaa

SEQ ID NO: 55341 - DNA, 15 bp, Homo sapiens
agcatttgaattaca

SEQ ID NO: 55342 - DNA, 15 bp, Homo sapiens
tagcatttgaattac

SEQ ID NO: 55343 - DNA, 15 bp, Homo sapiens
atagcatttgaatta

SEQ ID NO: 55344 - DNA, 15 bp, Homo sapiens
tatagcatttgaatt

SEQ ID NO: 55345 - DNA, 15 bp, Homo sapiens
atatagcatttgaat

SEQ ID NO: 55346 - DNA, 15 bp, Homo sapiens
aatatagcatttgaa

SEQ ID NO: 55347 - DNA, 15 bp, Homo sapiens
taatatagcatttga

SEQ ID NO: 55348 - DNA, 15 bp, Homo sapiens
ataatatagcatttg

SEQ ID NO: 55349 - DNA, 15 bp, Homo sapiens
cataatatagcattt

SEQ ID NO: 55350 - DNA, 15 bp, Homo sapiens
acataatatagcatt

SEQ ID NO: 55351 - DNA, 15 bp, Homo sapiens
tacataatatagcat

SEQ ID NO: 55352 - DNA, 15 bp, Homo sapiens
ttacataatatagca

SEQ ID NO: 55353 - DNA, 15 bp, Homo sapiens
tttacataatatagc

SEQ ID NO: 55354 - DNA, 15 bp, Homo sapiens
gtttacataatatag

SEQ ID NO: 55355 - DNA, 15 bp, Homo sapiens
agtttacataatata

SEQ ID NO: 55356 - DNA, 15 bp, Homo sapiens
tagtttacataatat

SEQ ID NO: 55357 - DNA, 15 bp, Homo sapiens
atagtttacataata

SEQ ID NO: 55358 - DNA, 15 bp, Homo sapiens
aatagtttacataat

SEQ ID NO: 55359 - DNA, 15 bp, Homo sapiens
caatagtttacataa

SEQ ID NO: 55360 - DNA, 15 bp, Homo sapiens
tcaatagtttacata

SEQ ID NO: 55361 - DNA, 15 bp, Homo sapiens
atcaatagtttacat

SEQ ID NO: 55362 - DNA, 15 bp, Homo sapiens
catcaatagtttaca

SEQ ID NO: 55363 - DNA, 15 bp, Homo sapiens
tcatcaatagtttac

SEQ ID NO: 55364 - DNA, 15 bp, Homo sapiens
gtcatcaatagttta

SEQ ID NO: 55365 - DNA, 15 bp, Homo sapiens
agtcatcaatagttt

SEQ ID NO: 55366 - DNA, 15 bp, Homo sapiens
aagtcatcaatagtt

SEQ ID NO: 55367 - DNA, 15 bp, Homo sapiens
aaagtcatcaatagt

SEQ ID NO: 55368 - DNA, 15 bp, Homo sapiens
gaaagtcatcaatag

SEQ ID NO: 55369 - DNA, 15 bp, Homo sapiens
tgaaagtcatcaata

SEQ ID NO: 55370 - DNA, 15 bp, Homo sapiens
ttgaaagtcatcaat

SEQ ID NO: 55371 - DNA, 15 bp, Homo sapiens
attgaaagtcatcaa

SEQ ID NO: 55372 - DNA, 15 bp, Homo sapiens
gattgaaagtcatca

SEQ ID NO: 55373 - DNA, 15 bp, Homo sapiens
agattgaaagtcatc

SEQ ID NO: 55374 - DNA, 15 bp, Homo sapiens
cagattgaaagtcat

SEQ ID NO: 55375 - DNA, 15 bp, Homo sapiens
gcagattgaaagtca

SEQ ID NO: 55376 - DNA, 15 bp, Homo sapiens
tgcagattgaaagtc

SEQ ID NO: 55377 - DNA, 15 bp, Homo sapiens
atgcagattgaaagt

SEQ ID NO: 55378 - DNA, 15 bp, Homo sapiens
aatgcagattgaaag

SEQ ID NO: 55379 - DNA, 15 bp, Homo sapiens
aaatgcagattgaaa

SEQ ID NO: 55380 - DNA, 15 bp, Homo sapiens
taaatgcagattgaa

SEQ ID NO: 55381 - DNA, 15 bp, Homo sapiens
ataaatgcagattga

SEQ ID NO: 55382 - DNA, 15 bp, Homo sapiens
aataaatgcagattg

SEQ ID NO: 55383 - DNA, 15 bp, Homo sapiens
aaataaatgcagatt

SEQ ID NO: 55384 - DNA, 15 bp, Homo sapiens
aaaataaatgcagat

SEQ ID NO: 55385 - DNA, 15 bp, Homo sapiens
caaaataaatgcaga

SEQ ID NO: 55386 - DNA, 15 bp, Homo sapiens
acaaaataaatgcag

SEQ ID NO: 55387 - DNA, 15 bp, Homo sapiens
tacaaaataaatgca

SEQ ID NO: 55388 - DNA, 15 bp, Homo sapiens
atacaaaataaatgc

SEQ ID NO: 55389 - DNA, 15 bp, Homo sapiens
tatacaaaataaatg

SEQ ID NO: 55390 - DNA, 15 bp, Homo sapiens
ttatacaaaataaat

SEQ ID NO: 55391 - DNA, 15 bp, Homo sapiens
attatacaaaataaa

SEQ ID NO: 55392 - DNA, 15 bp, Homo sapiens
aattatacaaaataa

SEQ ID NO: 55393 - DNA, 15 bp, Homo sapiens
taattatacaaaata

SEQ ID NO: 55394 - DNA, 15 bp, Homo sapiens
ataattatacaaaat

SEQ ID NO: 55395 - DNA, 15 bp, Homo sapiens
aataattatacaaaa

SEQ ID NO: 55396 - DNA, 15 bp, Homo sapiens
aaataattatacaaa

SEQ ID NO: 55397 - DNA, 15 bp, Homo sapiens
taaataattatacaa

SEQ ID NO: 55398 - DNA, 15 bp, Homo sapiens
ctaaataattataca

SEQ ID NO: 55399 - DNA, 15 bp, Homo sapiens
actaaataattatac

SEQ ID NO: 55400 - DNA, 15 bp, Homo sapiens
aactaaataattata

SEQ ID NO: 55401 - DNA, 15 bp, Homo sapiens
taactaaataattat

SEQ ID NO: 55402 - DNA, 15 bp, Homo sapiens
ttaactaaataatta

SEQ ID NO: 55403 - DNA, 15 bp, Homo sapiens
attaactaaataatt

SEQ ID NO: 55404 - DNA, 15 bp, Homo sapiens
tattaactaaataat

SEQ ID NO: 55405 - DNA, 15 bp, Homo sapiens
atattaactaaataa

SEQ ID NO: 55406 - DNA, 15 bp, Homo sapiens
aatattaactaaata

SEQ ID NO: 55407 - DNA, 15 bp, Homo sapiens
aaatattaactaaat

SEQ ID NO: 55408 - DNA, 15 bp, Homo sapiens
caaatattaactaaa

SEQ ID NO: 55409 - DNA, 15 bp, Homo sapiens
gcaaatattaactaa

SEQ ID NO: 55410 - DNA, 15 bp, Homo sapiens
ggcaaatattaacta

SEQ ID NO: 55411 - DNA, 15 bp, Homo sapiens
tggcaaatattaact

SEQ ID NO: 55412 - DNA, 15 bp, Homo sapiens
gtggcaaatattaac

SEQ ID NO: 55413 - DNA, 15 bp, Homo sapiens
agtggcaaatattaa

SEQ ID NO: 55414 - DNA, 15 bp, Homo sapiens
aagtggcaaatatta

SEQ ID NO: 55415 - DNA, 15 bp, Homo sapiens
taagtggcaaatatt

SEQ ID NO: 55416 - DNA, 15 bp, Homo sapiens
ataagtggcaaatat

SEQ ID NO: 55417 - DNA, 15 bp, Homo sapiens
tataagtggcaaata

SEQ ID NO: 55418 - DNA, 15 bp, Homo sapiens
atataagtggcaaat

SEQ ID NO: 55419 - DNA, 15 bp, Homo sapiens
aatataagtggcaaa

SEQ ID NO: 55420 - DNA, 15 bp, Homo sapiens
gaatataagtggcaa

SEQ ID NO: 55421 - DNA, 15 bp, Homo sapiens
ggaatataagtggca

SEQ ID NO: 55422 - DNA, 15 bp, Homo sapiens
aggaatataagtggc

SEQ ID NO: 55423 - DNA, 15 bp, Homo sapiens
aaggaatataagtgg

SEQ ID NO: 55424 - DNA, 15 bp, Homo sapiens
taaggaatataagtg

SEQ ID NO: 55425 - DNA, 15 bp, Homo sapiens
ttaaggaatataagt

SEQ ID NO: 55426 - DNA, 15 bp, Homo sapiens
tttaaggaatataag

SEQ ID NO: 55427 - DNA, 15 bp, Homo sapiens
ttttaaggaatataa

SEQ ID NO: 55428 - DNA, 15 bp, Homo sapiens
tttttaaggaatata

SEQ ID NO: 55429 - DNA, 15 bp, Homo sapiens
ttttttaaggaatat

SEQ ID NO: 55430 - DNA, 15 bp, Homo sapiens
attttttaaggaata

SEQ ID NO: 55431 - DNA, 15 bp, Homo sapiens
tattttttaaggaat

SEQ ID NO: 55432 - DNA, 15 bp, Homo sapiens
ttattttttaaggaa

SEQ ID NO: 55433 - DNA, 15 bp, Homo sapiens
tttattttttaagga

SEQ ID NO: 55434 - DNA, 15 bp, Homo sapiens
ttttattttttaagg

SEQ ID NO: 55435 - DNA, 15 bp, Homo sapiens
attttattttttaag

SEQ ID NO: 55436 - DNA, 15 bp, Homo sapiens
aattttattttttaa

SEQ ID NO: 55437 - DNA, 15 bp, Homo sapiens
caattttatttttta

SEQ ID NO: 55438 - DNA, 15 bp, Homo sapiens
tcaattttatttttt

SEQ ID NO: 55439 - DNA, 15 bp, Homo sapiens
ctcaattttattttt

SEQ ID NO: 55440 - DNA, 15 bp, Homo sapiens
cctcaattttatttt

SEQ ID NO: 55441 - DNA, 15 bp, Homo sapiens
acctcaattttattt

SEQ ID NO: 55442 - DNA, 15 bp, Homo sapiens
aacctcaattttatt

SEQ ID NO: 55443 - DNA, 15 bp, Homo sapiens
caacctcaattttat

SEQ ID NO: 55444 - DNA, 15 bp, Homo sapiens
ccaacctcaatttta

SEQ ID NO: 55445 - DNA, 15 bp, Homo sapiens
cccaacctcaatttt

SEQ ID NO: 55446 - DNA, 15 bp, Homo sapiens
gcccaacctcaattt

SEQ ID NO: 55447 - DNA, 15 bp, Homo sapiens
cgcccaacctcaatt

SEQ ID NO: 55448 - DNA, 15 bp, Homo sapiens
acgcccaacctcaat

SEQ ID NO: 55449 - DNA, 15 bp, Homo sapiens
cacgcccaacctcaa

SEQ ID NO: 55450 - DNA, 15 bp, Homo sapiens
ccacgcccaacctca

SEQ ID NO: 55451 - DNA, 15 bp, Homo sapiens
accacgcccaacctc

SEQ ID NO: 55452 - DNA, 15 bp, Homo sapiens
caccacgcccaacct

SEQ ID NO: 55453 - DNA, 15 bp, Homo sapiens
ccaccacgcccaacc

SEQ ID NO: 55454 - DNA, 15 bp, Homo sapiens
gccaccacgcccaac

SEQ ID NO: 55455 - DNA, 15 bp, Homo sapiens
agccaccacgcccaa

SEQ ID NO: 55456 - DNA, 15 bp, Homo sapiens
gtgagccaccacgcc

SEQ ID NO: 55457 - DNA, 15 bp, Homo sapiens
tgtgagccaccacgc

SEQ ID NO: 55458 - DNA, 15 bp, Homo sapiens
gtgtgagccaccacg

SEQ ID NO: 55459 - DNA, 15 bp, Homo sapiens
agtgtgagccaccac

SEQ ID NO: 55460 - DNA, 15 bp, Homo sapiens
aagtgtgagccacca

SEQ ID NO: 55461 - DNA, 15 bp, Homo sapiens
caagtgtgagccacc

SEQ ID NO: 55462 - DNA, 15 bp, Homo sapiens
acaagtgtgagccac

SEQ ID NO: 55463 - DNA, 15 bp, Homo sapiens
tacaagtgtgagcca

SEQ ID NO: 55464 - DNA, 15 bp, Homo sapiens
ttacaagtgtgagcc

SEQ ID NO: 55465 - DNA, 15 bp, Homo sapiens
attacaagtgtgagc

SEQ ID NO: 55466 - DNA, 15 bp, Homo sapiens
gattacaagtgtgag

SEQ ID NO: 55467 - DNA, 15 bp, Homo sapiens
ggattacaagtgtga

SEQ ID NO: 55468 - DNA, 15 bp, Homo sapiens
gggattacaagtgtg

SEQ ID NO: 55469 - DNA, 15 bp, Homo sapiens
tgggattacaagtgt

SEQ ID NO: 55470 - DNA, 15 bp, Homo sapiens
ctgggattacaagtg

SEQ ID NO: 55471 - DNA, 15 bp, Homo sapiens
gctgggattacaagt

SEQ ID NO: 55472 - DNA, 15 bp, Homo sapiens
tgctgggattacaag

SEQ ID NO: 55473 - DNA, 15 bp, Homo sapiens
gtgctgggattacaa

SEQ ID NO: 55474 - DNA, 15 bp, Homo sapiens
tgcctgcctcagcct

SEQ ID NO: 55475 - DNA, 15 bp, Homo sapiens
ctgcctgcctcagcc

SEQ ID NO: 55476 - DNA, 15 bp, Homo sapiens
tctgcctgcctcagc

SEQ ID NO: 55477 - DNA, 15 bp, Homo sapiens
atctgcctgcctcag

SEQ ID NO: 55478 - DNA, 15 bp, Homo sapiens
aatctgcctgcctca

SEQ ID NO: 55479 - DNA, 15 bp, Homo sapiens
caatctgcctgcctc

SEQ ID NO: 55480 - DNA, 15 bp, Homo sapiens
gcaatctgcctgcct

SEQ ID NO: 55481 - DNA, 15 bp, Homo sapiens
ggcaatctgcctgcc

SEQ ID NO: 55482 - DNA, 15 bp, Homo sapiens
aggcaatctgcctgc

SEQ ID NO: 55483 - DNA, 15 bp, Homo sapiens
caggcaatctgcctg

SEQ ID NO: 55484 - DNA, 15 bp, Homo sapiens
tcaggcaatctgcct

SEQ ID NO: 55485 - DNA, 15 bp, Homo sapiens
ctcaggcaatctgcc

SEQ ID NO: 55486 - DNA, 15 bp, Homo sapiens
gctcaggcaatctgc

SEQ ID NO: 55487 - DNA, 15 bp, Homo sapiens
agctcaggcaatctg

SEQ ID NO: 55488 - DNA, 15 bp, Homo sapiens
gagctcaggcaatct

SEQ ID NO: 55489 - DNA, 15 bp, Homo sapiens
tgagctcaggcaatc

SEQ ID NO: 55490 - DNA, 15 bp, Homo sapiens
ctgagctcaggcaat

SEQ ID NO: 55491 - DNA, 15 bp, Homo sapiens
cctgagctcaggcaa

SEQ ID NO: 55492 - DNA, 15 bp, Homo sapiens
tcctgagctcaggca

SEQ ID NO: 55493 - DNA, 15 bp, Homo sapiens
ctcctgagctcaggc

SEQ ID NO: 55494 - DNA, 15 bp, Homo sapiens
actcctgagctcagg

SEQ ID NO: 55495 - DNA, 15 bp, Homo sapiens
aactcctgagctcag

SEQ ID NO: 55496 - DNA, 15 bp, Homo sapiens
aaactcctgagctca

SEQ ID NO: 55497 - DNA, 15 bp, Homo sapiens
caaactcctgagctc

SEQ ID NO: 55498 - DNA, 15 bp, Homo sapiens
tcaaactcctgagct

SEQ ID NO: 55499 - DNA, 15 bp, Homo sapiens
ctcaaactcctgagc

SEQ ID NO: 55500 - DNA, 15 bp, Homo sapiens
tctcaaactcctgag

SEQ ID NO: 55501 - DNA, 15 bp, Homo sapiens
gctgatctcaaactc

SEQ ID NO: 55502 - DNA, 15 bp, Homo sapiens
ggctgatctcaaact

SEQ ID NO: 55503 - DNA, 15 bp, Homo sapiens
aggctgatctcaaac

SEQ ID NO: 55504 - DNA, 15 bp, Homo sapiens
caggctgatctcaaa

SEQ ID NO: 55505 - DNA, 15 bp, Homo sapiens
ccaggctgatctcaa

SEQ ID NO: 55506 - DNA, 15 bp, Homo sapiens
cccaggctgatctca

SEQ ID NO: 55507 - DNA, 15 bp, Homo sapiens
gcccaggctgatctc

SEQ ID NO: 55508 - DNA, 15 bp, Homo sapiens
tgcccaggctgatct

SEQ ID NO: 55509 - DNA, 15 bp, Homo sapiens
ttgcccaggctgatc

SEQ ID NO: 55510 - DNA, 15 bp, Homo sapiens
gttgcccaggctgat

SEQ ID NO: 55511 - DNA, 15 bp, Homo sapiens
gatgttgcccaggct

SEQ ID NO: 55512 - DNA, 15 bp, Homo sapiens
tgatgttgcccaggc

SEQ ID NO: 55513 - DNA, 15 bp, Homo sapiens
atgatgttgcccagg

SEQ ID NO: 55514 - DNA, 15 bp, Homo sapiens
catgatgttgcccag

SEQ ID NO: 55515 - DNA, 15 bp, Homo sapiens
tcatgatgttgccca

SEQ ID NO: 55516 - DNA, 15 bp, Homo sapiens
ttcatgatgttgccc

SEQ ID NO: 55517 - DNA, 15 bp, Homo sapiens
gttcatgatgttgcc

SEQ ID NO: 55518 - DNA, 15 bp, Homo sapiens
ggttcatgatgttgc

SEQ ID NO: 55519 - DNA, 15 bp, Homo sapiens
gggttcatgatgttg

SEQ ID NO: 55520 - DNA, 15 bp, Homo sapiens
ggggttcatgatgtt

SEQ ID NO: 55521 - DNA, 15 bp, Homo sapiens
tggggttcatgatgt

SEQ ID NO: 55522 - DNA, 15 bp, Homo sapiens
atggggttcatgatg

SEQ ID NO: 55523 - DNA, 15 bp, Homo sapiens
aatggggttcatgat

SEQ ID NO: 55524 - DNA, 15 bp, Homo sapiens
aaatggggttcatga

SEQ ID NO: 55525 - DNA, 15 bp, Homo sapiens
gaaatggggttcatg

SEQ ID NO: 55526 - DNA, 15 bp, Homo sapiens
agaaatggggttcat

SEQ ID NO: 55527 - DNA, 15 bp, Homo sapiens
tagaaatggggttca

SEQ ID NO: 55528 - DNA, 15 bp, Homo sapiens
gtagaaatggggttc

SEQ ID NO: 55529 - DNA, 15 bp, Homo sapiens
agtagaaatggggtt

SEQ ID NO: 55530 - DNA, 15 bp, Homo sapiens
tagtagaaatggggt

SEQ ID NO: 55531 - DNA, 15 bp, Homo sapiens
ttagtagaaatgggg

SEQ ID NO: 55532 - DNA, 15 bp, Homo sapiens
tttagtagaaatggg

SEQ ID NO: 55533 - DNA, 15 bp, Homo sapiens
ttttagtagaaatgg

SEQ ID NO: 55534 - DNA, 15 bp, Homo sapiens
attttagtagaaatg

SEQ ID NO: 55535 - DNA, 15 bp, Homo sapiens
tattttagtagaaat

SEQ ID NO: 55536 - DNA, 15 bp, Homo sapiens
gtattttagtagaaa

SEQ ID NO: 55537 - DNA, 15 bp, Homo sapiens
tgtattttagtagaa

SEQ ID NO: 55538 - DNA, 15 bp, Homo sapiens
ttgtattttagtaga

SEQ ID NO: 55539 - DNA, 15 bp, Homo sapiens
tttgtattttagtag

SEQ ID NO: 55540 - DNA, 15 bp, Homo sapiens
ttttgtattttagta

SEQ ID NO: 55541 - DNA, 15 bp, Homo sapiens
tttttgtattttagt

SEQ ID NO: 55542 - DNA, 15 bp, Homo sapiens
ttttttgtattttag

SEQ ID NO: 55543 - DNA, 15 bp, Homo sapiens
attttttgtatttta

SEQ ID NO: 55544 - DNA, 15 bp, Homo sapiens
aattttttgtatttt

SEQ ID NO: 55545 - DNA, 15 bp, Homo sapiens
taattttttgtattt

SEQ ID NO: 55546 - DNA, 15 bp, Homo sapiens
ataattttttgtatt

SEQ ID NO: 55547 - DNA, 15 bp, Homo sapiens
gataattttttgtat

SEQ ID NO: 55548 - DNA, 15 bp, Homo sapiens
agataattttttgta

SEQ ID NO: 55549 - DNA, 15 bp, Homo sapiens
cagataattttttgt

SEQ ID NO: 55550 - DNA, 15 bp, Homo sapiens
ccagataattttttg

SEQ ID NO: 55551 - DNA, 15 bp, Homo sapiens
cccagataatttttt

SEQ ID NO: 55552 - DNA, 15 bp, Homo sapiens
gcccagataattttt

SEQ ID NO: 55553 - DNA, 15 bp, Homo sapiens
tgcccagataatttt

SEQ ID NO: 55554 - DNA, 15 bp, Homo sapiens
atgcccagataattt

SEQ ID NO: 55555 - DNA, 15 bp, Homo sapiens
catgcccagataatt

SEQ ID NO: 55556 - DNA, 15 bp, Homo sapiens
ccatgcccagataat

SEQ ID NO: 55557 - DNA, 15 bp, Homo sapiens
accatgcccagataa

SEQ ID NO: 55558 - DNA, 15 bp, Homo sapiens
caccatgcccagata

SEQ ID NO: 55559 - DNA, 15 bp, Homo sapiens
ccaccatgcccagat

SEQ ID NO: 55560 - DNA, 15 bp, Homo sapiens
accaccatgcccaga

SEQ ID NO: 55561 - DNA, 15 bp, Homo sapiens
caccaccatgcccag

SEQ ID NO: 55562 - DNA, 15 bp, Homo sapiens
acaccaccatgccca

SEQ ID NO: 55563 - DNA, 15 bp, Homo sapiens
tacaccaccatgccc

SEQ ID NO: 55564 - DNA, 15 bp, Homo sapiens
gtacaccaccatgcc

SEQ ID NO: 55565 - DNA, 15 bp, Homo sapiens
tgtacaccaccatgc

SEQ ID NO: 55566 - DNA, 15 bp, Homo sapiens
gtgtacaccaccatg

SEQ ID NO: 55567 - DNA, 15 bp, Homo sapiens
ggtgtacaccaccat

SEQ ID NO: 55568 - DNA, 15 bp, Homo sapiens
aggtgtacaccacca

SEQ ID NO: 55569 - DNA, 15 bp, Homo sapiens
caggtgtacaccacc

SEQ ID NO: 55570 - DNA, 15 bp, Homo sapiens
acaggtgtacaccac

SEQ ID NO: 55571 - DNA, 15 bp, Homo sapiens
tacaggtgtacacca

SEQ ID NO: 55572 - DNA, 15 bp, Homo sapiens
ctacaggtgtacacc

SEQ ID NO: 55573 - DNA, 15 bp, Homo sapiens
gctacaggtgtacac

SEQ ID NO: 55574 - DNA, 15 bp, Homo sapiens
ggctacaggtgtaca

SEQ ID NO: 55575 - DNA, 15 bp, Homo sapiens
gggctacaggtgtac

SEQ ID NO: 55576 - DNA, 15 bp, Homo sapiens
agggctacaggtgta

SEQ ID NO: 55577 - DNA, 15 bp, Homo sapiens
tagggctacaggtgt

SEQ ID NO: 55578 - DNA, 15 bp, Homo sapiens
ctagggctacaggtg

SEQ ID NO: 55579 - DNA, 15 bp, Homo sapiens
gctagggctacaggt

SEQ ID NO: 55580 - DNA, 15 bp, Homo sapiens
agctagggctacagg

SEQ ID NO: 55581 - DNA, 15 bp, Homo sapiens
cagctagggctacag

SEQ ID NO: 55582 - DNA, 15 bp, Homo sapiens
acagctagggctaca

SEQ ID NO: 55583 - DNA, 15 bp, Homo sapiens
aacagctagggctac

SEQ ID NO: 55584 - DNA, 15 bp, Homo sapiens
aaacagctagggcta

SEQ ID NO: 55585 - DNA, 15 bp, Homo sapiens
caaacagctagggct

SEQ ID NO: 55586 - DNA, 15 bp, Homo sapiens
ccaaacagctagggc

SEQ ID NO: 55587 - DNA, 15 bp, Homo sapiens
cccaaacagctaggg

SEQ ID NO: 55588 - DNA, 15 bp, Homo sapiens
tagcctcccaaacag

SEQ ID NO: 55589 - DNA, 15 bp, Homo sapiens
ttagcctcccaaaca

SEQ ID NO: 55590 - DNA, 15 bp, Homo sapiens
cttagcctcccaaac

SEQ ID NO: 55591 - DNA, 15 bp, Homo sapiens
gtgccttagcctccc

SEQ ID NO: 55592 - DNA, 15 bp, Homo sapiens
cgtgccttagcctcc

SEQ ID NO: 55593 - DNA, 15 bp, Homo sapiens
tcgtgccttagcctc

SEQ ID NO: 55594 - DNA, 15 bp, Homo sapiens
ctcgtgccttagcct

SEQ ID NO: 55595 - DNA, 15 bp, Homo sapiens
tctcgtgccttagcc

SEQ ID NO: 55596 - DNA, 15 bp, Homo sapiens
ttctcgtgccttagc

SEQ ID NO: 55597 - DNA, 15 bp, Homo sapiens
attctcgtgccttag

SEQ ID NO: 55598 - DNA, 15 bp, Homo sapiens
aattctcgtgcctta

SEQ ID NO: 55599 - DNA, 15 bp, Homo sapiens
caattctcgtgcctt

SEQ ID NO: 55600 - DNA, 15 bp, Homo sapiens
gcaattctcgtgcct

SEQ ID NO: 55601 - DNA, 15 bp, Homo sapiens
agcaattctcgtgcc

SEQ ID NO: 55602 - DNA, 15 bp, Homo sapiens
aagcaattctcgtgc

SEQ ID NO: 55603 - DNA, 15 bp, Homo sapiens
caagcaattctcgtg

SEQ ID NO: 55604 - DNA, 15 bp, Homo sapiens
tcaagcaattctcgt

SEQ ID NO: 55605 - DNA, 15 bp, Homo sapiens
ttcaagcaattctcg

SEQ ID NO: 55606 - DNA, 15 bp, Homo sapiens
cctctgcctcccggg

SEQ ID NO: 55607 - DNA, 15 bp, Homo sapiens
acctctgcctcccgg

SEQ ID NO: 55608 - DNA, 15 bp, Homo sapiens
gatcttggctcactg

SEQ ID NO: 55609 - DNA, 15 bp, Homo sapiens
tgatcttggctcact

SEQ ID NO: 55610 - DNA, 15 bp, Homo sapiens
atgatcttggctcac

SEQ ID NO: 55611 - DNA, 15 bp, Homo sapiens
catgatcttggctca

SEQ ID NO: 55612 - DNA, 15 bp, Homo sapiens
gcatgatcttggctc

SEQ ID NO: 55613 - DNA, 15 bp, Homo sapiens
ggcatgatcttggct

SEQ ID NO: 55614 - DNA, 15 bp, Homo sapiens
tggcatgatcttggc

SEQ ID NO: 55615 - DNA, 15 bp, Homo sapiens
gtggcatgatcttgg

SEQ ID NO: 55616 - DNA, 15 bp, Homo sapiens
agtggcatgatcttg

SEQ ID NO: 55617 - DNA, 15 bp, Homo sapiens
cagtggcatgatctt

SEQ ID NO: 55618 - DNA, 15 bp, Homo sapiens
agctggagtgcagtg

SEQ ID NO: 55619 - DNA, 15 bp, Homo sapiens
aagctggagtgcagt

SEQ ID NO: 55620 - DNA, 15 bp, Homo sapiens
caagctggagtgcag

SEQ ID NO: 55621 - DNA, 15 bp, Homo sapiens
ccaagctggagtgca

SEQ ID NO: 55622 - DNA, 15 bp, Homo sapiens
gccaagctggagtgc

SEQ ID NO: 55623 - DNA, 15 bp, Homo sapiens
tgccaagctggagtg

SEQ ID NO: 55624 - DNA, 15 bp, Homo sapiens
ttgccaagctggagt

SEQ ID NO: 55625 - DNA, 15 bp, Homo sapiens
gttgccaagctggag

SEQ ID NO: 55626 - DNA, 15 bp, Homo sapiens
tgttgccaagctgga

SEQ ID NO: 55627 - DNA, 15 bp, Homo sapiens
ctgttgccaagctgg

SEQ ID NO: 55628 - DNA, 15 bp, Homo sapiens
tctgttgccaagctg

SEQ ID NO: 55629 - DNA, 15 bp, Homo sapiens
ctctgttgccaagct

SEQ ID NO: 55630 - DNA, 15 bp, Homo sapiens
gctctgttgccaagc

SEQ ID NO: 55631 - DNA, 15 bp, Homo sapiens
tgctctgttgccaag

SEQ ID NO: 55632 - DNA, 15 bp, Homo sapiens
ttgctctgttgccaa

SEQ ID NO: 55633 - DNA, 15 bp, Homo sapiens
cttgctctgttgcca

SEQ ID NO: 55634 - DNA, 15 bp, Homo sapiens
aagagtcttgctctg

SEQ ID NO: 55635 - DNA, 15 bp, Homo sapiens
caagagtcttgctct

SEQ ID NO: 55636 - DNA, 15 bp, Homo sapiens
acaagagtcttgctc

SEQ ID NO: 55637 - DNA, 15 bp, Homo sapiens
gacaagagtcttgct

SEQ ID NO: 55638 - DNA, 15 bp, Homo sapiens
agacaagagtcttgc

SEQ ID NO: 55639 - DNA, 15 bp, Homo sapiens
gagacaagagtcttg

SEQ ID NO: 55640 - DNA, 15 bp, Homo sapiens
ggagacaagagtctt

SEQ ID NO: 55641 - DNA, 15 bp, Homo sapiens
tggagacaagagtct

SEQ ID NO: 55642 - DNA, 15 bp, Homo sapiens
ctggagacaagagtc

SEQ ID NO: 55643 - DNA, 15 bp, Homo sapiens
tctggagacaagagt

SEQ ID NO: 55644 - DNA, 15 bp, Homo sapiens
ttctggagacaagag

SEQ ID NO: 55645 - DNA, 15 bp, Homo sapiens
tttctggagacaaga

SEQ ID NO: 55646 - DNA, 15 bp, Homo sapiens
atttctggagacaag

SEQ ID NO: 55647 - DNA, 15 bp, Homo sapiens
tatttctggagacaa

SEQ ID NO: 55648 - DNA, 15 bp, Homo sapiens
ttatttctggagaca

SEQ ID NO: 55649 - DNA, 15 bp, Homo sapiens
tttatttctggagac

SEQ ID NO: 55650 - DNA, 15 bp, Homo sapiens
ttttatttctggaga

SEQ ID NO: 55651 - DNA, 15 bp, Homo sapiens
tttttatttctggag

SEQ ID NO: 55652 - DNA, 15 bp, Homo sapiens
atttttatttctgga

SEQ ID NO: 55653 - DNA, 15 bp, Homo sapiens
tatttttatttctgg

SEQ ID NO: 55654 - DNA, 15 bp, Homo sapiens
ttatttttatttctg

SEQ ID NO: 55655 - DNA, 15 bp, Homo sapiens
tttatttttatttct

SEQ ID NO: 55656 - DNA, 15 bp, Homo sapiens
atttatttttatttc

SEQ ID NO: 55657 - DNA, 15 bp, Homo sapiens
tatttatttttattt

SEQ ID NO: 55658 - DNA, 15 bp, Homo sapiens
ttatttatttttatt

SEQ ID NO: 55659 - DNA, 15 bp, Homo sapiens
tttatttatttttat

SEQ ID NO: 55660 - DNA, 15 bp, Homo sapiens
atttatttattttta

SEQ ID NO: 55661 - DNA, 15 bp, Homo sapiens
aatttatttattttt

SEQ ID NO: 55662 - DNA, 15 bp, Homo sapiens
caatttatttatttt

SEQ ID NO: 55663 - DNA, 15 bp, Homo sapiens
acaatttatttattt

SEQ ID NO: 55664 - DNA, 15 bp, Homo sapiens
tacaatttatttatt

SEQ ID NO: 55665 - DNA, 15 bp, Homo sapiens
atacaatttatttat

SEQ ID NO: 55666 - DNA, 15 bp, Homo sapiens
aatacaatttattta

SEQ ID NO: 55667 - DNA, 15 bp, Homo sapiens
taatacaatttattt

SEQ ID NO: 55668 - DNA, 15 bp, Homo sapiens
ttaatacaatttatt

SEQ ID NO: 55669 - DNA, 15 bp, Homo sapiens
gttaatacaatttat

SEQ ID NO: 55670 - DNA, 15 bp, Homo sapiens
tgttaatacaattta

SEQ ID NO: 55671 - DNA, 15 bp, Homo sapiens
atgttaatacaattt

SEQ ID NO: 55672 - DNA, 15 bp, Homo sapiens
gatgttaatacaatt

SEQ ID NO: 55673 - DNA, 15 bp, Homo sapiens
ggatgttaatacaat

SEQ ID NO: 55674 - DNA, 15 bp, Homo sapiens
aggatgttaatacaa

SEQ ID NO: 55675 - DNA, 15 bp, Homo sapiens
caggatgttaataca

SEQ ID NO: 55676 - DNA, 15 bp, Homo sapiens
tcaggatgttaatac

SEQ ID NO: 55677 - DNA, 15 bp, Homo sapiens
atcaggatgttaata

SEQ ID NO: 55678 - DNA, 15 bp, Homo sapiens
tatcaggatgttaat

SEQ ID NO: 55679 - DNA, 15 bp, Homo sapiens
ctatcaggatgttaa

SEQ ID NO: 55680 - DNA, 15 bp, Homo sapiens
actatcaggatgtta

SEQ ID NO: 55681 - DNA, 15 bp, Homo sapiens
aactatcaggatgtt

SEQ ID NO: 55682 - DNA, 15 bp, Homo sapiens
aaactatcaggatgt

SEQ ID NO: 55683 - DNA, 15 bp, Homo sapiens
taaactatcaggatg

SEQ ID NO: 55684 - DNA, 15 bp, Homo sapiens
ataaactatcaggat

SEQ ID NO: 55685 - DNA, 15 bp, Homo sapiens
gataaactatcagga

SEQ ID NO: 55686 - DNA, 15 bp, Homo sapiens
agataaactatcagg

SEQ ID NO: 55687 - DNA, 15 bp, Homo sapiens
cagataaactatcag

SEQ ID NO: 55688 - DNA, 15 bp, Homo sapiens
acagataaactatca

SEQ ID NO: 55689 - DNA, 15 bp, Homo sapiens
aacagataaactatc

SEQ ID NO: 55690 - DNA, 15 bp, Homo sapiens
aaacagataaactat

SEQ ID NO: 55691 - DNA, 15 bp, Homo sapiens
taaacagataaacta

SEQ ID NO: 55692 - DNA, 15 bp, Homo sapiens
ctaaacagataaact

SEQ ID NO: 55693 - DNA, 15 bp, Homo sapiens
actaaacagataaac

SEQ ID NO: 55694 - DNA, 15 bp, Homo sapiens
tactaaacagataaa

SEQ ID NO: 55695 - DNA, 15 bp, Homo sapiens
gtactaaacagataa

SEQ ID NO: 55696 - DNA, 15 bp, Homo sapiens
ggtactaaacagata

SEQ ID NO: 55697 - DNA, 15 bp, Homo sapiens
aggtactaaacagat

SEQ ID NO: 55698 - DNA, 15 bp, Homo sapiens
taggtactaaacaga

SEQ ID NO: 55699 - DNA, 15 bp, Homo sapiens
ctaggtactaaacag

SEQ ID NO: 55700 - DNA, 15 bp, Homo sapiens
gctaggtactaaaca

SEQ ID NO: 55701 - DNA, 15 bp, Homo sapiens
tgctaggtactaaac

SEQ ID NO: 55702 - DNA, 15 bp, Homo sapiens
ttgctaggtactaaa

SEQ ID NO: 55703 - DNA, 15 bp, Homo sapiens
cttgctaggtactaa

SEQ ID NO: 55704 - DNA, 15 bp, Homo sapiens
tcttgctaggtacta

SEQ ID NO: 55705 - DNA, 15 bp, Homo sapiens
ttcttgctaggtact

SEQ ID NO: 55706 - DNA, 15 bp, Homo sapiens
tttcttgctaggtac

SEQ ID NO: 55707 - DNA, 15 bp, Homo sapiens
ctttcttgctaggta

SEQ ID NO: 55708 - DNA, 15 bp, Homo sapiens
tctttcttgctaggt

SEQ ID NO: 55709 - DNA, 15 bp, Homo sapiens
ttctttcttgctagg

SEQ ID NO: 55710 - DNA, 15 bp, Homo sapiens
tttctttcttgctag

SEQ ID NO: 55711 - DNA, 15 bp, Homo sapiens
ttttctttcttgcta

SEQ ID NO: 55712 - DNA, 15 bp, Homo sapiens
attttctttcttgct

SEQ ID NO: 55713 - DNA, 15 bp, Homo sapiens
cattttctttcttgc

SEQ ID NO: 55714 - DNA, 15 bp, Homo sapiens
acattttctttcttg

SEQ ID NO: 55715 - DNA, 15 bp, Homo sapiens
aacattttctttctt

SEQ ID NO: 55716 - DNA, 15 bp, Homo sapiens
caacattttctttct

SEQ ID NO: 55717 - DNA, 15 bp, Homo sapiens
tcaacattttctttc

SEQ ID NO: 55718 - DNA, 15 bp, Homo sapiens
ttcaacattttcttt

SEQ ID NO: 55719 - DNA, 15 bp, Homo sapiens
gttcaacattttctt

SEQ ID NO: 55720 - DNA, 15 bp, Homo sapiens
tgttcaacattttct

SEQ ID NO: 55721 - DNA, 15 bp, Homo sapiens
atgttcaacattttc

SEQ ID NO: 55722 - DNA, 15 bp, Homo sapiens
gatgttcaacatttt

SEQ ID NO: 55723 - DNA, 15 bp, Homo sapiens
agatgttcaacattt

SEQ ID NO: 55724 - DNA, 15 bp, Homo sapiens
aagatgttcaacatt

SEQ ID NO: 55725 - DNA, 15 bp, Homo sapiens
taagatgttcaacat

SEQ ID NO: 55726 - DNA, 15 bp, Homo sapiens
ttaagatgttcaaca

SEQ ID NO: 55727 - DNA, 15 bp, Homo sapiens
cttaagatgttcaac

SEQ ID NO: 55728 - DNA, 15 bp, Homo sapiens
tcttaagatgttcaa

SEQ ID NO: 55729 - DNA, 15 bp, Homo sapiens
ttcttaagatgttca

SEQ ID NO: 55730 - DNA, 15 bp, Homo sapiens
cttcttaagatgttc

SEQ ID NO: 55731 - DNA, 15 bp, Homo sapiens
tcttcttaagatgtt

SEQ ID NO: 55732 - DNA, 15 bp, Homo sapiens
ctcttcttaagatgt

SEQ ID NO: 55733 - DNA, 15 bp, Homo sapiens
cctcttcttaagatg

SEQ ID NO: 55734 - DNA, 15 bp, Homo sapiens
ccctcttcttaagat

SEQ ID NO: 55735 - DNA, 15 bp, Homo sapiens
accctcttcttaaga

SEQ ID NO: 55736 - DNA, 15 bp, Homo sapiens
gaccctcttcttaag

SEQ ID NO: 55737 - DNA, 15 bp, Homo sapiens
tgaccctcttcttaa

SEQ ID NO: 55738 - DNA, 15 bp, Homo sapiens
atgaccctcttctta

SEQ ID NO: 55739 - DNA, 15 bp, Homo sapiens
aatgaccctcttctt

SEQ ID NO: 55740 - DNA, 15 bp, Homo sapiens
aaatgaccctcttct

SEQ ID NO: 55741 - DNA, 15 bp, Homo sapiens
taaatgaccctcttc

SEQ ID NO: 55742 - DNA, 15 bp, Homo sapiens
ttaaatgaccctctt

SEQ ID NO: 55743 - DNA, 15 bp, Homo sapiens
tttaaatgaccctct

SEQ ID NO: 55744 - DNA, 15 bp, Homo sapiens
ttttaaatgaccctc

SEQ ID NO: 55745 - DNA, 15 bp, Homo sapiens
cttttaaatgaccct

SEQ ID NO: 55746 - DNA, 15 bp, Homo sapiens
ccttttaaatgaccc

SEQ ID NO: 55747 - DNA, 15 bp, Homo sapiens
gccttttaaatgacc

SEQ ID NO: 55748 - DNA, 15 bp, Homo sapiens
ggccttttaaatgac

SEQ ID NO: 55749 - DNA, 15 bp, Homo sapiens
aggccttttaaatga

SEQ ID NO: 55750 - DNA, 15 bp, Homo sapiens
gaggccttttaaatg

SEQ ID NO: 55751 - DNA, 15 bp, Homo sapiens
agaggccttttaaat

SEQ ID NO: 55752 - DNA, 15 bp, Homo sapiens
aagaggccttttaaa

SEQ ID NO: 55753 - DNA, 15 bp, Homo sapiens
taagaggccttttaa

SEQ ID NO: 55754 - DNA, 15 bp, Homo sapiens
ttaagaggcctttta

SEQ ID NO: 55755 - DNA, 15 bp, Homo sapiens
tttaagaggcctttt

SEQ ID NO: 55756 - DNA, 15 bp, Homo sapiens
ctttaagaggccttt

SEQ ID NO: 55757 - DNA, 15 bp, Homo sapiens
tctttaagaggcctt

SEQ ID NO: 55758 - DNA, 15 bp, Homo sapiens
atctttaagaggcct

SEQ ID NO: 55759 - DNA, 15 bp, Homo sapiens
gatctttaagaggcc

SEQ ID NO: 55760 - DNA, 15 bp, Homo sapiens
tgatctttaagaggc

SEQ ID NO: 55761 - DNA, 15 bp, Homo sapiens
atgatctttaagagg

SEQ ID NO: 55762 - DNA, 15 bp, Homo sapiens
catgatctttaagag

SEQ ID NO: 55763 - DNA, 15 bp, Homo sapiens
acatgatctttaaga

SEQ ID NO: 55764 - DNA, 15 bp, Homo sapiens
aacatgatctttaag

SEQ ID NO: 55765 - DNA, 15 bp, Homo sapiens
aaacatgatctttaa

SEQ ID NO: 55766 - DNA, 15 bp, Homo sapiens
caaacatgatcttta

SEQ ID NO: 55767 - DNA, 15 bp, Homo sapiens
acaaacatgatcttt

SEQ ID NO: 55768 - DNA, 15 bp, Homo sapiens
aacaaacatgatctt

SEQ ID NO: 55769 - DNA, 15 bp, Homo sapiens
taacaaacatgatct

SEQ ID NO: 55770 - DNA, 15 bp, Homo sapiens
gtaacaaacatgatc

SEQ ID NO: 55771 - DNA, 15 bp, Homo sapiens
tgtaacaaacatgat

SEQ ID NO: 55772 - DNA, 15 bp, Homo sapiens
ctgtaacaaacatga

SEQ ID NO: 55773 - DNA, 15 bp, Homo sapiens
actgtaacaaacatg

SEQ ID NO: 55774 - DNA, 15 bp, Homo sapiens
cactgtaacaaacat

SEQ ID NO: 55775 - DNA, 15 bp, Homo sapiens
gcactgtaacaaaca

SEQ ID NO: 55776 - DNA, 15 bp, Homo sapiens
agcactgtaacaaac

SEQ ID NO: 55777 - DNA, 15 bp, Homo sapiens
aagcactgtaacaaa

SEQ ID NO: 55778 - DNA, 15 bp, Homo sapiens
taagcactgtaacaa

SEQ ID NO: 55779 - DNA, 15 bp, Homo sapiens
ttaagcactgtaaca

SEQ ID NO: 55780 - DNA, 15 bp, Homo sapiens
tttaagcactgtaac

SEQ ID NO: 55781 - DNA, 15 bp, Homo sapiens
ttttaagcactgtaa

SEQ ID NO: 55782 - DNA, 15 bp, Homo sapiens
tttttaagcactgta

SEQ ID NO: 55783 - DNA, 15 bp, Homo sapiens
atttttaagcactgt

SEQ ID NO: 55784 - DNA, 15 bp, Homo sapiens
aatttttaagcactg

SEQ ID NO: 55785 - DNA, 15 bp, Homo sapiens
taatttttaagcact

SEQ ID NO: 55786 - DNA, 15 bp, Homo sapiens
ttaatttttaagcac

SEQ ID NO: 55787 - DNA, 15 bp, Homo sapiens
attaatttttaagca

SEQ ID NO: 55788 - DNA, 15 bp, Homo sapiens
tattaatttttaagc

SEQ ID NO: 55789 - DNA, 15 bp, Homo sapiens
atattaatttttaag

SEQ ID NO: 55790 - DNA, 15 bp, Homo sapiens
catattaatttttaa

SEQ ID NO: 55791 - DNA, 15 bp, Homo sapiens
acatattaattttta

SEQ ID NO: 55792 - DNA, 15 bp, Homo sapiens
aacatattaattttt

SEQ ID NO: 55793 - DNA, 15 bp, Homo sapiens
gaacatattaatttt

SEQ ID NO: 55794 - DNA, 15 bp, Homo sapiens
tgaacatattaattt

SEQ ID NO: 55795 - DNA, 15 bp, Homo sapiens
atgaacatattaatt

SEQ ID NO: 55796 - DNA, 15 bp, Homo sapiens
gatgaacatattaat

SEQ ID NO: 55797 - DNA, 15 bp, Homo sapiens
agatgaacatattaa

SEQ ID NO: 55798 - DNA, 15 bp, Homo sapiens
cagatgaacatatta

SEQ ID NO: 55799 - DNA, 15 bp, Homo sapiens
gcagatgaacatatt

SEQ ID NO: 55800 - DNA, 15 bp, Homo sapiens
tgcagatgaacatat

SEQ ID NO: 55801 - DNA, 15 bp, Homo sapiens
ttgcagatgaacata

SEQ ID NO: 55802 - DNA, 15 bp, Homo sapiens
tttgcagatgaacat

SEQ ID NO: 55803 - DNA, 15 bp, Homo sapiens
ttttgcagatgaaca

SEQ ID NO: 55804 - DNA, 15 bp, Homo sapiens
attttgcagatgaac

SEQ ID NO: 55805 - DNA, 15 bp, Homo sapiens
cattttgcagatgaa

SEQ ID NO: 55806 - DNA, 15 bp, Homo sapiens
ccattttgcagatga

SEQ ID NO: 55807 - DNA, 15 bp, Homo sapiens
tccattttgcagatg

SEQ ID NO: 55808 - DNA, 15 bp, Homo sapiens
ttccattttgcagat

SEQ ID NO: 55809 - DNA, 15 bp, Homo sapiens
attccattttgcaga

SEQ ID NO: 55810 - DNA, 15 bp, Homo sapiens
tattccattttgcag

SEQ ID NO: 55811 - DNA, 15 bp, Homo sapiens
ttattccattttgca

SEQ ID NO: 55812 - DNA, 15 bp, Homo sapiens
tttattccattttgc

SEQ ID NO: 55813 - DNA, 15 bp, Homo sapiens
ttttattccattttg

SEQ ID NO: 55814 - DNA, 15 bp, Homo sapiens
tttttattccatttt

SEQ ID NO: 55815 - DNA, 15 bp, Homo sapiens
ttttttattccattt

SEQ ID NO: 55816 - DNA, 15 bp, Homo sapiens
attttttattccatt

SEQ ID NO: 55817 - DNA, 15 bp, Homo sapiens
gattttttattccat

SEQ ID NO: 55818 - DNA, 15 bp, Homo sapiens
agattttttattcca

SEQ ID NO: 55819 - DNA, 15 bp, Homo sapiens
cagattttttattcc

SEQ ID NO: 55820 - DNA, 15 bp, Homo sapiens
acagattttttattc

SEQ ID NO: 55821 - DNA, 15 bp, Homo sapiens
aacagattttttatt

SEQ ID NO: 55822 - DNA, 15 bp, Homo sapiens
taacagattttttat

SEQ ID NO: 55823 - DNA, 15 bp, Homo sapiens
ttaacagatttttta

SEQ ID NO: 55824 - DNA, 15 bp, Homo sapiens
tttaacagatttttt

SEQ ID NO: 55825 - DNA, 15 bp, Homo sapiens
ttttaacagattttt

SEQ ID NO: 55826 - DNA, 15 bp, Homo sapiens
tttttaacagatttt

SEQ ID NO: 55827 - DNA, 15 bp, Homo sapiens
atttttaacagattt

SEQ ID NO: 55828 - DNA, 15 bp, Homo sapiens
tatttttaacagatt

SEQ ID NO: 55829 - DNA, 15 bp, Homo sapiens
atatttttaacagat

SEQ ID NO: 55830 - DNA, 15 bp, Homo sapiens
tatatttttaacaga

SEQ ID NO: 55831 - DNA, 15 bp, Homo sapiens
atatatttttaacag

SEQ ID NO: 55832 - DNA, 15 bp, Homo sapiens
aatatatttttaaca

SEQ ID NO: 55833 - DNA, 15 bp, Homo sapiens
aaatatatttttaac

SEQ ID NO: 55834 - DNA, 15 bp, Homo sapiens
gaaatatatttttaa

SEQ ID NO: 55835 - DNA, 15 bp, Homo sapiens
tgaaatatattttta

SEQ ID NO: 55836 - DNA, 15 bp, Homo sapiens
gtgaaatatattttt

SEQ ID NO: 55837 - DNA, 15 bp, Homo sapiens
agtgaaatatatttt

SEQ ID NO: 55838 - DNA, 15 bp, Homo sapiens
tagtgaaatatattt

SEQ ID NO: 55839 - DNA, 15 bp, Homo sapiens
ttagtgaaatatatt

SEQ ID NO: 55840 - DNA, 15 bp, Homo sapiens
tttagtgaaatatat

SEQ ID NO: 55841 - DNA, 15 bp, Homo sapiens
atttagtgaaatata

SEQ ID NO: 55842 - DNA, 15 bp, Homo sapiens
tatttagtgaaatat

SEQ ID NO: 55843 - DNA, 15 bp, Homo sapiens
ctatttagtgaaata

SEQ ID NO: 55844 - DNA, 15 bp, Homo sapiens
actatttagtgaaat

SEQ ID NO: 55845 - DNA, 15 bp, Homo sapiens
aactatttagtgaaa

SEQ ID NO: 55846 - DNA, 15 bp, Homo sapiens
aaactatttagtgaa

SEQ ID NO: 55847 - DNA, 15 bp, Homo sapiens
taaactatttagtga

SEQ ID NO: 55848 - DNA, 15 bp, Homo sapiens
ttaaactatttagtg

SEQ ID NO: 55849 - DNA, 15 bp, Homo sapiens
cttaaactatttagt

SEQ ID NO: 55850 - DNA, 15 bp, Homo sapiens
tcttaaactatttag

SEQ ID NO: 55851 - DNA, 15 bp, Homo sapiens
atcttaaactattta

SEQ ID NO: 55852 - DNA, 15 bp, Homo sapiens
catcttaaactattt

SEQ ID NO: 55853 - DNA, 15 bp, Homo sapiens
tcatcttaaactatt

SEQ ID NO: 55854 - DNA, 15 bp, Homo sapiens
ctcatcttaaactat

SEQ ID NO: 55855 - DNA, 15 bp, Homo sapiens
actcatcttaaacta

SEQ ID NO: 55856 - DNA, 15 bp, Homo sapiens
gactcatcttaaact

SEQ ID NO: 55857 - DNA, 15 bp, Homo sapiens
tgactcatcttaaac

SEQ ID NO: 55858 - DNA, 15 bp, Homo sapiens
atgactcatcttaaa

SEQ ID NO: 55859 - DNA, 15 bp, Homo sapiens
tatgactcatcttaa

SEQ ID NO: 55860 - DNA, 15 bp, Homo sapiens
atatgactcatctta

SEQ ID NO: 55861 - DNA, 15 bp, Homo sapiens
aatatgactcatctt

SEQ ID NO: 55862 - DNA, 15 bp, Homo sapiens
aaatatgactcatct

SEQ ID NO: 55863 - DNA, 15 bp, Homo sapiens
caaatatgactcatc

SEQ ID NO: 55864 - DNA, 15 bp, Homo sapiens
acaaatatgactcat

SEQ ID NO: 55865 - DNA, 15 bp, Homo sapiens
cacaaatatgactca

SEQ ID NO: 55866 - DNA, 15 bp, Homo sapiens
ccacaaatatgactc

SEQ ID NO: 55867 - DNA, 15 bp, Homo sapiens
cccacaaatatgact

SEQ ID NO: 55868 - DNA, 15 bp, Homo sapiens
acccacaaatatgac

SEQ ID NO: 55869 - DNA, 15 bp, Homo sapiens
aacccacaaatatga

SEQ ID NO: 55870 - DNA, 15 bp, Homo sapiens
aaacccacaaatatg

SEQ ID NO: 55871 - DNA, 15 bp, Homo sapiens
aaaacccacaaatat

SEQ ID NO: 55872 - DNA, 15 bp, Homo sapiens
gaaaacccacaaata

SEQ ID NO: 55873 - DNA, 15 bp, Homo sapiens
tgaaaacccacaaat

SEQ ID NO: 55874 - DNA, 15 bp, Homo sapiens
atgaaaacccacaaa

SEQ ID NO: 55875 - DNA, 15 bp, Homo sapiens
aatgaaaacccacaa

SEQ ID NO: 55876 - DNA, 15 bp, Homo sapiens
aaatgaaaacccaca

SEQ ID NO: 55877 - DNA, 15 bp, Homo sapiens
aaaatgaaaacccac

SEQ ID NO: 55878 - DNA, 15 bp, Homo sapiens
taaaatgaaaaccca

SEQ ID NO: 55879 - DNA, 15 bp, Homo sapiens
ttaaaatgaaaaccc

SEQ ID NO: 55880 - DNA, 15 bp, Homo sapiens
tttaaaatgaaaacc

SEQ ID NO: 55881 - DNA, 15 bp, Homo sapiens
atttaaaatgaaaac

SEQ ID NO: 55882 - DNA, 15 bp, Homo sapiens
aatttaaaatgaaaa

SEQ ID NO: 55883 - DNA, 15 bp, Homo sapiens
aaatttaaaatgaaa

SEQ ID NO: 55884 - DNA, 15 bp, Homo sapiens
aaaatttaaaatgaa

SEQ ID NO: 55885 - DNA, 15 bp, Homo sapiens
gaaaatttaaaatga

SEQ ID NO: 55886 - DNA, 15 bp, Homo sapiens
agaaaatttaaaatg

SEQ ID NO: 55887 - DNA, 15 bp, Homo sapiens
aagaaaatttaaaat

SEQ ID NO: 55888 - DNA, 15 bp, Homo sapiens
aaagaaaatttaaaa

SEQ ID NO: 55889 - DNA, 15 bp, Homo sapiens
gaaagaaaatttaaa

SEQ ID NO: 55890 - DNA, 15 bp, Homo sapiens
agaaagaaaatttaa

SEQ ID NO: 55891 - DNA, 15 bp, Homo sapiens
gagaaagaaaattta

SEQ ID NO: 55892 - DNA, 15 bp, Homo sapiens
agagaaagaaaattt

SEQ ID NO: 55893 - DNA, 15 bp, Homo sapiens
tagagaaagaaaatt

SEQ ID NO: 55894 - DNA, 15 bp, Homo sapiens
ctagagaaagaaaat

SEQ ID NO: 55895 - DNA, 15 bp, Homo sapiens
cctagagaaagaaaa

SEQ ID NO: 55896 - DNA, 15 bp, Homo sapiens
acctagagaaagaaa

SEQ ID NO: 55897 - DNA, 15 bp, Homo sapiens
cacctagagaaagaa

SEQ ID NO: 55898 - DNA, 15 bp, Homo sapiens
tcacctagagaaaga

SEQ ID NO: 55899 - DNA, 15 bp, Homo sapiens
ttcacctagagaaag

SEQ ID NO: 55900 - DNA, 15 bp, Homo sapiens
cttcacctagagaaa

SEQ ID NO: 55901 - DNA, 15 bp, Homo sapiens
gcttcacctagagaa

SEQ ID NO: 55902 - DNA, 15 bp, Homo sapiens
agcttcacctagaga

SEQ ID NO: 55903 - DNA, 15 bp, Homo sapiens
cagcttcacctagag

SEQ ID NO: 55904 - DNA, 15 bp, Homo sapiens
acagcttcacctaga

SEQ ID NO: 55905 - DNA, 15 bp, Homo sapiens
tacagcttcacctag

SEQ ID NO: 55906 - DNA, 15 bp, Homo sapiens
gtacagcttcaccta

SEQ ID NO: 55907 - DNA, 15 bp, Homo sapiens
agtacagcttcacct

SEQ ID NO: 55908 - DNA, 15 bp, Homo sapiens
aagtacagcttcacc

SEQ ID NO: 55909 - DNA, 15 bp, Homo sapiens
gaagtacagcttcac

SEQ ID NO: 55910 - DNA, 15 bp, Homo sapiens
tgaagtacagcttca

SEQ ID NO: 55911 - DNA, 15 bp, Homo sapiens
gtgaagtacagcttc

SEQ ID NO: 55912 - DNA, 15 bp, Homo sapiens
tgtgaagtacagctt

SEQ ID NO: 55913 - DNA, 15 bp, Homo sapiens
ttgtgaagtacagct

SEQ ID NO: 55914 - DNA, 15 bp, Homo sapiens
tttgtgaagtacagc

SEQ ID NO: 55915 - DNA, 15 bp, Homo sapiens
ttttgtgaagtacag

SEQ ID NO: 55916 - DNA, 15 bp, Homo sapiens
tttttgtgaagtaca

SEQ ID NO: 55917 - DNA, 15 bp, Homo sapiens
gtttttgtgaagtac

SEQ ID NO: 55918 - DNA, 15 bp, Homo sapiens
tgtttttgtgaagta

SEQ ID NO: 55919 - DNA, 15 bp, Homo sapiens
ctgtttttgtgaagt

SEQ ID NO: 55920 - DNA, 15 bp, Homo sapiens
actgtttttgtgaag

SEQ ID NO: 55921 - DNA, 15 bp, Homo sapiens
tactgtttttgtgaa

SEQ ID NO: 55922 - DNA, 15 bp, Homo sapiens
ctactgtttttgtga

SEQ ID NO: 55923 - DNA, 15 bp, Homo sapiens
tctactgtttttgtg

SEQ ID NO: 55924 - DNA, 15 bp, Homo sapiens
ctctactgtttttgt

SEQ ID NO: 55925 - DNA, 15 bp, Homo sapiens
cctctactgtttttg

SEQ ID NO: 55926 - DNA, 15 bp, Homo sapiens
tcctctactgttttt

SEQ ID NO: 55927 - DNA, 15 bp, Homo sapiens
ctcctctactgtttt

SEQ ID NO: 55928 - DNA, 15 bp, Homo sapiens
gctcctctactgttt

SEQ ID NO: 55929 - DNA, 15 bp, Homo sapiens
ggctcctctactgtt

SEQ ID NO: 55930 - DNA, 15 bp, Homo sapiens
cggctcctctactgt

SEQ ID NO: 55931 - DNA, 15 bp, Homo sapiens
acggctcctctactg

SEQ ID NO: 55932 - DNA, 15 bp, Homo sapiens
gacggctcctctact

SEQ ID NO: 55933 - DNA, 15 bp, Homo sapiens
tgacggctcctctac

SEQ ID NO: 55934 - DNA, 15 bp, Homo sapiens
ttgacggctcctcta

SEQ ID NO: 55935 - DNA, 15 bp, Homo sapiens
tttgacggctcctct

SEQ ID NO: 55936 - DNA, 15 bp, Homo sapiens
atttgacggctcctc

SEQ ID NO: 55937 - DNA, 15 bp, Homo sapiens
gatttgacggctcct

SEQ ID NO: 55938 - DNA, 15 bp, Homo sapiens
ggatttgacggctcc

SEQ ID NO: 55939 - DNA, 15 bp, Homo sapiens
tggatttgacggctc

SEQ ID NO: 55940 - DNA, 15 bp, Homo sapiens
ctggatttgacggct

SEQ ID NO: 55941 - DNA, 15 bp, Homo sapiens
tctggatttgacggc

SEQ ID NO: 55942 - DNA, 15 bp, Homo sapiens
ctctggatttgacgg

SEQ ID NO: 55943 - DNA, 15 bp, Homo sapiens
cctctggatttgacg

SEQ ID NO: 55944 - DNA, 15 bp, Homo sapiens
gcctctggatttgac

SEQ ID NO: 55945 - DNA, 15 bp, Homo sapiens
agcctctggatttga

SEQ ID NO: 55946 - DNA, 15 bp, Homo sapiens
tagcctctggatttg

SEQ ID NO: 55947 - DNA, 15 bp, Homo sapiens
ctagcctctggattt

SEQ ID NO: 55948 - DNA, 15 bp, Homo sapiens
gctagcctctggatt

SEQ ID NO: 55949 - DNA, 15 bp, Homo sapiens
tgctagcctctggat

SEQ ID NO: 55950 - DNA, 15 bp, Homo sapiens
ctgctagcctctgga

SEQ ID NO: 55951 - DNA, 15 bp, Homo sapiens
actgctagcctctgg

SEQ ID NO: 55952 - DNA, 15 bp, Homo sapiens
aactgctagcctctg

SEQ ID NO: 55953 - DNA, 15 bp, Homo sapiens
gaactgctagcctct

SEQ ID NO: 55954 - DNA, 15 bp, Homo sapiens
tgaactgctagcctc

SEQ ID NO: 55955 - DNA, 15 bp, Homo sapiens
ttgaactgctagcct

SEQ ID NO: 55956 - DNA, 15 bp, Homo sapiens
gttgaactgctagcc

SEQ ID NO: 55957 - DNA, 15 bp, Homo sapiens
agttgaactgctagc

SEQ ID NO: 55958 - DNA, 15 bp, Homo sapiens
aagttgaactgctag

SEQ ID NO: 55959 - DNA, 15 bp, Homo sapiens
gaagttgaactgcta

SEQ ID NO: 55960 - DNA, 15 bp, Homo sapiens
agaagttgaactgct

SEQ ID NO: 55961 - DNA, 15 bp, Homo sapiens
cagaagttgaactgc

SEQ ID NO: 55962 - DNA, 15 bp, Homo sapiens
acagaagttgaactg

SEQ ID NO: 55963 - DNA, 15 bp, Homo sapiens
tacagaagttgaact

SEQ ID NO: 55964 - DNA, 15 bp, Homo sapiens
ttacagaagttgaac

SEQ ID NO: 55965 - DNA, 15 bp, Homo sapiens
gttacagaagttgaa

SEQ ID NO: 55966 - DNA, 15 bp, Homo sapiens
tgttacagaagttga

SEQ ID NO: 55967 - DNA, 15 bp, Homo sapiens
gtgttacagaagttg

SEQ ID NO: 55968 - DNA, 15 bp, Homo sapiens
ggtgttacagaagtt

SEQ ID NO: 55969 - DNA, 15 bp, Homo sapiens
tggtgttacagaagt

SEQ ID NO: 55970 - DNA, 15 bp, Homo sapiens
ctggtgttacagaag

SEQ ID NO: 55971 - DNA, 15 bp, Homo sapiens
tctggtgttacagaa

SEQ ID NO: 55972 - DNA, 15 bp, Homo sapiens
atctggtgttacaga

SEQ ID NO: 55973 - DNA, 15 bp, Homo sapiens
catctggtgttacag

SEQ ID NO: 55974 - DNA, 15 bp, Homo sapiens
acatctggtgttaca

SEQ ID NO: 55975 - DNA, 15 bp, Homo sapiens
aacatctggtgttac

SEQ ID NO: 55976 - DNA, 15 bp, Homo sapiens
taacatctggtgtta

SEQ ID NO: 55977 - DNA, 15 bp, Homo sapiens
ctaacatctggtgtt

SEQ ID NO: 55978 - DNA, 15 bp, Homo sapiens
actaacatctggtgt

SEQ ID NO: 55979 - DNA, 15 bp, Homo sapiens
cactaacatctggtg

SEQ ID NO: 55980 - DNA, 15 bp, Homo sapiens
tcactaacatctggt

SEQ ID NO: 55981 - DNA, 15 bp, Homo sapiens
gtcactaacatctgg

SEQ ID NO: 55982 - DNA, 15 bp, Homo sapiens
tgtcactaacatctg

SEQ ID NO: 55983 - DNA, 15 bp, Homo sapiens
ttgtcactaacatct

SEQ ID NO: 55984 - DNA, 15 bp, Homo sapiens
attgtcactaacatc

SEQ ID NO: 55985 - DNA, 15 bp, Homo sapiens
cattgtcactaacat

SEQ ID NO: 55986 - DNA, 15 bp, Homo sapiens
tcattgtcactaaca

SEQ ID NO: 55987 - DNA, 15 bp, Homo sapiens
ttcattgtcactaac

SEQ ID NO: 55988 - DNA, 15 bp, Homo sapiens
gttcattgtcactaa

SEQ ID NO: 55989 - DNA, 15 bp, Homo sapiens
ggttcattgtcacta

SEQ ID NO: 55990 - DNA, 15 bp, Homo sapiens
aggttcattgtcact

SEQ ID NO: 55991 - DNA, 15 bp, Homo sapiens
caggttcattgtcac

SEQ ID NO: 55992 - DNA, 15 bp, Homo sapiens
tcaggttcattgtca

SEQ ID NO: 55993 - DNA, 15 bp, Homo sapiens
atcaggttcattgtc

SEQ ID NO: 55994 - DNA, 15 bp, Homo sapiens
gatcaggttcattgt

SEQ ID NO: 55995 - DNA, 15 bp, Homo sapiens
tgatcaggttcattg

SEQ ID NO: 55996 - DNA, 15 bp, Homo sapiens
atgatcaggttcatt

SEQ ID NO: 55997 - DNA, 15 bp, Homo sapiens
aatgatcaggttcat

SEQ ID NO: 55998 - DNA, 15 bp, Homo sapiens
taatgatcaggttca

SEQ ID NO: 55999 - DNA, 15 bp, Homo sapiens
ataatgatcaggttc

SEQ ID NO: 56000 - DNA, 15 bp, Homo sapiens
tataatgatcaggtt

SEQ ID NO: 56001 - DNA, 15 bp, Homo sapiens
ctataatgatcaggt

SEQ ID NO: 56002 - DNA, 15 bp, Homo sapiens
tctataatgatcagg

SEQ ID NO: 56003 - DNA, 15 bp, Homo sapiens
atctataatgatcag

SEQ ID NO: 56004 - DNA, 15 bp, Homo sapiens
tatctataatgatca

SEQ ID NO: 56005 - DNA, 15 bp, Homo sapiens
atatctataatgatc

SEQ ID NO: 56006 - DNA, 15 bp, Homo sapiens
aatatctataatgat

SEQ ID NO: 56007 - DNA, 15 bp, Homo sapiens
gaatatctataatga

SEQ ID NO: 56008 - DNA, 15 bp, Homo sapiens
agaatatctataatg

SEQ ID NO: 56009 - DNA, 15 bp, Homo sapiens
cagaatatctataat

SEQ ID NO: 56010 - DNA, 15 bp, Homo sapiens
tcagaatatctataa

SEQ ID NO: 56011 - DNA, 15 bp, Homo sapiens
gtcagaatatctata

SEQ ID NO: 56012 - DNA, 15 bp, Homo sapiens
tgtcagaatatctat

SEQ ID NO: 56013 - DNA, 15 bp, Homo sapiens
gtgtcagaatatcta

SEQ ID NO: 56014 - DNA, 15 bp, Homo sapiens
ggtgtcagaatatct

SEQ ID NO: 56015 - DNA, 15 bp, Homo sapiens
tggtgtcagaatatc

SEQ ID NO: 56016 - DNA, 15 bp, Homo sapiens
gtggtgtcagaatat

SEQ ID NO: 56017 - DNA, 15 bp, Homo sapiens
agtggtgtcagaata

SEQ ID NO: 56018 - DNA, 15 bp, Homo sapiens
cagtggtgtcagaat

SEQ ID NO: 56019 - DNA, 15 bp, Homo sapiens
tcagtggtgtcagaa

SEQ ID NO: 56020 - DNA, 15 bp, Homo sapiens
gtcagtggtgtcaga

SEQ ID NO: 56021 - DNA, 15 bp, Homo sapiens
agtcagtggtgtcag

SEQ ID NO: 56022 - DNA, 15 bp, Homo sapiens
gagtcagtggtgtca

SEQ ID NO: 56023 - DNA, 15 bp, Homo sapiens
agagtcagtggtgtc

SEQ ID NO: 56024 - DNA, 15 bp, Homo sapiens
cagagtcagtggtgt

SEQ ID NO: 56025 - DNA, 15 bp, Homo sapiens
tcagagtcagtggtg

SEQ ID NO: 56026 - DNA, 15 bp, Homo sapiens
atcagagtcagtggt

SEQ ID NO: 56027 - DNA, 15 bp, Homo sapiens
gatcagagtcagtgg

SEQ ID NO: 56028 - DNA, 15 bp, Homo sapiens
ggatcagagtcagtg

SEQ ID NO: 56029 - DNA, 15 bp, Homo sapiens
tggatcagagtcagt

SEQ ID NO: 56030 - DNA, 15 bp, Homo sapiens
ctggatcagagtcag

SEQ ID NO: 56031 - DNA, 15 bp, Homo sapiens
tctggatcagagtca

SEQ ID NO: 56032 - DNA, 15 bp, Homo sapiens
ctctggatcagagtc

SEQ ID NO: 56033 - DNA, 15 bp, Homo sapiens
tctctggatcagagt

SEQ ID NO: 56034 - DNA, 15 bp, Homo sapiens
ttctctggatcagag

SEQ ID NO: 56035 - DNA, 15 bp, Homo sapiens
attctctggatcaga

SEQ ID NO: 56036 - DNA, 15 bp, Homo sapiens
cattctctggatcag

SEQ ID NO: 56037 - DNA, 15 bp, Homo sapiens
tcattctctggatca

SEQ ID NO: 56038 - DNA, 15 bp, Homo sapiens
ttcattctctggatc

SEQ ID NO: 56039 - DNA, 15 bp, Homo sapiens
gttcattctctggat

SEQ ID NO: 56040 - DNA, 15 bp, Homo sapiens
ggttcattctctgga

SEQ ID NO: 56041 - DNA, 15 bp, Homo sapiens
aggttcattctctgg

SEQ ID NO: 56042 - DNA, 15 bp, Homo sapiens
aaggttcattctctg

SEQ ID NO: 56043 - DNA, 15 bp, Homo sapiens
aaaggttcattctct

SEQ ID NO: 56044 - DNA, 15 bp, Homo sapiens
aaaaggttcattctc

SEQ ID NO: 56045 - DNA, 15 bp, Homo sapiens
caaaaggttcattct

SEQ ID NO: 56046 - DNA, 15 bp, Homo sapiens
tcaaaaggttcattc

SEQ ID NO: 56047 - DNA, 15 bp, Homo sapiens
atcaaaaggttcatt

SEQ ID NO: 56048 - DNA, 15 bp, Homo sapiens
catcaaaaggttcat

SEQ ID NO: 56049 - DNA, 15 bp, Homo sapiens
tcatcaaaaggttca

SEQ ID NO: 56050 - DNA, 15 bp, Homo sapiens
ttcatcaaaaggttc

SEQ ID NO: 56051 - DNA, 15 bp, Homo sapiens
cttcatcaaaaggtt

SEQ ID NO: 56052 - DNA, 15 bp, Homo sapiens
tcttcatcaaaaggt

SEQ ID NO: 56053 - DNA, 15 bp, Homo sapiens
atcttcatcaaaagg

SEQ ID NO: 56054 - DNA, 15 bp, Homo sapiens
gatcttcatcaaaag

SEQ ID NO: 56055 - DNA, 15 bp, Homo sapiens
tgatcttcatcaaaa

SEQ ID NO: 56056 - DNA, 15 bp, Homo sapiens
ctgatcttcatcaaa

SEQ ID NO: 56057 - DNA, 15 bp, Homo sapiens
gctgatcttcatcaa

SEQ ID NO: 56058 - DNA, 15 bp, Homo sapiens
tgctgatcttcatca

SEQ ID NO: 56059 - DNA, 15 bp, Homo sapiens
atgctgatcttcatc

SEQ ID NO: 56060 - DNA, 15 bp, Homo sapiens
tatgctgatcttcat

SEQ ID NO: 56061 - DNA, 15 bp, Homo sapiens
gtatgctgatcttca

SEQ ID NO: 56062 - DNA, 15 bp, Homo sapiens
tgtatgctgatcttc

SEQ ID NO: 56063 - DNA, 15 bp, Homo sapiens
gtgtatgctgatctt

SEQ ID NO: 56064 - DNA, 15 bp, Homo sapiens
tgtgtatgctgatct

SEQ ID NO: 56065 - DNA, 15 bp, Homo sapiens
ttgtgtatgctgatc

SEQ ID NO: 56066 - DNA, 15 bp, Homo sapiens
tttgtgtatgctgat

SEQ ID NO: 56067 - DNA, 15 bp, Homo sapiens
atttgtgtatgctga

SEQ ID NO: 56068 - DNA, 15 bp, Homo sapiens
aatttgtgtatgctg

SEQ ID NO: 56069 - DNA, 15 bp, Homo sapiens
taatttgtgtatgct

SEQ ID NO: 56070 - DNA, 15 bp, Homo sapiens
gtaatttgtgtatgc

SEQ ID NO: 56071 - DNA, 15 bp, Homo sapiens
tgtaatttgtgtatg

SEQ ID NO: 56072 - DNA, 15 bp, Homo sapiens
ttgtaatttgtgtat

SEQ ID NO: 56073 - DNA, 15 bp, Homo sapiens
tttgtaatttgtgta

SEQ ID NO: 56074 - DNA, 15 bp, Homo sapiens
ttttgtaatttgtgt

SEQ ID NO: 56075 - DNA, 15 bp, Homo sapiens
cttttgtaatttgtg

SEQ ID NO: 56076 - DNA, 15 bp, Homo sapiens
acttttgtaatttgt

SEQ ID NO: 56077 - DNA, 15 bp, Homo sapiens
gacttttgtaatttg

SEQ ID NO: 56078 - DNA, 15 bp, Homo sapiens
agacttttgtaattt

SEQ ID NO: 56079 - DNA, 15 bp, Homo sapiens
cagacttttgtaatt

SEQ ID NO: 56080 - DNA, 15 bp, Homo sapiens
tcagacttttgtaat

SEQ ID NO: 56081 - DNA, 15 bp, Homo sapiens
ttcagacttttgtaa

SEQ ID NO: 56082 - DNA, 15 bp, Homo sapiens
attcagacttttgta

SEQ ID NO: 56083 - DNA, 15 bp, Homo sapiens
aattcagacttttgt

SEQ ID NO: 56084 - DNA, 15 bp, Homo sapiens
aaattcagacttttg

SEQ ID NO: 56085 - DNA, 15 bp, Homo sapiens
aaaattcagactttt

SEQ ID NO: 56086 - DNA, 15 bp, Homo sapiens
aaaaattcagacttt

SEQ ID NO: 56087 - DNA, 15 bp, Homo sapiens
aaaaaattcagactt

SEQ ID NO: 56088 - DNA, 15 bp, Homo sapiens
aaaaaaattcagact

SEQ ID NO: 56089 - DNA, 15 bp, Homo sapiens
aaaaaaaattcagac

SEQ ID NO: 56090 - DNA, 15 bp, Homo sapiens
aaaaaaaaattcaga

SEQ ID NO: 56091 - DNA, 15 bp, Homo sapiens
taaaaaaaaattcag

SEQ ID NO: 56092 - DNA, 15 bp, Homo sapiens
ataaaaaaaaattca

SEQ ID NO: 56093 - DNA, 15 bp, Homo sapiens
gataaaaaaaaattc

SEQ ID NO: 56094 - DNA, 15 bp, Homo sapiens
tgataaaaaaaaatt

SEQ ID NO: 56095 - DNA, 15 bp, Homo sapiens
ttgataaaaaaaaat

SEQ ID NO: 56096 - DNA, 15 bp, Homo sapiens
cttgataaaaaaaaa

SEQ ID NO: 56097 - DNA, 15 bp, Homo sapiens
tcttgataaaaaaaa

SEQ ID NO: 56098 - DNA, 15 bp, Homo sapiens
ctcttgataaaaaaa

SEQ ID NO: 56099 - DNA, 15 bp, Homo sapiens
cctcttgataaaaaa

SEQ ID NO: 56100 - DNA, 15 bp, Homo sapiens
ccctcttgataaaaa

SEQ ID NO: 56101 - DNA, 15 bp, Homo sapiens
tccctcttgataaaa

SEQ ID NO: 56102 - DNA, 15 bp, Homo sapiens
atccctcttgataaa

SEQ ID NO: 56103 - DNA, 15 bp, Homo sapiens
tatccctcttgataa

SEQ ID NO: 56104 - DNA, 15 bp, Homo sapiens
ttatccctcttgata

SEQ ID NO: 56105 - DNA, 15 bp, Homo sapiens
tttatccctcttgat

SEQ ID NO: 56106 - DNA, 15 bp, Homo sapiens
ttttatccctcttga

SEQ ID NO: 56107 - DNA, 15 bp, Homo sapiens
gttttatccctcttg

SEQ ID NO: 56108 - DNA, 15 bp, Homo sapiens
tgttttatccctctt

SEQ ID NO: 56109 - DNA, 15 bp, Homo sapiens
gtgttttatccctct

SEQ ID NO: 56110 - DNA, 15 bp, Homo sapiens
ggtgttttatccctc

SEQ ID NO: 56111 - DNA, 15 bp, Homo sapiens
tggtgttttatccct

SEQ ID NO: 56112 - DNA, 15 bp, Homo sapiens
atggtgttttatccc

SEQ ID NO: 56113 - DNA, 15 bp, Homo sapiens
catggtgttttatcc

SEQ ID NO: 56114 - DNA, 15 bp, Homo sapiens
tcatggtgttttatc

SEQ ID NO: 56115 - DNA, 15 bp, Homo sapiens
ttcatggtgttttat

SEQ ID NO: 56116 - DNA, 15 bp, Homo sapiens
tttcatggtgtttta

SEQ ID NO: 56117 - DNA, 15 bp, Homo sapiens
ttttcatggtgtttt

SEQ ID NO: 56118 - DNA, 15 bp, Homo sapiens
attttcatggtgttt

SEQ ID NO: 56119 - DNA, 15 bp, Homo sapiens
tattttcatggtgtt

SEQ ID NO: 56120 - DNA, 15 bp, Homo sapiens
ttattttcatggtgt

SEQ ID NO: 56121 - DNA, 15 bp, Homo sapiens
tttattttcatggtg

SEQ ID NO: 56122 - DNA, 15 bp, Homo sapiens
gtttattttcatggt

SEQ ID NO: 56123 - DNA, 15 bp, Homo sapiens
agtttattttcatgg

SEQ ID NO: 56124 - DNA, 15 bp, Homo sapiens
aagtttattttcatg

SEQ ID NO: 56125 - DNA, 15 bp, Homo sapiens
caagtttattttcat

SEQ ID NO: 56126 - DNA, 15 bp, Homo sapiens
tcaagtttattttca

SEQ ID NO: 56127 - DNA, 15 bp, Homo sapiens
ttcaagtttattttc

SEQ ID NO: 56128 - DNA, 15 bp, Homo sapiens
attcaagtttatttt

SEQ ID NO: 56129 - DNA, 15 bp, Homo sapiens
tattcaagtttattt

SEQ ID NO: 56130 - DNA, 15 bp, Homo sapiens
ttattcaagtttatt

SEQ ID NO: 56131 - DNA, 15 bp, Homo sapiens
tttattcaagtttat

SEQ ID NO: 56132 - DNA, 15 bp, Homo sapiens
gtttattcaagttta

SEQ ID NO: 56133 - DNA, 15 bp, Homo sapiens
agtttattcaagttt

SEQ ID NO: 56134 - DNA, 15 bp, Homo sapiens
cagtttattcaagtt

SEQ ID NO: 56135 - DNA, 15 bp, Homo sapiens
tcagtttattcaagt

SEQ ID NO: 56136 - DNA, 15 bp, Homo sapiens
ttcagtttattcaag

SEQ ID NO: 56137 - DNA, 15 bp, Homo sapiens
tttcagtttattcaa

SEQ ID NO: 56138 - DNA, 15 bp, Homo sapiens
ttttcagtttattca

SEQ ID NO: 56139 - DNA, 15 bp, Homo sapiens
attttcagtttattc

SEQ ID NO: 56140 - DNA, 15 bp, Homo sapiens
cattttcagtttatt

SEQ ID NO: 56141 - DNA, 15 bp, Homo sapiens
ccattttcagtttat

SEQ ID NO: 56142 - DNA, 15 bp, Homo sapiens
tccattttcagttta

SEQ ID NO: 56143 - DNA, 15 bp, Homo sapiens
gtccattttcagttt

SEQ ID NO: 56144 - DNA, 15 bp, Homo sapiens
ggtccattttcagtt

SEQ ID NO: 56145 - DNA, 15 bp, Homo sapiens
aggtccattttcagt

SEQ ID NO: 56146 - DNA, 15 bp, Homo sapiens
aaggtccattttcag

SEQ ID NO: 56147 - DNA, 15 bp, Homo sapiens
aaaggtccattttca

SEQ ID NO: 56148 - DNA, 15 bp, Homo sapiens
aaaaggtccattttc

SEQ ID NO: 56149 - DNA, 15 bp, Homo sapiens
aaaaaggtccatttt

SEQ ID NO: 56150 - DNA, 15 bp, Homo sapiens
aaaaaaggtccattt

SEQ ID NO: 56151 - DNA, 15 bp, Homo sapiens
aaaaaaaggtccatt

SEQ ID NO: 56152 - DNA, 15 bp, Homo sapiens
aaaaaaaaggtccat

SEQ ID NO: 56153 - DNA, 15 bp, Homo sapiens
aaaaaaaaaggtcca

SEQ ID NO: 56154 - DNA, 15 bp, Homo sapiens
aaaaaaaaaaggtcc

SEQ ID NO: 56155 - DNA, 15 bp, Homo sapiens
aaaaaaaaaaaggtc

SEQ ID NO: 56156 - DNA, 15 bp, Homo sapiens
taaaaaaaaaaaggt

SEQ ID NO: 56157 - DNA, 15 bp, Homo sapiens
ttaaaaaaaaaaagg

SEQ ID NO: 56158 - DNA, 15 bp, Homo sapiens
attaaaaaaaaaaag

SEQ ID NO: 56159 - DNA, 15 bp, Homo sapiens
cattaaaaaaaaaaa

SEQ ID NO: 56160 - DNA, 15 bp, Homo sapiens
ccattaaaaaaaaaa

SEQ ID NO: 56161 - DNA, 15 bp, Homo sapiens
gccattaaaaaaaaa

SEQ ID NO: 56162 - DNA, 15 bp, Homo sapiens
tgccattaaaaaaaa

SEQ ID NO: 56163 - DNA, 15 bp, Homo sapiens
ttgccattaaaaaaa

SEQ ID NO: 56164 - DNA, 15 bp, Homo sapiens
attgccattaaaaaa

SEQ ID NO: 56165 - DNA, 15 bp, Homo sapiens
tattgccattaaaaa

SEQ ID NO: 56166 - DNA, 15 bp, Homo sapiens
ctattgccattaaaa

SEQ ID NO: 56167 - DNA, 15 bp, Homo sapiens
cctattgccattaaa

SEQ ID NO: 56168 - DNA, 15 bp, Homo sapiens
tcctattgccattaa

SEQ ID NO: 56169 - DNA, 15 bp, Homo sapiens
gtcctattgccatta

SEQ ID NO: 56170 - DNA, 15 bp, Homo sapiens
tgtcctattgccatt

SEQ ID NO: 56171 - DNA, 15 bp, Homo sapiens
atgtcctattgccat

SEQ ID NO: 56172 - DNA, 15 bp, Homo sapiens
aatgtcctattgcca

SEQ ID NO: 56173 - DNA, 15 bp, Homo sapiens
caatgtcctattgcc

SEQ ID NO: 56174 - DNA, 15 bp, Homo sapiens
acaatgtcctattgc

SEQ ID NO: 56175 - DNA, 15 bp, Homo sapiens
cacaatgtcctattg

SEQ ID NO: 56176 - DNA, 15 bp, Homo sapiens
acacaatgtcctatt

SEQ ID NO: 56177 - DNA, 15 bp, Homo sapiens
gacacaatgtcctat

SEQ ID NO: 56178 - DNA, 15 bp, Homo sapiens
tgacacaatgtccta

SEQ ID NO: 56179 - DNA, 15 bp, Homo sapiens
ctgacacaatgtcct

SEQ ID NO: 56180 - DNA, 15 bp, Homo sapiens
tctgacacaatgtcc

SEQ ID NO: 56181 - DNA, 15 bp, Homo sapiens
atctgacacaatgtc

SEQ ID NO: 56182 - DNA, 15 bp, Homo sapiens
aatctgacacaatgt

SEQ ID NO: 56183 - DNA, 15 bp, Homo sapiens
taatctgacacaatg

SEQ ID NO: 56184 - DNA, 15 bp, Homo sapiens
gtaatctgacacaat

SEQ ID NO: 56185 - DNA, 15 bp, Homo sapiens
ggtaatctgacacaa

SEQ ID NO: 56186 - DNA, 15 bp, Homo sapiens
tggtaatctgacaca

SEQ ID NO: 56187 - DNA, 15 bp, Homo sapiens
ctggtaatctgacac

SEQ ID NO: 56188 - DNA, 15 bp, Homo sapiens
actggtaatctgaca

SEQ ID NO: 56189 - DNA, 15 bp, Homo sapiens
aactggtaatctgac

SEQ ID NO: 56190 - DNA, 15 bp, Homo sapiens
taactggtaatctga

SEQ ID NO: 56191 - DNA, 15 bp, Homo sapiens
ataactggtaatctg

SEQ ID NO: 56192 - DNA, 15 bp, Homo sapiens
tataactggtaatct

SEQ ID NO: 56193 - DNA, 15 bp, Homo sapiens
ctataactggtaatc

SEQ ID NO: 56194 - DNA, 15 bp, Homo sapiens
cctataactggtaat

SEQ ID NO: 56195 - DNA, 15 bp, Homo sapiens
tcctataactggtaa

SEQ ID NO: 56196 - DNA, 15 bp, Homo sapiens
ttcctataactggta

SEQ ID NO: 56197 - DNA, 15 bp, Homo sapiens
gttcctataactggt

SEQ ID NO: 56198 - DNA, 15 bp, Homo sapiens
tgttcctataactgg

SEQ ID NO: 56199 - DNA, 15 bp, Homo sapiens
ttgttcctataactg

SEQ ID NO: 56200 - DNA, 15 bp, Homo sapiens
attgttcctataact

SEQ ID NO: 56201 - DNA, 15 bp, Homo sapiens
aattgttcctataac

SEQ ID NO: 56202 - DNA, 15 bp, Homo sapiens
gaattgttcctataa

SEQ ID NO: 56203 - DNA, 15 bp, Homo sapiens
agaattgttcctata

SEQ ID NO: 56204 - DNA, 15 bp, Homo sapiens
gagaattgttcctat

SEQ ID NO: 56205 - DNA, 15 bp, Homo sapiens
agagaattgttccta

SEQ ID NO: 56206 - DNA, 15 bp, Homo sapiens
aagagaattgttcct

SEQ ID NO: 56207 - DNA, 15 bp, Homo sapiens
aaagagaattgttcc

SEQ ID NO: 56208 - DNA, 15 bp, Homo sapiens
aaaagagaattgttc

SEQ ID NO: 56209 - DNA, 15 bp, Homo sapiens
gaaaagagaattgtt

SEQ ID NO: 56210 - DNA, 15 bp, Homo sapiens
ggaaaagagaattgt

SEQ ID NO: 56211 - DNA, 15 bp, Homo sapiens
aggaaaagagaattg

SEQ ID NO: 56212 - DNA, 15 bp, Homo sapiens
caggaaaagagaatt

SEQ ID NO: 56213 - DNA, 15 bp, Homo sapiens
tcaggaaaagagaat

SEQ ID NO: 56214 - DNA, 15 bp, Homo sapiens
gtcaggaaaagagaa

SEQ ID NO: 56215 - DNA, 15 bp, Homo sapiens
ggtcaggaaaagaga

SEQ ID NO: 56216 - DNA, 15 bp, Homo sapiens
tggtcaggaaaagag

SEQ ID NO: 56217 - DNA, 15 bp, Homo sapiens
ttggtcaggaaaaga

SEQ ID NO: 56218 - DNA, 15 bp, Homo sapiens
attggtcaggaaaag

SEQ ID NO: 56219 - DNA, 15 bp, Homo sapiens
gattggtcaggaaaa

SEQ ID NO: 56220 - DNA, 15 bp, Homo sapiens
agattggtcaggaaa

SEQ ID NO: 56221 - DNA, 15 bp, Homo sapiens
aagattggtcaggaa

SEQ ID NO: 56222 - DNA, 15 bp, Homo sapiens
caagattggtcagga

SEQ ID NO: 56223 - DNA, 15 bp, Homo sapiens
acaagattggtcagg

SEQ ID NO: 56224 - DNA, 15 bp, Homo sapiens
aacaagattggtcag

SEQ ID NO: 56225 - DNA, 15 bp, Homo sapiens
aaacaagattggtca

SEQ ID NO: 56226 - DNA, 15 bp, Homo sapiens
aaaacaagattggtc

SEQ ID NO: 56227 - DNA, 15 bp, Homo sapiens
taaaacaagattggt

SEQ ID NO: 56228 - DNA, 15 bp, Homo sapiens
gtaaaacaagattgg

SEQ ID NO: 56229 - DNA, 15 bp, Homo sapiens
ggtaaaacaagattg

SEQ ID NO: 56230 - DNA, 15 bp, Homo sapiens
gggtaaaacaagatt

SEQ ID NO: 56231 - DNA, 15 bp, Homo sapiens
agggtaaaacaagat

SEQ ID NO: 56232 - DNA, 15 bp, Homo sapiens
tagggtaaaacaaga

SEQ ID NO: 56233 - DNA, 15 bp, Homo sapiens
atagggtaaaacaag

SEQ ID NO: 56234 - DNA, 15 bp, Homo sapiens
tatagggtaaaacaa

SEQ ID NO: 56235 - DNA, 15 bp, Homo sapiens
gtatagggtaaaaca

SEQ ID NO: 56236 - DNA, 15 bp, Homo sapiens
tgtatagggtaaaac

SEQ ID NO: 56237 - DNA, 15 bp, Homo sapiens
atgtatagggtaaaa

SEQ ID NO: 56238 - DNA, 15 bp, Homo sapiens
gatgtatagggtaaa

SEQ ID NO: 56239 - DNA, 15 bp, Homo sapiens
ggatgtatagggtaa

SEQ ID NO: 56240 - DNA, 15 bp, Homo sapiens
tggatgtatagggta

SEQ ID NO: 56241 - DNA, 15 bp, Homo sapiens
gtggatgtatagggt

SEQ ID NO: 56242 - DNA, 15 bp, Homo sapiens
tgtggatgtataggg

SEQ ID NO: 56243 - DNA, 15 bp, Homo sapiens
ctgtggatgtatagg

SEQ ID NO: 56244 - DNA, 15 bp, Homo sapiens
cctgtggatgtatag

SEQ ID NO: 56245 - DNA, 15 bp, Homo sapiens
ccctgtggatgtata

SEQ ID NO: 56246 - DNA, 15 bp, Homo sapiens
accctgtggatgtat

SEQ ID NO: 56247 - DNA, 15 bp, Homo sapiens
aaccctgtggatgta

SEQ ID NO: 56248 - DNA, 15 bp, Homo sapiens
aaaccctgtggatgt

SEQ ID NO: 56249 - DNA, 15 bp, Homo sapiens
aaaaccctgtggatg

SEQ ID NO: 56250 - DNA, 15 bp, Homo sapiens
caaaaccctgtggat

SEQ ID NO: 56251 - DNA, 15 bp, Homo sapiens
tcaaaaccctgtgga

SEQ ID NO: 56252 - DNA, 15 bp, Homo sapiens
gtcaaaaccctgtgg

SEQ ID NO: 56253 - DNA, 15 bp, Homo sapiens
tgtcaaaaccctgtg

SEQ ID NO: 56254 - DNA, 15 bp, Homo sapiens
gtgtcaaaaccctgt

SEQ ID NO: 56255 - DNA, 15 bp, Homo sapiens
agtgtcaaaaccctg

SEQ ID NO: 56256 - DNA, 15 bp, Homo sapiens
aagtgtcaaaaccct

SEQ ID NO: 56257 - DNA, 15 bp, Homo sapiens
caagtgtcaaaaccc

SEQ ID NO: 56258 - DNA, 15 bp, Homo sapiens
acaagtgtcaaaacc

SEQ ID NO: 56259 - DNA, 15 bp, Homo sapiens
aacaagtgtcaaaac

SEQ ID NO: 56260 - DNA, 15 bp, Homo sapiens
caacaagtgtcaaaa

SEQ ID NO: 56261 - DNA, 15 bp, Homo sapiens
acaacaagtgtcaaa

SEQ ID NO: 56262 - DNA, 15 bp, Homo sapiens
gacaacaagtgtcaa

SEQ ID NO: 56263 - DNA, 15 bp, Homo sapiens
ggacaacaagtgtca

SEQ ID NO: 56264 - DNA, 15 bp, Homo sapiens
tggacaacaagtgtc

SEQ ID NO: 56265 - DNA, 15 bp, Homo sapiens
ctggacaacaagtgt

SEQ ID NO: 56266 - DNA, 15 bp, Homo sapiens
actggacaacaagtg

SEQ ID NO: 56267 - DNA, 15 bp, Homo sapiens
aactggacaacaagt

SEQ ID NO: 56268 - DNA, 15 bp, Homo sapiens
caactggacaacaag

SEQ ID NO: 56269 - DNA, 15 bp, Homo sapiens
tcaactggacaacaa

SEQ ID NO: 56270 - DNA, 15 bp, Homo sapiens
ttcaactggacaaca

SEQ ID NO: 56271 - DNA, 15 bp, Homo sapiens
tttcaactggacaac

SEQ ID NO: 56272 - DNA, 15 bp, Homo sapiens
ttttcaactggacaa

SEQ ID NO: 56273 - DNA, 15 bp, Homo sapiens
tttttcaactggaca

SEQ ID NO: 56274 - DNA, 15 bp, Homo sapiens
ttttttcaactggac

SEQ ID NO: 56275 - DNA, 15 bp, Homo sapiens
cttttttcaactgga

SEQ ID NO: 56276 - DNA, 15 bp, Homo sapiens
ccttttttcaactgg

SEQ ID NO: 56277 - DNA, 15 bp, Homo sapiens
accttttttcaactg

SEQ ID NO: 56278 - DNA, 15 bp, Homo sapiens
aaccttttttcaact

SEQ ID NO: 56279 - DNA, 15 bp, Homo sapiens
caaccttttttcaac

SEQ ID NO: 56280 - DNA, 15 bp, Homo sapiens
acaaccttttttcaa

SEQ ID NO: 56281 - DNA, 15 bp, Homo sapiens
cacaaccttttttca

SEQ ID NO: 56282 - DNA, 15 bp, Homo sapiens
acacaaccttttttc

SEQ ID NO: 56283 - DNA, 15 bp, Homo sapiens
tacacaacctttttt

SEQ ID NO: 56284 - DNA, 15 bp, Homo sapiens
ctacacaaccttttt

SEQ ID NO: 56285 - DNA, 15 bp, Homo sapiens
gctacacaacctttt

SEQ ID NO: 56286 - DNA, 15 bp, Homo sapiens
agctacacaaccttt

SEQ ID NO: 56287 - DNA, 15 bp, Homo sapiens
cagctacacaacctt

SEQ ID NO: 56288 - DNA, 15 bp, Homo sapiens
acagctacacaacct

SEQ ID NO: 56289 - DNA, 15 bp, Homo sapiens
cacagctacacaacc

SEQ ID NO: 56290 - DNA, 15 bp, Homo sapiens
acacagctacacaac

SEQ ID NO: 56291 - DNA, 15 bp, Homo sapiens
gacacagctacacaa

SEQ ID NO: 56292 - DNA, 15 bp, Homo sapiens
tgacacagctacaca

SEQ ID NO: 56293 - DNA, 15 bp, Homo sapiens
atgacacagctacac

SEQ ID NO: 56294 - DNA, 15 bp, Homo sapiens
catgacacagctaca

SEQ ID NO: 56295 - DNA, 15 bp, Homo sapiens
acatgacacagctac

SEQ ID NO: 56296 - DNA, 15 bp, Homo sapiens
tacatgacacagcta

SEQ ID NO: 56297 - DNA, 15 bp, Homo sapiens
atacatgacacagct

SEQ ID NO: 56298 - DNA, 15 bp, Homo sapiens
tatacatgacacagc

SEQ ID NO: 56299 - DNA, 15 bp, Homo sapiens
atatacatgacacag

SEQ ID NO: 56300 - DNA, 15 bp, Homo sapiens
tatatacatgacaca

SEQ ID NO: 56301 - DNA, 15 bp, Homo sapiens
gtatatacatgacac

SEQ ID NO: 56302 - DNA, 15 bp, Homo sapiens
ggtatatacatgaca

SEQ ID NO: 56303 - DNA, 15 bp, Homo sapiens
aggtatatacatgac

SEQ ID NO: 56304 - DNA, 15 bp, Homo sapiens
aaggtatatacatga

SEQ ID NO: 56305 - DNA, 15 bp, Homo sapiens
aaaggtatatacatg

SEQ ID NO: 56306 - DNA, 15 bp, Homo sapiens
aaaaggtatatacat

SEQ ID NO: 56307 - DNA, 15 bp, Homo sapiens
aaaaaggtatataca

SEQ ID NO: 56308 - DNA, 15 bp, Homo sapiens
caaaaaggtatatac

SEQ ID NO: 56309 - DNA, 15 bp, Homo sapiens
acaaaaaggtatata

SEQ ID NO: 56310 - DNA, 15 bp, Homo sapiens
cacaaaaaggtatat

SEQ ID NO: 56311 - DNA, 15 bp, Homo sapiens
acacaaaaaggtata

SEQ ID NO: 56312 - DNA, 15 bp, Homo sapiens
gacacaaaaaggtat

SEQ ID NO: 56313 - DNA, 15 bp, Homo sapiens
tgacacaaaaaggta

SEQ ID NO: 56314 - DNA, 15 bp, Homo sapiens
ttgacacaaaaaggt

SEQ ID NO: 56315 - DNA, 15 bp, Homo sapiens
tttgacacaaaaagg

SEQ ID NO: 56316 - DNA, 15 bp, Homo sapiens
ttttgacacaaaaag

SEQ ID NO: 56317 - DNA, 15 bp, Homo sapiens
cttttgacacaaaaa

SEQ ID NO: 56318 - DNA, 15 bp, Homo sapiens
ccttttgacacaaaa

SEQ ID NO: 56319 - DNA, 15 bp, Homo sapiens
tccttttgacacaaa

SEQ ID NO: 56320 - DNA, 15 bp, Homo sapiens
gtccttttgacacaa

SEQ ID NO: 56321 - DNA, 15 bp, Homo sapiens
tgtccttttgacaca

SEQ ID NO: 56322 - DNA, 15 bp, Homo sapiens
atgtccttttgacac

SEQ ID NO: 56323 - DNA, 15 bp, Homo sapiens
aatgtccttttgaca

SEQ ID NO: 56324 - DNA, 15 bp, Homo sapiens
aaatgtccttttgac

SEQ ID NO: 56325 - DNA, 15 bp, Homo sapiens
taaatgtccttttga

SEQ ID NO: 56326 - DNA, 15 bp, Homo sapiens
ttaaatgtccttttg

SEQ ID NO: 56327 - DNA, 15 bp, Homo sapiens
tttaaatgtcctttt

SEQ ID NO: 56328 - DNA, 15 bp, Homo sapiens
ttttaaatgtccttt

SEQ ID NO: 56329 - DNA, 15 bp, Homo sapiens
attttaaatgtcctt

SEQ ID NO: 56330 - DNA, 15 bp, Homo sapiens
aattttaaatgtcct

SEQ ID NO: 56331 - DNA, 15 bp, Homo sapiens
gaattttaaatgtcc

SEQ ID NO: 56332 - DNA, 15 bp, Homo sapiens
tgaattttaaatgtc

SEQ ID NO: 56333 - DNA, 15 bp, Homo sapiens
ttgaattttaaatgt

SEQ ID NO: 56334 - DNA, 15 bp, Homo sapiens
attgaattttaaatg

SEQ ID NO: 56335 - DNA, 15 bp, Homo sapiens
aattgaattttaaat

SEQ ID NO: 56336 - DNA, 15 bp, Homo sapiens
taattgaattttaaa

SEQ ID NO: 56337 - DNA, 15 bp, Homo sapiens
ctaattgaattttaa

SEQ ID NO: 56338 - DNA, 15 bp, Homo sapiens
cctaattgaatttta

SEQ ID NO: 56339 - DNA, 15 bp, Homo sapiens
tcctaattgaatttt

SEQ ID NO: 56340 - DNA, 15 bp, Homo sapiens
atcctaattgaattt

SEQ ID NO: 56341 - DNA, 15 bp, Homo sapiens
aatcctaattgaatt

SEQ ID NO: 56342 - DNA, 15 bp, Homo sapiens
taatcctaattgaat

SEQ ID NO: 56343 - DNA, 15 bp, Homo sapiens
ttaatcctaattgaa

SEQ ID NO: 56344 - DNA, 15 bp, Homo sapiens
attaatcctaattga

SEQ ID NO: 56345 - DNA, 15 bp, Homo sapiens
tattaatcctaattg

SEQ ID NO: 56346 - DNA, 15 bp, Homo sapiens
ttattaatcctaatt

SEQ ID NO: 56347 - DNA, 15 bp, Homo sapiens
tttattaatcctaat

SEQ ID NO: 56348 - DNA, 15 bp, Homo sapiens
ctttattaatcctaa

SEQ ID NO: 56349 - DNA, 15 bp, Homo sapiens
tctttattaatccta

SEQ ID NO: 56350 - DNA, 15 bp, Homo sapiens
atctttattaatcct

SEQ ID NO: 56351 - DNA, 15 bp, Homo sapiens
catctttattaatcc

SEQ ID NO: 56352 - DNA, 15 bp, Homo sapiens
ccatctttattaatc

SEQ ID NO: 56353 - DNA, 15 bp, Homo sapiens
gccatctttattaat

SEQ ID NO: 56354 - DNA, 15 bp, Homo sapiens
tgccatctttattaa

SEQ ID NO: 56355 - DNA, 15 bp, Homo sapiens
gtgccatctttatta

SEQ ID NO: 56356 - DNA, 15 bp, Homo sapiens
agtgccatctttatt

SEQ ID NO: 56357 - DNA, 15 bp, Homo sapiens
aagtgccatctttat

SEQ ID NO: 56358 - DNA, 15 bp, Homo sapiens
aaagtgccatcttta

SEQ ID NO: 56359 - DNA, 15 bp, Homo sapiens
gaaagtgccatcttt

SEQ ID NO: 56360 - DNA, 15 bp, Homo sapiens
ggaaagtgccatctt

SEQ ID NO: 56361 - DNA, 15 bp, Homo sapiens
gggaaagtgccatct

SEQ ID NO: 56362 - DNA, 15 bp, Homo sapiens
cgggaaagtgccatc

SEQ ID NO: 56363 - DNA, 15 bp, Homo sapiens
acgggaaagtgccat

SEQ ID NO: 56364 - DNA, 15 bp, Homo sapiens
aacgggaaagtgcca

SEQ ID NO: 56365 - DNA, 15 bp, Homo sapiens
aaacgggaaagtgcc

SEQ ID NO: 56366 - DNA, 15 bp, Homo sapiens
aaaacgggaaagtgc

SEQ ID NO: 56367 - DNA, 15 bp, Homo sapiens
taaaacgggaaagtg

SEQ ID NO: 56368 - DNA, 15 bp, Homo sapiens
ataaaacgggaaagt

SEQ ID NO: 56369 - DNA, 15 bp, Homo sapiens
aataaaacgggaaag

SEQ ID NO: 56370 - DNA, 15 bp, Homo sapiens
gaataaaacgggaaa

SEQ ID NO: 56371 - DNA, 15 bp, Homo sapiens
ggaataaaacgggaa

SEQ ID NO: 56372 - DNA, 15 bp, Homo sapiens
tggaataaaacggga

SEQ ID NO: 56373 - DNA, 15 bp, Homo sapiens
ctggaataaaacggg

SEQ ID NO: 56374 - DNA, 15 bp, Homo sapiens
actggaataaaacgg

SEQ ID NO: 56375 - DNA, 15 bp, Homo sapiens
aactggaataaaacg

SEQ ID NO: 56376 - DNA, 15 bp, Homo sapiens
aaactggaataaaac

SEQ ID NO: 56377 - DNA, 15 bp, Homo sapiens
aaaactggaataaaa

SEQ ID NO: 56378 - DNA, 15 bp, Homo sapiens
taaaactggaataaa

SEQ ID NO: 56379 - DNA, 15 bp, Homo sapiens
ataaaactggaataa

SEQ ID NO: 56380 - DNA, 15 bp, Homo sapiens
tataaaactggaata

SEQ ID NO: 56381 - DNA, 15 bp, Homo sapiens
ttataaaactggaat

SEQ ID NO: 56382 - DNA, 15 bp, Homo sapiens
tttataaaactggaa

SEQ ID NO: 56383 - DNA, 15 bp, Homo sapiens
ttttataaaactgga

SEQ ID NO: 56384 - DNA, 15 bp, Homo sapiens
tttttataaaactgg

SEQ ID NO: 56385 - DNA, 15 bp, Homo sapiens
ctttttataaaactg

SEQ ID NO: 56386 - DNA, 15 bp, Homo sapiens
actttttataaaact

SEQ ID NO: 56387 - DNA, 15 bp, Homo sapiens
cactttttataaaac

SEQ ID NO: 56388 - DNA, 15 bp, Homo sapiens
ccactttttataaaa

SEQ ID NO: 56389 - DNA, 15 bp, Homo sapiens
tccactttttataaa

SEQ ID NO: 56390 - DNA, 15 bp, Homo sapiens
ctccactttttataa

SEQ ID NO: 56391 - DNA, 15 bp, Homo sapiens
tctccactttttata

SEQ ID NO: 56392 - DNA, 15 bp, Homo sapiens
gtctccactttttat

SEQ ID NO: 56393 - DNA, 15 bp, Homo sapiens
tgtctccacttttta

SEQ ID NO: 56394 - DNA, 15 bp, Homo sapiens
ctgtctccacttttt

SEQ ID NO: 56395 - DNA, 15 bp, Homo sapiens
tctgtctccactttt

SEQ ID NO: 56396 - DNA, 15 bp, Homo sapiens
atcagtctgtctcca

SEQ ID NO: 56397 - DNA, 15 bp, Homo sapiens
catcagtctgtctcc

SEQ ID NO: 56398 - DNA, 15 bp, Homo sapiens
acatcagtctgtctc

SEQ ID NO: 56399 - DNA, 15 bp, Homo sapiens
cacatcagtctgtct

SEQ ID NO: 56400 - DNA, 15 bp, Homo sapiens
acacatcagtctgtc

SEQ ID NO: 56401 - DNA, 15 bp, Homo sapiens
tacacatcagtctgt

SEQ ID NO: 56402 - DNA, 15 bp, Homo sapiens
atacacatcagtctg

SEQ ID NO: 56403 - DNA, 15 bp, Homo sapiens
tatacacatcagtct

SEQ ID NO: 56404 - DNA, 15 bp, Homo sapiens
gtatacacatcagtc

SEQ ID NO: 56405 - DNA, 15 bp, Homo sapiens
cgtatacacatcagt

SEQ ID NO: 56406 - DNA, 15 bp, Homo sapiens
acgtatacacatcag

SEQ ID NO: 56407 - DNA, 15 bp, Homo sapiens
tacgtatacacatca

SEQ ID NO: 56408 - DNA, 15 bp, Homo sapiens
ctacgtatacacatc

SEQ ID NO: 56409 - DNA, 15 bp, Homo sapiens
cctacgtatacacat

SEQ ID NO: 56410 - DNA, 15 bp, Homo sapiens
tcctacgtatacaca

SEQ ID NO: 56411 - DNA, 15 bp, Homo sapiens
ttcctacgtatacac

SEQ ID NO: 56412 - DNA, 15 bp, Homo sapiens
attcctacgtataca

SEQ ID NO: 56413 - DNA, 15 bp, Homo sapiens
aattcctacgtatac

SEQ ID NO: 56414 - DNA, 15 bp, Homo sapiens
aaattcctacgtata

SEQ ID NO: 56415 - DNA, 15 bp, Homo sapiens
aaaattcctacgtat

SEQ ID NO: 56416 - DNA, 15 bp, Homo sapiens
aaaaattcctacgta

SEQ ID NO: 56417 - DNA, 15 bp, Homo sapiens
aaaaaattcctacgt

SEQ ID NO: 56418 - DNA, 15 bp, Homo sapiens
gaaaaaattcctacg

SEQ ID NO: 56419 - DNA, 15 bp, Homo sapiens
ggaaaaaattcctac

SEQ ID NO: 56420 - DNA, 15 bp, Homo sapiens
aggaaaaaattccta

SEQ ID NO: 56421 - DNA, 15 bp, Homo sapiens
aaggaaaaaattcct

SEQ ID NO: 56422 - DNA, 15 bp, Homo sapiens
aaaggaaaaaattcc

SEQ ID NO: 56423 - DNA, 15 bp, Homo sapiens
aaaaggaaaaaattc

SEQ ID NO: 56424 - DNA, 15 bp, Homo sapiens
caaaaggaaaaaatt

SEQ ID NO: 56425 - DNA, 15 bp, Homo sapiens
acaaaaggaaaaaat

SEQ ID NO: 56426 - DNA, 15 bp, Homo sapiens
cacaaaaggaaaaaa

SEQ ID NO: 56427 - DNA, 15 bp, Homo sapiens
acacaaaaggaaaaa

SEQ ID NO: 56428 - DNA, 15 bp, Homo sapiens
aacacaaaaggaaaa

SEQ ID NO: 56429 - DNA, 15 bp, Homo sapiens
gaacacaaaaggaaa

SEQ ID NO: 56430 - DNA, 15 bp, Homo sapiens
agaacacaaaaggaa

SEQ ID NO: 56431 - DNA, 15 bp, Homo sapiens
cagaacacaaaagga

SEQ ID NO: 56432 - DNA, 15 bp, Homo sapiens
acagaacacaaaagg

SEQ ID NO: 56433 - DNA, 15 bp, Homo sapiens
gacagaacacaaaag

SEQ ID NO: 56434 - DNA, 15 bp, Homo sapiens
tgacagaacacaaaa

SEQ ID NO: 56435 - DNA, 15 bp, Homo sapiens
gtgacagaacacaaa

SEQ ID NO: 56436 - DNA, 15 bp, Homo sapiens
ggtgacagaacacaa

SEQ ID NO: 56437 - DNA, 15 bp, Homo sapiens
tggtgacagaacaca

SEQ ID NO: 56438 - DNA, 15 bp, Homo sapiens
ttggtgacagaacac

SEQ ID NO: 56439 - DNA, 15 bp, Homo sapiens
gttggtgacagaaca

SEQ ID NO: 56440 - DNA, 15 bp, Homo sapiens
agttggtgacagaac

SEQ ID NO: 56441 - DNA, 15 bp, Homo sapiens
cagttggtgacagaa

SEQ ID NO: 56442 - DNA, 15 bp, Homo sapiens
tcagttggtgacaga

SEQ ID NO: 56443 - DNA, 15 bp, Homo sapiens
ttcagttggtgacag

SEQ ID NO: 56444 - DNA, 15 bp, Homo sapiens
cttcagttggtgaca

SEQ ID NO: 56445 - DNA, 15 bp, Homo sapiens
acttcagttggtgac

SEQ ID NO: 56446 - DNA, 15 bp, Homo sapiens
cacttcagttggtga

SEQ ID NO: 56447 - DNA, 15 bp, Homo sapiens
ccacttcagttggtg

SEQ ID NO: 56448 - DNA, 15 bp, Homo sapiens
gccacttcagttggt

SEQ ID NO: 56449 - DNA, 15 bp, Homo sapiens
agccacttcagttgg

SEQ ID NO: 56450 - DNA, 15 bp, Homo sapiens
tagccacttcagttg

SEQ ID NO: 56451 - DNA, 15 bp, Homo sapiens
ttagccacttcagtt

SEQ ID NO: 56452 - DNA, 15 bp, Homo sapiens
tttagccacttcagt

SEQ ID NO: 56453 - DNA, 15 bp, Homo sapiens
ctttagccacttcag

SEQ ID NO: 56454 - DNA, 15 bp, Homo sapiens
tctttagccacttca

SEQ ID NO: 56455 - DNA, 15 bp, Homo sapiens
ctctttagccacttc

SEQ ID NO: 56456 - DNA, 15 bp, Homo sapiens
gctctttagccactt

SEQ ID NO: 56457 - DNA, 15 bp, Homo sapiens
agctctttagccact

SEQ ID NO: 56458 - DNA, 15 bp, Homo sapiens
aagctctttagccac

SEQ ID NO: 56459 - DNA, 15 bp, Homo sapiens
aaagctctttagcca

SEQ ID NO: 56460 - DNA, 15 bp, Homo sapiens
caaagctctttagcc

SEQ ID NO: 56461 - DNA, 15 bp, Homo sapiens
acaaagctctttagc

SEQ ID NO: 56462 - DNA, 15 bp, Homo sapiens
cacaaagctctttag

SEQ ID NO: 56463 - DNA, 15 bp, Homo sapiens
tcacaaagctcttta

SEQ ID NO: 56464 - DNA, 15 bp, Homo sapiens
atcacaaagctcttt

SEQ ID NO: 56465 - DNA, 15 bp, Homo sapiens
tatcacaaagctctt

SEQ ID NO: 56466 - DNA, 15 bp, Homo sapiens
atatcacaaagctct

SEQ ID NO: 56467 - DNA, 15 bp, Homo sapiens
tatatcacaaagctc

SEQ ID NO: 56468 - DNA, 15 bp, Homo sapiens
gtatatcacaaagct

SEQ ID NO: 56469 - DNA, 15 bp, Homo sapiens
agtatatcacaaagc

SEQ ID NO: 56470 - DNA, 15 bp, Homo sapiens
cagtatatcacaaag

SEQ ID NO: 56471 - DNA, 15 bp, Homo sapiens
ccagtatatcacaaa

SEQ ID NO: 56472 - DNA, 15 bp, Homo sapiens
accagtatatcacaa

SEQ ID NO: 56473 - DNA, 15 bp, Homo sapiens
aaccagtatatcaca

SEQ ID NO: 56474 - DNA, 15 bp, Homo sapiens
gaaccagtatatcac

SEQ ID NO: 56475 - DNA, 15 bp, Homo sapiens
tgaaccagtatatca

SEQ ID NO: 56476 - DNA, 15 bp, Homo sapiens
gtgaaccagtatatc

SEQ ID NO: 56477 - DNA, 15 bp, Homo sapiens
tgtgaaccagtatat

SEQ ID NO: 56478 - DNA, 15 bp, Homo sapiens
atgtgaaccagtata

SEQ ID NO: 56479 - DNA, 15 bp, Homo sapiens
gatgtgaaccagtat

SEQ ID NO: 56480 - DNA, 15 bp, Homo sapiens
ggatgtgaaccagta

SEQ ID NO: 56481 - DNA, 15 bp, Homo sapiens
aggatgtgaaccagt

SEQ ID NO: 56482 - DNA, 15 bp, Homo sapiens
taggatgtgaaccag

SEQ ID NO: 56483 - DNA, 15 bp, Homo sapiens
gtaggatgtgaacca

SEQ ID NO: 56484 - DNA, 15 bp, Homo sapiens
ggtaggatgtgaacc

SEQ ID NO: 56485 - DNA, 15 bp, Homo sapiens
gggtaggatgtgaac

SEQ ID NO: 56486 - DNA, 15 bp, Homo sapiens
ggggtaggatgtgaa

SEQ ID NO: 56487 - DNA, 15 bp, Homo sapiens
aggggtaggatgtga

SEQ ID NO: 56488 - DNA, 15 bp, Homo sapiens
aaggggtaggatgtg

SEQ ID NO: 56489 - DNA, 15 bp, Homo sapiens
aaaggggtaggatgt

SEQ ID NO: 56490 - DNA, 15 bp, Homo sapiens
caaaggggtaggatg

SEQ ID NO: 56491 - DNA, 15 bp, Homo sapiens
gcaaaggggtaggat

SEQ ID NO: 56492 - DNA, 15 bp, Homo sapiens
tgcaaaggggtagga

SEQ ID NO: 56493 - DNA, 15 bp, Homo sapiens
gtgcaaaggggtagg

SEQ ID NO: 56494 - DNA, 15 bp, Homo sapiens
agtgcaaaggggtag

SEQ ID NO: 56495 - DNA, 15 bp, Homo sapiens
aagtgcaaaggggta

SEQ ID NO: 56496 - DNA, 15 bp, Homo sapiens
caagtgcaaaggggt

SEQ ID NO: 56497 - DNA, 15 bp, Homo sapiens
acaagtgcaaagggg

SEQ ID NO: 56498 - DNA, 15 bp, Homo sapiens
cacaagtgcaaaggg

SEQ ID NO: 56499 - DNA, 15 bp, Homo sapiens
ccacaagtgcaaagg

SEQ ID NO: 56500 - DNA, 15 bp, Homo sapiens
gccacaagtgcaaag

SEQ ID NO: 56501 - DNA, 15 bp, Homo sapiens
tgccacaagtgcaaa

SEQ ID NO: 56502 - DNA, 15 bp, Homo sapiens
ttgccacaagtgcaa

SEQ ID NO: 56503 - DNA, 15 bp, Homo sapiens
gttgccacaagtgca

SEQ ID NO: 56504 - DNA, 15 bp, Homo sapiens
tgttgccacaagtgc

SEQ ID NO: 56505 - DNA, 15 bp, Homo sapiens
ctgttgccacaagtg

SEQ ID NO: 56506 - DNA, 15 bp, Homo sapiens
tctgttgccacaagt

SEQ ID NO: 56507 - DNA, 15 bp, Homo sapiens
atctgttgccacaag

SEQ ID NO: 56508 - DNA, 15 bp, Homo sapiens
tatctgttgccacaa

SEQ ID NO: 56509 - DNA, 15 bp, Homo sapiens
ttatctgttgccaca

SEQ ID NO: 56510 - DNA, 15 bp, Homo sapiens
cttatctgttgccac

SEQ ID NO: 56511 - DNA, 15 bp, Homo sapiens
acttatctgttgcca

SEQ ID NO: 56512 - DNA, 15 bp, Homo sapiens
aacttatctgttgcc

SEQ ID NO: 56513 - DNA, 15 bp, Homo sapiens
aaacttatctgttgc

SEQ ID NO: 56514 - DNA, 15 bp, Homo sapiens
caaacttatctgttg

SEQ ID NO: 56515 - DNA, 15 bp, Homo sapiens
gcaaacttatctgtt

SEQ ID NO: 56516 - DNA, 15 bp, Homo sapiens
tgcaaacttatctgt

SEQ ID NO: 56517 - DNA, 15 bp, Homo sapiens
ctgcaaacttatctg

SEQ ID NO: 56518 - DNA, 15 bp, Homo sapiens
actgcaaacttatct

SEQ ID NO: 56519 - DNA, 15 bp, Homo sapiens
aactgcaaacttatc

SEQ ID NO: 56520 - DNA, 15 bp, Homo sapiens
caactgcaaacttat

SEQ ID NO: 56521 - DNA, 15 bp, Homo sapiens
ccaactgcaaactta

SEQ ID NO: 56522 - DNA, 15 bp, Homo sapiens
gccaactgcaaactt

SEQ ID NO: 56523 - DNA, 15 bp, Homo sapiens
agccaactgcaaact

SEQ ID NO: 56524 - DNA, 15 bp, Homo sapiens
tagccaactgcaaac

SEQ ID NO: 56525 - DNA, 15 bp, Homo sapiens
ttagccaactgcaaa

SEQ ID NO: 56526 - DNA, 15 bp, Homo sapiens
cttagccaactgcaa

SEQ ID NO: 56527 - DNA, 15 bp, Homo sapiens
tcttagccaactgca

SEQ ID NO: 56528 - DNA, 15 bp, Homo sapiens
ctcttagccaactgc

SEQ ID NO: 56529 - DNA, 15 bp, Homo sapiens
tctcttagccaactg

SEQ ID NO: 56530 - DNA, 15 bp, Homo sapiens
ctctcttagccaact

SEQ ID NO: 56531 - DNA, 15 bp, Homo sapiens
cctctcttagccaac

SEQ ID NO: 56532 - DNA, 15 bp, Homo sapiens
acctctcttagccaa

SEQ ID NO: 56533 - DNA, 15 bp, Homo sapiens
aacctctcttagcca

SEQ ID NO: 56534 - DNA, 15 bp, Homo sapiens
aaacctctcttagcc

SEQ ID NO: 56535 - DNA, 15 bp, Homo sapiens
gaaacctctcttagc

SEQ ID NO: 56536 - DNA, 15 bp, Homo sapiens
ggaaacctctcttag

SEQ ID NO: 56537 - DNA, 15 bp, Homo sapiens
cggaaacctctctta

SEQ ID NO: 56538 - DNA, 15 bp, Homo sapiens
tcggaaacctctctt

SEQ ID NO: 56539 - DNA, 15 bp, Homo sapiens
ttcggaaacctctct

SEQ ID NO: 56540 - DNA, 15 bp, Homo sapiens
cttcggaaacctctc

SEQ ID NO: 56541 - DNA, 15 bp, Homo sapiens
ccttcggaaacctct

SEQ ID NO: 56542 - DNA, 15 bp, Homo sapiens
cccttcggaaacctc

SEQ ID NO: 56543 - DNA, 15 bp, Homo sapiens
acccttcggaaacct

SEQ ID NO: 56544 - DNA, 15 bp, Homo sapiens
aacccttcggaaacc

SEQ ID NO: 56545 - DNA, 15 bp, Homo sapiens
aaacccttcggaaac

SEQ ID NO: 56546 - DNA, 15 bp, Homo sapiens
aaaacccttcggaaa

SEQ ID NO: 56547 - DNA, 15 bp, Homo sapiens
caaaacccttcggaa

SEQ ID NO: 56548 - DNA, 15 bp, Homo sapiens
gcaaaacccttcgga

SEQ ID NO: 56549 - DNA, 15 bp, Homo sapiens
agcaaaacccttcgg

SEQ ID NO: 56550 - DNA, 15 bp, Homo sapiens
tagcaaaacccttcg

SEQ ID NO: 56551 - DNA, 15 bp, Homo sapiens
gtagcaaaacccttc

SEQ ID NO: 56552 - DNA, 15 bp, Homo sapiens
tgtagcaaaaccctt

SEQ ID NO: 56553 - DNA, 15 bp, Homo sapiens
atgtagcaaaaccct

SEQ ID NO: 56554 - DNA, 15 bp, Homo sapiens
aatgtagcaaaaccc

SEQ ID NO: 56555 - DNA, 15 bp, Homo sapiens
gaatgtagcaaaacc

SEQ ID NO: 56556 - DNA, 15 bp, Homo sapiens
agaatgtagcaaaac

SEQ ID NO: 56557 - DNA, 15 bp, Homo sapiens
tagaatgtagcaaaa

SEQ ID NO: 56558 - DNA, 15 bp, Homo sapiens
ttagaatgtagcaaa

SEQ ID NO: 56559 - DNA, 15 bp, Homo sapiens
attagaatgtagcaa

SEQ ID NO: 56560 - DNA, 15 bp, Homo sapiens
cattagaatgtagca

SEQ ID NO: 56561 - DNA, 15 bp, Homo sapiens
gcattagaatgtagc

SEQ ID NO: 56562 - DNA, 15 bp, Homo sapiens
tgcattagaatgtag

SEQ ID NO: 56563 - DNA, 15 bp, Homo sapiens
atgcattagaatgta

SEQ ID NO: 56564 - DNA, 15 bp, Homo sapiens
catgcattagaatgt

SEQ ID NO: 56565 - DNA, 15 bp, Homo sapiens
acatgcattagaatg

SEQ ID NO: 56566 - DNA, 15 bp, Homo sapiens
tacatgcattagaat

SEQ ID NO: 56567 - DNA, 15 bp, Homo sapiens
atacatgcattagaa

SEQ ID NO: 56568 - DNA, 15 bp, Homo sapiens
aatacatgcattaga

SEQ ID NO: 56569 - DNA, 15 bp, Homo sapiens
gaatacatgcattag

SEQ ID NO: 56570 - DNA, 15 bp, Homo sapiens
cgaatacatgcatta

SEQ ID NO: 56571 - DNA, 15 bp, Homo sapiens
ccgaatacatgcatt

SEQ ID NO: 56572 - DNA, 15 bp, Homo sapiens
cccgaatacatgcat

SEQ ID NO: 56573 - DNA, 15 bp, Homo sapiens
acccgaatacatgca

SEQ ID NO: 56574 - DNA, 15 bp, Homo sapiens
aacccgaatacatgc

SEQ ID NO: 56575 - DNA, 15 bp, Homo sapiens
taacccgaatacatg

SEQ ID NO: 56576 - DNA, 15 bp, Homo sapiens
ctaacccgaatacat

SEQ ID NO: 56577 - DNA, 15 bp, Homo sapiens
cctaacccgaataca

SEQ ID NO: 56578 - DNA, 15 bp, Homo sapiens
ccctaacccgaatac

SEQ ID NO: 56579 - DNA, 15 bp, Homo sapiens
cccctaacccgaata

SEQ ID NO: 56580 - DNA, 15 bp, Homo sapiens
tcccctaacccgaat

SEQ ID NO: 56581 - DNA, 15 bp, Homo sapiens
ttcccctaacccgaa

SEQ ID NO: 56582 - DNA, 15 bp, Homo sapiens
attcccctaacccga

SEQ ID NO: 56583 - DNA, 15 bp, Homo sapiens
cattcccctaacccg

SEQ ID NO: 56584 - DNA, 15 bp, Homo sapiens
ccattcccctaaccc

SEQ ID NO: 56585 - DNA, 15 bp, Homo sapiens
tccattcccctaacc

SEQ ID NO: 56586 - DNA, 15 bp, Homo sapiens
ctccattcccctaac

SEQ ID NO: 56587 - DNA, 15 bp, Homo sapiens
cctccattcccctaa

SEQ ID NO: 56588 - DNA, 15 bp, Homo sapiens
ccctccattccccta

SEQ ID NO: 56589 - DNA, 15 bp, Homo sapiens
tccctccattcccct

SEQ ID NO: 56590 - DNA, 15 bp, Homo sapiens
ttccctccattcccc

SEQ ID NO: 56591 - DNA, 15 bp, Homo sapiens
attccctccattccc

SEQ ID NO: 56592 - DNA, 15 bp, Homo sapiens
cattccctccattcc

SEQ ID NO: 56593 - DNA, 15 bp, Homo sapiens
gcattccctccattc

SEQ ID NO: 56594 - DNA, 15 bp, Homo sapiens
agcattccctccatt

SEQ ID NO: 56595 - DNA, 15 bp, Homo sapiens
gagcattccctccat

SEQ ID NO: 56596 - DNA, 15 bp, Homo sapiens
tgagcattccctcca

SEQ ID NO: 56597 - DNA, 15 bp, Homo sapiens
ctgagcattccctcc

SEQ ID NO: 56598 - DNA, 15 bp, Homo sapiens
tctgagcattccctc

SEQ ID NO: 56599 - DNA, 15 bp, Homo sapiens
ttctgagcattccct

SEQ ID NO: 56600 - DNA, 15 bp, Homo sapiens
tttctgagcattccc

SEQ ID NO: 56601 - DNA, 15 bp, Homo sapiens
ctttctgagcattcc

SEQ ID NO: 56602 - DNA, 15 bp, Homo sapiens
cctttctgagcattc

SEQ ID NO: 56603 - DNA, 15 bp, Homo sapiens
tcctttctgagcatt

SEQ ID NO: 56604 - DNA, 15 bp, Homo sapiens
ttcctttctgagcat

SEQ ID NO: 56605 - DNA, 15 bp, Homo sapiens
tttcctttctgagca

SEQ ID NO: 56606 - DNA, 15 bp, Homo sapiens
atttcctttctgagc

SEQ ID NO: 56607 - DNA, 15 bp, Homo sapiens
tatttcctttctgag

SEQ ID NO: 56608 - DNA, 15 bp, Homo sapiens
ttatttcctttctga

SEQ ID NO: 56609 - DNA, 15 bp, Homo sapiens
attatttcctttctg

SEQ ID NO: 56610 - DNA, 15 bp, Homo sapiens
aattatttcctttct

SEQ ID NO: 56611 - DNA, 15 bp, Homo sapiens
aaattatttcctttc

SEQ ID NO: 56612 - DNA, 15 bp, Homo sapiens
aaaattatttccttt

SEQ ID NO: 56613 - DNA, 15 bp, Homo sapiens
taaaattatttcctt

SEQ ID NO: 56614 - DNA, 15 bp, Homo sapiens
ataaaattatttcct

SEQ ID NO: 56615 - DNA, 15 bp, Homo sapiens
cataaaattatttcc

SEQ ID NO: 56616 - DNA, 15 bp, Homo sapiens
gcataaaattatttc

SEQ ID NO: 56617 - DNA, 15 bp, Homo sapiens
agcataaaattattt

SEQ ID NO: 56618 - DNA, 15 bp, Homo sapiens
cagcataaaattatt

SEQ ID NO: 56619 - DNA, 15 bp, Homo sapiens
ccagcataaaattat

SEQ ID NO: 56620 - DNA, 15 bp, Homo sapiens
tccagcataaaatta

SEQ ID NO: 56621 - DNA, 15 bp, Homo sapiens
gtccagcataaaatt

SEQ ID NO: 56622 - DNA, 15 bp, Homo sapiens
agtccagcataaaat

SEQ ID NO: 56623 - DNA, 15 bp, Homo sapiens
gagtccagcataaaa

SEQ ID NO: 56624 - DNA, 15 bp, Homo sapiens
agagtccagcataaa

SEQ ID NO: 56625 - DNA, 15 bp, Homo sapiens
cagagtccagcataa

SEQ ID NO: 56626 - DNA, 15 bp, Homo sapiens
ccagagtccagcata

SEQ ID NO: 56627 - DNA, 15 bp, Homo sapiens
tccagagtccagcat

SEQ ID NO: 56628 - DNA, 15 bp, Homo sapiens
gtccagagtccagca

SEQ ID NO: 56629 - DNA, 15 bp, Homo sapiens
ggtccagagtccagc

SEQ ID NO: 56630 - DNA, 15 bp, Homo sapiens
tggtccagagtccag

SEQ ID NO: 56631 - DNA, 15 bp, Homo sapiens
atggtccagagtcca

SEQ ID NO: 56632 - DNA, 15 bp, Homo sapiens
tatggtccagagtcc

SEQ ID NO: 56633 - DNA, 15 bp, Homo sapiens
atatggtccagagtc

SEQ ID NO: 56634 - DNA, 15 bp, Homo sapiens
tatatggtccagagt

SEQ ID NO: 56635 - DNA, 15 bp, Homo sapiens
gtatatggtccagag

SEQ ID NO: 56636 - DNA, 15 bp, Homo sapiens
ggtatatggtccaga

SEQ ID NO: 56637 - DNA, 15 bp, Homo sapiens
tggtatatggtccag

SEQ ID NO: 56638 - DNA, 15 bp, Homo sapiens
atggtatatggtcca

SEQ ID NO: 56639 - DNA, 15 bp, Homo sapiens
gatggtatatggtcc

SEQ ID NO: 56640 - DNA, 15 bp, Homo sapiens
agatggtatatggtc

SEQ ID NO: 56641 - DNA, 15 bp, Homo sapiens
gagatggtatatggt

SEQ ID NO: 56642 - DNA, 15 bp, Homo sapiens
ggagatggtatatgg

SEQ ID NO: 56643 - DNA, 15 bp, Homo sapiens
tggagatggtatatg

SEQ ID NO: 56644 - DNA, 15 bp, Homo sapiens
ctggagatggtatat

SEQ ID NO: 56645 - DNA, 15 bp, Homo sapiens
gctggagatggtata

SEQ ID NO: 56646 - DNA, 15 bp, Homo sapiens
agctggagatggtat

SEQ ID NO: 56647 - DNA, 15 bp, Homo sapiens
tagctggagatggta

SEQ ID NO: 56648 - DNA, 15 bp, Homo sapiens
atagctggagatggt

SEQ ID NO: 56649 - DNA, 15 bp, Homo sapiens
aatagctggagatgg

SEQ ID NO: 56650 - DNA, 15 bp, Homo sapiens
aaatagctggagatg

SEQ ID NO: 56651 - DNA, 15 bp, Homo sapiens
taaatagctggagat

SEQ ID NO: 56652 - DNA, 15 bp, Homo sapiens
gtaaatagctggaga

SEQ ID NO: 56653 - DNA, 15 bp, Homo sapiens
tgtaaatagctggag

SEQ ID NO: 56654 - DNA, 15 bp, Homo sapiens
gtgtaaatagctgga

SEQ ID NO: 56655 - DNA, 15 bp, Homo sapiens
tgtgtaaatagctgg

SEQ ID NO: 56656 - DNA, 15 bp, Homo sapiens
gtgtgtaaatagctg

SEQ ID NO: 56657 - DNA, 15 bp, Homo sapiens
tgtgtgtaaatagct

SEQ ID NO: 56658 - DNA, 15 bp, Homo sapiens
gtgtgtgtaaatagc

SEQ ID NO: 56659 - DNA, 15 bp, Homo sapiens
ggtgtgtgtaaatag

SEQ ID NO: 56660 - DNA, 15 bp, Homo sapiens
aggtgtgtgtaaata

SEQ ID NO: 56661 - DNA, 15 bp, Homo sapiens
aaggtgtgtgtaaat

SEQ ID NO: 56662 - DNA, 15 bp, Homo sapiens
aaaggtgtgtgtaaa

SEQ ID NO: 56663 - DNA, 15 bp, Homo sapiens
gaaaggtgtgtgtaa

SEQ ID NO: 56664 - DNA, 15 bp, Homo sapiens
agaaaggtgtgtgta

SEQ ID NO: 56665 - DNA, 15 bp, Homo sapiens
aagaaaggtgtgtgt

SEQ ID NO: 56666 - DNA, 15 bp, Homo sapiens
aaagaaaggtgtgtg

SEQ ID NO: 56667 - DNA, 15 bp, Homo sapiens
taaagaaaggtgtgt

SEQ ID NO: 56668 - DNA, 15 bp, Homo sapiens
ctaaagaaaggtgtg

SEQ ID NO: 56669 - DNA, 15 bp, Homo sapiens
gctaaagaaaggtgt

SEQ ID NO: 56670 - DNA, 15 bp, Homo sapiens
tgctaaagaaaggtg

SEQ ID NO: 56671 - DNA, 15 bp, Homo sapiens
atgctaaagaaaggt

SEQ ID NO: 56672 - DNA, 15 bp, Homo sapiens
catgctaaagaaagg

SEQ ID NO: 56673 - DNA, 15 bp, Homo sapiens
gcatgctaaagaaag

SEQ ID NO: 56674 - DNA, 15 bp, Homo sapiens
agcatgctaaagaaa

SEQ ID NO: 56675 - DNA, 15 bp, Homo sapiens
tagcatgctaaagaa

SEQ ID NO: 56676 - DNA, 15 bp, Homo sapiens
gtagcatgctaaaga

SEQ ID NO: 56677 - DNA, 15 bp, Homo sapiens
tgtagcatgctaaag

SEQ ID NO: 56678 - DNA, 15 bp, Homo sapiens
ctgtagcatgctaaa

SEQ ID NO: 56679 - DNA, 15 bp, Homo sapiens
actgtagcatgctaa

SEQ ID NO: 56680 - DNA, 15 bp, Homo sapiens
aactgtagcatgcta

SEQ ID NO: 56681 - DNA, 15 bp, Homo sapiens
taactgtagcatgct

SEQ ID NO: 56682 - DNA, 15 bp, Homo sapiens
ataactgtagcatgc

SEQ ID NO: 56683 - DNA, 15 bp, Homo sapiens
aataactgtagcatg

SEQ ID NO: 56684 - DNA, 15 bp, Homo sapiens
taataactgtagcat

SEQ ID NO: 56685 - DNA, 15 bp, Homo sapiens
ttaataactgtagca

SEQ ID NO: 56686 - DNA, 15 bp, Homo sapiens
attaataactgtagc

SEQ ID NO: 56687 - DNA, 15 bp, Homo sapiens
gattaataactgtag

SEQ ID NO: 56688 - DNA, 15 bp, Homo sapiens
agattaataactgta

SEQ ID NO: 56689 - DNA, 15 bp, Homo sapiens
cagattaataactgt

SEQ ID NO: 56690 - DNA, 15 bp, Homo sapiens
ccagattaataactg

SEQ ID NO: 56691 - DNA, 15 bp, Homo sapiens
tccagattaataact

SEQ ID NO: 56692 - DNA, 15 bp, Homo sapiens
gtccagattaataac

SEQ ID NO: 56693 - DNA, 15 bp, Homo sapiens
tgtccagattaataa

SEQ ID NO: 56694 - DNA, 15 bp, Homo sapiens
atgtccagattaata

SEQ ID NO: 56695 - DNA, 15 bp, Homo sapiens
aatgtccagattaat

SEQ ID NO: 56696 - DNA, 15 bp, Homo sapiens
gaatgtccagattaa

SEQ ID NO: 56697 - DNA, 15 bp, Homo sapiens
cgaatgtccagatta

SEQ ID NO: 56698 - DNA, 15 bp, Homo sapiens
tcgaatgtccagatt

SEQ ID NO: 56699 - DNA, 15 bp, Homo sapiens
ctcgaatgtccagat

SEQ ID NO: 56700 - DNA, 15 bp, Homo sapiens
cctcgaatgtccaga

SEQ ID NO: 56701 - DNA, 15 bp, Homo sapiens
tcctcgaatgtccag

SEQ ID NO: 56702 - DNA, 15 bp, Homo sapiens
ttcctcgaatgtcca

SEQ ID NO: 56703 - DNA, 15 bp, Homo sapiens
attcctcgaatgtcc

SEQ ID NO: 56704 - DNA, 15 bp, Homo sapiens
aattcctcgaatgtc

SEQ ID NO: 56705 - DNA, 15 bp, Homo sapiens
caattcctcgaatgt

SEQ ID NO: 56706 - DNA, 15 bp, Homo sapiens
ccaattcctcgaatg

SEQ ID NO: 56707 - DNA, 15 bp, Homo sapiens
gccaattcctcgaat

SEQ ID NO: 56708 - DNA, 15 bp, Homo sapiens
ggccaattcctcgaa

SEQ ID NO: 56709 - DNA, 15 bp, Homo sapiens
cggccaattcctcga

SEQ ID NO: 56710 - DNA, 15 bp, Homo sapiens
gcggccaattcctcg

SEQ ID NO: 56711 - DNA, 15 bp, Homo sapiens
agcggccaattcctc

SEQ ID NO: 56712 - DNA, 15 bp, Homo sapiens
cagcggccaattcct

SEQ ID NO: 56713 - DNA, 15 bp, Homo sapiens
acagcggccaattcc

SEQ ID NO: 56714 - DNA, 15 bp, Homo sapiens
gacagcggccaattc

SEQ ID NO: 56715 - DNA, 15 bp, Homo sapiens
tgacagcggccaatt

SEQ ID NO: 56716 - DNA, 15 bp, Homo sapiens
gtgacagcggccaat

SEQ ID NO: 56717 - DNA, 15 bp, Homo sapiens
agtgacagcggccaa

SEQ ID NO: 56718 - DNA, 15 bp, Homo sapiens
cagtgacagcggcca

SEQ ID NO: 56719 - DNA, 15 bp, Homo sapiens
gcagtgacagcggcc

SEQ ID NO: 56720 - DNA, 15 bp, Homo sapiens
agcagtgacagcggc

SEQ ID NO: 56721 - DNA, 15 bp, Homo sapiens
aagcagtgacagcgg

SEQ ID NO: 56722 - DNA, 15 bp, Homo sapiens
caagcagtgacagcg

SEQ ID NO: 56723 - DNA, 15 bp, Homo sapiens
acaagcagtgacagc

SEQ ID NO: 56724 - DNA, 15 bp, Homo sapiens
aacaagcagtgacag

SEQ ID NO: 56725 - DNA, 15 bp, Homo sapiens
caacaagcagtgaca

SEQ ID NO: 56726 - DNA, 15 bp, Homo sapiens
acaacaagcagtgac

SEQ ID NO: 56727 - DNA, 15 bp, Homo sapiens
aacaacaagcagtga

SEQ ID NO: 56728 - DNA, 15 bp, Homo sapiens
aaacaacaagcagtg

SEQ ID NO: 56729 - DNA, 15 bp, Homo sapiens
caaacaacaagcagt

SEQ ID NO: 56730 - DNA, 15 bp, Homo sapiens
gcaaacaacaagcag

SEQ ID NO: 56731 - DNA, 15 bp, Homo sapiens
cgcaaacaacaagca

SEQ ID NO: 56732 - DNA, 15 bp, Homo sapiens
gcgcaaacaacaagc

SEQ ID NO: 56733 - DNA, 15 bp, Homo sapiens
tgcgcaaacaacaag

SEQ ID NO: 56734 - DNA, 15 bp, Homo sapiens
atgcgcaaacaacaa

SEQ ID NO: 56735 - DNA, 15 bp, Homo sapiens
aatgcgcaaacaaca

SEQ ID NO: 56736 - DNA, 15 bp, Homo sapiens
aaatgcgcaaacaac

SEQ ID NO: 56737 - DNA, 15 bp, Homo sapiens
aaaatgcgcaaacaa

SEQ ID NO: 56738 - DNA, 15 bp, Homo sapiens
aaaaatgcgcaaaca

SEQ ID NO: 56739 - DNA, 15 bp, Homo sapiens
aaaaaatgcgcaaac

SEQ ID NO: 56740 - DNA, 15 bp, Homo sapiens
aaaaaaatgcgcaaa

SEQ ID NO: 56741 - DNA, 15 bp, Homo sapiens
aaaaaaaatgcgcaa

SEQ ID NO: 56742 - DNA, 15 bp, Homo sapiens
aaaaaaaaatgcgca

SEQ ID NO: 56743 - DNA, 15 bp, Homo sapiens
taaaaaaaaatgcgc

SEQ ID NO: 56744 - DNA, 15 bp, Homo sapiens
ttaaaaaaaaatgcg

SEQ ID NO: 56745 - DNA, 15 bp, Homo sapiens
tttaaaaaaaaatgc

SEQ ID NO: 56746 - DNA, 15 bp, Homo sapiens
ctttaaaaaaaaatg

SEQ ID NO: 56747 - DNA, 15 bp, Homo sapiens
gctttaaaaaaaaat

SEQ ID NO: 56748 - DNA, 15 bp, Homo sapiens
tgctttaaaaaaaaa

SEQ ID NO: 56749 - DNA, 15 bp, Homo sapiens
atgctttaaaaaaaa

SEQ ID NO: 56750 - DNA, 15 bp, Homo sapiens
tatgctttaaaaaaa

SEQ ID NO: 56751 - DNA, 15 bp, Homo sapiens
atatgctttaaaaaa

SEQ ID NO: 56752 - DNA, 15 bp, Homo sapiens
aatatgctttaaaaa

SEQ ID NO: 56753 - DNA, 15 bp, Homo sapiens
caatatgctttaaaa

SEQ ID NO: 56754 - DNA, 15 bp, Homo sapiens
ccaatatgctttaaa

SEQ ID NO: 56755 - DNA, 15 bp, Homo sapiens
accaatatgctttaa

SEQ ID NO: 56756 - DNA, 15 bp, Homo sapiens
caccaatatgcttta

SEQ ID NO: 56757 - DNA, 15 bp, Homo sapiens
gcaccaatatgcttt

SEQ ID NO: 56758 - DNA, 15 bp, Homo sapiens
agcaccaatatgctt

SEQ ID NO: 56759 - DNA, 15 bp, Homo sapiens
tagcaccaatatgct

SEQ ID NO: 56760 - DNA, 15 bp, Homo sapiens
ctagcaccaatatgc

SEQ ID NO: 56761 - DNA, 15 bp, Homo sapiens
tctagcaccaatatg

SEQ ID NO: 56762 - DNA, 15 bp, Homo sapiens
ttctagcaccaatat

SEQ ID NO: 56763 - DNA, 15 bp, Homo sapiens
tttctagcaccaata

SEQ ID NO: 56764 - DNA, 15 bp, Homo sapiens
ttttctagcaccaat

SEQ ID NO: 56765 - DNA, 15 bp, Homo sapiens
cttttctagcaccaa

SEQ ID NO: 56766 - DNA, 15 bp, Homo sapiens
ccttttctagcacca

SEQ ID NO: 56767 - DNA, 15 bp, Homo sapiens
gccttttctagcacc

SEQ ID NO: 56768 - DNA, 15 bp, Homo sapiens
tgccttttctagcac

SEQ ID NO: 56769 - DNA, 15 bp, Homo sapiens
ctgccttttctagca

SEQ ID NO: 56770 - DNA, 15 bp, Homo sapiens
gctgccttttctagc

SEQ ID NO: 56771 - DNA, 15 bp, Homo sapiens
agctgccttttctag

SEQ ID NO: 56772 - DNA, 15 bp, Homo sapiens
tagctgccttttcta

SEQ ID NO: 56773 - DNA, 15 bp, Homo sapiens
ttagctgccttttct

SEQ ID NO: 56774 - DNA, 15 bp, Homo sapiens
tttagctgccttttc

SEQ ID NO: 56775 - DNA, 15 bp, Homo sapiens
ctttagctgcctttt

SEQ ID NO: 56776 - DNA, 15 bp, Homo sapiens
cctttagctgccttt

SEQ ID NO: 56777 - DNA, 15 bp, Homo sapiens
tcctttagctgcctt

SEQ ID NO: 56778 - DNA, 15 bp, Homo sapiens
ttcctttagctgcct

SEQ ID NO: 56779 - DNA, 15 bp, Homo sapiens
cttcctttagctgcc

SEQ ID NO: 56780 - DNA, 15 bp, Homo sapiens
acttcctttagctgc

SEQ ID NO: 56781 - DNA, 15 bp, Homo sapiens
cacttcctttagctg

SEQ ID NO: 56782 - DNA, 15 bp, Homo sapiens
tcacttcctttagct

SEQ ID NO: 56783 - DNA, 15 bp, Homo sapiens
ttcacttcctttagc

SEQ ID NO: 56784 - DNA, 15 bp, Homo sapiens
attcacttcctttag

SEQ ID NO: 56785 - DNA, 15 bp, Homo sapiens
gattcacttccttta

SEQ ID NO: 56786 - DNA, 15 bp, Homo sapiens
agattcacttccttt

SEQ ID NO: 56787 - DNA, 15 bp, Homo sapiens
cagattcacttcctt

SEQ ID NO: 56788 - DNA, 15 bp, Homo sapiens
acagattcacttcct

SEQ ID NO: 56789 - DNA, 15 bp, Homo sapiens
tacagattcacttcc

SEQ ID NO: 56790 - DNA, 15 bp, Homo sapiens
atacagattcacttc

SEQ ID NO: 56791 - DNA, 15 bp, Homo sapiens
aatacagattcactt

SEQ ID NO: 56792 - DNA, 15 bp, Homo sapiens
caatacagattcact

SEQ ID NO: 56793 - DNA, 15 bp, Homo sapiens
ccaatacagattcac

SEQ ID NO: 56794 - DNA, 15 bp, Homo sapiens
cccaatacagattca

SEQ ID NO: 56795 - DNA, 15 bp, Homo sapiens
ccccaatacagattc

SEQ ID NO: 56796 - DNA, 15 bp, Homo sapiens
accccaatacagatt

SEQ ID NO: 56797 - DNA, 15 bp, Homo sapiens
taccccaatacagat

SEQ ID NO: 56798 - DNA, 15 bp, Homo sapiens
gtaccccaatacaga

SEQ ID NO: 56799 - DNA, 15 bp, Homo sapiens
tgtaccccaatacag

SEQ ID NO: 56800 - DNA, 15 bp, Homo sapiens
ctgtaccccaataca

SEQ ID NO: 56801 - DNA, 15 bp, Homo sapiens
cctgtaccccaatac

SEQ ID NO: 56802 - DNA, 15 bp, Homo sapiens
tcctgtaccccaata

SEQ ID NO: 56803 - DNA, 15 bp, Homo sapiens
ttcctgtaccccaat

SEQ ID NO: 56804 - DNA, 15 bp, Homo sapiens
attcctgtaccccaa

SEQ ID NO: 56805 - DNA, 15 bp, Homo sapiens
cattcctgtacccca

SEQ ID NO: 56806 - DNA, 15 bp, Homo sapiens
tcattcctgtacccc

SEQ ID NO: 56807 - DNA, 15 bp, Homo sapiens
ttcattcctgtaccc

SEQ ID NO: 56808 - DNA, 15 bp, Homo sapiens
gttcattcctgtacc

SEQ ID NO: 56809 - DNA, 15 bp, Homo sapiens
ggttcattcctgtac

SEQ ID NO: 56810 - DNA, 15 bp, Homo sapiens
aggttcattcctgta

SEQ ID NO: 56811 - DNA, 15 bp, Homo sapiens
aaggttcattcctgt

SEQ ID NO: 56812 - DNA, 15 bp, Homo sapiens
gaaggttcattcctg

SEQ ID NO: 56813 - DNA, 15 bp, Homo sapiens
agaaggttcattcct

SEQ ID NO: 56814 - DNA, 15 bp, Homo sapiens
cagaaggttcattcc

SEQ ID NO: 56815 - DNA, 15 bp, Homo sapiens
gcagaaggttcattc

SEQ ID NO: 56816 - DNA, 15 bp, Homo sapiens
tgcagaaggttcatt

SEQ ID NO: 56817 - DNA, 15 bp, Homo sapiens
ttgcagaaggttcat

SEQ ID NO: 56818 - DNA, 15 bp, Homo sapiens
gttgcagaaggttca

SEQ ID NO: 56819 - DNA, 15 bp, Homo sapiens
tgttgcagaaggttc

SEQ ID NO: 56820 - DNA, 15 bp, Homo sapiens
atgttgcagaaggtt

SEQ ID NO: 56821 - DNA, 15 bp, Homo sapiens
gatgttgcagaaggt

SEQ ID NO: 56822 - DNA, 15 bp, Homo sapiens
agatgttgcagaagg

SEQ ID NO: 56823 - DNA, 15 bp, Homo sapiens
aagatgttgcagaag

SEQ ID NO: 56824 - DNA, 15 bp, Homo sapiens
taagatgttgcagaa

SEQ ID NO: 56825 - DNA, 15 bp, Homo sapiens
ttaagatgttgcaga

SEQ ID NO: 56826 - DNA, 15 bp, Homo sapiens
cttaagatgttgcag

SEQ ID NO: 56827 - DNA, 15 bp, Homo sapiens
tcttaagatgttgca

SEQ ID NO: 56828 - DNA, 15 bp, Homo sapiens
atcttaagatgttgc

SEQ ID NO: 56829 - DNA, 15 bp, Homo sapiens
gatcttaagatgttg

SEQ ID NO: 56830 - DNA, 15 bp, Homo sapiens
ggatcttaagatgtt

SEQ ID NO: 56831 - DNA, 15 bp, Homo sapiens
tggatcttaagatgt

SEQ ID NO: 56832 - DNA, 15 bp, Homo sapiens
gtggatcttaagatg

SEQ ID NO: 56833 - DNA, 15 bp, Homo sapiens
tgtggatcttaagat

SEQ ID NO: 56834 - DNA, 15 bp, Homo sapiens
ttgtggatcttaaga

SEQ ID NO: 56835 - DNA, 15 bp, Homo sapiens
tttgtggatcttaag

SEQ ID NO: 56836 - DNA, 15 bp, Homo sapiens
atttgtggatcttaa

SEQ ID NO: 56837 - DNA, 15 bp, Homo sapiens
catttgtggatctta

SEQ ID NO: 56838 - DNA, 15 bp, Homo sapiens
tcatttgtggatctt

SEQ ID NO: 56839 - DNA, 15 bp, Homo sapiens
ttcatttgtggatct

SEQ ID NO: 56840 - DNA, 15 bp, Homo sapiens
cttcatttgtggatc

SEQ ID NO: 56841 - DNA, 15 bp, Homo sapiens
ccttcatttgtggat

SEQ ID NO: 56842 - DNA, 15 bp, Homo sapiens
cccttcatttgtgga

SEQ ID NO: 56843 - DNA, 15 bp, Homo sapiens
tcccttcatttgtgg

SEQ ID NO: 56844 - DNA, 15 bp, Homo sapiens
atcccttcatttgtg

SEQ ID NO: 56845 - DNA, 15 bp, Homo sapiens
tatcccttcatttgt

SEQ ID NO: 56846 - DNA, 15 bp, Homo sapiens
atatcccttcatttg

SEQ ID NO: 56847 - DNA, 15 bp, Homo sapiens
tatatcccttcattt

SEQ ID NO: 56848 - DNA, 15 bp, Homo sapiens
ttatatcccttcatt

SEQ ID NO: 56849 - DNA, 15 bp, Homo sapiens
tttatatcccttcat

SEQ ID NO: 56850 - DNA, 15 bp, Homo sapiens
ttttatatcccttca

SEQ ID NO: 56851 - DNA, 15 bp, Homo sapiens
tttttatatcccttc

SEQ ID NO: 56852 - DNA, 15 bp, Homo sapiens
atttttatatccctt

SEQ ID NO: 56853 - DNA, 15 bp, Homo sapiens
tatttttatatccct

SEQ ID NO: 56854 - DNA, 15 bp, Homo sapiens
ttatttttatatccc

SEQ ID NO: 56855 - DNA, 15 bp, Homo sapiens
attatttttatatcc

SEQ ID NO: 56856 - DNA, 15 bp, Homo sapiens
cattatttttatatc

SEQ ID NO: 56857 - DNA, 15 bp, Homo sapiens
acattatttttatat

SEQ ID NO: 56858 - DNA, 15 bp, Homo sapiens
gacattatttttata

SEQ ID NO: 56859 - DNA, 15 bp, Homo sapiens
tgacattatttttat

SEQ ID NO: 56860 - DNA, 15 bp, Homo sapiens
atgacattattttta

SEQ ID NO: 56861 - DNA, 15 bp, Homo sapiens
tatgacattattttt

SEQ ID NO: 56862 - DNA, 15 bp, Homo sapiens
ctatgacattatttt

SEQ ID NO: 56863 - DNA, 15 bp, Homo sapiens
cctatgacattattt

SEQ ID NO: 56864 - DNA, 15 bp, Homo sapiens
acctatgacattatt

SEQ ID NO: 56865 - DNA, 15 bp, Homo sapiens
tacctatgacattat

SEQ ID NO: 56866 - DNA, 15 bp, Homo sapiens
ttacctatgacatta

SEQ ID NO: 56867 - DNA, 15 bp, Homo sapiens
cttacctatgacatt

SEQ ID NO: 56868 - DNA, 15 bp, Homo sapiens
tcttacctatgacat

SEQ ID NO: 56869 - DNA, 15 bp, Homo sapiens
ttcttacctatgaca

SEQ ID NO: 56870 - DNA, 15 bp, Homo sapiens
tttcttacctatgac

SEQ ID NO: 56871 - DNA, 15 bp, Homo sapiens
gtttcttacctatga

SEQ ID NO: 56872 - DNA, 15 bp, Homo sapiens
tgtttcttacctatg

SEQ ID NO: 56873 - DNA, 15 bp, Homo sapiens
gtgtttcttacctat

SEQ ID NO: 56874 - DNA, 15 bp, Homo sapiens
tgtgtttcttaccta

SEQ ID NO: 56875 - DNA, 15 bp, Homo sapiens
ctgtgtttcttacct

SEQ ID NO: 56876 - DNA, 15 bp, Homo sapiens
gctgtgtttcttacc

SEQ ID NO: 56877 - DNA, 15 bp, Homo sapiens
tgctgtgtttcttac

SEQ ID NO: 56878 - DNA, 15 bp, Homo sapiens
ttgctgtgtttctta

SEQ ID NO: 56879 - DNA, 15 bp, Homo sapiens
gttgctgtgtttctt

SEQ ID NO: 56880 - DNA, 15 bp, Homo sapiens
tgttgctgtgtttct

SEQ ID NO: 56881 - DNA, 15 bp, Homo sapiens
ttgttgctgtgtttc

SEQ ID NO: 56882 - DNA, 15 bp, Homo sapiens
attgttgctgtgttt

SEQ ID NO: 56883 - DNA, 15 bp, Homo sapiens
cattgttgctgtgtt

SEQ ID NO: 56884 - DNA, 15 bp, Homo sapiens
tcattgttgctgtgt

SEQ ID NO: 56885 - DNA, 15 bp, Homo sapiens
gtcattgttgctgtg

SEQ ID NO: 56886 - DNA, 15 bp, Homo sapiens
agtcattgttgctgt

SEQ ID NO: 56887 - DNA, 15 bp, Homo sapiens
aagtcattgttgctg

SEQ ID NO: 56888 - DNA, 15 bp, Homo sapiens
taagtcattgttgct

SEQ ID NO: 56889 - DNA, 15 bp, Homo sapiens
ttaagtcattgttgc

SEQ ID NO: 56890 - DNA, 15 bp, Homo sapiens
gttaagtcattgttg

SEQ ID NO: 56891 - DNA, 15 bp, Homo sapiens
ggttaagtcattgtt

SEQ ID NO: 56892 - DNA, 15 bp, Homo sapiens
tggttaagtcattgt

SEQ ID NO: 56893 - DNA, 15 bp, Homo sapiens
atggttaagtcattg

SEQ ID NO: 56894 - DNA, 15 bp, Homo sapiens
tatggttaagtcatt

SEQ ID NO: 56895 - DNA, 15 bp, Homo sapiens
atatggttaagtcat

SEQ ID NO: 56896 - DNA, 15 bp, Homo sapiens
tatatggttaagtca

SEQ ID NO: 56897 - DNA, 15 bp, Homo sapiens
ttatatggttaagtc

SEQ ID NO: 56898 - DNA, 15 bp, Homo sapiens
tttatatggttaagt

SEQ ID NO: 56899 - DNA, 15 bp, Homo sapiens
atttatatggttaag

SEQ ID NO: 56900 - DNA, 15 bp, Homo sapiens
catttatatggttaa

SEQ ID NO: 56901 - DNA, 15 bp, Homo sapiens
acatttatatggtta

SEQ ID NO: 56902 - DNA, 15 bp, Homo sapiens
cacatttatatggtt

SEQ ID NO: 56903 - DNA, 15 bp, Homo sapiens
ccacatttatatggt

SEQ ID NO: 56904 - DNA, 15 bp, Homo sapiens
tccacatttatatgg

SEQ ID NO: 56905 - DNA, 15 bp, Homo sapiens
ctccacatttatatg

SEQ ID NO: 56906 - DNA, 15 bp, Homo sapiens
cctccacatttatat

SEQ ID NO: 56907 - DNA, 15 bp, Homo sapiens
gcctccacatttata

SEQ ID NO: 56908 - DNA, 15 bp, Homo sapiens
agcctccacatttat

SEQ ID NO: 56909 - DNA, 15 bp, Homo sapiens
tagcctccacattta

SEQ ID NO: 56910 - DNA, 15 bp, Homo sapiens
atagcctccacattt

SEQ ID NO: 56911 - DNA, 15 bp, Homo sapiens
gatagcctccacatt

SEQ ID NO: 56912 - DNA, 15 bp, Homo sapiens
tgatagcctccacat

SEQ ID NO: 56913 - DNA, 15 bp, Homo sapiens
ttgatagcctccaca

SEQ ID NO: 56914 - DNA, 15 bp, Homo sapiens
gttgatagcctccac

SEQ ID NO: 56915 - DNA, 15 bp, Homo sapiens
tgttgatagcctcca

SEQ ID NO: 56916 - DNA, 15 bp, Homo sapiens
ttgttgatagcctcc

SEQ ID NO: 56917 - DNA, 15 bp, Homo sapiens
tttgttgatagcctc

SEQ ID NO: 56918 - DNA, 15 bp, Homo sapiens
ctttgttgatagcct

SEQ ID NO: 56919 - DNA, 15 bp, Homo sapiens
tctttgttgatagcc

SEQ ID NO: 56920 - DNA, 15 bp, Homo sapiens
ttctttgttgatagc

SEQ ID NO: 56921 - DNA, 15 bp, Homo sapiens
attctttgttgatag

SEQ ID NO: 56922 - DNA, 15 bp, Homo sapiens
cattctttgttgata

SEQ ID NO: 56923 - DNA, 15 bp, Homo sapiens
ccattctttgttgat

SEQ ID NO: 56924 - DNA, 15 bp, Homo sapiens
cccattctttgttga

SEQ ID NO: 56925 - DNA, 15 bp, Homo sapiens
gcccattctttgttg

SEQ ID NO: 56926 - DNA, 15 bp, Homo sapiens
agcccattctttgtt

SEQ ID NO: 56927 - DNA, 15 bp, Homo sapiens
aagcccattctttgt

SEQ ID NO: 56928 - DNA, 15 bp, Homo sapiens
caagcccattctttg

SEQ ID NO: 56929 - DNA, 15 bp, Homo sapiens
tcaagcccattcttt

SEQ ID NO: 56930 - DNA, 15 bp, Homo sapiens
ttcaagcccattctt

SEQ ID NO: 56931 - DNA, 15 bp, Homo sapiens
tttcaagcccattct

SEQ ID NO: 56932 - DNA, 15 bp, Homo sapiens
gtttcaagcccattc

SEQ ID NO: 56933 - DNA, 15 bp, Homo sapiens
tgtttcaagcccatt

SEQ ID NO: 56934 - DNA, 15 bp, Homo sapiens
atgtttcaagcccat

SEQ ID NO: 56935 - DNA, 15 bp, Homo sapiens
aatgtttcaagccca

SEQ ID NO: 56936 - DNA, 15 bp, Homo sapiens
taatgtttcaagccc

SEQ ID NO: 56937 - DNA, 15 bp, Homo sapiens
ataatgtttcaagcc

SEQ ID NO: 56938 - DNA, 15 bp, Homo sapiens
tataatgtttcaagc

SEQ ID NO: 56939 - DNA, 15 bp, Homo sapiens
ttataatgtttcaag

SEQ ID NO: 56940 - DNA, 15 bp, Homo sapiens
tttataatgtttcaa

SEQ ID NO: 56941 - DNA, 15 bp, Homo sapiens
ttttataatgtttca

SEQ ID NO: 56942 - DNA, 15 bp, Homo sapiens
tttttataatgtttc

SEQ ID NO: 56943 - DNA, 15 bp, Homo sapiens
atttttataatgttt

SEQ ID NO: 56944 - DNA, 15 bp, Homo sapiens
aatttttataatgtt

SEQ ID NO: 56945 - DNA, 15 bp, Homo sapiens
caatttttataatgt

SEQ ID NO: 56946 - DNA, 15 bp, Homo sapiens
tcaatttttataatg

SEQ ID NO: 56947 - DNA, 15 bp, Homo sapiens
gtcaatttttataat

SEQ ID NO: 56948 - DNA, 15 bp, Homo sapiens
tgtcaatttttataa

SEQ ID NO: 56949 - DNA, 15 bp, Homo sapiens
ttgtcaatttttata

SEQ ID NO: 56950 - DNA, 15 bp, Homo sapiens
attgtcaatttttat

SEQ ID NO: 56951 - DNA, 15 bp, Homo sapiens
cattgtcaattttta

SEQ ID NO: 56952 - DNA, 15 bp, Homo sapiens
tcattgtcaattttt

SEQ ID NO: 56953 - DNA, 15 bp, Homo sapiens
atcattgtcaatttt

SEQ ID NO: 56954 - DNA, 15 bp, Homo sapiens
aatcattgtcaattt

SEQ ID NO: 56955 - DNA, 15 bp, Homo sapiens
aaatcattgtcaatt

SEQ ID NO: 56956 - DNA, 15 bp, Homo sapiens
taaatcattgtcaat

SEQ ID NO: 56957 - DNA, 15 bp, Homo sapiens
ataaatcattgtcaa

SEQ ID NO: 56958 - DNA, 15 bp, Homo sapiens
aataaatcattgtca

SEQ ID NO: 56959 - DNA, 15 bp, Homo sapiens
taataaatcattgtc

SEQ ID NO: 56960 - DNA, 15 bp, Homo sapiens
ttaataaatcattgt

SEQ ID NO: 56961 - DNA, 15 bp, Homo sapiens
tttaataaatcattg

SEQ ID NO: 56962 - DNA, 15 bp, Homo sapiens
atttaataaatcatt

SEQ ID NO: 56963 - DNA, 15 bp, Homo sapiens
tatttaataaatcat

SEQ ID NO: 56964 - DNA, 15 bp, Homo sapiens
atatttaataaatca

SEQ ID NO: 56965 - DNA, 15 bp, Homo sapiens
catatttaataaatc

SEQ ID NO: 56966 - DNA, 15 bp, Homo sapiens
acatatttaataaat

SEQ ID NO: 56967 - DNA, 15 bp, Homo sapiens
aacatatttaataaa

SEQ ID NO: 56968 - DNA, 15 bp, Homo sapiens
aaacatatttaataa

SEQ ID NO: 56969 - DNA, 15 bp, Homo sapiens
aaaacatatttaata

SEQ ID NO: 56970 - DNA, 15 bp, Homo sapiens
gaaaacatatttaat

SEQ ID NO: 56971 - DNA, 15 bp, Homo sapiens
agaaaacatatttaa

SEQ ID NO: 56972 - DNA, 15 bp, Homo sapiens
gagaaaacatattta

SEQ ID NO: 56973 - DNA, 15 bp, Homo sapiens
tgagaaaacatattt

SEQ ID NO: 56974 - DNA, 15 bp, Homo sapiens
ttgagaaaacatatt

SEQ ID NO: 56975 - DNA, 15 bp, Homo sapiens
attgagaaaacatat

SEQ ID NO: 56976 - DNA, 15 bp, Homo sapiens
aattgagaaaacata

SEQ ID NO: 56977 - DNA, 15 bp, Homo sapiens
caattgagaaaacat

SEQ ID NO: 56978 - DNA, 15 bp, Homo sapiens
acaattgagaaaaca

SEQ ID NO: 56979 - DNA, 15 bp, Homo sapiens
tacaattgagaaaac

SEQ ID NO: 56980 - DNA, 15 bp, Homo sapiens
ttacaattgagaaaa

SEQ ID NO: 56981 - DNA, 15 bp, Homo sapiens
gttacaattgagaaa

SEQ ID NO: 56982 - DNA, 15 bp, Homo sapiens
cgttacaattgagaa

SEQ ID NO: 56983 - DNA, 15 bp, Homo sapiens
tcgttacaattgaga

SEQ ID NO: 56984 - DNA, 15 bp, Homo sapiens
gtcgttacaattgag

SEQ ID NO: 56985 - DNA, 15 bp, Homo sapiens
agtcgttacaattga

SEQ ID NO: 56986 - DNA, 15 bp, Homo sapiens
aagtcgttacaattg

SEQ ID NO: 56987 - DNA, 15 bp, Homo sapiens
gaagtcgttacaatt

SEQ ID NO: 56988 - DNA, 15 bp, Homo sapiens
agaagtcgttacaat

SEQ ID NO: 56989 - DNA, 15 bp, Homo sapiens
gagaagtcgttacaa

SEQ ID NO: 56990 - DNA, 15 bp, Homo sapiens
ggagaagtcgttaca

SEQ ID NO: 56991 - DNA, 15 bp, Homo sapiens
tggagaagtcgttac

SEQ ID NO: 56992 - DNA, 15 bp, Homo sapiens
atggagaagtcgtta

SEQ ID NO: 56993 - DNA, 15 bp, Homo sapiens
gatggagaagtcgtt

SEQ ID NO: 56994 - DNA, 15 bp, Homo sapiens
agatggagaagtcgt

SEQ ID NO: 56995 - DNA, 15 bp, Homo sapiens
gagatggagaagtcg

SEQ ID NO: 56996 - DNA, 15 bp, Homo sapiens
ggagatggagaagtc

SEQ ID NO: 56997 - DNA, 15 bp, Homo sapiens
aggagatggagaagt

SEQ ID NO: 56998 - DNA, 15 bp, Homo sapiens
caggagatggagaag

SEQ ID NO: 56999 - DNA, 15 bp, Homo sapiens
acaggagatggagaa

SEQ ID NO: 57000 - DNA, 15 bp, Homo sapiens
cacaggagatggaga

SEQ ID NO: 57001 - DNA, 15 bp, Homo sapiens
acacaggagatggag

SEQ ID NO: 57002 - DNA, 15 bp, Homo sapiens
tacacaggagatgga

SEQ ID NO: 57003 - DNA, 15 bp, Homo sapiens
ttacacaggagatgg

SEQ ID NO: 57004 - DNA, 15 bp, Homo sapiens
attacacaggagatg

SEQ ID NO: 57005 - DNA, 15 bp, Homo sapiens
gattacacaggagat

SEQ ID NO: 57006 - DNA, 15 bp, Homo sapiens
tgattacacaggaga

SEQ ID NO: 57007 - DNA, 15 bp, Homo sapiens
ttgattacacaggag

SEQ ID NO: 57008 - DNA, 15 bp, Homo sapiens
cttgattacacagga

SEQ ID NO: 57009 - DNA, 15 bp, Homo sapiens
ccttgattacacagg

SEQ ID NO: 57010 - DNA, 15 bp, Homo sapiens
gccttgattacacag

SEQ ID NO: 57011 - DNA, 15 bp, Homo sapiens
ggccttgattacaca

SEQ ID NO: 57012 - DNA, 15 bp, Homo sapiens
tggccttgattacac

SEQ ID NO: 57013 - DNA, 15 bp, Homo sapiens
ctggccttgattaca

SEQ ID NO: 57014 - DNA, 15 bp, Homo sapiens
actggccttgattac

SEQ ID NO: 57015 - DNA, 15 bp, Homo sapiens
cactggccttgatta

SEQ ID NO: 57016 - DNA, 15 bp, Homo sapiens
gcactggccttgatt

SEQ ID NO: 57017 - DNA, 15 bp, Homo sapiens
agcactggccttgat

SEQ ID NO: 57018 - DNA, 15 bp, Homo sapiens
tagcactggccttga

SEQ ID NO: 57019 - DNA, 15 bp, Homo sapiens
ttagcactggccttg

SEQ ID NO: 57020 - DNA, 15 bp, Homo sapiens
tttagcactggcctt

SEQ ID NO: 57021 - DNA, 15 bp, Homo sapiens
ttttagcactggcct

SEQ ID NO: 57022 - DNA, 15 bp, Homo sapiens
attttagcactggcc

SEQ ID NO: 57023 - DNA, 15 bp, Homo sapiens
aattttagcactggc

SEQ ID NO: 57024 - DNA, 15 bp, Homo sapiens
gaattttagcactgg

SEQ ID NO: 57025 - DNA, 15 bp, Homo sapiens
tgaattttagcactg

SEQ ID NO: 57026 - DNA, 15 bp, Homo sapiens
ctgaattttagcact

SEQ ID NO: 57027 - DNA, 15 bp, Homo sapiens
tctgaattttagcac

SEQ ID NO: 57028 - DNA, 15 bp, Homo sapiens
atctgaattttagca

SEQ ID NO: 57029 - DNA, 15 bp, Homo sapiens
catctgaattttagc

SEQ ID NO: 57030 - DNA, 15 bp, Homo sapiens
gcatctgaattttag

SEQ ID NO: 57031 - DNA, 15 bp, Homo sapiens
agcatctgaatttta

SEQ ID NO: 57032 - DNA, 15 bp, Homo sapiens
cagcatctgaatttt

SEQ ID NO: 57033 - DNA, 15 bp, Homo sapiens
acagcatctgaattt

SEQ ID NO: 57034 - DNA, 15 bp, Homo sapiens
aacagcatctgaatt

SEQ ID NO: 57035 - DNA, 15 bp, Homo sapiens
taacagcatctgaat

SEQ ID NO: 57036 - DNA, 15 bp, Homo sapiens
ctaacagcatctgaa

SEQ ID NO: 57037 - DNA, 15 bp, Homo sapiens
actaacagcatctga

SEQ ID NO: 57038 - DNA, 15 bp, Homo sapiens
tactaacagcatctg

SEQ ID NO: 57039 - DNA, 15 bp, Homo sapiens
gtactaacagcatct

SEQ ID NO: 57040 - DNA, 15 bp, Homo sapiens
ggtactaacagcatc

SEQ ID NO: 57041 - DNA, 15 bp, Homo sapiens
aggtactaacagcat

SEQ ID NO: 57042 - DNA, 15 bp, Homo sapiens
taggtactaacagca

SEQ ID NO: 57043 - DNA, 15 bp, Homo sapiens
gtaggtactaacagc

SEQ ID NO: 57044 - DNA, 15 bp, Homo sapiens
tgtaggtactaacag

SEQ ID NO: 57045 - DNA, 15 bp, Homo sapiens
atgtaggtactaaca

SEQ ID NO: 57046 - DNA, 15 bp, Homo sapiens
gatgtaggtactaac

SEQ ID NO: 57047 - DNA, 15 bp, Homo sapiens
tgatgtaggtactaa

SEQ ID NO: 57048 - DNA, 15 bp, Homo sapiens
ctgatgtaggtacta

SEQ ID NO: 57049 - DNA, 15 bp, Homo sapiens
actgatgtaggtact

SEQ ID NO: 57050 - DNA, 15 bp, Homo sapiens
gactgatgtaggtac

SEQ ID NO: 57051 - DNA, 15 bp, Homo sapiens
tgactgatgtaggta

SEQ ID NO: 57052 - DNA, 15 bp, Homo sapiens
ttgactgatgtaggt

SEQ ID NO: 57053 - DNA, 15 bp, Homo sapiens
gttgactgatgtagg

SEQ ID NO: 57054 - DNA, 15 bp, Homo sapiens
tgttgactgatgtag

SEQ ID NO: 57055 - DNA, 15 bp, Homo sapiens
ttgttgactgatgta

SEQ ID NO: 57056 - DNA, 15 bp, Homo sapiens
gttgttgactgatgt

SEQ ID NO: 57057 - DNA, 15 bp, Homo sapiens
agttgttgactgatg

SEQ ID NO: 57058 - DNA, 15 bp, Homo sapiens
aagttgttgactgat

SEQ ID NO: 57059 - DNA, 15 bp, Homo sapiens
taagttgttgactga

SEQ ID NO: 57060 - DNA, 15 bp, Homo sapiens
gtaagttgttgactg

SEQ ID NO: 57061 - DNA, 15 bp, Homo sapiens
tgtaagttgttgact

SEQ ID NO: 57062 - DNA, 15 bp, Homo sapiens
gtgtaagttgttgac

SEQ ID NO: 57063 - DNA, 15 bp, Homo sapiens
agtgtaagttgttga

SEQ ID NO: 57064 - DNA, 15 bp, Homo sapiens
aagtgtaagttgttg

SEQ ID NO: 57065 - DNA, 15 bp, Homo sapiens
taagtgtaagttgtt

SEQ ID NO: 57066 - DNA, 15 bp, Homo sapiens
ataagtgtaagttgt

SEQ ID NO: 57067 - DNA, 15 bp, Homo sapiens
aataagtgtaagttg

SEQ ID NO: 57068 - DNA, 15 bp, Homo sapiens
aaataagtgtaagtt

SEQ ID NO: 57069 - DNA, 15 bp, Homo sapiens
aaaataagtgtaagt

SEQ ID NO: 57070 - DNA, 15 bp, Homo sapiens
taaaataagtgtaag

SEQ ID NO: 57071 - DNA, 15 bp, Homo sapiens
gtaaaataagtgtaa

SEQ ID NO: 57072 - DNA, 15 bp, Homo sapiens
agtaaaataagtgta

SEQ ID NO: 57073 - DNA, 15 bp, Homo sapiens
tagtaaaataagtgt

SEQ ID NO: 57074 - DNA, 15 bp, Homo sapiens
ctagtaaaataagtg

SEQ ID NO: 57075 - DNA, 15 bp, Homo sapiens
actagtaaaataagt

SEQ ID NO: 57076 - DNA, 15 bp, Homo sapiens
aactagtaaaataag

SEQ ID NO: 57077 - DNA, 15 bp, Homo sapiens
aaactagtaaaataa

SEQ ID NO: 57078 - DNA, 15 bp, Homo sapiens
aaaactagtaaaata

SEQ ID NO: 57079 - DNA, 15 bp, Homo sapiens
gaaaactagtaaaat

SEQ ID NO: 57080 - DNA, 15 bp, Homo sapiens
tgaaaactagtaaaa

SEQ ID NO: 57081 - DNA, 15 bp, Homo sapiens
ttgaaaactagtaaa

SEQ ID NO: 57082 - DNA, 15 bp, Homo sapiens
attgaaaactagtaa

SEQ ID NO: 57083 - DNA, 15 bp, Homo sapiens
gattgaaaactagta

SEQ ID NO: 57084 - DNA, 15 bp, Homo sapiens
tgattgaaaactagt

SEQ ID NO: 57085 - DNA, 15 bp, Homo sapiens
atgattgaaaactag

SEQ ID NO: 57086 - DNA, 15 bp, Homo sapiens
tatgattgaaaacta

SEQ ID NO: 57087 - DNA, 15 bp, Homo sapiens
ttatgattgaaaact

SEQ ID NO: 57088 - DNA, 15 bp, Homo sapiens
attatgattgaaaac

SEQ ID NO: 57089 - DNA, 15 bp, Homo sapiens
tattatgattgaaaa

SEQ ID NO: 57090 - DNA, 15 bp, Homo sapiens
gtattatgattgaaa

SEQ ID NO: 57091 - DNA, 15 bp, Homo sapiens
ggtattatgattgaa

SEQ ID NO: 57092 - DNA, 15 bp, Homo sapiens
aggtattatgattga

SEQ ID NO: 57093 - DNA, 15 bp, Homo sapiens
caggtattatgattg

SEQ ID NO: 57094 - DNA, 15 bp, Homo sapiens
gcaggtattatgatt

SEQ ID NO: 57095 - DNA, 15 bp, Homo sapiens
agcaggtattatgat

SEQ ID NO: 57096 - DNA, 15 bp, Homo sapiens
cagcaggtattatga

SEQ ID NO: 57097 - DNA, 15 bp, Homo sapiens
acagcaggtattatg

SEQ ID NO: 57098 - DNA, 15 bp, Homo sapiens
cacagcaggtattat

SEQ ID NO: 57099 - DNA, 15 bp, Homo sapiens
ccacagcaggtatta

SEQ ID NO: 57100 - DNA, 15 bp, Homo sapiens
tccacagcaggtatt

SEQ ID NO: 57101 - DNA, 15 bp, Homo sapiens
atccacagcaggtat

SEQ ID NO: 57102 - DNA, 15 bp, Homo sapiens
catccacagcaggta

SEQ ID NO: 57103 - DNA, 15 bp, Homo sapiens
gcatccacagcaggt

SEQ ID NO: 57104 - DNA, 15 bp, Homo sapiens
agcatccacagcagg

SEQ ID NO: 57105 - DNA, 15 bp, Homo sapiens
aagcatccacagcag

SEQ ID NO: 57106 - DNA, 15 bp, Homo sapiens
gaagcatccacagca

SEQ ID NO: 57107 - DNA, 15 bp, Homo sapiens
tgaagcatccacagc

SEQ ID NO: 57108 - DNA, 15 bp, Homo sapiens
atgaagcatccacag

SEQ ID NO: 57109 - DNA, 15 bp, Homo sapiens
catgaagcatccaca

SEQ ID NO: 57110 - DNA, 15 bp, Homo sapiens
acatgaagcatccac

SEQ ID NO: 57111 - DNA, 15 bp, Homo sapiens
cacatgaagcatcca

SEQ ID NO: 57112 - DNA, 15 bp, Homo sapiens
gcacatgaagcatcc

SEQ ID NO: 57113 - DNA, 15 bp, Homo sapiens
agcacatgaagcatc

SEQ ID NO: 57114 - DNA, 15 bp, Homo sapiens
cagcacatgaagcat

SEQ ID NO: 57115 - DNA, 15 bp, Homo sapiens
gcagcacatgaagca

SEQ ID NO: 57116 - DNA, 15 bp, Homo sapiens
ggcagcacatgaagc

SEQ ID NO: 57117 - DNA, 15 bp, Homo sapiens
aggcagcacatgaag

SEQ ID NO: 57118 - DNA, 15 bp, Homo sapiens
caggcagcacatgaa

SEQ ID NO: 57119 - DNA, 15 bp, Homo sapiens
gcaggcagcacatga

SEQ ID NO: 57120 - DNA, 15 bp, Homo sapiens
tgcaggcagcacatg

SEQ ID NO: 57121 - DNA, 15 bp, Homo sapiens
ttgcaggcagcacat

SEQ ID NO: 57122 - DNA, 15 bp, Homo sapiens
cttgcaggcagcaca

SEQ ID NO: 57123 - DNA, 15 bp, Homo sapiens
gcttgcaggcagcac

SEQ ID NO: 57124 - DNA, 15 bp, Homo sapiens
agcttgcaggcagca

SEQ ID NO: 57125 - DNA, 15 bp, Homo sapiens
aagcttgcaggcagc

SEQ ID NO: 57126 - DNA, 15 bp, Homo sapiens
gaagcttgcaggcag

SEQ ID NO: 57127 - DNA, 15 bp, Homo sapiens
agaagcttgcaggca

SEQ ID NO: 57128 - DNA, 15 bp, Homo sapiens
aagaagcttgcaggc

SEQ ID NO: 57129 - DNA, 15 bp, Homo sapiens
aaagaagcttgcagg

SEQ ID NO: 57130 - DNA, 15 bp, Homo sapiens
aaaagaagcttgcag

SEQ ID NO: 57131 - DNA, 15 bp, Homo sapiens
aaaaagaagcttgca

SEQ ID NO: 57132 - DNA, 15 bp, Homo sapiens
aaaaaagaagcttgc

SEQ ID NO: 57133 - DNA, 15 bp, Homo sapiens
gaaaaaagaagcttg

SEQ ID NO: 57134 - DNA, 15 bp, Homo sapiens
agaaaaaagaagctt

SEQ ID NO: 57135 - DNA, 15 bp, Homo sapiens
gagaaaaaagaagct

SEQ ID NO: 57136 - DNA, 15 bp, Homo sapiens
tgagaaaaaagaagc

SEQ ID NO: 57137 - DNA, 15 bp, Homo sapiens
atgagaaaaaagaag

SEQ ID NO: 57138 - DNA, 15 bp, Homo sapiens
aatgagaaaaaagaa

SEQ ID NO: 57139 - DNA, 15 bp, Homo sapiens
taatgagaaaaaaga

SEQ ID NO: 57140 - DNA, 15 bp, Homo sapiens
ttaatgagaaaaaag

SEQ ID NO: 57141 - DNA, 15 bp, Homo sapiens
tttaatgagaaaaaa

SEQ ID NO: 57142 - DNA, 15 bp, Homo sapiens
atttaatgagaaaaa

SEQ ID NO: 57143 - DNA, 15 bp, Homo sapiens
tatttaatgagaaaa

SEQ ID NO: 57144 - DNA, 15 bp, Homo sapiens
atatttaatgagaaa

SEQ ID NO: 57145 - DNA, 15 bp, Homo sapiens
tatatttaatgagaa

SEQ ID NO: 57146 - DNA, 15 bp, Homo sapiens
ttatatttaatgaga

SEQ ID NO: 57147 - DNA, 15 bp, Homo sapiens
tttatatttaatgag

SEQ ID NO: 57148 - DNA, 15 bp, Homo sapiens
ttttatatttaatga

SEQ ID NO: 57149 - DNA, 15 bp, Homo sapiens
attttatatttaatg

SEQ ID NO: 57150 - DNA, 15 bp, Homo sapiens
tattttatatttaat

SEQ ID NO: 57151 - DNA, 15 bp, Homo sapiens
atattttatatttaa

SEQ ID NO: 57152 - DNA, 15 bp, Homo sapiens
aatattttatattta

SEQ ID NO: 57153 - DNA, 15 bp, Homo sapiens
aaatattttatattt

SEQ ID NO: 57154 - DNA, 15 bp, Homo sapiens
aaaatattttatatt

SEQ ID NO: 57155 - DNA, 15 bp, Homo sapiens
caaaatattttatat

SEQ ID NO: 57156 - DNA, 15 bp, Homo sapiens
acaaaatattttata

SEQ ID NO: 57157 - DNA, 15 bp, Homo sapiens
tacaaaatattttat

SEQ ID NO: 57158 - DNA, 15 bp, Homo sapiens
ttacaaaatatttta

SEQ ID NO: 57159 - DNA, 15 bp, Homo sapiens
attacaaaatatttt

SEQ ID NO: 57160 - DNA, 15 bp, Homo sapiens
cattacaaaatattt

SEQ ID NO: 57161 - DNA, 15 bp, Homo sapiens
gcattacaaaatatt

SEQ ID NO: 57162 - DNA, 15 bp, Homo sapiens
agcattacaaaatat

SEQ ID NO: 57163 - DNA, 15 bp, Homo sapiens
cagcattacaaaata

SEQ ID NO: 57164 - DNA, 15 bp, Homo sapiens
gcagcattacaaaat

SEQ ID NO: 57165 - DNA, 15 bp, Homo sapiens
tgcagcattacaaaa

SEQ ID NO: 57166 - DNA, 15 bp, Homo sapiens
gtgcagcattacaaa

SEQ ID NO: 57167 - DNA, 15 bp, Homo sapiens
tgtgcagcattacaa

SEQ ID NO: 57168 - DNA, 15 bp, Homo sapiens
ctgtgcagcattaca

SEQ ID NO: 57169 - DNA, 15 bp, Homo sapiens
tctgtgcagcattac

SEQ ID NO: 57170 - DNA, 15 bp, Homo sapiens
ttctgtgcagcatta

SEQ ID NO: 57171 - DNA, 15 bp, Homo sapiens
tttctgtgcagcatt

SEQ ID NO: 57172 - DNA, 15 bp, Homo sapiens
atttctgtgcagcat

SEQ ID NO: 57173 - DNA, 15 bp, Homo sapiens
aatttctgtgcagca

SEQ ID NO: 57174 - DNA, 15 bp, Homo sapiens
aaatttctgtgcagc

SEQ ID NO: 57175 - DNA, 15 bp, Homo sapiens
aaaatttctgtgcag

SEQ ID NO: 57176 - DNA, 15 bp, Homo sapiens
gaaaatttctgtgca

SEQ ID NO: 57177 - DNA, 15 bp, Homo sapiens
tgaaaatttctgtgc

SEQ ID NO: 57178 - DNA, 15 bp, Homo sapiens
ttgaaaatttctgtg

SEQ ID NO: 57179 - DNA, 15 bp, Homo sapiens
attgaaaatttctgt

SEQ ID NO: 57180 - DNA, 15 bp, Homo sapiens
aattgaaaatttctg

SEQ ID NO: 57181 - DNA, 15 bp, Homo sapiens
aaattgaaaatttct

SEQ ID NO: 57182 - DNA, 15 bp, Homo sapiens
caaattgaaaatttc

SEQ ID NO: 57183 - DNA, 15 bp, Homo sapiens
tcaaattgaaaattt

SEQ ID NO: 57184 - DNA, 15 bp, Homo sapiens
ctcaaattgaaaatt

SEQ ID NO: 57185 - DNA, 15 bp, Homo sapiens
tctcaaattgaaaat

SEQ ID NO: 57186 - DNA, 15 bp, Homo sapiens
atctcaaattgaaaa

SEQ ID NO: 57187 - DNA, 15 bp, Homo sapiens
aatctcaaattgaaa

SEQ ID NO: 57188 - DNA, 15 bp, Homo sapiens
gaatctcaaattgaa

SEQ ID NO: 57189 - DNA, 15 bp, Homo sapiens
agaatctcaaattga

SEQ ID NO: 57190 - DNA, 15 bp, Homo sapiens
tagaatctcaaattg

SEQ ID NO: 57191 - DNA, 15 bp, Homo sapiens
gtagaatctcaaatt

SEQ ID NO: 57192 - DNA, 15 bp, Homo sapiens
tgtagaatctcaaat

SEQ ID NO: 57193 - DNA, 15 bp, Homo sapiens
ctgtagaatctcaaa

SEQ ID NO: 57194 - DNA, 15 bp, Homo sapiens
actgtagaatctcaa

SEQ ID NO: 57195 - DNA, 15 bp, Homo sapiens
tactgtagaatctca

SEQ ID NO: 57196 - DNA, 15 bp, Homo sapiens
ttactgtagaatctc

SEQ ID NO: 57197 - DNA, 15 bp, Homo sapiens
cttactgtagaatct

SEQ ID NO: 57198 - DNA, 15 bp, Homo sapiens
gcttactgtagaatc

SEQ ID NO: 57199 - DNA, 15 bp, Homo sapiens
cgcttactgtagaat

SEQ ID NO: 57200 - DNA, 15 bp, Homo sapiens
acgcttactgtagaa

SEQ ID NO: 57201 - DNA, 15 bp, Homo sapiens
aacgcttactgtaga

SEQ ID NO: 57202 - DNA, 15 bp, Homo sapiens
aaacgcttactgtag

SEQ ID NO: 57203 - DNA, 15 bp, Homo sapiens
aaaacgcttactgta

SEQ ID NO: 57204 - DNA, 15 bp, Homo sapiens
aaaaacgcttactgt

SEQ ID NO: 57205 - DNA, 15 bp, Homo sapiens
aaaaaacgcttactg

SEQ ID NO: 57206 - DNA, 15 bp, Homo sapiens
aaaaaaacgcttact

SEQ ID NO: 57207 - DNA, 15 bp, Homo sapiens
aaaaaaaacgcttac

SEQ ID NO: 57208 - DNA, 15 bp, Homo sapiens
gaaaaaaaacgctta

SEQ ID NO: 57209 - DNA, 15 bp, Homo sapiens
agaaaaaaaacgctt

SEQ ID NO: 57210 - DNA, 15 bp, Homo sapiens
aagaaaaaaaacgct

SEQ ID NO: 57211 - DNA, 15 bp, Homo sapiens
aaagaaaaaaaacgc

SEQ ID NO: 57212 - DNA, 15 bp, Homo sapiens
caaagaaaaaaaacg

SEQ ID NO: 57213 - DNA, 15 bp, Homo sapiens
tcaaagaaaaaaaac

SEQ ID NO: 57214 - DNA, 15 bp, Homo sapiens
ttcaaagaaaaaaaa

SEQ ID NO: 57215 - DNA, 15 bp, Homo sapiens
cttcaaagaaaaaaa

SEQ ID NO: 57216 - DNA, 15 bp, Homo sapiens
tcttcaaagaaaaaa

SEQ ID NO: 57217 - DNA, 15 bp, Homo sapiens
atcttcaaagaaaaa

SEQ ID NO: 57218 - DNA, 15 bp, Homo sapiens
aatcttcaaagaaaa

SEQ ID NO: 57219 - DNA, 15 bp, Homo sapiens
aaatcttcaaagaaa

SEQ ID NO: 57220 - DNA, 15 bp, Homo sapiens
taaatcttcaaagaa

SEQ ID NO: 57221 - DNA, 15 bp, Homo sapiens
ataaatcttcaaaga

SEQ ID NO: 57222 - DNA, 15 bp, Homo sapiens
cataaatcttcaaag

SEQ ID NO: 57223 - DNA, 15 bp, Homo sapiens
tcataaatcttcaaa

SEQ ID NO: 57224 - DNA, 15 bp, Homo sapiens
atcataaatcttcaa

SEQ ID NO: 57225 - DNA, 15 bp, Homo sapiens
catcataaatcttca

SEQ ID NO: 57226 - DNA, 15 bp, Homo sapiens
gcatcataaatcttc

SEQ ID NO: 57227 - DNA, 15 bp, Homo sapiens
tgcatcataaatctt

SEQ ID NO: 57228 - DNA, 15 bp, Homo sapiens
gtgcatcataaatct

SEQ ID NO: 57229 - DNA, 15 bp, Homo sapiens
agtgcatcataaatc

SEQ ID NO: 57230 - DNA, 15 bp, Homo sapiens
aagtgcatcataaat

SEQ ID NO: 57231 - DNA, 15 bp, Homo sapiens
taagtgcatcataaa

SEQ ID NO: 57232 - DNA, 15 bp, Homo sapiens
ataagtgcatcataa

SEQ ID NO: 57233 - DNA, 15 bp, Homo sapiens
aataagtgcatcata

SEQ ID NO: 57234 - DNA, 15 bp, Homo sapiens
gaataagtgcatcat

SEQ ID NO: 57235 - DNA, 15 bp, Homo sapiens
tgaataagtgcatca

SEQ ID NO: 57236 - DNA, 15 bp, Homo sapiens
ttgaataagtgcatc

SEQ ID NO: 57237 - DNA, 15 bp, Homo sapiens
attgaataagtgcat

SEQ ID NO: 57238 - DNA, 15 bp, Homo sapiens
tattgaataagtgca

SEQ ID NO: 57239 - DNA, 15 bp, Homo sapiens
ctattgaataagtgc

SEQ ID NO: 57240 - DNA, 15 bp, Homo sapiens
gctattgaataagtg

SEQ ID NO: 57241 - DNA, 15 bp, Homo sapiens
agctattgaataagt

SEQ ID NO: 57242 - DNA, 15 bp, Homo sapiens
cagctattgaataag

SEQ ID NO: 57243 - DNA, 15 bp, Homo sapiens
acagctattgaataa

SEQ ID NO: 57244 - DNA, 15 bp, Homo sapiens
gacagctattgaata

SEQ ID NO: 57245 - DNA, 15 bp, Homo sapiens
tgacagctattgaat

SEQ ID NO: 57246 - DNA, 15 bp, Homo sapiens
ctgacagctattgaa

SEQ ID NO: 57247 - DNA, 15 bp, Homo sapiens
gctgacagctattga

SEQ ID NO: 57248 - DNA, 15 bp, Homo sapiens
ggctgacagctattg

SEQ ID NO: 57249 - DNA, 15 bp, Homo sapiens
cggctgacagctatt

SEQ ID NO: 57250 - DNA, 15 bp, Homo sapiens
acggctgacagctat

SEQ ID NO: 57251 - DNA, 15 bp, Homo sapiens
aacggctgacagcta

SEQ ID NO: 57252 - DNA, 15 bp, Homo sapiens
gaacggctgacagct

SEQ ID NO: 57253 - DNA, 15 bp, Homo sapiens
ggaacggctgacagc

SEQ ID NO: 57254 - DNA, 15 bp, Homo sapiens
tggaacggctgacag

SEQ ID NO: 57255 - DNA, 15 bp, Homo sapiens
gtggaacggctgaca

SEQ ID NO: 57256 - DNA, 15 bp, Homo sapiens
ggtggaacggctgac

SEQ ID NO: 57257 - DNA, 15 bp, Homo sapiens
gggtggaacggctga

SEQ ID NO: 57258 - DNA, 15 bp, Homo sapiens
agggtggaacggctg

SEQ ID NO: 57259 - DNA, 15 bp, Homo sapiens
aagggtggaacggct

SEQ ID NO: 57260 - DNA, 15 bp, Homo sapiens
aaagggtggaacggc

SEQ ID NO: 57261 - DNA, 15 bp, Homo sapiens
aaaagggtggaacgg

SEQ ID NO: 57262 - DNA, 15 bp, Homo sapiens
caaaagggtggaacg

SEQ ID NO: 57263 - DNA, 15 bp, Homo sapiens
tcaaaagggtggaac

SEQ ID NO: 57264 - DNA, 15 bp, Homo sapiens
gtcaaaagggtggaa

SEQ ID NO: 57265 - DNA, 15 bp, Homo sapiens
ggtcaaaagggtgga

SEQ ID NO: 57266 - DNA, 15 bp, Homo sapiens
aggtcaaaagggtgg

SEQ ID NO: 57267 - DNA, 15 bp, Homo sapiens
aaggtcaaaagggtg

SEQ ID NO: 57268 - DNA, 15 bp, Homo sapiens
taaggtcaaaagggt

SEQ ID NO: 57269 - DNA, 15 bp, Homo sapiens
gtaaggtcaaaaggg

SEQ ID NO: 57270 - DNA, 15 bp, Homo sapiens
tgtaaggtcaaaagg

SEQ ID NO: 57271 - DNA, 15 bp, Homo sapiens
gtgtaaggtcaaaag

SEQ ID NO: 57272 - DNA, 15 bp, Homo sapiens
tgtgtaaggtcaaaa

SEQ ID NO: 57273 - DNA, 15 bp, Homo sapiens
atgtgtaaggtcaaa

SEQ ID NO: 57274 - DNA, 15 bp, Homo sapiens
aatgtgtaaggtcaa

SEQ ID NO: 57275 - DNA, 15 bp, Homo sapiens
gaatgtgtaaggtca

SEQ ID NO: 57276 - DNA, 15 bp, Homo sapiens
agaatgtgtaaggtc

SEQ ID NO: 57277 - DNA, 15 bp, Homo sapiens
tagaatgtgtaaggt

SEQ ID NO: 57278 - DNA, 15 bp, Homo sapiens
atagaatgtgtaagg

SEQ ID NO: 57279 - DNA, 15 bp, Homo sapiens
aatagaatgtgtaag

SEQ ID NO: 57280 - DNA, 15 bp, Homo sapiens
taatagaatgtgtaa

SEQ ID NO: 57281 - DNA, 15 bp, Homo sapiens
gtaatagaatgtgta

SEQ ID NO: 57282 - DNA, 15 bp, Homo sapiens
tgtaatagaatgtgt

SEQ ID NO: 57283 - DNA, 15 bp, Homo sapiens
ttgtaatagaatgtg

SEQ ID NO: 57284 - DNA, 15 bp, Homo sapiens
attgtaatagaatgt

SEQ ID NO: 57285 - DNA, 15 bp, Homo sapiens
cattgtaatagaatg

SEQ ID NO: 57286 - DNA, 15 bp, Homo sapiens
tcattgtaatagaat

SEQ ID NO: 57287 - DNA, 15 bp, Homo sapiens
ttcattgtaatagaa

SEQ ID NO: 57288 - DNA, 15 bp, Homo sapiens
attcattgtaataga

SEQ ID NO: 57289 - DNA, 15 bp, Homo sapiens
aattcattgtaatag

SEQ ID NO: 57290 - DNA, 15 bp, Homo sapiens
aaattcattgtaata

SEQ ID NO: 57291 - DNA, 15 bp, Homo sapiens
aaaattcattgtaat

SEQ ID NO: 57292 - DNA, 15 bp, Homo sapiens
caaaattcattgtaa

SEQ ID NO: 57293 - DNA, 15 bp, Homo sapiens
gcaaaattcattgta

SEQ ID NO: 57294 - DNA, 15 bp, Homo sapiens
tgcaaaattcattgt

SEQ ID NO: 57295 - DNA, 15 bp, Homo sapiens
ctgcaaaattcattg

SEQ ID NO: 57296 - DNA, 15 bp, Homo sapiens
actgcaaaattcatt

SEQ ID NO: 57297 - DNA, 15 bp, Homo sapiens
aactgcaaaattcat

SEQ ID NO: 57298 - DNA, 15 bp, Homo sapiens
aaactgcaaaattca

SEQ ID NO: 57299 - DNA, 15 bp, Homo sapiens
aaaactgcaaaattc

SEQ ID NO: 57300 - DNA, 15 bp, Homo sapiens
caaaactgcaaaatt

SEQ ID NO: 57301 - DNA, 15 bp, Homo sapiens
gcaaaactgcaaaat

SEQ ID NO: 57302 - DNA, 15 bp, Homo sapiens
tgcaaaactgcaaaa

SEQ ID NO: 57303 - DNA, 15 bp, Homo sapiens
gtgcaaaactgcaaa

SEQ ID NO: 57304 - DNA, 15 bp, Homo sapiens
tgtgcaaaactgcaa

SEQ ID NO: 57305 - DNA, 15 bp, Homo sapiens
atgtgcaaaactgca

SEQ ID NO: 57306 - DNA, 15 bp, Homo sapiens
aatgtgcaaaactgc

SEQ ID NO: 57307 - DNA, 15 bp, Homo sapiens
aaatgtgcaaaactg

SEQ ID NO: 57308 - DNA, 15 bp, Homo sapiens
aaaatgtgcaaaact

SEQ ID NO: 57309 - DNA, 15 bp, Homo sapiens
aaaaatgtgcaaaac

SEQ ID NO: 57310 - DNA, 15 bp, Homo sapiens
aaaaaatgtgcaaaa

SEQ ID NO: 57311 - DNA, 15 bp, Homo sapiens
taaaaaatgtgcaaa

SEQ ID NO: 57312 - DNA, 15 bp, Homo sapiens
ttaaaaaatgtgcaa

SEQ ID NO: 57313 - DNA, 15 bp, Homo sapiens
tttaaaaaatgtgca

SEQ ID NO: 57314 - DNA, 15 bp, Homo sapiens
atttaaaaaatgtgc

SEQ ID NO: 57315 - DNA, 15 bp, Homo sapiens
catttaaaaaatgtg

SEQ ID NO: 57316 - DNA, 15 bp, Homo sapiens
acatttaaaaaatgt

SEQ ID NO: 57317 - DNA, 15 bp, Homo sapiens
gacatttaaaaaatg

SEQ ID NO: 57318 - DNA, 15 bp, Homo sapiens
tgacatttaaaaaat

SEQ ID NO: 57319 - DNA, 15 bp, Homo sapiens
atgacatttaaaaaa

SEQ ID NO: 57320 - DNA, 15 bp, Homo sapiens
aatgacatttaaaaa

SEQ ID NO: 57321 - DNA, 15 bp, Homo sapiens
taatgacatttaaaa

SEQ ID NO: 57322 - DNA, 15 bp, Homo sapiens
ttaatgacatttaaa

SEQ ID NO: 57323 - DNA, 15 bp, Homo sapiens
gttaatgacatttaa

SEQ ID NO: 57324 - DNA, 15 bp, Homo sapiens
agttaatgacattta

SEQ ID NO: 57325 - DNA, 15 bp, Homo sapiens
cagttaatgacattt

SEQ ID NO: 57326 - DNA, 15 bp, Homo sapiens
acagttaatgacatt

SEQ ID NO: 57327 - DNA, 15 bp, Homo sapiens
aacagttaatgacat

SEQ ID NO: 57328 - DNA, 15 bp, Homo sapiens
taacagttaatgaca

SEQ ID NO: 57329 - DNA, 15 bp, Homo sapiens
ctaacagttaatgac

SEQ ID NO: 57330 - DNA, 15 bp, Homo sapiens
cctaacagttaatga

SEQ ID NO: 57331 - DNA, 15 bp, Homo sapiens
ccctaacagttaatg

SEQ ID NO: 57332 - DNA, 15 bp, Homo sapiens
tccctaacagttaat

SEQ ID NO: 57333 - DNA, 15 bp, Homo sapiens
ttccctaacagttaa

SEQ ID NO: 57334 - DNA, 15 bp, Homo sapiens
attccctaacagtta

SEQ ID NO: 57335 - DNA, 15 bp, Homo sapiens
aattccctaacagtt

SEQ ID NO: 57336 - DNA, 15 bp, Homo sapiens
aaattccctaacagt

SEQ ID NO: 57337 - DNA, 15 bp, Homo sapiens
aaaattccctaacag

SEQ ID NO: 57338 - DNA, 15 bp, Homo sapiens
taaaattccctaaca

SEQ ID NO: 57339 - DNA, 15 bp, Homo sapiens
gtaaaattccctaac

SEQ ID NO: 57340 - DNA, 15 bp, Homo sapiens
agtaaaattccctaa

SEQ ID NO: 57341 - DNA, 15 bp, Homo sapiens
aagtaaaattcccta

SEQ ID NO: 57342 - DNA, 15 bp, Homo sapiens
caagtaaaattccct

SEQ ID NO: 57343 - DNA, 15 bp, Homo sapiens
tcaagtaaaattccc

SEQ ID NO: 57344 - DNA, 15 bp, Homo sapiens
ttcaagtaaaattcc

SEQ ID NO: 57345 - DNA, 15 bp, Homo sapiens
attcaagtaaaattc

SEQ ID NO: 57346 - DNA, 15 bp, Homo sapiens
tattcaagtaaaatt

SEQ ID NO: 57347 - DNA, 15 bp, Homo sapiens
gtattcaagtaaaat

SEQ ID NO: 57348 - DNA, 15 bp, Homo sapiens
agtattcaagtaaaa

SEQ ID NO: 57349 - DNA, 15 bp, Homo sapiens
cagtattcaagtaaa

SEQ ID NO: 57350 - DNA, 15 bp, Homo sapiens
tcagtattcaagtaa

SEQ ID NO: 57351 - DNA, 15 bp, Homo sapiens
ttcagtattcaagta

SEQ ID NO: 57352 - DNA, 15 bp, Homo sapiens
attcagtattcaagt

SEQ ID NO: 57353 - DNA, 15 bp, Homo sapiens
tattcagtattcaag

SEQ ID NO: 57354 - DNA, 15 bp, Homo sapiens
gtattcagtattcaa

SEQ ID NO: 57355 - DNA, 15 bp, Homo sapiens
tgtattcagtattca

SEQ ID NO: 57356 - DNA, 15 bp, Homo sapiens
atgtattcagtattc

SEQ ID NO: 57357 - DNA, 15 bp, Homo sapiens
tatgtattcagtatt

SEQ ID NO: 57358 - DNA, 15 bp, Homo sapiens
atatgtattcagtat

SEQ ID NO: 57359 - DNA, 15 bp, Homo sapiens
tatatgtattcagta

SEQ ID NO: 57360 - DNA, 15 bp, Homo sapiens
ttatatgtattcagt

SEQ ID NO: 57361 - DNA, 15 bp, Homo sapiens
attatatgtattcag

SEQ ID NO: 57362 - DNA, 15 bp, Homo sapiens
cattatatgtattca

SEQ ID NO: 57363 - DNA, 15 bp, Homo sapiens
acattatatgtattc

SEQ ID NO: 57364 - DNA, 15 bp, Homo sapiens
aacattatatgtatt

SEQ ID NO: 57365 - DNA, 15 bp, Homo sapiens
aaacattatatgtat

SEQ ID NO: 57366 - DNA, 15 bp, Homo sapiens
taaacattatatgta

SEQ ID NO: 57367 - DNA, 15 bp, Homo sapiens
ataaacattatatgt

SEQ ID NO: 57368 - DNA, 15 bp, Homo sapiens
tataaacattatatg

SEQ ID NO: 57369 - DNA, 15 bp, Homo sapiens
atataaacattatat

SEQ ID NO: 57370 - DNA, 15 bp, Homo sapiens
aatataaacattata

SEQ ID NO: 57371 - DNA, 15 bp, Homo sapiens
taatataaacattat

SEQ ID NO: 57372 - DNA, 15 bp, Homo sapiens
ttaatataaacatta

SEQ ID NO: 57373 - DNA, 15 bp, Homo sapiens
tttaatataaacatt

SEQ ID NO: 57374 - DNA, 15 bp, Homo sapiens
ttttaatataaacat

SEQ ID NO: 57375 - DNA, 15 bp, Homo sapiens
tttttaatataaaca

SEQ ID NO: 57376 - DNA, 15 bp, Homo sapiens
ctttttaatataaac

SEQ ID NO: 57377 - DNA, 15 bp, Homo sapiens
cctttttaatataaa

SEQ ID NO: 57378 - DNA, 15 bp, Homo sapiens
tcctttttaatataa

SEQ ID NO: 57379 - DNA, 15 bp, Homo sapiens
gtcctttttaatata

SEQ ID NO: 57380 - DNA, 15 bp, Homo sapiens
tgtcctttttaatat

SEQ ID NO: 57381 - DNA, 15 bp, Homo sapiens
atgtcctttttaata

SEQ ID NO: 57382 - DNA, 15 bp, Homo sapiens
aatgtcctttttaat

SEQ ID NO: 57383 - DNA, 15 bp, Homo sapiens
aaatgtcctttttaa

SEQ ID NO: 57384 - DNA, 15 bp, Homo sapiens
caaatgtccttttta

SEQ ID NO: 57385 - DNA, 15 bp, Homo sapiens
acaaatgtccttttt

SEQ ID NO: 57386 - DNA, 15 bp, Homo sapiens
cacaaatgtcctttt

SEQ ID NO: 57387 - DNA, 15 bp, Homo sapiens
acacaaatgtccttt

SEQ ID NO: 57388 - DNA, 15 bp, Homo sapiens
aacacaaatgtcctt

SEQ ID NO: 57389 - DNA, 15 bp, Homo sapiens
taacacaaatgtcct

SEQ ID NO: 57390 - DNA, 15 bp, Homo sapiens
ttaacacaaatgtcc

SEQ ID NO: 57391 - DNA, 15 bp, Homo sapiens
tttaacacaaatgtc

SEQ ID NO: 57392 - DNA, 15 bp, Homo sapiens
ttttaacacaaatgt

SEQ ID NO: 57393 - DNA, 15 bp, Homo sapiens
tttttaacacaaatg

SEQ ID NO: 57394 - DNA, 15 bp, Homo sapiens
ctttttaacacaaat

SEQ ID NO: 57395 - DNA, 15 bp, Homo sapiens
cctttttaacacaaa

SEQ ID NO: 57396 - DNA, 15 bp, Homo sapiens
tcctttttaacacaa

SEQ ID NO: 57397 - DNA, 15 bp, Homo sapiens
ttcctttttaacaca

SEQ ID NO: 57398 - DNA, 15 bp, Homo sapiens
tttcctttttaacac

SEQ ID NO: 57399 - DNA, 15 bp, Homo sapiens
atttcctttttaaca

SEQ ID NO: 57400 - DNA, 15 bp, Homo sapiens
aatttcctttttaac

SEQ ID NO: 57401 - DNA, 15 bp, Homo sapiens
taatttcctttttaa

SEQ ID NO: 57402 - DNA, 15 bp, Homo sapiens
ctaatttccttttta

SEQ ID NO: 57403 - DNA, 15 bp, Homo sapiens
tctaatttccttttt

SEQ ID NO: 57404 - DNA, 15 bp, Homo sapiens
ctctaatttcctttt

SEQ ID NO: 57405 - DNA, 15 bp, Homo sapiens
actctaatttccttt

SEQ ID NO: 57406 - DNA, 15 bp, Homo sapiens
aactctaatttcctt

SEQ ID NO: 57407 - DNA, 15 bp, Homo sapiens
caactctaatttcct

SEQ ID NO: 57408 - DNA, 15 bp, Homo sapiens
gcaactctaatttcc

SEQ ID NO: 57409 - DNA, 15 bp, Homo sapiens
tgcaactctaatttc

SEQ ID NO: 57410 - DNA, 15 bp, Homo sapiens
ctgcaactctaattt

SEQ ID NO: 57411 - DNA, 15 bp, Homo sapiens
actgcaactctaatt

SEQ ID NO: 57412 - DNA, 15 bp, Homo sapiens
tactgcaactctaat

SEQ ID NO: 57413 - DNA, 15 bp, Homo sapiens
ttactgcaactctaa

SEQ ID NO: 57414 - DNA, 15 bp, Homo sapiens
tttactgcaactcta

SEQ ID NO: 57415 - DNA, 15 bp, Homo sapiens
gtttactgcaactct

SEQ ID NO: 57416 - DNA, 15 bp, Homo sapiens
agtttactgcaactc

SEQ ID NO: 57417 - DNA, 15 bp, Homo sapiens
aagtttactgcaact

SEQ ID NO: 57418 - DNA, 15 bp, Homo sapiens
aaagtttactgcaac

SEQ ID NO: 57419 - DNA, 15 bp, Homo sapiens
gaaagtttactgcaa

SEQ ID NO: 57420 - DNA, 15 bp, Homo sapiens
tgaaagtttactgca

SEQ ID NO: 57421 - DNA, 15 bp, Homo sapiens
ttgaaagtttactgc

SEQ ID NO: 57422 - DNA, 15 bp, Homo sapiens
attgaaagtttactg

SEQ ID NO: 57423 - DNA, 15 bp, Homo sapiens
cattgaaagtttact

SEQ ID NO: 57424 - DNA, 15 bp, Homo sapiens
gcattgaaagtttac

SEQ ID NO: 57425 - DNA, 15 bp, Homo sapiens
agcattgaaagttta

SEQ ID NO: 57426 - DNA, 15 bp, Homo sapiens
cagcattgaaagttt

SEQ ID NO: 57427 - DNA, 15 bp, Homo sapiens
gcagcattgaaagtt

SEQ ID NO: 57428 - DNA, 15 bp, Homo sapiens
tgcagcattgaaagt

SEQ ID NO: 57429 - DNA, 15 bp, Homo sapiens
gtgcagcattgaaag

SEQ ID NO: 57430 - DNA, 15 bp, Homo sapiens
tgtgcagcattgaaa

SEQ ID NO: 57431 - DNA, 15 bp, Homo sapiens
gtgtgcagcattgaa

SEQ ID NO: 57432 - DNA, 15 bp, Homo sapiens
tgtgtgcagcattga

SEQ ID NO: 57433 - DNA, 15 bp, Homo sapiens
ttgtgtgcagcattg

SEQ ID NO: 57434 - DNA, 15 bp, Homo sapiens
tttgtgtgcagcatt

SEQ ID NO: 57435 - DNA, 15 bp, Homo sapiens
ttttgtgtgcagcat

SEQ ID NO: 57436 - DNA, 15 bp, Homo sapiens
tttttgtgtgcagca

SEQ ID NO: 57437 - DNA, 15 bp, Homo sapiens
ttttttgtgtgcagc

SEQ ID NO: 57438 - DNA, 15 bp, Homo sapiens
tttttttgtgtgcag

SEQ ID NO: 57439 - DNA, 15 bp, Homo sapiens
ttttttttgtgtgca

SEQ ID NO: 57440 - DNA, 15 bp, Homo sapiens
cttttttttgtgtgc

SEQ ID NO: 57441 - DNA, 15 bp, Homo sapiens
tcttttttttgtgtg

SEQ ID NO: 57442 - DNA, 15 bp, Homo sapiens
gtcttttttttgtgt

SEQ ID NO: 57443 - DNA, 15 bp, Homo sapiens
tgtcttttttttgtg

SEQ ID NO: 57444 - DNA, 15 bp, Homo sapiens
atgtcttttttttgt

SEQ ID NO: 57445 - DNA, 15 bp, Homo sapiens
aatgtcttttttttg

SEQ ID NO: 57446 - DNA, 15 bp, Homo sapiens
aaatgtctttttttt

SEQ ID NO: 57447 - DNA, 15 bp, Homo sapiens
caaatgtcttttttt

SEQ ID NO: 57448 - DNA, 15 bp, Homo sapiens
tcaaatgtctttttt

SEQ ID NO: 57449 - DNA, 15 bp, Homo sapiens
atcaaatgtcttttt

SEQ ID NO: 57450 - DNA, 15 bp, Homo sapiens
aatcaaatgtctttt

SEQ ID NO: 57451 - DNA, 15 bp, Homo sapiens
aaatcaaatgtcttt

SEQ ID NO: 57452 - DNA, 15 bp, Homo sapiens
aaaatcaaatgtctt

SEQ ID NO: 57453 - DNA, 15 bp, Homo sapiens
aaaaatcaaatgtct

SEQ ID NO: 57454 - DNA, 15 bp, Homo sapiens
gaaaaatcaaatgtc

SEQ ID NO: 57455 - DNA, 15 bp, Homo sapiens
tgaaaaatcaaatgt

SEQ ID NO: 57456 - DNA, 15 bp, Homo sapiens
ctgaaaaatcaaatg

SEQ ID NO: 57457 - DNA, 15 bp, Homo sapiens
actgaaaaatcaaat

SEQ ID NO: 57458 - DNA, 15 bp, Homo sapiens
tactgaaaaatcaaa

SEQ ID NO: 57459 - DNA, 15 bp, Homo sapiens
ctactgaaaaatcaa

SEQ ID NO: 57460 - DNA, 15 bp, Homo sapiens
tctactgaaaaatca

SEQ ID NO: 57461 - DNA, 15 bp, Homo sapiens
ttctactgaaaaatc

SEQ ID NO: 57462 - DNA, 15 bp, Homo sapiens
tttctactgaaaaat

SEQ ID NO: 57463 - DNA, 15 bp, Homo sapiens
atttctactgaaaaa

SEQ ID NO: 57464 - DNA, 15 bp, Homo sapiens
aatttctactgaaaa

SEQ ID NO: 57465 - DNA, 15 bp, Homo sapiens
caatttctactgaaa

SEQ ID NO: 57466 - DNA, 15 bp, Homo sapiens
acaatttctactgaa

SEQ ID NO: 57467 - DNA, 15 bp, Homo sapiens
gacaatttctactga

SEQ ID NO: 57468 - DNA, 15 bp, Homo sapiens
ggacaatttctactg

SEQ ID NO: 57469 - DNA, 15 bp, Homo sapiens
aggacaatttctact

SEQ ID NO: 57470 - DNA, 15 bp, Homo sapiens
taggacaatttctac

SEQ ID NO: 57471 - DNA, 15 bp, Homo sapiens
gtaggacaatttcta

SEQ ID NO: 57472 - DNA, 15 bp, Homo sapiens
tgtaggacaatttct

SEQ ID NO: 57473 - DNA, 15 bp, Homo sapiens
atgtaggacaatttc

SEQ ID NO: 57474 - DNA, 15 bp, Homo sapiens
catgtaggacaattt

SEQ ID NO: 57475 - DNA, 15 bp, Homo sapiens
acatgtaggacaatt

SEQ ID NO: 57476 - DNA, 15 bp, Homo sapiens
cacatgtaggacaat

SEQ ID NO: 57477 - DNA, 15 bp, Homo sapiens
gcacatgtaggacaa

SEQ ID NO: 57478 - DNA, 15 bp, Homo sapiens
agcacatgtaggaca

SEQ ID NO: 57479 - DNA, 15 bp, Homo sapiens
aagcacatgtaggac

SEQ ID NO: 57480 - DNA, 15 bp, Homo sapiens
aaagcacatgtagga

SEQ ID NO: 57481 - DNA, 15 bp, Homo sapiens
taaagcacatgtagg

SEQ ID NO: 57482 - DNA, 15 bp, Homo sapiens
ataaagcacatgtag

SEQ ID NO: 57483 - DNA, 15 bp, Homo sapiens
aataaagcacatgta

SEQ ID NO: 57484 - DNA, 15 bp, Homo sapiens
caataaagcacatgt

SEQ ID NO: 57485 - DNA, 15 bp, Homo sapiens
tcaataaagcacatg

SEQ ID NO: 57486 - DNA, 15 bp, Homo sapiens
atcaataaagcacat

SEQ ID NO: 57487 - DNA, 15 bp, Homo sapiens
aatcaataaagcaca

SEQ ID NO: 57488 - DNA, 15 bp, Homo sapiens
aaatcaataaagcac

SEQ ID NO: 57489 - DNA, 15 bp, Homo sapiens
caaatcaataaagca

SEQ ID NO: 57490 - DNA, 15 bp, Homo sapiens
gcaaatcaataaagc

SEQ ID NO: 57491 - DNA, 15 bp, Homo sapiens
agcaaatcaataaag

SEQ ID NO: 57492 - DNA, 15 bp, Homo sapiens
tagcaaatcaataaa

SEQ ID NO: 57493 - DNA, 15 bp, Homo sapiens
atagcaaatcaataa

SEQ ID NO: 57494 - DNA, 15 bp, Homo sapiens
aatagcaaatcaata

SEQ ID NO: 57495 - DNA, 15 bp, Homo sapiens
caatagcaaatcaat

SEQ ID NO: 57496 - DNA, 15 bp, Homo sapiens
tcaatagcaaatcaa

SEQ ID NO: 57497 - DNA, 15 bp, Homo sapiens
ttcaatagcaaatca

SEQ ID NO: 57498 - DNA, 15 bp, Homo sapiens
tttcaatagcaaatc

SEQ ID NO: 57499 - DNA, 15 bp, Homo sapiens
ctttcaatagcaaat

SEQ ID NO: 57500 - DNA, 15 bp, Homo sapiens
tctttcaatagcaaa

SEQ ID NO: 57501 - DNA, 15 bp, Homo sapiens
ttctttcaatagcaa

SEQ ID NO: 57502 - DNA, 15 bp, Homo sapiens
attctttcaatagca

SEQ ID NO: 57503 - DNA, 15 bp, Homo sapiens
tattctttcaatagc

SEQ ID NO: 57504 - DNA, 15 bp, Homo sapiens
ctattctttcaatag

SEQ ID NO: 57505 - DNA, 15 bp, Homo sapiens
cctattctttcaata

SEQ ID NO: 57506 - DNA, 15 bp, Homo sapiens
ccctattctttcaat

SEQ ID NO: 57507 - DNA, 15 bp, Homo sapiens
accctattctttcaa

SEQ ID NO: 57508 - DNA, 15 bp, Homo sapiens
aaccctattctttca

SEQ ID NO: 57509 - DNA, 15 bp, Homo sapiens
aaaccctattctttc

SEQ ID NO: 57510 - DNA, 15 bp, Homo sapiens
aaaaccctattcttt

SEQ ID NO: 57511 - DNA, 15 bp, Homo sapiens
aaaaaccctattctt

SEQ ID NO: 57512 - DNA, 15 bp, Homo sapiens
aaaaaaccctattct

SEQ ID NO: 57513 - DNA, 15 bp, Homo sapiens
aaaaaaaccctattc

SEQ ID NO: 57514 - DNA, 15 bp, Homo sapiens
aaaaaaaaccctatt

SEQ ID NO: 57515 - DNA, 15 bp, Homo sapiens
aaaaaaaaaccctat

SEQ ID NO: 57516 - DNA, 15 bp, Homo sapiens
aaaaaaaaaacccta

SEQ ID NO: 57517 - DNA, 15 bp, Homo sapiens
aaaaaaaaaaaccct

SEQ ID NO: 57518 - DNA, 15 bp, Homo sapiens
aaaaaaaaaaaaccc

SEQ ID NO: 57519 - DNA, 15 bp, Homo sapiens
catttaaaaaaaaaa

SEQ ID NO: 57520 - DNA, 15 bp, Homo sapiens
acatttaaaaaaaaa

SEQ ID NO: 57521 - DNA, 15 bp, Homo sapiens
cacatttaaaaaaaa

SEQ ID NO: 57522 - DNA, 15 bp, Homo sapiens
gcacatttaaaaaaa

SEQ ID NO: 57523 - DNA, 15 bp, Homo sapiens
tgcacatttaaaaaa

SEQ ID NO: 57524 - DNA, 15 bp, Homo sapiens
ctgcacatttaaaaa

SEQ ID NO: 57525 - DNA, 15 bp, Homo sapiens
actgcacatttaaaa

SEQ ID NO: 57526 - DNA, 15 bp, Homo sapiens
cactgcacatttaaa

SEQ ID NO: 57527 - DNA, 15 bp, Homo sapiens
acactgcacatttaa

SEQ ID NO: 57528 - DNA, 15 bp, Homo sapiens
aacactgcacattta

SEQ ID NO: 57529 - DNA, 15 bp, Homo sapiens
caacactgcacattt

SEQ ID NO: 57530 - DNA, 15 bp, Homo sapiens
tcaacactgcacatt

SEQ ID NO: 57531 - DNA, 15 bp, Homo sapiens
ttcaacactgcacat

SEQ ID NO: 57532 - DNA, 15 bp, Homo sapiens
attcaacactgcaca

SEQ ID NO: 57533 - DNA, 15 bp, Homo sapiens
gattcaacactgcac

SEQ ID NO: 57534 - DNA, 15 bp, Homo sapiens
tgattcaacactgca

SEQ ID NO: 57535 - DNA, 15 bp, Homo sapiens
atgattcaacactgc

SEQ ID NO: 57536 - DNA, 15 bp, Homo sapiens
aatgattcaacactg

SEQ ID NO: 57537 - DNA, 15 bp, Homo sapiens
aaatgattcaacact

SEQ ID NO: 57538 - DNA, 15 bp, Homo sapiens
gaaatgattcaacac

SEQ ID NO: 57539 - DNA, 15 bp, Homo sapiens
agaaatgattcaaca

SEQ ID NO: 57540 - DNA, 15 bp, Homo sapiens
aagaaatgattcaac

SEQ ID NO: 57541 - DNA, 15 bp, Homo sapiens
gaagaaatgattcaa

SEQ ID NO: 57542 - DNA, 15 bp, Homo sapiens
tgaagaaatgattca

SEQ ID NO: 57543 - DNA, 15 bp, Homo sapiens
atgaagaaatgattc

SEQ ID NO: 57544 - DNA, 15 bp, Homo sapiens
tatgaagaaatgatt

SEQ ID NO: 57545 - DNA, 15 bp, Homo sapiens
ctatgaagaaatgat

SEQ ID NO: 57546 - DNA, 15 bp, Homo sapiens
actatgaagaaatga

SEQ ID NO: 57547 - DNA, 15 bp, Homo sapiens
cactatgaagaaatg

SEQ ID NO: 57548 - DNA, 15 bp, Homo sapiens
gcactatgaagaaat

SEQ ID NO: 57549 - DNA, 15 bp, Homo sapiens
agcactatgaagaaa

SEQ ID NO: 57550 - DNA, 15 bp, Homo sapiens
gagcactatgaagaa

SEQ ID NO: 57551 - DNA, 15 bp, Homo sapiens
ggagcactatgaaga

SEQ ID NO: 57552 - DNA, 15 bp, Homo sapiens
ggggagcactatgaa

SEQ ID NO: 57553 - DNA, 15 bp, Homo sapiens
gggggagcactatga

SEQ ID NO: 57554 - DNA, 15 bp, Homo sapiens
cgggggagcactatg

SEQ ID NO: 57555 - DNA, 15 bp, Homo sapiens
tcgggggagcactat

SEQ ID NO: 57556 - DNA, 15 bp, Homo sapiens
ctcgggggagcacta

SEQ ID NO: 57557 - DNA, 15 bp, Homo sapiens
actcgggggagcact

SEQ ID NO: 57558 - DNA, 15 bp, Homo sapiens
aactcgggggagcac

SEQ ID NO: 57559 - DNA, 15 bp, Homo sapiens
caactcgggggagca

SEQ ID NO: 57560 - DNA, 15 bp, Homo sapiens
ccaactcgggggagc

SEQ ID NO: 57561 - DNA, 15 bp, Homo sapiens
cccaactcgggggag

SEQ ID NO: 57562 - DNA, 15 bp, Homo sapiens
tcccaactcggggga

SEQ ID NO: 57563 - DNA, 15 bp, Homo sapiens
gtcccaactcggggg

SEQ ID NO: 57564 - DNA, 15 bp, Homo sapiens
agtcccaactcgggg

SEQ ID NO: 57565 - DNA, 15 bp, Homo sapiens
tagtcccaactcggg

SEQ ID NO: 57566 - DNA, 15 bp, Homo sapiens
ctagtcccaactcgg

SEQ ID NO: 57567 - DNA, 15 bp, Homo sapiens
cctagtcccaactcg

SEQ ID NO: 57568 - DNA, 15 bp, Homo sapiens
ccctagtcccaactc

SEQ ID NO: 57569 - DNA, 15 bp, Homo sapiens
gccctagtcccaact

SEQ ID NO: 57570 - DNA, 15 bp, Homo sapiens
agccctagtcccaac

SEQ ID NO: 57571 - DNA, 15 bp, Homo sapiens
aagccctagtcccaa

SEQ ID NO: 57572 - DNA, 15 bp, Homo sapiens
gaagccctagtccca

SEQ ID NO: 57573 - DNA, 15 bp, Homo sapiens
tgaagccctagtccc

SEQ ID NO: 57574 - DNA, 15 bp, Homo sapiens
ttgaagccctagtcc

SEQ ID NO: 57575 - DNA, 15 bp, Homo sapiens
attgaagccctagtc

SEQ ID NO: 57576 - DNA, 15 bp, Homo sapiens
aattgaagccctagt

SEQ ID NO: 57577 - DNA, 15 bp, Homo sapiens
aaattgaagccctag

SEQ ID NO: 57578 - DNA, 15 bp, Homo sapiens
gaaattgaagcccta

SEQ ID NO: 57579 - DNA, 15 bp, Homo sapiens
tgaaattgaagccct

SEQ ID NO: 57580 - DNA, 15 bp, Homo sapiens
gtgaaattgaagccc

SEQ ID NO: 57581 - DNA, 15 bp, Homo sapiens
agtgaaattgaagcc

SEQ ID NO: 57582 - DNA, 15 bp, Homo sapiens
aagtgaaattgaagc

SEQ ID NO: 57583 - DNA, 15 bp, Homo sapiens
gaagtgaaattgaag

SEQ ID NO: 57584 - DNA, 15 bp, Homo sapiens
agaagtgaaattgaa

SEQ ID NO: 57585 - DNA, 15 bp, Homo sapiens
aagaagtgaaattga

SEQ ID NO: 57586 - DNA, 15 bp, Homo sapiens
taagaagtgaaattg

SEQ ID NO: 57587 - DNA, 15 bp, Homo sapiens
ttaagaagtgaaatt

SEQ ID NO: 57588 - DNA, 15 bp, Homo sapiens
tttaagaagtgaaat

SEQ ID NO: 57589 - DNA, 15 bp, Homo sapiens
ttttaagaagtgaaa

SEQ ID NO: 57590 - DNA, 15 bp, Homo sapiens
tttttaagaagtgaa

SEQ ID NO: 57591 - DNA, 15 bp, Homo sapiens
ttttttaagaagtga

SEQ ID NO: 57592 - DNA, 15 bp, Homo sapiens
tttttttaagaagtg

SEQ ID NO: 57593 - DNA, 15 bp, Homo sapiens
ttttttttaagaagt

SEQ ID NO: 57594 - DNA, 15 bp, Homo sapiens
attttttttaagaag

SEQ ID NO: 57595 - DNA, 15 bp, Homo sapiens
atgattttttttaag

SEQ ID NO: 57596 - DNA, 15 bp, Homo sapiens
gatgattttttttaa

SEQ ID NO: 57597 - DNA, 15 bp, Homo sapiens
tgatgatttttttta

SEQ ID NO: 57598 - DNA, 15 bp, Homo sapiens
atgatgatttttttt

SEQ ID NO: 57599 - DNA, 15 bp, Homo sapiens
tatgatgattttttt

SEQ ID NO: 57600 - DNA, 15 bp, Homo sapiens
atatgatgatttttt

SEQ ID NO: 57601 - DNA, 15 bp, Homo sapiens
tatatgatgattttt

SEQ ID NO: 57602 - DNA, 15 bp, Homo sapiens
atatatgatgatttt

SEQ ID NO: 57603 - DNA, 15 bp, Homo sapiens
aatatatgatgattt

SEQ ID NO: 57604 - DNA, 15 bp, Homo sapiens
aaatatatgatgatt

SEQ ID NO: 57605 - DNA, 15 bp, Homo sapiens
caaatatatgatgat

SEQ ID NO: 57606 - DNA, 15 bp, Homo sapiens
tcaaatatatgatga

SEQ ID NO: 57607 - DNA, 15 bp, Homo sapiens
atcaaatatatgatg

SEQ ID NO: 57608 - DNA, 15 bp, Homo sapiens
tatcaaatatatgat

SEQ ID NO: 57609 - DNA, 15 bp, Homo sapiens
atatcaaatatatga

SEQ ID NO: 57610 - DNA, 15 bp, Homo sapiens
catatcaaatatatg

SEQ ID NO: 57611 - DNA, 15 bp, Homo sapiens
gcatatcaaatatat

SEQ ID NO: 57612 - DNA, 15 bp, Homo sapiens
ggcatatcaaatata

SEQ ID NO: 57613 - DNA, 15 bp, Homo sapiens
gggcatatcaaatat

SEQ ID NO: 57614 - DNA, 15 bp, Homo sapiens
tgggcatatcaaata

SEQ ID NO: 57615 - DNA, 15 bp, Homo sapiens
ctgggcatatcaaat

SEQ ID NO: 57616 - DNA, 15 bp, Homo sapiens
tctgggcatatcaaa

SEQ ID NO: 57617 - DNA, 15 bp, Homo sapiens
gtctgggcatatcaa

SEQ ID NO: 57618 - DNA, 15 bp, Homo sapiens
agtctgggcatatca

SEQ ID NO: 57619 - DNA, 15 bp, Homo sapiens
cagtctgggcatatc

SEQ ID NO: 57620 - DNA, 15 bp, Homo sapiens
gcagtctgggcatat

SEQ ID NO: 57621 - DNA, 15 bp, Homo sapiens
tgcagtctgggcata

SEQ ID NO: 57622 - DNA, 15 bp, Homo sapiens
atgcagtctgggcat

SEQ ID NO: 57623 - DNA, 15 bp, Homo sapiens
tatgcagtctgggca

SEQ ID NO: 57624 - DNA, 15 bp, Homo sapiens
gtatgcagtctgggc

SEQ ID NO: 57625 - DNA, 15 bp, Homo sapiens
cgtatgcagtctggg

SEQ ID NO: 57626 - DNA, 15 bp, Homo sapiens
tcgtatgcagtctgg

SEQ ID NO: 57627 - DNA, 15 bp, Homo sapiens
atcgtatgcagtctg

SEQ ID NO: 57628 - DNA, 15 bp, Homo sapiens
aatcgtatgcagtct

SEQ ID NO: 57629 - DNA, 15 bp, Homo sapiens
aaatcgtatgcagtc

SEQ ID NO: 57630 - DNA, 15 bp, Homo sapiens
aaaatcgtatgcagt

SEQ ID NO: 57631 - DNA, 15 bp, Homo sapiens
taaaatcgtatgcag

SEQ ID NO: 57632 - DNA, 15 bp, Homo sapiens
ttaaaatcgtatgca

SEQ ID NO: 57633 - DNA, 15 bp, Homo sapiens
cttaaaatcgtatgc

SEQ ID NO: 57634 - DNA, 15 bp, Homo sapiens
gcttaaaatcgtatg

SEQ ID NO: 57635 - DNA, 15 bp, Homo sapiens
cgcttaaaatcgtat

SEQ ID NO: 57636 - DNA, 15 bp, Homo sapiens
ccgcttaaaatcgta

SEQ ID NO: 57637 - DNA, 15 bp, Homo sapiens
tccgcttaaaatcgt

SEQ ID NO: 57638 - DNA, 15 bp, Homo sapiens
ctccgcttaaaatcg

SEQ ID NO: 57639 - DNA, 15 bp, Homo sapiens
actccgcttaaaatc

SEQ ID NO: 57640 - DNA, 15 bp, Homo sapiens
tactccgcttaaaat

SEQ ID NO: 57641 - DNA, 15 bp, Homo sapiens
gtactccgcttaaaa

SEQ ID NO: 57642 - DNA, 15 bp, Homo sapiens
tgtactccgcttaaa

SEQ ID NO: 57643 - DNA, 15 bp, Homo sapiens
ttgtactccgcttaa

SEQ ID NO: 57644 - DNA, 15 bp, Homo sapiens
gttgtactccgctta

SEQ ID NO: 57645 - DNA, 15 bp, Homo sapiens
agttgtactccgctt

SEQ ID NO: 57646 - DNA, 15 bp, Homo sapiens
tagttgtactccgct

SEQ ID NO: 57647 - DNA, 15 bp, Homo sapiens
gtagttgtactccgc

SEQ ID NO: 57648 - DNA, 15 bp, Homo sapiens
agtagttgtactccg

SEQ ID NO: 57649 - DNA, 15 bp, Homo sapiens
tagtagttgtactcc

SEQ ID NO: 57650 - DNA, 15 bp, Homo sapiens
atagtagttgtactc

SEQ ID NO: 57651 - DNA, 15 bp, Homo sapiens
aatagtagttgtact

SEQ ID NO: 57652 - DNA, 15 bp, Homo sapiens
caatagtagttgtac

SEQ ID NO: 57653 - DNA, 15 bp, Homo sapiens
acaatagtagttgta

SEQ ID NO: 57654 - DNA, 15 bp, Homo sapiens
tacaatagtagttgt

SEQ ID NO: 57655 - DNA, 15 bp, Homo sapiens
ttacaatagtagttg

SEQ ID NO: 57656 - DNA, 15 bp, Homo sapiens
tttacaatagtagtt

SEQ ID NO: 57657 - DNA, 15 bp, Homo sapiens
ctttacaatagtagt

SEQ ID NO: 57658 - DNA, 15 bp, Homo sapiens
gctttacaatagtag

SEQ ID NO: 57659 - DNA, 15 bp, Homo sapiens
agctttacaatagta

SEQ ID NO: 57660 - DNA, 15 bp, Homo sapiens
tagctttacaatagt

SEQ ID NO: 57661 - DNA, 15 bp, Homo sapiens
ttagctttacaatag

SEQ ID NO: 57662 - DNA, 15 bp, Homo sapiens
attagctttacaata

SEQ ID NO: 57663 - DNA, 15 bp, Homo sapiens
cattagctttacaat

SEQ ID NO: 57664 - DNA, 15 bp, Homo sapiens
acattagctttacaa

SEQ ID NO: 57665 - DNA, 15 bp, Homo sapiens
cacattagctttaca

SEQ ID NO: 57666 - DNA, 15 bp, Homo sapiens
tcacattagctttac

SEQ ID NO: 57667 - DNA, 15 bp, Homo sapiens
ttcacattagcttta

SEQ ID NO: 57668 - DNA, 15 bp, Homo sapiens
cttcacattagcttt

SEQ ID NO: 57669 - DNA, 15 bp, Homo sapiens
tcttcacattagctt

SEQ ID NO: 57670 - DNA, 15 bp, Homo sapiens
atcttcacattagct

SEQ ID NO: 57671 - DNA, 15 bp, Homo sapiens
tatcttcacattagc

SEQ ID NO: 57672 - DNA, 15 bp, Homo sapiens
atatcttcacattag

SEQ ID NO: 57673 - DNA, 15 bp, Homo sapiens
aatatcttcacatta

SEQ ID NO: 57674 - DNA, 15 bp, Homo sapiens
taatatcttcacatt

SEQ ID NO: 57675 - DNA, 15 bp, Homo sapiens
ataatatcttcacat

SEQ ID NO: 57676 - DNA, 15 bp, Homo sapiens
aataatatcttcaca

SEQ ID NO: 57677 - DNA, 15 bp, Homo sapiens
taataatatcttcac

SEQ ID NO: 57678 - DNA, 15 bp, Homo sapiens
ttaataatatcttca

SEQ ID NO: 57679 - DNA, 15 bp, Homo sapiens
tttaataatatcttc

SEQ ID NO: 57680 - DNA, 15 bp, Homo sapiens
ttttaataatatctt

SEQ ID NO: 57681 - DNA, 15 bp, Homo sapiens
tttttaataatatct

SEQ ID NO: 57682 - DNA, 15 bp, Homo sapiens
ctttttaataatatc

SEQ ID NO: 57683 - DNA, 15 bp, Homo sapiens
cctttttaataatat

SEQ ID NO: 57684 - DNA, 15 bp, Homo sapiens
acctttttaataata

SEQ ID NO: 57685 - DNA, 15 bp, Homo sapiens
aacctttttaataat

SEQ ID NO: 57686 - DNA, 15 bp, Homo sapiens
aaacctttttaataa

SEQ ID NO: 57687 - DNA, 15 bp, Homo sapiens
aaaacctttttaata

SEQ ID NO: 57688 - DNA, 15 bp, Homo sapiens
aaaaacctttttaat

SEQ ID NO: 57689 - DNA, 15 bp, Homo sapiens
aaaaaacctttttaa

SEQ ID NO: 57690 - DNA, 15 bp, Homo sapiens
aaaaaaaccttttta

SEQ ID NO: 57691 - DNA, 15 bp, Homo sapiens
aaaaaaaaccttttt

SEQ ID NO: 57692 - DNA, 15 bp, Homo sapiens
aaaaaaaaacctttt

SEQ ID NO: 57693 - DNA, 15 bp, Homo sapiens
gaaaaaaaaaccttt

SEQ ID NO: 57694 - DNA, 15 bp, Homo sapiens
ggaaaaaaaaacctt

SEQ ID NO: 57695 - DNA, 15 bp, Homo sapiens
tggaaaaaaaaacct

SEQ ID NO: 57696 - DNA, 15 bp, Homo sapiens
ctggaaaaaaaaacc

SEQ ID NO: 57697 - DNA, 15 bp, Homo sapiens
tctggaaaaaaaaac

SEQ ID NO: 57698 - DNA, 15 bp, Homo sapiens
ttctggaaaaaaaaa

SEQ ID NO: 57699 - DNA, 15 bp, Homo sapiens
tttctggaaaaaaaa

SEQ ID NO: 57700 - DNA, 15 bp, Homo sapiens
atttctggaaaaaaa

SEQ ID NO: 57701 - DNA, 15 bp, Homo sapiens
aatttctggaaaaaa

SEQ ID NO: 57702 - DNA, 15 bp, Homo sapiens
aaatttctggaaaaa

SEQ ID NO: 57703 - DNA, 15 bp, Homo sapiens
caaatttctggaaaa

SEQ ID NO: 57704 - DNA, 15 bp, Homo sapiens
ccaaatttctggaaa

SEQ ID NO: 57705 - DNA, 15 bp, Homo sapiens
accaaatttctggaa

SEQ ID NO: 57706 - DNA, 15 bp, Homo sapiens
caccaaatttctgga

SEQ ID NO: 57707 - DNA, 15 bp, Homo sapiens
acaccaaatttctgg

SEQ ID NO: 57708 - DNA, 15 bp, Homo sapiens
gacaccaaatttctg

SEQ ID NO: 57709 - DNA, 15 bp, Homo sapiens
agacaccaaatttct

SEQ ID NO: 57710 - DNA, 15 bp, Homo sapiens
aagacaccaaatttc

SEQ ID NO: 57711 - DNA, 15 bp, Homo sapiens
gaagacaccaaattt

SEQ ID NO: 57712 - DNA, 15 bp, Homo sapiens
tgaagacaccaaatt

SEQ ID NO: 57713 - DNA, 15 bp, Homo sapiens
ttgaagacaccaaat

SEQ ID NO: 57714 - DNA, 15 bp, Homo sapiens
tttgaagacaccaaa

SEQ ID NO: 57715 - DNA, 15 bp, Homo sapiens
atttgaagacaccaa

SEQ ID NO: 57716 - DNA, 15 bp, Homo sapiens
aatttgaagacacca

SEQ ID NO: 57717 - DNA, 15 bp, Homo sapiens
taatttgaagacacc

SEQ ID NO: 57718 - DNA, 15 bp, Homo sapiens
ataatttgaagacac

SEQ ID NO: 57719 - DNA, 15 bp, Homo sapiens
tataatttgaagaca

SEQ ID NO: 57720 - DNA, 15 bp, Homo sapiens
gtataatttgaagac

SEQ ID NO: 57721 - DNA, 15 bp, Homo sapiens
ggtataatttgaaga

SEQ ID NO: 57722 - DNA, 15 bp, Homo sapiens
aggtataatttgaag

SEQ ID NO: 57723 - DNA, 15 bp, Homo sapiens
aaggtataatttgaa

SEQ ID NO: 57724 - DNA, 15 bp, Homo sapiens
gaaggtataatttga

SEQ ID NO: 57725 - DNA, 15 bp, Homo sapiens
tgaaggtataatttg

SEQ ID NO: 57726 - DNA, 15 bp, Homo sapiens
gtgaaggtataattt

SEQ ID NO: 57727 - DNA, 15 bp, Homo sapiens
ggtgaaggtataatt

SEQ ID NO: 57728 - DNA, 15 bp, Homo sapiens
aggtgaaggtataat

SEQ ID NO: 57729 - DNA, 15 bp, Homo sapiens
aaggtgaaggtataa

SEQ ID NO: 57730 - DNA, 15 bp, Homo sapiens
caaggtgaaggtata

SEQ ID NO: 57731 - DNA, 15 bp, Homo sapiens
tcaaggtgaaggtat

SEQ ID NO: 57732 - DNA, 15 bp, Homo sapiens
gtcaaggtgaaggta

SEQ ID NO: 57733 - DNA, 15 bp, Homo sapiens
tgtcaaggtgaaggt

SEQ ID NO: 57734 - DNA, 15 bp, Homo sapiens
atgtcaaggtgaagg

SEQ ID NO: 57735 - DNA, 15 bp, Homo sapiens
aatgtcaaggtgaag

SEQ ID NO: 57736 - DNA, 15 bp, Homo sapiens
aaatgtcaaggtgaa

SEQ ID NO: 57737 - DNA, 15 bp, Homo sapiens
caaatgtcaaggtga

SEQ ID NO: 57738 - DNA, 15 bp, Homo sapiens
tcaaatgtcaaggtg

SEQ ID NO: 57739 - DNA, 15 bp, Homo sapiens
ttcaaatgtcaaggt

SEQ ID NO: 57740 - DNA, 15 bp, Homo sapiens
attcaaatgtcaagg

SEQ ID NO: 57741 - DNA, 15 bp, Homo sapiens
tattcaaatgtcaag

SEQ ID NO: 57742 - DNA, 15 bp, Homo sapiens
atattcaaatgtcaa

SEQ ID NO: 57743 - DNA, 15 bp, Homo sapiens
gatattcaaatgtca

SEQ ID NO: 57744 - DNA, 15 bp, Homo sapiens
ggatattcaaatgtc

SEQ ID NO: 57745 - DNA, 15 bp, Homo sapiens
tggatattcaaatgt

SEQ ID NO: 57746 - DNA, 15 bp, Homo sapiens
ctggatattcaaatg

SEQ ID NO: 57747 - DNA, 15 bp, Homo sapiens
gctggatattcaaat

SEQ ID NO: 57748 - DNA, 15 bp, Homo sapiens
ggctggatattcaaa

SEQ ID NO: 57749 - DNA, 15 bp, Homo sapiens
tggctggatattcaa

SEQ ID NO: 57750 - DNA, 15 bp, Homo sapiens
atggctggatattca

SEQ ID NO: 57751 - DNA, 15 bp, Homo sapiens
aatggctggatattc

SEQ ID NO: 57752 - DNA, 15 bp, Homo sapiens
aaatggctggatatt

SEQ ID NO: 57753 - DNA, 15 bp, Homo sapiens
aaaatggctggatat

SEQ ID NO: 57754 - DNA, 15 bp, Homo sapiens
caaaatggctggata

SEQ ID NO: 57755 - DNA, 15 bp, Homo sapiens
acaaaatggctggat

SEQ ID NO: 57756 - DNA, 15 bp, Homo sapiens
aacaaaatggctgga

SEQ ID NO: 57757 - DNA, 15 bp, Homo sapiens
aaacaaaatggctgg

SEQ ID NO: 57758 - DNA, 15 bp, Homo sapiens
gaaacaaaatggctg

SEQ ID NO: 57759 - DNA, 15 bp, Homo sapiens
agaaacaaaatggct

SEQ ID NO: 57760 - DNA, 15 bp, Homo sapiens
aagaaacaaaatggc

SEQ ID NO: 57761 - DNA, 15 bp, Homo sapiens
taagaaacaaaatgg

SEQ ID NO: 57762 - DNA, 15 bp, Homo sapiens
ttaagaaacaaaatg

SEQ ID NO: 57763 - DNA, 15 bp, Homo sapiens
attaagaaacaaaat

SEQ ID NO: 57764 - DNA, 15 bp, Homo sapiens
cattaagaaacaaaa

SEQ ID NO: 57765 - DNA, 15 bp, Homo sapiens
ccattaagaaacaaa

SEQ ID NO: 57766 - DNA, 15 bp, Homo sapiens
accattaagaaacaa

SEQ ID NO: 57767 - DNA, 15 bp, Homo sapiens
taccattaagaaaca

SEQ ID NO: 57768 - DNA, 15 bp, Homo sapiens
ataccattaagaaac

SEQ ID NO: 57769 - DNA, 15 bp, Homo sapiens
tataccattaagaaa

SEQ ID NO: 57770 - DNA, 15 bp, Homo sapiens
ttataccattaagaa

SEQ ID NO: 57771 - DNA, 15 bp, Homo sapiens
tttataccattaaga

SEQ ID NO: 57772 - DNA, 15 bp, Homo sapiens
ttttataccattaag

SEQ ID NO: 57773 - DNA, 15 bp, Homo sapiens
attttataccattaa

SEQ ID NO: 57774 - DNA, 15 bp, Homo sapiens
aattttataccatta

SEQ ID NO: 57775 - DNA, 15 bp, Homo sapiens
gaattttataccatt

SEQ ID NO: 57776 - DNA, 15 bp, Homo sapiens
ggaattttataccat

SEQ ID NO: 57777 - DNA, 15 bp, Homo sapiens
tggaattttatacca

SEQ ID NO: 57778 - DNA, 15 bp, Homo sapiens
atggaattttatacc

SEQ ID NO: 57779 - DNA, 15 bp, Homo sapiens
aatggaattttatac

SEQ ID NO: 57780 - DNA, 15 bp, Homo sapiens
aaatggaattttata

SEQ ID NO: 57781 - DNA, 15 bp, Homo sapiens
aaaatggaattttat

SEQ ID NO: 57782 - DNA, 15 bp, Homo sapiens
gaaaatggaatttta

SEQ ID NO: 57783 - DNA, 15 bp, Homo sapiens
tgaaaatggaatttt

SEQ ID NO: 57784 - DNA, 15 bp, Homo sapiens
ttgaaaatggaattt

SEQ ID NO: 57785 - DNA, 15 bp, Homo sapiens
attgaaaatggaatt

SEQ ID NO: 57786 - DNA, 15 bp, Homo sapiens
tattgaaaatggaat

SEQ ID NO: 57787 - DNA, 15 bp, Homo sapiens
ttattgaaaatggaa

SEQ ID NO: 57788 - DNA, 15 bp, Homo sapiens
gttattgaaaatgga

SEQ ID NO: 57789 - DNA, 15 bp, Homo sapiens
agttattgaaaatgg

SEQ ID NO: 57790 - DNA, 15 bp, Homo sapiens
aagttattgaaaatg

SEQ ID NO: 57791 - DNA, 15 bp, Homo sapiens
taagttattgaaaat

SEQ ID NO: 57792 - DNA, 15 bp, Homo sapiens
ataagttattgaaaa

SEQ ID NO: 57793 - DNA, 15 bp, Homo sapiens
aataagttattgaaa

SEQ ID NO: 57794 - DNA, 15 bp, Homo sapiens
caataagttattgaa

SEQ ID NO: 57795 - DNA, 15 bp, Homo sapiens
ccaataagttattga

SEQ ID NO: 57796 - DNA, 15 bp, Homo sapiens
accaataagttattg

SEQ ID NO: 57797 - DNA, 15 bp, Homo sapiens
caccaataagttatt

SEQ ID NO: 57798 - DNA, 15 bp, Homo sapiens
gcaccaataagttat

SEQ ID NO: 57799 - DNA, 15 bp, Homo sapiens
agcaccaataagtta

SEQ ID NO: 57800 - DNA, 15 bp, Homo sapiens
cagcaccaataagtt

SEQ ID NO: 57801 - DNA, 15 bp, Homo sapiens
tcagcaccaataagt

SEQ ID NO: 57802 - DNA, 15 bp, Homo sapiens
ttcagcaccaataag

SEQ ID NO: 57803 - DNA, 15 bp, Homo sapiens
tttcagcaccaataa

SEQ ID NO: 57804 - DNA, 15 bp, Homo sapiens
atttcagcaccaata

SEQ ID NO: 57805 - DNA, 15 bp, Homo sapiens
aatttcagcaccaat

SEQ ID NO: 57806 - DNA, 15 bp, Homo sapiens
caatttcagcaccaa

SEQ ID NO: 57807 - DNA, 15 bp, Homo sapiens
acaatttcagcacca

SEQ ID NO: 57808 - DNA, 15 bp, Homo sapiens
aacaatttcagcacc

SEQ ID NO: 57809 - DNA, 15 bp, Homo sapiens
gaacaatttcagcac

SEQ ID NO: 57810 - DNA, 15 bp, Homo sapiens
tgaacaatttcagca

SEQ ID NO: 57811 - DNA, 15 bp, Homo sapiens
gtgaacaatttcagc

SEQ ID NO: 57812 - DNA, 15 bp, Homo sapiens
agtgaacaatttcag

SEQ ID NO: 57813 - DNA, 15 bp, Homo sapiens
tagtgaacaatttca

SEQ ID NO: 57814 - DNA, 15 bp, Homo sapiens
ctagtgaacaatttc

SEQ ID NO: 57815 - DNA, 15 bp, Homo sapiens
gctagtgaacaattt

SEQ ID NO: 57816 - DNA, 15 bp, Homo sapiens
agctagtgaacaatt

SEQ ID NO: 57817 - DNA, 15 bp, Homo sapiens
cagctagtgaacaat

SEQ ID NO: 57818 - DNA, 15 bp, Homo sapiens
acagctagtgaacaa

SEQ ID NO: 57819 - DNA, 15 bp, Homo sapiens
cacagctagtgaaca

SEQ ID NO: 57820 - DNA, 15 bp, Homo sapiens
ccacagctagtgaac

SEQ ID NO: 57821 - DNA, 15 bp, Homo sapiens
accacagctagtgaa

SEQ ID NO: 57822 - DNA, 15 bp, Homo sapiens
gaccacagctagtga

SEQ ID NO: 57823 - DNA, 15 bp, Homo sapiens
agaccacagctagtg

SEQ ID NO: 57824 - DNA, 15 bp, Homo sapiens
cagaccacagctagt

SEQ ID NO: 57825 - DNA, 15 bp, Homo sapiens
tcagaccacagctag

SEQ ID NO: 57826 - DNA, 15 bp, Homo sapiens
gtcagaccacagcta

SEQ ID NO: 57827 - DNA, 15 bp, Homo sapiens
ggtcagaccacagct

SEQ ID NO: 57828 - DNA, 15 bp, Homo sapiens
aggtcagaccacagc

SEQ ID NO: 57829 - DNA, 15 bp, Homo sapiens
taggtcagaccacag

SEQ ID NO: 57830 - DNA, 15 bp, Homo sapiens
ctaggtcagaccaca

SEQ ID NO: 57831 - DNA, 15 bp, Homo sapiens
actaggtcagaccac

SEQ ID NO: 57832 - DNA, 15 bp, Homo sapiens
aactaggtcagacca

SEQ ID NO: 57833 - DNA, 15 bp, Homo sapiens
taactaggtcagacc

SEQ ID NO: 57834 - DNA, 15 bp, Homo sapiens
ttaactaggtcagac

SEQ ID NO: 57835 - DNA, 15 bp, Homo sapiens
attaactaggtcaga

SEQ ID NO: 57836 - DNA, 15 bp, Homo sapiens
aattaactaggtcag

SEQ ID NO: 57837 - DNA, 15 bp, Homo sapiens
aaattaactaggtca

SEQ ID NO: 57838 - DNA, 15 bp, Homo sapiens
taaattaactaggtc

SEQ ID NO: 57839 - DNA, 15 bp, Homo sapiens
gtaaattaactaggt

SEQ ID NO: 57840 - DNA, 15 bp, Homo sapiens
tgtaaattaactagg

SEQ ID NO: 57841 - DNA, 15 bp, Homo sapiens
ttgtaaattaactag

SEQ ID NO: 57842 - DNA, 15 bp, Homo sapiens
tttgtaaattaacta

SEQ ID NO: 57843 - DNA, 15 bp, Homo sapiens
atttgtaaattaact

SEQ ID NO: 57844 - DNA, 15 bp, Homo sapiens
tatttgtaaattaac

SEQ ID NO: 57845 - DNA, 15 bp, Homo sapiens
gtatttgtaaattaa

SEQ ID NO: 57846 - DNA, 15 bp, Homo sapiens
tgtatttgtaaatta

SEQ ID NO: 57847 - DNA, 15 bp, Homo sapiens
ctgtatttgtaaatt

SEQ ID NO: 57848 - DNA, 15 bp, Homo sapiens
tctgtatttgtaaat

SEQ ID NO: 57849 - DNA, 15 bp, Homo sapiens
atctgtatttgtaaa

SEQ ID NO: 57850 - DNA, 15 bp, Homo sapiens
aatctgtatttgtaa

SEQ ID NO: 57851 - DNA, 15 bp, Homo sapiens
caatctgtatttgta

SEQ ID NO: 57852 - DNA, 15 bp, Homo sapiens
tcaatctgtatttgt

SEQ ID NO: 57853 - DNA, 15 bp, Homo sapiens
ttcaatctgtatttg

SEQ ID NO: 57854 - DNA, 15 bp, Homo sapiens
attcaatctgtattt

SEQ ID NO: 57855 - DNA, 15 bp, Homo sapiens
tattcaatctgtatt

SEQ ID NO: 57856 - DNA, 15 bp, Homo sapiens
ctattcaatctgtat

SEQ ID NO: 57857 - DNA, 15 bp, Homo sapiens
cctattcaatctgta

SEQ ID NO: 57858 - DNA, 15 bp, Homo sapiens
tcctattcaatctgt

SEQ ID NO: 57859 - DNA, 15 bp, Homo sapiens
gtcctattcaatctg

SEQ ID NO: 57860 - DNA, 15 bp, Homo sapiens
ggtcctattcaatct

SEQ ID NO: 57861 - DNA, 15 bp, Homo sapiens
aggtcctattcaatc

SEQ ID NO: 57862 - DNA, 15 bp, Homo sapiens
taggtcctattcaat

SEQ ID NO: 57863 - DNA, 15 bp, Homo sapiens
gtaggtcctattcaa

SEQ ID NO: 57864 - DNA, 15 bp, Homo sapiens
agtaggtcctattca

SEQ ID NO: 57865 - DNA, 15 bp, Homo sapiens
tagtaggtcctattc

SEQ ID NO: 57866 - DNA, 15 bp, Homo sapiens
ctagtaggtcctatt

SEQ ID NO: 57867 - DNA, 15 bp, Homo sapiens
tctagtaggtcctat

SEQ ID NO: 57868 - DNA, 15 bp, Homo sapiens
ctctagtaggtccta

SEQ ID NO: 57869 - DNA, 15 bp, Homo sapiens
gctctagtaggtcct

SEQ ID NO: 57870 - DNA, 15 bp, Homo sapiens
tgctctagtaggtcc

SEQ ID NO: 57871 - DNA, 15 bp, Homo sapiens
ctgctctagtaggtc

SEQ ID NO: 57872 - DNA, 15 bp, Homo sapiens
gctgctctagtaggt

SEQ ID NO: 57873 - DNA, 15 bp, Homo sapiens
tgctgctctagtagg

SEQ ID NO: 57874 - DNA, 15 bp, Homo sapiens
atgctgctctagtag

SEQ ID NO: 57875 - DNA, 15 bp, Homo sapiens
aatgctgctctagta

SEQ ID NO: 57876 - DNA, 15 bp, Homo sapiens
aaatgctgctctagt

SEQ ID NO: 57877 - DNA, 15 bp, Homo sapiens
taaatgctgctctag

SEQ ID NO: 57878 - DNA, 15 bp, Homo sapiens
ataaatgctgctcta

SEQ ID NO: 57879 - DNA, 15 bp, Homo sapiens
tataaatgctgctct

SEQ ID NO: 57880 - DNA, 15 bp, Homo sapiens
ctataaatgctgctc

SEQ ID NO: 57881 - DNA, 15 bp, Homo sapiens
tctataaatgctgct

SEQ ID NO: 57882 - DNA, 15 bp, Homo sapiens
ctctataaatgctgc

SEQ ID NO: 57883 - DNA, 15 bp, Homo sapiens
actctataaatgctg

SEQ ID NO: 57884 - DNA, 15 bp, Homo sapiens
aactctataaatgct

SEQ ID NO: 57885 - DNA, 15 bp, Homo sapiens
aaactctataaatgc

SEQ ID NO: 57886 - DNA, 15 bp, Homo sapiens
caaactctataaatg

SEQ ID NO: 57887 - DNA, 15 bp, Homo sapiens
tcaaactctataaat

SEQ ID NO: 57888 - DNA, 15 bp, Homo sapiens
atcaaactctataaa

SEQ ID NO: 57889 - DNA, 15 bp, Homo sapiens
catcaaactctataa

SEQ ID NO: 57890 - DNA, 15 bp, Homo sapiens
ccatcaaactctata

SEQ ID NO: 57891 - DNA, 15 bp, Homo sapiens
gccatcaaactctat

SEQ ID NO: 57892 - DNA, 15 bp, Homo sapiens
tgccatcaaactcta

SEQ ID NO: 57893 - DNA, 15 bp, Homo sapiens
ttgccatcaaactct

SEQ ID NO: 57894 - DNA, 15 bp, Homo sapiens
tttgccatcaaactc

SEQ ID NO: 57895 - DNA, 15 bp, Homo sapiens
atttgccatcaaact

SEQ ID NO: 57896 - DNA, 15 bp, Homo sapiens
tatttgccatcaaac

SEQ ID NO: 57897 - DNA, 15 bp, Homo sapiens
ctatttgccatcaaa

SEQ ID NO: 57898 - DNA, 15 bp, Homo sapiens
tctatttgccatcaa

SEQ ID NO: 57899 - DNA, 15 bp, Homo sapiens
atctatttgccatca

SEQ ID NO: 57900 - DNA, 15 bp, Homo sapiens
aatctatttgccatc

SEQ ID NO: 57901 - DNA, 15 bp, Homo sapiens
taatctatttgccat

SEQ ID NO: 57902 - DNA, 15 bp, Homo sapiens
ctaatctatttgcca

SEQ ID NO: 57903 - DNA, 15 bp, Homo sapiens
cctaatctatttgcc

SEQ ID NO: 57904 - DNA, 15 bp, Homo sapiens
gcctaatctatttgc

SEQ ID NO: 57905 - DNA, 15 bp, Homo sapiens
tgcctaatctatttg

SEQ ID NO: 57906 - DNA, 15 bp, Homo sapiens
ctgcctaatctattt

SEQ ID NO: 57907 - DNA, 15 bp, Homo sapiens
tctgcctaatctatt

SEQ ID NO: 57908 - DNA, 15 bp, Homo sapiens
ttctgcctaatctat

SEQ ID NO: 57909 - DNA, 15 bp, Homo sapiens
gttctgcctaatcta

SEQ ID NO: 57910 - DNA, 15 bp, Homo sapiens
agttctgcctaatct

SEQ ID NO: 57911 - DNA, 15 bp, Homo sapiens
aagttctgcctaatc

SEQ ID NO: 57912 - DNA, 15 bp, Homo sapiens
gaagttctgcctaat

SEQ ID NO: 57913 - DNA, 15 bp, Homo sapiens
tgaagttctgcctaa

SEQ ID NO: 57914 - DNA, 15 bp, Homo sapiens
atgaagttctgccta

SEQ ID NO: 57915 - DNA, 15 bp, Homo sapiens
gatgaagttctgcct

SEQ ID NO: 57916 - DNA, 15 bp, Homo sapiens
agatgaagttctgcc

SEQ ID NO: 57917 - DNA, 15 bp, Homo sapiens
tagatgaagttctgc

SEQ ID NO: 57918 - DNA, 15 bp, Homo sapiens
ttagatgaagttctg

SEQ ID NO: 57919 - DNA, 15 bp, Homo sapiens
tttagatgaagttct

SEQ ID NO: 57920 - DNA, 15 bp, Homo sapiens
ttttagatgaagttc

SEQ ID NO: 57921 - DNA, 15 bp, Homo sapiens
attttagatgaagtt

SEQ ID NO: 57922 - DNA, 15 bp, Homo sapiens
tattttagatgaagt

SEQ ID NO: 57923 - DNA, 15 bp, Homo sapiens
atattttagatgaag

SEQ ID NO: 57924 - DNA, 15 bp, Homo sapiens
aatattttagatgaa

SEQ ID NO: 57925 - DNA, 15 bp, Homo sapiens
gaatattttagatga

SEQ ID NO: 57926 - DNA, 15 bp, Homo sapiens
agaatattttagatg

SEQ ID NO: 57927 - DNA, 15 bp, Homo sapiens
aagaatattttagat

SEQ ID NO: 57928 - DNA, 15 bp, Homo sapiens
taagaatattttaga

SEQ ID NO: 57929 - DNA, 15 bp, Homo sapiens
ctaagaatattttag

SEQ ID NO: 57930 - DNA, 15 bp, Homo sapiens
tactaagaatatttt

SEQ ID NO: 57931 - DNA, 15 bp, Homo sapiens
ttactaagaatattt

SEQ ID NO: 57932 - DNA, 15 bp, Homo sapiens
tttactaagaatatt

SEQ ID NO: 57933 - DNA, 15 bp, Homo sapiens
atttactaagaatat

SEQ ID NO: 57934 - DNA, 15 bp, Homo sapiens
tatttactaagaata

SEQ ID NO: 57935 - DNA, 15 bp, Homo sapiens
ttatttactaagaat

SEQ ID NO: 57936 - DNA, 15 bp, Homo sapiens
attatttactaagaa

SEQ ID NO: 57937 - DNA, 15 bp, Homo sapiens
cattatttactaaga

SEQ ID NO: 57938 - DNA, 15 bp, Homo sapiens
acattatttactaag

SEQ ID NO: 57939 - DNA, 15 bp, Homo sapiens
aacattatttactaa

SEQ ID NO: 57940 - DNA, 15 bp, Homo sapiens
caacattatttacta

SEQ ID NO: 57941 - DNA, 15 bp, Homo sapiens
tcaacattatttact

SEQ ID NO: 57942 - DNA, 15 bp, Homo sapiens
gtcaacattatttac

SEQ ID NO: 57943 - DNA, 15 bp, Homo sapiens
tgtcaacattattta

SEQ ID NO: 57944 - DNA, 15 bp, Homo sapiens
gtgtcaacattattt

SEQ ID NO: 57945 - DNA, 15 bp, Homo sapiens
cgtgtcaacattatt

SEQ ID NO: 57946 - DNA, 15 bp, Homo sapiens
acgtgtcaacattat

SEQ ID NO: 57947 - DNA, 15 bp, Homo sapiens
aacgtgtcaacatta

SEQ ID NO: 57948 - DNA, 15 bp, Homo sapiens
aaacgtgtcaacatt

SEQ ID NO: 57949 - DNA, 15 bp, Homo sapiens
aaaacgtgtcaacat

SEQ ID NO: 57950 - DNA, 15 bp, Homo sapiens
gaaaacgtgtcaaca

SEQ ID NO: 57951 - DNA, 15 bp, Homo sapiens
ggaaaacgtgtcaac

SEQ ID NO: 57952 - DNA, 15 bp, Homo sapiens
tggaaaacgtgtcaa

SEQ ID NO: 57953 - DNA, 15 bp, Homo sapiens
atggaaaacgtgtca

SEQ ID NO: 57954 - DNA, 15 bp, Homo sapiens
tatggaaaacgtgtc

SEQ ID NO: 57955 - DNA, 15 bp, Homo sapiens
gtatggaaaacgtgt

SEQ ID NO: 57956 - DNA, 15 bp, Homo sapiens
ggtatggaaaacgtg

SEQ ID NO: 57957 - DNA, 15 bp, Homo sapiens
aggtatggaaaacgt

SEQ ID NO: 57958 - DNA, 15 bp, Homo sapiens
aaggtatggaaaacg

SEQ ID NO: 57959 - DNA, 15 bp, Homo sapiens
caaggtatggaaaac

SEQ ID NO: 57960 - DNA, 15 bp, Homo sapiens
acaaggtatggaaaa

SEQ ID NO: 57961 - DNA, 15 bp, Homo sapiens
gacaaggtatggaaa

SEQ ID NO: 57962 - DNA, 15 bp, Homo sapiens
tgacaaggtatggaa

SEQ ID NO: 57963 - DNA, 15 bp, Homo sapiens
ctgacaaggtatgga

SEQ ID NO: 57964 - DNA, 15 bp, Homo sapiens
actgacaaggtatgg

SEQ ID NO: 57965 - DNA, 15 bp, Homo sapiens
aactgacaaggtatg

SEQ ID NO: 57966 - DNA, 15 bp, Homo sapiens
aaactgacaaggtat

SEQ ID NO: 57967 - DNA, 15 bp, Homo sapiens
gaaactgacaaggta

SEQ ID NO: 57968 - DNA, 15 bp, Homo sapiens
tgaaactgacaaggt

SEQ ID NO: 57969 - DNA, 15 bp, Homo sapiens
atgaaactgacaagg

SEQ ID NO: 57970 - DNA, 15 bp, Homo sapiens
aatgaaactgacaag

SEQ ID NO: 57971 - DNA, 15 bp, Homo sapiens
gaatgaaactgacaa

SEQ ID NO: 57972 - DNA, 15 bp, Homo sapiens
tgaatgaaactgaca

SEQ ID NO: 57973 - DNA, 15 bp, Homo sapiens
ttgaatgaaactgac

SEQ ID NO: 57974 - DNA, 15 bp, Homo sapiens
gttgaatgaaactga

SEQ ID NO: 57975 - DNA, 15 bp, Homo sapiens
tgttgaatgaaactg

SEQ ID NO: 57976 - DNA, 15 bp, Homo sapiens
ttgttgaatgaaact

SEQ ID NO: 57977 - DNA, 15 bp, Homo sapiens
attgttgaatgaaac

SEQ ID NO: 57978 - DNA, 15 bp, Homo sapiens
aattgttgaatgaaa

SEQ ID NO: 57979 - DNA, 15 bp, Homo sapiens
aaattgttgaatgaa

SEQ ID NO: 57980 - DNA, 15 bp, Homo sapiens
aaaattgttgaatga

SEQ ID NO: 57981 - DNA, 15 bp, Homo sapiens
aaaaattgttgaatg

SEQ ID NO: 57982 - DNA, 15 bp, Homo sapiens
taaaaattgttgaat

SEQ ID NO: 57983 - DNA, 15 bp, Homo sapiens
ttaaaaattgttgaa

SEQ ID NO: 57984 - DNA, 15 bp, Homo sapiens
tttaaaaattgttga

SEQ ID NO: 57985 - DNA, 15 bp, Homo sapiens
atttaaaaattgttg

SEQ ID NO: 57986 - DNA, 15 bp, Homo sapiens
aatttaaaaattgtt

SEQ ID NO: 57987 - DNA, 15 bp, Homo sapiens
aaatttaaaaattgt

SEQ ID NO: 57988 - DNA, 15 bp, Homo sapiens
aaaatttaaaaattg

SEQ ID NO: 57989 - DNA, 15 bp, Homo sapiens
aaaaatttaaaaatt

SEQ ID NO: 57990 - DNA, 15 bp, Homo sapiens
taaaaatttaaaaat

SEQ ID NO: 57991 - DNA, 15 bp, Homo sapiens
gttaaaaatttaaaa

SEQ ID NO: 57992 - DNA, 15 bp, Homo sapiens
tgttaaaaatttaaa

SEQ ID NO: 57993 - DNA, 15 bp, Homo sapiens
ttgttaaaaatttaa

SEQ ID NO: 57994 - DNA, 15 bp, Homo sapiens
tttgttaaaaattta

SEQ ID NO: 57995 - DNA, 15 bp, Homo sapiens
ctttgttaaaaattt

SEQ ID NO: 57996 - DNA, 15 bp, Homo sapiens
gctttgttaaaaatt

SEQ ID NO: 57997 - DNA, 15 bp, Homo sapiens
agctttgttaaaaat

SEQ ID NO: 57998 - DNA, 15 bp, Homo sapiens
gagctttgttaaaaa

SEQ ID NO: 57999 - DNA, 15 bp, Homo sapiens
agagctttgttaaaa

SEQ ID NO: 58000 - DNA, 15 bp, Homo sapiens
aagagctttgttaaa

SEQ ID NO: 58001 - DNA, 15 bp, Homo sapiens
taagagctttgttaa

SEQ ID NO: 58002 - DNA, 15 bp, Homo sapiens
ctaagagctttgtta

SEQ ID NO: 58003 - DNA, 15 bp, Homo sapiens
cctaagagctttgtt

SEQ ID NO: 58004 - DNA, 15 bp, Homo sapiens
tcctaagagctttgt

SEQ ID NO: 58005 - DNA, 15 bp, Homo sapiens
atcctaagagctttg

SEQ ID NO: 58006 - DNA, 15 bp, Homo sapiens
aatcctaagagcttt

SEQ ID NO: 58007 - DNA, 15 bp, Homo sapiens
aaatcctaagagctt

SEQ ID NO: 58008 - DNA, 15 bp, Homo sapiens
taaatcctaagagct

SEQ ID NO: 58009 - DNA, 15 bp, Homo sapiens
gtaaatcctaagagc

SEQ ID NO: 58010 - DNA, 15 bp, Homo sapiens
tgtaaatcctaagag

SEQ ID NO: 58011 - DNA, 15 bp, Homo sapiens
gtgtaaatcctaaga

SEQ ID NO: 58012 - DNA, 15 bp, Homo sapiens
tgtgtaaatcctaag

SEQ ID NO: 58013 - DNA, 15 bp, Homo sapiens
atgtgtaaatcctaa

SEQ ID NO: 58014 - DNA, 15 bp, Homo sapiens
aatgtgtaaatccta

SEQ ID NO: 58015 - DNA, 15 bp, Homo sapiens
aaatgtgtaaatcct

SEQ ID NO: 58016 - DNA, 15 bp, Homo sapiens
taaatgtgtaaatcc

SEQ ID NO: 58017 - DNA, 15 bp, Homo sapiens
ataaatgtgtaaatc

SEQ ID NO: 58018 - DNA, 15 bp, Homo sapiens
tataaatgtgtaaat

SEQ ID NO: 58019 - DNA, 15 bp, Homo sapiens
atataaatgtgtaaa

SEQ ID NO: 58020 - DNA, 15 bp, Homo sapiens
aatataaatgtgtaa

SEQ ID NO: 58021 - DNA, 15 bp, Homo sapiens
aaatataaatgtgta

SEQ ID NO: 58022 - DNA, 15 bp, Homo sapiens
taaatataaatgtgt

SEQ ID NO: 58023 - DNA, 15 bp, Homo sapiens
ttaaatataaatgtg

SEQ ID NO: 58024 - DNA, 15 bp, Homo sapiens
tttaaatataaatgt

SEQ ID NO: 58025 - DNA, 15 bp, Homo sapiens
gtttaaatataaatg

SEQ ID NO: 58026 - DNA, 15 bp, Homo sapiens
tgtttaaatataaat

SEQ ID NO: 58027 - DNA, 15 bp, Homo sapiens
atgtttaaatataaa

SEQ ID NO: 58028 - DNA, 15 bp, Homo sapiens
aatgtttaaatataa

SEQ ID NO: 58029 - DNA, 15 bp, Homo sapiens
caatgtttaaatata

SEQ ID NO: 58030 - DNA, 15 bp, Homo sapiens
tcaatgtttaaatat

SEQ ID NO: 58031 - DNA, 15 bp, Homo sapiens
atcaatgtttaaata

SEQ ID NO: 58032 - DNA, 15 bp, Homo sapiens
tatcaatgtttaaat

SEQ ID NO: 58033 - DNA, 15 bp, Homo sapiens
atatcaatgtttaaa

SEQ ID NO: 58034 - DNA, 15 bp, Homo sapiens
tatatcaatgtttaa

SEQ ID NO: 58035 - DNA, 15 bp, Homo sapiens
atatatcaatgttta

SEQ ID NO: 58036 - DNA, 15 bp, Homo sapiens
tatatatcaatgttt

SEQ ID NO: 58037 - DNA, 15 bp, Homo sapiens
ctatatatcaatgtt

SEQ ID NO: 58038 - DNA, 15 bp, Homo sapiens
tctatatatcaatgt

SEQ ID NO: 58039 - DNA, 15 bp, Homo sapiens
ctctatatatcaatg

SEQ ID NO: 58040 - DNA, 15 bp, Homo sapiens
actctatatatcaat

SEQ ID NO: 58041 - DNA, 15 bp, Homo sapiens
tactctatatatcaa

SEQ ID NO: 58042 - DNA, 15 bp, Homo sapiens
atactctatatatca

SEQ ID NO: 58043 - DNA, 15 bp, Homo sapiens
aatactctatatatc

SEQ ID NO: 58044 - DNA, 15 bp, Homo sapiens
caatactctatatat

SEQ ID NO: 58045 - DNA, 15 bp, Homo sapiens
tcaatactctatata

SEQ ID NO: 58046 - DNA, 15 bp, Homo sapiens
atcaatactctatat

SEQ ID NO: 58047 - DNA, 15 bp, Homo sapiens
aatcaatactctata

SEQ ID NO: 58048 - DNA, 15 bp, Homo sapiens
caatcaatactctat

SEQ ID NO: 58049 - DNA, 15 bp, Homo sapiens
tcaatcaatactcta

SEQ ID NO: 58050 - DNA, 15 bp, Homo sapiens
atcaatcaatactct

SEQ ID NO: 58051 - DNA, 15 bp, Homo sapiens
aatcaatcaatactc

SEQ ID NO: 58052 - DNA, 15 bp, Homo sapiens
caatcaatcaatact

SEQ ID NO: 58053 - DNA, 15 bp, Homo sapiens
gcaatcaatcaatac

SEQ ID NO: 58054 - DNA, 15 bp, Homo sapiens
agcaatcaatcaata

SEQ ID NO: 58055 - DNA, 15 bp, Homo sapiens
gagcaatcaatcaat

SEQ ID NO: 58056 - DNA, 15 bp, Homo sapiens
tgagcaatcaatcaa

SEQ ID NO: 58057 - DNA, 15 bp, Homo sapiens
atgagcaatcaatca

SEQ ID NO: 58058 - DNA, 15 bp, Homo sapiens
tatgagcaatcaatc

SEQ ID NO: 58059 - DNA, 15 bp, Homo sapiens
ttatgagcaatcaat

SEQ ID NO: 58060 - DNA, 15 bp, Homo sapiens
cttatgagcaatcaa

SEQ ID NO: 58061 - DNA, 15 bp, Homo sapiens
acttatgagcaatca

SEQ ID NO: 58062 - DNA, 15 bp, Homo sapiens
aacttatgagcaatc

SEQ ID NO: 58063 - DNA, 15 bp, Homo sapiens
taacttatgagcaat

SEQ ID NO: 58064 - DNA, 15 bp, Homo sapiens
ttaacttatgagcaa

SEQ ID NO: 58065 - DNA, 15 bp, Homo sapiens
tttaacttatgagca

SEQ ID NO: 58066 - DNA, 15 bp, Homo sapiens
atttaacttatgagc

SEQ ID NO: 58067 - DNA, 15 bp, Homo sapiens
aatttaacttatgag

SEQ ID NO: 58068 - DNA, 15 bp, Homo sapiens
caatttaacttatga

SEQ ID NO: 58069 - DNA, 15 bp, Homo sapiens
ccaatttaacttatg

SEQ ID NO: 58070 - DNA, 15 bp, Homo sapiens
accaatttaacttat

SEQ ID NO: 58071 - DNA, 15 bp, Homo sapiens
taccaatttaactta

SEQ ID NO: 58072 - DNA, 15 bp, Homo sapiens
ttaccaatttaactt

SEQ ID NO: 58073 - DNA, 15 bp, Homo sapiens
tttaccaatttaact

SEQ ID NO: 58074 - DNA, 15 bp, Homo sapiens
ctttaccaatttaac

SEQ ID NO: 58075 - DNA, 15 bp, Homo sapiens
actttaccaatttaa

SEQ ID NO: 58076 - DNA, 15 bp, Homo sapiens
aactttaccaattta

SEQ ID NO: 58077 - DNA, 15 bp, Homo sapiens
taactttaccaattt

SEQ ID NO: 58078 - DNA, 15 bp, Homo sapiens
ctaactttaccaatt

SEQ ID NO: 58079 - DNA, 15 bp, Homo sapiens
tctaactttaccaat

SEQ ID NO: 58080 - DNA, 15 bp, Homo sapiens
ctctaactttaccaa

SEQ ID NO: 58081 - DNA, 15 bp, Homo sapiens
tctctaactttacca

SEQ ID NO: 58082 - DNA, 15 bp, Homo sapiens
gtctctaactttacc

SEQ ID NO: 58083 - DNA, 15 bp, Homo sapiens
tgtctctaactttac

SEQ ID NO: 58084 - DNA, 15 bp, Homo sapiens
ttgtctctaacttta

SEQ ID NO: 58085 - DNA, 15 bp, Homo sapiens
gttgtctctaacttt

SEQ ID NO: 58086 - DNA, 15 bp, Homo sapiens
agttgtctctaactt

SEQ ID NO: 58087 - DNA, 15 bp, Homo sapiens
tagttgtctctaact

SEQ ID NO: 58088 - DNA, 15 bp, Homo sapiens
atagttgtctctaac

SEQ ID NO: 58089 - DNA, 15 bp, Homo sapiens
aatagttgtctctaa

SEQ ID NO: 58090 - DNA, 15 bp, Homo sapiens
gaatagttgtctcta

SEQ ID NO: 58091 - DNA, 15 bp, Homo sapiens
agaatagttgtctct

SEQ ID NO: 58092 - DNA, 15 bp, Homo sapiens
tagaatagttgtctc

SEQ ID NO: 58093 - DNA, 15 bp, Homo sapiens
ttagaatagttgtct

SEQ ID NO: 58094 - DNA, 15 bp, Homo sapiens
gttagaatagttgtc

SEQ ID NO: 58095 - DNA, 15 bp, Homo sapiens
tgttagaatagttgt

SEQ ID NO: 58096 - DNA, 15 bp, Homo sapiens
gtgttagaatagttg

SEQ ID NO: 58097 - DNA, 15 bp, Homo sapiens
ggtgttagaatagtt

SEQ ID NO: 58098 - DNA, 15 bp, Homo sapiens
aggtgttagaatagt

SEQ ID NO: 58099 - DNA, 15 bp, Homo sapiens
gaggtgttagaatag

SEQ ID NO: 58100 - DNA, 15 bp, Homo sapiens
tgaggtgttagaata

SEQ ID NO: 58101 - DNA, 15 bp, Homo sapiens
gtgaggtgttagaat

SEQ ID NO: 58102 - DNA, 15 bp, Homo sapiens
ggtgaggtgttagaa

SEQ ID NO: 58103 - DNA, 15 bp, Homo sapiens
tggtgaggtgttaga

SEQ ID NO: 58104 - DNA, 15 bp, Homo sapiens
atggtgaggtgttag

SEQ ID NO: 58105 - DNA, 15 bp, Homo sapiens
aatggtgaggtgtta

SEQ ID NO: 58106 - DNA, 15 bp, Homo sapiens
caatggtgaggtgtt

SEQ ID NO: 58107 - DNA, 15 bp, Homo sapiens
tcaatggtgaggtgt

SEQ ID NO: 58108 - DNA, 15 bp, Homo sapiens
ttcaatggtgaggtg

SEQ ID NO: 58109 - DNA, 15 bp, Homo sapiens
tttcaatggtgaggt

SEQ ID NO: 58110 - DNA, 15 bp, Homo sapiens
atttcaatggtgagg

SEQ ID NO: 58111 - DNA, 15 bp, Homo sapiens
aatttcaatggtgag

SEQ ID NO: 58112 - DNA, 15 bp, Homo sapiens
aaatttcaatggtga

SEQ ID NO: 58113 - DNA, 15 bp, Homo sapiens
taaatttcaatggtg

SEQ ID NO: 58114 - DNA, 15 bp, Homo sapiens
ataaatttcaatggt

SEQ ID NO: 58115 - DNA, 15 bp, Homo sapiens
tataaatttcaatgg

SEQ ID NO: 58116 - DNA, 15 bp, Homo sapiens
atataaatttcaatg

SEQ ID NO: 58117 - DNA, 15 bp, Homo sapiens
catataaatttcaat

SEQ ID NO: 58118 - DNA, 15 bp, Homo sapiens
gcatataaatttcaa

SEQ ID NO: 58119 - DNA, 15 bp, Homo sapiens
ggcatataaatttca

SEQ ID NO: 58120 - DNA, 15 bp, Homo sapiens
tggcatataaatttc

SEQ ID NO: 58121 - DNA, 15 bp, Homo sapiens
gtggcatataaattt

SEQ ID NO: 58122 - DNA, 15 bp, Homo sapiens
ggtggcatataaatt

SEQ ID NO: 58123 - DNA, 15 bp, Homo sapiens
aggtggcatataaat

SEQ ID NO: 58124 - DNA, 15 bp, Homo sapiens
aaggtggcatataaa

SEQ ID NO: 58125 - DNA, 15 bp, Homo sapiens
caaggtggcatataa

SEQ ID NO: 58126 - DNA, 15 bp, Homo sapiens
acaaggtggcatata

SEQ ID NO: 58127 - DNA, 15 bp, Homo sapiens
gacaaggtggcatat

SEQ ID NO: 58128 - DNA, 15 bp, Homo sapiens
agacaaggtggcata

SEQ ID NO: 58129 - DNA, 15 bp, Homo sapiens
aagacaaggtggcat

SEQ ID NO: 58130 - DNA, 15 bp, Homo sapiens
aaagacaaggtggca

SEQ ID NO: 58131 - DNA, 15 bp, Homo sapiens
gaaagacaaggtggc

SEQ ID NO: 58132 - DNA, 15 bp, Homo sapiens
tgaaagacaaggtgg

SEQ ID NO: 58133 - DNA, 15 bp, Homo sapiens
atgaaagacaaggtg

SEQ ID NO: 58134 - DNA, 15 bp, Homo sapiens
tatgaaagacaaggt

SEQ ID NO: 58135 - DNA, 15 bp, Homo sapiens
ttatgaaagacaagg

SEQ ID NO: 58136 - DNA, 15 bp, Homo sapiens
tttatgaaagacaag

SEQ ID NO: 58137 - DNA, 15 bp, Homo sapiens
ttttatgaaagacaa

SEQ ID NO: 58138 - DNA, 15 bp, Homo sapiens
cttttatgaaagaca

SEQ ID NO: 58139 - DNA, 15 bp, Homo sapiens
gcttttatgaaagac

SEQ ID NO: 58140 - DNA, 15 bp, Homo sapiens
agcttttatgaaaga

SEQ ID NO: 58141 - DNA, 15 bp, Homo sapiens
cagcttttatgaaag

SEQ ID NO: 58142 - DNA, 15 bp, Homo sapiens
tcagcttttatgaaa

SEQ ID NO: 58143 - DNA, 15 bp, Homo sapiens
ttcagcttttatgaa

SEQ ID NO: 58144 - DNA, 15 bp, Homo sapiens
tttcagcttttatga

SEQ ID NO: 58145 - DNA, 15 bp, Homo sapiens
ttttcagcttttatg

SEQ ID NO: 58146 - DNA, 15 bp, Homo sapiens
attttcagcttttat

SEQ ID NO: 58147 - DNA, 15 bp, Homo sapiens
aattttcagctttta

SEQ ID NO: 58148 - DNA, 15 bp, Homo sapiens
caattttcagctttt

SEQ ID NO: 58149 - DNA, 15 bp, Homo sapiens
acaattttcagcttt

SEQ ID NO: 58150 - DNA, 15 bp, Homo sapiens
aacaattttcagctt

SEQ ID NO: 58151 - DNA, 15 bp, Homo sapiens
taacaattttcagct

SEQ ID NO: 58152 - DNA, 15 bp, Homo sapiens
gtaacaattttcagc

SEQ ID NO: 58153 - DNA, 15 bp, Homo sapiens
ggtaacaattttcag

SEQ ID NO: 58154 - DNA, 15 bp, Homo sapiens
aggtaacaattttca

SEQ ID NO: 58155 - DNA, 15 bp, Homo sapiens
taggtaacaattttc

SEQ ID NO: 58156 - DNA, 15 bp, Homo sapiens
ttaggtaacaatttt

SEQ ID NO: 58157 - DNA, 15 bp, Homo sapiens
tttaggtaacaattt

SEQ ID NO: 58158 - DNA, 15 bp, Homo sapiens
ttttaggtaacaatt

SEQ ID NO: 58159 - DNA, 15 bp, Homo sapiens
attttaggtaacaat

SEQ ID NO: 58160 - DNA, 15 bp, Homo sapiens
cattttaggtaacaa

SEQ ID NO: 58161 - DNA, 15 bp, Homo sapiens
tcattttaggtaaca

SEQ ID NO: 58162 - DNA, 15 bp, Homo sapiens
ttcattttaggtaac

SEQ ID NO: 58163 - DNA, 15 bp, Homo sapiens
tttcattttaggtaa

SEQ ID NO: 58164 - DNA, 15 bp, Homo sapiens
ttttcattttaggta

SEQ ID NO: 58165 - DNA, 15 bp, Homo sapiens
attttcattttaggt

SEQ ID NO: 58166 - DNA, 15 bp, Homo sapiens
gattttcattttagg

SEQ ID NO: 58167 - DNA, 15 bp, Homo sapiens
tgattttcattttag

SEQ ID NO: 58168 - DNA, 15 bp, Homo sapiens
ttgattttcatttta

SEQ ID NO: 58169 - DNA, 15 bp, Homo sapiens
gttgattttcatttt

SEQ ID NO: 58170 - DNA, 15 bp, Homo sapiens
agttgattttcattt

SEQ ID NO: 58171 - DNA, 15 bp, Homo sapiens
aagttgattttcatt

SEQ ID NO: 58172 - DNA, 15 bp, Homo sapiens
gaagttgattttcat

SEQ ID NO: 58173 - DNA, 15 bp, Homo sapiens
tgaagttgattttca

SEQ ID NO: 58174 - DNA, 15 bp, Homo sapiens
atgaagttgattttc

SEQ ID NO: 58175 - DNA, 15 bp, Homo sapiens
catgaagttgatttt

SEQ ID NO: 58176 - DNA, 15 bp, Homo sapiens
acatgaagttgattt

SEQ ID NO: 58177 - DNA, 15 bp, Homo sapiens
aacatgaagttgatt

SEQ ID NO: 58178 - DNA, 15 bp, Homo sapiens
aaacatgaagttgat

SEQ ID NO: 58179 - DNA, 15 bp, Homo sapiens
aaaacatgaagttga

SEQ ID NO: 58180 - DNA, 15 bp, Homo sapiens
caaaacatgaagttg

SEQ ID NO: 58181 - DNA, 15 bp, Homo sapiens
tcaaaacatgaagtt

SEQ ID NO: 58182 - DNA, 15 bp, Homo sapiens
ttcaaaacatgaagt

SEQ ID NO: 58183 - DNA, 15 bp, Homo sapiens
cttcaaaacatgaag

SEQ ID NO: 58184 - DNA, 15 bp, Homo sapiens
tcttcaaaacatgaa

SEQ ID NO: 58185 - DNA, 15 bp, Homo sapiens
atcttcaaaacatga

SEQ ID NO: 58186 - DNA, 15 bp, Homo sapiens
tatcttcaaaacatg

SEQ ID NO: 58187 - DNA, 15 bp, Homo sapiens
ctatcttcaaaacat

SEQ ID NO: 58188 - DNA, 15 bp, Homo sapiens
actatcttcaaaaca

SEQ ID NO: 58189 - DNA, 15 bp, Homo sapiens
aactatcttcaaaac

SEQ ID NO: 58190 - DNA, 15 bp, Homo sapiens
taactatcttcaaaa

SEQ ID NO: 58191 - DNA, 15 bp, Homo sapiens
ataactatcttcaaa

SEQ ID NO: 58192 - DNA, 15 bp, Homo sapiens
tataactatcttcaa

SEQ ID NO: 58193 - DNA, 15 bp, Homo sapiens
ttataactatcttca

SEQ ID NO: 58194 - DNA, 15 bp, Homo sapiens
tttataactatcttc

SEQ ID NO: 58195 - DNA, 15 bp, Homo sapiens
atttataactatctt

SEQ ID NO: 58196 - DNA, 15 bp, Homo sapiens
tatttataactatct

SEQ ID NO: 58197 - DNA, 15 bp, Homo sapiens
atatttataactatc

SEQ ID NO: 58198 - DNA, 15 bp, Homo sapiens
aatatttataactat

SEQ ID NO: 58199 - DNA, 15 bp, Homo sapiens
caatatttataacta

SEQ ID NO: 58200 - DNA, 15 bp, Homo sapiens
acaatatttataact

SEQ ID NO: 58201 - DNA, 15 bp, Homo sapiens
aacaatatttataac

SEQ ID NO: 58202 - DNA, 15 bp, Homo sapiens
gaacaatatttataa

SEQ ID NO: 58203 - DNA, 15 bp, Homo sapiens
agaacaatatttata

SEQ ID NO: 58204 - DNA, 15 bp, Homo sapiens
aagaacaatatttat

SEQ ID NO: 58205 - DNA, 15 bp, Homo sapiens
aaagaacaatattta

SEQ ID NO: 58206 - DNA, 15 bp, Homo sapiens
caaagaacaatattt

SEQ ID NO: 58207 - DNA, 15 bp, Homo sapiens
acaaagaacaatatt

SEQ ID NO: 58208 - DNA, 15 bp, Homo sapiens
aacaaagaacaatat

SEQ ID NO: 58209 - DNA, 15 bp, Homo sapiens
taacaaagaacaata

SEQ ID NO: 58210 - DNA, 15 bp, Homo sapiens
gtaacaaagaacaat

SEQ ID NO: 58211 - DNA, 15 bp, Homo sapiens
tgtaacaaagaacaa

SEQ ID NO: 58212 - DNA, 15 bp, Homo sapiens
ttgtaacaaagaaca

SEQ ID NO: 58213 - DNA, 15 bp, Homo sapiens
attgtaacaaagaac

SEQ ID NO: 58214 - DNA, 15 bp, Homo sapiens
aattgtaacaaagaa

SEQ ID NO: 58215 - DNA, 15 bp, Homo sapiens
aaattgtaacaaaga

SEQ ID NO: 58216 - DNA, 15 bp, Homo sapiens
gaaattgtaacaaag

SEQ ID NO: 58217 - DNA, 15 bp, Homo sapiens
cgaaattgtaacaaa

SEQ ID NO: 58218 - DNA, 15 bp, Homo sapiens
ccgaaattgtaacaa

SEQ ID NO: 58219 - DNA, 15 bp, Homo sapiens
cccgaaattgtaaca

SEQ ID NO: 58220 - DNA, 15 bp, Homo sapiens
gcccgaaattgtaac

SEQ ID NO: 58221 - DNA, 15 bp, Homo sapiens
tgcccgaaattgtaa

SEQ ID NO: 58222 - DNA, 15 bp, Homo sapiens
gtgcccgaaattgta

SEQ ID NO: 58223 - DNA, 15 bp, Homo sapiens
ggtgcccgaaattgt

SEQ ID NO: 58224 - DNA, 15 bp, Homo sapiens
cggtgcccgaaattg

SEQ ID NO: 58225 - DNA, 15 bp, Homo sapiens
gcggtgcccgaaatt

SEQ ID NO: 58226 - DNA, 15 bp, Homo sapiens
tgcggtgcccgaaat

SEQ ID NO: 58227 - DNA, 15 bp, Homo sapiens
atgcggtgcccgaaa

SEQ ID NO: 58228 - DNA, 15 bp, Homo sapiens
tatgcggtgcccgaa

SEQ ID NO: 58229 - DNA, 15 bp, Homo sapiens
atatgcggtgcccga

SEQ ID NO: 58230 - DNA, 15 bp, Homo sapiens
aatatgcggtgcccg

SEQ ID NO: 58231 - DNA, 15 bp, Homo sapiens
taatatgcggtgccc

SEQ ID NO: 58232 - DNA, 15 bp, Homo sapiens
ttaatatgcggtgcc

SEQ ID NO: 58233 - DNA, 15 bp, Homo sapiens
tttaatatgcggtgc

SEQ ID NO: 58234 - DNA, 15 bp, Homo sapiens
ttttaatatgcggtg

SEQ ID NO: 58235 - DNA, 15 bp, Homo sapiens
gttttaatatgcggt

SEQ ID NO: 58236 - DNA, 15 bp, Homo sapiens
cgttttaatatgcgg

SEQ ID NO: 58237 - DNA, 15 bp, Homo sapiens
acgttttaatatgcg

SEQ ID NO: 58238 - DNA, 15 bp, Homo sapiens
tacgttttaatatgc

SEQ ID NO: 58239 - DNA, 15 bp, Homo sapiens
ttacgttttaatatg

SEQ ID NO: 58240 - DNA, 15 bp, Homo sapiens
gttacgttttaatat

SEQ ID NO: 58241 - DNA, 15 bp, Homo sapiens
agttacgttttaata

SEQ ID NO: 58242 - DNA, 15 bp, Homo sapiens
aagttacgttttaat

SEQ ID NO: 58243 - DNA, 15 bp, Homo sapiens
aaagttacgttttaa

SEQ ID NO: 58244 - DNA, 15 bp, Homo sapiens
taaagttacgtttta

SEQ ID NO: 58245 - DNA, 15 bp, Homo sapiens
ataaagttacgtttt

SEQ ID NO: 58246 - DNA, 15 bp, Homo sapiens
aataaagttacgttt

SEQ ID NO: 58247 - DNA, 15 bp, Homo sapiens
caataaagttacgtt

SEQ ID NO: 58248 - DNA, 15 bp, Homo sapiens
acaataaagttacgt

SEQ ID NO: 58249 - DNA, 15 bp, Homo sapiens
aacaataaagttacg

SEQ ID NO: 58250 - DNA, 15 bp, Homo sapiens
gaacaataaagttac

SEQ ID NO: 58251 - DNA, 15 bp, Homo sapiens
ggaacaataaagtta

SEQ ID NO: 58252 - DNA, 15 bp, Homo sapiens
tggaacaataaagtt

SEQ ID NO: 58253 - DNA, 15 bp, Homo sapiens
ttggaacaataaagt

SEQ ID NO: 58254 - DNA, 15 bp, Homo sapiens
attggaacaataaag

SEQ ID NO: 58255 - DNA, 15 bp, Homo sapiens
tattggaacaataaa

SEQ ID NO: 58256 - DNA, 15 bp, Homo sapiens
atattggaacaataa

SEQ ID NO: 58257 - DNA, 15 bp, Homo sapiens
catattggaacaata

SEQ ID NO: 58258 - DNA, 15 bp, Homo sapiens
acatattggaacaat

SEQ ID NO: 58259 - DNA, 15 bp, Homo sapiens
tacatattggaacaa

SEQ ID NO: 58260 - DNA, 15 bp, Homo sapiens
ttacatattggaaca

SEQ ID NO: 58261 - DNA, 15 bp, Homo sapiens
gttacatattggaac

SEQ ID NO: 58262 - DNA, 15 bp, Homo sapiens
tgttacatattggaa

SEQ ID NO: 58263 - DNA, 15 bp, Homo sapiens
atgttacatattgga

SEQ ID NO: 58264 - DNA, 15 bp, Homo sapiens
catgttacatattgg

SEQ ID NO: 58265 - DNA, 15 bp, Homo sapiens
ccatgttacatattg

SEQ ID NO: 58266 - DNA, 15 bp, Homo sapiens
tccatgttacatatt

SEQ ID NO: 58267 - DNA, 15 bp, Homo sapiens
ctccatgttacatat

SEQ ID NO: 58268 - DNA, 15 bp, Homo sapiens
cctccatgttacata

SEQ ID NO: 58269 - DNA, 15 bp, Homo sapiens
ccctccatgttacat

SEQ ID NO: 58270 - DNA, 15 bp, Homo sapiens
gccctccatgttaca

SEQ ID NO: 58271 - DNA, 15 bp, Homo sapiens
ggccctccatgttac

SEQ ID NO: 58272 - DNA, 15 bp, Homo sapiens
tggccctccatgtta

SEQ ID NO: 58273 - DNA, 15 bp, Homo sapiens
ctggccctccatgtt

SEQ ID NO: 58274 - DNA, 15 bp, Homo sapiens
cctggccctccatgt

SEQ ID NO: 58275 - DNA, 15 bp, Homo sapiens
acctggccctccatg

SEQ ID NO: 58276 - DNA, 15 bp, Homo sapiens
gacctggccctccat

SEQ ID NO: 58277 - DNA, 15 bp, Homo sapiens
tgacctggccctcca

SEQ ID NO: 58278 - DNA, 15 bp, Homo sapiens
atgacctggccctcc

SEQ ID NO: 58279 - DNA, 15 bp, Homo sapiens
tatgacctggccctc

SEQ ID NO: 58280 - DNA, 15 bp, Homo sapiens
ttatgacctggccct

SEQ ID NO: 58281 - DNA, 15 bp, Homo sapiens
tttatgacctggccc

SEQ ID NO: 58282 - DNA, 15 bp, Homo sapiens
atttatgacctggcc

SEQ ID NO: 58283 - DNA, 15 bp, Homo sapiens
tatttatgacctggc

SEQ ID NO: 58284 - DNA, 15 bp, Homo sapiens
ttatttatgacctgg

SEQ ID NO: 58285 - DNA, 15 bp, Homo sapiens
attatttatgacctg

SEQ ID NO: 58286 - DNA, 15 bp, Homo sapiens
cattatttatgacct

SEQ ID NO: 58287 - DNA, 15 bp, Homo sapiens
tcattatttatgacc

SEQ ID NO: 58288 - DNA, 15 bp, Homo sapiens
gtcattatttatgac

SEQ ID NO: 58289 - DNA, 15 bp, Homo sapiens
tgtcattatttatga

SEQ ID NO: 58290 - DNA, 15 bp, Homo sapiens
atgtcattatttatg

SEQ ID NO: 58291 - DNA, 15 bp, Homo sapiens
aatgtcattatttat

SEQ ID NO: 58292 - DNA, 15 bp, Homo sapiens
taatgtcattattta

SEQ ID NO: 58293 - DNA, 15 bp, Homo sapiens
ataatgtcattattt

SEQ ID NO: 58294 - DNA, 15 bp, Homo sapiens
tataatgtcattatt

SEQ ID NO: 58295 - DNA, 15 bp, Homo sapiens
ttataatgtcattat

SEQ ID NO: 58296 - DNA, 15 bp, Homo sapiens
attataatgtcatta

SEQ ID NO: 58297 - DNA, 15 bp, Homo sapiens
cattataatgtcatt

SEQ ID NO: 58298 - DNA, 15 bp, Homo sapiens
ccattataatgtcat

SEQ ID NO: 58299 - DNA, 15 bp, Homo sapiens
cccattataatgtca

SEQ ID NO: 58300 - DNA, 15 bp, Homo sapiens
gcccattataatgtc

SEQ ID NO: 58301 - DNA, 15 bp, Homo sapiens
agcccattataatgt

SEQ ID NO: 58302 - DNA, 15 bp, Homo sapiens
aagcccattataatg

SEQ ID NO: 58303 - DNA, 15 bp, Homo sapiens
aaagcccattataat

SEQ ID NO: 58304 - DNA, 15 bp, Homo sapiens
aaaagcccattataa

SEQ ID NO: 58305 - DNA, 15 bp, Homo sapiens
caaaagcccattata

SEQ ID NO: 58306 - DNA, 15 bp, Homo sapiens
gcaaaagcccattat

SEQ ID NO: 58307 - DNA, 15 bp, Homo sapiens
tgcaaaagcccatta

SEQ ID NO: 58308 - DNA, 15 bp, Homo sapiens
gtgcaaaagcccatt

SEQ ID NO: 58309 - DNA, 15 bp, Homo sapiens
agtgcaaaagcccat

SEQ ID NO: 58310 - DNA, 15 bp, Homo sapiens
cagtgcaaaagccca

SEQ ID NO: 58311 - DNA, 15 bp, Homo sapiens
acagtgcaaaagccc

SEQ ID NO: 58312 - DNA, 15 bp, Homo sapiens
aacagtgcaaaagcc

SEQ ID NO: 58313 - DNA, 15 bp, Homo sapiens
taacagtgcaaaagc

SEQ ID NO: 58314 - DNA, 15 bp, Homo sapiens
ataacagtgcaaaag

SEQ ID NO: 58315 - DNA, 15 bp, Homo sapiens
aataacagtgcaaaa

SEQ ID NO: 58316 - DNA, 15 bp, Homo sapiens
taataacagtgcaaa

SEQ ID NO: 58317 - DNA, 15 bp, Homo sapiens
ataataacagtgcaa

SEQ ID NO: 58318 - DNA, 15 bp, Homo sapiens
aataataacagtgca

SEQ ID NO: 58319 - DNA, 15 bp, Homo sapiens
aaataataacagtgc

SEQ ID NO: 58320 - DNA, 15 bp, Homo sapiens
aaaataataacagtg

SEQ ID NO: 58321 - DNA, 15 bp, Homo sapiens
gaaaaataataacag

SEQ ID NO: 58322 - DNA, 15 bp, Homo sapiens
ggaaaaataataaca

SEQ ID NO: 58323 - DNA, 15 bp, Homo sapiens
aggaaaaataataac

SEQ ID NO: 58324 - DNA, 15 bp, Homo sapiens
aaggaaaaataataa

SEQ ID NO: 58325 - DNA, 15 bp, Homo sapiens
aaaggaaaaataata

SEQ ID NO: 58326 - DNA, 15 bp, Homo sapiens
caaaggaaaaataat

SEQ ID NO: 58327 - DNA, 15 bp, Homo sapiens
ccaaaggaaaaataa

SEQ ID NO: 58328 - DNA, 15 bp, Homo sapiens
tccaaaggaaaaata

SEQ ID NO: 58329 - DNA, 15 bp, Homo sapiens
ttccaaaggaaaaat

SEQ ID NO: 58330 - DNA, 15 bp, Homo sapiens
attccaaaggaaaaa

SEQ ID NO: 58331 - DNA, 15 bp, Homo sapiens
cattccaaaggaaaa

SEQ ID NO: 58332 - DNA, 15 bp, Homo sapiens
acattccaaaggaaa

SEQ ID NO: 58333 - DNA, 15 bp, Homo sapiens
cacattccaaaggaa

SEQ ID NO: 58334 - DNA, 15 bp, Homo sapiens
tcacattccaaagga

SEQ ID NO: 58335 - DNA, 15 bp, Homo sapiens
ttcacattccaaagg

SEQ ID NO: 58336 - DNA, 15 bp, Homo sapiens
cttcacattccaaag

SEQ ID NO: 58337 - DNA, 15 bp, Homo sapiens
ccttcacattccaaa

SEQ ID NO: 58338 - DNA, 15 bp, Homo sapiens
accttcacattccaa

SEQ ID NO: 58339 - DNA, 15 bp, Homo sapiens
gaccttcacattcca

SEQ ID NO: 58340 - DNA, 15 bp, Homo sapiens
agaccttcacattcc

SEQ ID NO: 58341 - DNA, 15 bp, Homo sapiens
cagaccttcacattc

SEQ ID NO: 58342 - DNA, 15 bp, Homo sapiens
tcagaccttcacatt

SEQ ID NO: 58343 - DNA, 15 bp, Homo sapiens
ttcagaccttcacat

SEQ ID NO: 58344 - DNA, 15 bp, Homo sapiens
attcagaccttcaca

SEQ ID NO: 58345 - DNA, 15 bp, Homo sapiens
cattcagaccttcac

SEQ ID NO: 58346 - DNA, 15 bp, Homo sapiens
tcattcagaccttca

SEQ ID NO: 58347 - DNA, 15 bp, Homo sapiens
ctcattcagaccttc

SEQ ID NO: 58348 - DNA, 15 bp, Homo sapiens
cctcattcagacctt

SEQ ID NO: 58349 - DNA, 15 bp, Homo sapiens
ccctcattcagacct

SEQ ID NO: 58350 - DNA, 15 bp, Homo sapiens
accctcattcagacc

SEQ ID NO: 58351 - DNA, 15 bp, Homo sapiens
aaccctcattcagac

SEQ ID NO: 58352 - DNA, 15 bp, Homo sapiens
aaaccctcattcaga

SEQ ID NO: 58353 - DNA, 15 bp, Homo sapiens
aaaaccctcattcag

SEQ ID NO: 58354 - DNA, 15 bp, Homo sapiens
caaaaccctcattca

SEQ ID NO: 58355 - DNA, 15 bp, Homo sapiens
tcaaaaccctcattc

SEQ ID NO: 58356 - DNA, 15 bp, Homo sapiens
atcaaaaccctcatt

SEQ ID NO: 58357 - DNA, 15 bp, Homo sapiens
aatcaaaaccctcat

SEQ ID NO: 58358 - DNA, 15 bp, Homo sapiens
aaatcaaaaccctca

SEQ ID NO: 58359 - DNA, 15 bp, Homo sapiens
aaaatcaaaaccctc

SEQ ID NO: 58360 - DNA, 15 bp, Homo sapiens
caaaatcaaaaccct

SEQ ID NO: 58361 - DNA, 15 bp, Homo sapiens
tcaaaatcaaaaccc

SEQ ID NO: 58362 - DNA, 15 bp, Homo sapiens
ttcaaaatcaaaacc

SEQ ID NO: 58363 - DNA, 15 bp, Homo sapiens
attcaaaatcaaaac

SEQ ID NO: 58364 - DNA, 15 bp, Homo sapiens
cattcaaaatcaaaa

SEQ ID NO: 58365 - DNA, 15 bp, Homo sapiens
acattcaaaatcaaa

SEQ ID NO: 58366 - DNA, 15 bp, Homo sapiens
aacattcaaaatcaa

SEQ ID NO: 58367 - DNA, 15 bp, Homo sapiens
aaacattcaaaatca

SEQ ID NO: 58368 - DNA, 15 bp, Homo sapiens
gaaacattcaaaatc

SEQ ID NO: 58369 - DNA, 15 bp, Homo sapiens
tgaaacattcaaaat

SEQ ID NO: 58370 - DNA, 15 bp, Homo sapiens
ttgaaacattcaaaa

SEQ ID NO: 58371 - DNA, 15 bp, Homo sapiens
attgaaacattcaaa

SEQ ID NO: 58372 - DNA, 15 bp, Homo sapiens
cattgaaacattcaa

SEQ ID NO: 58373 - DNA, 15 bp, Homo sapiens
acattgaaacattca

SEQ ID NO: 58374 - DNA, 15 bp, Homo sapiens
aacattgaaacattc

SEQ ID NO: 58375 - DNA, 15 bp, Homo sapiens
aaacattgaaacatt

SEQ ID NO: 58376 - DNA, 15 bp, Homo sapiens
aaaacattgaaacat

SEQ ID NO: 58377 - DNA, 15 bp, Homo sapiens
aaaaacattgaaaca

SEQ ID NO: 58378 - DNA, 15 bp, Homo sapiens
caaaaacattgaaac

SEQ ID NO: 58379 - DNA, 15 bp, Homo sapiens
tcaaaaacattgaaa

SEQ ID NO: 58380 - DNA, 15 bp, Homo sapiens
ctcaaaaacattgaa

SEQ ID NO: 58381 - DNA, 15 bp, Homo sapiens
tctcaaaaacattga

SEQ ID NO: 58382 - DNA, 15 bp, Homo sapiens
ttctcaaaaacattg

SEQ ID NO: 58383 - DNA, 15 bp, Homo sapiens
cttctcaaaaacatt

SEQ ID NO: 58384 - DNA, 15 bp, Homo sapiens
gcttctcaaaaacat

SEQ ID NO: 58385 - DNA, 15 bp, Homo sapiens
ggcttctcaaaaaca

SEQ ID NO: 58386 - DNA, 15 bp, Homo sapiens
aggcttctcaaaaac

SEQ ID NO: 58387 - DNA, 15 bp, Homo sapiens
aaggcttctcaaaaa

SEQ ID NO: 58388 - DNA, 15 bp, Homo sapiens
caaggcttctcaaaa

SEQ ID NO: 58389 - DNA, 15 bp, Homo sapiens
gcaaggcttctcaaa

SEQ ID NO: 58390 - DNA, 15 bp, Homo sapiens
agcaaggcttctcaa

SEQ ID NO: 58391 - DNA, 15 bp, Homo sapiens
aagcaaggcttctca

SEQ ID NO: 58392 - DNA, 15 bp, Homo sapiens
taagcaaggcttctc

SEQ ID NO: 58393 - DNA, 15 bp, Homo sapiens
gtaagcaaggcttct

SEQ ID NO: 58394 - DNA, 15 bp, Homo sapiens
tgtaagcaaggcttc

SEQ ID NO: 58395 - DNA, 15 bp, Homo sapiens
atgtaagcaaggctt

SEQ ID NO: 58396 - DNA, 15 bp, Homo sapiens
aatgtaagcaaggct

SEQ ID NO: 58397 - DNA, 15 bp, Homo sapiens
aaatgtaagcaaggc

SEQ ID NO: 58398 - DNA, 15 bp, Homo sapiens
aaaatgtaagcaagg

SEQ ID NO: 58399 - DNA, 15 bp, Homo sapiens
taaaatgtaagcaag

SEQ ID NO: 58400 - DNA, 15 bp, Homo sapiens
ataaaatgtaagcaa

SEQ ID NO: 58401 - DNA, 15 bp, Homo sapiens
cataaaatgtaagca

SEQ ID NO: 58402 - DNA, 15 bp, Homo sapiens
ccataaaatgtaagc

SEQ ID NO: 58403 - DNA, 15 bp, Homo sapiens
accataaaatgtaag

SEQ ID NO: 58404 - DNA, 15 bp, Homo sapiens
caccataaaatgtaa

SEQ ID NO: 58405 - DNA, 15 bp, Homo sapiens
acaccataaaatgta

SEQ ID NO: 58406 - DNA, 15 bp, Homo sapiens
tacaccataaaatgt

SEQ ID NO: 58407 - DNA, 15 bp, Homo sapiens
ctacaccataaaatg

SEQ ID NO: 58408 - DNA, 15 bp, Homo sapiens
actacaccataaaat

SEQ ID NO: 58409 - DNA, 15 bp, Homo sapiens
gactacaccataaaa

SEQ ID NO: 58410 - DNA, 15 bp, Homo sapiens
tgactacaccataaa

SEQ ID NO: 58411 - DNA, 15 bp, Homo sapiens
atgactacaccataa

SEQ ID NO: 58412 - DNA, 15 bp, Homo sapiens
aatgactacaccata

SEQ ID NO: 58413 - DNA, 15 bp, Homo sapiens
caatgactacaccat

SEQ ID NO: 58414 - DNA, 15 bp, Homo sapiens
ccaatgactacacca

SEQ ID NO: 58415 - DNA, 15 bp, Homo sapiens
tccaatgactacacc

SEQ ID NO: 58416 - DNA, 15 bp, Homo sapiens
ttccaatgactacac

SEQ ID NO: 58417 - DNA, 15 bp, Homo sapiens
tttccaatgactaca

SEQ ID NO: 58418 - DNA, 15 bp, Homo sapiens
atttccaatgactac

SEQ ID NO: 58419 - DNA, 15 bp, Homo sapiens
catttccaatgacta

SEQ ID NO: 58420 - DNA, 15 bp, Homo sapiens
ccatttccaatgact

SEQ ID NO: 58421 - DNA, 15 bp, Homo sapiens
tccatttccaatgac

SEQ ID NO: 58422 - DNA, 15 bp, Homo sapiens
ttccatttccaatga

SEQ ID NO: 58423 - DNA, 15 bp, Homo sapiens
tttccatttccaatg

SEQ ID NO: 58424 - DNA, 15 bp, Homo sapiens
ttttccatttccaat

SEQ ID NO: 58425 - DNA, 15 bp, Homo sapiens
tttttccatttccaa

SEQ ID NO: 58426 - DNA, 15 bp, Homo sapiens
atttttccatttcca

SEQ ID NO: 58427 - DNA, 15 bp, Homo sapiens
catttttccatttcc

SEQ ID NO: 58428 - DNA, 15 bp, Homo sapiens
ccatttttccatttc

SEQ ID NO: 58429 - DNA, 15 bp, Homo sapiens
gccatttttccattt

SEQ ID NO: 58430 - DNA, 15 bp, Homo sapiens
tgccatttttccatt

SEQ ID NO: 58431 - DNA, 15 bp, Homo sapiens
atgccatttttccat

SEQ ID NO: 58432 - DNA, 15 bp, Homo sapiens
aatgccatttttcca

SEQ ID NO: 58433 - DNA, 15 bp, Homo sapiens
taatgccatttttcc

SEQ ID NO: 58434 - DNA, 15 bp, Homo sapiens
ataatgccatttttc

SEQ ID NO: 58435 - DNA, 15 bp, Homo sapiens
tataatgccattttt

SEQ ID NO: 58436 - DNA, 15 bp, Homo sapiens
atataatgccatttt

SEQ ID NO: 58437 - DNA, 15 bp, Homo sapiens
tatataatgccattt

SEQ ID NO: 58438 - DNA, 15 bp, Homo sapiens
atatataatgccatt

SEQ ID NO: 58439 - DNA, 15 bp, Homo sapiens
tatatataatgccat

SEQ ID NO: 58440 - DNA, 15 bp, Homo sapiens
atatatataatgcca

SEQ ID NO: 58441 - DNA, 15 bp, Homo sapiens
aatatatataatgcc

SEQ ID NO: 58442 - DNA, 15 bp, Homo sapiens
taatatatataatgc

SEQ ID NO: 58443 - DNA, 15 bp, Homo sapiens
ataatatatataatg

SEQ ID NO: 58444 - DNA, 15 bp, Homo sapiens
tataatatatataat

SEQ ID NO: 58445 - DNA, 15 bp, Homo sapiens
atataatatatataa

SEQ ID NO: 58446 - DNA, 15 bp, Homo sapiens
tatataatatatata

SEQ ID NO: 58447 - DNA, 15 bp, Homo sapiens
atatataatatatat

SEQ ID NO: 58448 - DNA, 15 bp, Homo sapiens
tatatataatatata

SEQ ID NO: 58449 - DNA, 15 bp, Homo sapiens
atatatataatatat

SEQ ID NO: 58450 - DNA, 15 bp, Homo sapiens
tatatatataatata

SEQ ID NO: 58451 - DNA, 15 bp, Homo sapiens
ttatatatataatat

SEQ ID NO: 58452 - DNA, 15 bp, Homo sapiens
tttatatatataata

SEQ ID NO: 58453 - DNA, 15 bp, Homo sapiens
atttatatatataat

SEQ ID NO: 58454 - DNA, 15 bp, Homo sapiens
tatttatatatataa

SEQ ID NO: 58455 - DNA, 15 bp, Homo sapiens
atatttatatatata

SEQ ID NO: 58456 - DNA, 15 bp, Homo sapiens
tatatttatatatat

SEQ ID NO: 58457 - DNA, 15 bp, Homo sapiens
atatatttatatata

SEQ ID NO: 58458 - DNA, 15 bp, Homo sapiens
tatatatttatatat

SEQ ID NO: 58459 - DNA, 15 bp, Homo sapiens
atatatatttatata

SEQ ID NO: 58460 - DNA, 15 bp, Homo sapiens
aatatatatttatat

SEQ ID NO: 58461 - DNA, 15 bp, Homo sapiens
taatatatatttata

SEQ ID NO: 58462 - DNA, 15 bp, Homo sapiens
ataatatatatttat

SEQ ID NO: 58463 - DNA, 15 bp, Homo sapiens
tataatatatattta

SEQ ID NO: 58464 - DNA, 15 bp, Homo sapiens
gtataatatatattt

SEQ ID NO: 58465 - DNA, 15 bp, Homo sapiens
tgtataatatatatt

SEQ ID NO: 58466 - DNA, 15 bp, Homo sapiens
atgtataatatatat

SEQ ID NO: 58467 - DNA, 15 bp, Homo sapiens
tatgtataatatata

SEQ ID NO: 58468 - DNA, 15 bp, Homo sapiens
gtatgtataatatat

SEQ ID NO: 58469 - DNA, 15 bp, Homo sapiens
agtatgtataatata

SEQ ID NO: 58470 - DNA, 15 bp, Homo sapiens
gagtatgtataatat

SEQ ID NO: 58471 - DNA, 15 bp, Homo sapiens
agagtatgtataata

SEQ ID NO: 58472 - DNA, 15 bp, Homo sapiens
gagagtatgtataat

SEQ ID NO: 58473 - DNA, 15 bp, Homo sapiens
ggagagtatgtataa

SEQ ID NO: 58474 - DNA, 15 bp, Homo sapiens
aggagagtatgtata

SEQ ID NO: 58475 - DNA, 15 bp, Homo sapiens
aaggagagtatgtat

SEQ ID NO: 58476 - DNA, 15 bp, Homo sapiens
taaggagagtatgta

SEQ ID NO: 58477 - DNA, 15 bp, Homo sapiens
gtaaggagagtatgt

SEQ ID NO: 58478 - DNA, 15 bp, Homo sapiens
agtaaggagagtatg

SEQ ID NO: 58479 - DNA, 15 bp, Homo sapiens
aagtaaggagagtat

SEQ ID NO: 58480 - DNA, 15 bp, Homo sapiens
aaagtaaggagagta

SEQ ID NO: 58481 - DNA, 15 bp, Homo sapiens
taaagtaaggagagt

SEQ ID NO: 58482 - DNA, 15 bp, Homo sapiens
ataaagtaaggagag

SEQ ID NO: 58483 - DNA, 15 bp, Homo sapiens
aataaagtaaggaga

SEQ ID NO: 58484 - DNA, 15 bp, Homo sapiens
aaataaagtaaggag

SEQ ID NO: 58485 - DNA, 15 bp, Homo sapiens
gaaataaagtaagga

SEQ ID NO: 58486 - DNA, 15 bp, Homo sapiens
tgaaataaagtaagg

SEQ ID NO: 58487 - DNA, 15 bp, Homo sapiens
ctgaaataaagtaag

SEQ ID NO: 58488 - DNA, 15 bp, Homo sapiens
actgaaataaagtaa

SEQ ID NO: 58489 - DNA, 15 bp, Homo sapiens
aactgaaataaagta

SEQ ID NO: 58490 - DNA, 15 bp, Homo sapiens
taactgaaataaagt

SEQ ID NO: 58491 - DNA, 15 bp, Homo sapiens
gtaactgaaataaag

SEQ ID NO: 58492 - DNA, 15 bp, Homo sapiens
ggtaactgaaataaa

SEQ ID NO: 58493 - DNA, 15 bp, Homo sapiens
tggtaactgaaataa

SEQ ID NO: 58494 - DNA, 15 bp, Homo sapiens
atggtaactgaaata

SEQ ID NO: 58495 - DNA, 15 bp, Homo sapiens
gatggtaactgaaat

SEQ ID NO: 58496 - DNA, 15 bp, Homo sapiens
ggatggtaactgaaa

SEQ ID NO: 58497 - DNA, 15 bp, Homo sapiens
gggatggtaactgaa

SEQ ID NO: 58498 - DNA, 15 bp, Homo sapiens
ggggatggtaactga

SEQ ID NO: 58499 - DNA, 15 bp, Homo sapiens
tggggatggtaactg

SEQ ID NO: 58500 - DNA, 15 bp, Homo sapiens
atggggatggtaact

SEQ ID NO: 58501 - DNA, 15 bp, Homo sapiens
tatggggatggtaac

SEQ ID NO: 58502 - DNA, 15 bp, Homo sapiens
ctatggggatggtaa

SEQ ID NO: 58503 - DNA, 15 bp, Homo sapiens
tctatggggatggta

SEQ ID NO: 58504 - DNA, 15 bp, Homo sapiens
ttctatggggatggt

SEQ ID NO: 58505 - DNA, 15 bp, Homo sapiens
attctatggggatgg

SEQ ID NO: 58506 - DNA, 15 bp, Homo sapiens
aattctatggggatg

SEQ ID NO: 58507 - DNA, 15 bp, Homo sapiens
aaattctatggggat

SEQ ID NO: 58508 - DNA, 15 bp, Homo sapiens
caaattctatgggga

SEQ ID NO: 58509 - DNA, 15 bp, Homo sapiens
tcaaattctatgggg

SEQ ID NO: 58510 - DNA, 15 bp, Homo sapiens
gtcaaattctatggg

SEQ ID NO: 58511 - DNA, 15 bp, Homo sapiens
tgtcaaattctatgg

SEQ ID NO: 58512 - DNA, 15 bp, Homo sapiens
ttgtcaaattctatg

SEQ ID NO: 58513 - DNA, 15 bp, Homo sapiens
cttgtcaaattctat

SEQ ID NO: 58514 - DNA, 15 bp, Homo sapiens
tcttgtcaaattcta

SEQ ID NO: 58515 - DNA, 15 bp, Homo sapiens
ttcttgtcaaattct

SEQ ID NO: 58516 - DNA, 15 bp, Homo sapiens
attcttgtcaaattc

SEQ ID NO: 58517 - DNA, 15 bp, Homo sapiens
aattcttgtcaaatt

SEQ ID NO: 58518 - DNA, 15 bp, Homo sapiens
caattcttgtcaaat

SEQ ID NO: 58519 - DNA, 15 bp, Homo sapiens
gcaattcttgtcaaa

SEQ ID NO: 58520 - DNA, 15 bp, Homo sapiens
agcaattcttgtcaa

SEQ ID NO: 58521 - DNA, 15 bp, Homo sapiens
tagcaattcttgtca

SEQ ID NO: 58522 - DNA, 15 bp, Homo sapiens
atagcaattcttgtc

SEQ ID NO: 58523 - DNA, 15 bp, Homo sapiens
catagcaattcttgt

SEQ ID NO: 58524 - DNA, 15 bp, Homo sapiens
tcatagcaattcttg

SEQ ID NO: 58525 - DNA, 15 bp, Homo sapiens
gtcatagcaattctt

SEQ ID NO: 58526 - DNA, 15 bp, Homo sapiens
agtcatagcaattct

SEQ ID NO: 58527 - DNA, 15 bp, Homo sapiens
cagtcatagcaattc

SEQ ID NO: 58528 - DNA, 15 bp, Homo sapiens
tcagtcatagcaatt

SEQ ID NO: 58529 - DNA, 15 bp, Homo sapiens
ttcagtcatagcaat

SEQ ID NO: 58530 - DNA, 15 bp, Homo sapiens
tttcagtcatagcaa

SEQ ID NO: 58531 - DNA, 15 bp, Homo sapiens
ctttcagtcatagca

SEQ ID NO: 58532 - DNA, 15 bp, Homo sapiens
cctttcagtcatagc

SEQ ID NO: 58533 - DNA, 15 bp, Homo sapiens
acctttcagtcatag

SEQ ID NO: 58534 - DNA, 15 bp, Homo sapiens
aacctttcagtcata

SEQ ID NO: 58535 - DNA, 15 bp, Homo sapiens
aaacctttcagtcat

SEQ ID NO: 58536 - DNA, 15 bp, Homo sapiens
aaaacctttcagtca

SEQ ID NO: 58537 - DNA, 15 bp, Homo sapiens
gaaaacctttcagtc

SEQ ID NO: 58538 - DNA, 15 bp, Homo sapiens
cgaaaacctttcagt

SEQ ID NO: 58539 - DNA, 15 bp, Homo sapiens
tcgaaaacctttcag

SEQ ID NO: 58540 - DNA, 15 bp, Homo sapiens
ctcgaaaacctttca

SEQ ID NO: 58541 - DNA, 15 bp, Homo sapiens
actcgaaaacctttc

SEQ ID NO: 58542 - DNA, 15 bp, Homo sapiens
gactcgaaaaccttt

SEQ ID NO: 58543 - DNA, 15 bp, Homo sapiens
ggactcgaaaacctt

SEQ ID NO: 58544 - DNA, 15 bp, Homo sapiens
aggactcgaaaacct

SEQ ID NO: 58545 - DNA, 15 bp, Homo sapiens
taggactcgaaaacc

SEQ ID NO: 58546 - DNA, 15 bp, Homo sapiens
ttaggactcgaaaac

SEQ ID NO: 58547 - DNA, 15 bp, Homo sapiens
attaggactcgaaaa

SEQ ID NO: 58548 - DNA, 15 bp, Homo sapiens
aattaggactcgaaa

SEQ ID NO: 58549 - DNA, 15 bp, Homo sapiens
taattaggactcgaa

SEQ ID NO: 58550 - DNA, 15 bp, Homo sapiens
ttaattaggactcga

SEQ ID NO: 58551 - DNA, 15 bp, Homo sapiens
tttaattaggactcg

SEQ ID NO: 58552 - DNA, 15 bp, Homo sapiens
ttttaattaggactc

SEQ ID NO: 58553 - DNA, 15 bp, Homo sapiens
gttttaattaggact

SEQ ID NO: 58554 - DNA, 15 bp, Homo sapiens
agttttaattaggac

SEQ ID NO: 58555 - DNA, 15 bp, Homo sapiens
aagttttaattagga

SEQ ID NO: 58556 - DNA, 15 bp, Homo sapiens
aaagttttaattagg

SEQ ID NO: 58557 - DNA, 15 bp, Homo sapiens
taaagttttaattag

SEQ ID NO: 58558 - DNA, 15 bp, Homo sapiens
ataaagttttaatta

SEQ ID NO: 58559 - DNA, 15 bp, Homo sapiens
aataaagttttaatt

SEQ ID NO: 58560 - DNA, 15 bp, Homo sapiens
aaataaagttttaat

SEQ ID NO: 58561 - DNA, 15 bp, Homo sapiens
taaataaagttttaa

SEQ ID NO: 58562 - DNA, 15 bp, Homo sapiens
ataaataaagtttta

SEQ ID NO: 58563 - DNA, 15 bp, Homo sapiens
cataaataaagtttt

SEQ ID NO: 58564 - DNA, 15 bp, Homo sapiens
ccataaataaagttt

SEQ ID NO: 58565 - DNA, 15 bp, Homo sapiens
gccataaataaagtt

SEQ ID NO: 58566 - DNA, 15 bp, Homo sapiens
tgccataaataaagt

SEQ ID NO: 58567 - DNA, 15 bp, Homo sapiens
ctgccataaataaag

SEQ ID NO: 58568 - DNA, 15 bp, Homo sapiens
actgccataaataaa

SEQ ID NO: 58569 - DNA, 15 bp, Homo sapiens
tactgccataaataa

SEQ ID NO: 58570 - DNA, 15 bp, Homo sapiens
atactgccataaata

SEQ ID NO: 58571 - DNA, 15 bp, Homo sapiens
aatactgccataaat

SEQ ID NO: 58572 - DNA, 15 bp, Homo sapiens
gaatactgccataaa

SEQ ID NO: 58573 - DNA, 15 bp, Homo sapiens
tgaatactgccataa

SEQ ID NO: 58574 - DNA, 15 bp, Homo sapiens
atgaatactgccata

SEQ ID NO: 58575 - DNA, 15 bp, Homo sapiens
tatgaatactgccat

SEQ ID NO: 58576 - DNA, 15 bp, Homo sapiens
ttatgaatactgcca

SEQ ID NO: 58577 - DNA, 15 bp, Homo sapiens
attatgaatactgcc

SEQ ID NO: 58578 - DNA, 15 bp, Homo sapiens
aattatgaatactgc

SEQ ID NO: 58579 - DNA, 15 bp, Homo sapiens
taattatgaatactg

SEQ ID NO: 58580 - DNA, 15 bp, Homo sapiens
ctaattatgaatact

SEQ ID NO: 58581 - DNA, 15 bp, Homo sapiens
gctaattatgaatac

SEQ ID NO: 58582 - DNA, 15 bp, Homo sapiens
ggctaattatgaata

SEQ ID NO: 58583 - DNA, 15 bp, Homo sapiens
aggctaattatgaat

SEQ ID NO: 58584 - DNA, 15 bp, Homo sapiens
caggctaattatgaa

SEQ ID NO: 58585 - DNA, 15 bp, Homo sapiens
tcaggctaattatga

SEQ ID NO: 58586 - DNA, 15 bp, Homo sapiens
ttcaggctaattatg

SEQ ID NO: 58587 - DNA, 15 bp, Homo sapiens
tttcaggctaattat

SEQ ID NO: 58588 - DNA, 15 bp, Homo sapiens
atttcaggctaatta

SEQ ID NO: 58589 - DNA, 15 bp, Homo sapiens
catttcaggctaatt

SEQ ID NO: 58590 - DNA, 15 bp, Homo sapiens
gcatttcaggctaat

SEQ ID NO: 58591 - DNA, 15 bp, Homo sapiens
tgcatttcaggctaa

SEQ ID NO: 58592 - DNA, 15 bp, Homo sapiens
atgcatttcaggcta

SEQ ID NO: 58593 - DNA, 15 bp, Homo sapiens
aatgcatttcaggct

SEQ ID NO: 58594 - DNA, 15 bp, Homo sapiens
gaatgcatttcaggc

SEQ ID NO: 58595 - DNA, 15 bp, Homo sapiens
agaatgcatttcagg

SEQ ID NO: 58596 - DNA, 15 bp, Homo sapiens
cagaatgcatttcag

SEQ ID NO: 58597 - DNA, 15 bp, Homo sapiens
acagaatgcatttca

SEQ ID NO: 58598 - DNA, 15 bp, Homo sapiens
tacagaatgcatttc

SEQ ID NO: 58599 - DNA, 15 bp, Homo sapiens
ctacagaatgcattt

SEQ ID NO: 58600 - DNA, 15 bp, Homo sapiens
cctacagaatgcatt

SEQ ID NO: 58601 - DNA, 15 bp, Homo sapiens
acctacagaatgcat

SEQ ID NO: 58602 - DNA, 15 bp, Homo sapiens
tacctacagaatgca

SEQ ID NO: 58603 - DNA, 15 bp, Homo sapiens
ttacctacagaatgc

SEQ ID NO: 58604 - DNA, 15 bp, Homo sapiens
attacctacagaatg

SEQ ID NO: 58605 - DNA, 15 bp, Homo sapiens
gattacctacagaat

SEQ ID NO: 58606 - DNA, 15 bp, Homo sapiens
agattacctacagaa

SEQ ID NO: 58607 - DNA, 15 bp, Homo sapiens
gagattacctacaga

SEQ ID NO: 58608 - DNA, 15 bp, Homo sapiens
agagattacctacag

SEQ ID NO: 58609 - DNA, 15 bp, Homo sapiens
cagagattacctaca

SEQ ID NO: 58610 - DNA, 15 bp, Homo sapiens
tcagagattacctac

SEQ ID NO: 58611 - DNA, 15 bp, Homo sapiens
ctcagagattaccta

SEQ ID NO: 58612 - DNA, 15 bp, Homo sapiens
actcagagattacct

SEQ ID NO: 58613 - DNA, 15 bp, Homo sapiens
aactcagagattacc

SEQ ID NO: 58614 - DNA, 15 bp, Homo sapiens
aaactcagagattac

SEQ ID NO: 58615 - DNA, 15 bp, Homo sapiens
gaaactcagagatta

SEQ ID NO: 58616 - DNA, 15 bp, Homo sapiens
agaaactcagagatt

SEQ ID NO: 58617 - DNA, 15 bp, Homo sapiens
cagaaactcagagat

SEQ ID NO: 58618 - DNA, 15 bp, Homo sapiens
ccagaaactcagaga

SEQ ID NO: 58619 - DNA, 15 bp, Homo sapiens
tccagaaactcagag

SEQ ID NO: 58620 - DNA, 15 bp, Homo sapiens
ttccagaaactcaga

SEQ ID NO: 58621 - DNA, 15 bp, Homo sapiens
attccagaaactcag

SEQ ID NO: 58622 - DNA, 15 bp, Homo sapiens
tattccagaaactca

SEQ ID NO: 58623 - DNA, 15 bp, Homo sapiens
atattccagaaactc

SEQ ID NO: 58624 - DNA, 15 bp, Homo sapiens
aatattccagaaact

SEQ ID NO: 58625 - DNA, 15 bp, Homo sapiens
aaatattccagaaac

SEQ ID NO: 58626 - DNA, 15 bp, Homo sapiens
aaaatattccagaaa

SEQ ID NO: 58627 - DNA, 15 bp, Homo sapiens
gaaaatattccagaa

SEQ ID NO: 58628 - DNA, 15 bp, Homo sapiens
agaaaatattccaga

SEQ ID NO: 58629 - DNA, 15 bp, Homo sapiens
aagaaaatattccag

SEQ ID NO: 58630 - DNA, 15 bp, Homo sapiens
taagaaaatattcca

SEQ ID NO: 58631 - DNA, 15 bp, Homo sapiens
ctaagaaaatattcc

SEQ ID NO: 58632 - DNA, 15 bp, Homo sapiens
tctaagaaaatattc

SEQ ID NO: 58633 - DNA, 15 bp, Homo sapiens
gtctaagaaaatatt

SEQ ID NO: 58634 - DNA, 15 bp, Homo sapiens
agtctaagaaaatat

SEQ ID NO: 58635 - DNA, 15 bp, Homo sapiens
aagtctaagaaaata

SEQ ID NO: 58636 - DNA, 15 bp, Homo sapiens
aaagtctaagaaaat

SEQ ID NO: 58637 - DNA, 15 bp, Homo sapiens
aaaagtctaagaaaa

SEQ ID NO: 58638 - DNA, 15 bp, Homo sapiens
aaaaagtctaagaaa

SEQ ID NO: 58639 - DNA, 15 bp, Homo sapiens
caaaaagtctaagaa

SEQ ID NO: 58640 - DNA, 15 bp, Homo sapiens
ccaaaaagtctaaga

SEQ ID NO: 58641 - DNA, 15 bp, Homo sapiens
tccaaaaagtctaag

SEQ ID NO: 58642 - DNA, 15 bp, Homo sapiens
atccaaaaagtctaa

SEQ ID NO: 58643 - DNA, 15 bp, Homo sapiens
catccaaaaagtcta

SEQ ID NO: 58644 - DNA, 15 bp, Homo sapiens
acatccaaaaagtct

SEQ ID NO: 58645 - DNA, 15 bp, Homo sapiens
cacatccaaaaagtc

SEQ ID NO: 58646 - DNA, 15 bp, Homo sapiens
gcacatccaaaaagt

SEQ ID NO: 58647 - DNA, 15 bp, Homo sapiens
tgcacatccaaaaag

SEQ ID NO: 58648 - DNA, 15 bp, Homo sapiens
ctgcacatccaaaaa

SEQ ID NO: 58649 - DNA, 15 bp, Homo sapiens
gctgcacatccaaaa

SEQ ID NO: 58650 - DNA, 15 bp, Homo sapiens
tgctgcacatccaaa

SEQ ID NO: 58651 - DNA, 15 bp, Homo sapiens
ctgctgcacatccaa

SEQ ID NO: 58652 - DNA, 15 bp, Homo sapiens
gctgctgcacatcca

SEQ ID NO: 58653 - DNA, 15 bp, Homo sapiens
agctgctgcacatcc

SEQ ID NO: 58654 - DNA, 15 bp, Homo sapiens
aagctgctgcacatc

SEQ ID NO: 58655 - DNA, 15 bp, Homo sapiens
taagctgctgcacat

SEQ ID NO: 58656 - DNA, 15 bp, Homo sapiens
gtaagctgctgcaca

SEQ ID NO: 58657 - DNA, 15 bp, Homo sapiens
tgtaagctgctgcac

SEQ ID NO: 58658 - DNA, 15 bp, Homo sapiens
atgtaagctgctgca

SEQ ID NO: 58659 - DNA, 15 bp, Homo sapiens
catgtaagctgctgc

SEQ ID NO: 58660 - DNA, 15 bp, Homo sapiens
acatgtaagctgctg

SEQ ID NO: 58661 - DNA, 15 bp, Homo sapiens
gacatgtaagctgct

SEQ ID NO: 58662 - DNA, 15 bp, Homo sapiens
agacatgtaagctgc

SEQ ID NO: 58663 - DNA, 15 bp, Homo sapiens
cagacatgtaagctg

SEQ ID NO: 58664 - DNA, 15 bp, Homo sapiens
tcagacatgtaagct

SEQ ID NO: 58665 - DNA, 15 bp, Homo sapiens
ttcagacatgtaagc

SEQ ID NO: 58666 - DNA, 15 bp, Homo sapiens
cttcagacatgtaag

SEQ ID NO: 58667 - DNA, 15 bp, Homo sapiens
acttcagacatgtaa

SEQ ID NO: 58668 - DNA, 15 bp, Homo sapiens
aacttcagacatgta

SEQ ID NO: 58669 - DNA, 15 bp, Homo sapiens
taacttcagacatgt

SEQ ID NO: 58670 - DNA, 15 bp, Homo sapiens
gtaacttcagacatg

SEQ ID NO: 58671 - DNA, 15 bp, Homo sapiens
agtaacttcagacat

SEQ ID NO: 58672 - DNA, 15 bp, Homo sapiens
aagtaacttcagaca

SEQ ID NO: 58673 - DNA, 15 bp, Homo sapiens
caagtaacttcagac

SEQ ID NO: 58674 - DNA, 15 bp, Homo sapiens
tcaagtaacttcaga

SEQ ID NO: 58675 - DNA, 15 bp, Homo sapiens
ttcaagtaacttcag

SEQ ID NO: 58676 - DNA, 15 bp, Homo sapiens
cttcaagtaacttca

SEQ ID NO: 58677 - DNA, 15 bp, Homo sapiens
ccttcaagtaacttc

SEQ ID NO: 58678 - DNA, 15 bp, Homo sapiens
gccttcaagtaactt

SEQ ID NO: 58679 - DNA, 15 bp, Homo sapiens
tgccttcaagtaact

SEQ ID NO: 58680 - DNA, 15 bp, Homo sapiens
atgccttcaagtaac

SEQ ID NO: 58681 - DNA, 15 bp, Homo sapiens
gatgccttcaagtaa

SEQ ID NO: 58682 - DNA, 15 bp, Homo sapiens
tgatgccttcaagta

SEQ ID NO: 58683 - DNA, 15 bp, Homo sapiens
gtgatgccttcaagt

SEQ ID NO: 58684 - DNA, 15 bp, Homo sapiens
agtgatgccttcaag

SEQ ID NO: 58685 - DNA, 15 bp, Homo sapiens
aagtgatgccttcaa

SEQ ID NO: 58686 - DNA, 15 bp, Homo sapiens
aaagtgatgccttca

SEQ ID NO: 58687 - DNA, 15 bp, Homo sapiens
aaaagtgatgccttc

SEQ ID NO: 58688 - DNA, 15 bp, Homo sapiens
taaaagtgatgcctt

SEQ ID NO: 58689 - DNA, 15 bp, Homo sapiens
ttaaaagtgatgcct

SEQ ID NO: 58690 - DNA, 15 bp, Homo sapiens
cttaaaagtgatgcc

SEQ ID NO: 58691 - DNA, 15 bp, Homo sapiens
tcttaaaagtgatgc

SEQ ID NO: 58692 - DNA, 15 bp, Homo sapiens
ttcttaaaagtgatg

SEQ ID NO: 58693 - DNA, 15 bp, Homo sapiens
tttcttaaaagtgat

SEQ ID NO: 58694 - DNA, 15 bp, Homo sapiens
ctttcttaaaagtga

SEQ ID NO: 58695 - DNA, 15 bp, Homo sapiens
gctttcttaaaagtg

SEQ ID NO: 58696 - DNA, 15 bp, Homo sapiens
agctttcttaaaagt

SEQ ID NO: 58697 - DNA, 15 bp, Homo sapiens
aagctttcttaaaag

SEQ ID NO: 58698 - DNA, 15 bp, Homo sapiens
taagctttcttaaaa

SEQ ID NO: 58699 - DNA, 15 bp, Homo sapiens
gtaagctttcttaaa

SEQ ID NO: 58700 - DNA, 15 bp, Homo sapiens
tgtaagctttcttaa

SEQ ID NO: 58701 - DNA, 15 bp, Homo sapiens
ctgtaagctttctta

SEQ ID NO: 58702 - DNA, 15 bp, Homo sapiens
actgtaagctttctt

SEQ ID NO: 58703 - DNA, 15 bp, Homo sapiens
aactgtaagctttct

SEQ ID NO: 58704 - DNA, 15 bp, Homo sapiens
caactgtaagctttc

SEQ ID NO: 58705 - DNA, 15 bp, Homo sapiens
ccaactgtaagcttt

SEQ ID NO: 58706 - DNA, 15 bp, Homo sapiens
cccaactgtaagctt

SEQ ID NO: 58707 - DNA, 15 bp, Homo sapiens
gcccaactgtaagct

SEQ ID NO: 58708 - DNA, 15 bp, Homo sapiens
ggcccaactgtaagc

SEQ ID NO: 58709 - DNA, 15 bp, Homo sapiens
gggcccaactgtaag

SEQ ID NO: 58710 - DNA, 15 bp, Homo sapiens
agggcccaactgtaa

SEQ ID NO: 58711 - DNA, 15 bp, Homo sapiens
cagggcccaactgta

SEQ ID NO: 58712 - DNA, 15 bp, Homo sapiens
acagggcccaactgt

SEQ ID NO: 58713 - DNA, 15 bp, Homo sapiens
tacagggcccaactg

SEQ ID NO: 58714 - DNA, 15 bp, Homo sapiens
gtacagggcccaact

SEQ ID NO: 58715 - DNA, 15 bp, Homo sapiens
ggtacagggcccaac

SEQ ID NO: 58716 - DNA, 15 bp, Homo sapiens
tggtacagggcccaa

SEQ ID NO: 58717 - DNA, 15 bp, Homo sapiens
atggtacagggccca

SEQ ID NO: 58718 - DNA, 15 bp, Homo sapiens
gatggtacagggccc

SEQ ID NO: 58719 - DNA, 15 bp, Homo sapiens
ggatggtacagggcc

SEQ ID NO: 58720 - DNA, 15 bp, Homo sapiens
gggatggtacagggc

SEQ ID NO: 58721 - DNA, 15 bp, Homo sapiens
tgggatggtacaggg

SEQ ID NO: 58722 - DNA, 15 bp, Homo sapiens
ttgggatggtacagg

SEQ ID NO: 58723 - DNA, 15 bp, Homo sapiens
cttgggatggtacag

SEQ ID NO: 58724 - DNA, 15 bp, Homo sapiens
acttgggatggtaca

SEQ ID NO: 58725 - DNA, 15 bp, Homo sapiens
gacttgggatggtac

SEQ ID NO: 58726 - DNA, 15 bp, Homo sapiens
ggacttgggatggta

SEQ ID NO: 58727 - DNA, 15 bp, Homo sapiens
aggacttgggatggt

SEQ ID NO: 58728 - DNA, 15 bp, Homo sapiens
aaggacttgggatgg

SEQ ID NO: 58729 - DNA, 15 bp, Homo sapiens
aaaggacttgggatg

SEQ ID NO: 58730 - DNA, 15 bp, Homo sapiens
caaaggacttgggat

SEQ ID NO: 58731 - DNA, 15 bp, Homo sapiens
acaaaggacttggga

SEQ ID NO: 58732 - DNA, 15 bp, Homo sapiens
tacaaaggacttggg

SEQ ID NO: 58733 - DNA, 15 bp, Homo sapiens
ctacaaaggacttgg

SEQ ID NO: 58734 - DNA, 15 bp, Homo sapiens
gctacaaaggacttg

SEQ ID NO: 58735 - DNA, 15 bp, Homo sapiens
agctacaaaggactt

SEQ ID NO: 58736 - DNA, 15 bp, Homo sapiens
gagctacaaaggact

SEQ ID NO: 58737 - DNA, 15 bp, Homo sapiens
ggagctacaaaggac

SEQ ID NO: 58738 - DNA, 15 bp, Homo sapiens
aggagctacaaagga

SEQ ID NO: 58739 - DNA, 15 bp, Homo sapiens
gaggagctacaaagg

SEQ ID NO: 58740 - DNA, 15 bp, Homo sapiens
agaggagctacaaag

SEQ ID NO: 58741 - DNA, 15 bp, Homo sapiens
aagaggagctacaaa

SEQ ID NO: 58742 - DNA, 15 bp, Homo sapiens
caagaggagctacaa

SEQ ID NO: 58743 - DNA, 15 bp, Homo sapiens
tcaagaggagctaca

SEQ ID NO: 58744 - DNA, 15 bp, Homo sapiens
ttcaagaggagctac

SEQ ID NO: 58745 - DNA, 15 bp, Homo sapiens
gttcaagaggagcta

SEQ ID NO: 58746 - DNA, 15 bp, Homo sapiens
tgttcaagaggagct

SEQ ID NO: 58747 - DNA, 15 bp, Homo sapiens
atgttcaagaggagc

SEQ ID NO: 58748 - DNA, 15 bp, Homo sapiens
catgttcaagaggag

SEQ ID NO: 58749 - DNA, 15 bp, Homo sapiens
acatgttcaagagga

SEQ ID NO: 58750 - DNA, 15 bp, Homo sapiens
aacatgttcaagagg

SEQ ID NO: 58751 - DNA, 15 bp, Homo sapiens
aaacatgttcaagag

SEQ ID NO: 58752 - DNA, 15 bp, Homo sapiens
caaacatgttcaaga

SEQ ID NO: 58753 - DNA, 15 bp, Homo sapiens
gcaaacatgttcaag

SEQ ID NO: 58754 - DNA, 15 bp, Homo sapiens
ggcaaacatgttcaa

SEQ ID NO: 58755 - DNA, 15 bp, Homo sapiens
tggcaaacatgttca

SEQ ID NO: 58756 - DNA, 15 bp, Homo sapiens
atggcaaacatgttc

SEQ ID NO: 58757 - DNA, 15 bp, Homo sapiens
tatggcaaacatgtt

SEQ ID NO: 58758 - DNA, 15 bp, Homo sapiens
gtatggcaaacatgt

SEQ ID NO: 58759 - DNA, 15 bp, Homo sapiens
agtatggcaaacatg

SEQ ID NO: 58760 - DNA, 15 bp, Homo sapiens
aagtatggcaaacat

SEQ ID NO: 58761 - DNA, 15 bp, Homo sapiens
aaagtatggcaaaca

SEQ ID NO: 58762 - DNA, 15 bp, Homo sapiens
aaaagtatggcaaac

SEQ ID NO: 58763 - DNA, 15 bp, Homo sapiens
taaaagtatggcaaa

SEQ ID NO: 58764 - DNA, 15 bp, Homo sapiens
ttaaaagtatggcaa

SEQ ID NO: 58765 - DNA, 15 bp, Homo sapiens
tttaaaagtatggca

SEQ ID NO: 58766 - DNA, 15 bp, Homo sapiens
ttttaaaagtatggc

SEQ ID NO: 58767 - DNA, 15 bp, Homo sapiens
cttttaaaagtatgg

SEQ ID NO: 58768 - DNA, 15 bp, Homo sapiens
ccttttaaaagtatg

SEQ ID NO: 58769 - DNA, 15 bp, Homo sapiens
cccttttaaaagtat

SEQ ID NO: 58770 - DNA, 15 bp, Homo sapiens
acccttttaaaagta

SEQ ID NO: 58771 - DNA, 15 bp, Homo sapiens
tacccttttaaaagt

SEQ ID NO: 58772 - DNA, 15 bp, Homo sapiens
ctacccttttaaaag

SEQ ID NO: 58773 - DNA, 15 bp, Homo sapiens
actacccttttaaaa

SEQ ID NO: 58774 - DNA, 15 bp, Homo sapiens
aactacccttttaaa

SEQ ID NO: 58775 - DNA, 15 bp, Homo sapiens
caactacccttttaa

SEQ ID NO: 58776 - DNA, 15 bp, Homo sapiens
tcaactaccctttta

SEQ ID NO: 58777 - DNA, 15 bp, Homo sapiens
ttcaactaccctttt

SEQ ID NO: 58778 - DNA, 15 bp, Homo sapiens
attcaactacccttt

SEQ ID NO: 58779 - DNA, 15 bp, Homo sapiens
tattcaactaccctt

SEQ ID NO: 58780 - DNA, 15 bp, Homo sapiens
ttattcaactaccct

SEQ ID NO: 58781 - DNA, 15 bp, Homo sapiens
tttattcaactaccc

SEQ ID NO: 58782 - DNA, 15 bp, Homo sapiens
atttattcaactacc

SEQ ID NO: 58783 - DNA, 15 bp, Homo sapiens
tatttattcaactac

SEQ ID NO: 58784 - DNA, 15 bp, Homo sapiens
ctatttattcaacta

SEQ ID NO: 58785 - DNA, 15 bp, Homo sapiens
gctatttattcaact

SEQ ID NO: 58786 - DNA, 15 bp, Homo sapiens
tgctatttattcaac

SEQ ID NO: 58787 - DNA, 15 bp, Homo sapiens
atgctatttattcaa

SEQ ID NO: 58788 - DNA, 15 bp, Homo sapiens
gatgctatttattca

SEQ ID NO: 58789 - DNA, 15 bp, Homo sapiens
tgatgctatttattc

SEQ ID NO: 58790 - DNA, 15 bp, Homo sapiens
gtgatgctatttatt

SEQ ID NO: 58791 - DNA, 15 bp, Homo sapiens
ggtgatgctatttat

SEQ ID NO: 58792 - DNA, 15 bp, Homo sapiens
tggtgatgctattta

SEQ ID NO: 58793 - DNA, 15 bp, Homo sapiens
atggtgatgctattt

SEQ ID NO: 58794 - DNA, 15 bp, Homo sapiens
aatggtgatgctatt

SEQ ID NO: 58795 - DNA, 15 bp, Homo sapiens
gaatggtgatgctat

SEQ ID NO: 58796 - DNA, 15 bp, Homo sapiens
agaatggtgatgcta

SEQ ID NO: 58797 - DNA, 15 bp, Homo sapiens
aagaatggtgatgct

SEQ ID NO: 58798 - DNA, 15 bp, Homo sapiens
aaagaatggtgatgc

SEQ ID NO: 58799 - DNA, 15 bp, Homo sapiens
caaagaatggtgatg

SEQ ID NO: 58800 - DNA, 15 bp, Homo sapiens
gcaaagaatggtgat

SEQ ID NO: 58801 - DNA, 15 bp, Homo sapiens
agcaaagaatggtga

SEQ ID NO: 58802 - DNA, 15 bp, Homo sapiens
cagcaaagaatggtg

SEQ ID NO: 58803 - DNA, 15 bp, Homo sapiens
acagcaaagaatggt

SEQ ID NO: 58804 - DNA, 15 bp, Homo sapiens
cacagcaaagaatgg

SEQ ID NO: 58805 - DNA, 15 bp, Homo sapiens
ccacagcaaagaatg

SEQ ID NO: 58806 - DNA, 15 bp, Homo sapiens
gccacagcaaagaat

SEQ ID NO: 58807 - DNA, 15 bp, Homo sapiens
tgccacagcaaagaa

SEQ ID NO: 58808 - DNA, 15 bp, Homo sapiens
gtgccacagcaaaga

SEQ ID NO: 58809 - DNA, 15 bp, Homo sapiens
tgtgccacagcaaag

SEQ ID NO: 58810 - DNA, 15 bp, Homo sapiens
ctgtgccacagcaaa

SEQ ID NO: 58811 - DNA, 15 bp, Homo sapiens
cctgtgccacagcaa

SEQ ID NO: 58812 - DNA, 15 bp, Homo sapiens
acctgtgccacagca

SEQ ID NO: 58813 - DNA, 15 bp, Homo sapiens
aacctgtgccacagc

SEQ ID NO: 58814 - DNA, 15 bp, Homo sapiens
taacctgtgccacag

SEQ ID NO: 58815 - DNA, 15 bp, Homo sapiens
ataacctgtgccaca

SEQ ID NO: 58816 - DNA, 15 bp, Homo sapiens
tataacctgtgccac

SEQ ID NO: 58817 - DNA, 15 bp, Homo sapiens
ttataacctgtgcca

SEQ ID NO: 58818 - DNA, 15 bp, Homo sapiens
tttataacctgtgcc

SEQ ID NO: 58819 - DNA, 15 bp, Homo sapiens
gtttataacctgtgc

SEQ ID NO: 58820 - DNA, 15 bp, Homo sapiens
agtttataacctgtg

SEQ ID NO: 58821 - DNA, 15 bp, Homo sapiens
aagtttataacctgt

SEQ ID NO: 58822 - DNA, 15 bp, Homo sapiens
taagtttataacctg

SEQ ID NO: 58823 - DNA, 15 bp, Homo sapiens
ttaagtttataacct

SEQ ID NO: 58824 - DNA, 15 bp, Homo sapiens
cttaagtttataacc

SEQ ID NO: 58825 - DNA, 15 bp, Homo sapiens
acttaagtttataac

SEQ ID NO: 58826 - DNA, 15 bp, Homo sapiens
cacttaagtttataa

SEQ ID NO: 58827 - DNA, 15 bp, Homo sapiens
ccacttaagtttata

SEQ ID NO: 58828 - DNA, 15 bp, Homo sapiens
tccacttaagtttat

SEQ ID NO: 58829 - DNA, 15 bp, Homo sapiens
ctccacttaagttta

SEQ ID NO: 58830 - DNA, 15 bp, Homo sapiens
actccacttaagttt

SEQ ID NO: 58831 - DNA, 15 bp, Homo sapiens
aactccacttaagtt

SEQ ID NO: 58832 - DNA, 15 bp, Homo sapiens
aaactccacttaagt

SEQ ID NO: 58833 - DNA, 15 bp, Homo sapiens
taaactccacttaag

SEQ ID NO: 58834 - DNA, 15 bp, Homo sapiens
gtaaactccacttaa

SEQ ID NO: 58835 - DNA, 15 bp, Homo sapiens
ggtaaactccactta

SEQ ID NO: 58836 - DNA, 15 bp, Homo sapiens
cggtaaactccactt

SEQ ID NO: 58837 - DNA, 15 bp, Homo sapiens
ccggtaaactccact

SEQ ID NO: 58838 - DNA, 15 bp, Homo sapiens
gccggtaaactccac

SEQ ID NO: 58839 - DNA, 15 bp, Homo sapiens
tgccggtaaactcca

SEQ ID NO: 58840 - DNA, 15 bp, Homo sapiens
ctgccggtaaactcc

SEQ ID NO: 58841 - DNA, 15 bp, Homo sapiens
gctgccggtaaactc

SEQ ID NO: 58842 - DNA, 15 bp, Homo sapiens
tgctgccggtaaact

SEQ ID NO: 58843 - DNA, 15 bp, Homo sapiens
atgctgccggtaaac

SEQ ID NO: 58844 - DNA, 15 bp, Homo sapiens
gatgctgccggtaaa

SEQ ID NO: 58845 - DNA, 15 bp, Homo sapiens
tgatgctgccggtaa

SEQ ID NO: 58846 - DNA, 15 bp, Homo sapiens
ttgatgctgccggta

SEQ ID NO: 58847 - DNA, 15 bp, Homo sapiens
tttgatgctgccggt

SEQ ID NO: 58848 - DNA, 15 bp, Homo sapiens
atttgatgctgccgg

SEQ ID NO: 58849 - DNA, 15 bp, Homo sapiens
catttgatgctgccg

SEQ ID NO: 58850 - DNA, 15 bp, Homo sapiens
acatttgatgctgcc

SEQ ID NO: 58851 - DNA, 15 bp, Homo sapiens
aacatttgatgctgc

SEQ ID NO: 58852 - DNA, 15 bp, Homo sapiens
aaacatttgatgctg

SEQ ID NO: 58853 - DNA, 15 bp, Homo sapiens
gaaacatttgatgct

SEQ ID NO: 58854 - DNA, 15 bp, Homo sapiens
tgaaacatttgatgc

SEQ ID NO: 58855 - DNA, 15 bp, Homo sapiens
ctgaaacatttgatg

SEQ ID NO: 58856 - DNA, 15 bp, Homo sapiens
gctgaaacatttgat

SEQ ID NO: 58857 - DNA, 15 bp, Homo sapiens
agctgaaacatttga

SEQ ID NO: 58858 - DNA, 15 bp, Homo sapiens
aagctgaaacatttg

SEQ ID NO: 58859 - DNA, 15 bp, Homo sapiens
aaagctgaaacattt

SEQ ID NO: 58860 - DNA, 15 bp, Homo sapiens
taaagctgaaacatt

SEQ ID NO: 58861 - DNA, 15 bp, Homo sapiens
ttaaagctgaaacat

SEQ ID NO: 58862 - DNA, 15 bp, Homo sapiens
tttaaagctgaaaca

SEQ ID NO: 58863 - DNA, 15 bp, Homo sapiens
ttttaaagctgaaac

SEQ ID NO: 58864 - DNA, 15 bp, Homo sapiens
tttttaaagctgaaa

SEQ ID NO: 58865 - DNA, 15 bp, Homo sapiens
ttttttaaagctgaa

SEQ ID NO: 58866 - DNA, 15 bp, Homo sapiens
attttttaaagctga

SEQ ID NO: 58867 - DNA, 15 bp, Homo sapiens
tattttttaaagctg

SEQ ID NO: 58868 - DNA, 15 bp, Homo sapiens
ttattttttaaagct

SEQ ID NO: 58869 - DNA, 15 bp, Homo sapiens
tttattttttaaagc

SEQ ID NO: 58870 - DNA, 15 bp, Homo sapiens
ttttattttttaaag

SEQ ID NO: 58871 - DNA, 15 bp, Homo sapiens
cttttattttttaaa

SEQ ID NO: 58872 - DNA, 15 bp, Homo sapiens
acttttattttttaa

SEQ ID NO: 58873 - DNA, 15 bp, Homo sapiens
tacttttatttttta

SEQ ID NO: 58874 - DNA, 15 bp, Homo sapiens
ctacttttatttttt

SEQ ID NO: 58875 - DNA, 15 bp, Homo sapiens
cctacttttattttt

SEQ ID NO: 58876 - DNA, 15 bp, Homo sapiens
ccctacttttatttt

SEQ ID NO: 58877 - DNA, 15 bp, Homo sapiens
accctacttttattt

SEQ ID NO: 58878 - DNA, 15 bp, Homo sapiens
taccctacttttatt

SEQ ID NO: 58879 - DNA, 15 bp, Homo sapiens
gtaccctacttttat

SEQ ID NO: 58880 - DNA, 15 bp, Homo sapiens
tgtaccctactttta

SEQ ID NO: 58881 - DNA, 15 bp, Homo sapiens
ttgtaccctactttt

SEQ ID NO: 58882 - DNA, 15 bp, Homo sapiens
cttgtaccctacttt

SEQ ID NO: 58883 - DNA, 15 bp, Homo sapiens
acttgtaccctactt

SEQ ID NO: 58884 - DNA, 15 bp, Homo sapiens
aacttgtaccctact

SEQ ID NO: 58885 - DNA, 15 bp, Homo sapiens
aaacttgtaccctac

SEQ ID NO: 58886 - DNA, 15 bp, Homo sapiens
taaacttgtacccta

SEQ ID NO: 58887 - DNA, 15 bp, Homo sapiens
ttaaacttgtaccct

SEQ ID NO: 58888 - DNA, 15 bp, Homo sapiens
attaaacttgtaccc

SEQ ID NO: 58889 - DNA, 15 bp, Homo sapiens
cattaaacttgtacc

SEQ ID NO: 58890 - DNA, 15 bp, Homo sapiens
acattaaacttgtac

SEQ ID NO: 58891 - DNA, 15 bp, Homo sapiens
aacattaaacttgta

SEQ ID NO: 58892 - DNA, 15 bp, Homo sapiens
aaacattaaacttgt

SEQ ID NO: 58893 - DNA, 15 bp, Homo sapiens
taaacattaaacttg

SEQ ID NO: 58894 - DNA, 15 bp, Homo sapiens
ctaaacattaaactt

SEQ ID NO: 58895 - DNA, 15 bp, Homo sapiens
actaaacattaaact

SEQ ID NO: 58896 - DNA, 15 bp, Homo sapiens
aactaaacattaaac

SEQ ID NO: 58897 - DNA, 15 bp, Homo sapiens
gaactaaacattaaa

SEQ ID NO: 58898 - DNA, 15 bp, Homo sapiens
agaactaaacattaa

SEQ ID NO: 58899 - DNA, 15 bp, Homo sapiens
tagaactaaacatta

SEQ ID NO: 58900 - DNA, 15 bp, Homo sapiens
ctagaactaaacatt

SEQ ID NO: 58901 - DNA, 15 bp, Homo sapiens
tctagaactaaacat

SEQ ID NO: 58902 - DNA, 15 bp, Homo sapiens
ttctagaactaaaca

SEQ ID NO: 58903 - DNA, 15 bp, Homo sapiens
tttctagaactaaac

SEQ ID NO: 58904 - DNA, 15 bp, Homo sapiens
atttctagaactaaa

SEQ ID NO: 58905 - DNA, 15 bp, Homo sapiens
aatttctagaactaa

SEQ ID NO: 58906 - DNA, 15 bp, Homo sapiens
aaatttctagaacta

SEQ ID NO: 58907 - DNA, 15 bp, Homo sapiens
aaaatttctagaact

SEQ ID NO: 58908 - DNA, 15 bp, Homo sapiens
caaaatttctagaac

SEQ ID NO: 58909 - DNA, 15 bp, Homo sapiens
acaaaatttctagaa

SEQ ID NO: 58910 - DNA, 15 bp, Homo sapiens
cacaaaatttctaga

SEQ ID NO: 58911 - DNA, 15 bp, Homo sapiens
gcacaaaatttctag

SEQ ID NO: 58912 - DNA, 15 bp, Homo sapiens
tgcacaaaatttcta

SEQ ID NO: 58913 - DNA, 15 bp, Homo sapiens
ttgcacaaaatttct

SEQ ID NO: 58914 - DNA, 15 bp, Homo sapiens
attgcacaaaatttc

SEQ ID NO: 58915 - DNA, 15 bp, Homo sapiens
tattgcacaaaattt

SEQ ID NO: 58916 - DNA, 15 bp, Homo sapiens
atattgcacaaaatt

SEQ ID NO: 58917 - DNA, 15 bp, Homo sapiens
catattgcacaaaat

SEQ ID NO: 58918 - DNA, 15 bp, Homo sapiens
acatattgcacaaaa

SEQ ID NO: 58919 - DNA, 15 bp, Homo sapiens
aacatattgcacaaa

SEQ ID NO: 58920 - DNA, 15 bp, Homo sapiens
gaacatattgcacaa

SEQ ID NO: 58921 - DNA, 15 bp, Homo sapiens
tgaacatattgcaca

SEQ ID NO: 58922 - DNA, 15 bp, Homo sapiens
atgaacatattgcac

SEQ ID NO: 58923 - DNA, 15 bp, Homo sapiens
tatgaacatattgca

SEQ ID NO: 58924 - DNA, 15 bp, Homo sapiens
ttatgaacatattgc

SEQ ID NO: 58925 - DNA, 15 bp, Homo sapiens
gttatgaacatattg

SEQ ID NO: 58926 - DNA, 15 bp, Homo sapiens
cgttatgaacatatt

SEQ ID NO: 58927 - DNA, 15 bp, Homo sapiens
tcgttatgaacatat

SEQ ID NO: 58928 - DNA, 15 bp, Homo sapiens
atcgttatgaacata

SEQ ID NO: 58929 - DNA, 15 bp, Homo sapiens
catcgttatgaacat

SEQ ID NO: 58930 - DNA, 15 bp, Homo sapiens
ccatcgttatgaaca

SEQ ID NO: 58931 - DNA, 15 bp, Homo sapiens
gccatcgttatgaac

SEQ ID NO: 58932 - DNA, 15 bp, Homo sapiens
agccatcgttatgaa

SEQ ID NO: 58933 - DNA, 15 bp, Homo sapiens
cagccatcgttatga

SEQ ID NO: 58934 - DNA, 15 bp, Homo sapiens
acagccatcgttatg

SEQ ID NO: 58935 - DNA, 15 bp, Homo sapiens
cacagccatcgttat

SEQ ID NO: 58936 - DNA, 15 bp, Homo sapiens
ccacagccatcgtta

SEQ ID NO: 58937 - DNA, 15 bp, Homo sapiens
accacagccatcgtt

SEQ ID NO: 58938 - DNA, 15 bp, Homo sapiens
aaccacagccatcgt

SEQ ID NO: 58939 - DNA, 15 bp, Homo sapiens
caaccacagccatcg

SEQ ID NO: 58940 - DNA, 15 bp, Homo sapiens
gcaaccacagccatc

SEQ ID NO: 58941 - DNA, 15 bp, Homo sapiens
ggcaaccacagccat

SEQ ID NO: 58942 - DNA, 15 bp, Homo sapiens
tggcaaccacagcca

SEQ ID NO: 58943 - DNA, 15 bp, Homo sapiens
gtggcaaccacagcc

SEQ ID NO: 58944 - DNA, 15 bp, Homo sapiens
tgtggcaaccacagc

SEQ ID NO: 58945 - DNA, 15 bp, Homo sapiens
ttgtggcaaccacag

SEQ ID NO: 58946 - DNA, 15 bp, Homo sapiens
tttgtggcaaccaca

SEQ ID NO: 58947 - DNA, 15 bp, Homo sapiens
ctttgtggcaaccac

SEQ ID NO: 58948 - DNA, 15 bp, Homo sapiens
actttgtggcaacca

SEQ ID NO: 58949 - DNA, 15 bp, Homo sapiens
cactttgtggcaacc

SEQ ID NO: 58950 - DNA, 15 bp, Homo sapiens
gcactttgtggcaac

SEQ ID NO: 58951 - DNA, 15 bp, Homo sapiens
ggcactttgtggcaa

SEQ ID NO: 58952 - DNA, 15 bp, Homo sapiens
aggcactttgtggca

SEQ ID NO: 58953 - DNA, 15 bp, Homo sapiens
gaggcactttgtggc

SEQ ID NO: 58954 - DNA, 15 bp, Homo sapiens
cgaggcactttgtgg

SEQ ID NO: 58955 - DNA, 15 bp, Homo sapiens
acgaggcactttgtg

SEQ ID NO: 58956 - DNA, 15 bp, Homo sapiens
aacgaggcactttgt

SEQ ID NO: 58957 - DNA, 15 bp, Homo sapiens
aaacgaggcactttg

SEQ ID NO: 58958 - DNA, 15 bp, Homo sapiens
taaacgaggcacttt

SEQ ID NO: 58959 - DNA, 15 bp, Homo sapiens
gtaaacgaggcactt

SEQ ID NO: 58960 - DNA, 15 bp, Homo sapiens
ggtaaacgaggcact

SEQ ID NO: 58961 - DNA, 15 bp, Homo sapiens
aggtaaacgaggcac

SEQ ID NO: 58962 - DNA, 15 bp, Homo sapiens
aaggtaaacgaggca

SEQ ID NO: 58963 - DNA, 15 bp, Homo sapiens
aaaggtaaacgaggc

SEQ ID NO: 58964 - DNA, 15 bp, Homo sapiens
taaaggtaaacgagg

SEQ ID NO: 58965 - DNA, 15 bp, Homo sapiens
ttaaaggtaaacgag

SEQ ID NO: 58966 - DNA, 15 bp, Homo sapiens
tttaaaggtaaacga

SEQ ID NO: 58967 - DNA, 15 bp, Homo sapiens
atttaaaggtaaacg

SEQ ID NO: 58968 - DNA, 15 bp, Homo sapiens
tatttaaaggtaaac

SEQ ID NO: 58969 - DNA, 15 bp, Homo sapiens
gtatttaaaggtaaa

SEQ ID NO: 58970 - DNA, 15 bp, Homo sapiens
agtatttaaaggtaa

SEQ ID NO: 58971 - DNA, 15 bp, Homo sapiens
cagtatttaaaggta

SEQ ID NO: 58972 - DNA, 15 bp, Homo sapiens
acagtatttaaaggt

SEQ ID NO: 58973 - DNA, 15 bp, Homo sapiens
aacagtatttaaagg

SEQ ID NO: 58974 - DNA, 15 bp, Homo sapiens
taacagtatttaaag

SEQ ID NO: 58975 - DNA, 15 bp, Homo sapiens
ttaacagtatttaaa

SEQ ID NO: 58976 - DNA, 15 bp, Homo sapiens
attaacagtatttaa

SEQ ID NO: 58977 - DNA, 15 bp, Homo sapiens
cattaacagtattta

SEQ ID NO: 58978 - DNA, 15 bp, Homo sapiens
acattaacagtattt

SEQ ID NO: 58979 - DNA, 15 bp, Homo sapiens
cacattaacagtatt

SEQ ID NO: 58980 - DNA, 15 bp, Homo sapiens
acacattaacagtat

SEQ ID NO: 58981 - DNA, 15 bp, Homo sapiens
gacacattaacagta

SEQ ID NO: 58982 - DNA, 15 bp, Homo sapiens
tgacacattaacagt

SEQ ID NO: 58983 - DNA, 15 bp, Homo sapiens
atgacacattaacag

SEQ ID NO: 58984 - DNA, 15 bp, Homo sapiens
catgacacattaaca

SEQ ID NO: 58985 - DNA, 15 bp, Homo sapiens
gcatgacacattaac

SEQ ID NO: 58986 - DNA, 15 bp, Homo sapiens
tgcatgacacattaa

SEQ ID NO: 58987 - DNA, 15 bp, Homo sapiens
atgcatgacacatta

SEQ ID NO: 58988 - DNA, 15 bp, Homo sapiens
catgcatgacacatt

SEQ ID NO: 58989 - DNA, 15 bp, Homo sapiens
gcatgcatgacacat

SEQ ID NO: 58990 - DNA, 15 bp, Homo sapiens
tgcatgcatgacaca

SEQ ID NO: 58991 - DNA, 15 bp, Homo sapiens
ctgcatgcatgacac

SEQ ID NO: 58992 - DNA, 15 bp, Homo sapiens
tctgcatgcatgaca

SEQ ID NO: 58993 - DNA, 15 bp, Homo sapiens
atctgcatgcatgac

SEQ ID NO: 58994 - DNA, 15 bp, Homo sapiens
catctgcatgcatga

SEQ ID NO: 58995 - DNA, 15 bp, Homo sapiens
ccatctgcatgcatg

SEQ ID NO: 58996 - DNA, 15 bp, Homo sapiens
tccatctgcatgcat

SEQ ID NO: 58997 - DNA, 15 bp, Homo sapiens
ttccatctgcatgca

SEQ ID NO: 58998 - DNA, 15 bp, Homo sapiens
cttccatctgcatgc

SEQ ID NO: 58999 - DNA, 15 bp, Homo sapiens
ccttccatctgcatg

SEQ ID NO: 59000 - DNA, 15 bp, Homo sapiens
cccttccatctgcat

SEQ ID NO: 59001 - DNA, 15 bp, Homo sapiens
ccccttccatctgca

SEQ ID NO: 59002 - DNA, 15 bp, Homo sapiens
accccttccatctgc

SEQ ID NO: 59003 - DNA, 15 bp, Homo sapiens
caccccttccatctg

SEQ ID NO: 59004 - DNA, 15 bp, Homo sapiens
ccaccccttccatct

SEQ ID NO: 59005 - DNA, 15 bp, Homo sapiens
tccaccccttccatc

SEQ ID NO: 59006 - DNA, 15 bp, Homo sapiens
ttccaccccttccat

SEQ ID NO: 59007 - DNA, 15 bp, Homo sapiens
gttccaccccttcca

SEQ ID NO: 59008 - DNA, 15 bp, Homo sapiens
agttccaccccttcc

SEQ ID NO: 59009 - DNA, 15 bp, Homo sapiens
cagttccaccccttc

SEQ ID NO: 59010 - DNA, 15 bp, Homo sapiens
acagttccacccctt

SEQ ID NO: 59011 - DNA, 15 bp, Homo sapiens
cacagttccacccct

SEQ ID NO: 59012 - DNA, 15 bp, Homo sapiens
gcacagttccacccc

SEQ ID NO: 59013 - DNA, 15 bp, Homo sapiens
tgcacagttccaccc

SEQ ID NO: 59014 - DNA, 15 bp, Homo sapiens
gtgcacagttccacc

SEQ ID NO: 59015 - DNA, 15 bp, Homo sapiens
agtgcacagttccac

SEQ ID NO: 59016 - DNA, 15 bp, Homo sapiens
tagtgcacagttcca

SEQ ID NO: 59017 - DNA, 15 bp, Homo sapiens
ttagtgcacagttcc

SEQ ID NO: 59018 - DNA, 15 bp, Homo sapiens
tttagtgcacagttc

SEQ ID NO: 59019 - DNA, 15 bp, Homo sapiens
ctttagtgcacagtt

SEQ ID NO: 59020 - DNA, 15 bp, Homo sapiens
actttagtgcacagt

SEQ ID NO: 59021 - DNA, 15 bp, Homo sapiens
cactttagtgcacag

SEQ ID NO: 59022 - DNA, 15 bp, Homo sapiens
ccactttagtgcaca

SEQ ID NO: 59023 - DNA, 15 bp, Homo sapiens
cccactttagtgcac

SEQ ID NO: 59024 - DNA, 15 bp, Homo sapiens
ccccactttagtgca

SEQ ID NO: 59025 - DNA, 15 bp, Homo sapiens
cccccactttagtgc

SEQ ID NO: 59026 - DNA, 15 bp, Homo sapiens
gcccccactttagtg

SEQ ID NO: 59027 - DNA, 15 bp, Homo sapiens
agcccccactttagt

SEQ ID NO: 59028 - DNA, 15 bp, Homo sapiens
aagcccccactttag

SEQ ID NO: 59029 - DNA, 15 bp, Homo sapiens
aaagcccccacttta

SEQ ID NO: 59030 - DNA, 15 bp, Homo sapiens
taaagcccccacttt

SEQ ID NO: 59031 - DNA, 15 bp, Homo sapiens
ttaaagcccccactt

SEQ ID NO: 59032 - DNA, 15 bp, Homo sapiens
gttaaagcccccact

SEQ ID NO: 59033 - DNA, 15 bp, Homo sapiens
agttaaagcccccac

SEQ ID NO: 59034 - DNA, 15 bp, Homo sapiens
cagttaaagccccca

SEQ ID NO: 59035 - DNA, 15 bp, Homo sapiens
acagttaaagccccc

SEQ ID NO: 59036 - DNA, 15 bp, Homo sapiens
tacagttaaagcccc

SEQ ID NO: 59037 - DNA, 15 bp, Homo sapiens
ctacagttaaagccc

SEQ ID NO: 59038 - DNA, 15 bp, Homo sapiens
actacagttaaagcc

SEQ ID NO: 59039 - DNA, 15 bp, Homo sapiens
tactacagttaaagc

SEQ ID NO: 59040 - DNA, 15 bp, Homo sapiens
atactacagttaaag

SEQ ID NO: 59041 - DNA, 15 bp, Homo sapiens
aatactacagttaaa

SEQ ID NO: 59042 - DNA, 15 bp, Homo sapiens
aaatactacagttaa

SEQ ID NO: 59043 - DNA, 15 bp, Homo sapiens
caaatactacagtta

SEQ ID NO: 59044 - DNA, 15 bp, Homo sapiens
ccaaatactacagtt

SEQ ID NO: 59045 - DNA, 15 bp, Homo sapiens
gccaaatactacagt

SEQ ID NO: 59046 - DNA, 15 bp, Homo sapiens
tgccaaatactacag

SEQ ID NO: 59047 - DNA, 15 bp, Homo sapiens
ctgccaaatactaca

SEQ ID NO: 59048 - DNA, 15 bp, Homo sapiens
tctgccaaatactac

SEQ ID NO: 59049 - DNA, 15 bp, Homo sapiens
ctctgccaaatacta

SEQ ID NO: 59050 - DNA, 15 bp, Homo sapiens
actctgccaaatact

SEQ ID NO: 59051 - DNA, 15 bp, Homo sapiens
aactctgccaaatac

SEQ ID NO: 59052 - DNA, 15 bp, Homo sapiens
caactctgccaaata

SEQ ID NO: 59053 - DNA, 15 bp, Homo sapiens
gcaactctgccaaat

SEQ ID NO: 59054 - DNA, 15 bp, Homo sapiens
ggcaactctgccaaa

SEQ ID NO: 59055 - DNA, 15 bp, Homo sapiens
aggcaactctgccaa

SEQ ID NO: 59056 - DNA, 15 bp, Homo sapiens
aaggcaactctgcca

SEQ ID NO: 59057 - DNA, 15 bp, Homo sapiens
gaaggcaactctgcc

SEQ ID NO: 59058 - DNA, 15 bp, Homo sapiens
agaaggcaactctgc

SEQ ID NO: 59059 - DNA, 15 bp, Homo sapiens
tagaaggcaactctg

SEQ ID NO: 59060 - DNA, 15 bp, Homo sapiens
gtagaaggcaactct

SEQ ID NO: 59061 - DNA, 15 bp, Homo sapiens
ggtagaaggcaactc

SEQ ID NO: 59062 - DNA, 15 bp, Homo sapiens
aggtagaaggcaact

SEQ ID NO: 59063 - DNA, 15 bp, Homo sapiens
caggtagaaggcaac

SEQ ID NO: 59064 - DNA, 15 bp, Homo sapiens
gcaggtagaaggcaa

SEQ ID NO: 59065 - DNA, 15 bp, Homo sapiens
ggcaggtagaaggca

SEQ ID NO: 59066 - DNA, 15 bp, Homo sapiens
tggcaggtagaaggc

SEQ ID NO: 59067 - DNA, 15 bp, Homo sapiens
ctggcaggtagaagg

SEQ ID NO: 59068 - DNA, 15 bp, Homo sapiens
actggcaggtagaag

SEQ ID NO: 59069 - DNA, 15 bp, Homo sapiens
aactggcaggtagaa

SEQ ID NO: 59070 - DNA, 15 bp, Homo sapiens
gaactggcaggtaga

SEQ ID NO: 59071 - DNA, 15 bp, Homo sapiens
tgaactggcaggtag

SEQ ID NO: 59072 - DNA, 15 bp, Homo sapiens
ttgaactggcaggta

SEQ ID NO: 59073 - DNA, 15 bp, Homo sapiens
tttgaactggcaggt

SEQ ID NO: 59074 - DNA, 15 bp, Homo sapiens
ttttgaactggcagg

SEQ ID NO: 59075 - DNA, 15 bp, Homo sapiens
cttttgaactggcag

SEQ ID NO: 59076 - DNA, 15 bp, Homo sapiens
acttttgaactggca

SEQ ID NO: 59077 - DNA, 15 bp, Homo sapiens
aacttttgaactggc

SEQ ID NO: 59078 - DNA, 15 bp, Homo sapiens
gaacttttgaactgg

SEQ ID NO: 59079 - DNA, 15 bp, Homo sapiens
tgaacttttgaactg

SEQ ID NO: 59080 - DNA, 15 bp, Homo sapiens
ttgaacttttgaact

SEQ ID NO: 59081 - DNA, 15 bp, Homo sapiens
gttgaacttttgaac

SEQ ID NO: 59082 - DNA, 15 bp, Homo sapiens
ggttgaacttttgaa

SEQ ID NO: 59083 - DNA, 15 bp, Homo sapiens
aggttgaacttttga

SEQ ID NO: 59084 - DNA, 15 bp, Homo sapiens
caggttgaacttttg

SEQ ID NO: 59085 - DNA, 15 bp, Homo sapiens
acaggttgaactttt

SEQ ID NO: 59086 - DNA, 15 bp, Homo sapiens
aacaggttgaacttt

SEQ ID NO: 59087 - DNA, 15 bp, Homo sapiens
aaacaggttgaactt

SEQ ID NO: 59088 - DNA, 15 bp, Homo sapiens
aaaacaggttgaact

SEQ ID NO: 59089 - DNA, 15 bp, Homo sapiens
gaaaacaggttgaac

SEQ ID NO: 59090 - DNA, 15 bp, Homo sapiens
tgaaaacaggttgaa

SEQ ID NO: 59091 - DNA, 15 bp, Homo sapiens
atgaaaacaggttga

SEQ ID NO: 59092 - DNA, 15 bp, Homo sapiens
tatgaaaacaggttg

SEQ ID NO: 59093 - DNA, 15 bp, Homo sapiens
atatgaaaacaggtt

SEQ ID NO: 59094 - DNA, 15 bp, Homo sapiens
tatatgaaaacaggt

SEQ ID NO: 59095 - DNA, 15 bp, Homo sapiens
ctatatgaaaacagg

SEQ ID NO: 59096 - DNA, 15 bp, Homo sapiens
tctatatgaaaacag

SEQ ID NO: 59097 - DNA, 15 bp, Homo sapiens
ttctatatgaaaaca

SEQ ID NO: 59098 - DNA, 15 bp, Homo sapiens
attctatatgaaaac

SEQ ID NO: 59099 - DNA, 15 bp, Homo sapiens
tattctatatgaaaa

SEQ ID NO: 59100 - DNA, 15 bp, Homo sapiens
atattctatatgaaa

SEQ ID NO: 59101 - DNA, 15 bp, Homo sapiens
tatattctatatgaa

SEQ ID NO: 59102 - DNA, 15 bp, Homo sapiens
atatattctatatga

SEQ ID NO: 59103 - DNA, 15 bp, Homo sapiens
tatatattctatatg

SEQ ID NO: 59104 - DNA, 15 bp, Homo sapiens
atatatattctatat

SEQ ID NO: 59105 - DNA, 15 bp, Homo sapiens
tatatatattctata

SEQ ID NO: 59106 - DNA, 15 bp, Homo sapiens
gtatatatattctat

SEQ ID NO: 59107 - DNA, 15 bp, Homo sapiens
agtatatatattcta

SEQ ID NO: 59108 - DNA, 15 bp, Homo sapiens
tagtatatatattct

SEQ ID NO: 59109 - DNA, 15 bp, Homo sapiens
ttagtatatatattc

SEQ ID NO: 59110 - DNA, 15 bp, Homo sapiens
tttagtatatatatt

SEQ ID NO: 59111 - DNA, 15 bp, Homo sapiens
ttttagtatatatat

SEQ ID NO: 59112 - DNA, 15 bp, Homo sapiens
tttttagtatatata

SEQ ID NO: 59113 - DNA, 15 bp, Homo sapiens
ttttttagtatatat

SEQ ID NO: 59114 - DNA, 15 bp, Homo sapiens
attttttagtatata

SEQ ID NO: 59115 - DNA, 15 bp, Homo sapiens
aattttttagtatat

SEQ ID NO: 59116 - DNA, 15 bp, Homo sapiens
aaattttttagtata

SEQ ID NO: 59117 - DNA, 15 bp, Homo sapiens
gaaattttttagtat

SEQ ID NO: 59118 - DNA, 15 bp, Homo sapiens
tgaaattttttagta

SEQ ID NO: 59119 - DNA, 15 bp, Homo sapiens
ctgaaattttttagt

SEQ ID NO: 59120 - DNA, 15 bp, Homo sapiens
actgaaattttttag

SEQ ID NO: 59121 - DNA, 15 bp, Homo sapiens
gactgaaatttttta

SEQ ID NO: 59122 - DNA, 15 bp, Homo sapiens
agactgaaatttttt

SEQ ID NO: 59123 - DNA, 15 bp, Homo sapiens
cagactgaaattttt

SEQ ID NO: 59124 - DNA, 15 bp, Homo sapiens
acagactgaaatttt

SEQ ID NO: 59125 - DNA, 15 bp, Homo sapiens
aacagactgaaattt

SEQ ID NO: 59126 - DNA, 15 bp, Homo sapiens
taacagactgaaatt

SEQ ID NO: 59127 - DNA, 15 bp, Homo sapiens
ttaacagactgaaat

SEQ ID NO: 59128 - DNA, 15 bp, Homo sapiens
tttaacagactgaaa

SEQ ID NO: 59129 - DNA, 15 bp, Homo sapiens
gtttaacagactgaa

SEQ ID NO: 59130 - DNA, 15 bp, Homo sapiens
tgtttaacagactga

SEQ ID NO: 59131 - DNA, 15 bp, Homo sapiens
ctgtttaacagactg

SEQ ID NO: 59132 - DNA, 15 bp, Homo sapiens
gctgtttaacagact

SEQ ID NO: 59133 - DNA, 15 bp, Homo sapiens
ggctgtttaacagac

SEQ ID NO: 59134 - DNA, 15 bp, Homo sapiens
aggctgtttaacaga

SEQ ID NO: 59135 - DNA, 15 bp, Homo sapiens
aaggctgtttaacag

SEQ ID NO: 59136 - DNA, 15 bp, Homo sapiens
taaggctgtttaaca

SEQ ID NO: 59137 - DNA, 15 bp, Homo sapiens
gtaaggctgtttaac

SEQ ID NO: 59138 - DNA, 15 bp, Homo sapiens
agtaaggctgtttaa

SEQ ID NO: 59139 - DNA, 15 bp, Homo sapiens
gagtaaggctgttta

SEQ ID NO: 59140 - DNA, 15 bp, Homo sapiens
agagtaaggctgttt

SEQ ID NO: 59141 - DNA, 15 bp, Homo sapiens
cagagtaaggctgtt

SEQ ID NO: 59142 - DNA, 15 bp, Homo sapiens
tcagagtaaggctgt

SEQ ID NO: 59143 - DNA, 15 bp, Homo sapiens
atcagagtaaggctg

SEQ ID NO: 59144 - DNA, 15 bp, Homo sapiens
aatcagagtaaggct

SEQ ID NO: 59145 - DNA, 15 bp, Homo sapiens
gaatcagagtaaggc

SEQ ID NO: 59146 - DNA, 15 bp, Homo sapiens
tgaatcagagtaagg

SEQ ID NO: 59147 - DNA, 15 bp, Homo sapiens
ctgaatcagagtaag

SEQ ID NO: 59148 - DNA, 15 bp, Homo sapiens
gctgaatcagagtaa

SEQ ID NO: 59149 - DNA, 15 bp, Homo sapiens
ggctgaatcagagta

SEQ ID NO: 59150 - DNA, 15 bp, Homo sapiens
aggctgaatcagagt

SEQ ID NO: 59151 - DNA, 15 bp, Homo sapiens
gaggctgaatcagag

SEQ ID NO: 59152 - DNA, 15 bp, Homo sapiens
agaggctgaatcaga

SEQ ID NO: 59153 - DNA, 15 bp, Homo sapiens
aagaggctgaatcag

SEQ ID NO: 59154 - DNA, 15 bp, Homo sapiens
gaagaggctgaatca

SEQ ID NO: 59155 - DNA, 15 bp, Homo sapiens
tgaagaggctgaatc

SEQ ID NO: 59156 - DNA, 15 bp, Homo sapiens
ctgaagaggctgaat

SEQ ID NO: 59157 - DNA, 15 bp, Homo sapiens
tctgaagaggctgaa

SEQ ID NO: 59158 - DNA, 15 bp, Homo sapiens
atctgaagaggctga

SEQ ID NO: 59159 - DNA, 15 bp, Homo sapiens
tatctgaagaggctg

SEQ ID NO: 59160 - DNA, 15 bp, Homo sapiens
gtatctgaagaggct

SEQ ID NO: 59161 - DNA, 15 bp, Homo sapiens
agtatctgaagaggc

SEQ ID NO: 59162 - DNA, 15 bp, Homo sapiens
gagtatctgaagagg

SEQ ID NO: 59163 - DNA, 15 bp, Homo sapiens
agagtatctgaagag

SEQ ID NO: 59164 - DNA, 15 bp, Homo sapiens
aagagtatctgaaga

SEQ ID NO: 59165 - DNA, 15 bp, Homo sapiens
caagagtatctgaag

SEQ ID NO: 59166 - DNA, 15 bp, Homo sapiens
acaagagtatctgaa

SEQ ID NO: 59167 - DNA, 15 bp, Homo sapiens
cacaagagtatctga

SEQ ID NO: 59168 - DNA, 15 bp, Homo sapiens
gcacaagagtatctg

SEQ ID NO: 59169 - DNA, 15 bp, Homo sapiens
agcacaagagtatct

SEQ ID NO: 59170 - DNA, 15 bp, Homo sapiens
cagcacaagagtatc

SEQ ID NO: 59171 - DNA, 15 bp, Homo sapiens
acagcacaagagtat

SEQ ID NO: 59172 - DNA, 15 bp, Homo sapiens
cacagcacaagagta

SEQ ID NO: 59173 - DNA, 15 bp, Homo sapiens
gcacagcacaagagt

SEQ ID NO: 59174 - DNA, 15 bp, Homo sapiens
tgcacagcacaagag

SEQ ID NO: 59175 - DNA, 15 bp, Homo sapiens
ctgcacagcacaaga

SEQ ID NO: 59176 - DNA, 15 bp, Homo sapiens
gctgcacagcacaag

SEQ ID NO: 59177 - DNA, 15 bp, Homo sapiens
tgctgcacagcacaa

SEQ ID NO: 59178 - DNA, 15 bp, Homo sapiens
ctgctgcacagcaca

SEQ ID NO: 59179 - DNA, 15 bp, Homo sapiens
actgctgcacagcac

SEQ ID NO: 59180 - DNA, 15 bp, Homo sapiens
cactgctgcacagca

SEQ ID NO: 59181 - DNA, 15 bp, Homo sapiens
ccactgctgcacagc

SEQ ID NO: 59182 - DNA, 15 bp, Homo sapiens
gccactgctgcacag

SEQ ID NO: 59183 - DNA, 15 bp, Homo sapiens
agccactgctgcaca

SEQ ID NO: 59184 - DNA, 15 bp, Homo sapiens
gagccactgctgcac

SEQ ID NO: 59185 - DNA, 15 bp, Homo sapiens
agagccactgctgca

SEQ ID NO: 59186 - DNA, 15 bp, Homo sapiens
cagagccactgctgc

SEQ ID NO: 59187 - DNA, 15 bp, Homo sapiens
acagagccactgctg

SEQ ID NO: 59188 - DNA, 15 bp, Homo sapiens
cacagagccactgct

SEQ ID NO: 59189 - DNA, 15 bp, Homo sapiens
acacagagccactgc

SEQ ID NO: 59190 - DNA, 15 bp, Homo sapiens
cacacagagccactg

SEQ ID NO: 59191 - DNA, 15 bp, Homo sapiens
acacacagagccact

SEQ ID NO: 59192 - DNA, 15 bp, Homo sapiens
tacacacagagccac

SEQ ID NO: 59193 - DNA, 15 bp, Homo sapiens
ttacacacagagcca

SEQ ID NO: 59194 - DNA, 15 bp, Homo sapiens
tttacacacagagcc

SEQ ID NO: 59195 - DNA, 15 bp, Homo sapiens
atttacacacagagc

SEQ ID NO: 59196 - DNA, 15 bp, Homo sapiens
catttacacacagag

SEQ ID NO: 59197 - DNA, 15 bp, Homo sapiens
gcatttacacacaga

SEQ ID NO: 59198 - DNA, 15 bp, Homo sapiens
agcatttacacacag

SEQ ID NO: 59199 - DNA, 15 bp, Homo sapiens
tagcatttacacaca

SEQ ID NO: 59200 - DNA, 15 bp, Homo sapiens
atagcatttacacac

SEQ ID NO: 59201 - DNA, 15 bp, Homo sapiens
catagcatttacaca

SEQ ID NO: 59202 - DNA, 15 bp, Homo sapiens
gcatagcatttacac

SEQ ID NO: 59203 - DNA, 15 bp, Homo sapiens
tgcatagcatttaca

SEQ ID NO: 59204 - DNA, 15 bp, Homo sapiens
gtgcatagcatttac

SEQ ID NO: 59205 - DNA, 15 bp, Homo sapiens
agtgcatagcattta

SEQ ID NO: 59206 - DNA, 15 bp, Homo sapiens
cagtgcatagcattt

SEQ ID NO: 59207 - DNA, 15 bp, Homo sapiens
tcagtgcatagcatt

SEQ ID NO: 59208 - DNA, 15 bp, Homo sapiens
ctcagtgcatagcat

SEQ ID NO: 59209 - DNA, 15 bp, Homo sapiens
cctcagtgcatagca

SEQ ID NO: 59210 - DNA, 15 bp, Homo sapiens
tcctcagtgcatagc

SEQ ID NO: 59211 - DNA, 15 bp, Homo sapiens
atcctcagtgcatag

SEQ ID NO: 59212 - DNA, 15 bp, Homo sapiens
tatcctcagtgcata

SEQ ID NO: 59213 - DNA, 15 bp, Homo sapiens
gtatcctcagtgcat

SEQ ID NO: 59214 - DNA, 15 bp, Homo sapiens
tgtatcctcagtgca

SEQ ID NO: 59215 - DNA, 15 bp, Homo sapiens
gtgtatcctcagtgc

SEQ ID NO: 59216 - DNA, 15 bp, Homo sapiens
tgtgtatcctcagtg

SEQ ID NO: 59217 - DNA, 15 bp, Homo sapiens
ttgtgtatcctcagt

SEQ ID NO: 59218 - DNA, 15 bp, Homo sapiens
tttgtgtatcctcag

SEQ ID NO: 59219 - DNA, 15 bp, Homo sapiens
ttttgtgtatcctca

SEQ ID NO: 59220 - DNA, 15 bp, Homo sapiens
tttttgtgtatcctc

SEQ ID NO: 59221 - DNA, 15 bp, Homo sapiens
atttttgtgtatcct

SEQ ID NO: 59222 - DNA, 15 bp, Homo sapiens
tatttttgtgtatcc

SEQ ID NO: 59223 - DNA, 15 bp, Homo sapiens
gtatttttgtgtatc

SEQ ID NO: 59224 - DNA, 15 bp, Homo sapiens
ggtatttttgtgtat

SEQ ID NO: 59225 - DNA, 15 bp, Homo sapiens
tggtatttttgtgta

SEQ ID NO: 59226 - DNA, 15 bp, Homo sapiens
ttggtatttttgtgt

SEQ ID NO: 59227 - DNA, 15 bp, Homo sapiens
attggtatttttgtg

SEQ ID NO: 59228 - DNA, 15 bp, Homo sapiens
tattggtatttttgt

SEQ ID NO: 59229 - DNA, 15 bp, Homo sapiens
atattggtatttttg

SEQ ID NO: 59230 - DNA, 15 bp, Homo sapiens
catattggtattttt

SEQ ID NO: 59231 - DNA, 15 bp, Homo sapiens
tcatattggtatttt

SEQ ID NO: 59232 - DNA, 15 bp, Homo sapiens
atcatattggtattt

SEQ ID NO: 59233 - DNA, 15 bp, Homo sapiens
catcatattggtatt

SEQ ID NO: 59234 - DNA, 15 bp, Homo sapiens
acatcatattggtat

SEQ ID NO: 59235 - DNA, 15 bp, Homo sapiens
cacatcatattggta

SEQ ID NO: 59236 - DNA, 15 bp, Homo sapiens
acacatcatattggt

SEQ ID NO: 59237 - DNA, 15 bp, Homo sapiens
tacacatcatattgg

SEQ ID NO: 59238 - DNA, 15 bp, Homo sapiens
gtacacatcatattg

SEQ ID NO: 59239 - DNA, 15 bp, Homo sapiens
tgtacacatcatatt

SEQ ID NO: 59240 - DNA, 15 bp, Homo sapiens
ctgtacacatcatat

SEQ ID NO: 59241 - DNA, 15 bp, Homo sapiens
cctgtacacatcata

SEQ ID NO: 59242 - DNA, 15 bp, Homo sapiens
tcctgtacacatcat

SEQ ID NO: 59243 - DNA, 15 bp, Homo sapiens
atcctgtacacatca

SEQ ID NO: 59244 - DNA, 15 bp, Homo sapiens
tatcctgtacacatc

SEQ ID NO: 59245 - DNA, 15 bp, Homo sapiens
ttatcctgtacacat

SEQ ID NO: 59246 - DNA, 15 bp, Homo sapiens
attatcctgtacaca

SEQ ID NO: 59247 - DNA, 15 bp, Homo sapiens
cattatcctgtacac

SEQ ID NO: 59248 - DNA, 15 bp, Homo sapiens
gcattatcctgtaca

SEQ ID NO: 59249 - DNA, 15 bp, Homo sapiens
ggcattatcctgtac

SEQ ID NO: 59250 - DNA, 15 bp, Homo sapiens
aggcattatcctgta

SEQ ID NO: 59251 - DNA, 15 bp, Homo sapiens
gaggcattatcctgt

SEQ ID NO: 59252 - DNA, 15 bp, Homo sapiens
tgaggcattatcctg

SEQ ID NO: 59253 - DNA, 15 bp, Homo sapiens
atgaggcattatcct

SEQ ID NO: 59254 - DNA, 15 bp, Homo sapiens
gatgaggcattatcc

SEQ ID NO: 59255 - DNA, 15 bp, Homo sapiens
ggatgaggcattatc

SEQ ID NO: 59256 - DNA, 15 bp, Homo sapiens
gggatgaggcattat

SEQ ID NO: 59257 - DNA, 15 bp, Homo sapiens
tgggatgaggcatta

SEQ ID NO: 59258 - DNA, 15 bp, Homo sapiens
ttgggatgaggcatt

SEQ ID NO: 59259 - DNA, 15 bp, Homo sapiens
attgggatgaggcat

SEQ ID NO: 59260 - DNA, 15 bp, Homo sapiens
gattgggatgaggca

SEQ ID NO: 59261 - DNA, 15 bp, Homo sapiens
tgattgggatgaggc

SEQ ID NO: 59262 - DNA, 15 bp, Homo sapiens
ctgattgggatgagg

SEQ ID NO: 59263 - DNA, 15 bp, Homo sapiens
tctgattgggatgag

SEQ ID NO: 59264 - DNA, 15 bp, Homo sapiens
atctgattgggatga

SEQ ID NO: 59265 - DNA, 15 bp, Homo sapiens
catctgattgggatg

SEQ ID NO: 59266 - DNA, 15 bp, Homo sapiens
acatctgattgggat

SEQ ID NO: 59267 - DNA, 15 bp, Homo sapiens
gacatctgattggga

SEQ ID NO: 59268 - DNA, 15 bp, Homo sapiens
ggacatctgattggg

SEQ ID NO: 59269 - DNA, 15 bp, Homo sapiens
tggacatctgattgg

SEQ ID NO: 59270 - DNA, 15 bp, Homo sapiens
atggacatctgattg

SEQ ID NO: 59271 - DNA, 15 bp, Homo sapiens
aatggacatctgatt

SEQ ID NO: 59272 - DNA, 15 bp, Homo sapiens
aaatggacatctgat

SEQ ID NO: 59273 - DNA, 15 bp, Homo sapiens
caaatggacatctga

SEQ ID NO: 59274 - DNA, 15 bp, Homo sapiens
acaaatggacatctg

SEQ ID NO: 59275 - DNA, 15 bp, Homo sapiens
aacaaatggacatct

SEQ ID NO: 59276 - DNA, 15 bp, Homo sapiens
taacaaatggacatc

SEQ ID NO: 59277 - DNA, 15 bp, Homo sapiens
ataacaaatggacat

SEQ ID NO: 59278 - DNA, 15 bp, Homo sapiens
aataacaaatggaca

SEQ ID NO: 59279 - DNA, 15 bp, Homo sapiens
caataacaaatggac

SEQ ID NO: 59280 - DNA, 15 bp, Homo sapiens
acaataacaaatgga

SEQ ID NO: 59281 - DNA, 15 bp, Homo sapiens
cacaataacaaatgg

SEQ ID NO: 59282 - DNA, 15 bp, Homo sapiens
acacaataacaaatg

SEQ ID NO: 59283 - DNA, 15 bp, Homo sapiens
aacacaataacaaat

SEQ ID NO: 59284 - DNA, 15 bp, Homo sapiens
aaacacaataacaaa

SEQ ID NO: 59285 - DNA, 15 bp, Homo sapiens
caaacacaataacaa

SEQ ID NO: 59286 - DNA, 15 bp, Homo sapiens
acaaacacaataaca

SEQ ID NO: 59287 - DNA, 15 bp, Homo sapiens
aacaaacacaataac

SEQ ID NO: 59288 - DNA, 15 bp, Homo sapiens
taacaaacacaataa

SEQ ID NO: 59289 - DNA, 15 bp, Homo sapiens
ttaacaaacacaata

SEQ ID NO: 59290 - DNA, 15 bp, Homo sapiens
gttaacaaacacaat

SEQ ID NO: 59291 - DNA, 15 bp, Homo sapiens
tgttaacaaacacaa

SEQ ID NO: 59292 - DNA, 15 bp, Homo sapiens
ttgttaacaaacaca

SEQ ID NO: 59293 - DNA, 15 bp, Homo sapiens
gttgttaacaaacac

SEQ ID NO: 59294 - DNA, 15 bp, Homo sapiens
ggttgttaacaaaca

SEQ ID NO: 59295 - DNA, 15 bp, Homo sapiens
gggttgttaacaaac

SEQ ID NO: 59296 - DNA, 15 bp, Homo sapiens
agggttgttaacaaa

SEQ ID NO: 59297 - DNA, 15 bp, Homo sapiens
aagggttgttaacaa

SEQ ID NO: 59298 - DNA, 15 bp, Homo sapiens
aaagggttgttaaca

SEQ ID NO: 59299 - DNA, 15 bp, Homo sapiens
taaagggttgttaac

SEQ ID NO: 59300 - DNA, 15 bp, Homo sapiens
ataaagggttgttaa

SEQ ID NO: 59301 - DNA, 15 bp, Homo sapiens
gataaagggttgtta

SEQ ID NO: 59302 - DNA, 15 bp, Homo sapiens
agataaagggttgtt

SEQ ID NO: 59303 - DNA, 15 bp, Homo sapiens
gagataaagggttgt

SEQ ID NO: 59304 - DNA, 15 bp, Homo sapiens
agagataaagggttg

SEQ ID NO: 59305 - DNA, 15 bp, Homo sapiens
aagagataaagggtt

SEQ ID NO: 59306 - DNA, 15 bp, Homo sapiens
taagagataaagggt

SEQ ID NO: 59307 - DNA, 15 bp, Homo sapiens
ctaagagataaaggg

SEQ ID NO: 59308 - DNA, 15 bp, Homo sapiens
actaagagataaagg

SEQ ID NO: 59309 - DNA, 15 bp, Homo sapiens
cactaagagataaag

SEQ ID NO: 59310 - DNA, 15 bp, Homo sapiens
acactaagagataaa

SEQ ID NO: 59311 - DNA, 15 bp, Homo sapiens
aacactaagagataa

SEQ ID NO: 59312 - DNA, 15 bp, Homo sapiens
taacactaagagata

SEQ ID NO: 59313 - DNA, 15 bp, Homo sapiens
ataacactaagagat

SEQ ID NO: 59314 - DNA, 15 bp, Homo sapiens
tataacactaagaga

SEQ ID NO: 59315 - DNA, 15 bp, Homo sapiens
ttataacactaagag

SEQ ID NO: 59316 - DNA, 15 bp, Homo sapiens
tttataacactaaga

SEQ ID NO: 59317 - DNA, 15 bp, Homo sapiens
gtttataacactaag

SEQ ID NO: 59318 - DNA, 15 bp, Homo sapiens
agtttataacactaa

SEQ ID NO: 59319 - DNA, 15 bp, Homo sapiens
gagtttataacacta

SEQ ID NO: 59320 - DNA, 15 bp, Homo sapiens
ggagtttataacact

SEQ ID NO: 59321 - DNA, 15 bp, Homo sapiens
tggagtttataacac

SEQ ID NO: 59322 - DNA, 15 bp, Homo sapiens
gtggagtttataaca

SEQ ID NO: 59323 - DNA, 15 bp, Homo sapiens
agtggagtttataac

SEQ ID NO: 59324 - DNA, 15 bp, Homo sapiens
aagtggagtttataa

SEQ ID NO: 59325 - DNA, 15 bp, Homo sapiens
taagtggagtttata

SEQ ID NO: 59326 - DNA, 15 bp, Homo sapiens
ttaagtggagtttat

SEQ ID NO: 59327 - DNA, 15 bp, Homo sapiens
tttaagtggagttta

SEQ ID NO: 59328 - DNA, 15 bp, Homo sapiens
ttttaagtggagttt

SEQ ID NO: 59329 - DNA, 15 bp, Homo sapiens
gttttaagtggagtt

SEQ ID NO: 59330 - DNA, 15 bp, Homo sapiens
agttttaagtggagt

SEQ ID NO: 59331 - DNA, 15 bp, Homo sapiens
cagttttaagtggag

SEQ ID NO: 59332 - DNA, 15 bp, Homo sapiens
tcagttttaagtgga

SEQ ID NO: 59333 - DNA, 15 bp, Homo sapiens
atcagttttaagtgg

SEQ ID NO: 59334 - DNA, 15 bp, Homo sapiens
aatcagttttaagtg

SEQ ID NO: 59335 - DNA, 15 bp, Homo sapiens
taatcagttttaagt

SEQ ID NO: 59336 - DNA, 15 bp, Homo sapiens
ttaatcagttttaag

SEQ ID NO: 59337 - DNA, 15 bp, Homo sapiens
tttaatcagttttaa

SEQ ID NO: 59338 - DNA, 15 bp, Homo sapiens
ctttaatcagtttta

SEQ ID NO: 59339 - DNA, 15 bp, Homo sapiens
actttaatcagtttt

SEQ ID NO: 59340 - DNA, 15 bp, Homo sapiens
gactttaatcagttt

SEQ ID NO: 59341 - DNA, 15 bp, Homo sapiens
agactttaatcagtt

SEQ ID NO: 59342 - DNA, 15 bp, Homo sapiens
gagactttaatcagt

SEQ ID NO: 59343 - DNA, 15 bp, Homo sapiens
tgagactttaatcag

SEQ ID NO: 59344 - DNA, 15 bp, Homo sapiens
atgagactttaatca

SEQ ID NO: 59345 - DNA, 15 bp, Homo sapiens
aatgagactttaatc

SEQ ID NO: 59346 - DNA, 15 bp, Homo sapiens
gaatgagactttaat

SEQ ID NO: 59347 - DNA, 15 bp, Homo sapiens
agaatgagactttaa

SEQ ID NO: 59348 - DNA, 15 bp, Homo sapiens
aagaatgagacttta

SEQ ID NO: 59349 - DNA, 15 bp, Homo sapiens
caagaatgagacttt

SEQ ID NO: 59350 - DNA, 15 bp, Homo sapiens
acaagaatgagactt

SEQ ID NO: 59351 - DNA, 15 bp, Homo sapiens
gacaagaatgagact

SEQ ID NO: 59352 - DNA, 15 bp, Homo sapiens
tgacaagaatgagac

SEQ ID NO: 59353 - DNA, 15 bp, Homo sapiens
atgacaagaatgaga

SEQ ID NO: 59354 - DNA, 15 bp, Homo sapiens
aatgacaagaatgag

SEQ ID NO: 59355 - DNA, 15 bp, Homo sapiens
caatgacaagaatga

SEQ ID NO: 59356 - DNA, 15 bp, Homo sapiens
acaatgacaagaatg

SEQ ID NO: 59357 - DNA, 15 bp, Homo sapiens
cacaatgacaagaat

SEQ ID NO: 59358 - DNA, 15 bp, Homo sapiens
acacaatgacaagaa

SEQ ID NO: 59359 - DNA, 15 bp, Homo sapiens
cacacaatgacaaga

SEQ ID NO: 59360 - DNA, 15 bp, Homo sapiens
ccacacaatgacaag

SEQ ID NO: 59361 - DNA, 15 bp, Homo sapiens
cccacacaatgacaa

SEQ ID NO: 59362 - DNA, 15 bp, Homo sapiens
acccacacaatgaca

SEQ ID NO: 59363 - DNA, 15 bp, Homo sapiens
cacccacacaatgac

SEQ ID NO: 59364 - DNA, 15 bp, Homo sapiens
acacccacacaatga

SEQ ID NO: 59365 - DNA, 15 bp, Homo sapiens
aacacccacacaatg

SEQ ID NO: 59366 - DNA, 15 bp, Homo sapiens
aaacacccacacaat

SEQ ID NO: 59367 - DNA, 15 bp, Homo sapiens
aaaacacccacacaa

SEQ ID NO: 59368 - DNA, 15 bp, Homo sapiens
taaaacacccacaca

SEQ ID NO: 59369 - DNA, 15 bp, Homo sapiens
ataaaacacccacac

SEQ ID NO: 59370 - DNA, 15 bp, Homo sapiens
aataaaacacccaca

SEQ ID NO: 59371 - DNA, 15 bp, Homo sapiens
taataaaacacccac

SEQ ID NO: 59372 - DNA, 15 bp, Homo sapiens
ttaataaaacaccca

SEQ ID NO: 59373 - DNA, 15 bp, Homo sapiens
tttaataaaacaccc

SEQ ID NO: 59374 - DNA, 15 bp, Homo sapiens
atttaataaaacacc

SEQ ID NO: 59375 - DNA, 15 bp, Homo sapiens
catttaataaaacac

SEQ ID NO: 59376 - DNA, 15 bp, Homo sapiens
tcatttaataaaaca

SEQ ID NO: 59377 - DNA, 15 bp, Homo sapiens
ctcatttaataaaac

SEQ ID NO: 59378 - DNA, 15 bp, Homo sapiens
tctcatttaataaaa

SEQ ID NO: 59379 - DNA, 15 bp, Homo sapiens
ctctcatttaataaa

SEQ ID NO: 59380 - DNA, 15 bp, Homo sapiens
actctcatttaataa

SEQ ID NO: 59381 - DNA, 15 bp, Homo sapiens
aactctcatttaata

SEQ ID NO: 59382 - DNA, 15 bp, Homo sapiens
aaactctcatttaat

SEQ ID NO: 59383 - DNA, 15 bp, Homo sapiens
taaactctcatttaa

SEQ ID NO: 59384 - DNA, 15 bp, Homo sapiens
ataaactctcattta

SEQ ID NO: 59385 - DNA, 15 bp, Homo sapiens
tataaactctcattt

SEQ ID NO: 59386 - DNA, 15 bp, Homo sapiens
ttataaactctcatt

SEQ ID NO: 59387 - DNA, 15 bp, Homo sapiens
attataaactctcat

SEQ ID NO: 59388 - DNA, 15 bp, Homo sapiens
aattataaactctca

SEQ ID NO: 59389 - DNA, 15 bp, Homo sapiens
gaattataaactctc

SEQ ID NO: 59390 - DNA, 15 bp, Homo sapiens
tgaattataaactct

SEQ ID NO: 59391 - DNA, 15 bp, Homo sapiens
ttgaattataaactc

SEQ ID NO: 59392 - DNA, 15 bp, Homo sapiens
tttgaattataaact

SEQ ID NO: 59393 - DNA, 15 bp, Homo sapiens
atttgaattataaac

SEQ ID NO: 59394 - DNA, 15 bp, Homo sapiens
aatttgaattataaa

SEQ ID NO: 59395 - DNA, 15 bp, Homo sapiens
caatttgaattataa

SEQ ID NO: 59396 - DNA, 15 bp, Homo sapiens
gcaatttgaattata

SEQ ID NO: 59397 - DNA, 15 bp, Homo sapiens
agcaatttgaattat

SEQ ID NO: 59398 - DNA, 15 bp, Homo sapiens
aagcaatttgaatta

SEQ ID NO: 59399 - DNA, 15 bp, Homo sapiens
taagcaatttgaatt

SEQ ID NO: 59400 - DNA, 15 bp, Homo sapiens
ttaagcaatttgaat

SEQ ID NO: 59401 - DNA, 15 bp, Homo sapiens
cttaagcaatttgaa

SEQ ID NO: 59402 - DNA, 15 bp, Homo sapiens
acttaagcaatttga

SEQ ID NO: 59403 - DNA, 15 bp, Homo sapiens
gacttaagcaatttg

SEQ ID NO: 59404 - DNA, 15 bp, Homo sapiens
ggacttaagcaattt

SEQ ID NO: 59405 - DNA, 15 bp, Homo sapiens
tggacttaagcaatt

SEQ ID NO: 59406 - DNA, 15 bp, Homo sapiens
atggacttaagcaat

SEQ ID NO: 59407 - DNA, 15 bp, Homo sapiens
aatggacttaagcaa

SEQ ID NO: 59408 - DNA, 15 bp, Homo sapiens
caatggacttaagca

SEQ ID NO: 59409 - DNA, 15 bp, Homo sapiens
tcaatggacttaagc

SEQ ID NO: 59410 - DNA, 15 bp, Homo sapiens
ttcaatggacttaag

SEQ ID NO: 59411 - DNA, 15 bp, Homo sapiens
cttcaatggacttaa

SEQ ID NO: 59412 - DNA, 15 bp, Homo sapiens
acttcaatggactta

SEQ ID NO: 59413 - DNA, 15 bp, Homo sapiens
aacttcaatggactt

SEQ ID NO: 59414 - DNA, 15 bp, Homo sapiens
aaacttcaatggact

SEQ ID NO: 59415 - DNA, 15 bp, Homo sapiens
aaaacttcaatggac

SEQ ID NO: 59416 - DNA, 15 bp, Homo sapiens
taaaacttcaatgga

SEQ ID NO: 59417 - DNA, 15 bp, Homo sapiens
ttaaaacttcaatgg

SEQ ID NO: 59418 - DNA, 15 bp, Homo sapiens
attaaaacttcaatg

SEQ ID NO: 59419 - DNA, 15 bp, Homo sapiens
aattaaaacttcaat

SEQ ID NO: 59420 - DNA, 15 bp, Homo sapiens
taattaaaacttcaa

SEQ ID NO: 59421 - DNA, 15 bp, Homo sapiens
ttaattaaaacttca

SEQ ID NO: 59422 - DNA, 15 bp, Homo sapiens
attaattaaaacttc

SEQ ID NO: 59423 - DNA, 15 bp, Homo sapiens
cattaattaaaactt

SEQ ID NO: 59424 - DNA, 15 bp, Homo sapiens
ccattaattaaaact

SEQ ID NO: 59425 - DNA, 15 bp, Homo sapiens
cccattaattaaaac

SEQ ID NO: 59426 - DNA, 15 bp, Homo sapiens
gcccattaattaaaa

SEQ ID NO: 59427 - DNA, 15 bp, Homo sapiens
tgcccattaattaaa

SEQ ID NO: 59428 - DNA, 15 bp, Homo sapiens
ctgcccattaattaa

SEQ ID NO: 59429 - DNA, 15 bp, Homo sapiens
gctgcccattaatta

SEQ ID NO: 59430 - DNA, 15 bp, Homo sapiens
ggctgcccattaatt

SEQ ID NO: 59431 - DNA, 15 bp, Homo sapiens
tggctgcccattaat

SEQ ID NO: 59432 - DNA, 15 bp, Homo sapiens
ttggctgcccattaa

SEQ ID NO: 59433 - DNA, 15 bp, Homo sapiens
tttggctgcccatta

SEQ ID NO: 59434 - DNA, 15 bp, Homo sapiens
atttggctgcccatt

SEQ ID NO: 59435 - DNA, 15 bp, Homo sapiens
catttggctgcccat

SEQ ID NO: 59436 - DNA, 15 bp, Homo sapiens
acatttggctgccca

SEQ ID NO: 59437 - DNA, 15 bp, Homo sapiens
cacatttggctgccc

SEQ ID NO: 59438 - DNA, 15 bp, Homo sapiens
tcacatttggctgcc

SEQ ID NO: 59439 - DNA, 15 bp, Homo sapiens
ttcacatttggctgc

SEQ ID NO: 59440 - DNA, 15 bp, Homo sapiens
attcacatttggctg

SEQ ID NO: 59441 - DNA, 15 bp, Homo sapiens
tattcacatttggct

SEQ ID NO: 59442 - DNA, 15 bp, Homo sapiens
gtattcacatttggc

SEQ ID NO: 59443 - DNA, 15 bp, Homo sapiens
tgtattcacatttgg

SEQ ID NO: 59444 - DNA, 15 bp, Homo sapiens
ttgtattcacatttg

SEQ ID NO: 59445 - DNA, 15 bp, Homo sapiens
tttgtattcacattt

SEQ ID NO: 59446 - DNA, 15 bp, Homo sapiens
ctttgtattcacatt

SEQ ID NO: 59447 - DNA, 15 bp, Homo sapiens
actttgtattcacat

SEQ ID NO: 59448 - DNA, 15 bp, Homo sapiens
aactttgtattcaca

SEQ ID NO: 59449 - DNA, 15 bp, Homo sapiens
aaactttgtattcac

SEQ ID NO: 59450 - DNA, 15 bp, Homo sapiens
aaaactttgtattca

SEQ ID NO: 59451 - DNA, 15 bp, Homo sapiens
gaaaactttgtattc

SEQ ID NO: 59452 - DNA, 15 bp, Homo sapiens
tgaaaactttgtatt

SEQ ID NO: 59453 - DNA, 15 bp, Homo sapiens
ctgaaaactttgtat

SEQ ID NO: 59454 - DNA, 15 bp, Homo sapiens
actgaaaactttgta

SEQ ID NO: 59455 - DNA, 15 bp, Homo sapiens
aactgaaaactttgt

SEQ ID NO: 59456 - DNA, 15 bp, Homo sapiens
aaactgaaaactttg

SEQ ID NO: 59457 - DNA, 15 bp, Homo sapiens
aaaactgaaaacttt

SEQ ID NO: 59458 - DNA, 15 bp, Homo sapiens
aaaaactgaaaactt

SEQ ID NO: 59459 - DNA, 15 bp, Homo sapiens
aaaaaactgaaaact

SEQ ID NO: 59460 - DNA, 15 bp, Homo sapiens
aaaaaaactgaaaac

SEQ ID NO: 59461 - DNA, 15 bp, Homo sapiens
aaaaaaaactgaaaa

SEQ ID NO: 59462 - DNA, 15 bp, Homo sapiens
aaaaaaaaactgaaa

SEQ ID NO: 59463 - DNA, 15 bp, Homo sapiens
aaaaaaaaaaactga

SEQ ID NO: 59464 - DNA, 15 bp, Homo sapiens
gaaaaaaaaaaactg

SEQ ID NO: 59465 - DNA, 15 bp, Homo sapiens
ggaaaaaaaaaaact

SEQ ID NO: 59466 - DNA, 15 bp, Homo sapiens
aggaaaaaaaaaaac

SEQ ID NO: 59467 - DNA, 15 bp, Homo sapiens
caggaaaaaaaaaaa

SEQ ID NO: 59468 - DNA, 15 bp, Homo sapiens
gcaggaaaaaaaaaa

SEQ ID NO: 59469 - DNA, 15 bp, Homo sapiens
agcaggaaaaaaaaa

SEQ ID NO: 59470 - DNA, 15 bp, Homo sapiens
cagcaggaaaaaaaa

SEQ ID NO: 59471 - DNA, 15 bp, Homo sapiens
acagcaggaaaaaaa

SEQ ID NO: 59472 - DNA, 15 bp, Homo sapiens
gacagcaggaaaaaa

SEQ ID NO: 59473 - DNA, 15 bp, Homo sapiens
ggacagcaggaaaaa

SEQ ID NO: 59474 - DNA, 15 bp, Homo sapiens
aggacagcaggaaaa

SEQ ID NO: 59475 - DNA, 15 bp, Homo sapiens
aaggacagcaggaaa

SEQ ID NO: 59476 - DNA, 15 bp, Homo sapiens
gaaggacagcaggaa

SEQ ID NO: 59477 - DNA, 15 bp, Homo sapiens
tgaaggacagcagga

SEQ ID NO: 59478 - DNA, 15 bp, Homo sapiens
ttgaaggacagcagg

SEQ ID NO: 59479 - DNA, 15 bp, Homo sapiens
tttgaaggacagcag

SEQ ID NO: 59480 - DNA, 15 bp, Homo sapiens
ctttgaaggacagca

SEQ ID NO: 59481 - DNA, 15 bp, Homo sapiens
gctttgaaggacagc

SEQ ID NO: 59482 - DNA, 15 bp, Homo sapiens
ggctttgaaggacag

SEQ ID NO: 59483 - DNA, 15 bp, Homo sapiens
aggctttgaaggaca

SEQ ID NO: 59484 - DNA, 15 bp, Homo sapiens
taggctttgaaggac

SEQ ID NO: 59485 - DNA, 15 bp, Homo sapiens
gtaggctttgaagga

SEQ ID NO: 59486 - DNA, 15 bp, Homo sapiens
agtaggctttgaagg

SEQ ID NO: 59487 - DNA, 15 bp, Homo sapiens
cagtaggctttgaag

SEQ ID NO: 59488 - DNA, 15 bp, Homo sapiens
acagtaggctttgaa

SEQ ID NO: 59489 - DNA, 15 bp, Homo sapiens
aacagtaggctttga

SEQ ID NO: 59490 - DNA, 15 bp, Homo sapiens
aaacagtaggctttg

SEQ ID NO: 59491 - DNA, 15 bp, Homo sapiens
taaacagtaggcttt

SEQ ID NO: 59492 - DNA, 15 bp, Homo sapiens
ttaaacagtaggctt

SEQ ID NO: 59493 - DNA, 15 bp, Homo sapiens
tttaaacagtaggct

SEQ ID NO: 59494 - DNA, 15 bp, Homo sapiens
ttttaaacagtaggc

SEQ ID NO: 59495 - DNA, 15 bp, Homo sapiens
tttttaaacagtagg

SEQ ID NO: 59496 - DNA, 15 bp, Homo sapiens
ttttttaaacagtag

SEQ ID NO: 59497 - DNA, 15 bp, Homo sapiens
tttttttaaacagta

SEQ ID NO: 59498 - DNA, 15 bp, Homo sapiens
ttttttttaaacagt

SEQ ID NO: 59499 - DNA, 15 bp, Homo sapiens
tttttttttaaacag

SEQ ID NO: 59500 - DNA, 15 bp, Homo sapiens
tttttttttttaaac

SEQ ID NO: 59501 - DNA, 15 bp, Homo sapiens
gtttttttttttttt

SEQ ID NO: 59502 - DNA, 15 bp, Homo sapiens
atgtttttttttttt

SEQ ID NO: 59503 - DNA, 15 bp, Homo sapiens
catgttttttttttt

SEQ ID NO: 59504 - DNA, 15 bp, Homo sapiens
ccatgtttttttttt

SEQ ID NO: 59505 - DNA, 15 bp, Homo sapiens
gccatgttttttttt

SEQ ID NO: 59506 - DNA, 15 bp, Homo sapiens
ggccatgtttttttt

SEQ ID NO: 59507 - DNA, 15 bp, Homo sapiens
aggccatgttttttt

SEQ ID NO: 59508 - DNA, 15 bp, Homo sapiens
caggccatgtttttt

SEQ ID NO: 59509 - DNA, 15 bp, Homo sapiens
tcaggccatgttttt

SEQ ID NO: 59510 - DNA, 15 bp, Homo sapiens
ctcaggccatgtttt

SEQ ID NO: 59511 - DNA, 15 bp, Homo sapiens
tctcaggccatgttt

SEQ ID NO: 59512 - DNA, 15 bp, Homo sapiens
ctctcaggccatgtt

SEQ ID NO: 59513 - DNA, 15 bp, Homo sapiens
actctcaggccatgt

SEQ ID NO: 59514 - DNA, 15 bp, Homo sapiens
tactctcaggccatg

SEQ ID NO: 59515 - DNA, 15 bp, Homo sapiens
ctactctcaggccat

SEQ ID NO: 59516 - DNA, 15 bp, Homo sapiens
tctactctcaggcca

SEQ ID NO: 59517 - DNA, 15 bp, Homo sapiens
ctctactctcaggcc

SEQ ID NO: 59518 - DNA, 15 bp, Homo sapiens
actctactctcaggc

SEQ ID NO: 59519 - DNA, 15 bp, Homo sapiens
tactctactctcagg

SEQ ID NO: 59520 - DNA, 15 bp, Homo sapiens
atactctactctcag

SEQ ID NO: 59521 - DNA, 15 bp, Homo sapiens
gatactctactctca

SEQ ID NO: 59522 - DNA, 15 bp, Homo sapiens
agatactctactctc

SEQ ID NO: 59523 - DNA, 15 bp, Homo sapiens
cagatactctactct

SEQ ID NO: 59524 - DNA, 15 bp, Homo sapiens
acagatactctactc

SEQ ID NO: 59525 - DNA, 15 bp, Homo sapiens
gacagatactctact

SEQ ID NO: 59526 - DNA, 15 bp, Homo sapiens
agacagatactctac

SEQ ID NO: 59527 - DNA, 15 bp, Homo sapiens
tagacagatactcta

SEQ ID NO: 59528 - DNA, 15 bp, Homo sapiens
gtagacagatactct

SEQ ID NO: 59529 - DNA, 15 bp, Homo sapiens
agtagacagatactc

SEQ ID NO: 59530 - DNA, 15 bp, Homo sapiens
gagtagacagatact

SEQ ID NO: 59531 - DNA, 15 bp, Homo sapiens
tgagtagacagatac

SEQ ID NO: 59532 - DNA, 15 bp, Homo sapiens
atgagtagacagata

SEQ ID NO: 59533 - DNA, 15 bp, Homo sapiens
catgagtagacagat

SEQ ID NO: 59534 - DNA, 15 bp, Homo sapiens
acatgagtagacaga

SEQ ID NO: 59535 - DNA, 15 bp, Homo sapiens
aacatgagtagacag

SEQ ID NO: 59536 - DNA, 15 bp, Homo sapiens
aaacatgagtagaca

SEQ ID NO: 59537 - DNA, 15 bp, Homo sapiens
taaacatgagtagac

SEQ ID NO: 59538 - DNA, 15 bp, Homo sapiens
ttaaacatgagtaga

SEQ ID NO: 59539 - DNA, 15 bp, Homo sapiens
attaaacatgagtag

SEQ ID NO: 59540 - DNA, 15 bp, Homo sapiens
aattaaacatgagta

SEQ ID NO: 59541 - DNA, 15 bp, Homo sapiens
taattaaacatgagt

SEQ ID NO: 59542 - DNA, 15 bp, Homo sapiens
ttaattaaacatgag

SEQ ID NO: 59543 - DNA, 15 bp, Homo sapiens
cttaattaaacatga

SEQ ID NO: 59544 - DNA, 15 bp, Homo sapiens
ccttaattaaacatg

SEQ ID NO: 59545 - DNA, 15 bp, Homo sapiens
tccttaattaaacat

SEQ ID NO: 59546 - DNA, 15 bp, Homo sapiens
ttccttaattaaaca

SEQ ID NO: 59547 - DNA, 15 bp, Homo sapiens
tttccttaattaaac

SEQ ID NO: 59548 - DNA, 15 bp, Homo sapiens
ttttccttaattaaa

SEQ ID NO: 59549 - DNA, 15 bp, Homo sapiens
tttttccttaattaa

SEQ ID NO: 59550 - DNA, 15 bp, Homo sapiens
gtttttccttaatta

SEQ ID NO: 59551 - DNA, 15 bp, Homo sapiens
tgtttttccttaatt

SEQ ID NO: 59552 - DNA, 15 bp, Homo sapiens
gtgtttttccttaat

SEQ ID NO: 59553 - DNA, 15 bp, Homo sapiens
agtgtttttccttaa

SEQ ID NO: 59554 - DNA, 15 bp, Homo sapiens
aagtgtttttcctta

SEQ ID NO: 59555 - DNA, 15 bp, Homo sapiens
taagtgtttttcctt

SEQ ID NO: 59556 - DNA, 15 bp, Homo sapiens
ataagtgtttttcct

SEQ ID NO: 59557 - DNA, 15 bp, Homo sapiens
aataagtgtttttcc

SEQ ID NO: 59558 - DNA, 15 bp, Homo sapiens
aaataagtgtttttc

SEQ ID NO: 59559 - DNA, 15 bp, Homo sapiens
aaaataagtgttttt

SEQ ID NO: 59560 - DNA, 15 bp, Homo sapiens
aaaaataagtgtttt

SEQ ID NO: 59561 - DNA, 15 bp, Homo sapiens
taaaaataagtgttt

SEQ ID NO: 59562 - DNA, 15 bp, Homo sapiens
ctaaaaataagtgtt

SEQ ID NO: 59563 - DNA, 15 bp, Homo sapiens
cctaaaaataagtgt

SEQ ID NO: 59564 - DNA, 15 bp, Homo sapiens
ccctaaaaataagtg

SEQ ID NO: 59565 - DNA, 15 bp, Homo sapiens
gccctaaaaataagt

SEQ ID NO: 59566 - DNA, 15 bp, Homo sapiens
agccctaaaaataag

SEQ ID NO: 59567 - DNA, 15 bp, Homo sapiens
aagccctaaaaataa

SEQ ID NO: 59568 - DNA, 15 bp, Homo sapiens
aaagccctaaaaata

SEQ ID NO: 59569 - DNA, 15 bp, Homo sapiens
taaagccctaaaaat

SEQ ID NO: 59570 - DNA, 15 bp, Homo sapiens
ctaaagccctaaaaa

SEQ ID NO: 59571 - DNA, 15 bp, Homo sapiens
actaaagccctaaaa

SEQ ID NO: 59572 - DNA, 15 bp, Homo sapiens
gactaaagccctaaa

SEQ ID NO: 59573 - DNA, 15 bp, Homo sapiens
tgactaaagccctaa

SEQ ID NO: 59574 - DNA, 15 bp, Homo sapiens
atgactaaagcccta

SEQ ID NO: 59575 - DNA, 15 bp, Homo sapiens
gatgactaaagccct

SEQ ID NO: 59576 - DNA, 15 bp, Homo sapiens
tgatgactaaagccc

SEQ ID NO: 59577 - DNA, 15 bp, Homo sapiens
gtgatgactaaagcc

SEQ ID NO: 59578 - DNA, 15 bp, Homo sapiens
agtgatgactaaagc

SEQ ID NO: 59579 - DNA, 15 bp, Homo sapiens
aagtgatgactaaag

SEQ ID NO: 59580 - DNA, 15 bp, Homo sapiens
gaagtgatgactaaa

SEQ ID NO: 59581 - DNA, 15 bp, Homo sapiens
tgaagtgatgactaa

SEQ ID NO: 59582 - DNA, 15 bp, Homo sapiens
atgaagtgatgacta

SEQ ID NO: 59583 - DNA, 15 bp, Homo sapiens
tatgaagtgatgact

SEQ ID NO: 59584 - DNA, 15 bp, Homo sapiens
ttatgaagtgatgac

SEQ ID NO: 59585 - DNA, 15 bp, Homo sapiens
tttatgaagtgatga

SEQ ID NO: 59586 - DNA, 15 bp, Homo sapiens
atttatgaagtgatg

SEQ ID NO: 59587 - DNA, 15 bp, Homo sapiens
aatttatgaagtgat

SEQ ID NO: 59588 - DNA, 15 bp, Homo sapiens
caatttatgaagtga

SEQ ID NO: 59589 - DNA, 15 bp, Homo sapiens
acaatttatgaagtg

SEQ ID NO: 59590 - DNA, 15 bp, Homo sapiens
tacaatttatgaagt

SEQ ID NO: 59591 - DNA, 15 bp, Homo sapiens
atacaatttatgaag

SEQ ID NO: 59592 - DNA, 15 bp, Homo sapiens
tatacaatttatgaa

SEQ ID NO: 59593 - DNA, 15 bp, Homo sapiens
ttatacaatttatga

SEQ ID NO: 59594 - DNA, 15 bp, Homo sapiens
cttatacaatttatg

SEQ ID NO: 59595 - DNA, 15 bp, Homo sapiens
gcttatacaatttat

SEQ ID NO: 59596 - DNA, 15 bp, Homo sapiens
tgcttatacaattta

SEQ ID NO: 59597 - DNA, 15 bp, Homo sapiens
gtgcttatacaattt

SEQ ID NO: 59598 - DNA, 15 bp, Homo sapiens
tgtgcttatacaatt

SEQ ID NO: 59599 - DNA, 15 bp, Homo sapiens
atgtgcttatacaat

SEQ ID NO: 59600 - DNA, 15 bp, Homo sapiens
aatgtgcttatacaa

SEQ ID NO: 59601 - DNA, 15 bp, Homo sapiens
taatgtgcttataca

SEQ ID NO: 59602 - DNA, 15 bp, Homo sapiens
ttaatgtgcttatac

SEQ ID NO: 59603 - DNA, 15 bp, Homo sapiens
tttaatgtgcttata

SEQ ID NO: 59604 - DNA, 15 bp, Homo sapiens
atttaatgtgcttat

SEQ ID NO: 59605 - DNA, 15 bp, Homo sapiens
tatttaatgtgctta

SEQ ID NO: 59606 - DNA, 15 bp, Homo sapiens
ctatttaatgtgctt

SEQ ID NO: 59607 - DNA, 15 bp, Homo sapiens
gctatttaatgtgct

SEQ ID NO: 59608 - DNA, 15 bp, Homo sapiens
cgctatttaatgtgc

SEQ ID NO: 59609 - DNA, 15 bp, Homo sapiens
acgctatttaatgtg

SEQ ID NO: 59610 - DNA, 15 bp, Homo sapiens
aacgctatttaatgt

SEQ ID NO: 59611 - DNA, 15 bp, Homo sapiens
gaacgctatttaatg

SEQ ID NO: 59612 - DNA, 15 bp, Homo sapiens
agaacgctatttaat

SEQ ID NO: 59613 - DNA, 15 bp, Homo sapiens
tagaacgctatttaa

SEQ ID NO: 59614 - DNA, 15 bp, Homo sapiens
ctagaacgctattta

SEQ ID NO: 59615 - DNA, 15 bp, Homo sapiens
actagaacgctattt

SEQ ID NO: 59616 - DNA, 15 bp, Homo sapiens
gactagaacgctatt

SEQ ID NO: 59617 - DNA, 15 bp, Homo sapiens
ggactagaacgctat

SEQ ID NO: 59618 - DNA, 15 bp, Homo sapiens
aggactagaacgcta

SEQ ID NO: 59619 - DNA, 15 bp, Homo sapiens
caggactagaacgct

SEQ ID NO: 59620 - DNA, 15 bp, Homo sapiens
tcaggactagaacgc

SEQ ID NO: 59621 - DNA, 15 bp, Homo sapiens
ttcaggactagaacg

SEQ ID NO: 59622 - DNA, 15 bp, Homo sapiens
tttcaggactagaac

SEQ ID NO: 59623 - DNA, 15 bp, Homo sapiens
ttttcaggactagaa

SEQ ID NO: 59624 - DNA, 15 bp, Homo sapiens
tttttcaggactaga

SEQ ID NO: 59625 - DNA, 15 bp, Homo sapiens
ctttttcaggactag

SEQ ID NO: 59626 - DNA, 15 bp, Homo sapiens
actttttcaggacta

SEQ ID NO: 59627 - DNA, 15 bp, Homo sapiens
gactttttcaggact

SEQ ID NO: 59628 - DNA, 15 bp, Homo sapiens
ggactttttcaggac

SEQ ID NO: 59629 - DNA, 15 bp, Homo sapiens
tggactttttcagga

SEQ ID NO: 59630 - DNA, 15 bp, Homo sapiens
ttggactttttcagg

SEQ ID NO: 59631 - DNA, 15 bp, Homo sapiens
cttggactttttcag

SEQ ID NO: 59632 - DNA, 15 bp, Homo sapiens
tcttggactttttca

SEQ ID NO: 59633 - DNA, 15 bp, Homo sapiens
atcttggactttttc

SEQ ID NO: 59634 - DNA, 15 bp, Homo sapiens
aatcttggacttttt

SEQ ID NO: 59635 - DNA, 15 bp, Homo sapiens
gaatcttggactttt

SEQ ID NO: 59636 - DNA, 15 bp, Homo sapiens
agaatcttggacttt

SEQ ID NO: 59637 - DNA, 15 bp, Homo sapiens
aagaatcttggactt

SEQ ID NO: 59638 - DNA, 15 bp, Homo sapiens
taagaatcttggact

SEQ ID NO: 59639 - DNA, 15 bp, Homo sapiens
ctaagaatcttggac

SEQ ID NO: 59640 - DNA, 15 bp, Homo sapiens
tctaagaatcttgga

SEQ ID NO: 59641 - DNA, 15 bp, Homo sapiens
ttctaagaatcttgg

SEQ ID NO: 59642 - DNA, 15 bp, Homo sapiens
tttctaagaatcttg

SEQ ID NO: 59643 - DNA, 15 bp, Homo sapiens
ttttctaagaatctt

SEQ ID NO: 59644 - DNA, 15 bp, Homo sapiens
attttctaagaatct

SEQ ID NO: 59645 - DNA, 15 bp, Homo sapiens
aattttctaagaatc

SEQ ID NO: 59646 - DNA, 15 bp, Homo sapiens
caattttctaagaat

SEQ ID NO: 59647 - DNA, 15 bp, Homo sapiens
acaattttctaagaa

SEQ ID NO: 59648 - DNA, 15 bp, Homo sapiens
cacaattttctaaga

SEQ ID NO: 59649 - DNA, 15 bp, Homo sapiens
gcacaattttctaag

SEQ ID NO: 59650 - DNA, 15 bp, Homo sapiens
tgcacaattttctaa

SEQ ID NO: 59651 - DNA, 15 bp, Homo sapiens
atgcacaattttcta

SEQ ID NO: 59652 - DNA, 15 bp, Homo sapiens
tatgcacaattttct

SEQ ID NO: 59653 - DNA, 15 bp, Homo sapiens
atatgcacaattttc

SEQ ID NO: 59654 - DNA, 15 bp, Homo sapiens
aatatgcacaatttt

SEQ ID NO: 59655 - DNA, 15 bp, Homo sapiens
aaatatgcacaattt

SEQ ID NO: 59656 - DNA, 15 bp, Homo sapiens
aaaatatgcacaatt

SEQ ID NO: 59657 - DNA, 15 bp, Homo sapiens
aaaaatatgcacaat

SEQ ID NO: 59658 - DNA, 15 bp, Homo sapiens
taaaaatatgcacaa

SEQ ID NO: 59659 - DNA, 15 bp, Homo sapiens
ataaaaatatgcaca

SEQ ID NO: 59660 - DNA, 15 bp, Homo sapiens
aataaaaatatgcac

SEQ ID NO: 59661 - DNA, 15 bp, Homo sapiens
taataaaaatatgca

SEQ ID NO: 59662 - DNA, 15 bp, Homo sapiens
ataataaaaatatgc

SEQ ID NO: 59663 - DNA, 15 bp, Homo sapiens
cataataaaaatatg

SEQ ID NO: 59664 - DNA, 15 bp, Homo sapiens
tcataataaaaatat

SEQ ID NO: 59665 - DNA, 15 bp, Homo sapiens
gtcataataaaaata

SEQ ID NO: 59666 - DNA, 15 bp, Homo sapiens
tgtcataataaaaat

SEQ ID NO: 59667 - DNA, 15 bp, Homo sapiens
ctgtcataataaaaa

SEQ ID NO: 59668 - DNA, 15 bp, Homo sapiens
tctgtcataataaaa

SEQ ID NO: 59669 - DNA, 15 bp, Homo sapiens
atctgtcataataaa

SEQ ID NO: 59670 - DNA, 15 bp, Homo sapiens
catctgtcataataa

SEQ ID NO: 59671 - DNA, 15 bp, Homo sapiens
acatctgtcataata

SEQ ID NO: 59672 - DNA, 15 bp, Homo sapiens
aacatctgtcataat

SEQ ID NO: 59673 - DNA, 15 bp, Homo sapiens
aaacatctgtcataa

SEQ ID NO: 59674 - DNA, 15 bp, Homo sapiens
caaacatctgtcata

SEQ ID NO: 59675 - DNA, 15 bp, Homo sapiens
tcaaacatctgtcat

SEQ ID NO: 59676 - DNA, 15 bp, Homo sapiens
ttcaaacatctgtca

SEQ ID NO: 59677 - DNA, 15 bp, Homo sapiens
cttcaaacatctgtc

SEQ ID NO: 59678 - DNA, 15 bp, Homo sapiens
tcttcaaacatctgt

SEQ ID NO: 59679 - DNA, 15 bp, Homo sapiens
atcttcaaacatctg

SEQ ID NO: 59680 - DNA, 15 bp, Homo sapiens
tatcttcaaacatct

SEQ ID NO: 59681 - DNA, 15 bp, Homo sapiens
ttatcttcaaacatc

SEQ ID NO: 59682 - DNA, 15 bp, Homo sapiens
attatcttcaaacat

SEQ ID NO: 59683 - DNA, 15 bp, Homo sapiens
aattatcttcaaaca

SEQ ID NO: 59684 - DNA, 15 bp, Homo sapiens
gaattatcttcaaac

SEQ ID NO: 59685 - DNA, 15 bp, Homo sapiens
ggaattatcttcaaa

SEQ ID NO: 59686 - DNA, 15 bp, Homo sapiens
gggaattatcttcaa

SEQ ID NO: 59687 - DNA, 15 bp, Homo sapiens
ggggaattatcttca

SEQ ID NO: 59688 - DNA, 15 bp, Homo sapiens
tggggaattatcttc

SEQ ID NO: 59689 - DNA, 15 bp, Homo sapiens
ctggggaattatctt

SEQ ID NO: 59690 - DNA, 15 bp, Homo sapiens
tctggggaattatct

SEQ ID NO: 59691 - DNA, 15 bp, Homo sapiens
ttctggggaattatc

SEQ ID NO: 59692 - DNA, 15 bp, Homo sapiens
attctggggaattat

SEQ ID NO: 59693 - DNA, 15 bp, Homo sapiens
cattctggggaatta

SEQ ID NO: 59694 - DNA, 15 bp, Homo sapiens
ccattctggggaatt

SEQ ID NO: 59695 - DNA, 15 bp, Homo sapiens
tccattctggggaat

SEQ ID NO: 59696 - DNA, 15 bp, Homo sapiens
atccattctggggaa

SEQ ID NO: 59697 - DNA, 15 bp, Homo sapiens
aatccattctgggga

SEQ ID NO: 59698 - DNA, 15 bp, Homo sapiens
aaatccattctgggg

SEQ ID NO: 59699 - DNA, 15 bp, Homo sapiens
caaatccattctggg

SEQ ID NO: 59700 - DNA, 15 bp, Homo sapiens
tcaaatccattctgg

SEQ ID NO: 59701 - DNA, 15 bp, Homo sapiens
atcaaatccattctg

SEQ ID NO: 59702 - DNA, 15 bp, Homo sapiens
tatcaaatccattct

SEQ ID NO: 59703 - DNA, 15 bp, Homo sapiens
gtatcaaatccattc

SEQ ID NO: 59704 - DNA, 15 bp, Homo sapiens
agtatcaaatccatt

SEQ ID NO: 59705 - DNA, 15 bp, Homo sapiens
aagtatcaaatccat

SEQ ID NO: 59706 - DNA, 15 bp, Homo sapiens
aaagtatcaaatcca

SEQ ID NO: 59707 - DNA, 15 bp, Homo sapiens
taaagtatcaaatcc

SEQ ID NO: 59708 - DNA, 15 bp, Homo sapiens
ctaaagtatcaaatc

SEQ ID NO: 59709 - DNA, 15 bp, Homo sapiens
tctaaagtatcaaat

SEQ ID NO: 59710 - DNA, 15 bp, Homo sapiens
atctaaagtatcaaa

SEQ ID NO: 59711 - DNA, 15 bp, Homo sapiens
aatctaaagtatcaa

SEQ ID NO: 59712 - DNA, 15 bp, Homo sapiens
aaatctaaagtatca

SEQ ID NO: 59713 - DNA, 15 bp, Homo sapiens
gaaatctaaagtatc

SEQ ID NO: 59714 - DNA, 15 bp, Homo sapiens
tgaaatctaaagtat

SEQ ID NO: 59715 - DNA, 15 bp, Homo sapiens
ttgaaatctaaagta

SEQ ID NO: 59716 - DNA, 15 bp, Homo sapiens
attgaaatctaaagt

SEQ ID NO: 59717 - DNA, 15 bp, Homo sapiens
aattgaaatctaaag

SEQ ID NO: 59718 - DNA, 15 bp, Homo sapiens
aaattgaaatctaaa

SEQ ID NO: 59719 - DNA, 15 bp, Homo sapiens
aaaattgaaatctaa

SEQ ID NO: 59720 - DNA, 15 bp, Homo sapiens
caaaattgaaatcta

SEQ ID NO: 59721 - DNA, 15 bp, Homo sapiens
acaaaattgaaatct

SEQ ID NO: 59722 - DNA, 15 bp, Homo sapiens
cacaaaattgaaatc

SEQ ID NO: 59723 - DNA, 15 bp, Homo sapiens
ccacaaaattgaaat

SEQ ID NO: 59724 - DNA, 15 bp, Homo sapiens
gccacaaaattgaaa

SEQ ID NO: 59725 - DNA, 15 bp, Homo sapiens
agccacaaaattgaa

SEQ ID NO: 59726 - DNA, 15 bp, Homo sapiens
aagccacaaaattga

SEQ ID NO: 59727 - DNA, 15 bp, Homo sapiens
aaagccacaaaattg

SEQ ID NO: 59728 - DNA, 15 bp, Homo sapiens
aaaagccacaaaatt

SEQ ID NO: 59729 - DNA, 15 bp, Homo sapiens
caaaagccacaaaat

SEQ ID NO: 59730 - DNA, 15 bp, Homo sapiens
acaaaagccacaaaa

SEQ ID NO: 59731 - DNA, 15 bp, Homo sapiens
gacaaaagccacaaa

SEQ ID NO: 59732 - DNA, 15 bp, Homo sapiens
agacaaaagccacaa

SEQ ID NO: 59733 - DNA, 15 bp, Homo sapiens
tagacaaaagccaca

SEQ ID NO: 59734 - DNA, 15 bp, Homo sapiens
atagacaaaagccac

SEQ ID NO: 59735 - DNA, 15 bp, Homo sapiens
aatagacaaaagcca

SEQ ID NO: 59736 - DNA, 15 bp, Homo sapiens
taatagacaaaagcc

SEQ ID NO: 59737 - DNA, 15 bp, Homo sapiens
ataatagacaaaagc

SEQ ID NO: 59738 - DNA, 15 bp, Homo sapiens
aataatagacaaaag

SEQ ID NO: 59739 - DNA, 15 bp, Homo sapiens
gaataatagacaaaa

SEQ ID NO: 59740 - DNA, 15 bp, Homo sapiens
agaataatagacaaa

SEQ ID NO: 59741 - DNA, 15 bp, Homo sapiens
cagaataatagacaa

SEQ ID NO: 59742 - DNA, 15 bp, Homo sapiens
acagaataatagaca

SEQ ID NO: 59743 - DNA, 15 bp, Homo sapiens
tacagaataatagac

SEQ ID NO: 59744 - DNA, 15 bp, Homo sapiens
gtacagaataataga

SEQ ID NO: 59745 - DNA, 15 bp, Homo sapiens
agtacagaataatag

SEQ ID NO: 59746 - DNA, 15 bp, Homo sapiens
gagtacagaataata

SEQ ID NO: 59747 - DNA, 15 bp, Homo sapiens
agagtacagaataat

SEQ ID NO: 59748 - DNA, 15 bp, Homo sapiens
cagagtacagaataa

SEQ ID NO: 59749 - DNA, 15 bp, Homo sapiens
gcagagtacagaata

SEQ ID NO: 59750 - DNA, 15 bp, Homo sapiens
ggcagagtacagaat

SEQ ID NO: 59751 - DNA, 15 bp, Homo sapiens
tggcagagtacagaa

SEQ ID NO: 59752 - DNA, 15 bp, Homo sapiens
atggcagagtacaga

SEQ ID NO: 59753 - DNA, 15 bp, Homo sapiens
gatggcagagtacag

SEQ ID NO: 59754 - DNA, 15 bp, Homo sapiens
tgatggcagagtaca

SEQ ID NO: 59755 - DNA, 15 bp, Homo sapiens
ctgatggcagagtac

SEQ ID NO: 59756 - DNA, 15 bp, Homo sapiens
gctgatggcagagta

SEQ ID NO: 59757 - DNA, 15 bp, Homo sapiens
tgctgatggcagagt

SEQ ID NO: 59758 - DNA, 15 bp, Homo sapiens
atgctgatggcagag

SEQ ID NO: 59759 - DNA, 15 bp, Homo sapiens
tatgctgatggcaga

SEQ ID NO: 59760 - DNA, 15 bp, Homo sapiens
atatgctgatggcag

SEQ ID NO: 59761 - DNA, 15 bp, Homo sapiens
catatgctgatggca

SEQ ID NO: 59762 - DNA, 15 bp, Homo sapiens
ccatatgctgatggc

SEQ ID NO: 59763 - DNA, 15 bp, Homo sapiens
tccatatgctgatgg

SEQ ID NO: 59764 - DNA, 15 bp, Homo sapiens
ttccatatgctgatg

SEQ ID NO: 59765 - DNA, 15 bp, Homo sapiens
tttccatatgctgat

SEQ ID NO: 59766 - DNA, 15 bp, Homo sapiens
ctttccatatgctga

SEQ ID NO: 59767 - DNA, 15 bp, Homo sapiens
gctttccatatgctg

SEQ ID NO: 59768 - DNA, 15 bp, Homo sapiens
agctttccatatgct

SEQ ID NO: 59769 - DNA, 15 bp, Homo sapiens
aagctttccatatgc

SEQ ID NO: 59770 - DNA, 15 bp, Homo sapiens
gaagctttccatatg

SEQ ID NO: 59771 - DNA, 15 bp, Homo sapiens
tgaagctttccatat

SEQ ID NO: 59772 - DNA, 15 bp, Homo sapiens
atgaagctttccata

SEQ ID NO: 59773 - DNA, 15 bp, Homo sapiens
aatgaagctttccat

SEQ ID NO: 59774 - DNA, 15 bp, Homo sapiens
aaatgaagctttcca

SEQ ID NO: 59775 - DNA, 15 bp, Homo sapiens
taaatgaagctttcc

SEQ ID NO: 59776 - DNA, 15 bp, Homo sapiens
gtaaatgaagctttc

SEQ ID NO: 59777 - DNA, 15 bp, Homo sapiens
agtaaatgaagcttt

SEQ ID NO: 59778 - DNA, 15 bp, Homo sapiens
gagtaaatgaagctt

SEQ ID NO: 59779 - DNA, 15 bp, Homo sapiens
tgagtaaatgaagct

SEQ ID NO: 59780 - DNA, 15 bp, Homo sapiens
atgagtaaatgaagc

SEQ ID NO: 59781 - DNA, 15 bp, Homo sapiens
gatgagtaaatgaag

SEQ ID NO: 59782 - DNA, 15 bp, Homo sapiens
tgatgagtaaatgaa

SEQ ID NO: 59783 - DNA, 15 bp, Homo sapiens
atgatgagtaaatga

SEQ ID NO: 59784 - DNA, 15 bp, Homo sapiens
catgatgagtaaatg

SEQ ID NO: 59785 - DNA, 15 bp, Homo sapiens
tcatgatgagtaaat

SEQ ID NO: 59786 - DNA, 15 bp, Homo sapiens
gtcatgatgagtaaa

SEQ ID NO: 59787 - DNA, 15 bp, Homo sapiens
agtcatgatgagtaa

SEQ ID NO: 59788 - DNA, 15 bp, Homo sapiens
aagtcatgatgagta

SEQ ID NO: 59789 - DNA, 15 bp, Homo sapiens
caagtcatgatgagt

SEQ ID NO: 59790 - DNA, 15 bp, Homo sapiens
acaagtcatgatgag

SEQ ID NO: 59791 - DNA, 15 bp, Homo sapiens
cacaagtcatgatga

SEQ ID NO: 59792 - DNA, 15 bp, Homo sapiens
gcacaagtcatgatg

SEQ ID NO: 59793 - DNA, 15 bp, Homo sapiens
ggcacaagtcatgat

SEQ ID NO: 59794 - DNA, 15 bp, Homo sapiens
tggcacaagtcatga

SEQ ID NO: 59795 - DNA, 15 bp, Homo sapiens
atggcacaagtcatg

SEQ ID NO: 59796 - DNA, 15 bp, Homo sapiens
tatggcacaagtcat

SEQ ID NO: 59797 - DNA, 15 bp, Homo sapiens
atatggcacaagtca

SEQ ID NO: 59798 - DNA, 15 bp, Homo sapiens
tatatggcacaagtc

SEQ ID NO: 59799 - DNA, 15 bp, Homo sapiens
ttatatggcacaagt

SEQ ID NO: 59800 - DNA, 15 bp, Homo sapiens
tttatatggcacaag

SEQ ID NO: 59801 - DNA, 15 bp, Homo sapiens
ttttatatggcacaa

SEQ ID NO: 59802 - DNA, 15 bp, Homo sapiens
tttttatatggcaca

SEQ ID NO: 59803 - DNA, 15 bp, Homo sapiens
atttttatatggcac

SEQ ID NO: 59804 - DNA, 15 bp, Homo sapiens
aatttttatatggca

SEQ ID NO: 59805 - DNA, 15 bp, Homo sapiens
caatttttatatggc

SEQ ID NO: 59806 - DNA, 15 bp, Homo sapiens
tcaatttttatatgg

SEQ ID NO: 59807 - DNA, 15 bp, Homo sapiens
atcaatttttatatg

SEQ ID NO: 59808 - DNA, 15 bp, Homo sapiens
tatcaatttttatat

SEQ ID NO: 59809 - DNA, 15 bp, Homo sapiens
atatcaatttttata

SEQ ID NO: 59810 - DNA, 15 bp, Homo sapiens
aatatcaatttttat

SEQ ID NO: 59811 - DNA, 15 bp, Homo sapiens
aaatatcaattttta

SEQ ID NO: 59812 - DNA, 15 bp, Homo sapiens
gaaatatcaattttt

SEQ ID NO: 59813 - DNA, 15 bp, Homo sapiens
cgaaatatcaatttt

SEQ ID NO: 59814 - DNA, 15 bp, Homo sapiens
ccgaaatatcaattt

SEQ ID NO: 59815 - DNA, 15 bp, Homo sapiens
tccgaaatatcaatt

SEQ ID NO: 59816 - DNA, 15 bp, Homo sapiens
ttccgaaatatcaat

SEQ ID NO: 59817 - DNA, 15 bp, Homo sapiens
attccgaaatatcaa

SEQ ID NO: 59818 - DNA, 15 bp, Homo sapiens
tattccgaaatatca

SEQ ID NO: 59819 - DNA, 15 bp, Homo sapiens
ctattccgaaatatc

SEQ ID NO: 59820 - DNA, 15 bp, Homo sapiens
actattccgaaatat

SEQ ID NO: 59821 - DNA, 15 bp, Homo sapiens
gactattccgaaata

SEQ ID NO: 59822 - DNA, 15 bp, Homo sapiens
agactattccgaaat

SEQ ID NO: 59823 - DNA, 15 bp, Homo sapiens
tagactattccgaaa

SEQ ID NO: 59824 - DNA, 15 bp, Homo sapiens
ttagactattccgaa

SEQ ID NO: 59825 - DNA, 15 bp, Homo sapiens
tttagactattccga

SEQ ID NO: 59826 - DNA, 15 bp, Homo sapiens
ctttagactattccg

SEQ ID NO: 59827 - DNA, 15 bp, Homo sapiens
cctttagactattcc

SEQ ID NO: 59828 - DNA, 15 bp, Homo sapiens
tcctttagactattc

SEQ ID NO: 59829 - DNA, 15 bp, Homo sapiens
gtcctttagactatt

SEQ ID NO: 59830 - DNA, 15 bp, Homo sapiens
agtcctttagactat

SEQ ID NO: 59831 - DNA, 15 bp, Homo sapiens
aagtcctttagacta

SEQ ID NO: 59832 - DNA, 15 bp, Homo sapiens
aaagtcctttagact

SEQ ID NO: 59833 - DNA, 15 bp, Homo sapiens
aaaagtcctttagac

SEQ ID NO: 59834 - DNA, 15 bp, Homo sapiens
aaaaagtcctttaga

SEQ ID NO: 59835 - DNA, 15 bp, Homo sapiens
caaaaagtcctttag

SEQ ID NO: 59836 - DNA, 15 bp, Homo sapiens
acaaaaagtccttta

SEQ ID NO: 59837 - DNA, 15 bp, Homo sapiens
tacaaaaagtccttt

SEQ ID NO: 59838 - DNA, 15 bp, Homo sapiens
gtacaaaaagtcctt

SEQ ID NO: 59839 - DNA, 15 bp, Homo sapiens
agtacaaaaagtcct

SEQ ID NO: 59840 - DNA, 15 bp, Homo sapiens
aagtacaaaaagtcc

SEQ ID NO: 59841 - DNA, 15 bp, Homo sapiens
caagtacaaaaagtc

SEQ ID NO: 59842 - DNA, 15 bp, Homo sapiens
tcaagtacaaaaagt

SEQ ID NO: 59843 - DNA, 15 bp, Homo sapiens
ttcaagtacaaaaag

SEQ ID NO: 59844 - DNA, 15 bp, Homo sapiens
attcaagtacaaaaa

SEQ ID NO: 59845 - DNA, 15 bp, Homo sapiens
aattcaagtacaaaa

SEQ ID NO: 59846 - DNA, 15 bp, Homo sapiens
aaattcaagtacaaa

SEQ ID NO: 59847 - DNA, 15 bp, Homo sapiens
taaattcaagtacaa

SEQ ID NO: 59848 - DNA, 15 bp, Homo sapiens
ttaaattcaagtaca

SEQ ID NO: 59849 - DNA, 15 bp, Homo sapiens
attaaattcaagtac

SEQ ID NO: 59850 - DNA, 15 bp, Homo sapiens
gattaaattcaagta

SEQ ID NO: 59851 - DNA, 15 bp, Homo sapiens
tgattaaattcaagt

SEQ ID NO: 59852 - DNA, 15 bp, Homo sapiens
atgattaaattcaag

SEQ ID NO: 59853 - DNA, 15 bp, Homo sapiens
catgattaaattcaa

SEQ ID NO: 59854 - DNA, 15 bp, Homo sapiens
acatgattaaattca

SEQ ID NO: 59855 - DNA, 15 bp, Homo sapiens
aacatgattaaattc

SEQ ID NO: 59856 - DNA, 15 bp, Homo sapiens
caacatgattaaatt

SEQ ID NO: 59857 - DNA, 15 bp, Homo sapiens
acaacatgattaaat

SEQ ID NO: 59858 - DNA, 15 bp, Homo sapiens
aacaacatgattaaa

SEQ ID NO: 59859 - DNA, 15 bp, Homo sapiens
aaacaacatgattaa

SEQ ID NO: 59860 - DNA, 15 bp, Homo sapiens
gaaacaacatgatta

SEQ ID NO: 59861 - DNA, 15 bp, Homo sapiens
agaaacaacatgatt

SEQ ID NO: 59862 - DNA, 15 bp, Homo sapiens
tagaaacaacatgat

SEQ ID NO: 59863 - DNA, 15 bp, Homo sapiens
ttagaaacaacatga

SEQ ID NO: 59864 - DNA, 15 bp, Homo sapiens
attagaaacaacatg

SEQ ID NO: 59865 - DNA, 15 bp, Homo sapiens
tattagaaacaacat

SEQ ID NO: 59866 - DNA, 15 bp, Homo sapiens
atattagaaacaaca

SEQ ID NO: 59867 - DNA, 15 bp, Homo sapiens
aatattagaaacaac

SEQ ID NO: 59868 - DNA, 15 bp, Homo sapiens
gaatattagaaacaa

SEQ ID NO: 59869 - DNA, 15 bp, Homo sapiens
agaatattagaaaca

SEQ ID NO: 59870 - DNA, 15 bp, Homo sapiens
aagaatattagaaac

SEQ ID NO: 59871 - DNA, 15 bp, Homo sapiens
taagaatattagaaa

SEQ ID NO: 59872 - DNA, 15 bp, Homo sapiens
ttaagaatattagaa

SEQ ID NO: 59873 - DNA, 15 bp, Homo sapiens
tttaagaatattaga

SEQ ID NO: 59874 - DNA, 15 bp, Homo sapiens
ttttaagaatattag

SEQ ID NO: 59875 - DNA, 15 bp, Homo sapiens
cttttaagaatatta

SEQ ID NO: 59876 - DNA, 15 bp, Homo sapiens
gcttttaagaatatt

SEQ ID NO: 59877 - DNA, 15 bp, Homo sapiens
agcttttaagaatat

SEQ ID NO: 59878 - DNA, 15 bp, Homo sapiens
aagcttttaagaata

SEQ ID NO: 59879 - DNA, 15 bp, Homo sapiens
caagcttttaagaat

SEQ ID NO: 59880 - DNA, 15 bp, Homo sapiens
tcaagcttttaagaa

SEQ ID NO: 59881 - DNA, 15 bp, Homo sapiens
ttcaagcttttaaga

SEQ ID NO: 59882 - DNA, 15 bp, Homo sapiens
cttcaagcttttaag

SEQ ID NO: 59883 - DNA, 15 bp, Homo sapiens
tcttcaagcttttaa

SEQ ID NO: 59884 - DNA, 15 bp, Homo sapiens
gtcttcaagctttta

SEQ ID NO: 59885 - DNA, 15 bp, Homo sapiens
agtcttcaagctttt

SEQ ID NO: 59886 - DNA, 15 bp, Homo sapiens
tagtcttcaagcttt

SEQ ID NO: 59887 - DNA, 15 bp, Homo sapiens
ttagtcttcaagctt

SEQ ID NO: 59888 - DNA, 15 bp, Homo sapiens
tttagtcttcaagct

SEQ ID NO: 59889 - DNA, 15 bp, Homo sapiens
ctttagtcttcaagc

SEQ ID NO: 59890 - DNA, 15 bp, Homo sapiens
gctttagtcttcaag

SEQ ID NO: 59891 - DNA, 15 bp, Homo sapiens
tgctttagtcttcaa

SEQ ID NO: 59892 - DNA, 15 bp, Homo sapiens
atgctttagtcttca

SEQ ID NO: 59893 - DNA, 15 bp, Homo sapiens
tatgctttagtcttc

SEQ ID NO: 59894 - DNA, 15 bp, Homo sapiens
atatgctttagtctt

SEQ ID NO: 59895 - DNA, 15 bp, Homo sapiens
gatatgctttagtct

SEQ ID NO: 59896 - DNA, 15 bp, Homo sapiens
ggatatgctttagtc

SEQ ID NO: 59897 - DNA, 15 bp, Homo sapiens
aggatatgctttagt

SEQ ID NO: 59898 - DNA, 15 bp, Homo sapiens
aaggatatgctttag

SEQ ID NO: 59899 - DNA, 15 bp, Homo sapiens
aaaggatatgcttta

SEQ ID NO: 59900 - DNA, 15 bp, Homo sapiens
gaaaggatatgcttt

SEQ ID NO: 59901 - DNA, 15 bp, Homo sapiens
tgaaaggatatgctt

SEQ ID NO: 59902 - DNA, 15 bp, Homo sapiens
ttgaaaggatatgct

SEQ ID NO: 59903 - DNA, 15 bp, Homo sapiens
gttgaaaggatatgc

SEQ ID NO: 59904 - DNA, 15 bp, Homo sapiens
tgttgaaaggatatg

SEQ ID NO: 59905 - DNA, 15 bp, Homo sapiens
ttgttgaaaggatat

SEQ ID NO: 59906 - DNA, 15 bp, Homo sapiens
tttgttgaaaggata

SEQ ID NO: 59907 - DNA, 15 bp, Homo sapiens
ctttgttgaaaggat

SEQ ID NO: 59908 - DNA, 15 bp, Homo sapiens
gctttgttgaaagga

SEQ ID NO: 59909 - DNA, 15 bp, Homo sapiens
tgctttgttgaaagg

SEQ ID NO: 59910 - DNA, 15 bp, Homo sapiens
atgctttgttgaaag

SEQ ID NO: 59911 - DNA, 15 bp, Homo sapiens
tatgctttgttgaaa

SEQ ID NO: 59912 - DNA, 15 bp, Homo sapiens
ctatgctttgttgaa

SEQ ID NO: 59913 - DNA, 15 bp, Homo sapiens
actatgctttgttga

SEQ ID NO: 59914 - DNA, 15 bp, Homo sapiens
tactatgctttgttg

SEQ ID NO: 59915 - DNA, 15 bp, Homo sapiens
ttactatgctttgtt

SEQ ID NO: 59916 - DNA, 15 bp, Homo sapiens
cttactatgctttgt

SEQ ID NO: 59917 - DNA, 15 bp, Homo sapiens
ccttactatgctttg

SEQ ID NO: 59918 - DNA, 15 bp, Homo sapiens
accttactatgcttt

SEQ ID NO: 59919 - DNA, 15 bp, Homo sapiens
taccttactatgctt

SEQ ID NO: 59920 - DNA, 15 bp, Homo sapiens
ttaccttactatgct

SEQ ID NO: 59921 - DNA, 15 bp, Homo sapiens
attaccttactatgc

SEQ ID NO: 59922 - DNA, 15 bp, Homo sapiens
tattaccttactatg

SEQ ID NO: 59923 - DNA, 15 bp, Homo sapiens
ttattaccttactat

SEQ ID NO: 59924 - DNA, 15 bp, Homo sapiens
cttattaccttacta

SEQ ID NO: 59925 - DNA, 15 bp, Homo sapiens
tcttattaccttact

SEQ ID NO: 59926 - DNA, 15 bp, Homo sapiens
ttcttattaccttac

SEQ ID NO: 59927 - DNA, 15 bp, Homo sapiens
tttcttattacctta

SEQ ID NO: 59928 - DNA, 15 bp, Homo sapiens
ctttcttattacctt

SEQ ID NO: 59929 - DNA, 15 bp, Homo sapiens
actttcttattacct

SEQ ID NO: 59930 - DNA, 15 bp, Homo sapiens
cactttcttattacc

SEQ ID NO: 59931 - DNA, 15 bp, Homo sapiens
acactttcttattac

SEQ ID NO: 59932 - DNA, 15 bp, Homo sapiens
tacactttcttatta

SEQ ID NO: 59933 - DNA, 15 bp, Homo sapiens
ctacactttcttatt

SEQ ID NO: 59934 - DNA, 15 bp, Homo sapiens
actacactttcttat

SEQ ID NO: 59935 - DNA, 15 bp, Homo sapiens
aactacactttctta

SEQ ID NO: 59936 - DNA, 15 bp, Homo sapiens
aaactacactttctt

SEQ ID NO: 59937 - DNA, 15 bp, Homo sapiens
caaactacactttct

SEQ ID NO: 59938 - DNA, 15 bp, Homo sapiens
acaaactacactttc

SEQ ID NO: 59939 - DNA, 15 bp, Homo sapiens
tacaaactacacttt

SEQ ID NO: 59940 - DNA, 15 bp, Homo sapiens
gtacaaactacactt

SEQ ID NO: 59941 - DNA, 15 bp, Homo sapiens
tgtacaaactacact

SEQ ID NO: 59942 - DNA, 15 bp, Homo sapiens
ttgtacaaactacac

SEQ ID NO: 59943 - DNA, 15 bp, Homo sapiens
cttgtacaaactaca

SEQ ID NO: 59944 - DNA, 15 bp, Homo sapiens
acttgtacaaactac

SEQ ID NO: 59945 - DNA, 15 bp, Homo sapiens
cacttgtacaaacta

SEQ ID NO: 59946 - DNA, 15 bp, Homo sapiens
acacttgtacaaact

SEQ ID NO: 59947 - DNA, 15 bp, Homo sapiens
aacacttgtacaaac

SEQ ID NO: 59948 - DNA, 15 bp, Homo sapiens
taacacttgtacaaa

SEQ ID NO: 59949 - DNA, 15 bp, Homo sapiens
ttaacacttgtacaa

SEQ ID NO: 59950 - DNA, 15 bp, Homo sapiens
tttaacacttgtaca

SEQ ID NO: 59951 - DNA, 15 bp, Homo sapiens
ttttaacacttgtac

SEQ ID NO: 59952 - DNA, 15 bp, Homo sapiens
tttttaacacttgta

SEQ ID NO: 59953 - DNA, 15 bp, Homo sapiens
ttttttaacacttgt

SEQ ID NO: 59954 - DNA, 15 bp, Homo sapiens
tttttttaacacttg

SEQ ID NO: 59955 - DNA, 15 bp, Homo sapiens
atttttttaacactt

SEQ ID NO: 59956 - DNA, 15 bp, Homo sapiens
tatttttttaacact

SEQ ID NO: 59957 - DNA, 15 bp, Homo sapiens
ttatttttttaacac

SEQ ID NO: 59958 - DNA, 15 bp, Homo sapiens
tttatttttttaaca

SEQ ID NO: 59959 - DNA, 15 bp, Homo sapiens
ctttatttttttaac

SEQ ID NO: 59960 - DNA, 15 bp, Homo sapiens
actttatttttttaa

SEQ ID NO: 59961 - DNA, 15 bp, Homo sapiens
tactttattttttta

SEQ ID NO: 59962 - DNA, 15 bp, Homo sapiens
ctactttattttttt

SEQ ID NO: 59963 - DNA, 15 bp, Homo sapiens
tctactttatttttt

SEQ ID NO: 59964 - DNA, 15 bp, Homo sapiens
gtctactttattttt

SEQ ID NO: 59965 - DNA, 15 bp, Homo sapiens
tgtctactttatttt

SEQ ID NO: 59966 - DNA, 15 bp, Homo sapiens
ttgtctactttattt

SEQ ID NO: 59967 - DNA, 15 bp, Homo sapiens
attgtctactttatt

SEQ ID NO: 59968 - DNA, 15 bp, Homo sapiens
cattgtctactttat

SEQ ID NO: 59969 - DNA, 15 bp, Homo sapiens
acattgtctacttta

SEQ ID NO: 59970 - DNA, 15 bp, Homo sapiens
aacattgtctacttt

SEQ ID NO: 59971 - DNA, 15 bp, Homo sapiens
taacattgtctactt

SEQ ID NO: 59972 - DNA, 15 bp, Homo sapiens
gtaacattgtctact

SEQ ID NO: 59973 - DNA, 15 bp, Homo sapiens
tgtaacattgtctac

SEQ ID NO: 59974 - DNA, 15 bp, Homo sapiens
ctgtaacattgtcta

SEQ ID NO: 59975 - DNA, 15 bp, Homo sapiens
actgtaacattgtct

SEQ ID NO: 59976 - DNA, 15 bp, Homo sapiens
cactgtaacattgtc

SEQ ID NO: 59977 - DNA, 15 bp, Homo sapiens
ccactgtaacattgt

SEQ ID NO: 59978 - DNA, 15 bp, Homo sapiens
cccactgtaacattg

SEQ ID NO: 59979 - DNA, 15 bp, Homo sapiens
tcccactgtaacatt

SEQ ID NO: 59980 - DNA, 15 bp, Homo sapiens
gtcccactgtaacat

SEQ ID NO: 59981 - DNA, 15 bp, Homo sapiens
agtcccactgtaaca

SEQ ID NO: 59982 - DNA, 15 bp, Homo sapiens
aagtcccactgtaac

SEQ ID NO: 59983 - DNA, 15 bp, Homo sapiens
taagtcccactgtaa

SEQ ID NO: 59984 - DNA, 15 bp, Homo sapiens
ataagtcccactgta

SEQ ID NO: 59985 - DNA, 15 bp, Homo sapiens
aataagtcccactgt

SEQ ID NO: 59986 - DNA, 15 bp, Homo sapiens
taataagtcccactg

SEQ ID NO: 59987 - DNA, 15 bp, Homo sapiens
ataataagtcccact

SEQ ID NO: 59988 - DNA, 15 bp, Homo sapiens
aataataagtcccac

SEQ ID NO: 59989 - DNA, 15 bp, Homo sapiens
aaataataagtccca

SEQ ID NO: 59990 - DNA, 15 bp, Homo sapiens
gaaataataagtccc

SEQ ID NO: 59991 - DNA, 15 bp, Homo sapiens
tgaaataataagtcc

SEQ ID NO: 59992 - DNA, 15 bp, Homo sapiens
ttgaaataataagtc

SEQ ID NO: 59993 - DNA, 15 bp, Homo sapiens
cttgaaataataagt

SEQ ID NO: 59994 - DNA, 15 bp, Homo sapiens
acttgaaataataag

SEQ ID NO: 59995 - DNA, 15 bp, Homo sapiens
aacttgaaataataa

SEQ ID NO: 59996 - DNA, 15 bp, Homo sapiens
aaacttgaaataata

SEQ ID NO: 59997 - DNA, 15 bp, Homo sapiens
taaacttgaaataat

SEQ ID NO: 59998 - DNA, 15 bp, Homo sapiens
gtaaacttgaaataa

SEQ ID NO: 59999 - DNA, 15 bp, Homo sapiens
tgtaaacttgaaata

SEQ ID NO: 60000 - DNA, 15 bp, Homo sapiens
atgtaaacttgaaat

SEQ ID NO: 60001 - DNA, 15 bp, Homo sapiens
aatgtaaacttgaaa

SEQ ID NO: 60002 - DNA, 15 bp, Homo sapiens
aaatgtaaacttgaa

SEQ ID NO: 60003 - DNA, 15 bp, Homo sapiens
aaaatgtaaacttga

SEQ ID NO: 60004 - DNA, 15 bp, Homo sapiens
gaaaatgtaaacttg

SEQ ID NO: 60005 - DNA, 15 bp, Homo sapiens
agaaaatgtaaactt

SEQ ID NO: 60006 - DNA, 15 bp, Homo sapiens
gagaaaatgtaaact

SEQ ID NO: 60007 - DNA, 15 bp, Homo sapiens
ggagaaaatgtaaac

SEQ ID NO: 60008 - DNA, 15 bp, Homo sapiens
tggagaaaatgtaaa

SEQ ID NO: 60009 - DNA, 15 bp, Homo sapiens
atggagaaaatgtaa

SEQ ID NO: 60010 - DNA, 15 bp, Homo sapiens
catggagaaaatgta

SEQ ID NO: 60011 - DNA, 15 bp, Homo sapiens
acatggagaaaatgt

SEQ ID NO: 60012 - DNA, 15 bp, Homo sapiens
tacatggagaaaatg

SEQ ID NO: 60013 - DNA, 15 bp, Homo sapiens
ttacatggagaaaat

SEQ ID NO: 60014 - DNA, 15 bp, Homo sapiens
attacatggagaaaa

SEQ ID NO: 60015 - DNA, 15 bp, Homo sapiens
aattacatggagaaa

SEQ ID NO: 60016 - DNA, 15 bp, Homo sapiens
aaattacatggagaa

SEQ ID NO: 60017 - DNA, 15 bp, Homo sapiens
aaaattacatggaga

SEQ ID NO: 60018 - DNA, 15 bp, Homo sapiens
aaaaattacatggag

SEQ ID NO: 60019 - DNA, 15 bp, Homo sapiens
aaaaaattacatgga

SEQ ID NO: 60020 - DNA, 15 bp, Homo sapiens
taaaaaattacatgg

SEQ ID NO: 60021 - DNA, 15 bp, Homo sapiens
ttaaaaaattacatg

SEQ ID NO: 60022 - DNA, 15 bp, Homo sapiens
tttaaaaaattacat

SEQ ID NO: 60023 - DNA, 15 bp, Homo sapiens
ttttaaaaaattaca

SEQ ID NO: 60024 - DNA, 15 bp, Homo sapiens
tttttaaaaaattac

SEQ ID NO: 60025 - DNA, 15 bp, Homo sapiens
ctttttaaaaaatta

SEQ ID NO: 60026 - DNA, 15 bp, Homo sapiens
actttttaaaaaatt

SEQ ID NO: 60027 - DNA, 15 bp, Homo sapiens
tactttttaaaaaat

SEQ ID NO: 60028 - DNA, 15 bp, Homo sapiens
ttactttttaaaaaa

SEQ ID NO: 60029 - DNA, 15 bp, Homo sapiens
tttactttttaaaaa

SEQ ID NO: 60030 - DNA, 15 bp, Homo sapiens
atttactttttaaaa

SEQ ID NO: 60031 - DNA, 15 bp, Homo sapiens
catttactttttaaa

SEQ ID NO: 60032 - DNA, 15 bp, Homo sapiens
tcatttactttttaa

SEQ ID NO: 60033 - DNA, 15 bp, Homo sapiens
ttcatttacttttta

SEQ ID NO: 60034 - DNA, 15 bp, Homo sapiens
tttcatttacttttt

SEQ ID NO: 60035 - DNA, 15 bp, Homo sapiens
ttttcatttactttt

SEQ ID NO: 60036 - DNA, 15 bp, Homo sapiens
tttttcatttacttt

SEQ ID NO: 60037 - DNA, 15 bp, Homo sapiens
ttttttcatttactt

SEQ ID NO: 60038 - DNA, 15 bp, Homo sapiens
attttttcatttact

SEQ ID NO: 60039 - DNA, 15 bp, Homo sapiens
cattttttcatttac

SEQ ID NO: 60040 - DNA, 15 bp, Homo sapiens
acattttttcattta

SEQ ID NO: 60041 - DNA, 15 bp, Homo sapiens
cacattttttcattt

SEQ ID NO: 60042 - DNA, 15 bp, Homo sapiens
gcacattttttcatt

SEQ ID NO: 60043 - DNA, 15 bp, Homo sapiens
tgcacattttttcat

SEQ ID NO: 60044 - DNA, 15 bp, Homo sapiens
ttgcacattttttca

SEQ ID NO: 60045 - DNA, 15 bp, Homo sapiens
attgcacattttttc

SEQ ID NO: 60046 - DNA, 15 bp, Homo sapiens
tattgcacatttttt

SEQ ID NO: 60047 - DNA, 15 bp, Homo sapiens
ttattgcacattttt

SEQ ID NO: 60048 - DNA, 15 bp, Homo sapiens
attattgcacatttt

SEQ ID NO: 60049 - DNA, 15 bp, Homo sapiens
cattattgcacattt

SEQ ID NO: 60050 - DNA, 15 bp, Homo sapiens
acattattgcacatt

SEQ ID NO: 60051 - DNA, 15 bp, Homo sapiens
tacattattgcacat

SEQ ID NO: 60052 - DNA, 15 bp, Homo sapiens
ttacattattgcaca

SEQ ID NO: 60053 - DNA, 15 bp, Homo sapiens
tttacattattgcac

SEQ ID NO: 60054 - DNA, 15 bp, Homo sapiens
ttttacattattgca

SEQ ID NO: 60055 - DNA, 15 bp, Homo sapiens
attttacattattgc

SEQ ID NO: 60056 - DNA, 15 bp, Homo sapiens
tattttacattattg

SEQ ID NO: 60057 - DNA, 15 bp, Homo sapiens
atattttacattatt

SEQ ID NO: 60058 - DNA, 15 bp, Homo sapiens
catattttacattat

SEQ ID NO: 60059 - DNA, 15 bp, Homo sapiens
tcatattttacatta

SEQ ID NO: 60060 - DNA, 15 bp, Homo sapiens
ttcatattttacatt

SEQ ID NO: 60061 - DNA, 15 bp, Homo sapiens
cttcatattttacat

SEQ ID NO: 60062 - DNA, 15 bp, Homo sapiens
acttcatattttaca

SEQ ID NO: 60063 - DNA, 15 bp, Homo sapiens
cacttcatattttac

SEQ ID NO: 60064 - DNA, 15 bp, Homo sapiens
acacttcatatttta

SEQ ID NO: 60065 - DNA, 15 bp, Homo sapiens
tacacttcatatttt

SEQ ID NO: 60066 - DNA, 15 bp, Homo sapiens
atacacttcatattt

SEQ ID NO: 60067 - DNA, 15 bp, Homo sapiens
catacacttcatatt

SEQ ID NO: 60068 - DNA, 15 bp, Homo sapiens
acatacacttcatat

SEQ ID NO: 60069 - DNA, 15 bp, Homo sapiens
cacatacacttcata

SEQ ID NO: 60070 - DNA, 15 bp, Homo sapiens
acacatacacttcat

SEQ ID NO: 60071 - DNA, 15 bp, Homo sapiens
tacacatacacttca

SEQ ID NO: 60072 - DNA, 15 bp, Homo sapiens
gtacacatacacttc

SEQ ID NO: 60073 - DNA, 15 bp, Homo sapiens
tgtacacatacactt

SEQ ID NO: 60074 - DNA, 15 bp, Homo sapiens
gtgtacacatacact

SEQ ID NO: 60075 - DNA, 15 bp, Homo sapiens
tgtgtacacatacac

SEQ ID NO: 60076 - DNA, 15 bp, Homo sapiens
gtgtgtacacataca

SEQ ID NO: 60077 - DNA, 15 bp, Homo sapiens
tgtgtgtacacatac

SEQ ID NO: 60078 - DNA, 15 bp, Homo sapiens
atgtgtgtacacata

SEQ ID NO: 60079 - DNA, 15 bp, Homo sapiens
aatgtgtgtacacat

SEQ ID NO: 60080 - DNA, 15 bp, Homo sapiens
aaatgtgtgtacaca

SEQ ID NO: 60081 - DNA, 15 bp, Homo sapiens
aaaatgtgtgtacac

SEQ ID NO: 60082 - DNA, 15 bp, Homo sapiens
taaaatgtgtgtaca

SEQ ID NO: 60083 - DNA, 15 bp, Homo sapiens
ataaaatgtgtgtac

SEQ ID NO: 60084 - DNA, 15 bp, Homo sapiens
aataaaatgtgtgta

SEQ ID NO: 60085 - DNA, 15 bp, Homo sapiens
aaataaaatgtgtgt

SEQ ID NO: 60086 - DNA, 15 bp, Homo sapiens
aaaataaaatgtgtg

SEQ ID NO: 60087 - DNA, 15 bp, Homo sapiens
aaaaataaaatgtgt

SEQ ID NO: 60088 - DNA, 15 bp, Homo sapiens
gaaaaataaaatgtg

SEQ ID NO: 60089 - DNA, 15 bp, Homo sapiens
cgaaaaataaaatgt

SEQ ID NO: 60090 - DNA, 15 bp, Homo sapiens
ccgaaaaataaaatg

SEQ ID NO: 60091 - DNA, 15 bp, Homo sapiens
accgaaaaataaaat

SEQ ID NO: 60092 - DNA, 15 bp, Homo sapiens
taccgaaaaataaaa

SEQ ID NO: 60093 - DNA, 15 bp, Homo sapiens
ataccgaaaaataaa

SEQ ID NO: 60094 - DNA, 15 bp, Homo sapiens
gataccgaaaaataa

SEQ ID NO: 60095 - DNA, 15 bp, Homo sapiens
agataccgaaaaata

SEQ ID NO: 60096 - DNA, 15 bp, Homo sapiens
aagataccgaaaaat

SEQ ID NO: 60097 - DNA, 15 bp, Homo sapiens
caagataccgaaaaa

SEQ ID NO: 60098 - DNA, 15 bp, Homo sapiens
ccaagataccgaaaa

SEQ ID NO: 60099 - DNA, 15 bp, Homo sapiens
cccaagataccgaaa

SEQ ID NO: 60100 - DNA, 15 bp, Homo sapiens
acccaagataccgaa

SEQ ID NO: 60101 - DNA, 15 bp, Homo sapiens
tacccaagataccga

SEQ ID NO: 60102 - DNA, 15 bp, Homo sapiens
atacccaagataccg

SEQ ID NO: 60103 - DNA, 15 bp, Homo sapiens
tatacccaagatacc

SEQ ID NO: 60104 - DNA, 15 bp, Homo sapiens
gtatacccaagatac

SEQ ID NO: 60105 - DNA, 15 bp, Homo sapiens
cgtatacccaagata

SEQ ID NO: 60106 - DNA, 15 bp, Homo sapiens
acgtatacccaagat

SEQ ID NO: 60107 - DNA, 15 bp, Homo sapiens
tacgtatacccaaga

SEQ ID NO: 60108 - DNA, 15 bp, Homo sapiens
atacgtatacccaag

SEQ ID NO: 60109 - DNA, 15 bp, Homo sapiens
catacgtatacccaa

SEQ ID NO: 60110 - DNA, 15 bp, Homo sapiens
ccatacgtataccca

SEQ ID NO: 60111 - DNA, 15 bp, Homo sapiens
accatacgtataccc

SEQ ID NO: 60112 - DNA, 15 bp, Homo sapiens
aaccatacgtatacc

SEQ ID NO: 60113 - DNA, 15 bp, Homo sapiens
caaccatacgtatac

SEQ ID NO: 60114 - DNA, 15 bp, Homo sapiens
tcaaccatacgtata

SEQ ID NO: 60115 - DNA, 15 bp, Homo sapiens
ttcaaccatacgtat

SEQ ID NO: 60116 - DNA, 15 bp, Homo sapiens
tttcaaccatacgta

SEQ ID NO: 60117 - DNA, 15 bp, Homo sapiens
ttttcaaccatacgt

SEQ ID NO: 60118 - DNA, 15 bp, Homo sapiens
gttttcaaccatacg

SEQ ID NO: 60119 - DNA, 15 bp, Homo sapiens
agttttcaaccatac

SEQ ID NO: 60120 - DNA, 15 bp, Homo sapiens
tagttttcaaccata

SEQ ID NO: 60121 - DNA, 15 bp, Homo sapiens
atagttttcaaccat

SEQ ID NO: 60122 - DNA, 15 bp, Homo sapiens
tatagttttcaacca

SEQ ID NO: 60123 - DNA, 15 bp, Homo sapiens
gtatagttttcaacc

SEQ ID NO: 60124 - DNA, 15 bp, Homo sapiens
agtatagttttcaac

SEQ ID NO: 60125 - DNA, 15 bp, Homo sapiens
cagtatagttttcaa

SEQ ID NO: 60126 - DNA, 15 bp, Homo sapiens
ccagtatagttttca

SEQ ID NO: 60127 - DNA, 15 bp, Homo sapiens
tccagtatagttttc

SEQ ID NO: 60128 - DNA, 15 bp, Homo sapiens
ctccagtatagtttt

SEQ ID NO: 60129 - DNA, 15 bp, Homo sapiens
actccagtatagttt

SEQ ID NO: 60130 - DNA, 15 bp, Homo sapiens
gactccagtatagtt

SEQ ID NO: 60131 - DNA, 15 bp, Homo sapiens
agactccagtatagt

SEQ ID NO: 60132 - DNA, 15 bp, Homo sapiens
tagactccagtatag

SEQ ID NO: 60133 - DNA, 15 bp, Homo sapiens
ttagactccagtata

SEQ ID NO: 60134 - DNA, 15 bp, Homo sapiens
tttagactccagtat

SEQ ID NO: 60135 - DNA, 15 bp, Homo sapiens
ttttagactccagta

SEQ ID NO: 60136 - DNA, 15 bp, Homo sapiens
cttttagactccagt

SEQ ID NO: 60137 - DNA, 15 bp, Homo sapiens
acttttagactccag

SEQ ID NO: 60138 - DNA, 15 bp, Homo sapiens
tacttttagactcca

SEQ ID NO: 60139 - DNA, 15 bp, Homo sapiens
atacttttagactcc

SEQ ID NO: 60140 - DNA, 15 bp, Homo sapiens
aatacttttagactc

SEQ ID NO: 60141 - DNA, 15 bp, Homo sapiens
gaatacttttagact

SEQ ID NO: 60142 - DNA, 15 bp, Homo sapiens
agaatacttttagac

SEQ ID NO: 60143 - DNA, 15 bp, Homo sapiens
tagaatacttttaga

SEQ ID NO: 60144 - DNA, 15 bp, Homo sapiens
ttagaatacttttag

SEQ ID NO: 60145 - DNA, 15 bp, Homo sapiens
attagaatactttta

SEQ ID NO: 60146 - DNA, 15 bp, Homo sapiens
aattagaatactttt

SEQ ID NO: 60147 - DNA, 15 bp, Homo sapiens
aaattagaatacttt

SEQ ID NO: 60148 - DNA, 15 bp, Homo sapiens
taaattagaatactt

SEQ ID NO: 60149 - DNA, 15 bp, Homo sapiens
ataaattagaatact

SEQ ID NO: 60150 - DNA, 15 bp, Homo sapiens
tataaattagaatac

SEQ ID NO: 60151 - DNA, 15 bp, Homo sapiens
ttataaattagaata

SEQ ID NO: 60152 - DNA, 15 bp, Homo sapiens
cttataaattagaat

SEQ ID NO: 60153 - DNA, 15 bp, Homo sapiens
tcttataaattagaa

SEQ ID NO: 60154 - DNA, 15 bp, Homo sapiens
ttcttataaattaga

SEQ ID NO: 60155 - DNA, 15 bp, Homo sapiens
cttcttataaattag

SEQ ID NO: 60156 - DNA, 15 bp, Homo sapiens
tcttcttataaatta

SEQ ID NO: 60157 - DNA, 15 bp, Homo sapiens
gtcttcttataaatt

SEQ ID NO: 60158 - DNA, 15 bp, Homo sapiens
tgtcttcttataaat

SEQ ID NO: 60159 - DNA, 15 bp, Homo sapiens
atgtcttcttataaa

SEQ ID NO: 60160 - DNA, 15 bp, Homo sapiens
aatgtcttcttataa

SEQ ID NO: 60161 - DNA, 15 bp, Homo sapiens
aaatgtcttcttata

SEQ ID NO: 60162 - DNA, 15 bp, Homo sapiens
aaaatgtcttcttat

SEQ ID NO: 60163 - DNA, 15 bp, Homo sapiens
caaaatgtcttctta

SEQ ID NO: 60164 - DNA, 15 bp, Homo sapiens
ccaaaatgtcttctt

SEQ ID NO: 60165 - DNA, 15 bp, Homo sapiens
accaaaatgtcttct

SEQ ID NO: 60166 - DNA, 15 bp, Homo sapiens
caccaaaatgtcttc

SEQ ID NO: 60167 - DNA, 15 bp, Homo sapiens
tcaccaaaatgtctt

SEQ ID NO: 60168 - DNA, 15 bp, Homo sapiens
atcaccaaaatgtct

SEQ ID NO: 60169 - DNA, 15 bp, Homo sapiens
catcaccaaaatgtc

SEQ ID NO: 60170 - DNA, 15 bp, Homo sapiens
acatcaccaaaatgt

SEQ ID NO: 60171 - DNA, 15 bp, Homo sapiens
aacatcaccaaaatg

SEQ ID NO: 60172 - DNA, 15 bp, Homo sapiens
aaacatcaccaaaat

SEQ ID NO: 60173 - DNA, 15 bp, Homo sapiens
caaacatcaccaaaa

SEQ ID NO: 60174 - DNA, 15 bp, Homo sapiens
tcaaacatcaccaaa

SEQ ID NO: 60175 - DNA, 15 bp, Homo sapiens
ttcaaacatcaccaa

SEQ ID NO: 60176 - DNA, 15 bp, Homo sapiens
tttcaaacatcacca

SEQ ID NO: 60177 - DNA, 15 bp, Homo sapiens
ttttcaaacatcacc

SEQ ID NO: 60178 - DNA, 15 bp, Homo sapiens
tttttcaaacatcac

SEQ ID NO: 60179 - DNA, 15 bp, Homo sapiens
atttttcaaacatca

SEQ ID NO: 60180 - DNA, 15 bp, Homo sapiens
tatttttcaaacatc

SEQ ID NO: 60181 - DNA, 15 bp, Homo sapiens
ctatttttcaaacat

SEQ ID NO: 60182 - DNA, 15 bp, Homo sapiens
tctatttttcaaaca

SEQ ID NO: 60183 - DNA, 15 bp, Homo sapiens
ttctatttttcaaac

SEQ ID NO: 60184 - DNA, 15 bp, Homo sapiens
tttctatttttcaaa

SEQ ID NO: 60185 - DNA, 15 bp, Homo sapiens
atttctatttttcaa

SEQ ID NO: 60186 - DNA, 15 bp, Homo sapiens
catttctatttttca

SEQ ID NO: 60187 - DNA, 15 bp, Homo sapiens
acatttctatttttc

SEQ ID NO: 60188 - DNA, 15 bp, Homo sapiens
cacatttctattttt

SEQ ID NO: 60189 - DNA, 15 bp, Homo sapiens
gcacatttctatttt

SEQ ID NO: 60190 - DNA, 15 bp, Homo sapiens
agcacatttctattt

SEQ ID NO: 60191 - DNA, 15 bp, Homo sapiens
tagcacatttctatt

SEQ ID NO: 60192 - DNA, 15 bp, Homo sapiens
ctagcacatttctat

SEQ ID NO: 60193 - DNA, 15 bp, Homo sapiens
actagcacatttcta

SEQ ID NO: 60194 - DNA, 15 bp, Homo sapiens
aactagcacatttct

SEQ ID NO: 60195 - DNA, 15 bp, Homo sapiens
aaactagcacatttc

SEQ ID NO: 60196 - DNA, 15 bp, Homo sapiens
aaaactagcacattt

SEQ ID NO: 60197 - DNA, 15 bp, Homo sapiens
caaaactagcacatt

SEQ ID NO: 60198 - DNA, 15 bp, Homo sapiens
acaaaactagcacat

SEQ ID NO: 60199 - DNA, 15 bp, Homo sapiens
aacaaaactagcaca

SEQ ID NO: 60200 - DNA, 15 bp, Homo sapiens
aaacaaaactagcac

SEQ ID NO: 60201 - DNA, 15 bp, Homo sapiens
aaaacaaaactagca

SEQ ID NO: 60202 - DNA, 15 bp, Homo sapiens
aaaaacaaaactagc

SEQ ID NO: 60203 - DNA, 15 bp, Homo sapiens
taaaaacaaaactag

SEQ ID NO: 60204 - DNA, 15 bp, Homo sapiens
ataaaaacaaaacta

SEQ ID NO: 60205 - DNA, 15 bp, Homo sapiens
tataaaaacaaaact

SEQ ID NO: 60206 - DNA, 15 bp, Homo sapiens
atataaaaacaaaac

SEQ ID NO: 60207 - DNA, 15 bp, Homo sapiens
gatataaaaacaaaa

SEQ ID NO: 60208 - DNA, 15 bp, Homo sapiens
tgatataaaaacaaa

SEQ ID NO: 60209 - DNA, 15 bp, Homo sapiens
atgatataaaaacaa

SEQ ID NO: 60210 - DNA, 15 bp, Homo sapiens
catgatataaaaaca

SEQ ID NO: 60211 - DNA, 15 bp, Homo sapiens
acatgatataaaaac

SEQ ID NO: 60212 - DNA, 15 bp, Homo sapiens
gacatgatataaaaa

SEQ ID NO: 60213 - DNA, 15 bp, Homo sapiens
ggacatgatataaaa

SEQ ID NO: 60214 - DNA, 15 bp, Homo sapiens
aggacatgatataaa

SEQ ID NO: 60215 - DNA, 15 bp, Homo sapiens
aaggacatgatataa

SEQ ID NO: 60216 - DNA, 15 bp, Homo sapiens
aaaggacatgatata

SEQ ID NO: 60217 - DNA, 15 bp, Homo sapiens
caaaggacatgatat

SEQ ID NO: 60218 - DNA, 15 bp, Homo sapiens
acaaaggacatgata

SEQ ID NO: 60219 - DNA, 15 bp, Homo sapiens
tacaaaggacatgat

SEQ ID NO: 60220 - DNA, 15 bp, Homo sapiens
gtacaaaggacatga

SEQ ID NO: 60221 - DNA, 15 bp, Homo sapiens
cgtacaaaggacatg

SEQ ID NO: 60222 - DNA, 15 bp, Homo sapiens
acgtacaaaggacat

SEQ ID NO: 60223 - DNA, 15 bp, Homo sapiens
aacgtacaaaggaca

SEQ ID NO: 60224 - DNA, 15 bp, Homo sapiens
caacgtacaaaggac

SEQ ID NO: 60225 - DNA, 15 bp, Homo sapiens
acaacgtacaaagga

SEQ ID NO: 60226 - DNA, 15 bp, Homo sapiens
tacaacgtacaaagg

SEQ ID NO: 60227 - DNA, 15 bp, Homo sapiens
ttacaacgtacaaag

SEQ ID NO: 60228 - DNA, 15 bp, Homo sapiens
attacaacgtacaaa

SEQ ID NO: 60229 - DNA, 15 bp, Homo sapiens
tattacaacgtacaa

SEQ ID NO: 60230 - DNA, 15 bp, Homo sapiens
atattacaacgtaca

SEQ ID NO: 60231 - DNA, 15 bp, Homo sapiens
catattacaacgtac

SEQ ID NO: 60232 - DNA, 15 bp, Homo sapiens
tcatattacaacgta

SEQ ID NO: 60233 - DNA, 15 bp, Homo sapiens
ctcatattacaacgt

SEQ ID NO: 60234 - DNA, 15 bp, Homo sapiens
gctcatattacaacg

SEQ ID NO: 60235 - DNA, 15 bp, Homo sapiens
agctcatattacaac

SEQ ID NO: 60236 - DNA, 15 bp, Homo sapiens
cagctcatattacaa

SEQ ID NO: 60237 - DNA, 15 bp, Homo sapiens
ccagctcatattaca

SEQ ID NO: 60238 - DNA, 15 bp, Homo sapiens
gccagctcatattac

SEQ ID NO: 60239 - DNA, 15 bp, Homo sapiens
agccagctcatatta

SEQ ID NO: 60240 - DNA, 15 bp, Homo sapiens
aagccagctcatatt

SEQ ID NO: 60241 - DNA, 15 bp, Homo sapiens
caagccagctcatat

SEQ ID NO: 60242 - DNA, 15 bp, Homo sapiens
ccaagccagctcata

SEQ ID NO: 60243 - DNA, 15 bp, Homo sapiens
accaagccagctcat

SEQ ID NO: 60244 - DNA, 15 bp, Homo sapiens
aaccaagccagctca

SEQ ID NO: 60245 - DNA, 15 bp, Homo sapiens
gaaccaagccagctc

SEQ ID NO: 60246 - DNA, 15 bp, Homo sapiens
tgaaccaagccagct

SEQ ID NO: 60247 - DNA, 15 bp, Homo sapiens
ctgaaccaagccagc

SEQ ID NO: 60248 - DNA, 15 bp, Homo sapiens
actgaaccaagccag

SEQ ID NO: 60249 - DNA, 15 bp, Homo sapiens
tactgaaccaagcca

SEQ ID NO: 60250 - DNA, 15 bp, Homo sapiens
ttactgaaccaagcc

SEQ ID NO: 60251 - DNA, 15 bp, Homo sapiens
tttactgaaccaagc

SEQ ID NO: 60252 - DNA, 15 bp, Homo sapiens
atttactgaaccaag

SEQ ID NO: 60253 - DNA, 15 bp, Homo sapiens
catttactgaaccaa

SEQ ID NO: 60254 - DNA, 15 bp, Homo sapiens
gcatttactgaacca

SEQ ID NO: 60255 - DNA, 15 bp, Homo sapiens
ggcatttactgaacc

SEQ ID NO: 60256 - DNA, 15 bp, Homo sapiens
tggcatttactgaac

SEQ ID NO: 60257 - DNA, 15 bp, Homo sapiens
atggcatttactgaa

SEQ ID NO: 60258 - DNA, 15 bp, Homo sapiens
gatggcatttactga

SEQ ID NO: 60259 - DNA, 15 bp, Homo sapiens
tgatggcatttactg

SEQ ID NO: 60260 - DNA, 15 bp, Homo sapiens
gtgatggcatttact

SEQ ID NO: 60261 - DNA, 15 bp, Homo sapiens
ggtgatggcatttac

SEQ ID NO: 60262 - DNA, 15 bp, Homo sapiens
tggtgatggcattta

SEQ ID NO: 60263 - DNA, 15 bp, Homo sapiens
atggtgatggcattt

SEQ ID NO: 60264 - DNA, 15 bp, Homo sapiens
aatggtgatggcatt

SEQ ID NO: 60265 - DNA, 15 bp, Homo sapiens
aaatggtgatggcat

SEQ ID NO: 60266 - DNA, 15 bp, Homo sapiens
gaaatggtgatggca

SEQ ID NO: 60267 - DNA, 15 bp, Homo sapiens
ggaaatggtgatggc

SEQ ID NO: 60268 - DNA, 15 bp, Homo sapiens
tggaaatggtgatgg

SEQ ID NO: 60269 - DNA, 15 bp, Homo sapiens
atggaaatggtgatg

SEQ ID NO: 60270 - DNA, 15 bp, Homo sapiens
aatggaaatggtgat

SEQ ID NO: 60271 - DNA, 15 bp, Homo sapiens
caatggaaatggtga

SEQ ID NO: 60272 - DNA, 15 bp, Homo sapiens
tcaatggaaatggtg

SEQ ID NO: 60273 - DNA, 15 bp, Homo sapiens
ctcaatggaaatggt

SEQ ID NO: 60274 - DNA, 15 bp, Homo sapiens
tctcaatggaaatgg

SEQ ID NO: 60275 - DNA, 15 bp, Homo sapiens
ttctcaatggaaatg

SEQ ID NO: 60276 - DNA, 15 bp, Homo sapiens
attctcaatggaaat

SEQ ID NO: 60277 - DNA, 15 bp, Homo sapiens
aattctcaatggaaa

SEQ ID NO: 60278 - DNA, 15 bp, Homo sapiens
aaattctcaatggaa

SEQ ID NO: 60279 - DNA, 15 bp, Homo sapiens
taaattctcaatgga

SEQ ID NO: 60280 - DNA, 15 bp, Homo sapiens
ttaaattctcaatgg

SEQ ID NO: 60281 - DNA, 15 bp, Homo sapiens
tttaaattctcaatg

SEQ ID NO: 60282 - DNA, 15 bp, Homo sapiens
ttttaaattctcaat

SEQ ID NO: 60283 - DNA, 15 bp, Homo sapiens
gttttaaattctcaa

SEQ ID NO: 60284 - DNA, 15 bp, Homo sapiens
agttttaaattctca

SEQ ID NO: 60285 - DNA, 15 bp, Homo sapiens
gagttttaaattctc

SEQ ID NO: 60286 - DNA, 15 bp, Homo sapiens
tgagttttaaattct

SEQ ID NO: 60287 - DNA, 15 bp, Homo sapiens
gtgagttttaaattc

SEQ ID NO: 60288 - DNA, 15 bp, Homo sapiens
ggtgagttttaaatt

SEQ ID NO: 60289 - DNA, 15 bp, Homo sapiens
tggtgagttttaaat

SEQ ID NO: 60290 - DNA, 15 bp, Homo sapiens
ctggtgagttttaaa

SEQ ID NO: 60291 - DNA, 15 bp, Homo sapiens
actggtgagttttaa

SEQ ID NO: 60292 - DNA, 15 bp, Homo sapiens
cactggtgagtttta

SEQ ID NO: 60293 - DNA, 15 bp, Homo sapiens
acactggtgagtttt

SEQ ID NO: 60294 - DNA, 15 bp, Homo sapiens
aacactggtgagttt

SEQ ID NO: 60295 - DNA, 15 bp, Homo sapiens
aaacactggtgagtt

SEQ ID NO: 60296 - DNA, 15 bp, Homo sapiens
taaacactggtgagt

SEQ ID NO: 60297 - DNA, 15 bp, Homo sapiens
ttaaacactggtgag

SEQ ID NO: 60298 - DNA, 15 bp, Homo sapiens
attaaacactggtga

SEQ ID NO: 60299 - DNA, 15 bp, Homo sapiens
tattaaacactggtg

SEQ ID NO: 60300 - DNA, 15 bp, Homo sapiens
atattaaacactggt

SEQ ID NO: 60301 - DNA, 15 bp, Homo sapiens
catattaaacactgg

SEQ ID NO: 60302 - DNA, 15 bp, Homo sapiens
gcatattaaacactg

SEQ ID NO: 60303 - DNA, 15 bp, Homo sapiens
tgcatattaaacact

SEQ ID NO: 60304 - DNA, 15 bp, Homo sapiens
ctgcatattaaacac

SEQ ID NO: 60305 - DNA, 15 bp, Homo sapiens
cctgcatattaaaca

SEQ ID NO: 60306 - DNA, 15 bp, Homo sapiens
gcctgcatattaaac

SEQ ID NO: 60307 - DNA, 15 bp, Homo sapiens
agcctgcatattaaa

SEQ ID NO: 60308 - DNA, 15 bp, Homo sapiens
aagcctgcatattaa

SEQ ID NO: 60309 - DNA, 15 bp, Homo sapiens
gaagcctgcatatta

SEQ ID NO: 60310 - DNA, 15 bp, Homo sapiens
ggaagcctgcatatt

SEQ ID NO: 60311 - DNA, 15 bp, Homo sapiens
tggaagcctgcatat

SEQ ID NO: 60312 - DNA, 15 bp, Homo sapiens
ttggaagcctgcata

SEQ ID NO: 60313 - DNA, 15 bp, Homo sapiens
tttggaagcctgcat

SEQ ID NO: 60314 - DNA, 15 bp, Homo sapiens
ctttggaagcctgca

SEQ ID NO: 60315 - DNA, 15 bp, Homo sapiens
cctttggaagcctgc

SEQ ID NO: 60316 - DNA, 15 bp, Homo sapiens
gcctttggaagcctg

SEQ ID NO: 60317 - DNA, 15 bp, Homo sapiens
agcctttggaagcct

SEQ ID NO: 60318 - DNA, 15 bp, Homo sapiens
aagcctttggaagcc

SEQ ID NO: 60319 - DNA, 15 bp, Homo sapiens
taagcctttggaagc

SEQ ID NO: 60320 - DNA, 15 bp, Homo sapiens
ataagcctttggaag

SEQ ID NO: 60321 - DNA, 15 bp, Homo sapiens
cataagcctttggaa

SEQ ID NO: 60322 - DNA, 15 bp, Homo sapiens
tcataagcctttgga

SEQ ID NO: 60323 - DNA, 15 bp, Homo sapiens
ttcataagcctttgg

SEQ ID NO: 60324 - DNA, 15 bp, Homo sapiens
tttcataagcctttg

SEQ ID NO: 60325 - DNA, 15 bp, Homo sapiens
ttttcataagccttt

SEQ ID NO: 60326 - DNA, 15 bp, Homo sapiens
tttttcataagcctt

SEQ ID NO: 60327 - DNA, 15 bp, Homo sapiens
ttttttcataagcct

SEQ ID NO: 60328 - DNA, 15 bp, Homo sapiens
tttttttcataagcc

SEQ ID NO: 60329 - DNA, 15 bp, Homo sapiens
atttttttcataagc

SEQ ID NO: 60330 - DNA, 15 bp, Homo sapiens
gatttttttcataag

SEQ ID NO: 60331 - DNA, 15 bp, Homo sapiens
tgatttttttcataa

SEQ ID NO: 60332 - DNA, 15 bp, Homo sapiens
ttgatttttttcata

SEQ ID NO: 60333 - DNA, 15 bp, Homo sapiens
cttgatttttttcat

SEQ ID NO: 60334 - DNA, 15 bp, Homo sapiens
tcttgatttttttca

SEQ ID NO: 60335 - DNA, 15 bp, Homo sapiens
gtcttgatttttttc

SEQ ID NO: 60336 - DNA, 15 bp, Homo sapiens
ggtcttgattttttt

SEQ ID NO: 60337 - DNA, 15 bp, Homo sapiens
gggtcttgatttttt

SEQ ID NO: 60338 - DNA, 15 bp, Homo sapiens
agggtcttgattttt

SEQ ID NO: 60339 - DNA, 15 bp, Homo sapiens
aagggtcttgatttt

SEQ ID NO: 60340 - DNA, 15 bp, Homo sapiens
taagggtcttgattt

SEQ ID NO: 60341 - DNA, 15 bp, Homo sapiens
ttaagggtcttgatt

SEQ ID NO: 60342 - DNA, 15 bp, Homo sapiens
tttaagggtcttgat

SEQ ID NO: 60343 - DNA, 15 bp, Homo sapiens
atttaagggtcttga

SEQ ID NO: 60344 - DNA, 15 bp, Homo sapiens
gatttaagggtcttg

SEQ ID NO: 60345 - DNA, 15 bp, Homo sapiens
agatttaagggtctt

SEQ ID NO: 60346 - DNA, 15 bp, Homo sapiens
tagatttaagggtct

SEQ ID NO: 60347 - DNA, 15 bp, Homo sapiens
ctagatttaagggtc

SEQ ID NO: 60348 - DNA, 15 bp, Homo sapiens
actagatttaagggt

SEQ ID NO: 60349 - DNA, 15 bp, Homo sapiens
aactagatttaaggg

SEQ ID NO: 60350 - DNA, 15 bp, Homo sapiens
taactagatttaagg

SEQ ID NO: 60351 - DNA, 15 bp, Homo sapiens
ttaactagatttaag

SEQ ID NO: 60352 - DNA, 15 bp, Homo sapiens
attaactagatttaa

SEQ ID NO: 60353 - DNA, 15 bp, Homo sapiens
aattaactagattta

SEQ ID NO: 60354 - DNA, 15 bp, Homo sapiens
aaattaactagattt

SEQ ID NO: 60355 - DNA, 15 bp, Homo sapiens
caaattaactagatt

SEQ ID NO: 60356 - DNA, 15 bp, Homo sapiens
gcaaattaactagat

SEQ ID NO: 60357 - DNA, 15 bp, Homo sapiens
agcaaattaactaga

SEQ ID NO: 60358 - DNA, 15 bp, Homo sapiens
cagcaaattaactag

SEQ ID NO: 60359 - DNA, 15 bp, Homo sapiens
gcagcaaattaacta

SEQ ID NO: 60360 - DNA, 15 bp, Homo sapiens
agcagcaaattaact

SEQ ID NO: 60361 - DNA, 15 bp, Homo sapiens
tagcagcaaattaac

SEQ ID NO: 60362 - DNA, 15 bp, Homo sapiens
ttagcagcaaattaa

SEQ ID NO: 60363 - DNA, 15 bp, Homo sapiens
gttagcagcaaatta

SEQ ID NO: 60364 - DNA, 15 bp, Homo sapiens
tgttagcagcaaatt

SEQ ID NO: 60365 - DNA, 15 bp, Homo sapiens
atgttagcagcaaat

SEQ ID NO: 60366 - DNA, 15 bp, Homo sapiens
catgttagcagcaaa

SEQ ID NO: 60367 - DNA, 15 bp, Homo sapiens
tcatgttagcagcaa

SEQ ID NO: 60368 - DNA, 15 bp, Homo sapiens
ttcatgttagcagca

SEQ ID NO: 60369 - DNA, 15 bp, Homo sapiens
tttcatgttagcagc

SEQ ID NO: 60370 - DNA, 15 bp, Homo sapiens
gtttcatgttagcag

SEQ ID NO: 60371 - DNA, 15 bp, Homo sapiens
agtttcatgttagca

SEQ ID NO: 60372 - DNA, 15 bp, Homo sapiens
gagtttcatgttagc

SEQ ID NO: 60373 - DNA, 15 bp, Homo sapiens
agagtttcatgttag

SEQ ID NO: 60374 - DNA, 15 bp, Homo sapiens
aagagtttcatgtta

SEQ ID NO: 60375 - DNA, 15 bp, Homo sapiens
aaagagtttcatgtt

SEQ ID NO: 60376 - DNA, 15 bp, Homo sapiens
caaagagtttcatgt

SEQ ID NO: 60377 - DNA, 15 bp, Homo sapiens
ccaaagagtttcatg

SEQ ID NO: 60378 - DNA, 15 bp, Homo sapiens
accaaagagtttcat

SEQ ID NO: 60379 - DNA, 15 bp, Homo sapiens
aaccaaagagtttca

SEQ ID NO: 60380 - DNA, 15 bp, Homo sapiens
gaaccaaagagtttc

SEQ ID NO: 60381 - DNA, 15 bp, Homo sapiens
agaaccaaagagttt

SEQ ID NO: 60382 - DNA, 15 bp, Homo sapiens
aagaaccaaagagtt

SEQ ID NO: 60383 - DNA, 15 bp, Homo sapiens
aaagaaccaaagagt

SEQ ID NO: 60384 - DNA, 15 bp, Homo sapiens
aaaagaaccaaagag

SEQ ID NO: 60385 - DNA, 15 bp, Homo sapiens
taaaagaaccaaaga

SEQ ID NO: 60386 - DNA, 15 bp, Homo sapiens
ataaaagaaccaaag

SEQ ID NO: 60387 - DNA, 15 bp, Homo sapiens
aataaaagaaccaaa

SEQ ID NO: 60388 - DNA, 15 bp, Homo sapiens
aaataaaagaaccaa

SEQ ID NO: 60389 - DNA, 15 bp, Homo sapiens
aaaataaaagaacca

SEQ ID NO: 60390 - DNA, 15 bp, Homo sapiens
aaaaataaaagaacc

SEQ ID NO: 60391 - DNA, 15 bp, Homo sapiens
caaaaataaaagaac

SEQ ID NO: 60392 - DNA, 15 bp, Homo sapiens
gcaaaaataaaagaa

SEQ ID NO: 60393 - DNA, 15 bp, Homo sapiens
ggcaaaaataaaaga

SEQ ID NO: 60394 - DNA, 15 bp, Homo sapiens
tggcaaaaataaaag

SEQ ID NO: 60395 - DNA, 15 bp, Homo sapiens
ctggcaaaaataaaa

SEQ ID NO: 60396 - DNA, 15 bp, Homo sapiens
tctggcaaaaataaa

SEQ ID NO: 60397 - DNA, 15 bp, Homo sapiens
atctggcaaaaataa

SEQ ID NO: 60398 - DNA, 15 bp, Homo sapiens
tatctggcaaaaata

SEQ ID NO: 60399 - DNA, 15 bp, Homo sapiens
ttatctggcaaaaat

SEQ ID NO: 60400 - DNA, 15 bp, Homo sapiens
attatctggcaaaaa

SEQ ID NO: 60401 - DNA, 15 bp, Homo sapiens
aattatctggcaaaa

SEQ ID NO: 60402 - DNA, 15 bp, Homo sapiens
taattatctggcaaa

SEQ ID NO: 60403 - DNA, 15 bp, Homo sapiens
ctaattatctggcaa

SEQ ID NO: 60404 - DNA, 15 bp, Homo sapiens
tctaattatctggca

SEQ ID NO: 60405 - DNA, 15 bp, Homo sapiens
gtctaattatctggc

SEQ ID NO: 60406 - DNA, 15 bp, Homo sapiens
tgtctaattatctgg

SEQ ID NO: 60407 - DNA, 15 bp, Homo sapiens
gtgtctaattatctg

SEQ ID NO: 60408 - DNA, 15 bp, Homo sapiens
tgtgtctaattatct

SEQ ID NO: 60409 - DNA, 15 bp, Homo sapiens
gtgtgtctaattatc

SEQ ID NO: 60410 - DNA, 15 bp, Homo sapiens
tgtgtgtctaattat

SEQ ID NO: 60411 - DNA, 15 bp, Homo sapiens
atgtgtgtctaatta

SEQ ID NO: 60412 - DNA, 15 bp, Homo sapiens
gatgtgtgtctaatt

SEQ ID NO: 60413 - DNA, 15 bp, Homo sapiens
agatgtgtgtctaat

SEQ ID NO: 60414 - DNA, 15 bp, Homo sapiens
tagatgtgtgtctaa

SEQ ID NO: 60415 - DNA, 15 bp, Homo sapiens
ttagatgtgtgtcta

SEQ ID NO: 60416 - DNA, 15 bp, Homo sapiens
tttagatgtgtgtct

SEQ ID NO: 60417 - DNA, 15 bp, Homo sapiens
ctttagatgtgtgtc

SEQ ID NO: 60418 - DNA, 15 bp, Homo sapiens
gctttagatgtgtgt

SEQ ID NO: 60419 - DNA, 15 bp, Homo sapiens
agctttagatgtgtg

SEQ ID NO: 60420 - DNA, 15 bp, Homo sapiens
aagctttagatgtgt

SEQ ID NO: 60421 - DNA, 15 bp, Homo sapiens
taagctttagatgtg

SEQ ID NO: 60422 - DNA, 15 bp, Homo sapiens
ctaagctttagatgt

SEQ ID NO: 60423 - DNA, 15 bp, Homo sapiens
actaagctttagatg

SEQ ID NO: 60424 - DNA, 15 bp, Homo sapiens
gactaagctttagat

SEQ ID NO: 60425 - DNA, 15 bp, Homo sapiens
agactaagctttaga

SEQ ID NO: 60426 - DNA, 15 bp, Homo sapiens
aagactaagctttag

SEQ ID NO: 60427 - DNA, 15 bp, Homo sapiens
taagactaagcttta

SEQ ID NO: 60428 - DNA, 15 bp, Homo sapiens
ttaagactaagcttt

SEQ ID NO: 60429 - DNA, 15 bp, Homo sapiens
tttaagactaagctt

SEQ ID NO: 60430 - DNA, 15 bp, Homo sapiens
atttaagactaagct

SEQ ID NO: 60431 - DNA, 15 bp, Homo sapiens
catttaagactaagc

SEQ ID NO: 60432 - DNA, 15 bp, Homo sapiens
ccatttaagactaag

SEQ ID NO: 60433 - DNA, 15 bp, Homo sapiens
gccatttaagactaa

SEQ ID NO: 60434 - DNA, 15 bp, Homo sapiens
agccatttaagacta

SEQ ID NO: 60435 - DNA, 15 bp, Homo sapiens
aagccatttaagact

SEQ ID NO: 60436 - DNA, 15 bp, Homo sapiens
taagccatttaagac

SEQ ID NO: 60437 - DNA, 15 bp, Homo sapiens
ttaagccatttaaga

SEQ ID NO: 60438 - DNA, 15 bp, Homo sapiens
cttaagccatttaag

SEQ ID NO: 60439 - DNA, 15 bp, Homo sapiens
acttaagccatttaa

SEQ ID NO: 60440 - DNA, 15 bp, Homo sapiens
cacttaagccattta

SEQ ID NO: 60441 - DNA, 15 bp, Homo sapiens
acacttaagccattt

SEQ ID NO: 60442 - DNA, 15 bp, Homo sapiens
tacacttaagccatt

SEQ ID NO: 60443 - DNA, 15 bp, Homo sapiens
ctacacttaagccat

SEQ ID NO: 60444 - DNA, 15 bp, Homo sapiens
gctacacttaagcca

SEQ ID NO: 60445 - DNA, 15 bp, Homo sapiens
agctacacttaagcc

SEQ ID NO: 60446 - DNA, 15 bp, Homo sapiens
tagctacacttaagc

SEQ ID NO: 60447 - DNA, 15 bp, Homo sapiens
atagctacacttaag

SEQ ID NO: 60448 - DNA, 15 bp, Homo sapiens
aatagctacacttaa

SEQ ID NO: 60449 - DNA, 15 bp, Homo sapiens
caatagctacactta

SEQ ID NO: 60450 - DNA, 15 bp, Homo sapiens
tcaatagctacactt

SEQ ID NO: 60451 - DNA, 15 bp, Homo sapiens
atcaatagctacact

SEQ ID NO: 60452 - DNA, 15 bp, Homo sapiens
aatcaatagctacac

SEQ ID NO: 60453 - DNA, 15 bp, Homo sapiens
taatcaatagctaca

SEQ ID NO: 60454 - DNA, 15 bp, Homo sapiens
ctaatcaatagctac

SEQ ID NO: 60455 - DNA, 15 bp, Homo sapiens
actaatcaatagcta

SEQ ID NO: 60456 - DNA, 15 bp, Homo sapiens
cactaatcaatagct

SEQ ID NO: 60457 - DNA, 15 bp, Homo sapiens
gcactaatcaatagc

SEQ ID NO: 60458 - DNA, 15 bp, Homo sapiens
agcactaatcaatag

SEQ ID NO: 60459 - DNA, 15 bp, Homo sapiens
cagcactaatcaata

SEQ ID NO: 60460 - DNA, 15 bp, Homo sapiens
acagcactaatcaat

SEQ ID NO: 60461 - DNA, 15 bp, Homo sapiens
aacagcactaatcaa

SEQ ID NO: 60462 - DNA, 15 bp, Homo sapiens
caacagcactaatca

SEQ ID NO: 60463 - DNA, 15 bp, Homo sapiens
gcaacagcactaatc

SEQ ID NO: 60464 - DNA, 15 bp, Homo sapiens
agcaacagcactaat

SEQ ID NO: 60465 - DNA, 15 bp, Homo sapiens
tagcaacagcactaa

SEQ ID NO: 60466 - DNA, 15 bp, Homo sapiens
ctagcaacagcacta

SEQ ID NO: 60467 - DNA, 15 bp, Homo sapiens
actagcaacagcact

SEQ ID NO: 60468 - DNA, 15 bp, Homo sapiens
aactagcaacagcac

SEQ ID NO: 60469 - DNA, 15 bp, Homo sapiens
gaactagcaacagca

SEQ ID NO: 60470 - DNA, 15 bp, Homo sapiens
tgaactagcaacagc

SEQ ID NO: 60471 - DNA, 15 bp, Homo sapiens
ctgaactagcaacag

SEQ ID NO: 60472 - DNA, 15 bp, Homo sapiens
tctgaactagcaaca

SEQ ID NO: 60473 - DNA, 15 bp, Homo sapiens
ttctgaactagcaac

SEQ ID NO: 60474 - DNA, 15 bp, Homo sapiens
tttctgaactagcaa

SEQ ID NO: 60475 - DNA, 15 bp, Homo sapiens
ctttctgaactagca

SEQ ID NO: 60476 - DNA, 15 bp, Homo sapiens
tctttctgaactagc

SEQ ID NO: 60477 - DNA, 15 bp, Homo sapiens
ttctttctgaactag

SEQ ID NO: 60478 - DNA, 15 bp, Homo sapiens
tttctttctgaacta

SEQ ID NO: 60479 - DNA, 15 bp, Homo sapiens
atttctttctgaact

SEQ ID NO: 60480 - DNA, 15 bp, Homo sapiens
catttctttctgaac

SEQ ID NO: 60481 - DNA, 15 bp, Homo sapiens
acatttctttctgaa

SEQ ID NO: 60482 - DNA, 15 bp, Homo sapiens
aacatttctttctga

SEQ ID NO: 60483 - DNA, 15 bp, Homo sapiens
aaacatttctttctg

SEQ ID NO: 60484 - DNA, 15 bp, Homo sapiens
caaacatttctttct

SEQ ID NO: 60485 - DNA, 15 bp, Homo sapiens
acaaacatttctttc

SEQ ID NO: 60486 - DNA, 15 bp, Homo sapiens
cacaaacatttcttt

SEQ ID NO: 60487 - DNA, 15 bp, Homo sapiens
tcacaaacatttctt

SEQ ID NO: 60488 - DNA, 15 bp, Homo sapiens
ttcacaaacatttct

SEQ ID NO: 60489 - DNA, 15 bp, Homo sapiens
attcacaaacatttc

SEQ ID NO: 60490 - DNA, 15 bp, Homo sapiens
cattcacaaacattt

SEQ ID NO: 60491 - DNA, 15 bp, Homo sapiens
ccattcacaaacatt

SEQ ID NO: 60492 - DNA, 15 bp, Homo sapiens
tccattcacaaacat

SEQ ID NO: 60493 - DNA, 15 bp, Homo sapiens
ttccattcacaaaca

SEQ ID NO: 60494 - DNA, 15 bp, Homo sapiens
tttccattcacaaac

SEQ ID NO: 60495 - DNA, 15 bp, Homo sapiens
gtttccattcacaaa

SEQ ID NO: 60496 - DNA, 15 bp, Homo sapiens
tgtttccattcacaa

SEQ ID NO: 60497 - DNA, 15 bp, Homo sapiens
ttgtttccattcaca

SEQ ID NO: 60498 - DNA, 15 bp, Homo sapiens
cttgtttccattcac

SEQ ID NO: 60499 - DNA, 15 bp, Homo sapiens
tcttgtttccattca

SEQ ID NO: 60500 - DNA, 15 bp, Homo sapiens
ttcttgtttccattc

SEQ ID NO: 60501 - DNA, 15 bp, Homo sapiens
attcttgtttccatt

SEQ ID NO: 60502 - DNA, 15 bp, Homo sapiens
tattcttgtttccat

SEQ ID NO: 60503 - DNA, 15 bp, Homo sapiens
atattcttgtttcca

SEQ ID NO: 60504 - DNA, 15 bp, Homo sapiens
aatattcttgtttcc

SEQ ID NO: 60505 - DNA, 15 bp, Homo sapiens
gaatattcttgtttc

SEQ ID NO: 60506 - DNA, 15 bp, Homo sapiens
tgaatattcttgttt

SEQ ID NO: 60507 - DNA, 15 bp, Homo sapiens
ctgaatattcttgtt

SEQ ID NO: 60508 - DNA, 15 bp, Homo sapiens
actgaatattcttgt

SEQ ID NO: 60509 - DNA, 15 bp, Homo sapiens
gactgaatattcttg

SEQ ID NO: 60510 - DNA, 15 bp, Homo sapiens
ggactgaatattctt

SEQ ID NO: 60511 - DNA, 15 bp, Homo sapiens
tggactgaatattct

SEQ ID NO: 60512 - DNA, 15 bp, Homo sapiens
ttggactgaatattc

SEQ ID NO: 60513 - DNA, 15 bp, Homo sapiens
tttggactgaatatt

SEQ ID NO: 60514 - DNA, 15 bp, Homo sapiens
gtttggactgaatat

SEQ ID NO: 60515 - DNA, 15 bp, Homo sapiens
agtttggactgaata

SEQ ID NO: 60516 - DNA, 15 bp, Homo sapiens
cagtttggactgaat

SEQ ID NO: 60517 - DNA, 15 bp, Homo sapiens
acagtttggactgaa

SEQ ID NO: 60518 - DNA, 15 bp, Homo sapiens
aacagtttggactga

SEQ ID NO: 60519 - DNA, 15 bp, Homo sapiens
caacagtttggactg

SEQ ID NO: 60520 - DNA, 15 bp, Homo sapiens
acaacagtttggact

SEQ ID NO: 60521 - DNA, 15 bp, Homo sapiens
tacaacagtttggac

SEQ ID NO: 60522 - DNA, 15 bp, Homo sapiens
ttacaacagtttgga

SEQ ID NO: 60523 - DNA, 15 bp, Homo sapiens
cttacaacagtttgg

SEQ ID NO: 60524 - DNA, 15 bp, Homo sapiens
ccttacaacagtttg

SEQ ID NO: 60525 - DNA, 15 bp, Homo sapiens
tccttacaacagttt

SEQ ID NO: 60526 - DNA, 15 bp, Homo sapiens
gtccttacaacagtt

SEQ ID NO: 60527 - DNA, 15 bp, Homo sapiens
tgtccttacaacagt

SEQ ID NO: 60528 - DNA, 15 bp, Homo sapiens
ctgtccttacaacag

SEQ ID NO: 60529 - DNA, 15 bp, Homo sapiens
actgtccttacaaca

SEQ ID NO: 60530 - DNA, 15 bp, Homo sapiens
tactgtccttacaac

SEQ ID NO: 60531 - DNA, 15 bp, Homo sapiens
gtactgtccttacaa

SEQ ID NO: 60532 - DNA, 15 bp, Homo sapiens
ggtactgtccttaca

SEQ ID NO: 60533 - DNA, 15 bp, Homo sapiens
aggtactgtccttac

SEQ ID NO: 60534 - DNA, 15 bp, Homo sapiens
caggtactgtcctta

SEQ ID NO: 60535 - DNA, 15 bp, Homo sapiens
tcaggtactgtcctt

SEQ ID NO: 60536 - DNA, 15 bp, Homo sapiens
ttcaggtactgtcct

SEQ ID NO: 60537 - DNA, 15 bp, Homo sapiens
tttcaggtactgtcc

SEQ ID NO: 60538 - DNA, 15 bp, Homo sapiens
ttttcaggtactgtc

SEQ ID NO: 60539 - DNA, 15 bp, Homo sapiens
gttttcaggtactgt

SEQ ID NO: 60540 - DNA, 15 bp, Homo sapiens
ggttttcaggtactg

SEQ ID NO: 60541 - DNA, 15 bp, Homo sapiens
tggttttcaggtact

SEQ ID NO: 60542 - DNA, 15 bp, Homo sapiens
ctggttttcaggtac

SEQ ID NO: 60543 - DNA, 15 bp, Homo sapiens
cctggttttcaggta

SEQ ID NO: 60544 - DNA, 15 bp, Homo sapiens
tcctggttttcaggt

SEQ ID NO: 60545 - DNA, 15 bp, Homo sapiens
ttcctggttttcagg

SEQ ID NO: 60546 - DNA, 15 bp, Homo sapiens
tttcctggttttcag

SEQ ID NO: 60547 - DNA, 15 bp, Homo sapiens
gtttcctggttttca

SEQ ID NO: 60548 - DNA, 15 bp, Homo sapiens
tgtttcctggttttc

SEQ ID NO: 60549 - DNA, 15 bp, Homo sapiens
ctgtttcctggtttt

SEQ ID NO: 60550 - DNA, 15 bp, Homo sapiens
cctgtttcctggttt

SEQ ID NO: 60551 - DNA, 15 bp, Homo sapiens
tcctgtttcctggtt

SEQ ID NO: 60552 - DNA, 15 bp, Homo sapiens
atcctgtttcctggt

SEQ ID NO: 60553 - DNA, 15 bp, Homo sapiens
tatcctgtttcctgg

SEQ ID NO: 60554 - DNA, 15 bp, Homo sapiens
ttatcctgtttcctg

SEQ ID NO: 60555 - DNA, 15 bp, Homo sapiens
attatcctgtttcct

SEQ ID NO: 60556 - DNA, 15 bp, Homo sapiens
cattatcctgtttcc

SEQ ID NO: 60557 - DNA, 15 bp, Homo sapiens
ccattatcctgtttc

SEQ ID NO: 60558 - DNA, 15 bp, Homo sapiens
tccattatcctgttt

SEQ ID NO: 60559 - DNA, 15 bp, Homo sapiens
ttccattatcctgtt

SEQ ID NO: 60560 - DNA, 15 bp, Homo sapiens
tttccattatcctgt

SEQ ID NO: 60561 - DNA, 15 bp, Homo sapiens
ttttccattatcctg

SEQ ID NO: 60562 - DNA, 15 bp, Homo sapiens
tttttccattatcct

SEQ ID NO: 60563 - DNA, 15 bp, Homo sapiens
ctttttccattatcc

SEQ ID NO: 60564 - DNA, 15 bp, Homo sapiens
actttttccattatc

SEQ ID NO: 60565 - DNA, 15 bp, Homo sapiens
gactttttccattat

SEQ ID NO: 60566 - DNA, 15 bp, Homo sapiens
agactttttccatta

SEQ ID NO: 60567 - DNA, 15 bp, Homo sapiens
aagactttttccatt

SEQ ID NO: 60568 - DNA, 15 bp, Homo sapiens
aaagactttttccat

SEQ ID NO: 60569 - DNA, 15 bp, Homo sapiens
aaaagactttttcca

SEQ ID NO: 60570 - DNA, 15 bp, Homo sapiens
taaaagactttttcc

SEQ ID NO: 60571 - DNA, 15 bp, Homo sapiens
ttaaaagactttttc

SEQ ID NO: 60572 - DNA, 15 bp, Homo sapiens
tttaaaagacttttt

SEQ ID NO: 60573 - DNA, 15 bp, Homo sapiens
ctttaaaagactttt

SEQ ID NO: 60574 - DNA, 15 bp, Homo sapiens
tctttaaaagacttt

SEQ ID NO: 60575 - DNA, 15 bp, Homo sapiens
atctttaaaagactt

SEQ ID NO: 60576 - DNA, 15 bp, Homo sapiens
catctttaaaagact

SEQ ID NO: 60577 - DNA, 15 bp, Homo sapiens
tcatctttaaaagac

SEQ ID NO: 60578 - DNA, 15 bp, Homo sapiens
ttcatctttaaaaga

SEQ ID NO: 60579 - DNA, 15 bp, Homo sapiens
tttcatctttaaaag

SEQ ID NO: 60580 - DNA, 15 bp, Homo sapiens
atttcatctttaaaa

SEQ ID NO: 60581 - DNA, 15 bp, Homo sapiens
catttcatctttaaa

SEQ ID NO: 60582 - DNA, 15 bp, Homo sapiens
acatttcatctttaa

SEQ ID NO: 60583 - DNA, 15 bp, Homo sapiens
aacatttcatcttta

SEQ ID NO: 60584 - DNA, 15 bp, Homo sapiens
caacatttcatcttt

SEQ ID NO: 60585 - DNA, 15 bp, Homo sapiens
ccaacatttcatctt

SEQ ID NO: 60586 - DNA, 15 bp, Homo sapiens
tccaacatttcatct

SEQ ID NO: 60587 - DNA, 15 bp, Homo sapiens
ctccaacatttcatc

SEQ ID NO: 60588 - DNA, 15 bp, Homo sapiens
gctccaacatttcat

SEQ ID NO: 60589 - DNA, 15 bp, Homo sapiens
ggctccaacatttca

SEQ ID NO: 60590 - DNA, 15 bp, Homo sapiens
tggctccaacatttc

SEQ ID NO: 60591 - DNA, 15 bp, Homo sapiens
ttggctccaacattt

SEQ ID NO: 60592 - DNA, 15 bp, Homo sapiens
gttggctccaacatt

SEQ ID NO: 60593 - DNA, 15 bp, Homo sapiens
agttggctccaacat

SEQ ID NO: 60594 - DNA, 15 bp, Homo sapiens
aagttggctccaaca

SEQ ID NO: 60595 - DNA, 15 bp, Homo sapiens
aaagttggctccaac

SEQ ID NO: 60596 - DNA, 15 bp, Homo sapiens
gaaagttggctccaa

SEQ ID NO: 60597 - DNA, 15 bp, Homo sapiens
agaaagttggctcca

SEQ ID NO: 60598 - DNA, 15 bp, Homo sapiens
aagaaagttggctcc

SEQ ID NO: 60599 - DNA, 15 bp, Homo sapiens
taagaaagttggctc

SEQ ID NO: 60600 - DNA, 15 bp, Homo sapiens
ataagaaagttggct

SEQ ID NO: 60601 - DNA, 15 bp, Homo sapiens
tataagaaagttggc

SEQ ID NO: 60602 - DNA, 15 bp, Homo sapiens
ctataagaaagttgg

SEQ ID NO: 60603 - DNA, 15 bp, Homo sapiens
tctataagaaagttg

SEQ ID NO: 60604 - DNA, 15 bp, Homo sapiens
ttctataagaaagtt

SEQ ID NO: 60605 - DNA, 15 bp, Homo sapiens
attctataagaaagt

SEQ ID NO: 60606 - DNA, 15 bp, Homo sapiens
aattctataagaaag

SEQ ID NO: 60607 - DNA, 15 bp, Homo sapiens
taattctataagaaa

SEQ ID NO: 60608 - DNA, 15 bp, Homo sapiens
ttaattctataagaa

SEQ ID NO: 60609 - DNA, 15 bp, Homo sapiens
attaattctataaga

SEQ ID NO: 60610 - DNA, 15 bp, Homo sapiens
aattaattctataag

SEQ ID NO: 60611 - DNA, 15 bp, Homo sapiens
caattaattctataa

SEQ ID NO: 60612 - DNA, 15 bp, Homo sapiens
acaattaattctata

SEQ ID NO: 60613 - DNA, 15 bp, Homo sapiens
tacaattaattctat

SEQ ID NO: 60614 - DNA, 15 bp, Homo sapiens
atacaattaattcta

SEQ ID NO: 60615 - DNA, 15 bp, Homo sapiens
catacaattaattct

SEQ ID NO: 60616 - DNA, 15 bp, Homo sapiens
acatacaattaattc

SEQ ID NO: 60617 - DNA, 15 bp, Homo sapiens
cacatacaattaatt

SEQ ID NO: 60618 - DNA, 15 bp, Homo sapiens
ccacatacaattaat

SEQ ID NO: 60619 - DNA, 15 bp, Homo sapiens
gccacatacaattaa

SEQ ID NO: 60620 - DNA, 15 bp, Homo sapiens
agccacatacaatta

SEQ ID NO: 60621 - DNA, 15 bp, Homo sapiens
tagccacatacaatt

SEQ ID NO: 60622 - DNA, 15 bp, Homo sapiens
atagccacatacaat

SEQ ID NO: 60623 - DNA, 15 bp, Homo sapiens
tatagccacatacaa

SEQ ID NO: 60624 - DNA, 15 bp, Homo sapiens
ctatagccacataca

SEQ ID NO: 60625 - DNA, 15 bp, Homo sapiens
tctatagccacatac

SEQ ID NO: 60626 - DNA, 15 bp, Homo sapiens
ttctatagccacata

SEQ ID NO: 60627 - DNA, 15 bp, Homo sapiens
tttctatagccacat

SEQ ID NO: 60628 - DNA, 15 bp, Homo sapiens
ctttctatagccaca

SEQ ID NO: 60629 - DNA, 15 bp, Homo sapiens
gctttctatagccac

SEQ ID NO: 60630 - DNA, 15 bp, Homo sapiens
ggctttctatagcca

SEQ ID NO: 60631 - DNA, 15 bp, Homo sapiens
aggctttctatagcc

SEQ ID NO: 60632 - DNA, 15 bp, Homo sapiens
taggctttctatagc

SEQ ID NO: 60633 - DNA, 15 bp, Homo sapiens
ttaggctttctatag

SEQ ID NO: 60634 - DNA, 15 bp, Homo sapiens
attaggctttctata

SEQ ID NO: 60635 - DNA, 15 bp, Homo sapiens
cattaggctttctat

SEQ ID NO: 60636 - DNA, 15 bp, Homo sapiens
tcattaggctttcta

SEQ ID NO: 60637 - DNA, 15 bp, Homo sapiens
atcattaggctttct

SEQ ID NO: 60638 - DNA, 15 bp, Homo sapiens
aatcattaggctttc

SEQ ID NO: 60639 - DNA, 15 bp, Homo sapiens
caatcattaggcttt

SEQ ID NO: 60640 - DNA, 15 bp, Homo sapiens
acaatcattaggctt

SEQ ID NO: 60641 - DNA, 15 bp, Homo sapiens
aacaatcattaggct

SEQ ID NO: 60642 - DNA, 15 bp, Homo sapiens
caacaatcattaggc

SEQ ID NO: 60643 - DNA, 15 bp, Homo sapiens
gcaacaatcattagg

SEQ ID NO: 60644 - DNA, 15 bp, Homo sapiens
agcaacaatcattag

SEQ ID NO: 60645 - DNA, 15 bp, Homo sapiens
aagcaacaatcatta

SEQ ID NO: 60646 - DNA, 15 bp, Homo sapiens
taagcaacaatcatt

SEQ ID NO: 60647 - DNA, 15 bp, Homo sapiens
ataagcaacaatcat

SEQ ID NO: 60648 - DNA, 15 bp, Homo sapiens
aataagcaacaatca

SEQ ID NO: 60649 - DNA, 15 bp, Homo sapiens
aaataagcaacaatc

SEQ ID NO: 60650 - DNA, 15 bp, Homo sapiens
aaaataagcaacaat

SEQ ID NO: 60651 - DNA, 15 bp, Homo sapiens
aaaaataagcaacaa

SEQ ID NO: 60652 - DNA, 15 bp, Homo sapiens
caaaaataagcaaca

SEQ ID NO: 60653 - DNA, 15 bp, Homo sapiens
tcaaaaataagcaac

SEQ ID NO: 60654 - DNA, 15 bp, Homo sapiens
ctcaaaaataagcaa

SEQ ID NO: 60655 - DNA, 15 bp, Homo sapiens
tctcaaaaataagca

SEQ ID NO: 60656 - DNA, 15 bp, Homo sapiens
ctctcaaaaataagc

SEQ ID NO: 60657 - DNA, 15 bp, Homo sapiens
gctctcaaaaataag

SEQ ID NO: 60658 - DNA, 15 bp, Homo sapiens
tgctctcaaaaataa

SEQ ID NO: 60659 - DNA, 15 bp, Homo sapiens
atgctctcaaaaata

SEQ ID NO: 60660 - DNA, 15 bp, Homo sapiens
tatgctctcaaaaat

SEQ ID NO: 60661 - DNA, 15 bp, Homo sapiens
atatgctctcaaaaa

SEQ ID NO: 60662 - DNA, 15 bp, Homo sapiens
aatatgctctcaaaa

SEQ ID NO: 60663 - DNA, 15 bp, Homo sapiens
taatatgctctcaaa

SEQ ID NO: 60664 - DNA, 15 bp, Homo sapiens
ataatatgctctcaa

SEQ ID NO: 60665 - DNA, 15 bp, Homo sapiens
aataatatgctctca

SEQ ID NO: 60666 - DNA, 15 bp, Homo sapiens
gaataatatgctctc

SEQ ID NO: 60667 - DNA, 15 bp, Homo sapiens
agaataatatgctct

SEQ ID NO: 60668 - DNA, 15 bp, Homo sapiens
aagaataatatgctc

SEQ ID NO: 60669 - DNA, 15 bp, Homo sapiens
aaagaataatatgct

SEQ ID NO: 60670 - DNA, 15 bp, Homo sapiens
aaaagaataatatgc

SEQ ID NO: 60671 - DNA, 15 bp, Homo sapiens
taaaagaataatatg

SEQ ID NO: 60672 - DNA, 15 bp, Homo sapiens
ataaaagaataatat

SEQ ID NO: 60673 - DNA, 15 bp, Homo sapiens
cataaaagaataata

SEQ ID NO: 60674 - DNA, 15 bp, Homo sapiens
tcataaaagaataat

SEQ ID NO: 60675 - DNA, 15 bp, Homo sapiens
gtcataaaagaataa

SEQ ID NO: 60676 - DNA, 15 bp, Homo sapiens
ggtcataaaagaata

SEQ ID NO: 60677 - DNA, 15 bp, Homo sapiens
tggtcataaaagaat

SEQ ID NO: 60678 - DNA, 15 bp, Homo sapiens
atggtcataaaagaa

SEQ ID NO: 60679 - DNA, 15 bp, Homo sapiens
tatggtcataaaaga

SEQ ID NO: 60680 - DNA, 15 bp, Homo sapiens
ttatggtcataaaag

SEQ ID NO: 60681 - DNA, 15 bp, Homo sapiens
attatggtcataaaa

SEQ ID NO: 60682 - DNA, 15 bp, Homo sapiens
gattatggtcataaa

SEQ ID NO: 60683 - DNA, 15 bp, Homo sapiens
agattatggtcataa

SEQ ID NO: 60684 - DNA, 15 bp, Homo sapiens
aagattatggtcata

SEQ ID NO: 60685 - DNA, 15 bp, Homo sapiens
caagattatggtcat

SEQ ID NO: 60686 - DNA, 15 bp, Homo sapiens
gcaagattatggtca

SEQ ID NO: 60687 - DNA, 15 bp, Homo sapiens
agcaagattatggtc

SEQ ID NO: 60688 - DNA, 15 bp, Homo sapiens
cagcaagattatggt

SEQ ID NO: 60689 - DNA, 15 bp, Homo sapiens
acagcaagattatgg

SEQ ID NO: 60690 - DNA, 15 bp, Homo sapiens
aacagcaagattatg

SEQ ID NO: 60691 - DNA, 15 bp, Homo sapiens
aaacagcaagattat

SEQ ID NO: 60692 - DNA, 15 bp, Homo sapiens
aaaacagcaagatta

SEQ ID NO: 60693 - DNA, 15 bp, Homo sapiens
aaaaacagcaagatt

SEQ ID NO: 60694 - DNA, 15 bp, Homo sapiens
gaaaaacagcaagat

SEQ ID NO: 60695 - DNA, 15 bp, Homo sapiens
ggaaaaacagcaaga

SEQ ID NO: 60696 - DNA, 15 bp, Homo sapiens
tggaaaaacagcaag

SEQ ID NO: 60697 - DNA, 15 bp, Homo sapiens
atggaaaaacagcaa

SEQ ID NO: 60698 - DNA, 15 bp, Homo sapiens
gatggaaaaacagca

SEQ ID NO: 60699 - DNA, 15 bp, Homo sapiens
agatggaaaaacagc

SEQ ID NO: 60700 - DNA, 15 bp, Homo sapiens
aagatggaaaaacag

SEQ ID NO: 60701 - DNA, 15 bp, Homo sapiens
gaagatggaaaaaca

SEQ ID NO: 60702 - DNA, 15 bp, Homo sapiens
ggaagatggaaaaac

SEQ ID NO: 60703 - DNA, 15 bp, Homo sapiens
tggaagatggaaaaa

SEQ ID NO: 60704 - DNA, 15 bp, Homo sapiens
ttggaagatggaaaa

SEQ ID NO: 60705 - DNA, 15 bp, Homo sapiens
tttggaagatggaaa

SEQ ID NO: 60706 - DNA, 15 bp, Homo sapiens
ttttggaagatggaa

SEQ ID NO: 60707 - DNA, 15 bp, Homo sapiens
cttttggaagatgga

SEQ ID NO: 60708 - DNA, 15 bp, Homo sapiens
tcttttggaagatgg

SEQ ID NO: 60709 - DNA, 15 bp, Homo sapiens
atcttttggaagatg

SEQ ID NO: 60710 - DNA, 15 bp, Homo sapiens
gatcttttggaagat

SEQ ID NO: 60711 - DNA, 15 bp, Homo sapiens
agatcttttggaaga

SEQ ID NO: 60712 - DNA, 15 bp, Homo sapiens
aagatcttttggaag

SEQ ID NO: 60713 - DNA, 15 bp, Homo sapiens
gaagatcttttggaa

SEQ ID NO: 60714 - DNA, 15 bp, Homo sapiens
ggaagatcttttgga

SEQ ID NO: 60715 - DNA, 15 bp, Homo sapiens
aggaagatcttttgg

SEQ ID NO: 60716 - DNA, 15 bp, Homo sapiens
aaggaagatcttttg

SEQ ID NO: 60717 - DNA, 15 bp, Homo sapiens
gaaggaagatctttt

SEQ ID NO: 60718 - DNA, 15 bp, Homo sapiens
agaaggaagatcttt

SEQ ID NO: 60719 - DNA, 15 bp, Homo sapiens
tagaaggaagatctt

SEQ ID NO: 60720 - DNA, 15 bp, Homo sapiens
ttagaaggaagatct

SEQ ID NO: 60721 - DNA, 15 bp, Homo sapiens
attagaaggaagatc

SEQ ID NO: 60722 - DNA, 15 bp, Homo sapiens
tattagaaggaagat

SEQ ID NO: 60723 - DNA, 15 bp, Homo sapiens
atattagaaggaaga

SEQ ID NO: 60724 - DNA, 15 bp, Homo sapiens
catattagaaggaag

SEQ ID NO: 60725 - DNA, 15 bp, Homo sapiens
acatattagaaggaa

SEQ ID NO: 60726 - DNA, 15 bp, Homo sapiens
tacatattagaagga

SEQ ID NO: 60727 - DNA, 15 bp, Homo sapiens
atacatattagaagg

SEQ ID NO: 60728 - DNA, 15 bp, Homo sapiens
tatacatattagaag

SEQ ID NO: 60729 - DNA, 15 bp, Homo sapiens
atatacatattagaa

SEQ ID NO: 60730 - DNA, 15 bp, Homo sapiens
gatatacatattaga

SEQ ID NO: 60731 - DNA, 15 bp, Homo sapiens
tgatatacatattag

SEQ ID NO: 60732 - DNA, 15 bp, Homo sapiens
ctgatatacatatta

SEQ ID NO: 60733 - DNA, 15 bp, Homo sapiens
tctgatatacatatt

SEQ ID NO: 60734 - DNA, 15 bp, Homo sapiens
ttctgatatacatat

SEQ ID NO: 60735 - DNA, 15 bp, Homo sapiens
attctgatatacata

SEQ ID NO: 60736 - DNA, 15 bp, Homo sapiens
cattctgatatacat

SEQ ID NO: 60737 - DNA, 15 bp, Homo sapiens
acattctgatataca

SEQ ID NO: 60738 - DNA, 15 bp, Homo sapiens
cacattctgatatac

SEQ ID NO: 60739 - DNA, 15 bp, Homo sapiens
ccacattctgatata

SEQ ID NO: 60740 - DNA, 15 bp, Homo sapiens
cccacattctgatat

SEQ ID NO: 60741 - DNA, 15 bp, Homo sapiens
acccacattctgata

SEQ ID NO: 60742 - DNA, 15 bp, Homo sapiens
tacccacattctgat

SEQ ID NO: 60743 - DNA, 15 bp, Homo sapiens
ctacccacattctga

SEQ ID NO: 60744 - DNA, 15 bp, Homo sapiens
gctacccacattctg

SEQ ID NO: 60745 - DNA, 15 bp, Homo sapiens
ggctacccacattct

SEQ ID NO: 60746 - DNA, 15 bp, Homo sapiens
tggctacccacattc

SEQ ID NO: 60747 - DNA, 15 bp, Homo sapiens
ctggctacccacatt

SEQ ID NO: 60748 - DNA, 15 bp, Homo sapiens
actggctacccacat

SEQ ID NO: 60749 - DNA, 15 bp, Homo sapiens
gactggctacccaca

SEQ ID NO: 60750 - DNA, 15 bp, Homo sapiens
tgactggctacccac

SEQ ID NO: 60751 - DNA, 15 bp, Homo sapiens
ctgactggctaccca

SEQ ID NO: 60752 - DNA, 15 bp, Homo sapiens
tctgactggctaccc

SEQ ID NO: 60753 - DNA, 15 bp, Homo sapiens
gtctgactggctacc

SEQ ID NO: 60754 - DNA, 15 bp, Homo sapiens
tgtctgactggctac

SEQ ID NO: 60755 - DNA, 15 bp, Homo sapiens
ttgtctgactggcta

SEQ ID NO: 60756 - DNA, 15 bp, Homo sapiens
tttgtctgactggct

SEQ ID NO: 60757 - DNA, 15 bp, Homo sapiens
atttgtctgactggc

SEQ ID NO: 60758 - DNA, 15 bp, Homo sapiens
aatttgtctgactgg

SEQ ID NO: 60759 - DNA, 15 bp, Homo sapiens
gaatttgtctgactg

SEQ ID NO: 60760 - DNA, 15 bp, Homo sapiens
tgaatttgtctgact

SEQ ID NO: 60761 - DNA, 15 bp, Homo sapiens
atgaatttgtctgac

SEQ ID NO: 60762 - DNA, 15 bp, Homo sapiens
tatgaatttgtctga

SEQ ID NO: 60763 - DNA, 15 bp, Homo sapiens
atatgaatttgtctg

SEQ ID NO: 60764 - DNA, 15 bp, Homo sapiens
aatatgaatttgtct

SEQ ID NO: 60765 - DNA, 15 bp, Homo sapiens
caatatgaatttgtc

SEQ ID NO: 60766 - DNA, 15 bp, Homo sapiens
ccaatatgaatttgt

SEQ ID NO: 60767 - DNA, 15 bp, Homo sapiens
accaatatgaatttg

SEQ ID NO: 60768 - DNA, 15 bp, Homo sapiens
aaccaatatgaattt

SEQ ID NO: 60769 - DNA, 15 bp, Homo sapiens
caaccaatatgaatt

SEQ ID NO: 60770 - DNA, 15 bp, Homo sapiens
ccaaccaatatgaat

SEQ ID NO: 60771 - DNA, 15 bp, Homo sapiens
accaaccaatatgaa

SEQ ID NO: 60772 - DNA, 15 bp, Homo sapiens
taccaaccaatatga

SEQ ID NO: 60773 - DNA, 15 bp, Homo sapiens
ctaccaaccaatatg

SEQ ID NO: 60774 - DNA, 15 bp, Homo sapiens
gctaccaaccaatat

SEQ ID NO: 60775 - DNA, 15 bp, Homo sapiens
agctaccaaccaata

SEQ ID NO: 60776 - DNA, 15 bp, Homo sapiens
aagctaccaaccaat

SEQ ID NO: 60777 - DNA, 15 bp, Homo sapiens
aaagctaccaaccaa

SEQ ID NO: 60778 - DNA, 15 bp, Homo sapiens
taaagctaccaacca

SEQ ID NO: 60779 - DNA, 15 bp, Homo sapiens
ttaaagctaccaacc

SEQ ID NO: 60780 - DNA, 15 bp, Homo sapiens
tttaaagctaccaac

SEQ ID NO: 60781 - DNA, 15 bp, Homo sapiens
ttttaaagctaccaa

SEQ ID NO: 60782 - DNA, 15 bp, Homo sapiens
tttttaaagctacca

SEQ ID NO: 60783 - DNA, 15 bp, Homo sapiens
ctttttaaagctacc

SEQ ID NO: 60784 - DNA, 15 bp, Homo sapiens
actttttaaagctac

SEQ ID NO: 60785 - DNA, 15 bp, Homo sapiens
aactttttaaagcta

SEQ ID NO: 60786 - DNA, 15 bp, Homo sapiens
aaactttttaaagct

SEQ ID NO: 60787 - DNA, 15 bp, Homo sapiens
caaactttttaaagc

SEQ ID NO: 60788 - DNA, 15 bp, Homo sapiens
acaaactttttaaag

SEQ ID NO: 60789 - DNA, 15 bp, Homo sapiens
tacaaactttttaaa

SEQ ID NO: 60790 - DNA, 15 bp, Homo sapiens
ttacaaactttttaa

SEQ ID NO: 60791 - DNA, 15 bp, Homo sapiens
attacaaacttttta

SEQ ID NO: 60792 - DNA, 15 bp, Homo sapiens
cattacaaacttttt

SEQ ID NO: 60793 - DNA, 15 bp, Homo sapiens
acattacaaactttt

SEQ ID NO: 60794 - DNA, 15 bp, Homo sapiens
cacattacaaacttt

SEQ ID NO: 60795 - DNA, 15 bp, Homo sapiens
tcacattacaaactt

SEQ ID NO: 60796 - DNA, 15 bp, Homo sapiens
ttcacattacaaact

SEQ ID NO: 60797 - DNA, 15 bp, Homo sapiens
cttcacattacaaac

SEQ ID NO: 60798 - DNA, 15 bp, Homo sapiens
tcttcacattacaaa

SEQ ID NO: 60799 - DNA, 15 bp, Homo sapiens
gtcttcacattacaa

SEQ ID NO: 60800 - DNA, 15 bp, Homo sapiens
tgtcttcacattaca

SEQ ID NO: 60801 - DNA, 15 bp, Homo sapiens
ctgtcttcacattac

SEQ ID NO: 60802 - DNA, 15 bp, Homo sapiens
cctgtcttcacatta

SEQ ID NO: 60803 - DNA, 15 bp, Homo sapiens
tcctgtcttcacatt

SEQ ID NO: 60804 - DNA, 15 bp, Homo sapiens
ttcctgtcttcacat

SEQ ID NO: 60805 - DNA, 15 bp, Homo sapiens
tttcctgtcttcaca

SEQ ID NO: 60806 - DNA, 15 bp, Homo sapiens
ctttcctgtcttcac

SEQ ID NO: 60807 - DNA, 15 bp, Homo sapiens
cctttcctgtcttca

SEQ ID NO: 60808 - DNA, 15 bp, Homo sapiens
tcctttcctgtcttc

SEQ ID NO: 60809 - DNA, 15 bp, Homo sapiens
gtcctttcctgtctt

SEQ ID NO: 60810 - DNA, 15 bp, Homo sapiens
tgtcctttcctgtct

SEQ ID NO: 60811 - DNA, 15 bp, Homo sapiens
ttgtcctttcctgtc

SEQ ID NO: 60812 - DNA, 15 bp, Homo sapiens
tttgtcctttcctgt

SEQ ID NO: 60813 - DNA, 15 bp, Homo sapiens
ttttgtcctttcctg

SEQ ID NO: 60814 - DNA, 15 bp, Homo sapiens
attttgtcctttcct

SEQ ID NO: 60815 - DNA, 15 bp, Homo sapiens
tattttgtcctttcc

SEQ ID NO: 60816 - DNA, 15 bp, Homo sapiens
ctattttgtcctttc

SEQ ID NO: 60817 - DNA, 15 bp, Homo sapiens
actattttgtccttt

SEQ ID NO: 60818 - DNA, 15 bp, Homo sapiens
aactattttgtcctt

SEQ ID NO: 60819 - DNA, 15 bp, Homo sapiens
aaactattttgtcct

SEQ ID NO: 60820 - DNA, 15 bp, Homo sapiens
caaactattttgtcc

SEQ ID NO: 60821 - DNA, 15 bp, Homo sapiens
gcaaactattttgtc

SEQ ID NO: 60822 - DNA, 15 bp, Homo sapiens
agcaaactattttgt

SEQ ID NO: 60823 - DNA, 15 bp, Homo sapiens
aagcaaactattttg

SEQ ID NO: 60824 - DNA, 15 bp, Homo sapiens
aaagcaaactatttt

SEQ ID NO: 60825 - DNA, 15 bp, Homo sapiens
caaagcaaactattt

SEQ ID NO: 60826 - DNA, 15 bp, Homo sapiens
ccaaagcaaactatt

SEQ ID NO: 60827 - DNA, 15 bp, Homo sapiens
accaaagcaaactat

SEQ ID NO: 60828 - DNA, 15 bp, Homo sapiens
caccaaagcaaacta

SEQ ID NO: 60829 - DNA, 15 bp, Homo sapiens
ccaccaaagcaaact

SEQ ID NO: 60830 - DNA, 15 bp, Homo sapiens
accaccaaagcaaac

SEQ ID NO: 60831 - DNA, 15 bp, Homo sapiens
taccaccaaagcaaa

SEQ ID NO: 60832 - DNA, 15 bp, Homo sapiens
ctaccaccaaagcaa

SEQ ID NO: 60833 - DNA, 15 bp, Homo sapiens
actaccaccaaagca

SEQ ID NO: 60834 - DNA, 15 bp, Homo sapiens
tactaccaccaaagc

SEQ ID NO: 60835 - DNA, 15 bp, Homo sapiens
gtactaccaccaaag

SEQ ID NO: 60836 - DNA, 15 bp, Homo sapiens
agtactaccaccaaa

SEQ ID NO: 60837 - DNA, 15 bp, Homo sapiens
gagtactaccaccaa

SEQ ID NO: 60838 - DNA, 15 bp, Homo sapiens
agagtactaccacca

SEQ ID NO: 60839 - DNA, 15 bp, Homo sapiens
cagagtactaccacc

SEQ ID NO: 60840 - DNA, 15 bp, Homo sapiens
ccagagtactaccac

SEQ ID NO: 60841 - DNA, 15 bp, Homo sapiens
accagagtactacca

SEQ ID NO: 60842 - DNA, 15 bp, Homo sapiens
aaccagagtactacc

SEQ ID NO: 60843 - DNA, 15 bp, Homo sapiens
caaccagagtactac

SEQ ID NO: 60844 - DNA, 15 bp, Homo sapiens
acaaccagagtacta

SEQ ID NO: 60845 - DNA, 15 bp, Homo sapiens
aacaaccagagtact

SEQ ID NO: 60846 - DNA, 15 bp, Homo sapiens
taacaaccagagtac

SEQ ID NO: 60847 - DNA, 15 bp, Homo sapiens
ttaacaaccagagta

SEQ ID NO: 60848 - DNA, 15 bp, Homo sapiens
cttaacaaccagagt

SEQ ID NO: 60849 - DNA, 15 bp, Homo sapiens
gcttaacaaccagag

SEQ ID NO: 60850 - DNA, 15 bp, Homo sapiens
agcttaacaaccaga

SEQ ID NO: 60851 - DNA, 15 bp, Homo sapiens
tagcttaacaaccag

SEQ ID NO: 60852 - DNA, 15 bp, Homo sapiens
ctagcttaacaacca

SEQ ID NO: 60853 - DNA, 15 bp, Homo sapiens
cctagcttaacaacc

SEQ ID NO: 60854 - DNA, 15 bp, Homo sapiens
acctagcttaacaac

SEQ ID NO: 60855 - DNA, 15 bp, Homo sapiens
tacctagcttaacaa

SEQ ID NO: 60856 - DNA, 15 bp, Homo sapiens
atacctagcttaaca

SEQ ID NO: 60857 - DNA, 15 bp, Homo sapiens
aatacctagcttaac

SEQ ID NO: 60858 - DNA, 15 bp, Homo sapiens
aaatacctagcttaa

SEQ ID NO: 60859 - DNA, 15 bp, Homo sapiens
aaaatacctagctta

SEQ ID NO: 60860 - DNA, 15 bp, Homo sapiens
caaaatacctagctt

SEQ ID NO: 60861 - DNA, 15 bp, Homo sapiens
tcaaaatacctagct

SEQ ID NO: 60862 - DNA, 15 bp, Homo sapiens
ctcaaaatacctagc

SEQ ID NO: 60863 - DNA, 15 bp, Homo sapiens
tctcaaaatacctag

SEQ ID NO: 60864 - DNA, 15 bp, Homo sapiens
gtctcaaaataccta

SEQ ID NO: 60865 - DNA, 15 bp, Homo sapiens
agtctcaaaatacct

SEQ ID NO: 60866 - DNA, 15 bp, Homo sapiens
tagtctcaaaatacc

SEQ ID NO: 60867 - DNA, 15 bp, Homo sapiens
gtagtctcaaaatac

SEQ ID NO: 60868 - DNA, 15 bp, Homo sapiens
agtagtctcaaaata

SEQ ID NO: 60869 - DNA, 15 bp, Homo sapiens
aagtagtctcaaaat

SEQ ID NO: 60870 - DNA, 15 bp, Homo sapiens
gaagtagtctcaaaa

SEQ ID NO: 60871 - DNA, 15 bp, Homo sapiens
ggaagtagtctcaaa

SEQ ID NO: 60872 - DNA, 15 bp, Homo sapiens
gggaagtagtctcaa

SEQ ID NO: 60873 - DNA, 15 bp, Homo sapiens
ggggaagtagtctca

SEQ ID NO: 60874 - DNA, 15 bp, Homo sapiens
tggggaagtagtctc

SEQ ID NO: 60875 - DNA, 15 bp, Homo sapiens
atggggaagtagtct

SEQ ID NO: 60876 - DNA, 15 bp, Homo sapiens
gatggggaagtagtc

SEQ ID NO: 60877 - DNA, 15 bp, Homo sapiens
tgatggggaagtagt

SEQ ID NO: 60878 - DNA, 15 bp, Homo sapiens
gtgatggggaagtag

SEQ ID NO: 60879 - DNA, 15 bp, Homo sapiens
tgtgatggggaagta

SEQ ID NO: 60880 - DNA, 15 bp, Homo sapiens
ttgtgatggggaagt

SEQ ID NO: 60881 - DNA, 15 bp, Homo sapiens
gttgtgatggggaag

SEQ ID NO: 60882 - DNA, 15 bp, Homo sapiens
tgttgtgatggggaa

SEQ ID NO: 60883 - DNA, 15 bp, Homo sapiens
ttgttgtgatgggga

SEQ ID NO: 60884 - DNA, 15 bp, Homo sapiens
gttgttgtgatgggg

SEQ ID NO: 60885 - DNA, 15 bp, Homo sapiens
tgttgttgtgatggg

SEQ ID NO: 60886 - DNA, 15 bp, Homo sapiens
ttgttgttgtgatgg

SEQ ID NO: 60887 - DNA, 15 bp, Homo sapiens
attgttgttgtgatg

SEQ ID NO: 60888 - DNA, 15 bp, Homo sapiens
tattgttgttgtgat

SEQ ID NO: 60889 - DNA, 15 bp, Homo sapiens
ttattgttgttgtga

SEQ ID NO: 60890 - DNA, 15 bp, Homo sapiens
tttattgttgttgtg

SEQ ID NO: 60891 - DNA, 15 bp, Homo sapiens
ttttattgttgttgt

SEQ ID NO: 60892 - DNA, 15 bp, Homo sapiens
attttattgttgttg

SEQ ID NO: 60893 - DNA, 15 bp, Homo sapiens
tattttattgttgtt

SEQ ID NO: 60894 - DNA, 15 bp, Homo sapiens
ttattttattgttgt

SEQ ID NO: 60895 - DNA, 15 bp, Homo sapiens
attattttattgttg

SEQ ID NO: 60896 - DNA, 15 bp, Homo sapiens
gattattttattgtt

SEQ ID NO: 60897 - DNA, 15 bp, Homo sapiens
tgattattttattgt

SEQ ID NO: 60898 - DNA, 15 bp, Homo sapiens
gtgattattttattg

SEQ ID NO: 60899 - DNA, 15 bp, Homo sapiens
agtgattattttatt

SEQ ID NO: 60900 - DNA, 15 bp, Homo sapiens
gagtgattattttat

SEQ ID NO: 60901 - DNA, 15 bp, Homo sapiens
tgagtgattatttta

SEQ ID NO: 60902 - DNA, 15 bp, Homo sapiens
atgagtgattatttt

SEQ ID NO: 60903 - DNA, 15 bp, Homo sapiens
tatgagtgattattt

SEQ ID NO: 60904 - DNA, 15 bp, Homo sapiens
ttatgagtgattatt

SEQ ID NO: 60905 - DNA, 15 bp, Homo sapiens
attatgagtgattat

SEQ ID NO: 60906 - DNA, 15 bp, Homo sapiens
gattatgagtgatta

SEQ ID NO: 60907 - DNA, 15 bp, Homo sapiens
ggattatgagtgatt

SEQ ID NO: 60908 - DNA, 15 bp, Homo sapiens
aggattatgagtgat

SEQ ID NO: 60909 - DNA, 15 bp, Homo sapiens
taggattatgagtga

SEQ ID NO: 60910 - DNA, 15 bp, Homo sapiens
ataggattatgagtg

SEQ ID NO: 60911 - DNA, 15 bp, Homo sapiens
gataggattatgagt

SEQ ID NO: 60912 - DNA, 15 bp, Homo sapiens
tgataggattatgag

SEQ ID NO: 60913 - DNA, 15 bp, Homo sapiens
gtgataggattatga

SEQ ID NO: 60914 - DNA, 15 bp, Homo sapiens
ggtgataggattatg

SEQ ID NO: 60915 - DNA, 15 bp, Homo sapiens
aggtgataggattat

SEQ ID NO: 60916 - DNA, 15 bp, Homo sapiens
caggtgataggatta

SEQ ID NO: 60917 - DNA, 15 bp, Homo sapiens
ccaggtgataggatt

SEQ ID NO: 60918 - DNA, 15 bp, Homo sapiens
tccaggtgataggat

SEQ ID NO: 60919 - DNA, 15 bp, Homo sapiens
ctccaggtgatagga

SEQ ID NO: 60920 - DNA, 15 bp, Homo sapiens
tctccaggtgatagg

SEQ ID NO: 60921 - DNA, 15 bp, Homo sapiens
gtctccaggtgatag

SEQ ID NO: 60922 - DNA, 15 bp, Homo sapiens
tgtctccaggtgata

SEQ ID NO: 60923 - DNA, 15 bp, Homo sapiens
atgtctccaggtgat

SEQ ID NO: 60924 - DNA, 15 bp, Homo sapiens
tatgtctccaggtga

SEQ ID NO: 60925 - DNA, 15 bp, Homo sapiens
ctatgtctccaggtg

SEQ ID NO: 60926 - DNA, 15 bp, Homo sapiens
gctatgtctccaggt

SEQ ID NO: 60927 - DNA, 15 bp, Homo sapiens
ggctatgtctccagg

SEQ ID NO: 60928 - DNA, 15 bp, Homo sapiens
tggctatgtctccag

SEQ ID NO: 60929 - DNA, 15 bp, Homo sapiens
atggctatgtctcca

SEQ ID NO: 60930 - DNA, 15 bp, Homo sapiens
gatggctatgtctcc

SEQ ID NO: 60931 - DNA, 15 bp, Homo sapiens
cgatggctatgtctc

SEQ ID NO: 60932 - DNA, 15 bp, Homo sapiens
acgatggctatgtct

SEQ ID NO: 60933 - DNA, 15 bp, Homo sapiens
aacgatggctatgtc

SEQ ID NO: 60934 - DNA, 15 bp, Homo sapiens
taacgatggctatgt

SEQ ID NO: 60935 - DNA, 15 bp, Homo sapiens
ttaacgatggctatg

SEQ ID NO: 60936 - DNA, 15 bp, Homo sapiens
attaacgatggctat

SEQ ID NO: 60937 - DNA, 15 bp, Homo sapiens
tattaacgatggcta

SEQ ID NO: 60938 - DNA, 15 bp, Homo sapiens
atattaacgatggct

SEQ ID NO: 60939 - DNA, 15 bp, Homo sapiens
catattaacgatggc

SEQ ID NO: 60940 - DNA, 15 bp, Homo sapiens
acatattaacgatgg

SEQ ID NO: 60941 - DNA, 15 bp, Homo sapiens
aacatattaacgatg

SEQ ID NO: 60942 - DNA, 15 bp, Homo sapiens
taacatattaacgat

SEQ ID NO: 60943 - DNA, 15 bp, Homo sapiens
ctaacatattaacga

SEQ ID NO: 60944 - DNA, 15 bp, Homo sapiens
actaacatattaacg

SEQ ID NO: 60945 - DNA, 15 bp, Homo sapiens
cactaacatattaac

SEQ ID NO: 60946 - DNA, 15 bp, Homo sapiens
tcactaacatattaa

SEQ ID NO: 60947 - DNA, 15 bp, Homo sapiens
gtcactaacatatta

SEQ ID NO: 60948 - DNA, 15 bp, Homo sapiens
agtcactaacatatt

SEQ ID NO: 60949 - DNA, 15 bp, Homo sapiens
tagtcactaacatat

SEQ ID NO: 60950 - DNA, 15 bp, Homo sapiens
atagtcactaacata

SEQ ID NO: 60951 - DNA, 15 bp, Homo sapiens
tatagtcactaacat

SEQ ID NO: 60952 - DNA, 15 bp, Homo sapiens
gtatagtcactaaca

SEQ ID NO: 60953 - DNA, 15 bp, Homo sapiens
tgtatagtcactaac

SEQ ID NO: 60954 - DNA, 15 bp, Homo sapiens
ttgtatagtcactaa

SEQ ID NO: 60955 - DNA, 15 bp, Homo sapiens
attgtatagtcacta

SEQ ID NO: 60956 - DNA, 15 bp, Homo sapiens
gattgtatagtcact

SEQ ID NO: 60957 - DNA, 15 bp, Homo sapiens
tgattgtatagtcac

SEQ ID NO: 60958 - DNA, 15 bp, Homo sapiens
atgattgtatagtca

SEQ ID NO: 60959 - DNA, 15 bp, Homo sapiens
catgattgtatagtc

SEQ ID NO: 60960 - DNA, 15 bp, Homo sapiens
acatgattgtatagt

SEQ ID NO: 60961 - DNA, 15 bp, Homo sapiens
aacatgattgtatag

SEQ ID NO: 60962 - DNA, 15 bp, Homo sapiens
aaacatgattgtata

SEQ ID NO: 60963 - DNA, 15 bp, Homo sapiens
aaaacatgattgtat

SEQ ID NO: 60964 - DNA, 15 bp, Homo sapiens
gaaaacatgattgta

SEQ ID NO: 60965 - DNA, 15 bp, Homo sapiens
agaaaacatgattgt

SEQ ID NO: 60966 - DNA, 15 bp, Homo sapiens
aagaaaacatgattg

SEQ ID NO: 60967 - DNA, 15 bp, Homo sapiens
gaagaaaacatgatt

SEQ ID NO: 60968 - DNA, 15 bp, Homo sapiens
agaagaaaacatgat

SEQ ID NO: 60969 - DNA, 15 bp, Homo sapiens
cagaagaaaacatga

SEQ ID NO: 60970 - DNA, 15 bp, Homo sapiens
acagaagaaaacatg

SEQ ID NO: 60971 - DNA, 15 bp, Homo sapiens
tacagaagaaaacat

SEQ ID NO: 60972 - DNA, 15 bp, Homo sapiens
atacagaagaaaaca

SEQ ID NO: 60973 - DNA, 15 bp, Homo sapiens
tatacagaagaaaac

SEQ ID NO: 60974 - DNA, 15 bp, Homo sapiens
atatacagaagaaaa

SEQ ID NO: 60975 - DNA, 15 bp, Homo sapiens
gatatacagaagaaa

SEQ ID NO: 60976 - DNA, 15 bp, Homo sapiens
ggatatacagaagaa

SEQ ID NO: 60977 - DNA, 15 bp, Homo sapiens
tggatatacagaaga

SEQ ID NO: 60978 - DNA, 15 bp, Homo sapiens
atggatatacagaag

SEQ ID NO: 60979 - DNA, 15 bp, Homo sapiens
catggatatacagaa

SEQ ID NO: 60980 - DNA, 15 bp, Homo sapiens
acatggatatacaga

SEQ ID NO: 60981 - DNA, 15 bp, Homo sapiens
tacatggatatacag

SEQ ID NO: 60982 - DNA, 15 bp, Homo sapiens
atacatggatataca

SEQ ID NO: 60983 - DNA, 15 bp, Homo sapiens
tatacatggatatac

SEQ ID NO: 60984 - DNA, 15 bp, Homo sapiens
atatacatggatata

SEQ ID NO: 60985 - DNA, 15 bp, Homo sapiens
aatatacatggatat

SEQ ID NO: 60986 - DNA, 15 bp, Homo sapiens
gaatatacatggata

SEQ ID NO: 60987 - DNA, 15 bp, Homo sapiens
agaatatacatggat

SEQ ID NO: 60988 - DNA, 15 bp, Homo sapiens
aagaatatacatgga

SEQ ID NO: 60989 - DNA, 15 bp, Homo sapiens
aaagaatatacatgg

SEQ ID NO: 60990 - DNA, 15 bp, Homo sapiens
taaagaatatacatg

SEQ ID NO: 60991 - DNA, 15 bp, Homo sapiens
ttaaagaatatacat

SEQ ID NO: 60992 - DNA, 15 bp, Homo sapiens
tttaaagaatataca

SEQ ID NO: 60993 - DNA, 15 bp, Homo sapiens
ttttaaagaatatac

SEQ ID NO: 60994 - DNA, 15 bp, Homo sapiens
tttttaaagaatata

SEQ ID NO: 60995 - DNA, 15 bp, Homo sapiens
atttttaaagaatat

SEQ ID NO: 60996 - DNA, 15 bp, Homo sapiens
catttttaaagaata

SEQ ID NO: 60997 - DNA, 15 bp, Homo sapiens
tcatttttaaagaat

SEQ ID NO: 60998 - DNA, 15 bp, Homo sapiens
ttcatttttaaagaa

SEQ ID NO: 60999 - DNA, 15 bp, Homo sapiens
tttcatttttaaaga

SEQ ID NO: 61000 - DNA, 15 bp, Homo sapiens
atttcatttttaaag

SEQ ID NO: 61001 - DNA, 15 bp, Homo sapiens
aatttcatttttaaa

SEQ ID NO: 61002 - DNA, 15 bp, Homo sapiens
aaatttcatttttaa

SEQ ID NO: 61003 - DNA, 15 bp, Homo sapiens
taaatttcattttta

SEQ ID NO: 61004 - DNA, 15 bp, Homo sapiens
ataaatttcattttt

SEQ ID NO: 61005 - DNA, 15 bp, Homo sapiens
tataaatttcatttt

SEQ ID NO: 61006 - DNA, 15 bp, Homo sapiens
gtataaatttcattt

SEQ ID NO: 61007 - DNA, 15 bp, Homo sapiens
agtataaatttcatt

SEQ ID NO: 61008 - DNA, 15 bp, Homo sapiens
cagtataaatttcat

SEQ ID NO: 61009 - DNA, 15 bp, Homo sapiens
acagtataaatttca

SEQ ID NO: 61010 - DNA, 15 bp, Homo sapiens
tacagtataaatttc

SEQ ID NO: 61011 - DNA, 15 bp, Homo sapiens
gtacagtataaattt

SEQ ID NO: 61012 - DNA, 15 bp, Homo sapiens
ggtacagtataaatt

SEQ ID NO: 61013 - DNA, 15 bp, Homo sapiens
aggtacagtataaat

SEQ ID NO: 61014 - DNA, 15 bp, Homo sapiens
caggtacagtataaa

SEQ ID NO: 61015 - DNA, 15 bp, Homo sapiens
tcaggtacagtataa

SEQ ID NO: 61016 - DNA, 15 bp, Homo sapiens
atcaggtacagtata

SEQ ID NO: 61017 - DNA, 15 bp, Homo sapiens
gatcaggtacagtat

SEQ ID NO: 61018 - DNA, 15 bp, Homo sapiens
agatcaggtacagta

SEQ ID NO: 61019 - DNA, 15 bp, Homo sapiens
gagatcaggtacagt

SEQ ID NO: 61020 - DNA, 15 bp, Homo sapiens
tgagatcaggtacag

SEQ ID NO: 61021 - DNA, 15 bp, Homo sapiens
ttgagatcaggtaca

SEQ ID NO: 61022 - DNA, 15 bp, Homo sapiens
tttgagatcaggtac

SEQ ID NO: 61023 - DNA, 15 bp, Homo sapiens
ctttgagatcaggta

SEQ ID NO: 61024 - DNA, 15 bp, Homo sapiens
gctttgagatcaggt

SEQ ID NO: 61025 - DNA, 15 bp, Homo sapiens
agctttgagatcagg

SEQ ID NO: 61026 - DNA, 15 bp, Homo sapiens
aagctttgagatcag

SEQ ID NO: 61027 - DNA, 15 bp, Homo sapiens
aaagctttgagatca

SEQ ID NO: 61028 - DNA, 15 bp, Homo sapiens
aaaagctttgagatc

SEQ ID NO: 61029 - DNA, 15 bp, Homo sapiens
aaaaagctttgagat

SEQ ID NO: 61030 - DNA, 15 bp, Homo sapiens
taaaaagctttgaga

SEQ ID NO: 61031 - DNA, 15 bp, Homo sapiens
ctaaaaagctttgag

SEQ ID NO: 61032 - DNA, 15 bp, Homo sapiens
gctaaaaagctttga

SEQ ID NO: 61033 - DNA, 15 bp, Homo sapiens
agctaaaaagctttg

SEQ ID NO: 61034 - DNA, 15 bp, Homo sapiens
aagctaaaaagcttt

SEQ ID NO: 61035 - DNA, 15 bp, Homo sapiens
taagctaaaaagctt

SEQ ID NO: 61036 - DNA, 15 bp, Homo sapiens
ctaagctaaaaagct

SEQ ID NO: 61037 - DNA, 15 bp, Homo sapiens
actaagctaaaaagc

SEQ ID NO: 61038 - DNA, 15 bp, Homo sapiens
tactaagctaaaaag

SEQ ID NO: 61039 - DNA, 15 bp, Homo sapiens
atactaagctaaaaa

SEQ ID NO: 61040 - DNA, 15 bp, Homo sapiens
tatactaagctaaaa

SEQ ID NO: 61041 - DNA, 15 bp, Homo sapiens
atatactaagctaaa

SEQ ID NO: 61042 - DNA, 15 bp, Homo sapiens
gatatactaagctaa

SEQ ID NO: 61043 - DNA, 15 bp, Homo sapiens
agatatactaagcta

SEQ ID NO: 61044 - DNA, 15 bp, Homo sapiens
cagatatactaagct

SEQ ID NO: 61045 - DNA, 15 bp, Homo sapiens
acagatatactaagc

SEQ ID NO: 61046 - DNA, 15 bp, Homo sapiens
gacagatatactaag

SEQ ID NO: 61047 - DNA, 15 bp, Homo sapiens
tgacagatatactaa

SEQ ID NO: 61048 - DNA, 15 bp, Homo sapiens
atgacagatatacta

SEQ ID NO: 61049 - DNA, 15 bp, Homo sapiens
catgacagatatact

SEQ ID NO: 61050 - DNA, 15 bp, Homo sapiens
tcatgacagatatac

SEQ ID NO: 61051 - DNA, 15 bp, Homo sapiens
ttcatgacagatata

SEQ ID NO: 61052 - DNA, 15 bp, Homo sapiens
attcatgacagatat

SEQ ID NO: 61053 - DNA, 15 bp, Homo sapiens
aattcatgacagata

SEQ ID NO: 61054 - DNA, 15 bp, Homo sapiens
aaattcatgacagat

SEQ ID NO: 61055 - DNA, 15 bp, Homo sapiens
caaattcatgacaga

SEQ ID NO: 61056 - DNA, 15 bp, Homo sapiens
acaaattcatgacag

SEQ ID NO: 61057 - DNA, 15 bp, Homo sapiens
tacaaattcatgaca

SEQ ID NO: 61058 - DNA, 15 bp, Homo sapiens
ctacaaattcatgac

SEQ ID NO: 61059 - DNA, 15 bp, Homo sapiens
cctacaaattcatga

SEQ ID NO: 61060 - DNA, 15 bp, Homo sapiens
tcctacaaattcatg

SEQ ID NO: 61061 - DNA, 15 bp, Homo sapiens
atcctacaaattcat

SEQ ID NO: 61062 - DNA, 15 bp, Homo sapiens
catcctacaaattca

SEQ ID NO: 61063 - DNA, 15 bp, Homo sapiens
acatcctacaaattc

SEQ ID NO: 61064 - DNA, 15 bp, Homo sapiens
aacatcctacaaatt

SEQ ID NO: 61065 - DNA, 15 bp, Homo sapiens
gaacatcctacaaat

SEQ ID NO: 61066 - DNA, 15 bp, Homo sapiens
ggaacatcctacaaa

SEQ ID NO: 61067 - DNA, 15 bp, Homo sapiens
tggaacatcctacaa

SEQ ID NO: 61068 - DNA, 15 bp, Homo sapiens
atggaacatcctaca

SEQ ID NO: 61069 - DNA, 15 bp, Homo sapiens
aatggaacatcctac

SEQ ID NO: 61070 - DNA, 15 bp, Homo sapiens
caatggaacatccta

SEQ ID NO: 61071 - DNA, 15 bp, Homo sapiens
gcaatggaacatcct

SEQ ID NO: 61072 - DNA, 15 bp, Homo sapiens
tgcaatggaacatcc

SEQ ID NO: 61073 - DNA, 15 bp, Homo sapiens
atgcaatggaacatc

SEQ ID NO: 61074 - DNA, 15 bp, Homo sapiens
gatgcaatggaacat

SEQ ID NO: 61075 - DNA, 15 bp, Homo sapiens
tgatgcaatggaaca

SEQ ID NO: 61076 - DNA, 15 bp, Homo sapiens
ctgatgcaatggaac

SEQ ID NO: 61077 - DNA, 15 bp, Homo sapiens
tctgatgcaatggaa

SEQ ID NO: 61078 - DNA, 15 bp, Homo sapiens
ttctgatgcaatgga

SEQ ID NO: 61079 - DNA, 15 bp, Homo sapiens
tttctgatgcaatgg

SEQ ID NO: 61080 - DNA, 15 bp, Homo sapiens
ttttctgatgcaatg

SEQ ID NO: 61081 - DNA, 15 bp, Homo sapiens
gttttctgatgcaat

SEQ ID NO: 61082 - DNA, 15 bp, Homo sapiens
cgttttctgatgcaa

SEQ ID NO: 61083 - DNA, 15 bp, Homo sapiens
ccgttttctgatgca

SEQ ID NO: 61084 - DNA, 15 bp, Homo sapiens
tccgttttctgatgc

SEQ ID NO: 61085 - DNA, 15 bp, Homo sapiens
gtccgttttctgatg

SEQ ID NO: 61086 - DNA, 15 bp, Homo sapiens
tgtccgttttctgat

SEQ ID NO: 61087 - DNA, 15 bp, Homo sapiens
ctgtccgttttctga

SEQ ID NO: 61088 - DNA, 15 bp, Homo sapiens
actgtccgttttctg

SEQ ID NO: 61089 - DNA, 15 bp, Homo sapiens
cactgtccgttttct

SEQ ID NO: 61090 - DNA, 15 bp, Homo sapiens
tcactgtccgttttc

SEQ ID NO: 61091 - DNA, 15 bp, Homo sapiens
atcactgtccgtttt

SEQ ID NO: 61092 - DNA, 15 bp, Homo sapiens
aatcactgtccgttt

SEQ ID NO: 61093 - DNA, 15 bp, Homo sapiens
aaatcactgtccgtt

SEQ ID NO: 61094 - DNA, 15 bp, Homo sapiens
caaatcactgtccgt

SEQ ID NO: 61095 - DNA, 15 bp, Homo sapiens
tcaaatcactgtccg

SEQ ID NO: 61096 - DNA, 15 bp, Homo sapiens
atcaaatcactgtcc

SEQ ID NO: 61097 - DNA, 15 bp, Homo sapiens
aatcaaatcactgtc

SEQ ID NO: 61098 - DNA, 15 bp, Homo sapiens
taatcaaatcactgt

SEQ ID NO: 61099 - DNA, 15 bp, Homo sapiens
gtaatcaaatcactg

SEQ ID NO: 61100 - DNA, 15 bp, Homo sapiens
agtaatcaaatcact

SEQ ID NO: 61101 - DNA, 15 bp, Homo sapiens
aagtaatcaaatcac

SEQ ID NO: 61102 - DNA, 15 bp, Homo sapiens
aaagtaatcaaatca

SEQ ID NO: 61103 - DNA, 15 bp, Homo sapiens
gaaagtaatcaaatc

SEQ ID NO: 61104 - DNA, 15 bp, Homo sapiens
agaaagtaatcaaat

SEQ ID NO: 61105 - DNA, 15 bp, Homo sapiens
tagaaagtaatcaaa

SEQ ID NO: 61106 - DNA, 15 bp, Homo sapiens
ttagaaagtaatcaa

SEQ ID NO: 61107 - DNA, 15 bp, Homo sapiens
attagaaagtaatca

SEQ ID NO: 61108 - DNA, 15 bp, Homo sapiens
cattagaaagtaatc

SEQ ID NO: 61109 - DNA, 15 bp, Homo sapiens
gcattagaaagtaat

SEQ ID NO: 61110 - DNA, 15 bp, Homo sapiens
ggcattagaaagtaa

SEQ ID NO: 61111 - DNA, 15 bp, Homo sapiens
tggcattagaaagta

SEQ ID NO: 61112 - DNA, 15 bp, Homo sapiens
gtggcattagaaagt

SEQ ID NO: 61113 - DNA, 15 bp, Homo sapiens
tgtggcattagaaag

SEQ ID NO: 61114 - DNA, 15 bp, Homo sapiens
ctgtggcattagaaa

SEQ ID NO: 61115 - DNA, 15 bp, Homo sapiens
tctgtggcattagaa

SEQ ID NO: 61116 - DNA, 15 bp, Homo sapiens
atctgtggcattaga

SEQ ID NO: 61117 - DNA, 15 bp, Homo sapiens
catctgtggcattag

SEQ ID NO: 61118 - DNA, 15 bp, Homo sapiens
gcatctgtggcatta

SEQ ID NO: 61119 - DNA, 15 bp, Homo sapiens
tgcatctgtggcatt

SEQ ID NO: 61120 - DNA, 15 bp, Homo sapiens
ctgcatctgtggcat

SEQ ID NO: 61121 - DNA, 15 bp, Homo sapiens
tctgcatctgtggca

SEQ ID NO: 61122 - DNA, 15 bp, Homo sapiens
atctgcatctgtggc

SEQ ID NO: 61123 - DNA, 15 bp, Homo sapiens
aatctgcatctgtgg

SEQ ID NO: 61124 - DNA, 15 bp, Homo sapiens
taatctgcatctgtg

SEQ ID NO: 61125 - DNA, 15 bp, Homo sapiens
gtaatctgcatctgt

SEQ ID NO: 61126 - DNA, 15 bp, Homo sapiens
tgtaatctgcatctg

SEQ ID NO: 61127 - DNA, 15 bp, Homo sapiens
atgtaatctgcatct

SEQ ID NO: 61128 - DNA, 15 bp, Homo sapiens
catgtaatctgcatc

SEQ ID NO: 61129 - DNA, 15 bp, Homo sapiens
acatgtaatctgcat

SEQ ID NO: 61130 - DNA, 15 bp, Homo sapiens
tacatgtaatctgca

SEQ ID NO: 61131 - DNA, 15 bp, Homo sapiens
ctacatgtaatctgc

SEQ ID NO: 61132 - DNA, 15 bp, Homo sapiens
actacatgtaatctg

SEQ ID NO: 61133 - DNA, 15 bp, Homo sapiens
aactacatgtaatct

SEQ ID NO: 61134 - DNA, 15 bp, Homo sapiens
taactacatgtaatc

SEQ ID NO: 61135 - DNA, 15 bp, Homo sapiens
ataactacatgtaat

SEQ ID NO: 61136 - DNA, 15 bp, Homo sapiens
aataactacatgtaa

SEQ ID NO: 61137 - DNA, 15 bp, Homo sapiens
caataactacatgta

SEQ ID NO: 61138 - DNA, 15 bp, Homo sapiens
tcaataactacatgt

SEQ ID NO: 61139 - DNA, 15 bp, Homo sapiens
ctcaataactacatg

SEQ ID NO: 61140 - DNA, 15 bp, Homo sapiens
tctcaataactacat

SEQ ID NO: 61141 - DNA, 15 bp, Homo sapiens
ttctcaataactaca

SEQ ID NO: 61142 - DNA, 15 bp, Homo sapiens
attctcaataactac

SEQ ID NO: 61143 - DNA, 15 bp, Homo sapiens
gattctcaataacta

SEQ ID NO: 61144 - DNA, 15 bp, Homo sapiens
ggattctcaataact

SEQ ID NO: 61145 - DNA, 15 bp, Homo sapiens
aggattctcaataac

SEQ ID NO: 61146 - DNA, 15 bp, Homo sapiens
aaggattctcaataa

SEQ ID NO: 61147 - DNA, 15 bp, Homo sapiens
aaaggattctcaata

SEQ ID NO: 61148 - DNA, 15 bp, Homo sapiens
gaaaggattctcaat

SEQ ID NO: 61149 - DNA, 15 bp, Homo sapiens
cgaaaggattctcaa

SEQ ID NO: 61150 - DNA, 15 bp, Homo sapiens
tcgaaaggattctca

SEQ ID NO: 61151 - DNA, 15 bp, Homo sapiens
ttcgaaaggattctc

SEQ ID NO: 61152 - DNA, 15 bp, Homo sapiens
attcgaaaggattct

SEQ ID NO: 61153 - DNA, 15 bp, Homo sapiens
aattcgaaaggattc

SEQ ID NO: 61154 - DNA, 15 bp, Homo sapiens
gaattcgaaaggatt

SEQ ID NO: 61155 - DNA, 15 bp, Homo sapiens
tgaattcgaaaggat

SEQ ID NO: 61156 - DNA, 15 bp, Homo sapiens
ctgaattcgaaagga

SEQ ID NO: 61157 - DNA, 15 bp, Homo sapiens
actgaattcgaaagg

SEQ ID NO: 61158 - DNA, 15 bp, Homo sapiens
cactgaattcgaaag

SEQ ID NO: 61159 - DNA, 15 bp, Homo sapiens
ccactgaattcgaaa

SEQ ID NO: 61160 - DNA, 15 bp, Homo sapiens
gccactgaattcgaa

SEQ ID NO: 61161 - DNA, 15 bp, Homo sapiens
agccactgaattcga

SEQ ID NO: 61162 - DNA, 15 bp, Homo sapiens
aagccactgaattcg

SEQ ID NO: 61163 - DNA, 15 bp, Homo sapiens
taagccactgaattc

SEQ ID NO: 61164 - DNA, 15 bp, Homo sapiens
ttaagccactgaatt

SEQ ID NO: 61165 - DNA, 15 bp, Homo sapiens
attaagccactgaat

SEQ ID NO: 61166 - DNA, 15 bp, Homo sapiens
gattaagccactgaa

SEQ ID NO: 61167 - DNA, 15 bp, Homo sapiens
tgattaagccactga

SEQ ID NO: 61168 - DNA, 15 bp, Homo sapiens
atgattaagccactg

SEQ ID NO: 61169 - DNA, 15 bp, Homo sapiens
catgattaagccact

SEQ ID NO: 61170 - DNA, 15 bp, Homo sapiens
tcatgattaagccac

SEQ ID NO: 61171 - DNA, 15 bp, Homo sapiens
ttcatgattaagcca

SEQ ID NO: 61172 - DNA, 15 bp, Homo sapiens
attcatgattaagcc

SEQ ID NO: 61173 - DNA, 15 bp, Homo sapiens
cattcatgattaagc

SEQ ID NO: 61174 - DNA, 15 bp, Homo sapiens
acattcatgattaag

SEQ ID NO: 61175 - DNA, 15 bp, Homo sapiens
gacattcatgattaa

SEQ ID NO: 61176 - DNA, 15 bp, Homo sapiens
agacattcatgatta

SEQ ID NO: 61177 - DNA, 15 bp, Homo sapiens
tagacattcatgatt

SEQ ID NO: 61178 - DNA, 15 bp, Homo sapiens
ttagacattcatgat

SEQ ID NO: 61179 - DNA, 15 bp, Homo sapiens
tttagacattcatga

SEQ ID NO: 61180 - DNA, 15 bp, Homo sapiens
atttagacattcatg

SEQ ID NO: 61181 - DNA, 15 bp, Homo sapiens
tatttagacattcat

SEQ ID NO: 61182 - DNA, 15 bp, Homo sapiens
atatttagacattca

SEQ ID NO: 61183 - DNA, 15 bp, Homo sapiens
aatatttagacattc

SEQ ID NO: 61184 - DNA, 15 bp, Homo sapiens
caatatttagacatt

SEQ ID NO: 61185 - DNA, 15 bp, Homo sapiens
acaatatttagacat

SEQ ID NO: 61186 - DNA, 15 bp, Homo sapiens
aacaatatttagaca

SEQ ID NO: 61187 - DNA, 15 bp, Homo sapiens
caacaatatttagac

SEQ ID NO: 61188 - DNA, 15 bp, Homo sapiens
tcaacaatatttaga

SEQ ID NO: 61189 - DNA, 15 bp, Homo sapiens
gtcaacaatatttag

SEQ ID NO: 61190 - DNA, 15 bp, Homo sapiens
tgtcaacaatattta

SEQ ID NO: 61191 - DNA, 15 bp, Homo sapiens
atgtcaacaatattt

SEQ ID NO: 61192 - DNA, 15 bp, Homo sapiens
aatgtcaacaatatt

SEQ ID NO: 61193 - DNA, 15 bp, Homo sapiens
taatgtcaacaatat

SEQ ID NO: 61194 - DNA, 15 bp, Homo sapiens
ctaatgtcaacaata

SEQ ID NO: 61195 - DNA, 15 bp, Homo sapiens
cctaatgtcaacaat

SEQ ID NO: 61196 - DNA, 15 bp, Homo sapiens
tcctaatgtcaacaa

SEQ ID NO: 61197 - DNA, 15 bp, Homo sapiens
atcctaatgtcaaca

SEQ ID NO: 61198 - DNA, 15 bp, Homo sapiens
catcctaatgtcaac

SEQ ID NO: 61199 - DNA, 15 bp, Homo sapiens
tcatcctaatgtcaa

SEQ ID NO: 61200 - DNA, 15 bp, Homo sapiens
atcatcctaatgtca

SEQ ID NO: 61201 - DNA, 15 bp, Homo sapiens
tatcatcctaatgtc

SEQ ID NO: 61202 - DNA, 15 bp, Homo sapiens
gtatcatcctaatgt

SEQ ID NO: 61203 - DNA, 15 bp, Homo sapiens
tgtatcatcctaatg

SEQ ID NO: 61204 - DNA, 15 bp, Homo sapiens
atgtatcatcctaat

SEQ ID NO: 61205 - DNA, 15 bp, Homo sapiens
catgtatcatcctaa

SEQ ID NO: 61206 - DNA, 15 bp, Homo sapiens
acatgtatcatccta

SEQ ID NO: 61207 - DNA, 15 bp, Homo sapiens
tacatgtatcatcct

SEQ ID NO: 61208 - DNA, 15 bp, Homo sapiens
ttacatgtatcatcc

SEQ ID NO: 61209 - DNA, 15 bp, Homo sapiens
tttacatgtatcatc

SEQ ID NO: 61210 - DNA, 15 bp, Homo sapiens
atttacatgtatcat

SEQ ID NO: 61211 - DNA, 15 bp, Homo sapiens
aatttacatgtatca

SEQ ID NO: 61212 - DNA, 15 bp, Homo sapiens
taatttacatgtatc

SEQ ID NO: 61213 - DNA, 15 bp, Homo sapiens
ttaatttacatgtat

SEQ ID NO: 61214 - DNA, 15 bp, Homo sapiens
tttaatttacatgta

SEQ ID NO: 61215 - DNA, 15 bp, Homo sapiens
ctttaatttacatgt

SEQ ID NO: 61216 - DNA, 15 bp, Homo sapiens
actttaatttacatg

SEQ ID NO: 61217 - DNA, 15 bp, Homo sapiens
aactttaatttacat

SEQ ID NO: 61218 - DNA, 15 bp, Homo sapiens
taactttaatttaca

SEQ ID NO: 61219 - DNA, 15 bp, Homo sapiens
gtaactttaatttac

SEQ ID NO: 61220 - DNA, 15 bp, Homo sapiens
tgtaactttaattta

SEQ ID NO: 61221 - DNA, 15 bp, Homo sapiens
atgtaactttaattt

SEQ ID NO: 61222 - DNA, 15 bp, Homo sapiens
aatgtaactttaatt

SEQ ID NO: 61223 - DNA, 15 bp, Homo sapiens
aaatgtaactttaat

SEQ ID NO: 61224 - DNA, 15 bp, Homo sapiens
caaatgtaactttaa

SEQ ID NO: 61225 - DNA, 15 bp, Homo sapiens
acaaatgtaacttta

SEQ ID NO: 61226 - DNA, 15 bp, Homo sapiens
aacaaatgtaacttt

SEQ ID NO: 61227 - DNA, 15 bp, Homo sapiens
aaacaaatgtaactt

SEQ ID NO: 61228 - DNA, 15 bp, Homo sapiens
taaacaaatgtaact

SEQ ID NO: 61229 - DNA, 15 bp, Homo sapiens
ctaaacaaatgtaac

SEQ ID NO: 61230 - DNA, 15 bp, Homo sapiens
gctaaacaaatgtaa

SEQ ID NO: 61231 - DNA, 15 bp, Homo sapiens
tgctaaacaaatgta

SEQ ID NO: 61232 - DNA, 15 bp, Homo sapiens
atgctaaacaaatgt

SEQ ID NO: 61233 - DNA, 15 bp, Homo sapiens
tatgctaaacaaatg

SEQ ID NO: 61234 - DNA, 15 bp, Homo sapiens
ctatgctaaacaaat

SEQ ID NO: 61235 - DNA, 15 bp, Homo sapiens
tctatgctaaacaaa

SEQ ID NO: 61236 - DNA, 15 bp, Homo sapiens
gtctatgctaaacaa

SEQ ID NO: 61237 - DNA, 15 bp, Homo sapiens
tgtctatgctaaaca

SEQ ID NO: 61238 - DNA, 15 bp, Homo sapiens
ttgtctatgctaaac

SEQ ID NO: 61239 - DNA, 15 bp, Homo sapiens
cttgtctatgctaaa

SEQ ID NO: 61240 - DNA, 15 bp, Homo sapiens
gcttgtctatgctaa

SEQ ID NO: 61241 - DNA, 15 bp, Homo sapiens
agcttgtctatgcta

SEQ ID NO: 61242 - DNA, 15 bp, Homo sapiens
aagcttgtctatgct

SEQ ID NO: 61243 - DNA, 15 bp, Homo sapiens
taagcttgtctatgc

SEQ ID NO: 61244 - DNA, 15 bp, Homo sapiens
ttaagcttgtctatg

SEQ ID NO: 61245 - DNA, 15 bp, Homo sapiens
gttaagcttgtctat

SEQ ID NO: 61246 - DNA, 15 bp, Homo sapiens
tgttaagcttgtcta

SEQ ID NO: 61247 - DNA, 15 bp, Homo sapiens
atgttaagcttgtct

SEQ ID NO: 61248 - DNA, 15 bp, Homo sapiens
aatgttaagcttgtc

SEQ ID NO: 61249 - DNA, 15 bp, Homo sapiens
caatgttaagcttgt

SEQ ID NO: 61250 - DNA, 15 bp, Homo sapiens
acaatgttaagcttg

SEQ ID NO: 61251 - DNA, 15 bp, Homo sapiens
tacaatgttaagctt

SEQ ID NO: 61252 - DNA, 15 bp, Homo sapiens
ctacaatgttaagct

SEQ ID NO: 61253 - DNA, 15 bp, Homo sapiens
tctacaatgttaagc

SEQ ID NO: 61254 - DNA, 15 bp, Homo sapiens
atctacaatgttaag

SEQ ID NO: 61255 - DNA, 15 bp, Homo sapiens
catctacaatgttaa

SEQ ID NO: 61256 - DNA, 15 bp, Homo sapiens
acatctacaatgtta

SEQ ID NO: 61257 - DNA, 15 bp, Homo sapiens
aacatctacaatgtt

SEQ ID NO: 61258 - DNA, 15 bp, Homo sapiens
aaacatctacaatgt

SEQ ID NO: 61259 - DNA, 15 bp, Homo sapiens
gaaacatctacaatg

SEQ ID NO: 61260 - DNA, 15 bp, Homo sapiens
agaaacatctacaat

SEQ ID NO: 61261 - DNA, 15 bp, Homo sapiens
gagaaacatctacaa

SEQ ID NO: 61262 - DNA, 15 bp, Homo sapiens
agagaaacatctaca

SEQ ID NO: 61263 - DNA, 15 bp, Homo sapiens
aagagaaacatctac

SEQ ID NO: 61264 - DNA, 15 bp, Homo sapiens
gaagagaaacatcta

SEQ ID NO: 61265 - DNA, 15 bp, Homo sapiens
tgaagagaaacatct

SEQ ID NO: 61266 - DNA, 15 bp, Homo sapiens
ttgaagagaaacatc

SEQ ID NO: 61267 - DNA, 15 bp, Homo sapiens
tttgaagagaaacat

SEQ ID NO: 61268 - DNA, 15 bp, Homo sapiens
ttttgaagagaaaca

SEQ ID NO: 61269 - DNA, 15 bp, Homo sapiens
tttttgaagagaaac

SEQ ID NO: 61270 - DNA, 15 bp, Homo sapiens
atttttgaagagaaa

SEQ ID NO: 61271 - DNA, 15 bp, Homo sapiens
gatttttgaagagaa

SEQ ID NO: 61272 - DNA, 15 bp, Homo sapiens
tgatttttgaagaga

SEQ ID NO: 61273 - DNA, 15 bp, Homo sapiens
atgatttttgaagag

SEQ ID NO: 61274 - DNA, 15 bp, Homo sapiens
gatgatttttgaaga

SEQ ID NO: 61275 - DNA, 15 bp, Homo sapiens
agatgatttttgaag

SEQ ID NO: 61276 - DNA, 15 bp, Homo sapiens
aagatgatttttgaa

SEQ ID NO: 61277 - DNA, 15 bp, Homo sapiens
taagatgatttttga

SEQ ID NO: 61278 - DNA, 15 bp, Homo sapiens
ttaagatgatttttg

SEQ ID NO: 61279 - DNA, 15 bp, Homo sapiens
tttaagatgattttt

SEQ ID NO: 61280 - DNA, 15 bp, Homo sapiens
gtttaagatgatttt

SEQ ID NO: 61281 - DNA, 15 bp, Homo sapiens
tgtttaagatgattt

SEQ ID NO: 61282 - DNA, 15 bp, Homo sapiens
atgtttaagatgatt

SEQ ID NO: 61283 - DNA, 15 bp, Homo sapiens
aatgtttaagatgat

SEQ ID NO: 61284 - DNA, 15 bp, Homo sapiens
aaatgtttaagatga

SEQ ID NO: 61285 - DNA, 15 bp, Homo sapiens
caaatgtttaagatg

SEQ ID NO: 61286 - DNA, 15 bp, Homo sapiens
gcaaatgtttaagat

SEQ ID NO: 61287 - DNA, 15 bp, Homo sapiens
tgcaaatgtttaaga

SEQ ID NO: 61288 - DNA, 15 bp, Homo sapiens
atgcaaatgtttaag

SEQ ID NO: 61289 - DNA, 15 bp, Homo sapiens
aatgcaaatgtttaa

SEQ ID NO: 61290 - DNA, 15 bp, Homo sapiens
aaatgcaaatgttta

SEQ ID NO: 61291 - DNA, 15 bp, Homo sapiens
caaatgcaaatgttt

SEQ ID NO: 61292 - DNA, 15 bp, Homo sapiens
ccaaatgcaaatgtt

SEQ ID NO: 61293 - DNA, 15 bp, Homo sapiens
tccaaatgcaaatgt

SEQ ID NO: 61294 - DNA, 15 bp, Homo sapiens
ttccaaatgcaaatg

SEQ ID NO: 61295 - DNA, 15 bp, Homo sapiens
attccaaatgcaaat

SEQ ID NO: 61296 - DNA, 15 bp, Homo sapiens
aattccaaatgcaaa

SEQ ID NO: 61297 - DNA, 15 bp, Homo sapiens
caattccaaatgcaa

SEQ ID NO: 61298 - DNA, 15 bp, Homo sapiens
acaattccaaatgca

SEQ ID NO: 61299 - DNA, 15 bp, Homo sapiens
cacaattccaaatgc

SEQ ID NO: 61300 - DNA, 15 bp, Homo sapiens
acacaattccaaatg

SEQ ID NO: 61301 - DNA, 15 bp, Homo sapiens
aacacaattccaaat

SEQ ID NO: 61302 - DNA, 15 bp, Homo sapiens
taacacaattccaaa

SEQ ID NO: 61303 - DNA, 15 bp, Homo sapiens
ttaacacaattccaa

SEQ ID NO: 61304 - DNA, 15 bp, Homo sapiens
tttaacacaattcca

SEQ ID NO: 61305 - DNA, 15 bp, Homo sapiens
atttaacacaattcc

SEQ ID NO: 61306 - DNA, 15 bp, Homo sapiens
tatttaacacaattc

SEQ ID NO: 61307 - DNA, 15 bp, Homo sapiens
ctatttaacacaatt

SEQ ID NO: 61308 - DNA, 15 bp, Homo sapiens
tctatttaacacaat

SEQ ID NO: 61309 - DNA, 15 bp, Homo sapiens
ttctatttaacacaa

SEQ ID NO: 61310 - DNA, 15 bp, Homo sapiens
attctatttaacaca

SEQ ID NO: 61311 - DNA, 15 bp, Homo sapiens
cattctatttaacac

SEQ ID NO: 61312 - DNA, 15 bp, Homo sapiens
acattctatttaaca

SEQ ID NO: 61313 - DNA, 15 bp, Homo sapiens
cacattctatttaac

SEQ ID NO: 61314 - DNA, 15 bp, Homo sapiens
acacattctatttaa

SEQ ID NO: 61315 - DNA, 15 bp, Homo sapiens
cacacattctattta

SEQ ID NO: 61316 - DNA, 15 bp, Homo sapiens
tcacacattctattt

SEQ ID NO: 61317 - DNA, 15 bp, Homo sapiens
ttcacacattctatt

SEQ ID NO: 61318 - DNA, 15 bp, Homo sapiens
tttcacacattctat

SEQ ID NO: 61319 - DNA, 15 bp, Homo sapiens
gtttcacacattcta

SEQ ID NO: 61320 - DNA, 15 bp, Homo sapiens
tgtttcacacattct

SEQ ID NO: 61321 - DNA, 15 bp, Homo sapiens
gtgtttcacacattc

SEQ ID NO: 61322 - DNA, 15 bp, Homo sapiens
agtgtttcacacatt

SEQ ID NO: 61323 - DNA, 15 bp, Homo sapiens
cagtgtttcacacat

SEQ ID NO: 61324 - DNA, 15 bp, Homo sapiens
acagtgtttcacaca

SEQ ID NO: 61325 - DNA, 15 bp, Homo sapiens
tacagtgtttcacac

SEQ ID NO: 61326 - DNA, 15 bp, Homo sapiens
atacagtgtttcaca

SEQ ID NO: 61327 - DNA, 15 bp, Homo sapiens
aatacagtgtttcac

SEQ ID NO: 61328 - DNA, 15 bp, Homo sapiens
taatacagtgtttca

SEQ ID NO: 61329 - DNA, 15 bp, Homo sapiens
ctaatacagtgtttc

SEQ ID NO: 61330 - DNA, 15 bp, Homo sapiens
actaatacagtgttt

SEQ ID NO: 61331 - DNA, 15 bp, Homo sapiens
tactaatacagtgtt

SEQ ID NO: 61332 - DNA, 15 bp, Homo sapiens
ttactaatacagtgt

SEQ ID NO: 61333 - DNA, 15 bp, Homo sapiens
tttactaatacagtg

SEQ ID NO: 61334 - DNA, 15 bp, Homo sapiens
gtttactaatacagt

SEQ ID NO: 61335 - DNA, 15 bp, Homo sapiens
agtttactaatacag

SEQ ID NO: 61336 - DNA, 15 bp, Homo sapiens
aagtttactaataca

SEQ ID NO: 61337 - DNA, 15 bp, Homo sapiens
gaagtttactaatac

SEQ ID NO: 61338 - DNA, 15 bp, Homo sapiens
tgaagtttactaata

SEQ ID NO: 61339 - DNA, 15 bp, Homo sapiens
atgaagtttactaat

SEQ ID NO: 61340 - DNA, 15 bp, Homo sapiens
gatgaagtttactaa

SEQ ID NO: 61341 - DNA, 15 bp, Homo sapiens
tgatgaagtttacta

SEQ ID NO: 61342 - DNA, 15 bp, Homo sapiens
gtgatgaagtttact

SEQ ID NO: 61343 - DNA, 15 bp, Homo sapiens
ggtgatgaagtttac

SEQ ID NO: 61344 - DNA, 15 bp, Homo sapiens
aggtgatgaagttta

SEQ ID NO: 61345 - DNA, 15 bp, Homo sapiens
aaggtgatgaagttt

SEQ ID NO: 61346 - DNA, 15 bp, Homo sapiens
aaaggtgatgaagtt

SEQ ID NO: 61347 - DNA, 15 bp, Homo sapiens
gaaaggtgatgaagt

SEQ ID NO: 61348 - DNA, 15 bp, Homo sapiens
agaaaggtgatgaag

SEQ ID NO: 61349 - DNA, 15 bp, Homo sapiens
tagaaaggtgatgaa

SEQ ID NO: 61350 - DNA, 15 bp, Homo sapiens
gtagaaaggtgatga

SEQ ID NO: 61351 - DNA, 15 bp, Homo sapiens
agtagaaaggtgatg

SEQ ID NO: 61352 - DNA, 15 bp, Homo sapiens
aagtagaaaggtgat

SEQ ID NO: 61353 - DNA, 15 bp, Homo sapiens
gaagtagaaaggtga

SEQ ID NO: 61354 - DNA, 15 bp, Homo sapiens
ggaagtagaaaggtg

SEQ ID NO: 61355 - DNA, 15 bp, Homo sapiens
aggaagtagaaaggt

SEQ ID NO: 61356 - DNA, 15 bp, Homo sapiens
aaggaagtagaaagg

SEQ ID NO: 61357 - DNA, 15 bp, Homo sapiens
taaggaagtagaaag

SEQ ID NO: 61358 - DNA, 15 bp, Homo sapiens
ataaggaagtagaaa

SEQ ID NO: 61359 - DNA, 15 bp, Homo sapiens
tataaggaagtagaa

SEQ ID NO: 61360 - DNA, 15 bp, Homo sapiens
ctataaggaagtaga

SEQ ID NO: 61361 - DNA, 15 bp, Homo sapiens
actataaggaagtag

SEQ ID NO: 61362 - DNA, 15 bp, Homo sapiens
aactataaggaagta

SEQ ID NO: 61363 - DNA, 15 bp, Homo sapiens
aaactataaggaagt

SEQ ID NO: 61364 - DNA, 15 bp, Homo sapiens
caaactataaggaag

SEQ ID NO: 61365 - DNA, 15 bp, Homo sapiens
tcaaactataaggaa

SEQ ID NO: 61366 - DNA, 15 bp, Homo sapiens
ttcaaactataagga

SEQ ID NO: 61367 - DNA, 15 bp, Homo sapiens
gttcaaactataagg

SEQ ID NO: 61368 - DNA, 15 bp, Homo sapiens
agttcaaactataag

SEQ ID NO: 61369 - DNA, 15 bp, Homo sapiens
aagttcaaactataa

SEQ ID NO: 61370 - DNA, 15 bp, Homo sapiens
aaagttcaaactata

SEQ ID NO: 61371 - DNA, 15 bp, Homo sapiens
aaaagttcaaactat

SEQ ID NO: 61372 - DNA, 15 bp, Homo sapiens
gaaaagttcaaacta

SEQ ID NO: 61373 - DNA, 15 bp, Homo sapiens
tgaaaagttcaaact

SEQ ID NO: 61374 - DNA, 15 bp, Homo sapiens
ctgaaaagttcaaac

SEQ ID NO: 61375 - DNA, 15 bp, Homo sapiens
actgaaaagttcaaa

SEQ ID NO: 61376 - DNA, 15 bp, Homo sapiens
aactgaaaagttcaa

SEQ ID NO: 61377 - DNA, 15 bp, Homo sapiens
aaactgaaaagttca

SEQ ID NO: 61378 - DNA, 15 bp, Homo sapiens
aaaactgaaaagttc

SEQ ID NO: 61379 - DNA, 15 bp, Homo sapiens
aaaaactgaaaagtt

SEQ ID NO: 61380 - DNA, 15 bp, Homo sapiens
caaaaactgaaaagt

SEQ ID NO: 61381 - DNA, 15 bp, Homo sapiens
acaaaaactgaaaag

SEQ ID NO: 61382 - DNA, 15 bp, Homo sapiens
tacaaaaactgaaaa

SEQ ID NO: 61383 - DNA, 15 bp, Homo sapiens
ctacaaaaactgaaa

SEQ ID NO: 61384 - DNA, 15 bp, Homo sapiens
actacaaaaactgaa

SEQ ID NO: 61385 - DNA, 15 bp, Homo sapiens
aactacaaaaactga

SEQ ID NO: 61386 - DNA, 15 bp, Homo sapiens
gaactacaaaaactg

SEQ ID NO: 61387 - DNA, 15 bp, Homo sapiens
ggaactacaaaaact

SEQ ID NO: 61388 - DNA, 15 bp, Homo sapiens
gggaactacaaaaac

SEQ ID NO: 61389 - DNA, 15 bp, Homo sapiens
tgggaactacaaaaa

SEQ ID NO: 61390 - DNA, 15 bp, Homo sapiens
ttgggaactacaaaa

SEQ ID NO: 61391 - DNA, 15 bp, Homo sapiens
tttgggaactacaaa

SEQ ID NO: 61392 - DNA, 15 bp, Homo sapiens
gtttgggaactacaa

SEQ ID NO: 61393 - DNA, 15 bp, Homo sapiens
tgtttgggaactaca

SEQ ID NO: 61394 - DNA, 15 bp, Homo sapiens
ctgtttgggaactac

SEQ ID NO: 61395 - DNA, 15 bp, Homo sapiens
actgtttgggaacta

SEQ ID NO: 61396 - DNA, 15 bp, Homo sapiens
aactgtttgggaact

SEQ ID NO: 61397 - DNA, 15 bp, Homo sapiens
caactgtttgggaac

SEQ ID NO: 61398 - DNA, 15 bp, Homo sapiens
gcaactgtttgggaa

SEQ ID NO: 61399 - DNA, 15 bp, Homo sapiens
agcaactgtttggga

SEQ ID NO: 61400 - DNA, 15 bp, Homo sapiens
gagcaactgtttggg

SEQ ID NO: 61401 - DNA, 15 bp, Homo sapiens
tgagcaactgtttgg

SEQ ID NO: 61402 - DNA, 15 bp, Homo sapiens
ttgagcaactgtttg

SEQ ID NO: 61403 - DNA, 15 bp, Homo sapiens
attgagcaactgttt

SEQ ID NO: 61404 - DNA, 15 bp, Homo sapiens
aattgagcaactgtt

SEQ ID NO: 61405 - DNA, 15 bp, Homo sapiens
aaattgagcaactgt

SEQ ID NO: 61406 - DNA, 15 bp, Homo sapiens
taaattgagcaactg

SEQ ID NO: 61407 - DNA, 15 bp, Homo sapiens
ctaaattgagcaact

SEQ ID NO: 61408 - DNA, 15 bp, Homo sapiens
tctaaattgagcaac

SEQ ID NO: 61409 - DNA, 15 bp, Homo sapiens
ctctaaattgagcaa

SEQ ID NO: 61410 - DNA, 15 bp, Homo sapiens
gctctaaattgagca

SEQ ID NO: 61411 - DNA, 15 bp, Homo sapiens
tgctctaaattgagc

SEQ ID NO: 61412 - DNA, 15 bp, Homo sapiens
ttgctctaaattgag

SEQ ID NO: 61413 - DNA, 15 bp, Homo sapiens
tttgctctaaattga

SEQ ID NO: 61414 - DNA, 15 bp, Homo sapiens
atttgctctaaattg

SEQ ID NO: 61415 - DNA, 15 bp, Homo sapiens
aatttgctctaaatt

SEQ ID NO: 61416 - DNA, 15 bp, Homo sapiens
taatttgctctaaat

SEQ ID NO: 61417 - DNA, 15 bp, Homo sapiens
ttaatttgctctaaa

SEQ ID NO: 61418 - DNA, 15 bp, Homo sapiens
attaatttgctctaa

SEQ ID NO: 61419 - DNA, 15 bp, Homo sapiens
aattaatttgctcta

SEQ ID NO: 61420 - DNA, 15 bp, Homo sapiens
aaattaatttgctct

SEQ ID NO: 61421 - DNA, 15 bp, Homo sapiens
taaattaatttgctc

SEQ ID NO: 61422 - DNA, 15 bp, Homo sapiens
ttaaattaatttgct

SEQ ID NO: 61423 - DNA, 15 bp, Homo sapiens
gttaaattaatttgc

SEQ ID NO: 61424 - DNA, 15 bp, Homo sapiens
tgttaaattaatttg

SEQ ID NO: 61425 - DNA, 15 bp, Homo sapiens
gtgttaaattaattt

SEQ ID NO: 61426 - DNA, 15 bp, Homo sapiens
ggtgttaaattaatt

SEQ ID NO: 61427 - DNA, 15 bp, Homo sapiens
aggtgttaaattaat

SEQ ID NO: 61428 - DNA, 15 bp, Homo sapiens
caggtgttaaattaa

SEQ ID NO: 61429 - DNA, 15 bp, Homo sapiens
gcaggtgttaaatta

SEQ ID NO: 61430 - DNA, 15 bp, Homo sapiens
ggcaggtgttaaatt

SEQ ID NO: 61431 - DNA, 15 bp, Homo sapiens
tggcaggtgttaaat

SEQ ID NO: 61432 - DNA, 15 bp, Homo sapiens
ttggcaggtgttaaa

SEQ ID NO: 61433 - DNA, 15 bp, Homo sapiens
tttggcaggtgttaa

SEQ ID NO: 61434 - DNA, 15 bp, Homo sapiens
ttttggcaggtgtta

SEQ ID NO: 61435 - DNA, 15 bp, Homo sapiens
tttttggcaggtgtt

SEQ ID NO: 61436 - DNA, 15 bp, Homo sapiens
ttttttggcaggtgt

SEQ ID NO: 61437 - DNA, 15 bp, Homo sapiens
tttttttggcaggtg

SEQ ID NO: 61438 - DNA, 15 bp, Homo sapiens
ctttttttggcaggt

SEQ ID NO: 61439 - DNA, 15 bp, Homo sapiens
cctttttttggcagg

SEQ ID NO: 61440 - DNA, 15 bp, Homo sapiens
gcctttttttggcag

SEQ ID NO: 61441 - DNA, 15 bp, Homo sapiens
agcctttttttggca

SEQ ID NO: 61442 - DNA, 15 bp, Homo sapiens
cagcctttttttggc

SEQ ID NO: 61443 - DNA, 15 bp, Homo sapiens
gcagcctttttttgg

SEQ ID NO: 61444 - DNA, 15 bp, Homo sapiens
agcagcctttttttg

SEQ ID NO: 61445 - DNA, 15 bp, Homo sapiens
cagcagccttttttt

SEQ ID NO: 61446 - DNA, 15 bp, Homo sapiens
acagcagcctttttt

SEQ ID NO: 61447 - DNA, 15 bp, Homo sapiens
aacagcagccttttt

SEQ ID NO: 61448 - DNA, 15 bp, Homo sapiens
caacagcagcctttt

SEQ ID NO: 61449 - DNA, 15 bp, Homo sapiens
ccaacagcagccttt

SEQ ID NO: 61450 - DNA, 15 bp, Homo sapiens
gccaacagcagcctt

SEQ ID NO: 61451 - DNA, 15 bp, Homo sapiens
agccaacagcagcct

SEQ ID NO: 61452 - DNA, 15 bp, Homo sapiens
aagccaacagcagcc

SEQ ID NO: 61453 - DNA, 15 bp, Homo sapiens
taagccaacagcagc

SEQ ID NO: 61454 - DNA, 15 bp, Homo sapiens
ataagccaacagcag

SEQ ID NO: 61455 - DNA, 15 bp, Homo sapiens
gataagccaacagca

SEQ ID NO: 61456 - DNA, 15 bp, Homo sapiens
tgataagccaacagc

SEQ ID NO: 61457 - DNA, 15 bp, Homo sapiens
ctgataagccaacag

SEQ ID NO: 61458 - DNA, 15 bp, Homo sapiens
actgataagccaaca

SEQ ID NO: 61459 - DNA, 15 bp, Homo sapiens
aactgataagccaac

SEQ ID NO: 61460 - DNA, 15 bp, Homo sapiens
caactgataagccaa

SEQ ID NO: 61461 - DNA, 15 bp, Homo sapiens
acaactgataagcca

SEQ ID NO: 61462 - DNA, 15 bp, Homo sapiens
gacaactgataagcc

SEQ ID NO: 61463 - DNA, 15 bp, Homo sapiens
agacaactgataagc

SEQ ID NO: 61464 - DNA, 15 bp, Homo sapiens
aagacaactgataag

SEQ ID NO: 61465 - DNA, 15 bp, Homo sapiens
aaagacaactgataa

SEQ ID NO: 61466 - DNA, 15 bp, Homo sapiens
taaagacaactgata

SEQ ID NO: 61467 - DNA, 15 bp, Homo sapiens
ttaaagacaactgat

SEQ ID NO: 61468 - DNA, 15 bp, Homo sapiens
tttaaagacaactga

SEQ ID NO: 61469 - DNA, 15 bp, Homo sapiens
atttaaagacaactg

SEQ ID NO: 61470 - DNA, 15 bp, Homo sapiens
aatttaaagacaact

SEQ ID NO: 61471 - DNA, 15 bp, Homo sapiens
gaatttaaagacaac

SEQ ID NO: 61472 - DNA, 15 bp, Homo sapiens
tgaatttaaagacaa

SEQ ID NO: 61473 - DNA, 15 bp, Homo sapiens
ttgaatttaaagaca

SEQ ID NO: 61474 - DNA, 15 bp, Homo sapiens
tttgaatttaaagac

SEQ ID NO: 61475 - DNA, 15 bp, Homo sapiens
atttgaatttaaaga

SEQ ID NO: 61476 - DNA, 15 bp, Homo sapiens
catttgaatttaaag

SEQ ID NO: 61477 - DNA, 15 bp, Homo sapiens
gcatttgaatttaaa

SEQ ID NO: 61478 - DNA, 15 bp, Homo sapiens
agcatttgaatttaa

SEQ ID NO: 61479 - DNA, 15 bp, Homo sapiens
gagcatttgaattta

SEQ ID NO: 61480 - DNA, 15 bp, Homo sapiens
tgagcatttgaattt

SEQ ID NO: 61481 - DNA, 15 bp, Homo sapiens
atgagcatttgaatt

SEQ ID NO: 61482 - DNA, 15 bp, Homo sapiens
catgagcatttgaat

SEQ ID NO: 61483 - DNA, 15 bp, Homo sapiens
acatgagcatttgaa

SEQ ID NO: 61484 - DNA, 15 bp, Homo sapiens
cacatgagcatttga

SEQ ID NO: 61485 - DNA, 15 bp, Homo sapiens
tcacatgagcatttg

SEQ ID NO: 61486 - DNA, 15 bp, Homo sapiens
gtcacatgagcattt

SEQ ID NO: 61487 - DNA, 15 bp, Homo sapiens
agtcacatgagcatt

SEQ ID NO: 61488 - DNA, 15 bp, Homo sapiens
aagtcacatgagcat

SEQ ID NO: 61489 - DNA, 15 bp, Homo sapiens
aaagtcacatgagca

SEQ ID NO: 61490 - DNA, 15 bp, Homo sapiens
aaaagtcacatgagc

SEQ ID NO: 61491 - DNA, 15 bp, Homo sapiens
taaaagtcacatgag

SEQ ID NO: 61492 - DNA, 15 bp, Homo sapiens
ataaaagtcacatga

SEQ ID NO: 61493 - DNA, 15 bp, Homo sapiens
gataaaagtcacatg

SEQ ID NO: 61494 - DNA, 15 bp, Homo sapiens
tgataaaagtcacat

SEQ ID NO: 61495 - DNA, 15 bp, Homo sapiens
gtgataaaagtcaca

SEQ ID NO: 61496 - DNA, 15 bp, Homo sapiens
tgtgataaaagtcac

SEQ ID NO: 61497 - DNA, 15 bp, Homo sapiens
atgtgataaaagtca

SEQ ID NO: 61498 - DNA, 15 bp, Homo sapiens
gatgtgataaaagtc

SEQ ID NO: 61499 - DNA, 15 bp, Homo sapiens
tgatgtgataaaagt

SEQ ID NO: 61500 - DNA, 15 bp, Homo sapiens
ttgatgtgataaaag

SEQ ID NO: 61501 - DNA, 15 bp, Homo sapiens
tttgatgtgataaaa

SEQ ID NO: 61502 - DNA, 15 bp, Homo sapiens
ttttgatgtgataaa

SEQ ID NO: 61503 - DNA, 15 bp, Homo sapiens
tttttgatgtgataa

SEQ ID NO: 61504 - DNA, 15 bp, Homo sapiens
ttttttgatgtgata

SEQ ID NO: 61505 - DNA, 15 bp, Homo sapiens
attttttgatgtgat

SEQ ID NO: 61506 - DNA, 15 bp, Homo sapiens
tattttttgatgtga

SEQ ID NO: 61507 - DNA, 15 bp, Homo sapiens
atattttttgatgtg

SEQ ID NO: 61508 - DNA, 15 bp, Homo sapiens
aatattttttgatgt

SEQ ID NO: 61509 - DNA, 15 bp, Homo sapiens
aaatattttttgatg

SEQ ID NO: 61510 - DNA, 15 bp, Homo sapiens
gaaatattttttgat

SEQ ID NO: 61511 - DNA, 15 bp, Homo sapiens
tgaaatattttttga

SEQ ID NO: 61512 - DNA, 15 bp, Homo sapiens
atgaaatattttttg

SEQ ID NO: 61513 - DNA, 15 bp, Homo sapiens
aatgaaatatttttt

SEQ ID NO: 61514 - DNA, 15 bp, Homo sapiens
taatgaaatattttt

SEQ ID NO: 61515 - DNA, 15 bp, Homo sapiens
ttaatgaaatatttt

SEQ ID NO: 61516 - DNA, 15 bp, Homo sapiens
attaatgaaatattt

SEQ ID NO: 61517 - DNA, 15 bp, Homo sapiens
cattaatgaaatatt

SEQ ID NO: 61518 - DNA, 15 bp, Homo sapiens
tcattaatgaaatat

SEQ ID NO: 61519 - DNA, 15 bp, Homo sapiens
atcattaatgaaata

SEQ ID NO: 61520 - DNA, 15 bp, Homo sapiens
aatcattaatgaaat

SEQ ID NO: 61521 - DNA, 15 bp, Homo sapiens
gaatcattaatgaaa

SEQ ID NO: 61522 - DNA, 15 bp, Homo sapiens
tgaatcattaatgaa

SEQ ID NO: 61523 - DNA, 15 bp, Homo sapiens
gtgaatcattaatga

SEQ ID NO: 61524 - DNA, 15 bp, Homo sapiens
ggtgaatcattaatg

SEQ ID NO: 61525 - DNA, 15 bp, Homo sapiens
aggtgaatcattaat

SEQ ID NO: 61526 - DNA, 15 bp, Homo sapiens
aaggtgaatcattaa

SEQ ID NO: 61527 - DNA, 15 bp, Homo sapiens
aaaggtgaatcatta

SEQ ID NO: 61528 - DNA, 15 bp, Homo sapiens
taaaggtgaatcatt

SEQ ID NO: 61529 - DNA, 15 bp, Homo sapiens
ctaaaggtgaatcat

SEQ ID NO: 61530 - DNA, 15 bp, Homo sapiens
gctaaaggtgaatca

SEQ ID NO: 61531 - DNA, 15 bp, Homo sapiens
agctaaaggtgaatc

SEQ ID NO: 61532 - DNA, 15 bp, Homo sapiens
gagctaaaggtgaat

SEQ ID NO: 61533 - DNA, 15 bp, Homo sapiens
agagctaaaggtgaa

SEQ ID NO: 61534 - DNA, 15 bp, Homo sapiens
cagagctaaaggtga

SEQ ID NO: 61535 - DNA, 15 bp, Homo sapiens
tcagagctaaaggtg

SEQ ID NO: 61536 - DNA, 15 bp, Homo sapiens
ttcagagctaaaggt

SEQ ID NO: 61537 - DNA, 15 bp, Homo sapiens
tttcagagctaaagg

SEQ ID NO: 61538 - DNA, 15 bp, Homo sapiens
ttttcagagctaaag

SEQ ID NO: 61539 - DNA, 15 bp, Homo sapiens
attttcagagctaaa

SEQ ID NO: 61540 - DNA, 15 bp, Homo sapiens
aattttcagagctaa

SEQ ID NO: 61541 - DNA, 15 bp, Homo sapiens
taattttcagagcta

SEQ ID NO: 61542 - DNA, 15 bp, Homo sapiens
gtaattttcagagct

SEQ ID NO: 61543 - DNA, 15 bp, Homo sapiens
ggtaattttcagagc

SEQ ID NO: 61544 - DNA, 15 bp, Homo sapiens
cggtaattttcagag

SEQ ID NO: 61545 - DNA, 15 bp, Homo sapiens
gcggtaattttcaga

SEQ ID NO: 61546 - DNA, 15 bp, Homo sapiens
cgcggtaattttcag

SEQ ID NO: 61547 - DNA, 15 bp, Homo sapiens
acgcggtaattttca

SEQ ID NO: 61548 - DNA, 15 bp, Homo sapiens
aacgcggtaattttc

SEQ ID NO: 61549 - DNA, 15 bp, Homo sapiens
aaacgcggtaatttt

SEQ ID NO: 61550 - DNA, 15 bp, Homo sapiens
taaacgcggtaattt

SEQ ID NO: 61551 - DNA, 15 bp, Homo sapiens
ctaaacgcggtaatt

SEQ ID NO: 61552 - DNA, 15 bp, Homo sapiens
actaaacgcggtaat

SEQ ID NO: 61553 - DNA, 15 bp, Homo sapiens
tactaaacgcggtaa

SEQ ID NO: 61554 - DNA, 15 bp, Homo sapiens
ttactaaacgcggta

SEQ ID NO: 61555 - DNA, 15 bp, Homo sapiens
attactaaacgcggt

SEQ ID NO: 61556 - DNA, 15 bp, Homo sapiens
aattactaaacgcgg

SEQ ID NO: 61557 - DNA, 15 bp, Homo sapiens
taattactaaacgcg

SEQ ID NO: 61558 - DNA, 15 bp, Homo sapiens
ataattactaaacgc

SEQ ID NO: 61559 - DNA, 15 bp, Homo sapiens
tataattactaaacg

SEQ ID NO: 61560 - DNA, 15 bp, Homo sapiens
ctataattactaaac

SEQ ID NO: 61561 - DNA, 15 bp, Homo sapiens
actataattactaaa

SEQ ID NO: 61562 - DNA, 15 bp, Homo sapiens
cactataattactaa

SEQ ID NO: 61563 - DNA, 15 bp, Homo sapiens
ccactataattacta

SEQ ID NO: 61564 - DNA, 15 bp, Homo sapiens
cccactataattact

SEQ ID NO: 61565 - DNA, 15 bp, Homo sapiens
gcccactataattac

SEQ ID NO: 61566 - DNA, 15 bp, Homo sapiens
agcccactataatta

SEQ ID NO: 61567 - DNA, 15 bp, Homo sapiens
aagcccactataatt

SEQ ID NO: 61568 - DNA, 15 bp, Homo sapiens
taagcccactataat

SEQ ID NO: 61569 - DNA, 15 bp, Homo sapiens
ataagcccactataa

SEQ ID NO: 61570 - DNA, 15 bp, Homo sapiens
tataagcccactata

SEQ ID NO: 61571 - DNA, 15 bp, Homo sapiens
ttataagcccactat

SEQ ID NO: 61572 - DNA, 15 bp, Homo sapiens
tttataagcccacta

SEQ ID NO: 61573 - DNA, 15 bp, Homo sapiens
ttttataagcccact

SEQ ID NO: 61574 - DNA, 15 bp, Homo sapiens
tttttataagcccac

SEQ ID NO: 61575 - DNA, 15 bp, Homo sapiens
gtttttataagccca

SEQ ID NO: 61576 - DNA, 15 bp, Homo sapiens
tgtttttataagccc

SEQ ID NO: 61577 - DNA, 15 bp, Homo sapiens
atgtttttataagcc

SEQ ID NO: 61578 - DNA, 15 bp, Homo sapiens
catgtttttataagc

SEQ ID NO: 61579 - DNA, 15 bp, Homo sapiens
gcatgtttttataag

SEQ ID NO: 61580 - DNA, 15 bp, Homo sapiens
tgcatgtttttataa

SEQ ID NO: 61581 - DNA, 15 bp, Homo sapiens
ttgcatgtttttata

SEQ ID NO: 61582 - DNA, 15 bp, Homo sapiens
gttgcatgtttttat

SEQ ID NO: 61583 - DNA, 15 bp, Homo sapiens
agttgcatgttttta

SEQ ID NO: 61584 - DNA, 15 bp, Homo sapiens
gagttgcatgttttt

SEQ ID NO: 61585 - DNA, 15 bp, Homo sapiens
agagttgcatgtttt

SEQ ID NO: 61586 - DNA, 15 bp, Homo sapiens
aagagttgcatgttt

SEQ ID NO: 61587 - DNA, 15 bp, Homo sapiens
aaagagttgcatgtt

SEQ ID NO: 61588 - DNA, 15 bp, Homo sapiens
aaaagagttgcatgt

SEQ ID NO: 61589 - DNA, 15 bp, Homo sapiens
aaaaagagttgcatg

SEQ ID NO: 61590 - DNA, 15 bp, Homo sapiens
caaaaagagttgcat

SEQ ID NO: 61591 - DNA, 15 bp, Homo sapiens
tcaaaaagagttgca

SEQ ID NO: 61592 - DNA, 15 bp, Homo sapiens
atcaaaaagagttgc

SEQ ID NO: 61593 - DNA, 15 bp, Homo sapiens
tatcaaaaagagttg

SEQ ID NO: 61594 - DNA, 15 bp, Homo sapiens
ctatcaaaaagagtt

SEQ ID NO: 61595 - DNA, 15 bp, Homo sapiens
actatcaaaaagagt

SEQ ID NO: 61596 - DNA, 15 bp, Homo sapiens
aactatcaaaaagag

SEQ ID NO: 61597 - DNA, 15 bp, Homo sapiens
taactatcaaaaaga

SEQ ID NO: 61598 - DNA, 15 bp, Homo sapiens
ataactatcaaaaag

SEQ ID NO: 61599 - DNA, 15 bp, Homo sapiens
aataactatcaaaaa

SEQ ID NO: 61600 - DNA, 15 bp, Homo sapiens
aaataactatcaaaa

SEQ ID NO: 61601 - DNA, 15 bp, Homo sapiens
caaataactatcaaa

SEQ ID NO: 61602 - DNA, 15 bp, Homo sapiens
tcaaataactatcaa

SEQ ID NO: 61603 - DNA, 15 bp, Homo sapiens
ctcaaataactatca

SEQ ID NO: 61604 - DNA, 15 bp, Homo sapiens
tctcaaataactatc

SEQ ID NO: 61605 - DNA, 15 bp, Homo sapiens
ttctcaaataactat

SEQ ID NO: 61606 - DNA, 15 bp, Homo sapiens
attctcaaataacta

SEQ ID NO: 61607 - DNA, 15 bp, Homo sapiens
aattctcaaataact

SEQ ID NO: 61608 - DNA, 15 bp, Homo sapiens
aaattctcaaataac

SEQ ID NO: 61609 - DNA, 15 bp, Homo sapiens
aaaattctcaaataa

SEQ ID NO: 61610 - DNA, 15 bp, Homo sapiens
caaaattctcaaata

SEQ ID NO: 61611 - DNA, 15 bp, Homo sapiens
ccaaaattctcaaat

SEQ ID NO: 61612 - DNA, 15 bp, Homo sapiens
accaaaattctcaaa

SEQ ID NO: 61613 - DNA, 15 bp, Homo sapiens
caccaaaattctcaa

SEQ ID NO: 61614 - DNA, 15 bp, Homo sapiens
tcaccaaaattctca

SEQ ID NO: 61615 - DNA, 15 bp, Homo sapiens
ttcaccaaaattctc

SEQ ID NO: 61616 - DNA, 15 bp, Homo sapiens
tttcaccaaaattct

SEQ ID NO: 61617 - DNA, 15 bp, Homo sapiens
ttttcaccaaaattc

SEQ ID NO: 61618 - DNA, 15 bp, Homo sapiens
tttttcaccaaaatt

SEQ ID NO: 61619 - DNA, 15 bp, Homo sapiens
atttttcaccaaaat

SEQ ID NO: 61620 - DNA, 15 bp, Homo sapiens
tatttttcaccaaaa

SEQ ID NO: 61621 - DNA, 15 bp, Homo sapiens
atatttttcaccaaa

SEQ ID NO: 61622 - DNA, 15 bp, Homo sapiens
aatatttttcaccaa

SEQ ID NO: 61623 - DNA, 15 bp, Homo sapiens
aaatatttttcacca

SEQ ID NO: 61624 - DNA, 15 bp, Homo sapiens
taaatatttttcacc

SEQ ID NO: 61625 - DNA, 15 bp, Homo sapiens
ctaaatatttttcac

SEQ ID NO: 61626 - DNA, 15 bp, Homo sapiens
gctaaatatttttca

SEQ ID NO: 61627 - DNA, 15 bp, Homo sapiens
agctaaatatttttc

SEQ ID NO: 61628 - DNA, 15 bp, Homo sapiens
cagctaaatattttt

SEQ ID NO: 61629 - DNA, 15 bp, Homo sapiens
tcagctaaatatttt

SEQ ID NO: 61630 - DNA, 15 bp, Homo sapiens
ctcagctaaatattt

SEQ ID NO: 61631 - DNA, 15 bp, Homo sapiens
cctcagctaaatatt

SEQ ID NO: 61632 - DNA, 15 bp, Homo sapiens
ccctcagctaaatat

SEQ ID NO: 61633 - DNA, 15 bp, Homo sapiens
gccctcagctaaata

SEQ ID NO: 61634 - DNA, 15 bp, Homo sapiens
tgccctcagctaaat

SEQ ID NO: 61635 - DNA, 15 bp, Homo sapiens
ctgccctcagctaaa

SEQ ID NO: 61636 - DNA, 15 bp, Homo sapiens
actgccctcagctaa

SEQ ID NO: 61637 - DNA, 15 bp, Homo sapiens
tactgccctcagcta

SEQ ID NO: 61638 - DNA, 15 bp, Homo sapiens
atactgccctcagct

SEQ ID NO: 61639 - DNA, 15 bp, Homo sapiens
tatactgccctcagc

SEQ ID NO: 61640 - DNA, 15 bp, Homo sapiens
ctatactgccctcag

SEQ ID NO: 61641 - DNA, 15 bp, Homo sapiens
tctatactgccctca

SEQ ID NO: 61642 - DNA, 15 bp, Homo sapiens
ttctatactgccctc

SEQ ID NO: 61643 - DNA, 15 bp, Homo sapiens
gttctatactgccct

SEQ ID NO: 61644 - DNA, 15 bp, Homo sapiens
agttctatactgccc

SEQ ID NO: 61645 - DNA, 15 bp, Homo sapiens
aagttctatactgcc

SEQ ID NO: 61646 - DNA, 15 bp, Homo sapiens
taagttctatactgc

SEQ ID NO: 61647 - DNA, 15 bp, Homo sapiens
ataagttctatactg

SEQ ID NO: 61648 - DNA, 15 bp, Homo sapiens
tataagttctatact

SEQ ID NO: 61649 - DNA, 15 bp, Homo sapiens
ttataagttctatac

SEQ ID NO: 61650 - DNA, 15 bp, Homo sapiens
tttataagttctata

SEQ ID NO: 61651 - DNA, 15 bp, Homo sapiens
gtttataagttctat

SEQ ID NO: 61652 - DNA, 15 bp, Homo sapiens
ggtttataagttcta

SEQ ID NO: 61653 - DNA, 15 bp, Homo sapiens
tggtttataagttct

SEQ ID NO: 61654 - DNA, 15 bp, Homo sapiens
ttggtttataagttc

SEQ ID NO: 61655 - DNA, 15 bp, Homo sapiens
attggtttataagtt

SEQ ID NO: 61656 - DNA, 15 bp, Homo sapiens
tattggtttataagt

SEQ ID NO: 61657 - DNA, 15 bp, Homo sapiens
atattggtttataag

SEQ ID NO: 61658 - DNA, 15 bp, Homo sapiens
tatattggtttataa

SEQ ID NO: 61659 - DNA, 15 bp, Homo sapiens
atatattggtttata

SEQ ID NO: 61660 - DNA, 15 bp, Homo sapiens
aatatattggtttat

SEQ ID NO: 61661 - DNA, 15 bp, Homo sapiens
caatatattggttta

SEQ ID NO: 61662 - DNA, 15 bp, Homo sapiens
tcaatatattggttt

SEQ ID NO: 61663 - DNA, 15 bp, Homo sapiens
atcaatatattggtt

SEQ ID NO: 61664 - DNA, 15 bp, Homo sapiens
tatcaatatattggt

SEQ ID NO: 61665 - DNA, 15 bp, Homo sapiens
atatcaatatattgg

SEQ ID NO: 61666 - DNA, 15 bp, Homo sapiens
aatatcaatatattg

SEQ ID NO: 61667 - DNA, 15 bp, Homo sapiens
aaatatcaatatatt

SEQ ID NO: 61668 - DNA, 15 bp, Homo sapiens
aaaatatcaatatat

SEQ ID NO: 61669 - DNA, 15 bp, Homo sapiens
aaaaatatcaatata

SEQ ID NO: 61670 - DNA, 15 bp, Homo sapiens
taaaaatatcaatat

SEQ ID NO: 61671 - DNA, 15 bp, Homo sapiens
ttaaaaatatcaata

SEQ ID NO: 61672 - DNA, 15 bp, Homo sapiens
tttaaaaatatcaat

SEQ ID NO: 61673 - DNA, 15 bp, Homo sapiens
ttttaaaaatatcaa

SEQ ID NO: 61674 - DNA, 15 bp, Homo sapiens
gttttaaaaatatca

SEQ ID NO: 61675 - DNA, 15 bp, Homo sapiens
tgttttaaaaatatc

SEQ ID NO: 61676 - DNA, 15 bp, Homo sapiens
atgttttaaaaatat

SEQ ID NO: 61677 - DNA, 15 bp, Homo sapiens
aatgttttaaaaata

SEQ ID NO: 61678 - DNA, 15 bp, Homo sapiens
aaatgttttaaaaat

SEQ ID NO: 61679 - DNA, 15 bp, Homo sapiens
aaaatgttttaaaaa

SEQ ID NO: 61680 - DNA, 15 bp, Homo sapiens
aaaaatgttttaaaa

SEQ ID NO: 61681 - DNA, 15 bp, Homo sapiens
taaaaatgttttaaa

SEQ ID NO: 61682 - DNA, 15 bp, Homo sapiens
gtaaaaatgttttaa

SEQ ID NO: 61683 - DNA, 15 bp, Homo sapiens
tgtaaaaatgtttta

SEQ ID NO: 61684 - DNA, 15 bp, Homo sapiens
atgtaaaaatgtttt

SEQ ID NO: 61685 - DNA, 15 bp, Homo sapiens
tatgtaaaaatgttt

SEQ ID NO: 61686 - DNA, 15 bp, Homo sapiens
atatgtaaaaatgtt

SEQ ID NO: 61687 - DNA, 15 bp, Homo sapiens
tatatgtaaaaatgt

SEQ ID NO: 61688 - DNA, 15 bp, Homo sapiens
ttatatgtaaaaatg

SEQ ID NO: 61689 - DNA, 15 bp, Homo sapiens
cttatatgtaaaaat

SEQ ID NO: 61690 - DNA, 15 bp, Homo sapiens
acttatatgtaaaaa

SEQ ID NO: 61691 - DNA, 15 bp, Homo sapiens
tacttatatgtaaaa

SEQ ID NO: 61692 - DNA, 15 bp, Homo sapiens
ttacttatatgtaaa

SEQ ID NO: 61693 - DNA, 15 bp, Homo sapiens
tttacttatatgtaa

SEQ ID NO: 61694 - DNA, 15 bp, Homo sapiens
gtttacttatatgta

SEQ ID NO: 61695 - DNA, 15 bp, Homo sapiens
agtttacttatatgt

SEQ ID NO: 61696 - DNA, 15 bp, Homo sapiens
cagtttacttatatg

SEQ ID NO: 61697 - DNA, 15 bp, Homo sapiens
gcagtttacttatat

SEQ ID NO: 61698 - DNA, 15 bp, Homo sapiens
ggcagtttacttata

SEQ ID NO: 61699 - DNA, 15 bp, Homo sapiens
tggcagtttacttat

SEQ ID NO: 61700 - DNA, 15 bp, Homo sapiens
atggcagtttactta

SEQ ID NO: 61701 - DNA, 15 bp, Homo sapiens
gatggcagtttactt

SEQ ID NO: 61702 - DNA, 15 bp, Homo sapiens
agatggcagtttact

SEQ ID NO: 61703 - DNA, 15 bp, Homo sapiens
aagatggcagtttac

SEQ ID NO: 61704 - DNA, 15 bp, Homo sapiens
aaagatggcagttta

SEQ ID NO: 61705 - DNA, 15 bp, Homo sapiens
caaagatggcagttt

SEQ ID NO: 61706 - DNA, 15 bp, Homo sapiens
tcaaagatggcagtt

SEQ ID NO: 61707 - DNA, 15 bp, Homo sapiens
ctcaaagatggcagt

SEQ ID NO: 61708 - DNA, 15 bp, Homo sapiens
gctcaaagatggcag

SEQ ID NO: 61709 - DNA, 15 bp, Homo sapiens
tgctcaaagatggca

SEQ ID NO: 61710 - DNA, 15 bp, Homo sapiens
atgctcaaagatggc

SEQ ID NO: 61711 - DNA, 15 bp, Homo sapiens
tatgctcaaagatgg

SEQ ID NO: 61712 - DNA, 15 bp, Homo sapiens
ttatgctcaaagatg

SEQ ID NO: 61713 - DNA, 15 bp, Homo sapiens
gttatgctcaaagat

SEQ ID NO: 61714 - DNA, 15 bp, Homo sapiens
agttatgctcaaaga

SEQ ID NO: 61715 - DNA, 15 bp, Homo sapiens
tagttatgctcaaag

SEQ ID NO: 61716 - DNA, 15 bp, Homo sapiens
gtagttatgctcaaa

SEQ ID NO: 61717 - DNA, 15 bp, Homo sapiens
tgtagttatgctcaa

SEQ ID NO: 61718 - DNA, 15 bp, Homo sapiens
atgtagttatgctca

SEQ ID NO: 61719 - DNA, 15 bp, Homo sapiens
aatgtagttatgctc

SEQ ID NO: 61720 - DNA, 15 bp, Homo sapiens
aaatgtagttatgct

SEQ ID NO: 61721 - DNA, 15 bp, Homo sapiens
taaatgtagttatgc

SEQ ID NO: 61722 - DNA, 15 bp, Homo sapiens
ttaaatgtagttatg

SEQ ID NO: 61723 - DNA, 15 bp, Homo sapiens
tttaaatgtagttat

SEQ ID NO: 61724 - DNA, 15 bp, Homo sapiens
ttttaaatgtagtta

SEQ ID NO: 61725 - DNA, 15 bp, Homo sapiens
tttttaaatgtagtt

SEQ ID NO: 61726 - DNA, 15 bp, Homo sapiens
atttttaaatgtagt

SEQ ID NO: 61727 - DNA, 15 bp, Homo sapiens
tatttttaaatgtag

SEQ ID NO: 61728 - DNA, 15 bp, Homo sapiens
ttatttttaaatgta

SEQ ID NO: 61729 - DNA, 15 bp, Homo sapiens
tttatttttaaatgt

SEQ ID NO: 61730 - DNA, 15 bp, Homo sapiens
ctttatttttaaatg

SEQ ID NO: 61731 - DNA, 15 bp, Homo sapiens
gctttatttttaaat

SEQ ID NO: 61732 - DNA, 15 bp, Homo sapiens
agctttatttttaaa

SEQ ID NO: 61733 - DNA, 15 bp, Homo sapiens
cagctttatttttaa

SEQ ID NO: 61734 - DNA, 15 bp, Homo sapiens
gcagctttattttta

SEQ ID NO: 61735 - DNA, 15 bp, Homo sapiens
tgcagctttattttt

SEQ ID NO: 61736 - DNA, 15 bp, Homo sapiens
atgcagctttatttt

SEQ ID NO: 61737 - DNA, 15 bp, Homo sapiens
tatgcagctttattt

SEQ ID NO: 61738 - DNA, 15 bp, Homo sapiens
atatgcagctttatt

SEQ ID NO: 61739 - DNA, 15 bp, Homo sapiens
aatatgcagctttat

SEQ ID NO: 61740 - DNA, 15 bp, Homo sapiens
aaatatgcagcttta

SEQ ID NO: 61741 - DNA, 15 bp, Homo sapiens
aaaatatgcagcttt

SEQ ID NO: 61742 - DNA, 15 bp, Homo sapiens
aaaaatatgcagctt

SEQ ID NO: 61743 - DNA, 15 bp, Homo sapiens
taaaaatatgcagct

SEQ ID NO: 61744 - DNA, 15 bp, Homo sapiens
ttaaaaatatgcagc

SEQ ID NO: 61745 - DNA, 15 bp, Homo sapiens
tttaaaaatatgcag

SEQ ID NO: 61746 - DNA, 15 bp, Homo sapiens
atttaaaaatatgca

SEQ ID NO: 61747 - DNA, 15 bp, Homo sapiens
gatttaaaaatatgc

SEQ ID NO: 61748 - DNA, 15 bp, Homo sapiens
tgatttaaaaatatg

SEQ ID NO: 61749 - DNA, 15 bp, Homo sapiens
ttgatttaaaaatat

SEQ ID NO: 61750 - DNA, 15 bp, Homo sapiens
cttgatttaaaaata

SEQ ID NO: 61751 - DNA, 15 bp, Homo sapiens
acttgatttaaaaat

SEQ ID NO: 61752 - DNA, 15 bp, Homo sapiens
cacttgatttaaaaa

SEQ ID NO: 61753 - DNA, 15 bp, Homo sapiens
acacttgatttaaaa

SEQ ID NO: 61754 - DNA, 15 bp, Homo sapiens
aacacttgatttaaa

SEQ ID NO: 61755 - DNA, 15 bp, Homo sapiens
aaacacttgatttaa

SEQ ID NO: 61756 - DNA, 15 bp, Homo sapiens
taaacacttgattta

SEQ ID NO: 61757 - DNA, 15 bp, Homo sapiens
ttaaacacttgattt

SEQ ID NO: 61758 - DNA, 15 bp, Homo sapiens
gttaaacacttgatt

SEQ ID NO: 61759 - DNA, 15 bp, Homo sapiens
tgttaaacacttgat

SEQ ID NO: 61760 - DNA, 15 bp, Homo sapiens
ttgttaaacacttga

SEQ ID NO: 61761 - DNA, 15 bp, Homo sapiens
cttgttaaacacttg

SEQ ID NO: 61762 - DNA, 15 bp, Homo sapiens
tcttgttaaacactt

SEQ ID NO: 61763 - DNA, 15 bp, Homo sapiens
ttcttgttaaacact

SEQ ID NO: 61764 - DNA, 15 bp, Homo sapiens
attcttgttaaacac

SEQ ID NO: 61765 - DNA, 15 bp, Homo sapiens
aattcttgttaaaca

SEQ ID NO: 61766 - DNA, 15 bp, Homo sapiens
aaattcttgttaaac

SEQ ID NO: 61767 - DNA, 15 bp, Homo sapiens
taaattcttgttaaa

SEQ ID NO: 61768 - DNA, 15 bp, Homo sapiens
ataaattcttgttaa

SEQ ID NO: 61769 - DNA, 15 bp, Homo sapiens
tataaattcttgtta

SEQ ID NO: 61770 - DNA, 15 bp, Homo sapiens
atataaattcttgtt

SEQ ID NO: 61771 - DNA, 15 bp, Homo sapiens
aatataaattcttgt

SEQ ID NO: 61772 - DNA, 15 bp, Homo sapiens
aaatataaattcttg

SEQ ID NO: 61773 - DNA, 15 bp, Homo sapiens
aaaatataaattctt

SEQ ID NO: 61774 - DNA, 15 bp, Homo sapiens
aaaaatataaattct

SEQ ID NO: 61775 - DNA, 15 bp, Homo sapiens
taaaaaatataaatt

SEQ ID NO: 61776 - DNA, 15 bp, Homo sapiens
ataaaaaatataaat

SEQ ID NO: 61777 - DNA, 15 bp, Homo sapiens
aataaaaaatataaa

SEQ ID NO: 61778 - DNA, 15 bp, Homo sapiens
aaataaaaaatataa

SEQ ID NO: 61779 - DNA, 15 bp, Homo sapiens
aaaataaaaaatata

SEQ ID NO: 61780 - DNA, 15 bp, Homo sapiens
aaaaataaaaaatat

SEQ ID NO: 61781 - DNA, 15 bp, Homo sapiens
aaaaaataaaaaata

SEQ ID NO: 61782 - DNA, 15 bp, Homo sapiens
taaaaaataaaaaat

SEQ ID NO: 61783 - DNA, 15 bp, Homo sapiens
ttaaaaaataaaaaa

SEQ ID NO: 61784 - DNA, 15 bp, Homo sapiens
tttaaaaaataaaaa

SEQ ID NO: 61785 - DNA, 15 bp, Homo sapiens
ttttaaaaaataaaa

SEQ ID NO: 61786 - DNA, 15 bp, Homo sapiens
attttaaaaaataaa

SEQ ID NO: 61787 - DNA, 15 bp, Homo sapiens
aattttaaaaaataa

SEQ ID NO: 61788 - DNA, 15 bp, Homo sapiens
taattttaaaaaata

SEQ ID NO: 61789 - DNA, 15 bp, Homo sapiens
ttaattttaaaaaat

SEQ ID NO: 61790 - DNA, 15 bp, Homo sapiens
tttaattttaaaaaa

SEQ ID NO: 61791 - DNA, 15 bp, Homo sapiens
ttttaattttaaaaa

SEQ ID NO: 61792 - DNA, 15 bp, Homo sapiens
tttttaattttaaaa

SEQ ID NO: 61793 - DNA, 15 bp, Homo sapiens
atttttaattttaaa

SEQ ID NO: 61794 - DNA, 15 bp, Homo sapiens
tatttttaattttaa

SEQ ID NO: 61795 - DNA, 15 bp, Homo sapiens
ttatttttaatttta

SEQ ID NO: 61796 - DNA, 15 bp, Homo sapiens
attatttttaatttt

SEQ ID NO: 61797 - DNA, 15 bp, Homo sapiens
aattatttttaattt

SEQ ID NO: 61798 - DNA, 15 bp, Homo sapiens
aaattatttttaatt

SEQ ID NO: 61799 - DNA, 15 bp, Homo sapiens
taaattatttttaat

SEQ ID NO: 61800 - DNA, 15 bp, Homo sapiens
ataaattatttttaa

SEQ ID NO: 61801 - DNA, 15 bp, Homo sapiens
tataaattattttta

SEQ ID NO: 61802 - DNA, 15 bp, Homo sapiens
atataaattattttt

SEQ ID NO: 61803 - DNA, 15 bp, Homo sapiens
aatataaattatttt

SEQ ID NO: 61804 - DNA, 15 bp, Homo sapiens
aaatataaattattt

SEQ ID NO: 61805 - DNA, 15 bp, Homo sapiens
gaaatataaattatt

SEQ ID NO: 61806 - DNA, 15 bp, Homo sapiens
ggaaatataaattat

SEQ ID NO: 61807 - DNA, 15 bp, Homo sapiens
aggaaatataaatta

SEQ ID NO: 61808 - DNA, 15 bp, Homo sapiens
gaggaaatataaatt

SEQ ID NO: 61809 - DNA, 15 bp, Homo sapiens
agaggaaatataaat

SEQ ID NO: 61810 - DNA, 15 bp, Homo sapiens
cagaggaaatataaa

SEQ ID NO: 61811 - DNA, 15 bp, Homo sapiens
acagaggaaatataa

SEQ ID NO: 61812 - DNA, 15 bp, Homo sapiens
aacagaggaaatata

SEQ ID NO: 61813 - DNA, 15 bp, Homo sapiens
caacagaggaaatat

SEQ ID NO: 61814 - DNA, 15 bp, Homo sapiens
gcaacagaggaaata

SEQ ID NO: 61815 - DNA, 15 bp, Homo sapiens
tgcaacagaggaaat

SEQ ID NO: 61816 - DNA, 15 bp, Homo sapiens
atgcaacagaggaaa

SEQ ID NO: 61817 - DNA, 15 bp, Homo sapiens
catgcaacagaggaa

SEQ ID NO: 61818 - DNA, 15 bp, Homo sapiens
tcatgcaacagagga

SEQ ID NO: 61819 - DNA, 15 bp, Homo sapiens
ctcatgcaacagagg

SEQ ID NO: 61820 - DNA, 15 bp, Homo sapiens
cctcatgcaacagag

SEQ ID NO: 61821 - DNA, 15 bp, Homo sapiens
tcctcatgcaacaga

SEQ ID NO: 61822 - DNA, 15 bp, Homo sapiens
atcctcatgcaacag

SEQ ID NO: 61823 - DNA, 15 bp, Homo sapiens
aatcctcatgcaaca

SEQ ID NO: 61824 - DNA, 15 bp, Homo sapiens
gaatcctcatgcaac

SEQ ID NO: 61825 - DNA, 15 bp, Homo sapiens
agaatcctcatgcaa

SEQ ID NO: 61826 - DNA, 15 bp, Homo sapiens
gagaatcctcatgca

SEQ ID NO: 61827 - DNA, 15 bp, Homo sapiens
tgagaatcctcatgc

SEQ ID NO: 61828 - DNA, 15 bp, Homo sapiens
atgagaatcctcatg

SEQ ID NO: 61829 - DNA, 15 bp, Homo sapiens
gatgagaatcctcat

SEQ ID NO: 61830 - DNA, 15 bp, Homo sapiens
agatgagaatcctca

SEQ ID NO: 61831 - DNA, 15 bp, Homo sapiens
cagatgagaatcctc

SEQ ID NO: 61832 - DNA, 15 bp, Homo sapiens
acagatgagaatcct

SEQ ID NO: 61833 - DNA, 15 bp, Homo sapiens
cacagatgagaatcc

SEQ ID NO: 61834 - DNA, 15 bp, Homo sapiens
gcacagatgagaatc

SEQ ID NO: 61835 - DNA, 15 bp, Homo sapiens
agcacagatgagaat

SEQ ID NO: 61836 - DNA, 15 bp, Homo sapiens
aagcacagatgagaa

SEQ ID NO: 61837 - DNA, 15 bp, Homo sapiens
taagcacagatgaga

SEQ ID NO: 61838 - DNA, 15 bp, Homo sapiens
ataagcacagatgag

SEQ ID NO: 61839 - DNA, 15 bp, Homo sapiens
tataagcacagatga

SEQ ID NO: 61840 - DNA, 15 bp, Homo sapiens
ttataagcacagatg

SEQ ID NO: 61841 - DNA, 15 bp, Homo sapiens
attataagcacagat

SEQ ID NO: 61842 - DNA, 15 bp, Homo sapiens
cattataagcacaga

SEQ ID NO: 61843 - DNA, 15 bp, Homo sapiens
ccattataagcacag

SEQ ID NO: 61844 - DNA, 15 bp, Homo sapiens
accattataagcaca

SEQ ID NO: 61845 - DNA, 15 bp, Homo sapiens
aaccattataagcac

SEQ ID NO: 61846 - DNA, 15 bp, Homo sapiens
taaccattataagca

SEQ ID NO: 61847 - DNA, 15 bp, Homo sapiens
ctaaccattataagc

SEQ ID NO: 61848 - DNA, 15 bp, Homo sapiens
tctaaccattataag

SEQ ID NO: 61849 - DNA, 15 bp, Homo sapiens
ctctaaccattataa

SEQ ID NO: 61850 - DNA, 15 bp, Homo sapiens
tctctaaccattata

SEQ ID NO: 61851 - DNA, 15 bp, Homo sapiens
atctctaaccattat

SEQ ID NO: 61852 - DNA, 15 bp, Homo sapiens
aatctctaaccatta

SEQ ID NO: 61853 - DNA, 15 bp, Homo sapiens
aaatctctaaccatt

SEQ ID NO: 61854 - DNA, 15 bp, Homo sapiens
aaaatctctaaccat

SEQ ID NO: 61855 - DNA, 15 bp, Homo sapiens
taaaatctctaacca

SEQ ID NO: 61856 - DNA, 15 bp, Homo sapiens
ataaaatctctaacc

SEQ ID NO: 61857 - DNA, 15 bp, Homo sapiens
aataaaatctctaac

SEQ ID NO: 61858 - DNA, 15 bp, Homo sapiens
aaataaaatctctaa

SEQ ID NO: 61859 - DNA, 15 bp, Homo sapiens
caaataaaatctcta

SEQ ID NO: 61860 - DNA, 15 bp, Homo sapiens
acaaataaaatctct

SEQ ID NO: 61861 - DNA, 15 bp, Homo sapiens
cacaaataaaatctc

SEQ ID NO: 61862 - DNA, 15 bp, Homo sapiens
acacaaataaaatct

SEQ ID NO: 61863 - DNA, 15 bp, Homo sapiens
cacacaaataaaatc

SEQ ID NO: 61864 - DNA, 15 bp, Homo sapiens
ccacacaaataaaat

SEQ ID NO: 61865 - DNA, 15 bp, Homo sapiens
tccacacaaataaaa

SEQ ID NO: 61866 - DNA, 15 bp, Homo sapiens
ttccacacaaataaa

SEQ ID NO: 61867 - DNA, 15 bp, Homo sapiens
attccacacaaataa

SEQ ID NO: 61868 - DNA, 15 bp, Homo sapiens
cattccacacaaata

SEQ ID NO: 61869 - DNA, 15 bp, Homo sapiens
tcattccacacaaat

SEQ ID NO: 61870 - DNA, 15 bp, Homo sapiens
ttcattccacacaaa

SEQ ID NO: 61871 - DNA, 15 bp, Homo sapiens
cttcattccacacaa

SEQ ID NO: 61872 - DNA, 15 bp, Homo sapiens
acttcattccacaca

SEQ ID NO: 61873 - DNA, 15 bp, Homo sapiens
cacttcattccacac

SEQ ID NO: 61874 - DNA, 15 bp, Homo sapiens
tcacttcattccaca

SEQ ID NO: 61875 - DNA, 15 bp, Homo sapiens
ctcacttcattccac

SEQ ID NO: 61876 - DNA, 15 bp, Homo sapiens
cctcacttcattcca

SEQ ID NO: 61877 - DNA, 15 bp, Homo sapiens
gcctcacttcattcc

SEQ ID NO: 61878 - DNA, 15 bp, Homo sapiens
agcctcacttcattc

SEQ ID NO: 61879 - DNA, 15 bp, Homo sapiens
aagcctcacttcatt

SEQ ID NO: 61880 - DNA, 15 bp, Homo sapiens
caagcctcacttcat

SEQ ID NO: 61881 - DNA, 15 bp, Homo sapiens
acaagcctcacttca

SEQ ID NO: 61882 - DNA, 15 bp, Homo sapiens
tacaagcctcacttc

SEQ ID NO: 61883 - DNA, 15 bp, Homo sapiens
ctacaagcctcactt

SEQ ID NO: 61884 - DNA, 15 bp, Homo sapiens
actacaagcctcact

SEQ ID NO: 61885 - DNA, 15 bp, Homo sapiens
gactacaagcctcac

SEQ ID NO: 61886 - DNA, 15 bp, Homo sapiens
tgactacaagcctca

SEQ ID NO: 61887 - DNA, 15 bp, Homo sapiens
atgactacaagcctc

SEQ ID NO: 61888 - DNA, 15 bp, Homo sapiens
catgactacaagcct

SEQ ID NO: 61889 - DNA, 15 bp, Homo sapiens
ccatgactacaagcc

SEQ ID NO: 61890 - DNA, 15 bp, Homo sapiens
accatgactacaagc

SEQ ID NO: 61891 - DNA, 15 bp, Homo sapiens
aaccatgactacaag

SEQ ID NO: 61892 - DNA, 15 bp, Homo sapiens
gaaccatgactacaa

SEQ ID NO: 61893 - DNA, 15 bp, Homo sapiens
agaaccatgactaca

SEQ ID NO: 61894 - DNA, 15 bp, Homo sapiens
tagaaccatgactac

SEQ ID NO: 61895 - DNA, 15 bp, Homo sapiens
ctagaaccatgacta

SEQ ID NO: 61896 - DNA, 15 bp, Homo sapiens
actagaaccatgact

SEQ ID NO: 61897 - DNA, 15 bp, Homo sapiens
cactagaaccatgac

SEQ ID NO: 61898 - DNA, 15 bp, Homo sapiens
acactagaaccatga

SEQ ID NO: 61899 - DNA, 15 bp, Homo sapiens
aacactagaaccatg

SEQ ID NO: 61900 - DNA, 15 bp, Homo sapiens
aaacactagaaccat

SEQ ID NO: 61901 - DNA, 15 bp, Homo sapiens
gaaacactagaacca

SEQ ID NO: 61902 - DNA, 15 bp, Homo sapiens
tgaaacactagaacc

SEQ ID NO: 61903 - DNA, 15 bp, Homo sapiens
ctgaaacactagaac

SEQ ID NO: 61904 - DNA, 15 bp, Homo sapiens
actgaaacactagaa

SEQ ID NO: 61905 - DNA, 15 bp, Homo sapiens
aactgaaacactaga

SEQ ID NO: 61906 - DNA, 15 bp, Homo sapiens
aaactgaaacactag

SEQ ID NO: 61907 - DNA, 15 bp, Homo sapiens
caaactgaaacacta

SEQ ID NO: 61908 - DNA, 15 bp, Homo sapiens
gcaaactgaaacact

SEQ ID NO: 61909 - DNA, 15 bp, Homo sapiens
ggcaaactgaaacac

SEQ ID NO: 61910 - DNA, 15 bp, Homo sapiens
tggcaaactgaaaca

SEQ ID NO: 61911 - DNA, 15 bp, Homo sapiens
ttggcaaactgaaac

SEQ ID NO: 61912 - DNA, 15 bp, Homo sapiens
cttggcaaactgaaa

SEQ ID NO: 61913 - DNA, 15 bp, Homo sapiens
acttggcaaactgaa

SEQ ID NO: 61914 - DNA, 15 bp, Homo sapiens
gacttggcaaactga

SEQ ID NO: 61915 - DNA, 15 bp, Homo sapiens
agacttggcaaactg

SEQ ID NO: 61916 - DNA, 15 bp, Homo sapiens
cagacttggcaaact

SEQ ID NO: 61917 - DNA, 15 bp, Homo sapiens
acagacttggcaaac

SEQ ID NO: 61918 - DNA, 15 bp, Homo sapiens
aacagacttggcaaa

SEQ ID NO: 61919 - DNA, 15 bp, Homo sapiens
aaacagacttggcaa

SEQ ID NO: 61920 - DNA, 15 bp, Homo sapiens
taaacagacttggca

SEQ ID NO: 61921 - DNA, 15 bp, Homo sapiens
gtaaacagacttggc

SEQ ID NO: 61922 - DNA, 15 bp, Homo sapiens
agtaaacagacttgg

SEQ ID NO: 61923 - DNA, 15 bp, Homo sapiens
cagtaaacagacttg

SEQ ID NO: 61924 - DNA, 15 bp, Homo sapiens
gcagtaaacagactt

SEQ ID NO: 61925 - DNA, 15 bp, Homo sapiens
tgcagtaaacagact

SEQ ID NO: 61926 - DNA, 15 bp, Homo sapiens
ctgcagtaaacagac

SEQ ID NO: 61927 - DNA, 15 bp, Homo sapiens
actgcagtaaacaga

SEQ ID NO: 61928 - DNA, 15 bp, Homo sapiens
cactgcagtaaacag

SEQ ID NO: 61929 - DNA, 15 bp, Homo sapiens
tcactgcagtaaaca

SEQ ID NO: 61930 - DNA, 15 bp, Homo sapiens
ttcactgcagtaaac

SEQ ID NO: 61931 - DNA, 15 bp, Homo sapiens
tttcactgcagtaaa

SEQ ID NO: 61932 - DNA, 15 bp, Homo sapiens
atttcactgcagtaa

SEQ ID NO: 61933 - DNA, 15 bp, Homo sapiens
aatttcactgcagta

SEQ ID NO: 61934 - DNA, 15 bp, Homo sapiens
gaatttcactgcagt

SEQ ID NO: 61935 - DNA, 15 bp, Homo sapiens
tgaatttcactgcag

SEQ ID NO: 61936 - DNA, 15 bp, Homo sapiens
atgaatttcactgca

SEQ ID NO: 61937 - DNA, 15 bp, Homo sapiens
gatgaatttcactgc

SEQ ID NO: 61938 - DNA, 15 bp, Homo sapiens
tgatgaatttcactg

SEQ ID NO: 61939 - DNA, 15 bp, Homo sapiens
ttgatgaatttcact

SEQ ID NO: 61940 - DNA, 15 bp, Homo sapiens
tttgatgaatttcac

SEQ ID NO: 61941 - DNA, 15 bp, Homo sapiens
atttgatgaatttca

SEQ ID NO: 61942 - DNA, 15 bp, Homo sapiens
catttgatgaatttc

SEQ ID NO: 61943 - DNA, 15 bp, Homo sapiens
acatttgatgaattt

SEQ ID NO: 61944 - DNA, 15 bp, Homo sapiens
aacatttgatgaatt

SEQ ID NO: 61945 - DNA, 15 bp, Homo sapiens
aaacatttgatgaat

SEQ ID NO: 61946 - DNA, 15 bp, Homo sapiens
gaaacatttgatgaa

SEQ ID NO: 61947 - DNA, 15 bp, Homo sapiens
tgaaacatttgatga

SEQ ID NO: 61948 - DNA, 15 bp, Homo sapiens
actgaaacatttgat

SEQ ID NO: 61949 - DNA, 15 bp, Homo sapiens
cactgaaacatttga

SEQ ID NO: 61950 - DNA, 15 bp, Homo sapiens
acactgaaacatttg

SEQ ID NO: 61951 - DNA, 15 bp, Homo sapiens
cacactgaaacattt

SEQ ID NO: 61952 - DNA, 15 bp, Homo sapiens
ccacactgaaacatt

SEQ ID NO: 61953 - DNA, 15 bp, Homo sapiens
accacactgaaacat

SEQ ID NO: 61954 - DNA, 15 bp, Homo sapiens
aaccacactgaaaca

SEQ ID NO: 61955 - DNA, 15 bp, Homo sapiens
aaaccacactgaaac

SEQ ID NO: 61956 - DNA, 15 bp, Homo sapiens
aaaaccacactgaaa

SEQ ID NO: 61957 - DNA, 15 bp, Homo sapiens
gaaaaccacactgaa

SEQ ID NO: 61958 - DNA, 15 bp, Homo sapiens
agaaaaccacactga

SEQ ID NO: 61959 - DNA, 15 bp, Homo sapiens
cagaaaaccacactg

SEQ ID NO: 61960 - DNA, 15 bp, Homo sapiens
acagaaaaccacact

SEQ ID NO: 61961 - DNA, 15 bp, Homo sapiens
tacagaaaaccacac

SEQ ID NO: 61962 - DNA, 15 bp, Homo sapiens
ctacagaaaaccaca

SEQ ID NO: 61963 - DNA, 15 bp, Homo sapiens
gctacagaaaaccac

SEQ ID NO: 61964 - DNA, 15 bp, Homo sapiens
ggctacagaaaacca

SEQ ID NO: 61965 - DNA, 15 bp, Homo sapiens
aggctacagaaaacc

SEQ ID NO: 61966 - DNA, 15 bp, Homo sapiens
taggctacagaaaac

SEQ ID NO: 61967 - DNA, 15 bp, Homo sapiens
ataggctacagaaaa

SEQ ID NO: 61968 - DNA, 15 bp, Homo sapiens
gataggctacagaaa

SEQ ID NO: 61969 - DNA, 15 bp, Homo sapiens
tgataggctacagaa

SEQ ID NO: 61970 - DNA, 15 bp, Homo sapiens
atgataggctacaga

SEQ ID NO: 61971 - DNA, 15 bp, Homo sapiens
aatgataggctacag

SEQ ID NO: 61972 - DNA, 15 bp, Homo sapiens
aaatgataggctaca

SEQ ID NO: 61973 - DNA, 15 bp, Homo sapiens
taaatgataggctac

SEQ ID NO: 61974 - DNA, 15 bp, Homo sapiens
gtaaatgataggcta

SEQ ID NO: 61975 - DNA, 15 bp, Homo sapiens
agtaaatgataggct

SEQ ID NO: 61976 - DNA, 15 bp, Homo sapiens
cagtaaatgataggc

SEQ ID NO: 61977 - DNA, 15 bp, Homo sapiens
ccagtaaatgatagg

SEQ ID NO: 61978 - DNA, 15 bp, Homo sapiens
gccagtaaatgatag

SEQ ID NO: 61979 - DNA, 15 bp, Homo sapiens
agccagtaaatgata

SEQ ID NO: 61980 - DNA, 15 bp, Homo sapiens
tagccagtaaatgat

SEQ ID NO: 61981 - DNA, 15 bp, Homo sapiens
atagccagtaaatga

SEQ ID NO: 61982 - DNA, 15 bp, Homo sapiens
aatagccagtaaatg

SEQ ID NO: 61983 - DNA, 15 bp, Homo sapiens
aaatagccagtaaat

SEQ ID NO: 61984 - DNA, 15 bp, Homo sapiens
aaaatagccagtaaa

SEQ ID NO: 61985 - DNA, 15 bp, Homo sapiens
aaaaatagccagtaa

SEQ ID NO: 61986 - DNA, 15 bp, Homo sapiens
aaaaaatagccagta

SEQ ID NO: 61987 - DNA, 15 bp, Homo sapiens
aaaaaaatagccagt

SEQ ID NO: 61988 - DNA, 15 bp, Homo sapiens
taaaaaaatagccag

SEQ ID NO: 61989 - DNA, 15 bp, Homo sapiens
ataaaaaaatagcca

SEQ ID NO: 61990 - DNA, 15 bp, Homo sapiens
cataaaaaaatagcc

SEQ ID NO: 61991 - DNA, 15 bp, Homo sapiens
acataaaaaaatagc

SEQ ID NO: 61992 - DNA, 15 bp, Homo sapiens
tacataaaaaaatag

SEQ ID NO: 61993 - DNA, 15 bp, Homo sapiens
gtacataaaaaaata

SEQ ID NO: 61994 - DNA, 15 bp, Homo sapiens
tgtacataaaaaaat

SEQ ID NO: 61995 - DNA, 15 bp, Homo sapiens
gtgtacataaaaaaa

SEQ ID NO: 61996 - DNA, 15 bp, Homo sapiens
ggtgtacataaaaaa

SEQ ID NO: 61997 - DNA, 15 bp, Homo sapiens
aggtgtacataaaaa

SEQ ID NO: 61998 - DNA, 15 bp, Homo sapiens
aaggtgtacataaaa

SEQ ID NO: 61999 - DNA, 15 bp, Homo sapiens
aaaggtgtacataaa

SEQ ID NO: 62000 - DNA, 15 bp, Homo sapiens
taaaggtgtacataa

SEQ ID NO: 62001 - DNA, 15 bp, Homo sapiens
ctaaaggtgtacata

SEQ ID NO: 62002 - DNA, 15 bp, Homo sapiens
cctaaaggtgtacat

SEQ ID NO: 62003 - DNA, 15 bp, Homo sapiens
tcctaaaggtgtaca

SEQ ID NO: 62004 - DNA, 15 bp, Homo sapiens
atcctaaaggtgtac

SEQ ID NO: 62005 - DNA, 15 bp, Homo sapiens
aatcctaaaggtgta

SEQ ID NO: 62006 - DNA, 15 bp, Homo sapiens
aaatcctaaaggtgt

SEQ ID NO: 62007 - DNA, 15 bp, Homo sapiens
aaaatcctaaaggtg

SEQ ID NO: 62008 - DNA, 15 bp, Homo sapiens
gaaaatcctaaaggt

SEQ ID NO: 62009 - DNA, 15 bp, Homo sapiens
agaaaatcctaaagg

SEQ ID NO: 62010 - DNA, 15 bp, Homo sapiens
cagaaaatcctaaag

SEQ ID NO: 62011 - DNA, 15 bp, Homo sapiens
gcagaaaatcctaaa

SEQ ID NO: 62012 - DNA, 15 bp, Homo sapiens
ggcagaaaatcctaa

SEQ ID NO: 62013 - DNA, 15 bp, Homo sapiens
aggcagaaaatccta

SEQ ID NO: 62014 - DNA, 15 bp, Homo sapiens
taggcagaaaatcct

SEQ ID NO: 62015 - DNA, 15 bp, Homo sapiens
gtaggcagaaaatcc

SEQ ID NO: 62016 - DNA, 15 bp, Homo sapiens
agtaggcagaaaatc

SEQ ID NO: 62017 - DNA, 15 bp, Homo sapiens
gagtaggcagaaaat

SEQ ID NO: 62018 - DNA, 15 bp, Homo sapiens
agagtaggcagaaaa

SEQ ID NO: 62019 - DNA, 15 bp, Homo sapiens
gatagagtaggcaga

SEQ ID NO: 62020 - DNA, 15 bp, Homo sapiens
ggatagagtaggcag

SEQ ID NO: 62021 - DNA, 15 bp, Homo sapiens
tggatagagtaggca

SEQ ID NO: 62022 - DNA, 15 bp, Homo sapiens
ctggatagagtaggc

SEQ ID NO: 62023 - DNA, 15 bp, Homo sapiens
actggatagagtagg

SEQ ID NO: 62024 - DNA, 15 bp, Homo sapiens
aactggatagagtag

SEQ ID NO: 62025 - DNA, 15 bp, Homo sapiens
caactggatagagta

SEQ ID NO: 62026 - DNA, 15 bp, Homo sapiens
acaactggatagagt

SEQ ID NO: 62027 - DNA, 15 bp, Homo sapiens
gacaactggatagag

SEQ ID NO: 62028 - DNA, 15 bp, Homo sapiens
ggacaactggataga

SEQ ID NO: 62029 - DNA, 15 bp, Homo sapiens
tggacaactggatag

SEQ ID NO: 62030 - DNA, 15 bp, Homo sapiens
ttggacaactggata

SEQ ID NO: 62031 - DNA, 15 bp, Homo sapiens
tttggacaactggat

SEQ ID NO: 62032 - DNA, 15 bp, Homo sapiens
atttggacaactgga

SEQ ID NO: 62033 - DNA, 15 bp, Homo sapiens
catttggacaactgg

SEQ ID NO: 62034 - DNA, 15 bp, Homo sapiens
tcatttggacaactg

SEQ ID NO: 62035 - DNA, 15 bp, Homo sapiens
atcatttggacaact

SEQ ID NO: 62036 - DNA, 15 bp, Homo sapiens
tatcatttggacaac

SEQ ID NO: 62037 - DNA, 15 bp, Homo sapiens
atatcatttggacaa

SEQ ID NO: 62038 - DNA, 15 bp, Homo sapiens
gatatcatttggaca

SEQ ID NO: 62039 - DNA, 15 bp, Homo sapiens
ggatatcatttggac

SEQ ID NO: 62040 - DNA, 15 bp, Homo sapiens
aggatatcatttgga

SEQ ID NO: 62041 - DNA, 15 bp, Homo sapiens
taggatatcatttgg

SEQ ID NO: 62042 - DNA, 15 bp, Homo sapiens
gtaggatatcatttg

SEQ ID NO: 62043 - DNA, 15 bp, Homo sapiens
tgtaggatatcattt

SEQ ID NO: 62044 - DNA, 15 bp, Homo sapiens
atgtaggatatcatt

SEQ ID NO: 62045 - DNA, 15 bp, Homo sapiens
aatgtaggatatcat

SEQ ID NO: 62046 - DNA, 15 bp, Homo sapiens
aaatgtaggatatca

SEQ ID NO: 62047 - DNA, 15 bp, Homo sapiens
aaaatgtaggatatc

SEQ ID NO: 62048 - DNA, 15 bp, Homo sapiens
taaaatgtaggatat

SEQ ID NO: 62049 - DNA, 15 bp, Homo sapiens
gtaaaatgtaggata

SEQ ID NO: 62050 - DNA, 15 bp, Homo sapiens
tgtaaaatgtaggat

SEQ ID NO: 62051 - DNA, 15 bp, Homo sapiens
ttgtaaaatgtagga

SEQ ID NO: 62052 - DNA, 15 bp, Homo sapiens
tttgtaaaatgtagg

SEQ ID NO: 62053 - DNA, 15 bp, Homo sapiens
atttgtaaaatgtag

SEQ ID NO: 62054 - DNA, 15 bp, Homo sapiens
catttgtaaaatgta

SEQ ID NO: 62055 - DNA, 15 bp, Homo sapiens
gcatttgtaaaatgt

SEQ ID NO: 62056 - DNA, 15 bp, Homo sapiens
ggcatttgtaaaatg

SEQ ID NO: 62057 - DNA, 15 bp, Homo sapiens
gggcatttgtaaaat

SEQ ID NO: 62058 - DNA, 15 bp, Homo sapiens
agggcatttgtaaaa

SEQ ID NO: 62059 - DNA, 15 bp, Homo sapiens
aagggcatttgtaaa

SEQ ID NO: 62060 - DNA, 15 bp, Homo sapiens
aaagggcatttgtaa

SEQ ID NO: 62061 - DNA, 15 bp, Homo sapiens
gaaagggcatttgta

SEQ ID NO: 62062 - DNA, 15 bp, Homo sapiens
tgaaagggcatttgt

SEQ ID NO: 62063 - DNA, 15 bp, Homo sapiens
ctgaaagggcatttg

SEQ ID NO: 62064 - DNA, 15 bp, Homo sapiens
actgaaagggcattt

SEQ ID NO: 62065 - DNA, 15 bp, Homo sapiens
aactgaaagggcatt

SEQ ID NO: 62066 - DNA, 15 bp, Homo sapiens
aaactgaaagggcat

SEQ ID NO: 62067 - DNA, 15 bp, Homo sapiens
gaaactgaaagggca

SEQ ID NO: 62068 - DNA, 15 bp, Homo sapiens
agaaactgaaagggc

SEQ ID NO: 62069 - DNA, 15 bp, Homo sapiens
tagaaactgaaaggg

SEQ ID NO: 62070 - DNA, 15 bp, Homo sapiens
atagaaactgaaagg

SEQ ID NO: 62071 - DNA, 15 bp, Homo sapiens
aatagaaactgaaag

SEQ ID NO: 62072 - DNA, 15 bp, Homo sapiens
aaatagaaactgaaa

SEQ ID NO: 62073 - DNA, 15 bp, Homo sapiens
aaaatagaaactgaa

SEQ ID NO: 62074 - DNA, 15 bp, Homo sapiens
gaaaatagaaactga

SEQ ID NO: 62075 - DNA, 15 bp, Homo sapiens
agaaaatagaaactg

SEQ ID NO: 62076 - DNA, 15 bp, Homo sapiens
aagaaaatagaaact

SEQ ID NO: 62077 - DNA, 15 bp, Homo sapiens
aaagaaaatagaaac

SEQ ID NO: 62078 - DNA, 15 bp, Homo sapiens
aaaagaaaatagaaa

SEQ ID NO: 62079 - DNA, 15 bp, Homo sapiens
aaaaagaaaatagaa

SEQ ID NO: 62080 - DNA, 15 bp, Homo sapiens
gaaaaagaaaataga

SEQ ID NO: 62081 - DNA, 15 bp, Homo sapiens
ggaaaaagaaaatag

SEQ ID NO: 62082 - DNA, 15 bp, Homo sapiens
tggaaaaagaaaata

SEQ ID NO: 62083 - DNA, 15 bp, Homo sapiens
atggaaaaagaaaat

SEQ ID NO: 62084 - DNA, 15 bp, Homo sapiens
aatggaaaaagaaaa

SEQ ID NO: 62085 - DNA, 15 bp, Homo sapiens
taatggaaaaagaaa

SEQ ID NO: 62086 - DNA, 15 bp, Homo sapiens
ttaatggaaaaagaa

SEQ ID NO: 62087 - DNA, 15 bp, Homo sapiens
tttaatggaaaaaga

SEQ ID NO: 62088 - DNA, 15 bp, Homo sapiens
atttaatggaaaaag

SEQ ID NO: 62089 - DNA, 15 bp, Homo sapiens
aatttaatggaaaaa

SEQ ID NO: 62090 - DNA, 15 bp, Homo sapiens
caatttaatggaaaa

SEQ ID NO: 62091 - DNA, 15 bp, Homo sapiens
gcaatttaatggaaa

SEQ ID NO: 62092 - DNA, 15 bp, Homo sapiens
ggcaatttaatggaa

SEQ ID NO: 62093 - DNA, 15 bp, Homo sapiens
gggcaatttaatgga

SEQ ID NO: 62094 - DNA, 15 bp, Homo sapiens
agggcaatttaatgg

SEQ ID NO: 62095 - DNA, 15 bp, Homo sapiens
gagggcaatttaatg

SEQ ID NO: 62096 - DNA, 15 bp, Homo sapiens
tgagggcaatttaat

SEQ ID NO: 62097 - DNA, 15 bp, Homo sapiens
atgagggcaatttaa

SEQ ID NO: 62098 - DNA, 15 bp, Homo sapiens
catgagggcaattta

SEQ ID NO: 62099 - DNA, 15 bp, Homo sapiens
acatgagggcaattt

SEQ ID NO: 62100 - DNA, 15 bp, Homo sapiens
gacatgagggcaatt

SEQ ID NO: 62101 - DNA, 15 bp, Homo sapiens
ggacatgagggcaat

SEQ ID NO: 62102 - DNA, 15 bp, Homo sapiens
aggacatgagggcaa

SEQ ID NO: 62103 - DNA, 15 bp, Homo sapiens
taggacatgagggca

SEQ ID NO: 62104 - DNA, 15 bp, Homo sapiens
ttaggacatgagggc

SEQ ID NO: 62105 - DNA, 15 bp, Homo sapiens
attaggacatgaggg

SEQ ID NO: 62106 - DNA, 15 bp, Homo sapiens
cattaggacatgagg

SEQ ID NO: 62107 - DNA, 15 bp, Homo sapiens
acattaggacatgag

SEQ ID NO: 62108 - DNA, 15 bp, Homo sapiens
cacattaggacatga

SEQ ID NO: 62109 - DNA, 15 bp, Homo sapiens
gcacattaggacatg

SEQ ID NO: 62110 - DNA, 15 bp, Homo sapiens
tgcacattaggacat

SEQ ID NO: 62111 - DNA, 15 bp, Homo sapiens
ctgcacattaggaca

SEQ ID NO: 62112 - DNA, 15 bp, Homo sapiens
actgcacattaggac

SEQ ID NO: 62113 - DNA, 15 bp, Homo sapiens
aactgcacattagga

SEQ ID NO: 62114 - DNA, 15 bp, Homo sapiens
aaactgcacattagg

SEQ ID NO: 62115 - DNA, 15 bp, Homo sapiens
caaactgcacattag

SEQ ID NO: 62116 - DNA, 15 bp, Homo sapiens
acaaactgcacatta

SEQ ID NO: 62117 - DNA, 15 bp, Homo sapiens
tacaaactgcacatt

SEQ ID NO: 62118 - DNA, 15 bp, Homo sapiens
ttacaaactgcacat

SEQ ID NO: 62119 - DNA, 15 bp, Homo sapiens
cttacaaactgcaca

SEQ ID NO: 62120 - DNA, 15 bp, Homo sapiens
acttacaaactgcac

SEQ ID NO: 62121 - DNA, 15 bp, Homo sapiens
cacttacaaactgca

SEQ ID NO: 62122 - DNA, 15 bp, Homo sapiens
acacttacaaactgc

SEQ ID NO: 62123 - DNA, 15 bp, Homo sapiens
cacacttacaaactg

SEQ ID NO: 62124 - DNA, 15 bp, Homo sapiens
acacacttacaaact

SEQ ID NO: 62125 - DNA, 15 bp, Homo sapiens
cacacacttacaaac

SEQ ID NO: 62126 - DNA, 15 bp, Homo sapiens
acacacacttacaaa

SEQ ID NO: 62127 - DNA, 15 bp, Homo sapiens
cacacacacttacaa

SEQ ID NO: 62128 - DNA, 15 bp, Homo sapiens
acacacacacttaca

SEQ ID NO: 62129 - DNA, 15 bp, Homo sapiens
cacacacacacttac

SEQ ID NO: 62130 - DNA, 15 bp, Homo sapiens
acacacacacactta

SEQ ID NO: 62131 - DNA, 15 bp, Homo sapiens
cacacacacacactt

SEQ ID NO: 62132 - DNA, 15 bp, Homo sapiens
gacacacacacacac

SEQ ID NO: 62133 - DNA, 15 bp, Homo sapiens
agacacacacacaca

SEQ ID NO: 62134 - DNA, 15 bp, Homo sapiens
cagacacacacacac

SEQ ID NO: 62135 - DNA, 15 bp, Homo sapiens
acagacacacacaca

SEQ ID NO: 62136 - DNA, 15 bp, Homo sapiens
cacagacacacacac

SEQ ID NO: 62137 - DNA, 15 bp, Homo sapiens
acacagacacacaca

SEQ ID NO: 62138 - DNA, 15 bp, Homo sapiens
cacacagacacacac

SEQ ID NO: 62139 - DNA, 15 bp, Homo sapiens
cacacacacagacac

SEQ ID NO: 62140 - DNA, 15 bp, Homo sapiens
acacacacacagaca

SEQ ID NO: 62141 - DNA, 15 bp, Homo sapiens
cacacacacacagac

SEQ ID NO: 62142 - DNA, 15 bp, Homo sapiens
tcacacacacacaga

SEQ ID NO: 62143 - DNA, 15 bp, Homo sapiens
ttcacacacacacag

SEQ ID NO: 62144 - DNA, 15 bp, Homo sapiens
attcacacacacaca

SEQ ID NO: 62145 - DNA, 15 bp, Homo sapiens
aattcacacacacac

SEQ ID NO: 62146 - DNA, 15 bp, Homo sapiens
aaattcacacacaca

SEQ ID NO: 62147 - DNA, 15 bp, Homo sapiens
caaattcacacacac

SEQ ID NO: 62148 - DNA, 15 bp, Homo sapiens
tcaaattcacacaca

SEQ ID NO: 62149 - DNA, 15 bp, Homo sapiens
atcaaattcacacac

SEQ ID NO: 62150 - DNA, 15 bp, Homo sapiens
aatcaaattcacaca

SEQ ID NO: 62151 - DNA, 15 bp, Homo sapiens
aaatcaaattcacac

SEQ ID NO: 62152 - DNA, 15 bp, Homo sapiens
aaaatcaaattcaca

SEQ ID NO: 62153 - DNA, 15 bp, Homo sapiens
gaaaatcaaattcac

SEQ ID NO: 62154 - DNA, 15 bp, Homo sapiens
tgaaaatcaaattca

SEQ ID NO: 62155 - DNA, 15 bp, Homo sapiens
ttgaaaatcaaattc

SEQ ID NO: 62156 - DNA, 15 bp, Homo sapiens
cttgaaaatcaaatt

SEQ ID NO: 62157 - DNA, 15 bp, Homo sapiens
tcttgaaaatcaaat

SEQ ID NO: 62158 - DNA, 15 bp, Homo sapiens
ctcttgaaaatcaaa

SEQ ID NO: 62159 - DNA, 15 bp, Homo sapiens
actcttgaaaatcaa

SEQ ID NO: 62160 - DNA, 15 bp, Homo sapiens
cactcttgaaaatca

SEQ ID NO: 62161 - DNA, 15 bp, Homo sapiens
gcactcttgaaaatc

SEQ ID NO: 62162 - DNA, 15 bp, Homo sapiens
agcactcttgaaaat

SEQ ID NO: 62163 - DNA, 15 bp, Homo sapiens
tagcactcttgaaaa

SEQ ID NO: 62164 - DNA, 15 bp, Homo sapiens
ctagcactcttgaaa

SEQ ID NO: 62165 - DNA, 15 bp, Homo sapiens
tctagcactcttgaa

SEQ ID NO: 62166 - DNA, 15 bp, Homo sapiens
gtctagcactcttga

SEQ ID NO: 62167 - DNA, 15 bp, Homo sapiens
agtctagcactcttg

SEQ ID NO: 62168 - DNA, 15 bp, Homo sapiens
aagtctagcactctt

SEQ ID NO: 62169 - DNA, 15 bp, Homo sapiens
gaagtctagcactct

SEQ ID NO: 62170 - DNA, 15 bp, Homo sapiens
ggaagtctagcactc

SEQ ID NO: 62171 - DNA, 15 bp, Homo sapiens
tggaagtctagcact

SEQ ID NO: 62172 - DNA, 15 bp, Homo sapiens
ttggaagtctagcac

SEQ ID NO: 62173 - DNA, 15 bp, Homo sapiens
attggaagtctagca

SEQ ID NO: 62174 - DNA, 15 bp, Homo sapiens
aattggaagtctagc

SEQ ID NO: 62175 - DNA, 15 bp, Homo sapiens
aaattggaagtctag

SEQ ID NO: 62176 - DNA, 15 bp, Homo sapiens
caaattggaagtcta

SEQ ID NO: 62177 - DNA, 15 bp, Homo sapiens
tcaaattggaagtct

SEQ ID NO: 62178 - DNA, 15 bp, Homo sapiens
ctcaaattggaagtc

SEQ ID NO: 62179 - DNA, 15 bp, Homo sapiens
tctcaaattggaagt

SEQ ID NO: 62180 - DNA, 15 bp, Homo sapiens
ctctcaaattggaag

SEQ ID NO: 62181 - DNA, 15 bp, Homo sapiens
tctctcaaattggaa

SEQ ID NO: 62182 - DNA, 15 bp, Homo sapiens
atctctcaaattgga

SEQ ID NO: 62183 - DNA, 15 bp, Homo sapiens
aatctctcaaattgg

SEQ ID NO: 62184 - DNA, 15 bp, Homo sapiens
taatctctcaaattg

SEQ ID NO: 62185 - DNA, 15 bp, Homo sapiens
ttaatctctcaaatt

SEQ ID NO: 62186 - DNA, 15 bp, Homo sapiens
tttaatctctcaaat

SEQ ID NO: 62187 - DNA, 15 bp, Homo sapiens
atttaatctctcaaa

SEQ ID NO: 62188 - DNA, 15 bp, Homo sapiens
tatttaatctctcaa

SEQ ID NO: 62189 - DNA, 15 bp, Homo sapiens
ttatttaatctctca

SEQ ID NO: 62190 - DNA, 15 bp, Homo sapiens
attatttaatctctc

SEQ ID NO: 62191 - DNA, 15 bp, Homo sapiens
aattatttaatctct

SEQ ID NO: 62192 - DNA, 15 bp, Homo sapiens
aaattatttaatctc

SEQ ID NO: 62193 - DNA, 15 bp, Homo sapiens
taaattatttaatct

SEQ ID NO: 62194 - DNA, 15 bp, Homo sapiens
ttaaattatttaatc

SEQ ID NO: 62195 - DNA, 15 bp, Homo sapiens
attaaattatttaat

SEQ ID NO: 62196 - DNA, 15 bp, Homo sapiens
aattaaattatttaa

SEQ ID NO: 62197 - DNA, 15 bp, Homo sapiens
gaattaaattattta

SEQ ID NO: 62198 - DNA, 15 bp, Homo sapiens
tgaattaaattattt

SEQ ID NO: 62199 - DNA, 15 bp, Homo sapiens
ctgaattaaattatt

SEQ ID NO: 62200 - DNA, 15 bp, Homo sapiens
cctgaattaaattat

SEQ ID NO: 62201 - DNA, 15 bp, Homo sapiens
gcctgaattaaatta

SEQ ID NO: 62202 - DNA, 15 bp, Homo sapiens
tgcctgaattaaatt

SEQ ID NO: 62203 - DNA, 15 bp, Homo sapiens
ttgcctgaattaaat

SEQ ID NO: 62204 - DNA, 15 bp, Homo sapiens
tttgcctgaattaaa

SEQ ID NO: 62205 - DNA, 15 bp, Homo sapiens
gtttgcctgaattaa

SEQ ID NO: 62206 - DNA, 15 bp, Homo sapiens
tgtttgcctgaatta

SEQ ID NO: 62207 - DNA, 15 bp, Homo sapiens
atgtttgcctgaatt

SEQ ID NO: 62208 - DNA, 15 bp, Homo sapiens
aatgtttgcctgaat

SEQ ID NO: 62209 - DNA, 15 bp, Homo sapiens
aaatgtttgcctgaa

SEQ ID NO: 62210 - DNA, 15 bp, Homo sapiens
aaaatgtttgcctga

SEQ ID NO: 62211 - DNA, 15 bp, Homo sapiens
aaaaatgtttgcctg

SEQ ID NO: 62212 - DNA, 15 bp, Homo sapiens
gaaaaatgtttgcct

SEQ ID NO: 62213 - DNA, 15 bp, Homo sapiens
tgaaaaatgtttgcc

SEQ ID NO: 62214 - DNA, 15 bp, Homo sapiens
atgaaaaatgtttgc

SEQ ID NO: 62215 - DNA, 15 bp, Homo sapiens
aatgaaaaatgtttg

SEQ ID NO: 62216 - DNA, 15 bp, Homo sapiens
caatgaaaaatgttt

SEQ ID NO: 62217 - DNA, 15 bp, Homo sapiens
ccaatgaaaaatgtt

SEQ ID NO: 62218 - DNA, 15 bp, Homo sapiens
tccaatgaaaaatgt

SEQ ID NO: 62219 - DNA, 15 bp, Homo sapiens
ttccaatgaaaaatg

SEQ ID NO: 62220 - DNA, 15 bp, Homo sapiens
attccaatgaaaaat

SEQ ID NO: 62221 - DNA, 15 bp, Homo sapiens
aattccaatgaaaaa

SEQ ID NO: 62222 - DNA, 15 bp, Homo sapiens
aaattccaatgaaaa

SEQ ID NO: 62223 - DNA, 15 bp, Homo sapiens
gaaattccaatgaaa

SEQ ID NO: 62224 - DNA, 15 bp, Homo sapiens
tgaaattccaatgaa

SEQ ID NO: 62225 - DNA, 15 bp, Homo sapiens
gtgaaattccaatga

SEQ ID NO: 62226 - DNA, 15 bp, Homo sapiens
tgtgaaattccaatg

SEQ ID NO: 62227 - DNA, 15 bp, Homo sapiens
ctgtgaaattccaat

SEQ ID NO: 62228 - DNA, 15 bp, Homo sapiens
actgtgaaattccaa

SEQ ID NO: 62229 - DNA, 15 bp, Homo sapiens
aactgtgaaattcca

SEQ ID NO: 62230 - DNA, 15 bp, Homo sapiens
gaactgtgaaattcc

SEQ ID NO: 62231 - DNA, 15 bp, Homo sapiens
tgaactgtgaaattc

SEQ ID NO: 62232 - DNA, 15 bp, Homo sapiens
atgaactgtgaaatt

SEQ ID NO: 62233 - DNA, 15 bp, Homo sapiens
aatgaactgtgaaat

SEQ ID NO: 62234 - DNA, 15 bp, Homo sapiens
caatgaactgtgaaa

SEQ ID NO: 62235 - DNA, 15 bp, Homo sapiens
acaatgaactgtgaa

SEQ ID NO: 62236 - DNA, 15 bp, Homo sapiens
tacaatgaactgtga

SEQ ID NO: 62237 - DNA, 15 bp, Homo sapiens
ttacaatgaactgtg

SEQ ID NO: 62238 - DNA, 15 bp, Homo sapiens
attacaatgaactgt

SEQ ID NO: 62239 - DNA, 15 bp, Homo sapiens
cattacaatgaactg

SEQ ID NO: 62240 - DNA, 15 bp, Homo sapiens
tcattacaatgaact

SEQ ID NO: 62241 - DNA, 15 bp, Homo sapiens
ttcattacaatgaac

SEQ ID NO: 62242 - DNA, 15 bp, Homo sapiens
tttcattacaatgaa

SEQ ID NO: 62243 - DNA, 15 bp, Homo sapiens
ttttcattacaatga

SEQ ID NO: 62244 - DNA, 15 bp, Homo sapiens
attttcattacaatg

SEQ ID NO: 62245 - DNA, 15 bp, Homo sapiens
cattttcattacaat

SEQ ID NO: 62246 - DNA, 15 bp, Homo sapiens
acattttcattacaa

SEQ ID NO: 62247 - DNA, 15 bp, Homo sapiens
aacattttcattaca

SEQ ID NO: 62248 - DNA, 15 bp, Homo sapiens
taacattttcattac

SEQ ID NO: 62249 - DNA, 15 bp, Homo sapiens
ttaacattttcatta

SEQ ID NO: 62250 - DNA, 15 bp, Homo sapiens
attaacattttcatt

SEQ ID NO: 62251 - DNA, 15 bp, Homo sapiens
gattaacattttcat

SEQ ID NO: 62252 - DNA, 15 bp, Homo sapiens
ggattaacattttca

SEQ ID NO: 62253 - DNA, 15 bp, Homo sapiens
aggattaacattttc

SEQ ID NO: 62254 - DNA, 15 bp, Homo sapiens
caggattaacatttt

SEQ ID NO: 62255 - DNA, 15 bp, Homo sapiens
ccaggattaacattt

SEQ ID NO: 62256 - DNA, 15 bp, Homo sapiens
tccaggattaacatt

SEQ ID NO: 62257 - DNA, 15 bp, Homo sapiens
atccaggattaacat

SEQ ID NO: 62258 - DNA, 15 bp, Homo sapiens
catccaggattaaca

SEQ ID NO: 62259 - DNA, 15 bp, Homo sapiens
tcatccaggattaac

SEQ ID NO: 62260 - DNA, 15 bp, Homo sapiens
gtcatccaggattaa

SEQ ID NO: 62261 - DNA, 15 bp, Homo sapiens
ggtcatccaggatta

SEQ ID NO: 62262 - DNA, 15 bp, Homo sapiens
aggtcatccaggatt

SEQ ID NO: 62263 - DNA, 15 bp, Homo sapiens
aaggtcatccaggat

SEQ ID NO: 62264 - DNA, 15 bp, Homo sapiens
aaaggtcatccagga

SEQ ID NO: 62265 - DNA, 15 bp, Homo sapiens
caaaggtcatccagg

SEQ ID NO: 62266 - DNA, 15 bp, Homo sapiens
tcaaaggtcatccag

SEQ ID NO: 62267 - DNA, 15 bp, Homo sapiens
gtcaaaggtcatcca

SEQ ID NO: 62268 - DNA, 15 bp, Homo sapiens
tgtcaaaggtcatcc

SEQ ID NO: 62269 - DNA, 15 bp, Homo sapiens
atgtcaaaggtcatc

SEQ ID NO: 62270 - DNA, 15 bp, Homo sapiens
tatgtcaaaggtcat

SEQ ID NO: 62271 - DNA, 15 bp, Homo sapiens
gtatgtcaaaggtca

SEQ ID NO: 62272 - DNA, 15 bp, Homo sapiens
tgtatgtcaaaggtc

SEQ ID NO: 62273 - DNA, 15 bp, Homo sapiens
ctgtatgtcaaaggt

SEQ ID NO: 62274 - DNA, 15 bp, Homo sapiens
actgtatgtcaaagg

SEQ ID NO: 62275 - DNA, 15 bp, Homo sapiens
tactgtatgtcaaag

SEQ ID NO: 62276 - DNA, 15 bp, Homo sapiens
ttactgtatgtcaaa

SEQ ID NO: 62277 - DNA, 15 bp, Homo sapiens
attactgtatgtcaa

SEQ ID NO: 62278 - DNA, 15 bp, Homo sapiens
cattactgtatgtca

SEQ ID NO: 62279 - DNA, 15 bp, Homo sapiens
tcattactgtatgtc

SEQ ID NO: 62280 - DNA, 15 bp, Homo sapiens
ttcattactgtatgt

SEQ ID NO: 62281 - DNA, 15 bp, Homo sapiens
attcattactgtatg

SEQ ID NO: 62282 - DNA, 15 bp, Homo sapiens
gattcattactgtat

SEQ ID NO: 62283 - DNA, 15 bp, Homo sapiens
agattcattactgta

SEQ ID NO: 62284 - DNA, 15 bp, Homo sapiens
aagattcattactgt

SEQ ID NO: 62285 - DNA, 15 bp, Homo sapiens
caagattcattactg

SEQ ID NO: 62286 - DNA, 15 bp, Homo sapiens
ccaagattcattact

SEQ ID NO: 62287 - DNA, 15 bp, Homo sapiens
tccaagattcattac

SEQ ID NO: 62288 - DNA, 15 bp, Homo sapiens
atccaagattcatta

SEQ ID NO: 62289 - DNA, 15 bp, Homo sapiens
tatccaagattcatt

SEQ ID NO: 62290 - DNA, 15 bp, Homo sapiens
atatccaagattcat

SEQ ID NO: 62291 - DNA, 15 bp, Homo sapiens
aatatccaagattca

SEQ ID NO: 62292 - DNA, 15 bp, Homo sapiens
taatatccaagattc

SEQ ID NO: 62293 - DNA, 15 bp, Homo sapiens
ttaatatccaagatt

SEQ ID NO: 62294 - DNA, 15 bp, Homo sapiens
attaatatccaagat

SEQ ID NO: 62295 - DNA, 15 bp, Homo sapiens
cattaatatccaaga

SEQ ID NO: 62296 - DNA, 15 bp, Homo sapiens
tcattaatatccaag

SEQ ID NO: 62297 - DNA, 15 bp, Homo sapiens
ttcattaatatccaa

SEQ ID NO: 62298 - DNA, 15 bp, Homo sapiens
attcattaatatcca

SEQ ID NO: 62299 - DNA, 15 bp, Homo sapiens
aattcattaatatcc

SEQ ID NO: 62300 - DNA, 15 bp, Homo sapiens
aaattcattaatatc

SEQ ID NO: 62301 - DNA, 15 bp, Homo sapiens
caaattcattaatat

SEQ ID NO: 62302 - DNA, 15 bp, Homo sapiens
acaaattcattaata

SEQ ID NO: 62303 - DNA, 15 bp, Homo sapiens
aacaaattcattaat

SEQ ID NO: 62304 - DNA, 15 bp, Homo sapiens
taacaaattcattaa

SEQ ID NO: 62305 - DNA, 15 bp, Homo sapiens
ctaacaaattcatta

SEQ ID NO: 62306 - DNA, 15 bp, Homo sapiens
actaacaaattcatt

SEQ ID NO: 62307 - DNA, 15 bp, Homo sapiens
tactaacaaattcat

SEQ ID NO: 62308 - DNA, 15 bp, Homo sapiens
ctactaacaaattca

SEQ ID NO: 62309 - DNA, 15 bp, Homo sapiens
gctactaacaaattc

SEQ ID NO: 62310 - DNA, 15 bp, Homo sapiens
tgctactaacaaatt

SEQ ID NO: 62311 - DNA, 15 bp, Homo sapiens
atgctactaacaaat

SEQ ID NO: 62312 - DNA, 15 bp, Homo sapiens
gatgctactaacaaa

SEQ ID NO: 62313 - DNA, 15 bp, Homo sapiens
agatgctactaacaa

SEQ ID NO: 62314 - DNA, 15 bp, Homo sapiens
aagatgctactaaca

SEQ ID NO: 62315 - DNA, 15 bp, Homo sapiens
caagatgctactaac

SEQ ID NO: 62316 - DNA, 15 bp, Homo sapiens
tcaagatgctactaa

SEQ ID NO: 62317 - DNA, 15 bp, Homo sapiens
atcaagatgctacta

SEQ ID NO: 62318 - DNA, 15 bp, Homo sapiens
catcaagatgctact

SEQ ID NO: 62319 - DNA, 15 bp, Homo sapiens
acatcaagatgctac

SEQ ID NO: 62320 - DNA, 15 bp, Homo sapiens
cacatcaagatgcta

SEQ ID NO: 62321 - DNA, 15 bp, Homo sapiens
acacatcaagatgct

SEQ ID NO: 62322 - DNA, 15 bp, Homo sapiens
cacacatcaagatgc

SEQ ID NO: 62323 - DNA, 15 bp, Homo sapiens
acacacatcaagatg

SEQ ID NO: 62324 - DNA, 15 bp, Homo sapiens
aacacacatcaagat

SEQ ID NO: 62325 - DNA, 15 bp, Homo sapiens
aaacacacatcaaga

SEQ ID NO: 62326 - DNA, 15 bp, Homo sapiens
aaaacacacatcaag

SEQ ID NO: 62327 - DNA, 15 bp, Homo sapiens
taaaacacacatcaa

SEQ ID NO: 62328 - DNA, 15 bp, Homo sapiens
ttaaaacacacatca

SEQ ID NO: 62329 - DNA, 15 bp, Homo sapiens
attaaaacacacatc

SEQ ID NO: 62330 - DNA, 15 bp, Homo sapiens
cattaaaacacacat

SEQ ID NO: 62331 - DNA, 15 bp, Homo sapiens
tcattaaaacacaca

SEQ ID NO: 62332 - DNA, 15 bp, Homo sapiens
ctcattaaaacacac

SEQ ID NO: 62333 - DNA, 15 bp, Homo sapiens
actcattaaaacaca

SEQ ID NO: 62334 - DNA, 15 bp, Homo sapiens
aactcattaaaacac

SEQ ID NO: 62335 - DNA, 15 bp, Homo sapiens
taactcattaaaaca

SEQ ID NO: 62336 - DNA, 15 bp, Homo sapiens
ataactcattaaaac

SEQ ID NO: 62337 - DNA, 15 bp, Homo sapiens
aataactcattaaaa

SEQ ID NO: 62338 - DNA, 15 bp, Homo sapiens
aaataactcattaaa

SEQ ID NO: 62339 - DNA, 15 bp, Homo sapiens
aaaataactcattaa

SEQ ID NO: 62340 - DNA, 15 bp, Homo sapiens
gaaaataactcatta

SEQ ID NO: 62341 - DNA, 15 bp, Homo sapiens
tgaaaataactcatt

SEQ ID NO: 62342 - DNA, 15 bp, Homo sapiens
ttgaaaataactcat

SEQ ID NO: 62343 - DNA, 15 bp, Homo sapiens
tttgaaaataactca

SEQ ID NO: 62344 - DNA, 15 bp, Homo sapiens
ctttgaaaataactc

SEQ ID NO: 62345 - DNA, 15 bp, Homo sapiens
actttgaaaataact

SEQ ID NO: 62346 - DNA, 15 bp, Homo sapiens
aactttgaaaataac

SEQ ID NO: 62347 - DNA, 15 bp, Homo sapiens
caactttgaaaataa

SEQ ID NO: 62348 - DNA, 15 bp, Homo sapiens
acaactttgaaaata

SEQ ID NO: 62349 - DNA, 15 bp, Homo sapiens
cacaactttgaaaat

SEQ ID NO: 62350 - DNA, 15 bp, Homo sapiens
gcacaactttgaaaa

SEQ ID NO: 62351 - DNA, 15 bp, Homo sapiens
tgcacaactttgaaa

SEQ ID NO: 62352 - DNA, 15 bp, Homo sapiens
atgcacaactttgaa

SEQ ID NO: 62353 - DNA, 15 bp, Homo sapiens
aatgcacaactttga

SEQ ID NO: 62354 - DNA, 15 bp, Homo sapiens
taatgcacaactttg

SEQ ID NO: 62355 - DNA, 15 bp, Homo sapiens
ttaatgcacaacttt

SEQ ID NO: 62356 - DNA, 15 bp, Homo sapiens
tttaatgcacaactt

SEQ ID NO: 62357 - DNA, 15 bp, Homo sapiens
gtttaatgcacaact

SEQ ID NO: 62358 - DNA, 15 bp, Homo sapiens
ggtttaatgcacaac

SEQ ID NO: 62359 - DNA, 15 bp, Homo sapiens
tggtttaatgcacaa

SEQ ID NO: 62360 - DNA, 15 bp, Homo sapiens
ttggtttaatgcaca

SEQ ID NO: 62361 - DNA, 15 bp, Homo sapiens
tttggtttaatgcac

SEQ ID NO: 62362 - DNA, 15 bp, Homo sapiens
ctttggtttaatgca

SEQ ID NO: 62363 - DNA, 15 bp, Homo sapiens
actttggtttaatgc

SEQ ID NO: 62364 - DNA, 15 bp, Homo sapiens
aactttggtttaatg

SEQ ID NO: 62365 - DNA, 15 bp, Homo sapiens
caactttggtttaat

SEQ ID NO: 62366 - DNA, 15 bp, Homo sapiens
ccaactttggtttaa

SEQ ID NO: 62367 - DNA, 15 bp, Homo sapiens
gccaactttggttta

SEQ ID NO: 62368 - DNA, 15 bp, Homo sapiens
tgccaactttggttt

SEQ ID NO: 62369 - DNA, 15 bp, Homo sapiens
atgccaactttggtt

SEQ ID NO: 62370 - DNA, 15 bp, Homo sapiens
tatgccaactttggt

SEQ ID NO: 62371 - DNA, 15 bp, Homo sapiens
gtatgccaactttgg

SEQ ID NO: 62372 - DNA, 15 bp, Homo sapiens
agtatgccaactttg

SEQ ID NO: 62373 - DNA, 15 bp, Homo sapiens
cagtatgccaacttt

SEQ ID NO: 62374 - DNA, 15 bp, Homo sapiens
ccagtatgccaactt

SEQ ID NO: 62375 - DNA, 15 bp, Homo sapiens
tccagtatgccaact

SEQ ID NO: 62376 - DNA, 15 bp, Homo sapiens
ttccagtatgccaac

SEQ ID NO: 62377 - DNA, 15 bp, Homo sapiens
cttccagtatgccaa

SEQ ID NO: 62378 - DNA, 15 bp, Homo sapiens
acttccagtatgcca

SEQ ID NO: 62379 - DNA, 15 bp, Homo sapiens
cacttccagtatgcc

SEQ ID NO: 62380 - DNA, 15 bp, Homo sapiens
acacttccagtatgc

SEQ ID NO: 62381 - DNA, 15 bp, Homo sapiens
aacacttccagtatg

SEQ ID NO: 62382 - DNA, 15 bp, Homo sapiens
aaacacttccagtat

SEQ ID NO: 62383 - DNA, 15 bp, Homo sapiens
taaacacttccagta

SEQ ID NO: 62384 - DNA, 15 bp, Homo sapiens
ataaacacttccagt

SEQ ID NO: 62385 - DNA, 15 bp, Homo sapiens
tataaacacttccag

SEQ ID NO: 62386 - DNA, 15 bp, Homo sapiens
atataaacacttcca

SEQ ID NO: 62387 - DNA, 15 bp, Homo sapiens
gatataaacacttcc

SEQ ID NO: 62388 - DNA, 15 bp, Homo sapiens
tgatataaacacttc

SEQ ID NO: 62389 - DNA, 15 bp, Homo sapiens
ttgatataaacactt

SEQ ID NO: 62390 - DNA, 15 bp, Homo sapiens
cttgatataaacact

SEQ ID NO: 62391 - DNA, 15 bp, Homo sapiens
acttgatataaacac

SEQ ID NO: 62392 - DNA, 15 bp, Homo sapiens
aacttgatataaaca

SEQ ID NO: 62393 - DNA, 15 bp, Homo sapiens
gaacttgatataaac

SEQ ID NO: 62394 - DNA, 15 bp, Homo sapiens
ggaacttgatataaa

SEQ ID NO: 62395 - DNA, 15 bp, Homo sapiens
tggaacttgatataa

SEQ ID NO: 62396 - DNA, 15 bp, Homo sapiens
atggaacttgatata

SEQ ID NO: 62397 - DNA, 15 bp, Homo sapiens
aatggaacttgatat

SEQ ID NO: 62398 - DNA, 15 bp, Homo sapiens
aaatggaacttgata

SEQ ID NO: 62399 - DNA, 15 bp, Homo sapiens
caaatggaacttgat

SEQ ID NO: 62400 - DNA, 15 bp, Homo sapiens
ccaaatggaacttga

SEQ ID NO: 62401 - DNA, 15 bp, Homo sapiens
gccaaatggaacttg

SEQ ID NO: 62402 - DNA, 15 bp, Homo sapiens
agccaaatggaactt

SEQ ID NO: 62403 - DNA, 15 bp, Homo sapiens
tagccaaatggaact

SEQ ID NO: 62404 - DNA, 15 bp, Homo sapiens
gtagccaaatggaac

SEQ ID NO: 62405 - DNA, 15 bp, Homo sapiens
agtagccaaatggaa

SEQ ID NO: 62406 - DNA, 15 bp, Homo sapiens
cagtagccaaatgga

SEQ ID NO: 62407 - DNA, 15 bp, Homo sapiens
tcagtagccaaatgg

SEQ ID NO: 62408 - DNA, 15 bp, Homo sapiens
atcagtagccaaatg

SEQ ID NO: 62409 - DNA, 15 bp, Homo sapiens
catcagtagccaaat

SEQ ID NO: 62410 - DNA, 15 bp, Homo sapiens
ccatcagtagccaaa

SEQ ID NO: 62411 - DNA, 15 bp, Homo sapiens
tccatcagtagccaa

SEQ ID NO: 62412 - DNA, 15 bp, Homo sapiens
gtccatcagtagcca

SEQ ID NO: 62413 - DNA, 15 bp, Homo sapiens
tgtccatcagtagcc

SEQ ID NO: 62414 - DNA, 15 bp, Homo sapiens
ttgtccatcagtagc

SEQ ID NO: 62415 - DNA, 15 bp, Homo sapiens
tttgtccatcagtag

SEQ ID NO: 62416 - DNA, 15 bp, Homo sapiens
ttttgtccatcagta

SEQ ID NO: 62417 - DNA, 15 bp, Homo sapiens
tttttgtccatcagt

SEQ ID NO: 62418 - DNA, 15 bp, Homo sapiens
ttttttgtccatcag

SEQ ID NO: 62419 - DNA, 15 bp, Homo sapiens
attttttgtccatca

SEQ ID NO: 62420 - DNA, 15 bp, Homo sapiens
tattttttgtccatc

SEQ ID NO: 62421 - DNA, 15 bp, Homo sapiens
ctattttttgtccat

SEQ ID NO: 62422 - DNA, 15 bp, Homo sapiens
tctattttttgtcca

SEQ ID NO: 62423 - DNA, 15 bp, Homo sapiens
ttctattttttgtcc

SEQ ID NO: 62424 - DNA, 15 bp, Homo sapiens
tttctattttttgtc

SEQ ID NO: 62425 - DNA, 15 bp, Homo sapiens
atttctattttttgt

SEQ ID NO: 62426 - DNA, 15 bp, Homo sapiens
catttctattttttg

SEQ ID NO: 62427 - DNA, 15 bp, Homo sapiens
gcatttctatttttt

SEQ ID NO: 62428 - DNA, 15 bp, Homo sapiens
ggcatttctattttt

SEQ ID NO: 62429 - DNA, 15 bp, Homo sapiens
aggcatttctatttt

SEQ ID NO: 62430 - DNA, 15 bp, Homo sapiens
aaggcatttctattt

SEQ ID NO: 62431 - DNA, 15 bp, Homo sapiens
gaaggcatttctatt

SEQ ID NO: 62432 - DNA, 15 bp, Homo sapiens
ggaaggcatttctat

SEQ ID NO: 62433 - DNA, 15 bp, Homo sapiens
aggaaggcatttcta

SEQ ID NO: 62434 - DNA, 15 bp, Homo sapiens
taggaaggcatttct

SEQ ID NO: 62435 - DNA, 15 bp, Homo sapiens
ataggaaggcatttc

SEQ ID NO: 62436 - DNA, 15 bp, Homo sapiens
cataggaaggcattt

SEQ ID NO: 62437 - DNA, 15 bp, Homo sapiens
ccataggaaggcatt

SEQ ID NO: 62438 - DNA, 15 bp, Homo sapiens
tccataggaaggcat

SEQ ID NO: 62439 - DNA, 15 bp, Homo sapiens
ctccataggaaggca

SEQ ID NO: 62440 - DNA, 15 bp, Homo sapiens
tctccataggaaggc

SEQ ID NO: 62441 - DNA, 15 bp, Homo sapiens
ctctccataggaagg

SEQ ID NO: 62442 - DNA, 15 bp, Homo sapiens
actctccataggaag

SEQ ID NO: 62443 - DNA, 15 bp, Homo sapiens
tactctccataggaa

SEQ ID NO: 62444 - DNA, 15 bp, Homo sapiens
atactctccatagga

SEQ ID NO: 62445 - DNA, 15 bp, Homo sapiens
aatactctccatagg

SEQ ID NO: 62446 - DNA, 15 bp, Homo sapiens
aaatactctccatag

SEQ ID NO: 62447 - DNA, 15 bp, Homo sapiens
aaaatactctccata

SEQ ID NO: 62448 - DNA, 15 bp, Homo sapiens
aaaaatactctccat

SEQ ID NO: 62449 - DNA, 15 bp, Homo sapiens
gaaaaatactctcca

SEQ ID NO: 62450 - DNA, 15 bp, Homo sapiens
ggaaaaatactctcc

SEQ ID NO: 62451 - DNA, 15 bp, Homo sapiens
aggaaaaatactctc

SEQ ID NO: 62452 - DNA, 15 bp, Homo sapiens
aaggaaaaatactct

SEQ ID NO: 62453 - DNA, 15 bp, Homo sapiens
aaaggaaaaatactc

SEQ ID NO: 62454 - DNA, 15 bp, Homo sapiens
taaaggaaaaatact

SEQ ID NO: 62455 - DNA, 15 bp, Homo sapiens
ttaaaggaaaaatac

SEQ ID NO: 62456 - DNA, 15 bp, Homo sapiens
tttaaaggaaaaata

SEQ ID NO: 62457 - DNA, 15 bp, Homo sapiens
ttttaaaggaaaaat

SEQ ID NO: 62458 - DNA, 15 bp, Homo sapiens
tttttaaaggaaaaa

SEQ ID NO: 62459 - DNA, 15 bp, Homo sapiens
ttttttaaaggaaaa

SEQ ID NO: 62460 - DNA, 15 bp, Homo sapiens
attttttaaaggaaa

SEQ ID NO: 62461 - DNA, 15 bp, Homo sapiens
aattttttaaaggaa

SEQ ID NO: 62462 - DNA, 15 bp, Homo sapiens
taattttttaaagga

SEQ ID NO: 62463 - DNA, 15 bp, Homo sapiens
ttaattttttaaagg

SEQ ID NO: 62464 - DNA, 15 bp, Homo sapiens
tttaattttttaaag

SEQ ID NO: 62465 - DNA, 15 bp, Homo sapiens
ttttaattttttaaa

SEQ ID NO: 62466 - DNA, 15 bp, Homo sapiens
tttttaattttttaa

SEQ ID NO: 62467 - DNA, 15 bp, Homo sapiens
ctttttaatttttta

SEQ ID NO: 62468 - DNA, 15 bp, Homo sapiens
cctttttaatttttt

SEQ ID NO: 62469 - DNA, 15 bp, Homo sapiens
acctttttaattttt

SEQ ID NO: 62470 - DNA, 15 bp, Homo sapiens
aacctttttaatttt

SEQ ID NO: 62471 - DNA, 15 bp, Homo sapiens
taacctttttaattt

SEQ ID NO: 62472 - DNA, 15 bp, Homo sapiens
ttaacctttttaatt

SEQ ID NO: 62473 - DNA, 15 bp, Homo sapiens
attaacctttttaat

SEQ ID NO: 62474 - DNA, 15 bp, Homo sapiens
aattaacctttttaa

SEQ ID NO: 62475 - DNA, 15 bp, Homo sapiens
taattaaccttttta

SEQ ID NO: 62476 - DNA, 15 bp, Homo sapiens
ataattaaccttttt

SEQ ID NO: 62477 - DNA, 15 bp, Homo sapiens
aataattaacctttt

SEQ ID NO: 62478 - DNA, 15 bp, Homo sapiens
aaataattaaccttt

SEQ ID NO: 62479 - DNA, 15 bp, Homo sapiens
aaaataattaacctt

SEQ ID NO: 62480 - DNA, 15 bp, Homo sapiens
caaaataattaacct

SEQ ID NO: 62481 - DNA, 15 bp, Homo sapiens
tcaaaataattaacc

SEQ ID NO: 62482 - DNA, 15 bp, Homo sapiens
gtcaaaataattaac

SEQ ID NO: 62483 - DNA, 15 bp, Homo sapiens
agtcaaaataattaa

SEQ ID NO: 62484 - DNA, 15 bp, Homo sapiens
tagtcaaaataatta

SEQ ID NO: 62485 - DNA, 15 bp, Homo sapiens
atagtcaaaataatt

SEQ ID NO: 62486 - DNA, 15 bp, Homo sapiens
aatagtcaaaataat

SEQ ID NO: 62487 - DNA, 15 bp, Homo sapiens
gaatagtcaaaataa

SEQ ID NO: 62488 - DNA, 15 bp, Homo sapiens
cgaatagtcaaaata

SEQ ID NO: 62489 - DNA, 15 bp, Homo sapiens
ccgaatagtcaaaat

SEQ ID NO: 62490 - DNA, 15 bp, Homo sapiens
accgaatagtcaaaa

SEQ ID NO: 62491 - DNA, 15 bp, Homo sapiens
aaccgaatagtcaaa

SEQ ID NO: 62492 - DNA, 15 bp, Homo sapiens
aaaccgaatagtcaa

SEQ ID NO: 62493 - DNA, 15 bp, Homo sapiens
aaaaccgaatagtca

SEQ ID NO: 62494 - DNA, 15 bp, Homo sapiens
taaaaccgaatagtc

SEQ ID NO: 62495 - DNA, 15 bp, Homo sapiens
ttaaaaccgaatagt

SEQ ID NO: 62496 - DNA, 15 bp, Homo sapiens
tttaaaaccgaatag

SEQ ID NO: 62497 - DNA, 15 bp, Homo sapiens
gtttaaaaccgaata

SEQ ID NO: 62498 - DNA, 15 bp, Homo sapiens
agtttaaaaccgaat

SEQ ID NO: 62499 - DNA, 15 bp, Homo sapiens
aagtttaaaaccgaa

SEQ ID NO: 62500 - DNA, 15 bp, Homo sapiens
aaagtttaaaaccga

SEQ ID NO: 62501 - DNA, 15 bp, Homo sapiens
aaaagtttaaaaccg

SEQ ID NO: 62502 - DNA, 15 bp, Homo sapiens
aaaaagtttaaaacc

SEQ ID NO: 62503 - DNA, 15 bp, Homo sapiens
taaaaagtttaaaac

SEQ ID NO: 62504 - DNA, 15 bp, Homo sapiens
ataaaaagtttaaaa

SEQ ID NO: 62505 - DNA, 15 bp, Homo sapiens
aataaaaagtttaaa

SEQ ID NO: 62506 - DNA, 15 bp, Homo sapiens
gaataaaaagtttaa

SEQ ID NO: 62507 - DNA, 15 bp, Homo sapiens
tgaataaaaagttta

SEQ ID NO: 62508 - DNA, 15 bp, Homo sapiens
ttgaataaaaagttt

SEQ ID NO: 62509 - DNA, 15 bp, Homo sapiens
gttgaataaaaagtt

SEQ ID NO: 62510 - DNA, 15 bp, Homo sapiens
tgttgaataaaaagt

SEQ ID NO: 62511 - DNA, 15 bp, Homo sapiens
ttgttgaataaaaag

SEQ ID NO: 62512 - DNA, 15 bp, Homo sapiens
tttgttgaataaaaa

SEQ ID NO: 62513 - DNA, 15 bp, Homo sapiens
atttgttgaataaaa

SEQ ID NO: 62514 - DNA, 15 bp, Homo sapiens
tatttgttgaataaa

SEQ ID NO: 62515 - DNA, 15 bp, Homo sapiens
gtatttgttgaataa

SEQ ID NO: 62516 - DNA, 15 bp, Homo sapiens
ggtatttgttgaata

SEQ ID NO: 62517 - DNA, 15 bp, Homo sapiens
tggtatttgttgaat

SEQ ID NO: 62518 - DNA, 15 bp, Homo sapiens
ttggtatttgttgaa

SEQ ID NO: 62519 - DNA, 15 bp, Homo sapiens
cttggtatttgttga

SEQ ID NO: 62520 - DNA, 15 bp, Homo sapiens
acttggtatttgttg

SEQ ID NO: 62521 - DNA, 15 bp, Homo sapiens
gacttggtatttgtt

SEQ ID NO: 62522 - DNA, 15 bp, Homo sapiens
ggacttggtatttgt

SEQ ID NO: 62523 - DNA, 15 bp, Homo sapiens
gggacttggtatttg

SEQ ID NO: 62524 - DNA, 15 bp, Homo sapiens
agggacttggtattt

SEQ ID NO: 62525 - DNA, 15 bp, Homo sapiens
cagggacttggtatt

SEQ ID NO: 62526 - DNA, 15 bp, Homo sapiens
gcagggacttggtat

SEQ ID NO: 62527 - DNA, 15 bp, Homo sapiens
agcagggacttggta

SEQ ID NO: 62528 - DNA, 15 bp, Homo sapiens
cagcagggacttggt

SEQ ID NO: 62529 - DNA, 15 bp, Homo sapiens
acagcagggacttgg

SEQ ID NO: 62530 - DNA, 15 bp, Homo sapiens
tacagcagggacttg

SEQ ID NO: 62531 - DNA, 15 bp, Homo sapiens
atacagcagggactt

SEQ ID NO: 62532 - DNA, 15 bp, Homo sapiens
tatacagcagggact

SEQ ID NO: 62533 - DNA, 15 bp, Homo sapiens
atatacagcagggac

SEQ ID NO: 62534 - DNA, 15 bp, Homo sapiens
tatatacagcaggga

SEQ ID NO: 62535 - DNA, 15 bp, Homo sapiens
atatatacagcaggg

SEQ ID NO: 62536 - DNA, 15 bp, Homo sapiens
catatatacagcagg

SEQ ID NO: 62537 - DNA, 15 bp, Homo sapiens
ccatatatacagcag

SEQ ID NO: 62538 - DNA, 15 bp, Homo sapiens
cccatatatacagca

SEQ ID NO: 62539 - DNA, 15 bp, Homo sapiens
acccatatatacagc

SEQ ID NO: 62540 - DNA, 15 bp, Homo sapiens
aacccatatatacag

SEQ ID NO: 62541 - DNA, 15 bp, Homo sapiens
aaacccatatataca

SEQ ID NO: 62542 - DNA, 15 bp, Homo sapiens
caaacccatatatac

SEQ ID NO: 62543 - DNA, 15 bp, Homo sapiens
ccaaacccatatata

SEQ ID NO: 62544 - DNA, 15 bp, Homo sapiens
tccaaacccatatat

SEQ ID NO: 62545 - DNA, 15 bp, Homo sapiens
ttccaaacccatata

SEQ ID NO: 62546 - DNA, 15 bp, Homo sapiens
attccaaacccatat

SEQ ID NO: 62547 - DNA, 15 bp, Homo sapiens
tattccaaacccata

SEQ ID NO: 62548 - DNA, 15 bp, Homo sapiens
gtattccaaacccat

SEQ ID NO: 62549 - DNA, 15 bp, Homo sapiens
tgtattccaaaccca

SEQ ID NO: 62550 - DNA, 15 bp, Homo sapiens
atgtattccaaaccc

SEQ ID NO: 62551 - DNA, 15 bp, Homo sapiens
aatgtattccaaacc

SEQ ID NO: 62552 - DNA, 15 bp, Homo sapiens
taatgtattccaaac

SEQ ID NO: 62553 - DNA, 15 bp, Homo sapiens
ctaatgtattccaaa

SEQ ID NO: 62554 - DNA, 15 bp, Homo sapiens
actaatgtattccaa

SEQ ID NO: 62555 - DNA, 15 bp, Homo sapiens
cactaatgtattcca

SEQ ID NO: 62556 - DNA, 15 bp, Homo sapiens
tcactaatgtattcc

SEQ ID NO: 62557 - DNA, 15 bp, Homo sapiens
atcactaatgtattc

SEQ ID NO: 62558 - DNA, 15 bp, Homo sapiens
gatcactaatgtatt

SEQ ID NO: 62559 - DNA, 15 bp, Homo sapiens
tgatcactaatgtat

SEQ ID NO: 62560 - DNA, 15 bp, Homo sapiens
ttgatcactaatgta

SEQ ID NO: 62561 - DNA, 15 bp, Homo sapiens
tttgatcactaatgt

SEQ ID NO: 62562 - DNA, 15 bp, Homo sapiens
ttttgatcactaatg

SEQ ID NO: 62563 - DNA, 15 bp, Homo sapiens
gttttgatcactaat

SEQ ID NO: 62564 - DNA, 15 bp, Homo sapiens
tgttttgatcactaa

SEQ ID NO: 62565 - DNA, 15 bp, Homo sapiens
gtgttttgatcacta

SEQ ID NO: 62566 - DNA, 15 bp, Homo sapiens
tgtgttttgatcact

SEQ ID NO: 62567 - DNA, 15 bp, Homo sapiens
gtgtgttttgatcac

SEQ ID NO: 62568 - DNA, 15 bp, Homo sapiens
ggtgtgttttgatca

SEQ ID NO: 62569 - DNA, 15 bp, Homo sapiens
gggtgtgttttgatc

SEQ ID NO: 62570 - DNA, 15 bp, Homo sapiens
agggtgtgttttgat

SEQ ID NO: 62571 - DNA, 15 bp, Homo sapiens
gagggtgtgttttga

SEQ ID NO: 62572 - DNA, 15 bp, Homo sapiens
agagggtgtgttttg

SEQ ID NO: 62573 - DNA, 15 bp, Homo sapiens
tagagggtgtgtttt

SEQ ID NO: 62574 - DNA, 15 bp, Homo sapiens
atagagggtgtgttt

SEQ ID NO: 62575 - DNA, 15 bp, Homo sapiens
gatagagggtgtgtt

SEQ ID NO: 62576 - DNA, 15 bp, Homo sapiens
ggatagagggtgtgt

SEQ ID NO: 62577 - DNA, 15 bp, Homo sapiens
gggatagagggtgtg

SEQ ID NO: 62578 - DNA, 15 bp, Homo sapiens
agggatagagggtgt

SEQ ID NO: 62579 - DNA, 15 bp, Homo sapiens
cagggatagagggtg

SEQ ID NO: 62580 - DNA, 15 bp, Homo sapiens
gcagggatagagggt

SEQ ID NO: 62581 - DNA, 15 bp, Homo sapiens
ggcagggatagaggg

SEQ ID NO: 62582 - DNA, 15 bp, Homo sapiens
gggcagggatagagg

SEQ ID NO: 62583 - DNA, 15 bp, Homo sapiens
agggcagggatagag

SEQ ID NO: 62584 - DNA, 15 bp, Homo sapiens
aagggcagggataga

SEQ ID NO: 62585 - DNA, 15 bp, Homo sapiens
caagggcagggatag

SEQ ID NO: 62586 - DNA, 15 bp, Homo sapiens
tcaagggcagggata

SEQ ID NO: 62587 - DNA, 15 bp, Homo sapiens
ttcaagggcagggat

SEQ ID NO: 62588 - DNA, 15 bp, Homo sapiens
cttcaagggcaggga

SEQ ID NO: 62589 - DNA, 15 bp, Homo sapiens
tcttcaagggcaggg

SEQ ID NO: 62590 - DNA, 15 bp, Homo sapiens
ctcttcaagggcagg

SEQ ID NO: 62591 - DNA, 15 bp, Homo sapiens
actcttcaagggcag

SEQ ID NO: 62592 - DNA, 15 bp, Homo sapiens
aactcttcaagggca

SEQ ID NO: 62593 - DNA, 15 bp, Homo sapiens
aaactcttcaagggc

SEQ ID NO: 62594 - DNA, 15 bp, Homo sapiens
taaactcttcaaggg

SEQ ID NO: 62595 - DNA, 15 bp, Homo sapiens
gtaaactcttcaagg

SEQ ID NO: 62596 - DNA, 15 bp, Homo sapiens
tgtaaactcttcaag

SEQ ID NO: 62597 - DNA, 15 bp, Homo sapiens
gtgtaaactcttcaa

SEQ ID NO: 62598 - DNA, 15 bp, Homo sapiens
agtgtaaactcttca

SEQ ID NO: 62599 - DNA, 15 bp, Homo sapiens
gagtgtaaactcttc

SEQ ID NO: 62600 - DNA, 15 bp, Homo sapiens
ggagtgtaaactctt

SEQ ID NO: 62601 - DNA, 15 bp, Homo sapiens
tggagtgtaaactct

SEQ ID NO: 62602 - DNA, 15 bp, Homo sapiens
ctggagtgtaaactc

SEQ ID NO: 62603 - DNA, 15 bp, Homo sapiens
actggagtgtaaact

SEQ ID NO: 62604 - DNA, 15 bp, Homo sapiens
tactggagtgtaaac

SEQ ID NO: 62605 - DNA, 15 bp, Homo sapiens
ctactggagtgtaaa

SEQ ID NO: 62606 - DNA, 15 bp, Homo sapiens
tctactggagtgtaa

SEQ ID NO: 62607 - DNA, 15 bp, Homo sapiens
ctctactggagtgta

SEQ ID NO: 62608 - DNA, 15 bp, Homo sapiens
cctctactggagtgt

SEQ ID NO: 62609 - DNA, 15 bp, Homo sapiens
tcctctactggagtg

SEQ ID NO: 62610 - DNA, 15 bp, Homo sapiens
ttcctctactggagt

SEQ ID NO: 62611 - DNA, 15 bp, Homo sapiens
tttcctctactggag

SEQ ID NO: 62612 - DNA, 15 bp, Homo sapiens
gtttcctctactgga

SEQ ID NO: 62613 - DNA, 15 bp, Homo sapiens
tgtttcctctactgg

SEQ ID NO: 62614 - DNA, 15 bp, Homo sapiens
ctgtttcctctactg

SEQ ID NO: 62615 - DNA, 15 bp, Homo sapiens
tctgtttcctctact

SEQ ID NO: 62616 - DNA, 15 bp, Homo sapiens
ttctgtttcctctac

SEQ ID NO: 62617 - DNA, 15 bp, Homo sapiens
attctgtttcctcta

SEQ ID NO: 62618 - DNA, 15 bp, Homo sapiens
aattctgtttcctct

SEQ ID NO: 62619 - DNA, 15 bp, Homo sapiens
aaattctgtttcctc

SEQ ID NO: 62620 - DNA, 15 bp, Homo sapiens
taaattctgtttcct

SEQ ID NO: 62621 - DNA, 15 bp, Homo sapiens
gtaaattctgtttcc

SEQ ID NO: 62622 - DNA, 15 bp, Homo sapiens
tgtaaattctgtttc

SEQ ID NO: 62623 - DNA, 15 bp, Homo sapiens
atgtaaattctgttt

SEQ ID NO: 62624 - DNA, 15 bp, Homo sapiens
aatgtaaattctgtt

SEQ ID NO: 62625 - DNA, 15 bp, Homo sapiens
taatgtaaattctgt

SEQ ID NO: 62626 - DNA, 15 bp, Homo sapiens
ttaatgtaaattctg

SEQ ID NO: 62627 - DNA, 15 bp, Homo sapiens
gttaatgtaaattct

SEQ ID NO: 62628 - DNA, 15 bp, Homo sapiens
tgttaatgtaaattc

SEQ ID NO: 62629 - DNA, 15 bp, Homo sapiens
ttgttaatgtaaatt

SEQ ID NO: 62630 - DNA, 15 bp, Homo sapiens
attgttaatgtaaat

SEQ ID NO: 62631 - DNA, 15 bp, Homo sapiens
aattgttaatgtaaa

SEQ ID NO: 62632 - DNA, 15 bp, Homo sapiens
taattgttaatgtaa

SEQ ID NO: 62633 - DNA, 15 bp, Homo sapiens
ataattgttaatgta

SEQ ID NO: 62634 - DNA, 15 bp, Homo sapiens
tataattgttaatgt

SEQ ID NO: 62635 - DNA, 15 bp, Homo sapiens
ttataattgttaatg

SEQ ID NO: 62636 - DNA, 15 bp, Homo sapiens
tttataattgttaat

SEQ ID NO: 62637 - DNA, 15 bp, Homo sapiens
atttataattgttaa

SEQ ID NO: 62638 - DNA, 15 bp, Homo sapiens
aatttataattgtta

SEQ ID NO: 62639 - DNA, 15 bp, Homo sapiens
caatttataattgtt

SEQ ID NO: 62640 - DNA, 15 bp, Homo sapiens
acaatttataattgt

SEQ ID NO: 62641 - DNA, 15 bp, Homo sapiens
cacaatttataattg

SEQ ID NO: 62642 - DNA, 15 bp, Homo sapiens
tcacaatttataatt

SEQ ID NO: 62643 - DNA, 15 bp, Homo sapiens
atcacaatttataat

SEQ ID NO: 62644 - DNA, 15 bp, Homo sapiens
tatcacaatttataa

SEQ ID NO: 62645 - DNA, 15 bp, Homo sapiens
gtatcacaatttata

SEQ ID NO: 62646 - DNA, 15 bp, Homo sapiens
tgtatcacaatttat

SEQ ID NO: 62647 - DNA, 15 bp, Homo sapiens
atgtatcacaattta

SEQ ID NO: 62648 - DNA, 15 bp, Homo sapiens
catgtatcacaattt

SEQ ID NO: 62649 - DNA, 15 bp, Homo sapiens
gcatgtatcacaatt

SEQ ID NO: 62650 - DNA, 15 bp, Homo sapiens
agcatgtatcacaat

SEQ ID NO: 62651 - DNA, 15 bp, Homo sapiens
cagcatgtatcacaa

SEQ ID NO: 62652 - DNA, 15 bp, Homo sapiens
acagcatgtatcaca

SEQ ID NO: 62653 - DNA, 15 bp, Homo sapiens
cacagcatgtatcac

SEQ ID NO: 62654 - DNA, 15 bp, Homo sapiens
ccacagcatgtatca

SEQ ID NO: 62655 - DNA, 15 bp, Homo sapiens
tccacagcatgtatc

SEQ ID NO: 62656 - DNA, 15 bp, Homo sapiens
ttccacagcatgtat

SEQ ID NO: 62657 - DNA, 15 bp, Homo sapiens
tttccacagcatgta

SEQ ID NO: 62658 - DNA, 15 bp, Homo sapiens
ctttccacagcatgt

SEQ ID NO: 62659 - DNA, 15 bp, Homo sapiens
actttccacagcatg

SEQ ID NO: 62660 - DNA, 15 bp, Homo sapiens
cactttccacagcat

SEQ ID NO: 62661 - DNA, 15 bp, Homo sapiens
tcactttccacagca

SEQ ID NO: 62662 - DNA, 15 bp, Homo sapiens
ctcactttccacagc

SEQ ID NO: 62663 - DNA, 15 bp, Homo sapiens
cctcactttccacag

SEQ ID NO: 62664 - DNA, 15 bp, Homo sapiens
acctcactttccaca

SEQ ID NO: 62665 - DNA, 15 bp, Homo sapiens
cacctcactttccac

SEQ ID NO: 62666 - DNA, 15 bp, Homo sapiens
gcacctcactttcca

SEQ ID NO: 62667 - DNA, 15 bp, Homo sapiens
tgcacctcactttcc

SEQ ID NO: 62668 - DNA, 15 bp, Homo sapiens
atgcacctcactttc

SEQ ID NO: 62669 - DNA, 15 bp, Homo sapiens
catgcacctcacttt

SEQ ID NO: 62670 - DNA, 15 bp, Homo sapiens
acatgcacctcactt

SEQ ID NO: 62671 - DNA, 15 bp, Homo sapiens
cacatgcacctcact

SEQ ID NO: 62672 - DNA, 15 bp, Homo sapiens
tcacatgcacctcac

SEQ ID NO: 62673 - DNA, 15 bp, Homo sapiens
atcacatgcacctca

SEQ ID NO: 62674 - DNA, 15 bp, Homo sapiens
tatcacatgcacctc

SEQ ID NO: 62675 - DNA, 15 bp, Homo sapiens
ttatcacatgcacct

SEQ ID NO: 62676 - DNA, 15 bp, Homo sapiens
attatcacatgcacc

SEQ ID NO: 62677 - DNA, 15 bp, Homo sapiens
cattatcacatgcac

SEQ ID NO: 62678 - DNA, 15 bp, Homo sapiens
ccattatcacatgca

SEQ ID NO: 62679 - DNA, 15 bp, Homo sapiens
accattatcacatgc

SEQ ID NO: 62680 - DNA, 15 bp, Homo sapiens
aaccattatcacatg

SEQ ID NO: 62681 - DNA, 15 bp, Homo sapiens
taaccattatcacat

SEQ ID NO: 62682 - DNA, 15 bp, Homo sapiens
ataaccattatcaca

SEQ ID NO: 62683 - DNA, 15 bp, Homo sapiens
gataaccattatcac

SEQ ID NO: 62684 - DNA, 15 bp, Homo sapiens
tgataaccattatca

SEQ ID NO: 62685 - DNA, 15 bp, Homo sapiens
ttgataaccattatc

SEQ ID NO: 62686 - DNA, 15 bp, Homo sapiens
tttgataaccattat

SEQ ID NO: 62687 - DNA, 15 bp, Homo sapiens
gtttgataaccatta

SEQ ID NO: 62688 - DNA, 15 bp, Homo sapiens
tgtttgataaccatt

SEQ ID NO: 62689 - DNA, 15 bp, Homo sapiens
atgtttgataaccat

SEQ ID NO: 62690 - DNA, 15 bp, Homo sapiens
aatgtttgataacca

SEQ ID NO: 62691 - DNA, 15 bp, Homo sapiens
taatgtttgataacc

SEQ ID NO: 62692 - DNA, 15 bp, Homo sapiens
ataatgtttgataac

SEQ ID NO: 62693 - DNA, 15 bp, Homo sapiens
cataatgtttgataa

SEQ ID NO: 62694 - DNA, 15 bp, Homo sapiens
gcataatgtttgata

SEQ ID NO: 62695 - DNA, 15 bp, Homo sapiens
agcataatgtttgat

SEQ ID NO: 62696 - DNA, 15 bp, Homo sapiens
gagcataatgtttga

SEQ ID NO: 62697 - DNA, 15 bp, Homo sapiens
ggagcataatgtttg

SEQ ID NO: 62698 - DNA, 15 bp, Homo sapiens
gggagcataatgttt

SEQ ID NO: 62699 - DNA, 15 bp, Homo sapiens
ggggagcataatgtt

SEQ ID NO: 62700 - DNA, 15 bp, Homo sapiens
tggggagcataatgt

SEQ ID NO: 62701 - DNA, 15 bp, Homo sapiens
ttggggagcataatg

SEQ ID NO: 62702 - DNA, 15 bp, Homo sapiens
tttggggagcataat

SEQ ID NO: 62703 - DNA, 15 bp, Homo sapiens
ttttggggagcataa

SEQ ID NO: 62704 - DNA, 15 bp, Homo sapiens
attttggggagcata

SEQ ID NO: 62705 - DNA, 15 bp, Homo sapiens
aattttggggagcat

SEQ ID NO: 62706 - DNA, 15 bp, Homo sapiens
aaattttggggagca

SEQ ID NO: 62707 - DNA, 15 bp, Homo sapiens
gaaattttggggagc

SEQ ID NO: 62708 - DNA, 15 bp, Homo sapiens
ggaaattttggggag

SEQ ID NO: 62709 - DNA, 15 bp, Homo sapiens
tggaaattttgggga

SEQ ID NO: 62710 - DNA, 15 bp, Homo sapiens
atggaaattttgggg

SEQ ID NO: 62711 - DNA, 15 bp, Homo sapiens
gatggaaattttggg

SEQ ID NO: 62712 - DNA, 15 bp, Homo sapiens
tgatggaaattttgg

SEQ ID NO: 62713 - DNA, 15 bp, Homo sapiens
gtgatggaaattttg

SEQ ID NO: 62714 - DNA, 15 bp, Homo sapiens
ggtgatggaaatttt

SEQ ID NO: 62715 - DNA, 15 bp, Homo sapiens
aggtgatggaaattt

SEQ ID NO: 62716 - DNA, 15 bp, Homo sapiens
aaggtgatggaaatt

SEQ ID NO: 62717 - DNA, 15 bp, Homo sapiens
caaggtgatggaaat

SEQ ID NO: 62718 - DNA, 15 bp, Homo sapiens
gcaaggtgatggaaa

SEQ ID NO: 62719 - DNA, 15 bp, Homo sapiens
tgcaaggtgatggaa

SEQ ID NO: 62720 - DNA, 15 bp, Homo sapiens
ctgcaaggtgatgga

SEQ ID NO: 62721 - DNA, 15 bp, Homo sapiens
actgcaaggtgatgg

SEQ ID NO: 62722 - DNA, 15 bp, Homo sapiens
aactgcaaggtgatg

SEQ ID NO: 62723 - DNA, 15 bp, Homo sapiens
caactgcaaggtgat

SEQ ID NO: 62724 - DNA, 15 bp, Homo sapiens
tcaactgcaaggtga

SEQ ID NO: 62725 - DNA, 15 bp, Homo sapiens
ttcaactgcaaggtg

SEQ ID NO: 62726 - DNA, 15 bp, Homo sapiens
attcaactgcaaggt

SEQ ID NO: 62727 - DNA, 15 bp, Homo sapiens
cattcaactgcaagg

SEQ ID NO: 62728 - DNA, 15 bp, Homo sapiens
tcattcaactgcaag

SEQ ID NO: 62729 - DNA, 15 bp, Homo sapiens
ctcattcaactgcaa

SEQ ID NO: 62730 - DNA, 15 bp, Homo sapiens
cctcattcaactgca

SEQ ID NO: 62731 - DNA, 15 bp, Homo sapiens
gcctcattcaactgc

SEQ ID NO: 62732 - DNA, 15 bp, Homo sapiens
ggcctcattcaactg

SEQ ID NO: 62733 - DNA, 15 bp, Homo sapiens
aggcctcattcaact

SEQ ID NO: 62734 - DNA, 15 bp, Homo sapiens
taggcctcattcaac

SEQ ID NO: 62735 - DNA, 15 bp, Homo sapiens
ataggcctcattcaa

SEQ ID NO: 62736 - DNA, 15 bp, Homo sapiens
cataggcctcattca

SEQ ID NO: 62737 - DNA, 15 bp, Homo sapiens
acataggcctcattc

SEQ ID NO: 62738 - DNA, 15 bp, Homo sapiens
tacataggcctcatt

SEQ ID NO: 62739 - DNA, 15 bp, Homo sapiens
ttacataggcctcat

SEQ ID NO: 62740 - DNA, 15 bp, Homo sapiens
gttacataggcctca

SEQ ID NO: 62741 - DNA, 15 bp, Homo sapiens
agttacataggcctc

SEQ ID NO: 62742 - DNA, 15 bp, Homo sapiens
tagttacataggcct

SEQ ID NO: 62743 - DNA, 15 bp, Homo sapiens
ctagttacataggcc

SEQ ID NO: 62744 - DNA, 15 bp, Homo sapiens
actagttacataggc

SEQ ID NO: 62745 - DNA, 15 bp, Homo sapiens
aactagttacatagg

SEQ ID NO: 62746 - DNA, 15 bp, Homo sapiens
aaactagttacatag

SEQ ID NO: 62747 - DNA, 15 bp, Homo sapiens
taaactagttacata

SEQ ID NO: 62748 - DNA, 15 bp, Homo sapiens
ataaactagttacat

SEQ ID NO: 62749 - DNA, 15 bp, Homo sapiens
aataaactagttaca

SEQ ID NO: 62750 - DNA, 15 bp, Homo sapiens
gaataaactagttac

SEQ ID NO: 62751 - DNA, 15 bp, Homo sapiens
agaataaactagtta

SEQ ID NO: 62752 - DNA, 15 bp, Homo sapiens
tagaataaactagtt

SEQ ID NO: 62753 - DNA, 15 bp, Homo sapiens
ttagaataaactagt

SEQ ID NO: 62754 - DNA, 15 bp, Homo sapiens
attagaataaactag

SEQ ID NO: 62755 - DNA, 15 bp, Homo sapiens
cattagaataaacta

SEQ ID NO: 62756 - DNA, 15 bp, Homo sapiens
acattagaataaact

SEQ ID NO: 62757 - DNA, 15 bp, Homo sapiens
tacattagaataaac

SEQ ID NO: 62758 - DNA, 15 bp, Homo sapiens
ttacattagaataaa

SEQ ID NO: 62759 - DNA, 15 bp, Homo sapiens
attacattagaataa

SEQ ID NO: 62760 - DNA, 15 bp, Homo sapiens
tattacattagaata

SEQ ID NO: 62761 - DNA, 15 bp, Homo sapiens
gtattacattagaat

SEQ ID NO: 62762 - DNA, 15 bp, Homo sapiens
tgtattacattagaa

SEQ ID NO: 62763 - DNA, 15 bp, Homo sapiens
ctgtattacattaga

SEQ ID NO: 62764 - DNA, 15 bp, Homo sapiens
tctgtattacattag

SEQ ID NO: 62765 - DNA, 15 bp, Homo sapiens
ttctgtattacatta

SEQ ID NO: 62766 - DNA, 15 bp, Homo sapiens
tttctgtattacatt

SEQ ID NO: 62767 - DNA, 15 bp, Homo sapiens
ctttctgtattacat

SEQ ID NO: 62768 - DNA, 15 bp, Homo sapiens
actttctgtattaca

SEQ ID NO: 62769 - DNA, 15 bp, Homo sapiens
tactttctgtattac

SEQ ID NO: 62770 - DNA, 15 bp, Homo sapiens
ctactttctgtatta

SEQ ID NO: 62771 - DNA, 15 bp, Homo sapiens
actactttctgtatt

SEQ ID NO: 62772 - DNA, 15 bp, Homo sapiens
cactactttctgtat

SEQ ID NO: 62773 - DNA, 15 bp, Homo sapiens
acactactttctgta

SEQ ID NO: 62774 - DNA, 15 bp, Homo sapiens
cacactactttctgt

SEQ ID NO: 62775 - DNA, 15 bp, Homo sapiens
tcacactactttctg

SEQ ID NO: 62776 - DNA, 15 bp, Homo sapiens
gtcacactactttct

SEQ ID NO: 62777 - DNA, 15 bp, Homo sapiens
tgtcacactactttc

SEQ ID NO: 62778 - DNA, 15 bp, Homo sapiens
gtgtcacactacttt

SEQ ID NO: 62779 - DNA, 15 bp, Homo sapiens
agtgtcacactactt

SEQ ID NO: 62780 - DNA, 15 bp, Homo sapiens
gagtgtcacactact

SEQ ID NO: 62781 - DNA, 15 bp, Homo sapiens
ggagtgtcacactac

SEQ ID NO: 62782 - DNA, 15 bp, Homo sapiens
tggagtgtcacacta

SEQ ID NO: 62783 - DNA, 15 bp, Homo sapiens
gtggagtgtcacact

SEQ ID NO: 62784 - DNA, 15 bp, Homo sapiens
agtggagtgtcacac

SEQ ID NO: 62785 - DNA, 15 bp, Homo sapiens
aagtggagtgtcaca

SEQ ID NO: 62786 - DNA, 15 bp, Homo sapiens
aaagtggagtgtcac

SEQ ID NO: 62787 - DNA, 15 bp, Homo sapiens
gaaagtggagtgtca

SEQ ID NO: 62788 - DNA, 15 bp, Homo sapiens
agaaagtggagtgtc

SEQ ID NO: 62789 - DNA, 15 bp, Homo sapiens
cagaaagtggagtgt

SEQ ID NO: 62790 - DNA, 15 bp, Homo sapiens
acagaaagtggagtg

SEQ ID NO: 62791 - DNA, 15 bp, Homo sapiens
tacagaaagtggagt

SEQ ID NO: 62792 - DNA, 15 bp, Homo sapiens
ttacagaaagtggag

SEQ ID NO: 62793 - DNA, 15 bp, Homo sapiens
tttacagaaagtgga

SEQ ID NO: 62794 - DNA, 15 bp, Homo sapiens
ctttacagaaagtgg

SEQ ID NO: 62795 - DNA, 15 bp, Homo sapiens
cctttacagaaagtg

SEQ ID NO: 62796 - DNA, 15 bp, Homo sapiens
gcctttacagaaagt

SEQ ID NO: 62797 - DNA, 15 bp, Homo sapiens
tgcctttacagaaag

SEQ ID NO: 62798 - DNA, 15 bp, Homo sapiens
ttgcctttacagaaa

SEQ ID NO: 62799 - DNA, 15 bp, Homo sapiens
attgcctttacagaa

SEQ ID NO: 62800 - DNA, 15 bp, Homo sapiens
cattgcctttacaga

SEQ ID NO: 62801 - DNA, 15 bp, Homo sapiens
tcattgcctttacag

SEQ ID NO: 62802 - DNA, 15 bp, Homo sapiens
ttcattgcctttaca

SEQ ID NO: 62803 - DNA, 15 bp, Homo sapiens
tttcattgcctttac

SEQ ID NO: 62804 - DNA, 15 bp, Homo sapiens
ttttcattgccttta

SEQ ID NO: 62805 - DNA, 15 bp, Homo sapiens
tttttcattgccttt

SEQ ID NO: 62806 - DNA, 15 bp, Homo sapiens
ttttttcattgcctt

SEQ ID NO: 62807 - DNA, 15 bp, Homo sapiens
tttttttcattgcct

SEQ ID NO: 62808 - DNA, 15 bp, Homo sapiens
atttttttcattgcc

SEQ ID NO: 62809 - DNA, 15 bp, Homo sapiens
aatttttttcattgc

SEQ ID NO: 62810 - DNA, 15 bp, Homo sapiens
aaatttttttcattg

SEQ ID NO: 62811 - DNA, 15 bp, Homo sapiens
taaatttttttcatt

SEQ ID NO: 62812 - DNA, 15 bp, Homo sapiens
gtaaatttttttcat

SEQ ID NO: 62813 - DNA, 15 bp, Homo sapiens
ggtaaatttttttca

SEQ ID NO: 62814 - DNA, 15 bp, Homo sapiens
tggtaaatttttttc

SEQ ID NO: 62815 - DNA, 15 bp, Homo sapiens
atggtaaattttttt

SEQ ID NO: 62816 - DNA, 15 bp, Homo sapiens
gatggtaaatttttt

SEQ ID NO: 62817 - DNA, 15 bp, Homo sapiens
ggatggtaaattttt

SEQ ID NO: 62818 - DNA, 15 bp, Homo sapiens
tggatggtaaatttt

SEQ ID NO: 62819 - DNA, 15 bp, Homo sapiens
ctggatggtaaattt

SEQ ID NO: 62820 - DNA, 15 bp, Homo sapiens
actggatggtaaatt

SEQ ID NO: 62821 - DNA, 15 bp, Homo sapiens
aactggatggtaaat

SEQ ID NO: 62822 - DNA, 15 bp, Homo sapiens
aaactggatggtaaa

SEQ ID NO: 62823 - DNA, 15 bp, Homo sapiens
gaaactggatggtaa

SEQ ID NO: 62824 - DNA, 15 bp, Homo sapiens
agaaactggatggta

SEQ ID NO: 62825 - DNA, 15 bp, Homo sapiens
gagaaactggatggt

SEQ ID NO: 62826 - DNA, 15 bp, Homo sapiens
agagaaactggatgg

SEQ ID NO: 62827 - DNA, 15 bp, Homo sapiens
gagagaaactggatg

SEQ ID NO: 62828 - DNA, 15 bp, Homo sapiens
agagagaaactggat

SEQ ID NO: 62829 - DNA, 15 bp, Homo sapiens
aagagagaaactgga

SEQ ID NO: 62830 - DNA, 15 bp, Homo sapiens
gaagagagaaactgg

SEQ ID NO: 62831 - DNA, 15 bp, Homo sapiens
ggaagagagaaactg

SEQ ID NO: 62832 - DNA, 15 bp, Homo sapiens
gggaagagagaaact

SEQ ID NO: 62833 - DNA, 15 bp, Homo sapiens
ggggaagagagaaac

SEQ ID NO: 62834 - DNA, 15 bp, Homo sapiens
aggggaagagagaaa

SEQ ID NO: 62835 - DNA, 15 bp, Homo sapiens
taggggaagagagaa

SEQ ID NO: 62836 - DNA, 15 bp, Homo sapiens
gtaggggaagagaga

SEQ ID NO: 62837 - DNA, 15 bp, Homo sapiens
agtaggggaagagag

SEQ ID NO: 62838 - DNA, 15 bp, Homo sapiens
cagtaggggaagaga

SEQ ID NO: 62839 - DNA, 15 bp, Homo sapiens
gcagtaggggaagag

SEQ ID NO: 62840 - DNA, 15 bp, Homo sapiens
agcagtaggggaaga

SEQ ID NO: 62841 - DNA, 15 bp, Homo sapiens
cagcagtaggggaag

SEQ ID NO: 62842 - DNA, 15 bp, Homo sapiens
acagcagtaggggaa

SEQ ID NO: 62843 - DNA, 15 bp, Homo sapiens
cacagcagtagggga

SEQ ID NO: 62844 - DNA, 15 bp, Homo sapiens
tcacagcagtagggg

SEQ ID NO: 62845 - DNA, 15 bp, Homo sapiens
atcacagcagtaggg

SEQ ID NO: 62846 - DNA, 15 bp, Homo sapiens
aatcacagcagtagg

SEQ ID NO: 62847 - DNA, 15 bp, Homo sapiens
taatcacagcagtag

SEQ ID NO: 62848 - DNA, 15 bp, Homo sapiens
ttaatcacagcagta

SEQ ID NO: 62849 - DNA, 15 bp, Homo sapiens
cttaatcacagcagt

SEQ ID NO: 62850 - DNA, 15 bp, Homo sapiens
ccttaatcacagcag

SEQ ID NO: 62851 - DNA, 15 bp, Homo sapiens
tccttaatcacagca

SEQ ID NO: 62852 - DNA, 15 bp, Homo sapiens
atccttaatcacagc

SEQ ID NO: 62853 - DNA, 15 bp, Homo sapiens
aatccttaatcacag

SEQ ID NO: 62854 - DNA, 15 bp, Homo sapiens
aaatccttaatcaca

SEQ ID NO: 62855 - DNA, 15 bp, Homo sapiens
aaaatccttaatcac

SEQ ID NO: 62856 - DNA, 15 bp, Homo sapiens
caaaatccttaatca

SEQ ID NO: 62857 - DNA, 15 bp, Homo sapiens
gcaaaatccttaatc

SEQ ID NO: 62858 - DNA, 15 bp, Homo sapiens
tgcaaaatccttaat

SEQ ID NO: 62859 - DNA, 15 bp, Homo sapiens
atgcaaaatccttaa

SEQ ID NO: 62860 - DNA, 15 bp, Homo sapiens
catgcaaaatcctta

SEQ ID NO: 62861 - DNA, 15 bp, Homo sapiens
acatgcaaaatcctt

SEQ ID NO: 62862 - DNA, 15 bp, Homo sapiens
aacatgcaaaatcct

SEQ ID NO: 62863 - DNA, 15 bp, Homo sapiens
gaacatgcaaaatcc

SEQ ID NO: 62864 - DNA, 15 bp, Homo sapiens
agaacatgcaaaatc

SEQ ID NO: 62865 - DNA, 15 bp, Homo sapiens
tagaacatgcaaaat

SEQ ID NO: 62866 - DNA, 15 bp, Homo sapiens
ctagaacatgcaaaa

SEQ ID NO: 62867 - DNA, 15 bp, Homo sapiens
tctagaacatgcaaa

SEQ ID NO: 62868 - DNA, 15 bp, Homo sapiens
atctagaacatgcaa

SEQ ID NO: 62869 - DNA, 15 bp, Homo sapiens
catctagaacatgca

SEQ ID NO: 62870 - DNA, 15 bp, Homo sapiens
ccatctagaacatgc

SEQ ID NO: 62871 - DNA, 15 bp, Homo sapiens
accatctagaacatg

SEQ ID NO: 62872 - DNA, 15 bp, Homo sapiens
caccatctagaacat

SEQ ID NO: 62873 - DNA, 15 bp, Homo sapiens
gcaccatctagaaca

SEQ ID NO: 62874 - DNA, 15 bp, Homo sapiens
tgcaccatctagaac

SEQ ID NO: 62875 - DNA, 15 bp, Homo sapiens
ctgcaccatctagaa

SEQ ID NO: 62876 - DNA, 15 bp, Homo sapiens
gctgcaccatctaga

SEQ ID NO: 62877 - DNA, 15 bp, Homo sapiens
agctgcaccatctag

SEQ ID NO: 62878 - DNA, 15 bp, Homo sapiens
aagctgcaccatcta

SEQ ID NO: 62879 - DNA, 15 bp, Homo sapiens
aaagctgcaccatct

SEQ ID NO: 62880 - DNA, 15 bp, Homo sapiens
caaagctgcaccatc

SEQ ID NO: 62881 - DNA, 15 bp, Homo sapiens
acaaagctgcaccat

SEQ ID NO: 62882 - DNA, 15 bp, Homo sapiens
gacaaagctgcacca

SEQ ID NO: 62883 - DNA, 15 bp, Homo sapiens
tgacaaagctgcacc

SEQ ID NO: 62884 - DNA, 15 bp, Homo sapiens
ctgacaaagctgcac

SEQ ID NO: 62885 - DNA, 15 bp, Homo sapiens
gctgacaaagctgca

SEQ ID NO: 62886 - DNA, 15 bp, Homo sapiens
ggctgacaaagctgc

SEQ ID NO: 62887 - DNA, 15 bp, Homo sapiens
aggctgacaaagctg

SEQ ID NO: 62888 - DNA, 15 bp, Homo sapiens
caggctgacaaagct

SEQ ID NO: 62889 - DNA, 15 bp, Homo sapiens
ccaggctgacaaagc

SEQ ID NO: 62890 - DNA, 15 bp, Homo sapiens
cccaggctgacaaag

SEQ ID NO: 62891 - DNA, 15 bp, Homo sapiens
acccaggctgacaaa

SEQ ID NO: 62892 - DNA, 15 bp, Homo sapiens
gacccaggctgacaa

SEQ ID NO: 62893 - DNA, 15 bp, Homo sapiens
agacccaggctgaca

SEQ ID NO: 62894 - DNA, 15 bp, Homo sapiens
aagacccaggctgac

SEQ ID NO: 62895 - DNA, 15 bp, Homo sapiens
caagacccaggctga

SEQ ID NO: 62896 - DNA, 15 bp, Homo sapiens
tcaagacccaggctg

SEQ ID NO: 62897 - DNA, 15 bp, Homo sapiens
ctcaagacccaggct

SEQ ID NO: 62898 - DNA, 15 bp, Homo sapiens
actcaagacccaggc

SEQ ID NO: 62899 - DNA, 15 bp, Homo sapiens
cactcaagacccagg

SEQ ID NO: 62900 - DNA, 15 bp, Homo sapiens
tcactcaagacccag

SEQ ID NO: 62901 - DNA, 15 bp, Homo sapiens
atcactcaagaccca

SEQ ID NO: 62902 - DNA, 15 bp, Homo sapiens
tatcactcaagaccc

SEQ ID NO: 62903 - DNA, 15 bp, Homo sapiens
gtatcactcaagacc

SEQ ID NO: 62904 - DNA, 15 bp, Homo sapiens
agtatcactcaagac

SEQ ID NO: 62905 - DNA, 15 bp, Homo sapiens
cagtatcactcaaga

SEQ ID NO: 62906 - DNA, 15 bp, Homo sapiens
ccagtatcactcaag

SEQ ID NO: 62907 - DNA, 15 bp, Homo sapiens
tccagtatcactcaa

SEQ ID NO: 62908 - DNA, 15 bp, Homo sapiens
ctccagtatcactca

SEQ ID NO: 62909 - DNA, 15 bp, Homo sapiens
gctccagtatcactc

SEQ ID NO: 62910 - DNA, 15 bp, Homo sapiens
tgctccagtatcact

SEQ ID NO: 62911 - DNA, 15 bp, Homo sapiens
ctgctccagtatcac

SEQ ID NO: 62912 - DNA, 15 bp, Homo sapiens
tctgctccagtatca

SEQ ID NO: 62913 - DNA, 15 bp, Homo sapiens
ttctgctccagtatc

SEQ ID NO: 62914 - DNA, 15 bp, Homo sapiens
gttctgctccagtat

SEQ ID NO: 62915 - DNA, 15 bp, Homo sapiens
agttctgctccagta

SEQ ID NO: 62916 - DNA, 15 bp, Homo sapiens
gagttctgctccagt

SEQ ID NO: 62917 - DNA, 15 bp, Homo sapiens
ggagttctgctccag

SEQ ID NO: 62918 - DNA, 15 bp, Homo sapiens
gggagttctgctcca

SEQ ID NO: 62919 - DNA, 15 bp, Homo sapiens
agggagttctgctcc

SEQ ID NO: 62920 - DNA, 15 bp, Homo sapiens
gagggagttctgctc

SEQ ID NO: 62921 - DNA, 15 bp, Homo sapiens
tgagggagttctgct

SEQ ID NO: 62922 - DNA, 15 bp, Homo sapiens
ttgagggagttctgc

SEQ ID NO: 62923 - DNA, 15 bp, Homo sapiens
tttgagggagttctg

SEQ ID NO: 62924 - DNA, 15 bp, Homo sapiens
atttgagggagttct

SEQ ID NO: 62925 - DNA, 15 bp, Homo sapiens
aatttgagggagttc

SEQ ID NO: 62926 - DNA, 15 bp, Homo sapiens
caatttgagggagtt

SEQ ID NO: 62927 - DNA, 15 bp, Homo sapiens
acaatttgagggagt

SEQ ID NO: 62928 - DNA, 15 bp, Homo sapiens
aacaatttgagggag

SEQ ID NO: 62929 - DNA, 15 bp, Homo sapiens
gaacaatttgaggga

SEQ ID NO: 62930 - DNA, 15 bp, Homo sapiens
ggaacaatttgaggg

SEQ ID NO: 62931 - DNA, 15 bp, Homo sapiens
aggaacaatttgagg

SEQ ID NO: 62932 - DNA, 15 bp, Homo sapiens
aaggaacaatttgag

SEQ ID NO: 62933 - DNA, 15 bp, Homo sapiens
gaaggaacaatttga

SEQ ID NO: 62934 - DNA, 15 bp, Homo sapiens
agaaggaacaatttg

SEQ ID NO: 62935 - DNA, 15 bp, Homo sapiens
cagaaggaacaattt

SEQ ID NO: 62936 - DNA, 15 bp, Homo sapiens
gcagaaggaacaatt

SEQ ID NO: 62937 - DNA, 15 bp, Homo sapiens
ggcagaaggaacaat

SEQ ID NO: 62938 - DNA, 15 bp, Homo sapiens
tggcagaaggaacaa

SEQ ID NO: 62939 - DNA, 15 bp, Homo sapiens
gtggcagaaggaaca

SEQ ID NO: 62940 - DNA, 15 bp, Homo sapiens
cgtggcagaaggaac

SEQ ID NO: 62941 - DNA, 15 bp, Homo sapiens
gcgtggcagaaggaa

SEQ ID NO: 62942 - DNA, 15 bp, Homo sapiens
agcgtggcagaagga

SEQ ID NO: 62943 - DNA, 15 bp, Homo sapiens
tagcgtggcagaagg

SEQ ID NO: 62944 - DNA, 15 bp, Homo sapiens
ttagcgtggcagaag

SEQ ID NO: 62945 - DNA, 15 bp, Homo sapiens
tttagcgtggcagaa

SEQ ID NO: 62946 - DNA, 15 bp, Homo sapiens
gtttagcgtggcaga

SEQ ID NO: 62947 - DNA, 15 bp, Homo sapiens
agtttagcgtggcag

SEQ ID NO: 62948 - DNA, 15 bp, Homo sapiens
aagtttagcgtggca

SEQ ID NO: 62949 - DNA, 15 bp, Homo sapiens
caagtttagcgtggc

SEQ ID NO: 62950 - DNA, 15 bp, Homo sapiens
acaagtttagcgtgg

SEQ ID NO: 62951 - DNA, 15 bp, Homo sapiens
aacaagtttagcgtg

SEQ ID NO: 62952 - DNA, 15 bp, Homo sapiens
taacaagtttagcgt

SEQ ID NO: 62953 - DNA, 15 bp, Homo sapiens
ctaacaagtttagcg

SEQ ID NO: 62954 - DNA, 15 bp, Homo sapiens
tctaacaagtttagc

SEQ ID NO: 62955 - DNA, 15 bp, Homo sapiens
atctaacaagtttag

SEQ ID NO: 62956 - DNA, 15 bp, Homo sapiens
tatctaacaagttta

SEQ ID NO: 62957 - DNA, 15 bp, Homo sapiens
atatctaacaagttt

SEQ ID NO: 62958 - DNA, 15 bp, Homo sapiens
aatatctaacaagtt

SEQ ID NO: 62959 - DNA, 15 bp, Homo sapiens
taatatctaacaagt

SEQ ID NO: 62960 - DNA, 15 bp, Homo sapiens
ctaatatctaacaag

SEQ ID NO: 62961 - DNA, 15 bp, Homo sapiens
gctaatatctaacaa

SEQ ID NO: 62962 - DNA, 15 bp, Homo sapiens
tgctaatatctaaca

SEQ ID NO: 62963 - DNA, 15 bp, Homo sapiens
atgctaatatctaac

SEQ ID NO: 62964 - DNA, 15 bp, Homo sapiens
tatgctaatatctaa

SEQ ID NO: 62965 - DNA, 15 bp, Homo sapiens
ttatgctaatatcta

SEQ ID NO: 62966 - DNA, 15 bp, Homo sapiens
tttatgctaatatct

SEQ ID NO: 62967 - DNA, 15 bp, Homo sapiens
atttatgctaatatc

SEQ ID NO: 62968 - DNA, 15 bp, Homo sapiens
tatttatgctaatat

SEQ ID NO: 62969 - DNA, 15 bp, Homo sapiens
ttatttatgctaata

SEQ ID NO: 62970 - DNA, 15 bp, Homo sapiens
cttatttatgctaat

SEQ ID NO: 62971 - DNA, 15 bp, Homo sapiens
tcttatttatgctaa

SEQ ID NO: 62972 - DNA, 15 bp, Homo sapiens
ttcttatttatgcta

SEQ ID NO: 62973 - DNA, 15 bp, Homo sapiens
tttcttatttatgct

SEQ ID NO: 62974 - DNA, 15 bp, Homo sapiens
atttcttatttatgc

SEQ ID NO: 62975 - DNA, 15 bp, Homo sapiens
tatttcttatttatg

SEQ ID NO: 62976 - DNA, 15 bp, Homo sapiens
ttatttcttatttat

SEQ ID NO: 62977 - DNA, 15 bp, Homo sapiens
tttatttcttattta

SEQ ID NO: 62978 - DNA, 15 bp, Homo sapiens
gtttatttcttattt

SEQ ID NO: 62979 - DNA, 15 bp, Homo sapiens
ggtttatttcttatt

SEQ ID NO: 62980 - DNA, 15 bp, Homo sapiens
tggtttatttcttat

SEQ ID NO: 62981 - DNA, 15 bp, Homo sapiens
atggtttatttctta

SEQ ID NO: 62982 - DNA, 15 bp, Homo sapiens
aatggtttatttctt

SEQ ID NO: 62983 - DNA, 15 bp, Homo sapiens
aaatggtttatttct

SEQ ID NO: 62984 - DNA, 15 bp, Homo sapiens
taaatggtttatttc

SEQ ID NO: 62985 - DNA, 15 bp, Homo sapiens
ctaaatggtttattt

SEQ ID NO: 62986 - DNA, 15 bp, Homo sapiens
tctaaatggtttatt

SEQ ID NO: 62987 - DNA, 15 bp, Homo sapiens
gtctaaatggtttat

SEQ ID NO: 62988 - DNA, 15 bp, Homo sapiens
agtctaaatggttta

SEQ ID NO: 62989 - DNA, 15 bp, Homo sapiens
cagtctaaatggttt

SEQ ID NO: 62990 - DNA, 15 bp, Homo sapiens
tcagtctaaatggtt

SEQ ID NO: 62991 - DNA, 15 bp, Homo sapiens
atcagtctaaatggt

SEQ ID NO: 62992 - DNA, 15 bp, Homo sapiens
tatcagtctaaatgg

SEQ ID NO: 62993 - DNA, 15 bp, Homo sapiens
gtatcagtctaaatg

SEQ ID NO: 62994 - DNA, 15 bp, Homo sapiens
agtatcagtctaaat

SEQ ID NO: 62995 - DNA, 15 bp, Homo sapiens
aagtatcagtctaaa

SEQ ID NO: 62996 - DNA, 15 bp, Homo sapiens
aaagtatcagtctaa

SEQ ID NO: 62997 - DNA, 15 bp, Homo sapiens
caaagtatcagtcta

SEQ ID NO: 62998 - DNA, 15 bp, Homo sapiens
ccaaagtatcagtct

SEQ ID NO: 62999 - DNA, 15 bp, Homo sapiens
cccaaagtatcagtc

SEQ ID NO: 63000 - DNA, 15 bp, Homo sapiens
tcccaaagtatcagt

SEQ ID NO: 63001 - DNA, 15 bp, Homo sapiens
gtcccaaagtatcag

SEQ ID NO: 63002 - DNA, 15 bp, Homo sapiens
tgtcccaaagtatca

SEQ ID NO: 63003 - DNA, 15 bp, Homo sapiens
ttgtcccaaagtatc

SEQ ID NO: 63004 - DNA, 15 bp, Homo sapiens
attgtcccaaagtat

SEQ ID NO: 63005 - DNA, 15 bp, Homo sapiens
aattgtcccaaagta

SEQ ID NO: 63006 - DNA, 15 bp, Homo sapiens
aaattgtcccaaagt

SEQ ID NO: 63007 - DNA, 15 bp, Homo sapiens
aaaattgtcccaaag

SEQ ID NO: 63008 - DNA, 15 bp, Homo sapiens
aaaaattgtcccaaa

SEQ ID NO: 63009 - DNA, 15 bp, Homo sapiens
aaaaaattgtcccaa

SEQ ID NO: 63010 - DNA, 15 bp, Homo sapiens
taaaaaattgtccca

SEQ ID NO: 63011 - DNA, 15 bp, Homo sapiens
ataaaaaattgtccc

SEQ ID NO: 63012 - DNA, 15 bp, Homo sapiens
gataaaaaattgtcc

SEQ ID NO: 63013 - DNA, 15 bp, Homo sapiens
tgataaaaaattgtc

SEQ ID NO: 63014 - DNA, 15 bp, Homo sapiens
gtgataaaaaattgt

SEQ ID NO: 63015 - DNA, 15 bp, Homo sapiens
tgtgataaaaaattg

SEQ ID NO: 63016 - DNA, 15 bp, Homo sapiens
ctgtgataaaaaatt

SEQ ID NO: 63017 - DNA, 15 bp, Homo sapiens
actgtgataaaaaat

SEQ ID NO: 63018 - DNA, 15 bp, Homo sapiens
cactgtgataaaaaa

SEQ ID NO: 63019 - DNA, 15 bp, Homo sapiens
acactgtgataaaaa

SEQ ID NO: 63020 - DNA, 15 bp, Homo sapiens
tacactgtgataaaa

SEQ ID NO: 63021 - DNA, 15 bp, Homo sapiens
ttacactgtgataaa

SEQ ID NO: 63022 - DNA, 15 bp, Homo sapiens
cttacactgtgataa

SEQ ID NO: 63023 - DNA, 15 bp, Homo sapiens
acttacactgtgata

SEQ ID NO: 63024 - DNA, 15 bp, Homo sapiens
aacttacactgtgat

SEQ ID NO: 63025 - DNA, 15 bp, Homo sapiens
taacttacactgtga

SEQ ID NO: 63026 - DNA, 15 bp, Homo sapiens
ataacttacactgtg

SEQ ID NO: 63027 - DNA, 15 bp, Homo sapiens
tataacttacactgt

SEQ ID NO: 63028 - DNA, 15 bp, Homo sapiens
atataacttacactg

SEQ ID NO: 63029 - DNA, 15 bp, Homo sapiens
gatataacttacact

SEQ ID NO: 63030 - DNA, 15 bp, Homo sapiens
ggatataacttacac

SEQ ID NO: 63031 - DNA, 15 bp, Homo sapiens
aggatataacttaca

SEQ ID NO: 63032 - DNA, 15 bp, Homo sapiens
caggatataacttac

SEQ ID NO: 63033 - DNA, 15 bp, Homo sapiens
tcaggatataactta

SEQ ID NO: 63034 - DNA, 15 bp, Homo sapiens
gtcaggatataactt

SEQ ID NO: 63035 - DNA, 15 bp, Homo sapiens
agtcaggatataact

SEQ ID NO: 63036 - DNA, 15 bp, Homo sapiens
tagtcaggatataac

SEQ ID NO: 63037 - DNA, 15 bp, Homo sapiens
ttagtcaggatataa

SEQ ID NO: 63038 - DNA, 15 bp, Homo sapiens
tttagtcaggatata

SEQ ID NO: 63039 - DNA, 15 bp, Homo sapiens
ttttagtcaggatat

SEQ ID NO: 63040 - DNA, 15 bp, Homo sapiens
gttttagtcaggata

SEQ ID NO: 63041 - DNA, 15 bp, Homo sapiens
tgttttagtcaggat

SEQ ID NO: 63042 - DNA, 15 bp, Homo sapiens
ctgttttagtcagga

SEQ ID NO: 63043 - DNA, 15 bp, Homo sapiens
actgttttagtcagg

SEQ ID NO: 63044 - DNA, 15 bp, Homo sapiens
cactgttttagtcag

SEQ ID NO: 63045 - DNA, 15 bp, Homo sapiens
gcactgttttagtca

SEQ ID NO: 63046 - DNA, 15 bp, Homo sapiens
agcactgttttagtc

SEQ ID NO: 63047 - DNA, 15 bp, Homo sapiens
aagcactgttttagt

SEQ ID NO: 63048 - DNA, 15 bp, Homo sapiens
aaagcactgttttag

SEQ ID NO: 63049 - DNA, 15 bp, Homo sapiens
caaagcactgtttta

SEQ ID NO: 63050 - DNA, 15 bp, Homo sapiens
ccaaagcactgtttt

SEQ ID NO: 63051 - DNA, 15 bp, Homo sapiens
tccaaagcactgttt

SEQ ID NO: 63052 - DNA, 15 bp, Homo sapiens
ttccaaagcactgtt

SEQ ID NO: 63053 - DNA, 15 bp, Homo sapiens
tttccaaagcactgt

SEQ ID NO: 63054 - DNA, 15 bp, Homo sapiens
ctttccaaagcactg

SEQ ID NO: 63055 - DNA, 15 bp, Homo sapiens
tctttccaaagcact

SEQ ID NO: 63056 - DNA, 15 bp, Homo sapiens
atctttccaaagcac

SEQ ID NO: 63057 - DNA, 15 bp, Homo sapiens
gatctttccaaagca

SEQ ID NO: 63058 - DNA, 15 bp, Homo sapiens
tgatctttccaaagc

SEQ ID NO: 63059 - DNA, 15 bp, Homo sapiens
ctgatctttccaaag

SEQ ID NO: 63060 - DNA, 15 bp, Homo sapiens
cctgatctttccaaa

SEQ ID NO: 63061 - DNA, 15 bp, Homo sapiens
ccctgatctttccaa

SEQ ID NO: 63062 - DNA, 15 bp, Homo sapiens
tccctgatctttcca

SEQ ID NO: 63063 - DNA, 15 bp, Homo sapiens
ttccctgatctttcc

SEQ ID NO: 63064 - DNA, 15 bp, Homo sapiens
cttccctgatctttc

SEQ ID NO: 63065 - DNA, 15 bp, Homo sapiens
ccttccctgatcttt

SEQ ID NO: 63066 - DNA, 15 bp, Homo sapiens
cccttccctgatctt

SEQ ID NO: 63067 - DNA, 15 bp, Homo sapiens
acccttccctgatct

SEQ ID NO: 63068 - DNA, 15 bp, Homo sapiens
aacccttccctgatc

SEQ ID NO: 63069 - DNA, 15 bp, Homo sapiens
aaacccttccctgat

SEQ ID NO: 63070 - DNA, 15 bp, Homo sapiens
gaaacccttccctga

SEQ ID NO: 63071 - DNA, 15 bp, Homo sapiens
agaaacccttccctg

SEQ ID NO: 63072 - DNA, 15 bp, Homo sapiens
aagaaacccttccct

SEQ ID NO: 63073 - DNA, 15 bp, Homo sapiens
caagaaacccttccc

SEQ ID NO: 63074 - DNA, 15 bp, Homo sapiens
tcaagaaacccttcc

SEQ ID NO: 63075 - DNA, 15 bp, Homo sapiens
ctcaagaaacccttc

SEQ ID NO: 63076 - DNA, 15 bp, Homo sapiens
gctcaagaaaccctt

SEQ ID NO: 63077 - DNA, 15 bp, Homo sapiens
agctcaagaaaccct

SEQ ID NO: 63078 - DNA, 15 bp, Homo sapiens
tagctcaagaaaccc

SEQ ID NO: 63079 - DNA, 15 bp, Homo sapiens
gtagctcaagaaacc

SEQ ID NO: 63080 - DNA, 15 bp, Homo sapiens
tgtagctcaagaaac

SEQ ID NO: 63081 - DNA, 15 bp, Homo sapiens
ttgtagctcaagaaa

SEQ ID NO: 63082 - DNA, 15 bp, Homo sapiens
tttgtagctcaagaa

SEQ ID NO: 63083 - DNA, 15 bp, Homo sapiens
ttttgtagctcaaga

SEQ ID NO: 63084 - DNA, 15 bp, Homo sapiens
cttttgtagctcaag

SEQ ID NO: 63085 - DNA, 15 bp, Homo sapiens
ccttttgtagctcaa

SEQ ID NO: 63086 - DNA, 15 bp, Homo sapiens
cccttttgtagctca

SEQ ID NO: 63087 - DNA, 15 bp, Homo sapiens
tcccttttgtagctc

SEQ ID NO: 63088 - DNA, 15 bp, Homo sapiens
ctcccttttgtagct

SEQ ID NO: 63089 - DNA, 15 bp, Homo sapiens
actcccttttgtagc

SEQ ID NO: 63090 - DNA, 15 bp, Homo sapiens
aactcccttttgtag

SEQ ID NO: 63091 - DNA, 15 bp, Homo sapiens
taactcccttttgta

SEQ ID NO: 63092 - DNA, 15 bp, Homo sapiens
ttaactcccttttgt

SEQ ID NO: 63093 - DNA, 15 bp, Homo sapiens
cttaactcccttttg

SEQ ID NO: 63094 - DNA, 15 bp, Homo sapiens
tcttaactccctttt

SEQ ID NO: 63095 - DNA, 15 bp, Homo sapiens
ttcttaactcccttt

SEQ ID NO: 63096 - DNA, 15 bp, Homo sapiens
attcttaactccctt

SEQ ID NO: 63097 - DNA, 15 bp, Homo sapiens
cattcttaactccct

SEQ ID NO: 63098 - DNA, 15 bp, Homo sapiens
tcattcttaactccc

SEQ ID NO: 63099 - DNA, 15 bp, Homo sapiens
ttcattcttaactcc

SEQ ID NO: 63100 - DNA, 15 bp, Homo sapiens
cttcattcttaactc

SEQ ID NO: 63101 - DNA, 15 bp, Homo sapiens
gcttcattcttaact

SEQ ID NO: 63102 - DNA, 15 bp, Homo sapiens
tgcttcattcttaac

SEQ ID NO: 63103 - DNA, 15 bp, Homo sapiens
ttgcttcattcttaa

SEQ ID NO: 63104 - DNA, 15 bp, Homo sapiens
tttgcttcattctta

SEQ ID NO: 63105 - DNA, 15 bp, Homo sapiens
ttttgcttcattctt

SEQ ID NO: 63106 - DNA, 15 bp, Homo sapiens
attttgcttcattct

SEQ ID NO: 63107 - DNA, 15 bp, Homo sapiens
cattttgcttcattc

SEQ ID NO: 63108 - DNA, 15 bp, Homo sapiens
tcattttgcttcatt

SEQ ID NO: 63109 - DNA, 15 bp, Homo sapiens
ttcattttgcttcat

SEQ ID NO: 63110 - DNA, 15 bp, Homo sapiens
tttcattttgcttca

SEQ ID NO: 63111 - DNA, 15 bp, Homo sapiens
atttcattttgcttc

SEQ ID NO: 63112 - DNA, 15 bp, Homo sapiens
tatttcattttgctt

SEQ ID NO: 63113 - DNA, 15 bp, Homo sapiens
atatttcattttgct

SEQ ID NO: 63114 - DNA, 15 bp, Homo sapiens
catatttcattttgc

SEQ ID NO: 63115 - DNA, 15 bp, Homo sapiens
ccatatttcattttg

SEQ ID NO: 63116 - DNA, 15 bp, Homo sapiens
gccatatttcatttt

SEQ ID NO: 63117 - DNA, 15 bp, Homo sapiens
tgccatatttcattt

SEQ ID NO: 63118 - DNA, 15 bp, Homo sapiens
atgccatatttcatt

SEQ ID NO: 63119 - DNA, 15 bp, Homo sapiens
gatgccatatttcat

SEQ ID NO: 63120 - DNA, 15 bp, Homo sapiens
agatgccatatttca

SEQ ID NO: 63121 - DNA, 15 bp, Homo sapiens
aagatgccatatttc

SEQ ID NO: 63122 - DNA, 15 bp, Homo sapiens
aaagatgccatattt

SEQ ID NO: 63123 - DNA, 15 bp, Homo sapiens
taaagatgccatatt

SEQ ID NO: 63124 - DNA, 15 bp, Homo sapiens
ttaaagatgccatat

SEQ ID NO: 63125 - DNA, 15 bp, Homo sapiens
tttaaagatgccata

SEQ ID NO: 63126 - DNA, 15 bp, Homo sapiens
atttaaagatgccat

SEQ ID NO: 63127 - DNA, 15 bp, Homo sapiens
catttaaagatgcca

SEQ ID NO: 63128 - DNA, 15 bp, Homo sapiens
tcatttaaagatgcc

SEQ ID NO: 63129 - DNA, 15 bp, Homo sapiens
gtcatttaaagatgc

SEQ ID NO: 63130 - DNA, 15 bp, Homo sapiens
tgtcatttaaagatg

SEQ ID NO: 63131 - DNA, 15 bp, Homo sapiens
atgtcatttaaagat

SEQ ID NO: 63132 - DNA, 15 bp, Homo sapiens
catgtcatttaaaga

SEQ ID NO: 63133 - DNA, 15 bp, Homo sapiens
tcatgtcatttaaag

SEQ ID NO: 63134 - DNA, 15 bp, Homo sapiens
atcatgtcatttaaa

SEQ ID NO: 63135 - DNA, 15 bp, Homo sapiens
catcatgtcatttaa

SEQ ID NO: 63136 - DNA, 15 bp, Homo sapiens
gcatcatgtcattta

SEQ ID NO: 63137 - DNA, 15 bp, Homo sapiens
tgcatcatgtcattt

SEQ ID NO: 63138 - DNA, 15 bp, Homo sapiens
ttgcatcatgtcatt

SEQ ID NO: 63139 - DNA, 15 bp, Homo sapiens
attgcatcatgtcat

SEQ ID NO: 63140 - DNA, 15 bp, Homo sapiens
tattgcatcatgtca

SEQ ID NO: 63141 - DNA, 15 bp, Homo sapiens
ttattgcatcatgtc

SEQ ID NO: 63142 - DNA, 15 bp, Homo sapiens
tttattgcatcatgt

SEQ ID NO: 63143 - DNA, 15 bp, Homo sapiens
gtttattgcatcatg

SEQ ID NO: 63144 - DNA, 15 bp, Homo sapiens
agtttattgcatcat

SEQ ID NO: 63145 - DNA, 15 bp, Homo sapiens
gagtttattgcatca

SEQ ID NO: 63146 - DNA, 15 bp, Homo sapiens
agagtttattgcatc

SEQ ID NO: 63147 - DNA, 15 bp, Homo sapiens
tagagtttattgcat

SEQ ID NO: 63148 - DNA, 15 bp, Homo sapiens
ttagagtttattgca

SEQ ID NO: 63149 - DNA, 15 bp, Homo sapiens
tttagagtttattgc

SEQ ID NO: 63150 - DNA, 15 bp, Homo sapiens
atttagagtttattg

SEQ ID NO: 63151 - DNA, 15 bp, Homo sapiens
aatttagagtttatt

SEQ ID NO: 63152 - DNA, 15 bp, Homo sapiens
caatttagagtttat

SEQ ID NO: 63153 - DNA, 15 bp, Homo sapiens
gcaatttagagttta

SEQ ID NO: 63154 - DNA, 15 bp, Homo sapiens
tgcaatttagagttt

SEQ ID NO: 63155 - DNA, 15 bp, Homo sapiens
ttgcaatttagagtt

SEQ ID NO: 63156 - DNA, 15 bp, Homo sapiens
cttgcaatttagagt

SEQ ID NO: 63157 - DNA, 15 bp, Homo sapiens
acttgcaatttagag

SEQ ID NO: 63158 - DNA, 15 bp, Homo sapiens
aacttgcaatttaga

SEQ ID NO: 63159 - DNA, 15 bp, Homo sapiens
taacttgcaatttag

SEQ ID NO: 63160 - DNA, 15 bp, Homo sapiens
ataacttgcaattta

SEQ ID NO: 63161 - DNA, 15 bp, Homo sapiens
aataacttgcaattt

SEQ ID NO: 63162 - DNA, 15 bp, Homo sapiens
gaataacttgcaatt

SEQ ID NO: 63163 - DNA, 15 bp, Homo sapiens
tgaataacttgcaat

SEQ ID NO: 63164 - DNA, 15 bp, Homo sapiens
ttgaataacttgcaa

SEQ ID NO: 63165 - DNA, 15 bp, Homo sapiens
attgaataacttgca

SEQ ID NO: 63166 - DNA, 15 bp, Homo sapiens
tattgaataacttgc

SEQ ID NO: 63167 - DNA, 15 bp, Homo sapiens
ctattgaataacttg

SEQ ID NO: 63168 - DNA, 15 bp, Homo sapiens
actattgaataactt

SEQ ID NO: 63169 - DNA, 15 bp, Homo sapiens
aactattgaataact

SEQ ID NO: 63170 - DNA, 15 bp, Homo sapiens
taactattgaataac

SEQ ID NO: 63171 - DNA, 15 bp, Homo sapiens
gtaactattgaataa

SEQ ID NO: 63172 - DNA, 15 bp, Homo sapiens
agtaactattgaata

SEQ ID NO: 63173 - DNA, 15 bp, Homo sapiens
cagtaactattgaat

SEQ ID NO: 63174 - DNA, 15 bp, Homo sapiens
tcagtaactattgaa

SEQ ID NO: 63175 - DNA, 15 bp, Homo sapiens
ctcagtaactattga

SEQ ID NO: 63176 - DNA, 15 bp, Homo sapiens
gctcagtaactattg

SEQ ID NO: 63177 - DNA, 15 bp, Homo sapiens
tgctcagtaactatt

SEQ ID NO: 63178 - DNA, 15 bp, Homo sapiens
gtgctcagtaactat

SEQ ID NO: 63179 - DNA, 15 bp, Homo sapiens
ggtgctcagtaacta

SEQ ID NO: 63180 - DNA, 15 bp, Homo sapiens
tggtgctcagtaact

SEQ ID NO: 63181 - DNA, 15 bp, Homo sapiens
ctggtgctcagtaac

SEQ ID NO: 63182 - DNA, 15 bp, Homo sapiens
tctggtgctcagtaa

SEQ ID NO: 63183 - DNA, 15 bp, Homo sapiens
atctggtgctcagta

SEQ ID NO: 63184 - DNA, 15 bp, Homo sapiens
tatctggtgctcagt

SEQ ID NO: 63185 - DNA, 15 bp, Homo sapiens
atatctggtgctcag

SEQ ID NO: 63186 - DNA, 15 bp, Homo sapiens
catatctggtgctca

SEQ ID NO: 63187 - DNA, 15 bp, Homo sapiens
acatatctggtgctc

SEQ ID NO: 63188 - DNA, 15 bp, Homo sapiens
cacatatctggtgct

SEQ ID NO: 63189 - DNA, 15 bp, Homo sapiens
acacatatctggtgc

SEQ ID NO: 63190 - DNA, 15 bp, Homo sapiens
gacacatatctggtg

SEQ ID NO: 63191 - DNA, 15 bp, Homo sapiens
tgacacatatctggt

SEQ ID NO: 63192 - DNA, 15 bp, Homo sapiens
ctgacacatatctgg

SEQ ID NO: 63193 - DNA, 15 bp, Homo sapiens
tctgacacatatctg

SEQ ID NO: 63194 - DNA, 15 bp, Homo sapiens
gtctgacacatatct

SEQ ID NO: 63195 - DNA, 15 bp, Homo sapiens
tgtctgacacatatc

SEQ ID NO: 63196 - DNA, 15 bp, Homo sapiens
cttctgtcttattca

SEQ ID NO: 63197 - DNA, 15 bp, Homo sapiens
tgtcttaaaaaaaaa

SEQ ID NO: 63198 - DNA, 15 bp, Homo sapiens
ctgtcttaaaaaaaa

SEQ ID NO: 63199 - DNA, 15 bp, Homo sapiens
atctcaaaaaaaaaa

SEQ ID NO: 63200 - DNA, 15 bp, Homo sapiens
catctcaaaaaaaaa

SEQ ID NO: 63201 - DNA, 15 bp, Homo sapiens
ccatctcaaaaaaaa

SEQ ID NO: 63202 - DNA, 15 bp, Homo sapiens
tccatctcaaaaaaa

SEQ ID NO: 63203 - DNA, 15 bp, Homo sapiens
aggcaggagaatcgc

SEQ ID NO: 63204 - DNA, 15 bp, Homo sapiens
gccgagatcacacca

SEQ ID NO: 63205 - DNA, 15 bp, Homo sapiens
agccgagatcacacc

SEQ ID NO: 63206 - DNA, 15 bp, Homo sapiens
gagccgagatcacac

SEQ ID NO: 63207 - DNA, 15 bp, Homo sapiens
tgagccgagatcaca

SEQ ID NO: 63208 - DNA, 15 bp, Homo sapiens
gtgagccgagatcac

SEQ ID NO: 63209 - DNA, 15 bp, Homo sapiens
ggattacaggcatga

SEQ ID NO: 63210 - DNA, 15 bp, Homo sapiens
gggattacaggcatg

SEQ ID NO: 63211 - DNA, 15 bp, Homo sapiens
tgggattacaggcat

SEQ ID NO: 63212 - DNA, 15 bp, Homo sapiens
ctgggattacaggca

SEQ ID NO: 63213 - DNA, 15 bp, Homo sapiens
gctgaggcaggagaa

SEQ ID NO: 63214 - DNA, 15 bp, Homo sapiens
cgagaccatcctggc

SEQ ID NO: 63215 - DNA, 15 bp, Homo sapiens
tcgagaccatcctgg

SEQ ID NO: 63216 - DNA, 15 bp, Homo sapiens
acctgtaatcccagc

SEQ ID NO: 63217 - DNA, 15 bp, Homo sapiens
atcccagctactcag

SEQ ID NO: 63218 - DNA, 15 bp, Homo sapiens
aatcccagctactca

SEQ ID NO: 63219 - DNA, 15 bp, Homo sapiens
taatcccagctactc

SEQ ID NO: 63220 - DNA, 15 bp, Homo sapiens
gtaatcccagctact

SEQ ID NO: 63221 - DNA, 15 bp, Homo sapiens
tgtaatcccagctac

SEQ ID NO: 63222 - DNA, 15 bp, Homo sapiens
ctgtaatcccagcta

SEQ ID NO: 63223 - DNA, 15 bp, Homo sapiens
cctgtaatcccagct

SEQ ID NO: 63224 - DNA, 15 bp, Homo sapiens
agtgatcctcccacc

SEQ ID NO: 63225 - DNA, 15 bp, Homo sapiens
aagtgatcctcccac

SEQ ID NO: 63226 - DNA, 15 bp, Homo sapiens
caagtgatcctccca

SEQ ID NO: 63227 - DNA, 15 bp, Homo sapiens
aaaaaaaaaaaaata

SEQ ID NO: 63228 - DNA, 15 bp, Homo sapiens
gaatcgcttgaaccc

SEQ ID NO: 63229 - DNA, 15 bp, Homo sapiens
ggcaggagaatcgct

SEQ ID NO: 63230 - DNA, 15 bp, Homo sapiens
gaggcaggagaatcg

SEQ ID NO: 63231 - DNA, 15 bp, Homo sapiens
tgaggcaggagaatc

SEQ ID NO: 63232 - DNA, 15 bp, Homo sapiens
acaaaaatcagctgg

SEQ ID NO: 63233 - DNA, 15 bp, Homo sapiens
tacaaatacaaaaat

SEQ ID NO: 63234 - DNA, 15 bp, Homo sapiens
ctacaaatacaaaaa

SEQ ID NO: 63235 - DNA, 15 bp, Homo sapiens
actacaaatacaaaa

SEQ ID NO: 63236 - DNA, 15 bp, Homo sapiens
tcagcctagaattct

SEQ ID NO: 63237 - DNA, 15 bp, Homo sapiens
acagattttcttttt

SEQ ID NO: 63238 - DNA, 15 bp, Homo sapiens
gacagattttctttt

SEQ ID NO: 63239 - DNA, 15 bp, Homo sapiens
ctggtccttttcacc

SEQ ID NO: 63240 - DNA, 15 bp, Homo sapiens
acaggcacgcgccac

SEQ ID NO: 63241 - DNA, 15 bp, Homo sapiens
tacaggcacgcgcca

SEQ ID NO: 63242 - DNA, 15 bp, Homo sapiens
gcgattctcctgcct

SEQ ID NO: 63243 - DNA, 15 bp, Homo sapiens
tttttttgagatgga

SEQ ID NO: 63244 - DNA, 15 bp, Homo sapiens
ttttttttgagatgg

SEQ ID NO: 63245 - DNA, 15 bp, Homo sapiens
tttttttttgagatg

SEQ ID NO: 63246 - DNA, 15 bp, Homo sapiens
ttttttttttgagat

SEQ ID NO: 63247 - DNA, 15 bp, Homo sapiens
tgaataagacagaag

SEQ ID NO: 63248 - DNA, 15 bp, Homo sapiens
ctcccaagcagctgg

SEQ ID NO: 63249 - DNA, 15 bp, Homo sapiens
cctcccaagcagctg

SEQ ID NO: 63250 - DNA, 15 bp, Homo sapiens
tatgtgtatgtgtgt

SEQ ID NO: 63251 - DNA, 15 bp, Homo sapiens
atatgtgtatgtgtg

SEQ ID NO: 63252 - DNA, 15 bp, Homo sapiens
gcctcagcctcccaa

SEQ ID NO: 63253 - DNA, 15 bp, Homo sapiens
tgcctcagcctccca

SEQ ID NO: 63254 - DNA, 15 bp, Homo sapiens
gcctgcctcagcctc

SEQ ID NO: 63255 - DNA, 15 bp, Homo sapiens
cgcctgcctcagcct

SEQ ID NO: 63256 - DNA, 15 bp, Homo sapiens
ccgcctgcctcagcc

SEQ ID NO: 63257 - DNA, 15 bp, Homo sapiens
tccgcctgcctcagc

SEQ ID NO: 63258 - DNA, 15 bp, Homo sapiens
atccgcctgcctcag

SEQ ID NO: 63259 - DNA, 15 bp, Homo sapiens
gatccgcctgcctca

SEQ ID NO: 63260 - DNA, 15 bp, Homo sapiens
cgatccgcctgcctc

SEQ ID NO: 63261 - DNA, 15 bp, Homo sapiens
gcgatccgcctgcct

SEQ ID NO: 63262 - DNA, 15 bp, Homo sapiens
agcgatccgcctgcc

SEQ ID NO: 63263 - DNA, 15 bp, Homo sapiens
aagcgatccgcctgc

SEQ ID NO: 63264 - DNA, 15 bp, Homo sapiens
caagcgatccgcctg

SEQ ID NO: 63265 - DNA, 15 bp, Homo sapiens
tcaagcgatccgcct

SEQ ID NO: 63266 - DNA, 15 bp, Homo sapiens
tccaggctggtctcg

SEQ ID NO: 63267 - DNA, 15 bp, Homo sapiens
aatttttgtgttttt

SEQ ID NO: 63268 - DNA, 15 bp, Homo sapiens
taatttttgtgtttt

SEQ ID NO: 63269 - DNA, 15 bp, Homo sapiens
ctaatttttgtgttt

SEQ ID NO: 63270 - DNA, 15 bp, Homo sapiens
gctaatttttgtgtt

SEQ ID NO: 63271 - DNA, 15 bp, Homo sapiens
tggctaatttttgta

SEQ ID NO: 63272 - DNA, 15 bp, Homo sapiens
ctggctaatttttgt

SEQ ID NO: 63273 - DNA, 15 bp, Homo sapiens
cctggctaatttttg

SEQ ID NO: 63274 - DNA, 15 bp, Homo sapiens
ggactacaggcacgc

SEQ ID NO: 63275 - DNA, 15 bp, Homo sapiens
gggactacaggcacg

SEQ ID NO: 63276 - DNA, 15 bp, Homo sapiens
tgggactacaggcac

SEQ ID NO: 63277 - DNA, 15 bp, Homo sapiens
ctgggactacaggca

SEQ ID NO: 63278 - DNA, 15 bp, Homo sapiens
tatatatataaaaca

SEQ ID NO: 63279 - DNA, 15 bp, Homo sapiens
atatatatataaaac

SEQ ID NO: 63280 - DNA, 15 bp, Homo sapiens
tatatatatataaaa

SEQ ID NO: 63281 - DNA, 15 bp, Homo sapiens
atatatatatataaa

SEQ ID NO: 63282 - DNA, 15 bp, Homo sapiens
atatttattaaaaaa

SEQ ID NO: 63283 - DNA, 15 bp, Homo sapiens
aatatttattaaaaa

SEQ ID NO: 63284 - DNA, 15 bp, Homo sapiens
gctgggtgtggtggc

SEQ ID NO: 63285 - DNA, 15 bp, Homo sapiens
agctgggtgtggtgg

SEQ ID NO: 63286 - DNA, 15 bp, Homo sapiens
tagctgggtgtggtg

SEQ ID NO: 63287 - DNA, 15 bp, Homo sapiens
ttagctgggtgtggt

SEQ ID NO: 63288 - DNA, 15 bp, Homo sapiens
attagctgggtgtgg

SEQ ID NO: 63289 - DNA, 15 bp, Homo sapiens
aattagctgggtgtg

SEQ ID NO: 63290 - DNA, 15 bp, Homo sapiens
aaattagctgggtgt

SEQ ID NO: 63291 - DNA, 15 bp, Homo sapiens
aaaattagctgggtg

SEQ ID NO: 63292 - DNA, 15 bp, Homo sapiens
aaaaattagctgggt

SEQ ID NO: 63293 - DNA, 15 bp, Homo sapiens
ggccaggctggtctc

SEQ ID NO: 63294 - DNA, 15 bp, Homo sapiens
accatgttggccagg

SEQ ID NO: 63295 - DNA, 15 bp, Homo sapiens
ttttttttaagacag

SEQ ID NO: 63296 - DNA, 15 bp, Homo sapiens
tttttttttaagaca

SEQ ID NO: 63297 - DNA, 15 bp, Homo sapiens
ttttttttttttaag

SEQ ID NO: 63298 - DNA, 15 bp, Homo sapiens
attggtagtaatagt

SEQ ID NO: 63299 - DNA, 15 bp, Homo sapiens
tattggtagtaatag

SEQ ID NO: 63300 - DNA, 15 bp, Homo sapiens
atattggtagtaata

SEQ ID NO: 63301 - DNA, 15 bp, Homo sapiens
tatattggtagtaat

SEQ ID NO: 63302 - DNA, 15 bp, Homo sapiens
gtatattggtagtaa

SEQ ID NO: 63303 - DNA, 15 bp, Homo sapiens
tgtatattggtagta

SEQ ID NO: 63304 - DNA, 15 bp, Homo sapiens
atgtatattggtagt

SEQ ID NO: 63305 - DNA, 15 bp, Homo sapiens
tatgtatattggtag

SEQ ID NO: 63306 - DNA, 15 bp, Homo sapiens
gtatgtatattggta

SEQ ID NO: 63307 - DNA, 15 bp, Homo sapiens
tgtatgtatattggt

SEQ ID NO: 63308 - DNA, 15 bp, Homo sapiens
atgtatgtatattgg

SEQ ID NO: 63309 - DNA, 15 bp, Homo sapiens
tatgtatgtatattg

SEQ ID NO: 63310 - DNA, 15 bp, Homo sapiens
catatatgtatgtat

SEQ ID NO: 63311 - DNA, 15 bp, Homo sapiens
acatatatgtatgta

SEQ ID NO: 63312 - DNA, 15 bp, Homo sapiens
tacatatatgtatgt

SEQ ID NO: 63313 - DNA, 15 bp, Homo sapiens
atacatatatgtatg

SEQ ID NO: 63314 - DNA, 15 bp, Homo sapiens
catacatatatgtat

SEQ ID NO: 63315 - DNA, 15 bp, Homo sapiens
acatacatatatgta

SEQ ID NO: 63316 - DNA, 15 bp, Homo sapiens
tacatacatatatgt

SEQ ID NO: 63317 - DNA, 15 bp, Homo sapiens
atacatacatatatg

SEQ ID NO: 63318 - DNA, 15 bp, Homo sapiens
caatatacatacata

SEQ ID NO: 63319 - DNA, 15 bp, Homo sapiens
ccaatatacatacat

SEQ ID NO: 63320 - DNA, 15 bp, Homo sapiens
accaatatacataca

SEQ ID NO: 63321 - DNA, 15 bp, Homo sapiens
taccaatatacatac

SEQ ID NO: 63322 - DNA, 15 bp, Homo sapiens
ctaccaatatacata

SEQ ID NO: 63323 - DNA, 15 bp, Homo sapiens
actaccaatatacat

SEQ ID NO: 63324 - DNA, 15 bp, Homo sapiens
tactaccaatataca

SEQ ID NO: 63325 - DNA, 15 bp, Homo sapiens
ttactaccaatatac

SEQ ID NO: 63326 - DNA, 15 bp, Homo sapiens
attactaccaatata

SEQ ID NO: 63327 - DNA, 15 bp, Homo sapiens
tattactaccaatat

SEQ ID NO: 63328 - DNA, 15 bp, Homo sapiens
ctattactaccaata

SEQ ID NO: 63329 - DNA, 15 bp, Homo sapiens
actattactaccaat

SEQ ID NO: 63330 - DNA, 15 bp, Homo sapiens
ggtgcatgccaccac

SEQ ID NO: 63331 - DNA, 15 bp, Homo sapiens
aggtgcatgccacca

SEQ ID NO: 63332 - DNA, 15 bp, Homo sapiens
tgctctgtcacccag

SEQ ID NO: 63333 - DNA, 15 bp, Homo sapiens
ttgctctgtcaccca

SEQ ID NO: 63334 - DNA, 15 bp, Homo sapiens
cttgctctgtcaccc

SEQ ID NO: 63335 - DNA, 15 bp, Homo sapiens
tcttgctctgtcacc

SEQ ID NO: 63336 - DNA, 15 bp, Homo sapiens
aacctctgcctcccg

SEQ ID NO: 63337 - DNA, 15 bp, Homo sapiens
gattttttttaagaa

SEQ ID NO: 63338 - DNA, 15 bp, Homo sapiens
tgattttttttaaga

SEQ ID NO: 63339 - DNA, 15 bp, Homo sapiens
tgttttttttttttt

SEQ ID NO: 63340 - DNA, 15 bp, Homo sapiens
acacacacacacact

SEQ ID NO: 63341 - DNA, 15 bp, Homo sapiens
cctcaagcacagaac

SEQ ID NO: 63342 - DNA, 15 bp, Homo sapiens
ctcaagcacagaacc

SEQ ID NO: 63343 - DNA, 15 bp, Homo sapiens
tcaagcacagaacca

SEQ ID NO: 63344 - DNA, 15 bp, Homo sapiens
caagcacagaaccaa

SEQ ID NO: 63345 - DNA, 15 bp, Homo sapiens
aagcacagaaccaaa

SEQ ID NO: 63346 - DNA, 15 bp, Homo sapiens
agcacagaaccaaaa

SEQ ID NO: 63347 - DNA, 15 bp, Homo sapiens
gcacagaaccaaaag

SEQ ID NO: 63348 - DNA, 15 bp, Homo sapiens
cacagaaccaaaagg

SEQ ID NO: 63349 - DNA, 15 bp, Homo sapiens
acagaaccaaaaggg

SEQ ID NO: 63350 - DNA, 15 bp, Homo sapiens
cagaaccaaaagggt

SEQ ID NO: 63351 - DNA, 15 bp, Homo sapiens
agaaccaaaagggtt

SEQ ID NO: 63352 - DNA, 15 bp, Homo sapiens
gaaccaaaagggttc

SEQ ID NO: 63353 - DNA, 15 bp, Homo sapiens
aaccaaaagggttca

SEQ ID NO: 63354 - DNA, 15 bp, Homo sapiens
accaaaagggttcac

SEQ ID NO: 63355 - DNA, 15 bp, Homo sapiens
ccaaaagggttcacc

SEQ ID NO: 63356 - DNA, 15 bp, Homo sapiens
caaaagggttcaccc

SEQ ID NO: 63357 - DNA, 15 bp, Homo sapiens
aaaagggttcaccct

SEQ ID NO: 63358 - DNA, 15 bp, Homo sapiens
aaagggttcacccta

SEQ ID NO: 63359 - DNA, 15 bp, Homo sapiens
aagggttcaccctaa

SEQ ID NO: 63360 - DNA, 15 bp, Homo sapiens
agggttcaccctaag

SEQ ID NO: 63361 - DNA, 15 bp, Homo sapiens
gggttcaccctaagc

SEQ ID NO: 63362 - DNA, 15 bp, Homo sapiens
ggttcaccctaagcg

SEQ ID NO: 63363 - DNA, 15 bp, Homo sapiens
gttcaccctaagcgg

SEQ ID NO: 63364 - DNA, 15 bp, Homo sapiens
ttcaccctaagcggc

SEQ ID NO: 63365 - DNA, 15 bp, Homo sapiens
tcaccctaagcggca

SEQ ID NO: 63366 - DNA, 15 bp, Homo sapiens
caccctaagcggcag

SEQ ID NO: 63367 - DNA, 15 bp, Homo sapiens
accctaagcggcagg

SEQ ID NO: 63368 - DNA, 15 bp, Homo sapiens
ccctaagcggcaggg

SEQ ID NO: 63369 - DNA, 15 bp, Homo sapiens
cctaagcggcagggc

SEQ ID NO: 63370 - DNA, 15 bp, Homo sapiens
ctaagcggcagggca

SEQ ID NO: 63371 - DNA, 15 bp, Homo sapiens
taagcggcagggcat

SEQ ID NO: 63372 - DNA, 15 bp, Homo sapiens
aagcggcagggcatc

SEQ ID NO: 63373 - DNA, 15 bp, Homo sapiens
agcggcagggcatca

SEQ ID NO: 63374 - DNA, 15 bp, Homo sapiens
gcggcagggcatcag

SEQ ID NO: 63375 - DNA, 15 bp, Homo sapiens
cggcagggcatcagc

SEQ ID NO: 63376 - DNA, 15 bp, Homo sapiens
ggcagggcatcagcg

SEQ ID NO: 63377 - DNA, 15 bp, Homo sapiens
gcagggcatcagcga

SEQ ID NO: 63378 - DNA, 15 bp, Homo sapiens
cagggcatcagcgat

SEQ ID NO: 63379 - DNA, 15 bp, Homo sapiens
agggcatcagcgatg

SEQ ID NO: 63380 - DNA, 15 bp, Homo sapiens
gggcatcagcgatgg

SEQ ID NO: 63381 - DNA, 15 bp, Homo sapiens
ggcatcagcgatgga

SEQ ID NO: 63382 - DNA, 15 bp, Homo sapiens
gcatcagcgatggag

SEQ ID NO: 63383 - DNA, 15 bp, Homo sapiens
catcagcgatggaga

SEQ ID NO: 63384 - DNA, 15 bp, Homo sapiens
atcagcgatggagag

SEQ ID NO: 63385 - DNA, 15 bp, Homo sapiens
tcagcgatggagagg

SEQ ID NO: 63386 - DNA, 15 bp, Homo sapiens
cagcgatggagaggc

SEQ ID NO: 63387 - DNA, 15 bp, Homo sapiens
agcgatggagaggcc

SEQ ID NO: 63388 - DNA, 15 bp, Homo sapiens
gcgatggagaggccc

SEQ ID NO: 63389 - DNA, 15 bp, Homo sapiens
cgatggagaggcccg

SEQ ID NO: 63390 - DNA, 15 bp, Homo sapiens
gatggagaggcccga

SEQ ID NO: 63391 - DNA, 15 bp, Homo sapiens
atggagaggcccgag

SEQ ID NO: 63392 - DNA, 15 bp, Homo sapiens
tggagaggcccgaga

SEQ ID NO: 63393 - DNA, 15 bp, Homo sapiens
ggagaggcccgagag

SEQ ID NO: 63394 - DNA, 15 bp, Homo sapiens
gagaggcccgagagc

SEQ ID NO: 63395 - DNA, 15 bp, Homo sapiens
agaggcccgagagcc

SEQ ID NO: 63396 - DNA, 15 bp, Homo sapiens
gaggcccgagagccc

SEQ ID NO: 63397 - DNA, 15 bp, Homo sapiens
aggcccgagagccct

SEQ ID NO: 63398 - DNA, 15 bp, Homo sapiens
ggcccgagagcccta

SEQ ID NO: 63399 - DNA, 15 bp, Homo sapiens
gcccgagagccctag

SEQ ID NO: 63400 - DNA, 15 bp, Homo sapiens
cccgagagccctagc

SEQ ID NO: 63401 - DNA, 15 bp, Homo sapiens
ccgagagccctagcg

SEQ ID NO: 63402 - DNA, 15 bp, Homo sapiens
cgagagccctagcgc

SEQ ID NO: 63403 - DNA, 15 bp, Homo sapiens
gagagccctagcgcc

SEQ ID NO: 63404 - DNA, 15 bp, Homo sapiens
agagccctagcgccc

SEQ ID NO: 63405 - DNA, 15 bp, Homo sapiens
gagccctagcgccca

SEQ ID NO: 63406 - DNA, 15 bp, Homo sapiens
agccctagcgcccag

SEQ ID NO: 63407 - DNA, 15 bp, Homo sapiens
gccctagcgcccagc

SEQ ID NO: 63408 - DNA, 15 bp, Homo sapiens
ccctagcgcccagct

SEQ ID NO: 63409 - DNA, 15 bp, Homo sapiens
cctagcgcccagctc

SEQ ID NO: 63410 - DNA, 15 bp, Homo sapiens
ctagcgcccagctcc

SEQ ID NO: 63411 - DNA, 15 bp, Homo sapiens
tagcgcccagctcct

SEQ ID NO: 63412 - DNA, 15 bp, Homo sapiens
agcgcccagctcctt

SEQ ID NO: 63413 - DNA, 15 bp, Homo sapiens
gcgcccagctccttt

SEQ ID NO: 63414 - DNA, 15 bp, Homo sapiens
cgcccagctcctttt

SEQ ID NO: 63415 - DNA, 15 bp, Homo sapiens
gcccagctccttttc

SEQ ID NO: 63416 - DNA, 15 bp, Homo sapiens
cccagctccttttcc

SEQ ID NO: 63417 - DNA, 15 bp, Homo sapiens
ccagctccttttccc

SEQ ID NO: 63418 - DNA, 15 bp, Homo sapiens
cagctccttttccca

SEQ ID NO: 63419 - DNA, 15 bp, Homo sapiens
agctccttttcccac

SEQ ID NO: 63420 - DNA, 15 bp, Homo sapiens
gctccttttcccacg

SEQ ID NO: 63421 - DNA, 15 bp, Homo sapiens
ctccttttcccacgt

SEQ ID NO: 63422 - DNA, 15 bp, Homo sapiens
tccttttcccacgtt

SEQ ID NO: 63423 - DNA, 15 bp, Homo sapiens
ccttttcccacgttt

SEQ ID NO: 63424 - DNA, 15 bp, Homo sapiens
cttttcccacgtttg

SEQ ID NO: 63425 - DNA, 15 bp, Homo sapiens
ttttcccacgtttgg

SEQ ID NO: 63426 - DNA, 15 bp, Homo sapiens
tttcccacgtttggg

SEQ ID NO: 63427 - DNA, 15 bp, Homo sapiens
ttcccacgtttggga

SEQ ID NO: 63428 - DNA, 15 bp, Homo sapiens
tcccacgtttgggaa

SEQ ID NO: 63429 - DNA, 15 bp, Homo sapiens
cccacgtttgggaag

SEQ ID NO: 63430 - DNA, 15 bp, Homo sapiens
ccacgtttgggaagg

SEQ ID NO: 63431 - DNA, 15 bp, Homo sapiens
cacgtttgggaaggc

SEQ ID NO: 63432 - DNA, 15 bp, Homo sapiens
acgtttgggaaggcg

SEQ ID NO: 63433 - DNA, 15 bp, Homo sapiens
cgtttgggaaggcgc

SEQ ID NO: 63434 - DNA, 15 bp, Homo sapiens
gtttgggaaggcgca

SEQ ID NO: 63435 - DNA, 15 bp, Homo sapiens
tttgggaaggcgcag

SEQ ID NO: 63436 - DNA, 15 bp, Homo sapiens
ttgggaaggcgcaga

SEQ ID NO: 63437 - DNA, 15 bp, Homo sapiens
tgggaaggcgcagaa

SEQ ID NO: 63438 - DNA, 15 bp, Homo sapiens
gggaaggcgcagaat

SEQ ID NO: 63439 - DNA, 15 bp, Homo sapiens
ggaaggcgcagaata

SEQ ID NO: 63440 - DNA, 15 bp, Homo sapiens
gaaggcgcagaatag

SEQ ID NO: 63441 - DNA, 15 bp, Homo sapiens
aaggcgcagaatagg

SEQ ID NO: 63442 - DNA, 15 bp, Homo sapiens
aggcgcagaataggt

SEQ ID NO: 63443 - DNA, 15 bp, Homo sapiens
ggcgcagaataggtc

SEQ ID NO: 63444 - DNA, 15 bp, Homo sapiens
gcgcagaataggtcg

SEQ ID NO: 63445 - DNA, 15 bp, Homo sapiens
cgcagaataggtcga

SEQ ID NO: 63446 - DNA, 15 bp, Homo sapiens
gcagaataggtcgat

SEQ ID NO: 63447 - DNA, 15 bp, Homo sapiens
cagaataggtcgatg

SEQ ID NO: 63448 - DNA, 15 bp, Homo sapiens
agaataggtcgatgt

SEQ ID NO: 63449 - DNA, 15 bp, Homo sapiens
gaataggtcgatgta

SEQ ID NO: 63450 - DNA, 15 bp, Homo sapiens
aataggtcgatgtag

SEQ ID NO: 63451 - DNA, 15 bp, Homo sapiens
ataggtcgatgtaga

SEQ ID NO: 63452 - DNA, 15 bp, Homo sapiens
taggtcgatgtagag

SEQ ID NO: 63453 - DNA, 15 bp, Homo sapiens
aggtcgatgtagagc

SEQ ID NO: 63454 - DNA, 15 bp, Homo sapiens
ggtcgatgtagagca

SEQ ID NO: 63455 - DNA, 15 bp, Homo sapiens
gtcgatgtagagcaa

SEQ ID NO: 63456 - DNA, 15 bp, Homo sapiens
tcgatgtagagcaag

SEQ ID NO: 63457 - DNA, 15 bp, Homo sapiens
cgatgtagagcaagg

SEQ ID NO: 63458 - DNA, 15 bp, Homo sapiens
gatgtagagcaagga

SEQ ID NO: 63459 - DNA, 15 bp, Homo sapiens
atgtagagcaaggag

SEQ ID NO: 63460 - DNA, 15 bp, Homo sapiens
tgtagagcaaggagt

SEQ ID NO: 63461 - DNA, 15 bp, Homo sapiens
gtagagcaaggagtg

SEQ ID NO: 63462 - DNA, 15 bp, Homo sapiens
tagagcaaggagtga

SEQ ID NO: 63463 - DNA, 15 bp, Homo sapiens
agagcaaggagtgag

SEQ ID NO: 63464 - DNA, 15 bp, Homo sapiens
gagcaaggagtgagt

SEQ ID NO: 63465 - DNA, 15 bp, Homo sapiens
agcaaggagtgagtc

SEQ ID NO: 63466 - DNA, 15 bp, Homo sapiens
gcaaggagtgagtct

SEQ ID NO: 63467 - DNA, 15 bp, Homo sapiens
caaggagtgagtctc

SEQ ID NO: 63468 - DNA, 15 bp, Homo sapiens
aaggagtgagtctca

SEQ ID NO: 63469 - DNA, 15 bp, Homo sapiens
aggagtgagtctcag

SEQ ID NO: 63470 - DNA, 15 bp, Homo sapiens
ggagtgagtctcagg

SEQ ID NO: 63471 - DNA, 15 bp, Homo sapiens
gagtgagtctcaggt

SEQ ID NO: 63472 - DNA, 15 bp, Homo sapiens
agtgagtctcaggtc

SEQ ID NO: 63473 - DNA, 15 bp, Homo sapiens
gtgagtctcaggtct

SEQ ID NO: 63474 - DNA, 15 bp, Homo sapiens
tgagtctcaggtctc

SEQ ID NO: 63475 - DNA, 15 bp, Homo sapiens
gagtctcaggtctca

SEQ ID NO: 63476 - DNA, 15 bp, Homo sapiens
agtctcaggtctcag

SEQ ID NO: 63477 - DNA, 15 bp, Homo sapiens
gtctcaggtctcagt

SEQ ID NO: 63478 - DNA, 15 bp, Homo sapiens
tctcaggtctcagtc

SEQ ID NO: 63479 - DNA, 15 bp, Homo sapiens
ctcaggtctcagtcc

SEQ ID NO: 63480 - DNA, 15 bp, Homo sapiens
tcaggtctcagtcct

SEQ ID NO: 63481 - DNA, 15 bp, Homo sapiens
caggtctcagtcctt

SEQ ID NO: 63482 - DNA, 15 bp, Homo sapiens
aggtctcagtccttt

SEQ ID NO: 63483 - DNA, 15 bp, Homo sapiens
ggtctcagtcctttg

SEQ ID NO: 63484 - DNA, 15 bp, Homo sapiens
gtctcagtcctttgg

SEQ ID NO: 63485 - DNA, 15 bp, Homo sapiens
tctcagtcctttggc

SEQ ID NO: 63486 - DNA, 15 bp, Homo sapiens
ctcagtcctttggct

SEQ ID NO: 63487 - DNA, 15 bp, Homo sapiens
tcagtcctttggctt

SEQ ID NO: 63488 - DNA, 15 bp, Homo sapiens
cagtcctttggcttg

SEQ ID NO: 63489 - DNA, 15 bp, Homo sapiens
agtcctttggcttgc

SEQ ID NO: 63490 - DNA, 15 bp, Homo sapiens
gtcctttggcttgct

SEQ ID NO: 63491 - DNA, 15 bp, Homo sapiens
tcctttggcttgctc

SEQ ID NO: 63492 - DNA, 15 bp, Homo sapiens
cctttggcttgctct

SEQ ID NO: 63493 - DNA, 15 bp, Homo sapiens
ctttggcttgctctt

SEQ ID NO: 63494 - DNA, 15 bp, Homo sapiens
tttggcttgctctta

SEQ ID NO: 63495 - DNA, 15 bp, Homo sapiens
ttggcttgctcttag

SEQ ID NO: 63496 - DNA, 15 bp, Homo sapiens
tggcttgctcttagg

SEQ ID NO: 63497 - DNA, 15 bp, Homo sapiens
ggcttgctcttaggg

SEQ ID NO: 63498 - DNA, 15 bp, Homo sapiens
gcttgctcttagggt

SEQ ID NO: 63499 - DNA, 15 bp, Homo sapiens
cttgctcttagggta

SEQ ID NO: 63500 - DNA, 15 bp, Homo sapiens
ttgctcttagggtag

SEQ ID NO: 63501 - DNA, 15 bp, Homo sapiens
tgctcttagggtagc

SEQ ID NO: 63502 - DNA, 15 bp, Homo sapiens
gctcttagggtagca

SEQ ID NO: 63503 - DNA, 15 bp, Homo sapiens
ctcttagggtagcag

SEQ ID NO: 63504 - DNA, 15 bp, Homo sapiens
tcttagggtagcagg

SEQ ID NO: 63505 - DNA, 15 bp, Homo sapiens
cttagggtagcaggc

SEQ ID NO: 63506 - DNA, 15 bp, Homo sapiens
ttagggtagcaggcg

SEQ ID NO: 63507 - DNA, 15 bp, Homo sapiens
tagggtagcaggcga

SEQ ID NO: 63508 - DNA, 15 bp, Homo sapiens
agggtagcaggcgag

SEQ ID NO: 63509 - DNA, 15 bp, Homo sapiens
gggtagcaggcgagg

SEQ ID NO: 63510 - DNA, 15 bp, Homo sapiens
ggtagcaggcgagga

SEQ ID NO: 63511 - DNA, 15 bp, Homo sapiens
gtagcaggcgaggag

SEQ ID NO: 63512 - DNA, 15 bp, Homo sapiens
tagcaggcgaggagt

SEQ ID NO: 63513 - DNA, 15 bp, Homo sapiens
agcaggcgaggagtg

SEQ ID NO: 63514 - DNA, 15 bp, Homo sapiens
gcaggcgaggagtgg

SEQ ID NO: 63515 - DNA, 15 bp, Homo sapiens
caggcgaggagtggc

SEQ ID NO: 63516 - DNA, 15 bp, Homo sapiens
aggcgaggagtggca

SEQ ID NO: 63517 - DNA, 15 bp, Homo sapiens
ggcgaggagtggcac

SEQ ID NO: 63518 - DNA, 15 bp, Homo sapiens
gcgaggagtggcacc

SEQ ID NO: 63519 - DNA, 15 bp, Homo sapiens
cgaggagtggcacca

SEQ ID NO: 63520 - DNA, 15 bp, Homo sapiens
gaggagtggcaccag

SEQ ID NO: 63521 - DNA, 15 bp, Homo sapiens
aggagtggcaccagt

SEQ ID NO: 63522 - DNA, 15 bp, Homo sapiens
ggagtggcaccagtt

SEQ ID NO: 63523 - DNA, 15 bp, Homo sapiens
gagtggcaccagttt

SEQ ID NO: 63524 - DNA, 15 bp, Homo sapiens
agtggcaccagtttg

SEQ ID NO: 63525 - DNA, 15 bp, Homo sapiens
gtggcaccagtttgg

SEQ ID NO: 63526 - DNA, 15 bp, Homo sapiens
tggcaccagtttggg

SEQ ID NO: 63527 - DNA, 15 bp, Homo sapiens
ggcaccagtttgggg

SEQ ID NO: 63528 - DNA, 15 bp, Homo sapiens
gcaccagtttgggga

SEQ ID NO: 63529 - DNA, 15 bp, Homo sapiens
caccagtttggggac

SEQ ID NO: 63530 - DNA, 15 bp, Homo sapiens
accagtttggggact

SEQ ID NO: 63531 - DNA, 15 bp, Homo sapiens
ccagtttggggactc

SEQ ID NO: 63532 - DNA, 15 bp, Homo sapiens
cagtttggggactct

SEQ ID NO: 63533 - DNA, 15 bp, Homo sapiens
agtttggggactctc

SEQ ID NO: 63534 - DNA, 15 bp, Homo sapiens
gtttggggactctct

SEQ ID NO: 63535 - DNA, 15 bp, Homo sapiens
tttggggactctctc

SEQ ID NO: 63536 - DNA, 15 bp, Homo sapiens
ttggggactctctcc

SEQ ID NO: 63537 - DNA, 15 bp, Homo sapiens
tggggactctctccc

SEQ ID NO: 63538 - DNA, 15 bp, Homo sapiens
ggggactctctcccc

SEQ ID NO: 63539 - DNA, 15 bp, Homo sapiens
gggactctctccccg

SEQ ID NO: 63540 - DNA, 15 bp, Homo sapiens
ggactctctccccgc

SEQ ID NO: 63541 - DNA, 15 bp, Homo sapiens
gactctctccccgcg

SEQ ID NO: 63542 - DNA, 15 bp, Homo sapiens
actctctccccgcgt

SEQ ID NO: 63543 - DNA, 15 bp, Homo sapiens
ctctctccccgcgtt

SEQ ID NO: 63544 - DNA, 15 bp, Homo sapiens
tctctccccgcgttc

SEQ ID NO: 63545 - DNA, 15 bp, Homo sapiens
ctctccccgcgttct

SEQ ID NO: 63546 - DNA, 15 bp, Homo sapiens
tctccccgcgttctg

SEQ ID NO: 63547 - DNA, 15 bp, Homo sapiens
ctccccgcgttctgt

SEQ ID NO: 63548 - DNA, 15 bp, Homo sapiens
tccccgcgttctgta

SEQ ID NO: 63549 - DNA, 15 bp, Homo sapiens
ccccgcgttctgtaa

SEQ ID NO: 63550 - DNA, 15 bp, Homo sapiens
cccgcgttctgtaag

SEQ ID NO: 63551 - DNA, 15 bp, Homo sapiens
ccgcgttctgtaaga

SEQ ID NO: 63552 - DNA, 15 bp, Homo sapiens
cgcgttctgtaagaa

SEQ ID NO: 63553 - DNA, 15 bp, Homo sapiens
gcgttctgtaagaat

SEQ ID NO: 63554 - DNA, 15 bp, Homo sapiens
cgttctgtaagaatc

SEQ ID NO: 63555 - DNA, 15 bp, Homo sapiens
gttctgtaagaatcg

SEQ ID NO: 63556 - DNA, 15 bp, Homo sapiens
ttctgtaagaatcgg

SEQ ID NO: 63557 - DNA, 15 bp, Homo sapiens
tctgtaagaatcggc

SEQ ID NO: 63558 - DNA, 15 bp, Homo sapiens
ctgtaagaatcggcg

SEQ ID NO: 63559 - DNA, 15 bp, Homo sapiens
tgtaagaatcggcgg

SEQ ID NO: 63560 - DNA, 15 bp, Homo sapiens
gtaagaatcggcggc

SEQ ID NO: 63561 - DNA, 15 bp, Homo sapiens
taagaatcggcggca

SEQ ID NO: 63562 - DNA, 15 bp, Homo sapiens
aagaatcggcggcag

SEQ ID NO: 63563 - DNA, 15 bp, Homo sapiens
agaatcggcggcagc

SEQ ID NO: 63564 - DNA, 15 bp, Homo sapiens
gaatcggcggcagcc

SEQ ID NO: 63565 - DNA, 15 bp, Homo sapiens
aatcggcggcagcca

SEQ ID NO: 63566 - DNA, 15 bp, Homo sapiens
atcggcggcagccag

SEQ ID NO: 63567 - DNA, 15 bp, Homo sapiens
tcggcggcagccagc

SEQ ID NO: 63568 - DNA, 15 bp, Homo sapiens
cggcggcagccagca

SEQ ID NO: 63569 - DNA, 15 bp, Homo sapiens
ggcggcagccagcag

SEQ ID NO: 63570 - DNA, 15 bp, Homo sapiens
gcggcagccagcagg

SEQ ID NO: 63571 - DNA, 15 bp, Homo sapiens
cggcagccagcaggc

SEQ ID NO: 63572 - DNA, 15 bp, Homo sapiens
ggcagccagcaggcg

SEQ ID NO: 63573 - DNA, 15 bp, Homo sapiens
gcagccagcaggcgg

SEQ ID NO: 63574 - DNA, 15 bp, Homo sapiens
cagccagcaggcggg

SEQ ID NO: 63575 - DNA, 15 bp, Homo sapiens
agccagcaggcgggg

SEQ ID NO: 63576 - DNA, 15 bp, Homo sapiens
gccagcaggcgggga

SEQ ID NO: 63577 - DNA, 15 bp, Homo sapiens
ccagcaggcggggag

SEQ ID NO: 63578 - DNA, 15 bp, Homo sapiens
cagcaggcggggagg

SEQ ID NO: 63579 - DNA, 15 bp, Homo sapiens
agcaggcggggaggc

SEQ ID NO: 63580 - DNA, 15 bp, Homo sapiens
gcaggcggggaggcg

SEQ ID NO: 63581 - DNA, 15 bp, Homo sapiens
caggcggggaggcgg

SEQ ID NO: 63582 - DNA, 15 bp, Homo sapiens
aggcggggaggcggg

SEQ ID NO: 63583 - DNA, 15 bp, Homo sapiens
ggcggggaggcgggg

SEQ ID NO: 63584 - DNA, 15 bp, Homo sapiens
gcggggaggcggggg

SEQ ID NO: 63585 - DNA, 15 bp, Homo sapiens
cggggaggcgggggc

SEQ ID NO: 63586 - DNA, 15 bp, Homo sapiens
ggggaggcgggggca

SEQ ID NO: 63587 - DNA, 15 bp, Homo sapiens
gggaggcgggggcac

SEQ ID NO: 63588 - DNA, 15 bp, Homo sapiens
ggaggcgggggcacg

SEQ ID NO: 63589 - DNA, 15 bp, Homo sapiens
gaggcgggggcacgt

SEQ ID NO: 63590 - DNA, 15 bp, Homo sapiens
aggcgggggcacgtg

SEQ ID NO: 63591 - DNA, 15 bp, Homo sapiens
ggcgggggcacgtgt

SEQ ID NO: 63592 - DNA, 15 bp, Homo sapiens
gcgggggcacgtgtt

SEQ ID NO: 63593 - DNA, 15 bp, Homo sapiens
cgggggcacgtgttt

SEQ ID NO: 63594 - DNA, 15 bp, Homo sapiens
gggggcacgtgtttg

SEQ ID NO: 63595 - DNA, 15 bp, Homo sapiens
ggggcacgtgtttgg

SEQ ID NO: 63596 - DNA, 15 bp, Homo sapiens
gggcacgtgtttgga

SEQ ID NO: 63597 - DNA, 15 bp, Homo sapiens
ggcacgtgtttggat

SEQ ID NO: 63598 - DNA, 15 bp, Homo sapiens
gcacgtgtttggatg

SEQ ID NO: 63599 - DNA, 15 bp, Homo sapiens
cacgtgtttggatgt

SEQ ID NO: 63600 - DNA, 15 bp, Homo sapiens
acgtgtttggatgtg

SEQ ID NO: 63601 - DNA, 15 bp, Homo sapiens
cgtgtttggatgtgg

SEQ ID NO: 63602 - DNA, 15 bp, Homo sapiens
gtgtttggatgtggg

SEQ ID NO: 63603 - DNA, 15 bp, Homo sapiens
tgtttggatgtgggt

SEQ ID NO: 63604 - DNA, 15 bp, Homo sapiens
gtttggatgtgggtg

SEQ ID NO: 63605 - DNA, 15 bp, Homo sapiens
tttggatgtgggtgc

SEQ ID NO: 63606 - DNA, 15 bp, Homo sapiens
ttggatgtgggtgct

SEQ ID NO: 63607 - DNA, 15 bp, Homo sapiens
tggatgtgggtgctt

SEQ ID NO: 63608 - DNA, 15 bp, Homo sapiens
ggatgtgggtgcttg

SEQ ID NO: 63609 - DNA, 15 bp, Homo sapiens
gatgtgggtgcttgt

SEQ ID NO: 63610 - DNA, 15 bp, Homo sapiens
atgtgggtgcttgtg

SEQ ID NO: 63611 - DNA, 15 bp, Homo sapiens
tgtgggtgcttgtgt

SEQ ID NO: 63612 - DNA, 15 bp, Homo sapiens
gtgggtgcttgtgta

SEQ ID NO: 63613 - DNA, 15 bp, Homo sapiens
tgggtgcttgtgtaa

SEQ ID NO: 63614 - DNA, 15 bp, Homo sapiens
gggtgcttgtgtaac

SEQ ID NO: 63615 - DNA, 15 bp, Homo sapiens
ggtgcttgtgtaacc

SEQ ID NO: 63616 - DNA, 15 bp, Homo sapiens
gtgcttgtgtaacca

SEQ ID NO: 63617 - DNA, 15 bp, Homo sapiens
tgcttgtgtaaccag

SEQ ID NO: 63618 - DNA, 15 bp, Homo sapiens
gcttgtgtaaccagt

SEQ ID NO: 63619 - DNA, 15 bp, Homo sapiens
cttgtgtaaccagtt

SEQ ID NO: 63620 - DNA, 15 bp, Homo sapiens
ttgtgtaaccagttc

SEQ ID NO: 63621 - DNA, 15 bp, Homo sapiens
tgtgtaaccagttcc

SEQ ID NO: 63622 - DNA, 15 bp, Homo sapiens
gtgtaaccagttccc

SEQ ID NO: 63623 - DNA, 15 bp, Homo sapiens
tgtaaccagttcccc

SEQ ID NO: 63624 - DNA, 15 bp, Homo sapiens
gtaaccagttcccca

SEQ ID NO: 63625 - DNA, 15 bp, Homo sapiens
taaccagttccccaa

SEQ ID NO: 63626 - DNA, 15 bp, Homo sapiens
aaccagttccccaag

SEQ ID NO: 63627 - DNA, 15 bp, Homo sapiens
accagttccccaagc

SEQ ID NO: 63628 - DNA, 15 bp, Homo sapiens
ccagttccccaagcg

SEQ ID NO: 63629 - DNA, 15 bp, Homo sapiens
cagttccccaagcgc

SEQ ID NO: 63630 - DNA, 15 bp, Homo sapiens
agttccccaagcgcc

SEQ ID NO: 63631 - DNA, 15 bp, Homo sapiens
gttccccaagcgcca

SEQ ID NO: 63632 - DNA, 15 bp, Homo sapiens
ttccccaagcgccag

SEQ ID NO: 63633 - DNA, 15 bp, Homo sapiens
tccccaagcgccagc

SEQ ID NO: 63634 - DNA, 15 bp, Homo sapiens
ccccaagcgccagcc

SEQ ID NO: 63635 - DNA, 15 bp, Homo sapiens
cccaagcgccagccc

SEQ ID NO: 63636 - DNA, 15 bp, Homo sapiens
ccaagcgccagcccc

SEQ ID NO: 63637 - DNA, 15 bp, Homo sapiens
caagcgccagccccg

SEQ ID NO: 63638 - DNA, 15 bp, Homo sapiens
aagcgccagccccga

SEQ ID NO: 63639 - DNA, 15 bp, Homo sapiens
agcgccagccccgac

SEQ ID NO: 63640 - DNA, 15 bp, Homo sapiens
gcgccagccccgaca

SEQ ID NO: 63641 - DNA, 15 bp, Homo sapiens
cgccagccccgacag

SEQ ID NO: 63642 - DNA, 15 bp, Homo sapiens
gccagccccgacagc

SEQ ID NO: 63643 - DNA, 15 bp, Homo sapiens
ccagccccgacagcg

SEQ ID NO: 63644 - DNA, 15 bp, Homo sapiens
cagccccgacagcgc

SEQ ID NO: 63645 - DNA, 15 bp, Homo sapiens
agccccgacagcgct

SEQ ID NO: 63646 - DNA, 15 bp, Homo sapiens
gccccgacagcgctc

SEQ ID NO: 63647 - DNA, 15 bp, Homo sapiens
ccccgacagcgctcc

SEQ ID NO: 63648 - DNA, 15 bp, Homo sapiens
cccgacagcgctcct

SEQ ID NO: 63649 - DNA, 15 bp, Homo sapiens
ccgacagcgctcctt

SEQ ID NO: 63650 - DNA, 15 bp, Homo sapiens
cgacagcgctccttc

SEQ ID NO: 63651 - DNA, 15 bp, Homo sapiens
gacagcgctccttcg

SEQ ID NO: 63652 - DNA, 15 bp, Homo sapiens
acagcgctccttcgg

SEQ ID NO: 63653 - DNA, 15 bp, Homo sapiens
cagcgctccttcggg

SEQ ID NO: 63654 - DNA, 15 bp, Homo sapiens
agcgctccttcggga

SEQ ID NO: 63655 - DNA, 15 bp, Homo sapiens
gcgctccttcgggag

SEQ ID NO: 63656 - DNA, 15 bp, Homo sapiens
cgctccttcgggagg

SEQ ID NO: 63657 - DNA, 15 bp, Homo sapiens
gctccttcgggaggc

SEQ ID NO: 63658 - DNA, 15 bp, Homo sapiens
ctccttcgggaggct

SEQ ID NO: 63659 - DNA, 15 bp, Homo sapiens
tccttcgggaggctg

SEQ ID NO: 63660 - DNA, 15 bp, Homo sapiens
ccttcgggaggctgg

SEQ ID NO: 63661 - DNA, 15 bp, Homo sapiens
cttcgggaggctggt

SEQ ID NO: 63662 - DNA, 15 bp, Homo sapiens
ttcgggaggctggtc

SEQ ID NO: 63663 - DNA, 15 bp, Homo sapiens
tcgggaggctggtcc

SEQ ID NO: 63664 - DNA, 15 bp, Homo sapiens
cgggaggctggtccg

SEQ ID NO: 63665 - DNA, 15 bp, Homo sapiens
gggaggctggtccga

SEQ ID NO: 63666 - DNA, 15 bp, Homo sapiens
ggaggctggtccgag

SEQ ID NO: 63667 - DNA, 15 bp, Homo sapiens
gaggctggtccgagc

SEQ ID NO: 63668 - DNA, 15 bp, Homo sapiens
aggctggtccgagcc

SEQ ID NO: 63669 - DNA, 15 bp, Homo sapiens
ggctggtccgagccc

SEQ ID NO: 63670 - DNA, 15 bp, Homo sapiens
gctggtccgagcccc

SEQ ID NO: 63671 - DNA, 15 bp, Homo sapiens
ctggtccgagcccct

SEQ ID NO: 63672 - DNA, 15 bp, Homo sapiens
tggtccgagcccctg

SEQ ID NO: 63673 - DNA, 15 bp, Homo sapiens
ggtccgagcccctgt

SEQ ID NO: 63674 - DNA, 15 bp, Homo sapiens
gtccgagcccctgtt

SEQ ID NO: 63675 - DNA, 15 bp, Homo sapiens
tccgagcccctgttt

SEQ ID NO: 63676 - DNA, 15 bp, Homo sapiens
ccgagcccctgtttc

SEQ ID NO: 63677 - DNA, 15 bp, Homo sapiens
cgagcccctgtttcc

SEQ ID NO: 63678 - DNA, 15 bp, Homo sapiens
gagcccctgtttccg

SEQ ID NO: 63679 - DNA, 15 bp, Homo sapiens
agcccctgtttccgc

SEQ ID NO: 63680 - DNA, 15 bp, Homo sapiens
gcccctgtttccgcc

SEQ ID NO: 63681 - DNA, 15 bp, Homo sapiens
cccctgtttccgccg

SEQ ID NO: 63682 - DNA, 15 bp, Homo sapiens
ccctgtttccgccgc

SEQ ID NO: 63683 - DNA, 15 bp, Homo sapiens
cctgtttccgccgcg

SEQ ID NO: 63684 - DNA, 15 bp, Homo sapiens
ctgtttccgccgcgg

SEQ ID NO: 63685 - DNA, 15 bp, Homo sapiens
tgtttccgccgcggc

SEQ ID NO: 63686 - DNA, 15 bp, Homo sapiens
gtttccgccgcggcg

SEQ ID NO: 63687 - DNA, 15 bp, Homo sapiens
tttccgccgcggcgc

SEQ ID NO: 63688 - DNA, 15 bp, Homo sapiens
ttccgccgcggcgca

SEQ ID NO: 63689 - DNA, 15 bp, Homo sapiens
tccgccgcggcgcag

SEQ ID NO: 63690 - DNA, 15 bp, Homo sapiens
ccgccgcggcgcagg

SEQ ID NO: 63691 - DNA, 15 bp, Homo sapiens
cgccgcggcgcagga

SEQ ID NO: 63692 - DNA, 15 bp, Homo sapiens
gccgcggcgcaggaa

SEQ ID NO: 63693 - DNA, 15 bp, Homo sapiens
ccgcggcgcaggaag

SEQ ID NO: 63694 - DNA, 15 bp, Homo sapiens
cgcggcgcaggaagg

SEQ ID NO: 63695 - DNA, 15 bp, Homo sapiens
gcggcgcaggaaggg

SEQ ID NO: 63696 - DNA, 15 bp, Homo sapiens
cggcgcaggaagggt

SEQ ID NO: 63697 - DNA, 15 bp, Homo sapiens
ggcgcaggaagggtt

SEQ ID NO: 63698 - DNA, 15 bp, Homo sapiens
gcgcaggaagggttg

SEQ ID NO: 63699 - DNA, 15 bp, Homo sapiens
cgcaggaagggttgg

SEQ ID NO: 63700 - DNA, 15 bp, Homo sapiens
gcaggaagggttggg

SEQ ID NO: 63701 - DNA, 15 bp, Homo sapiens
caggaagggttgggg

SEQ ID NO: 63702 - DNA, 15 bp, Homo sapiens
aggaagggttggggt

SEQ ID NO: 63703 - DNA, 15 bp, Homo sapiens
ggaagggttggggtt

SEQ ID NO: 63704 - DNA, 15 bp, Homo sapiens
gaagggttggggttc

SEQ ID NO: 63705 - DNA, 15 bp, Homo sapiens
aagggttggggttcc

SEQ ID NO: 63706 - DNA, 15 bp, Homo sapiens
agggttggggttccg

SEQ ID NO: 63707 - DNA, 15 bp, Homo sapiens
gggttggggttccgc

SEQ ID NO: 63708 - DNA, 15 bp, Homo sapiens
ggttggggttccgct

SEQ ID NO: 63709 - DNA, 15 bp, Homo sapiens
gttggggttccgctg

SEQ ID NO: 63710 - DNA, 15 bp, Homo sapiens
ttggggttccgctgc

SEQ ID NO: 63711 - DNA, 15 bp, Homo sapiens
tggggttccgctgcc

SEQ ID NO: 63712 - DNA, 15 bp, Homo sapiens
ggggttccgctgcct

SEQ ID NO: 63713 - DNA, 15 bp, Homo sapiens
gggttccgctgcctg

SEQ ID NO: 63714 - DNA, 15 bp, Homo sapiens
ggttccgctgcctgc

SEQ ID NO: 63715 - DNA, 15 bp, Homo sapiens
gttccgctgcctgca

SEQ ID NO: 63716 - DNA, 15 bp, Homo sapiens
ttccgctgcctgcac

SEQ ID NO: 63717 - DNA, 15 bp, Homo sapiens
tccgctgcctgcacc

SEQ ID NO: 63718 - DNA, 15 bp, Homo sapiens
ccgctgcctgcacca

SEQ ID NO: 63719 - DNA, 15 bp, Homo sapiens
cgctgcctgcaccag

SEQ ID NO: 63720 - DNA, 15 bp, Homo sapiens
gctgcctgcaccagg

SEQ ID NO: 63721 - DNA, 15 bp, Homo sapiens
ctgcctgcaccaggc

SEQ ID NO: 63722 - DNA, 15 bp, Homo sapiens
tgcctgcaccaggca

SEQ ID NO: 63723 - DNA, 15 bp, Homo sapiens
gcctgcaccaggcaa

SEQ ID NO: 63724 - DNA, 15 bp, Homo sapiens
cctgcaccaggcaag

SEQ ID NO: 63725 - DNA, 15 bp, Homo sapiens
ctgcaccaggcaaga

SEQ ID NO: 63726 - DNA, 15 bp, Homo sapiens
tgcaccaggcaagag

SEQ ID NO: 63727 - DNA, 15 bp, Homo sapiens
gcaccaggcaagagc

SEQ ID NO: 63728 - DNA, 15 bp, Homo sapiens
caccaggcaagagca

SEQ ID NO: 63729 - DNA, 15 bp, Homo sapiens
accaggcaagagcac

SEQ ID NO: 63730 - DNA, 15 bp, Homo sapiens
ccaggcaagagcacc

SEQ ID NO: 63731 - DNA, 15 bp, Homo sapiens
caggcaagagcaccc

SEQ ID NO: 63732 - DNA, 15 bp, Homo sapiens
aggcaagagcacccc

SEQ ID NO: 63733 - DNA, 15 bp, Homo sapiens
ggcaagagcaccccg

SEQ ID NO: 63734 - DNA, 15 bp, Homo sapiens
gcaagagcaccccga

SEQ ID NO: 63735 - DNA, 15 bp, Homo sapiens
caagagcaccccgag

SEQ ID NO: 63736 - DNA, 15 bp, Homo sapiens
aagagcaccccgagc

SEQ ID NO: 63737 - DNA, 15 bp, Homo sapiens
agagcaccccgagca

SEQ ID NO: 63738 - DNA, 15 bp, Homo sapiens
gagcaccccgagcaa

SEQ ID NO: 63739 - DNA, 15 bp, Homo sapiens
agcaccccgagcaaa

SEQ ID NO: 63740 - DNA, 15 bp, Homo sapiens
gcaccccgagcaaag

SEQ ID NO: 63741 - DNA, 15 bp, Homo sapiens
caccccgagcaaagg

SEQ ID NO: 63742 - DNA, 15 bp, Homo sapiens
accccgagcaaagga

SEQ ID NO: 63743 - DNA, 15 bp, Homo sapiens
ccccgagcaaaggaa

SEQ ID NO: 63744 - DNA, 15 bp, Homo sapiens
cccgagcaaaggaag

SEQ ID NO: 63745 - DNA, 15 bp, Homo sapiens
ccgagcaaaggaaga

SEQ ID NO: 63746 - DNA, 15 bp, Homo sapiens
cgagcaaaggaagaa

SEQ ID NO: 63747 - DNA, 15 bp, Homo sapiens
gagcaaaggaagaag

SEQ ID NO: 63748 - DNA, 15 bp, Homo sapiens
agcaaaggaagaaga

SEQ ID NO: 63749 - DNA, 15 bp, Homo sapiens
gcaaaggaagaagac

SEQ ID NO: 63750 - DNA, 15 bp, Homo sapiens
caaaggaagaagacg

SEQ ID NO: 63751 - DNA, 15 bp, Homo sapiens
aaaggaagaagacga

SEQ ID NO: 63752 - DNA, 15 bp, Homo sapiens
aaggaagaagacgac

SEQ ID NO: 63753 - DNA, 15 bp, Homo sapiens
aggaagaagacgact

SEQ ID NO: 63754 - DNA, 15 bp, Homo sapiens
ggaagaagacgactt

SEQ ID NO: 63755 - DNA, 15 bp, Homo sapiens
gaagaagacgacttg

SEQ ID NO: 63756 - DNA, 15 bp, Homo sapiens
aagaagacgacttgc

SEQ ID NO: 63757 - DNA, 15 bp, Homo sapiens
agaagacgacttgcc

SEQ ID NO: 63758 - DNA, 15 bp, Homo sapiens
gaagacgacttgcct

SEQ ID NO: 63759 - DNA, 15 bp, Homo sapiens
aagacgacttgcctc

SEQ ID NO: 63760 - DNA, 15 bp, Homo sapiens
agacgacttgcctcc

SEQ ID NO: 63761 - DNA, 15 bp, Homo sapiens
gacgacttgcctccg

SEQ ID NO: 63762 - DNA, 15 bp, Homo sapiens
acgacttgcctccgg

SEQ ID NO: 63763 - DNA, 15 bp, Homo sapiens
cgacttgcctccgga

SEQ ID NO: 63764 - DNA, 15 bp, Homo sapiens
gacttgcctccggag

SEQ ID NO: 63765 - DNA, 15 bp, Homo sapiens
acttgcctccggagc

SEQ ID NO: 63766 - DNA, 15 bp, Homo sapiens
cttgcctccggagct

SEQ ID NO: 63767 - DNA, 15 bp, Homo sapiens
ttgcctccggagcta

SEQ ID NO: 63768 - DNA, 15 bp, Homo sapiens
tgcctccggagctat

SEQ ID NO: 63769 - DNA, 15 bp, Homo sapiens
gcctccggagctatc

SEQ ID NO: 63770 - DNA, 15 bp, Homo sapiens
cctccggagctatca

SEQ ID NO: 63771 - DNA, 15 bp, Homo sapiens
ctccggagctatcac

SEQ ID NO: 63772 - DNA, 15 bp, Homo sapiens
tccggagctatcact

SEQ ID NO: 63773 - DNA, 15 bp, Homo sapiens
ccggagctatcactg

SEQ ID NO: 63774 - DNA, 15 bp, Homo sapiens
cggagctatcactgg

SEQ ID NO: 63775 - DNA, 15 bp, Homo sapiens
ggagctatcactggg

SEQ ID NO: 63776 - DNA, 15 bp, Homo sapiens
gagctatcactgggg

SEQ ID NO: 63777 - DNA, 15 bp, Homo sapiens
agctatcactgggga

SEQ ID NO: 63778 - DNA, 15 bp, Homo sapiens
gctatcactggggag

SEQ ID NO: 63779 - DNA, 15 bp, Homo sapiens
ctatcactggggagt

SEQ ID NO: 63780 - DNA, 15 bp, Homo sapiens
tatcactggggagtg

SEQ ID NO: 63781 - DNA, 15 bp, Homo sapiens
atcactggggagtgg

SEQ ID NO: 63782 - DNA, 15 bp, Homo sapiens
tcactggggagtggg

SEQ ID NO: 63783 - DNA, 15 bp, Homo sapiens
cactggggagtggga

SEQ ID NO: 63784 - DNA, 15 bp, Homo sapiens
actggggagtgggaa

SEQ ID NO: 63785 - DNA, 15 bp, Homo sapiens
ctggggagtgggaat

SEQ ID NO: 63786 - DNA, 15 bp, Homo sapiens
tggggagtgggaatt

SEQ ID NO: 63787 - DNA, 15 bp, Homo sapiens
ggggagtgggaattt

SEQ ID NO: 63788 - DNA, 15 bp, Homo sapiens
gggagtgggaatttg

SEQ ID NO: 63789 - DNA, 15 bp, Homo sapiens
ggagtgggaatttgg

SEQ ID NO: 63790 - DNA, 15 bp, Homo sapiens
gagtgggaatttgga

SEQ ID NO: 63791 - DNA, 15 bp, Homo sapiens
agtgggaatttggaa

SEQ ID NO: 63792 - DNA, 15 bp, Homo sapiens
gtgggaatttggaaa

SEQ ID NO: 63793 - DNA, 15 bp, Homo sapiens
tgggaatttggaaag

SEQ ID NO: 63794 - DNA, 15 bp, Homo sapiens
gggaatttggaaagt

SEQ ID NO: 63795 - DNA, 15 bp, Homo sapiens
ggaatttggaaagtt

SEQ ID NO: 63796 - DNA, 15 bp, Homo sapiens
gaatttggaaagttc

SEQ ID NO: 63797 - DNA, 15 bp, Homo sapiens
aatttggaaagttcc

SEQ ID NO: 63798 - DNA, 15 bp, Homo sapiens
atttggaaagttccc

SEQ ID NO: 63799 - DNA, 15 bp, Homo sapiens
tttggaaagttcccc

SEQ ID NO: 63800 - DNA, 15 bp, Homo sapiens
ttggaaagttcccca

SEQ ID NO: 63801 - DNA, 15 bp, Homo sapiens
tggaaagttccccaa

SEQ ID NO: 63802 - DNA, 15 bp, Homo sapiens
ggaaagttccccaac

SEQ ID NO: 63803 - DNA, 15 bp, Homo sapiens
gaaagttccccaact

SEQ ID NO: 63804 - DNA, 15 bp, Homo sapiens
aaagttccccaacta

SEQ ID NO: 63805 - DNA, 15 bp, Homo sapiens
aagttccccaactag

SEQ ID NO: 63806 - DNA, 15 bp, Homo sapiens
agttccccaactagg

SEQ ID NO: 63807 - DNA, 15 bp, Homo sapiens
gttccccaactaggg

SEQ ID NO: 63808 - DNA, 15 bp, Homo sapiens
ttccccaactaggga

SEQ ID NO: 63809 - DNA, 15 bp, Homo sapiens
tccccaactagggac

SEQ ID NO: 63810 - DNA, 15 bp, Homo sapiens
ccccaactagggaca

SEQ ID NO: 63811 - DNA, 15 bp, Homo sapiens
cccaactagggacac

SEQ ID NO: 63812 - DNA, 15 bp, Homo sapiens
ccaactagggacaca

SEQ ID NO: 63813 - DNA, 15 bp, Homo sapiens
caactagggacacac

SEQ ID NO: 63814 - DNA, 15 bp, Homo sapiens
aactagggacacacg

SEQ ID NO: 63815 - DNA, 15 bp, Homo sapiens
actagggacacacgt

SEQ ID NO: 63816 - DNA, 15 bp, Homo sapiens
ctagggacacacgtg

SEQ ID NO: 63817 - DNA, 15 bp, Homo sapiens
tagggacacacgtga

SEQ ID NO: 63818 - DNA, 15 bp, Homo sapiens
agggacacacgtgac

SEQ ID NO: 63819 - DNA, 15 bp, Homo sapiens
gggacacacgtgacc

SEQ ID NO: 63820 - DNA, 15 bp, Homo sapiens
ggacacacgtgacct

SEQ ID NO: 63821 - DNA, 15 bp, Homo sapiens
gacacacgtgacctc

SEQ ID NO: 63822 - DNA, 15 bp, Homo sapiens
acacacgtgacctcc

SEQ ID NO: 63823 - DNA, 15 bp, Homo sapiens
cacacgtgacctcct

SEQ ID NO: 63824 - DNA, 15 bp, Homo sapiens
acacgtgacctcctt

SEQ ID NO: 63825 - DNA, 15 bp, Homo sapiens
cacgtgacctccttc

SEQ ID NO: 63826 - DNA, 15 bp, Homo sapiens
acgtgacctccttcg

SEQ ID NO: 63827 - DNA, 15 bp, Homo sapiens
cgtgacctccttcgg

SEQ ID NO: 63828 - DNA, 15 bp, Homo sapiens
gtgacctccttcgga

SEQ ID NO: 63829 - DNA, 15 bp, Homo sapiens
tgacctccttcggaa

SEQ ID NO: 63830 - DNA, 15 bp, Homo sapiens
gacctccttcggaaa

SEQ ID NO: 63831 - DNA, 15 bp, Homo sapiens
acctccttcggaaag

SEQ ID NO: 63832 - DNA, 15 bp, Homo sapiens
cctccttcggaaagt

SEQ ID NO: 63833 - DNA, 15 bp, Homo sapiens
ctccttcggaaagta

SEQ ID NO: 63834 - DNA, 15 bp, Homo sapiens
tccttcggaaagtag

SEQ ID NO: 63835 - DNA, 15 bp, Homo sapiens
ccttcggaaagtagt

SEQ ID NO: 63836 - DNA, 15 bp, Homo sapiens
cttcggaaagtagtt

SEQ ID NO: 63837 - DNA, 15 bp, Homo sapiens
ttcggaaagtagttc

SEQ ID NO: 63838 - DNA, 15 bp, Homo sapiens
tcggaaagtagttcc

SEQ ID NO: 63839 - DNA, 15 bp, Homo sapiens
cggaaagtagttccg

SEQ ID NO: 63840 - DNA, 15 bp, Homo sapiens
ggaaagtagttccga

SEQ ID NO: 63841 - DNA, 15 bp, Homo sapiens
gaaagtagttccgac

SEQ ID NO: 63842 - DNA, 15 bp, Homo sapiens
aaagtagttccgact

SEQ ID NO: 63843 - DNA, 15 bp, Homo sapiens
aagtagttccgactg

SEQ ID NO: 63844 - DNA, 15 bp, Homo sapiens
agtagttccgactgt

SEQ ID NO: 63845 - DNA, 15 bp, Homo sapiens
gtagttccgactgtg

SEQ ID NO: 63846 - DNA, 15 bp, Homo sapiens
tagttccgactgtgg

SEQ ID NO: 63847 - DNA, 15 bp, Homo sapiens
agttccgactgtggc

SEQ ID NO: 63848 - DNA, 15 bp, Homo sapiens
gttccgactgtggcc

SEQ ID NO: 63849 - DNA, 15 bp, Homo sapiens
ttccgactgtggccc

SEQ ID NO: 63850 - DNA, 15 bp, Homo sapiens
tccgactgtggcccg

SEQ ID NO: 63851 - DNA, 15 bp, Homo sapiens
ccgactgtggcccgt

SEQ ID NO: 63852 - DNA, 15 bp, Homo sapiens
cgactgtggcccgtg

SEQ ID NO: 63853 - DNA, 15 bp, Homo sapiens
gactgtggcccgtgt

SEQ ID NO: 63854 - DNA, 15 bp, Homo sapiens
actgtggcccgtgta

SEQ ID NO: 63855 - DNA, 15 bp, Homo sapiens
ctgtggcccgtgtat

SEQ ID NO: 63856 - DNA, 15 bp, Homo sapiens
tgtggcccgtgtatc

SEQ ID NO: 63857 - DNA, 15 bp, Homo sapiens
gtggcccgtgtatcc

SEQ ID NO: 63858 - DNA, 15 bp, Homo sapiens
tggcccgtgtatcct

SEQ ID NO: 63859 - DNA, 15 bp, Homo sapiens
ggcccgtgtatcctt

SEQ ID NO: 63860 - DNA, 15 bp, Homo sapiens
gcccgtgtatccttc

SEQ ID NO: 63861 - DNA, 15 bp, Homo sapiens
cccgtgtatccttcc

SEQ ID NO: 63862 - DNA, 15 bp, Homo sapiens
ccgtgtatccttcca

SEQ ID NO: 63863 - DNA, 15 bp, Homo sapiens
cgtgtatccttccac

SEQ ID NO: 63864 - DNA, 15 bp, Homo sapiens
gtgtatccttccacc

SEQ ID NO: 63865 - DNA, 15 bp, Homo sapiens
tgtatccttccacct

SEQ ID NO: 63866 - DNA, 15 bp, Homo sapiens
gtatccttccacctc

SEQ ID NO: 63867 - DNA, 15 bp, Homo sapiens
tatccttccacctcc

SEQ ID NO: 63868 - DNA, 15 bp, Homo sapiens
atccttccacctcct

SEQ ID NO: 63869 - DNA, 15 bp, Homo sapiens
tccttccacctcctt

SEQ ID NO: 63870 - DNA, 15 bp, Homo sapiens
ccttccacctccttt

SEQ ID NO: 63871 - DNA, 15 bp, Homo sapiens
cttccacctcctttt

SEQ ID NO: 63872 - DNA, 15 bp, Homo sapiens
ttccacctccttttg

SEQ ID NO: 63873 - DNA, 15 bp, Homo sapiens
tccacctccttttga

SEQ ID NO: 63874 - DNA, 15 bp, Homo sapiens
ccacctccttttgaa

SEQ ID NO: 63875 - DNA, 15 bp, Homo sapiens
cacctccttttgaac

SEQ ID NO: 63876 - DNA, 15 bp, Homo sapiens
acctccttttgaacc

SEQ ID NO: 63877 - DNA, 15 bp, Homo sapiens
cctccttttgaaccc

SEQ ID NO: 63878 - DNA, 15 bp, Homo sapiens
ctccttttgaaccct

SEQ ID NO: 63879 - DNA, 15 bp, Homo sapiens
tccttttgaaccctc

SEQ ID NO: 63880 - DNA, 15 bp, Homo sapiens
ccttttgaaccctcc

SEQ ID NO: 63881 - DNA, 15 bp, Homo sapiens
cttttgaaccctcct

SEQ ID NO: 63882 - DNA, 15 bp, Homo sapiens
ttttgaaccctccta

SEQ ID NO: 63883 - DNA, 15 bp, Homo sapiens
tttgaaccctcctag

SEQ ID NO: 63884 - DNA, 15 bp, Homo sapiens
ttgaaccctcctagg

SEQ ID NO: 63885 - DNA, 15 bp, Homo sapiens
tgaaccctcctaggt

SEQ ID NO: 63886 - DNA, 15 bp, Homo sapiens
gaaccctcctaggtc

SEQ ID NO: 63887 - DNA, 15 bp, Homo sapiens
aaccctcctaggtct

SEQ ID NO: 63888 - DNA, 15 bp, Homo sapiens
accctcctaggtctc

SEQ ID NO: 63889 - DNA, 15 bp, Homo sapiens
ccctcctaggtctcc

SEQ ID NO: 63890 - DNA, 15 bp, Homo sapiens
cctcctaggtctcct

SEQ ID NO: 63891 - DNA, 15 bp, Homo sapiens
ctcctaggtctcctc

SEQ ID NO: 63892 - DNA, 15 bp, Homo sapiens
tcctaggtctcctcg

SEQ ID NO: 63893 - DNA, 15 bp, Homo sapiens
cctaggtctcctcgc

SEQ ID NO: 63894 - DNA, 15 bp, Homo sapiens
ctaggtctcctcgcc

SEQ ID NO: 63895 - DNA, 15 bp, Homo sapiens
taggtctcctcgccc

SEQ ID NO: 63896 - DNA, 15 bp, Homo sapiens
aggtctcctcgcccc

SEQ ID NO: 63897 - DNA, 15 bp, Homo sapiens
ggtctcctcgccccg

SEQ ID NO: 63898 - DNA, 15 bp, Homo sapiens
gtctcctcgccccgc

SEQ ID NO: 63899 - DNA, 15 bp, Homo sapiens
tctcctcgccccgcc

SEQ ID NO: 63900 - DNA, 15 bp, Homo sapiens
ctcctcgccccgccc

SEQ ID NO: 63901 - DNA, 15 bp, Homo sapiens
tcctcgccccgccca

SEQ ID NO: 63902 - DNA, 15 bp, Homo sapiens
cctcgccccgcccac

SEQ ID NO: 63903 - DNA, 15 bp, Homo sapiens
ctcgccccgcccact

SEQ ID NO: 63904 - DNA, 15 bp, Homo sapiens
tcgccccgcccactc

SEQ ID NO: 63905 - DNA, 15 bp, Homo sapiens
cgccccgcccactcg

SEQ ID NO: 63906 - DNA, 15 bp, Homo sapiens
gccccgcccactcgc

SEQ ID NO: 63907 - DNA, 15 bp, Homo sapiens
ccccgcccactcgct

SEQ ID NO: 63908 - DNA, 15 bp, Homo sapiens
cccgcccactcgctg

SEQ ID NO: 63909 - DNA, 15 bp, Homo sapiens
ccgcccactcgctgg

SEQ ID NO: 63910 - DNA, 15 bp, Homo sapiens
cgcccactcgctggg

SEQ ID NO: 63911 - DNA, 15 bp, Homo sapiens
gcccactcgctgggc

SEQ ID NO: 63912 - DNA, 15 bp, Homo sapiens
cccactcgctgggct

SEQ ID NO: 63913 - DNA, 15 bp, Homo sapiens
ccactcgctgggctg

SEQ ID NO: 63914 - DNA, 15 bp, Homo sapiens
cactcgctgggctgc

SEQ ID NO: 63915 - DNA, 15 bp, Homo sapiens
actcgctgggctgca

SEQ ID NO: 63916 - DNA, 15 bp, Homo sapiens
ctcgctgggctgcag

SEQ ID NO: 63917 - DNA, 15 bp, Homo sapiens
tcgctgggctgcagc

SEQ ID NO: 63918 - DNA, 15 bp, Homo sapiens
cgctgggctgcagct

SEQ ID NO: 63919 - DNA, 15 bp, Homo sapiens
gctgggctgcagctt

SEQ ID NO: 63920 - DNA, 15 bp, Homo sapiens
ctgggctgcagcttc

SEQ ID NO: 63921 - DNA, 15 bp, Homo sapiens
tgggctgcagcttcc

SEQ ID NO: 63922 - DNA, 15 bp, Homo sapiens
gggctgcagcttcct

SEQ ID NO: 63923 - DNA, 15 bp, Homo sapiens
ggctgcagcttccta

SEQ ID NO: 63924 - DNA, 15 bp, Homo sapiens
gctgcagcttcctac

SEQ ID NO: 63925 - DNA, 15 bp, Homo sapiens
ctgcagcttcctacc

SEQ ID NO: 63926 - DNA, 15 bp, Homo sapiens
tgcagcttcctaccg

SEQ ID NO: 63927 - DNA, 15 bp, Homo sapiens
gcagcttcctaccgt

SEQ ID NO: 63928 - DNA, 15 bp, Homo sapiens
cagcttcctaccgtt

SEQ ID NO: 63929 - DNA, 15 bp, Homo sapiens
agcttcctaccgttc

SEQ ID NO: 63930 - DNA, 15 bp, Homo sapiens
gcttcctaccgttcc

SEQ ID NO: 63931 - DNA, 15 bp, Homo sapiens
cttcctaccgttccg

SEQ ID NO: 63932 - DNA, 15 bp, Homo sapiens
ttcctaccgttccgt

SEQ ID NO: 63933 - DNA, 15 bp, Homo sapiens
tcctaccgttccgta

SEQ ID NO: 63934 - DNA, 15 bp, Homo sapiens
cctaccgttccgtac

SEQ ID NO: 63935 - DNA, 15 bp, Homo sapiens
ctaccgttccgtact

SEQ ID NO: 63936 - DNA, 15 bp, Homo sapiens
taccgttccgtactt

SEQ ID NO: 63937 - DNA, 15 bp, Homo sapiens
accgttccgtacttt

SEQ ID NO: 63938 - DNA, 15 bp, Homo sapiens
ccgttccgtactttc

SEQ ID NO: 63939 - DNA, 15 bp, Homo sapiens
cgttccgtactttcc

SEQ ID NO: 63940 - DNA, 15 bp, Homo sapiens
gttccgtactttcca

SEQ ID NO: 63941 - DNA, 15 bp, Homo sapiens
ttccgtactttccac

SEQ ID NO: 63942 - DNA, 15 bp, Homo sapiens
tccgtactttccact

SEQ ID NO: 63943 - DNA, 15 bp, Homo sapiens
ccgtactttccactc

SEQ ID NO: 63944 - DNA, 15 bp, Homo sapiens
cgtactttccactca

SEQ ID NO: 63945 - DNA, 15 bp, Homo sapiens
gtactttccactcaa

SEQ ID NO: 63946 - DNA, 15 bp, Homo sapiens
tactttccactcaac

SEQ ID NO: 63947 - DNA, 15 bp, Homo sapiens
actttccactcaacc

SEQ ID NO: 63948 - DNA, 15 bp, Homo sapiens
ctttccactcaaccc

SEQ ID NO: 63949 - DNA, 15 bp, Homo sapiens
tttccactcaacccg

SEQ ID NO: 63950 - DNA, 15 bp, Homo sapiens
ttccactcaacccgg

SEQ ID NO: 63951 - DNA, 15 bp, Homo sapiens
tccactcaacccggt

SEQ ID NO: 63952 - DNA, 15 bp, Homo sapiens
ccactcaacccggta

SEQ ID NO: 63953 - DNA, 15 bp, Homo sapiens
cactcaacccggtaa

SEQ ID NO: 63954 - DNA, 15 bp, Homo sapiens
actcaacccggtaac

SEQ ID NO: 63955 - DNA, 15 bp, Homo sapiens
ctcaacccggtaacc

SEQ ID NO: 63956 - DNA, 15 bp, Homo sapiens
tcaacccggtaaccc

SEQ ID NO: 63957 - DNA, 15 bp, Homo sapiens
caacccggtaacccc

SEQ ID NO: 63958 - DNA, 15 bp, Homo sapiens
aacccggtaacccca

SEQ ID NO: 63959 - DNA, 15 bp, Homo sapiens
acccggtaaccccaa

SEQ ID NO: 63960 - DNA, 15 bp, Homo sapiens
cccggtaaccccaaa

SEQ ID NO: 63961 - DNA, 15 bp, Homo sapiens
ccggtaaccccaaac

SEQ ID NO: 63962 - DNA, 15 bp, Homo sapiens
cggtaaccccaaacg

SEQ ID NO: 63963 - DNA, 15 bp, Homo sapiens
ggtaaccccaaacgt

SEQ ID NO: 63964 - DNA, 15 bp, Homo sapiens
gtaaccccaaacgtg

SEQ ID NO: 63965 - DNA, 15 bp, Homo sapiens
taaccccaaacgtgc

SEQ ID NO: 63966 - DNA, 15 bp, Homo sapiens
aaccccaaacgtgca

SEQ ID NO: 63967 - DNA, 15 bp, Homo sapiens
accccaaacgtgcac

SEQ ID NO: 63968 - DNA, 15 bp, Homo sapiens
ccccaaacgtgcacg

SEQ ID NO: 63969 - DNA, 15 bp, Homo sapiens
cccaaacgtgcacgg

SEQ ID NO: 63970 - DNA, 15 bp, Homo sapiens
ccaaacgtgcacggt

SEQ ID NO: 63971 - DNA, 15 bp, Homo sapiens
caaacgtgcacggtc

SEQ ID NO: 63972 - DNA, 15 bp, Homo sapiens
aaacgtgcacggtcc

SEQ ID NO: 63973 - DNA, 15 bp, Homo sapiens
aacgtgcacggtccg

SEQ ID NO: 63974 - DNA, 15 bp, Homo sapiens
acgtgcacggtccgg

SEQ ID NO: 63975 - DNA, 15 bp, Homo sapiens
cgtgcacggtccggc

SEQ ID NO: 63976 - DNA, 15 bp, Homo sapiens
gtgcacggtccggcc

SEQ ID NO: 63977 - DNA, 15 bp, Homo sapiens
tgcacggtccggccg

SEQ ID NO: 63978 - DNA, 15 bp, Homo sapiens
gcacggtccggccgg

SEQ ID NO: 63979 - DNA, 15 bp, Homo sapiens
cacggtccggccggg

SEQ ID NO: 63980 - DNA, 15 bp, Homo sapiens
acggtccggccgggg

SEQ ID NO: 63981 - DNA, 15 bp, Homo sapiens
cggtccggccggggc

SEQ ID NO: 63982 - DNA, 15 bp, Homo sapiens
ggtccggccggggcg

SEQ ID NO: 63983 - DNA, 15 bp, Homo sapiens
gtccggccggggcgc

SEQ ID NO: 63984 - DNA, 15 bp, Homo sapiens
tccggccggggcgcg

SEQ ID NO: 63985 - DNA, 15 bp, Homo sapiens
ccggccggggcgcgc

SEQ ID NO: 63986 - DNA, 15 bp, Homo sapiens
cggccggggcgcgcg

SEQ ID NO: 63987 - DNA, 15 bp, Homo sapiens
ggccggggcgcgcgg

SEQ ID NO: 63988 - DNA, 15 bp, Homo sapiens
gccggggcgcgcgga

SEQ ID NO: 63989 - DNA, 15 bp, Homo sapiens
ccggggcgcgcggag

SEQ ID NO: 63990 - DNA, 15 bp, Homo sapiens
cggggcgcgcggagc

SEQ ID NO: 63991 - DNA, 15 bp, Homo sapiens
ggggcgcgcggagcc

SEQ ID NO: 63992 - DNA, 15 bp, Homo sapiens
gggcgcgcggagcct

SEQ ID NO: 63993 - DNA, 15 bp, Homo sapiens
ggcgcgcggagcctg

SEQ ID NO: 63994 - DNA, 15 bp, Homo sapiens
gcgcgcggagcctgg

SEQ ID NO: 63995 - DNA, 15 bp, Homo sapiens
cgcgcggagcctggc

SEQ ID NO: 63996 - DNA, 15 bp, Homo sapiens
gcgcggagcctggcc

SEQ ID NO: 63997 - DNA, 15 bp, Homo sapiens
cgcggagcctggccc

SEQ ID NO: 63998 - DNA, 15 bp, Homo sapiens
gcggagcctggcccc

SEQ ID NO: 63999 - DNA, 15 bp, Homo sapiens
cggagcctggccccg

SEQ ID NO: 64000 - DNA, 15 bp, Homo sapiens
ggagcctggccccgg

SEQ ID NO: 64001 - DNA, 15 bp, Homo sapiens
gagcctggccccggg

SEQ ID NO: 64002 - DNA, 15 bp, Homo sapiens
agcctggccccgggc

SEQ ID NO: 64003 - DNA, 15 bp, Homo sapiens
gcctggccccgggcg

SEQ ID NO: 64004 - DNA, 15 bp, Homo sapiens
cctggccccgggcga

SEQ ID NO: 64005 - DNA, 15 bp, Homo sapiens
ctggccccgggcgat

SEQ ID NO: 64006 - DNA, 15 bp, Homo sapiens
tggccccgggcgatc

SEQ ID NO: 64007 - DNA, 15 bp, Homo sapiens
ggccccgggcgatcc

SEQ ID NO: 64008 - DNA, 15 bp, Homo sapiens
gccccgggcgatcca

SEQ ID NO: 64009 - DNA, 15 bp, Homo sapiens
ccccgggcgatccat

SEQ ID NO: 64010 - DNA, 15 bp, Homo sapiens
cccgggcgatccatc

SEQ ID NO: 64011 - DNA, 15 bp, Homo sapiens
ccgggcgatccatcc

SEQ ID NO: 64012 - DNA, 15 bp, Homo sapiens
cgggcgatccatcct

SEQ ID NO: 64013 - DNA, 15 bp, Homo sapiens
gggcgatccatcctg

SEQ ID NO: 64014 - DNA, 15 bp, Homo sapiens
ggcgatccatcctgc

SEQ ID NO: 64015 - DNA, 15 bp, Homo sapiens
gcgatccatcctgcc

SEQ ID NO: 64016 - DNA, 15 bp, Homo sapiens
cgatccatcctgccg

SEQ ID NO: 64017 - DNA, 15 bp, Homo sapiens
gatccatcctgccgg

SEQ ID NO: 64018 - DNA, 15 bp, Homo sapiens
atccatcctgccggg

SEQ ID NO: 64019 - DNA, 15 bp, Homo sapiens
tccatcctgccgggt

SEQ ID NO: 64020 - DNA, 15 bp, Homo sapiens
ccatcctgccgggtt

SEQ ID NO: 64021 - DNA, 15 bp, Homo sapiens
catcctgccgggttt

SEQ ID NO: 64022 - DNA, 15 bp, Homo sapiens
atcctgccgggtttt

SEQ ID NO: 64023 - DNA, 15 bp, Homo sapiens
tcctgccgggttttc

SEQ ID NO: 64024 - DNA, 15 bp, Homo sapiens
cctgccgggttttca

SEQ ID NO: 64025 - DNA, 15 bp, Homo sapiens
ctgccgggttttcac

SEQ ID NO: 64026 - DNA, 15 bp, Homo sapiens
tgccgggttttcacg

SEQ ID NO: 64027 - DNA, 15 bp, Homo sapiens
gccgggttttcacgg

SEQ ID NO: 64028 - DNA, 15 bp, Homo sapiens
ccgggttttcacggc

SEQ ID NO: 64029 - DNA, 15 bp, Homo sapiens
cgggttttcacggcg

SEQ ID NO: 64030 - DNA, 15 bp, Homo sapiens
gggttttcacggcgg

SEQ ID NO: 64031 - DNA, 15 bp, Homo sapiens
ggttttcacggcggc

SEQ ID NO: 64032 - DNA, 15 bp, Homo sapiens
gttttcacggcggcc

SEQ ID NO: 64033 - DNA, 15 bp, Homo sapiens
ttttcacggcggcca

SEQ ID NO: 64034 - DNA, 15 bp, Homo sapiens
tttcacggcggccaa

SEQ ID NO: 64035 - DNA, 15 bp, Homo sapiens
ttcacggcggccaag

SEQ ID NO: 64036 - DNA, 15 bp, Homo sapiens
tcacggcggccaagg

SEQ ID NO: 64037 - DNA, 15 bp, Homo sapiens
cacggcggccaaggg

SEQ ID NO: 64038 - DNA, 15 bp, Homo sapiens
acggcggccaagggg

SEQ ID NO: 64039 - DNA, 15 bp, Homo sapiens
cggcggccaaggggg

SEQ ID NO: 64040 - DNA, 15 bp, Homo sapiens
ggcggccaagggggg

SEQ ID NO: 64041 - DNA, 15 bp, Homo sapiens
gcggccaaggggggg

SEQ ID NO: 64042 - DNA, 15 bp, Homo sapiens
cggccaagggggggc

SEQ ID NO: 64043 - DNA, 15 bp, Homo sapiens
ggccaagggggggcg

SEQ ID NO: 64044 - DNA, 15 bp, Homo sapiens
gccaagggggggcgg

SEQ ID NO: 64045 - DNA, 15 bp, Homo sapiens
ccaagggggggcggg

SEQ ID NO: 64046 - DNA, 15 bp, Homo sapiens
caagggggggcgggg

SEQ ID NO: 64047 - DNA, 15 bp, Homo sapiens
aagggggggcggggc

SEQ ID NO: 64048 - DNA, 15 bp, Homo sapiens
agggggggcggggct

SEQ ID NO: 64049 - DNA, 15 bp, Homo sapiens
gggggggcggggcta

SEQ ID NO: 64050 - DNA, 15 bp, Homo sapiens
ggggggcggggctag

SEQ ID NO: 64051 - DNA, 15 bp, Homo sapiens
gggggcggggctagg

SEQ ID NO: 64052 - DNA, 15 bp, Homo sapiens
ggggcggggctaggt

SEQ ID NO: 64053 - DNA, 15 bp, Homo sapiens
gggcggggctaggtg

SEQ ID NO: 64054 - DNA, 15 bp, Homo sapiens
ggcggggctaggtgg

SEQ ID NO: 64055 - DNA, 15 bp, Homo sapiens
gcggggctaggtggt

SEQ ID NO: 64056 - DNA, 15 bp, Homo sapiens
cggggctaggtggtc

SEQ ID NO: 64057 - DNA, 15 bp, Homo sapiens
ggggctaggtggtct

SEQ ID NO: 64058 - DNA, 15 bp, Homo sapiens
gggctaggtggtctc

SEQ ID NO: 64059 - DNA, 15 bp, Homo sapiens
ggctaggtggtctct

SEQ ID NO: 64060 - DNA, 15 bp, Homo sapiens
gctaggtggtctctg

SEQ ID NO: 64061 - DNA, 15 bp, Homo sapiens
ctaggtggtctctga

SEQ ID NO: 64062 - DNA, 15 bp, Homo sapiens
taggtggtctctgag

SEQ ID NO: 64063 - DNA, 15 bp, Homo sapiens
aggtggtctctgaga

SEQ ID NO: 64064 - DNA, 15 bp, Homo sapiens
ggtggtctctgagaa

SEQ ID NO: 64065 - DNA, 15 bp, Homo sapiens
gtggtctctgagaac

SEQ ID NO: 64066 - DNA, 15 bp, Homo sapiens
tggtctctgagaacc

SEQ ID NO: 64067 - DNA, 15 bp, Homo sapiens
ggtctctgagaaccg

SEQ ID NO: 64068 - DNA, 15 bp, Homo sapiens
gtctctgagaaccga

SEQ ID NO: 64069 - DNA, 15 bp, Homo sapiens
tctctgagaaccgag

SEQ ID NO: 64070 - DNA, 15 bp, Homo sapiens
ctctgagaaccgagc

SEQ ID NO: 64071 - DNA, 15 bp, Homo sapiens
tctgagaaccgagct

SEQ ID NO: 64072 - DNA, 15 bp, Homo sapiens
ctgagaaccgagctt

SEQ ID NO: 64073 - DNA, 15 bp, Homo sapiens
tgagaaccgagcttg

SEQ ID NO: 64074 - DNA, 15 bp, Homo sapiens
gagaaccgagcttga

SEQ ID NO: 64075 - DNA, 15 bp, Homo sapiens
agaaccgagcttgac

SEQ ID NO: 64076 - DNA, 15 bp, Homo sapiens
gaaccgagcttgact

SEQ ID NO: 64077 - DNA, 15 bp, Homo sapiens
aaccgagcttgactc

SEQ ID NO: 64078 - DNA, 15 bp, Homo sapiens
accgagcttgactcc

SEQ ID NO: 64079 - DNA, 15 bp, Homo sapiens
ccgagcttgactccg

SEQ ID NO: 64080 - DNA, 15 bp, Homo sapiens
cgagcttgactccga

SEQ ID NO: 64081 - DNA, 15 bp, Homo sapiens
gagcttgactccgac

SEQ ID NO: 64082 - DNA, 15 bp, Homo sapiens
agcttgactccgacg

SEQ ID NO: 64083 - DNA, 15 bp, Homo sapiens
gcttgactccgacgc

SEQ ID NO: 64084 - DNA, 15 bp, Homo sapiens
cttgactccgacgcc

SEQ ID NO: 64085 - DNA, 15 bp, Homo sapiens
ttgactccgacgccg

SEQ ID NO: 64086 - DNA, 15 bp, Homo sapiens
tgactccgacgccgc

SEQ ID NO: 64087 - DNA, 15 bp, Homo sapiens
gactccgacgccgcg

SEQ ID NO: 64088 - DNA, 15 bp, Homo sapiens
actccgacgccgcga

SEQ ID NO: 64089 - DNA, 15 bp, Homo sapiens
ctccgacgccgcgaa

SEQ ID NO: 64090 - DNA, 15 bp, Homo sapiens
tccgacgccgcgaac

SEQ ID NO: 64091 - DNA, 15 bp, Homo sapiens
ccgacgccgcgaacc

SEQ ID NO: 64092 - DNA, 15 bp, Homo sapiens
cgacgccgcgaaccg

SEQ ID NO: 64093 - DNA, 15 bp, Homo sapiens
gacgccgcgaaccga

SEQ ID NO: 64094 - DNA, 15 bp, Homo sapiens
acgccgcgaaccgac

SEQ ID NO: 64095 - DNA, 15 bp, Homo sapiens
cgccgcgaaccgacc

SEQ ID NO: 64096 - DNA, 15 bp, Homo sapiens
gccgcgaaccgacct

SEQ ID NO: 64097 - DNA, 15 bp, Homo sapiens
ccgcgaaccgacctg

SEQ ID NO: 64098 - DNA, 15 bp, Homo sapiens
cgcgaaccgacctgg

SEQ ID NO: 64099 - DNA, 15 bp, Homo sapiens
gcgaaccgacctgga

SEQ ID NO: 64100 - DNA, 15 bp, Homo sapiens
cgaaccgacctggag

SEQ ID NO: 64101 - DNA, 15 bp, Homo sapiens
gaaccgacctggagc

SEQ ID NO: 64102 - DNA, 15 bp, Homo sapiens
aaccgacctggagcc

SEQ ID NO: 64103 - DNA, 15 bp, Homo sapiens
accgacctggagccc

SEQ ID NO: 64104 - DNA, 15 bp, Homo sapiens
ccgacctggagcccg

SEQ ID NO: 64105 - DNA, 15 bp, Homo sapiens
cgacctggagcccga

SEQ ID NO: 64106 - DNA, 15 bp, Homo sapiens
gacctggagcccgag

SEQ ID NO: 64107 - DNA, 15 bp, Homo sapiens
acctggagcccgagg

SEQ ID NO: 64108 - DNA, 15 bp, Homo sapiens
cctggagcccgaggg

SEQ ID NO: 64109 - DNA, 15 bp, Homo sapiens
ctggagcccgagggg

SEQ ID NO: 64110 - DNA, 15 bp, Homo sapiens
tggagcccgagggga

SEQ ID NO: 64111 - DNA, 15 bp, Homo sapiens
ggagcccgaggggaa

SEQ ID NO: 64112 - DNA, 15 bp, Homo sapiens
gagcccgaggggaaa

SEQ ID NO: 64113 - DNA, 15 bp, Homo sapiens
agcccgaggggaaag

SEQ ID NO: 64114 - DNA, 15 bp, Homo sapiens
gcccgaggggaaaga

SEQ ID NO: 64115 - DNA, 15 bp, Homo sapiens
cccgaggggaaagat

SEQ ID NO: 64116 - DNA, 15 bp, Homo sapiens
ccgaggggaaagatg

SEQ ID NO: 64117 - DNA, 15 bp, Homo sapiens
cgaggggaaagatgc

SEQ ID NO: 64118 - DNA, 15 bp, Homo sapiens
gaggggaaagatgct

SEQ ID NO: 64119 - DNA, 15 bp, Homo sapiens
aggggaaagatgctc

SEQ ID NO: 64120 - DNA, 15 bp, Homo sapiens
ggggaaagatgctcg

SEQ ID NO: 64121 - DNA, 15 bp, Homo sapiens
gggaaagatgctcga

SEQ ID NO: 64122 - DNA, 15 bp, Homo sapiens
ggaaagatgctcgac

SEQ ID NO: 64123 - DNA, 15 bp, Homo sapiens
gaaagatgctcgact

SEQ ID NO: 64124 - DNA, 15 bp, Homo sapiens
aaagatgctcgactc

SEQ ID NO: 64125 - DNA, 15 bp, Homo sapiens
aagatgctcgactct

SEQ ID NO: 64126 - DNA, 15 bp, Homo sapiens
agatgctcgactctc

SEQ ID NO: 64127 - DNA, 15 bp, Homo sapiens
gatgctcgactctct

SEQ ID NO: 64128 - DNA, 15 bp, Homo sapiens
atgctcgactctctt

SEQ ID NO: 64129 - DNA, 15 bp, Homo sapiens
tgctcgactctcttg

SEQ ID NO: 64130 - DNA, 15 bp, Homo sapiens
gctcgactctcttgg

SEQ ID NO: 64131 - DNA, 15 bp, Homo sapiens
ctcgactctcttggg

SEQ ID NO: 64132 - DNA, 15 bp, Homo sapiens
tcgactctcttgggg

SEQ ID NO: 64133 - DNA, 15 bp, Homo sapiens
cgactctcttggggg

SEQ ID NO: 64134 - DNA, 15 bp, Homo sapiens
gactctcttgggggc

SEQ ID NO: 64135 - DNA, 15 bp, Homo sapiens
actctcttgggggca

SEQ ID NO: 64136 - DNA, 15 bp, Homo sapiens
ctctcttgggggcac

SEQ ID NO: 64137 - DNA, 15 bp, Homo sapiens
tctcttgggggcacc

SEQ ID NO: 64138 - DNA, 15 bp, Homo sapiens
ctcttgggggcaccg

SEQ ID NO: 64139 - DNA, 15 bp, Homo sapiens
tcttgggggcaccgg

SEQ ID NO: 64140 - DNA, 15 bp, Homo sapiens
cttgggggcaccgga

SEQ ID NO: 64141 - DNA, 15 bp, Homo sapiens
ttgggggcaccggag

SEQ ID NO: 64142 - DNA, 15 bp, Homo sapiens
tgggggcaccggagc

SEQ ID NO: 64143 - DNA, 15 bp, Homo sapiens
gggggcaccggagcg

SEQ ID NO: 64144 - DNA, 15 bp, Homo sapiens
ggggcaccggagcgg

SEQ ID NO: 64145 - DNA, 15 bp, Homo sapiens
gggcaccggagcggg

SEQ ID NO: 64146 - DNA, 15 bp, Homo sapiens
ggcaccggagcgggc

SEQ ID NO: 64147 - DNA, 15 bp, Homo sapiens
gcaccggagcgggcg

SEQ ID NO: 64148 - DNA, 15 bp, Homo sapiens
caccggagcgggcgc

SEQ ID NO: 64149 - DNA, 15 bp, Homo sapiens
accggagcgggcgca

SEQ ID NO: 64150 - DNA, 15 bp, Homo sapiens
ccggagcgggcgcag

SEQ ID NO: 64151 - DNA, 15 bp, Homo sapiens
cggagcgggcgcagg

SEQ ID NO: 64152 - DNA, 15 bp, Homo sapiens
ggagcgggcgcagga

SEQ ID NO: 64153 - DNA, 15 bp, Homo sapiens
gagcgggcgcaggag

SEQ ID NO: 64154 - DNA, 15 bp, Homo sapiens
agcgggcgcaggaga

SEQ ID NO: 64155 - DNA, 15 bp, Homo sapiens
gcgggcgcaggagag

SEQ ID NO: 64156 - DNA, 15 bp, Homo sapiens
cgggcgcaggagagg

SEQ ID NO: 64157 - DNA, 15 bp, Homo sapiens
gggcgcaggagaggc

SEQ ID NO: 64158 - DNA, 15 bp, Homo sapiens
ggcgcaggagaggcc

SEQ ID NO: 64159 - DNA, 15 bp, Homo sapiens
gcgcaggagaggcct

SEQ ID NO: 64160 - DNA, 15 bp, Homo sapiens
cgcaggagaggcctg

SEQ ID NO: 64161 - DNA, 15 bp, Homo sapiens
gcaggagaggcctgc

SEQ ID NO: 64162 - DNA, 15 bp, Homo sapiens
caggagaggcctgcg

SEQ ID NO: 64163 - DNA, 15 bp, Homo sapiens
aggagaggcctgcgg

SEQ ID NO: 64164 - DNA, 15 bp, Homo sapiens
ggagaggcctgcggg

SEQ ID NO: 64165 - DNA, 15 bp, Homo sapiens
gagaggcctgcgggg

SEQ ID NO: 64166 - DNA, 15 bp, Homo sapiens
agaggcctgcggggt

SEQ ID NO: 64167 - DNA, 15 bp, Homo sapiens
gaggcctgcggggtg

SEQ ID NO: 64168 - DNA, 15 bp, Homo sapiens
aggcctgcggggtgc

SEQ ID NO: 64169 - DNA, 15 bp, Homo sapiens
ggcctgcggggtgcg

SEQ ID NO: 64170 - DNA, 15 bp, Homo sapiens
gcctgcggggtgcgt

SEQ ID NO: 64171 - DNA, 15 bp, Homo sapiens
cctgcggggtgcgtc

SEQ ID NO: 64172 - DNA, 15 bp, Homo sapiens
ctgcggggtgcgtcc

SEQ ID NO: 64173 - DNA, 15 bp, Homo sapiens
tgcggggtgcgtccc

SEQ ID NO: 64174 - DNA, 15 bp, Homo sapiens
gcggggtgcgtccca

SEQ ID NO: 64175 - DNA, 15 bp, Homo sapiens
cggggtgcgtcccac

SEQ ID NO: 64176 - DNA, 15 bp, Homo sapiens
ggggtgcgtcccact

SEQ ID NO: 64177 - DNA, 15 bp, Homo sapiens
gggtgcgtcccactc

SEQ ID NO: 64178 - DNA, 15 bp, Homo sapiens
ggtgcgtcccactca

SEQ ID NO: 64179 - DNA, 15 bp, Homo sapiens
gtgcgtcccactcac

SEQ ID NO: 64180 - DNA, 15 bp, Homo sapiens
tgcgtcccactcaca

SEQ ID NO: 64181 - DNA, 15 bp, Homo sapiens
gcgtcccactcacag

SEQ ID NO: 64182 - DNA, 15 bp, Homo sapiens
cgtcccactcacagg

SEQ ID NO: 64183 - DNA, 15 bp, Homo sapiens
gtcccactcacaggg

SEQ ID NO: 64184 - DNA, 15 bp, Homo sapiens
tcccactcacaggga

SEQ ID NO: 64185 - DNA, 15 bp, Homo sapiens
cccactcacagggat

SEQ ID NO: 64186 - DNA, 15 bp, Homo sapiens
ccactcacagggatc

SEQ ID NO: 64187 - DNA, 15 bp, Homo sapiens
cactcacagggatcc

SEQ ID NO: 64188 - DNA, 15 bp, Homo sapiens
actcacagggatcct

SEQ ID NO: 64189 - DNA, 15 bp, Homo sapiens
ctcacagggatcctc

SEQ ID NO: 64190 - DNA, 15 bp, Homo sapiens
tcacagggatcctct

SEQ ID NO: 64191 - DNA, 15 bp, Homo sapiens
cacagggatcctctt

SEQ ID NO: 64192 - DNA, 15 bp, Homo sapiens
acagggatcctcttt

SEQ ID NO: 64193 - DNA, 15 bp, Homo sapiens
cagggatcctctttc

SEQ ID NO: 64194 - DNA, 15 bp, Homo sapiens
agggatcctctttca

SEQ ID NO: 64195 - DNA, 15 bp, Homo sapiens
gggatcctctttcag

SEQ ID NO: 64196 - DNA, 15 bp, Homo sapiens
ggatcctctttcagt

SEQ ID NO: 64197 - DNA, 15 bp, Homo sapiens
gatcctctttcagtt

SEQ ID NO: 64198 - DNA, 15 bp, Homo sapiens
atcctctttcagttc

SEQ ID NO: 64199 - DNA, 15 bp, Homo sapiens
tcctctttcagttca

SEQ ID NO: 64200 - DNA, 15 bp, Homo sapiens
cctctttcagttcat

SEQ ID NO: 64201 - DNA, 15 bp, Homo sapiens
ctctttcagttcatt

SEQ ID NO: 64202 - DNA, 15 bp, Homo sapiens
tctttcagttcattt

SEQ ID NO: 64203 - DNA, 15 bp, Homo sapiens
ctttcagttcattta

SEQ ID NO: 64204 - DNA, 15 bp, Homo sapiens
tttcagttcatttag

SEQ ID NO: 64205 - DNA, 15 bp, Homo sapiens
ttcagttcatttaga

SEQ ID NO: 64206 - DNA, 15 bp, Homo sapiens
tcagttcatttagat

SEQ ID NO: 64207 - DNA, 15 bp, Homo sapiens
cagttcatttagata

SEQ ID NO: 64208 - DNA, 15 bp, Homo sapiens
agttcatttagatag

SEQ ID NO: 64209 - DNA, 15 bp, Homo sapiens
gttcatttagatagg

SEQ ID NO: 64210 - DNA, 15 bp, Homo sapiens
ttcatttagataggt

SEQ ID NO: 64211 - DNA, 15 bp, Homo sapiens
tcatttagataggtg

SEQ ID NO: 64212 - DNA, 15 bp, Homo sapiens
catttagataggtgc

SEQ ID NO: 64213 - DNA, 15 bp, Homo sapiens
atttagataggtgcc

SEQ ID NO: 64214 - DNA, 15 bp, Homo sapiens
tttagataggtgccc

SEQ ID NO: 64215 - DNA, 15 bp, Homo sapiens
ttagataggtgccct

SEQ ID NO: 64216 - DNA, 15 bp, Homo sapiens
tagataggtgccctt

SEQ ID NO: 64217 - DNA, 15 bp, Homo sapiens
agataggtgcccttt

SEQ ID NO: 64218 - DNA, 15 bp, Homo sapiens
gataggtgccctttg

SEQ ID NO: 64219 - DNA, 15 bp, Homo sapiens
ataggtgccctttgg

SEQ ID NO: 64220 - DNA, 15 bp, Homo sapiens
taggtgccctttggg

SEQ ID NO: 64221 - DNA, 15 bp, Homo sapiens
aggtgccctttgggc

SEQ ID NO: 64222 - DNA, 15 bp, Homo sapiens
ggtgccctttgggcc

SEQ ID NO: 64223 - DNA, 15 bp, Homo sapiens
gtgccctttgggccc

SEQ ID NO: 64224 - DNA, 15 bp, Homo sapiens
tgccctttgggccct

SEQ ID NO: 64225 - DNA, 15 bp, Homo sapiens
gccctttgggccctt

SEQ ID NO: 64226 - DNA, 15 bp, Homo sapiens
ccctttgggcccttg

SEQ ID NO: 64227 - DNA, 15 bp, Homo sapiens
cctttgggcccttga

SEQ ID NO: 64228 - DNA, 15 bp, Homo sapiens
ctttgggcccttgaa

SEQ ID NO: 64229 - DNA, 15 bp, Homo sapiens
tttgggcccttgaaa

SEQ ID NO: 64230 - DNA, 15 bp, Homo sapiens
ttgggcccttgaaat

SEQ ID NO: 64231 - DNA, 15 bp, Homo sapiens
tgggcccttgaaatt

SEQ ID NO: 64232 - DNA, 15 bp, Homo sapiens
gggcccttgaaattc

SEQ ID NO: 64233 - DNA, 15 bp, Homo sapiens
ggcccttgaaattca

SEQ ID NO: 64234 - DNA, 15 bp, Homo sapiens
gcccttgaaattcaa

SEQ ID NO: 64235 - DNA, 15 bp, Homo sapiens
cccttgaaattcaac

SEQ ID NO: 64236 - DNA, 15 bp, Homo sapiens
ccttgaaattcaacg

SEQ ID NO: 64237 - DNA, 15 bp, Homo sapiens
cttgaaattcaacgg

SEQ ID NO: 64238 - DNA, 15 bp, Homo sapiens
ttgaaattcaacggc

SEQ ID NO: 64239 - DNA, 15 bp, Homo sapiens
tgaaattcaacggct

SEQ ID NO: 64240 - DNA, 15 bp, Homo sapiens
gaaattcaacggcta

SEQ ID NO: 64241 - DNA, 15 bp, Homo sapiens
aaattcaacggctat

SEQ ID NO: 64242 - DNA, 15 bp, Homo sapiens
aattcaacggctatg

SEQ ID NO: 64243 - DNA, 15 bp, Homo sapiens
attcaacggctatgt

SEQ ID NO: 64244 - DNA, 15 bp, Homo sapiens
ttcaacggctatgtg

SEQ ID NO: 64245 - DNA, 15 bp, Homo sapiens
tcaacggctatgtgt

SEQ ID NO: 64246 - DNA, 15 bp, Homo sapiens
caacggctatgtgtt

SEQ ID NO: 64247 - DNA, 15 bp, Homo sapiens
aacggctatgtgttc

SEQ ID NO: 64248 - DNA, 15 bp, Homo sapiens
acggctatgtgttca

SEQ ID NO: 64249 - DNA, 15 bp, Homo sapiens
cggctatgtgttcac

SEQ ID NO: 64250 - DNA, 15 bp, Homo sapiens
ggctatgtgttcacg

SEQ ID NO: 64251 - DNA, 15 bp, Homo sapiens
gctatgtgttcacgt

SEQ ID NO: 64252 - DNA, 15 bp, Homo sapiens
ctatgtgttcacgtt

SEQ ID NO: 64253 - DNA, 15 bp, Homo sapiens
tatgtgttcacgttc

SEQ ID NO: 64254 - DNA, 15 bp, Homo sapiens
atgtgttcacgttca

SEQ ID NO: 64255 - DNA, 15 bp, Homo sapiens
tgtgttcacgttcag

SEQ ID NO: 64256 - DNA, 15 bp, Homo sapiens
gtgttcacgttcagc

SEQ ID NO: 64257 - DNA, 15 bp, Homo sapiens
tgttcacgttcagca

SEQ ID NO: 64258 - DNA, 15 bp, Homo sapiens
gttcacgttcagcac

SEQ ID NO: 64259 - DNA, 15 bp, Homo sapiens
ttcacgttcagcacg

SEQ ID NO: 64260 - DNA, 15 bp, Homo sapiens
tcacgttcagcacgc

SEQ ID NO: 64261 - DNA, 15 bp, Homo sapiens
cacgttcagcacgct

SEQ ID NO: 64262 - DNA, 15 bp, Homo sapiens
acgttcagcacgctc

SEQ ID NO: 64263 - DNA, 15 bp, Homo sapiens
cgttcagcacgctcg

SEQ ID NO: 64264 - DNA, 15 bp, Homo sapiens
gttcagcacgctcgg

SEQ ID NO: 64265 - DNA, 15 bp, Homo sapiens
ttcagcacgctcggc

SEQ ID NO: 64266 - DNA, 15 bp, Homo sapiens
tcagcacgctcggct

SEQ ID NO: 64267 - DNA, 15 bp, Homo sapiens
cagcacgctcggctg

SEQ ID NO: 64268 - DNA, 15 bp, Homo sapiens
agcacgctcggctga

SEQ ID NO: 64269 - DNA, 15 bp, Homo sapiens
gcacgctcggctgag

SEQ ID NO: 64270 - DNA, 15 bp, Homo sapiens
cacgctcggctgaga

SEQ ID NO: 64271 - DNA, 15 bp, Homo sapiens
acgctcggctgagag

SEQ ID NO: 64272 - DNA, 15 bp, Homo sapiens
cgctcggctgagagc

SEQ ID NO: 64273 - DNA, 15 bp, Homo sapiens
gctcggctgagagct

SEQ ID NO: 64274 - DNA, 15 bp, Homo sapiens
ctcggctgagagctt

SEQ ID NO: 64275 - DNA, 15 bp, Homo sapiens
tcggctgagagcttt

SEQ ID NO: 64276 - DNA, 15 bp, Homo sapiens
cggctgagagctttc

SEQ ID NO: 64277 - DNA, 15 bp, Homo sapiens
ggctgagagctttca

SEQ ID NO: 64278 - DNA, 15 bp, Homo sapiens
gctgagagctttcat

SEQ ID NO: 64279 - DNA, 15 bp, Homo sapiens
ctgagagctttcatt

SEQ ID NO: 64280 - DNA, 15 bp, Homo sapiens
tgagagctttcattt

SEQ ID NO: 64281 - DNA, 15 bp, Homo sapiens
gagagctttcatttt

SEQ ID NO: 64282 - DNA, 15 bp, Homo sapiens
agagctttcattttt

SEQ ID NO: 64283 - DNA, 15 bp, Homo sapiens
gagctttcattttta

SEQ ID NO: 64284 - DNA, 15 bp, Homo sapiens
agctttcatttttag

SEQ ID NO: 64285 - DNA, 15 bp, Homo sapiens
gctttcatttttagg

SEQ ID NO: 64286 - DNA, 15 bp, Homo sapiens
ctttcatttttaggg

SEQ ID NO: 64287 - DNA, 15 bp, Homo sapiens
tttcatttttagggc

SEQ ID NO: 64288 - DNA, 15 bp, Homo sapiens
ttcatttttagggca

SEQ ID NO: 64289 - DNA, 15 bp, Homo sapiens
tcatttttagggcaa

SEQ ID NO: 64290 - DNA, 15 bp, Homo sapiens
catttttagggcaaa

SEQ ID NO: 64291 - DNA, 15 bp, Homo sapiens
atttttagggcaaac

SEQ ID NO: 64292 - DNA, 15 bp, Homo sapiens
tttttagggcaaacg

SEQ ID NO: 64293 - DNA, 15 bp, Homo sapiens
ttttagggcaaacga

SEQ ID NO: 64294 - DNA, 15 bp, Homo sapiens
tttagggcaaacgag

SEQ ID NO: 64295 - DNA, 15 bp, Homo sapiens
ttagggcaaacgagc

SEQ ID NO: 64296 - DNA, 15 bp, Homo sapiens
tagggcaaacgagcc

SEQ ID NO: 64297 - DNA, 15 bp, Homo sapiens
agggcaaacgagccg

SEQ ID NO: 64298 - DNA, 15 bp, Homo sapiens
gggcaaacgagccga

SEQ ID NO: 64299 - DNA, 15 bp, Homo sapiens
ggcaaacgagccgag

SEQ ID NO: 64300 - DNA, 15 bp, Homo sapiens
gcaaacgagccgagt

SEQ ID NO: 64301 - DNA, 15 bp, Homo sapiens
caaacgagccgagtt

SEQ ID NO: 64302 - DNA, 15 bp, Homo sapiens
aaacgagccgagtta

SEQ ID NO: 64303 - DNA, 15 bp, Homo sapiens
aacgagccgagttac

SEQ ID NO: 64304 - DNA, 15 bp, Homo sapiens
acgagccgagttacc

SEQ ID NO: 64305 - DNA, 15 bp, Homo sapiens
cgagccgagttaccg

SEQ ID NO: 64306 - DNA, 15 bp, Homo sapiens
gagccgagttaccgg

SEQ ID NO: 64307 - DNA, 15 bp, Homo sapiens
agccgagttaccggg

SEQ ID NO: 64308 - DNA, 15 bp, Homo sapiens
gccgagttaccgggg

SEQ ID NO: 64309 - DNA, 15 bp, Homo sapiens
ccgagttaccgggga

SEQ ID NO: 64310 - DNA, 15 bp, Homo sapiens
cgagttaccggggaa

SEQ ID NO: 64311 - DNA, 15 bp, Homo sapiens
gagttaccggggaag

SEQ ID NO: 64312 - DNA, 15 bp, Homo sapiens
agttaccggggaagc

SEQ ID NO: 64313 - DNA, 15 bp, Homo sapiens
gttaccggggaagcg

SEQ ID NO: 64314 - DNA, 15 bp, Homo sapiens
ttaccggggaagcga

SEQ ID NO: 64315 - DNA, 15 bp, Homo sapiens
taccggggaagcgag

SEQ ID NO: 64316 - DNA, 15 bp, Homo sapiens
accggggaagcgaga

SEQ ID NO: 64317 - DNA, 15 bp, Homo sapiens
ccggggaagcgagag

SEQ ID NO: 64318 - DNA, 15 bp, Homo sapiens
cggggaagcgagagg

SEQ ID NO: 64319 - DNA, 15 bp, Homo sapiens
ggggaagcgagaggt

SEQ ID NO: 64320 - DNA, 15 bp, Homo sapiens
gggaagcgagaggtg

SEQ ID NO: 64321 - DNA, 15 bp, Homo sapiens
ggaagcgagaggtgg

SEQ ID NO: 64322 - DNA, 15 bp, Homo sapiens
gaagcgagaggtggg

SEQ ID NO: 64323 - DNA, 15 bp, Homo sapiens
aagcgagaggtgggg

SEQ ID NO: 64324 - DNA, 15 bp, Homo sapiens
agcgagaggtggggc

SEQ ID NO: 64325 - DNA, 15 bp, Homo sapiens
gcgagaggtggggcg

SEQ ID NO: 64326 - DNA, 15 bp, Homo sapiens
cgagaggtggggcgc

SEQ ID NO: 64327 - DNA, 15 bp, Homo sapiens
gagaggtggggcgct

SEQ ID NO: 64328 - DNA, 15 bp, Homo sapiens
agaggtggggcgctg

SEQ ID NO: 64329 - DNA, 15 bp, Homo sapiens
gaggtggggcgctgc

SEQ ID NO: 64330 - DNA, 15 bp, Homo sapiens
aggtggggcgctgca

SEQ ID NO: 64331 - DNA, 15 bp, Homo sapiens
ggtggggcgctgcaa

SEQ ID NO: 64332 - DNA, 15 bp, Homo sapiens
gtggggcgctgcaag

SEQ ID NO: 64333 - DNA, 15 bp, Homo sapiens
tggggcgctgcaagg

SEQ ID NO: 64334 - DNA, 15 bp, Homo sapiens
ggggcgctgcaaggg

SEQ ID NO: 64335 - DNA, 15 bp, Homo sapiens
gggcgctgcaaggga

SEQ ID NO: 64336 - DNA, 15 bp, Homo sapiens
ggcgctgcaagggag

SEQ ID NO: 64337 - DNA, 15 bp, Homo sapiens
gcgctgcaagggagc

SEQ ID NO: 64338 - DNA, 15 bp, Homo sapiens
cgctgcaagggagcc

SEQ ID NO: 64339 - DNA, 15 bp, Homo sapiens
gctgcaagggagccg

SEQ ID NO: 64340 - DNA, 15 bp, Homo sapiens
ctgcaagggagccgg

SEQ ID NO: 64341 - DNA, 15 bp, Homo sapiens
tgcaagggagccgga

SEQ ID NO: 64342 - DNA, 15 bp, Homo sapiens
gcaagggagccggat

SEQ ID NO: 64343 - DNA, 15 bp, Homo sapiens
caagggagccggatg

SEQ ID NO: 64344 - DNA, 15 bp, Homo sapiens
aagggagccggatga

SEQ ID NO: 64345 - DNA, 15 bp, Homo sapiens
agggagccggatgag

SEQ ID NO: 64346 - DNA, 15 bp, Homo sapiens
gggagccggatgagg

SEQ ID NO: 64347 - DNA, 15 bp, Homo sapiens
ggagccggatgaggt

SEQ ID NO: 64348 - DNA, 15 bp, Homo sapiens
gagccggatgaggtg

SEQ ID NO: 64349 - DNA, 15 bp, Homo sapiens
agccggatgaggtga

SEQ ID NO: 64350 - DNA, 15 bp, Homo sapiens
gccggatgaggtgat

SEQ ID NO: 64351 - DNA, 15 bp, Homo sapiens
ccggatgaggtgata

SEQ ID NO: 64352 - DNA, 15 bp, Homo sapiens
cggatgaggtgatac

SEQ ID NO: 64353 - DNA, 15 bp, Homo sapiens
ggatgaggtgataca

SEQ ID NO: 64354 - DNA, 15 bp, Homo sapiens
gatgaggtgatacac

SEQ ID NO: 64355 - DNA, 15 bp, Homo sapiens
atgaggtgatacacg

SEQ ID NO: 64356 - DNA, 15 bp, Homo sapiens
tgaggtgatacacgc

SEQ ID NO: 64357 - DNA, 15 bp, Homo sapiens
gaggtgatacacgct

SEQ ID NO: 64358 - DNA, 15 bp, Homo sapiens
aggtgatacacgctg

SEQ ID NO: 64359 - DNA, 15 bp, Homo sapiens
ggtgatacacgctgg

SEQ ID NO: 64360 - DNA, 15 bp, Homo sapiens
gtgatacacgctggc

SEQ ID NO: 64361 - DNA, 15 bp, Homo sapiens
tgatacacgctggcg

SEQ ID NO: 64362 - DNA, 15 bp, Homo sapiens
gatacacgctggcga

SEQ ID NO: 64363 - DNA, 15 bp, Homo sapiens
atacacgctggcgac

SEQ ID NO: 64364 - DNA, 15 bp, Homo sapiens
tacacgctggcgaca

SEQ ID NO: 64365 - DNA, 15 bp, Homo sapiens
acacgctggcgacac

SEQ ID NO: 64366 - DNA, 15 bp, Homo sapiens
cacgctggcgacaca

SEQ ID NO: 64367 - DNA, 15 bp, Homo sapiens
acgctggcgacacaa

SEQ ID NO: 64368 - DNA, 15 bp, Homo sapiens
cgctggcgacacaat

SEQ ID NO: 64369 - DNA, 15 bp, Homo sapiens
gctggcgacacaata

SEQ ID NO: 64370 - DNA, 15 bp, Homo sapiens
ctggcgacacaatag

SEQ ID NO: 64371 - DNA, 15 bp, Homo sapiens
tggcgacacaatagc

SEQ ID NO: 64372 - DNA, 15 bp, Homo sapiens
ggcgacacaatagca

SEQ ID NO: 64373 - DNA, 15 bp, Homo sapiens
gcgacacaatagcag

SEQ ID NO: 64374 - DNA, 15 bp, Homo sapiens
cgacacaatagcagg

SEQ ID NO: 64375 - DNA, 15 bp, Homo sapiens
gacacaatagcaggt

SEQ ID NO: 64376 - DNA, 15 bp, Homo sapiens
acacaatagcaggtt

SEQ ID NO: 64377 - DNA, 15 bp, Homo sapiens
cacaatagcaggttg

SEQ ID NO: 64378 - DNA, 15 bp, Homo sapiens
acaatagcaggttgc

SEQ ID NO: 64379 - DNA, 15 bp, Homo sapiens
caatagcaggttgct

SEQ ID NO: 64380 - DNA, 15 bp, Homo sapiens
aatagcaggttgctc

SEQ ID NO: 64381 - DNA, 15 bp, Homo sapiens
atagcaggttgctct

SEQ ID NO: 64382 - DNA, 15 bp, Homo sapiens
tagcaggttgctctt

SEQ ID NO: 64383 - DNA, 15 bp, Homo sapiens
agcaggttgctcttt

SEQ ID NO: 64384 - DNA, 15 bp, Homo sapiens
gcaggttgctctttg

SEQ ID NO: 64385 - DNA, 15 bp, Homo sapiens
caggttgctctttgt

SEQ ID NO: 64386 - DNA, 15 bp, Homo sapiens
aggttgctctttgtg

SEQ ID NO: 64387 - DNA, 15 bp, Homo sapiens
ggttgctctttgtgc

SEQ ID NO: 64388 - DNA, 15 bp, Homo sapiens
gttgctctttgtgct

SEQ ID NO: 64389 - DNA, 15 bp, Homo sapiens
ttgctctttgtgcta

SEQ ID NO: 64390 - DNA, 15 bp, Homo sapiens
tgctctttgtgctaa

SEQ ID NO: 64391 - DNA, 15 bp, Homo sapiens
gctctttgtgctaag

SEQ ID NO: 64392 - DNA, 15 bp, Homo sapiens
ctctttgtgctaaga

SEQ ID NO: 64393 - DNA, 15 bp, Homo sapiens
tctttgtgctaagac

SEQ ID NO: 64394 - DNA, 15 bp, Homo sapiens
ctttgtgctaagact

SEQ ID NO: 64395 - DNA, 15 bp, Homo sapiens
tttgtgctaagactg

SEQ ID NO: 64396 - DNA, 15 bp, Homo sapiens
ttgtgctaagactga

SEQ ID NO: 64397 - DNA, 15 bp, Homo sapiens
tgtgctaagactgac

SEQ ID NO: 64398 - DNA, 15 bp, Homo sapiens
gtgctaagactgaca

SEQ ID NO: 64399 - DNA, 15 bp, Homo sapiens
tgctaagactgacac

SEQ ID NO: 64400 - DNA, 15 bp, Homo sapiens
gctaagactgacacc

SEQ ID NO: 64401 - DNA, 15 bp, Homo sapiens
ctaagactgacacca

SEQ ID NO: 64402 - DNA, 15 bp, Homo sapiens
taagactgacaccat

SEQ ID NO: 64403 - DNA, 15 bp, Homo sapiens
aagactgacaccatg

SEQ ID NO: 64404 - DNA, 15 bp, Homo sapiens
agactgacaccatga

SEQ ID NO: 64405 - DNA, 15 bp, Homo sapiens
gactgacaccatgag

SEQ ID NO: 64406 - DNA, 15 bp, Homo sapiens
actgacaccatgagg

SEQ ID NO: 64407 - DNA, 15 bp, Homo sapiens
ctgacaccatgagga

SEQ ID NO: 64408 - DNA, 15 bp, Homo sapiens
tgacaccatgaggac

SEQ ID NO: 64409 - DNA, 15 bp, Homo sapiens
gacaccatgaggaca

SEQ ID NO: 64410 - DNA, 15 bp, Homo sapiens
acaccatgaggacac

SEQ ID NO: 64411 - DNA, 15 bp, Homo sapiens
caccatgaggacaca

SEQ ID NO: 64412 - DNA, 15 bp, Homo sapiens
accatgaggacacag

SEQ ID NO: 64413 - DNA, 15 bp, Homo sapiens
ccatgaggacacaga

SEQ ID NO: 64414 - DNA, 15 bp, Homo sapiens
catgaggacacagat

SEQ ID NO: 64415 - DNA, 15 bp, Homo sapiens
atgaggacacagatt

SEQ ID NO: 64416 - DNA, 15 bp, Homo sapiens
tgaggacacagattt

SEQ ID NO: 64417 - DNA, 15 bp, Homo sapiens
gaggacacagatttg

SEQ ID NO: 64418 - DNA, 15 bp, Homo sapiens
aggacacagatttgg

SEQ ID NO: 64419 - DNA, 15 bp, Homo sapiens
ggacacagatttggg

SEQ ID NO: 64420 - DNA, 15 bp, Homo sapiens
gacacagatttgggg

SEQ ID NO: 64421 - DNA, 15 bp, Homo sapiens
acacagatttggggg

SEQ ID NO: 64422 - DNA, 15 bp, Homo sapiens
cacagatttggggga

SEQ ID NO: 64423 - DNA, 15 bp, Homo sapiens
acagatttgggggaa

SEQ ID NO: 64424 - DNA, 15 bp, Homo sapiens
cagatttgggggaag

SEQ ID NO: 64425 - DNA, 15 bp, Homo sapiens
agatttgggggaagg

SEQ ID NO: 64426 - DNA, 15 bp, Homo sapiens
gatttgggggaaggg

SEQ ID NO: 64427 - DNA, 15 bp, Homo sapiens
atttgggggaagggg

SEQ ID NO: 64428 - DNA, 15 bp, Homo sapiens
tttgggggaaggggg

SEQ ID NO: 64429 - DNA, 15 bp, Homo sapiens
ttgggggaaggggga

SEQ ID NO: 64430 - DNA, 15 bp, Homo sapiens
tgggggaagggggaa

SEQ ID NO: 64431 - DNA, 15 bp, Homo sapiens
gggggaagggggaat

SEQ ID NO: 64432 - DNA, 15 bp, Homo sapiens
ggggaagggggaatc

SEQ ID NO: 64433 - DNA, 15 bp, Homo sapiens
gggaagggggaatct

SEQ ID NO: 64434 - DNA, 15 bp, Homo sapiens
ggaagggggaatctc

SEQ ID NO: 64435 - DNA, 15 bp, Homo sapiens
gaagggggaatctct

SEQ ID NO: 64436 - DNA, 15 bp, Homo sapiens
aagggggaatctcta

SEQ ID NO: 64437 - DNA, 15 bp, Homo sapiens
agggggaatctctag

SEQ ID NO: 64438 - DNA, 15 bp, Homo sapiens
gggggaatctctagg

SEQ ID NO: 64439 - DNA, 15 bp, Homo sapiens
ggggaatctctaggc

SEQ ID NO: 64440 - DNA, 15 bp, Homo sapiens
gggaatctctaggca

SEQ ID NO: 64441 - DNA, 15 bp, Homo sapiens
ggaatctctaggcaa

SEQ ID NO: 64442 - DNA, 15 bp, Homo sapiens
gaatctctaggcaaa

SEQ ID NO: 64443 - DNA, 15 bp, Homo sapiens
aatctctaggcaaag

SEQ ID NO: 64444 - DNA, 15 bp, Homo sapiens
atctctaggcaaagg

SEQ ID NO: 64445 - DNA, 15 bp, Homo sapiens
tctctaggcaaaggc

SEQ ID NO: 64446 - DNA, 15 bp, Homo sapiens
ctctaggcaaaggct

SEQ ID NO: 64447 - DNA, 15 bp, Homo sapiens
tctaggcaaaggctg

SEQ ID NO: 64448 - DNA, 15 bp, Homo sapiens
ctaggcaaaggctgt

SEQ ID NO: 64449 - DNA, 15 bp, Homo sapiens
taggcaaaggctgtt

SEQ ID NO: 64450 - DNA, 15 bp, Homo sapiens
aggcaaaggctgtta

SEQ ID NO: 64451 - DNA, 15 bp, Homo sapiens
ggcaaaggctgttac

SEQ ID NO: 64452 - DNA, 15 bp, Homo sapiens
gcaaaggctgttaca

SEQ ID NO: 64453 - DNA, 15 bp, Homo sapiens
caaaggctgttacag

SEQ ID NO: 64454 - DNA, 15 bp, Homo sapiens
aaaggctgttacagt

SEQ ID NO: 64455 - DNA, 15 bp, Homo sapiens
aaggctgttacagtc

SEQ ID NO: 64456 - DNA, 15 bp, Homo sapiens
aggctgttacagtca

SEQ ID NO: 64457 - DNA, 15 bp, Homo sapiens
ggctgttacagtcaa

SEQ ID NO: 64458 - DNA, 15 bp, Homo sapiens
gctgttacagtcaaa

SEQ ID NO: 64459 - DNA, 15 bp, Homo sapiens
ctgttacagtcaaat

SEQ ID NO: 64460 - DNA, 15 bp, Homo sapiens
tgttacagtcaaatc

SEQ ID NO: 64461 - DNA, 15 bp, Homo sapiens
gttacagtcaaatct

SEQ ID NO: 64462 - DNA, 15 bp, Homo sapiens
ttacagtcaaatctc

SEQ ID NO: 64463 - DNA, 15 bp, Homo sapiens
tacagtcaaatctct

SEQ ID NO: 64464 - DNA, 15 bp, Homo sapiens
acagtcaaatctctg

SEQ ID NO: 64465 - DNA, 15 bp, Homo sapiens
cagtcaaatctctgc

SEQ ID NO: 64466 - DNA, 15 bp, Homo sapiens
agtcaaatctctgcg

SEQ ID NO: 64467 - DNA, 15 bp, Homo sapiens
gtcaaatctctgcga

SEQ ID NO: 64468 - DNA, 15 bp, Homo sapiens
tcaaatctctgcgaa

SEQ ID NO: 64469 - DNA, 15 bp, Homo sapiens
caaatctctgcgaac

SEQ ID NO: 64470 - DNA, 15 bp, Homo sapiens
aaatctctgcgaacg

SEQ ID NO: 64471 - DNA, 15 bp, Homo sapiens
aatctctgcgaacga

SEQ ID NO: 64472 - DNA, 15 bp, Homo sapiens
atctctgcgaacgat

SEQ ID NO: 64473 - DNA, 15 bp, Homo sapiens
tctctgcgaacgatt

SEQ ID NO: 64474 - DNA, 15 bp, Homo sapiens
ctctgcgaacgattg

SEQ ID NO: 64475 - DNA, 15 bp, Homo sapiens
tctgcgaacgattgt

SEQ ID NO: 64476 - DNA, 15 bp, Homo sapiens
ctgcgaacgattgtg

SEQ ID NO: 64477 - DNA, 15 bp, Homo sapiens
tgcgaacgattgtga

SEQ ID NO: 64478 - DNA, 15 bp, Homo sapiens
gcgaacgattgtgat

SEQ ID NO: 64479 - DNA, 15 bp, Homo sapiens
cgaacgattgtgatc

SEQ ID NO: 64480 - DNA, 15 bp, Homo sapiens
gaacgattgtgatcc

SEQ ID NO: 64481 - DNA, 15 bp, Homo sapiens
aacgattgtgatccg

SEQ ID NO: 64482 - DNA, 15 bp, Homo sapiens
acgattgtgatccga

SEQ ID NO: 64483 - DNA, 15 bp, Homo sapiens
cgattgtgatccgac

SEQ ID NO: 64484 - DNA, 15 bp, Homo sapiens
gattgtgatccgaca

SEQ ID NO: 64485 - DNA, 15 bp, Homo sapiens
attgtgatccgacag

SEQ ID NO: 64486 - DNA, 15 bp, Homo sapiens
ttgtgatccgacagc

SEQ ID NO: 64487 - DNA, 15 bp, Homo sapiens
tgtgatccgacagcg

SEQ ID NO: 64488 - DNA, 15 bp, Homo sapiens
gtgatccgacagcgg

SEQ ID NO: 64489 - DNA, 15 bp, Homo sapiens
tgatccgacagcggt

SEQ ID NO: 64490 - DNA, 15 bp, Homo sapiens
gatccgacagcggtg

SEQ ID NO: 64491 - DNA, 15 bp, Homo sapiens
atccgacagcggtgc

SEQ ID NO: 64492 - DNA, 15 bp, Homo sapiens
tccgacagcggtgca

SEQ ID NO: 64493 - DNA, 15 bp, Homo sapiens
ccgacagcggtgcaa

SEQ ID NO: 64494 - DNA, 15 bp, Homo sapiens
cgacagcggtgcaaa

SEQ ID NO: 64495 - DNA, 15 bp, Homo sapiens
gacagcggtgcaaaa

SEQ ID NO: 64496 - DNA, 15 bp, Homo sapiens
acagcggtgcaaaag

SEQ ID NO: 64497 - DNA, 15 bp, Homo sapiens
cagcggtgcaaaagg

SEQ ID NO: 64498 - DNA, 15 bp, Homo sapiens
agcggtgcaaaagga

SEQ ID NO: 64499 - DNA, 15 bp, Homo sapiens
gcggtgcaaaaggaa

SEQ ID NO: 64500 - DNA, 15 bp, Homo sapiens
cggtgcaaaaggaaa

SEQ ID NO: 64501 - DNA, 15 bp, Homo sapiens
ggtgcaaaaggaaag

SEQ ID NO: 64502 - DNA, 15 bp, Homo sapiens
gtgcaaaaggaaaga

SEQ ID NO: 64503 - DNA, 15 bp, Homo sapiens
tgcaaaaggaaagag

SEQ ID NO: 64504 - DNA, 15 bp, Homo sapiens
gcaaaaggaaagagc

SEQ ID NO: 64505 - DNA, 15 bp, Homo sapiens
caaaaggaaagagcg

SEQ ID NO: 64506 - DNA, 15 bp, Homo sapiens
aaaaggaaagagcga

SEQ ID NO: 64507 - DNA, 15 bp, Homo sapiens
aaaggaaagagcgaa

SEQ ID NO: 64508 - DNA, 15 bp, Homo sapiens
aaggaaagagcgaat

SEQ ID NO: 64509 - DNA, 15 bp, Homo sapiens
aggaaagagcgaatg

SEQ ID NO: 64510 - DNA, 15 bp, Homo sapiens
ggaaagagcgaatgc

SEQ ID NO: 64511 - DNA, 15 bp, Homo sapiens
gaaagagcgaatgca

SEQ ID NO: 64512 - DNA, 15 bp, Homo sapiens
aaagagcgaatgcag

SEQ ID NO: 64513 - DNA, 15 bp, Homo sapiens
aagagcgaatgcagt

SEQ ID NO: 64514 - DNA, 15 bp, Homo sapiens
agagcgaatgcagtc

SEQ ID NO: 64515 - DNA, 15 bp, Homo sapiens
gagcgaatgcagtcc

SEQ ID NO: 64516 - DNA, 15 bp, Homo sapiens
agcgaatgcagtcca

SEQ ID NO: 64517 - DNA, 15 bp, Homo sapiens
gcgaatgcagtccac

SEQ ID NO: 64518 - DNA, 15 bp, Homo sapiens
cgaatgcagtccacg

SEQ ID NO: 64519 - DNA, 15 bp, Homo sapiens
gaatgcagtccacgc

SEQ ID NO: 64520 - DNA, 15 bp, Homo sapiens
aatgcagtccacgcc

SEQ ID NO: 64521 - DNA, 15 bp, Homo sapiens
atgcagtccacgccg

SEQ ID NO: 64522 - DNA, 15 bp, Homo sapiens
tgcagtccacgccgc

SEQ ID NO: 64523 - DNA, 15 bp, Homo sapiens
gcagtccacgccgcg

SEQ ID NO: 64524 - DNA, 15 bp, Homo sapiens
cagtccacgccgcgg

SEQ ID NO: 64525 - DNA, 15 bp, Homo sapiens
agtccacgccgcgga

SEQ ID NO: 64526 - DNA, 15 bp, Homo sapiens
gtccacgccgcggaa

SEQ ID NO: 64527 - DNA, 15 bp, Homo sapiens
tccacgccgcggaaa

SEQ ID NO: 64528 - DNA, 15 bp, Homo sapiens
ccacgccgcggaaat

SEQ ID NO: 64529 - DNA, 15 bp, Homo sapiens
cacgccgcggaaatc

SEQ ID NO: 64530 - DNA, 15 bp, Homo sapiens
acgccgcggaaatct

SEQ ID NO: 64531 - DNA, 15 bp, Homo sapiens
cgccgcggaaatcta

SEQ ID NO: 64532 - DNA, 15 bp, Homo sapiens
gccgcggaaatctag

SEQ ID NO: 64533 - DNA, 15 bp, Homo sapiens
ccgcggaaatctagg

SEQ ID NO: 64534 - DNA, 15 bp, Homo sapiens
cgcggaaatctaggg

SEQ ID NO: 64535 - DNA, 15 bp, Homo sapiens
gcggaaatctagggg

SEQ ID NO: 64536 - DNA, 15 bp, Homo sapiens
cggaaatctaggggt

SEQ ID NO: 64537 - DNA, 15 bp, Homo sapiens
ggaaatctaggggta

SEQ ID NO: 64538 - DNA, 15 bp, Homo sapiens
gaaatctaggggtag

SEQ ID NO: 64539 - DNA, 15 bp, Homo sapiens
aaatctaggggtaga

SEQ ID NO: 64540 - DNA, 15 bp, Homo sapiens
aatctaggggtagag

SEQ ID NO: 64541 - DNA, 15 bp, Homo sapiens
atctaggggtagagg

SEQ ID NO: 64542 - DNA, 15 bp, Homo sapiens
tctaggggtagaggc

SEQ ID NO: 64543 - DNA, 15 bp, Homo sapiens
ctaggggtagaggca

SEQ ID NO: 64544 - DNA, 15 bp, Homo sapiens
taggggtagaggcaa

SEQ ID NO: 64545 - DNA, 15 bp, Homo sapiens
aggggtagaggcaag

SEQ ID NO: 64546 - DNA, 15 bp, Homo sapiens
ggggtagaggcaagg

SEQ ID NO: 64547 - DNA, 15 bp, Homo sapiens
gggtagaggcaaggg

SEQ ID NO: 64548 - DNA, 15 bp, Homo sapiens
ggtagaggcaagggg

SEQ ID NO: 64549 - DNA, 15 bp, Homo sapiens
gtagaggcaaggggg

SEQ ID NO: 64550 - DNA, 15 bp, Homo sapiens
tagaggcaagggggg

SEQ ID NO: 64551 - DNA, 15 bp, Homo sapiens
agaggcaagggggga

SEQ ID NO: 64552 - DNA, 15 bp, Homo sapiens
gaggcaaggggggag

SEQ ID NO: 64553 - DNA, 15 bp, Homo sapiens
aggcaaggggggagg

SEQ ID NO: 64554 - DNA, 15 bp, Homo sapiens
ggcaaggggggaggg

SEQ ID NO: 64555 - DNA, 15 bp, Homo sapiens
gcaaggggggagggt

SEQ ID NO: 64556 - DNA, 15 bp, Homo sapiens
caaggggggagggta

SEQ ID NO: 64557 - DNA, 15 bp, Homo sapiens
aaggggggagggtat

SEQ ID NO: 64558 - DNA, 15 bp, Homo sapiens
aggggggagggtatt

SEQ ID NO: 64559 - DNA, 15 bp, Homo sapiens
ggggggagggtattc

SEQ ID NO: 64560 - DNA, 15 bp, Homo sapiens
gggggagggtattcc

SEQ ID NO: 64561 - DNA, 15 bp, Homo sapiens
ggggagggtattccc

SEQ ID NO: 64562 - DNA, 15 bp, Homo sapiens
gggagggtattcccc

SEQ ID NO: 64563 - DNA, 15 bp, Homo sapiens
ggagggtattcccct

SEQ ID NO: 64564 - DNA, 15 bp, Homo sapiens
gagggtattcccctt

SEQ ID NO: 64565 - DNA, 15 bp, Homo sapiens
agggtattccccttg

SEQ ID NO: 64566 - DNA, 15 bp, Homo sapiens
gggtattccccttgc

SEQ ID NO: 64567 - DNA, 15 bp, Homo sapiens
ggtattccccttgca

SEQ ID NO: 64568 - DNA, 15 bp, Homo sapiens
gtattccccttgcag

SEQ ID NO: 64569 - DNA, 15 bp, Homo sapiens
tattccccttgcagg

SEQ ID NO: 64570 - DNA, 15 bp, Homo sapiens
attccccttgcaggg

SEQ ID NO: 64571 - DNA, 15 bp, Homo sapiens
ttccccttgcaggga

SEQ ID NO: 64572 - DNA, 15 bp, Homo sapiens
tccccttgcagggac

SEQ ID NO: 64573 - DNA, 15 bp, Homo sapiens
ccccttgcagggacc

SEQ ID NO: 64574 - DNA, 15 bp, Homo sapiens
cccttgcagggaccg

SEQ ID NO: 64575 - DNA, 15 bp, Homo sapiens
ccttgcagggaccgt

SEQ ID NO: 64576 - DNA, 15 bp, Homo sapiens
cttgcagggaccgtc

SEQ ID NO: 64577 - DNA, 15 bp, Homo sapiens
ttgcagggaccgtcc

SEQ ID NO: 64578 - DNA, 15 bp, Homo sapiens
tgcagggaccgtccc

SEQ ID NO: 64579 - DNA, 15 bp, Homo sapiens
gcagggaccgtccct

SEQ ID NO: 64580 - DNA, 15 bp, Homo sapiens
cagggaccgtccctg

SEQ ID NO: 64581 - DNA, 15 bp, Homo sapiens
agggaccgtccctgc

SEQ ID NO: 64582 - DNA, 15 bp, Homo sapiens
gggaccgtccctgca

SEQ ID NO: 64583 - DNA, 15 bp, Homo sapiens
ggaccgtccctgcat

SEQ ID NO: 64584 - DNA, 15 bp, Homo sapiens
gaccgtccctgcatt

SEQ ID NO: 64585 - DNA, 15 bp, Homo sapiens
accgtccctgcattt

SEQ ID NO: 64586 - DNA, 15 bp, Homo sapiens
ccgtccctgcatttc

SEQ ID NO: 64587 - DNA, 15 bp, Homo sapiens
cgtccctgcatttcc

SEQ ID NO: 64588 - DNA, 15 bp, Homo sapiens
gtccctgcatttccc

SEQ ID NO: 64589 - DNA, 15 bp, Homo sapiens
tccctgcatttccct

SEQ ID NO: 64590 - DNA, 15 bp, Homo sapiens
ccctgcatttccctc

SEQ ID NO: 64591 - DNA, 15 bp, Homo sapiens
cctgcatttccctct

SEQ ID NO: 64592 - DNA, 15 bp, Homo sapiens
ctgcatttccctcta

SEQ ID NO: 64593 - DNA, 15 bp, Homo sapiens
tgcatttccctctac

SEQ ID NO: 64594 - DNA, 15 bp, Homo sapiens
gcatttccctctaca

SEQ ID NO: 64595 - DNA, 15 bp, Homo sapiens
catttccctctacac

SEQ ID NO: 64596 - DNA, 15 bp, Homo sapiens
atttccctctacact

SEQ ID NO: 64597 - DNA, 15 bp, Homo sapiens
tttccctctacactg

SEQ ID NO: 64598 - DNA, 15 bp, Homo sapiens
ttccctctacactga

SEQ ID NO: 64599 - DNA, 15 bp, Homo sapiens
tccctctacactgag

SEQ ID NO: 64600 - DNA, 15 bp, Homo sapiens
ccctctacactgagc

SEQ ID NO: 64601 - DNA, 15 bp, Homo sapiens
cctctacactgagca

SEQ ID NO: 64602 - DNA, 15 bp, Homo sapiens
ctctacactgagcag

SEQ ID NO: 64603 - DNA, 15 bp, Homo sapiens
tctacactgagcagc

SEQ ID NO: 64604 - DNA, 15 bp, Homo sapiens
ctacactgagcagcg

SEQ ID NO: 64605 - DNA, 15 bp, Homo sapiens
tacactgagcagcgt

SEQ ID NO: 64606 - DNA, 15 bp, Homo sapiens
acactgagcagcgtg

SEQ ID NO: 64607 - DNA, 15 bp, Homo sapiens
cactgagcagcgtgg

SEQ ID NO: 64608 - DNA, 15 bp, Homo sapiens
actgagcagcgtggt

SEQ ID NO: 64609 - DNA, 15 bp, Homo sapiens
ctgagcagcgtggtc

SEQ ID NO: 64610 - DNA, 15 bp, Homo sapiens
tgagcagcgtggtca

SEQ ID NO: 64611 - DNA, 15 bp, Homo sapiens
gagcagcgtggtcac

SEQ ID NO: 64612 - DNA, 15 bp, Homo sapiens
agcagcgtggtcacc

SEQ ID NO: 64613 - DNA, 15 bp, Homo sapiens
gcagcgtggtcacct

SEQ ID NO: 64614 - DNA, 15 bp, Homo sapiens
cagcgtggtcacctg

SEQ ID NO: 64615 - DNA, 15 bp, Homo sapiens
agcgtggtcacctgg

SEQ ID NO: 64616 - DNA, 15 bp, Homo sapiens
gcgtggtcacctggt

SEQ ID NO: 64617 - DNA, 15 bp, Homo sapiens
cgtggtcacctggtc

SEQ ID NO: 64618 - DNA, 15 bp, Homo sapiens
gtggtcacctggtcc

SEQ ID NO: 64619 - DNA, 15 bp, Homo sapiens
tggtcacctggtcct

SEQ ID NO: 64620 - DNA, 15 bp, Homo sapiens
ggtcacctggtcctt

SEQ ID NO: 64621 - DNA, 15 bp, Homo sapiens
gtcacctggtccttt

SEQ ID NO: 64622 - DNA, 15 bp, Homo sapiens
tcacctggtcctttt

SEQ ID NO: 64623 - DNA, 15 bp, Homo sapiens
cacctggtccttttc

SEQ ID NO: 64624 - DNA, 15 bp, Homo sapiens
acctggtccttttca

SEQ ID NO: 64625 - DNA, 15 bp, Homo sapiens
cctggtccttttcac

SEQ ID NO: 64626 - DNA, 15 bp, Homo sapiens
tggtccttttcacct

SEQ ID NO: 64627 - DNA, 15 bp, Homo sapiens
ggtccttttcacctg

SEQ ID NO: 64628 - DNA, 15 bp, Homo sapiens
gtccttttcacctgt

SEQ ID NO: 64629 - DNA, 15 bp, Homo sapiens
tccttttcacctgtg

SEQ ID NO: 64630 - DNA, 15 bp, Homo sapiens
ccttttcacctgtgc

SEQ ID NO: 64631 - DNA, 15 bp, Homo sapiens
cttttcacctgtgca

SEQ ID NO: 64632 - DNA, 15 bp, Homo sapiens
ttttcacctgtgcac

SEQ ID NO: 64633 - DNA, 15 bp, Homo sapiens
tttcacctgtgcaca

SEQ ID NO: 64634 - DNA, 15 bp, Homo sapiens
ttcacctgtgcacag

SEQ ID NO: 64635 - DNA, 15 bp, Homo sapiens
tcacctgtgcacagg

SEQ ID NO: 64636 - DNA, 15 bp, Homo sapiens
cacctgtgcacaggt

SEQ ID NO: 64637 - DNA, 15 bp, Homo sapiens
acctgtgcacaggta

SEQ ID NO: 64638 - DNA, 15 bp, Homo sapiens
cctgtgcacaggtaa

SEQ ID NO: 64639 - DNA, 15 bp, Homo sapiens
ctgtgcacaggtaac

SEQ ID NO: 64640 - DNA, 15 bp, Homo sapiens
tgtgcacaggtaacc

SEQ ID NO: 64641 - DNA, 15 bp, Homo sapiens
gtgcacaggtaacct

SEQ ID NO: 64642 - DNA, 15 bp, Homo sapiens
tgcacaggtaacctc

SEQ ID NO: 64643 - DNA, 15 bp, Homo sapiens
gcacaggtaacctca

SEQ ID NO: 64644 - DNA, 15 bp, Homo sapiens
cacaggtaacctcag

SEQ ID NO: 64645 - DNA, 15 bp, Homo sapiens
acaggtaacctcaga

SEQ ID NO: 64646 - DNA, 15 bp, Homo sapiens
caggtaacctcagac

SEQ ID NO: 64647 - DNA, 15 bp, Homo sapiens
aggtaacctcagact

SEQ ID NO: 64648 - DNA, 15 bp, Homo sapiens
ggtaacctcagactc

SEQ ID NO: 64649 - DNA, 15 bp, Homo sapiens
gtaacctcagactcg

SEQ ID NO: 64650 - DNA, 15 bp, Homo sapiens
taacctcagactcga

SEQ ID NO: 64651 - DNA, 15 bp, Homo sapiens
aacctcagactcgag

SEQ ID NO: 64652 - DNA, 15 bp, Homo sapiens
acctcagactcgagt

SEQ ID NO: 64653 - DNA, 15 bp, Homo sapiens
cctcagactcgagtc

SEQ ID NO: 64654 - DNA, 15 bp, Homo sapiens
ctcagactcgagtca

SEQ ID NO: 64655 - DNA, 15 bp, Homo sapiens
tcagactcgagtcag

SEQ ID NO: 64656 - DNA, 15 bp, Homo sapiens
cagactcgagtcagt

SEQ ID NO: 64657 - DNA, 15 bp, Homo sapiens
agactcgagtcagtg

SEQ ID NO: 64658 - DNA, 15 bp, Homo sapiens
gactcgagtcagtga

SEQ ID NO: 64659 - DNA, 15 bp, Homo sapiens
actcgagtcagtgac

SEQ ID NO: 64660 - DNA, 15 bp, Homo sapiens
ctcgagtcagtgaca

SEQ ID NO: 64661 - DNA, 15 bp, Homo sapiens
tcgagtcagtgacac

SEQ ID NO: 64662 - DNA, 15 bp, Homo sapiens
cgagtcagtgacact

SEQ ID NO: 64663 - DNA, 15 bp, Homo sapiens
gagtcagtgacactg

SEQ ID NO: 64664 - DNA, 15 bp, Homo sapiens
agtcagtgacactgc

SEQ ID NO: 64665 - DNA, 15 bp, Homo sapiens
gtcagtgacactgct

SEQ ID NO: 64666 - DNA, 15 bp, Homo sapiens
tcagtgacactgctc

SEQ ID NO: 64667 - DNA, 15 bp, Homo sapiens
cagtgacactgctca

SEQ ID NO: 64668 - DNA, 15 bp, Homo sapiens
agtgacactgctcaa

SEQ ID NO: 64669 - DNA, 15 bp, Homo sapiens
gtgacactgctcaac

SEQ ID NO: 64670 - DNA, 15 bp, Homo sapiens
tgacactgctcaacg

SEQ ID NO: 64671 - DNA, 15 bp, Homo sapiens
gacactgctcaacgc

SEQ ID NO: 64672 - DNA, 15 bp, Homo sapiens
acactgctcaacgca

SEQ ID NO: 64673 - DNA, 15 bp, Homo sapiens
cactgctcaacgcac

SEQ ID NO: 64674 - DNA, 15 bp, Homo sapiens
actgctcaacgcacc

SEQ ID NO: 64675 - DNA, 15 bp, Homo sapiens
ctgctcaacgcaccc

SEQ ID NO: 64676 - DNA, 15 bp, Homo sapiens
tgctcaacgcaccca

SEQ ID NO: 64677 - DNA, 15 bp, Homo sapiens
gctcaacgcacccat

SEQ ID NO: 64678 - DNA, 15 bp, Homo sapiens
ctcaacgcacccatc

SEQ ID NO: 64679 - DNA, 15 bp, Homo sapiens
tcaacgcacccatct

SEQ ID NO: 64680 - DNA, 15 bp, Homo sapiens
caacgcacccatctc

SEQ ID NO: 64681 - DNA, 15 bp, Homo sapiens
aacgcacccatctca

SEQ ID NO: 64682 - DNA, 15 bp, Homo sapiens
acgcacccatctcag

SEQ ID NO: 64683 - DNA, 15 bp, Homo sapiens
cgcacccatctcagc

SEQ ID NO: 64684 - DNA, 15 bp, Homo sapiens
gcacccatctcagct

SEQ ID NO: 64685 - DNA, 15 bp, Homo sapiens
cacccatctcagctt

SEQ ID NO: 64686 - DNA, 15 bp, Homo sapiens
acccatctcagcttt

SEQ ID NO: 64687 - DNA, 15 bp, Homo sapiens
cccatctcagctttc

SEQ ID NO: 64688 - DNA, 15 bp, Homo sapiens
ccatctcagctttca

SEQ ID NO: 64689 - DNA, 15 bp, Homo sapiens
catctcagctttcat

SEQ ID NO: 64690 - DNA, 15 bp, Homo sapiens
atctcagctttcatc

SEQ ID NO: 64691 - DNA, 15 bp, Homo sapiens
tctcagctttcatca

SEQ ID NO: 64692 - DNA, 15 bp, Homo sapiens
ctcagctttcatcat

SEQ ID NO: 64693 - DNA, 15 bp, Homo sapiens
tcagctttcatcatc

SEQ ID NO: 64694 - DNA, 15 bp, Homo sapiens
cagctttcatcatca

SEQ ID NO: 64695 - DNA, 15 bp, Homo sapiens
agctttcatcatcag

SEQ ID NO: 64696 - DNA, 15 bp, Homo sapiens
gctttcatcatcagt

SEQ ID NO: 64697 - DNA, 15 bp, Homo sapiens
ctttcatcatcagtc

SEQ ID NO: 64698 - DNA, 15 bp, Homo sapiens
tttcatcatcagtcc

SEQ ID NO: 64699 - DNA, 15 bp, Homo sapiens
ttcatcatcagtcct

SEQ ID NO: 64700 - DNA, 15 bp, Homo sapiens
tcatcatcagtcctc

SEQ ID NO: 64701 - DNA, 15 bp, Homo sapiens
catcatcagtcctcc

SEQ ID NO: 64702 - DNA, 15 bp, Homo sapiens
atcatcagtcctcca

SEQ ID NO: 64703 - DNA, 15 bp, Homo sapiens
tcatcagtcctccac

SEQ ID NO: 64704 - DNA, 15 bp, Homo sapiens
catcagtcctccacc

SEQ ID NO: 64705 - DNA, 15 bp, Homo sapiens
atcagtcctccaccc

SEQ ID NO: 64706 - DNA, 15 bp, Homo sapiens
tcagtcctccacccc

SEQ ID NO: 64707 - DNA, 15 bp, Homo sapiens
cagtcctccaccccc

SEQ ID NO: 64708 - DNA, 15 bp, Homo sapiens
agtcctccacccccg

SEQ ID NO: 64709 - DNA, 15 bp, Homo sapiens
gtcctccacccccgc

SEQ ID NO: 64710 - DNA, 15 bp, Homo sapiens
tcctccacccccgcc

SEQ ID NO: 64711 - DNA, 15 bp, Homo sapiens
cctccacccccgccc

SEQ ID NO: 64712 - DNA, 15 bp, Homo sapiens
ctccacccccgcccc

SEQ ID NO: 64713 - DNA, 15 bp, Homo sapiens
tccacccccgcccca

SEQ ID NO: 64714 - DNA, 15 bp, Homo sapiens
ccacccccgccccac

SEQ ID NO: 64715 - DNA, 15 bp, Homo sapiens
cacccccgccccaca

SEQ ID NO: 64716 - DNA, 15 bp, Homo sapiens
acccccgccccacaa

SEQ ID NO: 64717 - DNA, 15 bp, Homo sapiens
cccccgccccacaac

SEQ ID NO: 64718 - DNA, 15 bp, Homo sapiens
ccccgccccacaaca

SEQ ID NO: 64719 - DNA, 15 bp, Homo sapiens
cccgccccacaacag

SEQ ID NO: 64720 - DNA, 15 bp, Homo sapiens
ccgccccacaacagc

SEQ ID NO: 64721 - DNA, 15 bp, Homo sapiens
cgccccacaacagcc

SEQ ID NO: 64722 - DNA, 15 bp, Homo sapiens
gccccacaacagcct

SEQ ID NO: 64723 - DNA, 15 bp, Homo sapiens
ccccacaacagccta

SEQ ID NO: 64724 - DNA, 15 bp, Homo sapiens
cccacaacagcctac

SEQ ID NO: 64725 - DNA, 15 bp, Homo sapiens
ccacaacagcctacc

SEQ ID NO: 64726 - DNA, 15 bp, Homo sapiens
cacaacagcctaccc

SEQ ID NO: 64727 - DNA, 15 bp, Homo sapiens
acaacagcctaccct

SEQ ID NO: 64728 - DNA, 15 bp, Homo sapiens
caacagcctaccctg

SEQ ID NO: 64729 - DNA, 15 bp, Homo sapiens
aacagcctaccctgc

SEQ ID NO: 64730 - DNA, 15 bp, Homo sapiens
acagcctaccctgcc

SEQ ID NO: 64731 - DNA, 15 bp, Homo sapiens
cagcctaccctgcct

SEQ ID NO: 64732 - DNA, 15 bp, Homo sapiens
agcctaccctgcctc

SEQ ID NO: 64733 - DNA, 15 bp, Homo sapiens
gcctaccctgcctcc

SEQ ID NO: 64734 - DNA, 15 bp, Homo sapiens
cctaccctgcctccg

SEQ ID NO: 64735 - DNA, 15 bp, Homo sapiens
ctaccctgcctccgg

SEQ ID NO: 64736 - DNA, 15 bp, Homo sapiens
taccctgcctccggc

SEQ ID NO: 64737 - DNA, 15 bp, Homo sapiens
accctgcctccggct

SEQ ID NO: 64738 - DNA, 15 bp, Homo sapiens
ccctgcctccggctg

SEQ ID NO: 64739 - DNA, 15 bp, Homo sapiens
cctgcctccggctgg

SEQ ID NO: 64740 - DNA, 15 bp, Homo sapiens
ctgcctccggctggg

SEQ ID NO: 64741 - DNA, 15 bp, Homo sapiens
tgcctccggctgggt

SEQ ID NO: 64742 - DNA, 15 bp, Homo sapiens
gcctccggctgggtt

SEQ ID NO: 64743 - DNA, 15 bp, Homo sapiens
cctccggctgggttt

SEQ ID NO: 64744 - DNA, 15 bp, Homo sapiens
ctccggctgggtttc

SEQ ID NO: 64745 - DNA, 15 bp, Homo sapiens
tccggctgggtttct

SEQ ID NO: 64746 - DNA, 15 bp, Homo sapiens
ccggctgggtttctg

SEQ ID NO: 64747 - DNA, 15 bp, Homo sapiens
cggctgggtttctgg

SEQ ID NO: 64748 - DNA, 15 bp, Homo sapiens
ggctgggtttctggg

SEQ ID NO: 64749 - DNA, 15 bp, Homo sapiens
gctgggtttctgggc

SEQ ID NO: 64750 - DNA, 15 bp, Homo sapiens
ctgggtttctgggca

SEQ ID NO: 64751 - DNA, 15 bp, Homo sapiens
tgggtttctgggcag

SEQ ID NO: 64752 - DNA, 15 bp, Homo sapiens
gggtttctgggcaga

SEQ ID NO: 64753 - DNA, 15 bp, Homo sapiens
ggtttctgggcagag

SEQ ID NO: 64754 - DNA, 15 bp, Homo sapiens
gtttctgggcagagg

SEQ ID NO: 64755 - DNA, 15 bp, Homo sapiens
tttctgggcagaggc

SEQ ID NO: 64756 - DNA, 15 bp, Homo sapiens
ttctgggcagaggcc

SEQ ID NO: 64757 - DNA, 15 bp, Homo sapiens
tctgggcagaggccg

SEQ ID NO: 64758 - DNA, 15 bp, Homo sapiens
ctgggcagaggccga

SEQ ID NO: 64759 - DNA, 15 bp, Homo sapiens
tgggcagaggccgag

SEQ ID NO: 64760 - DNA, 15 bp, Homo sapiens
gggcagaggccgagg

SEQ ID NO: 64761 - DNA, 15 bp, Homo sapiens
ggcagaggccgaggc

SEQ ID NO: 64762 - DNA, 15 bp, Homo sapiens
gcagaggccgaggct

SEQ ID NO: 64763 - DNA, 15 bp, Homo sapiens
cagaggccgaggctt

SEQ ID NO: 64764 - DNA, 15 bp, Homo sapiens
agaggccgaggctta

SEQ ID NO: 64765 - DNA, 15 bp, Homo sapiens
gaggccgaggcttag

SEQ ID NO: 64766 - DNA, 15 bp, Homo sapiens
aggccgaggcttagc

SEQ ID NO: 64767 - DNA, 15 bp, Homo sapiens
ggccgaggcttagct

SEQ ID NO: 64768 - DNA, 15 bp, Homo sapiens
gccgaggcttagctc

SEQ ID NO: 64769 - DNA, 15 bp, Homo sapiens
ccgaggcttagctcg

SEQ ID NO: 64770 - DNA, 15 bp, Homo sapiens
cgaggcttagctcgt

SEQ ID NO: 64771 - DNA, 15 bp, Homo sapiens
gaggcttagctcgtt

SEQ ID NO: 64772 - DNA, 15 bp, Homo sapiens
aggcttagctcgtta

SEQ ID NO: 64773 - DNA, 15 bp, Homo sapiens
ggcttagctcgttat

SEQ ID NO: 64774 - DNA, 15 bp, Homo sapiens
gcttagctcgttatc

SEQ ID NO: 64775 - DNA, 15 bp, Homo sapiens
cttagctcgttatcc

SEQ ID NO: 64776 - DNA, 15 bp, Homo sapiens
ttagctcgttatcct

SEQ ID NO: 64777 - DNA, 15 bp, Homo sapiens
tagctcgttatcctc

SEQ ID NO: 64778 - DNA, 15 bp, Homo sapiens
agctcgttatcctcg

SEQ ID NO: 64779 - DNA, 15 bp, Homo sapiens
gctcgttatcctcgc

SEQ ID NO: 64780 - DNA, 15 bp, Homo sapiens
ctcgttatcctcgcc

SEQ ID NO: 64781 - DNA, 15 bp, Homo sapiens
tcgttatcctcgcct

SEQ ID NO: 64782 - DNA, 15 bp, Homo sapiens
cgttatcctcgcctc

SEQ ID NO: 64783 - DNA, 15 bp, Homo sapiens
gttatcctcgcctcg

SEQ ID NO: 64784 - DNA, 15 bp, Homo sapiens
ttatcctcgcctcgc

SEQ ID NO: 64785 - DNA, 15 bp, Homo sapiens
tatcctcgcctcgcg

SEQ ID NO: 64786 - DNA, 15 bp, Homo sapiens
atcctcgcctcgcgt

SEQ ID NO: 64787 - DNA, 15 bp, Homo sapiens
tcctcgcctcgcgtt

SEQ ID NO: 64788 - DNA, 15 bp, Homo sapiens
cctcgcctcgcgttg

SEQ ID NO: 64789 - DNA, 15 bp, Homo sapiens
ctcgcctcgcgttgc

SEQ ID NO: 64790 - DNA, 15 bp, Homo sapiens
tcgcctcgcgttgct

SEQ ID NO: 64791 - DNA, 15 bp, Homo sapiens
cgcctcgcgttgctg

SEQ ID NO: 64792 - DNA, 15 bp, Homo sapiens
gcctcgcgttgctgc

SEQ ID NO: 64793 - DNA, 15 bp, Homo sapiens
cctcgcgttgctgca

SEQ ID NO: 64794 - DNA, 15 bp, Homo sapiens
ctcgcgttgctgcaa

SEQ ID NO: 64795 - DNA, 15 bp, Homo sapiens
tcgcgttgctgcaaa

SEQ ID NO: 64796 - DNA, 15 bp, Homo sapiens
cgcgttgctgcaaaa

SEQ ID NO: 64797 - DNA, 15 bp, Homo sapiens
gcgttgctgcaaaag

SEQ ID NO: 64798 - DNA, 15 bp, Homo sapiens
cgttgctgcaaaagc

SEQ ID NO: 64799 - DNA, 15 bp, Homo sapiens
gttgctgcaaaagcc

SEQ ID NO: 64800 - DNA, 15 bp, Homo sapiens
ttgctgcaaaagccg

SEQ ID NO: 64801 - DNA, 15 bp, Homo sapiens
tgctgcaaaagccgc

SEQ ID NO: 64802 - DNA, 15 bp, Homo sapiens
gctgcaaaagccgca

SEQ ID NO: 64803 - DNA, 15 bp, Homo sapiens
ctgcaaaagccgcag

SEQ ID NO: 64804 - DNA, 15 bp, Homo sapiens
tgcaaaagccgcagc

SEQ ID NO: 64805 - DNA, 15 bp, Homo sapiens
gcaaaagccgcagca

SEQ ID NO: 64806 - DNA, 15 bp, Homo sapiens
caaaagccgcagcaa

SEQ ID NO: 64807 - DNA, 15 bp, Homo sapiens
aaaagccgcagcaag

SEQ ID NO: 64808 - DNA, 15 bp, Homo sapiens
aaagccgcagcaagt

SEQ ID NO: 64809 - DNA, 15 bp, Homo sapiens
aagccgcagcaagtg

SEQ ID NO: 64810 - DNA, 15 bp, Homo sapiens
agccgcagcaagtgc

SEQ ID NO: 64811 - DNA, 15 bp, Homo sapiens
gccgcagcaagtgca

SEQ ID NO: 64812 - DNA, 15 bp, Homo sapiens
ccgcagcaagtgcag

SEQ ID NO: 64813 - DNA, 15 bp, Homo sapiens
cgcagcaagtgcagc

SEQ ID NO: 64814 - DNA, 15 bp, Homo sapiens
gcagcaagtgcagct

SEQ ID NO: 64815 - DNA, 15 bp, Homo sapiens
cagcaagtgcagctg

SEQ ID NO: 64816 - DNA, 15 bp, Homo sapiens
agcaagtgcagctgc

SEQ ID NO: 64817 - DNA, 15 bp, Homo sapiens
gcaagtgcagctgca

SEQ ID NO: 64818 - DNA, 15 bp, Homo sapiens
caagtgcagctgcag

SEQ ID NO: 64819 - DNA, 15 bp, Homo sapiens
aagtgcagctgcagg

SEQ ID NO: 64820 - DNA, 15 bp, Homo sapiens
agtgcagctgcaggc

SEQ ID NO: 64821 - DNA, 15 bp, Homo sapiens
gtgcagctgcaggct

SEQ ID NO: 64822 - DNA, 15 bp, Homo sapiens
tgcagctgcaggctg

SEQ ID NO: 64823 - DNA, 15 bp, Homo sapiens
gcagctgcaggctgg

SEQ ID NO: 64824 - DNA, 15 bp, Homo sapiens
cagctgcaggctggc

SEQ ID NO: 64825 - DNA, 15 bp, Homo sapiens
agctgcaggctggcg

SEQ ID NO: 64826 - DNA, 15 bp, Homo sapiens
gctgcaggctggcgg

SEQ ID NO: 64827 - DNA, 15 bp, Homo sapiens
ctgcaggctggcggc

SEQ ID NO: 64828 - DNA, 15 bp, Homo sapiens
tgcaggctggcggct

SEQ ID NO: 64829 - DNA, 15 bp, Homo sapiens
gcaggctggcggctg

SEQ ID NO: 64830 - DNA, 15 bp, Homo sapiens
caggctggcggctgg

SEQ ID NO: 64831 - DNA, 15 bp, Homo sapiens
aggctggcggctggg

SEQ ID NO: 64832 - DNA, 15 bp, Homo sapiens
ggctggcggctggga

SEQ ID NO: 64833 - DNA, 15 bp, Homo sapiens
gctggcggctgggaa

SEQ ID NO: 64834 - DNA, 15 bp, Homo sapiens
ctggcggctgggaac

SEQ ID NO: 64835 - DNA, 15 bp, Homo sapiens
tggcggctgggaacc

SEQ ID NO: 64836 - DNA, 15 bp, Homo sapiens
ggcggctgggaaccg

SEQ ID NO: 64837 - DNA, 15 bp, Homo sapiens
gcggctgggaaccgg

SEQ ID NO: 64838 - DNA, 15 bp, Homo sapiens
cggctgggaaccggc

SEQ ID NO: 64839 - DNA, 15 bp, Homo sapiens
ggctgggaaccggcc

SEQ ID NO: 64840 - DNA, 15 bp, Homo sapiens
gctgggaaccggccc

SEQ ID NO: 64841 - DNA, 15 bp, Homo sapiens
ctgggaaccggcccg

SEQ ID NO: 64842 - DNA, 15 bp, Homo sapiens
tgggaaccggcccga

SEQ ID NO: 64843 - DNA, 15 bp, Homo sapiens
gggaaccggcccgag

SEQ ID NO: 64844 - DNA, 15 bp, Homo sapiens
ggaaccggcccgagc

SEQ ID NO: 64845 - DNA, 15 bp, Homo sapiens
gaaccggcccgagca

SEQ ID NO: 64846 - DNA, 15 bp, Homo sapiens
aaccggcccgagcaa

SEQ ID NO: 64847 - DNA, 15 bp, Homo sapiens
accggcccgagcaag

SEQ ID NO: 64848 - DNA, 15 bp, Homo sapiens
ccggcccgagcaagc

SEQ ID NO: 64849 - DNA, 15 bp, Homo sapiens
cggcccgagcaagcc

SEQ ID NO: 64850 - DNA, 15 bp, Homo sapiens
ggcccgagcaagccc

SEQ ID NO: 64851 - DNA, 15 bp, Homo sapiens
gcccgagcaagcccc

SEQ ID NO: 64852 - DNA, 15 bp, Homo sapiens
cccgagcaagcccca

SEQ ID NO: 64853 - DNA, 15 bp, Homo sapiens
ccgagcaagccccag

SEQ ID NO: 64854 - DNA, 15 bp, Homo sapiens
cgagcaagccccagg

SEQ ID NO: 64855 - DNA, 15 bp, Homo sapiens
gagcaagccccaggc

SEQ ID NO: 64856 - DNA, 15 bp, Homo sapiens
agcaagccccaggca

SEQ ID NO: 64857 - DNA, 15 bp, Homo sapiens
gcaagccccaggcag

SEQ ID NO: 64858 - DNA, 15 bp, Homo sapiens
caagccccaggcagc

SEQ ID NO: 64859 - DNA, 15 bp, Homo sapiens
aagccccaggcagct

SEQ ID NO: 64860 - DNA, 15 bp, Homo sapiens
agccccaggcagcta

SEQ ID NO: 64861 - DNA, 15 bp, Homo sapiens
gccccaggcagctac

SEQ ID NO: 64862 - DNA, 15 bp, Homo sapiens
ccccaggcagctaca

SEQ ID NO: 64863 - DNA, 15 bp, Homo sapiens
cccaggcagctacac

SEQ ID NO: 64864 - DNA, 15 bp, Homo sapiens
ccaggcagctacact

SEQ ID NO: 64865 - DNA, 15 bp, Homo sapiens
caggcagctacactg

SEQ ID NO: 64866 - DNA, 15 bp, Homo sapiens
aggcagctacactgg

SEQ ID NO: 64867 - DNA, 15 bp, Homo sapiens
ggcagctacactggg

SEQ ID NO: 64868 - DNA, 15 bp, Homo sapiens
gcagctacactgggc

SEQ ID NO: 64869 - DNA, 15 bp, Homo sapiens
cagctacactgggca

SEQ ID NO: 64870 - DNA, 15 bp, Homo sapiens
agctacactgggcat

SEQ ID NO: 64871 - DNA, 15 bp, Homo sapiens
gctacactgggcatg

SEQ ID NO: 64872 - DNA, 15 bp, Homo sapiens
ctacactgggcatgc

SEQ ID NO: 64873 - DNA, 15 bp, Homo sapiens
tacactgggcatgct

SEQ ID NO: 64874 - DNA, 15 bp, Homo sapiens
acactgggcatgctc

SEQ ID NO: 64875 - DNA, 15 bp, Homo sapiens
cactgggcatgctca

SEQ ID NO: 64876 - DNA, 15 bp, Homo sapiens
actgggcatgctcag

SEQ ID NO: 64877 - DNA, 15 bp, Homo sapiens
ctgggcatgctcagt

SEQ ID NO: 64878 - DNA, 15 bp, Homo sapiens
tgggcatgctcagta

SEQ ID NO: 64879 - DNA, 15 bp, Homo sapiens
gggcatgctcagtag

SEQ ID NO: 64880 - DNA, 15 bp, Homo sapiens
ggcatgctcagtaga

SEQ ID NO: 64881 - DNA, 15 bp, Homo sapiens
gcatgctcagtagag

SEQ ID NO: 64882 - DNA, 15 bp, Homo sapiens
catgctcagtagagc

SEQ ID NO: 64883 - DNA, 15 bp, Homo sapiens
atgctcagtagagcc

SEQ ID NO: 64884 - DNA, 15 bp, Homo sapiens
tgctcagtagagcct

SEQ ID NO: 64885 - DNA, 15 bp, Homo sapiens
gctcagtagagcctg

SEQ ID NO: 64886 - DNA, 15 bp, Homo sapiens
ctcagtagagcctgc

SEQ ID NO: 64887 - DNA, 15 bp, Homo sapiens
tcagtagagcctgcg

SEQ ID NO: 64888 - DNA, 15 bp, Homo sapiens
cagtagagcctgcgg

SEQ ID NO: 64889 - DNA, 15 bp, Homo sapiens
agtagagcctgcggc

SEQ ID NO: 64890 - DNA, 15 bp, Homo sapiens
gtagagcctgcggct

SEQ ID NO: 64891 - DNA, 15 bp, Homo sapiens
tagagcctgcggctt

SEQ ID NO: 64892 - DNA, 15 bp, Homo sapiens
agagcctgcggcttg

SEQ ID NO: 64893 - DNA, 15 bp, Homo sapiens
gagcctgcggcttgg

SEQ ID NO: 64894 - DNA, 15 bp, Homo sapiens
agcctgcggcttggg

SEQ ID NO: 64895 - DNA, 15 bp, Homo sapiens
gcctgcggcttgggg

SEQ ID NO: 64896 - DNA, 15 bp, Homo sapiens
cctgcggcttgggga

SEQ ID NO: 64897 - DNA, 15 bp, Homo sapiens
ctgcggcttggggac

SEQ ID NO: 64898 - DNA, 15 bp, Homo sapiens
tgcggcttggggact

SEQ ID NO: 64899 - DNA, 15 bp, Homo sapiens
gcggcttggggactc

SEQ ID NO: 64900 - DNA, 15 bp, Homo sapiens
cggcttggggactct

SEQ ID NO: 64901 - DNA, 15 bp, Homo sapiens
ggcttggggactctg

SEQ ID NO: 64902 - DNA, 15 bp, Homo sapiens
gcttggggactctgc

SEQ ID NO: 64903 - DNA, 15 bp, Homo sapiens
cttggggactctgcg

SEQ ID NO: 64904 - DNA, 15 bp, Homo sapiens
ttggggactctgcgc

SEQ ID NO: 64905 - DNA, 15 bp, Homo sapiens
tggggactctgcgct

SEQ ID NO: 64906 - DNA, 15 bp, Homo sapiens
ggggactctgcgctc

SEQ ID NO: 64907 - DNA, 15 bp, Homo sapiens
gggactctgcgctcg

SEQ ID NO: 64908 - DNA, 15 bp, Homo sapiens
ggactctgcgctcgc

SEQ ID NO: 64909 - DNA, 15 bp, Homo sapiens
gactctgcgctcgca

SEQ ID NO: 64910 - DNA, 15 bp, Homo sapiens
actctgcgctcgcac

SEQ ID NO: 64911 - DNA, 15 bp, Homo sapiens
ctctgcgctcgcacc

SEQ ID NO: 64912 - DNA, 15 bp, Homo sapiens
tctgcgctcgcaccc

SEQ ID NO: 64913 - DNA, 15 bp, Homo sapiens
ctgcgctcgcaccca

SEQ ID NO: 64914 - DNA, 15 bp, Homo sapiens
tgcgctcgcacccag

SEQ ID NO: 64915 - DNA, 15 bp, Homo sapiens
gcgctcgcacccaga

SEQ ID NO: 64916 - DNA, 15 bp, Homo sapiens
cgctcgcacccagag

SEQ ID NO: 64917 - DNA, 15 bp, Homo sapiens
gctcgcacccagagc

SEQ ID NO: 64918 - DNA, 15 bp, Homo sapiens
ctcgcacccagagct

SEQ ID NO: 64919 - DNA, 15 bp, Homo sapiens
tcgcacccagagcta

SEQ ID NO: 64920 - DNA, 15 bp, Homo sapiens
cgcacccagagctac

SEQ ID NO: 64921 - DNA, 15 bp, Homo sapiens
gcacccagagctacc

SEQ ID NO: 64922 - DNA, 15 bp, Homo sapiens
cacccagagctaccg

SEQ ID NO: 64923 - DNA, 15 bp, Homo sapiens
acccagagctaccgc

SEQ ID NO: 64924 - DNA, 15 bp, Homo sapiens
cccagagctaccgct

SEQ ID NO: 64925 - DNA, 15 bp, Homo sapiens
ccagagctaccgctc

SEQ ID NO: 64926 - DNA, 15 bp, Homo sapiens
cagagctaccgctct

SEQ ID NO: 64927 - DNA, 15 bp, Homo sapiens
agagctaccgctctg

SEQ ID NO: 64928 - DNA, 15 bp, Homo sapiens
gagctaccgctctgc

SEQ ID NO: 64929 - DNA, 15 bp, Homo sapiens
agctaccgctctgcc

SEQ ID NO: 64930 - DNA, 15 bp, Homo sapiens
gctaccgctctgccc

SEQ ID NO: 64931 - DNA, 15 bp, Homo sapiens
ctaccgctctgcccc

SEQ ID NO: 64932 - DNA, 15 bp, Homo sapiens
taccgctctgccccc

SEQ ID NO: 64933 - DNA, 15 bp, Homo sapiens
accgctctgccccct

SEQ ID NO: 64934 - DNA, 15 bp, Homo sapiens
ccgctctgccccctc

SEQ ID NO: 64935 - DNA, 15 bp, Homo sapiens
cgctctgccccctcc

SEQ ID NO: 64936 - DNA, 15 bp, Homo sapiens
gctctgccccctcct

SEQ ID NO: 64937 - DNA, 15 bp, Homo sapiens
ctctgccccctccta

SEQ ID NO: 64938 - DNA, 15 bp, Homo sapiens
tctgccccctcctac

SEQ ID NO: 64939 - DNA, 15 bp, Homo sapiens
ctgccccctcctacc

SEQ ID NO: 64940 - DNA, 15 bp, Homo sapiens
tgccccctcctaccg

SEQ ID NO: 64941 - DNA, 15 bp, Homo sapiens
gccccctcctaccgc

SEQ ID NO: 64942 - DNA, 15 bp, Homo sapiens
ccccctcctaccgcc

SEQ ID NO: 64943 - DNA, 15 bp, Homo sapiens
cccctcctaccgccc

SEQ ID NO: 64944 - DNA, 15 bp, Homo sapiens
ccctcctaccgcccc

SEQ ID NO: 64945 - DNA, 15 bp, Homo sapiens
cctcctaccgccccc

SEQ ID NO: 64946 - DNA, 15 bp, Homo sapiens
ctcctaccgccccct

SEQ ID NO: 64947 - DNA, 15 bp, Homo sapiens
tcctaccgccccctg

SEQ ID NO: 64948 - DNA, 15 bp, Homo sapiens
cctaccgccccctgc

SEQ ID NO: 64949 - DNA, 15 bp, Homo sapiens
ctaccgccccctgcc

SEQ ID NO: 64950 - DNA, 15 bp, Homo sapiens
taccgccccctgccc

SEQ ID NO: 64951 - DNA, 15 bp, Homo sapiens
accgccccctgccct

SEQ ID NO: 64952 - DNA, 15 bp, Homo sapiens
ccgccccctgccctg

SEQ ID NO: 64953 - DNA, 15 bp, Homo sapiens
cgccccctgccctgc

SEQ ID NO: 64954 - DNA, 15 bp, Homo sapiens
gccccctgccctgcc

SEQ ID NO: 64955 - DNA, 15 bp, Homo sapiens
ccccctgccctgccc

SEQ ID NO: 64956 - DNA, 15 bp, Homo sapiens
cccctgccctgccct

SEQ ID NO: 64957 - DNA, 15 bp, Homo sapiens
ccctgccctgccctg

SEQ ID NO: 64958 - DNA, 15 bp, Homo sapiens
cctgccctgccctgc

SEQ ID NO: 64959 - DNA, 15 bp, Homo sapiens
ctgccctgccctgcc

SEQ ID NO: 64960 - DNA, 15 bp, Homo sapiens
tgccctgccctgccc

SEQ ID NO: 64961 - DNA, 15 bp, Homo sapiens
gccctgccctgccct

SEQ ID NO: 64962 - DNA, 15 bp, Homo sapiens
ccctgccctgccctc

SEQ ID NO: 64963 - DNA, 15 bp, Homo sapiens
cctgccctgccctcc

SEQ ID NO: 64964 - DNA, 15 bp, Homo sapiens
ctgccctgccctccc

SEQ ID NO: 64965 - DNA, 15 bp, Homo sapiens
tgccctgccctcccc

SEQ ID NO: 64966 - DNA, 15 bp, Homo sapiens
gccctgccctcccct

SEQ ID NO: 64967 - DNA, 15 bp, Homo sapiens
ccctgccctcccctc

SEQ ID NO: 64968 - DNA, 15 bp, Homo sapiens
cctgccctcccctcg

SEQ ID NO: 64969 - DNA, 15 bp, Homo sapiens
ctgccctcccctcgc

SEQ ID NO: 64970 - DNA, 15 bp, Homo sapiens
tgccctcccctcgcc

SEQ ID NO: 64971 - DNA, 15 bp, Homo sapiens
gccctcccctcgccc

SEQ ID NO: 64972 - DNA, 15 bp, Homo sapiens
ccctcccctcgcccg

SEQ ID NO: 64973 - DNA, 15 bp, Homo sapiens
cctcccctcgcccgg

SEQ ID NO: 64974 - DNA, 15 bp, Homo sapiens
ctcccctcgcccggc

SEQ ID NO: 64975 - DNA, 15 bp, Homo sapiens
tcccctcgcccggcg

SEQ ID NO: 64976 - DNA, 15 bp, Homo sapiens
cccctcgcccggcgc

SEQ ID NO: 64977 - DNA, 15 bp, Homo sapiens
ccctcgcccggcgcg

SEQ ID NO: 64978 - DNA, 15 bp, Homo sapiens
cctcgcccggcgcgg

SEQ ID NO: 64979 - DNA, 15 bp, Homo sapiens
ctcgcccggcgcggt

SEQ ID NO: 64980 - DNA, 15 bp, Homo sapiens
tcgcccggcgcggtc

SEQ ID NO: 64981 - DNA, 15 bp, Homo sapiens
cgcccggcgcggtcc

SEQ ID NO: 64982 - DNA, 15 bp, Homo sapiens
gcccggcgcggtccc

SEQ ID NO: 64983 - DNA, 15 bp, Homo sapiens
cccggcgcggtcccg

SEQ ID NO: 64984 - DNA, 15 bp, Homo sapiens
ccggcgcggtcccgt

SEQ ID NO: 64985 - DNA, 15 bp, Homo sapiens
cggcgcggtcccgtc

SEQ ID NO: 64986 - DNA, 15 bp, Homo sapiens
ggcgcggtcccgtcc

SEQ ID NO: 64987 - DNA, 15 bp, Homo sapiens
gcgcggtcccgtccg

SEQ ID NO: 64988 - DNA, 15 bp, Homo sapiens
cgcggtcccgtccgc

SEQ ID NO: 64989 - DNA, 15 bp, Homo sapiens
gcggtcccgtccgcc

SEQ ID NO: 64990 - DNA, 15 bp, Homo sapiens
cggtcccgtccgcct

SEQ ID NO: 64991 - DNA, 15 bp, Homo sapiens
ggtcccgtccgcctc

SEQ ID NO: 64992 - DNA, 15 bp, Homo sapiens
gtcccgtccgcctct

SEQ ID NO: 64993 - DNA, 15 bp, Homo sapiens
tcccgtccgcctctc

SEQ ID NO: 64994 - DNA, 15 bp, Homo sapiens
cccgtccgcctctcg

SEQ ID NO: 64995 - DNA, 15 bp, Homo sapiens
ccgtccgcctctcgc

SEQ ID NO: 64996 - DNA, 15 bp, Homo sapiens
cgtccgcctctcgct

SEQ ID NO: 64997 - DNA, 15 bp, Homo sapiens
gtccgcctctcgctc

SEQ ID NO: 64998 - DNA, 15 bp, Homo sapiens
tccgcctctcgctcg

SEQ ID NO: 64999 - DNA, 15 bp, Homo sapiens
ccgcctctcgctcgc

SEQ ID NO: 65000 - DNA, 15 bp, Homo sapiens
cgcctctcgctcgcc

SEQ ID NO: 65001 - DNA, 15 bp, Homo sapiens
gcctctcgctcgcct

SEQ ID NO: 65002 - DNA, 15 bp, Homo sapiens
cctctcgctcgcctc

SEQ ID NO: 65003 - DNA, 15 bp, Homo sapiens
ctctcgctcgcctcc

SEQ ID NO: 65004 - DNA, 15 bp, Homo sapiens
tctcgctcgcctccc

SEQ ID NO: 65005 - DNA, 15 bp, Homo sapiens
ctcgctcgcctcccg

SEQ ID NO: 65006 - DNA, 15 bp, Homo sapiens
tcgctcgcctcccgc

SEQ ID NO: 65007 - DNA, 15 bp, Homo sapiens
cgctcgcctcccgcc

SEQ ID NO: 65008 - DNA, 15 bp, Homo sapiens
gctcgcctcccgcct

SEQ ID NO: 65009 - DNA, 15 bp, Homo sapiens
ctcgcctcccgcctc

SEQ ID NO: 65010 - DNA, 15 bp, Homo sapiens
tcgcctcccgcctcc

SEQ ID NO: 65011 - DNA, 15 bp, Homo sapiens
cgcctcccgcctccc

SEQ ID NO: 65012 - DNA, 15 bp, Homo sapiens
gcctcccgcctcccc

SEQ ID NO: 65013 - DNA, 15 bp, Homo sapiens
cctcccgcctcccct

SEQ ID NO: 65014 - DNA, 15 bp, Homo sapiens
ctcccgcctcccctc

SEQ ID NO: 65015 - DNA, 15 bp, Homo sapiens
tcccgcctcccctcg

SEQ ID NO: 65016 - DNA, 15 bp, Homo sapiens
cccgcctcccctcgg

SEQ ID NO: 65017 - DNA, 15 bp, Homo sapiens
ccgcctcccctcggt

SEQ ID NO: 65018 - DNA, 15 bp, Homo sapiens
cgcctcccctcggtc

SEQ ID NO: 65019 - DNA, 15 bp, Homo sapiens
gcctcccctcggtct

SEQ ID NO: 65020 - DNA, 15 bp, Homo sapiens
cctcccctcggtctt

SEQ ID NO: 65021 - DNA, 15 bp, Homo sapiens
ctcccctcggtcttc

SEQ ID NO: 65022 - DNA, 15 bp, Homo sapiens
tcccctcggtcttcc

SEQ ID NO: 65023 - DNA, 15 bp, Homo sapiens
cccctcggtcttccg

SEQ ID NO: 65024 - DNA, 15 bp, Homo sapiens
ccctcggtcttccga

SEQ ID NO: 65025 - DNA, 15 bp, Homo sapiens
cctcggtcttccgag

SEQ ID NO: 65026 - DNA, 15 bp, Homo sapiens
ctcggtcttccgagg

SEQ ID NO: 65027 - DNA, 15 bp, Homo sapiens
tcggtcttccgaggc

SEQ ID NO: 65028 - DNA, 15 bp, Homo sapiens
cggtcttccgaggcg

SEQ ID NO: 65029 - DNA, 15 bp, Homo sapiens
ggtcttccgaggcgc

SEQ ID NO: 65030 - DNA, 15 bp, Homo sapiens
gtcttccgaggcgcc

SEQ ID NO: 65031 - DNA, 15 bp, Homo sapiens
tcttccgaggcgccc

SEQ ID NO: 65032 - DNA, 15 bp, Homo sapiens
cttccgaggcgcccg

SEQ ID NO: 65033 - DNA, 15 bp, Homo sapiens
ttccgaggcgcccgg

SEQ ID NO: 65034 - DNA, 15 bp, Homo sapiens
tccgaggcgcccggg

SEQ ID NO: 65035 - DNA, 15 bp, Homo sapiens
ccgaggcgcccgggc

SEQ ID NO: 65036 - DNA, 15 bp, Homo sapiens
cgaggcgcccgggct

SEQ ID NO: 65037 - DNA, 15 bp, Homo sapiens
gaggcgcccgggctc

SEQ ID NO: 65038 - DNA, 15 bp, Homo sapiens
aggcgcccgggctcc

SEQ ID NO: 65039 - DNA, 15 bp, Homo sapiens
ggcgcccgggctccc

SEQ ID NO: 65040 - DNA, 15 bp, Homo sapiens
gcgcccgggctcccg

SEQ ID NO: 65041 - DNA, 15 bp, Homo sapiens
cgcccgggctcccgg

SEQ ID NO: 65042 - DNA, 15 bp, Homo sapiens
gcccgggctcccggc

SEQ ID NO: 65043 - DNA, 15 bp, Homo sapiens
cccgggctcccggcg

SEQ ID NO: 65044 - DNA, 15 bp, Homo sapiens
ccgggctcccggcgc

SEQ ID NO: 65045 - DNA, 15 bp, Homo sapiens
cgggctcccggcgcg

SEQ ID NO: 65046 - DNA, 15 bp, Homo sapiens
gggctcccggcgcgg

SEQ ID NO: 65047 - DNA, 15 bp, Homo sapiens
ggctcccggcgcggc

SEQ ID NO: 65048 - DNA, 15 bp, Homo sapiens
gctcccggcgcggcg

SEQ ID NO: 65049 - DNA, 15 bp, Homo sapiens
ctcccggcgcggcgg

SEQ ID NO: 65050 - DNA, 15 bp, Homo sapiens
tcccggcgcggcggc

SEQ ID NO: 65051 - DNA, 15 bp, Homo sapiens
cccggcgcggcggcg

SEQ ID NO: 65052 - DNA, 15 bp, Homo sapiens
ccggcgcggcggcgg

SEQ ID NO: 65053 - DNA, 15 bp, Homo sapiens
cggcgcggcggcgga

SEQ ID NO: 65054 - DNA, 15 bp, Homo sapiens
ggcgcggcggcggag

SEQ ID NO: 65055 - DNA, 15 bp, Homo sapiens
gcgcggcggcggagg

SEQ ID NO: 65056 - DNA, 15 bp, Homo sapiens
cgcggcggcggaggg

SEQ ID NO: 65057 - DNA, 15 bp, Homo sapiens
gcggcggcggagggg

SEQ ID NO: 65058 - DNA, 15 bp, Homo sapiens
cggcggcggaggggg

SEQ ID NO: 65059 - DNA, 15 bp, Homo sapiens
ggcggcggagggggc

SEQ ID NO: 65060 - DNA, 15 bp, Homo sapiens
gcggcggagggggcg

SEQ ID NO: 65061 - DNA, 15 bp, Homo sapiens
cggcggagggggcgg

SEQ ID NO: 65062 - DNA, 15 bp, Homo sapiens
ggcggagggggcggg

SEQ ID NO: 65063 - DNA, 15 bp, Homo sapiens
gcggagggggcgggc

SEQ ID NO: 65064 - DNA, 15 bp, Homo sapiens
cggagggggcgggca

SEQ ID NO: 65065 - DNA, 15 bp, Homo sapiens
ggagggggcgggcag

SEQ ID NO: 65066 - DNA, 15 bp, Homo sapiens
gagggggcgggcagg

SEQ ID NO: 65067 - DNA, 15 bp, Homo sapiens
agggggcgggcaggc

SEQ ID NO: 65068 - DNA, 15 bp, Homo sapiens
gggggcgggcaggcc

SEQ ID NO: 65069 - DNA, 15 bp, Homo sapiens
ggggcgggcaggccg

SEQ ID NO: 65070 - DNA, 15 bp, Homo sapiens
gggcgggcaggccgg

SEQ ID NO: 65071 - DNA, 15 bp, Homo sapiens
ggcgggcaggccggc

SEQ ID NO: 65072 - DNA, 15 bp, Homo sapiens
gcgggcaggccggcg

SEQ ID NO: 65073 - DNA, 15 bp, Homo sapiens
cgggcaggccggcgg

SEQ ID NO: 65074 - DNA, 15 bp, Homo sapiens
gggcaggccggcggg

SEQ ID NO: 65075 - DNA, 15 bp, Homo sapiens
ggcaggccggcgggc

SEQ ID NO: 65076 - DNA, 15 bp, Homo sapiens
gcaggccggcgggcg

SEQ ID NO: 65077 - DNA, 15 bp, Homo sapiens
caggccggcgggcgg

SEQ ID NO: 65078 - DNA, 15 bp, Homo sapiens
aggccggcgggcggt

SEQ ID NO: 65079 - DNA, 15 bp, Homo sapiens
ggccggcgggcggtg

SEQ ID NO: 65080 - DNA, 15 bp, Homo sapiens
gccggcgggcggtga

SEQ ID NO: 65081 - DNA, 15 bp, Homo sapiens
ccggcgggcggtgat

SEQ ID NO: 65082 - DNA, 15 bp, Homo sapiens
cggcgggcggtgatg

SEQ ID NO: 65083 - DNA, 15 bp, Homo sapiens
ggcgggcggtgatgt

SEQ ID NO: 65084 - DNA, 15 bp, Homo sapiens
gcgggcggtgatgtg

SEQ ID NO: 65085 - DNA, 15 bp, Homo sapiens
cgggcggtgatgtgg

SEQ ID NO: 65086 - DNA, 15 bp, Homo sapiens
gggcggtgatgtggc

SEQ ID NO: 65087 - DNA, 15 bp, Homo sapiens
ggcggtgatgtggcg

SEQ ID NO: 65088 - DNA, 15 bp, Homo sapiens
gcggtgatgtggcgg

SEQ ID NO: 65089 - DNA, 15 bp, Homo sapiens
cggtgatgtggcggg

SEQ ID NO: 65090 - DNA, 15 bp, Homo sapiens
ggtgatgtggcggga

SEQ ID NO: 65091 - DNA, 15 bp, Homo sapiens
gtgatgtggcgggac

SEQ ID NO: 65092 - DNA, 15 bp, Homo sapiens
tgatgtggcgggact

SEQ ID NO: 65093 - DNA, 15 bp, Homo sapiens
gatgtggcgggactc

SEQ ID NO: 65094 - DNA, 15 bp, Homo sapiens
atgtggcgggactct

SEQ ID NO: 65095 - DNA, 15 bp, Homo sapiens
tgtggcgggactctt

SEQ ID NO: 65096 - DNA, 15 bp, Homo sapiens
gtggcgggactcttt

SEQ ID NO: 65097 - DNA, 15 bp, Homo sapiens
tggcgggactcttta

SEQ ID NO: 65098 - DNA, 15 bp, Homo sapiens
ggcgggactctttat

SEQ ID NO: 65099 - DNA, 15 bp, Homo sapiens
gcgggactctttatg

SEQ ID NO: 65100 - DNA, 15 bp, Homo sapiens
cgggactctttatgc

SEQ ID NO: 65101 - DNA, 15 bp, Homo sapiens
gggactctttatgcg

SEQ ID NO: 65102 - DNA, 15 bp, Homo sapiens
ggactctttatgcgc

SEQ ID NO: 65103 - DNA, 15 bp, Homo sapiens
gactctttatgcgct

SEQ ID NO: 65104 - DNA, 15 bp, Homo sapiens
actctttatgcgctg

SEQ ID NO: 65105 - DNA, 15 bp, Homo sapiens
ctctttatgcgctgc

SEQ ID NO: 65106 - DNA, 15 bp, Homo sapiens
tctttatgcgctgcg

SEQ ID NO: 65107 - DNA, 15 bp, Homo sapiens
ctttatgcgctgcgg

SEQ ID NO: 65108 - DNA, 15 bp, Homo sapiens
tttatgcgctgcggc

SEQ ID NO: 65109 - DNA, 15 bp, Homo sapiens
ttatgcgctgcggca

SEQ ID NO: 65110 - DNA, 15 bp, Homo sapiens
tatgcgctgcggcag

SEQ ID NO: 65111 - DNA, 15 bp, Homo sapiens
atgcgctgcggcagg

SEQ ID NO: 65112 - DNA, 15 bp, Homo sapiens
tgcgctgcggcagga

SEQ ID NO: 65113 - DNA, 15 bp, Homo sapiens
gcgctgcggcaggat

SEQ ID NO: 65114 - DNA, 15 bp, Homo sapiens
cgctgcggcaggata

SEQ ID NO: 65115 - DNA, 15 bp, Homo sapiens
gctgcggcaggatac

SEQ ID NO: 65116 - DNA, 15 bp, Homo sapiens
ctgcggcaggatacg

SEQ ID NO: 65117 - DNA, 15 bp, Homo sapiens
tgcggcaggatacgc

SEQ ID NO: 65118 - DNA, 15 bp, Homo sapiens
gcggcaggatacgcg

SEQ ID NO: 65119 - DNA, 15 bp, Homo sapiens
cggcaggatacgcgc

SEQ ID NO: 65120 - DNA, 15 bp, Homo sapiens
ggcaggatacgcgct

SEQ ID NO: 65121 - DNA, 15 bp, Homo sapiens
gcaggatacgcgctc

SEQ ID NO: 65122 - DNA, 15 bp, Homo sapiens
caggatacgcgctcg

SEQ ID NO: 65123 - DNA, 15 bp, Homo sapiens
aggatacgcgctcgg

SEQ ID NO: 65124 - DNA, 15 bp, Homo sapiens
ggatacgcgctcggc

SEQ ID NO: 65125 - DNA, 15 bp, Homo sapiens
gatacgcgctcggcg

SEQ ID NO: 65126 - DNA, 15 bp, Homo sapiens
atacgcgctcggcgc

SEQ ID NO: 65127 - DNA, 15 bp, Homo sapiens
tacgcgctcggcgct

SEQ ID NO: 65128 - DNA, 15 bp, Homo sapiens
acgcgctcggcgctg

SEQ ID NO: 65129 - DNA, 15 bp, Homo sapiens
cgcgctcggcgctgg

SEQ ID NO: 65130 - DNA, 15 bp, Homo sapiens
gcgctcggcgctggg

SEQ ID NO: 65131 - DNA, 15 bp, Homo sapiens
cgctcggcgctggga

SEQ ID NO: 65132 - DNA, 15 bp, Homo sapiens
gctcggcgctgggac

SEQ ID NO: 65133 - DNA, 15 bp, Homo sapiens
ctcggcgctgggacg

SEQ ID NO: 65134 - DNA, 15 bp, Homo sapiens
tcggcgctgggacgc

SEQ ID NO: 65135 - DNA, 15 bp, Homo sapiens
cggcgctgggacgcg

SEQ ID NO: 65136 - DNA, 15 bp, Homo sapiens
ggcgctgggacgcga

SEQ ID NO: 65137 - DNA, 15 bp, Homo sapiens
gcgctgggacgcgac

SEQ ID NO: 65138 - DNA, 15 bp, Homo sapiens
cgctgggacgcgact

SEQ ID NO: 65139 - DNA, 15 bp, Homo sapiens
gctgggacgcgactg

SEQ ID NO: 65140 - DNA, 15 bp, Homo sapiens
ctgggacgcgactgc

SEQ ID NO: 65141 - DNA, 15 bp, Homo sapiens
tgggacgcgactgcg

SEQ ID NO: 65142 - DNA, 15 bp, Homo sapiens
gggacgcgactgcgc

SEQ ID NO: 65143 - DNA, 15 bp, Homo sapiens
ggacgcgactgcgct

SEQ ID NO: 65144 - DNA, 15 bp, Homo sapiens
gacgcgactgcgctc

SEQ ID NO: 65145 - DNA, 15 bp, Homo sapiens
acgcgactgcgctca

SEQ ID NO: 65146 - DNA, 15 bp, Homo sapiens
cgcgactgcgctcag

SEQ ID NO: 65147 - DNA, 15 bp, Homo sapiens
gcgactgcgctcagt

SEQ ID NO: 65148 - DNA, 15 bp, Homo sapiens
cgactgcgctcagtt

SEQ ID NO: 65149 - DNA, 15 bp, Homo sapiens
gactgcgctcagttc

SEQ ID NO: 65150 - DNA, 15 bp, Homo sapiens
actgcgctcagttct

SEQ ID NO: 65151 - DNA, 15 bp, Homo sapiens
ctgcgctcagttctc

SEQ ID NO: 65152 - DNA, 15 bp, Homo sapiens
tgcgctcagttctct

SEQ ID NO: 65153 - DNA, 15 bp, Homo sapiens
gcgctcagttctctc

SEQ ID NO: 65154 - DNA, 15 bp, Homo sapiens
cgctcagttctctcc

SEQ ID NO: 65155 - DNA, 15 bp, Homo sapiens
gctcagttctctcct

SEQ ID NO: 65156 - DNA, 15 bp, Homo sapiens
ctcagttctctcctc

SEQ ID NO: 65157 - DNA, 15 bp, Homo sapiens
tcagttctctcctct

SEQ ID NO: 65158 - DNA, 15 bp, Homo sapiens
cagttctctcctctc

SEQ ID NO: 65159 - DNA, 15 bp, Homo sapiens
agttctctcctctcg

SEQ ID NO: 65160 - DNA, 15 bp, Homo sapiens
gttctctcctctcgg

SEQ ID NO: 65161 - DNA, 15 bp, Homo sapiens
ttctctcctctcgga

SEQ ID NO: 65162 - DNA, 15 bp, Homo sapiens
tctctcctctcggaa

SEQ ID NO: 65163 - DNA, 15 bp, Homo sapiens
ctctcctctcggaag

SEQ ID NO: 65164 - DNA, 15 bp, Homo sapiens
tctcctctcggaagc

SEQ ID NO: 65165 - DNA, 15 bp, Homo sapiens
ctcctctcggaagct

SEQ ID NO: 65166 - DNA, 15 bp, Homo sapiens
tcctctcggaagctg

SEQ ID NO: 65167 - DNA, 15 bp, Homo sapiens
cctctcggaagctgc

SEQ ID NO: 65168 - DNA, 15 bp, Homo sapiens
ctctcggaagctgca

SEQ ID NO: 65169 - DNA, 15 bp, Homo sapiens
tctcggaagctgcag

SEQ ID NO: 65170 - DNA, 15 bp, Homo sapiens
ctcggaagctgcagc

SEQ ID NO: 65171 - DNA, 15 bp, Homo sapiens
tcggaagctgcagcc

SEQ ID NO: 65172 - DNA, 15 bp, Homo sapiens
cggaagctgcagcca

SEQ ID NO: 65173 - DNA, 15 bp, Homo sapiens
ggaagctgcagccat

SEQ ID NO: 65174 - DNA, 15 bp, Homo sapiens
gaagctgcagccatg

SEQ ID NO: 65175 - DNA, 15 bp, Homo sapiens
aagctgcagccatga

SEQ ID NO: 65176 - DNA, 15 bp, Homo sapiens
agctgcagccatgat

SEQ ID NO: 65177 - DNA, 15 bp, Homo sapiens
gctgcagccatgatg

SEQ ID NO: 65178 - DNA, 15 bp, Homo sapiens
ctgcagccatgatgg

SEQ ID NO: 65179 - DNA, 15 bp, Homo sapiens
tgcagccatgatgga

SEQ ID NO: 65180 - DNA, 15 bp, Homo sapiens
gcagccatgatggaa

SEQ ID NO: 65181 - DNA, 15 bp, Homo sapiens
cagccatgatggaag

SEQ ID NO: 65182 - DNA, 15 bp, Homo sapiens
agccatgatggaagt

SEQ ID NO: 65183 - DNA, 15 bp, Homo sapiens
gccatgatggaagtt

SEQ ID NO: 65184 - DNA, 15 bp, Homo sapiens
ccatgatggaagttt

SEQ ID NO: 65185 - DNA, 15 bp, Homo sapiens
catgatggaagtttg

SEQ ID NO: 65186 - DNA, 15 bp, Homo sapiens
atgatggaagtttga

SEQ ID NO: 65187 - DNA, 15 bp, Homo sapiens
tgatggaagtttgag

SEQ ID NO: 65188 - DNA, 15 bp, Homo sapiens
gatggaagtttgaga

SEQ ID NO: 65189 - DNA, 15 bp, Homo sapiens
atggaagtttgagag

SEQ ID NO: 65190 - DNA, 15 bp, Homo sapiens
tggaagtttgagagt

SEQ ID NO: 65191 - DNA, 15 bp, Homo sapiens
ggaagtttgagagtt

SEQ ID NO: 65192 - DNA, 15 bp, Homo sapiens
gaagtttgagagttg

SEQ ID NO: 65193 - DNA, 15 bp, Homo sapiens
aagtttgagagttga

SEQ ID NO: 65194 - DNA, 15 bp, Homo sapiens
agtttgagagttgag

SEQ ID NO: 65195 - DNA, 15 bp, Homo sapiens
gtttgagagttgagc

SEQ ID NO: 65196 - DNA, 15 bp, Homo sapiens
tttgagagttgagcc

SEQ ID NO: 65197 - DNA, 15 bp, Homo sapiens
ttgagagttgagccg

SEQ ID NO: 65198 - DNA, 15 bp, Homo sapiens
tgagagttgagccgc

SEQ ID NO: 65199 - DNA, 15 bp, Homo sapiens
gagagttgagccgct

SEQ ID NO: 65200 - DNA, 15 bp, Homo sapiens
agagttgagccgctg

SEQ ID NO: 65201 - DNA, 15 bp, Homo sapiens
gagttgagccgctgt

SEQ ID NO: 65202 - DNA, 15 bp, Homo sapiens
agttgagccgctgtg

SEQ ID NO: 65203 - DNA, 15 bp, Homo sapiens
gttgagccgctgtga

SEQ ID NO: 65204 - DNA, 15 bp, Homo sapiens
ttgagccgctgtgag

SEQ ID NO: 65205 - DNA, 15 bp, Homo sapiens
tgagccgctgtgagg

SEQ ID NO: 65206 - DNA, 15 bp, Homo sapiens
gagccgctgtgaggc

SEQ ID NO: 65207 - DNA, 15 bp, Homo sapiens
agccgctgtgaggcg

SEQ ID NO: 65208 - DNA, 15 bp, Homo sapiens
gccgctgtgaggcga

SEQ ID NO: 65209 - DNA, 15 bp, Homo sapiens
ccgctgtgaggcgag

SEQ ID NO: 65210 - DNA, 15 bp, Homo sapiens
cgctgtgaggcgagg

SEQ ID NO: 65211 - DNA, 15 bp, Homo sapiens
gctgtgaggcgaggc

SEQ ID NO: 65212 - DNA, 15 bp, Homo sapiens
ctgtgaggcgaggcc

SEQ ID NO: 65213 - DNA, 15 bp, Homo sapiens
tgtgaggcgaggccg

SEQ ID NO: 65214 - DNA, 15 bp, Homo sapiens
gtgaggcgaggccgg

SEQ ID NO: 65215 - DNA, 15 bp, Homo sapiens
tgaggcgaggccggg

SEQ ID NO: 65216 - DNA, 15 bp, Homo sapiens
gaggcgaggccgggc

SEQ ID NO: 65217 - DNA, 15 bp, Homo sapiens
aggcgaggccgggct

SEQ ID NO: 65218 - DNA, 15 bp, Homo sapiens
ggcgaggccgggctc

SEQ ID NO: 65219 - DNA, 15 bp, Homo sapiens
gcgaggccgggctca

SEQ ID NO: 65220 - DNA, 15 bp, Homo sapiens
cgaggccgggctcag

SEQ ID NO: 65221 - DNA, 15 bp, Homo sapiens
gaggccgggctcagg

SEQ ID NO: 65222 - DNA, 15 bp, Homo sapiens
aggccgggctcaggc

SEQ ID NO: 65223 - DNA, 15 bp, Homo sapiens
ggccgggctcaggcg

SEQ ID NO: 65224 - DNA, 15 bp, Homo sapiens
gccgggctcaggcga

SEQ ID NO: 65225 - DNA, 15 bp, Homo sapiens
ccgggctcaggcgag

SEQ ID NO: 65226 - DNA, 15 bp, Homo sapiens
cgggctcaggcgagg

SEQ ID NO: 65227 - DNA, 15 bp, Homo sapiens
gggctcaggcgaggg

SEQ ID NO: 65228 - DNA, 15 bp, Homo sapiens
ggctcaggcgaggga

SEQ ID NO: 65229 - DNA, 15 bp, Homo sapiens
gctcaggcgagggag

SEQ ID NO: 65230 - DNA, 15 bp, Homo sapiens
ctcaggcgagggaga

SEQ ID NO: 65231 - DNA, 15 bp, Homo sapiens
tcaggcgagggagat

SEQ ID NO: 65232 - DNA, 15 bp, Homo sapiens
caggcgagggagatg

SEQ ID NO: 65233 - DNA, 15 bp, Homo sapiens
aggcgagggagatga

SEQ ID NO: 65234 - DNA, 15 bp, Homo sapiens
ggcgagggagatgag

SEQ ID NO: 65235 - DNA, 15 bp, Homo sapiens
gcgagggagatgaga

SEQ ID NO: 65236 - DNA, 15 bp, Homo sapiens
cgagggagatgagag

SEQ ID NO: 65237 - DNA, 15 bp, Homo sapiens
gagggagatgagaga

SEQ ID NO: 65238 - DNA, 15 bp, Homo sapiens
agggagatgagagac

SEQ ID NO: 65239 - DNA, 15 bp, Homo sapiens
gggagatgagagacg

SEQ ID NO: 65240 - DNA, 15 bp, Homo sapiens
ggagatgagagacgg

SEQ ID NO: 65241 - DNA, 15 bp, Homo sapiens
gagatgagagacggc

SEQ ID NO: 65242 - DNA, 15 bp, Homo sapiens
agatgagagacggcg

SEQ ID NO: 65243 - DNA, 15 bp, Homo sapiens
gatgagagacggcgg

SEQ ID NO: 65244 - DNA, 15 bp, Homo sapiens
atgagagacggcggc

SEQ ID NO: 65245 - DNA, 15 bp, Homo sapiens
tgagagacggcggcg

SEQ ID NO: 65246 - DNA, 15 bp, Homo sapiens
gagagacggcggcgg

SEQ ID NO: 65247 - DNA, 15 bp, Homo sapiens
agagacggcggcggc

SEQ ID NO: 65248 - DNA, 15 bp, Homo sapiens
gagacggcggcggcc

SEQ ID NO: 65249 - DNA, 15 bp, Homo sapiens
agacggcggcggccg

SEQ ID NO: 65250 - DNA, 15 bp, Homo sapiens
gacggcggcggccgc

SEQ ID NO: 65251 - DNA, 15 bp, Homo sapiens
acggcggcggccgcg

SEQ ID NO: 65252 - DNA, 15 bp, Homo sapiens
cggcggcggccgcgg

SEQ ID NO: 65253 - DNA, 15 bp, Homo sapiens
ggcggcggccgcggc

SEQ ID NO: 65254 - DNA, 15 bp, Homo sapiens
gcggcggccgcggcc

SEQ ID NO: 65255 - DNA, 15 bp, Homo sapiens
cggcggccgcggccc

SEQ ID NO: 65256 - DNA, 15 bp, Homo sapiens
ggcggccgcggcccg

SEQ ID NO: 65257 - DNA, 15 bp, Homo sapiens
gcggccgcggcccgg

SEQ ID NO: 65258 - DNA, 15 bp, Homo sapiens
cggccgcggcccgga

SEQ ID NO: 65259 - DNA, 15 bp, Homo sapiens
ggccgcggcccggag

SEQ ID NO: 65260 - DNA, 15 bp, Homo sapiens
gccgcggcccggagc

SEQ ID NO: 65261 - DNA, 15 bp, Homo sapiens
ccgcggcccggagcc

SEQ ID NO: 65262 - DNA, 15 bp, Homo sapiens
cgcggcccggagccc

SEQ ID NO: 65263 - DNA, 15 bp, Homo sapiens
gcggcccggagcccc

SEQ ID NO: 65264 - DNA, 15 bp, Homo sapiens
cggcccggagcccct

SEQ ID NO: 65265 - DNA, 15 bp, Homo sapiens
ggcccggagcccctc

SEQ ID NO: 65266 - DNA, 15 bp, Homo sapiens
gcccggagcccctct

SEQ ID NO: 65267 - DNA, 15 bp, Homo sapiens
cccggagcccctctc

SEQ ID NO: 65268 - DNA, 15 bp, Homo sapiens
ccggagcccctctca

SEQ ID NO: 65269 - DNA, 15 bp, Homo sapiens
cggagcccctctcag

SEQ ID NO: 65270 - DNA, 15 bp, Homo sapiens
ggagcccctctcagc

SEQ ID NO: 65271 - DNA, 15 bp, Homo sapiens
gagcccctctcagcg

SEQ ID NO: 65272 - DNA, 15 bp, Homo sapiens
agcccctctcagcgc

SEQ ID NO: 65273 - DNA, 15 bp, Homo sapiens
gcccctctcagcgcc

SEQ ID NO: 65274 - DNA, 15 bp, Homo sapiens
cccctctcagcgcct

SEQ ID NO: 65275 - DNA, 15 bp, Homo sapiens
ccctctcagcgcctg

SEQ ID NO: 65276 - DNA, 15 bp, Homo sapiens
cctctcagcgcctgt

SEQ ID NO: 65277 - DNA, 15 bp, Homo sapiens
ctctcagcgcctgtg

SEQ ID NO: 65278 - DNA, 15 bp, Homo sapiens
tctcagcgcctgtga

SEQ ID NO: 65279 - DNA, 15 bp, Homo sapiens
ctcagcgcctgtgag

SEQ ID NO: 65280 - DNA, 15 bp, Homo sapiens
tcagcgcctgtgagc

SEQ ID NO: 65281 - DNA, 15 bp, Homo sapiens
cagcgcctgtgagca

SEQ ID NO: 65282 - DNA, 15 bp, Homo sapiens
agcgcctgtgagcag

SEQ ID NO: 65283 - DNA, 15 bp, Homo sapiens
gcgcctgtgagcagc

SEQ ID NO: 65284 - DNA, 15 bp, Homo sapiens
cgcctgtgagcagcc

SEQ ID NO: 65285 - DNA, 15 bp, Homo sapiens
gcctgtgagcagccg

SEQ ID NO: 65286 - DNA, 15 bp, Homo sapiens
cctgtgagcagccgc

SEQ ID NO: 65287 - DNA, 15 bp, Homo sapiens
ctgtgagcagccgcg

SEQ ID NO: 65288 - DNA, 15 bp, Homo sapiens
tgtgagcagccgcgg

SEQ ID NO: 65289 - DNA, 15 bp, Homo sapiens
gtgagcagccgcggg

SEQ ID NO: 65290 - DNA, 15 bp, Homo sapiens
tgagcagccgcgggg

SEQ ID NO: 65291 - DNA, 15 bp, Homo sapiens
gagcagccgcggggg

SEQ ID NO: 65292 - DNA, 15 bp, Homo sapiens
agcagccgcgggggc

SEQ ID NO: 65293 - DNA, 15 bp, Homo sapiens
gcagccgcgggggca

SEQ ID NO: 65294 - DNA, 15 bp, Homo sapiens
cagccgcgggggcag

SEQ ID NO: 65295 - DNA, 15 bp, Homo sapiens
agccgcgggggcagc

SEQ ID NO: 65296 - DNA, 15 bp, Homo sapiens
gccgcgggggcagcg

SEQ ID NO: 65297 - DNA, 15 bp, Homo sapiens
ccgcgggggcagcgc

SEQ ID NO: 65298 - DNA, 15 bp, Homo sapiens
cgcgggggcagcgcc

SEQ ID NO: 65299 - DNA, 15 bp, Homo sapiens
gcgggggcagcgccc

SEQ ID NO: 65300 - DNA, 15 bp, Homo sapiens
cgggggcagcgccct

SEQ ID NO: 65301 - DNA, 15 bp, Homo sapiens
gggggcagcgccctc

SEQ ID NO: 65302 - DNA, 15 bp, Homo sapiens
ggggcagcgccctcg

SEQ ID NO: 65303 - DNA, 15 bp, Homo sapiens
gggcagcgccctcgg

SEQ ID NO: 65304 - DNA, 15 bp, Homo sapiens
ggcagcgccctcggg

SEQ ID NO: 65305 - DNA, 15 bp, Homo sapiens
gcagcgccctcgggg

SEQ ID NO: 65306 - DNA, 15 bp, Homo sapiens
cagcgccctcgggga

SEQ ID NO: 65307 - DNA, 15 bp, Homo sapiens
agcgccctcggggag

SEQ ID NO: 65308 - DNA, 15 bp, Homo sapiens
gcgccctcggggagc

SEQ ID NO: 65309 - DNA, 15 bp, Homo sapiens
cgccctcggggagcc

SEQ ID NO: 65310 - DNA, 15 bp, Homo sapiens
gccctcggggagccg

SEQ ID NO: 65311 - DNA, 15 bp, Homo sapiens
ccctcggggagccgg

SEQ ID NO: 65312 - DNA, 15 bp, Homo sapiens
cctcggggagccggc

SEQ ID NO: 65313 - DNA, 15 bp, Homo sapiens
ctcggggagccggcc

SEQ ID NO: 65314 - DNA, 15 bp, Homo sapiens
tcggggagccggccg

SEQ ID NO: 65315 - DNA, 15 bp, Homo sapiens
cggggagccggccgg

SEQ ID NO: 65316 - DNA, 15 bp, Homo sapiens
ggggagccggccggc

SEQ ID NO: 65317 - DNA, 15 bp, Homo sapiens
gggagccggccggcc

SEQ ID NO: 65318 - DNA, 15 bp, Homo sapiens
ggagccggccggcct

SEQ ID NO: 65319 - DNA, 15 bp, Homo sapiens
gagccggccggcctg

SEQ ID NO: 65320 - DNA, 15 bp, Homo sapiens
agccggccggcctgc

SEQ ID NO: 65321 - DNA, 15 bp, Homo sapiens
gccggccggcctgcg

SEQ ID NO: 65322 - DNA, 15 bp, Homo sapiens
ccggccggcctgcgg

SEQ ID NO: 65323 - DNA, 15 bp, Homo sapiens
cggccggcctgcggc

SEQ ID NO: 65324 - DNA, 15 bp, Homo sapiens
ggccggcctgcggcg

SEQ ID NO: 65325 - DNA, 15 bp, Homo sapiens
gccggcctgcggcgg

SEQ ID NO: 65326 - DNA, 15 bp, Homo sapiens
ccggcctgcggcggc

SEQ ID NO: 65327 - DNA, 15 bp, Homo sapiens
cggcctgcggcggcg

SEQ ID NO: 65328 - DNA, 15 bp, Homo sapiens
ggcctgcggcggcgg

SEQ ID NO: 65329 - DNA, 15 bp, Homo sapiens
gcctgcggcggcggc

SEQ ID NO: 65330 - DNA, 15 bp, Homo sapiens
cctgcggcggcggca

SEQ ID NO: 65331 - DNA, 15 bp, Homo sapiens
ctgcggcggcggcag

SEQ ID NO: 65332 - DNA, 15 bp, Homo sapiens
tgcggcggcggcagc

SEQ ID NO: 65333 - DNA, 15 bp, Homo sapiens
gcggcggcggcagcg

SEQ ID NO: 65334 - DNA, 15 bp, Homo sapiens
cggcggcggcagcgg

SEQ ID NO: 65335 - DNA, 15 bp, Homo sapiens
ggcggcggcagcggc

SEQ ID NO: 65336 - DNA, 15 bp, Homo sapiens
gcggcggcagcggcg

SEQ ID NO: 65337 - DNA, 15 bp, Homo sapiens
cggcggcagcggcgg

SEQ ID NO: 65338 - DNA, 15 bp, Homo sapiens
ggcggcagcggcggc

SEQ ID NO: 65339 - DNA, 15 bp, Homo sapiens
gcggcagcggcggcg

SEQ ID NO: 65340 - DNA, 15 bp, Homo sapiens
cggcagcggcggcgt

SEQ ID NO: 65341 - DNA, 15 bp, Homo sapiens
ggcagcggcggcgtt

SEQ ID NO: 65342 - DNA, 15 bp, Homo sapiens
gcagcggcggcgttt

SEQ ID NO: 65343 - DNA, 15 bp, Homo sapiens
cagcggcggcgtttc

SEQ ID NO: 65344 - DNA, 15 bp, Homo sapiens
agcggcggcgtttct

SEQ ID NO: 65345 - DNA, 15 bp, Homo sapiens
gcggcggcgtttctc

SEQ ID NO: 65346 - DNA, 15 bp, Homo sapiens
cggcggcgtttctcg

SEQ ID NO: 65347 - DNA, 15 bp, Homo sapiens
ggcggcgtttctcgc

SEQ ID NO: 65348 - DNA, 15 bp, Homo sapiens
gcggcgtttctcgcc

SEQ ID NO: 65349 - DNA, 15 bp, Homo sapiens
cggcgtttctcgcct

SEQ ID NO: 65350 - DNA, 15 bp, Homo sapiens
ggcgtttctcgcctc

SEQ ID NO: 65351 - DNA, 15 bp, Homo sapiens
gcgtttctcgcctcc

SEQ ID NO: 65352 - DNA, 15 bp, Homo sapiens
cgtttctcgcctcct

SEQ ID NO: 65353 - DNA, 15 bp, Homo sapiens
gtttctcgcctcctc

SEQ ID NO: 65354 - DNA, 15 bp, Homo sapiens
tttctcgcctcctct

SEQ ID NO: 65355 - DNA, 15 bp, Homo sapiens
ttctcgcctcctctt

SEQ ID NO: 65356 - DNA, 15 bp, Homo sapiens
tctcgcctcctcttc

SEQ ID NO: 65357 - DNA, 15 bp, Homo sapiens
ctcgcctcctcttcg

SEQ ID NO: 65358 - DNA, 15 bp, Homo sapiens
tcgcctcctcttcgt

SEQ ID NO: 65359 - DNA, 15 bp, Homo sapiens
cgcctcctcttcgtc

SEQ ID NO: 65360 - DNA, 15 bp, Homo sapiens
gcctcctcttcgtct

SEQ ID NO: 65361 - DNA, 15 bp, Homo sapiens
cctcctcttcgtctt

SEQ ID NO: 65362 - DNA, 15 bp, Homo sapiens
ctcctcttcgtcttt

SEQ ID NO: 65363 - DNA, 15 bp, Homo sapiens
tcctcttcgtctttt

SEQ ID NO: 65364 - DNA, 15 bp, Homo sapiens
cctcttcgtcttttc

SEQ ID NO: 65365 - DNA, 15 bp, Homo sapiens
ctcttcgtcttttct

SEQ ID NO: 65366 - DNA, 15 bp, Homo sapiens
tcttcgtcttttcta

SEQ ID NO: 65367 - DNA, 15 bp, Homo sapiens
cttcgtcttttctaa

SEQ ID NO: 65368 - DNA, 15 bp, Homo sapiens
ttcgtcttttctaac

SEQ ID NO: 65369 - DNA, 15 bp, Homo sapiens
tcgtcttttctaacc

SEQ ID NO: 65370 - DNA, 15 bp, Homo sapiens
cgtcttttctaaccg

SEQ ID NO: 65371 - DNA, 15 bp, Homo sapiens
gtcttttctaaccgt

SEQ ID NO: 65372 - DNA, 15 bp, Homo sapiens
tcttttctaaccgtg

SEQ ID NO: 65373 - DNA, 15 bp, Homo sapiens
cttttctaaccgtgc

SEQ ID NO: 65374 - DNA, 15 bp, Homo sapiens
ttttctaaccgtgca

SEQ ID NO: 65375 - DNA, 15 bp, Homo sapiens
tttctaaccgtgcag

SEQ ID NO: 65376 - DNA, 15 bp, Homo sapiens
ttctaaccgtgcagc

SEQ ID NO: 65377 - DNA, 15 bp, Homo sapiens
tctaaccgtgcagcc

SEQ ID NO: 65378 - DNA, 15 bp, Homo sapiens
ctaaccgtgcagcct

SEQ ID NO: 65379 - DNA, 15 bp, Homo sapiens
taaccgtgcagcctc

SEQ ID NO: 65380 - DNA, 15 bp, Homo sapiens
aaccgtgcagcctct

SEQ ID NO: 65381 - DNA, 15 bp, Homo sapiens
accgtgcagcctctt

SEQ ID NO: 65382 - DNA, 15 bp, Homo sapiens
ccgtgcagcctcttc

SEQ ID NO: 65383 - DNA, 15 bp, Homo sapiens
cgtgcagcctcttcc

SEQ ID NO: 65384 - DNA, 15 bp, Homo sapiens
gtgcagcctcttcct

SEQ ID NO: 65385 - DNA, 15 bp, Homo sapiens
tgcagcctcttcctc

SEQ ID NO: 65386 - DNA, 15 bp, Homo sapiens
gcagcctcttcctcg

SEQ ID NO: 65387 - DNA, 15 bp, Homo sapiens
cagcctcttcctcgg

SEQ ID NO: 65388 - DNA, 15 bp, Homo sapiens
agcctcttcctcggc

SEQ ID NO: 65389 - DNA, 15 bp, Homo sapiens
gcctcttcctcggct

SEQ ID NO: 65390 - DNA, 15 bp, Homo sapiens
cctcttcctcggctt

SEQ ID NO: 65391 - DNA, 15 bp, Homo sapiens
ctcttcctcggcttc

SEQ ID NO: 65392 - DNA, 15 bp, Homo sapiens
tcttcctcggcttct

SEQ ID NO: 65393 - DNA, 15 bp, Homo sapiens
cttcctcggcttctc

SEQ ID NO: 65394 - DNA, 15 bp, Homo sapiens
ttcctcggcttctcc

SEQ ID NO: 65395 - DNA, 15 bp, Homo sapiens
tcctcggcttctcct

SEQ ID NO: 65396 - DNA, 15 bp, Homo sapiens
cctcggcttctcctg

SEQ ID NO: 65397 - DNA, 15 bp, Homo sapiens
ctcggcttctcctga

SEQ ID NO: 65398 - DNA, 15 bp, Homo sapiens
tcggcttctcctgaa

SEQ ID NO: 65399 - DNA, 15 bp, Homo sapiens
cggcttctcctgaaa

SEQ ID NO: 65400 - DNA, 15 bp, Homo sapiens
ggcttctcctgaaag

SEQ ID NO: 65401 - DNA, 15 bp, Homo sapiens
gcttctcctgaaagg

SEQ ID NO: 65402 - DNA, 15 bp, Homo sapiens
cttctcctgaaaggg

SEQ ID NO: 65403 - DNA, 15 bp, Homo sapiens
ttctcctgaaaggga

SEQ ID NO: 65404 - DNA, 15 bp, Homo sapiens
tctcctgaaagggaa

SEQ ID NO: 65405 - DNA, 15 bp, Homo sapiens
ctcctgaaagggaag

SEQ ID NO: 65406 - DNA, 15 bp, Homo sapiens
tcctgaaagggaagg

SEQ ID NO: 65407 - DNA, 15 bp, Homo sapiens
cctgaaagggaaggt

SEQ ID NO: 65408 - DNA, 15 bp, Homo sapiens
ctgaaagggaaggtg

SEQ ID NO: 65409 - DNA, 15 bp, Homo sapiens
tgaaagggaaggtgg

SEQ ID NO: 65410 - DNA, 15 bp, Homo sapiens
gaaagggaaggtgga

SEQ ID NO: 65411 - DNA, 15 bp, Homo sapiens
aaagggaaggtggaa

SEQ ID NO: 65412 - DNA, 15 bp, Homo sapiens
aagggaaggtggaag

SEQ ID NO: 65413 - DNA, 15 bp, Homo sapiens
agggaaggtggaagc

SEQ ID NO: 65414 - DNA, 15 bp, Homo sapiens
gggaaggtggaagcc

SEQ ID NO: 65415 - DNA, 15 bp, Homo sapiens
ggaaggtggaagccg

SEQ ID NO: 65416 - DNA, 15 bp, Homo sapiens
gaaggtggaagccgt

SEQ ID NO: 65417 - DNA, 15 bp, Homo sapiens
aaggtggaagccgtg

SEQ ID NO: 65418 - DNA, 15 bp, Homo sapiens
aggtggaagccgtgg

SEQ ID NO: 65419 - DNA, 15 bp, Homo sapiens
ggtggaagccgtggg

SEQ ID NO: 65420 - DNA, 15 bp, Homo sapiens
gtggaagccgtgggc

SEQ ID NO: 65421 - DNA, 15 bp, Homo sapiens
tggaagccgtgggct

SEQ ID NO: 65422 - DNA, 15 bp, Homo sapiens
ggaagccgtgggctc

SEQ ID NO: 65423 - DNA, 15 bp, Homo sapiens
gaagccgtgggctcg

SEQ ID NO: 65424 - DNA, 15 bp, Homo sapiens
aagccgtgggctcgg

SEQ ID NO: 65425 - DNA, 15 bp, Homo sapiens
agccgtgggctcggg

SEQ ID NO: 65426 - DNA, 15 bp, Homo sapiens
gccgtgggctcgggc

SEQ ID NO: 65427 - DNA, 15 bp, Homo sapiens
ccgtgggctcgggcg

SEQ ID NO: 65428 - DNA, 15 bp, Homo sapiens
cgtgggctcgggcgg

SEQ ID NO: 65429 - DNA, 15 bp, Homo sapiens
gtgggctcgggcggg

SEQ ID NO: 65430 - DNA, 15 bp, Homo sapiens
tgggctcgggcggga

SEQ ID NO: 65431 - DNA, 15 bp, Homo sapiens
gggctcgggcgggag

SEQ ID NO: 65432 - DNA, 15 bp, Homo sapiens
ggctcgggcgggagc

SEQ ID NO: 65433 - DNA, 15 bp, Homo sapiens
gctcgggcgggagcc

SEQ ID NO: 65434 - DNA, 15 bp, Homo sapiens
ctcgggcgggagccg

SEQ ID NO: 65435 - DNA, 15 bp, Homo sapiens
tcgggcgggagccgg

SEQ ID NO: 65436 - DNA, 15 bp, Homo sapiens
cgggcgggagccggc

SEQ ID NO: 65437 - DNA, 15 bp, Homo sapiens
gggcgggagccggct

SEQ ID NO: 65438 - DNA, 15 bp, Homo sapiens
ggcgggagccggctg

SEQ ID NO: 65439 - DNA, 15 bp, Homo sapiens
gcgggagccggctga

SEQ ID NO: 65440 - DNA, 15 bp, Homo sapiens
cgggagccggctgag

SEQ ID NO: 65441 - DNA, 15 bp, Homo sapiens
gggagccggctgagg

SEQ ID NO: 65442 - DNA, 15 bp, Homo sapiens
ggagccggctgaggc

SEQ ID NO: 65443 - DNA, 15 bp, Homo sapiens
gagccggctgaggcg

SEQ ID NO: 65444 - DNA, 15 bp, Homo sapiens
agccggctgaggcgc

SEQ ID NO: 65445 - DNA, 15 bp, Homo sapiens
gccggctgaggcgcg

SEQ ID NO: 65446 - DNA, 15 bp, Homo sapiens
ccggctgaggcgcgg

SEQ ID NO: 65447 - DNA, 15 bp, Homo sapiens
cggctgaggcgcggc

SEQ ID NO: 65448 - DNA, 15 bp, Homo sapiens
ggctgaggcgcggcg

SEQ ID NO: 65449 - DNA, 15 bp, Homo sapiens
gctgaggcgcggcgg

SEQ ID NO: 65450 - DNA, 15 bp, Homo sapiens
ctgaggcgcggcggc

SEQ ID NO: 65451 - DNA, 15 bp, Homo sapiens
tgaggcgcggcggcg

SEQ ID NO: 65452 - DNA, 15 bp, Homo sapiens
gaggcgcggcggcgg

SEQ ID NO: 65453 - DNA, 15 bp, Homo sapiens
aggcgcggcggcggc

SEQ ID NO: 65454 - DNA, 15 bp, Homo sapiens
ggcgcggcggcggcg

SEQ ID NO: 65455 - DNA, 15 bp, Homo sapiens
gcgcggcggcggcgg

SEQ ID NO: 65456 - DNA, 15 bp, Homo sapiens
cgcggcggcggcggc

SEQ ID NO: 65457 - DNA, 15 bp, Homo sapiens
gcggcggcggcggcg

SEQ ID NO: 65458 - DNA, 15 bp, Homo sapiens
cggcggcggcggcgg

SEQ ID NO: 65459 - DNA, 15 bp, Homo sapiens
ggcggcggcggcggc

SEQ ID NO: 65460 - DNA, 15 bp, Homo sapiens
gcggcggcggcggca

SEQ ID NO: 65461 - DNA, 15 bp, Homo sapiens
cggcggcggcggcac

SEQ ID NO: 65462 - DNA, 15 bp, Homo sapiens
ggcggcggcggcacc

SEQ ID NO: 65463 - DNA, 15 bp, Homo sapiens
gcggcggcggcacct

SEQ ID NO: 65464 - DNA, 15 bp, Homo sapiens
cggcggcggcacctc

SEQ ID NO: 65465 - DNA, 15 bp, Homo sapiens
ggcggcggcacctcc

SEQ ID NO: 65466 - DNA, 15 bp, Homo sapiens
gcggcggcacctccc

SEQ ID NO: 65467 - DNA, 15 bp, Homo sapiens
cggcggcacctcccg

SEQ ID NO: 65468 - DNA, 15 bp, Homo sapiens
ggcggcacctcccgc

SEQ ID NO: 65469 - DNA, 15 bp, Homo sapiens
gcggcacctcccgct

SEQ ID NO: 65470 - DNA, 15 bp, Homo sapiens
cggcacctcccgctc

SEQ ID NO: 65471 - DNA, 15 bp, Homo sapiens
ggcacctcccgctcc

SEQ ID NO: 65472 - DNA, 15 bp, Homo sapiens
gcacctcccgctcct

SEQ ID NO: 65473 - DNA, 15 bp, Homo sapiens
cacctcccgctcctg

SEQ ID NO: 65474 - DNA, 15 bp, Homo sapiens
acctcccgctcctgg

SEQ ID NO: 65475 - DNA, 15 bp, Homo sapiens
cctcccgctcctgga

SEQ ID NO: 65476 - DNA, 15 bp, Homo sapiens
ctcccgctcctggag

SEQ ID NO: 65477 - DNA, 15 bp, Homo sapiens
tcccgctcctggagc

SEQ ID NO: 65478 - DNA, 15 bp, Homo sapiens
cccgctcctggagcg

SEQ ID NO: 65479 - DNA, 15 bp, Homo sapiens
ccgctcctggagcgg

SEQ ID NO: 65480 - DNA, 15 bp, Homo sapiens
cgctcctggagcggg

SEQ ID NO: 65481 - DNA, 15 bp, Homo sapiens
gctcctggagcgggg

SEQ ID NO: 65482 - DNA, 15 bp, Homo sapiens
ctcctggagcggggg

SEQ ID NO: 65483 - DNA, 15 bp, Homo sapiens
tcctggagcgggggg

SEQ ID NO: 65484 - DNA, 15 bp, Homo sapiens
cctggagcggggggg

SEQ ID NO: 65485 - DNA, 15 bp, Homo sapiens
ctggagcggggggga

SEQ ID NO: 65486 - DNA, 15 bp, Homo sapiens
tggagcgggggggag

SEQ ID NO: 65487 - DNA, 15 bp, Homo sapiens
ggagcgggggggaga

SEQ ID NO: 65488 - DNA, 15 bp, Homo sapiens
gagcgggggggagaa

SEQ ID NO: 65489 - DNA, 15 bp, Homo sapiens
agcgggggggagaag

SEQ ID NO: 65490 - DNA, 15 bp, Homo sapiens
gcgggggggagaagc

SEQ ID NO: 65491 - DNA, 15 bp, Homo sapiens
cgggggggagaagcg

SEQ ID NO: 65492 - DNA, 15 bp, Homo sapiens
gggggggagaagcgg

SEQ ID NO: 65493 - DNA, 15 bp, Homo sapiens
ggggggagaagcggc

SEQ ID NO: 65494 - DNA, 15 bp, Homo sapiens
gggggagaagcggcg

SEQ ID NO: 65495 - DNA, 15 bp, Homo sapiens
ggggagaagcggcgg

SEQ ID NO: 65496 - DNA, 15 bp, Homo sapiens
gggagaagcggcggc

SEQ ID NO: 65497 - DNA, 15 bp, Homo sapiens
ggagaagcggcggcg

SEQ ID NO: 65498 - DNA, 15 bp, Homo sapiens
gagaagcggcggcgg

SEQ ID NO: 65499 - DNA, 15 bp, Homo sapiens
agaagcggcggcggc

SEQ ID NO: 65500 - DNA, 15 bp, Homo sapiens
gaagcggcggcggcg

SEQ ID NO: 65501 - DNA, 15 bp, Homo sapiens
aagcggcggcggcgg

SEQ ID NO: 65502 - DNA, 15 bp, Homo sapiens
agcggcggcggcggc

SEQ ID NO: 65503 - DNA, 15 bp, Homo sapiens
gcggcggcggcggcc

SEQ ID NO: 65504 - DNA, 15 bp, Homo sapiens
cggcggcggcggccg

SEQ ID NO: 65505 - DNA, 15 bp, Homo sapiens
ggcggcggcggccgc

SEQ ID NO: 65506 - DNA, 15 bp, Homo sapiens
gcggcggcggccgcg

SEQ ID NO: 65507 - DNA, 15 bp, Homo sapiens
gcggcggccgcggcg

SEQ ID NO: 65508 - DNA, 15 bp, Homo sapiens
cggcggccgcggcgg

SEQ ID NO: 65509 - DNA, 15 bp, Homo sapiens
ggcggccgcggcggc

SEQ ID NO: 65510 - DNA, 15 bp, Homo sapiens
gcggccgcggcggct

SEQ ID NO: 65511 - DNA, 15 bp, Homo sapiens
cggccgcggcggctg

SEQ ID NO: 65512 - DNA, 15 bp, Homo sapiens
ggccgcggcggctgc

SEQ ID NO: 65513 - DNA, 15 bp, Homo sapiens
gccgcggcggctgca

SEQ ID NO: 65514 - DNA, 15 bp, Homo sapiens
ccgcggcggctgcag

SEQ ID NO: 65515 - DNA, 15 bp, Homo sapiens
cgcggcggctgcagc

SEQ ID NO: 65516 - DNA, 15 bp, Homo sapiens
gcggcggctgcagct

SEQ ID NO: 65517 - DNA, 15 bp, Homo sapiens
cggcggctgcagctc

SEQ ID NO: 65518 - DNA, 15 bp, Homo sapiens
ggcggctgcagctcc

SEQ ID NO: 65519 - DNA, 15 bp, Homo sapiens
gcggctgcagctcca

SEQ ID NO: 65520 - DNA, 15 bp, Homo sapiens
cggctgcagctccag

SEQ ID NO: 65521 - DNA, 15 bp, Homo sapiens
ggctgcagctccagg

SEQ ID NO: 65522 - DNA, 15 bp, Homo sapiens
gctgcagctccaggg

SEQ ID NO: 65523 - DNA, 15 bp, Homo sapiens
ctgcagctccaggga

SEQ ID NO: 65524 - DNA, 15 bp, Homo sapiens
tgcagctccagggag

SEQ ID NO: 65525 - DNA, 15 bp, Homo sapiens
gcagctccagggagg

SEQ ID NO: 65526 - DNA, 15 bp, Homo sapiens
cagctccagggaggg

SEQ ID NO: 65527 - DNA, 15 bp, Homo sapiens
agctccagggagggg

SEQ ID NO: 65528 - DNA, 15 bp, Homo sapiens
gctccagggaggggg

SEQ ID NO: 65529 - DNA, 15 bp, Homo sapiens
ctccagggagggggt

SEQ ID NO: 65530 - DNA, 15 bp, Homo sapiens
tccagggagggggtc

SEQ ID NO: 65531 - DNA, 15 bp, Homo sapiens
ccagggagggggtct

SEQ ID NO: 65532 - DNA, 15 bp, Homo sapiens
cagggagggggtctg

SEQ ID NO: 65533 - DNA, 15 bp, Homo sapiens
agggagggggtctga

SEQ ID NO: 65534 - DNA, 15 bp, Homo sapiens
gggagggggtctgag

SEQ ID NO: 65535 - DNA, 15 bp, Homo sapiens
ggagggggtctgagt

SEQ ID NO: 65536 - DNA, 15 bp, Homo sapiens
gagggggtctgagtc

SEQ ID NO: 65537 - DNA, 15 bp, Homo sapiens
agggggtctgagtcg

SEQ ID NO: 65538 - DNA, 15 bp, Homo sapiens
gggggtctgagtcgc

SEQ ID NO: 65539 - DNA, 15 bp, Homo sapiens
ggggtctgagtcgcc

SEQ ID NO: 65540 - DNA, 15 bp, Homo sapiens
gggtctgagtcgcct

SEQ ID NO: 65541 - DNA, 15 bp, Homo sapiens
ggtctgagtcgcctg

SEQ ID NO: 65542 - DNA, 15 bp, Homo sapiens
gtctgagtcgcctgt

SEQ ID NO: 65543 - DNA, 15 bp, Homo sapiens
tctgagtcgcctgtc

SEQ ID NO: 65544 - DNA, 15 bp, Homo sapiens
ctgagtcgcctgtca

SEQ ID NO: 65545 - DNA, 15 bp, Homo sapiens
tgagtcgcctgtcac

SEQ ID NO: 65546 - DNA, 15 bp, Homo sapiens
gagtcgcctgtcacc

SEQ ID NO: 65547 - DNA, 15 bp, Homo sapiens
agtcgcctgtcacca

SEQ ID NO: 65548 - DNA, 15 bp, Homo sapiens
gtcgcctgtcaccat

SEQ ID NO: 65549 - DNA, 15 bp, Homo sapiens
tcgcctgtcaccatt

SEQ ID NO: 65550 - DNA, 15 bp, Homo sapiens
cgcctgtcaccattt

SEQ ID NO: 65551 - DNA, 15 bp, Homo sapiens
gcctgtcaccatttc

SEQ ID NO: 65552 - DNA, 15 bp, Homo sapiens
cctgtcaccatttcc

SEQ ID NO: 65553 - DNA, 15 bp, Homo sapiens
ctgtcaccatttcca

SEQ ID NO: 65554 - DNA, 15 bp, Homo sapiens
tgtcaccatttccag

SEQ ID NO: 65555 - DNA, 15 bp, Homo sapiens
gtcaccatttccagg

SEQ ID NO: 65556 - DNA, 15 bp, Homo sapiens
tcaccatttccaggg

SEQ ID NO: 65557 - DNA, 15 bp, Homo sapiens
caccatttccagggc

SEQ ID NO: 65558 - DNA, 15 bp, Homo sapiens
accatttccagggct

SEQ ID NO: 65559 - DNA, 15 bp, Homo sapiens
ccatttccagggctg

SEQ ID NO: 65560 - DNA, 15 bp, Homo sapiens
catttccagggctgg

SEQ ID NO: 65561 - DNA, 15 bp, Homo sapiens
atttccagggctggg

SEQ ID NO: 65562 - DNA, 15 bp, Homo sapiens
tttccagggctggga

SEQ ID NO: 65563 - DNA, 15 bp, Homo sapiens
ttccagggctgggaa

SEQ ID NO: 65564 - DNA, 15 bp, Homo sapiens
tccagggctgggaac

SEQ ID NO: 65565 - DNA, 15 bp, Homo sapiens
ccagggctgggaacg

SEQ ID NO: 65566 - DNA, 15 bp, Homo sapiens
cagggctgggaacgc

SEQ ID NO: 65567 - DNA, 15 bp, Homo sapiens
agggctgggaacgcc

SEQ ID NO: 65568 - DNA, 15 bp, Homo sapiens
gggctgggaacgccg

SEQ ID NO: 65569 - DNA, 15 bp, Homo sapiens
ggctgggaacgccgg

SEQ ID NO: 65570 - DNA, 15 bp, Homo sapiens
gctgggaacgccgga

SEQ ID NO: 65571 - DNA, 15 bp, Homo sapiens
ctgggaacgccggag

SEQ ID NO: 65572 - DNA, 15 bp, Homo sapiens
tgggaacgccggaga

SEQ ID NO: 65573 - DNA, 15 bp, Homo sapiens
gggaacgccggagag

SEQ ID NO: 65574 - DNA, 15 bp, Homo sapiens
ggaacgccggagagt

SEQ ID NO: 65575 - DNA, 15 bp, Homo sapiens
gaacgccggagagtt

SEQ ID NO: 65576 - DNA, 15 bp, Homo sapiens
aacgccggagagttg

SEQ ID NO: 65577 - DNA, 15 bp, Homo sapiens
acgccggagagttgg

SEQ ID NO: 65578 - DNA, 15 bp, Homo sapiens
cgccggagagttggt

SEQ ID NO: 65579 - DNA, 15 bp, Homo sapiens
gccggagagttggtc

SEQ ID NO: 65580 - DNA, 15 bp, Homo sapiens
ccggagagttggtct

SEQ ID NO: 65581 - DNA, 15 bp, Homo sapiens
cggagagttggtctc

SEQ ID NO: 65582 - DNA, 15 bp, Homo sapiens
ggagagttggtctct

SEQ ID NO: 65583 - DNA, 15 bp, Homo sapiens
gagagttggtctctc

SEQ ID NO: 65584 - DNA, 15 bp, Homo sapiens
agagttggtctctcc

SEQ ID NO: 65585 - DNA, 15 bp, Homo sapiens
gagttggtctctccc

SEQ ID NO: 65586 - DNA, 15 bp, Homo sapiens
agttggtctctcccc

SEQ ID NO: 65587 - DNA, 15 bp, Homo sapiens
gttggtctctcccct

SEQ ID NO: 65588 - DNA, 15 bp, Homo sapiens
ttggtctctcccctt

SEQ ID NO: 65589 - DNA, 15 bp, Homo sapiens
tggtctctccccttc

SEQ ID NO: 65590 - DNA, 15 bp, Homo sapiens
ggtctctccccttct

SEQ ID NO: 65591 - DNA, 15 bp, Homo sapiens
gtctctccccttcta

SEQ ID NO: 65592 - DNA, 15 bp, Homo sapiens
tctctccccttctac

SEQ ID NO: 65593 - DNA, 15 bp, Homo sapiens
ctctccccttctact

SEQ ID NO: 65594 - DNA, 15 bp, Homo sapiens
tctccccttctactg

SEQ ID NO: 65595 - DNA, 15 bp, Homo sapiens
ctccccttctactgc

SEQ ID NO: 65596 - DNA, 15 bp, Homo sapiens
tccccttctactgcc

SEQ ID NO: 65597 - DNA, 15 bp, Homo sapiens
ccccttctactgcct

SEQ ID NO: 65598 - DNA, 15 bp, Homo sapiens
cccttctactgcctc

SEQ ID NO: 65599 - DNA, 15 bp, Homo sapiens
ccttctactgcctcc

SEQ ID NO: 65600 - DNA, 15 bp, Homo sapiens
cttctactgcctcca

SEQ ID NO: 65601 - DNA, 15 bp, Homo sapiens
ttctactgcctccaa

SEQ ID NO: 65602 - DNA, 15 bp, Homo sapiens
tctactgcctccaac

SEQ ID NO: 65603 - DNA, 15 bp, Homo sapiens
ctactgcctccaaca

SEQ ID NO: 65604 - DNA, 15 bp, Homo sapiens
tactgcctccaacac

SEQ ID NO: 65605 - DNA, 15 bp, Homo sapiens
actgcctccaacacg

SEQ ID NO: 65606 - DNA, 15 bp, Homo sapiens
ctgcctccaacacgg

SEQ ID NO: 65607 - DNA, 15 bp, Homo sapiens
tgcctccaacacggc

SEQ ID NO: 65608 - DNA, 15 bp, Homo sapiens
gcctccaacacggcg

SEQ ID NO: 65609 - DNA, 15 bp, Homo sapiens
cctccaacacggcgg

SEQ ID NO: 65610 - DNA, 15 bp, Homo sapiens
ctccaacacggcggc

SEQ ID NO: 65611 - DNA, 15 bp, Homo sapiens
tccaacacggcggcg

SEQ ID NO: 65612 - DNA, 15 bp, Homo sapiens
ccaacacggcggcgg

SEQ ID NO: 65613 - DNA, 15 bp, Homo sapiens
caacacggcggcggc

SEQ ID NO: 65614 - DNA, 15 bp, Homo sapiens
aacacggcggcggcg

SEQ ID NO: 65615 - DNA, 15 bp, Homo sapiens
acacggcggcggcgg

SEQ ID NO: 65616 - DNA, 15 bp, Homo sapiens
cacggcggcggcggc

SEQ ID NO: 65617 - DNA, 15 bp, Homo sapiens
acggcggcggcggcg

SEQ ID NO: 65618 - DNA, 15 bp, Homo sapiens
gcggcggcggcggct

SEQ ID NO: 65619 - DNA, 15 bp, Homo sapiens
cggcggcggcggctg

SEQ ID NO: 65620 - DNA, 15 bp, Homo sapiens
ggcggcggcggctgg

SEQ ID NO: 65621 - DNA, 15 bp, Homo sapiens
gcggcggcggctggc

SEQ ID NO: 65622 - DNA, 15 bp, Homo sapiens
cggcggcggctggca

SEQ ID NO: 65623 - DNA, 15 bp, Homo sapiens
ggcggcggctggcac

SEQ ID NO: 65624 - DNA, 15 bp, Homo sapiens
gcggcggctggcaca

SEQ ID NO: 65625 - DNA, 15 bp, Homo sapiens
cggcggctggcacat

SEQ ID NO: 65626 - DNA, 15 bp, Homo sapiens
ggcggctggcacatc

SEQ ID NO: 65627 - DNA, 15 bp, Homo sapiens
gcggctggcacatcc

SEQ ID NO: 65628 - DNA, 15 bp, Homo sapiens
cggctggcacatcca

SEQ ID NO: 65629 - DNA, 15 bp, Homo sapiens
ggctggcacatccag

SEQ ID NO: 65630 - DNA, 15 bp, Homo sapiens
gctggcacatccagg

SEQ ID NO: 65631 - DNA, 15 bp, Homo sapiens
ctggcacatccaggg

SEQ ID NO: 65632 - DNA, 15 bp, Homo sapiens
tggcacatccaggga

SEQ ID NO: 65633 - DNA, 15 bp, Homo sapiens
ggcacatccagggac

SEQ ID NO: 65634 - DNA, 15 bp, Homo sapiens
gcacatccagggacc

SEQ ID NO: 65635 - DNA, 15 bp, Homo sapiens
cacatccagggaccc

SEQ ID NO: 65636 - DNA, 15 bp, Homo sapiens
acatccagggacccg

SEQ ID NO: 65637 - DNA, 15 bp, Homo sapiens
catccagggacccgg

SEQ ID NO: 65638 - DNA, 15 bp, Homo sapiens
atccagggacccggg

SEQ ID NO: 65639 - DNA, 15 bp, Homo sapiens
tccagggacccgggc

SEQ ID NO: 65640 - DNA, 15 bp, Homo sapiens
ccagggacccgggcc

SEQ ID NO: 65641 - DNA, 15 bp, Homo sapiens
cagggacccgggccg

SEQ ID NO: 65642 - DNA, 15 bp, Homo sapiens
agggacccgggccgg

SEQ ID NO: 65643 - DNA, 15 bp, Homo sapiens
gggacccgggccggt

SEQ ID NO: 65644 - DNA, 15 bp, Homo sapiens
ggacccgggccggtt

SEQ ID NO: 65645 - DNA, 15 bp, Homo sapiens
gacccgggccggttt

SEQ ID NO: 65646 - DNA, 15 bp, Homo sapiens
acccgggccggtttt

SEQ ID NO: 65647 - DNA, 15 bp, Homo sapiens
cccgggccggtttta

SEQ ID NO: 65648 - DNA, 15 bp, Homo sapiens
ccgggccggttttaa

SEQ ID NO: 65649 - DNA, 15 bp, Homo sapiens
cgggccggttttaaa

SEQ ID NO: 65650 - DNA, 15 bp, Homo sapiens
gggccggttttaaac

SEQ ID NO: 65651 - DNA, 15 bp, Homo sapiens
ggccggttttaaacc

SEQ ID NO: 65652 - DNA, 15 bp, Homo sapiens
gccggttttaaacct

SEQ ID NO: 65653 - DNA, 15 bp, Homo sapiens
ccggttttaaacctc

SEQ ID NO: 65654 - DNA, 15 bp, Homo sapiens
cggttttaaacctcc

SEQ ID NO: 65655 - DNA, 15 bp, Homo sapiens
ggttttaaacctccc

SEQ ID NO: 65656 - DNA, 15 bp, Homo sapiens
gttttaaacctcccg

SEQ ID NO: 65657 - DNA, 15 bp, Homo sapiens
ttttaaacctcccgt

SEQ ID NO: 65658 - DNA, 15 bp, Homo sapiens
tttaaacctcccgtg

SEQ ID NO: 65659 - DNA, 15 bp, Homo sapiens
ttaaacctcccgtgc

SEQ ID NO: 65660 - DNA, 15 bp, Homo sapiens
taaacctcccgtgcg

SEQ ID NO: 65661 - DNA, 15 bp, Homo sapiens
aaacctcccgtgcgc

SEQ ID NO: 65662 - DNA, 15 bp, Homo sapiens
aacctcccgtgcgcc

SEQ ID NO: 65663 - DNA, 15 bp, Homo sapiens
acctcccgtgcgccg

SEQ ID NO: 65664 - DNA, 15 bp, Homo sapiens
cctcccgtgcgccgc

SEQ ID NO: 65665 - DNA, 15 bp, Homo sapiens
ctcccgtgcgccgcc

SEQ ID NO: 65666 - DNA, 15 bp, Homo sapiens
tcccgtgcgccgccg

SEQ ID NO: 65667 - DNA, 15 bp, Homo sapiens
cccgtgcgccgccgc

SEQ ID NO: 65668 - DNA, 15 bp, Homo sapiens
ccgtgcgccgccgcc

SEQ ID NO: 65669 - DNA, 15 bp, Homo sapiens
cgtgcgccgccgccg

SEQ ID NO: 65670 - DNA, 15 bp, Homo sapiens
gtgcgccgccgccgc

SEQ ID NO: 65671 - DNA, 15 bp, Homo sapiens
tgcgccgccgccgca

SEQ ID NO: 65672 - DNA, 15 bp, Homo sapiens
gcgccgccgccgcac

SEQ ID NO: 65673 - DNA, 15 bp, Homo sapiens
cgccgccgccgcacc

SEQ ID NO: 65674 - DNA, 15 bp, Homo sapiens
gccgccgccgcaccc

SEQ ID NO: 65675 - DNA, 15 bp, Homo sapiens
ccgccgccgcacccc

SEQ ID NO: 65676 - DNA, 15 bp, Homo sapiens
cgccgccgcaccccc

SEQ ID NO: 65677 - DNA, 15 bp, Homo sapiens
gccgccgcacccccc

SEQ ID NO: 65678 - DNA, 15 bp, Homo sapiens
ccgccgcaccccccg

SEQ ID NO: 65679 - DNA, 15 bp, Homo sapiens
cgccgcaccccccgt

SEQ ID NO: 65680 - DNA, 15 bp, Homo sapiens
gccgcaccccccgtg

SEQ ID NO: 65681 - DNA, 15 bp, Homo sapiens
ccgcaccccccgtgg

SEQ ID NO: 65682 - DNA, 15 bp, Homo sapiens
cgcaccccccgtggc

SEQ ID NO: 65683 - DNA, 15 bp, Homo sapiens
gcaccccccgtggcc

SEQ ID NO: 65684 - DNA, 15 bp, Homo sapiens
caccccccgtggccc

SEQ ID NO: 65685 - DNA, 15 bp, Homo sapiens
accccccgtggcccg

SEQ ID NO: 65686 - DNA, 15 bp, Homo sapiens
ccccccgtggcccgg

SEQ ID NO: 65687 - DNA, 15 bp, Homo sapiens
cccccgtggcccggg

SEQ ID NO: 65688 - DNA, 15 bp, Homo sapiens
ccccgtggcccgggc

SEQ ID NO: 65689 - DNA, 15 bp, Homo sapiens
cccgtggcccgggct

SEQ ID NO: 65690 - DNA, 15 bp, Homo sapiens
ccgtggcccgggctc

SEQ ID NO: 65691 - DNA, 15 bp, Homo sapiens
cgtggcccgggctcc

SEQ ID NO: 65692 - DNA, 15 bp, Homo sapiens
gtggcccgggctccg

SEQ ID NO: 65693 - DNA, 15 bp, Homo sapiens
tggcccgggctccgg

SEQ ID NO: 65694 - DNA, 15 bp, Homo sapiens
ggcccgggctccgga

SEQ ID NO: 65695 - DNA, 15 bp, Homo sapiens
gcccgggctccggag

SEQ ID NO: 65696 - DNA, 15 bp, Homo sapiens
cccgggctccggagg

SEQ ID NO: 65697 - DNA, 15 bp, Homo sapiens
ccgggctccggaggc

SEQ ID NO: 65698 - DNA, 15 bp, Homo sapiens
cgggctccggaggcc

SEQ ID NO: 65699 - DNA, 15 bp, Homo sapiens
gggctccggaggccg

SEQ ID NO: 65700 - DNA, 15 bp, Homo sapiens
ggctccggaggccgc

SEQ ID NO: 65701 - DNA, 15 bp, Homo sapiens
gctccggaggccgcc

SEQ ID NO: 65702 - DNA, 15 bp, Homo sapiens
ctccggaggccgccg

SEQ ID NO: 65703 - DNA, 15 bp, Homo sapiens
tccggaggccgccgg

SEQ ID NO: 65704 - DNA, 15 bp, Homo sapiens
ccggaggccgccggc

SEQ ID NO: 65705 - DNA, 15 bp, Homo sapiens
cggaggccgccggcg

SEQ ID NO: 65706 - DNA, 15 bp, Homo sapiens
ggaggccgccggcgg

SEQ ID NO: 65707 - DNA, 15 bp, Homo sapiens
gaggccgccggcgga

SEQ ID NO: 65708 - DNA, 15 bp, Homo sapiens
aggccgccggcggag

SEQ ID NO: 65709 - DNA, 15 bp, Homo sapiens
ggccgccggcggagg

SEQ ID NO: 65710 - DNA, 15 bp, Homo sapiens
gccgccggcggaggc

SEQ ID NO: 65711 - DNA, 15 bp, Homo sapiens
ccgccggcggaggca

SEQ ID NO: 65712 - DNA, 15 bp, Homo sapiens
cgccggcggaggcag

SEQ ID NO: 65713 - DNA, 15 bp, Homo sapiens
gccggcggaggcagc

SEQ ID NO: 65714 - DNA, 15 bp, Homo sapiens
ccggcggaggcagcc

SEQ ID NO: 65715 - DNA, 15 bp, Homo sapiens
cggcggaggcagccg

SEQ ID NO: 65716 - DNA, 15 bp, Homo sapiens
ggcggaggcagccgt

SEQ ID NO: 65717 - DNA, 15 bp, Homo sapiens
gcggaggcagccgtt

SEQ ID NO: 65718 - DNA, 15 bp, Homo sapiens
cggaggcagccgttc

SEQ ID NO: 65719 - DNA, 15 bp, Homo sapiens
ggaggcagccgttcg

SEQ ID NO: 65720 - DNA, 15 bp, Homo sapiens
gaggcagccgttcgg

SEQ ID NO: 65721 - DNA, 15 bp, Homo sapiens
aggcagccgttcgga

SEQ ID NO: 65722 - DNA, 15 bp, Homo sapiens
ggcagccgttcggag

SEQ ID NO: 65723 - DNA, 15 bp, Homo sapiens
gcagccgttcggagg

SEQ ID NO: 65724 - DNA, 15 bp, Homo sapiens
cagccgttcggagga

SEQ ID NO: 65725 - DNA, 15 bp, Homo sapiens
agccgttcggaggat

SEQ ID NO: 65726 - DNA, 15 bp, Homo sapiens
gccgttcggaggatt

SEQ ID NO: 65727 - DNA, 15 bp, Homo sapiens
ccgttcggaggatta

SEQ ID NO: 65728 - DNA, 15 bp, Homo sapiens
cgttcggaggattat

SEQ ID NO: 65729 - DNA, 15 bp, Homo sapiens
gttcggaggattatt

SEQ ID NO: 65730 - DNA, 15 bp, Homo sapiens
ttcggaggattattc

SEQ ID NO: 65731 - DNA, 15 bp, Homo sapiens
tcggaggattattcg

SEQ ID NO: 65732 - DNA, 15 bp, Homo sapiens
cggaggattattcgt

SEQ ID NO: 65733 - DNA, 15 bp, Homo sapiens
ggaggattattcgtc

SEQ ID NO: 65734 - DNA, 15 bp, Homo sapiens
gaggattattcgtct

SEQ ID NO: 65735 - DNA, 15 bp, Homo sapiens
aggattattcgtctt

SEQ ID NO: 65736 - DNA, 15 bp, Homo sapiens
ggattattcgtcttc

SEQ ID NO: 65737 - DNA, 15 bp, Homo sapiens
gattattcgtcttct

SEQ ID NO: 65738 - DNA, 15 bp, Homo sapiens
attattcgtcttctc

SEQ ID NO: 65739 - DNA, 15 bp, Homo sapiens
ttattcgtcttctcc

SEQ ID NO: 65740 - DNA, 15 bp, Homo sapiens
tattcgtcttctccc

SEQ ID NO: 65741 - DNA, 15 bp, Homo sapiens
attcgtcttctcccc

SEQ ID NO: 65742 - DNA, 15 bp, Homo sapiens
ttcgtcttctcccca

SEQ ID NO: 65743 - DNA, 15 bp, Homo sapiens
tcgtcttctccccat

SEQ ID NO: 65744 - DNA, 15 bp, Homo sapiens
cgtcttctccccatt

SEQ ID NO: 65745 - DNA, 15 bp, Homo sapiens
gtcttctccccattc

SEQ ID NO: 65746 - DNA, 15 bp, Homo sapiens
tcttctccccattcc

SEQ ID NO: 65747 - DNA, 15 bp, Homo sapiens
cttctccccattccg

SEQ ID NO: 65748 - DNA, 15 bp, Homo sapiens
ttctccccattccgc

SEQ ID NO: 65749 - DNA, 15 bp, Homo sapiens
tctccccattccgct

SEQ ID NO: 65750 - DNA, 15 bp, Homo sapiens
ctccccattccgctg

SEQ ID NO: 65751 - DNA, 15 bp, Homo sapiens
tccccattccgctgc

SEQ ID NO: 65752 - DNA, 15 bp, Homo sapiens
ccccattccgctgcc

SEQ ID NO: 65753 - DNA, 15 bp, Homo sapiens
cccattccgctgccg

SEQ ID NO: 65754 - DNA, 15 bp, Homo sapiens
ccattccgctgccgc

SEQ ID NO: 65755 - DNA, 15 bp, Homo sapiens
cattccgctgccgcc

SEQ ID NO: 65756 - DNA, 15 bp, Homo sapiens
attccgctgccgccg

SEQ ID NO: 65757 - DNA, 15 bp, Homo sapiens
ttccgctgccgccgc

SEQ ID NO: 65758 - DNA, 15 bp, Homo sapiens
tccgctgccgccgct

SEQ ID NO: 65759 - DNA, 15 bp, Homo sapiens
ccgctgccgccgctg

SEQ ID NO: 65760 - DNA, 15 bp, Homo sapiens
cgctgccgccgctgc

SEQ ID NO: 65761 - DNA, 15 bp, Homo sapiens
gctgccgccgctgcc

SEQ ID NO: 65762 - DNA, 15 bp, Homo sapiens
ctgccgccgctgcca

SEQ ID NO: 65763 - DNA, 15 bp, Homo sapiens
tgccgccgctgccag

SEQ ID NO: 65764 - DNA, 15 bp, Homo sapiens
gccgccgctgccagg

SEQ ID NO: 65765 - DNA, 15 bp, Homo sapiens
ccgccgctgccaggc

SEQ ID NO: 65766 - DNA, 15 bp, Homo sapiens
cgccgctgccaggcc

SEQ ID NO: 65767 - DNA, 15 bp, Homo sapiens
gccgctgccaggcct

SEQ ID NO: 65768 - DNA, 15 bp, Homo sapiens
ccgctgccaggcctc

SEQ ID NO: 65769 - DNA, 15 bp, Homo sapiens
cgctgccaggcctct

SEQ ID NO: 65770 - DNA, 15 bp, Homo sapiens
gctgccaggcctctg

SEQ ID NO: 65771 - DNA, 15 bp, Homo sapiens
ctgccaggcctctgg

SEQ ID NO: 65772 - DNA, 15 bp, Homo sapiens
tgccaggcctctggc

SEQ ID NO: 65773 - DNA, 15 bp, Homo sapiens
gccaggcctctggct

SEQ ID NO: 65774 - DNA, 15 bp, Homo sapiens
ccaggcctctggctg

SEQ ID NO: 65775 - DNA, 15 bp, Homo sapiens
caggcctctggctgc

SEQ ID NO: 65776 - DNA, 15 bp, Homo sapiens
aggcctctggctgct

SEQ ID NO: 65777 - DNA, 15 bp, Homo sapiens
ggcctctggctgctg

SEQ ID NO: 65778 - DNA, 15 bp, Homo sapiens
gcctctggctgctga

SEQ ID NO: 65779 - DNA, 15 bp, Homo sapiens
cctctggctgctgag

SEQ ID NO: 65780 - DNA, 15 bp, Homo sapiens
ctctggctgctgagg

SEQ ID NO: 65781 - DNA, 15 bp, Homo sapiens
tctggctgctgagga

SEQ ID NO: 65782 - DNA, 15 bp, Homo sapiens
ctggctgctgaggag

SEQ ID NO: 65783 - DNA, 15 bp, Homo sapiens
tggctgctgaggaga

SEQ ID NO: 65784 - DNA, 15 bp, Homo sapiens
ggctgctgaggagaa

SEQ ID NO: 65785 - DNA, 15 bp, Homo sapiens
gctgctgaggagaag

SEQ ID NO: 65786 - DNA, 15 bp, Homo sapiens
ctgctgaggagaagc

SEQ ID NO: 65787 - DNA, 15 bp, Homo sapiens
tgctgaggagaagca

SEQ ID NO: 65788 - DNA, 15 bp, Homo sapiens
gctgaggagaagcag

SEQ ID NO: 65789 - DNA, 15 bp, Homo sapiens
ctgaggagaagcagg

SEQ ID NO: 65790 - DNA, 15 bp, Homo sapiens
tgaggagaagcaggc

SEQ ID NO: 65791 - DNA, 15 bp, Homo sapiens
gaggagaagcaggcc

SEQ ID NO: 65792 - DNA, 15 bp, Homo sapiens
aggagaagcaggccc

SEQ ID NO: 65793 - DNA, 15 bp, Homo sapiens
ggagaagcaggccca

SEQ ID NO: 65794 - DNA, 15 bp, Homo sapiens
gagaagcaggcccag

SEQ ID NO: 65795 - DNA, 15 bp, Homo sapiens
agaagcaggcccagt

SEQ ID NO: 65796 - DNA, 15 bp, Homo sapiens
gaagcaggcccagtc

SEQ ID NO: 65797 - DNA, 15 bp, Homo sapiens
aagcaggcccagtcg

SEQ ID NO: 65798 - DNA, 15 bp, Homo sapiens
agcaggcccagtcgc

SEQ ID NO: 65799 - DNA, 15 bp, Homo sapiens
gcaggcccagtcgct

SEQ ID NO: 65800 - DNA, 15 bp, Homo sapiens
caggcccagtcgctg

SEQ ID NO: 65801 - DNA, 15 bp, Homo sapiens
aggcccagtcgctgc

SEQ ID NO: 65802 - DNA, 15 bp, Homo sapiens
ggcccagtcgctgca

SEQ ID NO: 65803 - DNA, 15 bp, Homo sapiens
gcccagtcgctgcaa

SEQ ID NO: 65804 - DNA, 15 bp, Homo sapiens
cccagtcgctgcaac

SEQ ID NO: 65805 - DNA, 15 bp, Homo sapiens
ccagtcgctgcaacc

SEQ ID NO: 65806 - DNA, 15 bp, Homo sapiens
cagtcgctgcaacca

SEQ ID NO: 65807 - DNA, 15 bp, Homo sapiens
agtcgctgcaaccat

SEQ ID NO: 65808 - DNA, 15 bp, Homo sapiens
gtcgctgcaaccatc

SEQ ID NO: 65809 - DNA, 15 bp, Homo sapiens
tcgctgcaaccatcc

SEQ ID NO: 65810 - DNA, 15 bp, Homo sapiens
cgctgcaaccatcca

SEQ ID NO: 65811 - DNA, 15 bp, Homo sapiens
gctgcaaccatccag

SEQ ID NO: 65812 - DNA, 15 bp, Homo sapiens
ctgcaaccatccagc

SEQ ID NO: 65813 - DNA, 15 bp, Homo sapiens
tgcaaccatccagca

SEQ ID NO: 65814 - DNA, 15 bp, Homo sapiens
gcaaccatccagcag

SEQ ID NO: 65815 - DNA, 15 bp, Homo sapiens
caaccatccagcagc

SEQ ID NO: 65816 - DNA, 15 bp, Homo sapiens
aaccatccagcagcc

SEQ ID NO: 65817 - DNA, 15 bp, Homo sapiens
accatccagcagccg

SEQ ID NO: 65818 - DNA, 15 bp, Homo sapiens
ccatccagcagccgc

SEQ ID NO: 65819 - DNA, 15 bp, Homo sapiens
catccagcagccgcc

SEQ ID NO: 65820 - DNA, 15 bp, Homo sapiens
atccagcagccgccg

SEQ ID NO: 65821 - DNA, 15 bp, Homo sapiens
tccagcagccgccgc

SEQ ID NO: 65822 - DNA, 15 bp, Homo sapiens
ccagcagccgccgca

SEQ ID NO: 65823 - DNA, 15 bp, Homo sapiens
cagcagccgccgcag

SEQ ID NO: 65824 - DNA, 15 bp, Homo sapiens
agcagccgccgcagc

SEQ ID NO: 65825 - DNA, 15 bp, Homo sapiens
gcagccgccgcagca

SEQ ID NO: 65826 - DNA, 15 bp, Homo sapiens
cagccgccgcagcag

SEQ ID NO: 65827 - DNA, 15 bp, Homo sapiens
agccgccgcagcagc

SEQ ID NO: 65828 - DNA, 15 bp, Homo sapiens
gccgccgcagcagcc

SEQ ID NO: 65829 - DNA, 15 bp, Homo sapiens
ccgccgcagcagcca

SEQ ID NO: 65830 - DNA, 15 bp, Homo sapiens
cgccgcagcagccat

SEQ ID NO: 65831 - DNA, 15 bp, Homo sapiens
gccgcagcagccatt

SEQ ID NO: 65832 - DNA, 15 bp, Homo sapiens
ccgcagcagccatta

SEQ ID NO: 65833 - DNA, 15 bp, Homo sapiens
cgcagcagccattac

SEQ ID NO: 65834 - DNA, 15 bp, Homo sapiens
gcagcagccattacc

SEQ ID NO: 65835 - DNA, 15 bp, Homo sapiens
cagcagccattaccc

SEQ ID NO: 65836 - DNA, 15 bp, Homo sapiens
agcagccattacccg

SEQ ID NO: 65837 - DNA, 15 bp, Homo sapiens
gcagccattacccgg

SEQ ID NO: 65838 - DNA, 15 bp, Homo sapiens
cagccattacccggc

SEQ ID NO: 65839 - DNA, 15 bp, Homo sapiens
agccattacccggct

SEQ ID NO: 65840 - DNA, 15 bp, Homo sapiens
gccattacccggctg

SEQ ID NO: 65841 - DNA, 15 bp, Homo sapiens
ccattacccggctgc

SEQ ID NO: 65842 - DNA, 15 bp, Homo sapiens
cattacccggctgcg

SEQ ID NO: 65843 - DNA, 15 bp, Homo sapiens
attacccggctgcgg

SEQ ID NO: 65844 - DNA, 15 bp, Homo sapiens
ttacccggctgcggt

SEQ ID NO: 65845 - DNA, 15 bp, Homo sapiens
tacccggctgcggtc

SEQ ID NO: 65846 - DNA, 15 bp, Homo sapiens
acccggctgcggtcc

SEQ ID NO: 65847 - DNA, 15 bp, Homo sapiens
cccggctgcggtcca

SEQ ID NO: 65848 - DNA, 15 bp, Homo sapiens
ccggctgcggtccag

SEQ ID NO: 65849 - DNA, 15 bp, Homo sapiens
cggctgcggtccaga

SEQ ID NO: 65850 - DNA, 15 bp, Homo sapiens
ggctgcggtccagag

SEQ ID NO: 65851 - DNA, 15 bp, Homo sapiens
gctgcggtccagagc

SEQ ID NO: 65852 - DNA, 15 bp, Homo sapiens
ctgcggtccagagcc

SEQ ID NO: 65853 - DNA, 15 bp, Homo sapiens
tgcggtccagagcca

SEQ ID NO: 65854 - DNA, 15 bp, Homo sapiens
gcggtccagagccaa

SEQ ID NO: 65855 - DNA, 15 bp, Homo sapiens
cggtccagagccaag

SEQ ID NO: 65856 - DNA, 15 bp, Homo sapiens
ggtccagagccaagc

SEQ ID NO: 65857 - DNA, 15 bp, Homo sapiens
gtccagagccaagcg

SEQ ID NO: 65858 - DNA, 15 bp, Homo sapiens
tccagagccaagcgg

SEQ ID NO: 65859 - DNA, 15 bp, Homo sapiens
ccagagccaagcggc

SEQ ID NO: 65860 - DNA, 15 bp, Homo sapiens
cagagccaagcggcg

SEQ ID NO: 65861 - DNA, 15 bp, Homo sapiens
agagccaagcggcgg

SEQ ID NO: 65862 - DNA, 15 bp, Homo sapiens
gagccaagcggcggc

SEQ ID NO: 65863 - DNA, 15 bp, Homo sapiens
agccaagcggcggca

SEQ ID NO: 65864 - DNA, 15 bp, Homo sapiens
gccaagcggcggcag

SEQ ID NO: 65865 - DNA, 15 bp, Homo sapiens
ccaagcggcggcaga

SEQ ID NO: 65866 - DNA, 15 bp, Homo sapiens
caagcggcggcagag

SEQ ID NO: 65867 - DNA, 15 bp, Homo sapiens
aagcggcggcagagc

SEQ ID NO: 65868 - DNA, 15 bp, Homo sapiens
agcggcggcagagcg

SEQ ID NO: 65869 - DNA, 15 bp, Homo sapiens
gcggcggcagagcga

SEQ ID NO: 65870 - DNA, 15 bp, Homo sapiens
cggcggcagagcgag

SEQ ID NO: 65871 - DNA, 15 bp, Homo sapiens
ggcggcagagcgagg

SEQ ID NO: 65872 - DNA, 15 bp, Homo sapiens
gcggcagagcgaggg

SEQ ID NO: 65873 - DNA, 15 bp, Homo sapiens
cggcagagcgagggg

SEQ ID NO: 65874 - DNA, 15 bp, Homo sapiens
ggcagagcgaggggc

SEQ ID NO: 65875 - DNA, 15 bp, Homo sapiens
gcagagcgaggggca

SEQ ID NO: 65876 - DNA, 15 bp, Homo sapiens
cagagcgaggggcat

SEQ ID NO: 65877 - DNA, 15 bp, Homo sapiens
agagcgaggggcatc

SEQ ID NO: 65878 - DNA, 15 bp, Homo sapiens
gagcgaggggcatca

SEQ ID NO: 65879 - DNA, 15 bp, Homo sapiens
agcgaggggcatcag

SEQ ID NO: 65880 - DNA, 15 bp, Homo sapiens
gcgaggggcatcagc

SEQ ID NO: 65881 - DNA, 15 bp, Homo sapiens
cgaggggcatcagct

SEQ ID NO: 65882 - DNA, 15 bp, Homo sapiens
gaggggcatcagcta

SEQ ID NO: 65883 - DNA, 15 bp, Homo sapiens
aggggcatcagctac

SEQ ID NO: 65884 - DNA, 15 bp, Homo sapiens
ggggcatcagctacc

SEQ ID NO: 65885 - DNA, 15 bp, Homo sapiens
gggcatcagctaccg

SEQ ID NO: 65886 - DNA, 15 bp, Homo sapiens
ggcatcagctaccgc

SEQ ID NO: 65887 - DNA, 15 bp, Homo sapiens
gcatcagctaccgcc

SEQ ID NO: 65888 - DNA, 15 bp, Homo sapiens
catcagctaccgcca

SEQ ID NO: 65889 - DNA, 15 bp, Homo sapiens
atcagctaccgccaa

SEQ ID NO: 65890 - DNA, 15 bp, Homo sapiens
tcagctaccgccaag

SEQ ID NO: 65891 - DNA, 15 bp, Homo sapiens
cagctaccgccaagt

SEQ ID NO: 65892 - DNA, 15 bp, Homo sapiens
agctaccgccaagtc

SEQ ID NO: 65893 - DNA, 15 bp, Homo sapiens
gctaccgccaagtcc

SEQ ID NO: 65894 - DNA, 15 bp, Homo sapiens
ctaccgccaagtcca

SEQ ID NO: 65895 - DNA, 15 bp, Homo sapiens
taccgccaagtccag

SEQ ID NO: 65896 - DNA, 15 bp, Homo sapiens
accgccaagtccaga

SEQ ID NO: 65897 - DNA, 15 bp, Homo sapiens
ccgccaagtccagag

SEQ ID NO: 65898 - DNA, 15 bp, Homo sapiens
cgccaagtccagagc

SEQ ID NO: 65899 - DNA, 15 bp, Homo sapiens
gccaagtccagagcc

SEQ ID NO: 65900 - DNA, 15 bp, Homo sapiens
ccaagtccagagcca

SEQ ID NO: 65901 - DNA, 15 bp, Homo sapiens
caagtccagagccat

SEQ ID NO: 65902 - DNA, 15 bp, Homo sapiens
aagtccagagccatt

SEQ ID NO: 65903 - DNA, 15 bp, Homo sapiens
agtccagagccattt

SEQ ID NO: 65904 - DNA, 15 bp, Homo sapiens
gtccagagccatttc

SEQ ID NO: 65905 - DNA, 15 bp, Homo sapiens
tccagagccatttcc

SEQ ID NO: 65906 - DNA, 15 bp, Homo sapiens
ccagagccatttcca

SEQ ID NO: 65907 - DNA, 15 bp, Homo sapiens
cagagccatttccat

SEQ ID NO: 65908 - DNA, 15 bp, Homo sapiens
agagccatttccatc

SEQ ID NO: 65909 - DNA, 15 bp, Homo sapiens
gagccatttccatcc

SEQ ID NO: 65910 - DNA, 15 bp, Homo sapiens
agccatttccatcct

SEQ ID NO: 65911 - DNA, 15 bp, Homo sapiens
gccatttccatcctg

SEQ ID NO: 65912 - DNA, 15 bp, Homo sapiens
ccatttccatcctgc

SEQ ID NO: 65913 - DNA, 15 bp, Homo sapiens
catttccatcctgca

SEQ ID NO: 65914 - DNA, 15 bp, Homo sapiens
atttccatcctgcag

SEQ ID NO: 65915 - DNA, 15 bp, Homo sapiens
tttccatcctgcaga

SEQ ID NO: 65916 - DNA, 15 bp, Homo sapiens
ttccatcctgcagaa

SEQ ID NO: 65917 - DNA, 15 bp, Homo sapiens
tccatcctgcagaag

SEQ ID NO: 65918 - DNA, 15 bp, Homo sapiens
ccatcctgcagaaga

SEQ ID NO: 65919 - DNA, 15 bp, Homo sapiens
catcctgcagaagaa

SEQ ID NO: 65920 - DNA, 15 bp, Homo sapiens
atcctgcagaagaag

SEQ ID NO: 65921 - DNA, 15 bp, Homo sapiens
tcctgcagaagaagc

SEQ ID NO: 65922 - DNA, 15 bp, Homo sapiens
cctgcagaagaagcc

SEQ ID NO: 65923 - DNA, 15 bp, Homo sapiens
ctgcagaagaagccc

SEQ ID NO: 65924 - DNA, 15 bp, Homo sapiens
tgcagaagaagcccc

SEQ ID NO: 65925 - DNA, 15 bp, Homo sapiens
gcagaagaagccccg

SEQ ID NO: 65926 - DNA, 15 bp, Homo sapiens
cagaagaagccccgc

SEQ ID NO: 65927 - DNA, 15 bp, Homo sapiens
agaagaagccccgcc

SEQ ID NO: 65928 - DNA, 15 bp, Homo sapiens
gaagaagccccgcca

SEQ ID NO: 65929 - DNA, 15 bp, Homo sapiens
aagaagccccgccac

SEQ ID NO: 65930 - DNA, 15 bp, Homo sapiens
agaagccccgccacc

SEQ ID NO: 65931 - DNA, 15 bp, Homo sapiens
gaagccccgccacca

SEQ ID NO: 65932 - DNA, 15 bp, Homo sapiens
aagccccgccaccag

SEQ ID NO: 65933 - DNA, 15 bp, Homo sapiens
agccccgccaccagc

SEQ ID NO: 65934 - DNA, 15 bp, Homo sapiens
gccccgccaccagca

SEQ ID NO: 65935 - DNA, 15 bp, Homo sapiens
ccccgccaccagcag

SEQ ID NO: 65936 - DNA, 15 bp, Homo sapiens
cccgccaccagcagc

SEQ ID NO: 65937 - DNA, 15 bp, Homo sapiens
ccgccaccagcagct

SEQ ID NO: 65938 - DNA, 15 bp, Homo sapiens
cgccaccagcagctt

SEQ ID NO: 65939 - DNA, 15 bp, Homo sapiens
gccaccagcagcttc

SEQ ID NO: 65940 - DNA, 15 bp, Homo sapiens
ccaccagcagcttct

SEQ ID NO: 65941 - DNA, 15 bp, Homo sapiens
caccagcagcttctg

SEQ ID NO: 65942 - DNA, 15 bp, Homo sapiens
accagcagcttctgc

SEQ ID NO: 65943 - DNA, 15 bp, Homo sapiens
ccagcagcttctgcc

SEQ ID NO: 65944 - DNA, 15 bp, Homo sapiens
cagcagcttctgcca

SEQ ID NO: 65945 - DNA, 15 bp, Homo sapiens
agcagcttctgccat

SEQ ID NO: 65946 - DNA, 15 bp, Homo sapiens
gcagcttctgccatc

SEQ ID NO: 65947 - DNA, 15 bp, Homo sapiens
cagcttctgccatct

SEQ ID NO: 65948 - DNA, 15 bp, Homo sapiens
agcttctgccatctc

SEQ ID NO: 65949 - DNA, 15 bp, Homo sapiens
gcttctgccatctct

SEQ ID NO: 65950 - DNA, 15 bp, Homo sapiens
cttctgccatctctc

SEQ ID NO: 65951 - DNA, 15 bp, Homo sapiens
ttctgccatctctct

SEQ ID NO: 65952 - DNA, 15 bp, Homo sapiens
tctgccatctctctc

SEQ ID NO: 65953 - DNA, 15 bp, Homo sapiens
ctgccatctctctcc

SEQ ID NO: 65954 - DNA, 15 bp, Homo sapiens
tgccatctctctcct

SEQ ID NO: 65955 - DNA, 15 bp, Homo sapiens
gccatctctctcctc

SEQ ID NO: 65956 - DNA, 15 bp, Homo sapiens
ccatctctctcctcc

SEQ ID NO: 65957 - DNA, 15 bp, Homo sapiens
catctctctcctcct

SEQ ID NO: 65958 - DNA, 15 bp, Homo sapiens
atctctctcctcctt

SEQ ID NO: 65959 - DNA, 15 bp, Homo sapiens
tctctctcctccttt

SEQ ID NO: 65960 - DNA, 15 bp, Homo sapiens
ctctctcctcctttt

SEQ ID NO: 65961 - DNA, 15 bp, Homo sapiens
tctctcctccttttt

SEQ ID NO: 65962 - DNA, 15 bp, Homo sapiens
ctctcctcctttttc

SEQ ID NO: 65963 - DNA, 15 bp, Homo sapiens
tctcctcctttttct

SEQ ID NO: 65964 - DNA, 15 bp, Homo sapiens
ctcctcctttttctt

SEQ ID NO: 65965 - DNA, 15 bp, Homo sapiens
tcctcctttttcttc

SEQ ID NO: 65966 - DNA, 15 bp, Homo sapiens
cctcctttttcttca

SEQ ID NO: 65967 - DNA, 15 bp, Homo sapiens
ctcctttttcttcag

SEQ ID NO: 65968 - DNA, 15 bp, Homo sapiens
tcctttttcttcagc

SEQ ID NO: 65969 - DNA, 15 bp, Homo sapiens
cctttttcttcagcc

SEQ ID NO: 65970 - DNA, 15 bp, Homo sapiens
ctttttcttcagcca

SEQ ID NO: 65971 - DNA, 15 bp, Homo sapiens
tttttcttcagccac

SEQ ID NO: 65972 - DNA, 15 bp, Homo sapiens
ttttcttcagccaca

SEQ ID NO: 65973 - DNA, 15 bp, Homo sapiens
tttcttcagccacag

SEQ ID NO: 65974 - DNA, 15 bp, Homo sapiens
ttcttcagccacagg

SEQ ID NO: 65975 - DNA, 15 bp, Homo sapiens
tcttcagccacaggc

SEQ ID NO: 65976 - DNA, 15 bp, Homo sapiens
cttcagccacaggct

SEQ ID NO: 65977 - DNA, 15 bp, Homo sapiens
ttcagccacaggctc

SEQ ID NO: 65978 - DNA, 15 bp, Homo sapiens
tcagccacaggctcc

SEQ ID NO: 65979 - DNA, 15 bp, Homo sapiens
cagccacaggctccc

SEQ ID NO: 65980 - DNA, 15 bp, Homo sapiens
agccacaggctccca

SEQ ID NO: 65981 - DNA, 15 bp, Homo sapiens
gccacaggctcccag

SEQ ID NO: 65982 - DNA, 15 bp, Homo sapiens
ccacaggctcccaga

SEQ ID NO: 65983 - DNA, 15 bp, Homo sapiens
cacaggctcccagac

SEQ ID NO: 65984 - DNA, 15 bp, Homo sapiens
acaggctcccagaca

SEQ ID NO: 65985 - DNA, 15 bp, Homo sapiens
caggctcccagacat

SEQ ID NO: 65986 - DNA, 15 bp, Homo sapiens
aggctcccagacatg

SEQ ID NO: 65987 - DNA, 15 bp, Homo sapiens
ggctcccagacatga

SEQ ID NO: 65988 - DNA, 15 bp, Homo sapiens
gctcccagacatgac

SEQ ID NO: 65989 - DNA, 15 bp, Homo sapiens
ctcccagacatgaca

SEQ ID NO: 65990 - DNA, 15 bp, Homo sapiens
tcccagacatgacag

SEQ ID NO: 65991 - DNA, 15 bp, Homo sapiens
cccagacatgacagc

SEQ ID NO: 65992 - DNA, 15 bp, Homo sapiens
ccagacatgacagcc

SEQ ID NO: 65993 - DNA, 15 bp, Homo sapiens
cagacatgacagcca

SEQ ID NO: 65994 - DNA, 15 bp, Homo sapiens
agacatgacagccat

SEQ ID NO: 65995 - DNA, 15 bp, Homo sapiens
gacatgacagccatc

SEQ ID NO: 65996 - DNA, 15 bp, Homo sapiens
acatgacagccatca

SEQ ID NO: 65997 - DNA, 15 bp, Homo sapiens
catgacagccatcat

SEQ ID NO: 65998 - DNA, 15 bp, Homo sapiens
atgacagccatcatc

SEQ ID NO: 65999 - DNA, 15 bp, Homo sapiens
tgacagccatcatca

SEQ ID NO: 66000 - DNA, 15 bp, Homo sapiens
gacagccatcatcaa

SEQ ID NO: 66001 - DNA, 15 bp, Homo sapiens
acagccatcatcaaa

SEQ ID NO: 66002 - DNA, 15 bp, Homo sapiens
cagccatcatcaaag

SEQ ID NO: 66003 - DNA, 15 bp, Homo sapiens
agccatcatcaaaga

SEQ ID NO: 66004 - DNA, 15 bp, Homo sapiens
gccatcatcaaagag

SEQ ID NO: 66005 - DNA, 15 bp, Homo sapiens
ccatcatcaaagaga

SEQ ID NO: 66006 - DNA, 15 bp, Homo sapiens
catcatcaaagagat

SEQ ID NO: 66007 - DNA, 15 bp, Homo sapiens
atcatcaaagagatc

SEQ ID NO: 66008 - DNA, 15 bp, Homo sapiens
tcatcaaagagatcg

SEQ ID NO: 66009 - DNA, 15 bp, Homo sapiens
catcaaagagatcgt

SEQ ID NO: 66010 - DNA, 15 bp, Homo sapiens
atcaaagagatcgtt

SEQ ID NO: 66011 - DNA, 15 bp, Homo sapiens
tcaaagagatcgtta

SEQ ID NO: 66012 - DNA, 15 bp, Homo sapiens
caaagagatcgttag

SEQ ID NO: 66013 - DNA, 15 bp, Homo sapiens
aaagagatcgttagc

SEQ ID NO: 66014 - DNA, 15 bp, Homo sapiens
aagagatcgttagca

SEQ ID NO: 66015 - DNA, 15 bp, Homo sapiens
agagatcgttagcag

SEQ ID NO: 66016 - DNA, 15 bp, Homo sapiens
gagatcgttagcaga

SEQ ID NO: 66017 - DNA, 15 bp, Homo sapiens
agatcgttagcagaa

SEQ ID NO: 66018 - DNA, 15 bp, Homo sapiens
gatcgttagcagaaa

SEQ ID NO: 66019 - DNA, 15 bp, Homo sapiens
atcgttagcagaaac

SEQ ID NO: 66020 - DNA, 15 bp, Homo sapiens
tcgttagcagaaaca

SEQ ID NO: 66021 - DNA, 15 bp, Homo sapiens
cgttagcagaaacaa

SEQ ID NO: 66022 - DNA, 15 bp, Homo sapiens
gttagcagaaacaaa

SEQ ID NO: 66023 - DNA, 15 bp, Homo sapiens
ttagcagaaacaaaa

SEQ ID NO: 66024 - DNA, 15 bp, Homo sapiens
tagcagaaacaaaag

SEQ ID NO: 66025 - DNA, 15 bp, Homo sapiens
agcagaaacaaaagg

SEQ ID NO: 66026 - DNA, 15 bp, Homo sapiens
gcagaaacaaaagga

SEQ ID NO: 66027 - DNA, 15 bp, Homo sapiens
cagaaacaaaaggag

SEQ ID NO: 66028 - DNA, 15 bp, Homo sapiens
agaaacaaaaggaga

SEQ ID NO: 66029 - DNA, 15 bp, Homo sapiens
gaaacaaaaggagat

SEQ ID NO: 66030 - DNA, 15 bp, Homo sapiens
aaacaaaaggagata

SEQ ID NO: 66031 - DNA, 15 bp, Homo sapiens
aacaaaaggagatat

SEQ ID NO: 66032 - DNA, 15 bp, Homo sapiens
acaaaaggagatatc

SEQ ID NO: 66033 - DNA, 15 bp, Homo sapiens
caaaaggagatatca

SEQ ID NO: 66034 - DNA, 15 bp, Homo sapiens
aaaaggagatatcaa

SEQ ID NO: 66035 - DNA, 15 bp, Homo sapiens
aaaggagatatcaag

SEQ ID NO: 66036 - DNA, 15 bp, Homo sapiens
aaggagatatcaaga

SEQ ID NO: 66037 - DNA, 15 bp, Homo sapiens
aggagatatcaagag

SEQ ID NO: 66038 - DNA, 15 bp, Homo sapiens
ggagatatcaagagg

SEQ ID NO: 66039 - DNA, 15 bp, Homo sapiens
gagatatcaagagga

SEQ ID NO: 66040 - DNA, 15 bp, Homo sapiens
agatatcaagaggat

SEQ ID NO: 66041 - DNA, 15 bp, Homo sapiens
gatatcaagaggatg

SEQ ID NO: 66042 - DNA, 15 bp, Homo sapiens
atatcaagaggatgg

SEQ ID NO: 66043 - DNA, 15 bp, Homo sapiens
tatcaagaggatgga

SEQ ID NO: 66044 - DNA, 15 bp, Homo sapiens
atcaagaggatggat

SEQ ID NO: 66045 - DNA, 15 bp, Homo sapiens
tcaagaggatggatt

SEQ ID NO: 66046 - DNA, 15 bp, Homo sapiens
caagaggatggattc

SEQ ID NO: 66047 - DNA, 15 bp, Homo sapiens
aagaggatggattcg

SEQ ID NO: 66048 - DNA, 15 bp, Homo sapiens
agaggatggattcga

SEQ ID NO: 66049 - DNA, 15 bp, Homo sapiens
gaggatggattcgac

SEQ ID NO: 66050 - DNA, 15 bp, Homo sapiens
aggatggattcgact

SEQ ID NO: 66051 - DNA, 15 bp, Homo sapiens
ggatggattcgactt

SEQ ID NO: 66052 - DNA, 15 bp, Homo sapiens
gatggattcgactta

SEQ ID NO: 66053 - DNA, 15 bp, Homo sapiens
atggattcgacttag

SEQ ID NO: 66054 - DNA, 15 bp, Homo sapiens
tggattcgacttaga

SEQ ID NO: 66055 - DNA, 15 bp, Homo sapiens
ggattcgacttagac

SEQ ID NO: 66056 - DNA, 15 bp, Homo sapiens
gattcgacttagact

SEQ ID NO: 66057 - DNA, 15 bp, Homo sapiens
attcgacttagactt

SEQ ID NO: 66058 - DNA, 15 bp, Homo sapiens
ttcgacttagacttg

SEQ ID NO: 66059 - DNA, 15 bp, Homo sapiens
tcgacttagacttga

SEQ ID NO: 66060 - DNA, 15 bp, Homo sapiens
cgacttagacttgac

SEQ ID NO: 66061 - DNA, 15 bp, Homo sapiens
gacttagacttgacc

SEQ ID NO: 66062 - DNA, 15 bp, Homo sapiens
acttagacttgacct

SEQ ID NO: 66063 - DNA, 15 bp, Homo sapiens
cttagacttgacctg

SEQ ID NO: 66064 - DNA, 15 bp, Homo sapiens
ttagacttgacctgt

SEQ ID NO: 66065 - DNA, 15 bp, Homo sapiens
tagacttgacctgta

SEQ ID NO: 66066 - DNA, 15 bp, Homo sapiens
agacttgacctgtat

SEQ ID NO: 66067 - DNA, 15 bp, Homo sapiens
gacttgacctgtatc

SEQ ID NO: 66068 - DNA, 15 bp, Homo sapiens
acttgacctgtatcc

SEQ ID NO: 66069 - DNA, 15 bp, Homo sapiens
cttgacctgtatcca

SEQ ID NO: 66070 - DNA, 15 bp, Homo sapiens
ttgacctgtatccat

SEQ ID NO: 66071 - DNA, 15 bp, Homo sapiens
tgacctgtatccatt

SEQ ID NO: 66072 - DNA, 15 bp, Homo sapiens
gacctgtatccattt

SEQ ID NO: 66073 - DNA, 15 bp, Homo sapiens
acctgtatccatttc

SEQ ID NO: 66074 - DNA, 15 bp, Homo sapiens
cctgtatccatttct

SEQ ID NO: 66075 - DNA, 15 bp, Homo sapiens
ctgtatccatttctg

SEQ ID NO: 66076 - DNA, 15 bp, Homo sapiens
tgtatccatttctgc

SEQ ID NO: 66077 - DNA, 15 bp, Homo sapiens
gtatccatttctgcg

SEQ ID NO: 66078 - DNA, 15 bp, Homo sapiens
tatccatttctgcgg

SEQ ID NO: 66079 - DNA, 15 bp, Homo sapiens
atccatttctgcggc

SEQ ID NO: 66080 - DNA, 15 bp, Homo sapiens
tccatttctgcggct

SEQ ID NO: 66081 - DNA, 15 bp, Homo sapiens
ccatttctgcggctg

SEQ ID NO: 66082 - DNA, 15 bp, Homo sapiens
catttctgcggctgc

SEQ ID NO: 66083 - DNA, 15 bp, Homo sapiens
atttctgcggctgct

SEQ ID NO: 66084 - DNA, 15 bp, Homo sapiens
tttctgcggctgctc

SEQ ID NO: 66085 - DNA, 15 bp, Homo sapiens
ttctgcggctgctcc

SEQ ID NO: 66086 - DNA, 15 bp, Homo sapiens
tctgcggctgctcct

SEQ ID NO: 66087 - DNA, 15 bp, Homo sapiens
ctgcggctgctcctc

SEQ ID NO: 66088 - DNA, 15 bp, Homo sapiens
tgcggctgctcctct

SEQ ID NO: 66089 - DNA, 15 bp, Homo sapiens
gcggctgctcctctt

SEQ ID NO: 66090 - DNA, 15 bp, Homo sapiens
cggctgctcctcttt

SEQ ID NO: 66091 - DNA, 15 bp, Homo sapiens
ggctgctcctcttta

SEQ ID NO: 66092 - DNA, 15 bp, Homo sapiens
gctgctcctctttac

SEQ ID NO: 66093 - DNA, 15 bp, Homo sapiens
ctgctcctctttacc

SEQ ID NO: 66094 - DNA, 15 bp, Homo sapiens
tgctcctctttacct

SEQ ID NO: 66095 - DNA, 15 bp, Homo sapiens
gctcctctttacctt

SEQ ID NO: 66096 - DNA, 15 bp, Homo sapiens
ctcctctttaccttt

SEQ ID NO: 66097 - DNA, 15 bp, Homo sapiens
tcctctttacctttc

SEQ ID NO: 66098 - DNA, 15 bp, Homo sapiens
cctctttacctttct

SEQ ID NO: 66099 - DNA, 15 bp, Homo sapiens
ctctttacctttctg

SEQ ID NO: 66100 - DNA, 15 bp, Homo sapiens
tctttacctttctgt

SEQ ID NO: 66101 - DNA, 15 bp, Homo sapiens
ctttacctttctgtc

SEQ ID NO: 66102 - DNA, 15 bp, Homo sapiens
tttacctttctgtca

SEQ ID NO: 66103 - DNA, 15 bp, Homo sapiens
ttacctttctgtcac

SEQ ID NO: 66104 - DNA, 15 bp, Homo sapiens
tacctttctgtcact

SEQ ID NO: 66105 - DNA, 15 bp, Homo sapiens
acctttctgtcactc

SEQ ID NO: 66106 - DNA, 15 bp, Homo sapiens
cctttctgtcactct

SEQ ID NO: 66107 - DNA, 15 bp, Homo sapiens
ctttctgtcactctc

SEQ ID NO: 66108 - DNA, 15 bp, Homo sapiens
tttctgtcactctct

SEQ ID NO: 66109 - DNA, 15 bp, Homo sapiens
ttctgtcactctctt

SEQ ID NO: 66110 - DNA, 15 bp, Homo sapiens
tctgtcactctctta

SEQ ID NO: 66111 - DNA, 15 bp, Homo sapiens
ctgtcactctcttag

SEQ ID NO: 66112 - DNA, 15 bp, Homo sapiens
tgtcactctcttaga

SEQ ID NO: 66113 - DNA, 15 bp, Homo sapiens
gtcactctcttagaa

SEQ ID NO: 66114 - DNA, 15 bp, Homo sapiens
tcactctcttagaac

SEQ ID NO: 66115 - DNA, 15 bp, Homo sapiens
cactctcttagaacg

SEQ ID NO: 66116 - DNA, 15 bp, Homo sapiens
actctcttagaacgt

SEQ ID NO: 66117 - DNA, 15 bp, Homo sapiens
ctctcttagaacgtg

SEQ ID NO: 66118 - DNA, 15 bp, Homo sapiens
tctcttagaacgtgg

SEQ ID NO: 66119 - DNA, 15 bp, Homo sapiens
ctcttagaacgtggg

SEQ ID NO: 66120 - DNA, 15 bp, Homo sapiens
tcttagaacgtggga

SEQ ID NO: 66121 - DNA, 15 bp, Homo sapiens
cttagaacgtgggag

SEQ ID NO: 66122 - DNA, 15 bp, Homo sapiens
ttagaacgtgggagt

SEQ ID NO: 66123 - DNA, 15 bp, Homo sapiens
tagaacgtgggagta

SEQ ID NO: 66124 - DNA, 15 bp, Homo sapiens
agaacgtgggagtag

SEQ ID NO: 66125 - DNA, 15 bp, Homo sapiens
gaacgtgggagtaga

SEQ ID NO: 66126 - DNA, 15 bp, Homo sapiens
aacgtgggagtagac

SEQ ID NO: 66127 - DNA, 15 bp, Homo sapiens
acgtgggagtagacg

SEQ ID NO: 66128 - DNA, 15 bp, Homo sapiens
cgtgggagtagacgg

SEQ ID NO: 66129 - DNA, 15 bp, Homo sapiens
gtgggagtagacgga

SEQ ID NO: 66130 - DNA, 15 bp, Homo sapiens
tgggagtagacggat

SEQ ID NO: 66131 - DNA, 15 bp, Homo sapiens
gggagtagacggatg

SEQ ID NO: 66132 - DNA, 15 bp, Homo sapiens
ggagtagacggatgc

SEQ ID NO: 66133 - DNA, 15 bp, Homo sapiens
gagtagacggatgcg

SEQ ID NO: 66134 - DNA, 15 bp, Homo sapiens
agtagacggatgcga

SEQ ID NO: 66135 - DNA, 15 bp, Homo sapiens
gtagacggatgcgaa

SEQ ID NO: 66136 - DNA, 15 bp, Homo sapiens
tagacggatgcgaaa

SEQ ID NO: 66137 - DNA, 15 bp, Homo sapiens
agacggatgcgaaaa

SEQ ID NO: 66138 - DNA, 15 bp, Homo sapiens
gacggatgcgaaaat

SEQ ID NO: 66139 - DNA, 15 bp, Homo sapiens
acggatgcgaaaatg

SEQ ID NO: 66140 - DNA, 15 bp, Homo sapiens
cggatgcgaaaatgt

SEQ ID NO: 66141 - DNA, 15 bp, Homo sapiens
ggatgcgaaaatgtc

SEQ ID NO: 66142 - DNA, 15 bp, Homo sapiens
gatgcgaaaatgtcc

SEQ ID NO: 66143 - DNA, 15 bp, Homo sapiens
atgcgaaaatgtccg

SEQ ID NO: 66144 - DNA, 15 bp, Homo sapiens
tgcgaaaatgtccgt

SEQ ID NO: 66145 - DNA, 15 bp, Homo sapiens
gcgaaaatgtccgta

SEQ ID NO: 66146 - DNA, 15 bp, Homo sapiens
cgaaaatgtccgtag

SEQ ID NO: 66147 - DNA, 15 bp, Homo sapiens
gaaaatgtccgtagt

SEQ ID NO: 66148 - DNA, 15 bp, Homo sapiens
aaaatgtccgtagtt

SEQ ID NO: 66149 - DNA, 15 bp, Homo sapiens
aaatgtccgtagttt

SEQ ID NO: 66150 - DNA, 15 bp, Homo sapiens
aatgtccgtagtttg

SEQ ID NO: 66151 - DNA, 15 bp, Homo sapiens
atgtccgtagtttgg

SEQ ID NO: 66152 - DNA, 15 bp, Homo sapiens
tgtccgtagtttggg

SEQ ID NO: 66153 - DNA, 15 bp, Homo sapiens
gtccgtagtttgggt

SEQ ID NO: 66154 - DNA, 15 bp, Homo sapiens
tccgtagtttgggtg

SEQ ID NO: 66155 - DNA, 15 bp, Homo sapiens
ccgtagtttgggtga

SEQ ID NO: 66156 - DNA, 15 bp, Homo sapiens
cgtagtttgggtgac

SEQ ID NO: 66157 - DNA, 15 bp, Homo sapiens
gtagtttgggtgact

SEQ ID NO: 66158 - DNA, 15 bp, Homo sapiens
tagtttgggtgacta

SEQ ID NO: 66159 - DNA, 15 bp, Homo sapiens
agtttgggtgactat

SEQ ID NO: 66160 - DNA, 15 bp, Homo sapiens
gtttgggtgactata

SEQ ID NO: 66161 - DNA, 15 bp, Homo sapiens
tttgggtgactataa

SEQ ID NO: 66162 - DNA, 15 bp, Homo sapiens
ttgggtgactataac

SEQ ID NO: 66163 - DNA, 15 bp, Homo sapiens
tgggtgactataaca

SEQ ID NO: 66164 - DNA, 15 bp, Homo sapiens
gggtgactataacat

SEQ ID NO: 66165 - DNA, 15 bp, Homo sapiens
ggtgactataacatt

SEQ ID NO: 66166 - DNA, 15 bp, Homo sapiens
gtgactataacattt

SEQ ID NO: 66167 - DNA, 15 bp, Homo sapiens
tgactataacattta

SEQ ID NO: 66168 - DNA, 15 bp, Homo sapiens
gactataacatttaa

SEQ ID NO: 66169 - DNA, 15 bp, Homo sapiens
actataacatttaac

SEQ ID NO: 66170 - DNA, 15 bp, Homo sapiens
ctataacatttaacc

SEQ ID NO: 66171 - DNA, 15 bp, Homo sapiens
tataacatttaaccc

SEQ ID NO: 66172 - DNA, 15 bp, Homo sapiens
ataacatttaaccct

SEQ ID NO: 66173 - DNA, 15 bp, Homo sapiens
taacatttaaccctg

SEQ ID NO: 66174 - DNA, 15 bp, Homo sapiens
aacatttaaccctgg

SEQ ID NO: 66175 - DNA, 15 bp, Homo sapiens
acatttaaccctggt

SEQ ID NO: 66176 - DNA, 15 bp, Homo sapiens
catttaaccctggtc

SEQ ID NO: 66177 - DNA, 15 bp, Homo sapiens
atttaaccctggtca

SEQ ID NO: 66178 - DNA, 15 bp, Homo sapiens
tttaaccctggtcag

SEQ ID NO: 66179 - DNA, 15 bp, Homo sapiens
ttaaccctggtcagg

SEQ ID NO: 66180 - DNA, 15 bp, Homo sapiens
taaccctggtcaggt

SEQ ID NO: 66181 - DNA, 15 bp, Homo sapiens
aaccctggtcaggtt

SEQ ID NO: 66182 - DNA, 15 bp, Homo sapiens
accctggtcaggttg

SEQ ID NO: 66183 - DNA, 15 bp, Homo sapiens
ccctggtcaggttgc

SEQ ID NO: 66184 - DNA, 15 bp, Homo sapiens
cctggtcaggttgct

SEQ ID NO: 66185 - DNA, 15 bp, Homo sapiens
ctggtcaggttgcta

SEQ ID NO: 66186 - DNA, 15 bp, Homo sapiens
tggtcaggttgctag

SEQ ID NO: 66187 - DNA, 15 bp, Homo sapiens
ggtcaggttgctagg

SEQ ID NO: 66188 - DNA, 15 bp, Homo sapiens
gtcaggttgctaggt

SEQ ID NO: 66189 - DNA, 15 bp, Homo sapiens
tcaggttgctaggtc

SEQ ID NO: 66190 - DNA, 15 bp, Homo sapiens
caggttgctaggtca

SEQ ID NO: 66191 - DNA, 15 bp, Homo sapiens
aggttgctaggtcat

SEQ ID NO: 66192 - DNA, 15 bp, Homo sapiens
ggttgctaggtcata

SEQ ID NO: 66193 - DNA, 15 bp, Homo sapiens
gttgctaggtcatat

SEQ ID NO: 66194 - DNA, 15 bp, Homo sapiens
ttgctaggtcatata

SEQ ID NO: 66195 - DNA, 15 bp, Homo sapiens
tgctaggtcatatat

SEQ ID NO: 66196 - DNA, 15 bp, Homo sapiens
gctaggtcatatatt

SEQ ID NO: 66197 - DNA, 15 bp, Homo sapiens
ctaggtcatatattt

SEQ ID NO: 66198 - DNA, 15 bp, Homo sapiens
taggtcatatatttt

SEQ ID NO: 66199 - DNA, 15 bp, Homo sapiens
aggtcatatattttg

SEQ ID NO: 66200 - DNA, 15 bp, Homo sapiens
ggtcatatattttgt

SEQ ID NO: 66201 - DNA, 15 bp, Homo sapiens
gtcatatattttgtg

SEQ ID NO: 66202 - DNA, 15 bp, Homo sapiens
tcatatattttgtgt

SEQ ID NO: 66203 - DNA, 15 bp, Homo sapiens
catatattttgtgtt

SEQ ID NO: 66204 - DNA, 15 bp, Homo sapiens
atatattttgtgttt

SEQ ID NO: 66205 - DNA, 15 bp, Homo sapiens
tatattttgtgtttc

SEQ ID NO: 66206 - DNA, 15 bp, Homo sapiens
atattttgtgtttcc

SEQ ID NO: 66207 - DNA, 15 bp, Homo sapiens
tattttgtgtttcct

SEQ ID NO: 66208 - DNA, 15 bp, Homo sapiens
attttgtgtttcctt

SEQ ID NO: 66209 - DNA, 15 bp, Homo sapiens
ttttgtgtttccttt

SEQ ID NO: 66210 - DNA, 15 bp, Homo sapiens
tttgtgtttcctttc

SEQ ID NO: 66211 - DNA, 15 bp, Homo sapiens
ttgtgtttcctttct

SEQ ID NO: 66212 - DNA, 15 bp, Homo sapiens
tgtgtttcctttctg

SEQ ID NO: 66213 - DNA, 15 bp, Homo sapiens
gtgtttcctttctgt

SEQ ID NO: 66214 - DNA, 15 bp, Homo sapiens
tgtttcctttctgtg

SEQ ID NO: 66215 - DNA, 15 bp, Homo sapiens
gtttcctttctgtgt

SEQ ID NO: 66216 - DNA, 15 bp, Homo sapiens
tttcctttctgtgta

SEQ ID NO: 66217 - DNA, 15 bp, Homo sapiens
ttcctttctgtgtat

SEQ ID NO: 66218 - DNA, 15 bp, Homo sapiens
tcctttctgtgtatt

SEQ ID NO: 66219 - DNA, 15 bp, Homo sapiens
cctttctgtgtattc

SEQ ID NO: 66220 - DNA, 15 bp, Homo sapiens
ctttctgtgtattca

SEQ ID NO: 66221 - DNA, 15 bp, Homo sapiens
tttctgtgtattcaa

SEQ ID NO: 66222 - DNA, 15 bp, Homo sapiens
ttctgtgtattcaac

SEQ ID NO: 66223 - DNA, 15 bp, Homo sapiens
tctgtgtattcaacc

SEQ ID NO: 66224 - DNA, 15 bp, Homo sapiens
ctgtgtattcaacct

SEQ ID NO: 66225 - DNA, 15 bp, Homo sapiens
tgtgtattcaaccta

SEQ ID NO: 66226 - DNA, 15 bp, Homo sapiens
gtgtattcaacctag

SEQ ID NO: 66227 - DNA, 15 bp, Homo sapiens
tgtattcaacctagg

SEQ ID NO: 66228 - DNA, 15 bp, Homo sapiens
gtattcaacctaggg

SEQ ID NO: 66229 - DNA, 15 bp, Homo sapiens
tattcaacctagggt

SEQ ID NO: 66230 - DNA, 15 bp, Homo sapiens
attcaacctagggtg

SEQ ID NO: 66231 - DNA, 15 bp, Homo sapiens
ttcaacctagggtgt

SEQ ID NO: 66232 - DNA, 15 bp, Homo sapiens
tcaacctagggtgtg

SEQ ID NO: 66233 - DNA, 15 bp, Homo sapiens
caacctagggtgtgt

SEQ ID NO: 66234 - DNA, 15 bp, Homo sapiens
aacctagggtgtgtt

SEQ ID NO: 66235 - DNA, 15 bp, Homo sapiens
acctagggtgtgttt

SEQ ID NO: 66236 - DNA, 15 bp, Homo sapiens
cctagggtgtgtttg

SEQ ID NO: 66237 - DNA, 15 bp, Homo sapiens
ctagggtgtgtttgg

SEQ ID NO: 66238 - DNA, 15 bp, Homo sapiens
tagggtgtgtttggc

SEQ ID NO: 66239 - DNA, 15 bp, Homo sapiens
agggtgtgtttggct

SEQ ID NO: 66240 - DNA, 15 bp, Homo sapiens
gggtgtgtttggcta

SEQ ID NO: 66241 - DNA, 15 bp, Homo sapiens
ggtgtgtttggctag

SEQ ID NO: 66242 - DNA, 15 bp, Homo sapiens
gtgtgtttggctaga

SEQ ID NO: 66243 - DNA, 15 bp, Homo sapiens
tgtgtttggctagac

SEQ ID NO: 66244 - DNA, 15 bp, Homo sapiens
gtgtttggctagacg

SEQ ID NO: 66245 - DNA, 15 bp, Homo sapiens
tgtttggctagacgg

SEQ ID NO: 66246 - DNA, 15 bp, Homo sapiens
gtttggctagacgga

SEQ ID NO: 66247 - DNA, 15 bp, Homo sapiens
tttggctagacggaa

SEQ ID NO: 66248 - DNA, 15 bp, Homo sapiens
ttggctagacggaac

SEQ ID NO: 66249 - DNA, 15 bp, Homo sapiens
tggctagacggaact

SEQ ID NO: 66250 - DNA, 15 bp, Homo sapiens
ggctagacggaactc

SEQ ID NO: 66251 - DNA, 15 bp, Homo sapiens
gctagacggaactct

SEQ ID NO: 66252 - DNA, 15 bp, Homo sapiens
ctagacggaactctt

SEQ ID NO: 66253 - DNA, 15 bp, Homo sapiens
tagacggaactcttg

SEQ ID NO: 66254 - DNA, 15 bp, Homo sapiens
agacggaactcttgc

SEQ ID NO: 66255 - DNA, 15 bp, Homo sapiens
gacggaactcttgcc

SEQ ID NO: 66256 - DNA, 15 bp, Homo sapiens
acggaactcttgcct

SEQ ID NO: 66257 - DNA, 15 bp, Homo sapiens
cggaactcttgcctg

SEQ ID NO: 66258 - DNA, 15 bp, Homo sapiens
ggaactcttgcctgg

SEQ ID NO: 66259 - DNA, 15 bp, Homo sapiens
gaactcttgcctggt

SEQ ID NO: 66260 - DNA, 15 bp, Homo sapiens
aactcttgcctggtt

SEQ ID NO: 66261 - DNA, 15 bp, Homo sapiens
actcttgcctggttg

SEQ ID NO: 66262 - DNA, 15 bp, Homo sapiens
ctcttgcctggttgc

SEQ ID NO: 66263 - DNA, 15 bp, Homo sapiens
tcttgcctggttgca

SEQ ID NO: 66264 - DNA, 15 bp, Homo sapiens
cttgcctggttgcaa

SEQ ID NO: 66265 - DNA, 15 bp, Homo sapiens
ttgcctggttgcaag

SEQ ID NO: 66266 - DNA, 15 bp, Homo sapiens
tgcctggttgcaagt

SEQ ID NO: 66267 - DNA, 15 bp, Homo sapiens
gcctggttgcaagtg

SEQ ID NO: 66268 - DNA, 15 bp, Homo sapiens
cctggttgcaagtgt

SEQ ID NO: 66269 - DNA, 15 bp, Homo sapiens
ctggttgcaagtgtc

SEQ ID NO: 66270 - DNA, 15 bp, Homo sapiens
tggttgcaagtgtca

SEQ ID NO: 66271 - DNA, 15 bp, Homo sapiens
ggttgcaagtgtcaa

SEQ ID NO: 66272 - DNA, 15 bp, Homo sapiens
gttgcaagtgtcaag

SEQ ID NO: 66273 - DNA, 15 bp, Homo sapiens
ttgcaagtgtcaagc

SEQ ID NO: 66274 - DNA, 15 bp, Homo sapiens
tgcaagtgtcaagcc

SEQ ID NO: 66275 - DNA, 15 bp, Homo sapiens
gcaagtgtcaagcca

SEQ ID NO: 66276 - DNA, 15 bp, Homo sapiens
caagtgtcaagccac

SEQ ID NO: 66277 - DNA, 15 bp, Homo sapiens
aagtgtcaagccacc

SEQ ID NO: 66278 - DNA, 15 bp, Homo sapiens
agtgtcaagccaccg

SEQ ID NO: 66279 - DNA, 15 bp, Homo sapiens
gtgtcaagccaccga

SEQ ID NO: 66280 - DNA, 15 bp, Homo sapiens
tgtcaagccaccgat

SEQ ID NO: 66281 - DNA, 15 bp, Homo sapiens
gtcaagccaccgatt

SEQ ID NO: 66282 - DNA, 15 bp, Homo sapiens
tcaagccaccgattg

SEQ ID NO: 66283 - DNA, 15 bp, Homo sapiens
caagccaccgattgc

SEQ ID NO: 66284 - DNA, 15 bp, Homo sapiens
aagccaccgattgct

SEQ ID NO: 66285 - DNA, 15 bp, Homo sapiens
agccaccgattgctt

SEQ ID NO: 66286 - DNA, 15 bp, Homo sapiens
gccaccgattgcttt

SEQ ID NO: 66287 - DNA, 15 bp, Homo sapiens
ccaccgattgctttc

SEQ ID NO: 66288 - DNA, 15 bp, Homo sapiens
caccgattgctttct

SEQ ID NO: 66289 - DNA, 15 bp, Homo sapiens
accgattgctttctt

SEQ ID NO: 66290 - DNA, 15 bp, Homo sapiens
ccgattgctttctta

SEQ ID NO: 66291 - DNA, 15 bp, Homo sapiens
cgattgctttcttag

SEQ ID NO: 66292 - DNA, 15 bp, Homo sapiens
gattgctttcttagg

SEQ ID NO: 66293 - DNA, 15 bp, Homo sapiens
attgctttcttaggc

SEQ ID NO: 66294 - DNA, 15 bp, Homo sapiens
ttgctttcttaggct

SEQ ID NO: 66295 - DNA, 15 bp, Homo sapiens
tgctttcttaggcta

SEQ ID NO: 66296 - DNA, 15 bp, Homo sapiens
gctttcttaggctat

SEQ ID NO: 66297 - DNA, 15 bp, Homo sapiens
ctttcttaggctatc

SEQ ID NO: 66298 - DNA, 15 bp, Homo sapiens
tttcttaggctatct

SEQ ID NO: 66299 - DNA, 15 bp, Homo sapiens
ttcttaggctatcta

SEQ ID NO: 66300 - DNA, 15 bp, Homo sapiens
tcttaggctatctat

SEQ ID NO: 66301 - DNA, 15 bp, Homo sapiens
cttaggctatctata

SEQ ID NO: 66302 - DNA, 15 bp, Homo sapiens
ttaggctatctatat

SEQ ID NO: 66303 - DNA, 15 bp, Homo sapiens
taggctatctatatg

SEQ ID NO: 66304 - DNA, 15 bp, Homo sapiens
aggctatctatatgg

SEQ ID NO: 66305 - DNA, 15 bp, Homo sapiens
ggctatctatatggt

SEQ ID NO: 66306 - DNA, 15 bp, Homo sapiens
gctatctatatggtc

SEQ ID NO: 66307 - DNA, 15 bp, Homo sapiens
ctatctatatggtct

SEQ ID NO: 66308 - DNA, 15 bp, Homo sapiens
tatctatatggtctc

SEQ ID NO: 66309 - DNA, 15 bp, Homo sapiens
atctatatggtctct

SEQ ID NO: 66310 - DNA, 15 bp, Homo sapiens
tctatatggtctctt

SEQ ID NO: 66311 - DNA, 15 bp, Homo sapiens
ctatatggtctcttc

SEQ ID NO: 66312 - DNA, 15 bp, Homo sapiens
tatatggtctcttcc

SEQ ID NO: 66313 - DNA, 15 bp, Homo sapiens
atatggtctcttcct

SEQ ID NO: 66314 - DNA, 15 bp, Homo sapiens
tatggtctcttcctg

SEQ ID NO: 66315 - DNA, 15 bp, Homo sapiens
atggtctcttcctga

SEQ ID NO: 66316 - DNA, 15 bp, Homo sapiens
tggtctcttcctgag

SEQ ID NO: 66317 - DNA, 15 bp, Homo sapiens
ggtctcttcctgagg

SEQ ID NO: 66318 - DNA, 15 bp, Homo sapiens
gtctcttcctgaggg

SEQ ID NO: 66319 - DNA, 15 bp, Homo sapiens
tctcttcctgagggc

SEQ ID NO: 66320 - DNA, 15 bp, Homo sapiens
ctcttcctgagggct

SEQ ID NO: 66321 - DNA, 15 bp, Homo sapiens
tcttcctgagggcta

SEQ ID NO: 66322 - DNA, 15 bp, Homo sapiens
cttcctgagggctat

SEQ ID NO: 66323 - DNA, 15 bp, Homo sapiens
ttcctgagggctatt

SEQ ID NO: 66324 - DNA, 15 bp, Homo sapiens
tcctgagggctattg

SEQ ID NO: 66325 - DNA, 15 bp, Homo sapiens
cctgagggctattgt

SEQ ID NO: 66326 - DNA, 15 bp, Homo sapiens
ctgagggctattgtc

SEQ ID NO: 66327 - DNA, 15 bp, Homo sapiens
tgagggctattgtcc

SEQ ID NO: 66328 - DNA, 15 bp, Homo sapiens
gagggctattgtccg

SEQ ID NO: 66329 - DNA, 15 bp, Homo sapiens
agggctattgtccgt

SEQ ID NO: 66330 - DNA, 15 bp, Homo sapiens
gggctattgtccgtt

SEQ ID NO: 66331 - DNA, 15 bp, Homo sapiens
ggctattgtccgtta

SEQ ID NO: 66332 - DNA, 15 bp, Homo sapiens
gctattgtccgttaa

SEQ ID NO: 66333 - DNA, 15 bp, Homo sapiens
ctattgtccgttaat

SEQ ID NO: 66334 - DNA, 15 bp, Homo sapiens
tattgtccgttaata

SEQ ID NO: 66335 - DNA, 15 bp, Homo sapiens
attgtccgttaatac

SEQ ID NO: 66336 - DNA, 15 bp, Homo sapiens
ttgtccgttaataca

SEQ ID NO: 66337 - DNA, 15 bp, Homo sapiens
tgtccgttaatacag

SEQ ID NO: 66338 - DNA, 15 bp, Homo sapiens
gtccgttaatacaga

SEQ ID NO: 66339 - DNA, 15 bp, Homo sapiens
tccgttaatacagaa

SEQ ID NO: 66340 - DNA, 15 bp, Homo sapiens
ccgttaatacagaat

SEQ ID NO: 66341 - DNA, 15 bp, Homo sapiens
cgttaatacagaata

SEQ ID NO: 66342 - DNA, 15 bp, Homo sapiens
gttaatacagaatac

SEQ ID NO: 66343 - DNA, 15 bp, Homo sapiens
ttaatacagaataca

SEQ ID NO: 66344 - DNA, 15 bp, Homo sapiens
taatacagaatacag

SEQ ID NO: 66345 - DNA, 15 bp, Homo sapiens
aatacagaatacagt

SEQ ID NO: 66346 - DNA, 15 bp, Homo sapiens
atacagaatacagta

SEQ ID NO: 66347 - DNA, 15 bp, Homo sapiens
tacagaatacagtac

SEQ ID NO: 66348 - DNA, 15 bp, Homo sapiens
acagaatacagtaca

SEQ ID NO: 66349 - DNA, 15 bp, Homo sapiens
cagaatacagtacac

SEQ ID NO: 66350 - DNA, 15 bp, Homo sapiens
agaatacagtacact

SEQ ID NO: 66351 - DNA, 15 bp, Homo sapiens
gaatacagtacactg

SEQ ID NO: 66352 - DNA, 15 bp, Homo sapiens
aatacagtacactgt

SEQ ID NO: 66353 - DNA, 15 bp, Homo sapiens
atacagtacactgtt

SEQ ID NO: 66354 - DNA, 15 bp, Homo sapiens
tacagtacactgtta

SEQ ID NO: 66355 - DNA, 15 bp, Homo sapiens
acagtacactgttag

SEQ ID NO: 66356 - DNA, 15 bp, Homo sapiens
cagtacactgttagt

SEQ ID NO: 66357 - DNA, 15 bp, Homo sapiens
agtacactgttagtg

SEQ ID NO: 66358 - DNA, 15 bp, Homo sapiens
gtacactgttagtgg

SEQ ID NO: 66359 - DNA, 15 bp, Homo sapiens
tacactgttagtgga

SEQ ID NO: 66360 - DNA, 15 bp, Homo sapiens
acactgttagtggat

SEQ ID NO: 66361 - DNA, 15 bp, Homo sapiens
cactgttagtggatt

SEQ ID NO: 66362 - DNA, 15 bp, Homo sapiens
actgttagtggatta

SEQ ID NO: 66363 - DNA, 15 bp, Homo sapiens
ctgttagtggattag

SEQ ID NO: 66364 - DNA, 15 bp, Homo sapiens
tgttagtggattagc

SEQ ID NO: 66365 - DNA, 15 bp, Homo sapiens
gttagtggattagcg

SEQ ID NO: 66366 - DNA, 15 bp, Homo sapiens
ttagtggattagcga

SEQ ID NO: 66367 - DNA, 15 bp, Homo sapiens
tagtggattagcgag

SEQ ID NO: 66368 - DNA, 15 bp, Homo sapiens
agtggattagcgagc

SEQ ID NO: 66369 - DNA, 15 bp, Homo sapiens
gtggattagcgagct

SEQ ID NO: 66370 - DNA, 15 bp, Homo sapiens
tggattagcgagctc

SEQ ID NO: 66371 - DNA, 15 bp, Homo sapiens
ggattagcgagctcg

SEQ ID NO: 66372 - DNA, 15 bp, Homo sapiens
gattagcgagctcgg

SEQ ID NO: 66373 - DNA, 15 bp, Homo sapiens
attagcgagctcggt

SEQ ID NO: 66374 - DNA, 15 bp, Homo sapiens
ttagcgagctcggta

SEQ ID NO: 66375 - DNA, 15 bp, Homo sapiens
tagcgagctcggtaa

SEQ ID NO: 66376 - DNA, 15 bp, Homo sapiens
agcgagctcggtaat

SEQ ID NO: 66377 - DNA, 15 bp, Homo sapiens
gcgagctcggtaatc

SEQ ID NO: 66378 - DNA, 15 bp, Homo sapiens
cgagctcggtaatcc

SEQ ID NO: 66379 - DNA, 15 bp, Homo sapiens
gagctcggtaatccg

SEQ ID NO: 66380 - DNA, 15 bp, Homo sapiens
agctcggtaatccgg

SEQ ID NO: 66381 - DNA, 15 bp, Homo sapiens
gctcggtaatccggt

SEQ ID NO: 66382 - DNA, 15 bp, Homo sapiens
ctcggtaatccggtc

SEQ ID NO: 66383 - DNA, 15 bp, Homo sapiens
tcggtaatccggtct

SEQ ID NO: 66384 - DNA, 15 bp, Homo sapiens
cggtaatccggtctc

SEQ ID NO: 66385 - DNA, 15 bp, Homo sapiens
ggtaatccggtctcc

SEQ ID NO: 66386 - DNA, 15 bp, Homo sapiens
gtaatccggtctcct

SEQ ID NO: 66387 - DNA, 15 bp, Homo sapiens
taatccggtctccta

SEQ ID NO: 66388 - DNA, 15 bp, Homo sapiens
aatccggtctcctaa

SEQ ID NO: 66389 - DNA, 15 bp, Homo sapiens
atccggtctcctaaa

SEQ ID NO: 66390 - DNA, 15 bp, Homo sapiens
tccggtctcctaaat

SEQ ID NO: 66391 - DNA, 15 bp, Homo sapiens
ccggtctcctaaatg

SEQ ID NO: 66392 - DNA, 15 bp, Homo sapiens
cggtctcctaaatga

SEQ ID NO: 66393 - DNA, 15 bp, Homo sapiens
ggtctcctaaatgaa

SEQ ID NO: 66394 - DNA, 15 bp, Homo sapiens
gtctcctaaatgaac

SEQ ID NO: 66395 - DNA, 15 bp, Homo sapiens
tctcctaaatgaaca

SEQ ID NO: 66396 - DNA, 15 bp, Homo sapiens
ctcctaaatgaacaa

SEQ ID NO: 66397 - DNA, 15 bp, Homo sapiens
tcctaaatgaacaaa

SEQ ID NO: 66398 - DNA, 15 bp, Homo sapiens
cctaaatgaacaaaa

SEQ ID NO: 66399 - DNA, 15 bp, Homo sapiens
ctaaatgaacaaaaa

SEQ ID NO: 66400 - DNA, 15 bp, Homo sapiens
taaatgaacaaaaaa

SEQ ID NO: 66401 - DNA, 15 bp, Homo sapiens
aaatgaacaaaaaag

SEQ ID NO: 66402 - DNA, 15 bp, Homo sapiens
aatgaacaaaaaagt

SEQ ID NO: 66403 - DNA, 15 bp, Homo sapiens
atgaacaaaaaagta

SEQ ID NO: 66404 - DNA, 15 bp, Homo sapiens
tgaacaaaaaagtag

SEQ ID NO: 66405 - DNA, 15 bp, Homo sapiens
gaacaaaaaagtaga

SEQ ID NO: 66406 - DNA, 15 bp, Homo sapiens
aacaaaaaagtagac

SEQ ID NO: 66407 - DNA, 15 bp, Homo sapiens
acaaaaaagtagacg

SEQ ID NO: 66408 - DNA, 15 bp, Homo sapiens
caaaaaagtagacgc

SEQ ID NO: 66409 - DNA, 15 bp, Homo sapiens
aaaaaagtagacgct

SEQ ID NO: 66410 - DNA, 15 bp, Homo sapiens
aaaaagtagacgctt

SEQ ID NO: 66411 - DNA, 15 bp, Homo sapiens
aaaagtagacgcttt

SEQ ID NO: 66412 - DNA, 15 bp, Homo sapiens
aaagtagacgctttt

SEQ ID NO: 66413 - DNA, 15 bp, Homo sapiens
aagtagacgcttttt

SEQ ID NO: 66414 - DNA, 15 bp, Homo sapiens
agtagacgctttttg

SEQ ID NO: 66415 - DNA, 15 bp, Homo sapiens
gtagacgctttttga

SEQ ID NO: 66416 - DNA, 15 bp, Homo sapiens
tagacgctttttgag

SEQ ID NO: 66417 - DNA, 15 bp, Homo sapiens
agacgctttttgagg

SEQ ID NO: 66418 - DNA, 15 bp, Homo sapiens
gacgctttttgaggt

SEQ ID NO: 66419 - DNA, 15 bp, Homo sapiens
acgctttttgaggtt

SEQ ID NO: 66420 - DNA, 15 bp, Homo sapiens
cgctttttgaggttg

SEQ ID NO: 66421 - DNA, 15 bp, Homo sapiens
gctttttgaggttga

SEQ ID NO: 66422 - DNA, 15 bp, Homo sapiens
ctttttgaggttgag

SEQ ID NO: 66423 - DNA, 15 bp, Homo sapiens
tttttgaggttgagc

SEQ ID NO: 66424 - DNA, 15 bp, Homo sapiens
ttttgaggttgagca

SEQ ID NO: 66425 - DNA, 15 bp, Homo sapiens
tttgaggttgagcat

SEQ ID NO: 66426 - DNA, 15 bp, Homo sapiens
ttgaggttgagcata

SEQ ID NO: 66427 - DNA, 15 bp, Homo sapiens
tgaggttgagcatat

SEQ ID NO: 66428 - DNA, 15 bp, Homo sapiens
gaggttgagcatatt

SEQ ID NO: 66429 - DNA, 15 bp, Homo sapiens
aggttgagcatattt

SEQ ID NO: 66430 - DNA, 15 bp, Homo sapiens
ggttgagcatatttc

SEQ ID NO: 66431 - DNA, 15 bp, Homo sapiens
gttgagcatatttcg

SEQ ID NO: 66432 - DNA, 15 bp, Homo sapiens
ttgagcatatttcga

SEQ ID NO: 66433 - DNA, 15 bp, Homo sapiens
tgagcatatttcgat

SEQ ID NO: 66434 - DNA, 15 bp, Homo sapiens
gagcatatttcgatt

SEQ ID NO: 66435 - DNA, 15 bp, Homo sapiens
agcatatttcgatta

SEQ ID NO: 66436 - DNA, 15 bp, Homo sapiens
gcatatttcgattaa

SEQ ID NO: 66437 - DNA, 15 bp, Homo sapiens
catatttcgattaaa

SEQ ID NO: 66438 - DNA, 15 bp, Homo sapiens
atatttcgattaaat

SEQ ID NO: 66439 - DNA, 15 bp, Homo sapiens
tatttcgattaaatc

SEQ ID NO: 66440 - DNA, 15 bp, Homo sapiens
atttcgattaaatct

SEQ ID NO: 66441 - DNA, 15 bp, Homo sapiens
tttcgattaaatctt

SEQ ID NO: 66442 - DNA, 15 bp, Homo sapiens
ttcgattaaatcttg

SEQ ID NO: 66443 - DNA, 15 bp, Homo sapiens
tcgattaaatcttgg

SEQ ID NO: 66444 - DNA, 15 bp, Homo sapiens
cgattaaatcttggc

SEQ ID NO: 66445 - DNA, 15 bp, Homo sapiens
gattaaatcttggct

SEQ ID NO: 66446 - DNA, 15 bp, Homo sapiens
attaaatcttggctt

SEQ ID NO: 66447 - DNA, 15 bp, Homo sapiens
ttaaatcttggctta

SEQ ID NO: 66448 - DNA, 15 bp, Homo sapiens
taaatcttggcttag

SEQ ID NO: 66449 - DNA, 15 bp, Homo sapiens
aaatcttggcttagg

SEQ ID NO: 66450 - DNA, 15 bp, Homo sapiens
aatcttggcttaggc

SEQ ID NO: 66451 - DNA, 15 bp, Homo sapiens
atcttggcttaggcc

SEQ ID NO: 66452 - DNA, 15 bp, Homo sapiens
tcttggcttaggccc

SEQ ID NO: 66453 - DNA, 15 bp, Homo sapiens
cttggcttaggccct

SEQ ID NO: 66454 - DNA, 15 bp, Homo sapiens
ttggcttaggcccta

SEQ ID NO: 66455 - DNA, 15 bp, Homo sapiens
tggcttaggccctag

SEQ ID NO: 66456 - DNA, 15 bp, Homo sapiens
ggcttaggccctaga

SEQ ID NO: 66457 - DNA, 15 bp, Homo sapiens
gcttaggccctagat

SEQ ID NO: 66458 - DNA, 15 bp, Homo sapiens
cttaggccctagatc

SEQ ID NO: 66459 - DNA, 15 bp, Homo sapiens
ttaggccctagatca

SEQ ID NO: 66460 - DNA, 15 bp, Homo sapiens
taggccctagatcaa

SEQ ID NO: 66461 - DNA, 15 bp, Homo sapiens
aggccctagatcaag

SEQ ID NO: 66462 - DNA, 15 bp, Homo sapiens
ggccctagatcaagg

SEQ ID NO: 66463 - DNA, 15 bp, Homo sapiens
gccctagatcaaggg

SEQ ID NO: 66464 - DNA, 15 bp, Homo sapiens
ccctagatcaagggt

SEQ ID NO: 66465 - DNA, 15 bp, Homo sapiens
cctagatcaagggtt

SEQ ID NO: 66466 - DNA, 15 bp, Homo sapiens
ctagatcaagggttt

SEQ ID NO: 66467 - DNA, 15 bp, Homo sapiens
tagatcaagggttta

SEQ ID NO: 66468 - DNA, 15 bp, Homo sapiens
agatcaagggtttag

SEQ ID NO: 66469 - DNA, 15 bp, Homo sapiens
gatcaagggtttaga

SEQ ID NO: 66470 - DNA, 15 bp, Homo sapiens
atcaagggtttagat

SEQ ID NO: 66471 - DNA, 15 bp, Homo sapiens
tcaagggtttagatc

SEQ ID NO: 66472 - DNA, 15 bp, Homo sapiens
caagggtttagatca

SEQ ID NO: 66473 - DNA, 15 bp, Homo sapiens
aagggtttagatcag

SEQ ID NO: 66474 - DNA, 15 bp, Homo sapiens
agggtttagatcaga

SEQ ID NO: 66475 - DNA, 15 bp, Homo sapiens
gggtttagatcagaa

SEQ ID NO: 66476 - DNA, 15 bp, Homo sapiens
ggtttagatcagaat

SEQ ID NO: 66477 - DNA, 15 bp, Homo sapiens
gtttagatcagaata

SEQ ID NO: 66478 - DNA, 15 bp, Homo sapiens
tttagatcagaataa

SEQ ID NO: 66479 - DNA, 15 bp, Homo sapiens
ttagatcagaataaa

SEQ ID NO: 66480 - DNA, 15 bp, Homo sapiens
tagatcagaataaaa

SEQ ID NO: 66481 - DNA, 15 bp, Homo sapiens
agatcagaataaaat

SEQ ID NO: 66482 - DNA, 15 bp, Homo sapiens
gatcagaataaaatg

SEQ ID NO: 66483 - DNA, 15 bp, Homo sapiens
atcagaataaaatga

SEQ ID NO: 66484 - DNA, 15 bp, Homo sapiens
tcagaataaaatgaa

SEQ ID NO: 66485 - DNA, 15 bp, Homo sapiens
cagaataaaatgaaa

SEQ ID NO: 66486 - DNA, 15 bp, Homo sapiens
agaataaaatgaaaa

SEQ ID NO: 66487 - DNA, 15 bp, Homo sapiens
gaataaaatgaaaat

SEQ ID NO: 66488 - DNA, 15 bp, Homo sapiens
aataaaatgaaaatt

SEQ ID NO: 66489 - DNA, 15 bp, Homo sapiens
ataaaatgaaaatta

SEQ ID NO: 66490 - DNA, 15 bp, Homo sapiens
taaaatgaaaattag

SEQ ID NO: 66491 - DNA, 15 bp, Homo sapiens
aaaatgaaaattagt

SEQ ID NO: 66492 - DNA, 15 bp, Homo sapiens
aaatgaaaattagtg

SEQ ID NO: 66493 - DNA, 15 bp, Homo sapiens
aatgaaaattagtgt

SEQ ID NO: 66494 - DNA, 15 bp, Homo sapiens
atgaaaattagtgtt

SEQ ID NO: 66495 - DNA, 15 bp, Homo sapiens
tgaaaattagtgttg

SEQ ID NO: 66496 - DNA, 15 bp, Homo sapiens
gaaaattagtgttgc

SEQ ID NO: 66497 - DNA, 15 bp, Homo sapiens
aaaattagtgttgca

SEQ ID NO: 66498 - DNA, 15 bp, Homo sapiens
aaattagtgttgcac

SEQ ID NO: 66499 - DNA, 15 bp, Homo sapiens
aattagtgttgcacg

SEQ ID NO: 66500 - DNA, 15 bp, Homo sapiens
attagtgttgcacgt

SEQ ID NO: 66501 - DNA, 15 bp, Homo sapiens
ttagtgttgcacgta

SEQ ID NO: 66502 - DNA, 15 bp, Homo sapiens
tagtgttgcacgtac

SEQ ID NO: 66503 - DNA, 15 bp, Homo sapiens
agtgttgcacgtacg

SEQ ID NO: 66504 - DNA, 15 bp, Homo sapiens
gtgttgcacgtacgc

SEQ ID NO: 66505 - DNA, 15 bp, Homo sapiens
tgttgcacgtacgca

SEQ ID NO: 66506 - DNA, 15 bp, Homo sapiens
gttgcacgtacgcat

SEQ ID NO: 66507 - DNA, 15 bp, Homo sapiens
ttgcacgtacgcata

SEQ ID NO: 66508 - DNA, 15 bp, Homo sapiens
tgcacgtacgcatat

SEQ ID NO: 66509 - DNA, 15 bp, Homo sapiens
gcacgtacgcatatt

SEQ ID NO: 66510 - DNA, 15 bp, Homo sapiens
cacgtacgcatattg

SEQ ID NO: 66511 - DNA, 15 bp, Homo sapiens
acgtacgcatattgc

SEQ ID NO: 66512 - DNA, 15 bp, Homo sapiens
cgtacgcatattgca

SEQ ID NO: 66513 - DNA, 15 bp, Homo sapiens
gtacgcatattgcat

SEQ ID NO: 66514 - DNA, 15 bp, Homo sapiens
tacgcatattgcatc

SEQ ID NO: 66515 - DNA, 15 bp, Homo sapiens
acgcatattgcatca

SEQ ID NO: 66516 - DNA, 15 bp, Homo sapiens
cgcatattgcatcag

SEQ ID NO: 66517 - DNA, 15 bp, Homo sapiens
gcatattgcatcaga

SEQ ID NO: 66518 - DNA, 15 bp, Homo sapiens
catattgcatcagaa

SEQ ID NO: 66519 - DNA, 15 bp, Homo sapiens
atattgcatcagaat

SEQ ID NO: 66520 - DNA, 15 bp, Homo sapiens
tattgcatcagaatc

SEQ ID NO: 66521 - DNA, 15 bp, Homo sapiens
attgcatcagaatct

SEQ ID NO: 66522 - DNA, 15 bp, Homo sapiens
ttgcatcagaatctt

SEQ ID NO: 66523 - DNA, 15 bp, Homo sapiens
tgcatcagaatcttg

SEQ ID NO: 66524 - DNA, 15 bp, Homo sapiens
gcatcagaatcttgc

SEQ ID NO: 66525 - DNA, 15 bp, Homo sapiens
catcagaatcttgca

SEQ ID NO: 66526 - DNA, 15 bp, Homo sapiens
atcagaatcttgcag

SEQ ID NO: 66527 - DNA, 15 bp, Homo sapiens
tcagaatcttgcagt

SEQ ID NO: 66528 - DNA, 15 bp, Homo sapiens
cagaatcttgcagtg

SEQ ID NO: 66529 - DNA, 15 bp, Homo sapiens
agaatcttgcagtga

SEQ ID NO: 66530 - DNA, 15 bp, Homo sapiens
gaatcttgcagtgat

SEQ ID NO: 66531 - DNA, 15 bp, Homo sapiens
aatcttgcagtgatt

SEQ ID NO: 66532 - DNA, 15 bp, Homo sapiens
atcttgcagtgattg

SEQ ID NO: 66533 - DNA, 15 bp, Homo sapiens
tcttgcagtgattgt

SEQ ID NO: 66534 - DNA, 15 bp, Homo sapiens
cttgcagtgattgtt

SEQ ID NO: 66535 - DNA, 15 bp, Homo sapiens
ttgcagtgattgttt

SEQ ID NO: 66536 - DNA, 15 bp, Homo sapiens
tgcagtgattgtttt

SEQ ID NO: 66537 - DNA, 15 bp, Homo sapiens
gcagtgattgtttta

SEQ ID NO: 66538 - DNA, 15 bp, Homo sapiens
cagtgattgttttag

SEQ ID NO: 66539 - DNA, 15 bp, Homo sapiens
agtgattgttttagt

SEQ ID NO: 66540 - DNA, 15 bp, Homo sapiens
gtgattgttttagtt

SEQ ID NO: 66541 - DNA, 15 bp, Homo sapiens
tgattgttttagttt

SEQ ID NO: 66542 - DNA, 15 bp, Homo sapiens
gattgttttagtttc

SEQ ID NO: 66543 - DNA, 15 bp, Homo sapiens
attgttttagtttcc

SEQ ID NO: 66544 - DNA, 15 bp, Homo sapiens
ttgttttagtttcct

SEQ ID NO: 66545 - DNA, 15 bp, Homo sapiens
tgttttagtttcctg

SEQ ID NO: 66546 - DNA, 15 bp, Homo sapiens
gttttagtttcctga

SEQ ID NO: 66547 - DNA, 15 bp, Homo sapiens
ttttagtttcctgag

SEQ ID NO: 66548 - DNA, 15 bp, Homo sapiens
tttagtttcctgagt

SEQ ID NO: 66549 - DNA, 15 bp, Homo sapiens
ttagtttcctgagtt

SEQ ID NO: 66550 - DNA, 15 bp, Homo sapiens
tagtttcctgagttg

SEQ ID NO: 66551 - DNA, 15 bp, Homo sapiens
agtttcctgagttgc

SEQ ID NO: 66552 - DNA, 15 bp, Homo sapiens
gtttcctgagttgca

SEQ ID NO: 66553 - DNA, 15 bp, Homo sapiens
tttcctgagttgcat

SEQ ID NO: 66554 - DNA, 15 bp, Homo sapiens
ttcctgagttgcatt

SEQ ID NO: 66555 - DNA, 15 bp, Homo sapiens
tcctgagttgcattg

SEQ ID NO: 66556 - DNA, 15 bp, Homo sapiens
cctgagttgcattga

SEQ ID NO: 66557 - DNA, 15 bp, Homo sapiens
ctgagttgcattgat

SEQ ID NO: 66558 - DNA, 15 bp, Homo sapiens
tgagttgcattgata

SEQ ID NO: 66559 - DNA, 15 bp, Homo sapiens
gagttgcattgatag

SEQ ID NO: 66560 - DNA, 15 bp, Homo sapiens
agttgcattgataga

SEQ ID NO: 66561 - DNA, 15 bp, Homo sapiens
gttgcattgatagat

SEQ ID NO: 66562 - DNA, 15 bp, Homo sapiens
ttgcattgatagatt

SEQ ID NO: 66563 - DNA, 15 bp, Homo sapiens
tgcattgatagattc

SEQ ID NO: 66564 - DNA, 15 bp, Homo sapiens
gcattgatagattct

SEQ ID NO: 66565 - DNA, 15 bp, Homo sapiens
cattgatagattctt

SEQ ID NO: 66566 - DNA, 15 bp, Homo sapiens
attgatagattcttt

SEQ ID NO: 66567 - DNA, 15 bp, Homo sapiens
ttgatagattctttt

SEQ ID NO: 66568 - DNA, 15 bp, Homo sapiens
tgatagattctttta

SEQ ID NO: 66569 - DNA, 15 bp, Homo sapiens
gatagattcttttaa

SEQ ID NO: 66570 - DNA, 15 bp, Homo sapiens
atagattcttttaaa

SEQ ID NO: 66571 - DNA, 15 bp, Homo sapiens
tagattcttttaaaa

SEQ ID NO: 66572 - DNA, 15 bp, Homo sapiens
agattcttttaaaat

SEQ ID NO: 66573 - DNA, 15 bp, Homo sapiens
gattcttttaaaata

SEQ ID NO: 66574 - DNA, 15 bp, Homo sapiens
attcttttaaaatat

SEQ ID NO: 66575 - DNA, 15 bp, Homo sapiens
ttcttttaaaatatg

SEQ ID NO: 66576 - DNA, 15 bp, Homo sapiens
tcttttaaaatatga

SEQ ID NO: 66577 - DNA, 15 bp, Homo sapiens
cttttaaaatatgac

SEQ ID NO: 66578 - DNA, 15 bp, Homo sapiens
ttttaaaatatgact

SEQ ID NO: 66579 - DNA, 15 bp, Homo sapiens
tttaaaatatgactg

SEQ ID NO: 66580 - DNA, 15 bp, Homo sapiens
ttaaaatatgactga

SEQ ID NO: 66581 - DNA, 15 bp, Homo sapiens
taaaatatgactgat

SEQ ID NO: 66582 - DNA, 15 bp, Homo sapiens
aaaatatgactgatt

SEQ ID NO: 66583 - DNA, 15 bp, Homo sapiens
aaatatgactgattt

SEQ ID NO: 66584 - DNA, 15 bp, Homo sapiens
aatatgactgatttg

SEQ ID NO: 66585 - DNA, 15 bp, Homo sapiens
atatgactgatttgc

SEQ ID NO: 66586 - DNA, 15 bp, Homo sapiens
tatgactgatttgca

SEQ ID NO: 66587 - DNA, 15 bp, Homo sapiens
atgactgatttgcat

SEQ ID NO: 66588 - DNA, 15 bp, Homo sapiens
tgactgatttgcata

SEQ ID NO: 66589 - DNA, 15 bp, Homo sapiens
gactgatttgcataa

SEQ ID NO: 66590 - DNA, 15 bp, Homo sapiens
actgatttgcataac

SEQ ID NO: 66591 - DNA, 15 bp, Homo sapiens
ctgatttgcataact

SEQ ID NO: 66592 - DNA, 15 bp, Homo sapiens
tgatttgcataactt

SEQ ID NO: 66593 - DNA, 15 bp, Homo sapiens
gatttgcataacttt

SEQ ID NO: 66594 - DNA, 15 bp, Homo sapiens
atttgcataacttta

SEQ ID NO: 66595 - DNA, 15 bp, Homo sapiens
tttgcataactttag

SEQ ID NO: 66596 - DNA, 15 bp, Homo sapiens
ttgcataactttaga

SEQ ID NO: 66597 - DNA, 15 bp, Homo sapiens
tgcataactttagaa

SEQ ID NO: 66598 - DNA, 15 bp, Homo sapiens
gcataactttagaag

SEQ ID NO: 66599 - DNA, 15 bp, Homo sapiens
cataactttagaagc

SEQ ID NO: 66600 - DNA, 15 bp, Homo sapiens
ataactttagaagca

SEQ ID NO: 66601 - DNA, 15 bp, Homo sapiens
taactttagaagcag

SEQ ID NO: 66602 - DNA, 15 bp, Homo sapiens
aactttagaagcaga

SEQ ID NO: 66603 - DNA, 15 bp, Homo sapiens
actttagaagcagaa

SEQ ID NO: 66604 - DNA, 15 bp, Homo sapiens
ctttagaagcagaat

SEQ ID NO: 66605 - DNA, 15 bp, Homo sapiens
tttagaagcagaatc

SEQ ID NO: 66606 - DNA, 15 bp, Homo sapiens
ttagaagcagaatca

SEQ ID NO: 66607 - DNA, 15 bp, Homo sapiens
tagaagcagaatcat

SEQ ID NO: 66608 - DNA, 15 bp, Homo sapiens
agaagcagaatcatt

SEQ ID NO: 66609 - DNA, 15 bp, Homo sapiens
gaagcagaatcattt

SEQ ID NO: 66610 - DNA, 15 bp, Homo sapiens
aagcagaatcatttt

SEQ ID NO: 66611 - DNA, 15 bp, Homo sapiens
agcagaatcattttc

SEQ ID NO: 66612 - DNA, 15 bp, Homo sapiens
gcagaatcattttca

SEQ ID NO: 66613 - DNA, 15 bp, Homo sapiens
cagaatcattttcag

SEQ ID NO: 66614 - DNA, 15 bp, Homo sapiens
agaatcattttcagt

SEQ ID NO: 66615 - DNA, 15 bp, Homo sapiens
gaatcattttcagta

SEQ ID NO: 66616 - DNA, 15 bp, Homo sapiens
aatcattttcagtat

SEQ ID NO: 66617 - DNA, 15 bp, Homo sapiens
atcattttcagtata

SEQ ID NO: 66618 - DNA, 15 bp, Homo sapiens
tcattttcagtatat

SEQ ID NO: 66619 - DNA, 15 bp, Homo sapiens
cattttcagtatata

SEQ ID NO: 66620 - DNA, 15 bp, Homo sapiens
attttcagtatatat

SEQ ID NO: 66621 - DNA, 15 bp, Homo sapiens
ttttcagtatatatg

SEQ ID NO: 66622 - DNA, 15 bp, Homo sapiens
tttcagtatatatgg

SEQ ID NO: 66623 - DNA, 15 bp, Homo sapiens
ttcagtatatatggt

SEQ ID NO: 66624 - DNA, 15 bp, Homo sapiens
tcagtatatatggtg

SEQ ID NO: 66625 - DNA, 15 bp, Homo sapiens
cagtatatatggtgc

SEQ ID NO: 66626 - DNA, 15 bp, Homo sapiens
agtatatatggtgca

SEQ ID NO: 66627 - DNA, 15 bp, Homo sapiens
gtatatatggtgcac

SEQ ID NO: 66628 - DNA, 15 bp, Homo sapiens
tatatatggtgcaca

SEQ ID NO: 66629 - DNA, 15 bp, Homo sapiens
atatatggtgcacat

SEQ ID NO: 66630 - DNA, 15 bp, Homo sapiens
tatatggtgcacatt

SEQ ID NO: 66631 - DNA, 15 bp, Homo sapiens
atatggtgcacattg

SEQ ID NO: 66632 - DNA, 15 bp, Homo sapiens
tatggtgcacattga

SEQ ID NO: 66633 - DNA, 15 bp, Homo sapiens
atggtgcacattgag

SEQ ID NO: 66634 - DNA, 15 bp, Homo sapiens
tggtgcacattgagg

SEQ ID NO: 66635 - DNA, 15 bp, Homo sapiens
ggtgcacattgaggg

SEQ ID NO: 66636 - DNA, 15 bp, Homo sapiens
gtgcacattgagggc

SEQ ID NO: 66637 - DNA, 15 bp, Homo sapiens
tgcacattgagggca

SEQ ID NO: 66638 - DNA, 15 bp, Homo sapiens
gcacattgagggcaa

SEQ ID NO: 66639 - DNA, 15 bp, Homo sapiens
cacattgagggcaaa

SEQ ID NO: 66640 - DNA, 15 bp, Homo sapiens
acattgagggcaaaa

SEQ ID NO: 66641 - DNA, 15 bp, Homo sapiens
cattgagggcaaaaa

SEQ ID NO: 66642 - DNA, 15 bp, Homo sapiens
attgagggcaaaaag

SEQ ID NO: 66643 - DNA, 15 bp, Homo sapiens
ttgagggcaaaaagt

SEQ ID NO: 66644 - DNA, 15 bp, Homo sapiens
tgagggcaaaaagta

SEQ ID NO: 66645 - DNA, 15 bp, Homo sapiens
gagggcaaaaagtag

SEQ ID NO: 66646 - DNA, 15 bp, Homo sapiens
agggcaaaaagtagt

SEQ ID NO: 66647 - DNA, 15 bp, Homo sapiens
gggcaaaaagtagtt

SEQ ID NO: 66648 - DNA, 15 bp, Homo sapiens
ggcaaaaagtagttt

SEQ ID NO: 66649 - DNA, 15 bp, Homo sapiens
gcaaaaagtagtttt

SEQ ID NO: 66650 - DNA, 15 bp, Homo sapiens
caaaaagtagttttg

SEQ ID NO: 66651 - DNA, 15 bp, Homo sapiens
aaaaagtagttttgt

SEQ ID NO: 66652 - DNA, 15 bp, Homo sapiens
aaaagtagttttgtt

SEQ ID NO: 66653 - DNA, 15 bp, Homo sapiens
aaagtagttttgtta

SEQ ID NO: 66654 - DNA, 15 bp, Homo sapiens
aagtagttttgttaa

SEQ ID NO: 66655 - DNA, 15 bp, Homo sapiens
agtagttttgttaat

SEQ ID NO: 66656 - DNA, 15 bp, Homo sapiens
gtagttttgttaatg

SEQ ID NO: 66657 - DNA, 15 bp, Homo sapiens
tagttttgttaatgt

SEQ ID NO: 66658 - DNA, 15 bp, Homo sapiens
agttttgttaatgtt

SEQ ID NO: 66659 - DNA, 15 bp, Homo sapiens
gttttgttaatgttt

SEQ ID NO: 66660 - DNA, 15 bp, Homo sapiens
ttttgttaatgttta

SEQ ID NO: 66661 - DNA, 15 bp, Homo sapiens
tttgttaatgtttaa

SEQ ID NO: 66662 - DNA, 15 bp, Homo sapiens
ttgttaatgtttaaa

SEQ ID NO: 66663 - DNA, 15 bp, Homo sapiens
tgttaatgtttaaac

SEQ ID NO: 66664 - DNA, 15 bp, Homo sapiens
gttaatgtttaaact

SEQ ID NO: 66665 - DNA, 15 bp, Homo sapiens
ttaatgtttaaactt

SEQ ID NO: 66666 - DNA, 15 bp, Homo sapiens
taatgtttaaactta

SEQ ID NO: 66667 - DNA, 15 bp, Homo sapiens
aatgtttaaacttaa

SEQ ID NO: 66668 - DNA, 15 bp, Homo sapiens
atgtttaaacttaag

SEQ ID NO: 66669 - DNA, 15 bp, Homo sapiens
tgtttaaacttaagt

SEQ ID NO: 66670 - DNA, 15 bp, Homo sapiens
gtttaaacttaagtt

SEQ ID NO: 66671 - DNA, 15 bp, Homo sapiens
tttaaacttaagtta

SEQ ID NO: 66672 - DNA, 15 bp, Homo sapiens
ttaaacttaagttac

SEQ ID NO: 66673 - DNA, 15 bp, Homo sapiens
taaacttaagttacc

SEQ ID NO: 66674 - DNA, 15 bp, Homo sapiens
aaacttaagttacct

SEQ ID NO: 66675 - DNA, 15 bp, Homo sapiens
aacttaagttaccta

SEQ ID NO: 66676 - DNA, 15 bp, Homo sapiens
acttaagttacctac

SEQ ID NO: 66677 - DNA, 15 bp, Homo sapiens
cttaagttacctaca

SEQ ID NO: 66678 - DNA, 15 bp, Homo sapiens
ttaagttacctacaa

SEQ ID NO: 66679 - DNA, 15 bp, Homo sapiens
taagttacctacaac

SEQ ID NO: 66680 - DNA, 15 bp, Homo sapiens
aagttacctacaact

SEQ ID NO: 66681 - DNA, 15 bp, Homo sapiens
agttacctacaactt

SEQ ID NO: 66682 - DNA, 15 bp, Homo sapiens
gttacctacaacttt

SEQ ID NO: 66683 - DNA, 15 bp, Homo sapiens
ttacctacaactttg

SEQ ID NO: 66684 - DNA, 15 bp, Homo sapiens
tacctacaactttga

SEQ ID NO: 66685 - DNA, 15 bp, Homo sapiens
acctacaactttgaa

SEQ ID NO: 66686 - DNA, 15 bp, Homo sapiens
cctacaactttgaac

SEQ ID NO: 66687 - DNA, 15 bp, Homo sapiens
ctacaactttgaact

SEQ ID NO: 66688 - DNA, 15 bp, Homo sapiens
tacaactttgaactg

SEQ ID NO: 66689 - DNA, 15 bp, Homo sapiens
acaactttgaactgt

SEQ ID NO: 66690 - DNA, 15 bp, Homo sapiens
caactttgaactgta

SEQ ID NO: 66691 - DNA, 15 bp, Homo sapiens
aactttgaactgtat

SEQ ID NO: 66692 - DNA, 15 bp, Homo sapiens
actttgaactgtatg

SEQ ID NO: 66693 - DNA, 15 bp, Homo sapiens
ctttgaactgtatgt

SEQ ID NO: 66694 - DNA, 15 bp, Homo sapiens
tttgaactgtatgta

SEQ ID NO: 66695 - DNA, 15 bp, Homo sapiens
ttgaactgtatgtag

SEQ ID NO: 66696 - DNA, 15 bp, Homo sapiens
tgaactgtatgtaga

SEQ ID NO: 66697 - DNA, 15 bp, Homo sapiens
gaactgtatgtagaa

SEQ ID NO: 66698 - DNA, 15 bp, Homo sapiens
aactgtatgtagaag

SEQ ID NO: 66699 - DNA, 15 bp, Homo sapiens
actgtatgtagaagt

SEQ ID NO: 66700 - DNA, 15 bp, Homo sapiens
ctgtatgtagaagtt

SEQ ID NO: 66701 - DNA, 15 bp, Homo sapiens
tgtatgtagaagttt

SEQ ID NO: 66702 - DNA, 15 bp, Homo sapiens
gtatgtagaagtttt

SEQ ID NO: 66703 - DNA, 15 bp, Homo sapiens
tatgtagaagttttg

SEQ ID NO: 66704 - DNA, 15 bp, Homo sapiens
atgtagaagttttgt

SEQ ID NO: 66705 - DNA, 15 bp, Homo sapiens
tgtagaagttttgta

SEQ ID NO: 66706 - DNA, 15 bp, Homo sapiens
gtagaagttttgtag

SEQ ID NO: 66707 - DNA, 15 bp, Homo sapiens
tagaagttttgtagt

SEQ ID NO: 66708 - DNA, 15 bp, Homo sapiens
agaagttttgtagtt

SEQ ID NO: 66709 - DNA, 15 bp, Homo sapiens
gaagttttgtagttt

SEQ ID NO: 66710 - DNA, 15 bp, Homo sapiens
aagttttgtagtttg

SEQ ID NO: 66711 - DNA, 15 bp, Homo sapiens
agttttgtagtttga

SEQ ID NO: 66712 - DNA, 15 bp, Homo sapiens
gttttgtagtttgaa

SEQ ID NO: 66713 - DNA, 15 bp, Homo sapiens
ttttgtagtttgaag

SEQ ID NO: 66714 - DNA, 15 bp, Homo sapiens
tttgtagtttgaagt

SEQ ID NO: 66715 - DNA, 15 bp, Homo sapiens
ttgtagtttgaagtc

SEQ ID NO: 66716 - DNA, 15 bp, Homo sapiens
tgtagtttgaagtca

SEQ ID NO: 66717 - DNA, 15 bp, Homo sapiens
gtagtttgaagtcaa

SEQ ID NO: 66718 - DNA, 15 bp, Homo sapiens
tagtttgaagtcaat

SEQ ID NO: 66719 - DNA, 15 bp, Homo sapiens
agtttgaagtcaata

SEQ ID NO: 66720 - DNA, 15 bp, Homo sapiens
gtttgaagtcaatag

SEQ ID NO: 66721 - DNA, 15 bp, Homo sapiens
tttgaagtcaatagt

SEQ ID NO: 66722 - DNA, 15 bp, Homo sapiens
ttgaagtcaatagtg

SEQ ID NO: 66723 - DNA, 15 bp, Homo sapiens
tgaagtcaatagtgc

SEQ ID NO: 66724 - DNA, 15 bp, Homo sapiens
gaagtcaatagtgcc

SEQ ID NO: 66725 - DNA, 15 bp, Homo sapiens
aagtcaatagtgcca

SEQ ID NO: 66726 - DNA, 15 bp, Homo sapiens
agtcaatagtgccat

SEQ ID NO: 66727 - DNA, 15 bp, Homo sapiens
gtcaatagtgccata

SEQ ID NO: 66728 - DNA, 15 bp, Homo sapiens
tcaatagtgccataa

SEQ ID NO: 66729 - DNA, 15 bp, Homo sapiens
caatagtgccataat

SEQ ID NO: 66730 - DNA, 15 bp, Homo sapiens
aatagtgccataata

SEQ ID NO: 66731 - DNA, 15 bp, Homo sapiens
atagtgccataatat

SEQ ID NO: 66732 - DNA, 15 bp, Homo sapiens
tagtgccataatata

SEQ ID NO: 66733 - DNA, 15 bp, Homo sapiens
agtgccataatatac

SEQ ID NO: 66734 - DNA, 15 bp, Homo sapiens
gtgccataatatacc

SEQ ID NO: 66735 - DNA, 15 bp, Homo sapiens
tgccataatatacct

SEQ ID NO: 66736 - DNA, 15 bp, Homo sapiens
gccataatatacctt

SEQ ID NO: 66737 - DNA, 15 bp, Homo sapiens
ccataatatacctta

SEQ ID NO: 66738 - DNA, 15 bp, Homo sapiens
cataatataccttat

SEQ ID NO: 66739 - DNA, 15 bp, Homo sapiens
ataatataccttata

SEQ ID NO: 66740 - DNA, 15 bp, Homo sapiens
taatataccttataa

SEQ ID NO: 66741 - DNA, 15 bp, Homo sapiens
aatataccttataag

SEQ ID NO: 66742 - DNA, 15 bp, Homo sapiens
atataccttataagg

SEQ ID NO: 66743 - DNA, 15 bp, Homo sapiens
tataccttataaggc

SEQ ID NO: 66744 - DNA, 15 bp, Homo sapiens
ataccttataaggcg

SEQ ID NO: 66745 - DNA, 15 bp, Homo sapiens
taccttataaggcgt

SEQ ID NO: 66746 - DNA, 15 bp, Homo sapiens
accttataaggcgtt

SEQ ID NO: 66747 - DNA, 15 bp, Homo sapiens
ccttataaggcgttc

SEQ ID NO: 66748 - DNA, 15 bp, Homo sapiens
cttataaggcgttct

SEQ ID NO: 66749 - DNA, 15 bp, Homo sapiens
ttataaggcgttctt

SEQ ID NO: 66750 - DNA, 15 bp, Homo sapiens
tataaggcgttctta

SEQ ID NO: 66751 - DNA, 15 bp, Homo sapiens
ataaggcgttcttac

SEQ ID NO: 66752 - DNA, 15 bp, Homo sapiens
taaggcgttcttact

SEQ ID NO: 66753 - DNA, 15 bp, Homo sapiens
aaggcgttcttacta

SEQ ID NO: 66754 - DNA, 15 bp, Homo sapiens
aggcgttcttactag

SEQ ID NO: 66755 - DNA, 15 bp, Homo sapiens
ggcgttcttactaga

SEQ ID NO: 66756 - DNA, 15 bp, Homo sapiens
gcgttcttactagat

SEQ ID NO: 66757 - DNA, 15 bp, Homo sapiens
cgttcttactagatc

SEQ ID NO: 66758 - DNA, 15 bp, Homo sapiens
gttcttactagatct

SEQ ID NO: 66759 - DNA, 15 bp, Homo sapiens
ttcttactagatctt

SEQ ID NO: 66760 - DNA, 15 bp, Homo sapiens
tcttactagatcttt

SEQ ID NO: 66761 - DNA, 15 bp, Homo sapiens
cttactagatctttg

SEQ ID NO: 66762 - DNA, 15 bp, Homo sapiens
ttactagatctttgt

SEQ ID NO: 66763 - DNA, 15 bp, Homo sapiens
tactagatctttgtt

SEQ ID NO: 66764 - DNA, 15 bp, Homo sapiens
actagatctttgtta

SEQ ID NO: 66765 - DNA, 15 bp, Homo sapiens
ctagatctttgttat

SEQ ID NO: 66766 - DNA, 15 bp, Homo sapiens
tagatctttgttata

SEQ ID NO: 66767 - DNA, 15 bp, Homo sapiens
agatctttgttatat

SEQ ID NO: 66768 - DNA, 15 bp, Homo sapiens
gatctttgttatatt

SEQ ID NO: 66769 - DNA, 15 bp, Homo sapiens
atctttgttatattt

SEQ ID NO: 66770 - DNA, 15 bp, Homo sapiens
tctttgttatattta

SEQ ID NO: 66771 - DNA, 15 bp, Homo sapiens
ctttgttatatttac

SEQ ID NO: 66772 - DNA, 15 bp, Homo sapiens
tttgttatatttacc

SEQ ID NO: 66773 - DNA, 15 bp, Homo sapiens
ttgttatatttacct

SEQ ID NO: 66774 - DNA, 15 bp, Homo sapiens
tgttatatttacctt

SEQ ID NO: 66775 - DNA, 15 bp, Homo sapiens
gttatatttaccttt

SEQ ID NO: 66776 - DNA, 15 bp, Homo sapiens
ttatatttacctttt

SEQ ID NO: 66777 - DNA, 15 bp, Homo sapiens
tatatttaccttttt

SEQ ID NO: 66778 - DNA, 15 bp, Homo sapiens
atatttacctttttc

SEQ ID NO: 66779 - DNA, 15 bp, Homo sapiens
tatttacctttttct

SEQ ID NO: 66780 - DNA, 15 bp, Homo sapiens
atttacctttttctc

SEQ ID NO: 66781 - DNA, 15 bp, Homo sapiens
tttacctttttctct

SEQ ID NO: 66782 - DNA, 15 bp, Homo sapiens
ttacctttttctctc

SEQ ID NO: 66783 - DNA, 15 bp, Homo sapiens
tacctttttctctcc

SEQ ID NO: 66784 - DNA, 15 bp, Homo sapiens
acctttttctctccc

SEQ ID NO: 66785 - DNA, 15 bp, Homo sapiens
cctttttctctccct

SEQ ID NO: 66786 - DNA, 15 bp, Homo sapiens
ctttttctctcccta

SEQ ID NO: 66787 - DNA, 15 bp, Homo sapiens
tttttctctccctat

SEQ ID NO: 66788 - DNA, 15 bp, Homo sapiens
ttttctctccctatg

SEQ ID NO: 66789 - DNA, 15 bp, Homo sapiens
tttctctccctatgg

SEQ ID NO: 66790 - DNA, 15 bp, Homo sapiens
ttctctccctatggg

SEQ ID NO: 66791 - DNA, 15 bp, Homo sapiens
tctctccctatgggg

SEQ ID NO: 66792 - DNA, 15 bp, Homo sapiens
ctctccctatggggt

SEQ ID NO: 66793 - DNA, 15 bp, Homo sapiens
tctccctatggggtg

SEQ ID NO: 66794 - DNA, 15 bp, Homo sapiens
ctccctatggggtga

SEQ ID NO: 66795 - DNA, 15 bp, Homo sapiens
tccctatggggtgat

SEQ ID NO: 66796 - DNA, 15 bp, Homo sapiens
ccctatggggtgatg

SEQ ID NO: 66797 - DNA, 15 bp, Homo sapiens
cctatggggtgatgt

SEQ ID NO: 66798 - DNA, 15 bp, Homo sapiens
ctatggggtgatgta

SEQ ID NO: 66799 - DNA, 15 bp, Homo sapiens
tatggggtgatgtag

SEQ ID NO: 66800 - DNA, 15 bp, Homo sapiens
atggggtgatgtagg

SEQ ID NO: 66801 - DNA, 15 bp, Homo sapiens
tggggtgatgtagga

SEQ ID NO: 66802 - DNA, 15 bp, Homo sapiens
ggggtgatgtaggat

SEQ ID NO: 66803 - DNA, 15 bp, Homo sapiens
gggtgatgtaggata

SEQ ID NO: 66804 - DNA, 15 bp, Homo sapiens
ggtgatgtaggatag

SEQ ID NO: 66805 - DNA, 15 bp, Homo sapiens
gtgatgtaggatagt

SEQ ID NO: 66806 - DNA, 15 bp, Homo sapiens
tgatgtaggatagtg

SEQ ID NO: 66807 - DNA, 15 bp, Homo sapiens
gatgtaggatagtgc

SEQ ID NO: 66808 - DNA, 15 bp, Homo sapiens
atgtaggatagtgct

SEQ ID NO: 66809 - DNA, 15 bp, Homo sapiens
tgtaggatagtgctt

SEQ ID NO: 66810 - DNA, 15 bp, Homo sapiens
gtaggatagtgcttg

SEQ ID NO: 66811 - DNA, 15 bp, Homo sapiens
taggatagtgcttga

SEQ ID NO: 66812 - DNA, 15 bp, Homo sapiens
aggatagtgcttgaa

SEQ ID NO: 66813 - DNA, 15 bp, Homo sapiens
ggatagtgcttgaaa

SEQ ID NO: 66814 - DNA, 15 bp, Homo sapiens
gatagtgcttgaaat

SEQ ID NO: 66815 - DNA, 15 bp, Homo sapiens
atagtgcttgaaatt

SEQ ID NO: 66816 - DNA, 15 bp, Homo sapiens
tagtgcttgaaattt

SEQ ID NO: 66817 - DNA, 15 bp, Homo sapiens
agtgcttgaaatttg

SEQ ID NO: 66818 - DNA, 15 bp, Homo sapiens
gtgcttgaaatttgc

SEQ ID NO: 66819 - DNA, 15 bp, Homo sapiens
tgcttgaaatttgca

SEQ ID NO: 66820 - DNA, 15 bp, Homo sapiens
gcttgaaatttgcac

SEQ ID NO: 66821 - DNA, 15 bp, Homo sapiens
cttgaaatttgcact

SEQ ID NO: 66822 - DNA, 15 bp, Homo sapiens
ttgaaatttgcactt

SEQ ID NO: 66823 - DNA, 15 bp, Homo sapiens
tgaaatttgcacttc

SEQ ID NO: 66824 - DNA, 15 bp, Homo sapiens
gaaatttgcacttca

SEQ ID NO: 66825 - DNA, 15 bp, Homo sapiens
aaatttgcacttcag

SEQ ID NO: 66826 - DNA, 15 bp, Homo sapiens
aatttgcacttcagt

SEQ ID NO: 66827 - DNA, 15 bp, Homo sapiens
atttgcacttcagta

SEQ ID NO: 66828 - DNA, 15 bp, Homo sapiens
tttgcacttcagtag

SEQ ID NO: 66829 - DNA, 15 bp, Homo sapiens
ttgcacttcagtagc

SEQ ID NO: 66830 - DNA, 15 bp, Homo sapiens
tgcacttcagtagca

SEQ ID NO: 66831 - DNA, 15 bp, Homo sapiens
gcacttcagtagcat

SEQ ID NO: 66832 - DNA, 15 bp, Homo sapiens
cacttcagtagcatt

SEQ ID NO: 66833 - DNA, 15 bp, Homo sapiens
acttcagtagcattt

SEQ ID NO: 66834 - DNA, 15 bp, Homo sapiens
cttcagtagcattta

SEQ ID NO: 66835 - DNA, 15 bp, Homo sapiens
ttcagtagcatttaa

SEQ ID NO: 66836 - DNA, 15 bp, Homo sapiens
tcagtagcatttaat

SEQ ID NO: 66837 - DNA, 15 bp, Homo sapiens
cagtagcatttaatg

SEQ ID NO: 66838 - DNA, 15 bp, Homo sapiens
agtagcatttaatgt

SEQ ID NO: 66839 - DNA, 15 bp, Homo sapiens
gtagcatttaatgtt

SEQ ID NO: 66840 - DNA, 15 bp, Homo sapiens
tagcatttaatgttc

SEQ ID NO: 66841 - DNA, 15 bp, Homo sapiens
agcatttaatgttca

SEQ ID NO: 66842 - DNA, 15 bp, Homo sapiens
gcatttaatgttcag

SEQ ID NO: 66843 - DNA, 15 bp, Homo sapiens
catttaatgttcagt

SEQ ID NO: 66844 - DNA, 15 bp, Homo sapiens
atttaatgttcagtg

SEQ ID NO: 66845 - DNA, 15 bp, Homo sapiens
tttaatgttcagtgc

SEQ ID NO: 66846 - DNA, 15 bp, Homo sapiens
ttaatgttcagtgct

SEQ ID NO: 66847 - DNA, 15 bp, Homo sapiens
taatgttcagtgctc

SEQ ID NO: 66848 - DNA, 15 bp, Homo sapiens
aatgttcagtgctct

SEQ ID NO: 66849 - DNA, 15 bp, Homo sapiens
atgttcagtgctctt

SEQ ID NO: 66850 - DNA, 15 bp, Homo sapiens
tgttcagtgctcttg

SEQ ID NO: 66851 - DNA, 15 bp, Homo sapiens
gttcagtgctcttgt

SEQ ID NO: 66852 - DNA, 15 bp, Homo sapiens
ttcagtgctcttgtc

SEQ ID NO: 66853 - DNA, 15 bp, Homo sapiens
tcagtgctcttgtca

SEQ ID NO: 66854 - DNA, 15 bp, Homo sapiens
cagtgctcttgtcat

SEQ ID NO: 66855 - DNA, 15 bp, Homo sapiens
agtgctcttgtcata

SEQ ID NO: 66856 - DNA, 15 bp, Homo sapiens
gtgctcttgtcataa

SEQ ID NO: 66857 - DNA, 15 bp, Homo sapiens
tgctcttgtcataaa

SEQ ID NO: 66858 - DNA, 15 bp, Homo sapiens
gctcttgtcataaac

SEQ ID NO: 66859 - DNA, 15 bp, Homo sapiens
ctcttgtcataaaca

SEQ ID NO: 66860 - DNA, 15 bp, Homo sapiens
tcttgtcataaacat

SEQ ID NO: 66861 - DNA, 15 bp, Homo sapiens
cttgtcataaacata

SEQ ID NO: 66862 - DNA, 15 bp, Homo sapiens
ttgtcataaacatag

SEQ ID NO: 66863 - DNA, 15 bp, Homo sapiens
tgtcataaacataga

SEQ ID NO: 66864 - DNA, 15 bp, Homo sapiens
gtcataaacatagaa

SEQ ID NO: 66865 - DNA, 15 bp, Homo sapiens
tcataaacatagaat

SEQ ID NO: 66866 - DNA, 15 bp, Homo sapiens
cataaacatagaatg

SEQ ID NO: 66867 - DNA, 15 bp, Homo sapiens
ataaacatagaatgg

SEQ ID NO: 66868 - DNA, 15 bp, Homo sapiens
taaacatagaatgga

SEQ ID NO: 66869 - DNA, 15 bp, Homo sapiens
aaacatagaatggat

SEQ ID NO: 66870 - DNA, 15 bp, Homo sapiens
aacatagaatggata

SEQ ID NO: 66871 - DNA, 15 bp, Homo sapiens
acatagaatggatat

SEQ ID NO: 66872 - DNA, 15 bp, Homo sapiens
catagaatggatatt

SEQ ID NO: 66873 - DNA, 15 bp, Homo sapiens
atagaatggatattg

SEQ ID NO: 66874 - DNA, 15 bp, Homo sapiens
tagaatggatattga

SEQ ID NO: 66875 - DNA, 15 bp, Homo sapiens
agaatggatattgag

SEQ ID NO: 66876 - DNA, 15 bp, Homo sapiens
gaatggatattgagt

SEQ ID NO: 66877 - DNA, 15 bp, Homo sapiens
aatggatattgagta

SEQ ID NO: 66878 - DNA, 15 bp, Homo sapiens
atggatattgagtag

SEQ ID NO: 66879 - DNA, 15 bp, Homo sapiens
tggatattgagtagt

SEQ ID NO: 66880 - DNA, 15 bp, Homo sapiens
ggatattgagtagtt

SEQ ID NO: 66881 - DNA, 15 bp, Homo sapiens
gatattgagtagttt

SEQ ID NO: 66882 - DNA, 15 bp, Homo sapiens
atattgagtagtttc

SEQ ID NO: 66883 - DNA, 15 bp, Homo sapiens
tattgagtagtttct

SEQ ID NO: 66884 - DNA, 15 bp, Homo sapiens
attgagtagtttctg

SEQ ID NO: 66885 - DNA, 15 bp, Homo sapiens
ttgagtagtttctga

SEQ ID NO: 66886 - DNA, 15 bp, Homo sapiens
tgagtagtttctgat

SEQ ID NO: 66887 - DNA, 15 bp, Homo sapiens
gagtagtttctgatc

SEQ ID NO: 66888 - DNA, 15 bp, Homo sapiens
agtagtttctgatcc

SEQ ID NO: 66889 - DNA, 15 bp, Homo sapiens
gtagtttctgatccc

SEQ ID NO: 66890 - DNA, 15 bp, Homo sapiens
tagtttctgatccca

SEQ ID NO: 66891 - DNA, 15 bp, Homo sapiens
agtttctgatcccag

SEQ ID NO: 66892 - DNA, 15 bp, Homo sapiens
gtttctgatcccaga

SEQ ID NO: 66893 - DNA, 15 bp, Homo sapiens
tttctgatcccagat

SEQ ID NO: 66894 - DNA, 15 bp, Homo sapiens
ttctgatcccagatg

SEQ ID NO: 66895 - DNA, 15 bp, Homo sapiens
tctgatcccagatgg

SEQ ID NO: 66896 - DNA, 15 bp, Homo sapiens
ctgatcccagatggt

SEQ ID NO: 66897 - DNA, 15 bp, Homo sapiens
tgatcccagatggta

SEQ ID NO: 66898 - DNA, 15 bp, Homo sapiens
gatcccagatggtaa

SEQ ID NO: 66899 - DNA, 15 bp, Homo sapiens
atcccagatggtaat

SEQ ID NO: 66900 - DNA, 15 bp, Homo sapiens
tcccagatggtaatg

SEQ ID NO: 66901 - DNA, 15 bp, Homo sapiens
cccagatggtaatgt

SEQ ID NO: 66902 - DNA, 15 bp, Homo sapiens
ccagatggtaatgtg

SEQ ID NO: 66903 - DNA, 15 bp, Homo sapiens
cagatggtaatgtgt

SEQ ID NO: 66904 - DNA, 15 bp, Homo sapiens
agatggtaatgtgta

SEQ ID NO: 66905 - DNA, 15 bp, Homo sapiens
gatggtaatgtgtag

SEQ ID NO: 66906 - DNA, 15 bp, Homo sapiens
atggtaatgtgtagg

SEQ ID NO: 66907 - DNA, 15 bp, Homo sapiens
tggtaatgtgtaggt

SEQ ID NO: 66908 - DNA, 15 bp, Homo sapiens
ggtaatgtgtaggtt

SEQ ID NO: 66909 - DNA, 15 bp, Homo sapiens
gtaatgtgtaggttc

SEQ ID NO: 66910 - DNA, 15 bp, Homo sapiens
taatgtgtaggttca

SEQ ID NO: 66911 - DNA, 15 bp, Homo sapiens
aatgtgtaggttcaa

SEQ ID NO: 66912 - DNA, 15 bp, Homo sapiens
atgtgtaggttcaag

SEQ ID NO: 66913 - DNA, 15 bp, Homo sapiens
tgtgtaggttcaagg

SEQ ID NO: 66914 - DNA, 15 bp, Homo sapiens
gtgtaggttcaaggg

SEQ ID NO: 66915 - DNA, 15 bp, Homo sapiens
tgtaggttcaagggt

SEQ ID NO: 66916 - DNA, 15 bp, Homo sapiens
gtaggttcaagggta

SEQ ID NO: 66917 - DNA, 15 bp, Homo sapiens
taggttcaagggtat

SEQ ID NO: 66918 - DNA, 15 bp, Homo sapiens
aggttcaagggtatt

SEQ ID NO: 66919 - DNA, 15 bp, Homo sapiens
ggttcaagggtattg

SEQ ID NO: 66920 - DNA, 15 bp, Homo sapiens
gttcaagggtattgt

SEQ ID NO: 66921 - DNA, 15 bp, Homo sapiens
ttcaagggtattgtg

SEQ ID NO: 66922 - DNA, 15 bp, Homo sapiens
tcaagggtattgtgt

SEQ ID NO: 66923 - DNA, 15 bp, Homo sapiens
caagggtattgtgtg

SEQ ID NO: 66924 - DNA, 15 bp, Homo sapiens
aagggtattgtgtgt

SEQ ID NO: 66925 - DNA, 15 bp, Homo sapiens
agggtattgtgtgta

SEQ ID NO: 66926 - DNA, 15 bp, Homo sapiens
gggtattgtgtgtag

SEQ ID NO: 66927 - DNA, 15 bp, Homo sapiens
ggtattgtgtgtagc

SEQ ID NO: 66928 - DNA, 15 bp, Homo sapiens
gtattgtgtgtagca

SEQ ID NO: 66929 - DNA, 15 bp, Homo sapiens
tattgtgtgtagcaa

SEQ ID NO: 66930 - DNA, 15 bp, Homo sapiens
attgtgtgtagcaag

SEQ ID NO: 66931 - DNA, 15 bp, Homo sapiens
ttgtgtgtagcaagt

SEQ ID NO: 66932 - DNA, 15 bp, Homo sapiens
tgtgtgtagcaagtg

SEQ ID NO: 66933 - DNA, 15 bp, Homo sapiens
gtgtgtagcaagtga

SEQ ID NO: 66934 - DNA, 15 bp, Homo sapiens
tgtgtagcaagtgaa

SEQ ID NO: 66935 - DNA, 15 bp, Homo sapiens
gtgtagcaagtgaag

SEQ ID NO: 66936 - DNA, 15 bp, Homo sapiens
tgtagcaagtgaaga

SEQ ID NO: 66937 - DNA, 15 bp, Homo sapiens
gtagcaagtgaagat

SEQ ID NO: 66938 - DNA, 15 bp, Homo sapiens
tagcaagtgaagatt

SEQ ID NO: 66939 - DNA, 15 bp, Homo sapiens
agcaagtgaagattg

SEQ ID NO: 66940 - DNA, 15 bp, Homo sapiens
gcaagtgaagattgc

SEQ ID NO: 66941 - DNA, 15 bp, Homo sapiens
caagtgaagattgca

SEQ ID NO: 66942 - DNA, 15 bp, Homo sapiens
aagtgaagattgcag

SEQ ID NO: 66943 - DNA, 15 bp, Homo sapiens
agtgaagattgcaga

SEQ ID NO: 66944 - DNA, 15 bp, Homo sapiens
gtgaagattgcagaa

SEQ ID NO: 66945 - DNA, 15 bp, Homo sapiens
tgaagattgcagaaa

SEQ ID NO: 66946 - DNA, 15 bp, Homo sapiens
gaagattgcagaaat

SEQ ID NO: 66947 - DNA, 15 bp, Homo sapiens
aagattgcagaaata

SEQ ID NO: 66948 - DNA, 15 bp, Homo sapiens
agattgcagaaataa

SEQ ID NO: 66949 - DNA, 15 bp, Homo sapiens
gattgcagaaataaa

SEQ ID NO: 66950 - DNA, 15 bp, Homo sapiens
attgcagaaataaaa

SEQ ID NO: 66951 - DNA, 15 bp, Homo sapiens
ttgcagaaataaaac

SEQ ID NO: 66952 - DNA, 15 bp, Homo sapiens
tgcagaaataaaact

SEQ ID NO: 66953 - DNA, 15 bp, Homo sapiens
gcagaaataaaactt

SEQ ID NO: 66954 - DNA, 15 bp, Homo sapiens
cagaaataaaacttc

SEQ ID NO: 66955 - DNA, 15 bp, Homo sapiens
agaaataaaacttca

SEQ ID NO: 66956 - DNA, 15 bp, Homo sapiens
gaaataaaacttcag

SEQ ID NO: 66957 - DNA, 15 bp, Homo sapiens
aaataaaacttcagt

SEQ ID NO: 66958 - DNA, 15 bp, Homo sapiens
aataaaacttcagtt

SEQ ID NO: 66959 - DNA, 15 bp, Homo sapiens
ataaaacttcagttc

SEQ ID NO: 66960 - DNA, 15 bp, Homo sapiens
taaaacttcagttca

SEQ ID NO: 66961 - DNA, 15 bp, Homo sapiens
aaaacttcagttcat

SEQ ID NO: 66962 - DNA, 15 bp, Homo sapiens
aaacttcagttcatg

SEQ ID NO: 66963 - DNA, 15 bp, Homo sapiens
aacttcagttcatgc

SEQ ID NO: 66964 - DNA, 15 bp, Homo sapiens
acttcagttcatgct

SEQ ID NO: 66965 - DNA, 15 bp, Homo sapiens
cttcagttcatgctt

SEQ ID NO: 66966 - DNA, 15 bp, Homo sapiens
ttcagttcatgcttg

SEQ ID NO: 66967 - DNA, 15 bp, Homo sapiens
tcagttcatgcttga

SEQ ID NO: 66968 - DNA, 15 bp, Homo sapiens
cagttcatgcttgaa

SEQ ID NO: 66969 - DNA, 15 bp, Homo sapiens
agttcatgcttgaaa

SEQ ID NO: 66970 - DNA, 15 bp, Homo sapiens
gttcatgcttgaaat

SEQ ID NO: 66971 - DNA, 15 bp, Homo sapiens
ttcatgcttgaaatt

SEQ ID NO: 66972 - DNA, 15 bp, Homo sapiens
tcatgcttgaaattt

SEQ ID NO: 66973 - DNA, 15 bp, Homo sapiens
catgcttgaaattta

SEQ ID NO: 66974 - DNA, 15 bp, Homo sapiens
atgcttgaaatttaa

SEQ ID NO: 66975 - DNA, 15 bp, Homo sapiens
tgcttgaaatttaag

SEQ ID NO: 66976 - DNA, 15 bp, Homo sapiens
gcttgaaatttaagt

SEQ ID NO: 66977 - DNA, 15 bp, Homo sapiens
cttgaaatttaagta

SEQ ID NO: 66978 - DNA, 15 bp, Homo sapiens
ttgaaatttaagtat

SEQ ID NO: 66979 - DNA, 15 bp, Homo sapiens
tgaaatttaagtatt

SEQ ID NO: 66980 - DNA, 15 bp, Homo sapiens
gaaatttaagtattg

SEQ ID NO: 66981 - DNA, 15 bp, Homo sapiens
aaatttaagtattgt

SEQ ID NO: 66982 - DNA, 15 bp, Homo sapiens
aatttaagtattgtt

SEQ ID NO: 66983 - DNA, 15 bp, Homo sapiens
atttaagtattgttg

SEQ ID NO: 66984 - DNA, 15 bp, Homo sapiens
tttaagtattgttgt

SEQ ID NO: 66985 - DNA, 15 bp, Homo sapiens
ttaagtattgttgtg

SEQ ID NO: 66986 - DNA, 15 bp, Homo sapiens
taagtattgttgtga

SEQ ID NO: 66987 - DNA, 15 bp, Homo sapiens
aagtattgttgtgat

SEQ ID NO: 66988 - DNA, 15 bp, Homo sapiens
agtattgttgtgatg

SEQ ID NO: 66989 - DNA, 15 bp, Homo sapiens
gtattgttgtgatgc

SEQ ID NO: 66990 - DNA, 15 bp, Homo sapiens
tattgttgtgatgcc

SEQ ID NO: 66991 - DNA, 15 bp, Homo sapiens
attgttgtgatgcca

SEQ ID NO: 66992 - DNA, 15 bp, Homo sapiens
ttgttgtgatgccag

SEQ ID NO: 66993 - DNA, 15 bp, Homo sapiens
tgttgtgatgccaga

SEQ ID NO: 66994 - DNA, 15 bp, Homo sapiens
gttgtgatgccagaa

SEQ ID NO: 66995 - DNA, 15 bp, Homo sapiens
ttgtgatgccagaat

SEQ ID NO: 66996 - DNA, 15 bp, Homo sapiens
tgtgatgccagaatt

SEQ ID NO: 66997 - DNA, 15 bp, Homo sapiens
gtgatgccagaattg

SEQ ID NO: 66998 - DNA, 15 bp, Homo sapiens
tgatgccagaattgc

SEQ ID NO: 66999 - DNA, 15 bp, Homo sapiens
gatgccagaattgct

SEQ ID NO: 67000 - DNA, 15 bp, Homo sapiens
atgccagaattgctg

SEQ ID NO: 67001 - DNA, 15 bp, Homo sapiens
tgccagaattgctgc

SEQ ID NO: 67002 - DNA, 15 bp, Homo sapiens
gccagaattgctgct

SEQ ID NO: 67003 - DNA, 15 bp, Homo sapiens
ccagaattgctgctc

SEQ ID NO: 67004 - DNA, 15 bp, Homo sapiens
cagaattgctgctca

SEQ ID NO: 67005 - DNA, 15 bp, Homo sapiens
agaattgctgctcac

SEQ ID NO: 67006 - DNA, 15 bp, Homo sapiens
gaattgctgctcacc

SEQ ID NO: 67007 - DNA, 15 bp, Homo sapiens
aattgctgctcaccg

SEQ ID NO: 67008 - DNA, 15 bp, Homo sapiens
attgctgctcaccgt

SEQ ID NO: 67009 - DNA, 15 bp, Homo sapiens
ttgctgctcaccgtt

SEQ ID NO: 67010 - DNA, 15 bp, Homo sapiens
tgctgctcaccgttt

SEQ ID NO: 67011 - DNA, 15 bp, Homo sapiens
gctgctcaccgtttt

SEQ ID NO: 67012 - DNA, 15 bp, Homo sapiens
ctgctcaccgttttt

SEQ ID NO: 67013 - DNA, 15 bp, Homo sapiens
tgctcaccgttttta

SEQ ID NO: 67014 - DNA, 15 bp, Homo sapiens
gctcaccgtttttag

SEQ ID NO: 67015 - DNA, 15 bp, Homo sapiens
ctcaccgtttttagg

SEQ ID NO: 67016 - DNA, 15 bp, Homo sapiens
tcaccgtttttaggt

SEQ ID NO: 67017 - DNA, 15 bp, Homo sapiens
caccgtttttaggtt

SEQ ID NO: 67018 - DNA, 15 bp, Homo sapiens
accgtttttaggttt

SEQ ID NO: 67019 - DNA, 15 bp, Homo sapiens
ccgtttttaggtttc

SEQ ID NO: 67020 - DNA, 15 bp, Homo sapiens
cgtttttaggtttca

SEQ ID NO: 67021 - DNA, 15 bp, Homo sapiens
gtttttaggtttcag

SEQ ID NO: 67022 - DNA, 15 bp, Homo sapiens
tttttaggtttcagg

SEQ ID NO: 67023 - DNA, 15 bp, Homo sapiens
ttttaggtttcaggt

SEQ ID NO: 67024 - DNA, 15 bp, Homo sapiens
tttaggtttcaggtc

SEQ ID NO: 67025 - DNA, 15 bp, Homo sapiens
ttaggtttcaggtcc

SEQ ID NO: 67026 - DNA, 15 bp, Homo sapiens
taggtttcaggtcct

SEQ ID NO: 67027 - DNA, 15 bp, Homo sapiens
aggtttcaggtcctc

SEQ ID NO: 67028 - DNA, 15 bp, Homo sapiens
ggtttcaggtcctct

SEQ ID NO: 67029 - DNA, 15 bp, Homo sapiens
gtttcaggtcctctg

SEQ ID NO: 67030 - DNA, 15 bp, Homo sapiens
tttcaggtcctctga

SEQ ID NO: 67031 - DNA, 15 bp, Homo sapiens
ttcaggtcctctgac

SEQ ID NO: 67032 - DNA, 15 bp, Homo sapiens
tcaggtcctctgaca

SEQ ID NO: 67033 - DNA, 15 bp, Homo sapiens
caggtcctctgacac

SEQ ID NO: 67034 - DNA, 15 bp, Homo sapiens
aggtcctctgacacc

SEQ ID NO: 67035 - DNA, 15 bp, Homo sapiens
ggtcctctgacacct

SEQ ID NO: 67036 - DNA, 15 bp, Homo sapiens
gtcctctgacacctt

SEQ ID NO: 67037 - DNA, 15 bp, Homo sapiens
tcctctgacaccttt

SEQ ID NO: 67038 - DNA, 15 bp, Homo sapiens
cctctgacacctttt

SEQ ID NO: 67039 - DNA, 15 bp, Homo sapiens
ctctgacaccttttg

SEQ ID NO: 67040 - DNA, 15 bp, Homo sapiens
tctgacaccttttgg

SEQ ID NO: 67041 - DNA, 15 bp, Homo sapiens
ctgacaccttttggt

SEQ ID NO: 67042 - DNA, 15 bp, Homo sapiens
tgacaccttttggta

SEQ ID NO: 67043 - DNA, 15 bp, Homo sapiens
gacaccttttggtat

SEQ ID NO: 67044 - DNA, 15 bp, Homo sapiens
acaccttttggtatc

SEQ ID NO: 67045 - DNA, 15 bp, Homo sapiens
caccttttggtatcg

SEQ ID NO: 67046 - DNA, 15 bp, Homo sapiens
accttttggtatcgt

SEQ ID NO: 67047 - DNA, 15 bp, Homo sapiens
ccttttggtatcgtt

SEQ ID NO: 67048 - DNA, 15 bp, Homo sapiens
cttttggtatcgtta

SEQ ID NO: 67049 - DNA, 15 bp, Homo sapiens
ttttggtatcgttaa

SEQ ID NO: 67050 - DNA, 15 bp, Homo sapiens
tttggtatcgttaat

SEQ ID NO: 67051 - DNA, 15 bp, Homo sapiens
ttggtatcgttaatt

SEQ ID NO: 67052 - DNA, 15 bp, Homo sapiens
tggtatcgttaattt

SEQ ID NO: 67053 - DNA, 15 bp, Homo sapiens
ggtatcgttaatttt

SEQ ID NO: 67054 - DNA, 15 bp, Homo sapiens
gtatcgttaatttta

SEQ ID NO: 67055 - DNA, 15 bp, Homo sapiens
tatcgttaattttac

SEQ ID NO: 67056 - DNA, 15 bp, Homo sapiens
atcgttaattttact

SEQ ID NO: 67057 - DNA, 15 bp, Homo sapiens
tcgttaattttactg

SEQ ID NO: 67058 - DNA, 15 bp, Homo sapiens
cgttaattttactga

SEQ ID NO: 67059 - DNA, 15 bp, Homo sapiens
gttaattttactgat

SEQ ID NO: 67060 - DNA, 15 bp, Homo sapiens
ttaattttactgatt

SEQ ID NO: 67061 - DNA, 15 bp, Homo sapiens
taattttactgattt

SEQ ID NO: 67062 - DNA, 15 bp, Homo sapiens
aattttactgatttg

SEQ ID NO: 67063 - DNA, 15 bp, Homo sapiens
attttactgatttgt

SEQ ID NO: 67064 - DNA, 15 bp, Homo sapiens
ttttactgatttgtg

SEQ ID NO: 67065 - DNA, 15 bp, Homo sapiens
tttactgatttgtgt

SEQ ID NO: 67066 - DNA, 15 bp, Homo sapiens
ttactgatttgtgta

SEQ ID NO: 67067 - DNA, 15 bp, Homo sapiens
tactgatttgtgtag

SEQ ID NO: 67068 - DNA, 15 bp, Homo sapiens
actgatttgtgtaga

SEQ ID NO: 67069 - DNA, 15 bp, Homo sapiens
ctgatttgtgtagaa

SEQ ID NO: 67070 - DNA, 15 bp, Homo sapiens
tgatttgtgtagaat

SEQ ID NO: 67071 - DNA, 15 bp, Homo sapiens
gatttgtgtagaatg

SEQ ID NO: 67072 - DNA, 15 bp, Homo sapiens
atttgtgtagaatgt

SEQ ID NO: 67073 - DNA, 15 bp, Homo sapiens
tttgtgtagaatgtc

SEQ ID NO: 67074 - DNA, 15 bp, Homo sapiens
ttgtgtagaatgtca

SEQ ID NO: 67075 - DNA, 15 bp, Homo sapiens
tgtgtagaatgtcag

SEQ ID NO: 67076 - DNA, 15 bp, Homo sapiens
gtgtagaatgtcagt

SEQ ID NO: 67077 - DNA, 15 bp, Homo sapiens
tgtagaatgtcagtt

SEQ ID NO: 67078 - DNA, 15 bp, Homo sapiens
gtagaatgtcagttg

SEQ ID NO: 67079 - DNA, 15 bp, Homo sapiens
tagaatgtcagttgt

SEQ ID NO: 67080 - DNA, 15 bp, Homo sapiens
agaatgtcagttgta

SEQ ID NO: 67081 - DNA, 15 bp, Homo sapiens
gaatgtcagttgtat

SEQ ID NO: 67082 - DNA, 15 bp, Homo sapiens
aatgtcagttgtatt

SEQ ID NO: 67083 - DNA, 15 bp, Homo sapiens
atgtcagttgtattt

SEQ ID NO: 67084 - DNA, 15 bp, Homo sapiens
tgtcagttgtatttt

SEQ ID NO: 67085 - DNA, 15 bp, Homo sapiens
gtcagttgtatttta

SEQ ID NO: 67086 - DNA, 15 bp, Homo sapiens
tcagttgtattttac

SEQ ID NO: 67087 - DNA, 15 bp, Homo sapiens
cagttgtattttacc

SEQ ID NO: 67088 - DNA, 15 bp, Homo sapiens
agttgtattttacca

SEQ ID NO: 67089 - DNA, 15 bp, Homo sapiens
gttgtattttaccag

SEQ ID NO: 67090 - DNA, 15 bp, Homo sapiens
ttgtattttaccagc

SEQ ID NO: 67091 - DNA, 15 bp, Homo sapiens
tgtattttaccagct

SEQ ID NO: 67092 - DNA, 15 bp, Homo sapiens
gtattttaccagcta

SEQ ID NO: 67093 - DNA, 15 bp, Homo sapiens
tattttaccagctaa

SEQ ID NO: 67094 - DNA, 15 bp, Homo sapiens
attttaccagctaat

SEQ ID NO: 67095 - DNA, 15 bp, Homo sapiens
ttttaccagctaata

SEQ ID NO: 67096 - DNA, 15 bp, Homo sapiens
tttaccagctaatat

SEQ ID NO: 67097 - DNA, 15 bp, Homo sapiens
ttaccagctaatatc

SEQ ID NO: 67098 - DNA, 15 bp, Homo sapiens
taccagctaatatct

SEQ ID NO: 67099 - DNA, 15 bp, Homo sapiens
accagctaatatcta

SEQ ID NO: 67100 - DNA, 15 bp, Homo sapiens
ccagctaatatctag

SEQ ID NO: 67101 - DNA, 15 bp, Homo sapiens
cagctaatatctaga

SEQ ID NO: 67102 - DNA, 15 bp, Homo sapiens
agctaatatctagaa

SEQ ID NO: 67103 - DNA, 15 bp, Homo sapiens
gctaatatctagaaa

SEQ ID NO: 67104 - DNA, 15 bp, Homo sapiens
ctaatatctagaaat

SEQ ID NO: 67105 - DNA, 15 bp, Homo sapiens
taatatctagaaatg

SEQ ID NO: 67106 - DNA, 15 bp, Homo sapiens
aatatctagaaatgc

SEQ ID NO: 67107 - DNA, 15 bp, Homo sapiens
atatctagaaatgct

SEQ ID NO: 67108 - DNA, 15 bp, Homo sapiens
tatctagaaatgctg

SEQ ID NO: 67109 - DNA, 15 bp, Homo sapiens
atctagaaatgctgg

SEQ ID NO: 67110 - DNA, 15 bp, Homo sapiens
tctagaaatgctggc

SEQ ID NO: 67111 - DNA, 15 bp, Homo sapiens
ctagaaatgctggca

SEQ ID NO: 67112 - DNA, 15 bp, Homo sapiens
tagaaatgctggcaa

SEQ ID NO: 67113 - DNA, 15 bp, Homo sapiens
agaaatgctggcaag

SEQ ID NO: 67114 - DNA, 15 bp, Homo sapiens
gaaatgctggcaaga

SEQ ID NO: 67115 - DNA, 15 bp, Homo sapiens
aaatgctggcaagag

SEQ ID NO: 67116 - DNA, 15 bp, Homo sapiens
aatgctggcaagagg

SEQ ID NO: 67117 - DNA, 15 bp, Homo sapiens
atgctggcaagaggg

SEQ ID NO: 67118 - DNA, 15 bp, Homo sapiens
tgctggcaagagggg

SEQ ID NO: 67119 - DNA, 15 bp, Homo sapiens
gctggcaagaggggt

SEQ ID NO: 67120 - DNA, 15 bp, Homo sapiens
ctggcaagaggggtt

SEQ ID NO: 67121 - DNA, 15 bp, Homo sapiens
tggcaagaggggttt

SEQ ID NO: 67122 - DNA, 15 bp, Homo sapiens
ggcaagaggggttta

SEQ ID NO: 67123 - DNA, 15 bp, Homo sapiens
gcaagaggggtttac

SEQ ID NO: 67124 - DNA, 15 bp, Homo sapiens
caagaggggtttact

SEQ ID NO: 67125 - DNA, 15 bp, Homo sapiens
aagaggggtttactc

SEQ ID NO: 67126 - DNA, 15 bp, Homo sapiens
agaggggtttactcc

SEQ ID NO: 67127 - DNA, 15 bp, Homo sapiens
gaggggtttactcca

SEQ ID NO: 67128 - DNA, 15 bp, Homo sapiens
aggggtttactccag

SEQ ID NO: 67129 - DNA, 15 bp, Homo sapiens
ggggtttactccagc

SEQ ID NO: 67130 - DNA, 15 bp, Homo sapiens
gggtttactccagct

SEQ ID NO: 67131 - DNA, 15 bp, Homo sapiens
ggtttactccagctt

SEQ ID NO: 67132 - DNA, 15 bp, Homo sapiens
gtttactccagcttt

SEQ ID NO: 67133 - DNA, 15 bp, Homo sapiens
tttactccagcttta

SEQ ID NO: 67134 - DNA, 15 bp, Homo sapiens
ttactccagctttag

SEQ ID NO: 67135 - DNA, 15 bp, Homo sapiens
tactccagctttaga

SEQ ID NO: 67136 - DNA, 15 bp, Homo sapiens
actccagctttagat

SEQ ID NO: 67137 - DNA, 15 bp, Homo sapiens
ctccagctttagatt

SEQ ID NO: 67138 - DNA, 15 bp, Homo sapiens
tccagctttagattg

SEQ ID NO: 67139 - DNA, 15 bp, Homo sapiens
ccagctttagattgt

SEQ ID NO: 67140 - DNA, 15 bp, Homo sapiens
cagctttagattgta

SEQ ID NO: 67141 - DNA, 15 bp, Homo sapiens
agctttagattgtag

SEQ ID NO: 67142 - DNA, 15 bp, Homo sapiens
gctttagattgtagg

SEQ ID NO: 67143 - DNA, 15 bp, Homo sapiens
ctttagattgtaggt

SEQ ID NO: 67144 - DNA, 15 bp, Homo sapiens
tttagattgtaggta

SEQ ID NO: 67145 - DNA, 15 bp, Homo sapiens
ttagattgtaggtat

SEQ ID NO: 67146 - DNA, 15 bp, Homo sapiens
tagattgtaggtatg

SEQ ID NO: 67147 - DNA, 15 bp, Homo sapiens
agattgtaggtatgt

SEQ ID NO: 67148 - DNA, 15 bp, Homo sapiens
gattgtaggtatgtt

SEQ ID NO: 67149 - DNA, 15 bp, Homo sapiens
attgtaggtatgtta

SEQ ID NO: 67150 - DNA, 15 bp, Homo sapiens
ttgtaggtatgttag

SEQ ID NO: 67151 - DNA, 15 bp, Homo sapiens
tgtaggtatgttagc

SEQ ID NO: 67152 - DNA, 15 bp, Homo sapiens
gtaggtatgttagct

SEQ ID NO: 67153 - DNA, 15 bp, Homo sapiens
taggtatgttagctt

SEQ ID NO: 67154 - DNA, 15 bp, Homo sapiens
aggtatgttagcttt

SEQ ID NO: 67155 - DNA, 15 bp, Homo sapiens
ggtatgttagctttt

SEQ ID NO: 67156 - DNA, 15 bp, Homo sapiens
gtatgttagcttttt

SEQ ID NO: 67157 - DNA, 15 bp, Homo sapiens
tatgttagctttttt

SEQ ID NO: 67158 - DNA, 15 bp, Homo sapiens
atgttagcttttttc

SEQ ID NO: 67159 - DNA, 15 bp, Homo sapiens
tgttagcttttttca

SEQ ID NO: 67160 - DNA, 15 bp, Homo sapiens
gttagcttttttcat

SEQ ID NO: 67161 - DNA, 15 bp, Homo sapiens
ttagcttttttcata

SEQ ID NO: 67162 - DNA, 15 bp, Homo sapiens
tagcttttttcatac

SEQ ID NO: 67163 - DNA, 15 bp, Homo sapiens
agcttttttcataca

SEQ ID NO: 67164 - DNA, 15 bp, Homo sapiens
gcttttttcatacag

SEQ ID NO: 67165 - DNA, 15 bp, Homo sapiens
cttttttcatacagt

SEQ ID NO: 67166 - DNA, 15 bp, Homo sapiens
ttttttcatacagtg

SEQ ID NO: 67167 - DNA, 15 bp, Homo sapiens
tttttcatacagtgt

SEQ ID NO: 67168 - DNA, 15 bp, Homo sapiens
ttttcatacagtgta

SEQ ID NO: 67169 - DNA, 15 bp, Homo sapiens
tttcatacagtgtat

SEQ ID NO: 67170 - DNA, 15 bp, Homo sapiens
ttcatacagtgtatt

SEQ ID NO: 67171 - DNA, 15 bp, Homo sapiens
tcatacagtgtatta

SEQ ID NO: 67172 - DNA, 15 bp, Homo sapiens
catacagtgtattaa

SEQ ID NO: 67173 - DNA, 15 bp, Homo sapiens
atacagtgtattaaa

SEQ ID NO: 67174 - DNA, 15 bp, Homo sapiens
tacagtgtattaaat

SEQ ID NO: 67175 - DNA, 15 bp, Homo sapiens
acagtgtattaaatt

SEQ ID NO: 67176 - DNA, 15 bp, Homo sapiens
cagtgtattaaattt

SEQ ID NO: 67177 - DNA, 15 bp, Homo sapiens
agtgtattaaattta

SEQ ID NO: 67178 - DNA, 15 bp, Homo sapiens
gtgtattaaatttac

SEQ ID NO: 67179 - DNA, 15 bp, Homo sapiens
tgtattaaatttact

SEQ ID NO: 67180 - DNA, 15 bp, Homo sapiens
gtattaaatttactg

SEQ ID NO: 67181 - DNA, 15 bp, Homo sapiens
tattaaatttactga

SEQ ID NO: 67182 - DNA, 15 bp, Homo sapiens
attaaatttactgag

SEQ ID NO: 67183 - DNA, 15 bp, Homo sapiens
ttaaatttactgagt

SEQ ID NO: 67184 - DNA, 15 bp, Homo sapiens
taaatttactgagtc

SEQ ID NO: 67185 - DNA, 15 bp, Homo sapiens
aaatttactgagtca

SEQ ID NO: 67186 - DNA, 15 bp, Homo sapiens
aatttactgagtcag

SEQ ID NO: 67187 - DNA, 15 bp, Homo sapiens
atttactgagtcagc

SEQ ID NO: 67188 - DNA, 15 bp, Homo sapiens
tttactgagtcagct

SEQ ID NO: 67189 - DNA, 15 bp, Homo sapiens
ttactgagtcagctt

SEQ ID NO: 67190 - DNA, 15 bp, Homo sapiens
tactgagtcagcttg

SEQ ID NO: 67191 - DNA, 15 bp, Homo sapiens
actgagtcagcttgc

SEQ ID NO: 67192 - DNA, 15 bp, Homo sapiens
ctgagtcagcttgct

SEQ ID NO: 67193 - DNA, 15 bp, Homo sapiens
tgagtcagcttgctg

SEQ ID NO: 67194 - DNA, 15 bp, Homo sapiens
gagtcagcttgctga

SEQ ID NO: 67195 - DNA, 15 bp, Homo sapiens
agtcagcttgctgaa

SEQ ID NO: 67196 - DNA, 15 bp, Homo sapiens
gtcagcttgctgaat

SEQ ID NO: 67197 - DNA, 15 bp, Homo sapiens
tcagcttgctgaata

SEQ ID NO: 67198 - DNA, 15 bp, Homo sapiens
cagcttgctgaataa

SEQ ID NO: 67199 - DNA, 15 bp, Homo sapiens
agcttgctgaataag

SEQ ID NO: 67200 - DNA, 15 bp, Homo sapiens
gcttgctgaataaga

SEQ ID NO: 67201 - DNA, 15 bp, Homo sapiens
cttgctgaataagac

SEQ ID NO: 67202 - DNA, 15 bp, Homo sapiens
ttgctgaataagaca

SEQ ID NO: 67203 - DNA, 15 bp, Homo sapiens
tgctgaataagacag

SEQ ID NO: 67204 - DNA, 15 bp, Homo sapiens
gctgaataagacaga

SEQ ID NO: 67205 - DNA, 15 bp, Homo sapiens
ctgaataagacagaa

SEQ ID NO: 67206 - DNA, 15 bp, Homo sapiens
gaataagacagaagc

SEQ ID NO: 67207 - DNA, 15 bp, Homo sapiens
aataagacagaagcc

SEQ ID NO: 67208 - DNA, 15 bp, Homo sapiens
ataagacagaagccc

SEQ ID NO: 67209 - DNA, 15 bp, Homo sapiens
taagacagaagccca

SEQ ID NO: 67210 - DNA, 15 bp, Homo sapiens
aagacagaagcccaa

SEQ ID NO: 67211 - DNA, 15 bp, Homo sapiens
agacagaagcccaag

SEQ ID NO: 67212 - DNA, 15 bp, Homo sapiens
gacagaagcccaaga

SEQ ID NO: 67213 - DNA, 15 bp, Homo sapiens
acagaagcccaagaa

SEQ ID NO: 67214 - DNA, 15 bp, Homo sapiens
cagaagcccaagaat

SEQ ID NO: 67215 - DNA, 15 bp, Homo sapiens
agaagcccaagaatt

SEQ ID NO: 67216 - DNA, 15 bp, Homo sapiens
gaagcccaagaattt

SEQ ID NO: 67217 - DNA, 15 bp, Homo sapiens
aagcccaagaatttt

SEQ ID NO: 67218 - DNA, 15 bp, Homo sapiens
agcccaagaatttta

SEQ ID NO: 67219 - DNA, 15 bp, Homo sapiens
gcccaagaattttaa

SEQ ID NO: 67220 - DNA, 15 bp, Homo sapiens
cccaagaattttaac

SEQ ID NO: 67221 - DNA, 15 bp, Homo sapiens
ccaagaattttaaca

SEQ ID NO: 67222 - DNA, 15 bp, Homo sapiens
caagaattttaacag

SEQ ID NO: 67223 - DNA, 15 bp, Homo sapiens
aagaattttaacagt

SEQ ID NO: 67224 - DNA, 15 bp, Homo sapiens
agaattttaacagtg

SEQ ID NO: 67225 - DNA, 15 bp, Homo sapiens
gaattttaacagtgt

SEQ ID NO: 67226 - DNA, 15 bp, Homo sapiens
aattttaacagtgtg

SEQ ID NO: 67227 - DNA, 15 bp, Homo sapiens
attttaacagtgtgt

SEQ ID NO: 67228 - DNA, 15 bp, Homo sapiens
ttttaacagtgtgta

SEQ ID NO: 67229 - DNA, 15 bp, Homo sapiens
tttaacagtgtgtag

SEQ ID NO: 67230 - DNA, 15 bp, Homo sapiens
ttaacagtgtgtagc

SEQ ID NO: 67231 - DNA, 15 bp, Homo sapiens
taacagtgtgtagct

SEQ ID NO: 67232 - DNA, 15 bp, Homo sapiens
aacagtgtgtagctt

SEQ ID NO: 67233 - DNA, 15 bp, Homo sapiens
acagtgtgtagcttt

SEQ ID NO: 67234 - DNA, 15 bp, Homo sapiens
cagtgtgtagcttta

SEQ ID NO: 67235 - DNA, 15 bp, Homo sapiens
agtgtgtagctttag

SEQ ID NO: 67236 - DNA, 15 bp, Homo sapiens
gtgtgtagctttagt

SEQ ID NO: 67237 - DNA, 15 bp, Homo sapiens
tgtgtagctttagtt

SEQ ID NO: 67238 - DNA, 15 bp, Homo sapiens
gtgtagctttagttg

SEQ ID NO: 67239 - DNA, 15 bp, Homo sapiens
tgtagctttagttgt

SEQ ID NO: 67240 - DNA, 15 bp, Homo sapiens
gtagctttagttgtc

SEQ ID NO: 67241 - DNA, 15 bp, Homo sapiens
tagctttagttgtct

SEQ ID NO: 67242 - DNA, 15 bp, Homo sapiens
agctttagttgtcta

SEQ ID NO: 67243 - DNA, 15 bp, Homo sapiens
gctttagttgtctaa

SEQ ID NO: 67244 - DNA, 15 bp, Homo sapiens
ctttagttgtctaaa

SEQ ID NO: 67245 - DNA, 15 bp, Homo sapiens
tttagttgtctaaaa

SEQ ID NO: 67246 - DNA, 15 bp, Homo sapiens
ttagttgtctaaaag

SEQ ID NO: 67247 - DNA, 15 bp, Homo sapiens
tagttgtctaaaagt

SEQ ID NO: 67248 - DNA, 15 bp, Homo sapiens
agttgtctaaaagtt

SEQ ID NO: 67249 - DNA, 15 bp, Homo sapiens
gttgtctaaaagtta

SEQ ID NO: 67250 - DNA, 15 bp, Homo sapiens
ttgtctaaaagttag

SEQ ID NO: 67251 - DNA, 15 bp, Homo sapiens
tgtctaaaagttagg

SEQ ID NO: 67252 - DNA, 15 bp, Homo sapiens
gtctaaaagttaggc

SEQ ID NO: 67253 - DNA, 15 bp, Homo sapiens
tctaaaagttaggcc

SEQ ID NO: 67254 - DNA, 15 bp, Homo sapiens
ctaaaagttaggcct

SEQ ID NO: 67255 - DNA, 15 bp, Homo sapiens
taaaagttaggcctt

SEQ ID NO: 67256 - DNA, 15 bp, Homo sapiens
aaaagttaggccttc

SEQ ID NO: 67257 - DNA, 15 bp, Homo sapiens
aaagttaggccttcg

SEQ ID NO: 67258 - DNA, 15 bp, Homo sapiens
aagttaggccttcgg

SEQ ID NO: 67259 - DNA, 15 bp, Homo sapiens
agttaggccttcggg

SEQ ID NO: 67260 - DNA, 15 bp, Homo sapiens
gttaggccttcgggc

SEQ ID NO: 67261 - DNA, 15 bp, Homo sapiens
ttaggccttcgggct

SEQ ID NO: 67262 - DNA, 15 bp, Homo sapiens
taggccttcgggctt

SEQ ID NO: 67263 - DNA, 15 bp, Homo sapiens
aggccttcgggcttc

SEQ ID NO: 67264 - DNA, 15 bp, Homo sapiens
ggccttcgggcttca

SEQ ID NO: 67265 - DNA, 15 bp, Homo sapiens
gccttcgggcttcaa

SEQ ID NO: 67266 - DNA, 15 bp, Homo sapiens
ccttcgggcttcaaa

SEQ ID NO: 67267 - DNA, 15 bp, Homo sapiens
cttcgggcttcaaaa

SEQ ID NO: 67268 - DNA, 15 bp, Homo sapiens
ttcgggcttcaaaag

SEQ ID NO: 67269 - DNA, 15 bp, Homo sapiens
tcgggcttcaaaagt

SEQ ID NO: 67270 - DNA, 15 bp, Homo sapiens
cgggcttcaaaagtt

SEQ ID NO: 67271 - DNA, 15 bp, Homo sapiens
gggcttcaaaagtta

SEQ ID NO: 67272 - DNA, 15 bp, Homo sapiens
ggcttcaaaagttag

SEQ ID NO: 67273 - DNA, 15 bp, Homo sapiens
gcttcaaaagttagt

SEQ ID NO: 67274 - DNA, 15 bp, Homo sapiens
cttcaaaagttagtg

SEQ ID NO: 67275 - DNA, 15 bp, Homo sapiens
ttcaaaagttagtgg

SEQ ID NO: 67276 - DNA, 15 bp, Homo sapiens
tcaaaagttagtggt

SEQ ID NO: 67277 - DNA, 15 bp, Homo sapiens
caaaagttagtggtc

SEQ ID NO: 67278 - DNA, 15 bp, Homo sapiens
aaaagttagtggtca

SEQ ID NO: 67279 - DNA, 15 bp, Homo sapiens
aaagttagtggtcat

SEQ ID NO: 67280 - DNA, 15 bp, Homo sapiens
aagttagtggtcatc

SEQ ID NO: 67281 - DNA, 15 bp, Homo sapiens
agttagtggtcatcg

SEQ ID NO: 67282 - DNA, 15 bp, Homo sapiens
gttagtggtcatcga

SEQ ID NO: 67283 - DNA, 15 bp, Homo sapiens
ttagtggtcatcgaa

SEQ ID NO: 67284 - DNA, 15 bp, Homo sapiens
tagtggtcatcgaaa

SEQ ID NO: 67285 - DNA, 15 bp, Homo sapiens
agtggtcatcgaaaa

SEQ ID NO: 67286 - DNA, 15 bp, Homo sapiens
gtggtcatcgaaaag

SEQ ID NO: 67287 - DNA, 15 bp, Homo sapiens
tggtcatcgaaaagc

SEQ ID NO: 67288 - DNA, 15 bp, Homo sapiens
ggtcatcgaaaagca

SEQ ID NO: 67289 - DNA, 15 bp, Homo sapiens
gtcatcgaaaagcat

SEQ ID NO: 67290 - DNA, 15 bp, Homo sapiens
tcatcgaaaagcatt

SEQ ID NO: 67291 - DNA, 15 bp, Homo sapiens
catcgaaaagcatta

SEQ ID NO: 67292 - DNA, 15 bp, Homo sapiens
atcgaaaagcattaa

SEQ ID NO: 67293 - DNA, 15 bp, Homo sapiens
tcgaaaagcattaat

SEQ ID NO: 67294 - DNA, 15 bp, Homo sapiens
cgaaaagcattaatc

SEQ ID NO: 67295 - DNA, 15 bp, Homo sapiens
gaaaagcattaatct

SEQ ID NO: 67296 - DNA, 15 bp, Homo sapiens
aaaagcattaatctt

SEQ ID NO: 67297 - DNA, 15 bp, Homo sapiens
aaagcattaatcttt

SEQ ID NO: 67298 - DNA, 15 bp, Homo sapiens
aagcattaatctttg

SEQ ID NO: 67299 - DNA, 15 bp, Homo sapiens
agcattaatctttgc

SEQ ID NO: 67300 - DNA, 15 bp, Homo sapiens
gcattaatctttgca

SEQ ID NO: 67301 - DNA, 15 bp, Homo sapiens
cattaatctttgcag

SEQ ID NO: 67302 - DNA, 15 bp, Homo sapiens
attaatctttgcagt

SEQ ID NO: 67303 - DNA, 15 bp, Homo sapiens
ttaatctttgcagtt

SEQ ID NO: 67304 - DNA, 15 bp, Homo sapiens
taatctttgcagttt

SEQ ID NO: 67305 - DNA, 15 bp, Homo sapiens
aatctttgcagtttc

SEQ ID NO: 67306 - DNA, 15 bp, Homo sapiens
atctttgcagtttca

SEQ ID NO: 67307 - DNA, 15 bp, Homo sapiens
tctttgcagtttcag

SEQ ID NO: 67308 - DNA, 15 bp, Homo sapiens
ctttgcagtttcagg

SEQ ID NO: 67309 - DNA, 15 bp, Homo sapiens
tttgcagtttcaggt

SEQ ID NO: 67310 - DNA, 15 bp, Homo sapiens
ttgcagtttcaggta

SEQ ID NO: 67311 - DNA, 15 bp, Homo sapiens
tgcagtttcaggtac

SEQ ID NO: 67312 - DNA, 15 bp, Homo sapiens
gcagtttcaggtaca

SEQ ID NO: 67313 - DNA, 15 bp, Homo sapiens
cagtttcaggtacaa

SEQ ID NO: 67314 - DNA, 15 bp, Homo sapiens
agtttcaggtacaac

SEQ ID NO: 67315 - DNA, 15 bp, Homo sapiens
gtttcaggtacaaca

SEQ ID NO: 67316 - DNA, 15 bp, Homo sapiens
tttcaggtacaacac

SEQ ID NO: 67317 - DNA, 15 bp, Homo sapiens
ttcaggtacaacaca

SEQ ID NO: 67318 - DNA, 15 bp, Homo sapiens
tcaggtacaacacat

SEQ ID NO: 67319 - DNA, 15 bp, Homo sapiens
caggtacaacacatt

SEQ ID NO: 67320 - DNA, 15 bp, Homo sapiens
aggtacaacacattg

SEQ ID NO: 67321 - DNA, 15 bp, Homo sapiens
ggtacaacacattgg

SEQ ID NO: 67322 - DNA, 15 bp, Homo sapiens
gtacaacacattggt

SEQ ID NO: 67323 - DNA, 15 bp, Homo sapiens
tacaacacattggtt

SEQ ID NO: 67324 - DNA, 15 bp, Homo sapiens
acaacacattggttt

SEQ ID NO: 67325 - DNA, 15 bp, Homo sapiens
caacacattggtttt

SEQ ID NO: 67326 - DNA, 15 bp, Homo sapiens
aacacattggttttg

SEQ ID NO: 67327 - DNA, 15 bp, Homo sapiens
acacattggttttga

SEQ ID NO: 67328 - DNA, 15 bp, Homo sapiens
cacattggttttgat

SEQ ID NO: 67329 - DNA, 15 bp, Homo sapiens
acattggttttgatt

SEQ ID NO: 67330 - DNA, 15 bp, Homo sapiens
cattggttttgatta

SEQ ID NO: 67331 - DNA, 15 bp, Homo sapiens
attggttttgattag

SEQ ID NO: 67332 - DNA, 15 bp, Homo sapiens
ttggttttgattagg

SEQ ID NO: 67333 - DNA, 15 bp, Homo sapiens
tggttttgattaggg

SEQ ID NO: 67334 - DNA, 15 bp, Homo sapiens
ggttttgattaggga

SEQ ID NO: 67335 - DNA, 15 bp, Homo sapiens
gttttgattagggat

SEQ ID NO: 67336 - DNA, 15 bp, Homo sapiens
ttttgattagggatg

SEQ ID NO: 67337 - DNA, 15 bp, Homo sapiens
tttgattagggatgg

SEQ ID NO: 67338 - DNA, 15 bp, Homo sapiens
ttgattagggatggg

SEQ ID NO: 67339 - DNA, 15 bp, Homo sapiens
tgattagggatgggg

SEQ ID NO: 67340 - DNA, 15 bp, Homo sapiens
gattagggatgggga

SEQ ID NO: 67341 - DNA, 15 bp, Homo sapiens
attagggatggggat

SEQ ID NO: 67342 - DNA, 15 bp, Homo sapiens
ttagggatggggatg

SEQ ID NO: 67343 - DNA, 15 bp, Homo sapiens
tagggatggggatgg

SEQ ID NO: 67344 - DNA, 15 bp, Homo sapiens
agggatggggatggg

SEQ ID NO: 67345 - DNA, 15 bp, Homo sapiens
gggatggggatgggg

SEQ ID NO: 67346 - DNA, 15 bp, Homo sapiens
ggatggggatggggc

SEQ ID NO: 67347 - DNA, 15 bp, Homo sapiens
gatggggatggggcc

SEQ ID NO: 67348 - DNA, 15 bp, Homo sapiens
atggggatggggccc

SEQ ID NO: 67349 - DNA, 15 bp, Homo sapiens
tggggatggggccct

SEQ ID NO: 67350 - DNA, 15 bp, Homo sapiens
ggggatggggccctc

SEQ ID NO: 67351 - DNA, 15 bp, Homo sapiens
gggatggggccctct

SEQ ID NO: 67352 - DNA, 15 bp, Homo sapiens
ggatggggccctctt

SEQ ID NO: 67353 - DNA, 15 bp, Homo sapiens
gatggggccctcttt

SEQ ID NO: 67354 - DNA, 15 bp, Homo sapiens
atggggccctctttt

SEQ ID NO: 67355 - DNA, 15 bp, Homo sapiens
tggggccctcttttt

SEQ ID NO: 67356 - DNA, 15 bp, Homo sapiens
ggggccctctttttg

SEQ ID NO: 67357 - DNA, 15 bp, Homo sapiens
gggccctctttttgc

SEQ ID NO: 67358 - DNA, 15 bp, Homo sapiens
ggccctctttttgca

SEQ ID NO: 67359 - DNA, 15 bp, Homo sapiens
gccctctttttgcag

SEQ ID NO: 67360 - DNA, 15 bp, Homo sapiens
ccctctttttgcaga

SEQ ID NO: 67361 - DNA, 15 bp, Homo sapiens
cctctttttgcagaa

SEQ ID NO: 67362 - DNA, 15 bp, Homo sapiens
ctctttttgcagaat

SEQ ID NO: 67363 - DNA, 15 bp, Homo sapiens
tctttttgcagaatg

SEQ ID NO: 67364 - DNA, 15 bp, Homo sapiens
ctttttgcagaatgg

SEQ ID NO: 67365 - DNA, 15 bp, Homo sapiens
tttttgcagaatggg

SEQ ID NO: 67366 - DNA, 15 bp, Homo sapiens
ttttgcagaatgggg

SEQ ID NO: 67367 - DNA, 15 bp, Homo sapiens
tttgcagaatgggga

SEQ ID NO: 67368 - DNA, 15 bp, Homo sapiens
ttgcagaatggggaa

SEQ ID NO: 67369 - DNA, 15 bp, Homo sapiens
tgcagaatggggaaa

SEQ ID NO: 67370 - DNA, 15 bp, Homo sapiens
gcagaatggggaaag

SEQ ID NO: 67371 - DNA, 15 bp, Homo sapiens
cagaatggggaaagt

SEQ ID NO: 67372 - DNA, 15 bp, Homo sapiens
agaatggggaaagta

SEQ ID NO: 67373 - DNA, 15 bp, Homo sapiens
gaatggggaaagtat

SEQ ID NO: 67374 - DNA, 15 bp, Homo sapiens
aatggggaaagtatt

SEQ ID NO: 67375 - DNA, 15 bp, Homo sapiens
atggggaaagtattg

SEQ ID NO: 67376 - DNA, 15 bp, Homo sapiens
tggggaaagtattga

SEQ ID NO: 67377 - DNA, 15 bp, Homo sapiens
ggggaaagtattgac

SEQ ID NO: 67378 - DNA, 15 bp, Homo sapiens
gggaaagtattgaca

SEQ ID NO: 67379 - DNA, 15 bp, Homo sapiens
ggaaagtattgacag

SEQ ID NO: 67380 - DNA, 15 bp, Homo sapiens
gaaagtattgacagg

SEQ ID NO: 67381 - DNA, 15 bp, Homo sapiens
aaagtattgacagga

SEQ ID NO: 67382 - DNA, 15 bp, Homo sapiens
aagtattgacaggaa

SEQ ID NO: 67383 - DNA, 15 bp, Homo sapiens
agtattgacaggaat

SEQ ID NO: 67384 - DNA, 15 bp, Homo sapiens
gtattgacaggaatt

SEQ ID NO: 67385 - DNA, 15 bp, Homo sapiens
tattgacaggaattg

SEQ ID NO: 67386 - DNA, 15 bp, Homo sapiens
attgacaggaattga

SEQ ID NO: 67387 - DNA, 15 bp, Homo sapiens
ttgacaggaattgag

SEQ ID NO: 67388 - DNA, 15 bp, Homo sapiens
tgacaggaattgaga

SEQ ID NO: 67389 - DNA, 15 bp, Homo sapiens
gacaggaattgagag

SEQ ID NO: 67390 - DNA, 15 bp, Homo sapiens
acaggaattgagagc

SEQ ID NO: 67391 - DNA, 15 bp, Homo sapiens
caggaattgagagct

SEQ ID NO: 67392 - DNA, 15 bp, Homo sapiens
aggaattgagagcta

SEQ ID NO: 67393 - DNA, 15 bp, Homo sapiens
ggaattgagagctat

SEQ ID NO: 67394 - DNA, 15 bp, Homo sapiens
gaattgagagctatt

SEQ ID NO: 67395 - DNA, 15 bp, Homo sapiens
aattgagagctattg

SEQ ID NO: 67396 - DNA, 15 bp, Homo sapiens
attgagagctattgg

SEQ ID NO: 67397 - DNA, 15 bp, Homo sapiens
ttgagagctattggt

SEQ ID NO: 67398 - DNA, 15 bp, Homo sapiens
tgagagctattggta

SEQ ID NO: 67399 - DNA, 15 bp, Homo sapiens
gagagctattggtag

SEQ ID NO: 67400 - DNA, 15 bp, Homo sapiens
agagctattggtagg

SEQ ID NO: 67401 - DNA, 15 bp, Homo sapiens
gagctattggtaggc

SEQ ID NO: 67402 - DNA, 15 bp, Homo sapiens
agctattggtaggcc

SEQ ID NO: 67403 - DNA, 15 bp, Homo sapiens
gctattggtaggcca

SEQ ID NO: 67404 - DNA, 15 bp, Homo sapiens
ctattggtaggccag

SEQ ID NO: 67405 - DNA, 15 bp, Homo sapiens
tattggtaggccagt

SEQ ID NO: 67406 - DNA, 15 bp, Homo sapiens
attggtaggccagtg

SEQ ID NO: 67407 - DNA, 15 bp, Homo sapiens
ttggtaggccagtgt

SEQ ID NO: 67408 - DNA, 15 bp, Homo sapiens
tggtaggccagtgta

SEQ ID NO: 67409 - DNA, 15 bp, Homo sapiens
ggtaggccagtgtat

SEQ ID NO: 67410 - DNA, 15 bp, Homo sapiens
gtaggccagtgtata

SEQ ID NO: 67411 - DNA, 15 bp, Homo sapiens
taggccagtgtataa

SEQ ID NO: 67412 - DNA, 15 bp, Homo sapiens
aggccagtgtataag

SEQ ID NO: 67413 - DNA, 15 bp, Homo sapiens
ggccagtgtataagg

SEQ ID NO: 67414 - DNA, 15 bp, Homo sapiens
gccagtgtataaggt

SEQ ID NO: 67415 - DNA, 15 bp, Homo sapiens
ccagtgtataaggta

SEQ ID NO: 67416 - DNA, 15 bp, Homo sapiens
cagtgtataaggtat

SEQ ID NO: 67417 - DNA, 15 bp, Homo sapiens
agtgtataaggtatg

SEQ ID NO: 67418 - DNA, 15 bp, Homo sapiens
gtgtataaggtatgt

SEQ ID NO: 67419 - DNA, 15 bp, Homo sapiens
tgtataaggtatgtg

SEQ ID NO: 67420 - DNA, 15 bp, Homo sapiens
gtataaggtatgtga

SEQ ID NO: 67421 - DNA, 15 bp, Homo sapiens
tataaggtatgtgaa

SEQ ID NO: 67422 - DNA, 15 bp, Homo sapiens
ataaggtatgtgaaa

SEQ ID NO: 67423 - DNA, 15 bp, Homo sapiens
taaggtatgtgaaaa

SEQ ID NO: 67424 - DNA, 15 bp, Homo sapiens
aaggtatgtgaaaac

SEQ ID NO: 67425 - DNA, 15 bp, Homo sapiens
aggtatgtgaaaaca

SEQ ID NO: 67426 - DNA, 15 bp, Homo sapiens
ggtatgtgaaaacag

SEQ ID NO: 67427 - DNA, 15 bp, Homo sapiens
gtatgtgaaaacaga

SEQ ID NO: 67428 - DNA, 15 bp, Homo sapiens
tatgtgaaaacagaa

SEQ ID NO: 67429 - DNA, 15 bp, Homo sapiens
atgtgaaaacagaat

SEQ ID NO: 67430 - DNA, 15 bp, Homo sapiens
tgtgaaaacagaatt

SEQ ID NO: 67431 - DNA, 15 bp, Homo sapiens
gtgaaaacagaatta

SEQ ID NO: 67432 - DNA, 15 bp, Homo sapiens
tgaaaacagaattaa

SEQ ID NO: 67433 - DNA, 15 bp, Homo sapiens
gaaaacagaattaag

SEQ ID NO: 67434 - DNA, 15 bp, Homo sapiens
aaaacagaattaagt

SEQ ID NO: 67435 - DNA, 15 bp, Homo sapiens
aaacagaattaagtt

SEQ ID NO: 67436 - DNA, 15 bp, Homo sapiens
aacagaattaagtta

SEQ ID NO: 67437 - DNA, 15 bp, Homo sapiens
acagaattaagttat

SEQ ID NO: 67438 - DNA, 15 bp, Homo sapiens
cagaattaagttatt

SEQ ID NO: 67439 - DNA, 15 bp, Homo sapiens
agaattaagttattg

SEQ ID NO: 67440 - DNA, 15 bp, Homo sapiens
gaattaagttattgg

SEQ ID NO: 67441 - DNA, 15 bp, Homo sapiens
aattaagttattggt

SEQ ID NO: 67442 - DNA, 15 bp, Homo sapiens
attaagttattggtc

SEQ ID NO: 67443 - DNA, 15 bp, Homo sapiens
ttaagttattggtct

SEQ ID NO: 67444 - DNA, 15 bp, Homo sapiens
taagttattggtctg

SEQ ID NO: 67445 - DNA, 15 bp, Homo sapiens
aagttattggtctga

SEQ ID NO: 67446 - DNA, 15 bp, Homo sapiens
agttattggtctgaa

SEQ ID NO: 67447 - DNA, 15 bp, Homo sapiens
gttattggtctgaag

SEQ ID NO: 67448 - DNA, 15 bp, Homo sapiens
ttattggtctgaagt

SEQ ID NO: 67449 - DNA, 15 bp, Homo sapiens
tattggtctgaagtg

SEQ ID NO: 67450 - DNA, 15 bp, Homo sapiens
attggtctgaagtga

SEQ ID NO: 67451 - DNA, 15 bp, Homo sapiens
ttggtctgaagtgac

SEQ ID NO: 67452 - DNA, 15 bp, Homo sapiens
tggtctgaagtgact

SEQ ID NO: 67453 - DNA, 15 bp, Homo sapiens
ggtctgaagtgactg

SEQ ID NO: 67454 - DNA, 15 bp, Homo sapiens
gtctgaagtgactga

SEQ ID NO: 67455 - DNA, 15 bp, Homo sapiens
tctgaagtgactgaa

SEQ ID NO: 67456 - DNA, 15 bp, Homo sapiens
ctgaagtgactgaag

SEQ ID NO: 67457 - DNA, 15 bp, Homo sapiens
tgaagtgactgaagc

SEQ ID NO: 67458 - DNA, 15 bp, Homo sapiens
gaagtgactgaagca

SEQ ID NO: 67459 - DNA, 15 bp, Homo sapiens
aagtgactgaagcat

SEQ ID NO: 67460 - DNA, 15 bp, Homo sapiens
agtgactgaagcatt

SEQ ID NO: 67461 - DNA, 15 bp, Homo sapiens
gtgactgaagcattt

SEQ ID NO: 67462 - DNA, 15 bp, Homo sapiens
tgactgaagcattta

SEQ ID NO: 67463 - DNA, 15 bp, Homo sapiens
gactgaagcatttag

SEQ ID NO: 67464 - DNA, 15 bp, Homo sapiens
actgaagcatttagg

SEQ ID NO: 67465 - DNA, 15 bp, Homo sapiens
ctgaagcatttaggc

SEQ ID NO: 67466 - DNA, 15 bp, Homo sapiens
tgaagcatttaggct

SEQ ID NO: 67467 - DNA, 15 bp, Homo sapiens
gaagcatttaggctc

SEQ ID NO: 67468 - DNA, 15 bp, Homo sapiens
aagcatttaggctct

SEQ ID NO: 67469 - DNA, 15 bp, Homo sapiens
agcatttaggctcta

SEQ ID NO: 67470 - DNA, 15 bp, Homo sapiens
gcatttaggctctat

SEQ ID NO: 67471 - DNA, 15 bp, Homo sapiens
catttaggctctatc

SEQ ID NO: 67472 - DNA, 15 bp, Homo sapiens
atttaggctctatca

SEQ ID NO: 67473 - DNA, 15 bp, Homo sapiens
tttaggctctatcaa

SEQ ID NO: 67474 - DNA, 15 bp, Homo sapiens
ttaggctctatcaag

SEQ ID NO: 67475 - DNA, 15 bp, Homo sapiens
taggctctatcaagg

SEQ ID NO: 67476 - DNA, 15 bp, Homo sapiens
aggctctatcaaggc

SEQ ID NO: 67477 - DNA, 15 bp, Homo sapiens
ggctctatcaaggcc

SEQ ID NO: 67478 - DNA, 15 bp, Homo sapiens
gctctatcaaggcct

SEQ ID NO: 67479 - DNA, 15 bp, Homo sapiens
ctctatcaaggccta

SEQ ID NO: 67480 - DNA, 15 bp, Homo sapiens
tctatcaaggcctaa

SEQ ID NO: 67481 - DNA, 15 bp, Homo sapiens
ctatcaaggcctaaa

SEQ ID NO: 67482 - DNA, 15 bp, Homo sapiens
tatcaaggcctaaaa

SEQ ID NO: 67483 - DNA, 15 bp, Homo sapiens
atcaaggcctaaaat

SEQ ID NO: 67484 - DNA, 15 bp, Homo sapiens
tcaaggcctaaaatt

SEQ ID NO: 67485 - DNA, 15 bp, Homo sapiens
caaggcctaaaattt

SEQ ID NO: 67486 - DNA, 15 bp, Homo sapiens
aaggcctaaaatttg

SEQ ID NO: 67487 - DNA, 15 bp, Homo sapiens
aggcctaaaatttgg

SEQ ID NO: 67488 - DNA, 15 bp, Homo sapiens
ggcctaaaatttggt

SEQ ID NO: 67489 - DNA, 15 bp, Homo sapiens
gcctaaaatttggta

SEQ ID NO: 67490 - DNA, 15 bp, Homo sapiens
cctaaaatttggtaa

SEQ ID NO: 67491 - DNA, 15 bp, Homo sapiens
ctaaaatttggtaat

SEQ ID NO: 67492 - DNA, 15 bp, Homo sapiens
taaaatttggtaata

SEQ ID NO: 67493 - DNA, 15 bp, Homo sapiens
aaaatttggtaatat

SEQ ID NO: 67494 - DNA, 15 bp, Homo sapiens
aaatttggtaatatg

SEQ ID NO: 67495 - DNA, 15 bp, Homo sapiens
aatttggtaatatga

SEQ ID NO: 67496 - DNA, 15 bp, Homo sapiens
atttggtaatatgag

SEQ ID NO: 67497 - DNA, 15 bp, Homo sapiens
tttggtaatatgagt

SEQ ID NO: 67498 - DNA, 15 bp, Homo sapiens
ttggtaatatgagtt

SEQ ID NO: 67499 - DNA, 15 bp, Homo sapiens
tggtaatatgagttt

SEQ ID NO: 67500 - DNA, 15 bp, Homo sapiens
ggtaatatgagtttg

SEQ ID NO: 67501 - DNA, 15 bp, Homo sapiens
gtaatatgagtttgg

SEQ ID NO: 67502 - DNA, 15 bp, Homo sapiens
taatatgagtttggt

SEQ ID NO: 67503 - DNA, 15 bp, Homo sapiens
aatatgagtttggta

SEQ ID NO: 67504 - DNA, 15 bp, Homo sapiens
atatgagtttggtaa

SEQ ID NO: 67505 - DNA, 15 bp, Homo sapiens
tatgagtttggtaat

SEQ ID NO: 67506 - DNA, 15 bp, Homo sapiens
atgagtttggtaatg

SEQ ID NO: 67507 - DNA, 15 bp, Homo sapiens
tgagtttggtaatgc

SEQ ID NO: 67508 - DNA, 15 bp, Homo sapiens
gagtttggtaatgcg

SEQ ID NO: 67509 - DNA, 15 bp, Homo sapiens
agtttggtaatgcga

SEQ ID NO: 67510 - DNA, 15 bp, Homo sapiens
gtttggtaatgcgaa

SEQ ID NO: 67511 - DNA, 15 bp, Homo sapiens
tttggtaatgcgaat

SEQ ID NO: 67512 - DNA, 15 bp, Homo sapiens
ttggtaatgcgaatt

SEQ ID NO: 67513 - DNA, 15 bp, Homo sapiens
tggtaatgcgaattg

SEQ ID NO: 67514 - DNA, 15 bp, Homo sapiens
ggtaatgcgaattgt

SEQ ID NO: 67515 - DNA, 15 bp, Homo sapiens
gtaatgcgaattgtg

SEQ ID NO: 67516 - DNA, 15 bp, Homo sapiens
taatgcgaattgtgg

SEQ ID NO: 67517 - DNA, 15 bp, Homo sapiens
aatgcgaattgtggc

SEQ ID NO: 67518 - DNA, 15 bp, Homo sapiens
atgcgaattgtggca

SEQ ID NO: 67519 - DNA, 15 bp, Homo sapiens
tgcgaattgtggcag

SEQ ID NO: 67520 - DNA, 15 bp, Homo sapiens
gcgaattgtggcagt

SEQ ID NO: 67521 - DNA, 15 bp, Homo sapiens
cgaattgtggcagtg

SEQ ID NO: 67522 - DNA, 15 bp, Homo sapiens
gaattgtggcagtgg

SEQ ID NO: 67523 - DNA, 15 bp, Homo sapiens
aattgtggcagtgga

SEQ ID NO: 67524 - DNA, 15 bp, Homo sapiens
attgtggcagtggac

SEQ ID NO: 67525 - DNA, 15 bp, Homo sapiens
ttgtggcagtggaca

SEQ ID NO: 67526 - DNA, 15 bp, Homo sapiens
tgtggcagtggacaa

SEQ ID NO: 67527 - DNA, 15 bp, Homo sapiens
gtggcagtggacaat

SEQ ID NO: 67528 - DNA, 15 bp, Homo sapiens
tggcagtggacaata

SEQ ID NO: 67529 - DNA, 15 bp, Homo sapiens
ggcagtggacaatat

SEQ ID NO: 67530 - DNA, 15 bp, Homo sapiens
gcagtggacaatatt

SEQ ID NO: 67531 - DNA, 15 bp, Homo sapiens
cagtggacaatattt

SEQ ID NO: 67532 - DNA, 15 bp, Homo sapiens
agtggacaatattta

SEQ ID NO: 67533 - DNA, 15 bp, Homo sapiens
gtggacaatatttag

SEQ ID NO: 67534 - DNA, 15 bp, Homo sapiens
tggacaatatttagt

SEQ ID NO: 67535 - DNA, 15 bp, Homo sapiens
ggacaatatttagtt

SEQ ID NO: 67536 - DNA, 15 bp, Homo sapiens
gacaatatttagtta

SEQ ID NO: 67537 - DNA, 15 bp, Homo sapiens
acaatatttagttaa

SEQ ID NO: 67538 - DNA, 15 bp, Homo sapiens
caatatttagttaaa

SEQ ID NO: 67539 - DNA, 15 bp, Homo sapiens
aatatttagttaaaa

SEQ ID NO: 67540 - DNA, 15 bp, Homo sapiens
atatttagttaaaat

SEQ ID NO: 67541 - DNA, 15 bp, Homo sapiens
tatttagttaaaatt

SEQ ID NO: 67542 - DNA, 15 bp, Homo sapiens
atttagttaaaatta

SEQ ID NO: 67543 - DNA, 15 bp, Homo sapiens
tttagttaaaattat

SEQ ID NO: 67544 - DNA, 15 bp, Homo sapiens
ttagttaaaattatg

SEQ ID NO: 67545 - DNA, 15 bp, Homo sapiens
tagttaaaattatgt

SEQ ID NO: 67546 - DNA, 15 bp, Homo sapiens
agttaaaattatgta

SEQ ID NO: 67547 - DNA, 15 bp, Homo sapiens
gttaaaattatgtaa

SEQ ID NO: 67548 - DNA, 15 bp, Homo sapiens
ttaaaattatgtaat

SEQ ID NO: 67549 - DNA, 15 bp, Homo sapiens
taaaattatgtaatt

SEQ ID NO: 67550 - DNA, 15 bp, Homo sapiens
aaaattatgtaattg

SEQ ID NO: 67551 - DNA, 15 bp, Homo sapiens
aaattatgtaattgc

SEQ ID NO: 67552 - DNA, 15 bp, Homo sapiens
aattatgtaattgca

SEQ ID NO: 67553 - DNA, 15 bp, Homo sapiens
attatgtaattgcat

SEQ ID NO: 67554 - DNA, 15 bp, Homo sapiens
ttatgtaattgcata

SEQ ID NO: 67555 - DNA, 15 bp, Homo sapiens
tatgtaattgcataa

SEQ ID NO: 67556 - DNA, 15 bp, Homo sapiens
atgtaattgcataag

SEQ ID NO: 67557 - DNA, 15 bp, Homo sapiens
tgtaattgcataagt

SEQ ID NO: 67558 - DNA, 15 bp, Homo sapiens
gtaattgcataagta

SEQ ID NO: 67559 - DNA, 15 bp, Homo sapiens
taattgcataagtac

SEQ ID NO: 67560 - DNA, 15 bp, Homo sapiens
aattgcataagtact

SEQ ID NO: 67561 - DNA, 15 bp, Homo sapiens
attgcataagtacta

SEQ ID NO: 67562 - DNA, 15 bp, Homo sapiens
ttgcataagtactag

SEQ ID NO: 67563 - DNA, 15 bp, Homo sapiens
tgcataagtactagc

SEQ ID NO: 67564 - DNA, 15 bp, Homo sapiens
gcataagtactagca

SEQ ID NO: 67565 - DNA, 15 bp, Homo sapiens
cataagtactagcac

SEQ ID NO: 67566 - DNA, 15 bp, Homo sapiens
ataagtactagcaca

SEQ ID NO: 67567 - DNA, 15 bp, Homo sapiens
taagtactagcacag

SEQ ID NO: 67568 - DNA, 15 bp, Homo sapiens
aagtactagcacagt

SEQ ID NO: 67569 - DNA, 15 bp, Homo sapiens
agtactagcacagta

SEQ ID NO: 67570 - DNA, 15 bp, Homo sapiens
gtactagcacagtat

SEQ ID NO: 67571 - DNA, 15 bp, Homo sapiens
tactagcacagtatt

SEQ ID NO: 67572 - DNA, 15 bp, Homo sapiens
actagcacagtattt

SEQ ID NO: 67573 - DNA, 15 bp, Homo sapiens
ctagcacagtatttt

SEQ ID NO: 67574 - DNA, 15 bp, Homo sapiens
tagcacagtattttt

SEQ ID NO: 67575 - DNA, 15 bp, Homo sapiens
agcacagtattttta

SEQ ID NO: 67576 - DNA, 15 bp, Homo sapiens
gcacagtatttttaa

SEQ ID NO: 67577 - DNA, 15 bp, Homo sapiens
cacagtatttttaat

SEQ ID NO: 67578 - DNA, 15 bp, Homo sapiens
acagtatttttaata

SEQ ID NO: 67579 - DNA, 15 bp, Homo sapiens
cagtatttttaataa

SEQ ID NO: 67580 - DNA, 15 bp, Homo sapiens
agtatttttaataaa

SEQ ID NO: 67581 - DNA, 15 bp, Homo sapiens
gtatttttaataaaa

SEQ ID NO: 67582 - DNA, 15 bp, Homo sapiens
tatttttaataaaag

SEQ ID NO: 67583 - DNA, 15 bp, Homo sapiens
atttttaataaaagt

SEQ ID NO: 67584 - DNA, 15 bp, Homo sapiens
tttttaataaaagtt

SEQ ID NO: 67585 - DNA, 15 bp, Homo sapiens
ttttaataaaagtta

SEQ ID NO: 67586 - DNA, 15 bp, Homo sapiens
tttaataaaagttat

SEQ ID NO: 67587 - DNA, 15 bp, Homo sapiens
ttaataaaagttatt

SEQ ID NO: 67588 - DNA, 15 bp, Homo sapiens
taataaaagttattt

SEQ ID NO: 67589 - DNA, 15 bp, Homo sapiens
aataaaagttatttc

SEQ ID NO: 67590 - DNA, 15 bp, Homo sapiens
ataaaagttatttct

SEQ ID NO: 67591 - DNA, 15 bp, Homo sapiens
taaaagttatttctt

SEQ ID NO: 67592 - DNA, 15 bp, Homo sapiens
aaaagttatttctta

SEQ ID NO: 67593 - DNA, 15 bp, Homo sapiens
aaagttatttcttag

SEQ ID NO: 67594 - DNA, 15 bp, Homo sapiens
aagttatttcttagc

SEQ ID NO: 67595 - DNA, 15 bp, Homo sapiens
agttatttcttagca

SEQ ID NO: 67596 - DNA, 15 bp, Homo sapiens
gttatttcttagcaa

SEQ ID NO: 67597 - DNA, 15 bp, Homo sapiens
ttatttcttagcaaa

SEQ ID NO: 67598 - DNA, 15 bp, Homo sapiens
tatttcttagcaaat

SEQ ID NO: 67599 - DNA, 15 bp, Homo sapiens
atttcttagcaaatg

SEQ ID NO: 67600 - DNA, 15 bp, Homo sapiens
tttcttagcaaatgt

SEQ ID NO: 67601 - DNA, 15 bp, Homo sapiens
ttcttagcaaatgtc

SEQ ID NO: 67602 - DNA, 15 bp, Homo sapiens
tcttagcaaatgtca

SEQ ID NO: 67603 - DNA, 15 bp, Homo sapiens
cttagcaaatgtcag

SEQ ID NO: 67604 - DNA, 15 bp, Homo sapiens
ttagcaaatgtcagt

SEQ ID NO: 67605 - DNA, 15 bp, Homo sapiens
tagcaaatgtcagtt

SEQ ID NO: 67606 - DNA, 15 bp, Homo sapiens
agcaaatgtcagttg

SEQ ID NO: 67607 - DNA, 15 bp, Homo sapiens
gcaaatgtcagttgc

SEQ ID NO: 67608 - DNA, 15 bp, Homo sapiens
caaatgtcagttgca

SEQ ID NO: 67609 - DNA, 15 bp, Homo sapiens
aaatgtcagttgcat

SEQ ID NO: 67610 - DNA, 15 bp, Homo sapiens
aatgtcagttgcatt

SEQ ID NO: 67611 - DNA, 15 bp, Homo sapiens
atgtcagttgcattt

SEQ ID NO: 67612 - DNA, 15 bp, Homo sapiens
tgtcagttgcatttt

SEQ ID NO: 67613 - DNA, 15 bp, Homo sapiens
gtcagttgcattttg

SEQ ID NO: 67614 - DNA, 15 bp, Homo sapiens
tcagttgcattttgt

SEQ ID NO: 67615 - DNA, 15 bp, Homo sapiens
cagttgcattttgtc

SEQ ID NO: 67616 - DNA, 15 bp, Homo sapiens
agttgcattttgtct

SEQ ID NO: 67617 - DNA, 15 bp, Homo sapiens
gttgcattttgtcta

SEQ ID NO: 67618 - DNA, 15 bp, Homo sapiens
ttgcattttgtctaa

SEQ ID NO: 67619 - DNA, 15 bp, Homo sapiens
tgcattttgtctaaa

SEQ ID NO: 67620 - DNA, 15 bp, Homo sapiens
gcattttgtctaaag

SEQ ID NO: 67621 - DNA, 15 bp, Homo sapiens
cattttgtctaaagg

SEQ ID NO: 67622 - DNA, 15 bp, Homo sapiens
attttgtctaaaggt

SEQ ID NO: 67623 - DNA, 15 bp, Homo sapiens
ttttgtctaaaggta

SEQ ID NO: 67624 - DNA, 15 bp, Homo sapiens
tttgtctaaaggtag

SEQ ID NO: 67625 - DNA, 15 bp, Homo sapiens
ttgtctaaaggtaga

SEQ ID NO: 67626 - DNA, 15 bp, Homo sapiens
tgtctaaaggtagag

SEQ ID NO: 67627 - DNA, 15 bp, Homo sapiens
gtctaaaggtagagt

SEQ ID NO: 67628 - DNA, 15 bp, Homo sapiens
tctaaaggtagagtg

SEQ ID NO: 67629 - DNA, 15 bp, Homo sapiens
ctaaaggtagagtga

SEQ ID NO: 67630 - DNA, 15 bp, Homo sapiens
taaaggtagagtgac

SEQ ID NO: 67631 - DNA, 15 bp, Homo sapiens
aaaggtagagtgaca

SEQ ID NO: 67632 - DNA, 15 bp, Homo sapiens
aaggtagagtgacac

SEQ ID NO: 67633 - DNA, 15 bp, Homo sapiens
aggtagagtgacact

SEQ ID NO: 67634 - DNA, 15 bp, Homo sapiens
ggtagagtgacacta

SEQ ID NO: 67635 - DNA, 15 bp, Homo sapiens
gtagagtgacactac

SEQ ID NO: 67636 - DNA, 15 bp, Homo sapiens
tagagtgacactaca

SEQ ID NO: 67637 - DNA, 15 bp, Homo sapiens
agagtgacactacag

SEQ ID NO: 67638 - DNA, 15 bp, Homo sapiens
gagtgacactacagt

SEQ ID NO: 67639 - DNA, 15 bp, Homo sapiens
agtgacactacagtg

SEQ ID NO: 67640 - DNA, 15 bp, Homo sapiens
gtgacactacagtgt

SEQ ID NO: 67641 - DNA, 15 bp, Homo sapiens
tgacactacagtgtc

SEQ ID NO: 67642 - DNA, 15 bp, Homo sapiens
gacactacagtgtct

SEQ ID NO: 67643 - DNA, 15 bp, Homo sapiens
acactacagtgtcta

SEQ ID NO: 67644 - DNA, 15 bp, Homo sapiens
cactacagtgtctat

SEQ ID NO: 67645 - DNA, 15 bp, Homo sapiens
actacagtgtctata

SEQ ID NO: 67646 - DNA, 15 bp, Homo sapiens
ctacagtgtctatat

SEQ ID NO: 67647 - DNA, 15 bp, Homo sapiens
tacagtgtctatatg

SEQ ID NO: 67648 - DNA, 15 bp, Homo sapiens
acagtgtctatatgt

SEQ ID NO: 67649 - DNA, 15 bp, Homo sapiens
cagtgtctatatgtc

SEQ ID NO: 67650 - DNA, 15 bp, Homo sapiens
agtgtctatatgtcc

SEQ ID NO: 67651 - DNA, 15 bp, Homo sapiens
gtgtctatatgtcct

SEQ ID NO: 67652 - DNA, 15 bp, Homo sapiens
tgtctatatgtcctg

SEQ ID NO: 67653 - DNA, 15 bp, Homo sapiens
gtctatatgtcctgc

SEQ ID NO: 67654 - DNA, 15 bp, Homo sapiens
tctatatgtcctgct

SEQ ID NO: 67655 - DNA, 15 bp, Homo sapiens
ctatatgtcctgcta

SEQ ID NO: 67656 - DNA, 15 bp, Homo sapiens
tatatgtcctgctaa

SEQ ID NO: 67657 - DNA, 15 bp, Homo sapiens
atatgtcctgctaaa

SEQ ID NO: 67658 - DNA, 15 bp, Homo sapiens
tatgtcctgctaaaa

SEQ ID NO: 67659 - DNA, 15 bp, Homo sapiens
atgtcctgctaaaaa

SEQ ID NO: 67660 - DNA, 15 bp, Homo sapiens
tgtcctgctaaaaat

SEQ ID NO: 67661 - DNA, 15 bp, Homo sapiens
gtcctgctaaaaatt

SEQ ID NO: 67662 - DNA, 15 bp, Homo sapiens
tcctgctaaaaattg

SEQ ID NO: 67663 - DNA, 15 bp, Homo sapiens
cctgctaaaaattgt

SEQ ID NO: 67664 - DNA, 15 bp, Homo sapiens
ctgctaaaaattgtg

SEQ ID NO: 67665 - DNA, 15 bp, Homo sapiens
tgctaaaaattgtgg

SEQ ID NO: 67666 - DNA, 15 bp, Homo sapiens
gctaaaaattgtggg

SEQ ID NO: 67667 - DNA, 15 bp, Homo sapiens
ctaaaaattgtgggg

SEQ ID NO: 67668 - DNA, 15 bp, Homo sapiens
taaaaattgtgggga

SEQ ID NO: 67669 - DNA, 15 bp, Homo sapiens
aaaaattgtggggaa

SEQ ID NO: 67670 - DNA, 15 bp, Homo sapiens
aaaattgtggggaat

SEQ ID NO: 67671 - DNA, 15 bp, Homo sapiens
aaattgtggggaata

SEQ ID NO: 67672 - DNA, 15 bp, Homo sapiens
aattgtggggaatat

SEQ ID NO: 67673 - DNA, 15 bp, Homo sapiens
attgtggggaatatt

SEQ ID NO: 67674 - DNA, 15 bp, Homo sapiens
ttgtggggaatattt

SEQ ID NO: 67675 - DNA, 15 bp, Homo sapiens
tgtggggaatatttt

SEQ ID NO: 67676 - DNA, 15 bp, Homo sapiens
gtggggaatattttt

SEQ ID NO: 67677 - DNA, 15 bp, Homo sapiens
tggggaatatttttt

SEQ ID NO: 67678 - DNA, 15 bp, Homo sapiens
ggggaatattttttt

SEQ ID NO: 67679 - DNA, 15 bp, Homo sapiens
gggaatatttttttt

SEQ ID NO: 67680 - DNA, 15 bp, Homo sapiens
ggaatattttttttt

SEQ ID NO: 67681 - DNA, 15 bp, Homo sapiens
gaatattttttttta

SEQ ID NO: 67682 - DNA, 15 bp, Homo sapiens
aatatttttttttaa

SEQ ID NO: 67683 - DNA, 15 bp, Homo sapiens
atatttttttttaag

SEQ ID NO: 67684 - DNA, 15 bp, Homo sapiens
tatttttttttaaga

SEQ ID NO: 67685 - DNA, 15 bp, Homo sapiens
atttttttttaagac

SEQ ID NO: 67686 - DNA, 15 bp, Homo sapiens
tttttttaagacagc

SEQ ID NO: 67687 - DNA, 15 bp, Homo sapiens
ttttttaagacagcg

SEQ ID NO: 67688 - DNA, 15 bp, Homo sapiens
tttttaagacagcgt

SEQ ID NO: 67689 - DNA, 15 bp, Homo sapiens
ttttaagacagcgtt

SEQ ID NO: 67690 - DNA, 15 bp, Homo sapiens
tttaagacagcgttt

SEQ ID NO: 67691 - DNA, 15 bp, Homo sapiens
ttaagacagcgttta

SEQ ID NO: 67692 - DNA, 15 bp, Homo sapiens
taagacagcgtttat

SEQ ID NO: 67693 - DNA, 15 bp, Homo sapiens
aagacagcgtttata

SEQ ID NO: 67694 - DNA, 15 bp, Homo sapiens
agacagcgtttatat

SEQ ID NO: 67695 - DNA, 15 bp, Homo sapiens
gacagcgtttatatc

SEQ ID NO: 67696 - DNA, 15 bp, Homo sapiens
acagcgtttatatcg

SEQ ID NO: 67697 - DNA, 15 bp, Homo sapiens
cagcgtttatatcgg

SEQ ID NO: 67698 - DNA, 15 bp, Homo sapiens
agcgtttatatcggg

SEQ ID NO: 67699 - DNA, 15 bp, Homo sapiens
gcgtttatatcggga

SEQ ID NO: 67700 - DNA, 15 bp, Homo sapiens
cgtttatatcgggag

SEQ ID NO: 67701 - DNA, 15 bp, Homo sapiens
gtttatatcgggaga

SEQ ID NO: 67702 - DNA, 15 bp, Homo sapiens
tttatatcgggagag

SEQ ID NO: 67703 - DNA, 15 bp, Homo sapiens
ttatatcgggagagg

SEQ ID NO: 67704 - DNA, 15 bp, Homo sapiens
tatatcgggagaggt

SEQ ID NO: 67705 - DNA, 15 bp, Homo sapiens
atatcgggagaggtt

SEQ ID NO: 67706 - DNA, 15 bp, Homo sapiens
tatcgggagaggttt

SEQ ID NO: 67707 - DNA, 15 bp, Homo sapiens
atcgggagaggtttt

SEQ ID NO: 67708 - DNA, 15 bp, Homo sapiens
tcgggagaggtttta

SEQ ID NO: 67709 - DNA, 15 bp, Homo sapiens
cgggagaggttttat

SEQ ID NO: 67710 - DNA, 15 bp, Homo sapiens
gggagaggttttatt

SEQ ID NO: 67711 - DNA, 15 bp, Homo sapiens
ggagaggttttattc

SEQ ID NO: 67712 - DNA, 15 bp, Homo sapiens
gagaggttttattcc

SEQ ID NO: 67713 - DNA, 15 bp, Homo sapiens
agaggttttattccg

SEQ ID NO: 67714 - DNA, 15 bp, Homo sapiens
gaggttttattccgt

SEQ ID NO: 67715 - DNA, 15 bp, Homo sapiens
aggttttattccgtt

SEQ ID NO: 67716 - DNA, 15 bp, Homo sapiens
ggttttattccgttg

SEQ ID NO: 67717 - DNA, 15 bp, Homo sapiens
gttttattccgttgg

SEQ ID NO: 67718 - DNA, 15 bp, Homo sapiens
ttttattccgttgga

SEQ ID NO: 67719 - DNA, 15 bp, Homo sapiens
tttattccgttggat

SEQ ID NO: 67720 - DNA, 15 bp, Homo sapiens
ttattccgttggatt

SEQ ID NO: 67721 - DNA, 15 bp, Homo sapiens
tattccgttggatta

SEQ ID NO: 67722 - DNA, 15 bp, Homo sapiens
attccgttggattat

SEQ ID NO: 67723 - DNA, 15 bp, Homo sapiens
ttccgttggattatg

SEQ ID NO: 67724 - DNA, 15 bp, Homo sapiens
tccgttggattatgt

SEQ ID NO: 67725 - DNA, 15 bp, Homo sapiens
ccgttggattatgtt

SEQ ID NO: 67726 - DNA, 15 bp, Homo sapiens
cgttggattatgtta

SEQ ID NO: 67727 - DNA, 15 bp, Homo sapiens
gttggattatgttag

SEQ ID NO: 67728 - DNA, 15 bp, Homo sapiens
ttggattatgttagc

SEQ ID NO: 67729 - DNA, 15 bp, Homo sapiens
tggattatgttagct

SEQ ID NO: 67730 - DNA, 15 bp, Homo sapiens
ggattatgttagctg

SEQ ID NO: 67731 - DNA, 15 bp, Homo sapiens
gattatgttagctgc

SEQ ID NO: 67732 - DNA, 15 bp, Homo sapiens
attatgttagctgca

SEQ ID NO: 67733 - DNA, 15 bp, Homo sapiens
ttatgttagctgcat

SEQ ID NO: 67734 - DNA, 15 bp, Homo sapiens
tatgttagctgcata

SEQ ID NO: 67735 - DNA, 15 bp, Homo sapiens
atgttagctgcatat

SEQ ID NO: 67736 - DNA, 15 bp, Homo sapiens
tgttagctgcatata

SEQ ID NO: 67737 - DNA, 15 bp, Homo sapiens
gttagctgcatataa

SEQ ID NO: 67738 - DNA, 15 bp, Homo sapiens
ttagctgcatataaa

SEQ ID NO: 67739 - DNA, 15 bp, Homo sapiens
tagctgcatataaat

SEQ ID NO: 67740 - DNA, 15 bp, Homo sapiens
agctgcatataaatg

SEQ ID NO: 67741 - DNA, 15 bp, Homo sapiens
gctgcatataaatgt

SEQ ID NO: 67742 - DNA, 15 bp, Homo sapiens
ctgcatataaatgtg

SEQ ID NO: 67743 - DNA, 15 bp, Homo sapiens
tgcatataaatgtgc

SEQ ID NO: 67744 - DNA, 15 bp, Homo sapiens
gcatataaatgtgca

SEQ ID NO: 67745 - DNA, 15 bp, Homo sapiens
catataaatgtgcac

SEQ ID NO: 67746 - DNA, 15 bp, Homo sapiens
atataaatgtgcaca

SEQ ID NO: 67747 - DNA, 15 bp, Homo sapiens
tataaatgtgcacag

SEQ ID NO: 67748 - DNA, 15 bp, Homo sapiens
ataaatgtgcacagt

SEQ ID NO: 67749 - DNA, 15 bp, Homo sapiens
taaatgtgcacagtt

SEQ ID NO: 67750 - DNA, 15 bp, Homo sapiens
aaatgtgcacagtta

SEQ ID NO: 67751 - DNA, 15 bp, Homo sapiens
aatgtgcacagttaa

SEQ ID NO: 67752 - DNA, 15 bp, Homo sapiens
atgtgcacagttaat

SEQ ID NO: 67753 - DNA, 15 bp, Homo sapiens
tgtgcacagttaatt

SEQ ID NO: 67754 - DNA, 15 bp, Homo sapiens
gtgcacagttaattt

SEQ ID NO: 67755 - DNA, 15 bp, Homo sapiens
tgcacagttaatttt

SEQ ID NO: 67756 - DNA, 15 bp, Homo sapiens
gcacagttaattttg

SEQ ID NO: 67757 - DNA, 15 bp, Homo sapiens
cacagttaattttgc

SEQ ID NO: 67758 - DNA, 15 bp, Homo sapiens
acagttaattttgcc

SEQ ID NO: 67759 - DNA, 15 bp, Homo sapiens
cagttaattttgccc

SEQ ID NO: 67760 - DNA, 15 bp, Homo sapiens
agttaattttgccca

SEQ ID NO: 67761 - DNA, 15 bp, Homo sapiens
gttaattttgcccaa

SEQ ID NO: 67762 - DNA, 15 bp, Homo sapiens
ttaattttgcccaag

SEQ ID NO: 67763 - DNA, 15 bp, Homo sapiens
taattttgcccaagt

SEQ ID NO: 67764 - DNA, 15 bp, Homo sapiens
aattttgcccaagtt

SEQ ID NO: 67765 - DNA, 15 bp, Homo sapiens
attttgcccaagttt

SEQ ID NO: 67766 - DNA, 15 bp, Homo sapiens
ttttgcccaagtttt

SEQ ID NO: 67767 - DNA, 15 bp, Homo sapiens
tttgcccaagttttt

SEQ ID NO: 67768 - DNA, 15 bp, Homo sapiens
ttgcccaagtttttg

SEQ ID NO: 67769 - DNA, 15 bp, Homo sapiens
tgcccaagtttttgt

SEQ ID NO: 67770 - DNA, 15 bp, Homo sapiens
gcccaagtttttgtt

SEQ ID NO: 67771 - DNA, 15 bp, Homo sapiens
cccaagtttttgttt

SEQ ID NO: 67772 - DNA, 15 bp, Homo sapiens
ccaagtttttgtttt

SEQ ID NO: 67773 - DNA, 15 bp, Homo sapiens
caagtttttgttttg

SEQ ID NO: 67774 - DNA, 15 bp, Homo sapiens
aagtttttgttttga

SEQ ID NO: 67775 - DNA, 15 bp, Homo sapiens
agtttttgttttgaa

SEQ ID NO: 67776 - DNA, 15 bp, Homo sapiens
gtttttgttttgaaa

SEQ ID NO: 67777 - DNA, 15 bp, Homo sapiens
tttttgttttgaaat

SEQ ID NO: 67778 - DNA, 15 bp, Homo sapiens
ttttgttttgaaatg

SEQ ID NO: 67779 - DNA, 15 bp, Homo sapiens
tttgttttgaaatga

SEQ ID NO: 67780 - DNA, 15 bp, Homo sapiens
ttgttttgaaatgaa

SEQ ID NO: 67781 - DNA, 15 bp, Homo sapiens
tgttttgaaatgaat

SEQ ID NO: 67782 - DNA, 15 bp, Homo sapiens
gttttgaaatgaatg

SEQ ID NO: 67783 - DNA, 15 bp, Homo sapiens
ttttgaaatgaatgt

SEQ ID NO: 67784 - DNA, 15 bp, Homo sapiens
tttgaaatgaatgta

SEQ ID NO: 67785 - DNA, 15 bp, Homo sapiens
ttgaaatgaatgtaa

SEQ ID NO: 67786 - DNA, 15 bp, Homo sapiens
tgaaatgaatgtaaa

SEQ ID NO: 67787 - DNA, 15 bp, Homo sapiens
gaaatgaatgtaaaa

SEQ ID NO: 67788 - DNA, 15 bp, Homo sapiens
aaatgaatgtaaaac

SEQ ID NO: 67789 - DNA, 15 bp, Homo sapiens
aatgaatgtaaaact

SEQ ID NO: 67790 - DNA, 15 bp, Homo sapiens
atgaatgtaaaactt

SEQ ID NO: 67791 - DNA, 15 bp, Homo sapiens
tgaatgtaaaactta

SEQ ID NO: 67792 - DNA, 15 bp, Homo sapiens
gaatgtaaaacttac

SEQ ID NO: 67793 - DNA, 15 bp, Homo sapiens
aatgtaaaacttact

SEQ ID NO: 67794 - DNA, 15 bp, Homo sapiens
atgtaaaacttactg

SEQ ID NO: 67795 - DNA, 15 bp, Homo sapiens
tgtaaaacttactga

SEQ ID NO: 67796 - DNA, 15 bp, Homo sapiens
gtaaaacttactgaa

SEQ ID NO: 67797 - DNA, 15 bp, Homo sapiens
taaaacttactgaag

SEQ ID NO: 67798 - DNA, 15 bp, Homo sapiens
aaaacttactgaaga

SEQ ID NO: 67799 - DNA, 15 bp, Homo sapiens
aaacttactgaagaa

SEQ ID NO: 67800 - DNA, 15 bp, Homo sapiens
aacttactgaagaag

SEQ ID NO: 67801 - DNA, 15 bp, Homo sapiens
acttactgaagaagt

SEQ ID NO: 67802 - DNA, 15 bp, Homo sapiens
cttactgaagaagta

SEQ ID NO: 67803 - DNA, 15 bp, Homo sapiens
ttactgaagaagtag

SEQ ID NO: 67804 - DNA, 15 bp, Homo sapiens
tactgaagaagtagc

SEQ ID NO: 67805 - DNA, 15 bp, Homo sapiens
actgaagaagtagct

SEQ ID NO: 67806 - DNA, 15 bp, Homo sapiens
ctgaagaagtagctt

SEQ ID NO: 67807 - DNA, 15 bp, Homo sapiens
tgaagaagtagcttc

SEQ ID NO: 67808 - DNA, 15 bp, Homo sapiens
gaagaagtagcttcc

SEQ ID NO: 67809 - DNA, 15 bp, Homo sapiens
aagaagtagcttccc

SEQ ID NO: 67810 - DNA, 15 bp, Homo sapiens
agaagtagcttccca

SEQ ID NO: 67811 - DNA, 15 bp, Homo sapiens
gaagtagcttcccaa

SEQ ID NO: 67812 - DNA, 15 bp, Homo sapiens
aagtagcttcccaaa

SEQ ID NO: 67813 - DNA, 15 bp, Homo sapiens
agtagcttcccaaaa

SEQ ID NO: 67814 - DNA, 15 bp, Homo sapiens
gtagcttcccaaaat

SEQ ID NO: 67815 - DNA, 15 bp, Homo sapiens
tagcttcccaaaatt

SEQ ID NO: 67816 - DNA, 15 bp, Homo sapiens
agcttcccaaaattt

SEQ ID NO: 67817 - DNA, 15 bp, Homo sapiens
gcttcccaaaattta

SEQ ID NO: 67818 - DNA, 15 bp, Homo sapiens
cttcccaaaatttag

SEQ ID NO: 67819 - DNA, 15 bp, Homo sapiens
ttcccaaaatttagt

SEQ ID NO: 67820 - DNA, 15 bp, Homo sapiens
tcccaaaatttagtt

SEQ ID NO: 67821 - DNA, 15 bp, Homo sapiens
cccaaaatttagttt

SEQ ID NO: 67822 - DNA, 15 bp, Homo sapiens
ccaaaatttagtttt

SEQ ID NO: 67823 - DNA, 15 bp, Homo sapiens
caaaatttagttttc

SEQ ID NO: 67824 - DNA, 15 bp, Homo sapiens
aaaatttagttttct

SEQ ID NO: 67825 - DNA, 15 bp, Homo sapiens
aaatttagttttctg

SEQ ID NO: 67826 - DNA, 15 bp, Homo sapiens
aatttagttttctgt

SEQ ID NO: 67827 - DNA, 15 bp, Homo sapiens
atttagttttctgtt

SEQ ID NO: 67828 - DNA, 15 bp, Homo sapiens
tttagttttctgtta

SEQ ID NO: 67829 - DNA, 15 bp, Homo sapiens
ttagttttctgttaa

SEQ ID NO: 67830 - DNA, 15 bp, Homo sapiens
tagttttctgttaag

SEQ ID NO: 67831 - DNA, 15 bp, Homo sapiens
agttttctgttaagc

SEQ ID NO: 67832 - DNA, 15 bp, Homo sapiens
gttttctgttaagcc

SEQ ID NO: 67833 - DNA, 15 bp, Homo sapiens
ttttctgttaagcca

SEQ ID NO: 67834 - DNA, 15 bp, Homo sapiens
tttctgttaagccaa

SEQ ID NO: 67835 - DNA, 15 bp, Homo sapiens
ttctgttaagccaaa

SEQ ID NO: 67836 - DNA, 15 bp, Homo sapiens
tctgttaagccaaaa

SEQ ID NO: 67837 - DNA, 15 bp, Homo sapiens
ctgttaagccaaaaa

SEQ ID NO: 67838 - DNA, 15 bp, Homo sapiens
tgttaagccaaaaat

SEQ ID NO: 67839 - DNA, 15 bp, Homo sapiens
gttaagccaaaaata

SEQ ID NO: 67840 - DNA, 15 bp, Homo sapiens
ttaagccaaaaatat

SEQ ID NO: 67841 - DNA, 15 bp, Homo sapiens
taagccaaaaatatt

SEQ ID NO: 67842 - DNA, 15 bp, Homo sapiens
aagccaaaaatatta

SEQ ID NO: 67843 - DNA, 15 bp, Homo sapiens
agccaaaaatattat

SEQ ID NO: 67844 - DNA, 15 bp, Homo sapiens
gccaaaaatattatt

SEQ ID NO: 67845 - DNA, 15 bp, Homo sapiens
ccaaaaatattattt

SEQ ID NO: 67846 - DNA, 15 bp, Homo sapiens
caaaaatattatttt

SEQ ID NO: 67847 - DNA, 15 bp, Homo sapiens
aaaaatattatttta

SEQ ID NO: 67848 - DNA, 15 bp, Homo sapiens
aaaatattattttaa

SEQ ID NO: 67849 - DNA, 15 bp, Homo sapiens
aaatattattttaaa

SEQ ID NO: 67850 - DNA, 15 bp, Homo sapiens
aatattattttaaaa

SEQ ID NO: 67851 - DNA, 15 bp, Homo sapiens
atattattttaaaag

SEQ ID NO: 67852 - DNA, 15 bp, Homo sapiens
tattattttaaaaga

SEQ ID NO: 67853 - DNA, 15 bp, Homo sapiens
attattttaaaagag

SEQ ID NO: 67854 - DNA, 15 bp, Homo sapiens
ttattttaaaagagt

SEQ ID NO: 67855 - DNA, 15 bp, Homo sapiens
tattttaaaagagta

SEQ ID NO: 67856 - DNA, 15 bp, Homo sapiens
attttaaaagagtat

SEQ ID NO: 67857 - DNA, 15 bp, Homo sapiens
ttttaaaagagtatt

SEQ ID NO: 67858 - DNA, 15 bp, Homo sapiens
tttaaaagagtattt

SEQ ID NO: 67859 - DNA, 15 bp, Homo sapiens
ttaaaagagtatttg

SEQ ID NO: 67860 - DNA, 15 bp, Homo sapiens
taaaagagtatttgc

SEQ ID NO: 67861 - DNA, 15 bp, Homo sapiens
aaaagagtatttgca

SEQ ID NO: 67862 - DNA, 15 bp, Homo sapiens
aaagagtatttgcaa

SEQ ID NO: 67863 - DNA, 15 bp, Homo sapiens
aagagtatttgcaaa

SEQ ID NO: 67864 - DNA, 15 bp, Homo sapiens
agagtatttgcaaat

SEQ ID NO: 67865 - DNA, 15 bp, Homo sapiens
gagtatttgcaaatt

SEQ ID NO: 67866 - DNA, 15 bp, Homo sapiens
agtatttgcaaattt

SEQ ID NO: 67867 - DNA, 15 bp, Homo sapiens
gtatttgcaaatttt

SEQ ID NO: 67868 - DNA, 15 bp, Homo sapiens
tatttgcaaattttg

SEQ ID NO: 67869 - DNA, 15 bp, Homo sapiens
atttgcaaattttga

SEQ ID NO: 67870 - DNA, 15 bp, Homo sapiens
tttgcaaattttgaa

SEQ ID NO: 67871 - DNA, 15 bp, Homo sapiens
ttgcaaattttgaag

SEQ ID NO: 67872 - DNA, 15 bp, Homo sapiens
tgcaaattttgaagt

SEQ ID NO: 67873 - DNA, 15 bp, Homo sapiens
gcaaattttgaagtt

SEQ ID NO: 67874 - DNA, 15 bp, Homo sapiens
caaattttgaagttg

SEQ ID NO: 67875 - DNA, 15 bp, Homo sapiens
aaattttgaagttga

SEQ ID NO: 67876 - DNA, 15 bp, Homo sapiens
aattttgaagttgac

SEQ ID NO: 67877 - DNA, 15 bp, Homo sapiens
attttgaagttgaca

SEQ ID NO: 67878 - DNA, 15 bp, Homo sapiens
ttttgaagttgacat

SEQ ID NO: 67879 - DNA, 15 bp, Homo sapiens
tttgaagttgacatt

SEQ ID NO: 67880 - DNA, 15 bp, Homo sapiens
ttgaagttgacatta

SEQ ID NO: 67881 - DNA, 15 bp, Homo sapiens
tgaagttgacattaa

SEQ ID NO: 67882 - DNA, 15 bp, Homo sapiens
gaagttgacattaat

SEQ ID NO: 67883 - DNA, 15 bp, Homo sapiens
aagttgacattaatt

SEQ ID NO: 67884 - DNA, 15 bp, Homo sapiens
agttgacattaattg

SEQ ID NO: 67885 - DNA, 15 bp, Homo sapiens
gttgacattaattga

SEQ ID NO: 67886 - DNA, 15 bp, Homo sapiens
ttgacattaattgag

SEQ ID NO: 67887 - DNA, 15 bp, Homo sapiens
tgacattaattgaga

SEQ ID NO: 67888 - DNA, 15 bp, Homo sapiens
gacattaattgagaa

SEQ ID NO: 67889 - DNA, 15 bp, Homo sapiens
acattaattgagaat

SEQ ID NO: 67890 - DNA, 15 bp, Homo sapiens
cattaattgagaatg

SEQ ID NO: 67891 - DNA, 15 bp, Homo sapiens
attaattgagaatgt

SEQ ID NO: 67892 - DNA, 15 bp, Homo sapiens
ttaattgagaatgtt

SEQ ID NO: 67893 - DNA, 15 bp, Homo sapiens
taattgagaatgtta

SEQ ID NO: 67894 - DNA, 15 bp, Homo sapiens
aattgagaatgttac

SEQ ID NO: 67895 - DNA, 15 bp, Homo sapiens
attgagaatgttact

SEQ ID NO: 67896 - DNA, 15 bp, Homo sapiens
ttgagaatgttacta

SEQ ID NO: 67897 - DNA, 15 bp, Homo sapiens
tgagaatgttactaa

SEQ ID NO: 67898 - DNA, 15 bp, Homo sapiens
gagaatgttactaag

SEQ ID NO: 67899 - DNA, 15 bp, Homo sapiens
agaatgttactaagg

SEQ ID NO: 67900 - DNA, 15 bp, Homo sapiens
gaatgttactaaggc

SEQ ID NO: 67901 - DNA, 15 bp, Homo sapiens
aatgttactaaggct

SEQ ID NO: 67902 - DNA, 15 bp, Homo sapiens
atgttactaaggcta

SEQ ID NO: 67903 - DNA, 15 bp, Homo sapiens
tgttactaaggctaa

SEQ ID NO: 67904 - DNA, 15 bp, Homo sapiens
gttactaaggctaaa

SEQ ID NO: 67905 - DNA, 15 bp, Homo sapiens
ttactaaggctaaac

SEQ ID NO: 67906 - DNA, 15 bp, Homo sapiens
tactaaggctaaact

SEQ ID NO: 67907 - DNA, 15 bp, Homo sapiens
actaaggctaaactg

SEQ ID NO: 67908 - DNA, 15 bp, Homo sapiens
ctaaggctaaactgg

SEQ ID NO: 67909 - DNA, 15 bp, Homo sapiens
taaggctaaactgga

SEQ ID NO: 67910 - DNA, 15 bp, Homo sapiens
aaggctaaactggac

SEQ ID NO: 67911 - DNA, 15 bp, Homo sapiens
aggctaaactggacc

SEQ ID NO: 67912 - DNA, 15 bp, Homo sapiens
ggctaaactggaccc

SEQ ID NO: 67913 - DNA, 15 bp, Homo sapiens
gctaaactggacccg

SEQ ID NO: 67914 - DNA, 15 bp, Homo sapiens
ctaaactggacccgc

SEQ ID NO: 67915 - DNA, 15 bp, Homo sapiens
taaactggacccgct

SEQ ID NO: 67916 - DNA, 15 bp, Homo sapiens
aaactggacccgctt

SEQ ID NO: 67917 - DNA, 15 bp, Homo sapiens
aactggacccgcttg

SEQ ID NO: 67918 - DNA, 15 bp, Homo sapiens
actggacccgcttgc

SEQ ID NO: 67919 - DNA, 15 bp, Homo sapiens
ctggacccgcttgcc

SEQ ID NO: 67920 - DNA, 15 bp, Homo sapiens
tggacccgcttgccc

SEQ ID NO: 67921 - DNA, 15 bp, Homo sapiens
ggacccgcttgccca

SEQ ID NO: 67922 - DNA, 15 bp, Homo sapiens
gacccgcttgcccag

SEQ ID NO: 67923 - DNA, 15 bp, Homo sapiens
acccgcttgcccaga

SEQ ID NO: 67924 - DNA, 15 bp, Homo sapiens
cccgcttgcccagaa

SEQ ID NO: 67925 - DNA, 15 bp, Homo sapiens
ccgcttgcccagaag

SEQ ID NO: 67926 - DNA, 15 bp, Homo sapiens
cgcttgcccagaaga

SEQ ID NO: 67927 - DNA, 15 bp, Homo sapiens
gcttgcccagaagat

SEQ ID NO: 67928 - DNA, 15 bp, Homo sapiens
cttgcccagaagata

SEQ ID NO: 67929 - DNA, 15 bp, Homo sapiens
ttgcccagaagataa

SEQ ID NO: 67930 - DNA, 15 bp, Homo sapiens
tgcccagaagataat

SEQ ID NO: 67931 - DNA, 15 bp, Homo sapiens
gcccagaagataatt

SEQ ID NO: 67932 - DNA, 15 bp, Homo sapiens
cccagaagataatta

SEQ ID NO: 67933 - DNA, 15 bp, Homo sapiens
ccagaagataattat

SEQ ID NO: 67934 - DNA, 15 bp, Homo sapiens
cagaagataattatg

SEQ ID NO: 67935 - DNA, 15 bp, Homo sapiens
agaagataattatgg

SEQ ID NO: 67936 - DNA, 15 bp, Homo sapiens
gaagataattatgga

SEQ ID NO: 67937 - DNA, 15 bp, Homo sapiens
aagataattatggaa

SEQ ID NO: 67938 - DNA, 15 bp, Homo sapiens
agataattatggaaa

SEQ ID NO: 67939 - DNA, 15 bp, Homo sapiens
gataattatggaaaa

SEQ ID NO: 67940 - DNA, 15 bp, Homo sapiens
ataattatggaaaaa

SEQ ID NO: 67941 - DNA, 15 bp, Homo sapiens
taattatggaaaaat

SEQ ID NO: 67942 - DNA, 15 bp, Homo sapiens
aattatggaaaaatt

SEQ ID NO: 67943 - DNA, 15 bp, Homo sapiens
attatggaaaaattc

SEQ ID NO: 67944 - DNA, 15 bp, Homo sapiens
ttatggaaaaattct

SEQ ID NO: 67945 - DNA, 15 bp, Homo sapiens
tatggaaaaattctt

SEQ ID NO: 67946 - DNA, 15 bp, Homo sapiens
atggaaaaattcttt

SEQ ID NO: 67947 - DNA, 15 bp, Homo sapiens
tggaaaaattctttt

SEQ ID NO: 67948 - DNA, 15 bp, Homo sapiens
ggaaaaattcttttg

SEQ ID NO: 67949 - DNA, 15 bp, Homo sapiens
gaaaaattcttttgt

SEQ ID NO: 67950 - DNA, 15 bp, Homo sapiens
aaaaattcttttgtg

SEQ ID NO: 67951 - DNA, 15 bp, Homo sapiens
aaaattcttttgtga

SEQ ID NO: 67952 - DNA, 15 bp, Homo sapiens
aaattcttttgtgac

SEQ ID NO: 67953 - DNA, 15 bp, Homo sapiens
aattcttttgtgact

SEQ ID NO: 67954 - DNA, 15 bp, Homo sapiens
attcttttgtgactt

SEQ ID NO: 67955 - DNA, 15 bp, Homo sapiens
ttcttttgtgacttc

SEQ ID NO: 67956 - DNA, 15 bp, Homo sapiens
tcttttgtgacttcc

SEQ ID NO: 67957 - DNA, 15 bp, Homo sapiens
cttttgtgacttcca

SEQ ID NO: 67958 - DNA, 15 bp, Homo sapiens
ttttgtgacttccaa

SEQ ID NO: 67959 - DNA, 15 bp, Homo sapiens
tttgtgacttccaaa

SEQ ID NO: 67960 - DNA, 15 bp, Homo sapiens
ttgtgacttccaaag

SEQ ID NO: 67961 - DNA, 15 bp, Homo sapiens
tgtgacttccaaagc

SEQ ID NO: 67962 - DNA, 15 bp, Homo sapiens
gtgacttccaaagca

SEQ ID NO: 67963 - DNA, 15 bp, Homo sapiens
tgacttccaaagcag

SEQ ID NO: 67964 - DNA, 15 bp, Homo sapiens
gacttccaaagcagt

SEQ ID NO: 67965 - DNA, 15 bp, Homo sapiens
acttccaaagcagtc

SEQ ID NO: 67966 - DNA, 15 bp, Homo sapiens
cttccaaagcagtct

SEQ ID NO: 67967 - DNA, 15 bp, Homo sapiens
ttccaaagcagtcta

SEQ ID NO: 67968 - DNA, 15 bp, Homo sapiens
tccaaagcagtctac

SEQ ID NO: 67969 - DNA, 15 bp, Homo sapiens
ccaaagcagtctact

SEQ ID NO: 67970 - DNA, 15 bp, Homo sapiens
caaagcagtctacta

SEQ ID NO: 67971 - DNA, 15 bp, Homo sapiens
aaagcagtctactat

SEQ ID NO: 67972 - DNA, 15 bp, Homo sapiens
aagcagtctactatt

SEQ ID NO: 67973 - DNA, 15 bp, Homo sapiens
agcagtctactatta

SEQ ID NO: 67974 - DNA, 15 bp, Homo sapiens
gcagtctactattag

SEQ ID NO: 67975 - DNA, 15 bp, Homo sapiens
cagtctactattagc

SEQ ID NO: 67976 - DNA, 15 bp, Homo sapiens
agtctactattagca

SEQ ID NO: 67977 - DNA, 15 bp, Homo sapiens
gtctactattagcat

SEQ ID NO: 67978 - DNA, 15 bp, Homo sapiens
tctactattagcatg

SEQ ID NO: 67979 - DNA, 15 bp, Homo sapiens
ctactattagcatga

SEQ ID NO: 67980 - DNA, 15 bp, Homo sapiens
tactattagcatgaa

SEQ ID NO: 67981 - DNA, 15 bp, Homo sapiens
actattagcatgaat

SEQ ID NO: 67982 - DNA, 15 bp, Homo sapiens
ctattagcatgaatt

SEQ ID NO: 67983 - DNA, 15 bp, Homo sapiens
tattagcatgaatta

SEQ ID NO: 67984 - DNA, 15 bp, Homo sapiens
attagcatgaattac

SEQ ID NO: 67985 - DNA, 15 bp, Homo sapiens
ttagcatgaattact

SEQ ID NO: 67986 - DNA, 15 bp, Homo sapiens
tagcatgaattactg

SEQ ID NO: 67987 - DNA, 15 bp, Homo sapiens
agcatgaattactga

SEQ ID NO: 67988 - DNA, 15 bp, Homo sapiens
gcatgaattactgac

SEQ ID NO: 67989 - DNA, 15 bp, Homo sapiens
catgaattactgaca

SEQ ID NO: 67990 - DNA, 15 bp, Homo sapiens
atgaattactgacag

SEQ ID NO: 67991 - DNA, 15 bp, Homo sapiens
tgaattactgacagt

SEQ ID NO: 67992 - DNA, 15 bp, Homo sapiens
gaattactgacagtc

SEQ ID NO: 67993 - DNA, 15 bp, Homo sapiens
aattactgacagtca

SEQ ID NO: 67994 - DNA, 15 bp, Homo sapiens
attactgacagtcat

SEQ ID NO: 67995 - DNA, 15 bp, Homo sapiens
ttactgacagtcatc

SEQ ID NO: 67996 - DNA, 15 bp, Homo sapiens
tactgacagtcatcc

SEQ ID NO: 67997 - DNA, 15 bp, Homo sapiens
actgacagtcatcca

SEQ ID NO: 67998 - DNA, 15 bp, Homo sapiens
ctgacagtcatccaa

SEQ ID NO: 67999 - DNA, 15 bp, Homo sapiens
tgacagtcatccaaa

SEQ ID NO: 68000 - DNA, 15 bp, Homo sapiens
gacagtcatccaaat

SEQ ID NO: 68001 - DNA, 15 bp, Homo sapiens
acagtcatccaaata

SEQ ID NO: 68002 - DNA, 15 bp, Homo sapiens
cagtcatccaaatat

SEQ ID NO: 68003 - DNA, 15 bp, Homo sapiens
agtcatccaaatata

SEQ ID NO: 68004 - DNA, 15 bp, Homo sapiens
gtcatccaaatatat

SEQ ID NO: 68005 - DNA, 15 bp, Homo sapiens
tcatccaaatatata

SEQ ID NO: 68006 - DNA, 15 bp, Homo sapiens
catccaaatatatag

SEQ ID NO: 68007 - DNA, 15 bp, Homo sapiens
atccaaatatatagg

SEQ ID NO: 68008 - DNA, 15 bp, Homo sapiens
tccaaatatatagga

SEQ ID NO: 68009 - DNA, 15 bp, Homo sapiens
ccaaatatataggaa

SEQ ID NO: 68010 - DNA, 15 bp, Homo sapiens
caaatatataggaac

SEQ ID NO: 68011 - DNA, 15 bp, Homo sapiens
aaatatataggaaca

SEQ ID NO: 68012 - DNA, 15 bp, Homo sapiens
aatatataggaacaa

SEQ ID NO: 68013 - DNA, 15 bp, Homo sapiens
atatataggaacaaa

SEQ ID NO: 68014 - DNA, 15 bp, Homo sapiens
tatataggaacaaaa

SEQ ID NO: 68015 - DNA, 15 bp, Homo sapiens
atataggaacaaaaa

SEQ ID NO: 68016 - DNA, 15 bp, Homo sapiens
tataggaacaaaaaa

SEQ ID NO: 68017 - DNA, 15 bp, Homo sapiens
ataggaacaaaaaat

SEQ ID NO: 68018 - DNA, 15 bp, Homo sapiens
taggaacaaaaaatt

SEQ ID NO: 68019 - DNA, 15 bp, Homo sapiens
aggaacaaaaaatta

SEQ ID NO: 68020 - DNA, 15 bp, Homo sapiens
ggaacaaaaaattaa

SEQ ID NO: 68021 - DNA, 15 bp, Homo sapiens
gaacaaaaaattaaa

SEQ ID NO: 68022 - DNA, 15 bp, Homo sapiens
aacaaaaaattaaat

SEQ ID NO: 68023 - DNA, 15 bp, Homo sapiens
acaaaaaattaaatg

SEQ ID NO: 68024 - DNA, 15 bp, Homo sapiens
caaaaaattaaatgt

SEQ ID NO: 68025 - DNA, 15 bp, Homo sapiens
aaaaaattaaatgtt

SEQ ID NO: 68026 - DNA, 15 bp, Homo sapiens
aaaaattaaatgttt

SEQ ID NO: 68027 - DNA, 15 bp, Homo sapiens
aaaattaaatgttta

SEQ ID NO: 68028 - DNA, 15 bp, Homo sapiens
aaattaaatgtttat

SEQ ID NO: 68029 - DNA, 15 bp, Homo sapiens
aattaaatgtttatg

SEQ ID NO: 68030 - DNA, 15 bp, Homo sapiens
attaaatgtttatgt

SEQ ID NO: 68031 - DNA, 15 bp, Homo sapiens
ttaaatgtttatgta

SEQ ID NO: 68032 - DNA, 15 bp, Homo sapiens
taaatgtttatgtaa

SEQ ID NO: 68033 - DNA, 15 bp, Homo sapiens
aaatgtttatgtaac

SEQ ID NO: 68034 - DNA, 15 bp, Homo sapiens
aatgtttatgtaact

SEQ ID NO: 68035 - DNA, 15 bp, Homo sapiens
atgtttatgtaactt

SEQ ID NO: 68036 - DNA, 15 bp, Homo sapiens
tgtttatgtaacttt

SEQ ID NO: 68037 - DNA, 15 bp, Homo sapiens
gtttatgtaactttg

SEQ ID NO: 68038 - DNA, 15 bp, Homo sapiens
tttatgtaactttga

SEQ ID NO: 68039 - DNA, 15 bp, Homo sapiens
ttatgtaactttgaa

SEQ ID NO: 68040 - DNA, 15 bp, Homo sapiens
tatgtaactttgaaa

SEQ ID NO: 68041 - DNA, 15 bp, Homo sapiens
atgtaactttgaaaa

SEQ ID NO: 68042 - DNA, 15 bp, Homo sapiens
tgtaactttgaaaaa

SEQ ID NO: 68043 - DNA, 15 bp, Homo sapiens
gtaactttgaaaaaa

SEQ ID NO: 68044 - DNA, 15 bp, Homo sapiens
taactttgaaaaaaa

SEQ ID NO: 68045 - DNA, 15 bp, Homo sapiens
aactttgaaaaaaaa

SEQ ID NO: 68046 - DNA, 15 bp, Homo sapiens
actttgaaaaaaaag

SEQ ID NO: 68047 - DNA, 15 bp, Homo sapiens
ctttgaaaaaaaagc

SEQ ID NO: 68048 - DNA, 15 bp, Homo sapiens
tttgaaaaaaaagcc

SEQ ID NO: 68049 - DNA, 15 bp, Homo sapiens
ttgaaaaaaaagcct

SEQ ID NO: 68050 - DNA, 15 bp, Homo sapiens
tgaaaaaaaagcctt

SEQ ID NO: 68051 - DNA, 15 bp, Homo sapiens
gaaaaaaaagccttt

SEQ ID NO: 68052 - DNA, 15 bp, Homo sapiens
aaaaaaaagcctttg

SEQ ID NO: 68053 - DNA, 15 bp, Homo sapiens
aaaaaaagcctttga

SEQ ID NO: 68054 - DNA, 15 bp, Homo sapiens
aaaaaagcctttgaa

SEQ ID NO: 68055 - DNA, 15 bp, Homo sapiens
aaaaagcctttgaag

SEQ ID NO: 68056 - DNA, 15 bp, Homo sapiens
aaaagcctttgaaga

SEQ ID NO: 68057 - DNA, 15 bp, Homo sapiens
aaagcctttgaagaa

SEQ ID NO: 68058 - DNA, 15 bp, Homo sapiens
aagcctttgaagaaa

SEQ ID NO: 68059 - DNA, 15 bp, Homo sapiens
agcctttgaagaaaa

SEQ ID NO: 68060 - DNA, 15 bp, Homo sapiens
gcctttgaagaaaat

SEQ ID NO: 68061 - DNA, 15 bp, Homo sapiens
cctttgaagaaaata

SEQ ID NO: 68062 - DNA, 15 bp, Homo sapiens
ctttgaagaaaataa

SEQ ID NO: 68063 - DNA, 15 bp, Homo sapiens
tttgaagaaaataat

SEQ ID NO: 68064 - DNA, 15 bp, Homo sapiens
ttgaagaaaataatt

SEQ ID NO: 68065 - DNA, 15 bp, Homo sapiens
tgaagaaaataattg

SEQ ID NO: 68066 - DNA, 15 bp, Homo sapiens
gaagaaaataattga

SEQ ID NO: 68067 - DNA, 15 bp, Homo sapiens
aagaaaataattgaa

SEQ ID NO: 68068 - DNA, 15 bp, Homo sapiens
agaaaataattgaat

SEQ ID NO: 68069 - DNA, 15 bp, Homo sapiens
gaaaataattgaatg

SEQ ID NO: 68070 - DNA, 15 bp, Homo sapiens
aaaataattgaatgc

SEQ ID NO: 68071 - DNA, 15 bp, Homo sapiens
aaataattgaatgct

SEQ ID NO: 68072 - DNA, 15 bp, Homo sapiens
aataattgaatgctg

SEQ ID NO: 68073 - DNA, 15 bp, Homo sapiens
ataattgaatgctgt

SEQ ID NO: 68074 - DNA, 15 bp, Homo sapiens
taattgaatgctgtc

SEQ ID NO: 68075 - DNA, 15 bp, Homo sapiens
aattgaatgctgtct

SEQ ID NO: 68076 - DNA, 15 bp, Homo sapiens
attgaatgctgtctg

SEQ ID NO: 68077 - DNA, 15 bp, Homo sapiens
ttgaatgctgtctgg

SEQ ID NO: 68078 - DNA, 15 bp, Homo sapiens
tgaatgctgtctggg

SEQ ID NO: 68079 - DNA, 15 bp, Homo sapiens
gaatgctgtctggga

SEQ ID NO: 68080 - DNA, 15 bp, Homo sapiens
aatgctgtctgggag

SEQ ID NO: 68081 - DNA, 15 bp, Homo sapiens
atgctgtctgggaga

SEQ ID NO: 68082 - DNA, 15 bp, Homo sapiens
tgctgtctgggagac

SEQ ID NO: 68083 - DNA, 15 bp, Homo sapiens
gctgtctgggagaca

SEQ ID NO: 68084 - DNA, 15 bp, Homo sapiens
ctgtctgggagacag

SEQ ID NO: 68085 - DNA, 15 bp, Homo sapiens
tgtctgggagacaga

SEQ ID NO: 68086 - DNA, 15 bp, Homo sapiens
gtctgggagacagat

SEQ ID NO: 68087 - DNA, 15 bp, Homo sapiens
tctgggagacagatt

SEQ ID NO: 68088 - DNA, 15 bp, Homo sapiens
ctgggagacagattt

SEQ ID NO: 68089 - DNA, 15 bp, Homo sapiens
tgggagacagatttc

SEQ ID NO: 68090 - DNA, 15 bp, Homo sapiens
gggagacagatttct

SEQ ID NO: 68091 - DNA, 15 bp, Homo sapiens
ggagacagatttctt

SEQ ID NO: 68092 - DNA, 15 bp, Homo sapiens
gagacagatttcttt

SEQ ID NO: 68093 - DNA, 15 bp, Homo sapiens
agacagatttctttc

SEQ ID NO: 68094 - DNA, 15 bp, Homo sapiens
gacagatttctttca

SEQ ID NO: 68095 - DNA, 15 bp, Homo sapiens
acagatttctttcag

SEQ ID NO: 68096 - DNA, 15 bp, Homo sapiens
cagatttctttcagc

SEQ ID NO: 68097 - DNA, 15 bp, Homo sapiens
agatttctttcagca

SEQ ID NO: 68098 - DNA, 15 bp, Homo sapiens
gatttctttcagcac

SEQ ID NO: 68099 - DNA, 15 bp, Homo sapiens
atttctttcagcact

SEQ ID NO: 68100 - DNA, 15 bp, Homo sapiens
tttctttcagcactt

SEQ ID NO: 68101 - DNA, 15 bp, Homo sapiens
ttctttcagcactta

SEQ ID NO: 68102 - DNA, 15 bp, Homo sapiens
tctttcagcacttaa

SEQ ID NO: 68103 - DNA, 15 bp, Homo sapiens
ctttcagcacttaaa

SEQ ID NO: 68104 - DNA, 15 bp, Homo sapiens
tttcagcacttaaag

SEQ ID NO: 68105 - DNA, 15 bp, Homo sapiens
ttcagcacttaaagt

SEQ ID NO: 68106 - DNA, 15 bp, Homo sapiens
tcagcacttaaagta

SEQ ID NO: 68107 - DNA, 15 bp, Homo sapiens
cagcacttaaagtac

SEQ ID NO: 68108 - DNA, 15 bp, Homo sapiens
agcacttaaagtaca

SEQ ID NO: 68109 - DNA, 15 bp, Homo sapiens
gcacttaaagtacat

SEQ ID NO: 68110 - DNA, 15 bp, Homo sapiens
cacttaaagtacata

SEQ ID NO: 68111 - DNA, 15 bp, Homo sapiens
acttaaagtacataa

SEQ ID NO: 68112 - DNA, 15 bp, Homo sapiens
cttaaagtacataac

SEQ ID NO: 68113 - DNA, 15 bp, Homo sapiens
ttaaagtacataaca

SEQ ID NO: 68114 - DNA, 15 bp, Homo sapiens
taaagtacataacac

SEQ ID NO: 68115 - DNA, 15 bp, Homo sapiens
aaagtacataacaca

SEQ ID NO: 68116 - DNA, 15 bp, Homo sapiens
aagtacataacacac

SEQ ID NO: 68117 - DNA, 15 bp, Homo sapiens
agtacataacacact

SEQ ID NO: 68118 - DNA, 15 bp, Homo sapiens
gtacataacacacta

SEQ ID NO: 68119 - DNA, 15 bp, Homo sapiens
tacataacacactac

SEQ ID NO: 68120 - DNA, 15 bp, Homo sapiens
acataacacactact

SEQ ID NO: 68121 - DNA, 15 bp, Homo sapiens
cataacacactactt

SEQ ID NO: 68122 - DNA, 15 bp, Homo sapiens
ataacacactacttt

SEQ ID NO: 68123 - DNA, 15 bp, Homo sapiens
taacacactactttt

SEQ ID NO: 68124 - DNA, 15 bp, Homo sapiens
aacacactactttta

SEQ ID NO: 68125 - DNA, 15 bp, Homo sapiens
acacactacttttac

SEQ ID NO: 68126 - DNA, 15 bp, Homo sapiens
cacactacttttact

SEQ ID NO: 68127 - DNA, 15 bp, Homo sapiens
acactacttttactt

SEQ ID NO: 68128 - DNA, 15 bp, Homo sapiens
cactacttttacttt

SEQ ID NO: 68129 - DNA, 15 bp, Homo sapiens
actacttttactttt

SEQ ID NO: 68130 - DNA, 15 bp, Homo sapiens
ctacttttacttttc

SEQ ID NO: 68131 - DNA, 15 bp, Homo sapiens
tacttttacttttcc

SEQ ID NO: 68132 - DNA, 15 bp, Homo sapiens
acttttacttttccc

SEQ ID NO: 68133 - DNA, 15 bp, Homo sapiens
cttttacttttccca

SEQ ID NO: 68134 - DNA, 15 bp, Homo sapiens
ttttacttttcccac

SEQ ID NO: 68135 - DNA, 15 bp, Homo sapiens
tttacttttcccact

SEQ ID NO: 68136 - DNA, 15 bp, Homo sapiens
ttacttttcccactt

SEQ ID NO: 68137 - DNA, 15 bp, Homo sapiens
tacttttcccacttg

SEQ ID NO: 68138 - DNA, 15 bp, Homo sapiens
acttttcccacttga

SEQ ID NO: 68139 - DNA, 15 bp, Homo sapiens
cttttcccacttgat

SEQ ID NO: 68140 - DNA, 15 bp, Homo sapiens
ttttcccacttgatt

SEQ ID NO: 68141 - DNA, 15 bp, Homo sapiens
tttcccacttgattt

SEQ ID NO: 68142 - DNA, 15 bp, Homo sapiens
ttcccacttgatttt

SEQ ID NO: 68143 - DNA, 15 bp, Homo sapiens
tcccacttgatttta

SEQ ID NO: 68144 - DNA, 15 bp, Homo sapiens
cccacttgattttaa

SEQ ID NO: 68145 - DNA, 15 bp, Homo sapiens
ccacttgattttaaa

SEQ ID NO: 68146 - DNA, 15 bp, Homo sapiens
cacttgattttaaat

SEQ ID NO: 68147 - DNA, 15 bp, Homo sapiens
acttgattttaaatt

SEQ ID NO: 68148 - DNA, 15 bp, Homo sapiens
cttgattttaaatta

SEQ ID NO: 68149 - DNA, 15 bp, Homo sapiens
ttgattttaaattat

SEQ ID NO: 68150 - DNA, 15 bp, Homo sapiens
tgattttaaattatc

SEQ ID NO: 68151 - DNA, 15 bp, Homo sapiens
gattttaaattatca

SEQ ID NO: 68152 - DNA, 15 bp, Homo sapiens
attttaaattatcag

SEQ ID NO: 68153 - DNA, 15 bp, Homo sapiens
ttttaaattatcagg

SEQ ID NO: 68154 - DNA, 15 bp, Homo sapiens
tttaaattatcaggg

SEQ ID NO: 68155 - DNA, 15 bp, Homo sapiens
ttaaattatcagggt

SEQ ID NO: 68156 - DNA, 15 bp, Homo sapiens
taaattatcagggtt

SEQ ID NO: 68157 - DNA, 15 bp, Homo sapiens
aaattatcagggtta

SEQ ID NO: 68158 - DNA, 15 bp, Homo sapiens
aattatcagggttat

SEQ ID NO: 68159 - DNA, 15 bp, Homo sapiens
attatcagggttatt

SEQ ID NO: 68160 - DNA, 15 bp, Homo sapiens
ttatcagggttatta

SEQ ID NO: 68161 - DNA, 15 bp, Homo sapiens
tatcagggttattaa

SEQ ID NO: 68162 - DNA, 15 bp, Homo sapiens
atcagggttattaag

SEQ ID NO: 68163 - DNA, 15 bp, Homo sapiens
tcagggttattaaga

SEQ ID NO: 68164 - DNA, 15 bp, Homo sapiens
cagggttattaagac

SEQ ID NO: 68165 - DNA, 15 bp, Homo sapiens
agggttattaagacc

SEQ ID NO: 68166 - DNA, 15 bp, Homo sapiens
gggttattaagacct

SEQ ID NO: 68167 - DNA, 15 bp, Homo sapiens
ggttattaagacctt

SEQ ID NO: 68168 - DNA, 15 bp, Homo sapiens
gttattaagacctta

SEQ ID NO: 68169 - DNA, 15 bp, Homo sapiens
ttattaagaccttaa

SEQ ID NO: 68170 - DNA, 15 bp, Homo sapiens
tattaagaccttaaa

SEQ ID NO: 68171 - DNA, 15 bp, Homo sapiens
attaagaccttaaaa

SEQ ID NO: 68172 - DNA, 15 bp, Homo sapiens
ttaagaccttaaaat

SEQ ID NO: 68173 - DNA, 15 bp, Homo sapiens
taagaccttaaaatt

SEQ ID NO: 68174 - DNA, 15 bp, Homo sapiens
aagaccttaaaatta

SEQ ID NO: 68175 - DNA, 15 bp, Homo sapiens
agaccttaaaattat

SEQ ID NO: 68176 - DNA, 15 bp, Homo sapiens
gaccttaaaattatt

SEQ ID NO: 68177 - DNA, 15 bp, Homo sapiens
accttaaaattattt

SEQ ID NO: 68178 - DNA, 15 bp, Homo sapiens
ccttaaaattatttt

SEQ ID NO: 68179 - DNA, 15 bp, Homo sapiens
cttaaaattatttta

SEQ ID NO: 68180 - DNA, 15 bp, Homo sapiens
ttaaaattattttac

SEQ ID NO: 68181 - DNA, 15 bp, Homo sapiens
taaaattattttacc

SEQ ID NO: 68182 - DNA, 15 bp, Homo sapiens
aaaattattttacca

SEQ ID NO: 68183 - DNA, 15 bp, Homo sapiens
aaattattttaccag

SEQ ID NO: 68184 - DNA, 15 bp, Homo sapiens
aattattttaccagg

SEQ ID NO: 68185 - DNA, 15 bp, Homo sapiens
attattttaccaggt

SEQ ID NO: 68186 - DNA, 15 bp, Homo sapiens
ttattttaccaggtt

SEQ ID NO: 68187 - DNA, 15 bp, Homo sapiens
tattttaccaggttt

SEQ ID NO: 68188 - DNA, 15 bp, Homo sapiens
attttaccaggtttt

SEQ ID NO: 68189 - DNA, 15 bp, Homo sapiens
ttttaccaggttttt

SEQ ID NO: 68190 - DNA, 15 bp, Homo sapiens
tttaccaggttttta

SEQ ID NO: 68191 - DNA, 15 bp, Homo sapiens
ttaccaggtttttac

SEQ ID NO: 68192 - DNA, 15 bp, Homo sapiens
taccaggtttttaca

SEQ ID NO: 68193 - DNA, 15 bp, Homo sapiens
accaggtttttacat

SEQ ID NO: 68194 - DNA, 15 bp, Homo sapiens
ccaggtttttacatg

SEQ ID NO: 68195 - DNA, 15 bp, Homo sapiens
caggtttttacatgt

SEQ ID NO: 68196 - DNA, 15 bp, Homo sapiens
aggtttttacatgtg

SEQ ID NO: 68197 - DNA, 15 bp, Homo sapiens
ggtttttacatgtga

SEQ ID NO: 68198 - DNA, 15 bp, Homo sapiens
gtttttacatgtgag

SEQ ID NO: 68199 - DNA, 15 bp, Homo sapiens
tttttacatgtgagc

SEQ ID NO: 68200 - DNA, 15 bp, Homo sapiens
ttttacatgtgagct

SEQ ID NO: 68201 - DNA, 15 bp, Homo sapiens
tttacatgtgagctg

SEQ ID NO: 68202 - DNA, 15 bp, Homo sapiens
ttacatgtgagctgt

SEQ ID NO: 68203 - DNA, 15 bp, Homo sapiens
tacatgtgagctgtg

SEQ ID NO: 68204 - DNA, 15 bp, Homo sapiens
acatgtgagctgtga

SEQ ID NO: 68205 - DNA, 15 bp, Homo sapiens
catgtgagctgtgac

SEQ ID NO: 68206 - DNA, 15 bp, Homo sapiens
atgtgagctgtgaca

SEQ ID NO: 68207 - DNA, 15 bp, Homo sapiens
tgtgagctgtgacat

SEQ ID NO: 68208 - DNA, 15 bp, Homo sapiens
gtgagctgtgacatg

SEQ ID NO: 68209 - DNA, 15 bp, Homo sapiens
tgagctgtgacatga

SEQ ID NO: 68210 - DNA, 15 bp, Homo sapiens
gagctgtgacatgac

SEQ ID NO: 68211 - DNA, 15 bp, Homo sapiens
agctgtgacatgact

SEQ ID NO: 68212 - DNA, 15 bp, Homo sapiens
gctgtgacatgactg

SEQ ID NO: 68213 - DNA, 15 bp, Homo sapiens
ctgtgacatgactgg

SEQ ID NO: 68214 - DNA, 15 bp, Homo sapiens
tgtgacatgactggc

SEQ ID NO: 68215 - DNA, 15 bp, Homo sapiens
gtgacatgactggca

SEQ ID NO: 68216 - DNA, 15 bp, Homo sapiens
tgacatgactggcat

SEQ ID NO: 68217 - DNA, 15 bp, Homo sapiens
gacatgactggcatt

SEQ ID NO: 68218 - DNA, 15 bp, Homo sapiens
acatgactggcattt

SEQ ID NO: 68219 - DNA, 15 bp, Homo sapiens
catgactggcatttt

SEQ ID NO: 68220 - DNA, 15 bp, Homo sapiens
atgactggcattttc

SEQ ID NO: 68221 - DNA, 15 bp, Homo sapiens
tgactggcattttct

SEQ ID NO: 68222 - DNA, 15 bp, Homo sapiens
gactggcattttctt

SEQ ID NO: 68223 - DNA, 15 bp, Homo sapiens
actggcattttcttt

SEQ ID NO: 68224 - DNA, 15 bp, Homo sapiens
ctggcattttctttg

SEQ ID NO: 68225 - DNA, 15 bp, Homo sapiens
tggcattttctttga

SEQ ID NO: 68226 - DNA, 15 bp, Homo sapiens
ggcattttctttgat

SEQ ID NO: 68227 - DNA, 15 bp, Homo sapiens
gcattttctttgatt

SEQ ID NO: 68228 - DNA, 15 bp, Homo sapiens
cattttctttgattt

SEQ ID NO: 68229 - DNA, 15 bp, Homo sapiens
attttctttgatttc

SEQ ID NO: 68230 - DNA, 15 bp, Homo sapiens
ttttctttgatttca

SEQ ID NO: 68231 - DNA, 15 bp, Homo sapiens
tttctttgatttcag

SEQ ID NO: 68232 - DNA, 15 bp, Homo sapiens
ttctttgatttcagc

SEQ ID NO: 68233 - DNA, 15 bp, Homo sapiens
tctttgatttcagcg

SEQ ID NO: 68234 - DNA, 15 bp, Homo sapiens
ctttgatttcagcgt

SEQ ID NO: 68235 - DNA, 15 bp, Homo sapiens
tttgatttcagcgta

SEQ ID NO: 68236 - DNA, 15 bp, Homo sapiens
ttgatttcagcgtat

SEQ ID NO: 68237 - DNA, 15 bp, Homo sapiens
tgatttcagcgtatg

SEQ ID NO: 68238 - DNA, 15 bp, Homo sapiens
gatttcagcgtatgt

SEQ ID NO: 68239 - DNA, 15 bp, Homo sapiens
atttcagcgtatgtt

SEQ ID NO: 68240 - DNA, 15 bp, Homo sapiens
tttcagcgtatgttg

SEQ ID NO: 68241 - DNA, 15 bp, Homo sapiens
ttcagcgtatgttgg

SEQ ID NO: 68242 - DNA, 15 bp, Homo sapiens
tcagcgtatgttggt

SEQ ID NO: 68243 - DNA, 15 bp, Homo sapiens
cagcgtatgttggtc

SEQ ID NO: 68244 - DNA, 15 bp, Homo sapiens
agcgtatgttggtct

SEQ ID NO: 68245 - DNA, 15 bp, Homo sapiens
gcgtatgttggtctc

SEQ ID NO: 68246 - DNA, 15 bp, Homo sapiens
cgtatgttggtctct

SEQ ID NO: 68247 - DNA, 15 bp, Homo sapiens
gtatgttggtctcta

SEQ ID NO: 68248 - DNA, 15 bp, Homo sapiens
tatgttggtctctac

SEQ ID NO: 68249 - DNA, 15 bp, Homo sapiens
atgttggtctctaca

SEQ ID NO: 68250 - DNA, 15 bp, Homo sapiens
tgttggtctctacac

SEQ ID NO: 68251 - DNA, 15 bp, Homo sapiens
gttggtctctacaca

SEQ ID NO: 68252 - DNA, 15 bp, Homo sapiens
ttggtctctacacat

SEQ ID NO: 68253 - DNA, 15 bp, Homo sapiens
tggtctctacacatg

SEQ ID NO: 68254 - DNA, 15 bp, Homo sapiens
ggtctctacacatga

SEQ ID NO: 68255 - DNA, 15 bp, Homo sapiens
gtctctacacatgaa

SEQ ID NO: 68256 - DNA, 15 bp, Homo sapiens
tctctacacatgaaa

SEQ ID NO: 68257 - DNA, 15 bp, Homo sapiens
ctctacacatgaaat

SEQ ID NO: 68258 - DNA, 15 bp, Homo sapiens
tctacacatgaaatt

SEQ ID NO: 68259 - DNA, 15 bp, Homo sapiens
ctacacatgaaattt

SEQ ID NO: 68260 - DNA, 15 bp, Homo sapiens
tacacatgaaatttg

SEQ ID NO: 68261 - DNA, 15 bp, Homo sapiens
acacatgaaatttgt

SEQ ID NO: 68262 - DNA, 15 bp, Homo sapiens
cacatgaaatttgtg

SEQ ID NO: 68263 - DNA, 15 bp, Homo sapiens
acatgaaatttgtgt

SEQ ID NO: 68264 - DNA, 15 bp, Homo sapiens
catgaaatttgtgtg

SEQ ID NO: 68265 - DNA, 15 bp, Homo sapiens
atgaaatttgtgtga

SEQ ID NO: 68266 - DNA, 15 bp, Homo sapiens
tgaaatttgtgtgac

SEQ ID NO: 68267 - DNA, 15 bp, Homo sapiens
gaaatttgtgtgact

SEQ ID NO: 68268 - DNA, 15 bp, Homo sapiens
aaatttgtgtgactt

SEQ ID NO: 68269 - DNA, 15 bp, Homo sapiens
aatttgtgtgactta

SEQ ID NO: 68270 - DNA, 15 bp, Homo sapiens
atttgtgtgacttaa

SEQ ID NO: 68271 - DNA, 15 bp, Homo sapiens
tttgtgtgacttaaa

SEQ ID NO: 68272 - DNA, 15 bp, Homo sapiens
ttgtgtgacttaaaa

SEQ ID NO: 68273 - DNA, 15 bp, Homo sapiens
tgtgtgacttaaaac

SEQ ID NO: 68274 - DNA, 15 bp, Homo sapiens
gtgtgacttaaaact

SEQ ID NO: 68275 - DNA, 15 bp, Homo sapiens
tgtgacttaaaactt

SEQ ID NO: 68276 - DNA, 15 bp, Homo sapiens
gtgacttaaaacttt

SEQ ID NO: 68277 - DNA, 15 bp, Homo sapiens
tgacttaaaactttc

SEQ ID NO: 68278 - DNA, 15 bp, Homo sapiens
gacttaaaactttct

SEQ ID NO: 68279 - DNA, 15 bp, Homo sapiens
acttaaaactttctc

SEQ ID NO: 68280 - DNA, 15 bp, Homo sapiens
cttaaaactttctct

SEQ ID NO: 68281 - DNA, 15 bp, Homo sapiens
ttaaaactttctcta

SEQ ID NO: 68282 - DNA, 15 bp, Homo sapiens
taaaactttctctaa

SEQ ID NO: 68283 - DNA, 15 bp, Homo sapiens
aaaactttctctaaa

SEQ ID NO: 68284 - DNA, 15 bp, Homo sapiens
aaactttctctaaaa

SEQ ID NO: 68285 - DNA, 15 bp, Homo sapiens
aactttctctaaaac

SEQ ID NO: 68286 - DNA, 15 bp, Homo sapiens
actttctctaaaact

SEQ ID NO: 68287 - DNA, 15 bp, Homo sapiens
ctttctctaaaactg

SEQ ID NO: 68288 - DNA, 15 bp, Homo sapiens
tttctctaaaactgt

SEQ ID NO: 68289 - DNA, 15 bp, Homo sapiens
ttctctaaaactgta

SEQ ID NO: 68290 - DNA, 15 bp, Homo sapiens
tctctaaaactgtac

SEQ ID NO: 68291 - DNA, 15 bp, Homo sapiens
ctctaaaactgtact

SEQ ID NO: 68292 - DNA, 15 bp, Homo sapiens
tctaaaactgtactt

SEQ ID NO: 68293 - DNA, 15 bp, Homo sapiens
ctaaaactgtacttt

SEQ ID NO: 68294 - DNA, 15 bp, Homo sapiens
taaaactgtactttt

SEQ ID NO: 68295 - DNA, 15 bp, Homo sapiens
aaaactgtactttta

SEQ ID NO: 68296 - DNA, 15 bp, Homo sapiens
aaactgtacttttag

SEQ ID NO: 68297 - DNA, 15 bp, Homo sapiens
aactgtacttttagt

SEQ ID NO: 68298 - DNA, 15 bp, Homo sapiens
actgtacttttagtt

SEQ ID NO: 68299 - DNA, 15 bp, Homo sapiens
ctgtacttttagtta

SEQ ID NO: 68300 - DNA, 15 bp, Homo sapiens
tgtacttttagttat

SEQ ID NO: 68301 - DNA, 15 bp, Homo sapiens
gtacttttagttatg

SEQ ID NO: 68302 - DNA, 15 bp, Homo sapiens
tacttttagttatga

SEQ ID NO: 68303 - DNA, 15 bp, Homo sapiens
acttttagttatgat

SEQ ID NO: 68304 - DNA, 15 bp, Homo sapiens
cttttagttatgata

SEQ ID NO: 68305 - DNA, 15 bp, Homo sapiens
ttttagttatgatat

SEQ ID NO: 68306 - DNA, 15 bp, Homo sapiens
tttagttatgatatg

SEQ ID NO: 68307 - DNA, 15 bp, Homo sapiens
ttagttatgatatgc

SEQ ID NO: 68308 - DNA, 15 bp, Homo sapiens
tagttatgatatgca

SEQ ID NO: 68309 - DNA, 15 bp, Homo sapiens
agttatgatatgcat

SEQ ID NO: 68310 - DNA, 15 bp, Homo sapiens
gttatgatatgcata

SEQ ID NO: 68311 - DNA, 15 bp, Homo sapiens
ttatgatatgcatag

SEQ ID NO: 68312 - DNA, 15 bp, Homo sapiens
tatgatatgcataga

SEQ ID NO: 68313 - DNA, 15 bp, Homo sapiens
atgatatgcatagaa

SEQ ID NO: 68314 - DNA, 15 bp, Homo sapiens
tgatatgcatagaaa

SEQ ID NO: 68315 - DNA, 15 bp, Homo sapiens
gatatgcatagaaag

SEQ ID NO: 68316 - DNA, 15 bp, Homo sapiens
atatgcatagaaagc

SEQ ID NO: 68317 - DNA, 15 bp, Homo sapiens
tatgcatagaaagca

SEQ ID NO: 68318 - DNA, 15 bp, Homo sapiens
atgcatagaaagcag

SEQ ID NO: 68319 - DNA, 15 bp, Homo sapiens
tgcatagaaagcagt

SEQ ID NO: 68320 - DNA, 15 bp, Homo sapiens
gcatagaaagcagta

SEQ ID NO: 68321 - DNA, 15 bp, Homo sapiens
catagaaagcagtat

SEQ ID NO: 68322 - DNA, 15 bp, Homo sapiens
atagaaagcagtatc

SEQ ID NO: 68323 - DNA, 15 bp, Homo sapiens
tagaaagcagtatca

SEQ ID NO: 68324 - DNA, 15 bp, Homo sapiens
agaaagcagtatcaa

SEQ ID NO: 68325 - DNA, 15 bp, Homo sapiens
gaaagcagtatcaaa

SEQ ID NO: 68326 - DNA, 15 bp, Homo sapiens
aaagcagtatcaaat

SEQ ID NO: 68327 - DNA, 15 bp, Homo sapiens
aagcagtatcaaata

SEQ ID NO: 68328 - DNA, 15 bp, Homo sapiens
agcagtatcaaatat

SEQ ID NO: 68329 - DNA, 15 bp, Homo sapiens
gcagtatcaaatatt

SEQ ID NO: 68330 - DNA, 15 bp, Homo sapiens
cagtatcaaatattg

SEQ ID NO: 68331 - DNA, 15 bp, Homo sapiens
agtatcaaatattgc

SEQ ID NO: 68332 - DNA, 15 bp, Homo sapiens
gtatcaaatattgcg

SEQ ID NO: 68333 - DNA, 15 bp, Homo sapiens
tatcaaatattgcgt

SEQ ID NO: 68334 - DNA, 15 bp, Homo sapiens
atcaaatattgcgtc

SEQ ID NO: 68335 - DNA, 15 bp, Homo sapiens
tcaaatattgcgtca

SEQ ID NO: 68336 - DNA, 15 bp, Homo sapiens
caaatattgcgtcaa

SEQ ID NO: 68337 - DNA, 15 bp, Homo sapiens
aaatattgcgtcaaa

SEQ ID NO: 68338 - DNA, 15 bp, Homo sapiens
aatattgcgtcaaat

SEQ ID NO: 68339 - DNA, 15 bp, Homo sapiens
atattgcgtcaaatg

SEQ ID NO: 68340 - DNA, 15 bp, Homo sapiens
tattgcgtcaaatga

SEQ ID NO: 68341 - DNA, 15 bp, Homo sapiens
attgcgtcaaatgac

SEQ ID NO: 68342 - DNA, 15 bp, Homo sapiens
ttgcgtcaaatgact

SEQ ID NO: 68343 - DNA, 15 bp, Homo sapiens
tgcgtcaaatgacta

SEQ ID NO: 68344 - DNA, 15 bp, Homo sapiens
gcgtcaaatgactaa

SEQ ID NO: 68345 - DNA, 15 bp, Homo sapiens
cgtcaaatgactaat

SEQ ID NO: 68346 - DNA, 15 bp, Homo sapiens
gtcaaatgactaata

SEQ ID NO: 68347 - DNA, 15 bp, Homo sapiens
tcaaatgactaataa

SEQ ID NO: 68348 - DNA, 15 bp, Homo sapiens
caaatgactaataac

SEQ ID NO: 68349 - DNA, 15 bp, Homo sapiens
aaatgactaataaca

SEQ ID NO: 68350 - DNA, 15 bp, Homo sapiens
aatgactaataacac

SEQ ID NO: 68351 - DNA, 15 bp, Homo sapiens
atgactaataacact

SEQ ID NO: 68352 - DNA, 15 bp, Homo sapiens
tgactaataacactt

SEQ ID NO: 68353 - DNA, 15 bp, Homo sapiens
gactaataacactta

SEQ ID NO: 68354 - DNA, 15 bp, Homo sapiens
actaataacacttaa

SEQ ID NO: 68355 - DNA, 15 bp, Homo sapiens
ctaataacacttaat

SEQ ID NO: 68356 - DNA, 15 bp, Homo sapiens
taataacacttaatt

SEQ ID NO: 68357 - DNA, 15 bp, Homo sapiens
aataacacttaattt

SEQ ID NO: 68358 - DNA, 15 bp, Homo sapiens
ataacacttaatttc

SEQ ID NO: 68359 - DNA, 15 bp, Homo sapiens
taacacttaatttct

SEQ ID NO: 68360 - DNA, 15 bp, Homo sapiens
aacacttaatttcta

SEQ ID NO: 68361 - DNA, 15 bp, Homo sapiens
acacttaatttctag

SEQ ID NO: 68362 - DNA, 15 bp, Homo sapiens
cacttaatttctaga

SEQ ID NO: 68363 - DNA, 15 bp, Homo sapiens
acttaatttctagag

SEQ ID NO: 68364 - DNA, 15 bp, Homo sapiens
cttaatttctagagt

SEQ ID NO: 68365 - DNA, 15 bp, Homo sapiens
ttaatttctagagtt

SEQ ID NO: 68366 - DNA, 15 bp, Homo sapiens
taatttctagagttg

SEQ ID NO: 68367 - DNA, 15 bp, Homo sapiens
aatttctagagttgt

SEQ ID NO: 68368 - DNA, 15 bp, Homo sapiens
atttctagagttgtg

SEQ ID NO: 68369 - DNA, 15 bp, Homo sapiens
tttctagagttgtgg

SEQ ID NO: 68370 - DNA, 15 bp, Homo sapiens
ttctagagttgtggt

SEQ ID NO: 68371 - DNA, 15 bp, Homo sapiens
tctagagttgtggtt

SEQ ID NO: 68372 - DNA, 15 bp, Homo sapiens
ctagagttgtggttt

SEQ ID NO: 68373 - DNA, 15 bp, Homo sapiens
tagagttgtggtttt

SEQ ID NO: 68374 - DNA, 15 bp, Homo sapiens
agagttgtggtttta

SEQ ID NO: 68375 - DNA, 15 bp, Homo sapiens
gagttgtggttttat

SEQ ID NO: 68376 - DNA, 15 bp, Homo sapiens
agttgtggttttatt

SEQ ID NO: 68377 - DNA, 15 bp, Homo sapiens
gttgtggttttattg

SEQ ID NO: 68378 - DNA, 15 bp, Homo sapiens
ttgtggttttattga

SEQ ID NO: 68379 - DNA, 15 bp, Homo sapiens
tgtggttttattgag

SEQ ID NO: 68380 - DNA, 15 bp, Homo sapiens
gtggttttattgagc

SEQ ID NO: 68381 - DNA, 15 bp, Homo sapiens
tggttttattgagcc

SEQ ID NO: 68382 - DNA, 15 bp, Homo sapiens
ggttttattgagcca

SEQ ID NO: 68383 - DNA, 15 bp, Homo sapiens
gttttattgagccaa

SEQ ID NO: 68384 - DNA, 15 bp, Homo sapiens
ttttattgagccaaa

SEQ ID NO: 68385 - DNA, 15 bp, Homo sapiens
tttattgagccaaaa

SEQ ID NO: 68386 - DNA, 15 bp, Homo sapiens
ttattgagccaaaag

SEQ ID NO: 68387 - DNA, 15 bp, Homo sapiens
tattgagccaaaagt

SEQ ID NO: 68388 - DNA, 15 bp, Homo sapiens
attgagccaaaagtt

SEQ ID NO: 68389 - DNA, 15 bp, Homo sapiens
ttgagccaaaagttg

SEQ ID NO: 68390 - DNA, 15 bp, Homo sapiens
tgagccaaaagttga

SEQ ID NO: 68391 - DNA, 15 bp, Homo sapiens
gagccaaaagttgat

SEQ ID NO: 68392 - DNA, 15 bp, Homo sapiens
agccaaaagttgata

SEQ ID NO: 68393 - DNA, 15 bp, Homo sapiens
gccaaaagttgatat

SEQ ID NO: 68394 - DNA, 15 bp, Homo sapiens
ccaaaagttgatatg

SEQ ID NO: 68395 - DNA, 15 bp, Homo sapiens
caaaagttgatatga

SEQ ID NO: 68396 - DNA, 15 bp, Homo sapiens
aaaagttgatatgaa

SEQ ID NO: 68397 - DNA, 15 bp, Homo sapiens
aaagttgatatgaaa

SEQ ID NO: 68398 - DNA, 15 bp, Homo sapiens
aagttgatatgaaaa

SEQ ID NO: 68399 - DNA, 15 bp, Homo sapiens
agttgatatgaaaaa

SEQ ID NO: 68400 - DNA, 15 bp, Homo sapiens
gttgatatgaaaaaa

SEQ ID NO: 68401 - DNA, 15 bp, Homo sapiens
ttgatatgaaaaaaa

SEQ ID NO: 68402 - DNA, 15 bp, Homo sapiens
tgatatgaaaaaaag

SEQ ID NO: 68403 - DNA, 15 bp, Homo sapiens
gatatgaaaaaaagt

SEQ ID NO: 68404 - DNA, 15 bp, Homo sapiens
atatgaaaaaaagtc

SEQ ID NO: 68405 - DNA, 15 bp, Homo sapiens
tatgaaaaaaagtca

SEQ ID NO: 68406 - DNA, 15 bp, Homo sapiens
atgaaaaaaagtcag

SEQ ID NO: 68407 - DNA, 15 bp, Homo sapiens
tgaaaaaaagtcagt

SEQ ID NO: 68408 - DNA, 15 bp, Homo sapiens
gaaaaaaagtcagta

SEQ ID NO: 68409 - DNA, 15 bp, Homo sapiens
aaaaaaagtcagtaa

SEQ ID NO: 68410 - DNA, 15 bp, Homo sapiens
aaaaaagtcagtaag

SEQ ID NO: 68411 - DNA, 15 bp, Homo sapiens
aaaaagtcagtaagg

SEQ ID NO: 68412 - DNA, 15 bp, Homo sapiens
aaaagtcagtaagga

SEQ ID NO: 68413 - DNA, 15 bp, Homo sapiens
aaagtcagtaaggaa

SEQ ID NO: 68414 - DNA, 15 bp, Homo sapiens
aagtcagtaaggaaa

SEQ ID NO: 68415 - DNA, 15 bp, Homo sapiens
agtcagtaaggaaag

SEQ ID NO: 68416 - DNA, 15 bp, Homo sapiens
gtcagtaaggaaagt

SEQ ID NO: 68417 - DNA, 15 bp, Homo sapiens
tcagtaaggaaagtc

SEQ ID NO: 68418 - DNA, 15 bp, Homo sapiens
cagtaaggaaagtca

SEQ ID NO: 68419 - DNA, 15 bp, Homo sapiens
agtaaggaaagtcag

SEQ ID NO: 68420 - DNA, 15 bp, Homo sapiens
gtaaggaaagtcagt

SEQ ID NO: 68421 - DNA, 15 bp, Homo sapiens
taaggaaagtcagtg

SEQ ID NO: 68422 - DNA, 15 bp, Homo sapiens
aaggaaagtcagtga

SEQ ID NO: 68423 - DNA, 15 bp, Homo sapiens
aggaaagtcagtgaa

SEQ ID NO: 68424 - DNA, 15 bp, Homo sapiens
ggaaagtcagtgaag

SEQ ID NO: 68425 - DNA, 15 bp, Homo sapiens
gaaagtcagtgaagt

SEQ ID NO: 68426 - DNA, 15 bp, Homo sapiens
aaagtcagtgaagtg

SEQ ID NO: 68427 - DNA, 15 bp, Homo sapiens
aagtcagtgaagtgc

SEQ ID NO: 68428 - DNA, 15 bp, Homo sapiens
agtcagtgaagtgct

SEQ ID NO: 68429 - DNA, 15 bp, Homo sapiens
gtcagtgaagtgctt

SEQ ID NO: 68430 - DNA, 15 bp, Homo sapiens
tcagtgaagtgcttg

SEQ ID NO: 68431 - DNA, 15 bp, Homo sapiens
cagtgaagtgcttgc

SEQ ID NO: 68432 - DNA, 15 bp, Homo sapiens
agtgaagtgcttgct

SEQ ID NO: 68433 - DNA, 15 bp, Homo sapiens
gtgaagtgcttgctt

SEQ ID NO: 68434 - DNA, 15 bp, Homo sapiens
tgaagtgcttgcttt

SEQ ID NO: 68435 - DNA, 15 bp, Homo sapiens
gaagtgcttgctttt

SEQ ID NO: 68436 - DNA, 15 bp, Homo sapiens
aagtgcttgcttttt

SEQ ID NO: 68437 - DNA, 15 bp, Homo sapiens
agtgcttgctttttt

SEQ ID NO: 68438 - DNA, 15 bp, Homo sapiens
gtgcttgcttttttg

SEQ ID NO: 68439 - DNA, 15 bp, Homo sapiens
tgcttgcttttttga

SEQ ID NO: 68440 - DNA, 15 bp, Homo sapiens
gcttgcttttttgat

SEQ ID NO: 68441 - DNA, 15 bp, Homo sapiens
cttgcttttttgata

SEQ ID NO: 68442 - DNA, 15 bp, Homo sapiens
ttgcttttttgataa

SEQ ID NO: 68443 - DNA, 15 bp, Homo sapiens
tgcttttttgataat

SEQ ID NO: 68444 - DNA, 15 bp, Homo sapiens
gcttttttgataatt

SEQ ID NO: 68445 - DNA, 15 bp, Homo sapiens
cttttttgataattg

SEQ ID NO: 68446 - DNA, 15 bp, Homo sapiens
ttttttgataattgc

SEQ ID NO: 68447 - DNA, 15 bp, Homo sapiens
tttttgataattgca

SEQ ID NO: 68448 - DNA, 15 bp, Homo sapiens
ttttgataattgcac

SEQ ID NO: 68449 - DNA, 15 bp, Homo sapiens
tttgataattgcact

SEQ ID NO: 68450 - DNA, 15 bp, Homo sapiens
ttgataattgcactc

SEQ ID NO: 68451 - DNA, 15 bp, Homo sapiens
tgataattgcactcc

SEQ ID NO: 68452 - DNA, 15 bp, Homo sapiens
gataattgcactccc

SEQ ID NO: 68453 - DNA, 15 bp, Homo sapiens
ataattgcactccca

SEQ ID NO: 68454 - DNA, 15 bp, Homo sapiens
taattgcactcccaa

SEQ ID NO: 68455 - DNA, 15 bp, Homo sapiens
aattgcactcccaat

SEQ ID NO: 68456 - DNA, 15 bp, Homo sapiens
attgcactcccaata

SEQ ID NO: 68457 - DNA, 15 bp, Homo sapiens
ttgcactcccaataa

SEQ ID NO: 68458 - DNA, 15 bp, Homo sapiens
tgcactcccaataat

SEQ ID NO: 68459 - DNA, 15 bp, Homo sapiens
gcactcccaataatt

SEQ ID NO: 68460 - DNA, 15 bp, Homo sapiens
cactcccaataattt

SEQ ID NO: 68461 - DNA, 15 bp, Homo sapiens
actcccaataatttt

SEQ ID NO: 68462 - DNA, 15 bp, Homo sapiens
ctcccaataattttg

SEQ ID NO: 68463 - DNA, 15 bp, Homo sapiens
tcccaataattttga

SEQ ID NO: 68464 - DNA, 15 bp, Homo sapiens
cccaataattttgat

SEQ ID NO: 68465 - DNA, 15 bp, Homo sapiens
ccaataattttgata

SEQ ID NO: 68466 - DNA, 15 bp, Homo sapiens
caataattttgatat

SEQ ID NO: 68467 - DNA, 15 bp, Homo sapiens
aataattttgatatt

SEQ ID NO: 68468 - DNA, 15 bp, Homo sapiens
ataattttgatattc

SEQ ID NO: 68469 - DNA, 15 bp, Homo sapiens
taattttgatattcc

SEQ ID NO: 68470 - DNA, 15 bp, Homo sapiens
aattttgatattcca

SEQ ID NO: 68471 - DNA, 15 bp, Homo sapiens
attttgatattccaa

SEQ ID NO: 68472 - DNA, 15 bp, Homo sapiens
ttttgatattccaac

SEQ ID NO: 68473 - DNA, 15 bp, Homo sapiens
tttgatattccaacg

SEQ ID NO: 68474 - DNA, 15 bp, Homo sapiens
ttgatattccaacgt

SEQ ID NO: 68475 - DNA, 15 bp, Homo sapiens
tgatattccaacgta

SEQ ID NO: 68476 - DNA, 15 bp, Homo sapiens
gatattccaacgtac

SEQ ID NO: 68477 - DNA, 15 bp, Homo sapiens
atattccaacgtact

SEQ ID NO: 68478 - DNA, 15 bp, Homo sapiens
tattccaacgtactt

SEQ ID NO: 68479 - DNA, 15 bp, Homo sapiens
attccaacgtacttg

SEQ ID NO: 68480 - DNA, 15 bp, Homo sapiens
ttccaacgtacttgg

SEQ ID NO: 68481 - DNA, 15 bp, Homo sapiens
tccaacgtacttggt

SEQ ID NO: 68482 - DNA, 15 bp, Homo sapiens
ccaacgtacttggtt

SEQ ID NO: 68483 - DNA, 15 bp, Homo sapiens
caacgtacttggttt

SEQ ID NO: 68484 - DNA, 15 bp, Homo sapiens
aacgtacttggtttg

SEQ ID NO: 68485 - DNA, 15 bp, Homo sapiens
acgtacttggtttgc

SEQ ID NO: 68486 - DNA, 15 bp, Homo sapiens
cgtacttggtttgct

SEQ ID NO: 68487 - DNA, 15 bp, Homo sapiens
gtacttggtttgctt

SEQ ID NO: 68488 - DNA, 15 bp, Homo sapiens
tacttggtttgcttg

SEQ ID NO: 68489 - DNA, 15 bp, Homo sapiens
acttggtttgcttgt

SEQ ID NO: 68490 - DNA, 15 bp, Homo sapiens
cttggtttgcttgtt

SEQ ID NO: 68491 - DNA, 15 bp, Homo sapiens
ttggtttgcttgttt

SEQ ID NO: 68492 - DNA, 15 bp, Homo sapiens
tggtttgcttgtttt

SEQ ID NO: 68493 - DNA, 15 bp, Homo sapiens
ggtttgcttgttttc

SEQ ID NO: 68494 - DNA, 15 bp, Homo sapiens
gtttgcttgttttca

SEQ ID NO: 68495 - DNA, 15 bp, Homo sapiens
tttgcttgttttcac

SEQ ID NO: 68496 - DNA, 15 bp, Homo sapiens
ttgcttgttttcacg

SEQ ID NO: 68497 - DNA, 15 bp, Homo sapiens
tgcttgttttcacgt

SEQ ID NO: 68498 - DNA, 15 bp, Homo sapiens
gcttgttttcacgtt

SEQ ID NO: 68499 - DNA, 15 bp, Homo sapiens
cttgttttcacgtta

SEQ ID NO: 68500 - DNA, 15 bp, Homo sapiens
ttgttttcacgttaa

SEQ ID NO: 68501 - DNA, 15 bp, Homo sapiens
tgttttcacgttaat

SEQ ID NO: 68502 - DNA, 15 bp, Homo sapiens
gttttcacgttaatg

SEQ ID NO: 68503 - DNA, 15 bp, Homo sapiens
ttttcacgttaatgt

SEQ ID NO: 68504 - DNA, 15 bp, Homo sapiens
tttcacgttaatgtt

SEQ ID NO: 68505 - DNA, 15 bp, Homo sapiens
ttcacgttaatgttt

SEQ ID NO: 68506 - DNA, 15 bp, Homo sapiens
tcacgttaatgtttt

SEQ ID NO: 68507 - DNA, 15 bp, Homo sapiens
cacgttaatgttttc

SEQ ID NO: 68508 - DNA, 15 bp, Homo sapiens
acgttaatgttttct

SEQ ID NO: 68509 - DNA, 15 bp, Homo sapiens
cgttaatgttttctg

SEQ ID NO: 68510 - DNA, 15 bp, Homo sapiens
gttaatgttttctgt

SEQ ID NO: 68511 - DNA, 15 bp, Homo sapiens
ttaatgttttctgtt

SEQ ID NO: 68512 - DNA, 15 bp, Homo sapiens
taatgttttctgttt

SEQ ID NO: 68513 - DNA, 15 bp, Homo sapiens
aatgttttctgttta

SEQ ID NO: 68514 - DNA, 15 bp, Homo sapiens
atgttttctgtttat

SEQ ID NO: 68515 - DNA, 15 bp, Homo sapiens
tgttttctgtttatt

SEQ ID NO: 68516 - DNA, 15 bp, Homo sapiens
gttttctgtttattg

SEQ ID NO: 68517 - DNA, 15 bp, Homo sapiens
ttttctgtttattgg

SEQ ID NO: 68518 - DNA, 15 bp, Homo sapiens
tttctgtttattgga

SEQ ID NO: 68519 - DNA, 15 bp, Homo sapiens
ttctgtttattggag

SEQ ID NO: 68520 - DNA, 15 bp, Homo sapiens
tctgtttattggagt

SEQ ID NO: 68521 - DNA, 15 bp, Homo sapiens
ctgtttattggagtg

SEQ ID NO: 68522 - DNA, 15 bp, Homo sapiens
tgtttattggagtgg

SEQ ID NO: 68523 - DNA, 15 bp, Homo sapiens
gtttattggagtggg

SEQ ID NO: 68524 - DNA, 15 bp, Homo sapiens
tttattggagtggga

SEQ ID NO: 68525 - DNA, 15 bp, Homo sapiens
ttattggagtgggaa

SEQ ID NO: 68526 - DNA, 15 bp, Homo sapiens
tattggagtgggaag

SEQ ID NO: 68527 - DNA, 15 bp, Homo sapiens
attggagtgggaagg

SEQ ID NO: 68528 - DNA, 15 bp, Homo sapiens
ttggagtgggaaggc

SEQ ID NO: 68529 - DNA, 15 bp, Homo sapiens
tggagtgggaaggca

SEQ ID NO: 68530 - DNA, 15 bp, Homo sapiens
ggagtgggaaggcat

SEQ ID NO: 68531 - DNA, 15 bp, Homo sapiens
gagtgggaaggcatt

SEQ ID NO: 68532 - DNA, 15 bp, Homo sapiens
agtgggaaggcatta

SEQ ID NO: 68533 - DNA, 15 bp, Homo sapiens
gtgggaaggcattaa

SEQ ID NO: 68534 - DNA, 15 bp, Homo sapiens
tgggaaggcattaaa

SEQ ID NO: 68535 - DNA, 15 bp, Homo sapiens
gggaaggcattaaaa

SEQ ID NO: 68536 - DNA, 15 bp, Homo sapiens
ggaaggcattaaaat

SEQ ID NO: 68537 - DNA, 15 bp, Homo sapiens
gaaggcattaaaatt

SEQ ID NO: 68538 - DNA, 15 bp, Homo sapiens
aaggcattaaaattg

SEQ ID NO: 68539 - DNA, 15 bp, Homo sapiens
aggcattaaaattgt

SEQ ID NO: 68540 - DNA, 15 bp, Homo sapiens
ggcattaaaattgtc

SEQ ID NO: 68541 - DNA, 15 bp, Homo sapiens
gcattaaaattgtca

SEQ ID NO: 68542 - DNA, 15 bp, Homo sapiens
cattaaaattgtcat

SEQ ID NO: 68543 - DNA, 15 bp, Homo sapiens
attaaaattgtcatt

SEQ ID NO: 68544 - DNA, 15 bp, Homo sapiens
ttaaaattgtcattg

SEQ ID NO: 68545 - DNA, 15 bp, Homo sapiens
taaaattgtcattga

SEQ ID NO: 68546 - DNA, 15 bp, Homo sapiens
aaaattgtcattgaa

SEQ ID NO: 68547 - DNA, 15 bp, Homo sapiens
aaattgtcattgaag

SEQ ID NO: 68548 - DNA, 15 bp, Homo sapiens
aattgtcattgaaga

SEQ ID NO: 68549 - DNA, 15 bp, Homo sapiens
attgtcattgaagac

SEQ ID NO: 68550 - DNA, 15 bp, Homo sapiens
ttgtcattgaagact

SEQ ID NO: 68551 - DNA, 15 bp, Homo sapiens
tgtcattgaagactt

SEQ ID NO: 68552 - DNA, 15 bp, Homo sapiens
gtcattgaagacttt

SEQ ID NO: 68553 - DNA, 15 bp, Homo sapiens
tcattgaagactttg

SEQ ID NO: 68554 - DNA, 15 bp, Homo sapiens
cattgaagactttgt

SEQ ID NO: 68555 - DNA, 15 bp, Homo sapiens
attgaagactttgtc

SEQ ID NO: 68556 - DNA, 15 bp, Homo sapiens
ttgaagactttgtct

SEQ ID NO: 68557 - DNA, 15 bp, Homo sapiens
tgaagactttgtctt

SEQ ID NO: 68558 - DNA, 15 bp, Homo sapiens
gaagactttgtcttt

SEQ ID NO: 68559 - DNA, 15 bp, Homo sapiens
aagactttgtctttg

SEQ ID NO: 68560 - DNA, 15 bp, Homo sapiens
agactttgtctttga

SEQ ID NO: 68561 - DNA, 15 bp, Homo sapiens
gactttgtctttgac

SEQ ID NO: 68562 - DNA, 15 bp, Homo sapiens
actttgtctttgaca

SEQ ID NO: 68563 - DNA, 15 bp, Homo sapiens
ctttgtctttgacat

SEQ ID NO: 68564 - DNA, 15 bp, Homo sapiens
tttgtctttgacatg

SEQ ID NO: 68565 - DNA, 15 bp, Homo sapiens
ttgtctttgacatgt

SEQ ID NO: 68566 - DNA, 15 bp, Homo sapiens
tgtctttgacatgtt

SEQ ID NO: 68567 - DNA, 15 bp, Homo sapiens
gtctttgacatgttg

SEQ ID NO: 68568 - DNA, 15 bp, Homo sapiens
tctttgacatgttgt

SEQ ID NO: 68569 - DNA, 15 bp, Homo sapiens
ctttgacatgttgta

SEQ ID NO: 68570 - DNA, 15 bp, Homo sapiens
tttgacatgttgtag

SEQ ID NO: 68571 - DNA, 15 bp, Homo sapiens
ttgacatgttgtagt

SEQ ID NO: 68572 - DNA, 15 bp, Homo sapiens
tgacatgttgtagta

SEQ ID NO: 68573 - DNA, 15 bp, Homo sapiens
gacatgttgtagtat

SEQ ID NO: 68574 - DNA, 15 bp, Homo sapiens
acatgttgtagtatt

SEQ ID NO: 68575 - DNA, 15 bp, Homo sapiens
catgttgtagtattt

SEQ ID NO: 68576 - DNA, 15 bp, Homo sapiens
atgttgtagtattta

SEQ ID NO: 68577 - DNA, 15 bp, Homo sapiens
tgttgtagtatttat

SEQ ID NO: 68578 - DNA, 15 bp, Homo sapiens
gttgtagtatttatt

SEQ ID NO: 68579 - DNA, 15 bp, Homo sapiens
ttgtagtatttattt

SEQ ID NO: 68580 - DNA, 15 bp, Homo sapiens
tgtagtatttatttc

SEQ ID NO: 68581 - DNA, 15 bp, Homo sapiens
gtagtatttatttca

SEQ ID NO: 68582 - DNA, 15 bp, Homo sapiens
tagtatttatttcag

SEQ ID NO: 68583 - DNA, 15 bp, Homo sapiens
agtatttatttcagt

SEQ ID NO: 68584 - DNA, 15 bp, Homo sapiens
gtatttatttcagta

SEQ ID NO: 68585 - DNA, 15 bp, Homo sapiens
tatttatttcagtaa

SEQ ID NO: 68586 - DNA, 15 bp, Homo sapiens
atttatttcagtaac

SEQ ID NO: 68587 - DNA, 15 bp, Homo sapiens
tttatttcagtaact

SEQ ID NO: 68588 - DNA, 15 bp, Homo sapiens
ttatttcagtaacta

SEQ ID NO: 68589 - DNA, 15 bp, Homo sapiens
tatttcagtaactaa

SEQ ID NO: 68590 - DNA, 15 bp, Homo sapiens
atttcagtaactaac

SEQ ID NO: 68591 - DNA, 15 bp, Homo sapiens
tttcagtaactaacc

SEQ ID NO: 68592 - DNA, 15 bp, Homo sapiens
ttcagtaactaacct

SEQ ID NO: 68593 - DNA, 15 bp, Homo sapiens
tcagtaactaacctg

SEQ ID NO: 68594 - DNA, 15 bp, Homo sapiens
cagtaactaacctgt

SEQ ID NO: 68595 - DNA, 15 bp, Homo sapiens
agtaactaacctgtg

SEQ ID NO: 68596 - DNA, 15 bp, Homo sapiens
gtaactaacctgtga

SEQ ID NO: 68597 - DNA, 15 bp, Homo sapiens
taactaacctgtgaa

SEQ ID NO: 68598 - DNA, 15 bp, Homo sapiens
aactaacctgtgaaa

SEQ ID NO: 68599 - DNA, 15 bp, Homo sapiens
actaacctgtgaaaa

SEQ ID NO: 68600 - DNA, 15 bp, Homo sapiens
ctaacctgtgaaaag

SEQ ID NO: 68601 - DNA, 15 bp, Homo sapiens
taacctgtgaaaagt

SEQ ID NO: 68602 - DNA, 15 bp, Homo sapiens
aacctgtgaaaagtt

SEQ ID NO: 68603 - DNA, 15 bp, Homo sapiens
acctgtgaaaagtta

SEQ ID NO: 68604 - DNA, 15 bp, Homo sapiens
cctgtgaaaagttaa

SEQ ID NO: 68605 - DNA, 15 bp, Homo sapiens
ctgtgaaaagttaaa

SEQ ID NO: 68606 - DNA, 15 bp, Homo sapiens
tgtgaaaagttaaat

SEQ ID NO: 68607 - DNA, 15 bp, Homo sapiens
gtgaaaagttaaatt

SEQ ID NO: 68608 - DNA, 15 bp, Homo sapiens
tgaaaagttaaattc

SEQ ID NO: 68609 - DNA, 15 bp, Homo sapiens
gaaaagttaaattcc

SEQ ID NO: 68610 - DNA, 15 bp, Homo sapiens
aaaagttaaattcct

SEQ ID NO: 68611 - DNA, 15 bp, Homo sapiens
aaagttaaattcctt

SEQ ID NO: 68612 - DNA, 15 bp, Homo sapiens
aagttaaattccttt

SEQ ID NO: 68613 - DNA, 15 bp, Homo sapiens
agttaaattccttta

SEQ ID NO: 68614 - DNA, 15 bp, Homo sapiens
gttaaattcctttat

SEQ ID NO: 68615 - DNA, 15 bp, Homo sapiens
ttaaattcctttatg

SEQ ID NO: 68616 - DNA, 15 bp, Homo sapiens
taaattcctttatga

SEQ ID NO: 68617 - DNA, 15 bp, Homo sapiens
aaattcctttatgaa

SEQ ID NO: 68618 - DNA, 15 bp, Homo sapiens
aattcctttatgaaa

SEQ ID NO: 68619 - DNA, 15 bp, Homo sapiens
attcctttatgaaag

SEQ ID NO: 68620 - DNA, 15 bp, Homo sapiens
ttcctttatgaaagt

SEQ ID NO: 68621 - DNA, 15 bp, Homo sapiens
tcctttatgaaagta

SEQ ID NO: 68622 - DNA, 15 bp, Homo sapiens
cctttatgaaagtag

SEQ ID NO: 68623 - DNA, 15 bp, Homo sapiens
ctttatgaaagtagt

SEQ ID NO: 68624 - DNA, 15 bp, Homo sapiens
tttatgaaagtagtg

SEQ ID NO: 68625 - DNA, 15 bp, Homo sapiens
ttatgaaagtagtga

SEQ ID NO: 68626 - DNA, 15 bp, Homo sapiens
tatgaaagtagtgat

SEQ ID NO: 68627 - DNA, 15 bp, Homo sapiens
atgaaagtagtgatt

SEQ ID NO: 68628 - DNA, 15 bp, Homo sapiens
tgaaagtagtgattg

SEQ ID NO: 68629 - DNA, 15 bp, Homo sapiens
gaaagtagtgattgg

SEQ ID NO: 68630 - DNA, 15 bp, Homo sapiens
aaagtagtgattgga

SEQ ID NO: 68631 - DNA, 15 bp, Homo sapiens
aagtagtgattggag

SEQ ID NO: 68632 - DNA, 15 bp, Homo sapiens
agtagtgattggagt

SEQ ID NO: 68633 - DNA, 15 bp, Homo sapiens
gtagtgattggagta

SEQ ID NO: 68634 - DNA, 15 bp, Homo sapiens
tagtgattggagtat

SEQ ID NO: 68635 - DNA, 15 bp, Homo sapiens
agtgattggagtatt

SEQ ID NO: 68636 - DNA, 15 bp, Homo sapiens
gtgattggagtattt

SEQ ID NO: 68637 - DNA, 15 bp, Homo sapiens
tgattggagtatttt

SEQ ID NO: 68638 - DNA, 15 bp, Homo sapiens
gattggagtattttt

SEQ ID NO: 68639 - DNA, 15 bp, Homo sapiens
attggagtattttta

SEQ ID NO: 68640 - DNA, 15 bp, Homo sapiens
ttggagtatttttat

SEQ ID NO: 68641 - DNA, 15 bp, Homo sapiens
tggagtatttttatc

SEQ ID NO: 68642 - DNA, 15 bp, Homo sapiens
ggagtatttttatct

SEQ ID NO: 68643 - DNA, 15 bp, Homo sapiens
gagtatttttatctg

SEQ ID NO: 68644 - DNA, 15 bp, Homo sapiens
agtatttttatctga

SEQ ID NO: 68645 - DNA, 15 bp, Homo sapiens
gtatttttatctgat

SEQ ID NO: 68646 - DNA, 15 bp, Homo sapiens
tatttttatctgata

SEQ ID NO: 68647 - DNA, 15 bp, Homo sapiens
atttttatctgataa

SEQ ID NO: 68648 - DNA, 15 bp, Homo sapiens
tttttatctgataaa

SEQ ID NO: 68649 - DNA, 15 bp, Homo sapiens
ttttatctgataaag

SEQ ID NO: 68650 - DNA, 15 bp, Homo sapiens
tttatctgataaaga

SEQ ID NO: 68651 - DNA, 15 bp, Homo sapiens
ttatctgataaagaa

SEQ ID NO: 68652 - DNA, 15 bp, Homo sapiens
tatctgataaagaaa

SEQ ID NO: 68653 - DNA, 15 bp, Homo sapiens
atctgataaagaaag

SEQ ID NO: 68654 - DNA, 15 bp, Homo sapiens
tctgataaagaaaga

SEQ ID NO: 68655 - DNA, 15 bp, Homo sapiens
ctgataaagaaagat

SEQ ID NO: 68656 - DNA, 15 bp, Homo sapiens
tgataaagaaagatt

SEQ ID NO: 68657 - DNA, 15 bp, Homo sapiens
gataaagaaagatta

SEQ ID NO: 68658 - DNA, 15 bp, Homo sapiens
ataaagaaagattaa

SEQ ID NO: 68659 - DNA, 15 bp, Homo sapiens
taaagaaagattaat

SEQ ID NO: 68660 - DNA, 15 bp, Homo sapiens
aaagaaagattaata

SEQ ID NO: 68661 - DNA, 15 bp, Homo sapiens
aagaaagattaataa

SEQ ID NO: 68662 - DNA, 15 bp, Homo sapiens
agaaagattaataat

SEQ ID NO: 68663 - DNA, 15 bp, Homo sapiens
gaaagattaataatg

SEQ ID NO: 68664 - DNA, 15 bp, Homo sapiens
aaagattaataatga

SEQ ID NO: 68665 - DNA, 15 bp, Homo sapiens
aagattaataatgaa

SEQ ID NO: 68666 - DNA, 15 bp, Homo sapiens
agattaataatgaag

SEQ ID NO: 68667 - DNA, 15 bp, Homo sapiens
gattaataatgaagc

SEQ ID NO: 68668 - DNA, 15 bp, Homo sapiens
attaataatgaagcc

SEQ ID NO: 68669 - DNA, 15 bp, Homo sapiens
ttaataatgaagcca

SEQ ID NO: 68670 - DNA, 15 bp, Homo sapiens
taataatgaagccat

SEQ ID NO: 68671 - DNA, 15 bp, Homo sapiens
aataatgaagccatt

SEQ ID NO: 68672 - DNA, 15 bp, Homo sapiens
ataatgaagccattt

SEQ ID NO: 68673 - DNA, 15 bp, Homo sapiens
taatgaagccatttc

SEQ ID NO: 68674 - DNA, 15 bp, Homo sapiens
aatgaagccatttct

SEQ ID NO: 68675 - DNA, 15 bp, Homo sapiens
atgaagccatttctc

SEQ ID NO: 68676 - DNA, 15 bp, Homo sapiens
tgaagccatttctcc

SEQ ID NO: 68677 - DNA, 15 bp, Homo sapiens
gaagccatttctccg

SEQ ID NO: 68678 - DNA, 15 bp, Homo sapiens
aagccatttctccga

SEQ ID NO: 68679 - DNA, 15 bp, Homo sapiens
agccatttctccgag

SEQ ID NO: 68680 - DNA, 15 bp, Homo sapiens
gccatttctccgagg

SEQ ID NO: 68681 - DNA, 15 bp, Homo sapiens
ccatttctccgagga

SEQ ID NO: 68682 - DNA, 15 bp, Homo sapiens
catttctccgaggaa

SEQ ID NO: 68683 - DNA, 15 bp, Homo sapiens
atttctccgaggaaa

SEQ ID NO: 68684 - DNA, 15 bp, Homo sapiens
tttctccgaggaaaa

SEQ ID NO: 68685 - DNA, 15 bp, Homo sapiens
ttctccgaggaaaat

SEQ ID NO: 68686 - DNA, 15 bp, Homo sapiens
tctccgaggaaaatt

SEQ ID NO: 68687 - DNA, 15 bp, Homo sapiens
ctccgaggaaaattg

SEQ ID NO: 68688 - DNA, 15 bp, Homo sapiens
tccgaggaaaattga

SEQ ID NO: 68689 - DNA, 15 bp, Homo sapiens
ccgaggaaaattgag

SEQ ID NO: 68690 - DNA, 15 bp, Homo sapiens
cgaggaaaattgagg

SEQ ID NO: 68691 - DNA, 15 bp, Homo sapiens
gaggaaaattgagga

SEQ ID NO: 68692 - DNA, 15 bp, Homo sapiens
aggaaaattgaggac

SEQ ID NO: 68693 - DNA, 15 bp, Homo sapiens
ggaaaattgaggaca

SEQ ID NO: 68694 - DNA, 15 bp, Homo sapiens
gaaaattgaggacaa

SEQ ID NO: 68695 - DNA, 15 bp, Homo sapiens
aaaattgaggacaat

SEQ ID NO: 68696 - DNA, 15 bp, Homo sapiens
aaattgaggacaata

SEQ ID NO: 68697 - DNA, 15 bp, Homo sapiens
aattgaggacaataa

SEQ ID NO: 68698 - DNA, 15 bp, Homo sapiens
attgaggacaataat

SEQ ID NO: 68699 - DNA, 15 bp, Homo sapiens
ttgaggacaataatt

SEQ ID NO: 68700 - DNA, 15 bp, Homo sapiens
tgaggacaataattc

SEQ ID NO: 68701 - DNA, 15 bp, Homo sapiens
gaggacaataattca

SEQ ID NO: 68702 - DNA, 15 bp, Homo sapiens
aggacaataattcag

SEQ ID NO: 68703 - DNA, 15 bp, Homo sapiens
ggacaataattcagt

SEQ ID NO: 68704 - DNA, 15 bp, Homo sapiens
gacaataattcagtt

SEQ ID NO: 68705 - DNA, 15 bp, Homo sapiens
acaataattcagttt

SEQ ID NO: 68706 - DNA, 15 bp, Homo sapiens
caataattcagtttt

SEQ ID NO: 68707 - DNA, 15 bp, Homo sapiens
aataattcagtttta

SEQ ID NO: 68708 - DNA, 15 bp, Homo sapiens
ataattcagttttaa

SEQ ID NO: 68709 - DNA, 15 bp, Homo sapiens
taattcagttttaaa

SEQ ID NO: 68710 - DNA, 15 bp, Homo sapiens
aattcagttttaaaa

SEQ ID NO: 68711 - DNA, 15 bp, Homo sapiens
attcagttttaaaat

SEQ ID NO: 68712 - DNA, 15 bp, Homo sapiens
ttcagttttaaaata

SEQ ID NO: 68713 - DNA, 15 bp, Homo sapiens
tcagttttaaaatat

SEQ ID NO: 68714 - DNA, 15 bp, Homo sapiens
cagttttaaaatatt

SEQ ID NO: 68715 - DNA, 15 bp, Homo sapiens
agttttaaaatatta

SEQ ID NO: 68716 - DNA, 15 bp, Homo sapiens
gttttaaaatattat

SEQ ID NO: 68717 - DNA, 15 bp, Homo sapiens
ttttaaaatattatc

SEQ ID NO: 68718 - DNA, 15 bp, Homo sapiens
tttaaaatattatcg

SEQ ID NO: 68719 - DNA, 15 bp, Homo sapiens
ttaaaatattatcgc

SEQ ID NO: 68720 - DNA, 15 bp, Homo sapiens
taaaatattatcgca

SEQ ID NO: 68721 - DNA, 15 bp, Homo sapiens
aaaatattatcgcaa

SEQ ID NO: 68722 - DNA, 15 bp, Homo sapiens
aaatattatcgcaaa

SEQ ID NO: 68723 - DNA, 15 bp, Homo sapiens
aatattatcgcaaaa

SEQ ID NO: 68724 - DNA, 15 bp, Homo sapiens
atattatcgcaaaat

SEQ ID NO: 68725 - DNA, 15 bp, Homo sapiens
tattatcgcaaaatt

SEQ ID NO: 68726 - DNA, 15 bp, Homo sapiens
attatcgcaaaatta

SEQ ID NO: 68727 - DNA, 15 bp, Homo sapiens
ttatcgcaaaattaa

SEQ ID NO: 68728 - DNA, 15 bp, Homo sapiens
tatcgcaaaattaaa

SEQ ID NO: 68729 - DNA, 15 bp, Homo sapiens
atcgcaaaattaaat

SEQ ID NO: 68730 - DNA, 15 bp, Homo sapiens
tcgcaaaattaaatt

SEQ ID NO: 68731 - DNA, 15 bp, Homo sapiens
cgcaaaattaaatta

SEQ ID NO: 68732 - DNA, 15 bp, Homo sapiens
gcaaaattaaattat

SEQ ID NO: 68733 - DNA, 15 bp, Homo sapiens
caaaattaaattatt

SEQ ID NO: 68734 - DNA, 15 bp, Homo sapiens
aaaattaaattattc

SEQ ID NO: 68735 - DNA, 15 bp, Homo sapiens
aaattaaattattct

SEQ ID NO: 68736 - DNA, 15 bp, Homo sapiens
aattaaattattcta

SEQ ID NO: 68737 - DNA, 15 bp, Homo sapiens
attaaattattctaa

SEQ ID NO: 68738 - DNA, 15 bp, Homo sapiens
ttaaattattctaaa

SEQ ID NO: 68739 - DNA, 15 bp, Homo sapiens
taaattattctaaaa

SEQ ID NO: 68740 - DNA, 15 bp, Homo sapiens
aaattattctaaaaa

SEQ ID NO: 68741 - DNA, 15 bp, Homo sapiens
aattattctaaaaat

SEQ ID NO: 68742 - DNA, 15 bp, Homo sapiens
attattctaaaaatt

SEQ ID NO: 68743 - DNA, 15 bp, Homo sapiens
ttattctaaaaattt

SEQ ID NO: 68744 - DNA, 15 bp, Homo sapiens
tattctaaaaatttg

SEQ ID NO: 68745 - DNA, 15 bp, Homo sapiens
attctaaaaatttgt

SEQ ID NO: 68746 - DNA, 15 bp, Homo sapiens
ttctaaaaatttgtt

SEQ ID NO: 68747 - DNA, 15 bp, Homo sapiens
tctaaaaatttgtta

SEQ ID NO: 68748 - DNA, 15 bp, Homo sapiens
ctaaaaatttgttag

SEQ ID NO: 68749 - DNA, 15 bp, Homo sapiens
taaaaatttgttagt

SEQ ID NO: 68750 - DNA, 15 bp, Homo sapiens
aaaaatttgttagta

SEQ ID NO: 68751 - DNA, 15 bp, Homo sapiens
aaaatttgttagtag

SEQ ID NO: 68752 - DNA, 15 bp, Homo sapiens
aaatttgttagtagg

SEQ ID NO: 68753 - DNA, 15 bp, Homo sapiens
aatttgttagtaggg

SEQ ID NO: 68754 - DNA, 15 bp, Homo sapiens
atttgttagtagggt

SEQ ID NO: 68755 - DNA, 15 bp, Homo sapiens
tttgttagtagggtt

SEQ ID NO: 68756 - DNA, 15 bp, Homo sapiens
ttgttagtagggtta

SEQ ID NO: 68757 - DNA, 15 bp, Homo sapiens
tgttagtagggttat

SEQ ID NO: 68758 - DNA, 15 bp, Homo sapiens
gttagtagggttata

SEQ ID NO: 68759 - DNA, 15 bp, Homo sapiens
ttagtagggttatat

SEQ ID NO: 68760 - DNA, 15 bp, Homo sapiens
tagtagggttatatg

SEQ ID NO: 68761 - DNA, 15 bp, Homo sapiens
agtagggttatatgc

SEQ ID NO: 68762 - DNA, 15 bp, Homo sapiens
gtagggttatatgct

SEQ ID NO: 68763 - DNA, 15 bp, Homo sapiens
tagggttatatgctt

SEQ ID NO: 68764 - DNA, 15 bp, Homo sapiens
agggttatatgctta

SEQ ID NO: 68765 - DNA, 15 bp, Homo sapiens
gggttatatgcttaa

SEQ ID NO: 68766 - DNA, 15 bp, Homo sapiens
ggttatatgcttaat

SEQ ID NO: 68767 - DNA, 15 bp, Homo sapiens
gttatatgcttaata

SEQ ID NO: 68768 - DNA, 15 bp, Homo sapiens
ttatatgcttaatat

SEQ ID NO: 68769 - DNA, 15 bp, Homo sapiens
tatatgcttaatatt

SEQ ID NO: 68770 - DNA, 15 bp, Homo sapiens
atatgcttaatatta

SEQ ID NO: 68771 - DNA, 15 bp, Homo sapiens
tatgcttaatattag

SEQ ID NO: 68772 - DNA, 15 bp, Homo sapiens
atgcttaatattagt

SEQ ID NO: 68773 - DNA, 15 bp, Homo sapiens
tgcttaatattagtc

SEQ ID NO: 68774 - DNA, 15 bp, Homo sapiens
gcttaatattagtct

SEQ ID NO: 68775 - DNA, 15 bp, Homo sapiens
cttaatattagtctg

SEQ ID NO: 68776 - DNA, 15 bp, Homo sapiens
ttaatattagtctga

SEQ ID NO: 68777 - DNA, 15 bp, Homo sapiens
taatattagtctgaa

SEQ ID NO: 68778 - DNA, 15 bp, Homo sapiens
aatattagtctgaaa

SEQ ID NO: 68779 - DNA, 15 bp, Homo sapiens
atattagtctgaaat

SEQ ID NO: 68780 - DNA, 15 bp, Homo sapiens
tattagtctgaaata

SEQ ID NO: 68781 - DNA, 15 bp, Homo sapiens
attagtctgaaatat

SEQ ID NO: 68782 - DNA, 15 bp, Homo sapiens
ttagtctgaaatata

SEQ ID NO: 68783 - DNA, 15 bp, Homo sapiens
tagtctgaaatatag

SEQ ID NO: 68784 - DNA, 15 bp, Homo sapiens
agtctgaaatatagt

SEQ ID NO: 68785 - DNA, 15 bp, Homo sapiens
gtctgaaatatagtg

SEQ ID NO: 68786 - DNA, 15 bp, Homo sapiens
tctgaaatatagtgc

SEQ ID NO: 68787 - DNA, 15 bp, Homo sapiens
ctgaaatatagtgct

SEQ ID NO: 68788 - DNA, 15 bp, Homo sapiens
tgaaatatagtgctg

SEQ ID NO: 68789 - DNA, 15 bp, Homo sapiens
gaaatatagtgctga

SEQ ID NO: 68790 - DNA, 15 bp, Homo sapiens
aaatatagtgctgaa

SEQ ID NO: 68791 - DNA, 15 bp, Homo sapiens
aatatagtgctgaat

SEQ ID NO: 68792 - DNA, 15 bp, Homo sapiens
atatagtgctgaatt

SEQ ID NO: 68793 - DNA, 15 bp, Homo sapiens
tatagtgctgaattt

SEQ ID NO: 68794 - DNA, 15 bp, Homo sapiens
atagtgctgaatttg

SEQ ID NO: 68795 - DNA, 15 bp, Homo sapiens
tagtgctgaatttga

SEQ ID NO: 68796 - DNA, 15 bp, Homo sapiens
agtgctgaatttgag

SEQ ID NO: 68797 - DNA, 15 bp, Homo sapiens
gtgctgaatttgaga

SEQ ID NO: 68798 - DNA, 15 bp, Homo sapiens
tgctgaatttgagac

SEQ ID NO: 68799 - DNA, 15 bp, Homo sapiens
gctgaatttgagact

SEQ ID NO: 68800 - DNA, 15 bp, Homo sapiens
ctgaatttgagacta

SEQ ID NO: 68801 - DNA, 15 bp, Homo sapiens
tgaatttgagactat

SEQ ID NO: 68802 - DNA, 15 bp, Homo sapiens
gaatttgagactata

SEQ ID NO: 68803 - DNA, 15 bp, Homo sapiens
aatttgagactatag

SEQ ID NO: 68804 - DNA, 15 bp, Homo sapiens
atttgagactataga

SEQ ID NO: 68805 - DNA, 15 bp, Homo sapiens
tttgagactatagaa

SEQ ID NO: 68806 - DNA, 15 bp, Homo sapiens
ttgagactatagaaa

SEQ ID NO: 68807 - DNA, 15 bp, Homo sapiens
tgagactatagaaaa

SEQ ID NO: 68808 - DNA, 15 bp, Homo sapiens
gagactatagaaaaa

SEQ ID NO: 68809 - DNA, 15 bp, Homo sapiens
agactatagaaaaat

SEQ ID NO: 68810 - DNA, 15 bp, Homo sapiens
gactatagaaaaatt

SEQ ID NO: 68811 - DNA, 15 bp, Homo sapiens
actatagaaaaatta

SEQ ID NO: 68812 - DNA, 15 bp, Homo sapiens
ctatagaaaaattaa

SEQ ID NO: 68813 - DNA, 15 bp, Homo sapiens
tatagaaaaattaag

SEQ ID NO: 68814 - DNA, 15 bp, Homo sapiens
atagaaaaattaagt

SEQ ID NO: 68815 - DNA, 15 bp, Homo sapiens
tagaaaaattaagtg

SEQ ID NO: 68816 - DNA, 15 bp, Homo sapiens
agaaaaattaagtgt

SEQ ID NO: 68817 - DNA, 15 bp, Homo sapiens
gaaaaattaagtgta

SEQ ID NO: 68818 - DNA, 15 bp, Homo sapiens
aaaaattaagtgtat

SEQ ID NO: 68819 - DNA, 15 bp, Homo sapiens
aaaattaagtgtatt

SEQ ID NO: 68820 - DNA, 15 bp, Homo sapiens
aaattaagtgtattt

SEQ ID NO: 68821 - DNA, 15 bp, Homo sapiens
aattaagtgtattta

SEQ ID NO: 68822 - DNA, 15 bp, Homo sapiens
attaagtgtatttag

SEQ ID NO: 68823 - DNA, 15 bp, Homo sapiens
ttaagtgtatttagg

SEQ ID NO: 68824 - DNA, 15 bp, Homo sapiens
taagtgtatttaggg

SEQ ID NO: 68825 - DNA, 15 bp, Homo sapiens
aagtgtatttagggt

SEQ ID NO: 68826 - DNA, 15 bp, Homo sapiens
agtgtatttagggta

SEQ ID NO: 68827 - DNA, 15 bp, Homo sapiens
gtgtatttagggtat

SEQ ID NO: 68828 - DNA, 15 bp, Homo sapiens
tgtatttagggtatg

SEQ ID NO: 68829 - DNA, 15 bp, Homo sapiens
gtatttagggtatgt

SEQ ID NO: 68830 - DNA, 15 bp, Homo sapiens
tatttagggtatgtg

SEQ ID NO: 68831 - DNA, 15 bp, Homo sapiens
atttagggtatgtgg

SEQ ID NO: 68832 - DNA, 15 bp, Homo sapiens
tttagggtatgtgga

SEQ ID NO: 68833 - DNA, 15 bp, Homo sapiens
ttagggtatgtggaa

SEQ ID NO: 68834 - DNA, 15 bp, Homo sapiens
tagggtatgtggaaa

SEQ ID NO: 68835 - DNA, 15 bp, Homo sapiens
agggtatgtggaaac

SEQ ID NO: 68836 - DNA, 15 bp, Homo sapiens
gggtatgtggaaacg

SEQ ID NO: 68837 - DNA, 15 bp, Homo sapiens
ggtatgtggaaacgt

SEQ ID NO: 68838 - DNA, 15 bp, Homo sapiens
gtatgtggaaacgtt

SEQ ID NO: 68839 - DNA, 15 bp, Homo sapiens
tatgtggaaacgtta

SEQ ID NO: 68840 - DNA, 15 bp, Homo sapiens
atgtggaaacgttag

SEQ ID NO: 68841 - DNA, 15 bp, Homo sapiens
tgtggaaacgttagg

SEQ ID NO: 68842 - DNA, 15 bp, Homo sapiens
gtggaaacgttaggc

SEQ ID NO: 68843 - DNA, 15 bp, Homo sapiens
tggaaacgttaggct

SEQ ID NO: 68844 - DNA, 15 bp, Homo sapiens
ggaaacgttaggctt

SEQ ID NO: 68845 - DNA, 15 bp, Homo sapiens
gaaacgttaggcttc

SEQ ID NO: 68846 - DNA, 15 bp, Homo sapiens
aaacgttaggcttct

SEQ ID NO: 68847 - DNA, 15 bp, Homo sapiens
aacgttaggcttctg

SEQ ID NO: 68848 - DNA, 15 bp, Homo sapiens
acgttaggcttctgt

SEQ ID NO: 68849 - DNA, 15 bp, Homo sapiens
cgttaggcttctgtt

SEQ ID NO: 68850 - DNA, 15 bp, Homo sapiens
gttaggcttctgttg

SEQ ID NO: 68851 - DNA, 15 bp, Homo sapiens
ttaggcttctgttgt

SEQ ID NO: 68852 - DNA, 15 bp, Homo sapiens
taggcttctgttgta

SEQ ID NO: 68853 - DNA, 15 bp, Homo sapiens
aggcttctgttgtat

SEQ ID NO: 68854 - DNA, 15 bp, Homo sapiens
ggcttctgttgtatt

SEQ ID NO: 68855 - DNA, 15 bp, Homo sapiens
gcttctgttgtattt

SEQ ID NO: 68856 - DNA, 15 bp, Homo sapiens
cttctgttgtatttt

SEQ ID NO: 68857 - DNA, 15 bp, Homo sapiens
ttctgttgtattttt

SEQ ID NO: 68858 - DNA, 15 bp, Homo sapiens
tctgttgtattttta

SEQ ID NO: 68859 - DNA, 15 bp, Homo sapiens
ctgttgtatttttat

SEQ ID NO: 68860 - DNA, 15 bp, Homo sapiens
tgttgtatttttatt

SEQ ID NO: 68861 - DNA, 15 bp, Homo sapiens
gttgtatttttattg

SEQ ID NO: 68862 - DNA, 15 bp, Homo sapiens
ttgtatttttattgt

SEQ ID NO: 68863 - DNA, 15 bp, Homo sapiens
tgtatttttattgtt

SEQ ID NO: 68864 - DNA, 15 bp, Homo sapiens
gtatttttattgttt

SEQ ID NO: 68865 - DNA, 15 bp, Homo sapiens
tatttttattgtttg

SEQ ID NO: 68866 - DNA, 15 bp, Homo sapiens
atttttattgtttgg

SEQ ID NO: 68867 - DNA, 15 bp, Homo sapiens
tttttattgtttggt

SEQ ID NO: 68868 - DNA, 15 bp, Homo sapiens
ttttattgtttggta

SEQ ID NO: 68869 - DNA, 15 bp, Homo sapiens
tttattgtttggtag

SEQ ID NO: 68870 - DNA, 15 bp, Homo sapiens
ttattgtttggtaga

SEQ ID NO: 68871 - DNA, 15 bp, Homo sapiens
tattgtttggtagat

SEQ ID NO: 68872 - DNA, 15 bp, Homo sapiens
attgtttggtagatt

SEQ ID NO: 68873 - DNA, 15 bp, Homo sapiens
ttgtttggtagattt

SEQ ID NO: 68874 - DNA, 15 bp, Homo sapiens
tgtttggtagatttg

SEQ ID NO: 68875 - DNA, 15 bp, Homo sapiens
gtttggtagatttgc

SEQ ID NO: 68876 - DNA, 15 bp, Homo sapiens
tttggtagatttgcc

SEQ ID NO: 68877 - DNA, 15 bp, Homo sapiens
ttggtagatttgcct

SEQ ID NO: 68878 - DNA, 15 bp, Homo sapiens
tggtagatttgcctc

SEQ ID NO: 68879 - DNA, 15 bp, Homo sapiens
ggtagatttgcctct

SEQ ID NO: 68880 - DNA, 15 bp, Homo sapiens
gtagatttgcctctt

SEQ ID NO: 68881 - DNA, 15 bp, Homo sapiens
tagatttgcctcttt

SEQ ID NO: 68882 - DNA, 15 bp, Homo sapiens
agatttgcctctttt

SEQ ID NO: 68883 - DNA, 15 bp, Homo sapiens
gatttgcctcttttc

SEQ ID NO: 68884 - DNA, 15 bp, Homo sapiens
atttgcctcttttca

SEQ ID NO: 68885 - DNA, 15 bp, Homo sapiens
tttgcctcttttcaa

SEQ ID NO: 68886 - DNA, 15 bp, Homo sapiens
ttgcctcttttcaaa

SEQ ID NO: 68887 - DNA, 15 bp, Homo sapiens
tgcctcttttcaaat

SEQ ID NO: 68888 - DNA, 15 bp, Homo sapiens
gcctcttttcaaata

SEQ ID NO: 68889 - DNA, 15 bp, Homo sapiens
cctcttttcaaataa

SEQ ID NO: 68890 - DNA, 15 bp, Homo sapiens
ctcttttcaaataaa

SEQ ID NO: 68891 - DNA, 15 bp, Homo sapiens
tcttttcaaataaat

SEQ ID NO: 68892 - DNA, 15 bp, Homo sapiens
cttttcaaataaatg

SEQ ID NO: 68893 - DNA, 15 bp, Homo sapiens
ttttcaaataaatgt

SEQ ID NO: 68894 - DNA, 15 bp, Homo sapiens
tttcaaataaatgtt

SEQ ID NO: 68895 - DNA, 15 bp, Homo sapiens
ttcaaataaatgttc

SEQ ID NO: 68896 - DNA, 15 bp, Homo sapiens
tcaaataaatgttca

SEQ ID NO: 68897 - DNA, 15 bp, Homo sapiens
caaataaatgttcac

SEQ ID NO: 68898 - DNA, 15 bp, Homo sapiens
aaataaatgttcaca

SEQ ID NO: 68899 - DNA, 15 bp, Homo sapiens
aataaatgttcacag

SEQ ID NO: 68900 - DNA, 15 bp, Homo sapiens
ataaatgttcacagg

SEQ ID NO: 68901 - DNA, 15 bp, Homo sapiens
taaatgttcacaggg

SEQ ID NO: 68902 - DNA, 15 bp, Homo sapiens
aaatgttcacaggga

SEQ ID NO: 68903 - DNA, 15 bp, Homo sapiens
aatgttcacagggaa

SEQ ID NO: 68904 - DNA, 15 bp, Homo sapiens
atgttcacagggaat

SEQ ID NO: 68905 - DNA, 15 bp, Homo sapiens
tgttcacagggaata

SEQ ID NO: 68906 - DNA, 15 bp, Homo sapiens
gttcacagggaatac

SEQ ID NO: 68907 - DNA, 15 bp, Homo sapiens
ttcacagggaatact

SEQ ID NO: 68908 - DNA, 15 bp, Homo sapiens
tcacagggaatactt

SEQ ID NO: 68909 - DNA, 15 bp, Homo sapiens
cacagggaatacttt

SEQ ID NO: 68910 - DNA, 15 bp, Homo sapiens
acagggaatactttt

SEQ ID NO: 68911 - DNA, 15 bp, Homo sapiens
cagggaatactttta

SEQ ID NO: 68912 - DNA, 15 bp, Homo sapiens
agggaatacttttaa

SEQ ID NO: 68913 - DNA, 15 bp, Homo sapiens
gggaatacttttaac

SEQ ID NO: 68914 - DNA, 15 bp, Homo sapiens
ggaatacttttaact

SEQ ID NO: 68915 - DNA, 15 bp, Homo sapiens
gaatacttttaactt

SEQ ID NO: 68916 - DNA, 15 bp, Homo sapiens
aatacttttaacttg

SEQ ID NO: 68917 - DNA, 15 bp, Homo sapiens
atacttttaacttgt

SEQ ID NO: 68918 - DNA, 15 bp, Homo sapiens
tacttttaacttgta

SEQ ID NO: 68919 - DNA, 15 bp, Homo sapiens
acttttaacttgtag

SEQ ID NO: 68920 - DNA, 15 bp, Homo sapiens
cttttaacttgtaga

SEQ ID NO: 68921 - DNA, 15 bp, Homo sapiens
ttttaacttgtagag

SEQ ID NO: 68922 - DNA, 15 bp, Homo sapiens
tttaacttgtagaga

SEQ ID NO: 68923 - DNA, 15 bp, Homo sapiens
ttaacttgtagagag

SEQ ID NO: 68924 - DNA, 15 bp, Homo sapiens
taacttgtagagagt

SEQ ID NO: 68925 - DNA, 15 bp, Homo sapiens
aacttgtagagagta

SEQ ID NO: 68926 - DNA, 15 bp, Homo sapiens
acttgtagagagtac

SEQ ID NO: 68927 - DNA, 15 bp, Homo sapiens
cttgtagagagtaca

SEQ ID NO: 68928 - DNA, 15 bp, Homo sapiens
ttgtagagagtacag

SEQ ID NO: 68929 - DNA, 15 bp, Homo sapiens
tgtagagagtacagt

SEQ ID NO: 68930 - DNA, 15 bp, Homo sapiens
gtagagagtacagtg

SEQ ID NO: 68931 - DNA, 15 bp, Homo sapiens
tagagagtacagtga

SEQ ID NO: 68932 - DNA, 15 bp, Homo sapiens
agagagtacagtgac

SEQ ID NO: 68933 - DNA, 15 bp, Homo sapiens
gagagtacagtgact

SEQ ID NO: 68934 - DNA, 15 bp, Homo sapiens
agagtacagtgacta

SEQ ID NO: 68935 - DNA, 15 bp, Homo sapiens
gagtacagtgactat

SEQ ID NO: 68936 - DNA, 15 bp, Homo sapiens
agtacagtgactatt

SEQ ID NO: 68937 - DNA, 15 bp, Homo sapiens
gtacagtgactattg

SEQ ID NO: 68938 - DNA, 15 bp, Homo sapiens
tacagtgactattga

SEQ ID NO: 68939 - DNA, 15 bp, Homo sapiens
acagtgactattgaa

SEQ ID NO: 68940 - DNA, 15 bp, Homo sapiens
cagtgactattgaag

SEQ ID NO: 68941 - DNA, 15 bp, Homo sapiens
agtgactattgaagt

SEQ ID NO: 68942 - DNA, 15 bp, Homo sapiens
gtgactattgaagtt

SEQ ID NO: 68943 - DNA, 15 bp, Homo sapiens
tgactattgaagtta

SEQ ID NO: 68944 - DNA, 15 bp, Homo sapiens
gactattgaagttac

SEQ ID NO: 68945 - DNA, 15 bp, Homo sapiens
actattgaagttacc

SEQ ID NO: 68946 - DNA, 15 bp, Homo sapiens
ctattgaagttacct

SEQ ID NO: 68947 - DNA, 15 bp, Homo sapiens
tattgaagttaccta

SEQ ID NO: 68948 - DNA, 15 bp, Homo sapiens
attgaagttacctaa

SEQ ID NO: 68949 - DNA, 15 bp, Homo sapiens
ttgaagttacctaaa

SEQ ID NO: 68950 - DNA, 15 bp, Homo sapiens
tgaagttacctaaat

SEQ ID NO: 68951 - DNA, 15 bp, Homo sapiens
gaagttacctaaatt

SEQ ID NO: 68952 - DNA, 15 bp, Homo sapiens
aagttacctaaatta

SEQ ID NO: 68953 - DNA, 15 bp, Homo sapiens
agttacctaaattac

SEQ ID NO: 68954 - DNA, 15 bp, Homo sapiens
gttacctaaattacc

SEQ ID NO: 68955 - DNA, 15 bp, Homo sapiens
ttacctaaattacct

SEQ ID NO: 68956 - DNA, 15 bp, Homo sapiens
tacctaaattacctc

SEQ ID NO: 68957 - DNA, 15 bp, Homo sapiens
acctaaattacctca

SEQ ID NO: 68958 - DNA, 15 bp, Homo sapiens
cctaaattacctcaa

SEQ ID NO: 68959 - DNA, 15 bp, Homo sapiens
ctaaattacctcaag

SEQ ID NO: 68960 - DNA, 15 bp, Homo sapiens
taaattacctcaagg

SEQ ID NO: 68961 - DNA, 15 bp, Homo sapiens
aaattacctcaaggt

SEQ ID NO: 68962 - DNA, 15 bp, Homo sapiens
aattacctcaaggta

SEQ ID NO: 68963 - DNA, 15 bp, Homo sapiens
attacctcaaggtaa

SEQ ID NO: 68964 - DNA, 15 bp, Homo sapiens
ttacctcaaggtaag

SEQ ID NO: 68965 - DNA, 15 bp, Homo sapiens
tacctcaaggtaagt

SEQ ID NO: 68966 - DNA, 15 bp, Homo sapiens
acctcaaggtaagtg

SEQ ID NO: 68967 - DNA, 15 bp, Homo sapiens
cctcaaggtaagtga

SEQ ID NO: 68968 - DNA, 15 bp, Homo sapiens
ctcaaggtaagtgat

SEQ ID NO: 68969 - DNA, 15 bp, Homo sapiens
tcaaggtaagtgatt

SEQ ID NO: 68970 - DNA, 15 bp, Homo sapiens
caaggtaagtgatta

SEQ ID NO: 68971 - DNA, 15 bp, Homo sapiens
aaggtaagtgattac

SEQ ID NO: 68972 - DNA, 15 bp, Homo sapiens
aggtaagtgattact

SEQ ID NO: 68973 - DNA, 15 bp, Homo sapiens
ggtaagtgattactg

SEQ ID NO: 68974 - DNA, 15 bp, Homo sapiens
gtaagtgattactga

SEQ ID NO: 68975 - DNA, 15 bp, Homo sapiens
taagtgattactgaa

SEQ ID NO: 68976 - DNA, 15 bp, Homo sapiens
aagtgattactgaaa

SEQ ID NO: 68977 - DNA, 15 bp, Homo sapiens
agtgattactgaaat

SEQ ID NO: 68978 - DNA, 15 bp, Homo sapiens
gtgattactgaaatt

SEQ ID NO: 68979 - DNA, 15 bp, Homo sapiens
tgattactgaaatta

SEQ ID NO: 68980 - DNA, 15 bp, Homo sapiens
gattactgaaattaa

SEQ ID NO: 68981 - DNA, 15 bp, Homo sapiens
attactgaaattaat

SEQ ID NO: 68982 - DNA, 15 bp, Homo sapiens
ttactgaaattaatc

SEQ ID NO: 68983 - DNA, 15 bp, Homo sapiens
tactgaaattaatca

SEQ ID NO: 68984 - DNA, 15 bp, Homo sapiens
actgaaattaatcat

SEQ ID NO: 68985 - DNA, 15 bp, Homo sapiens
ctgaaattaatcatg

SEQ ID NO: 68986 - DNA, 15 bp, Homo sapiens
tgaaattaatcatga

SEQ ID NO: 68987 - DNA, 15 bp, Homo sapiens
gaaattaatcatgag

SEQ ID NO: 68988 - DNA, 15 bp, Homo sapiens
aaattaatcatgagg

SEQ ID NO: 68989 - DNA, 15 bp, Homo sapiens
aattaatcatgaggg

SEQ ID NO: 68990 - DNA, 15 bp, Homo sapiens
attaatcatgagggt

SEQ ID NO: 68991 - DNA, 15 bp, Homo sapiens
ttaatcatgagggtt

SEQ ID NO: 68992 - DNA, 15 bp, Homo sapiens
taatcatgagggttt

SEQ ID NO: 68993 - DNA, 15 bp, Homo sapiens
aatcatgagggtttt

SEQ ID NO: 68994 - DNA, 15 bp, Homo sapiens
atcatgagggtttta

SEQ ID NO: 68995 - DNA, 15 bp, Homo sapiens
tcatgagggttttaa

SEQ ID NO: 68996 - DNA, 15 bp, Homo sapiens
catgagggttttaaa

SEQ ID NO: 68997 - DNA, 15 bp, Homo sapiens
atgagggttttaaaa

SEQ ID NO: 68998 - DNA, 15 bp, Homo sapiens
tgagggttttaaaaa

SEQ ID NO: 68999 - DNA, 15 bp, Homo sapiens
gagggttttaaaaag

SEQ ID NO: 69000 - DNA, 15 bp, Homo sapiens
agggttttaaaaagt

SEQ ID NO: 69001 - DNA, 15 bp, Homo sapiens
gggttttaaaaagta

SEQ ID NO: 69002 - DNA, 15 bp, Homo sapiens
ggttttaaaaagtat

SEQ ID NO: 69003 - DNA, 15 bp, Homo sapiens
gttttaaaaagtatt

SEQ ID NO: 69004 - DNA, 15 bp, Homo sapiens
ttttaaaaagtattc

SEQ ID NO: 69005 - DNA, 15 bp, Homo sapiens
tttaaaaagtattct

SEQ ID NO: 69006 - DNA, 15 bp, Homo sapiens
ttaaaaagtattcta

SEQ ID NO: 69007 - DNA, 15 bp, Homo sapiens
taaaaagtattctat

SEQ ID NO: 69008 - DNA, 15 bp, Homo sapiens
aaaaagtattctatt

SEQ ID NO: 69009 - DNA, 15 bp, Homo sapiens
aaaagtattctattc

SEQ ID NO: 69010 - DNA, 15 bp, Homo sapiens
aaagtattctattca

SEQ ID NO: 69011 - DNA, 15 bp, Homo sapiens
aagtattctattcac

SEQ ID NO: 69012 - DNA, 15 bp, Homo sapiens
agtattctattcaca

SEQ ID NO: 69013 - DNA, 15 bp, Homo sapiens
gtattctattcacaa

SEQ ID NO: 69014 - DNA, 15 bp, Homo sapiens
tattctattcacaac

SEQ ID NO: 69015 - DNA, 15 bp, Homo sapiens
attctattcacaaca

SEQ ID NO: 69016 - DNA, 15 bp, Homo sapiens
ttctattcacaacat

SEQ ID NO: 69017 - DNA, 15 bp, Homo sapiens
tctattcacaacatt

SEQ ID NO: 69018 - DNA, 15 bp, Homo sapiens
ctattcacaacattt

SEQ ID NO: 69019 - DNA, 15 bp, Homo sapiens
tattcacaacattta

SEQ ID NO: 69020 - DNA, 15 bp, Homo sapiens
attcacaacatttat

SEQ ID NO: 69021 - DNA, 15 bp, Homo sapiens
ttcacaacatttatt

SEQ ID NO: 69022 - DNA, 15 bp, Homo sapiens
tcacaacatttattt

SEQ ID NO: 69023 - DNA, 15 bp, Homo sapiens
cacaacatttatttt

SEQ ID NO: 69024 - DNA, 15 bp, Homo sapiens
acaacatttatttta

SEQ ID NO: 69025 - DNA, 15 bp, Homo sapiens
caacatttattttac

SEQ ID NO: 69026 - DNA, 15 bp, Homo sapiens
aacatttattttaca

SEQ ID NO: 69027 - DNA, 15 bp, Homo sapiens
acatttattttacat

SEQ ID NO: 69028 - DNA, 15 bp, Homo sapiens
catttattttacatt

SEQ ID NO: 69029 - DNA, 15 bp, Homo sapiens
atttattttacattg

SEQ ID NO: 69030 - DNA, 15 bp, Homo sapiens
tttattttacattgt

SEQ ID NO: 69031 - DNA, 15 bp, Homo sapiens
ttattttacattgtt

SEQ ID NO: 69032 - DNA, 15 bp, Homo sapiens
tattttacattgttt

SEQ ID NO: 69033 - DNA, 15 bp, Homo sapiens
attttacattgtttt

SEQ ID NO: 69034 - DNA, 15 bp, Homo sapiens
ttttacattgttttg

SEQ ID NO: 69035 - DNA, 15 bp, Homo sapiens
tttacattgttttgt

SEQ ID NO: 69036 - DNA, 15 bp, Homo sapiens
ttacattgttttgta

SEQ ID NO: 69037 - DNA, 15 bp, Homo sapiens
tacattgttttgtat

SEQ ID NO: 69038 - DNA, 15 bp, Homo sapiens
acattgttttgtatc

SEQ ID NO: 69039 - DNA, 15 bp, Homo sapiens
cattgttttgtatct

SEQ ID NO: 69040 - DNA, 15 bp, Homo sapiens
attgttttgtatctg

SEQ ID NO: 69041 - DNA, 15 bp, Homo sapiens
ttgttttgtatctgc

SEQ ID NO: 69042 - DNA, 15 bp, Homo sapiens
tgttttgtatctgct

SEQ ID NO: 69043 - DNA, 15 bp, Homo sapiens
gttttgtatctgcta

SEQ ID NO: 69044 - DNA, 15 bp, Homo sapiens
ttttgtatctgctaa

SEQ ID NO: 69045 - DNA, 15 bp, Homo sapiens
tttgtatctgctaag

SEQ ID NO: 69046 - DNA, 15 bp, Homo sapiens
ttgtatctgctaagt

SEQ ID NO: 69047 - DNA, 15 bp, Homo sapiens
tgtatctgctaagtt

SEQ ID NO: 69048 - DNA, 15 bp, Homo sapiens
gtatctgctaagtta

SEQ ID NO: 69049 - DNA, 15 bp, Homo sapiens
tatctgctaagttat

SEQ ID NO: 69050 - DNA, 15 bp, Homo sapiens
atctgctaagttata

SEQ ID NO: 69051 - DNA, 15 bp, Homo sapiens
tctgctaagttatat

SEQ ID NO: 69052 - DNA, 15 bp, Homo sapiens
ctgctaagttatatt

SEQ ID NO: 69053 - DNA, 15 bp, Homo sapiens
tgctaagttatattt

SEQ ID NO: 69054 - DNA, 15 bp, Homo sapiens
gctaagttatatttc

SEQ ID NO: 69055 - DNA, 15 bp, Homo sapiens
ctaagttatatttcc

SEQ ID NO: 69056 - DNA, 15 bp, Homo sapiens
taagttatatttcct

SEQ ID NO: 69057 - DNA, 15 bp, Homo sapiens
aagttatatttcctg

SEQ ID NO: 69058 - DNA, 15 bp, Homo sapiens
agttatatttcctga

SEQ ID NO: 69059 - DNA, 15 bp, Homo sapiens
gttatatttcctgaa

SEQ ID NO: 69060 - DNA, 15 bp, Homo sapiens
ttatatttcctgaaa

SEQ ID NO: 69061 - DNA, 15 bp, Homo sapiens
tatatttcctgaaaa

SEQ ID NO: 69062 - DNA, 15 bp, Homo sapiens
atatttcctgaaaaa

SEQ ID NO: 69063 - DNA, 15 bp, Homo sapiens
tatttcctgaaaaac

SEQ ID NO: 69064 - DNA, 15 bp, Homo sapiens
atttcctgaaaaaca

SEQ ID NO: 69065 - DNA, 15 bp, Homo sapiens
tttcctgaaaaacat

SEQ ID NO: 69066 - DNA, 15 bp, Homo sapiens
ttcctgaaaaacatg

SEQ ID NO: 69067 - DNA, 15 bp, Homo sapiens
tcctgaaaaacatga

SEQ ID NO: 69068 - DNA, 15 bp, Homo sapiens
cctgaaaaacatgac

SEQ ID NO: 69069 - DNA, 15 bp, Homo sapiens
ctgaaaaacatgact

SEQ ID NO: 69070 - DNA, 15 bp, Homo sapiens
tgaaaaacatgactg

SEQ ID NO: 69071 - DNA, 15 bp, Homo sapiens
gaaaaacatgactgg

SEQ ID NO: 69072 - DNA, 15 bp, Homo sapiens
aaaaacatgactgga

SEQ ID NO: 69073 - DNA, 15 bp, Homo sapiens
aaaacatgactggac

SEQ ID NO: 69074 - DNA, 15 bp, Homo sapiens
aaacatgactggacc

SEQ ID NO: 69075 - DNA, 15 bp, Homo sapiens
aacatgactggacca

SEQ ID NO: 69076 - DNA, 15 bp, Homo sapiens
acatgactggaccac

SEQ ID NO: 69077 - DNA, 15 bp, Homo sapiens
catgactggaccacc

SEQ ID NO: 69078 - DNA, 15 bp, Homo sapiens
atgactggaccacct

SEQ ID NO: 69079 - DNA, 15 bp, Homo sapiens
tgactggaccaccta

SEQ ID NO: 69080 - DNA, 15 bp, Homo sapiens
gactggaccacctaa

SEQ ID NO: 69081 - DNA, 15 bp, Homo sapiens
actggaccacctaat

SEQ ID NO: 69082 - DNA, 15 bp, Homo sapiens
ctggaccacctaatt

SEQ ID NO: 69083 - DNA, 15 bp, Homo sapiens
tggaccacctaattg

SEQ ID NO: 69084 - DNA, 15 bp, Homo sapiens
ggaccacctaattgc

SEQ ID NO: 69085 - DNA, 15 bp, Homo sapiens
gaccacctaattgct

SEQ ID NO: 69086 - DNA, 15 bp, Homo sapiens
accacctaattgctg

SEQ ID NO: 69087 - DNA, 15 bp, Homo sapiens
ccacctaattgctgt

SEQ ID NO: 69088 - DNA, 15 bp, Homo sapiens
cacctaattgctgta

SEQ ID NO: 69089 - DNA, 15 bp, Homo sapiens
acctaattgctgtat

SEQ ID NO: 69090 - DNA, 15 bp, Homo sapiens
cctaattgctgtatg

SEQ ID NO: 69091 - DNA, 15 bp, Homo sapiens
ctaattgctgtatga

SEQ ID NO: 69092 - DNA, 15 bp, Homo sapiens
taattgctgtatgat

SEQ ID NO: 69093 - DNA, 15 bp, Homo sapiens
aattgctgtatgata

SEQ ID NO: 69094 - DNA, 15 bp, Homo sapiens
attgctgtatgataa

SEQ ID NO: 69095 - DNA, 15 bp, Homo sapiens
ttgctgtatgataac

SEQ ID NO: 69096 - DNA, 15 bp, Homo sapiens
tgctgtatgataact

SEQ ID NO: 69097 - DNA, 15 bp, Homo sapiens
gctgtatgataactt

SEQ ID NO: 69098 - DNA, 15 bp, Homo sapiens
ctgtatgataactta

SEQ ID NO: 69099 - DNA, 15 bp, Homo sapiens
tgtatgataacttac

SEQ ID NO: 69100 - DNA, 15 bp, Homo sapiens
gtatgataacttaca

SEQ ID NO: 69101 - DNA, 15 bp, Homo sapiens
tatgataacttacaa

SEQ ID NO: 69102 - DNA, 15 bp, Homo sapiens
atgataacttacaaa

SEQ ID NO: 69103 - DNA, 15 bp, Homo sapiens
tgataacttacaaac

SEQ ID NO: 69104 - DNA, 15 bp, Homo sapiens
gataacttacaaact

SEQ ID NO: 69105 - DNA, 15 bp, Homo sapiens
ataacttacaaactt

SEQ ID NO: 69106 - DNA, 15 bp, Homo sapiens
taacttacaaacttc

SEQ ID NO: 69107 - DNA, 15 bp, Homo sapiens
aacttacaaacttca

SEQ ID NO: 69108 - DNA, 15 bp, Homo sapiens
acttacaaacttcat

SEQ ID NO: 69109 - DNA, 15 bp, Homo sapiens
cttacaaacttcatt

SEQ ID NO: 69110 - DNA, 15 bp, Homo sapiens
ttacaaacttcattt

SEQ ID NO: 69111 - DNA, 15 bp, Homo sapiens
tacaaacttcatttt

SEQ ID NO: 69112 - DNA, 15 bp, Homo sapiens
acaaacttcattttt

SEQ ID NO: 69113 - DNA, 15 bp, Homo sapiens
caaacttcatttttc

SEQ ID NO: 69114 - DNA, 15 bp, Homo sapiens
aaacttcatttttca

SEQ ID NO: 69115 - DNA, 15 bp, Homo sapiens
aacttcatttttcat

SEQ ID NO: 69116 - DNA, 15 bp, Homo sapiens
acttcatttttcata

SEQ ID NO: 69117 - DNA, 15 bp, Homo sapiens
cttcatttttcatag

SEQ ID NO: 69118 - DNA, 15 bp, Homo sapiens
ttcatttttcatagt

SEQ ID NO: 69119 - DNA, 15 bp, Homo sapiens
tcatttttcatagtg

SEQ ID NO: 69120 - DNA, 15 bp, Homo sapiens
catttttcatagtgc

SEQ ID NO: 69121 - DNA, 15 bp, Homo sapiens
atttttcatagtgct

SEQ ID NO: 69122 - DNA, 15 bp, Homo sapiens
tttttcatagtgctt

SEQ ID NO: 69123 - DNA, 15 bp, Homo sapiens
ttttcatagtgctta

SEQ ID NO: 69124 - DNA, 15 bp, Homo sapiens
tttcatagtgcttat

SEQ ID NO: 69125 - DNA, 15 bp, Homo sapiens
ttcatagtgcttatt

SEQ ID NO: 69126 - DNA, 15 bp, Homo sapiens
tcatagtgcttattc

SEQ ID NO: 69127 - DNA, 15 bp, Homo sapiens
catagtgcttattca

SEQ ID NO: 69128 - DNA, 15 bp, Homo sapiens
atagtgcttattcaa

SEQ ID NO: 69129 - DNA, 15 bp, Homo sapiens
tagtgcttattcaag

SEQ ID NO: 69130 - DNA, 15 bp, Homo sapiens
agtgcttattcaagt

SEQ ID NO: 69131 - DNA, 15 bp, Homo sapiens
gtgcttattcaagtg

SEQ ID NO: 69132 - DNA, 15 bp, Homo sapiens
tgcttattcaagtgt

SEQ ID NO: 69133 - DNA, 15 bp, Homo sapiens
gcttattcaagtgta

SEQ ID NO: 69134 - DNA, 15 bp, Homo sapiens
cttattcaagtgtaa

SEQ ID NO: 69135 - DNA, 15 bp, Homo sapiens
ttattcaagtgtaaa

SEQ ID NO: 69136 - DNA, 15 bp, Homo sapiens
tattcaagtgtaaag

SEQ ID NO: 69137 - DNA, 15 bp, Homo sapiens
attcaagtgtaaagc

SEQ ID NO: 69138 - DNA, 15 bp, Homo sapiens
ttcaagtgtaaagca

SEQ ID NO: 69139 - DNA, 15 bp, Homo sapiens
tcaagtgtaaagcac

SEQ ID NO: 69140 - DNA, 15 bp, Homo sapiens
caagtgtaaagcaca

SEQ ID NO: 69141 - DNA, 15 bp, Homo sapiens
aagtgtaaagcacaa

SEQ ID NO: 69142 - DNA, 15 bp, Homo sapiens
agtgtaaagcacaac

SEQ ID NO: 69143 - DNA, 15 bp, Homo sapiens
gtgtaaagcacaact

SEQ ID NO: 69144 - DNA, 15 bp, Homo sapiens
tgtaaagcacaactg

SEQ ID NO: 69145 - DNA, 15 bp, Homo sapiens
gtaaagcacaactga

SEQ ID NO: 69146 - DNA, 15 bp, Homo sapiens
taaagcacaactgaa

SEQ ID NO: 69147 - DNA, 15 bp, Homo sapiens
aaagcacaactgaaa

SEQ ID NO: 69148 - DNA, 15 bp, Homo sapiens
aagcacaactgaaag

SEQ ID NO: 69149 - DNA, 15 bp, Homo sapiens
agcacaactgaaagg

SEQ ID NO: 69150 - DNA, 15 bp, Homo sapiens
gcacaactgaaagga

SEQ ID NO: 69151 - DNA, 15 bp, Homo sapiens
cacaactgaaaggag

SEQ ID NO: 69152 - DNA, 15 bp, Homo sapiens
acaactgaaaggagt

SEQ ID NO: 69153 - DNA, 15 bp, Homo sapiens
caactgaaaggagta

SEQ ID NO: 69154 - DNA, 15 bp, Homo sapiens
aactgaaaggagtaa

SEQ ID NO: 69155 - DNA, 15 bp, Homo sapiens
actgaaaggagtaat

SEQ ID NO: 69156 - DNA, 15 bp, Homo sapiens
ctgaaaggagtaatg

SEQ ID NO: 69157 - DNA, 15 bp, Homo sapiens
tgaaaggagtaatgt

SEQ ID NO: 69158 - DNA, 15 bp, Homo sapiens
gaaaggagtaatgta

SEQ ID NO: 69159 - DNA, 15 bp, Homo sapiens
aaaggagtaatgtac

SEQ ID NO: 69160 - DNA, 15 bp, Homo sapiens
aaggagtaatgtaca

SEQ ID NO: 69161 - DNA, 15 bp, Homo sapiens
aggagtaatgtacag

SEQ ID NO: 69162 - DNA, 15 bp, Homo sapiens
ggagtaatgtacagt

SEQ ID NO: 69163 - DNA, 15 bp, Homo sapiens
gagtaatgtacagtt

SEQ ID NO: 69164 - DNA, 15 bp, Homo sapiens
agtaatgtacagttt

SEQ ID NO: 69165 - DNA, 15 bp, Homo sapiens
gtaatgtacagttta

SEQ ID NO: 69166 - DNA, 15 bp, Homo sapiens
taatgtacagtttat

SEQ ID NO: 69167 - DNA, 15 bp, Homo sapiens
aatgtacagtttata

SEQ ID NO: 69168 - DNA, 15 bp, Homo sapiens
atgtacagtttatat

SEQ ID NO: 69169 - DNA, 15 bp, Homo sapiens
tgtacagtttatatg

SEQ ID NO: 69170 - DNA, 15 bp, Homo sapiens
gtacagtttatatga

SEQ ID NO: 69171 - DNA, 15 bp, Homo sapiens
tacagtttatatgag

SEQ ID NO: 69172 - DNA, 15 bp, Homo sapiens
acagtttatatgagg

SEQ ID NO: 69173 - DNA, 15 bp, Homo sapiens
cagtttatatgagga

SEQ ID NO: 69174 - DNA, 15 bp, Homo sapiens
agtttatatgaggaa

SEQ ID NO: 69175 - DNA, 15 bp, Homo sapiens
gtttatatgaggaaa

SEQ ID NO: 69176 - DNA, 15 bp, Homo sapiens
tttatatgaggaaaa

SEQ ID NO: 69177 - DNA, 15 bp, Homo sapiens
ttatatgaggaaaaa

SEQ ID NO: 69178 - DNA, 15 bp, Homo sapiens
tatatgaggaaaaag

SEQ ID NO: 69179 - DNA, 15 bp, Homo sapiens
atatgaggaaaaagg

SEQ ID NO: 69180 - DNA, 15 bp, Homo sapiens
tatgaggaaaaagga

SEQ ID NO: 69181 - DNA, 15 bp, Homo sapiens
atgaggaaaaaggaa

SEQ ID NO: 69182 - DNA, 15 bp, Homo sapiens
tgaggaaaaaggaat

SEQ ID NO: 69183 - DNA, 15 bp, Homo sapiens
gaggaaaaaggaatt

SEQ ID NO: 69184 - DNA, 15 bp, Homo sapiens
aggaaaaaggaattt

SEQ ID NO: 69185 - DNA, 15 bp, Homo sapiens
ggaaaaaggaatttt

SEQ ID NO: 69186 - DNA, 15 bp, Homo sapiens
gaaaaaggaatttta

SEQ ID NO: 69187 - DNA, 15 bp, Homo sapiens
aaaaaggaattttat

SEQ ID NO: 69188 - DNA, 15 bp, Homo sapiens
aaaaggaattttatt

SEQ ID NO: 69189 - DNA, 15 bp, Homo sapiens
aaaggaattttattg

SEQ ID NO: 69190 - DNA, 15 bp, Homo sapiens
aaggaattttattgc

SEQ ID NO: 69191 - DNA, 15 bp, Homo sapiens
aggaattttattgct

SEQ ID NO: 69192 - DNA, 15 bp, Homo sapiens
ggaattttattgctg

SEQ ID NO: 69193 - DNA, 15 bp, Homo sapiens
gaattttattgctgc

SEQ ID NO: 69194 - DNA, 15 bp, Homo sapiens
aattttattgctgcc

SEQ ID NO: 69195 - DNA, 15 bp, Homo sapiens
attttattgctgcca

SEQ ID NO: 69196 - DNA, 15 bp, Homo sapiens
ttttattgctgccag

SEQ ID NO: 69197 - DNA, 15 bp, Homo sapiens
tttattgctgccagt

SEQ ID NO: 69198 - DNA, 15 bp, Homo sapiens
ttattgctgccagtg

SEQ ID NO: 69199 - DNA, 15 bp, Homo sapiens
tattgctgccagtgt

SEQ ID NO: 69200 - DNA, 15 bp, Homo sapiens
attgctgccagtgta

SEQ ID NO: 69201 - DNA, 15 bp, Homo sapiens
ttgctgccagtgtaa

SEQ ID NO: 69202 - DNA, 15 bp, Homo sapiens
tgctgccagtgtaaa

SEQ ID NO: 69203 - DNA, 15 bp, Homo sapiens
gctgccagtgtaaaa

SEQ ID NO: 69204 - DNA, 15 bp, Homo sapiens
ctgccagtgtaaaag

SEQ ID NO: 69205 - DNA, 15 bp, Homo sapiens
tgccagtgtaaaagt

SEQ ID NO: 69206 - DNA, 15 bp, Homo sapiens
gccagtgtaaaagtt

SEQ ID NO: 69207 - DNA, 15 bp, Homo sapiens
ccagtgtaaaagttt

SEQ ID NO: 69208 - DNA, 15 bp, Homo sapiens
cagtgtaaaagtttg

SEQ ID NO: 69209 - DNA, 15 bp, Homo sapiens
agtgtaaaagtttgc

SEQ ID NO: 69210 - DNA, 15 bp, Homo sapiens
gtgtaaaagtttgca

SEQ ID NO: 69211 - DNA, 15 bp, Homo sapiens
tgtaaaagtttgcac

SEQ ID NO: 69212 - DNA, 15 bp, Homo sapiens
gtaaaagtttgcaca

SEQ ID NO: 69213 - DNA, 15 bp, Homo sapiens
taaaagtttgcacag

SEQ ID NO: 69214 - DNA, 15 bp, Homo sapiens
aaaagtttgcacagc

SEQ ID NO: 69215 - DNA, 15 bp, Homo sapiens
aaagtttgcacagca

SEQ ID NO: 69216 - DNA, 15 bp, Homo sapiens
aagtttgcacagcag

SEQ ID NO: 69217 - DNA, 15 bp, Homo sapiens
agtttgcacagcagt

SEQ ID NO: 69218 - DNA, 15 bp, Homo sapiens
gtttgcacagcagta

SEQ ID NO: 69219 - DNA, 15 bp, Homo sapiens
tttgcacagcagtat

SEQ ID NO: 69220 - DNA, 15 bp, Homo sapiens
ttgcacagcagtata

SEQ ID NO: 69221 - DNA, 15 bp, Homo sapiens
tgcacagcagtatag

SEQ ID NO: 69222 - DNA, 15 bp, Homo sapiens
gcacagcagtatagt

SEQ ID NO: 69223 - DNA, 15 bp, Homo sapiens
cacagcagtatagtc

SEQ ID NO: 69224 - DNA, 15 bp, Homo sapiens
acagcagtatagtca

SEQ ID NO: 69225 - DNA, 15 bp, Homo sapiens
cagcagtatagtcat

SEQ ID NO: 69226 - DNA, 15 bp, Homo sapiens
agcagtatagtcatc

SEQ ID NO: 69227 - DNA, 15 bp, Homo sapiens
gcagtatagtcatca

SEQ ID NO: 69228 - DNA, 15 bp, Homo sapiens
cagtatagtcatcaa

SEQ ID NO: 69229 - DNA, 15 bp, Homo sapiens
agtatagtcatcaat

SEQ ID NO: 69230 - DNA, 15 bp, Homo sapiens
gtatagtcatcaatg

SEQ ID NO: 69231 - DNA, 15 bp, Homo sapiens
tatagtcatcaatgc

SEQ ID NO: 69232 - DNA, 15 bp, Homo sapiens
atagtcatcaatgca

SEQ ID NO: 69233 - DNA, 15 bp, Homo sapiens
tagtcatcaatgcag

SEQ ID NO: 69234 - DNA, 15 bp, Homo sapiens
agtcatcaatgcaga

SEQ ID NO: 69235 - DNA, 15 bp, Homo sapiens
gtcatcaatgcagat

SEQ ID NO: 69236 - DNA, 15 bp, Homo sapiens
tcatcaatgcagatt

SEQ ID NO: 69237 - DNA, 15 bp, Homo sapiens
catcaatgcagattt

SEQ ID NO: 69238 - DNA, 15 bp, Homo sapiens
atcaatgcagattta

SEQ ID NO: 69239 - DNA, 15 bp, Homo sapiens
tcaatgcagatttac

SEQ ID NO: 69240 - DNA, 15 bp, Homo sapiens
caatgcagatttaca

SEQ ID NO: 69241 - DNA, 15 bp, Homo sapiens
aatgcagatttacat

SEQ ID NO: 69242 - DNA, 15 bp, Homo sapiens
atgcagatttacatt

SEQ ID NO: 69243 - DNA, 15 bp, Homo sapiens
tgcagatttacattg

SEQ ID NO: 69244 - DNA, 15 bp, Homo sapiens
gcagatttacattgc

SEQ ID NO: 69245 - DNA, 15 bp, Homo sapiens
cagatttacattgct

SEQ ID NO: 69246 - DNA, 15 bp, Homo sapiens
agatttacattgctt

SEQ ID NO: 69247 - DNA, 15 bp, Homo sapiens
gatttacattgctta

SEQ ID NO: 69248 - DNA, 15 bp, Homo sapiens
atttacattgcttat

SEQ ID NO: 69249 - DNA, 15 bp, Homo sapiens
tttacattgcttata

SEQ ID NO: 69250 - DNA, 15 bp, Homo sapiens
ttacattgcttataa

SEQ ID NO: 69251 - DNA, 15 bp, Homo sapiens
tacattgcttataat

SEQ ID NO: 69252 - DNA, 15 bp, Homo sapiens
acattgcttataata

SEQ ID NO: 69253 - DNA, 15 bp, Homo sapiens
cattgcttataatat

SEQ ID NO: 69254 - DNA, 15 bp, Homo sapiens
attgcttataatata

SEQ ID NO: 69255 - DNA, 15 bp, Homo sapiens
ttgcttataatatac

SEQ ID NO: 69256 - DNA, 15 bp, Homo sapiens
tgcttataatatact

SEQ ID NO: 69257 - DNA, 15 bp, Homo sapiens
gcttataatatacta

SEQ ID NO: 69258 - DNA, 15 bp, Homo sapiens
cttataatatactaa

SEQ ID NO: 69259 - DNA, 15 bp, Homo sapiens
ttataatatactaag

SEQ ID NO: 69260 - DNA, 15 bp, Homo sapiens
tataatatactaagt

SEQ ID NO: 69261 - DNA, 15 bp, Homo sapiens
ataatatactaagta

SEQ ID NO: 69262 - DNA, 15 bp, Homo sapiens
taatatactaagtaa

SEQ ID NO: 69263 - DNA, 15 bp, Homo sapiens
aatatactaagtaaa

SEQ ID NO: 69264 - DNA, 15 bp, Homo sapiens
atatactaagtaaat

SEQ ID NO: 69265 - DNA, 15 bp, Homo sapiens
tatactaagtaaata

SEQ ID NO: 69266 - DNA, 15 bp, Homo sapiens
atactaagtaaatac

SEQ ID NO: 69267 - DNA, 15 bp, Homo sapiens
tactaagtaaatact

SEQ ID NO: 69268 - DNA, 15 bp, Homo sapiens
actaagtaaatacta

SEQ ID NO: 69269 - DNA, 15 bp, Homo sapiens
ctaagtaaatactaa

SEQ ID NO: 69270 - DNA, 15 bp, Homo sapiens
taagtaaatactaaa

SEQ ID NO: 69271 - DNA, 15 bp, Homo sapiens
aagtaaatactaaat

SEQ ID NO: 69272 - DNA, 15 bp, Homo sapiens
agtaaatactaaatg

SEQ ID NO: 69273 - DNA, 15 bp, Homo sapiens
gtaaatactaaatga

SEQ ID NO: 69274 - DNA, 15 bp, Homo sapiens
taaatactaaatgat

SEQ ID NO: 69275 - DNA, 15 bp, Homo sapiens
aaatactaaatgatt

SEQ ID NO: 69276 - DNA, 15 bp, Homo sapiens
aatactaaatgatta

SEQ ID NO: 69277 - DNA, 15 bp, Homo sapiens
atactaaatgattaa

SEQ ID NO: 69278 - DNA, 15 bp, Homo sapiens
tactaaatgattaaa

SEQ ID NO: 69279 - DNA, 15 bp, Homo sapiens
actaaatgattaaag

SEQ ID NO: 69280 - DNA, 15 bp, Homo sapiens
ctaaatgattaaaga

SEQ ID NO: 69281 - DNA, 15 bp, Homo sapiens
taaatgattaaagat

SEQ ID NO: 69282 - DNA, 15 bp, Homo sapiens
aaatgattaaagata

SEQ ID NO: 69283 - DNA, 15 bp, Homo sapiens
aatgattaaagataa

SEQ ID NO: 69284 - DNA, 15 bp, Homo sapiens
atgattaaagataat

SEQ ID NO: 69285 - DNA, 15 bp, Homo sapiens
tgattaaagataata

SEQ ID NO: 69286 - DNA, 15 bp, Homo sapiens
gattaaagataataa

SEQ ID NO: 69287 - DNA, 15 bp, Homo sapiens
attaaagataataaa

SEQ ID NO: 69288 - DNA, 15 bp, Homo sapiens
ttaaagataataaaa

SEQ ID NO: 69289 - DNA, 15 bp, Homo sapiens
taaagataataaaat

SEQ ID NO: 69290 - DNA, 15 bp, Homo sapiens
aaagataataaaata

SEQ ID NO: 69291 - DNA, 15 bp, Homo sapiens
aagataataaaatat

SEQ ID NO: 69292 - DNA, 15 bp, Homo sapiens
agataataaaatatg

SEQ ID NO: 69293 - DNA, 15 bp, Homo sapiens
gataataaaatatgg

SEQ ID NO: 69294 - DNA, 15 bp, Homo sapiens
ataataaaatatggt

SEQ ID NO: 69295 - DNA, 15 bp, Homo sapiens
taataaaatatggtg

SEQ ID NO: 69296 - DNA, 15 bp, Homo sapiens
aataaaatatggtga

SEQ ID NO: 69297 - DNA, 15 bp, Homo sapiens
ataaaatatggtgag

SEQ ID NO: 69298 - DNA, 15 bp, Homo sapiens
taaaatatggtgagg

SEQ ID NO: 69299 - DNA, 15 bp, Homo sapiens
aaaatatggtgaggt

SEQ ID NO: 69300 - DNA, 15 bp, Homo sapiens
aaatatggtgaggta

SEQ ID NO: 69301 - DNA, 15 bp, Homo sapiens
aatatggtgaggtat

SEQ ID NO: 69302 - DNA, 15 bp, Homo sapiens
atatggtgaggtata

SEQ ID NO: 69303 - DNA, 15 bp, Homo sapiens
tatggtgaggtataa

SEQ ID NO: 69304 - DNA, 15 bp, Homo sapiens
atggtgaggtataac

SEQ ID NO: 69305 - DNA, 15 bp, Homo sapiens
tggtgaggtataacc

SEQ ID NO: 69306 - DNA, 15 bp, Homo sapiens
ggtgaggtataacca

SEQ ID NO: 69307 - DNA, 15 bp, Homo sapiens
gtgaggtataaccac

SEQ ID NO: 69308 - DNA, 15 bp, Homo sapiens
tgaggtataaccacc

SEQ ID NO: 69309 - DNA, 15 bp, Homo sapiens
gaggtataaccacct

SEQ ID NO: 69310 - DNA, 15 bp, Homo sapiens
aggtataaccacctt

SEQ ID NO: 69311 - DNA, 15 bp, Homo sapiens
ggtataaccaccttc

SEQ ID NO: 69312 - DNA, 15 bp, Homo sapiens
gtataaccaccttca

SEQ ID NO: 69313 - DNA, 15 bp, Homo sapiens
tataaccaccttcat

SEQ ID NO: 69314 - DNA, 15 bp, Homo sapiens
ataaccaccttcatt

SEQ ID NO: 69315 - DNA, 15 bp, Homo sapiens
taaccaccttcattt

SEQ ID NO: 69316 - DNA, 15 bp, Homo sapiens
aaccaccttcatttt

SEQ ID NO: 69317 - DNA, 15 bp, Homo sapiens
accaccttcatttta

SEQ ID NO: 69318 - DNA, 15 bp, Homo sapiens
ccaccttcattttaa

SEQ ID NO: 69319 - DNA, 15 bp, Homo sapiens
caccttcattttaaa

SEQ ID NO: 69320 - DNA, 15 bp, Homo sapiens
accttcattttaaac

SEQ ID NO: 69321 - DNA, 15 bp, Homo sapiens
ccttcattttaaact

SEQ ID NO: 69322 - DNA, 15 bp, Homo sapiens
cttcattttaaactt

SEQ ID NO: 69323 - DNA, 15 bp, Homo sapiens
ttcattttaaactta

SEQ ID NO: 69324 - DNA, 15 bp, Homo sapiens
tcattttaaacttag

SEQ ID NO: 69325 - DNA, 15 bp, Homo sapiens
cattttaaacttagt

SEQ ID NO: 69326 - DNA, 15 bp, Homo sapiens
attttaaacttagtt

SEQ ID NO: 69327 - DNA, 15 bp, Homo sapiens
ttttaaacttagttt

SEQ ID NO: 69328 - DNA, 15 bp, Homo sapiens
tttaaacttagtttt

SEQ ID NO: 69329 - DNA, 15 bp, Homo sapiens
ttaaacttagtttta

SEQ ID NO: 69330 - DNA, 15 bp, Homo sapiens
taaacttagttttag

SEQ ID NO: 69331 - DNA, 15 bp, Homo sapiens
aaacttagttttaga

SEQ ID NO: 69332 - DNA, 15 bp, Homo sapiens
aacttagttttagaa

SEQ ID NO: 69333 - DNA, 15 bp, Homo sapiens
acttagttttagaag

SEQ ID NO: 69334 - DNA, 15 bp, Homo sapiens
cttagttttagaaga

SEQ ID NO: 69335 - DNA, 15 bp, Homo sapiens
ttagttttagaagat

SEQ ID NO: 69336 - DNA, 15 bp, Homo sapiens
tagttttagaagata

SEQ ID NO: 69337 - DNA, 15 bp, Homo sapiens
agttttagaagatag

SEQ ID NO: 69338 - DNA, 15 bp, Homo sapiens
gttttagaagatagt

SEQ ID NO: 69339 - DNA, 15 bp, Homo sapiens
ttttagaagatagta

SEQ ID NO: 69340 - DNA, 15 bp, Homo sapiens
tttagaagatagtaa

SEQ ID NO: 69341 - DNA, 15 bp, Homo sapiens
ttagaagatagtaaa

SEQ ID NO: 69342 - DNA, 15 bp, Homo sapiens
tagaagatagtaaag

SEQ ID NO: 69343 - DNA, 15 bp, Homo sapiens
agaagatagtaaaga

SEQ ID NO: 69344 - DNA, 15 bp, Homo sapiens
gaagatagtaaagaa

SEQ ID NO: 69345 - DNA, 15 bp, Homo sapiens
aagatagtaaagaaa

SEQ ID NO: 69346 - DNA, 15 bp, Homo sapiens
agatagtaaagaaag

SEQ ID NO: 69347 - DNA, 15 bp, Homo sapiens
gatagtaaagaaaga

SEQ ID NO: 69348 - DNA, 15 bp, Homo sapiens
atagtaaagaaagat

SEQ ID NO: 69349 - DNA, 15 bp, Homo sapiens
tagtaaagaaagatt

SEQ ID NO: 69350 - DNA, 15 bp, Homo sapiens
agtaaagaaagattc

SEQ ID NO: 69351 - DNA, 15 bp, Homo sapiens
gtaaagaaagattcc

SEQ ID NO: 69352 - DNA, 15 bp, Homo sapiens
taaagaaagattcct

SEQ ID NO: 69353 - DNA, 15 bp, Homo sapiens
aaagaaagattcctt

SEQ ID NO: 69354 - DNA, 15 bp, Homo sapiens
aagaaagattccttt

SEQ ID NO: 69355 - DNA, 15 bp, Homo sapiens
agaaagattccttta

SEQ ID NO: 69356 - DNA, 15 bp, Homo sapiens
gaaagattcctttat

SEQ ID NO: 69357 - DNA, 15 bp, Homo sapiens
aaagattcctttatt

SEQ ID NO: 69358 - DNA, 15 bp, Homo sapiens
aagattcctttatta

SEQ ID NO: 69359 - DNA, 15 bp, Homo sapiens
agattcctttattac

SEQ ID NO: 69360 - DNA, 15 bp, Homo sapiens
gattcctttattacc

SEQ ID NO: 69361 - DNA, 15 bp, Homo sapiens
attcctttattacct

SEQ ID NO: 69362 - DNA, 15 bp, Homo sapiens
ttcctttattacctt

SEQ ID NO: 69363 - DNA, 15 bp, Homo sapiens
tcctttattaccttt

SEQ ID NO: 69364 - DNA, 15 bp, Homo sapiens
cctttattacctttt

SEQ ID NO: 69365 - DNA, 15 bp, Homo sapiens
ctttattaccttttt

SEQ ID NO: 69366 - DNA, 15 bp, Homo sapiens
tttattaccttttta

SEQ ID NO: 69367 - DNA, 15 bp, Homo sapiens
ttattacctttttag

SEQ ID NO: 69368 - DNA, 15 bp, Homo sapiens
tattacctttttaga

SEQ ID NO: 69369 - DNA, 15 bp, Homo sapiens
attacctttttagaa

SEQ ID NO: 69370 - DNA, 15 bp, Homo sapiens
ttacctttttagaat

SEQ ID NO: 69371 - DNA, 15 bp, Homo sapiens
tacctttttagaatt

SEQ ID NO: 69372 - DNA, 15 bp, Homo sapiens
acctttttagaattt

SEQ ID NO: 69373 - DNA, 15 bp, Homo sapiens
cctttttagaatttt

SEQ ID NO: 69374 - DNA, 15 bp, Homo sapiens
ctttttagaatttta

SEQ ID NO: 69375 - DNA, 15 bp, Homo sapiens
tttttagaattttat

SEQ ID NO: 69376 - DNA, 15 bp, Homo sapiens
ttttagaattttatt

SEQ ID NO: 69377 - DNA, 15 bp, Homo sapiens
tttagaattttattt

SEQ ID NO: 69378 - DNA, 15 bp, Homo sapiens
ttagaattttatttt

SEQ ID NO: 69379 - DNA, 15 bp, Homo sapiens
tagaattttattttt

SEQ ID NO: 69380 - DNA, 15 bp, Homo sapiens
agaattttattttta

SEQ ID NO: 69381 - DNA, 15 bp, Homo sapiens
gaattttatttttaa

SEQ ID NO: 69382 - DNA, 15 bp, Homo sapiens
aattttatttttaat

SEQ ID NO: 69383 - DNA, 15 bp, Homo sapiens
attttatttttaata

SEQ ID NO: 69384 - DNA, 15 bp, Homo sapiens
ttttatttttaataa

SEQ ID NO: 69385 - DNA, 15 bp, Homo sapiens
tttatttttaataac

SEQ ID NO: 69386 - DNA, 15 bp, Homo sapiens
ttatttttaataaca

SEQ ID NO: 69387 - DNA, 15 bp, Homo sapiens
tatttttaataacat

SEQ ID NO: 69388 - DNA, 15 bp, Homo sapiens
atttttaataacatg

SEQ ID NO: 69389 - DNA, 15 bp, Homo sapiens
tttttaataacatgg

SEQ ID NO: 69390 - DNA, 15 bp, Homo sapiens
ttttaataacatggg

SEQ ID NO: 69391 - DNA, 15 bp, Homo sapiens
tttaataacatggga

SEQ ID NO: 69392 - DNA, 15 bp, Homo sapiens
ttaataacatgggaa

SEQ ID NO: 69393 - DNA, 15 bp, Homo sapiens
taataacatgggaaa

SEQ ID NO: 69394 - DNA, 15 bp, Homo sapiens
aataacatgggaaag

SEQ ID NO: 69395 - DNA, 15 bp, Homo sapiens
ataacatgggaaagg

SEQ ID NO: 69396 - DNA, 15 bp, Homo sapiens
taacatgggaaaggc

SEQ ID NO: 69397 - DNA, 15 bp, Homo sapiens
aacatgggaaaggca

SEQ ID NO: 69398 - DNA, 15 bp, Homo sapiens
acatgggaaaggcaa

SEQ ID NO: 69399 - DNA, 15 bp, Homo sapiens
catgggaaaggcaac

SEQ ID NO: 69400 - DNA, 15 bp, Homo sapiens
atgggaaaggcaact

SEQ ID NO: 69401 - DNA, 15 bp, Homo sapiens
tgggaaaggcaactg

SEQ ID NO: 69402 - DNA, 15 bp, Homo sapiens
gggaaaggcaactgg

SEQ ID NO: 69403 - DNA, 15 bp, Homo sapiens
ggaaaggcaactggt

SEQ ID NO: 69404 - DNA, 15 bp, Homo sapiens
gaaaggcaactggtg

SEQ ID NO: 69405 - DNA, 15 bp, Homo sapiens
aaaggcaactggtga

SEQ ID NO: 69406 - DNA, 15 bp, Homo sapiens
aaggcaactggtgat

SEQ ID NO: 69407 - DNA, 15 bp, Homo sapiens
aggcaactggtgata

SEQ ID NO: 69408 - DNA, 15 bp, Homo sapiens
ggcaactggtgatat

SEQ ID NO: 69409 - DNA, 15 bp, Homo sapiens
gcaactggtgatatt

SEQ ID NO: 69410 - DNA, 15 bp, Homo sapiens
caactggtgatattt

SEQ ID NO: 69411 - DNA, 15 bp, Homo sapiens
aactggtgatatttt

SEQ ID NO: 69412 - DNA, 15 bp, Homo sapiens
actggtgatatttta

SEQ ID NO: 69413 - DNA, 15 bp, Homo sapiens
ctggtgatattttaa

SEQ ID NO: 69414 - DNA, 15 bp, Homo sapiens
tggtgatattttaat

SEQ ID NO: 69415 - DNA, 15 bp, Homo sapiens
ggtgatattttaatt

SEQ ID NO: 69416 - DNA, 15 bp, Homo sapiens
gtgatattttaattt

SEQ ID NO: 69417 - DNA, 15 bp, Homo sapiens
tgatattttaatttt

SEQ ID NO: 69418 - DNA, 15 bp, Homo sapiens
gatattttaattttt

SEQ ID NO: 69419 - DNA, 15 bp, Homo sapiens
atattttaatttttg

SEQ ID NO: 69420 - DNA, 15 bp, Homo sapiens
tattttaatttttgt

SEQ ID NO: 69421 - DNA, 15 bp, Homo sapiens
attttaatttttgta

SEQ ID NO: 69422 - DNA, 15 bp, Homo sapiens
ttttaatttttgtat

SEQ ID NO: 69423 - DNA, 15 bp, Homo sapiens
tttaatttttgtatg

SEQ ID NO: 69424 - DNA, 15 bp, Homo sapiens
ttaatttttgtatgg

SEQ ID NO: 69425 - DNA, 15 bp, Homo sapiens
taatttttgtatgga

SEQ ID NO: 69426 - DNA, 15 bp, Homo sapiens
aatttttgtatggaa

SEQ ID NO: 69427 - DNA, 15 bp, Homo sapiens
atttttgtatggaac

SEQ ID NO: 69428 - DNA, 15 bp, Homo sapiens
tttttgtatggaaca

SEQ ID NO: 69429 - DNA, 15 bp, Homo sapiens
ttttgtatggaacag

SEQ ID NO: 69430 - DNA, 15 bp, Homo sapiens
tttgtatggaacagt

SEQ ID NO: 69431 - DNA, 15 bp, Homo sapiens
ttgtatggaacagtg

SEQ ID NO: 69432 - DNA, 15 bp, Homo sapiens
tgtatggaacagtgc

SEQ ID NO: 69433 - DNA, 15 bp, Homo sapiens
gtatggaacagtgca

SEQ ID NO: 69434 - DNA, 15 bp, Homo sapiens
tatggaacagtgcat

SEQ ID NO: 69435 - DNA, 15 bp, Homo sapiens
atggaacagtgcatc

SEQ ID NO: 69436 - DNA, 15 bp, Homo sapiens
tggaacagtgcatct

SEQ ID NO: 69437 - DNA, 15 bp, Homo sapiens
ggaacagtgcatctg

SEQ ID NO: 69438 - DNA, 15 bp, Homo sapiens
gaacagtgcatctgc

SEQ ID NO: 69439 - DNA, 15 bp, Homo sapiens
aacagtgcatctgct

SEQ ID NO: 69440 - DNA, 15 bp, Homo sapiens
acagtgcatctgctt

SEQ ID NO: 69441 - DNA, 15 bp, Homo sapiens
cagtgcatctgcttt

SEQ ID NO: 69442 - DNA, 15 bp, Homo sapiens
agtgcatctgctttc

SEQ ID NO: 69443 - DNA, 15 bp, Homo sapiens
gtgcatctgctttct

SEQ ID NO: 69444 - DNA, 15 bp, Homo sapiens
tgcatctgctttctc

SEQ ID NO: 69445 - DNA, 15 bp, Homo sapiens
gcatctgctttctca

SEQ ID NO: 69446 - DNA, 15 bp, Homo sapiens
catctgctttctcat

SEQ ID NO: 69447 - DNA, 15 bp, Homo sapiens
atctgctttctcata

SEQ ID NO: 69448 - DNA, 15 bp, Homo sapiens
tctgctttctcatag

SEQ ID NO: 69449 - DNA, 15 bp, Homo sapiens
ctgctttctcatagc

SEQ ID NO: 69450 - DNA, 15 bp, Homo sapiens
tgctttctcatagcc

SEQ ID NO: 69451 - DNA, 15 bp, Homo sapiens
gctttctcatagcca

SEQ ID NO: 69452 - DNA, 15 bp, Homo sapiens
ctttctcatagccac

SEQ ID NO: 69453 - DNA, 15 bp, Homo sapiens
tttctcatagccaca

SEQ ID NO: 69454 - DNA, 15 bp, Homo sapiens
ttctcatagccacat

SEQ ID NO: 69455 - DNA, 15 bp, Homo sapiens
tctcatagccacata

SEQ ID NO: 69456 - DNA, 15 bp, Homo sapiens
ctcatagccacataa

SEQ ID NO: 69457 - DNA, 15 bp, Homo sapiens
tcatagccacataaa

SEQ ID NO: 69458 - DNA, 15 bp, Homo sapiens
catagccacataaaa

SEQ ID NO: 69459 - DNA, 15 bp, Homo sapiens
atagccacataaaat

SEQ ID NO: 69460 - DNA, 15 bp, Homo sapiens
tagccacataaaata

SEQ ID NO: 69461 - DNA, 15 bp, Homo sapiens
agccacataaaatac

SEQ ID NO: 69462 - DNA, 15 bp, Homo sapiens
gccacataaaataca

SEQ ID NO: 69463 - DNA, 15 bp, Homo sapiens
ccacataaaatacat

SEQ ID NO: 69464 - DNA, 15 bp, Homo sapiens
cacataaaatacata

SEQ ID NO: 69465 - DNA, 15 bp, Homo sapiens
acataaaatacataa

SEQ ID NO: 69466 - DNA, 15 bp, Homo sapiens
cataaaatacataaa

SEQ ID NO: 69467 - DNA, 15 bp, Homo sapiens
ataaaatacataaac

SEQ ID NO: 69468 - DNA, 15 bp, Homo sapiens
taaaatacataaact

SEQ ID NO: 69469 - DNA, 15 bp, Homo sapiens
aaaatacataaactt

SEQ ID NO: 69470 - DNA, 15 bp, Homo sapiens
aaatacataaacttc

SEQ ID NO: 69471 - DNA, 15 bp, Homo sapiens
aatacataaacttct

SEQ ID NO: 69472 - DNA, 15 bp, Homo sapiens
atacataaacttctt

SEQ ID NO: 69473 - DNA, 15 bp, Homo sapiens
tacataaacttctta

SEQ ID NO: 69474 - DNA, 15 bp, Homo sapiens
acataaacttcttag

SEQ ID NO: 69475 - DNA, 15 bp, Homo sapiens
cataaacttcttagt

SEQ ID NO: 69476 - DNA, 15 bp, Homo sapiens
ataaacttcttagtg

SEQ ID NO: 69477 - DNA, 15 bp, Homo sapiens
taaacttcttagtgt

SEQ ID NO: 69478 - DNA, 15 bp, Homo sapiens
aaacttcttagtgtt

SEQ ID NO: 69479 - DNA, 15 bp, Homo sapiens
aacttcttagtgtta

SEQ ID NO: 69480 - DNA, 15 bp, Homo sapiens
acttcttagtgttat

SEQ ID NO: 69481 - DNA, 15 bp, Homo sapiens
cttcttagtgttatg

SEQ ID NO: 69482 - DNA, 15 bp, Homo sapiens
ttcttagtgttatga

SEQ ID NO: 69483 - DNA, 15 bp, Homo sapiens
tcttagtgttatgaa

SEQ ID NO: 69484 - DNA, 15 bp, Homo sapiens
cttagtgttatgaaa

SEQ ID NO: 69485 - DNA, 15 bp, Homo sapiens
ttagtgttatgaaat

SEQ ID NO: 69486 - DNA, 15 bp, Homo sapiens
tagtgttatgaaatg

SEQ ID NO: 69487 - DNA, 15 bp, Homo sapiens
agtgttatgaaatgg

SEQ ID NO: 69488 - DNA, 15 bp, Homo sapiens
gtgttatgaaatggc

SEQ ID NO: 69489 - DNA, 15 bp, Homo sapiens
tgttatgaaatggct

SEQ ID NO: 69490 - DNA, 15 bp, Homo sapiens
gttatgaaatggctt

SEQ ID NO: 69491 - DNA, 15 bp, Homo sapiens
ttatgaaatggctta

SEQ ID NO: 69492 - DNA, 15 bp, Homo sapiens
tatgaaatggcttac

SEQ ID NO: 69493 - DNA, 15 bp, Homo sapiens
atgaaatggcttact

SEQ ID NO: 69494 - DNA, 15 bp, Homo sapiens
tgaaatggcttactt

SEQ ID NO: 69495 - DNA, 15 bp, Homo sapiens
gaaatggcttacttt

SEQ ID NO: 69496 - DNA, 15 bp, Homo sapiens
aaatggcttactttt

SEQ ID NO: 69497 - DNA, 15 bp, Homo sapiens
aatggcttacttttt

SEQ ID NO: 69498 - DNA, 15 bp, Homo sapiens
atggcttactttttg

SEQ ID NO: 69499 - DNA, 15 bp, Homo sapiens
tggcttactttttgg

SEQ ID NO: 69500 - DNA, 15 bp, Homo sapiens
ggcttactttttgga

SEQ ID NO: 69501 - DNA, 15 bp, Homo sapiens
gcttactttttggaa

SEQ ID NO: 69502 - DNA, 15 bp, Homo sapiens
cttactttttggaag

SEQ ID NO: 69503 - DNA, 15 bp, Homo sapiens
ttactttttggaagt

SEQ ID NO: 69504 - DNA, 15 bp, Homo sapiens
tactttttggaagtg

SEQ ID NO: 69505 - DNA, 15 bp, Homo sapiens
actttttggaagtga

SEQ ID NO: 69506 - DNA, 15 bp, Homo sapiens
ctttttggaagtgaa

SEQ ID NO: 69507 - DNA, 15 bp, Homo sapiens
tttttggaagtgaag

SEQ ID NO: 69508 - DNA, 15 bp, Homo sapiens
ttttggaagtgaaga

SEQ ID NO: 69509 - DNA, 15 bp, Homo sapiens
tttggaagtgaagaa

SEQ ID NO: 69510 - DNA, 15 bp, Homo sapiens
ttggaagtgaagaag

SEQ ID NO: 69511 - DNA, 15 bp, Homo sapiens
tggaagtgaagaagt

SEQ ID NO: 69512 - DNA, 15 bp, Homo sapiens
ggaagtgaagaagtc

SEQ ID NO: 69513 - DNA, 15 bp, Homo sapiens
gaagtgaagaagtct

SEQ ID NO: 69514 - DNA, 15 bp, Homo sapiens
aagtgaagaagtctt

SEQ ID NO: 69515 - DNA, 15 bp, Homo sapiens
agtgaagaagtcttc

SEQ ID NO: 69516 - DNA, 15 bp, Homo sapiens
gtgaagaagtcttca

SEQ ID NO: 69517 - DNA, 15 bp, Homo sapiens
tgaagaagtcttcaa

SEQ ID NO: 69518 - DNA, 15 bp, Homo sapiens
gaagaagtcttcaat

SEQ ID NO: 69519 - DNA, 15 bp, Homo sapiens
aagaagtcttcaatt

SEQ ID NO: 69520 - DNA, 15 bp, Homo sapiens
agaagtcttcaattc

SEQ ID NO: 69521 - DNA, 15 bp, Homo sapiens
gaagtcttcaattct

SEQ ID NO: 69522 - DNA, 15 bp, Homo sapiens
aagtcttcaattctt

SEQ ID NO: 69523 - DNA, 15 bp, Homo sapiens
agtcttcaattctta

SEQ ID NO: 69524 - DNA, 15 bp, Homo sapiens
gtcttcaattcttat

SEQ ID NO: 69525 - DNA, 15 bp, Homo sapiens
tcttcaattcttatt

SEQ ID NO: 69526 - DNA, 15 bp, Homo sapiens
cttcaattcttattt

SEQ ID NO: 69527 - DNA, 15 bp, Homo sapiens
ttcaattcttatttt

SEQ ID NO: 69528 - DNA, 15 bp, Homo sapiens
tcaattcttattttc

SEQ ID NO: 69529 - DNA, 15 bp, Homo sapiens
caattcttattttct

SEQ ID NO: 69530 - DNA, 15 bp, Homo sapiens
aattcttattttcta

SEQ ID NO: 69531 - DNA, 15 bp, Homo sapiens
attcttattttctaa

SEQ ID NO: 69532 - DNA, 15 bp, Homo sapiens
ttcttattttctaat

SEQ ID NO: 69533 - DNA, 15 bp, Homo sapiens
tcttattttctaatg

SEQ ID NO: 69534 - DNA, 15 bp, Homo sapiens
cttattttctaatgt

SEQ ID NO: 69535 - DNA, 15 bp, Homo sapiens
ttattttctaatgtt

SEQ ID NO: 69536 - DNA, 15 bp, Homo sapiens
tattttctaatgtta

SEQ ID NO: 69537 - DNA, 15 bp, Homo sapiens
attttctaatgttat

SEQ ID NO: 69538 - DNA, 15 bp, Homo sapiens
ttttctaatgttatt

SEQ ID NO: 69539 - DNA, 15 bp, Homo sapiens
tttctaatgttattt

SEQ ID NO: 69540 - DNA, 15 bp, Homo sapiens
ttctaatgttatttt

SEQ ID NO: 69541 - DNA, 15 bp, Homo sapiens
tctaatgttattttg

SEQ ID NO: 69542 - DNA, 15 bp, Homo sapiens
ctaatgttattttga

SEQ ID NO: 69543 - DNA, 15 bp, Homo sapiens
taatgttattttgaa

SEQ ID NO: 69544 - DNA, 15 bp, Homo sapiens
aatgttattttgaaa

SEQ ID NO: 69545 - DNA, 15 bp, Homo sapiens
atgttattttgaaat

SEQ ID NO: 69546 - DNA, 15 bp, Homo sapiens
tgttattttgaaatt

SEQ ID NO: 69547 - DNA, 15 bp, Homo sapiens
gttattttgaaattt

SEQ ID NO: 69548 - DNA, 15 bp, Homo sapiens
ttattttgaaatttg

SEQ ID NO: 69549 - DNA, 15 bp, Homo sapiens
tattttgaaatttgc

SEQ ID NO: 69550 - DNA, 15 bp, Homo sapiens
attttgaaatttgcc

SEQ ID NO: 69551 - DNA, 15 bp, Homo sapiens
ttttgaaatttgcct

SEQ ID NO: 69552 - DNA, 15 bp, Homo sapiens
tttgaaatttgcctc

SEQ ID NO: 69553 - DNA, 15 bp, Homo sapiens
ttgaaatttgcctcc

SEQ ID NO: 69554 - DNA, 15 bp, Homo sapiens
tgaaatttgcctcca

SEQ ID NO: 69555 - DNA, 15 bp, Homo sapiens
gaaatttgcctccat

SEQ ID NO: 69556 - DNA, 15 bp, Homo sapiens
aaatttgcctccatt

SEQ ID NO: 69557 - DNA, 15 bp, Homo sapiens
aatttgcctccattt

SEQ ID NO: 69558 - DNA, 15 bp, Homo sapiens
atttgcctccatttg

SEQ ID NO: 69559 - DNA, 15 bp, Homo sapiens
tttgcctccatttgc

SEQ ID NO: 69560 - DNA, 15 bp, Homo sapiens
ttgcctccatttgct

SEQ ID NO: 69561 - DNA, 15 bp, Homo sapiens
tgcctccatttgctg

SEQ ID NO: 69562 - DNA, 15 bp, Homo sapiens
gcctccatttgctgt

SEQ ID NO: 69563 - DNA, 15 bp, Homo sapiens
cctccatttgctgtt

SEQ ID NO: 69564 - DNA, 15 bp, Homo sapiens
ctccatttgctgttt

SEQ ID NO: 69565 - DNA, 15 bp, Homo sapiens
tccatttgctgtttg

SEQ ID NO: 69566 - DNA, 15 bp, Homo sapiens
ccatttgctgtttgt

SEQ ID NO: 69567 - DNA, 15 bp, Homo sapiens
catttgctgtttgtt

SEQ ID NO: 69568 - DNA, 15 bp, Homo sapiens
atttgctgtttgttc

SEQ ID NO: 69569 - DNA, 15 bp, Homo sapiens
tttgctgtttgttca

SEQ ID NO: 69570 - DNA, 15 bp, Homo sapiens
ttgctgtttgttcat

SEQ ID NO: 69571 - DNA, 15 bp, Homo sapiens
tgctgtttgttcatt

SEQ ID NO: 69572 - DNA, 15 bp, Homo sapiens
gctgtttgttcattt

SEQ ID NO: 69573 - DNA, 15 bp, Homo sapiens
ctgtttgttcatttg

SEQ ID NO: 69574 - DNA, 15 bp, Homo sapiens
tgtttgttcatttgg

SEQ ID NO: 69575 - DNA, 15 bp, Homo sapiens
gtttgttcatttggt

SEQ ID NO: 69576 - DNA, 15 bp, Homo sapiens
tttgttcatttggtg

SEQ ID NO: 69577 - DNA, 15 bp, Homo sapiens
ttgttcatttggtga

SEQ ID NO: 69578 - DNA, 15 bp, Homo sapiens
tgttcatttggtgat

SEQ ID NO: 69579 - DNA, 15 bp, Homo sapiens
gttcatttggtgata

SEQ ID NO: 69580 - DNA, 15 bp, Homo sapiens
ttcatttggtgatag

SEQ ID NO: 69581 - DNA, 15 bp, Homo sapiens
tcatttggtgatagc

SEQ ID NO: 69582 - DNA, 15 bp, Homo sapiens
catttggtgatagcg

SEQ ID NO: 69583 - DNA, 15 bp, Homo sapiens
atttggtgatagcgc

SEQ ID NO: 69584 - DNA, 15 bp, Homo sapiens
tttggtgatagcgca

SEQ ID NO: 69585 - DNA, 15 bp, Homo sapiens
ttggtgatagcgcaa

SEQ ID NO: 69586 - DNA, 15 bp, Homo sapiens
tggtgatagcgcaac

SEQ ID NO: 69587 - DNA, 15 bp, Homo sapiens
ggtgatagcgcaaca

SEQ ID NO: 69588 - DNA, 15 bp, Homo sapiens
gtgatagcgcaacac

SEQ ID NO: 69589 - DNA, 15 bp, Homo sapiens
tgatagcgcaacact

SEQ ID NO: 69590 - DNA, 15 bp, Homo sapiens
gatagcgcaacactt

SEQ ID NO: 69591 - DNA, 15 bp, Homo sapiens
atagcgcaacactta

SEQ ID NO: 69592 - DNA, 15 bp, Homo sapiens
tagcgcaacacttaa

SEQ ID NO: 69593 - DNA, 15 bp, Homo sapiens
agcgcaacacttaaa

SEQ ID NO: 69594 - DNA, 15 bp, Homo sapiens
gcgcaacacttaaaa

SEQ ID NO: 69595 - DNA, 15 bp, Homo sapiens
cgcaacacttaaaaa

SEQ ID NO: 69596 - DNA, 15 bp, Homo sapiens
gcaacacttaaaaaa

SEQ ID NO: 69597 - DNA, 15 bp, Homo sapiens
caacacttaaaaaaa

SEQ ID NO: 69598 - DNA, 15 bp, Homo sapiens
aacacttaaaaaaat

SEQ ID NO: 69599 - DNA, 15 bp, Homo sapiens
acacttaaaaaaata

SEQ ID NO: 69600 - DNA, 15 bp, Homo sapiens
cacttaaaaaaatat

SEQ ID NO: 69601 - DNA, 15 bp, Homo sapiens
acttaaaaaaatatt

SEQ ID NO: 69602 - DNA, 15 bp, Homo sapiens
cttaaaaaaatattt

SEQ ID NO: 69603 - DNA, 15 bp, Homo sapiens
ttaaaaaaatatttt

SEQ ID NO: 69604 - DNA, 15 bp, Homo sapiens
taaaaaaatatttta

SEQ ID NO: 69605 - DNA, 15 bp, Homo sapiens
aaaaaaatattttaa

SEQ ID NO: 69606 - DNA, 15 bp, Homo sapiens
aaaaaatattttaag

SEQ ID NO: 69607 - DNA, 15 bp, Homo sapiens
aaaaatattttaagc

SEQ ID NO: 69608 - DNA, 15 bp, Homo sapiens
aaaatattttaagcc

SEQ ID NO: 69609 - DNA, 15 bp, Homo sapiens
aaatattttaagccg

SEQ ID NO: 69610 - DNA, 15 bp, Homo sapiens
aatattttaagccgc

SEQ ID NO: 69611 - DNA, 15 bp, Homo sapiens
atattttaagccgct

SEQ ID NO: 69612 - DNA, 15 bp, Homo sapiens
tattttaagccgctt

SEQ ID NO: 69613 - DNA, 15 bp, Homo sapiens
attttaagccgcttc

SEQ ID NO: 69614 - DNA, 15 bp, Homo sapiens
ttttaagccgcttct

SEQ ID NO: 69615 - DNA, 15 bp, Homo sapiens
tttaagccgcttctg

SEQ ID NO: 69616 - DNA, 15 bp, Homo sapiens
ttaagccgcttctga

SEQ ID NO: 69617 - DNA, 15 bp, Homo sapiens
taagccgcttctgaa

SEQ ID NO: 69618 - DNA, 15 bp, Homo sapiens
aagccgcttctgaag

SEQ ID NO: 69619 - DNA, 15 bp, Homo sapiens
agccgcttctgaagt

SEQ ID NO: 69620 - DNA, 15 bp, Homo sapiens
gccgcttctgaagta

SEQ ID NO: 69621 - DNA, 15 bp, Homo sapiens
ccgcttctgaagtaa

SEQ ID NO: 69622 - DNA, 15 bp, Homo sapiens
cgcttctgaagtaat

SEQ ID NO: 69623 - DNA, 15 bp, Homo sapiens
gcttctgaagtaatc

SEQ ID NO: 69624 - DNA, 15 bp, Homo sapiens
cttctgaagtaatca

SEQ ID NO: 69625 - DNA, 15 bp, Homo sapiens
ttctgaagtaatcac

SEQ ID NO: 69626 - DNA, 15 bp, Homo sapiens
tctgaagtaatcact

SEQ ID NO: 69627 - DNA, 15 bp, Homo sapiens
ctgaagtaatcactt

SEQ ID NO: 69628 - DNA, 15 bp, Homo sapiens
tgaagtaatcacttc

SEQ ID NO: 69629 - DNA, 15 bp, Homo sapiens
gaagtaatcacttca

SEQ ID NO: 69630 - DNA, 15 bp, Homo sapiens
aagtaatcacttcag

SEQ ID NO: 69631 - DNA, 15 bp, Homo sapiens
agtaatcacttcagt

SEQ ID NO: 69632 - DNA, 15 bp, Homo sapiens
gtaatcacttcagtg

SEQ ID NO: 69633 - DNA, 15 bp, Homo sapiens
taatcacttcagtga

SEQ ID NO: 69634 - DNA, 15 bp, Homo sapiens
aatcacttcagtgac

SEQ ID NO: 69635 - DNA, 15 bp, Homo sapiens
atcacttcagtgact

SEQ ID NO: 69636 - DNA, 15 bp, Homo sapiens
tcacttcagtgactt

SEQ ID NO: 69637 - DNA, 15 bp, Homo sapiens
cacttcagtgacttt

SEQ ID NO: 69638 - DNA, 15 bp, Homo sapiens
acttcagtgactttt

SEQ ID NO: 69639 - DNA, 15 bp, Homo sapiens
cttcagtgactttta

SEQ ID NO: 69640 - DNA, 15 bp, Homo sapiens
ttcagtgacttttaa

SEQ ID NO: 69641 - DNA, 15 bp, Homo sapiens
tcagtgacttttaat

SEQ ID NO: 69642 - DNA, 15 bp, Homo sapiens
cagtgacttttaatg

SEQ ID NO: 69643 - DNA, 15 bp, Homo sapiens
agtgacttttaatgg

SEQ ID NO: 69644 - DNA, 15 bp, Homo sapiens
gtgacttttaatgga

SEQ ID NO: 69645 - DNA, 15 bp, Homo sapiens
tgacttttaatggag

SEQ ID NO: 69646 - DNA, 15 bp, Homo sapiens
gacttttaatggagg

SEQ ID NO: 69647 - DNA, 15 bp, Homo sapiens
acttttaatggagga

SEQ ID NO: 69648 - DNA, 15 bp, Homo sapiens
cttttaatggaggag

SEQ ID NO: 69649 - DNA, 15 bp, Homo sapiens
ttttaatggaggagt

SEQ ID NO: 69650 - DNA, 15 bp, Homo sapiens
tttaatggaggagta

SEQ ID NO: 69651 - DNA, 15 bp, Homo sapiens
ttaatggaggagtat

SEQ ID NO: 69652 - DNA, 15 bp, Homo sapiens
taatggaggagtatt

SEQ ID NO: 69653 - DNA, 15 bp, Homo sapiens
aatggaggagtattt

SEQ ID NO: 69654 - DNA, 15 bp, Homo sapiens
atggaggagtatttg

SEQ ID NO: 69655 - DNA, 15 bp, Homo sapiens
tggaggagtatttgt

SEQ ID NO: 69656 - DNA, 15 bp, Homo sapiens
ggaggagtatttgtt

SEQ ID NO: 69657 - DNA, 15 bp, Homo sapiens
gaggagtatttgtta

SEQ ID NO: 69658 - DNA, 15 bp, Homo sapiens
aggagtatttgttat

SEQ ID NO: 69659 - DNA, 15 bp, Homo sapiens
ggagtatttgttatg

SEQ ID NO: 69660 - DNA, 15 bp, Homo sapiens
gagtatttgttatgg

SEQ ID NO: 69661 - DNA, 15 bp, Homo sapiens
agtatttgttatggg

SEQ ID NO: 69662 - DNA, 15 bp, Homo sapiens
gtatttgttatggga

SEQ ID NO: 69663 - DNA, 15 bp, Homo sapiens
tatttgttatgggaa

SEQ ID NO: 69664 - DNA, 15 bp, Homo sapiens
atttgttatgggaaa

SEQ ID NO: 69665 - DNA, 15 bp, Homo sapiens
tttgttatgggaaat

SEQ ID NO: 69666 - DNA, 15 bp, Homo sapiens
ttgttatgggaaatt

SEQ ID NO: 69667 - DNA, 15 bp, Homo sapiens
tgttatgggaaattc

SEQ ID NO: 69668 - DNA, 15 bp, Homo sapiens
gttatgggaaattca

SEQ ID NO: 69669 - DNA, 15 bp, Homo sapiens
ttatgggaaattcac

SEQ ID NO: 69670 - DNA, 15 bp, Homo sapiens
tatgggaaattcact

SEQ ID NO: 69671 - DNA, 15 bp, Homo sapiens
atgggaaattcactt

SEQ ID NO: 69672 - DNA, 15 bp, Homo sapiens
tgggaaattcacttc

SEQ ID NO: 69673 - DNA, 15 bp, Homo sapiens
gggaaattcacttca

SEQ ID NO: 69674 - DNA, 15 bp, Homo sapiens
ggaaattcacttcac

SEQ ID NO: 69675 - DNA, 15 bp, Homo sapiens
gaaattcacttcaca

SEQ ID NO: 69676 - DNA, 15 bp, Homo sapiens
aaattcacttcacaa

SEQ ID NO: 69677 - DNA, 15 bp, Homo sapiens
aattcacttcacaaa

SEQ ID NO: 69678 - DNA, 15 bp, Homo sapiens
attcacttcacaaag

SEQ ID NO: 69679 - DNA, 15 bp, Homo sapiens
ttcacttcacaaagt

SEQ ID NO: 69680 - DNA, 15 bp, Homo sapiens
tcacttcacaaagtt

SEQ ID NO: 69681 - DNA, 15 bp, Homo sapiens
cacttcacaaagttt

SEQ ID NO: 69682 - DNA, 15 bp, Homo sapiens
acttcacaaagtttt

SEQ ID NO: 69683 - DNA, 15 bp, Homo sapiens
cttcacaaagtttta

SEQ ID NO: 69684 - DNA, 15 bp, Homo sapiens
ttcacaaagttttaa

SEQ ID NO: 69685 - DNA, 15 bp, Homo sapiens
tcacaaagttttaac

SEQ ID NO: 69686 - DNA, 15 bp, Homo sapiens
cacaaagttttaaca

SEQ ID NO: 69687 - DNA, 15 bp, Homo sapiens
acaaagttttaacat

SEQ ID NO: 69688 - DNA, 15 bp, Homo sapiens
caaagttttaacatt

SEQ ID NO: 69689 - DNA, 15 bp, Homo sapiens
aaagttttaacatta

SEQ ID NO: 69690 - DNA, 15 bp, Homo sapiens
aagttttaacattaa

SEQ ID NO: 69691 - DNA, 15 bp, Homo sapiens
agttttaacattaat

SEQ ID NO: 69692 - DNA, 15 bp, Homo sapiens
gttttaacattaatt

SEQ ID NO: 69693 - DNA, 15 bp, Homo sapiens
ttttaacattaattc

SEQ ID NO: 69694 - DNA, 15 bp, Homo sapiens
tttaacattaattca

SEQ ID NO: 69695 - DNA, 15 bp, Homo sapiens
ttaacattaattcac

SEQ ID NO: 69696 - DNA, 15 bp, Homo sapiens
taacattaattcact

SEQ ID NO: 69697 - DNA, 15 bp, Homo sapiens
aacattaattcactt

SEQ ID NO: 69698 - DNA, 15 bp, Homo sapiens
acattaattcacttg

SEQ ID NO: 69699 - DNA, 15 bp, Homo sapiens
cattaattcacttga

SEQ ID NO: 69700 - DNA, 15 bp, Homo sapiens
attaattcacttgaa

SEQ ID NO: 69701 - DNA, 15 bp, Homo sapiens
ttaattcacttgaag

SEQ ID NO: 69702 - DNA, 15 bp, Homo sapiens
taattcacttgaagt

SEQ ID NO: 69703 - DNA, 15 bp, Homo sapiens
aattcacttgaagta

SEQ ID NO: 69704 - DNA, 15 bp, Homo sapiens
attcacttgaagtaa

SEQ ID NO: 69705 - DNA, 15 bp, Homo sapiens
ttcacttgaagtaaa

SEQ ID NO: 69706 - DNA, 15 bp, Homo sapiens
tcacttgaagtaaac

SEQ ID NO: 69707 - DNA, 15 bp, Homo sapiens
cacttgaagtaaacg

SEQ ID NO: 69708 - DNA, 15 bp, Homo sapiens
acttgaagtaaacgt

SEQ ID NO: 69709 - DNA, 15 bp, Homo sapiens
cttgaagtaaacgtg

SEQ ID NO: 69710 - DNA, 15 bp, Homo sapiens
ttgaagtaaacgtgc

SEQ ID NO: 69711 - DNA, 15 bp, Homo sapiens
tgaagtaaacgtgct

SEQ ID NO: 69712 - DNA, 15 bp, Homo sapiens
gaagtaaacgtgcta

SEQ ID NO: 69713 - DNA, 15 bp, Homo sapiens
aagtaaacgtgctat

SEQ ID NO: 69714 - DNA, 15 bp, Homo sapiens
agtaaacgtgctatt

SEQ ID NO: 69715 - DNA, 15 bp, Homo sapiens
gtaaacgtgctattt

SEQ ID NO: 69716 - DNA, 15 bp, Homo sapiens
taaacgtgctatttt

SEQ ID NO: 69717 - DNA, 15 bp, Homo sapiens
aaacgtgctattttt

SEQ ID NO: 69718 - DNA, 15 bp, Homo sapiens
aacgtgctattttta

SEQ ID NO: 69719 - DNA, 15 bp, Homo sapiens
acgtgctatttttaa

SEQ ID NO: 69720 - DNA, 15 bp, Homo sapiens
cgtgctatttttaaa

SEQ ID NO: 69721 - DNA, 15 bp, Homo sapiens
gtgctatttttaaat

SEQ ID NO: 69722 - DNA, 15 bp, Homo sapiens
tgctatttttaaatt

SEQ ID NO: 69723 - DNA, 15 bp, Homo sapiens
gctatttttaaattt

SEQ ID NO: 69724 - DNA, 15 bp, Homo sapiens
ctatttttaaatttt

SEQ ID NO: 69725 - DNA, 15 bp, Homo sapiens
tatttttaaattttc

SEQ ID NO: 69726 - DNA, 15 bp, Homo sapiens
atttttaaattttca

SEQ ID NO: 69727 - DNA, 15 bp, Homo sapiens
tttttaaattttcat

SEQ ID NO: 69728 - DNA, 15 bp, Homo sapiens
ttttaaattttcatc

SEQ ID NO: 69729 - DNA, 15 bp, Homo sapiens
tttaaattttcatct

SEQ ID NO: 69730 - DNA, 15 bp, Homo sapiens
ttaaattttcatctc

SEQ ID NO: 69731 - DNA, 15 bp, Homo sapiens
taaattttcatctca

SEQ ID NO: 69732 - DNA, 15 bp, Homo sapiens
aaattttcatctcaa

SEQ ID NO: 69733 - DNA, 15 bp, Homo sapiens
aattttcatctcaat

SEQ ID NO: 69734 - DNA, 15 bp, Homo sapiens
attttcatctcaatc

SEQ ID NO: 69735 - DNA, 15 bp, Homo sapiens
ttttcatctcaatct

SEQ ID NO: 69736 - DNA, 15 bp, Homo sapiens
tttcatctcaatctt

SEQ ID NO: 69737 - DNA, 15 bp, Homo sapiens
ttcatctcaatcttt

SEQ ID NO: 69738 - DNA, 15 bp, Homo sapiens
tcatctcaatctttt

SEQ ID NO: 69739 - DNA, 15 bp, Homo sapiens
catctcaatctttta

SEQ ID NO: 69740 - DNA, 15 bp, Homo sapiens
atctcaatcttttaa

SEQ ID NO: 69741 - DNA, 15 bp, Homo sapiens
tctcaatcttttaag

SEQ ID NO: 69742 - DNA, 15 bp, Homo sapiens
ctcaatcttttaagt

SEQ ID NO: 69743 - DNA, 15 bp, Homo sapiens
tcaatcttttaagta

SEQ ID NO: 69744 - DNA, 15 bp, Homo sapiens
caatcttttaagtaa

SEQ ID NO: 69745 - DNA, 15 bp, Homo sapiens
aatcttttaagtaag

SEQ ID NO: 69746 - DNA, 15 bp, Homo sapiens
atcttttaagtaaga

SEQ ID NO: 69747 - DNA, 15 bp, Homo sapiens
tcttttaagtaagac

SEQ ID NO: 69748 - DNA, 15 bp, Homo sapiens
cttttaagtaagacg

SEQ ID NO: 69749 - DNA, 15 bp, Homo sapiens
ttttaagtaagacga

SEQ ID NO: 69750 - DNA, 15 bp, Homo sapiens
tttaagtaagacgaa

SEQ ID NO: 69751 - DNA, 15 bp, Homo sapiens
ttaagtaagacgaaa

SEQ ID NO: 69752 - DNA, 15 bp, Homo sapiens
taagtaagacgaaag

SEQ ID NO: 69753 - DNA, 15 bp, Homo sapiens
aagtaagacgaaagc

SEQ ID NO: 69754 - DNA, 15 bp, Homo sapiens
agtaagacgaaagct

SEQ ID NO: 69755 - DNA, 15 bp, Homo sapiens
gtaagacgaaagctt

SEQ ID NO: 69756 - DNA, 15 bp, Homo sapiens
taagacgaaagctta

SEQ ID NO: 69757 - DNA, 15 bp, Homo sapiens
aagacgaaagcttag

SEQ ID NO: 69758 - DNA, 15 bp, Homo sapiens
agacgaaagcttagg

SEQ ID NO: 69759 - DNA, 15 bp, Homo sapiens
gacgaaagcttagga

SEQ ID NO: 69760 - DNA, 15 bp, Homo sapiens
acgaaagcttaggaa

SEQ ID NO: 69761 - DNA, 15 bp, Homo sapiens
cgaaagcttaggaaa

SEQ ID NO: 69762 - DNA, 15 bp, Homo sapiens
gaaagcttaggaaat

SEQ ID NO: 69763 - DNA, 15 bp, Homo sapiens
aaagcttaggaaatc

SEQ ID NO: 69764 - DNA, 15 bp, Homo sapiens
aagcttaggaaatca

SEQ ID NO: 69765 - DNA, 15 bp, Homo sapiens
agcttaggaaatcac

SEQ ID NO: 69766 - DNA, 15 bp, Homo sapiens
gcttaggaaatcact

SEQ ID NO: 69767 - DNA, 15 bp, Homo sapiens
cttaggaaatcactt

SEQ ID NO: 69768 - DNA, 15 bp, Homo sapiens
ttaggaaatcacttt

SEQ ID NO: 69769 - DNA, 15 bp, Homo sapiens
taggaaatcactttt

SEQ ID NO: 69770 - DNA, 15 bp, Homo sapiens
aggaaatcactttta

SEQ ID NO: 69771 - DNA, 15 bp, Homo sapiens
ggaaatcacttttat

SEQ ID NO: 69772 - DNA, 15 bp, Homo sapiens
gaaatcacttttatt

SEQ ID NO: 69773 - DNA, 15 bp, Homo sapiens
aaatcacttttatta

SEQ ID NO: 69774 - DNA, 15 bp, Homo sapiens
aatcacttttattat

SEQ ID NO: 69775 - DNA, 15 bp, Homo sapiens
atcacttttattatt

SEQ ID NO: 69776 - DNA, 15 bp, Homo sapiens
tcacttttattattg

SEQ ID NO: 69777 - DNA, 15 bp, Homo sapiens
cacttttattattga

SEQ ID NO: 69778 - DNA, 15 bp, Homo sapiens
acttttattattgat

SEQ ID NO: 69779 - DNA, 15 bp, Homo sapiens
cttttattattgata

SEQ ID NO: 69780 - DNA, 15 bp, Homo sapiens
ttttattattgatat

SEQ ID NO: 69781 - DNA, 15 bp, Homo sapiens
tttattattgatatt

SEQ ID NO: 69782 - DNA, 15 bp, Homo sapiens
ttattattgatattg

SEQ ID NO: 69783 - DNA, 15 bp, Homo sapiens
tattattgatattgt

SEQ ID NO: 69784 - DNA, 15 bp, Homo sapiens
attattgatattgtg

SEQ ID NO: 69785 - DNA, 15 bp, Homo sapiens
ttattgatattgtgt

SEQ ID NO: 69786 - DNA, 15 bp, Homo sapiens
tattgatattgtgtg

SEQ ID NO: 69787 - DNA, 15 bp, Homo sapiens
attgatattgtgtgt

SEQ ID NO: 69788 - DNA, 15 bp, Homo sapiens
ttgatattgtgtgtg

SEQ ID NO: 69789 - DNA, 15 bp, Homo sapiens
tgatattgtgtgtga

SEQ ID NO: 69790 - DNA, 15 bp, Homo sapiens
gatattgtgtgtgac

SEQ ID NO: 69791 - DNA, 15 bp, Homo sapiens
atattgtgtgtgact

SEQ ID NO: 69792 - DNA, 15 bp, Homo sapiens
tattgtgtgtgactt

SEQ ID NO: 69793 - DNA, 15 bp, Homo sapiens
attgtgtgtgacttc

SEQ ID NO: 69794 - DNA, 15 bp, Homo sapiens
ttgtgtgtgacttca

SEQ ID NO: 69795 - DNA, 15 bp, Homo sapiens
tgtgtgtgacttcag

SEQ ID NO: 69796 - DNA, 15 bp, Homo sapiens
gtgtgtgacttcaga

SEQ ID NO: 69797 - DNA, 15 bp, Homo sapiens
tgtgtgacttcagag

SEQ ID NO: 69798 - DNA, 15 bp, Homo sapiens
gtgtgacttcagagt

SEQ ID NO: 69799 - DNA, 15 bp, Homo sapiens
tgtgacttcagagtt

SEQ ID NO: 69800 - DNA, 15 bp, Homo sapiens
gtgacttcagagttt

SEQ ID NO: 69801 - DNA, 15 bp, Homo sapiens
tgacttcagagtttg

SEQ ID NO: 69802 - DNA, 15 bp, Homo sapiens
gacttcagagtttgt

SEQ ID NO: 69803 - DNA, 15 bp, Homo sapiens
acttcagagtttgta

SEQ ID NO: 69804 - DNA, 15 bp, Homo sapiens
cttcagagtttgtaa

SEQ ID NO: 69805 - DNA, 15 bp, Homo sapiens
ttcagagtttgtaaa

SEQ ID NO: 69806 - DNA, 15 bp, Homo sapiens
tcagagtttgtaaag

SEQ ID NO: 69807 - DNA, 15 bp, Homo sapiens
cagagtttgtaaaga

SEQ ID NO: 69808 - DNA, 15 bp, Homo sapiens
agagtttgtaaagag

SEQ ID NO: 69809 - DNA, 15 bp, Homo sapiens
gagtttgtaaagaga

SEQ ID NO: 69810 - DNA, 15 bp, Homo sapiens
agtttgtaaagagaa

SEQ ID NO: 69811 - DNA, 15 bp, Homo sapiens
gtttgtaaagagaat

SEQ ID NO: 69812 - DNA, 15 bp, Homo sapiens
tttgtaaagagaatt

SEQ ID NO: 69813 - DNA, 15 bp, Homo sapiens
ttgtaaagagaattg

SEQ ID NO: 69814 - DNA, 15 bp, Homo sapiens
tgtaaagagaattgt

SEQ ID NO: 69815 - DNA, 15 bp, Homo sapiens
gtaaagagaattgta

SEQ ID NO: 69816 - DNA, 15 bp, Homo sapiens
taaagagaattgtag

SEQ ID NO: 69817 - DNA, 15 bp, Homo sapiens
aaagagaattgtaga

SEQ ID NO: 69818 - DNA, 15 bp, Homo sapiens
aagagaattgtagaa

SEQ ID NO: 69819 - DNA, 15 bp, Homo sapiens
agagaattgtagaag

SEQ ID NO: 69820 - DNA, 15 bp, Homo sapiens
gagaattgtagaagt

SEQ ID NO: 69821 - DNA, 15 bp, Homo sapiens
agaattgtagaagtg

SEQ ID NO: 69822 - DNA, 15 bp, Homo sapiens
gaattgtagaagtgt

SEQ ID NO: 69823 - DNA, 15 bp, Homo sapiens
aattgtagaagtgtt

SEQ ID NO: 69824 - DNA, 15 bp, Homo sapiens
attgtagaagtgttg

SEQ ID NO: 69825 - DNA, 15 bp, Homo sapiens
ttgtagaagtgttgc

SEQ ID NO: 69826 - DNA, 15 bp, Homo sapiens
tgtagaagtgttgca

SEQ ID NO: 69827 - DNA, 15 bp, Homo sapiens
gtagaagtgttgcat

SEQ ID NO: 69828 - DNA, 15 bp, Homo sapiens
tagaagtgttgcatg

SEQ ID NO: 69829 - DNA, 15 bp, Homo sapiens
agaagtgttgcatgc

SEQ ID NO: 69830 - DNA, 15 bp, Homo sapiens
gaagtgttgcatgca

SEQ ID NO: 69831 - DNA, 15 bp, Homo sapiens
aagtgttgcatgcat

SEQ ID NO: 69832 - DNA, 15 bp, Homo sapiens
agtgttgcatgcata

SEQ ID NO: 69833 - DNA, 15 bp, Homo sapiens
gtgttgcatgcatat

SEQ ID NO: 69834 - DNA, 15 bp, Homo sapiens
tgttgcatgcatatg

SEQ ID NO: 69835 - DNA, 15 bp, Homo sapiens
gttgcatgcatatga

SEQ ID NO: 69836 - DNA, 15 bp, Homo sapiens
ttgcatgcatatgac

SEQ ID NO: 69837 - DNA, 15 bp, Homo sapiens
tgcatgcatatgaca

SEQ ID NO: 69838 - DNA, 15 bp, Homo sapiens
gcatgcatatgacaa

SEQ ID NO: 69839 - DNA, 15 bp, Homo sapiens
catgcatatgacaat

SEQ ID NO: 69840 - DNA, 15 bp, Homo sapiens
atgcatatgacaatt

SEQ ID NO: 69841 - DNA, 15 bp, Homo sapiens
tgcatatgacaattt

SEQ ID NO: 69842 - DNA, 15 bp, Homo sapiens
gcatatgacaatttt

SEQ ID NO: 69843 - DNA, 15 bp, Homo sapiens
catatgacaattttc

SEQ ID NO: 69844 - DNA, 15 bp, Homo sapiens
atatgacaattttct

SEQ ID NO: 69845 - DNA, 15 bp, Homo sapiens
tatgacaattttctg

SEQ ID NO: 69846 - DNA, 15 bp, Homo sapiens
atgacaattttctgc

SEQ ID NO: 69847 - DNA, 15 bp, Homo sapiens
tgacaattttctgct

SEQ ID NO: 69848 - DNA, 15 bp, Homo sapiens
gacaattttctgctt

SEQ ID NO: 69849 - DNA, 15 bp, Homo sapiens
acaattttctgctta

SEQ ID NO: 69850 - DNA, 15 bp, Homo sapiens
caattttctgcttaa

SEQ ID NO: 69851 - DNA, 15 bp, Homo sapiens
aattttctgcttaat

SEQ ID NO: 69852 - DNA, 15 bp, Homo sapiens
attttctgcttaatt

SEQ ID NO: 69853 - DNA, 15 bp, Homo sapiens
ttttctgcttaattg

SEQ ID NO: 69854 - DNA, 15 bp, Homo sapiens
tttctgcttaattga

SEQ ID NO: 69855 - DNA, 15 bp, Homo sapiens
ttctgcttaattgaa

SEQ ID NO: 69856 - DNA, 15 bp, Homo sapiens
tctgcttaattgaaa

SEQ ID NO: 69857 - DNA, 15 bp, Homo sapiens
ctgcttaattgaaat

SEQ ID NO: 69858 - DNA, 15 bp, Homo sapiens
tgcttaattgaaatg

SEQ ID NO: 69859 - DNA, 15 bp, Homo sapiens
gcttaattgaaatgt

SEQ ID NO: 69860 - DNA, 15 bp, Homo sapiens
cttaattgaaatgtg

SEQ ID NO: 69861 - DNA, 15 bp, Homo sapiens
ttaattgaaatgtga

SEQ ID NO: 69862 - DNA, 15 bp, Homo sapiens
taattgaaatgtgag

SEQ ID NO: 69863 - DNA, 15 bp, Homo sapiens
aattgaaatgtgagg

SEQ ID NO: 69864 - DNA, 15 bp, Homo sapiens
attgaaatgtgaggc

SEQ ID NO: 69865 - DNA, 15 bp, Homo sapiens
ttgaaatgtgaggcc

SEQ ID NO: 69866 - DNA, 15 bp, Homo sapiens
tgaaatgtgaggcct

SEQ ID NO: 69867 - DNA, 15 bp, Homo sapiens
gaaatgtgaggcctc

SEQ ID NO: 69868 - DNA, 15 bp, Homo sapiens
aaatgtgaggcctct

SEQ ID NO: 69869 - DNA, 15 bp, Homo sapiens
aatgtgaggcctctg

SEQ ID NO: 69870 - DNA, 15 bp, Homo sapiens
atgtgaggcctctgc

SEQ ID NO: 69871 - DNA, 15 bp, Homo sapiens
tgtgaggcctctgcc

SEQ ID NO: 69872 - DNA, 15 bp, Homo sapiens
gtgaggcctctgcca

SEQ ID NO: 69873 - DNA, 15 bp, Homo sapiens
tgaggcctctgccat

SEQ ID NO: 69874 - DNA, 15 bp, Homo sapiens
gaggcctctgccata

SEQ ID NO: 69875 - DNA, 15 bp, Homo sapiens
aggcctctgccatac

SEQ ID NO: 69876 - DNA, 15 bp, Homo sapiens
ggcctctgccatact

SEQ ID NO: 69877 - DNA, 15 bp, Homo sapiens
gcctctgccatacta

SEQ ID NO: 69878 - DNA, 15 bp, Homo sapiens
cctctgccatactac

SEQ ID NO: 69879 - DNA, 15 bp, Homo sapiens
ctctgccatactaca

SEQ ID NO: 69880 - DNA, 15 bp, Homo sapiens
tctgccatactacaa

SEQ ID NO: 69881 - DNA, 15 bp, Homo sapiens
ctgccatactacaag

SEQ ID NO: 69882 - DNA, 15 bp, Homo sapiens
tgccatactacaagg

SEQ ID NO: 69883 - DNA, 15 bp, Homo sapiens
gccatactacaagga

SEQ ID NO: 69884 - DNA, 15 bp, Homo sapiens
ccatactacaaggat

SEQ ID NO: 69885 - DNA, 15 bp, Homo sapiens
catactacaaggatt

SEQ ID NO: 69886 - DNA, 15 bp, Homo sapiens
atactacaaggattt

SEQ ID NO: 69887 - DNA, 15 bp, Homo sapiens
tactacaaggattta

SEQ ID NO: 69888 - DNA, 15 bp, Homo sapiens
actacaaggatttag

SEQ ID NO: 69889 - DNA, 15 bp, Homo sapiens
ctacaaggatttagc

SEQ ID NO: 69890 - DNA, 15 bp, Homo sapiens
tacaaggatttagct

SEQ ID NO: 69891 - DNA, 15 bp, Homo sapiens
acaaggatttagctt

SEQ ID NO: 69892 - DNA, 15 bp, Homo sapiens
caaggatttagcttc

SEQ ID NO: 69893 - DNA, 15 bp, Homo sapiens
aaggatttagcttcc

SEQ ID NO: 69894 - DNA, 15 bp, Homo sapiens
aggatttagcttcca

SEQ ID NO: 69895 - DNA, 15 bp, Homo sapiens
ggatttagcttccag

SEQ ID NO: 69896 - DNA, 15 bp, Homo sapiens
gatttagcttccaga

SEQ ID NO: 69897 - DNA, 15 bp, Homo sapiens
atttagcttccagaa

SEQ ID NO: 69898 - DNA, 15 bp, Homo sapiens
tttagcttccagaaa

SEQ ID NO: 69899 - DNA, 15 bp, Homo sapiens
ttagcttccagaaaa

SEQ ID NO: 69900 - DNA, 15 bp, Homo sapiens
tagcttccagaaaat

SEQ ID NO: 69901 - DNA, 15 bp, Homo sapiens
agcttccagaaaatg

SEQ ID NO: 69902 - DNA, 15 bp, Homo sapiens
gcttccagaaaatgt

SEQ ID NO: 69903 - DNA, 15 bp, Homo sapiens
cttccagaaaatgta

SEQ ID NO: 69904 - DNA, 15 bp, Homo sapiens
ttccagaaaatgtaa

SEQ ID NO: 69905 - DNA, 15 bp, Homo sapiens
tccagaaaatgtaat

SEQ ID NO: 69906 - DNA, 15 bp, Homo sapiens
ccagaaaatgtaata

SEQ ID NO: 69907 - DNA, 15 bp, Homo sapiens
cagaaaatgtaatat

SEQ ID NO: 69908 - DNA, 15 bp, Homo sapiens
agaaaatgtaatatt

SEQ ID NO: 69909 - DNA, 15 bp, Homo sapiens
gaaaatgtaatatta

SEQ ID NO: 69910 - DNA, 15 bp, Homo sapiens
aaaatgtaatattaa

SEQ ID NO: 69911 - DNA, 15 bp, Homo sapiens
aaatgtaatattaac

SEQ ID NO: 69912 - DNA, 15 bp, Homo sapiens
aatgtaatattaaca

SEQ ID NO: 69913 - DNA, 15 bp, Homo sapiens
atgtaatattaacat

SEQ ID NO: 69914 - DNA, 15 bp, Homo sapiens
tgtaatattaacata

SEQ ID NO: 69915 - DNA, 15 bp, Homo sapiens
gtaatattaacatag

SEQ ID NO: 69916 - DNA, 15 bp, Homo sapiens
taatattaacatagc

SEQ ID NO: 69917 - DNA, 15 bp, Homo sapiens
aatattaacatagct

SEQ ID NO: 69918 - DNA, 15 bp, Homo sapiens
atattaacatagctt

SEQ ID NO: 69919 - DNA, 15 bp, Homo sapiens
tattaacatagctta

SEQ ID NO: 69920 - DNA, 15 bp, Homo sapiens
attaacatagcttaa

SEQ ID NO: 69921 - DNA, 15 bp, Homo sapiens
ttaacatagcttaag

SEQ ID NO: 69922 - DNA, 15 bp, Homo sapiens
taacatagcttaaga

SEQ ID NO: 69923 - DNA, 15 bp, Homo sapiens
aacatagcttaagaa

SEQ ID NO: 69924 - DNA, 15 bp, Homo sapiens
acatagcttaagaaa

SEQ ID NO: 69925 - DNA, 15 bp, Homo sapiens
catagcttaagaaat

SEQ ID NO: 69926 - DNA, 15 bp, Homo sapiens
atagcttaagaaatg

SEQ ID NO: 69927 - DNA, 15 bp, Homo sapiens
tagcttaagaaatgt

SEQ ID NO: 69928 - DNA, 15 bp, Homo sapiens
agcttaagaaatgta

SEQ ID NO: 69929 - DNA, 15 bp, Homo sapiens
gcttaagaaatgtat

SEQ ID NO: 69930 - DNA, 15 bp, Homo sapiens
cttaagaaatgtatt

SEQ ID NO: 69931 - DNA, 15 bp, Homo sapiens
ttaagaaatgtattt

SEQ ID NO: 69932 - DNA, 15 bp, Homo sapiens
taagaaatgtatttt

SEQ ID NO: 69933 - DNA, 15 bp, Homo sapiens
aagaaatgtattttt

SEQ ID NO: 69934 - DNA, 15 bp, Homo sapiens
agaaatgtatttttt

SEQ ID NO: 69935 - DNA, 15 bp, Homo sapiens
gaaatgtattttttt

SEQ ID NO: 69936 - DNA, 15 bp, Homo sapiens
aaatgtatttttttt

SEQ ID NO: 69937 - DNA, 15 bp, Homo sapiens
aatgtattttttttt

SEQ ID NO: 69938 - DNA, 15 bp, Homo sapiens
atgtatttttttttt

SEQ ID NO: 69939 - DNA, 15 bp, Homo sapiens
tgtattttttttttt

SEQ ID NO: 69940 - DNA, 15 bp, Homo sapiens
gtatttttttttttc

SEQ ID NO: 69941 - DNA, 15 bp, Homo sapiens
tatttttttttttct

SEQ ID NO: 69942 - DNA, 15 bp, Homo sapiens
atttttttttttctg

SEQ ID NO: 69943 - DNA, 15 bp, Homo sapiens
tttttttttttctgt

SEQ ID NO: 69944 - DNA, 15 bp, Homo sapiens
ttttttttttctgta

SEQ ID NO: 69945 - DNA, 15 bp, Homo sapiens
tttttttttctgtag

SEQ ID NO: 69946 - DNA, 15 bp, Homo sapiens
ttttttttctgtaga

SEQ ID NO: 69947 - DNA, 15 bp, Homo sapiens
tttttttctgtagaa

SEQ ID NO: 69948 - DNA, 15 bp, Homo sapiens
ttttttctgtagaaa

SEQ ID NO: 69949 - DNA, 15 bp, Homo sapiens
tttttctgtagaaac

SEQ ID NO: 69950 - DNA, 15 bp, Homo sapiens
ttttctgtagaaacc

SEQ ID NO: 69951 - DNA, 15 bp, Homo sapiens
tttctgtagaaaccg

SEQ ID NO: 69952 - DNA, 15 bp, Homo sapiens
ttctgtagaaaccgt

SEQ ID NO: 69953 - DNA, 15 bp, Homo sapiens
tctgtagaaaccgtt

SEQ ID NO: 69954 - DNA, 15 bp, Homo sapiens
ctgtagaaaccgttg

SEQ ID NO: 69955 - DNA, 15 bp, Homo sapiens
tgtagaaaccgttgg

SEQ ID NO: 69956 - DNA, 15 bp, Homo sapiens
gtagaaaccgttggg

SEQ ID NO: 69957 - DNA, 15 bp, Homo sapiens
tagaaaccgttgggt

SEQ ID NO: 69958 - DNA, 15 bp, Homo sapiens
agaaaccgttgggtt

SEQ ID NO: 69959 - DNA, 15 bp, Homo sapiens
gaaaccgttgggtta

SEQ ID NO: 69960 - DNA, 15 bp, Homo sapiens
aaaccgttgggttaa

SEQ ID NO: 69961 - DNA, 15 bp, Homo sapiens
aaccgttgggttaaa

SEQ ID NO: 69962 - DNA, 15 bp, Homo sapiens
accgttgggttaaac

SEQ ID NO: 69963 - DNA, 15 bp, Homo sapiens
ccgttgggttaaaca

SEQ ID NO: 69964 - DNA, 15 bp, Homo sapiens
cgttgggttaaacaa

SEQ ID NO: 69965 - DNA, 15 bp, Homo sapiens
gttgggttaaacaaa

SEQ ID NO: 69966 - DNA, 15 bp, Homo sapiens
ttgggttaaacaaac

SEQ ID NO: 69967 - DNA, 15 bp, Homo sapiens
tgggttaaacaaaca

SEQ ID NO: 69968 - DNA, 15 bp, Homo sapiens
gggttaaacaaacag

SEQ ID NO: 69969 - DNA, 15 bp, Homo sapiens
ggttaaacaaacagt

SEQ ID NO: 69970 - DNA, 15 bp, Homo sapiens
gttaaacaaacagtt

SEQ ID NO: 69971 - DNA, 15 bp, Homo sapiens
ttaaacaaacagttc

SEQ ID NO: 69972 - DNA, 15 bp, Homo sapiens
taaacaaacagttca

SEQ ID NO: 69973 - DNA, 15 bp, Homo sapiens
aaacaaacagttcag

SEQ ID NO: 69974 - DNA, 15 bp, Homo sapiens
aacaaacagttcaga

SEQ ID NO: 69975 - DNA, 15 bp, Homo sapiens
acaaacagttcagaa

SEQ ID NO: 69976 - DNA, 15 bp, Homo sapiens
caaacagttcagaag

SEQ ID NO: 69977 - DNA, 15 bp, Homo sapiens
aaacagttcagaagt

SEQ ID NO: 69978 - DNA, 15 bp, Homo sapiens
aacagttcagaagtt

SEQ ID NO: 69979 - DNA, 15 bp, Homo sapiens
acagttcagaagttt

SEQ ID NO: 69980 - DNA, 15 bp, Homo sapiens
cagttcagaagtttt

SEQ ID NO: 69981 - DNA, 15 bp, Homo sapiens
agttcagaagtttta

SEQ ID NO: 69982 - DNA, 15 bp, Homo sapiens
gttcagaagttttat

SEQ ID NO: 69983 - DNA, 15 bp, Homo sapiens
ttcagaagttttatt

SEQ ID NO: 69984 - DNA, 15 bp, Homo sapiens
tcagaagttttatta

SEQ ID NO: 69985 - DNA, 15 bp, Homo sapiens
cagaagttttattac

SEQ ID NO: 69986 - DNA, 15 bp, Homo sapiens
agaagttttattaca

SEQ ID NO: 69987 - DNA, 15 bp, Homo sapiens
gaagttttattacat

SEQ ID NO: 69988 - DNA, 15 bp, Homo sapiens
aagttttattacatg

SEQ ID NO: 69989 - DNA, 15 bp, Homo sapiens
agttttattacatgg

SEQ ID NO: 69990 - DNA, 15 bp, Homo sapiens
gttttattacatgga

SEQ ID NO: 69991 - DNA, 15 bp, Homo sapiens
ttttattacatggaa

SEQ ID NO: 69992 - DNA, 15 bp, Homo sapiens
tttattacatggaac

SEQ ID NO: 69993 - DNA, 15 bp, Homo sapiens
ttattacatggaacc

SEQ ID NO: 69994 - DNA, 15 bp, Homo sapiens
tattacatggaaccc

SEQ ID NO: 69995 - DNA, 15 bp, Homo sapiens
attacatggaaccca

SEQ ID NO: 69996 - DNA, 15 bp, Homo sapiens
ttacatggaacccat

SEQ ID NO: 69997 - DNA, 15 bp, Homo sapiens
tacatggaacccatt

SEQ ID NO: 69998 - DNA, 15 bp, Homo sapiens
acatggaacccatta

SEQ ID NO: 69999 - DNA, 15 bp, Homo sapiens
catggaacccattag

SEQ ID NO: 70000 - DNA, 15 bp, Homo sapiens
atggaacccattagt

SEQ ID NO: 70001 - DNA, 15 bp, Homo sapiens
tggaacccattagtt

SEQ ID NO: 70002 - DNA, 15 bp, Homo sapiens
ggaacccattagttc

SEQ ID NO: 70003 - DNA, 15 bp, Homo sapiens
gaacccattagttct

SEQ ID NO: 70004 - DNA, 15 bp, Homo sapiens
aacccattagttctt

SEQ ID NO: 70005 - DNA, 15 bp, Homo sapiens
acccattagttctta

SEQ ID NO: 70006 - DNA, 15 bp, Homo sapiens
cccattagttcttaa

SEQ ID NO: 70007 - DNA, 15 bp, Homo sapiens
ccattagttcttaat

SEQ ID NO: 70008 - DNA, 15 bp, Homo sapiens
cattagttcttaatc

SEQ ID NO: 70009 - DNA, 15 bp, Homo sapiens
attagttcttaatct

SEQ ID NO: 70010 - DNA, 15 bp, Homo sapiens
ttagttcttaatctt

SEQ ID NO: 70011 - DNA, 15 bp, Homo sapiens
tagttcttaatcttg

SEQ ID NO: 70012 - DNA, 15 bp, Homo sapiens
agttcttaatcttgt

SEQ ID NO: 70013 - DNA, 15 bp, Homo sapiens
gttcttaatcttgtt

SEQ ID NO: 70014 - DNA, 15 bp, Homo sapiens
ttcttaatcttgtta

SEQ ID NO: 70015 - DNA, 15 bp, Homo sapiens
tcttaatcttgttac

SEQ ID NO: 70016 - DNA, 15 bp, Homo sapiens
cttaatcttgttacc

SEQ ID NO: 70017 - DNA, 15 bp, Homo sapiens
ttaatcttgttacct

SEQ ID NO: 70018 - DNA, 15 bp, Homo sapiens
taatcttgttacctt

SEQ ID NO: 70019 - DNA, 15 bp, Homo sapiens
aatcttgttaccttt

SEQ ID NO: 70020 - DNA, 15 bp, Homo sapiens
atcttgttacctttt

SEQ ID NO: 70021 - DNA, 15 bp, Homo sapiens
tcttgttaccttttt

SEQ ID NO: 70022 - DNA, 15 bp, Homo sapiens
cttgttacctttttc

SEQ ID NO: 70023 - DNA, 15 bp, Homo sapiens
ttgttacctttttct

SEQ ID NO: 70024 - DNA, 15 bp, Homo sapiens
tgttacctttttctt

SEQ ID NO: 70025 - DNA, 15 bp, Homo sapiens
gttacctttttcttc

SEQ ID NO: 70026 - DNA, 15 bp, Homo sapiens
ttacctttttcttca

SEQ ID NO: 70027 - DNA, 15 bp, Homo sapiens
tacctttttcttcat

SEQ ID NO: 70028 - DNA, 15 bp, Homo sapiens
acctttttcttcatt

SEQ ID NO: 70029 - DNA, 15 bp, Homo sapiens
cctttttcttcattt

SEQ ID NO: 70030 - DNA, 15 bp, Homo sapiens
ctttttcttcatttt

SEQ ID NO: 70031 - DNA, 15 bp, Homo sapiens
tttttcttcattttt

SEQ ID NO: 70032 - DNA, 15 bp, Homo sapiens
ttttcttcatttttt

SEQ ID NO: 70033 - DNA, 15 bp, Homo sapiens
tttcttcattttttc

SEQ ID NO: 70034 - DNA, 15 bp, Homo sapiens
ttcttcattttttct

SEQ ID NO: 70035 - DNA, 15 bp, Homo sapiens
tcttcattttttctg

SEQ ID NO: 70036 - DNA, 15 bp, Homo sapiens
cttcattttttctgt

SEQ ID NO: 70037 - DNA, 15 bp, Homo sapiens
ttcattttttctgtt

SEQ ID NO: 70038 - DNA, 15 bp, Homo sapiens
tcattttttctgtta

SEQ ID NO: 70039 - DNA, 15 bp, Homo sapiens
cattttttctgttaa

SEQ ID NO: 70040 - DNA, 15 bp, Homo sapiens
attttttctgttaaa

SEQ ID NO: 70041 - DNA, 15 bp, Homo sapiens
ttttttctgttaaac

SEQ ID NO: 70042 - DNA, 15 bp, Homo sapiens
tttttctgttaaact

SEQ ID NO: 70043 - DNA, 15 bp, Homo sapiens
ttttctgttaaactt

SEQ ID NO: 70044 - DNA, 15 bp, Homo sapiens
tttctgttaaacttg

SEQ ID NO: 70045 - DNA, 15 bp, Homo sapiens
ttctgttaaacttga

SEQ ID NO: 70046 - DNA, 15 bp, Homo sapiens
tctgttaaacttgat

SEQ ID NO: 70047 - DNA, 15 bp, Homo sapiens
ctgttaaacttgatt

SEQ ID NO: 70048 - DNA, 15 bp, Homo sapiens
tgttaaacttgattt

SEQ ID NO: 70049 - DNA, 15 bp, Homo sapiens
gttaaacttgatttt

SEQ ID NO: 70050 - DNA, 15 bp, Homo sapiens
ttaaacttgattttc

SEQ ID NO: 70051 - DNA, 15 bp, Homo sapiens
taaacttgattttca

SEQ ID NO: 70052 - DNA, 15 bp, Homo sapiens
aaacttgattttcac

SEQ ID NO: 70053 - DNA, 15 bp, Homo sapiens
aacttgattttcaca

SEQ ID NO: 70054 - DNA, 15 bp, Homo sapiens
acttgattttcacag

SEQ ID NO: 70055 - DNA, 15 bp, Homo sapiens
cttgattttcacagt

SEQ ID NO: 70056 - DNA, 15 bp, Homo sapiens
ttgattttcacagtc

SEQ ID NO: 70057 - DNA, 15 bp, Homo sapiens
tgattttcacagtca

SEQ ID NO: 70058 - DNA, 15 bp, Homo sapiens
gattttcacagtcag

SEQ ID NO: 70059 - DNA, 15 bp, Homo sapiens
attttcacagtcagc

SEQ ID NO: 70060 - DNA, 15 bp, Homo sapiens
ttttcacagtcagca

SEQ ID NO: 70061 - DNA, 15 bp, Homo sapiens
tttcacagtcagcat

SEQ ID NO: 70062 - DNA, 15 bp, Homo sapiens
ttcacagtcagcatt

SEQ ID NO: 70063 - DNA, 15 bp, Homo sapiens
tcacagtcagcattg

SEQ ID NO: 70064 - DNA, 15 bp, Homo sapiens
cacagtcagcattga

SEQ ID NO: 70065 - DNA, 15 bp, Homo sapiens
acagtcagcattgaa

SEQ ID NO: 70066 - DNA, 15 bp, Homo sapiens
cagtcagcattgaag

SEQ ID NO: 70067 - DNA, 15 bp, Homo sapiens
agtcagcattgaaga

SEQ ID NO: 70068 - DNA, 15 bp, Homo sapiens
gtcagcattgaagaa

SEQ ID NO: 70069 - DNA, 15 bp, Homo sapiens
tcagcattgaagaat

SEQ ID NO: 70070 - DNA, 15 bp, Homo sapiens
cagcattgaagaatt

SEQ ID NO: 70071 - DNA, 15 bp, Homo sapiens
agcattgaagaattc

SEQ ID NO: 70072 - DNA, 15 bp, Homo sapiens
gcattgaagaattca

SEQ ID NO: 70073 - DNA, 15 bp, Homo sapiens
cattgaagaattcat

SEQ ID NO: 70074 - DNA, 15 bp, Homo sapiens
attgaagaattcatc

SEQ ID NO: 70075 - DNA, 15 bp, Homo sapiens
ttgaagaattcatct

SEQ ID NO: 70076 - DNA, 15 bp, Homo sapiens
tgaagaattcatctt

SEQ ID NO: 70077 - DNA, 15 bp, Homo sapiens
gaagaattcatcttg

SEQ ID NO: 70078 - DNA, 15 bp, Homo sapiens
aagaattcatcttgt

SEQ ID NO: 70079 - DNA, 15 bp, Homo sapiens
agaattcatcttgtg

SEQ ID NO: 70080 - DNA, 15 bp, Homo sapiens
gaattcatcttgtgg

SEQ ID NO: 70081 - DNA, 15 bp, Homo sapiens
aattcatcttgtggc

SEQ ID NO: 70082 - DNA, 15 bp, Homo sapiens
attcatcttgtggcc

SEQ ID NO: 70083 - DNA, 15 bp, Homo sapiens
ttcatcttgtggcct

SEQ ID NO: 70084 - DNA, 15 bp, Homo sapiens
tcatcttgtggcctg

SEQ ID NO: 70085 - DNA, 15 bp, Homo sapiens
catcttgtggcctga

SEQ ID NO: 70086 - DNA, 15 bp, Homo sapiens
atcttgtggcctgaa

SEQ ID NO: 70087 - DNA, 15 bp, Homo sapiens
tcttgtggcctgaat

SEQ ID NO: 70088 - DNA, 15 bp, Homo sapiens
cttgtggcctgaatt

SEQ ID NO: 70089 - DNA, 15 bp, Homo sapiens
ttgtggcctgaattc

SEQ ID NO: 70090 - DNA, 15 bp, Homo sapiens
tgtggcctgaattca

SEQ ID NO: 70091 - DNA, 15 bp, Homo sapiens
gtggcctgaattcat

SEQ ID NO: 70092 - DNA, 15 bp, Homo sapiens
tggcctgaattcatt

SEQ ID NO: 70093 - DNA, 15 bp, Homo sapiens
ggcctgaattcatta

SEQ ID NO: 70094 - DNA, 15 bp, Homo sapiens
gcctgaattcattaa

SEQ ID NO: 70095 - DNA, 15 bp, Homo sapiens
cctgaattcattaag

SEQ ID NO: 70096 - DNA, 15 bp, Homo sapiens
ctgaattcattaaga

SEQ ID NO: 70097 - DNA, 15 bp, Homo sapiens
tgaattcattaagaa

SEQ ID NO: 70098 - DNA, 15 bp, Homo sapiens
gaattcattaagaaa

SEQ ID NO: 70099 - DNA, 15 bp, Homo sapiens
aattcattaagaaaa

SEQ ID NO: 70100 - DNA, 15 bp, Homo sapiens
attcattaagaaaag

SEQ ID NO: 70101 - DNA, 15 bp, Homo sapiens
ttcattaagaaaaga

SEQ ID NO: 70102 - DNA, 15 bp, Homo sapiens
tcattaagaaaagat

SEQ ID NO: 70103 - DNA, 15 bp, Homo sapiens
cattaagaaaagatg

SEQ ID NO: 70104 - DNA, 15 bp, Homo sapiens
attaagaaaagatgt

SEQ ID NO: 70105 - DNA, 15 bp, Homo sapiens
ttaagaaaagatgtt

SEQ ID NO: 70106 - DNA, 15 bp, Homo sapiens
taagaaaagatgtta

SEQ ID NO: 70107 - DNA, 15 bp, Homo sapiens
aagaaaagatgttag

SEQ ID NO: 70108 - DNA, 15 bp, Homo sapiens
agaaaagatgttagg

SEQ ID NO: 70109 - DNA, 15 bp, Homo sapiens
gaaaagatgttagga

SEQ ID NO: 70110 - DNA, 15 bp, Homo sapiens
aaaagatgttaggat

SEQ ID NO: 70111 - DNA, 15 bp, Homo sapiens
aaagatgttaggatt

SEQ ID NO: 70112 - DNA, 15 bp, Homo sapiens
aagatgttaggattt

SEQ ID NO: 70113 - DNA, 15 bp, Homo sapiens
agatgttaggatttg

SEQ ID NO: 70114 - DNA, 15 bp, Homo sapiens
gatgttaggatttgt

SEQ ID NO: 70115 - DNA, 15 bp, Homo sapiens
atgttaggatttgtt

SEQ ID NO: 70116 - DNA, 15 bp, Homo sapiens
tgttaggatttgttc

SEQ ID NO: 70117 - DNA, 15 bp, Homo sapiens
gttaggatttgttct

SEQ ID NO: 70118 - DNA, 15 bp, Homo sapiens
ttaggatttgttctg

SEQ ID NO: 70119 - DNA, 15 bp, Homo sapiens
taggatttgttctga

SEQ ID NO: 70120 - DNA, 15 bp, Homo sapiens
aggatttgttctgaa

SEQ ID NO: 70121 - DNA, 15 bp, Homo sapiens
ggatttgttctgaag

SEQ ID NO: 70122 - DNA, 15 bp, Homo sapiens
gatttgttctgaaga

SEQ ID NO: 70123 - DNA, 15 bp, Homo sapiens
atttgttctgaagat

SEQ ID NO: 70124 - DNA, 15 bp, Homo sapiens
tttgttctgaagata

SEQ ID NO: 70125 - DNA, 15 bp, Homo sapiens
ttgttctgaagatag

SEQ ID NO: 70126 - DNA, 15 bp, Homo sapiens
tgttctgaagatagt

SEQ ID NO: 70127 - DNA, 15 bp, Homo sapiens
gttctgaagatagtg

SEQ ID NO: 70128 - DNA, 15 bp, Homo sapiens
ttctgaagatagtga

SEQ ID NO: 70129 - DNA, 15 bp, Homo sapiens
tctgaagatagtgac

SEQ ID NO: 70130 - DNA, 15 bp, Homo sapiens
ctgaagatagtgact

SEQ ID NO: 70131 - DNA, 15 bp, Homo sapiens
tgaagatagtgactt

SEQ ID NO: 70132 - DNA, 15 bp, Homo sapiens
gaagatagtgactta

SEQ ID NO: 70133 - DNA, 15 bp, Homo sapiens
aagatagtgacttag

SEQ ID NO: 70134 - DNA, 15 bp, Homo sapiens
agatagtgacttagg

SEQ ID NO: 70135 - DNA, 15 bp, Homo sapiens
gatagtgacttagga

SEQ ID NO: 70136 - DNA, 15 bp, Homo sapiens
atagtgacttaggaa

SEQ ID NO: 70137 - DNA, 15 bp, Homo sapiens
tagtgacttaggaaa

SEQ ID NO: 70138 - DNA, 15 bp, Homo sapiens
agtgacttaggaaat

SEQ ID NO: 70139 - DNA, 15 bp, Homo sapiens
gtgacttaggaaatt

SEQ ID NO: 70140 - DNA, 15 bp, Homo sapiens
tgacttaggaaattt

SEQ ID NO: 70141 - DNA, 15 bp, Homo sapiens
gacttaggaaatttg

SEQ ID NO: 70142 - DNA, 15 bp, Homo sapiens
acttaggaaatttgt

SEQ ID NO: 70143 - DNA, 15 bp, Homo sapiens
cttaggaaatttgtg

SEQ ID NO: 70144 - DNA, 15 bp, Homo sapiens
ttaggaaatttgtga

SEQ ID NO: 70145 - DNA, 15 bp, Homo sapiens
taggaaatttgtgag

SEQ ID NO: 70146 - DNA, 15 bp, Homo sapiens
aggaaatttgtgaga

SEQ ID NO: 70147 - DNA, 15 bp, Homo sapiens
ggaaatttgtgagac

SEQ ID NO: 70148 - DNA, 15 bp, Homo sapiens
gaaatttgtgagact

SEQ ID NO: 70149 - DNA, 15 bp, Homo sapiens
aaatttgtgagactg

SEQ ID NO: 70150 - DNA, 15 bp, Homo sapiens
aatttgtgagactgg

SEQ ID NO: 70151 - DNA, 15 bp, Homo sapiens
atttgtgagactggg

SEQ ID NO: 70152 - DNA, 15 bp, Homo sapiens
tttgtgagactgggg

SEQ ID NO: 70153 - DNA, 15 bp, Homo sapiens
ttgtgagactggggt

SEQ ID NO: 70154 - DNA, 15 bp, Homo sapiens
tgtgagactggggtc

SEQ ID NO: 70155 - DNA, 15 bp, Homo sapiens
gtgagactggggtca

SEQ ID NO: 70156 - DNA, 15 bp, Homo sapiens
tgagactggggtcag

SEQ ID NO: 70157 - DNA, 15 bp, Homo sapiens
gagactggggtcagt

SEQ ID NO: 70158 - DNA, 15 bp, Homo sapiens
agactggggtcagtc

SEQ ID NO: 70159 - DNA, 15 bp, Homo sapiens
gactggggtcagtca

SEQ ID NO: 70160 - DNA, 15 bp, Homo sapiens
actggggtcagtcag

SEQ ID NO: 70161 - DNA, 15 bp, Homo sapiens
ctggggtcagtcagt

SEQ ID NO: 70162 - DNA, 15 bp, Homo sapiens
tggggtcagtcagtt

SEQ ID NO: 70163 - DNA, 15 bp, Homo sapiens
ggggtcagtcagttc

SEQ ID NO: 70164 - DNA, 15 bp, Homo sapiens
gggtcagtcagttct

SEQ ID NO: 70165 - DNA, 15 bp, Homo sapiens
ggtcagtcagttctg

SEQ ID NO: 70166 - DNA, 15 bp, Homo sapiens
gtcagtcagttctgt

SEQ ID NO: 70167 - DNA, 15 bp, Homo sapiens
tcagtcagttctgtt

SEQ ID NO: 70168 - DNA, 15 bp, Homo sapiens
cagtcagttctgttt

SEQ ID NO: 70169 - DNA, 15 bp, Homo sapiens
agtcagttctgtttt

SEQ ID NO: 70170 - DNA, 15 bp, Homo sapiens
gtcagttctgtttta

SEQ ID NO: 70171 - DNA, 15 bp, Homo sapiens
tcagttctgttttac

SEQ ID NO: 70172 - DNA, 15 bp, Homo sapiens
cagttctgttttaca

SEQ ID NO: 70173 - DNA, 15 bp, Homo sapiens
agttctgttttacaa

SEQ ID NO: 70174 - DNA, 15 bp, Homo sapiens
gttctgttttacaat

SEQ ID NO: 70175 - DNA, 15 bp, Homo sapiens
ttctgttttacaatt

SEQ ID NO: 70176 - DNA, 15 bp, Homo sapiens
tctgttttacaattg

SEQ ID NO: 70177 - DNA, 15 bp, Homo sapiens
ctgttttacaattgc

SEQ ID NO: 70178 - DNA, 15 bp, Homo sapiens
tgttttacaattgct

SEQ ID NO: 70179 - DNA, 15 bp, Homo sapiens
gttttacaattgctt

SEQ ID NO: 70180 - DNA, 15 bp, Homo sapiens
ttttacaattgcttt

SEQ ID NO: 70181 - DNA, 15 bp, Homo sapiens
tttacaattgctttc

SEQ ID NO: 70182 - DNA, 15 bp, Homo sapiens
ttacaattgctttct

SEQ ID NO: 70183 - DNA, 15 bp, Homo sapiens
tacaattgctttcta

SEQ ID NO: 70184 - DNA, 15 bp, Homo sapiens
acaattgctttctat

SEQ ID NO: 70185 - DNA, 15 bp, Homo sapiens
caattgctttctatt

SEQ ID NO: 70186 - DNA, 15 bp, Homo sapiens
aattgctttctattt

SEQ ID NO: 70187 - DNA, 15 bp, Homo sapiens
attgctttctatttg

SEQ ID NO: 70188 - DNA, 15 bp, Homo sapiens
ttgctttctatttgg

SEQ ID NO: 70189 - DNA, 15 bp, Homo sapiens
tgctttctatttggt

SEQ ID NO: 70190 - DNA, 15 bp, Homo sapiens
gctttctatttggta

SEQ ID NO: 70191 - DNA, 15 bp, Homo sapiens
ctttctatttggtag

SEQ ID NO: 70192 - DNA, 15 bp, Homo sapiens
tttctatttggtagc

SEQ ID NO: 70193 - DNA, 15 bp, Homo sapiens
ttctatttggtagct

SEQ ID NO: 70194 - DNA, 15 bp, Homo sapiens
tctatttggtagctt

SEQ ID NO: 70195 - DNA, 15 bp, Homo sapiens
ctatttggtagcttt

SEQ ID NO: 70196 - DNA, 15 bp, Homo sapiens
tatttggtagctttg

SEQ ID NO: 70197 - DNA, 15 bp, Homo sapiens
atttggtagctttga

SEQ ID NO: 70198 - DNA, 15 bp, Homo sapiens
tttggtagctttgaa

SEQ ID NO: 70199 - DNA, 15 bp, Homo sapiens
ttggtagctttgaaa

SEQ ID NO: 70200 - DNA, 15 bp, Homo sapiens
tggtagctttgaaat

SEQ ID NO: 70201 - DNA, 15 bp, Homo sapiens
ggtagctttgaaatt

SEQ ID NO: 70202 - DNA, 15 bp, Homo sapiens
gtagctttgaaatta

SEQ ID NO: 70203 - DNA, 15 bp, Homo sapiens
tagctttgaaattaa

SEQ ID NO: 70204 - DNA, 15 bp, Homo sapiens
agctttgaaattaat

SEQ ID NO: 70205 - DNA, 15 bp, Homo sapiens
gctttgaaattaatt

SEQ ID NO: 70206 - DNA, 15 bp, Homo sapiens
ctttgaaattaattt

SEQ ID NO: 70207 - DNA, 15 bp, Homo sapiens
tttgaaattaattta

SEQ ID NO: 70208 - DNA, 15 bp, Homo sapiens
ttgaaattaatttag

SEQ ID NO: 70209 - DNA, 15 bp, Homo sapiens
tgaaattaatttagt

SEQ ID NO: 70210 - DNA, 15 bp, Homo sapiens
gaaattaatttagtt

SEQ ID NO: 70211 - DNA, 15 bp, Homo sapiens
aaattaatttagttg

SEQ ID NO: 70212 - DNA, 15 bp, Homo sapiens
aattaatttagttgc

SEQ ID NO: 70213 - DNA, 15 bp, Homo sapiens
attaatttagttgct

SEQ ID NO: 70214 - DNA, 15 bp, Homo sapiens
ttaatttagttgctt

SEQ ID NO: 70215 - DNA, 15 bp, Homo sapiens
taatttagttgctta

SEQ ID NO: 70216 - DNA, 15 bp, Homo sapiens
aatttagttgcttat

SEQ ID NO: 70217 - DNA, 15 bp, Homo sapiens
atttagttgcttatc

SEQ ID NO: 70218 - DNA, 15 bp, Homo sapiens
tttagttgcttatca

SEQ ID NO: 70219 - DNA, 15 bp, Homo sapiens
ttagttgcttatcag

SEQ ID NO: 70220 - DNA, 15 bp, Homo sapiens
tagttgcttatcaga

SEQ ID NO: 70221 - DNA, 15 bp, Homo sapiens
agttgcttatcagag

SEQ ID NO: 70222 - DNA, 15 bp, Homo sapiens
gttgcttatcagaga

SEQ ID NO: 70223 - DNA, 15 bp, Homo sapiens
ttgcttatcagagag

SEQ ID NO: 70224 - DNA, 15 bp, Homo sapiens
tgcttatcagagaga

SEQ ID NO: 70225 - DNA, 15 bp, Homo sapiens
gcttatcagagagaa

SEQ ID NO: 70226 - DNA, 15 bp, Homo sapiens
cttatcagagagaat

SEQ ID NO: 70227 - DNA, 15 bp, Homo sapiens
ttatcagagagaata

SEQ ID NO: 70228 - DNA, 15 bp, Homo sapiens
tatcagagagaataa

SEQ ID NO: 70229 - DNA, 15 bp, Homo sapiens
atcagagagaataat

SEQ ID NO: 70230 - DNA, 15 bp, Homo sapiens
tcagagagaataatg

SEQ ID NO: 70231 - DNA, 15 bp, Homo sapiens
cagagagaataatgt

SEQ ID NO: 70232 - DNA, 15 bp, Homo sapiens
agagagaataatgtt

SEQ ID NO: 70233 - DNA, 15 bp, Homo sapiens
gagagaataatgttg

SEQ ID NO: 70234 - DNA, 15 bp, Homo sapiens
agagaataatgttga

SEQ ID NO: 70235 - DNA, 15 bp, Homo sapiens
gagaataatgttgag

SEQ ID NO: 70236 - DNA, 15 bp, Homo sapiens
agaataatgttgagg

SEQ ID NO: 70237 - DNA, 15 bp, Homo sapiens
gaataatgttgaggt

SEQ ID NO: 70238 - DNA, 15 bp, Homo sapiens
aataatgttgaggtt

SEQ ID NO: 70239 - DNA, 15 bp, Homo sapiens
ataatgttgaggtta

SEQ ID NO: 70240 - DNA, 15 bp, Homo sapiens
taatgttgaggttag

SEQ ID NO: 70241 - DNA, 15 bp, Homo sapiens
aatgttgaggttaga

SEQ ID NO: 70242 - DNA, 15 bp, Homo sapiens
atgttgaggttagac

SEQ ID NO: 70243 - DNA, 15 bp, Homo sapiens
tgttgaggttagact

SEQ ID NO: 70244 - DNA, 15 bp, Homo sapiens
gttgaggttagacta

SEQ ID NO: 70245 - DNA, 15 bp, Homo sapiens
ttgaggttagactaa

SEQ ID NO: 70246 - DNA, 15 bp, Homo sapiens
tgaggttagactaac

SEQ ID NO: 70247 - DNA, 15 bp, Homo sapiens
gaggttagactaacc

SEQ ID NO: 70248 - DNA, 15 bp, Homo sapiens
aggttagactaacct

SEQ ID NO: 70249 - DNA, 15 bp, Homo sapiens
ggttagactaacctt

SEQ ID NO: 70250 - DNA, 15 bp, Homo sapiens
gttagactaacctta

SEQ ID NO: 70251 - DNA, 15 bp, Homo sapiens
ttagactaaccttaa

SEQ ID NO: 70252 - DNA, 15 bp, Homo sapiens
tagactaaccttaaa

SEQ ID NO: 70253 - DNA, 15 bp, Homo sapiens
agactaaccttaaat

SEQ ID NO: 70254 - DNA, 15 bp, Homo sapiens
gactaaccttaaatt

SEQ ID NO: 70255 - DNA, 15 bp, Homo sapiens
actaaccttaaattg

SEQ ID NO: 70256 - DNA, 15 bp, Homo sapiens
ctaaccttaaattgg

SEQ ID NO: 70257 - DNA, 15 bp, Homo sapiens
taaccttaaattggt

SEQ ID NO: 70258 - DNA, 15 bp, Homo sapiens
aaccttaaattggta

SEQ ID NO: 70259 - DNA, 15 bp, Homo sapiens
accttaaattggtaa

SEQ ID NO: 70260 - DNA, 15 bp, Homo sapiens
ccttaaattggtaag

SEQ ID NO: 70261 - DNA, 15 bp, Homo sapiens
cttaaattggtaagg

SEQ ID NO: 70262 - DNA, 15 bp, Homo sapiens
ttaaattggtaaggc

SEQ ID NO: 70263 - DNA, 15 bp, Homo sapiens
taaattggtaaggct

SEQ ID NO: 70264 - DNA, 15 bp, Homo sapiens
aaattggtaaggctt

SEQ ID NO: 70265 - DNA, 15 bp, Homo sapiens
aattggtaaggcttt

SEQ ID NO: 70266 - DNA, 15 bp, Homo sapiens
attggtaaggctttg

SEQ ID NO: 70267 - DNA, 15 bp, Homo sapiens
ttggtaaggctttgc

SEQ ID NO: 70268 - DNA, 15 bp, Homo sapiens
tggtaaggctttgct

SEQ ID NO: 70269 - DNA, 15 bp, Homo sapiens
ggtaaggctttgctg

SEQ ID NO: 70270 - DNA, 15 bp, Homo sapiens
gtaaggctttgctga

SEQ ID NO: 70271 - DNA, 15 bp, Homo sapiens
taaggctttgctgag

SEQ ID NO: 70272 - DNA, 15 bp, Homo sapiens
aaggctttgctgagc

SEQ ID NO: 70273 - DNA, 15 bp, Homo sapiens
aggctttgctgagca

SEQ ID NO: 70274 - DNA, 15 bp, Homo sapiens
ggctttgctgagcaa

SEQ ID NO: 70275 - DNA, 15 bp, Homo sapiens
gctttgctgagcaaa

SEQ ID NO: 70276 - DNA, 15 bp, Homo sapiens
ctttgctgagcaaac

SEQ ID NO: 70277 - DNA, 15 bp, Homo sapiens
tttgctgagcaaact

SEQ ID NO: 70278 - DNA, 15 bp, Homo sapiens
ttgctgagcaaactg

SEQ ID NO: 70279 - DNA, 15 bp, Homo sapiens
tgctgagcaaactga

SEQ ID NO: 70280 - DNA, 15 bp, Homo sapiens
gctgagcaaactgat

SEQ ID NO: 70281 - DNA, 15 bp, Homo sapiens
ctgagcaaactgata

SEQ ID NO: 70282 - DNA, 15 bp, Homo sapiens
tgagcaaactgataa

SEQ ID NO: 70283 - DNA, 15 bp, Homo sapiens
gagcaaactgataac

SEQ ID NO: 70284 - DNA, 15 bp, Homo sapiens
agcaaactgataact

SEQ ID NO: 70285 - DNA, 15 bp, Homo sapiens
gcaaactgataactg

SEQ ID NO: 70286 - DNA, 15 bp, Homo sapiens
caaactgataactgt

SEQ ID NO: 70287 - DNA, 15 bp, Homo sapiens
aaactgataactgta

SEQ ID NO: 70288 - DNA, 15 bp, Homo sapiens
aactgataactgtaa

SEQ ID NO: 70289 - DNA, 15 bp, Homo sapiens
actgataactgtaag

SEQ ID NO: 70290 - DNA, 15 bp, Homo sapiens
ctgataactgtaagt

SEQ ID NO: 70291 - DNA, 15 bp, Homo sapiens
tgataactgtaagtc

SEQ ID NO: 70292 - DNA, 15 bp, Homo sapiens
gataactgtaagtct

SEQ ID NO: 70293 - DNA, 15 bp, Homo sapiens
ataactgtaagtctt

SEQ ID NO: 70294 - DNA, 15 bp, Homo sapiens
taactgtaagtcttt

SEQ ID NO: 70295 - DNA, 15 bp, Homo sapiens
aactgtaagtctttt

SEQ ID NO: 70296 - DNA, 15 bp, Homo sapiens
actgtaagtctttta

SEQ ID NO: 70297 - DNA, 15 bp, Homo sapiens
ctgtaagtcttttat

SEQ ID NO: 70298 - DNA, 15 bp, Homo sapiens
tgtaagtcttttata

SEQ ID NO: 70299 - DNA, 15 bp, Homo sapiens
gtaagtcttttatag

SEQ ID NO: 70300 - DNA, 15 bp, Homo sapiens
taagtcttttatagg

SEQ ID NO: 70301 - DNA, 15 bp, Homo sapiens
aagtcttttataggg

SEQ ID NO: 70302 - DNA, 15 bp, Homo sapiens
agtcttttatagggt

SEQ ID NO: 70303 - DNA, 15 bp, Homo sapiens
gtcttttatagggtg

SEQ ID NO: 70304 - DNA, 15 bp, Homo sapiens
tcttttatagggtgc

SEQ ID NO: 70305 - DNA, 15 bp, Homo sapiens
cttttatagggtgca

SEQ ID NO: 70306 - DNA, 15 bp, Homo sapiens
ttttatagggtgcat

SEQ ID NO: 70307 - DNA, 15 bp, Homo sapiens
tttatagggtgcatt

SEQ ID NO: 70308 - DNA, 15 bp, Homo sapiens
ttatagggtgcatta

SEQ ID NO: 70309 - DNA, 15 bp, Homo sapiens
tatagggtgcattac

SEQ ID NO: 70310 - DNA, 15 bp, Homo sapiens
atagggtgcattact

SEQ ID NO: 70311 - DNA, 15 bp, Homo sapiens
tagggtgcattactg

SEQ ID NO: 70312 - DNA, 15 bp, Homo sapiens
agggtgcattactgc

SEQ ID NO: 70313 - DNA, 15 bp, Homo sapiens
gggtgcattactgcc

SEQ ID NO: 70314 - DNA, 15 bp, Homo sapiens
ggtgcattactgcca

SEQ ID NO: 70315 - DNA, 15 bp, Homo sapiens
gtgcattactgccac

SEQ ID NO: 70316 - DNA, 15 bp, Homo sapiens
tgcattactgccaca

SEQ ID NO: 70317 - DNA, 15 bp, Homo sapiens
gcattactgccacat

SEQ ID NO: 70318 - DNA, 15 bp, Homo sapiens
cattactgccacata

SEQ ID NO: 70319 - DNA, 15 bp, Homo sapiens
attactgccacatat

SEQ ID NO: 70320 - DNA, 15 bp, Homo sapiens
ttactgccacatata

SEQ ID NO: 70321 - DNA, 15 bp, Homo sapiens
tactgccacatatac

SEQ ID NO: 70322 - DNA, 15 bp, Homo sapiens
actgccacatatacg

SEQ ID NO: 70323 - DNA, 15 bp, Homo sapiens
ctgccacatatacgt

SEQ ID NO: 70324 - DNA, 15 bp, Homo sapiens
tgccacatatacgtt

SEQ ID NO: 70325 - DNA, 15 bp, Homo sapiens
gccacatatacgttc

SEQ ID NO: 70326 - DNA, 15 bp, Homo sapiens
ccacatatacgttct

SEQ ID NO: 70327 - DNA, 15 bp, Homo sapiens
cacatatacgttctt

SEQ ID NO: 70328 - DNA, 15 bp, Homo sapiens
acatatacgttcttc

SEQ ID NO: 70329 - DNA, 15 bp, Homo sapiens
catatacgttcttcc

SEQ ID NO: 70330 - DNA, 15 bp, Homo sapiens
atatacgttcttcca

SEQ ID NO: 70331 - DNA, 15 bp, Homo sapiens
tatacgttcttccat

SEQ ID NO: 70332 - DNA, 15 bp, Homo sapiens
atacgttcttccata

SEQ ID NO: 70333 - DNA, 15 bp, Homo sapiens
tacgttcttccatag

SEQ ID NO: 70334 - DNA, 15 bp, Homo sapiens
acgttcttccatagg

SEQ ID NO: 70335 - DNA, 15 bp, Homo sapiens
cgttcttccataggt

SEQ ID NO: 70336 - DNA, 15 bp, Homo sapiens
gttcttccataggtg

SEQ ID NO: 70337 - DNA, 15 bp, Homo sapiens
ttcttccataggtgg

SEQ ID NO: 70338 - DNA, 15 bp, Homo sapiens
tcttccataggtggt

SEQ ID NO: 70339 - DNA, 15 bp, Homo sapiens
cttccataggtggtt

SEQ ID NO: 70340 - DNA, 15 bp, Homo sapiens
ttccataggtggtta

SEQ ID NO: 70341 - DNA, 15 bp, Homo sapiens
tccataggtggttaa

SEQ ID NO: 70342 - DNA, 15 bp, Homo sapiens
ccataggtggttaaa

SEQ ID NO: 70343 - DNA, 15 bp, Homo sapiens
cataggtggttaaaa

SEQ ID NO: 70344 - DNA, 15 bp, Homo sapiens
ataggtggttaaaag

SEQ ID NO: 70345 - DNA, 15 bp, Homo sapiens
taggtggttaaaagt

SEQ ID NO: 70346 - DNA, 15 bp, Homo sapiens
aggtggttaaaagta

SEQ ID NO: 70347 - DNA, 15 bp, Homo sapiens
ggtggttaaaagtat

SEQ ID NO: 70348 - DNA, 15 bp, Homo sapiens
gtggttaaaagtata

SEQ ID NO: 70349 - DNA, 15 bp, Homo sapiens
tggttaaaagtatat

SEQ ID NO: 70350 - DNA, 15 bp, Homo sapiens
ggttaaaagtatatt

SEQ ID NO: 70351 - DNA, 15 bp, Homo sapiens
gttaaaagtatattg

SEQ ID NO: 70352 - DNA, 15 bp, Homo sapiens
ttaaaagtatattgg

SEQ ID NO: 70353 - DNA, 15 bp, Homo sapiens
taaaagtatattggt

SEQ ID NO: 70354 - DNA, 15 bp, Homo sapiens
aaaagtatattggtc

SEQ ID NO: 70355 - DNA, 15 bp, Homo sapiens
aaagtatattggtct

SEQ ID NO: 70356 - DNA, 15 bp, Homo sapiens
aagtatattggtctg

SEQ ID NO: 70357 - DNA, 15 bp, Homo sapiens
agtatattggtctgt

SEQ ID NO: 70358 - DNA, 15 bp, Homo sapiens
gtatattggtctgtg

SEQ ID NO: 70359 - DNA, 15 bp, Homo sapiens
tatattggtctgtgt

SEQ ID NO: 70360 - DNA, 15 bp, Homo sapiens
atattggtctgtgtt

SEQ ID NO: 70361 - DNA, 15 bp, Homo sapiens
tattggtctgtgttt

SEQ ID NO: 70362 - DNA, 15 bp, Homo sapiens
attggtctgtgtttg

SEQ ID NO: 70363 - DNA, 15 bp, Homo sapiens
ttggtctgtgtttgg

SEQ ID NO: 70364 - DNA, 15 bp, Homo sapiens
tggtctgtgtttggt

SEQ ID NO: 70365 - DNA, 15 bp, Homo sapiens
ggtctgtgtttggtg

SEQ ID NO: 70366 - DNA, 15 bp, Homo sapiens
gtctgtgtttggtga

SEQ ID NO: 70367 - DNA, 15 bp, Homo sapiens
tctgtgtttggtgat

SEQ ID NO: 70368 - DNA, 15 bp, Homo sapiens
ctgtgtttggtgatt

SEQ ID NO: 70369 - DNA, 15 bp, Homo sapiens
tgtgtttggtgattc

SEQ ID NO: 70370 - DNA, 15 bp, Homo sapiens
gtgtttggtgattct

SEQ ID NO: 70371 - DNA, 15 bp, Homo sapiens
tgtttggtgattctc

SEQ ID NO: 70372 - DNA, 15 bp, Homo sapiens
gtttggtgattctct

SEQ ID NO: 70373 - DNA, 15 bp, Homo sapiens
tttggtgattctctt

SEQ ID NO: 70374 - DNA, 15 bp, Homo sapiens
ttggtgattctcttt

SEQ ID NO: 70375 - DNA, 15 bp, Homo sapiens
tggtgattctctttg

SEQ ID NO: 70376 - DNA, 15 bp, Homo sapiens
ggtgattctctttgt

SEQ ID NO: 70377 - DNA, 15 bp, Homo sapiens
gtgattctctttgta

SEQ ID NO: 70378 - DNA, 15 bp, Homo sapiens
tgattctctttgtac

SEQ ID NO: 70379 - DNA, 15 bp, Homo sapiens
gattctctttgtaca

SEQ ID NO: 70380 - DNA, 15 bp, Homo sapiens
attctctttgtacat

SEQ ID NO: 70381 - DNA, 15 bp, Homo sapiens
ttctctttgtacata

SEQ ID NO: 70382 - DNA, 15 bp, Homo sapiens
tctctttgtacatat

SEQ ID NO: 70383 - DNA, 15 bp, Homo sapiens
ctctttgtacatatt

SEQ ID NO: 70384 - DNA, 15 bp, Homo sapiens
tctttgtacatattg

SEQ ID NO: 70385 - DNA, 15 bp, Homo sapiens
ctttgtacatattga

SEQ ID NO: 70386 - DNA, 15 bp, Homo sapiens
tttgtacatattgag

SEQ ID NO: 70387 - DNA, 15 bp, Homo sapiens
ttgtacatattgagt

SEQ ID NO: 70388 - DNA, 15 bp, Homo sapiens
tgtacatattgagta

SEQ ID NO: 70389 - DNA, 15 bp, Homo sapiens
gtacatattgagtat

SEQ ID NO: 70390 - DNA, 15 bp, Homo sapiens
tacatattgagtata

SEQ ID NO: 70391 - DNA, 15 bp, Homo sapiens
acatattgagtatat

SEQ ID NO: 70392 - DNA, 15 bp, Homo sapiens
catattgagtatatg

SEQ ID NO: 70393 - DNA, 15 bp, Homo sapiens
atattgagtatatgc

SEQ ID NO: 70394 - DNA, 15 bp, Homo sapiens
tattgagtatatgca

SEQ ID NO: 70395 - DNA, 15 bp, Homo sapiens
attgagtatatgcat

SEQ ID NO: 70396 - DNA, 15 bp, Homo sapiens
ttgagtatatgcatt

SEQ ID NO: 70397 - DNA, 15 bp, Homo sapiens
tgagtatatgcattc

SEQ ID NO: 70398 - DNA, 15 bp, Homo sapiens
gagtatatgcattca

SEQ ID NO: 70399 - DNA, 15 bp, Homo sapiens
agtatatgcattcac

SEQ ID NO: 70400 - DNA, 15 bp, Homo sapiens
gtatatgcattcact

SEQ ID NO: 70401 - DNA, 15 bp, Homo sapiens
tatatgcattcacta

SEQ ID NO: 70402 - DNA, 15 bp, Homo sapiens
atatgcattcactaa

SEQ ID NO: 70403 - DNA, 15 bp, Homo sapiens
tatgcattcactaat

SEQ ID NO: 70404 - DNA, 15 bp, Homo sapiens
atgcattcactaatg

SEQ ID NO: 70405 - DNA, 15 bp, Homo sapiens
tgcattcactaatgt

SEQ ID NO: 70406 - DNA, 15 bp, Homo sapiens
gcattcactaatgta

SEQ ID NO: 70407 - DNA, 15 bp, Homo sapiens
cattcactaatgtaa

SEQ ID NO: 70408 - DNA, 15 bp, Homo sapiens
attcactaatgtaaa

SEQ ID NO: 70409 - DNA, 15 bp, Homo sapiens
ttcactaatgtaaaa

SEQ ID NO: 70410 - DNA, 15 bp, Homo sapiens
tcactaatgtaaaat

SEQ ID NO: 70411 - DNA, 15 bp, Homo sapiens
cactaatgtaaaata

SEQ ID NO: 70412 - DNA, 15 bp, Homo sapiens
actaatgtaaaataa

SEQ ID NO: 70413 - DNA, 15 bp, Homo sapiens
ctaatgtaaaataat

SEQ ID NO: 70414 - DNA, 15 bp, Homo sapiens
taatgtaaaataatt

SEQ ID NO: 70415 - DNA, 15 bp, Homo sapiens
aatgtaaaataattt

SEQ ID NO: 70416 - DNA, 15 bp, Homo sapiens
atgtaaaataatttg

SEQ ID NO: 70417 - DNA, 15 bp, Homo sapiens
tgtaaaataatttgc

SEQ ID NO: 70418 - DNA, 15 bp, Homo sapiens
gtaaaataatttgcc

SEQ ID NO: 70419 - DNA, 15 bp, Homo sapiens
taaaataatttgcca

SEQ ID NO: 70420 - DNA, 15 bp, Homo sapiens
aaaataatttgccaa

SEQ ID NO: 70421 - DNA, 15 bp, Homo sapiens
aaataatttgccaag

SEQ ID NO: 70422 - DNA, 15 bp, Homo sapiens
aataatttgccaaga

SEQ ID NO: 70423 - DNA, 15 bp, Homo sapiens
ataatttgccaagaa

SEQ ID NO: 70424 - DNA, 15 bp, Homo sapiens
taatttgccaagaaa

SEQ ID NO: 70425 - DNA, 15 bp, Homo sapiens
aatttgccaagaaag

SEQ ID NO: 70426 - DNA, 15 bp, Homo sapiens
atttgccaagaaagg

SEQ ID NO: 70427 - DNA, 15 bp, Homo sapiens
tttgccaagaaaggt

SEQ ID NO: 70428 - DNA, 15 bp, Homo sapiens
ttgccaagaaaggtg

SEQ ID NO: 70429 - DNA, 15 bp, Homo sapiens
tgccaagaaaggtga

SEQ ID NO: 70430 - DNA, 15 bp, Homo sapiens
gccaagaaaggtgaa

SEQ ID NO: 70431 - DNA, 15 bp, Homo sapiens
ccaagaaaggtgaaa

SEQ ID NO: 70432 - DNA, 15 bp, Homo sapiens
caagaaaggtgaaat

SEQ ID NO: 70433 - DNA, 15 bp, Homo sapiens
aagaaaggtgaaatt

SEQ ID NO: 70434 - DNA, 15 bp, Homo sapiens
agaaaggtgaaatta

SEQ ID NO: 70435 - DNA, 15 bp, Homo sapiens
gaaaggtgaaattag

SEQ ID NO: 70436 - DNA, 15 bp, Homo sapiens
aaaggtgaaattagt

SEQ ID NO: 70437 - DNA, 15 bp, Homo sapiens
aaggtgaaattagta

SEQ ID NO: 70438 - DNA, 15 bp, Homo sapiens
aggtgaaattagtat

SEQ ID NO: 70439 - DNA, 15 bp, Homo sapiens
ggtgaaattagtata

SEQ ID NO: 70440 - DNA, 15 bp, Homo sapiens
gtgaaattagtatat

SEQ ID NO: 70441 - DNA, 15 bp, Homo sapiens
tgaaattagtatatt

SEQ ID NO: 70442 - DNA, 15 bp, Homo sapiens
gaaattagtatattg

SEQ ID NO: 70443 - DNA, 15 bp, Homo sapiens
aaattagtatattgt

SEQ ID NO: 70444 - DNA, 15 bp, Homo sapiens
aattagtatattgta

SEQ ID NO: 70445 - DNA, 15 bp, Homo sapiens
attagtatattgtac

SEQ ID NO: 70446 - DNA, 15 bp, Homo sapiens
ttagtatattgtact

SEQ ID NO: 70447 - DNA, 15 bp, Homo sapiens
tagtatattgtactt

SEQ ID NO: 70448 - DNA, 15 bp, Homo sapiens
agtatattgtacttg

SEQ ID NO: 70449 - DNA, 15 bp, Homo sapiens
gtatattgtacttga

SEQ ID NO: 70450 - DNA, 15 bp, Homo sapiens
tatattgtacttgac

SEQ ID NO: 70451 - DNA, 15 bp, Homo sapiens
atattgtacttgact

SEQ ID NO: 70452 - DNA, 15 bp, Homo sapiens
tattgtacttgacta

SEQ ID NO: 70453 - DNA, 15 bp, Homo sapiens
attgtacttgactat

SEQ ID NO: 70454 - DNA, 15 bp, Homo sapiens
ttgtacttgactatt

SEQ ID NO: 70455 - DNA, 15 bp, Homo sapiens
tgtacttgactattc

SEQ ID NO: 70456 - DNA, 15 bp, Homo sapiens
gtacttgactattca

SEQ ID NO: 70457 - DNA, 15 bp, Homo sapiens
tacttgactattcac

SEQ ID NO: 70458 - DNA, 15 bp, Homo sapiens
acttgactattcacc

SEQ ID NO: 70459 - DNA, 15 bp, Homo sapiens
cttgactattcacct

SEQ ID NO: 70460 - DNA, 15 bp, Homo sapiens
ttgactattcacctt

SEQ ID NO: 70461 - DNA, 15 bp, Homo sapiens
tgactattcaccttt

SEQ ID NO: 70462 - DNA, 15 bp, Homo sapiens
gactattcacctttc

SEQ ID NO: 70463 - DNA, 15 bp, Homo sapiens
actattcacctttcc

SEQ ID NO: 70464 - DNA, 15 bp, Homo sapiens
ctattcacctttccc

SEQ ID NO: 70465 - DNA, 15 bp, Homo sapiens
tattcacctttccct

SEQ ID NO: 70466 - DNA, 15 bp, Homo sapiens
attcacctttccctt

SEQ ID NO: 70467 - DNA, 15 bp, Homo sapiens
ttcacctttccctta

SEQ ID NO: 70468 - DNA, 15 bp, Homo sapiens
tcacctttcccttag

SEQ ID NO: 70469 - DNA, 15 bp, Homo sapiens
cacctttcccttagt

SEQ ID NO: 70470 - DNA, 15 bp, Homo sapiens
acctttcccttagtt

SEQ ID NO: 70471 - DNA, 15 bp, Homo sapiens
cctttcccttagttt

SEQ ID NO: 70472 - DNA, 15 bp, Homo sapiens
ctttcccttagtttt

SEQ ID NO: 70473 - DNA, 15 bp, Homo sapiens
tttcccttagttttt

SEQ ID NO: 70474 - DNA, 15 bp, Homo sapiens
ttcccttagtttttt

SEQ ID NO: 70475 - DNA, 15 bp, Homo sapiens
tcccttagttttttg

SEQ ID NO: 70476 - DNA, 15 bp, Homo sapiens
cccttagttttttga

SEQ ID NO: 70477 - DNA, 15 bp, Homo sapiens
ccttagttttttgaa

SEQ ID NO: 70478 - DNA, 15 bp, Homo sapiens
cttagttttttgaat

SEQ ID NO: 70479 - DNA, 15 bp, Homo sapiens
ttagttttttgaatt

SEQ ID NO: 70480 - DNA, 15 bp, Homo sapiens
tagttttttgaattt

SEQ ID NO: 70481 - DNA, 15 bp, Homo sapiens
agttttttgaatttt

SEQ ID NO: 70482 - DNA, 15 bp, Homo sapiens
gttttttgaattttt

SEQ ID NO: 70483 - DNA, 15 bp, Homo sapiens
ttttttgaatttttt

SEQ ID NO: 70484 - DNA, 15 bp, Homo sapiens
tttttgaattttttt

SEQ ID NO: 70485 - DNA, 15 bp, Homo sapiens
ttttgaatttttttc

SEQ ID NO: 70486 - DNA, 15 bp, Homo sapiens
tttgaatttttttca

SEQ ID NO: 70487 - DNA, 15 bp, Homo sapiens
ttgaatttttttcat

SEQ ID NO: 70488 - DNA, 15 bp, Homo sapiens
tgaatttttttcatt

SEQ ID NO: 70489 - DNA, 15 bp, Homo sapiens
gaatttttttcattg

SEQ ID NO: 70490 - DNA, 15 bp, Homo sapiens
aatttttttcattgg

SEQ ID NO: 70491 - DNA, 15 bp, Homo sapiens
atttttttcattggt

SEQ ID NO: 70492 - DNA, 15 bp, Homo sapiens
tttttttcattggtt

SEQ ID NO: 70493 - DNA, 15 bp, Homo sapiens
ttttttcattggttg

SEQ ID NO: 70494 - DNA, 15 bp, Homo sapiens
tttttcattggttgc

SEQ ID NO: 70495 - DNA, 15 bp, Homo sapiens
ttttcattggttgca

SEQ ID NO: 70496 - DNA, 15 bp, Homo sapiens
tttcattggttgcag

SEQ ID NO: 70497 - DNA, 15 bp, Homo sapiens
ttcattggttgcaga

SEQ ID NO: 70498 - DNA, 15 bp, Homo sapiens
tcattggttgcagag

SEQ ID NO: 70499 - DNA, 15 bp, Homo sapiens
cattggttgcagagg

SEQ ID NO: 70500 - DNA, 15 bp, Homo sapiens
attggttgcagagga

SEQ ID NO: 70501 - DNA, 15 bp, Homo sapiens
ttggttgcagaggaa

SEQ ID NO: 70502 - DNA, 15 bp, Homo sapiens
tggttgcagaggaag

SEQ ID NO: 70503 - DNA, 15 bp, Homo sapiens
ggttgcagaggaagt

SEQ ID NO: 70504 - DNA, 15 bp, Homo sapiens
gttgcagaggaagta

SEQ ID NO: 70505 - DNA, 15 bp, Homo sapiens
ttgcagaggaagtat

SEQ ID NO: 70506 - DNA, 15 bp, Homo sapiens
tgcagaggaagtatt

SEQ ID NO: 70507 - DNA, 15 bp, Homo sapiens
gcagaggaagtatta

SEQ ID NO: 70508 - DNA, 15 bp, Homo sapiens
cagaggaagtattag

SEQ ID NO: 70509 - DNA, 15 bp, Homo sapiens
agaggaagtattagc

SEQ ID NO: 70510 - DNA, 15 bp, Homo sapiens
gaggaagtattagca

SEQ ID NO: 70511 - DNA, 15 bp, Homo sapiens
aggaagtattagcaa

SEQ ID NO: 70512 - DNA, 15 bp, Homo sapiens
ggaagtattagcaat

SEQ ID NO: 70513 - DNA, 15 bp, Homo sapiens
gaagtattagcaatt

SEQ ID NO: 70514 - DNA, 15 bp, Homo sapiens
aagtattagcaattt

SEQ ID NO: 70515 - DNA, 15 bp, Homo sapiens
agtattagcaattta

SEQ ID NO: 70516 - DNA, 15 bp, Homo sapiens
gtattagcaatttaa

SEQ ID NO: 70517 - DNA, 15 bp, Homo sapiens
tattagcaatttaat

SEQ ID NO: 70518 - DNA, 15 bp, Homo sapiens
attagcaatttaatt

SEQ ID NO: 70519 - DNA, 15 bp, Homo sapiens
ttagcaatttaattc

SEQ ID NO: 70520 - DNA, 15 bp, Homo sapiens
tagcaatttaattct

SEQ ID NO: 70521 - DNA, 15 bp, Homo sapiens
agcaatttaattctt

SEQ ID NO: 70522 - DNA, 15 bp, Homo sapiens
gcaatttaattcttt

SEQ ID NO: 70523 - DNA, 15 bp, Homo sapiens
caatttaattctttt

SEQ ID NO: 70524 - DNA, 15 bp, Homo sapiens
aatttaattctttta

SEQ ID NO: 70525 - DNA, 15 bp, Homo sapiens
atttaattcttttaa

SEQ ID NO: 70526 - DNA, 15 bp, Homo sapiens
tttaattcttttaaa

SEQ ID NO: 70527 - DNA, 15 bp, Homo sapiens
ttaattcttttaaaa

SEQ ID NO: 70528 - DNA, 15 bp, Homo sapiens
taattcttttaaaat

SEQ ID NO: 70529 - DNA, 15 bp, Homo sapiens
aattcttttaaaata

SEQ ID NO: 70530 - DNA, 15 bp, Homo sapiens
attcttttaaaataa

SEQ ID NO: 70531 - DNA, 15 bp, Homo sapiens
ttcttttaaaataat

SEQ ID NO: 70532 - DNA, 15 bp, Homo sapiens
tcttttaaaataatt

SEQ ID NO: 70533 - DNA, 15 bp, Homo sapiens
cttttaaaataattt

SEQ ID NO: 70534 - DNA, 15 bp, Homo sapiens
ttttaaaataatttg

SEQ ID NO: 70535 - DNA, 15 bp, Homo sapiens
tttaaaataatttgc

SEQ ID NO: 70536 - DNA, 15 bp, Homo sapiens
ttaaaataatttgca

SEQ ID NO: 70537 - DNA, 15 bp, Homo sapiens
taaaataatttgcac

SEQ ID NO: 70538 - DNA, 15 bp, Homo sapiens
aaaataatttgcact

SEQ ID NO: 70539 - DNA, 15 bp, Homo sapiens
aaataatttgcactg

SEQ ID NO: 70540 - DNA, 15 bp, Homo sapiens
aataatttgcactgg

SEQ ID NO: 70541 - DNA, 15 bp, Homo sapiens
ataatttgcactgga

SEQ ID NO: 70542 - DNA, 15 bp, Homo sapiens
taatttgcactggaa

SEQ ID NO: 70543 - DNA, 15 bp, Homo sapiens
aatttgcactggaat

SEQ ID NO: 70544 - DNA, 15 bp, Homo sapiens
atttgcactggaata

SEQ ID NO: 70545 - DNA, 15 bp, Homo sapiens
tttgcactggaataa

SEQ ID NO: 70546 - DNA, 15 bp, Homo sapiens
ttgcactggaataaa

SEQ ID NO: 70547 - DNA, 15 bp, Homo sapiens
tgcactggaataaat

SEQ ID NO: 70548 - DNA, 15 bp, Homo sapiens
gcactggaataaata

SEQ ID NO: 70549 - DNA, 15 bp, Homo sapiens
cactggaataaataa

SEQ ID NO: 70550 - DNA, 15 bp, Homo sapiens
actggaataaataag

SEQ ID NO: 70551 - DNA, 15 bp, Homo sapiens
ctggaataaataagt

SEQ ID NO: 70552 - DNA, 15 bp, Homo sapiens
tggaataaataagta

SEQ ID NO: 70553 - DNA, 15 bp, Homo sapiens
ggaataaataagtat

SEQ ID NO: 70554 - DNA, 15 bp, Homo sapiens
gaataaataagtatc

SEQ ID NO: 70555 - DNA, 15 bp, Homo sapiens
aataaataagtatcg

SEQ ID NO: 70556 - DNA, 15 bp, Homo sapiens
ataaataagtatcgg

SEQ ID NO: 70557 - DNA, 15 bp, Homo sapiens
taaataagtatcggc

SEQ ID NO: 70558 - DNA, 15 bp, Homo sapiens
aaataagtatcggca

SEQ ID NO: 70559 - DNA, 15 bp, Homo sapiens
aataagtatcggcaa

SEQ ID NO: 70560 - DNA, 15 bp, Homo sapiens
ataagtatcggcaaa

SEQ ID NO: 70561 - DNA, 15 bp, Homo sapiens
taagtatcggcaaat

SEQ ID NO: 70562 - DNA, 15 bp, Homo sapiens
aagtatcggcaaata

SEQ ID NO: 70563 - DNA, 15 bp, Homo sapiens
agtatcggcaaatat

SEQ ID NO: 70564 - DNA, 15 bp, Homo sapiens
gtatcggcaaatata

SEQ ID NO: 70565 - DNA, 15 bp, Homo sapiens
tatcggcaaatataa

SEQ ID NO: 70566 - DNA, 15 bp, Homo sapiens
atcggcaaatataag

SEQ ID NO: 70567 - DNA, 15 bp, Homo sapiens
tcggcaaatataaga

SEQ ID NO: 70568 - DNA, 15 bp, Homo sapiens
cggcaaatataagaa

SEQ ID NO: 70569 - DNA, 15 bp, Homo sapiens
ggcaaatataagaag

SEQ ID NO: 70570 - DNA, 15 bp, Homo sapiens
gcaaatataagaaga

SEQ ID NO: 70571 - DNA, 15 bp, Homo sapiens
caaatataagaagag

SEQ ID NO: 70572 - DNA, 15 bp, Homo sapiens
aaatataagaagagt

SEQ ID NO: 70573 - DNA, 15 bp, Homo sapiens
aatataagaagagta

SEQ ID NO: 70574 - DNA, 15 bp, Homo sapiens
atataagaagagtaa

SEQ ID NO: 70575 - DNA, 15 bp, Homo sapiens
tataagaagagtaac

SEQ ID NO: 70576 - DNA, 15 bp, Homo sapiens
ataagaagagtaaca

SEQ ID NO: 70577 - DNA, 15 bp, Homo sapiens
taagaagagtaacat

SEQ ID NO: 70578 - DNA, 15 bp, Homo sapiens
aagaagagtaacata

SEQ ID NO: 70579 - DNA, 15 bp, Homo sapiens
agaagagtaacataa

SEQ ID NO: 70580 - DNA, 15 bp, Homo sapiens
gaagagtaacataat

SEQ ID NO: 70581 - DNA, 15 bp, Homo sapiens
aagagtaacataatt

SEQ ID NO: 70582 - DNA, 15 bp, Homo sapiens
agagtaacataattt

SEQ ID NO: 70583 - DNA, 15 bp, Homo sapiens
gagtaacataattta

SEQ ID NO: 70584 - DNA, 15 bp, Homo sapiens
agtaacataatttaa

SEQ ID NO: 70585 - DNA, 15 bp, Homo sapiens
gtaacataatttaag

SEQ ID NO: 70586 - DNA, 15 bp, Homo sapiens
taacataatttaagg

SEQ ID NO: 70587 - DNA, 15 bp, Homo sapiens
aacataatttaaggg

SEQ ID NO: 70588 - DNA, 15 bp, Homo sapiens
acataatttaagggt

SEQ ID NO: 70589 - DNA, 15 bp, Homo sapiens
cataatttaagggtg

SEQ ID NO: 70590 - DNA, 15 bp, Homo sapiens
ataatttaagggtga

SEQ ID NO: 70591 - DNA, 15 bp, Homo sapiens
taatttaagggtgaa

SEQ ID NO: 70592 - DNA, 15 bp, Homo sapiens
aatttaagggtgaat

SEQ ID NO: 70593 - DNA, 15 bp, Homo sapiens
atttaagggtgaatt

SEQ ID NO: 70594 - DNA, 15 bp, Homo sapiens
tttaagggtgaatta

SEQ ID NO: 70595 - DNA, 15 bp, Homo sapiens
ttaagggtgaattaa

SEQ ID NO: 70596 - DNA, 15 bp, Homo sapiens
taagggtgaattaat

SEQ ID NO: 70597 - DNA, 15 bp, Homo sapiens
aagggtgaattaatt

SEQ ID NO: 70598 - DNA, 15 bp, Homo sapiens
agggtgaattaattt

SEQ ID NO: 70599 - DNA, 15 bp, Homo sapiens
gggtgaattaatttt

SEQ ID NO: 70600 - DNA, 15 bp, Homo sapiens
ggtgaattaatttta

SEQ ID NO: 70601 - DNA, 15 bp, Homo sapiens
gtgaattaattttat

SEQ ID NO: 70602 - DNA, 15 bp, Homo sapiens
tgaattaattttatt

SEQ ID NO: 70603 - DNA, 15 bp, Homo sapiens
gaattaattttattt

SEQ ID NO: 70604 - DNA, 15 bp, Homo sapiens
aattaattttatttg

SEQ ID NO: 70605 - DNA, 15 bp, Homo sapiens
attaattttatttgg

SEQ ID NO: 70606 - DNA, 15 bp, Homo sapiens
ttaattttatttggg

SEQ ID NO: 70607 - DNA, 15 bp, Homo sapiens
taattttatttggga

SEQ ID NO: 70608 - DNA, 15 bp, Homo sapiens
aattttatttgggaa

SEQ ID NO: 70609 - DNA, 15 bp, Homo sapiens
attttatttgggaag

SEQ ID NO: 70610 - DNA, 15 bp, Homo sapiens
ttttatttgggaagt

SEQ ID NO: 70611 - DNA, 15 bp, Homo sapiens
tttatttgggaagtt

SEQ ID NO: 70612 - DNA, 15 bp, Homo sapiens
ttatttgggaagttt

SEQ ID NO: 70613 - DNA, 15 bp, Homo sapiens
tatttgggaagtttt

SEQ ID NO: 70614 - DNA, 15 bp, Homo sapiens
atttgggaagtttta

SEQ ID NO: 70615 - DNA, 15 bp, Homo sapiens
tttgggaagttttag

SEQ ID NO: 70616 - DNA, 15 bp, Homo sapiens
ttgggaagttttagt

SEQ ID NO: 70617 - DNA, 15 bp, Homo sapiens
tgggaagttttagtt

SEQ ID NO: 70618 - DNA, 15 bp, Homo sapiens
gggaagttttagttc

SEQ ID NO: 70619 - DNA, 15 bp, Homo sapiens
ggaagttttagttct

SEQ ID NO: 70620 - DNA, 15 bp, Homo sapiens
gaagttttagttctg

SEQ ID NO: 70621 - DNA, 15 bp, Homo sapiens
aagttttagttctgt

SEQ ID NO: 70622 - DNA, 15 bp, Homo sapiens
agttttagttctgta

SEQ ID NO: 70623 - DNA, 15 bp, Homo sapiens
gttttagttctgtat

SEQ ID NO: 70624 - DNA, 15 bp, Homo sapiens
ttttagttctgtata

SEQ ID NO: 70625 - DNA, 15 bp, Homo sapiens
tttagttctgtatag

SEQ ID NO: 70626 - DNA, 15 bp, Homo sapiens
ttagttctgtatagt

SEQ ID NO: 70627 - DNA, 15 bp, Homo sapiens
tagttctgtatagtt

SEQ ID NO: 70628 - DNA, 15 bp, Homo sapiens
agttctgtatagtta

SEQ ID NO: 70629 - DNA, 15 bp, Homo sapiens
gttctgtatagttaa

SEQ ID NO: 70630 - DNA, 15 bp, Homo sapiens
ttctgtatagttaag

SEQ ID NO: 70631 - DNA, 15 bp, Homo sapiens
tctgtatagttaagg

SEQ ID NO: 70632 - DNA, 15 bp, Homo sapiens
ctgtatagttaaggc

SEQ ID NO: 70633 - DNA, 15 bp, Homo sapiens
tgtatagttaaggca

SEQ ID NO: 70634 - DNA, 15 bp, Homo sapiens
gtatagttaaggcag

SEQ ID NO: 70635 - DNA, 15 bp, Homo sapiens
tatagttaaggcaga

SEQ ID NO: 70636 - DNA, 15 bp, Homo sapiens
atagttaaggcagat

SEQ ID NO: 70637 - DNA, 15 bp, Homo sapiens
tagttaaggcagatt

SEQ ID NO: 70638 - DNA, 15 bp, Homo sapiens
agttaaggcagattc

SEQ ID NO: 70639 - DNA, 15 bp, Homo sapiens
gttaaggcagattct

SEQ ID NO: 70640 - DNA, 15 bp, Homo sapiens
ttaaggcagattctt

SEQ ID NO: 70641 - DNA, 15 bp, Homo sapiens
taaggcagattcttc

SEQ ID NO: 70642 - DNA, 15 bp, Homo sapiens
aaggcagattcttca

SEQ ID NO: 70643 - DNA, 15 bp, Homo sapiens
aggcagattcttcat

SEQ ID NO: 70644 - DNA, 15 bp, Homo sapiens
ggcagattcttcatt

SEQ ID NO: 70645 - DNA, 15 bp, Homo sapiens
gcagattcttcattt

SEQ ID NO: 70646 - DNA, 15 bp, Homo sapiens
cagattcttcatttg

SEQ ID NO: 70647 - DNA, 15 bp, Homo sapiens
agattcttcatttgc

SEQ ID NO: 70648 - DNA, 15 bp, Homo sapiens
gattcttcatttgca

SEQ ID NO: 70649 - DNA, 15 bp, Homo sapiens
attcttcatttgcaa

SEQ ID NO: 70650 - DNA, 15 bp, Homo sapiens
ttcttcatttgcaac

SEQ ID NO: 70651 - DNA, 15 bp, Homo sapiens
tcttcatttgcaaca

SEQ ID NO: 70652 - DNA, 15 bp, Homo sapiens
cttcatttgcaacag

SEQ ID NO: 70653 - DNA, 15 bp, Homo sapiens
ttcatttgcaacagt

SEQ ID NO: 70654 - DNA, 15 bp, Homo sapiens
tcatttgcaacagtt

SEQ ID NO: 70655 - DNA, 15 bp, Homo sapiens
catttgcaacagttg

SEQ ID NO: 70656 - DNA, 15 bp, Homo sapiens
atttgcaacagttga

SEQ ID NO: 70657 - DNA, 15 bp, Homo sapiens
tttgcaacagttgac

SEQ ID NO: 70658 - DNA, 15 bp, Homo sapiens
ttgcaacagttgaca

SEQ ID NO: 70659 - DNA, 15 bp, Homo sapiens
tgcaacagttgacat

SEQ ID NO: 70660 - DNA, 15 bp, Homo sapiens
gcaacagttgacatt

SEQ ID NO: 70661 - DNA, 15 bp, Homo sapiens
caacagttgacattg

SEQ ID NO: 70662 - DNA, 15 bp, Homo sapiens
aacagttgacattgg

SEQ ID NO: 70663 - DNA, 15 bp, Homo sapiens
acagttgacattggg

SEQ ID NO: 70664 - DNA, 15 bp, Homo sapiens
cagttgacattggga

SEQ ID NO: 70665 - DNA, 15 bp, Homo sapiens
agttgacattgggac

SEQ ID NO: 70666 - DNA, 15 bp, Homo sapiens
gttgacattgggaca

SEQ ID NO: 70667 - DNA, 15 bp, Homo sapiens
ttgacattgggacat

SEQ ID NO: 70668 - DNA, 15 bp, Homo sapiens
tgacattgggacatg

SEQ ID NO: 70669 - DNA, 15 bp, Homo sapiens
gacattgggacatgt

SEQ ID NO: 70670 - DNA, 15 bp, Homo sapiens
acattgggacatgtg

SEQ ID NO: 70671 - DNA, 15 bp, Homo sapiens
cattgggacatgtgt

SEQ ID NO: 70672 - DNA, 15 bp, Homo sapiens
attgggacatgtgtg

SEQ ID NO: 70673 - DNA, 15 bp, Homo sapiens
ttgggacatgtgtga

SEQ ID NO: 70674 - DNA, 15 bp, Homo sapiens
tgggacatgtgtgaa

SEQ ID NO: 70675 - DNA, 15 bp, Homo sapiens
gggacatgtgtgaac

SEQ ID NO: 70676 - DNA, 15 bp, Homo sapiens
ggacatgtgtgaaca

SEQ ID NO: 70677 - DNA, 15 bp, Homo sapiens
gacatgtgtgaacat

SEQ ID NO: 70678 - DNA, 15 bp, Homo sapiens
acatgtgtgaacatc

SEQ ID NO: 70679 - DNA, 15 bp, Homo sapiens
catgtgtgaacatct

SEQ ID NO: 70680 - DNA, 15 bp, Homo sapiens
atgtgtgaacatctt

SEQ ID NO: 70681 - DNA, 15 bp, Homo sapiens
tgtgtgaacatcttc

SEQ ID NO: 70682 - DNA, 15 bp, Homo sapiens
gtgtgaacatcttca

SEQ ID NO: 70683 - DNA, 15 bp, Homo sapiens
tgtgaacatcttcaa

SEQ ID NO: 70684 - DNA, 15 bp, Homo sapiens
gtgaacatcttcaag

SEQ ID NO: 70685 - DNA, 15 bp, Homo sapiens
tgaacatcttcaagg

SEQ ID NO: 70686 - DNA, 15 bp, Homo sapiens
gaacatcttcaaggt

SEQ ID NO: 70687 - DNA, 15 bp, Homo sapiens
aacatcttcaaggta

SEQ ID NO: 70688 - DNA, 15 bp, Homo sapiens
acatcttcaaggtat

SEQ ID NO: 70689 - DNA, 15 bp, Homo sapiens
catcttcaaggtatt

SEQ ID NO: 70690 - DNA, 15 bp, Homo sapiens
atcttcaaggtatta

SEQ ID NO: 70691 - DNA, 15 bp, Homo sapiens
tcttcaaggtattag

SEQ ID NO: 70692 - DNA, 15 bp, Homo sapiens
cttcaaggtattagg

SEQ ID NO: 70693 - DNA, 15 bp, Homo sapiens
ttcaaggtattagga

SEQ ID NO: 70694 - DNA, 15 bp, Homo sapiens
tcaaggtattaggac

SEQ ID NO: 70695 - DNA, 15 bp, Homo sapiens
caaggtattaggaca

SEQ ID NO: 70696 - DNA, 15 bp, Homo sapiens
aaggtattaggacat

SEQ ID NO: 70697 - DNA, 15 bp, Homo sapiens
aggtattaggacatc

SEQ ID NO: 70698 - DNA, 15 bp, Homo sapiens
ggtattaggacatct

SEQ ID NO: 70699 - DNA, 15 bp, Homo sapiens
gtattaggacatctt

SEQ ID NO: 70700 - DNA, 15 bp, Homo sapiens
tattaggacatcttc

SEQ ID NO: 70701 - DNA, 15 bp, Homo sapiens
attaggacatcttca

SEQ ID NO: 70702 - DNA, 15 bp, Homo sapiens
ttaggacatcttcaa

SEQ ID NO: 70703 - DNA, 15 bp, Homo sapiens
taggacatcttcaag

SEQ ID NO: 70704 - DNA, 15 bp, Homo sapiens
aggacatcttcaagg

SEQ ID NO: 70705 - DNA, 15 bp, Homo sapiens
ggacatcttcaaggc

SEQ ID NO: 70706 - DNA, 15 bp, Homo sapiens
gacatcttcaaggca

SEQ ID NO: 70707 - DNA, 15 bp, Homo sapiens
acatcttcaaggcat

SEQ ID NO: 70708 - DNA, 15 bp, Homo sapiens
catcttcaaggcatt

SEQ ID NO: 70709 - DNA, 15 bp, Homo sapiens
atcttcaaggcatta

SEQ ID NO: 70710 - DNA, 15 bp, Homo sapiens
tcttcaaggcattac

SEQ ID NO: 70711 - DNA, 15 bp, Homo sapiens
cttcaaggcattact

SEQ ID NO: 70712 - DNA, 15 bp, Homo sapiens
ttcaaggcattactt

SEQ ID NO: 70713 - DNA, 15 bp, Homo sapiens
tcaaggcattacttt

SEQ ID NO: 70714 - DNA, 15 bp, Homo sapiens
caaggcattactttt

SEQ ID NO: 70715 - DNA, 15 bp, Homo sapiens
aaggcattacttttt

SEQ ID NO: 70716 - DNA, 15 bp, Homo sapiens
aggcattactttttg

SEQ ID NO: 70717 - DNA, 15 bp, Homo sapiens
ggcattactttttgg

SEQ ID NO: 70718 - DNA, 15 bp, Homo sapiens
gcattactttttggc

SEQ ID NO: 70719 - DNA, 15 bp, Homo sapiens
cattactttttggca

SEQ ID NO: 70720 - DNA, 15 bp, Homo sapiens
attactttttggcag

SEQ ID NO: 70721 - DNA, 15 bp, Homo sapiens
ttactttttggcagt

SEQ ID NO: 70722 - DNA, 15 bp, Homo sapiens
tactttttggcagtg

SEQ ID NO: 70723 - DNA, 15 bp, Homo sapiens
actttttggcagtgt

SEQ ID NO: 70724 - DNA, 15 bp, Homo sapiens
ctttttggcagtgtt

SEQ ID NO: 70725 - DNA, 15 bp, Homo sapiens
tttttggcagtgttg

SEQ ID NO: 70726 - DNA, 15 bp, Homo sapiens
ttttggcagtgttga

SEQ ID NO: 70727 - DNA, 15 bp, Homo sapiens
tttggcagtgttgag

SEQ ID NO: 70728 - DNA, 15 bp, Homo sapiens
ttggcagtgttgaga

SEQ ID NO: 70729 - DNA, 15 bp, Homo sapiens
tggcagtgttgagaa

SEQ ID NO: 70730 - DNA, 15 bp, Homo sapiens
ggcagtgttgagaat

SEQ ID NO: 70731 - DNA, 15 bp, Homo sapiens
gcagtgttgagaatt

SEQ ID NO: 70732 - DNA, 15 bp, Homo sapiens
cagtgttgagaattt

SEQ ID NO: 70733 - DNA, 15 bp, Homo sapiens
agtgttgagaatttt

SEQ ID NO: 70734 - DNA, 15 bp, Homo sapiens
gtgttgagaattttt

SEQ ID NO: 70735 - DNA, 15 bp, Homo sapiens
tgttgagaatttttt

SEQ ID NO: 70736 - DNA, 15 bp, Homo sapiens
gttgagaattttttt

SEQ ID NO: 70737 - DNA, 15 bp, Homo sapiens
ttgagaatttttttt

SEQ ID NO: 70738 - DNA, 15 bp, Homo sapiens
tgagaattttttttt

SEQ ID NO: 70739 - DNA, 15 bp, Homo sapiens
gagaatttttttttt

SEQ ID NO: 70740 - DNA, 15 bp, Homo sapiens
agaattttttttttt

SEQ ID NO: 70741 - DNA, 15 bp, Homo sapiens
gaatttttttttttt

SEQ ID NO: 70742 - DNA, 15 bp, Homo sapiens
aattttttttttttt

SEQ ID NO: 70743 - DNA, 15 bp, Homo sapiens
ttttttttttttgag

SEQ ID NO: 70744 - DNA, 15 bp, Homo sapiens
tttttttttttgaga

SEQ ID NO: 70745 - DNA, 15 bp, Homo sapiens
ttttttgagatggaa

SEQ ID NO: 70746 - DNA, 15 bp, Homo sapiens
tttttgagatggaat

SEQ ID NO: 70747 - DNA, 15 bp, Homo sapiens
ttttgagatggaatc

SEQ ID NO: 70748 - DNA, 15 bp, Homo sapiens
tttgagatggaatct

SEQ ID NO: 70749 - DNA, 15 bp, Homo sapiens
ttgagatggaatctc

SEQ ID NO: 70750 - DNA, 15 bp, Homo sapiens
tgagatggaatctcg

SEQ ID NO: 70751 - DNA, 15 bp, Homo sapiens
gagatggaatctcgc

SEQ ID NO: 70752 - DNA, 15 bp, Homo sapiens
agatggaatctcgct

SEQ ID NO: 70753 - DNA, 15 bp, Homo sapiens
gatggaatctcgctc

SEQ ID NO: 70754 - DNA, 15 bp, Homo sapiens
atggaatctcgctct

SEQ ID NO: 70755 - DNA, 15 bp, Homo sapiens
tggaatctcgctcta

SEQ ID NO: 70756 - DNA, 15 bp, Homo sapiens
ggaatctcgctctat

SEQ ID NO: 70757 - DNA, 15 bp, Homo sapiens
gaatctcgctctatc

SEQ ID NO: 70758 - DNA, 15 bp, Homo sapiens
aatctcgctctatcg

SEQ ID NO: 70759 - DNA, 15 bp, Homo sapiens
atctcgctctatcgc

SEQ ID NO: 70760 - DNA, 15 bp, Homo sapiens
tctcgctctatcgcc

SEQ ID NO: 70761 - DNA, 15 bp, Homo sapiens
ctcgctctatcgccc

SEQ ID NO: 70762 - DNA, 15 bp, Homo sapiens
tcgctctatcgccca

SEQ ID NO: 70763 - DNA, 15 bp, Homo sapiens
cgctctatcgcccag

SEQ ID NO: 70764 - DNA, 15 bp, Homo sapiens
gctctatcgcccagt

SEQ ID NO: 70765 - DNA, 15 bp, Homo sapiens
ctctatcgcccagtc

SEQ ID NO: 70766 - DNA, 15 bp, Homo sapiens
tctatcgcccagtct

SEQ ID NO: 70767 - DNA, 15 bp, Homo sapiens
ctatcgcccagtctg

SEQ ID NO: 70768 - DNA, 15 bp, Homo sapiens
tatcgcccagtctgg

SEQ ID NO: 70769 - DNA, 15 bp, Homo sapiens
atcgcccagtctggg

SEQ ID NO: 70770 - DNA, 15 bp, Homo sapiens
tcgcccagtctgggg

SEQ ID NO: 70771 - DNA, 15 bp, Homo sapiens
cgcccagtctggggt

SEQ ID NO: 70772 - DNA, 15 bp, Homo sapiens
gcccagtctggggtg

SEQ ID NO: 70773 - DNA, 15 bp, Homo sapiens
cccagtctggggtgc

SEQ ID NO: 70774 - DNA, 15 bp, Homo sapiens
ccagtctggggtgca

SEQ ID NO: 70775 - DNA, 15 bp, Homo sapiens
cagtctggggtgcag

SEQ ID NO: 70776 - DNA, 15 bp, Homo sapiens
agtctggggtgcagt

SEQ ID NO: 70777 - DNA, 15 bp, Homo sapiens
gtctggggtgcagtg

SEQ ID NO: 70778 - DNA, 15 bp, Homo sapiens
tctggggtgcagtgg

SEQ ID NO: 70779 - DNA, 15 bp, Homo sapiens
ctggggtgcagtggc

SEQ ID NO: 70780 - DNA, 15 bp, Homo sapiens
tggggtgcagtggca

SEQ ID NO: 70781 - DNA, 15 bp, Homo sapiens
ggggtgcagtggcag

SEQ ID NO: 70782 - DNA, 15 bp, Homo sapiens
gggtgcagtggcagg

SEQ ID NO: 70783 - DNA, 15 bp, Homo sapiens
ggtgcagtggcagga

SEQ ID NO: 70784 - DNA, 15 bp, Homo sapiens
gtgcagtggcaggat

SEQ ID NO: 70785 - DNA, 15 bp, Homo sapiens
tgcagtggcaggatc

SEQ ID NO: 70786 - DNA, 15 bp, Homo sapiens
gcagtggcaggatct

SEQ ID NO: 70787 - DNA, 15 bp, Homo sapiens
cagtggcaggatctc

SEQ ID NO: 70788 - DNA, 15 bp, Homo sapiens
agtggcaggatctcg

SEQ ID NO: 70789 - DNA, 15 bp, Homo sapiens
gtggcaggatctcgg

SEQ ID NO: 70790 - DNA, 15 bp, Homo sapiens
tggcaggatctcggc

SEQ ID NO: 70791 - DNA, 15 bp, Homo sapiens
ggcaggatctcggct

SEQ ID NO: 70792 - DNA, 15 bp, Homo sapiens
gcaggatctcggctc

SEQ ID NO: 70793 - DNA, 15 bp, Homo sapiens
caggatctcggctca

SEQ ID NO: 70794 - DNA, 15 bp, Homo sapiens
aggatctcggctcac

SEQ ID NO: 70795 - DNA, 15 bp, Homo sapiens
ggatctcggctcact

SEQ ID NO: 70796 - DNA, 15 bp, Homo sapiens
gatctcggctcactg

SEQ ID NO: 70797 - DNA, 15 bp, Homo sapiens
atctcggctcactgg

SEQ ID NO: 70798 - DNA, 15 bp, Homo sapiens
tctcggctcactgga

SEQ ID NO: 70799 - DNA, 15 bp, Homo sapiens
ctcggctcactggaa

SEQ ID NO: 70800 - DNA, 15 bp, Homo sapiens
tcggctcactggaac

SEQ ID NO: 70801 - DNA, 15 bp, Homo sapiens
cggctcactggaacc

SEQ ID NO: 70802 - DNA, 15 bp, Homo sapiens
ggctcactggaacct

SEQ ID NO: 70803 - DNA, 15 bp, Homo sapiens
gctcactggaacctc

SEQ ID NO: 70804 - DNA, 15 bp, Homo sapiens
ctcactggaacctct

SEQ ID NO: 70805 - DNA, 15 bp, Homo sapiens
tcactggaacctctg

SEQ ID NO: 70806 - DNA, 15 bp, Homo sapiens
cactggaacctctgc

SEQ ID NO: 70807 - DNA, 15 bp, Homo sapiens
actggaacctctgcc

SEQ ID NO: 70808 - DNA, 15 bp, Homo sapiens
ctggaacctctgcct

SEQ ID NO: 70809 - DNA, 15 bp, Homo sapiens
tggaacctctgcctc

SEQ ID NO: 70810 - DNA, 15 bp, Homo sapiens
ggaacctctgcctcc

SEQ ID NO: 70811 - DNA, 15 bp, Homo sapiens
gaacctctgcctccc

SEQ ID NO: 70812 - DNA, 15 bp, Homo sapiens
aacctctgcctccca

SEQ ID NO: 70813 - DNA, 15 bp, Homo sapiens
acctctgcctcccag

SEQ ID NO: 70814 - DNA, 15 bp, Homo sapiens
cctctgcctcccagg

SEQ ID NO: 70815 - DNA, 15 bp, Homo sapiens
ctctgcctcccaggt

SEQ ID NO: 70816 - DNA, 15 bp, Homo sapiens
tctgcctcccaggtt

SEQ ID NO: 70817 - DNA, 15 bp, Homo sapiens
ctgcctcccaggttc

SEQ ID NO: 70818 - DNA, 15 bp, Homo sapiens
tgcctcccaggttca

SEQ ID NO: 70819 - DNA, 15 bp, Homo sapiens
gcctcccaggttcag

SEQ ID NO: 70820 - DNA, 15 bp, Homo sapiens
cctcccaggttcagg

SEQ ID NO: 70821 - DNA, 15 bp, Homo sapiens
ctcccaggttcaggc

SEQ ID NO: 70822 - DNA, 15 bp, Homo sapiens
tcccaggttcaggcg

SEQ ID NO: 70823 - DNA, 15 bp, Homo sapiens
cccaggttcaggcga

SEQ ID NO: 70824 - DNA, 15 bp, Homo sapiens
ccaggttcaggcgat

SEQ ID NO: 70825 - DNA, 15 bp, Homo sapiens
caggttcaggcgatt

SEQ ID NO: 70826 - DNA, 15 bp, Homo sapiens
aggttcaggcgattc

SEQ ID NO: 70827 - DNA, 15 bp, Homo sapiens
ggttcaggcgattct

SEQ ID NO: 70828 - DNA, 15 bp, Homo sapiens
gttcaggcgattctc

SEQ ID NO: 70829 - DNA, 15 bp, Homo sapiens
ttcaggcgattctcc

SEQ ID NO: 70830 - DNA, 15 bp, Homo sapiens
tcaggcgattctcct

SEQ ID NO: 70831 - DNA, 15 bp, Homo sapiens
caggcgattctcctg

SEQ ID NO: 70832 - DNA, 15 bp, Homo sapiens
aggcgattctcctgc

SEQ ID NO: 70833 - DNA, 15 bp, Homo sapiens
ggcgattctcctgcc

SEQ ID NO: 70834 - DNA, 15 bp, Homo sapiens
cgattctcctgcctg

SEQ ID NO: 70835 - DNA, 15 bp, Homo sapiens
gattctcctgcctga

SEQ ID NO: 70836 - DNA, 15 bp, Homo sapiens
attctcctgcctgaa

SEQ ID NO: 70837 - DNA, 15 bp, Homo sapiens
ttctcctgcctgaac

SEQ ID NO: 70838 - DNA, 15 bp, Homo sapiens
tctcctgcctgaacc

SEQ ID NO: 70839 - DNA, 15 bp, Homo sapiens
ctcctgcctgaacct

SEQ ID NO: 70840 - DNA, 15 bp, Homo sapiens
tcctgcctgaacctc

SEQ ID NO: 70841 - DNA, 15 bp, Homo sapiens
cctgcctgaacctcc

SEQ ID NO: 70842 - DNA, 15 bp, Homo sapiens
ctgcctgaacctccc

SEQ ID NO: 70843 - DNA, 15 bp, Homo sapiens
tgcctgaacctccca

SEQ ID NO: 70844 - DNA, 15 bp, Homo sapiens
gcctgaacctcccaa

SEQ ID NO: 70845 - DNA, 15 bp, Homo sapiens
cctgaacctcccaag

SEQ ID NO: 70846 - DNA, 15 bp, Homo sapiens
ctgaacctcccaagc

SEQ ID NO: 70847 - DNA, 15 bp, Homo sapiens
tgaacctcccaagca

SEQ ID NO: 70848 - DNA, 15 bp, Homo sapiens
gaacctcccaagcag

SEQ ID NO: 70849 - DNA, 15 bp, Homo sapiens
aacctcccaagcagc

SEQ ID NO: 70850 - DNA, 15 bp, Homo sapiens
acctcccaagcagct

SEQ ID NO: 70851 - DNA, 15 bp, Homo sapiens
tcccaagcagctggg

SEQ ID NO: 70852 - DNA, 15 bp, Homo sapiens
cccaagcagctggga

SEQ ID NO: 70853 - DNA, 15 bp, Homo sapiens
ccaagcagctgggat

SEQ ID NO: 70854 - DNA, 15 bp, Homo sapiens
caagcagctgggatt

SEQ ID NO: 70855 - DNA, 15 bp, Homo sapiens
aagcagctgggatta

SEQ ID NO: 70856 - DNA, 15 bp, Homo sapiens
agcagctgggattat

SEQ ID NO: 70857 - DNA, 15 bp, Homo sapiens
gcagctgggattata

SEQ ID NO: 70858 - DNA, 15 bp, Homo sapiens
cagctgggattatag

SEQ ID NO: 70859 - DNA, 15 bp, Homo sapiens
agctgggattatagg

SEQ ID NO: 70860 - DNA, 15 bp, Homo sapiens
ctgggattataggtg

SEQ ID NO: 70861 - DNA, 15 bp, Homo sapiens
tgggattataggtgc

SEQ ID NO: 70862 - DNA, 15 bp, Homo sapiens
gggattataggtgca

SEQ ID NO: 70863 - DNA, 15 bp, Homo sapiens
ggattataggtgcat

SEQ ID NO: 70864 - DNA, 15 bp, Homo sapiens
gattataggtgcatg

SEQ ID NO: 70865 - DNA, 15 bp, Homo sapiens
attataggtgcatgc

SEQ ID NO: 70866 - DNA, 15 bp, Homo sapiens
ttataggtgcatgcc

SEQ ID NO: 70867 - DNA, 15 bp, Homo sapiens
tataggtgcatgcca

SEQ ID NO: 70868 - DNA, 15 bp, Homo sapiens
ataggtgcatgccac

SEQ ID NO: 70869 - DNA, 15 bp, Homo sapiens
taggtgcatgccacc

SEQ ID NO: 70870 - DNA, 15 bp, Homo sapiens
gtgcatgccaccacg

SEQ ID NO: 70871 - DNA, 15 bp, Homo sapiens
tgcatgccaccacgc

SEQ ID NO: 70872 - DNA, 15 bp, Homo sapiens
gcatgccaccacgcc

SEQ ID NO: 70873 - DNA, 15 bp, Homo sapiens
catgccaccacgccc

SEQ ID NO: 70874 - DNA, 15 bp, Homo sapiens
atgccaccacgccca

SEQ ID NO: 70875 - DNA, 15 bp, Homo sapiens
tgccaccacgcccag

SEQ ID NO: 70876 - DNA, 15 bp, Homo sapiens
gccaccacgcccaga

SEQ ID NO: 70877 - DNA, 15 bp, Homo sapiens
ccaccacgcccagat

SEQ ID NO: 70878 - DNA, 15 bp, Homo sapiens
caccacgcccagata

SEQ ID NO: 70879 - DNA, 15 bp, Homo sapiens
accacgcccagatag

SEQ ID NO: 70880 - DNA, 15 bp, Homo sapiens
ccacgcccagatagt

SEQ ID NO: 70881 - DNA, 15 bp, Homo sapiens
cacgcccagatagtt

SEQ ID NO: 70882 - DNA, 15 bp, Homo sapiens
acgcccagatagttt

SEQ ID NO: 70883 - DNA, 15 bp, Homo sapiens
cgcccagatagtttt

SEQ ID NO: 70884 - DNA, 15 bp, Homo sapiens
gcccagatagttttt

SEQ ID NO: 70885 - DNA, 15 bp, Homo sapiens
cccagatagtttttg

SEQ ID NO: 70886 - DNA, 15 bp, Homo sapiens
ccagatagtttttgt

SEQ ID NO: 70887 - DNA, 15 bp, Homo sapiens
cagatagtttttgta

SEQ ID NO: 70888 - DNA, 15 bp, Homo sapiens
agatagtttttgtac

SEQ ID NO: 70889 - DNA, 15 bp, Homo sapiens
gatagtttttgtact

SEQ ID NO: 70890 - DNA, 15 bp, Homo sapiens
atagtttttgtactt

SEQ ID NO: 70891 - DNA, 15 bp, Homo sapiens
tagtttttgtacttt

SEQ ID NO: 70892 - DNA, 15 bp, Homo sapiens
agtttttgtactttt

SEQ ID NO: 70893 - DNA, 15 bp, Homo sapiens
gtttttgtactttta

SEQ ID NO: 70894 - DNA, 15 bp, Homo sapiens
tttttgtacttttag

SEQ ID NO: 70895 - DNA, 15 bp, Homo sapiens
ttttgtacttttagt

SEQ ID NO: 70896 - DNA, 15 bp, Homo sapiens
tttgtacttttagta

SEQ ID NO: 70897 - DNA, 15 bp, Homo sapiens
ttgtacttttagtag

SEQ ID NO: 70898 - DNA, 15 bp, Homo sapiens
tgtacttttagtaga

SEQ ID NO: 70899 - DNA, 15 bp, Homo sapiens
gtacttttagtagag

SEQ ID NO: 70900 - DNA, 15 bp, Homo sapiens
tacttttagtagaga

SEQ ID NO: 70901 - DNA, 15 bp, Homo sapiens
acttttagtagagat

SEQ ID NO: 70902 - DNA, 15 bp, Homo sapiens
cttttagtagagatg

SEQ ID NO: 70903 - DNA, 15 bp, Homo sapiens
ttttagtagagatgg

SEQ ID NO: 70904 - DNA, 15 bp, Homo sapiens
tttagtagagatggg

SEQ ID NO: 70905 - DNA, 15 bp, Homo sapiens
ttagtagagatgggg

SEQ ID NO: 70906 - DNA, 15 bp, Homo sapiens
tagtagagatggggt

SEQ ID NO: 70907 - DNA, 15 bp, Homo sapiens
agtagagatggggtt

SEQ ID NO: 70908 - DNA, 15 bp, Homo sapiens
gtagagatggggttt

SEQ ID NO: 70909 - DNA, 15 bp, Homo sapiens
tagagatggggtttt

SEQ ID NO: 70910 - DNA, 15 bp, Homo sapiens
agagatggggtttta

SEQ ID NO: 70911 - DNA, 15 bp, Homo sapiens
gagatggggttttac

SEQ ID NO: 70912 - DNA, 15 bp, Homo sapiens
agatggggttttacc

SEQ ID NO: 70913 - DNA, 15 bp, Homo sapiens
gatggggttttacca

SEQ ID NO: 70914 - DNA, 15 bp, Homo sapiens
atggggttttaccac

SEQ ID NO: 70915 - DNA, 15 bp, Homo sapiens
tggggttttaccacc

SEQ ID NO: 70916 - DNA, 15 bp, Homo sapiens
ggggttttaccacct

SEQ ID NO: 70917 - DNA, 15 bp, Homo sapiens
gggttttaccacctt

SEQ ID NO: 70918 - DNA, 15 bp, Homo sapiens
ggttttaccaccttg

SEQ ID NO: 70919 - DNA, 15 bp, Homo sapiens
gttttaccaccttgg

SEQ ID NO: 70920 - DNA, 15 bp, Homo sapiens
ttttaccaccttggc

SEQ ID NO: 70921 - DNA, 15 bp, Homo sapiens
tttaccaccttggcc

SEQ ID NO: 70922 - DNA, 15 bp, Homo sapiens
ttaccaccttggcca

SEQ ID NO: 70923 - DNA, 15 bp, Homo sapiens
taccaccttggccag

SEQ ID NO: 70924 - DNA, 15 bp, Homo sapiens
accaccttggccagg

SEQ ID NO: 70925 - DNA, 15 bp, Homo sapiens
ccaccttggccaggc

SEQ ID NO: 70926 - DNA, 15 bp, Homo sapiens
caccttggccaggct

SEQ ID NO: 70927 - DNA, 15 bp, Homo sapiens
accttggccaggctg

SEQ ID NO: 70928 - DNA, 15 bp, Homo sapiens
ccttggccaggctgg

SEQ ID NO: 70929 - DNA, 15 bp, Homo sapiens
cttggccaggctggt

SEQ ID NO: 70930 - DNA, 15 bp, Homo sapiens
ttggccaggctggtc

SEQ ID NO: 70931 - DNA, 15 bp, Homo sapiens
tggccaggctggtct

SEQ ID NO: 70932 - DNA, 15 bp, Homo sapiens
gccaggctggtctca

SEQ ID NO: 70933 - DNA, 15 bp, Homo sapiens
caggctggtctcaaa

SEQ ID NO: 70934 - DNA, 15 bp, Homo sapiens
gctggtctcaaactc

SEQ ID NO: 70935 - DNA, 15 bp, Homo sapiens
ctggtctcaaactcc

SEQ ID NO: 70936 - DNA, 15 bp, Homo sapiens
tggtctcaaactcca

SEQ ID NO: 70937 - DNA, 15 bp, Homo sapiens
ggtctcaaactccag

SEQ ID NO: 70938 - DNA, 15 bp, Homo sapiens
gtctcaaactccaga

SEQ ID NO: 70939 - DNA, 15 bp, Homo sapiens
tctcaaactccagac

SEQ ID NO: 70940 - DNA, 15 bp, Homo sapiens
ctcaaactccagacc

SEQ ID NO: 70941 - DNA, 15 bp, Homo sapiens
tcaaactccagacct

SEQ ID NO: 70942 - DNA, 15 bp, Homo sapiens
caaactccagacctc

SEQ ID NO: 70943 - DNA, 15 bp, Homo sapiens
aaactccagacctca

SEQ ID NO: 70944 - DNA, 15 bp, Homo sapiens
aactccagacctcaa

SEQ ID NO: 70945 - DNA, 15 bp, Homo sapiens
actccagacctcaag

SEQ ID NO: 70946 - DNA, 15 bp, Homo sapiens
ctccagacctcaagt

SEQ ID NO: 70947 - DNA, 15 bp, Homo sapiens
tccagacctcaagtg

SEQ ID NO: 70948 - DNA, 15 bp, Homo sapiens
ccagacctcaagtga

SEQ ID NO: 70949 - DNA, 15 bp, Homo sapiens
cagacctcaagtgat

SEQ ID NO: 70950 - DNA, 15 bp, Homo sapiens
agacctcaagtgatc

SEQ ID NO: 70951 - DNA, 15 bp, Homo sapiens
tgatccgcctgcctc

SEQ ID NO: 70952 - DNA, 15 bp, Homo sapiens
gatccgcctgcctcg

SEQ ID NO: 70953 - DNA, 15 bp, Homo sapiens
atccgcctgcctcgg

SEQ ID NO: 70954 - DNA, 15 bp, Homo sapiens
tccgcctgcctcggc

SEQ ID NO: 70955 - DNA, 15 bp, Homo sapiens
ccgcctgcctcggcc

SEQ ID NO: 70956 - DNA, 15 bp, Homo sapiens
cgcctgcctcggcct

SEQ ID NO: 70957 - DNA, 15 bp, Homo sapiens
gcctgcctcggcctc

SEQ ID NO: 70958 - DNA, 15 bp, Homo sapiens
cctgcctcggcctcc

SEQ ID NO: 70959 - DNA, 15 bp, Homo sapiens
ctgcctcggcctccc

SEQ ID NO: 70960 - DNA, 15 bp, Homo sapiens
tgcctcggcctccca

SEQ ID NO: 70961 - DNA, 15 bp, Homo sapiens
gcctcggcctcccaa

SEQ ID NO: 70962 - DNA, 15 bp, Homo sapiens
cctcggcctcccaaa

SEQ ID NO: 70963 - DNA, 15 bp, Homo sapiens
ctcggcctcccaaaa

SEQ ID NO: 70964 - DNA, 15 bp, Homo sapiens
tcggcctcccaaaat

SEQ ID NO: 70965 - DNA, 15 bp, Homo sapiens
cggcctcccaaaatg

SEQ ID NO: 70966 - DNA, 15 bp, Homo sapiens
ggcctcccaaaatgc

SEQ ID NO: 70967 - DNA, 15 bp, Homo sapiens
aaatgctgggattac

SEQ ID NO: 70968 - DNA, 15 bp, Homo sapiens
aatgctgggattaca

SEQ ID NO: 70969 - DNA, 15 bp, Homo sapiens
atgctgggattacag

SEQ ID NO: 70970 - DNA, 15 bp, Homo sapiens
tgctgggattacagg

SEQ ID NO: 70971 - DNA, 15 bp, Homo sapiens
gctgggattacaggc

SEQ ID NO: 70972 - DNA, 15 bp, Homo sapiens
ctgggattacaggcg

SEQ ID NO: 70973 - DNA, 15 bp, Homo sapiens
tgggattacaggcgt

SEQ ID NO: 70974 - DNA, 15 bp, Homo sapiens
gggattacaggcgtg

SEQ ID NO: 70975 - DNA, 15 bp, Homo sapiens
ggattacaggcgtga

SEQ ID NO: 70976 - DNA, 15 bp, Homo sapiens
gattacaggcgtgag

SEQ ID NO: 70977 - DNA, 15 bp, Homo sapiens
attacaggcgtgagc

SEQ ID NO: 70978 - DNA, 15 bp, Homo sapiens
ttacaggcgtgagcc

SEQ ID NO: 70979 - DNA, 15 bp, Homo sapiens
tacaggcgtgagcca

SEQ ID NO: 70980 - DNA, 15 bp, Homo sapiens
acaggcgtgagccac

SEQ ID NO: 70981 - DNA, 15 bp, Homo sapiens
caggcgtgagccact

SEQ ID NO: 70982 - DNA, 15 bp, Homo sapiens
aggcgtgagccactg

SEQ ID NO: 70983 - DNA, 15 bp, Homo sapiens
ggcgtgagccactgc

SEQ ID NO: 70984 - DNA, 15 bp, Homo sapiens
gcgtgagccactgcg

SEQ ID NO: 70985 - DNA, 15 bp, Homo sapiens
cgtgagccactgcgc

SEQ ID NO: 70986 - DNA, 15 bp, Homo sapiens
gtgagccactgcgcc

SEQ ID NO: 70987 - DNA, 15 bp, Homo sapiens
tgagccactgcgcct

SEQ ID NO: 70988 - DNA, 15 bp, Homo sapiens
gagccactgcgcctg

SEQ ID NO: 70989 - DNA, 15 bp, Homo sapiens
agccactgcgcctgg

SEQ ID NO: 70990 - DNA, 15 bp, Homo sapiens
gccactgcgcctggc

SEQ ID NO: 70991 - DNA, 15 bp, Homo sapiens
ccactgcgcctggcc

SEQ ID NO: 70992 - DNA, 15 bp, Homo sapiens
cactgcgcctggcca

SEQ ID NO: 70993 - DNA, 15 bp, Homo sapiens
actgcgcctggccag

SEQ ID NO: 70994 - DNA, 15 bp, Homo sapiens
ctgcgcctggccagt

SEQ ID NO: 70995 - DNA, 15 bp, Homo sapiens
tgcgcctggccagtg

SEQ ID NO: 70996 - DNA, 15 bp, Homo sapiens
gcgcctggccagtgt

SEQ ID NO: 70997 - DNA, 15 bp, Homo sapiens
cgcctggccagtgtt

SEQ ID NO: 70998 - DNA, 15 bp, Homo sapiens
gcctggccagtgttg

SEQ ID NO: 70999 - DNA, 15 bp, Homo sapiens
cctggccagtgttga

SEQ ID NO: 71000 - DNA, 15 bp, Homo sapiens
ctggccagtgttgag

SEQ ID NO: 71001 - DNA, 15 bp, Homo sapiens
tggccagtgttgaga

SEQ ID NO: 71002 - DNA, 15 bp, Homo sapiens
ggccagtgttgagaa

SEQ ID NO: 71003 - DNA, 15 bp, Homo sapiens
gccagtgttgagaat

SEQ ID NO: 71004 - DNA, 15 bp, Homo sapiens
ccagtgttgagaata

SEQ ID NO: 71005 - DNA, 15 bp, Homo sapiens
cagtgttgagaatat

SEQ ID NO: 71006 - DNA, 15 bp, Homo sapiens
agtgttgagaatatt

SEQ ID NO: 71007 - DNA, 15 bp, Homo sapiens
gtgttgagaatattg

SEQ ID NO: 71008 - DNA, 15 bp, Homo sapiens
tgttgagaatattga

SEQ ID NO: 71009 - DNA, 15 bp, Homo sapiens
gttgagaatattgag

SEQ ID NO: 71010 - DNA, 15 bp, Homo sapiens
ttgagaatattgaga

SEQ ID NO: 71011 - DNA, 15 bp, Homo sapiens
tgagaatattgagag

SEQ ID NO: 71012 - DNA, 15 bp, Homo sapiens
gagaatattgagaga

SEQ ID NO: 71013 - DNA, 15 bp, Homo sapiens
agaatattgagagat

SEQ ID NO: 71014 - DNA, 15 bp, Homo sapiens
gaatattgagagatg

SEQ ID NO: 71015 - DNA, 15 bp, Homo sapiens
aatattgagagatgg

SEQ ID NO: 71016 - DNA, 15 bp, Homo sapiens
atattgagagatgga

SEQ ID NO: 71017 - DNA, 15 bp, Homo sapiens
tattgagagatggat

SEQ ID NO: 71018 - DNA, 15 bp, Homo sapiens
attgagagatggata

SEQ ID NO: 71019 - DNA, 15 bp, Homo sapiens
ttgagagatggatat

SEQ ID NO: 71020 - DNA, 15 bp, Homo sapiens
tgagagatggatatt

SEQ ID NO: 71021 - DNA, 15 bp, Homo sapiens
gagagatggatattg

SEQ ID NO: 71022 - DNA, 15 bp, Homo sapiens
agagatggatattgt

SEQ ID NO: 71023 - DNA, 15 bp, Homo sapiens
gagatggatattgta

SEQ ID NO: 71024 - DNA, 15 bp, Homo sapiens
agatggatattgtag

SEQ ID NO: 71025 - DNA, 15 bp, Homo sapiens
gatggatattgtagc

SEQ ID NO: 71026 - DNA, 15 bp, Homo sapiens
atggatattgtagct

SEQ ID NO: 71027 - DNA, 15 bp, Homo sapiens
tggatattgtagctg

SEQ ID NO: 71028 - DNA, 15 bp, Homo sapiens
ggatattgtagctgt

SEQ ID NO: 71029 - DNA, 15 bp, Homo sapiens
gatattgtagctgta

SEQ ID NO: 71030 - DNA, 15 bp, Homo sapiens
atattgtagctgtac

SEQ ID NO: 71031 - DNA, 15 bp, Homo sapiens
tattgtagctgtacc

SEQ ID NO: 71032 - DNA, 15 bp, Homo sapiens
attgtagctgtacct

SEQ ID NO: 71033 - DNA, 15 bp, Homo sapiens
ttgtagctgtacctg

SEQ ID NO: 71034 - DNA, 15 bp, Homo sapiens
tgtagctgtacctgc

SEQ ID NO: 71035 - DNA, 15 bp, Homo sapiens
gtagctgtacctgcc

SEQ ID NO: 71036 - DNA, 15 bp, Homo sapiens
tagctgtacctgcca

SEQ ID NO: 71037 - DNA, 15 bp, Homo sapiens
agctgtacctgccat

SEQ ID NO: 71038 - DNA, 15 bp, Homo sapiens
gctgtacctgccatc

SEQ ID NO: 71039 - DNA, 15 bp, Homo sapiens
ctgtacctgccatca

SEQ ID NO: 71040 - DNA, 15 bp, Homo sapiens
tgtacctgccatcaa

SEQ ID NO: 71041 - DNA, 15 bp, Homo sapiens
gtacctgccatcaaa

SEQ ID NO: 71042 - DNA, 15 bp, Homo sapiens
tacctgccatcaaaa

SEQ ID NO: 71043 - DNA, 15 bp, Homo sapiens
acctgccatcaaaag

SEQ ID NO: 71044 - DNA, 15 bp, Homo sapiens
cctgccatcaaaaga

SEQ ID NO: 71045 - DNA, 15 bp, Homo sapiens
ctgccatcaaaagaa

SEQ ID NO: 71046 - DNA, 15 bp, Homo sapiens
tgccatcaaaagaat

SEQ ID NO: 71047 - DNA, 15 bp, Homo sapiens
gccatcaaaagaatt

SEQ ID NO: 71048 - DNA, 15 bp, Homo sapiens
ccatcaaaagaattt

SEQ ID NO: 71049 - DNA, 15 bp, Homo sapiens
catcaaaagaatttt

SEQ ID NO: 71050 - DNA, 15 bp, Homo sapiens
atcaaaagaattttc

SEQ ID NO: 71051 - DNA, 15 bp, Homo sapiens
tcaaaagaattttct

SEQ ID NO: 71052 - DNA, 15 bp, Homo sapiens
caaaagaattttctt

SEQ ID NO: 71053 - DNA, 15 bp, Homo sapiens
aaaagaattttcttg

SEQ ID NO: 71054 - DNA, 15 bp, Homo sapiens
aaagaattttcttga

SEQ ID NO: 71055 - DNA, 15 bp, Homo sapiens
aagaattttcttgac

SEQ ID NO: 71056 - DNA, 15 bp, Homo sapiens
agaattttcttgacc

SEQ ID NO: 71057 - DNA, 15 bp, Homo sapiens
gaattttcttgacct

SEQ ID NO: 71058 - DNA, 15 bp, Homo sapiens
aattttcttgacctc

SEQ ID NO: 71059 - DNA, 15 bp, Homo sapiens
attttcttgacctcc

SEQ ID NO: 71060 - DNA, 15 bp, Homo sapiens
ttttcttgacctcca

SEQ ID NO: 71061 - DNA, 15 bp, Homo sapiens
tttcttgacctccac

SEQ ID NO: 71062 - DNA, 15 bp, Homo sapiens
ttcttgacctccaca

SEQ ID NO: 71063 - DNA, 15 bp, Homo sapiens
tcttgacctccacat

SEQ ID NO: 71064 - DNA, 15 bp, Homo sapiens
cttgacctccacata

SEQ ID NO: 71065 - DNA, 15 bp, Homo sapiens
ttgacctccacatag

SEQ ID NO: 71066 - DNA, 15 bp, Homo sapiens
tgacctccacatagt

SEQ ID NO: 71067 - DNA, 15 bp, Homo sapiens
gacctccacatagtg

SEQ ID NO: 71068 - DNA, 15 bp, Homo sapiens
acctccacatagtgt

SEQ ID NO: 71069 - DNA, 15 bp, Homo sapiens
cctccacatagtgtg

SEQ ID NO: 71070 - DNA, 15 bp, Homo sapiens
ctccacatagtgtga

SEQ ID NO: 71071 - DNA, 15 bp, Homo sapiens
tccacatagtgtgaa

SEQ ID NO: 71072 - DNA, 15 bp, Homo sapiens
ccacatagtgtgaaa

SEQ ID NO: 71073 - DNA, 15 bp, Homo sapiens
cacatagtgtgaaaa

SEQ ID NO: 71074 - DNA, 15 bp, Homo sapiens
acatagtgtgaaaaa

SEQ ID NO: 71075 - DNA, 15 bp, Homo sapiens
catagtgtgaaaaag

SEQ ID NO: 71076 - DNA, 15 bp, Homo sapiens
atagtgtgaaaaaga

SEQ ID NO: 71077 - DNA, 15 bp, Homo sapiens
tagtgtgaaaaagaa

SEQ ID NO: 71078 - DNA, 15 bp, Homo sapiens
agtgtgaaaaagaag

SEQ ID NO: 71079 - DNA, 15 bp, Homo sapiens
gtgtgaaaaagaaga

SEQ ID NO: 71080 - DNA, 15 bp, Homo sapiens
tgtgaaaaagaagac

SEQ ID NO: 71081 - DNA, 15 bp, Homo sapiens
gtgaaaaagaagact

SEQ ID NO: 71082 - DNA, 15 bp, Homo sapiens
tgaaaaagaagactg

SEQ ID NO: 71083 - DNA, 15 bp, Homo sapiens
gaaaaagaagactgt

SEQ ID NO: 71084 - DNA, 15 bp, Homo sapiens
aaaaagaagactgtt

SEQ ID NO: 71085 - DNA, 15 bp, Homo sapiens
aaaagaagactgttt

SEQ ID NO: 71086 - DNA, 15 bp, Homo sapiens
aaagaagactgttta

SEQ ID NO: 71087 - DNA, 15 bp, Homo sapiens
aagaagactgtttac

SEQ ID NO: 71088 - DNA, 15 bp, Homo sapiens
agaagactgtttaca

SEQ ID NO: 71089 - DNA, 15 bp, Homo sapiens
gaagactgtttacac

SEQ ID NO: 71090 - DNA, 15 bp, Homo sapiens
aagactgtttacaca

SEQ ID NO: 71091 - DNA, 15 bp, Homo sapiens
agactgtttacacat

SEQ ID NO: 71092 - DNA, 15 bp, Homo sapiens
gactgtttacacatt

SEQ ID NO: 71093 - DNA, 15 bp, Homo sapiens
actgtttacacatta

SEQ ID NO: 71094 - DNA, 15 bp, Homo sapiens
ctgtttacacattat

SEQ ID NO: 71095 - DNA, 15 bp, Homo sapiens
tgtttacacattata

SEQ ID NO: 71096 - DNA, 15 bp, Homo sapiens
gtttacacattatat

SEQ ID NO: 71097 - DNA, 15 bp, Homo sapiens
tttacacattatatt

SEQ ID NO: 71098 - DNA, 15 bp, Homo sapiens
ttacacattatattt

SEQ ID NO: 71099 - DNA, 15 bp, Homo sapiens
tacacattatatttt

SEQ ID NO: 71100 - DNA, 15 bp, Homo sapiens
acacattatatttta

SEQ ID NO: 71101 - DNA, 15 bp, Homo sapiens
cacattatattttaa

SEQ ID NO: 71102 - DNA, 15 bp, Homo sapiens
acattatattttaag

SEQ ID NO: 71103 - DNA, 15 bp, Homo sapiens
cattatattttaagt

SEQ ID NO: 71104 - DNA, 15 bp, Homo sapiens
attatattttaagta

SEQ ID NO: 71105 - DNA, 15 bp, Homo sapiens
ttatattttaagtaa

SEQ ID NO: 71106 - DNA, 15 bp, Homo sapiens
tatattttaagtaat

SEQ ID NO: 71107 - DNA, 15 bp, Homo sapiens
atattttaagtaatt

SEQ ID NO: 71108 - DNA, 15 bp, Homo sapiens
tattttaagtaatta

SEQ ID NO: 71109 - DNA, 15 bp, Homo sapiens
attttaagtaattat

SEQ ID NO: 71110 - DNA, 15 bp, Homo sapiens
ttttaagtaattata

SEQ ID NO: 71111 - DNA, 15 bp, Homo sapiens
tttaagtaattatac

SEQ ID NO: 71112 - DNA, 15 bp, Homo sapiens
ttaagtaattataca

SEQ ID NO: 71113 - DNA, 15 bp, Homo sapiens
taagtaattatacac

SEQ ID NO: 71114 - DNA, 15 bp, Homo sapiens
aagtaattatacaca

SEQ ID NO: 71115 - DNA, 15 bp, Homo sapiens
agtaattatacacat

SEQ ID NO: 71116 - DNA, 15 bp, Homo sapiens
gtaattatacacata

SEQ ID NO: 71117 - DNA, 15 bp, Homo sapiens
taattatacacataa

SEQ ID NO: 71118 - DNA, 15 bp, Homo sapiens
aattatacacataat

SEQ ID NO: 71119 - DNA, 15 bp, Homo sapiens
attatacacataatt

SEQ ID NO: 71120 - DNA, 15 bp, Homo sapiens
ttatacacataatta

SEQ ID NO: 71121 - DNA, 15 bp, Homo sapiens
tatacacataattat

SEQ ID NO: 71122 - DNA, 15 bp, Homo sapiens
atacacataattatt

SEQ ID NO: 71123 - DNA, 15 bp, Homo sapiens
tacacataattatta

SEQ ID NO: 71124 - DNA, 15 bp, Homo sapiens
acacataattattat

SEQ ID NO: 71125 - DNA, 15 bp, Homo sapiens
cacataattattatc

SEQ ID NO: 71126 - DNA, 15 bp, Homo sapiens
acataattattatca

SEQ ID NO: 71127 - DNA, 15 bp, Homo sapiens
cataattattatcag

SEQ ID NO: 71128 - DNA, 15 bp, Homo sapiens
ataattattatcagt

SEQ ID NO: 71129 - DNA, 15 bp, Homo sapiens
taattattatcagta

SEQ ID NO: 71130 - DNA, 15 bp, Homo sapiens
aattattatcagtac

SEQ ID NO: 71131 - DNA, 15 bp, Homo sapiens
attattatcagtact

SEQ ID NO: 71132 - DNA, 15 bp, Homo sapiens
ttattatcagtactc

SEQ ID NO: 71133 - DNA, 15 bp, Homo sapiens
tattatcagtactca

SEQ ID NO: 71134 - DNA, 15 bp, Homo sapiens
attatcagtactcac

SEQ ID NO: 71135 - DNA, 15 bp, Homo sapiens
ttatcagtactcacc

SEQ ID NO: 71136 - DNA, 15 bp, Homo sapiens
tatcagtactcacca

SEQ ID NO: 71137 - DNA, 15 bp, Homo sapiens
atcagtactcaccac

SEQ ID NO: 71138 - DNA, 15 bp, Homo sapiens
tcagtactcaccact

SEQ ID NO: 71139 - DNA, 15 bp, Homo sapiens
cagtactcaccactt

SEQ ID NO: 71140 - DNA, 15 bp, Homo sapiens
agtactcaccacttc

SEQ ID NO: 71141 - DNA, 15 bp, Homo sapiens
gtactcaccacttca

SEQ ID NO: 71142 - DNA, 15 bp, Homo sapiens
tactcaccacttcaa

SEQ ID NO: 71143 - DNA, 15 bp, Homo sapiens
actcaccacttcaaa

SEQ ID NO: 71144 - DNA, 15 bp, Homo sapiens
ctcaccacttcaaat

SEQ ID NO: 71145 - DNA, 15 bp, Homo sapiens
tcaccacttcaaata

SEQ ID NO: 71146 - DNA, 15 bp, Homo sapiens
caccacttcaaatat

SEQ ID NO: 71147 - DNA, 15 bp, Homo sapiens
accacttcaaatatg

SEQ ID NO: 71148 - DNA, 15 bp, Homo sapiens
ccacttcaaatatga

SEQ ID NO: 71149 - DNA, 15 bp, Homo sapiens
cacttcaaatatgaa

SEQ ID NO: 71150 - DNA, 15 bp, Homo sapiens
acttcaaatatgaac

SEQ ID NO: 71151 - DNA, 15 bp, Homo sapiens
cttcaaatatgaaca

SEQ ID NO: 71152 - DNA, 15 bp, Homo sapiens
ttcaaatatgaacag

SEQ ID NO: 71153 - DNA, 15 bp, Homo sapiens
tcaaatatgaacagt

SEQ ID NO: 71154 - DNA, 15 bp, Homo sapiens
caaatatgaacagtg

SEQ ID NO: 71155 - DNA, 15 bp, Homo sapiens
aaatatgaacagtga

SEQ ID NO: 71156 - DNA, 15 bp, Homo sapiens
aatatgaacagtgaa

SEQ ID NO: 71157 - DNA, 15 bp, Homo sapiens
atatgaacagtgaat

SEQ ID NO: 71158 - DNA, 15 bp, Homo sapiens
tatgaacagtgaatc

SEQ ID NO: 71159 - DNA, 15 bp, Homo sapiens
atgaacagtgaatct

SEQ ID NO: 71160 - DNA, 15 bp, Homo sapiens
tgaacagtgaatcta

SEQ ID NO: 71161 - DNA, 15 bp, Homo sapiens
gaacagtgaatctaa

SEQ ID NO: 71162 - DNA, 15 bp, Homo sapiens
aacagtgaatctaac

SEQ ID NO: 71163 - DNA, 15 bp, Homo sapiens
acagtgaatctaacc

SEQ ID NO: 71164 - DNA, 15 bp, Homo sapiens
cagtgaatctaacca

SEQ ID NO: 71165 - DNA, 15 bp, Homo sapiens
agtgaatctaaccag

SEQ ID NO: 71166 - DNA, 15 bp, Homo sapiens
gtgaatctaaccagt

SEQ ID NO: 71167 - DNA, 15 bp, Homo sapiens
tgaatctaaccagtg

SEQ ID NO: 71168 - DNA, 15 bp, Homo sapiens
gaatctaaccagtgt

SEQ ID NO: 71169 - DNA, 15 bp, Homo sapiens
aatctaaccagtgtt

SEQ ID NO: 71170 - DNA, 15 bp, Homo sapiens
atctaaccagtgttt

SEQ ID NO: 71171 - DNA, 15 bp, Homo sapiens
tctaaccagtgtttg

SEQ ID NO: 71172 - DNA, 15 bp, Homo sapiens
ctaaccagtgtttga

SEQ ID NO: 71173 - DNA, 15 bp, Homo sapiens
taaccagtgtttgat

SEQ ID NO: 71174 - DNA, 15 bp, Homo sapiens
aaccagtgtttgatt

SEQ ID NO: 71175 - DNA, 15 bp, Homo sapiens
accagtgtttgattt

SEQ ID NO: 71176 - DNA, 15 bp, Homo sapiens
ccagtgtttgatttc

SEQ ID NO: 71177 - DNA, 15 bp, Homo sapiens
cagtgtttgatttct

SEQ ID NO: 71178 - DNA, 15 bp, Homo sapiens
agtgtttgatttctc

SEQ ID NO: 71179 - DNA, 15 bp, Homo sapiens
gtgtttgatttctct

SEQ ID NO: 71180 - DNA, 15 bp, Homo sapiens
tgtttgatttctctg

SEQ ID NO: 71181 - DNA, 15 bp, Homo sapiens
gtttgatttctctgt

SEQ ID NO: 71182 - DNA, 15 bp, Homo sapiens
tttgatttctctgtg

SEQ ID NO: 71183 - DNA, 15 bp, Homo sapiens
ttgatttctctgtgt

SEQ ID NO: 71184 - DNA, 15 bp, Homo sapiens
tgatttctctgtgtg

SEQ ID NO: 71185 - DNA, 15 bp, Homo sapiens
gatttctctgtgtgt

SEQ ID NO: 71186 - DNA, 15 bp, Homo sapiens
atttctctgtgtgtg

SEQ ID NO: 71187 - DNA, 15 bp, Homo sapiens
tttctctgtgtgtgt

SEQ ID NO: 71188 - DNA, 15 bp, Homo sapiens
ttctctgtgtgtgta

SEQ ID NO: 71189 - DNA, 15 bp, Homo sapiens
tctctgtgtgtgtat

SEQ ID NO: 71190 - DNA, 15 bp, Homo sapiens
ctctgtgtgtgtatg

SEQ ID NO: 71191 - DNA, 15 bp, Homo sapiens
tctgtgtgtgtatgt

SEQ ID NO: 71192 - DNA, 15 bp, Homo sapiens
ctgtgtgtgtatgtg

SEQ ID NO: 71193 - DNA, 15 bp, Homo sapiens
tgtgtgtgtatgtgt

SEQ ID NO: 71194 - DNA, 15 bp, Homo sapiens
gtgtgtgtatgtgta

SEQ ID NO: 71195 - DNA, 15 bp, Homo sapiens
tgtgtgtatgtgtat

SEQ ID NO: 71196 - DNA, 15 bp, Homo sapiens
gtgtgtatgtgtata

SEQ ID NO: 71197 - DNA, 15 bp, Homo sapiens
tgtgtatgtgtatac

SEQ ID NO: 71198 - DNA, 15 bp, Homo sapiens
gtgtatgtgtataca

SEQ ID NO: 71199 - DNA, 15 bp, Homo sapiens
tgtatgtgtatacaa

SEQ ID NO: 71200 - DNA, 15 bp, Homo sapiens
gtatgtgtatacaaa

SEQ ID NO: 71201 - DNA, 15 bp, Homo sapiens
tatgtgtatacaaag

SEQ ID NO: 71202 - DNA, 15 bp, Homo sapiens
atgtgtatacaaagt

SEQ ID NO: 71203 - DNA, 15 bp, Homo sapiens
tgtgtatacaaagtt

SEQ ID NO: 71204 - DNA, 15 bp, Homo sapiens
gtgtatacaaagtta

SEQ ID NO: 71205 - DNA, 15 bp, Homo sapiens
tgtatacaaagttag

SEQ ID NO: 71206 - DNA, 15 bp, Homo sapiens
gtatacaaagttagc

SEQ ID NO: 71207 - DNA, 15 bp, Homo sapiens
tatacaaagttagca

SEQ ID NO: 71208 - DNA, 15 bp, Homo sapiens
atacaaagttagcaa

SEQ ID NO: 71209 - DNA, 15 bp, Homo sapiens
tacaaagttagcaaa

SEQ ID NO: 71210 - DNA, 15 bp, Homo sapiens
acaaagttagcaaac

SEQ ID NO: 71211 - DNA, 15 bp, Homo sapiens
caaagttagcaaacc

SEQ ID NO: 71212 - DNA, 15 bp, Homo sapiens
aaagttagcaaacct

SEQ ID NO: 71213 - DNA, 15 bp, Homo sapiens
aagttagcaaacctt

SEQ ID NO: 71214 - DNA, 15 bp, Homo sapiens
agttagcaaaccttt

SEQ ID NO: 71215 - DNA, 15 bp, Homo sapiens
gttagcaaacctttt

SEQ ID NO: 71216 - DNA, 15 bp, Homo sapiens
ttagcaaacctttta

SEQ ID NO: 71217 - DNA, 15 bp, Homo sapiens
tagcaaaccttttat

SEQ ID NO: 71218 - DNA, 15 bp, Homo sapiens
agcaaaccttttatc

SEQ ID NO: 71219 - DNA, 15 bp, Homo sapiens
gcaaaccttttatct

SEQ ID NO: 71220 - DNA, 15 bp, Homo sapiens
caaaccttttatctt

SEQ ID NO: 71221 - DNA, 15 bp, Homo sapiens
aaaccttttatctta

SEQ ID NO: 71222 - DNA, 15 bp, Homo sapiens
aaccttttatcttaa

SEQ ID NO: 71223 - DNA, 15 bp, Homo sapiens
accttttatcttaat

SEQ ID NO: 71224 - DNA, 15 bp, Homo sapiens
ccttttatcttaata

SEQ ID NO: 71225 - DNA, 15 bp, Homo sapiens
cttttatcttaatat

SEQ ID NO: 71226 - DNA, 15 bp, Homo sapiens
ttttatcttaatatt

SEQ ID NO: 71227 - DNA, 15 bp, Homo sapiens
tttatcttaatattt

SEQ ID NO: 71228 - DNA, 15 bp, Homo sapiens
ttatcttaatattta

SEQ ID NO: 71229 - DNA, 15 bp, Homo sapiens
tatcttaatatttat

SEQ ID NO: 71230 - DNA, 15 bp, Homo sapiens
atcttaatatttatt

SEQ ID NO: 71231 - DNA, 15 bp, Homo sapiens
tcttaatatttatta

SEQ ID NO: 71232 - DNA, 15 bp, Homo sapiens
cttaatatttattaa

SEQ ID NO: 71233 - DNA, 15 bp, Homo sapiens
ttaatatttattaaa

SEQ ID NO: 71234 - DNA, 15 bp, Homo sapiens
taatatttattaaaa

SEQ ID NO: 71235 - DNA, 15 bp, Homo sapiens
tatttattaaaaaac

SEQ ID NO: 71236 - DNA, 15 bp, Homo sapiens
atttattaaaaaacg

SEQ ID NO: 71237 - DNA, 15 bp, Homo sapiens
tttattaaaaaacga

SEQ ID NO: 71238 - DNA, 15 bp, Homo sapiens
ttattaaaaaacgaa

SEQ ID NO: 71239 - DNA, 15 bp, Homo sapiens
tattaaaaaacgaat

SEQ ID NO: 71240 - DNA, 15 bp, Homo sapiens
attaaaaaacgaatt

SEQ ID NO: 71241 - DNA, 15 bp, Homo sapiens
ttaaaaaacgaattt

SEQ ID NO: 71242 - DNA, 15 bp, Homo sapiens
taaaaaacgaatttt

SEQ ID NO: 71243 - DNA, 15 bp, Homo sapiens
aaaaaacgaattttt

SEQ ID NO: 71244 - DNA, 15 bp, Homo sapiens
aaaaacgaatttttg

SEQ ID NO: 71245 - DNA, 15 bp, Homo sapiens
aaaacgaatttttgt

SEQ ID NO: 71246 - DNA, 15 bp, Homo sapiens
aaacgaatttttgtt

SEQ ID NO: 71247 - DNA, 15 bp, Homo sapiens
aacgaatttttgttt

SEQ ID NO: 71248 - DNA, 15 bp, Homo sapiens
acgaatttttgtttc

SEQ ID NO: 71249 - DNA, 15 bp, Homo sapiens
cgaatttttgtttct

SEQ ID NO: 71250 - DNA, 15 bp, Homo sapiens
gaatttttgtttctt

SEQ ID NO: 71251 - DNA, 15 bp, Homo sapiens
aatttttgtttcttt

SEQ ID NO: 71252 - DNA, 15 bp, Homo sapiens
atttttgtttcttta

SEQ ID NO: 71253 - DNA, 15 bp, Homo sapiens
tttttgtttctttaa

SEQ ID NO: 71254 - DNA, 15 bp, Homo sapiens
ttttgtttctttaaa

SEQ ID NO: 71255 - DNA, 15 bp, Homo sapiens
tttgtttctttaaag

SEQ ID NO: 71256 - DNA, 15 bp, Homo sapiens
ttgtttctttaaaga

SEQ ID NO: 71257 - DNA, 15 bp, Homo sapiens
tgtttctttaaagaa

SEQ ID NO: 71258 - DNA, 15 bp, Homo sapiens
gtttctttaaagaaa

SEQ ID NO: 71259 - DNA, 15 bp, Homo sapiens
tttctttaaagaaaa

SEQ ID NO: 71260 - DNA, 15 bp, Homo sapiens
ttctttaaagaaaag

SEQ ID NO: 71261 - DNA, 15 bp, Homo sapiens
tctttaaagaaaaga

SEQ ID NO: 71262 - DNA, 15 bp, Homo sapiens
ctttaaagaaaagac

SEQ ID NO: 71263 - DNA, 15 bp, Homo sapiens
tttaaagaaaagact

SEQ ID NO: 71264 - DNA, 15 bp, Homo sapiens
ttaaagaaaagacta

SEQ ID NO: 71265 - DNA, 15 bp, Homo sapiens
taaagaaaagactac

SEQ ID NO: 71266 - DNA, 15 bp, Homo sapiens
aaagaaaagactacc

SEQ ID NO: 71267 - DNA, 15 bp, Homo sapiens
aagaaaagactacct

SEQ ID NO: 71268 - DNA, 15 bp, Homo sapiens
agaaaagactacctt

SEQ ID NO: 71269 - DNA, 15 bp, Homo sapiens
gaaaagactacctta

SEQ ID NO: 71270 - DNA, 15 bp, Homo sapiens
aaaagactaccttag

SEQ ID NO: 71271 - DNA, 15 bp, Homo sapiens
aaagactaccttaga

SEQ ID NO: 71272 - DNA, 15 bp, Homo sapiens
aagactaccttagag

SEQ ID NO: 71273 - DNA, 15 bp, Homo sapiens
agactaccttagaga

SEQ ID NO: 71274 - DNA, 15 bp, Homo sapiens
gactaccttagagaa

SEQ ID NO: 71275 - DNA, 15 bp, Homo sapiens
actaccttagagaat

SEQ ID NO: 71276 - DNA, 15 bp, Homo sapiens
ctaccttagagaata

SEQ ID NO: 71277 - DNA, 15 bp, Homo sapiens
taccttagagaatat

SEQ ID NO: 71278 - DNA, 15 bp, Homo sapiens
accttagagaatatt

SEQ ID NO: 71279 - DNA, 15 bp, Homo sapiens
ccttagagaatattg

SEQ ID NO: 71280 - DNA, 15 bp, Homo sapiens
cttagagaatattgt

SEQ ID NO: 71281 - DNA, 15 bp, Homo sapiens
ttagagaatattgtt

SEQ ID NO: 71282 - DNA, 15 bp, Homo sapiens
tagagaatattgttc

SEQ ID NO: 71283 - DNA, 15 bp, Homo sapiens
agagaatattgttct

SEQ ID NO: 71284 - DNA, 15 bp, Homo sapiens
gagaatattgttcta

SEQ ID NO: 71285 - DNA, 15 bp, Homo sapiens
agaatattgttctat

SEQ ID NO: 71286 - DNA, 15 bp, Homo sapiens
gaatattgttctata

SEQ ID NO: 71287 - DNA, 15 bp, Homo sapiens
aatattgttctatag

SEQ ID NO: 71288 - DNA, 15 bp, Homo sapiens
atattgttctatagt

SEQ ID NO: 71289 - DNA, 15 bp, Homo sapiens
tattgttctatagtt

SEQ ID NO: 71290 - DNA, 15 bp, Homo sapiens
attgttctatagttt

SEQ ID NO: 71291 - DNA, 15 bp, Homo sapiens
ttgttctatagtttt

SEQ ID NO: 71292 - DNA, 15 bp, Homo sapiens
tgttctatagttttt

SEQ ID NO: 71293 - DNA, 15 bp, Homo sapiens
gttctatagttttta

SEQ ID NO: 71294 - DNA, 15 bp, Homo sapiens
ttctatagtttttaa

SEQ ID NO: 71295 - DNA, 15 bp, Homo sapiens
tctatagtttttaaa

SEQ ID NO: 71296 - DNA, 15 bp, Homo sapiens
ctatagtttttaaat

SEQ ID NO: 71297 - DNA, 15 bp, Homo sapiens
tatagtttttaaata

SEQ ID NO: 71298 - DNA, 15 bp, Homo sapiens
atagtttttaaatat

SEQ ID NO: 71299 - DNA, 15 bp, Homo sapiens
tagtttttaaatatg

SEQ ID NO: 71300 - DNA, 15 bp, Homo sapiens
agtttttaaatatgg

SEQ ID NO: 71301 - DNA, 15 bp, Homo sapiens
gtttttaaatatggt

SEQ ID NO: 71302 - DNA, 15 bp, Homo sapiens
tttttaaatatggtc

SEQ ID NO: 71303 - DNA, 15 bp, Homo sapiens
ttttaaatatggtca

SEQ ID NO: 71304 - DNA, 15 bp, Homo sapiens
tttaaatatggtcag

SEQ ID NO: 71305 - DNA, 15 bp, Homo sapiens
ttaaatatggtcaga

SEQ ID NO: 71306 - DNA, 15 bp, Homo sapiens
taaatatggtcagat

SEQ ID NO: 71307 - DNA, 15 bp, Homo sapiens
aaatatggtcagatc

SEQ ID NO: 71308 - DNA, 15 bp, Homo sapiens
aatatggtcagatct

SEQ ID NO: 71309 - DNA, 15 bp, Homo sapiens
atatggtcagatcta

SEQ ID NO: 71310 - DNA, 15 bp, Homo sapiens
tatggtcagatctat

SEQ ID NO: 71311 - DNA, 15 bp, Homo sapiens
atggtcagatctatt

SEQ ID NO: 71312 - DNA, 15 bp, Homo sapiens
tggtcagatctattt

SEQ ID NO: 71313 - DNA, 15 bp, Homo sapiens
ggtcagatctatttt

SEQ ID NO: 71314 - DNA, 15 bp, Homo sapiens
gtcagatctatttta

SEQ ID NO: 71315 - DNA, 15 bp, Homo sapiens
tcagatctattttaa

SEQ ID NO: 71316 - DNA, 15 bp, Homo sapiens
cagatctattttaaa

SEQ ID NO: 71317 - DNA, 15 bp, Homo sapiens
agatctattttaaat

SEQ ID NO: 71318 - DNA, 15 bp, Homo sapiens
gatctattttaaatt

SEQ ID NO: 71319 - DNA, 15 bp, Homo sapiens
atctattttaaatta

SEQ ID NO: 71320 - DNA, 15 bp, Homo sapiens
tctattttaaattat

SEQ ID NO: 71321 - DNA, 15 bp, Homo sapiens
ctattttaaattatg

SEQ ID NO: 71322 - DNA, 15 bp, Homo sapiens
tattttaaattatgt

SEQ ID NO: 71323 - DNA, 15 bp, Homo sapiens
attttaaattatgtt

SEQ ID NO: 71324 - DNA, 15 bp, Homo sapiens
ttttaaattatgtta

SEQ ID NO: 71325 - DNA, 15 bp, Homo sapiens
tttaaattatgttaa

SEQ ID NO: 71326 - DNA, 15 bp, Homo sapiens
ttaaattatgttaaa

SEQ ID NO: 71327 - DNA, 15 bp, Homo sapiens
taaattatgttaaaa

SEQ ID NO: 71328 - DNA, 15 bp, Homo sapiens
aaattatgttaaaat

SEQ ID NO: 71329 - DNA, 15 bp, Homo sapiens
aattatgttaaaatt

SEQ ID NO: 71330 - DNA, 15 bp, Homo sapiens
attatgttaaaattt

SEQ ID NO: 71331 - DNA, 15 bp, Homo sapiens
ttatgttaaaatttt

SEQ ID NO: 71332 - DNA, 15 bp, Homo sapiens
tatgttaaaattttg

SEQ ID NO: 71333 - DNA, 15 bp, Homo sapiens
atgttaaaattttga

SEQ ID NO: 71334 - DNA, 15 bp, Homo sapiens
tgttaaaattttgag

SEQ ID NO: 71335 - DNA, 15 bp, Homo sapiens
gttaaaattttgagt

SEQ ID NO: 71336 - DNA, 15 bp, Homo sapiens
ttaaaattttgagta

SEQ ID NO: 71337 - DNA, 15 bp, Homo sapiens
taaaattttgagtat

SEQ ID NO: 71338 - DNA, 15 bp, Homo sapiens
aaaattttgagtatt

SEQ ID NO: 71339 - DNA, 15 bp, Homo sapiens
aaattttgagtatta

SEQ ID NO: 71340 - DNA, 15 bp, Homo sapiens
aattttgagtattac

SEQ ID NO: 71341 - DNA, 15 bp, Homo sapiens
attttgagtattacg

SEQ ID NO: 71342 - DNA, 15 bp, Homo sapiens
ttttgagtattacgt

SEQ ID NO: 71343 - DNA, 15 bp, Homo sapiens
tttgagtattacgtt

SEQ ID NO: 71344 - DNA, 15 bp, Homo sapiens
ttgagtattacgttt

SEQ ID NO: 71345 - DNA, 15 bp, Homo sapiens
tgagtattacgttta

SEQ ID NO: 71346 - DNA, 15 bp, Homo sapiens
gagtattacgtttat

SEQ ID NO: 71347 - DNA, 15 bp, Homo sapiens
agtattacgtttatc

SEQ ID NO: 71348 - DNA, 15 bp, Homo sapiens
gtattacgtttatct

SEQ ID NO: 71349 - DNA, 15 bp, Homo sapiens
tattacgtttatcta

SEQ ID NO: 71350 - DNA, 15 bp, Homo sapiens
attacgtttatctat

SEQ ID NO: 71351 - DNA, 15 bp, Homo sapiens
ttacgtttatctata

SEQ ID NO: 71352 - DNA, 15 bp, Homo sapiens
tacgtttatctatac

SEQ ID NO: 71353 - DNA, 15 bp, Homo sapiens
acgtttatctatact

SEQ ID NO: 71354 - DNA, 15 bp, Homo sapiens
cgtttatctatactt

SEQ ID NO: 71355 - DNA, 15 bp, Homo sapiens
gtttatctatacttt

SEQ ID NO: 71356 - DNA, 15 bp, Homo sapiens
tttatctatactttt

SEQ ID NO: 71357 - DNA, 15 bp, Homo sapiens
ttatctatactttta

SEQ ID NO: 71358 - DNA, 15 bp, Homo sapiens
tatctatacttttaa

SEQ ID NO: 71359 - DNA, 15 bp, Homo sapiens
atctatacttttaag

SEQ ID NO: 71360 - DNA, 15 bp, Homo sapiens
tctatacttttaagc

SEQ ID NO: 71361 - DNA, 15 bp, Homo sapiens
ctatacttttaagca

SEQ ID NO: 71362 - DNA, 15 bp, Homo sapiens
tatacttttaagcat

SEQ ID NO: 71363 - DNA, 15 bp, Homo sapiens
atacttttaagcata

SEQ ID NO: 71364 - DNA, 15 bp, Homo sapiens
tacttttaagcatat

SEQ ID NO: 71365 - DNA, 15 bp, Homo sapiens
acttttaagcatata

SEQ ID NO: 71366 - DNA, 15 bp, Homo sapiens
cttttaagcatatat

SEQ ID NO: 71367 - DNA, 15 bp, Homo sapiens
ttttaagcatatata

SEQ ID NO: 71368 - DNA, 15 bp, Homo sapiens
tttaagcatatatac

SEQ ID NO: 71369 - DNA, 15 bp, Homo sapiens
ttaagcatatataca

SEQ ID NO: 71370 - DNA, 15 bp, Homo sapiens
taagcatatatacat

SEQ ID NO: 71371 - DNA, 15 bp, Homo sapiens
aagcatatatacatt

SEQ ID NO: 71372 - DNA, 15 bp, Homo sapiens
agcatatatacattg

SEQ ID NO: 71373 - DNA, 15 bp, Homo sapiens
gcatatatacattgt

SEQ ID NO: 71374 - DNA, 15 bp, Homo sapiens
catatatacattgtt

SEQ ID NO: 71375 - DNA, 15 bp, Homo sapiens
atatatacattgttt

SEQ ID NO: 71376 - DNA, 15 bp, Homo sapiens
tatatacattgtttc

SEQ ID NO: 71377 - DNA, 15 bp, Homo sapiens
atatacattgtttca

SEQ ID NO: 71378 - DNA, 15 bp, Homo sapiens
tatacattgtttcat

SEQ ID NO: 71379 - DNA, 15 bp, Homo sapiens
atacattgtttcatt

SEQ ID NO: 71380 - DNA, 15 bp, Homo sapiens
tacattgtttcattt

SEQ ID NO: 71381 - DNA, 15 bp, Homo sapiens
acattgtttcatttt

SEQ ID NO: 71382 - DNA, 15 bp, Homo sapiens
cattgtttcatttta

SEQ ID NO: 71383 - DNA, 15 bp, Homo sapiens
attgtttcattttag

SEQ ID NO: 71384 - DNA, 15 bp, Homo sapiens
ttgtttcattttaga

SEQ ID NO: 71385 - DNA, 15 bp, Homo sapiens
tgtttcattttagat

SEQ ID NO: 71386 - DNA, 15 bp, Homo sapiens
gtttcattttagatt

SEQ ID NO: 71387 - DNA, 15 bp, Homo sapiens
tttcattttagattt

SEQ ID NO: 71388 - DNA, 15 bp, Homo sapiens
ttcattttagatttt

SEQ ID NO: 71389 - DNA, 15 bp, Homo sapiens
tcattttagatttta

SEQ ID NO: 71390 - DNA, 15 bp, Homo sapiens
cattttagattttag

SEQ ID NO: 71391 - DNA, 15 bp, Homo sapiens
attttagattttagg

SEQ ID NO: 71392 - DNA, 15 bp, Homo sapiens
ttttagattttaggg

SEQ ID NO: 71393 - DNA, 15 bp, Homo sapiens
tttagattttaggga

SEQ ID NO: 71394 - DNA, 15 bp, Homo sapiens
ttagattttagggag

SEQ ID NO: 71395 - DNA, 15 bp, Homo sapiens
tagattttagggagg

SEQ ID NO: 71396 - DNA, 15 bp, Homo sapiens
agattttagggaggc

SEQ ID NO: 71397 - DNA, 15 bp, Homo sapiens
gattttagggaggca

SEQ ID NO: 71398 - DNA, 15 bp, Homo sapiens
attttagggaggcag

SEQ ID NO: 71399 - DNA, 15 bp, Homo sapiens
ttttagggaggcagt

SEQ ID NO: 71400 - DNA, 15 bp, Homo sapiens
tttagggaggcagtg

SEQ ID NO: 71401 - DNA, 15 bp, Homo sapiens
ttagggaggcagtgt

SEQ ID NO: 71402 - DNA, 15 bp, Homo sapiens
tagggaggcagtgtg

SEQ ID NO: 71403 - DNA, 15 bp, Homo sapiens
agggaggcagtgtgg

SEQ ID NO: 71404 - DNA, 15 bp, Homo sapiens
gggaggcagtgtggg

SEQ ID NO: 71405 - DNA, 15 bp, Homo sapiens
ggaggcagtgtgggc

SEQ ID NO: 71406 - DNA, 15 bp, Homo sapiens
gaggcagtgtgggct

SEQ ID NO: 71407 - DNA, 15 bp, Homo sapiens
aggcagtgtgggctc

SEQ ID NO: 71408 - DNA, 15 bp, Homo sapiens
ggcagtgtgggctct

SEQ ID NO: 71409 - DNA, 15 bp, Homo sapiens
gcagtgtgggctctg

SEQ ID NO: 71410 - DNA, 15 bp, Homo sapiens
cagtgtgggctctgg

SEQ ID NO: 71411 - DNA, 15 bp, Homo sapiens
agtgtgggctctgga

SEQ ID NO: 71412 - DNA, 15 bp, Homo sapiens
gtgtgggctctggag

SEQ ID NO: 71413 - DNA, 15 bp, Homo sapiens
tgtgggctctggagc

SEQ ID NO: 71414 - DNA, 15 bp, Homo sapiens
gtgggctctggagcc

SEQ ID NO: 71415 - DNA, 15 bp, Homo sapiens
tgggctctggagcca

SEQ ID NO: 71416 - DNA, 15 bp, Homo sapiens
gggctctggagccag

SEQ ID NO: 71417 - DNA, 15 bp, Homo sapiens
ggctctggagccaga

SEQ ID NO: 71418 - DNA, 15 bp, Homo sapiens
gctctggagccagac

SEQ ID NO: 71419 - DNA, 15 bp, Homo sapiens
ctctggagccagact

SEQ ID NO: 71420 - DNA, 15 bp, Homo sapiens
tctggagccagactg

SEQ ID NO: 71421 - DNA, 15 bp, Homo sapiens
ctggagccagactgc

SEQ ID NO: 71422 - DNA, 15 bp, Homo sapiens
tggagccagactgct

SEQ ID NO: 71423 - DNA, 15 bp, Homo sapiens
ggagccagactgctt

SEQ ID NO: 71424 - DNA, 15 bp, Homo sapiens
gagccagactgcttg

SEQ ID NO: 71425 - DNA, 15 bp, Homo sapiens
agccagactgcttgt

SEQ ID NO: 71426 - DNA, 15 bp, Homo sapiens
gccagactgcttgtt

SEQ ID NO: 71427 - DNA, 15 bp, Homo sapiens
ccagactgcttgttt

SEQ ID NO: 71428 - DNA, 15 bp, Homo sapiens
cagactgcttgtttt

SEQ ID NO: 71429 - DNA, 15 bp, Homo sapiens
agactgcttgttttg

SEQ ID NO: 71430 - DNA, 15 bp, Homo sapiens
gactgcttgttttgt

SEQ ID NO: 71431 - DNA, 15 bp, Homo sapiens
actgcttgttttgta

SEQ ID NO: 71432 - DNA, 15 bp, Homo sapiens
ctgcttgttttgtaa

SEQ ID NO: 71433 - DNA, 15 bp, Homo sapiens
tgcttgttttgtaat

SEQ ID NO: 71434 - DNA, 15 bp, Homo sapiens
gcttgttttgtaatc

SEQ ID NO: 71435 - DNA, 15 bp, Homo sapiens
cttgttttgtaatcc

SEQ ID NO: 71436 - DNA, 15 bp, Homo sapiens
ttgttttgtaatcct

SEQ ID NO: 71437 - DNA, 15 bp, Homo sapiens
tgttttgtaatcctg

SEQ ID NO: 71438 - DNA, 15 bp, Homo sapiens
gttttgtaatcctgg

SEQ ID NO: 71439 - DNA, 15 bp, Homo sapiens
ttttgtaatcctgga

SEQ ID NO: 71440 - DNA, 15 bp, Homo sapiens
tttgtaatcctggat

SEQ ID NO: 71441 - DNA, 15 bp, Homo sapiens
ttgtaatcctggatc

SEQ ID NO: 71442 - DNA, 15 bp, Homo sapiens
tgtaatcctggatct

SEQ ID NO: 71443 - DNA, 15 bp, Homo sapiens
gtaatcctggatctt

SEQ ID NO: 71444 - DNA, 15 bp, Homo sapiens
taatcctggatcttc

SEQ ID NO: 71445 - DNA, 15 bp, Homo sapiens
aatcctggatcttcc

SEQ ID NO: 71446 - DNA, 15 bp, Homo sapiens
atcctggatcttcca

SEQ ID NO: 71447 - DNA, 15 bp, Homo sapiens
tcctggatcttccat

SEQ ID NO: 71448 - DNA, 15 bp, Homo sapiens
cctggatcttccatt

SEQ ID NO: 71449 - DNA, 15 bp, Homo sapiens
ctggatcttccattt

SEQ ID NO: 71450 - DNA, 15 bp, Homo sapiens
tggatcttccattta

SEQ ID NO: 71451 - DNA, 15 bp, Homo sapiens
ggatcttccatttag

SEQ ID NO: 71452 - DNA, 15 bp, Homo sapiens
gatcttccatttagt

SEQ ID NO: 71453 - DNA, 15 bp, Homo sapiens
atcttccatttagta

SEQ ID NO: 71454 - DNA, 15 bp, Homo sapiens
tcttccatttagtag

SEQ ID NO: 71455 - DNA, 15 bp, Homo sapiens
cttccatttagtagc

SEQ ID NO: 71456 - DNA, 15 bp, Homo sapiens
ttccatttagtagct

SEQ ID NO: 71457 - DNA, 15 bp, Homo sapiens
tccatttagtagctg

SEQ ID NO: 71458 - DNA, 15 bp, Homo sapiens
ccatttagtagctgg

SEQ ID NO: 71459 - DNA, 15 bp, Homo sapiens
catttagtagctgga

SEQ ID NO: 71460 - DNA, 15 bp, Homo sapiens
atttagtagctggat

SEQ ID NO: 71461 - DNA, 15 bp, Homo sapiens
tttagtagctggatg

SEQ ID NO: 71462 - DNA, 15 bp, Homo sapiens
ttagtagctggatga

SEQ ID NO: 71463 - DNA, 15 bp, Homo sapiens
tagtagctggatgac

SEQ ID NO: 71464 - DNA, 15 bp, Homo sapiens
agtagctggatgact

SEQ ID NO: 71465 - DNA, 15 bp, Homo sapiens
gtagctggatgactt

SEQ ID NO: 71466 - DNA, 15 bp, Homo sapiens
tagctggatgacttt

SEQ ID NO: 71467 - DNA, 15 bp, Homo sapiens
agctggatgactttg

SEQ ID NO: 71468 - DNA, 15 bp, Homo sapiens
gctggatgactttga

SEQ ID NO: 71469 - DNA, 15 bp, Homo sapiens
ctggatgactttgag

SEQ ID NO: 71470 - DNA, 15 bp, Homo sapiens
tggatgactttgagt

SEQ ID NO: 71471 - DNA, 15 bp, Homo sapiens
ggatgactttgagta

SEQ ID NO: 71472 - DNA, 15 bp, Homo sapiens
gatgactttgagtag

SEQ ID NO: 71473 - DNA, 15 bp, Homo sapiens
atgactttgagtagg

SEQ ID NO: 71474 - DNA, 15 bp, Homo sapiens
tgactttgagtaggt

SEQ ID NO: 71475 - DNA, 15 bp, Homo sapiens
gactttgagtaggtt

SEQ ID NO: 71476 - DNA, 15 bp, Homo sapiens
actttgagtaggtta

SEQ ID NO: 71477 - DNA, 15 bp, Homo sapiens
ctttgagtaggttat

SEQ ID NO: 71478 - DNA, 15 bp, Homo sapiens
tttgagtaggttatt

SEQ ID NO: 71479 - DNA, 15 bp, Homo sapiens
ttgagtaggttattt

SEQ ID NO: 71480 - DNA, 15 bp, Homo sapiens
tgagtaggttattta

SEQ ID NO: 71481 - DNA, 15 bp, Homo sapiens
gagtaggttatttag

SEQ ID NO: 71482 - DNA, 15 bp, Homo sapiens
agtaggttatttaga

SEQ ID NO: 71483 - DNA, 15 bp, Homo sapiens
gtaggttatttagat

SEQ ID NO: 71484 - DNA, 15 bp, Homo sapiens
taggttatttagatt

SEQ ID NO: 71485 - DNA, 15 bp, Homo sapiens
aggttatttagattt

SEQ ID NO: 71486 - DNA, 15 bp, Homo sapiens
ggttatttagatttt

SEQ ID NO: 71487 - DNA, 15 bp, Homo sapiens
gttatttagattttc

SEQ ID NO: 71488 - DNA, 15 bp, Homo sapiens
ttatttagattttct

SEQ ID NO: 71489 - DNA, 15 bp, Homo sapiens
tatttagattttctc

SEQ ID NO: 71490 - DNA, 15 bp, Homo sapiens
atttagattttctca

SEQ ID NO: 71491 - DNA, 15 bp, Homo sapiens
tttagattttctcaa

SEQ ID NO: 71492 - DNA, 15 bp, Homo sapiens
ttagattttctcaat

SEQ ID NO: 71493 - DNA, 15 bp, Homo sapiens
tagattttctcaatc

SEQ ID NO: 71494 - DNA, 15 bp, Homo sapiens
agattttctcaatct

SEQ ID NO: 71495 - DNA, 15 bp, Homo sapiens
gattttctcaatcta

SEQ ID NO: 71496 - DNA, 15 bp, Homo sapiens
attttctcaatctat

SEQ ID NO: 71497 - DNA, 15 bp, Homo sapiens
ttttctcaatctatt

SEQ ID NO: 71498 - DNA, 15 bp, Homo sapiens
tttctcaatctattt

SEQ ID NO: 71499 - DNA, 15 bp, Homo sapiens
ttctcaatctatttt

SEQ ID NO: 71500 - DNA, 15 bp, Homo sapiens
tctcaatctatttta

SEQ ID NO: 71501 - DNA, 15 bp, Homo sapiens
ctcaatctattttat

SEQ ID NO: 71502 - DNA, 15 bp, Homo sapiens
tcaatctattttatc

SEQ ID NO: 71503 - DNA, 15 bp, Homo sapiens
caatctattttatct

SEQ ID NO: 71504 - DNA, 15 bp, Homo sapiens
aatctattttatctg

SEQ ID NO: 71505 - DNA, 15 bp, Homo sapiens
atctattttatctgt

SEQ ID NO: 71506 - DNA, 15 bp, Homo sapiens
tctattttatctgta

SEQ ID NO: 71507 - DNA, 15 bp, Homo sapiens
ctattttatctgtaa

SEQ ID NO: 71508 - DNA, 15 bp, Homo sapiens
tattttatctgtaaa

SEQ ID NO: 71509 - DNA, 15 bp, Homo sapiens
attttatctgtaaaa

SEQ ID NO: 71510 - DNA, 15 bp, Homo sapiens
ttttatctgtaaaat

SEQ ID NO: 71511 - DNA, 15 bp, Homo sapiens
tttatctgtaaaatg

SEQ ID NO: 71512 - DNA, 15 bp, Homo sapiens
ttatctgtaaaatgg

SEQ ID NO: 71513 - DNA, 15 bp, Homo sapiens
tatctgtaaaatggg

SEQ ID NO: 71514 - DNA, 15 bp, Homo sapiens
atctgtaaaatgggg

SEQ ID NO: 71515 - DNA, 15 bp, Homo sapiens
tctgtaaaatgggga

SEQ ID NO: 71516 - DNA, 15 bp, Homo sapiens
ctgtaaaatggggat

SEQ ID NO: 71517 - DNA, 15 bp, Homo sapiens
tgtaaaatggggatg

SEQ ID NO: 71518 - DNA, 15 bp, Homo sapiens
gtaaaatggggatga

SEQ ID NO: 71519 - DNA, 15 bp, Homo sapiens
taaaatggggatgat

SEQ ID NO: 71520 - DNA, 15 bp, Homo sapiens
aaaatggggatgata

SEQ ID NO: 71521 - DNA, 15 bp, Homo sapiens
aaatggggatgataa

SEQ ID NO: 71522 - DNA, 15 bp, Homo sapiens
aatggggatgataat

SEQ ID NO: 71523 - DNA, 15 bp, Homo sapiens
atggggatgataatg

SEQ ID NO: 71524 - DNA, 15 bp, Homo sapiens
tggggatgataatgg

SEQ ID NO: 71525 - DNA, 15 bp, Homo sapiens
ggggatgataatgga

SEQ ID NO: 71526 - DNA, 15 bp, Homo sapiens
gggatgataatggaa

SEQ ID NO: 71527 - DNA, 15 bp, Homo sapiens
ggatgataatggaac

SEQ ID NO: 71528 - DNA, 15 bp, Homo sapiens
gatgataatggaacc

SEQ ID NO: 71529 - DNA, 15 bp, Homo sapiens
atgataatggaacct

SEQ ID NO: 71530 - DNA, 15 bp, Homo sapiens
tgataatggaaccta

SEQ ID NO: 71531 - DNA, 15 bp, Homo sapiens
gataatggaacctac

SEQ ID NO: 71532 - DNA, 15 bp, Homo sapiens
ataatggaacctacc

SEQ ID NO: 71533 - DNA, 15 bp, Homo sapiens
taatggaacctaccg

SEQ ID NO: 71534 - DNA, 15 bp, Homo sapiens
aatggaacctaccgc

SEQ ID NO: 71535 - DNA, 15 bp, Homo sapiens
atggaacctaccgca

SEQ ID NO: 71536 - DNA, 15 bp, Homo sapiens
tggaacctaccgcat

SEQ ID NO: 71537 - DNA, 15 bp, Homo sapiens
ggaacctaccgcata

SEQ ID NO: 71538 - DNA, 15 bp, Homo sapiens
gaacctaccgcatac

SEQ ID NO: 71539 - DNA, 15 bp, Homo sapiens
aacctaccgcatacg

SEQ ID NO: 71540 - DNA, 15 bp, Homo sapiens
acctaccgcatacgt

SEQ ID NO: 71541 - DNA, 15 bp, Homo sapiens
cctaccgcatacgtt

SEQ ID NO: 71542 - DNA, 15 bp, Homo sapiens
ctaccgcatacgttt

SEQ ID NO: 71543 - DNA, 15 bp, Homo sapiens
taccgcatacgttta

SEQ ID NO: 71544 - DNA, 15 bp, Homo sapiens
accgcatacgtttat

SEQ ID NO: 71545 - DNA, 15 bp, Homo sapiens
ccgcatacgtttatc

SEQ ID NO: 71546 - DNA, 15 bp, Homo sapiens
cgcatacgtttatct

SEQ ID NO: 71547 - DNA, 15 bp, Homo sapiens
gcatacgtttatctt

SEQ ID NO: 71548 - DNA, 15 bp, Homo sapiens
catacgtttatcttg

SEQ ID NO: 71549 - DNA, 15 bp, Homo sapiens
atacgtttatcttga

SEQ ID NO: 71550 - DNA, 15 bp, Homo sapiens
tacgtttatcttgaa

SEQ ID NO: 71551 - DNA, 15 bp, Homo sapiens
acgtttatcttgaat

SEQ ID NO: 71552 - DNA, 15 bp, Homo sapiens
cgtttatcttgaata

SEQ ID NO: 71553 - DNA, 15 bp, Homo sapiens
gtttatcttgaatag

SEQ ID NO: 71554 - DNA, 15 bp, Homo sapiens
tttatcttgaatagt

SEQ ID NO: 71555 - DNA, 15 bp, Homo sapiens
ttatcttgaatagta

SEQ ID NO: 71556 - DNA, 15 bp, Homo sapiens
tatcttgaatagtaa

SEQ ID NO: 71557 - DNA, 15 bp, Homo sapiens
atcttgaatagtaag

SEQ ID NO: 71558 - DNA, 15 bp, Homo sapiens
tcttgaatagtaagt

SEQ ID NO: 71559 - DNA, 15 bp, Homo sapiens
cttgaatagtaagtg

SEQ ID NO: 71560 - DNA, 15 bp, Homo sapiens
ttgaatagtaagtga

SEQ ID NO: 71561 - DNA, 15 bp, Homo sapiens
tgaatagtaagtgag

SEQ ID NO: 71562 - DNA, 15 bp, Homo sapiens
gaatagtaagtgaga

SEQ ID NO: 71563 - DNA, 15 bp, Homo sapiens
aatagtaagtgagat

SEQ ID NO: 71564 - DNA, 15 bp, Homo sapiens
atagtaagtgagata

SEQ ID NO: 71565 - DNA, 15 bp, Homo sapiens
tagtaagtgagataa

SEQ ID NO: 71566 - DNA, 15 bp, Homo sapiens
agtaagtgagataat

SEQ ID NO: 71567 - DNA, 15 bp, Homo sapiens
gtaagtgagataata

SEQ ID NO: 71568 - DNA, 15 bp, Homo sapiens
taagtgagataataa

SEQ ID NO: 71569 - DNA, 15 bp, Homo sapiens
aagtgagataataat

SEQ ID NO: 71570 - DNA, 15 bp, Homo sapiens
agtgagataataata

SEQ ID NO: 71571 - DNA, 15 bp, Homo sapiens
gtgagataataataa

SEQ ID NO: 71572 - DNA, 15 bp, Homo sapiens
tgagataataataag

SEQ ID NO: 71573 - DNA, 15 bp, Homo sapiens
gagataataataagt

SEQ ID NO: 71574 - DNA, 15 bp, Homo sapiens
agataataataagta

SEQ ID NO: 71575 - DNA, 15 bp, Homo sapiens
gataataataagtaa

SEQ ID NO: 71576 - DNA, 15 bp, Homo sapiens
ataataataagtaat

SEQ ID NO: 71577 - DNA, 15 bp, Homo sapiens
taataataagtaatt

SEQ ID NO: 71578 - DNA, 15 bp, Homo sapiens
aataataagtaattt

SEQ ID NO: 71579 - DNA, 15 bp, Homo sapiens
ataataagtaatttc

SEQ ID NO: 71580 - DNA, 15 bp, Homo sapiens
taataagtaatttca

SEQ ID NO: 71581 - DNA, 15 bp, Homo sapiens
aataagtaatttcat

SEQ ID NO: 71582 - DNA, 15 bp, Homo sapiens
ataagtaatttcatt

SEQ ID NO: 71583 - DNA, 15 bp, Homo sapiens
taagtaatttcattt

SEQ ID NO: 71584 - DNA, 15 bp, Homo sapiens
aagtaatttcattta

SEQ ID NO: 71585 - DNA, 15 bp, Homo sapiens
agtaatttcatttag

SEQ ID NO: 71586 - DNA, 15 bp, Homo sapiens
gtaatttcatttagc

SEQ ID NO: 71587 - DNA, 15 bp, Homo sapiens
taatttcatttagca

SEQ ID NO: 71588 - DNA, 15 bp, Homo sapiens
aatttcatttagcat

SEQ ID NO: 71589 - DNA, 15 bp, Homo sapiens
atttcatttagcata

SEQ ID NO: 71590 - DNA, 15 bp, Homo sapiens
tttcatttagcatag

SEQ ID NO: 71591 - DNA, 15 bp, Homo sapiens
ttcatttagcatagt

SEQ ID NO: 71592 - DNA, 15 bp, Homo sapiens
tcatttagcatagta

SEQ ID NO: 71593 - DNA, 15 bp, Homo sapiens
catttagcatagtac

SEQ ID NO: 71594 - DNA, 15 bp, Homo sapiens
atttagcatagtacc

SEQ ID NO: 71595 - DNA, 15 bp, Homo sapiens
tttagcatagtacct

SEQ ID NO: 71596 - DNA, 15 bp, Homo sapiens
ttagcatagtacctg

SEQ ID NO: 71597 - DNA, 15 bp, Homo sapiens
tagcatagtacctgc

SEQ ID NO: 71598 - DNA, 15 bp, Homo sapiens
agcatagtacctgcc

SEQ ID NO: 71599 - DNA, 15 bp, Homo sapiens
gcatagtacctgcca

SEQ ID NO: 71600 - DNA, 15 bp, Homo sapiens
catagtacctgccac

SEQ ID NO: 71601 - DNA, 15 bp, Homo sapiens
atagtacctgccaca

SEQ ID NO: 71602 - DNA, 15 bp, Homo sapiens
tagtacctgccacat

SEQ ID NO: 71603 - DNA, 15 bp, Homo sapiens
agtacctgccacatt

SEQ ID NO: 71604 - DNA, 15 bp, Homo sapiens
gtacctgccacattg

SEQ ID NO: 71605 - DNA, 15 bp, Homo sapiens
tacctgccacattgt

SEQ ID NO: 71606 - DNA, 15 bp, Homo sapiens
acctgccacattgta

SEQ ID NO: 71607 - DNA, 15 bp, Homo sapiens
cctgccacattgtaa

SEQ ID NO: 71608 - DNA, 15 bp, Homo sapiens
ctgccacattgtaaa

SEQ ID NO: 71609 - DNA, 15 bp, Homo sapiens
tgccacattgtaaat

SEQ ID NO: 71610 - DNA, 15 bp, Homo sapiens
gccacattgtaaata

SEQ ID NO: 71611 - DNA, 15 bp, Homo sapiens
ccacattgtaaatac

SEQ ID NO: 71612 - DNA, 15 bp, Homo sapiens
cacattgtaaatact

SEQ ID NO: 71613 - DNA, 15 bp, Homo sapiens
acattgtaaatactt

SEQ ID NO: 71614 - DNA, 15 bp, Homo sapiens
cattgtaaatactta

SEQ ID NO: 71615 - DNA, 15 bp, Homo sapiens
attgtaaatacttaa

SEQ ID NO: 71616 - DNA, 15 bp, Homo sapiens
ttgtaaatacttaaa

SEQ ID NO: 71617 - DNA, 15 bp, Homo sapiens
tgtaaatacttaaat

SEQ ID NO: 71618 - DNA, 15 bp, Homo sapiens
gtaaatacttaaatg

SEQ ID NO: 71619 - DNA, 15 bp, Homo sapiens
taaatacttaaatgg

SEQ ID NO: 71620 - DNA, 15 bp, Homo sapiens
aaatacttaaatggt

SEQ ID NO: 71621 - DNA, 15 bp, Homo sapiens
aatacttaaatggta

SEQ ID NO: 71622 - DNA, 15 bp, Homo sapiens
atacttaaatggtag

SEQ ID NO: 71623 - DNA, 15 bp, Homo sapiens
tacttaaatggtagc

SEQ ID NO: 71624 - DNA, 15 bp, Homo sapiens
acttaaatggtagct

SEQ ID NO: 71625 - DNA, 15 bp, Homo sapiens
cttaaatggtagcta

SEQ ID NO: 71626 - DNA, 15 bp, Homo sapiens
ttaaatggtagctac

SEQ ID NO: 71627 - DNA, 15 bp, Homo sapiens
taaatggtagctact

SEQ ID NO: 71628 - DNA, 15 bp, Homo sapiens
aaatggtagctactg

SEQ ID NO: 71629 - DNA, 15 bp, Homo sapiens
aatggtagctactgc

SEQ ID NO: 71630 - DNA, 15 bp, Homo sapiens
atggtagctactgct

SEQ ID NO: 71631 - DNA, 15 bp, Homo sapiens
tggtagctactgctc

SEQ ID NO: 71632 - DNA, 15 bp, Homo sapiens
ggtagctactgctct

SEQ ID NO: 71633 - DNA, 15 bp, Homo sapiens
gtagctactgctctg

SEQ ID NO: 71634 - DNA, 15 bp, Homo sapiens
tagctactgctctga

SEQ ID NO: 71635 - DNA, 15 bp, Homo sapiens
agctactgctctgaa

SEQ ID NO: 71636 - DNA, 15 bp, Homo sapiens
gctactgctctgaaa

SEQ ID NO: 71637 - DNA, 15 bp, Homo sapiens
ctactgctctgaaaa

SEQ ID NO: 71638 - DNA, 15 bp, Homo sapiens
tactgctctgaaaaa

SEQ ID NO: 71639 - DNA, 15 bp, Homo sapiens
actgctctgaaaaac

SEQ ID NO: 71640 - DNA, 15 bp, Homo sapiens
ctgctctgaaaaact

SEQ ID NO: 71641 - DNA, 15 bp, Homo sapiens
tgctctgaaaaactg

SEQ ID NO: 71642 - DNA, 15 bp, Homo sapiens
gctctgaaaaactgt

SEQ ID NO: 71643 - DNA, 15 bp, Homo sapiens
ctctgaaaaactgta

SEQ ID NO: 71644 - DNA, 15 bp, Homo sapiens
tctgaaaaactgtaa

SEQ ID NO: 71645 - DNA, 15 bp, Homo sapiens
ctgaaaaactgtaat

SEQ ID NO: 71646 - DNA, 15 bp, Homo sapiens
tgaaaaactgtaatt

SEQ ID NO: 71647 - DNA, 15 bp, Homo sapiens
gaaaaactgtaattt

SEQ ID NO: 71648 - DNA, 15 bp, Homo sapiens
aaaaactgtaatttc

SEQ ID NO: 71649 - DNA, 15 bp, Homo sapiens
aaaactgtaatttca

SEQ ID NO: 71650 - DNA, 15 bp, Homo sapiens
aaactgtaatttcag

SEQ ID NO: 71651 - DNA, 15 bp, Homo sapiens
aactgtaatttcagg

SEQ ID NO: 71652 - DNA, 15 bp, Homo sapiens
actgtaatttcaggt

SEQ ID NO: 71653 - DNA, 15 bp, Homo sapiens
ctgtaatttcaggtt

SEQ ID NO: 71654 - DNA, 15 bp, Homo sapiens
tgtaatttcaggtta

SEQ ID NO: 71655 - DNA, 15 bp, Homo sapiens
gtaatttcaggttat

SEQ ID NO: 71656 - DNA, 15 bp, Homo sapiens
taatttcaggttatg

SEQ ID NO: 71657 - DNA, 15 bp, Homo sapiens
aatttcaggttatgt

SEQ ID NO: 71658 - DNA, 15 bp, Homo sapiens
atttcaggttatgta

SEQ ID NO: 71659 - DNA, 15 bp, Homo sapiens
tttcaggttatgtat

SEQ ID NO: 71660 - DNA, 15 bp, Homo sapiens
ttcaggttatgtatg

SEQ ID NO: 71661 - DNA, 15 bp, Homo sapiens
tcaggttatgtatgt

SEQ ID NO: 71662 - DNA, 15 bp, Homo sapiens
caggttatgtatgta

SEQ ID NO: 71663 - DNA, 15 bp, Homo sapiens
aggttatgtatgtag

SEQ ID NO: 71664 - DNA, 15 bp, Homo sapiens
ggttatgtatgtagg

SEQ ID NO: 71665 - DNA, 15 bp, Homo sapiens
gttatgtatgtaggg

SEQ ID NO: 71666 - DNA, 15 bp, Homo sapiens
ttatgtatgtaggga

SEQ ID NO: 71667 - DNA, 15 bp, Homo sapiens
tatgtatgtagggaa

SEQ ID NO: 71668 - DNA, 15 bp, Homo sapiens
atgtatgtagggaaa

SEQ ID NO: 71669 - DNA, 15 bp, Homo sapiens
tgtatgtagggaaat

SEQ ID NO: 71670 - DNA, 15 bp, Homo sapiens
gtatgtagggaaatt

SEQ ID NO: 71671 - DNA, 15 bp, Homo sapiens
tatgtagggaaatta

SEQ ID NO: 71672 - DNA, 15 bp, Homo sapiens
atgtagggaaattat

SEQ ID NO: 71673 - DNA, 15 bp, Homo sapiens
tgtagggaaattatt

SEQ ID NO: 71674 - DNA, 15 bp, Homo sapiens
gtagggaaattattt

SEQ ID NO: 71675 - DNA, 15 bp, Homo sapiens
tagggaaattatttg

SEQ ID NO: 71676 - DNA, 15 bp, Homo sapiens
agggaaattatttgt

SEQ ID NO: 71677 - DNA, 15 bp, Homo sapiens
gggaaattatttgta

SEQ ID NO: 71678 - DNA, 15 bp, Homo sapiens
ggaaattatttgtat

SEQ ID NO: 71679 - DNA, 15 bp, Homo sapiens
gaaattatttgtatt

SEQ ID NO: 71680 - DNA, 15 bp, Homo sapiens
aaattatttgtattt

SEQ ID NO: 71681 - DNA, 15 bp, Homo sapiens
aattatttgtatttt

SEQ ID NO: 71682 - DNA, 15 bp, Homo sapiens
attatttgtattttc

SEQ ID NO: 71683 - DNA, 15 bp, Homo sapiens
ttatttgtattttca

SEQ ID NO: 71684 - DNA, 15 bp, Homo sapiens
tatttgtattttcat

SEQ ID NO: 71685 - DNA, 15 bp, Homo sapiens
atttgtattttcatt

SEQ ID NO: 71686 - DNA, 15 bp, Homo sapiens
tttgtattttcattt

SEQ ID NO: 71687 - DNA, 15 bp, Homo sapiens
ttgtattttcattta

SEQ ID NO: 71688 - DNA, 15 bp, Homo sapiens
tgtattttcatttat

SEQ ID NO: 71689 - DNA, 15 bp, Homo sapiens
gtattttcatttatg

SEQ ID NO: 71690 - DNA, 15 bp, Homo sapiens
tattttcatttatgg

SEQ ID NO: 71691 - DNA, 15 bp, Homo sapiens
attttcatttatggt

SEQ ID NO: 71692 - DNA, 15 bp, Homo sapiens
ttttcatttatggtg

SEQ ID NO: 71693 - DNA, 15 bp, Homo sapiens
tttcatttatggtgt

SEQ ID NO: 71694 - DNA, 15 bp, Homo sapiens
ttcatttatggtgta

SEQ ID NO: 71695 - DNA, 15 bp, Homo sapiens
tcatttatggtgtat

SEQ ID NO: 71696 - DNA, 15 bp, Homo sapiens
catttatggtgtatg

SEQ ID NO: 71697 - DNA, 15 bp, Homo sapiens
atttatggtgtatga

SEQ ID NO: 71698 - DNA, 15 bp, Homo sapiens
tttatggtgtatgat

SEQ ID NO: 71699 - DNA, 15 bp, Homo sapiens
ttatggtgtatgatt

SEQ ID NO: 71700 - DNA, 15 bp, Homo sapiens
tatggtgtatgattg

SEQ ID NO: 71701 - DNA, 15 bp, Homo sapiens
atggtgtatgattgt

SEQ ID NO: 71702 - DNA, 15 bp, Homo sapiens
tggtgtatgattgta

SEQ ID NO: 71703 - DNA, 15 bp, Homo sapiens
ggtgtatgattgtaa

SEQ ID NO: 71704 - DNA, 15 bp, Homo sapiens
gtgtatgattgtaac

SEQ ID NO: 71705 - DNA, 15 bp, Homo sapiens
tgtatgattgtaact

SEQ ID NO: 71706 - DNA, 15 bp, Homo sapiens
gtatgattgtaactg

SEQ ID NO: 71707 - DNA, 15 bp, Homo sapiens
tatgattgtaactga

SEQ ID NO: 71708 - DNA, 15 bp, Homo sapiens
atgattgtaactgaa

SEQ ID NO: 71709 - DNA, 15 bp, Homo sapiens
tgattgtaactgaat

SEQ ID NO: 71710 - DNA, 15 bp, Homo sapiens
gattgtaactgaatt

SEQ ID NO: 71711 - DNA, 15 bp, Homo sapiens
attgtaactgaattt

SEQ ID NO: 71712 - DNA, 15 bp, Homo sapiens
ttgtaactgaatttc

SEQ ID NO: 71713 - DNA, 15 bp, Homo sapiens
tgtaactgaatttcc

SEQ ID NO: 71714 - DNA, 15 bp, Homo sapiens
gtaactgaatttcct

SEQ ID NO: 71715 - DNA, 15 bp, Homo sapiens
taactgaatttcctc

SEQ ID NO: 71716 - DNA, 15 bp, Homo sapiens
aactgaatttcctca

SEQ ID NO: 71717 - DNA, 15 bp, Homo sapiens
actgaatttcctcag

SEQ ID NO: 71718 - DNA, 15 bp, Homo sapiens
ctgaatttcctcagt

SEQ ID NO: 71719 - DNA, 15 bp, Homo sapiens
tgaatttcctcagtt

SEQ ID NO: 71720 - DNA, 15 bp, Homo sapiens
gaatttcctcagttt

SEQ ID NO: 71721 - DNA, 15 bp, Homo sapiens
aatttcctcagtttg

SEQ ID NO: 71722 - DNA, 15 bp, Homo sapiens
atttcctcagtttgg

SEQ ID NO: 71723 - DNA, 15 bp, Homo sapiens
tttcctcagtttggg

SEQ ID NO: 71724 - DNA, 15 bp, Homo sapiens
ttcctcagtttgggc

SEQ ID NO: 71725 - DNA, 15 bp, Homo sapiens
tcctcagtttgggcc

SEQ ID NO: 71726 - DNA, 15 bp, Homo sapiens
cctcagtttgggcca

SEQ ID NO: 71727 - DNA, 15 bp, Homo sapiens
ctcagtttgggccat

SEQ ID NO: 71728 - DNA, 15 bp, Homo sapiens
tcagtttgggccatg

SEQ ID NO: 71729 - DNA, 15 bp, Homo sapiens
cagtttgggccatgt

SEQ ID NO: 71730 - DNA, 15 bp, Homo sapiens
agtttgggccatgtt

SEQ ID NO: 71731 - DNA, 15 bp, Homo sapiens
gtttgggccatgtta

SEQ ID NO: 71732 - DNA, 15 bp, Homo sapiens
tttgggccatgttag

SEQ ID NO: 71733 - DNA, 15 bp, Homo sapiens
ttgggccatgttagg

SEQ ID NO: 71734 - DNA, 15 bp, Homo sapiens
tgggccatgttagga

SEQ ID NO: 71735 - DNA, 15 bp, Homo sapiens
gggccatgttaggat

SEQ ID NO: 71736 - DNA, 15 bp, Homo sapiens
ggccatgttaggatt

SEQ ID NO: 71737 - DNA, 15 bp, Homo sapiens
gccatgttaggattt

SEQ ID NO: 71738 - DNA, 15 bp, Homo sapiens
ccatgttaggatttt

SEQ ID NO: 71739 - DNA, 15 bp, Homo sapiens
catgttaggattttg

SEQ ID NO: 71740 - DNA, 15 bp, Homo sapiens
atgttaggattttgt

SEQ ID NO: 71741 - DNA, 15 bp, Homo sapiens
tgttaggattttgtt

SEQ ID NO: 71742 - DNA, 15 bp, Homo sapiens
gttaggattttgttt

SEQ ID NO: 71743 - DNA, 15 bp, Homo sapiens
ttaggattttgtttc

SEQ ID NO: 71744 - DNA, 15 bp, Homo sapiens
taggattttgtttca

SEQ ID NO: 71745 - DNA, 15 bp, Homo sapiens
aggattttgtttcaa

SEQ ID NO: 71746 - DNA, 15 bp, Homo sapiens
ggattttgtttcaag

SEQ ID NO: 71747 - DNA, 15 bp, Homo sapiens
gattttgtttcaagt

SEQ ID NO: 71748 - DNA, 15 bp, Homo sapiens
attttgtttcaagtt

SEQ ID NO: 71749 - DNA, 15 bp, Homo sapiens
ttttgtttcaagtta

SEQ ID NO: 71750 - DNA, 15 bp, Homo sapiens
tttgtttcaagttat

SEQ ID NO: 71751 - DNA, 15 bp, Homo sapiens
ttgtttcaagttata

SEQ ID NO: 71752 - DNA, 15 bp, Homo sapiens
tgtttcaagttataa

SEQ ID NO: 71753 - DNA, 15 bp, Homo sapiens
gtttcaagttataag

SEQ ID NO: 71754 - DNA, 15 bp, Homo sapiens
tttcaagttataagt

SEQ ID NO: 71755 - DNA, 15 bp, Homo sapiens
ttcaagttataagtg

SEQ ID NO: 71756 - DNA, 15 bp, Homo sapiens
tcaagttataagtgt

SEQ ID NO: 71757 - DNA, 15 bp, Homo sapiens
caagttataagtgtt

SEQ ID NO: 71758 - DNA, 15 bp, Homo sapiens
aagttataagtgttt

SEQ ID NO: 71759 - DNA, 15 bp, Homo sapiens
agttataagtgtttt

SEQ ID NO: 71760 - DNA, 15 bp, Homo sapiens
gttataagtgttttt

SEQ ID NO: 71761 - DNA, 15 bp, Homo sapiens
ttataagtgttttta

SEQ ID NO: 71762 - DNA, 15 bp, Homo sapiens
tataagtgtttttaa

SEQ ID NO: 71763 - DNA, 15 bp, Homo sapiens
ataagtgtttttaaa

SEQ ID NO: 71764 - DNA, 15 bp, Homo sapiens
taagtgtttttaaaa

SEQ ID NO: 71765 - DNA, 15 bp, Homo sapiens
aagtgtttttaaaaa

SEQ ID NO: 71766 - DNA, 15 bp, Homo sapiens
agtgtttttaaaaat

SEQ ID NO: 71767 - DNA, 15 bp, Homo sapiens
gtgtttttaaaaata

SEQ ID NO: 71768 - DNA, 15 bp, Homo sapiens
tgtttttaaaaataa

SEQ ID NO: 71769 - DNA, 15 bp, Homo sapiens
gtttttaaaaataag

SEQ ID NO: 71770 - DNA, 15 bp, Homo sapiens
tttttaaaaataagg

SEQ ID NO: 71771 - DNA, 15 bp, Homo sapiens
ttttaaaaataaggg

SEQ ID NO: 71772 - DNA, 15 bp, Homo sapiens
tttaaaaataagggt

SEQ ID NO: 71773 - DNA, 15 bp, Homo sapiens
ttaaaaataagggta

SEQ ID NO: 71774 - DNA, 15 bp, Homo sapiens
taaaaataagggtat

SEQ ID NO: 71775 - DNA, 15 bp, Homo sapiens
aaaaataagggtatt

SEQ ID NO: 71776 - DNA, 15 bp, Homo sapiens
aaaataagggtattc

SEQ ID NO: 71777 - DNA, 15 bp, Homo sapiens
aaataagggtattcc

SEQ ID NO: 71778 - DNA, 15 bp, Homo sapiens
aataagggtattcct

SEQ ID NO: 71779 - DNA, 15 bp, Homo sapiens
ataagggtattcctt

SEQ ID NO: 71780 - DNA, 15 bp, Homo sapiens
taagggtattccttt

SEQ ID NO: 71781 - DNA, 15 bp, Homo sapiens
aagggtattccttta

SEQ ID NO: 71782 - DNA, 15 bp, Homo sapiens
agggtattcctttag

SEQ ID NO: 71783 - DNA, 15 bp, Homo sapiens
gggtattcctttagg

SEQ ID NO: 71784 - DNA, 15 bp, Homo sapiens
ggtattcctttagga

SEQ ID NO: 71785 - DNA, 15 bp, Homo sapiens
gtattcctttaggaa

SEQ ID NO: 71786 - DNA, 15 bp, Homo sapiens
tattcctttaggaag

SEQ ID NO: 71787 - DNA, 15 bp, Homo sapiens
attcctttaggaagt

SEQ ID NO: 71788 - DNA, 15 bp, Homo sapiens
ttcctttaggaagtc

SEQ ID NO: 71789 - DNA, 15 bp, Homo sapiens
tcctttaggaagtct

SEQ ID NO: 71790 - DNA, 15 bp, Homo sapiens
cctttaggaagtctg

SEQ ID NO: 71791 - DNA, 15 bp, Homo sapiens
ctttaggaagtctgg

SEQ ID NO: 71792 - DNA, 15 bp, Homo sapiens
tttaggaagtctggg

SEQ ID NO: 71793 - DNA, 15 bp, Homo sapiens
ttaggaagtctgggt

SEQ ID NO: 71794 - DNA, 15 bp, Homo sapiens
taggaagtctgggta

SEQ ID NO: 71795 - DNA, 15 bp, Homo sapiens
aggaagtctgggtat

SEQ ID NO: 71796 - DNA, 15 bp, Homo sapiens
ggaagtctgggtatg

SEQ ID NO: 71797 - DNA, 15 bp, Homo sapiens
gaagtctgggtatga

SEQ ID NO: 71798 - DNA, 15 bp, Homo sapiens
aagtctgggtatgac

SEQ ID NO: 71799 - DNA, 15 bp, Homo sapiens
agtctgggtatgaca

SEQ ID NO: 71800 - DNA, 15 bp, Homo sapiens
gtctgggtatgacat

SEQ ID NO: 71801 - DNA, 15 bp, Homo sapiens
tctgggtatgacatg

SEQ ID NO: 71802 - DNA, 15 bp, Homo sapiens
ctgggtatgacatgt

SEQ ID NO: 71803 - DNA, 15 bp, Homo sapiens
tgggtatgacatgtc

SEQ ID NO: 71804 - DNA, 15 bp, Homo sapiens
gggtatgacatgtct

SEQ ID NO: 71805 - DNA, 15 bp, Homo sapiens
ggtatgacatgtctg

SEQ ID NO: 71806 - DNA, 15 bp, Homo sapiens
gtatgacatgtctgt

SEQ ID NO: 71807 - DNA, 15 bp, Homo sapiens
tatgacatgtctgtg

SEQ ID NO: 71808 - DNA, 15 bp, Homo sapiens
atgacatgtctgtga

SEQ ID NO: 71809 - DNA, 15 bp, Homo sapiens
tgacatgtctgtgat

SEQ ID NO: 71810 - DNA, 15 bp, Homo sapiens
gacatgtctgtgatt

SEQ ID NO: 71811 - DNA, 15 bp, Homo sapiens
acatgtctgtgattt

SEQ ID NO: 71812 - DNA, 15 bp, Homo sapiens
catgtctgtgatttt

SEQ ID NO: 71813 - DNA, 15 bp, Homo sapiens
atgtctgtgattttg

SEQ ID NO: 71814 - DNA, 15 bp, Homo sapiens
tgtctgtgattttgc

SEQ ID NO: 71815 - DNA, 15 bp, Homo sapiens
gtctgtgattttgct

SEQ ID NO: 71816 - DNA, 15 bp, Homo sapiens
tctgtgattttgctg

SEQ ID NO: 71817 - DNA, 15 bp, Homo sapiens
ctgtgattttgctgg

SEQ ID NO: 71818 - DNA, 15 bp, Homo sapiens
tgtgattttgctggt

SEQ ID NO: 71819 - DNA, 15 bp, Homo sapiens
gtgattttgctggtt

SEQ ID NO: 71820 - DNA, 15 bp, Homo sapiens
tgattttgctggttc

SEQ ID NO: 71821 - DNA, 15 bp, Homo sapiens
gattttgctggttca

SEQ ID NO: 71822 - DNA, 15 bp, Homo sapiens
attttgctggttcat

SEQ ID NO: 71823 - DNA, 15 bp, Homo sapiens
ttttgctggttcatc

SEQ ID NO: 71824 - DNA, 15 bp, Homo sapiens
tttgctggttcatca

SEQ ID NO: 71825 - DNA, 15 bp, Homo sapiens
ttgctggttcatcac

SEQ ID NO: 71826 - DNA, 15 bp, Homo sapiens
tgctggttcatcaca

SEQ ID NO: 71827 - DNA, 15 bp, Homo sapiens
gctggttcatcacaa

SEQ ID NO: 71828 - DNA, 15 bp, Homo sapiens
ctggttcatcacaaa

SEQ ID NO: 71829 - DNA, 15 bp, Homo sapiens
tggttcatcacaaat

SEQ ID NO: 71830 - DNA, 15 bp, Homo sapiens
ggttcatcacaaatg

SEQ ID NO: 71831 - DNA, 15 bp, Homo sapiens
gttcatcacaaatgg

SEQ ID NO: 71832 - DNA, 15 bp, Homo sapiens
ttcatcacaaatggg

SEQ ID NO: 71833 - DNA, 15 bp, Homo sapiens
tcatcacaaatggga

SEQ ID NO: 71834 - DNA, 15 bp, Homo sapiens
catcacaaatgggaa

SEQ ID NO: 71835 - DNA, 15 bp, Homo sapiens
atcacaaatgggaaa

SEQ ID NO: 71836 - DNA, 15 bp, Homo sapiens
tcacaaatgggaaat

SEQ ID NO: 71837 - DNA, 15 bp, Homo sapiens
cacaaatgggaaata

SEQ ID NO: 71838 - DNA, 15 bp, Homo sapiens
acaaatgggaaataa

SEQ ID NO: 71839 - DNA, 15 bp, Homo sapiens
caaatgggaaataaa

SEQ ID NO: 71840 - DNA, 15 bp, Homo sapiens
aaatgggaaataaat

SEQ ID NO: 71841 - DNA, 15 bp, Homo sapiens
aatgggaaataaatc

SEQ ID NO: 71842 - DNA, 15 bp, Homo sapiens
atgggaaataaatct

SEQ ID NO: 71843 - DNA, 15 bp, Homo sapiens
tgggaaataaatctc

SEQ ID NO: 71844 - DNA, 15 bp, Homo sapiens
gggaaataaatctct

SEQ ID NO: 71845 - DNA, 15 bp, Homo sapiens
ggaaataaatctctg

SEQ ID NO: 71846 - DNA, 15 bp, Homo sapiens
gaaataaatctctgc

SEQ ID NO: 71847 - DNA, 15 bp, Homo sapiens
aaataaatctctgct

SEQ ID NO: 71848 - DNA, 15 bp, Homo sapiens
aataaatctctgcta

SEQ ID NO: 71849 - DNA, 15 bp, Homo sapiens
ataaatctctgctaa

SEQ ID NO: 71850 - DNA, 15 bp, Homo sapiens
taaatctctgctaac

SEQ ID NO: 71851 - DNA, 15 bp, Homo sapiens
aaatctctgctaact

SEQ ID NO: 71852 - DNA, 15 bp, Homo sapiens
aatctctgctaactc

SEQ ID NO: 71853 - DNA, 15 bp, Homo sapiens
atctctgctaactca

SEQ ID NO: 71854 - DNA, 15 bp, Homo sapiens
tctctgctaactcaa

SEQ ID NO: 71855 - DNA, 15 bp, Homo sapiens
ctctgctaactcaaa

SEQ ID NO: 71856 - DNA, 15 bp, Homo sapiens
tctgctaactcaaac

SEQ ID NO: 71857 - DNA, 15 bp, Homo sapiens
ctgctaactcaaact

SEQ ID NO: 71858 - DNA, 15 bp, Homo sapiens
tgctaactcaaactg

SEQ ID NO: 71859 - DNA, 15 bp, Homo sapiens
gctaactcaaactgt

SEQ ID NO: 71860 - DNA, 15 bp, Homo sapiens
ctaactcaaactgtt

SEQ ID NO: 71861 - DNA, 15 bp, Homo sapiens
taactcaaactgttg

SEQ ID NO: 71862 - DNA, 15 bp, Homo sapiens
aactcaaactgttga

SEQ ID NO: 71863 - DNA, 15 bp, Homo sapiens
actcaaactgttgac

SEQ ID NO: 71864 - DNA, 15 bp, Homo sapiens
ctcaaactgttgacc

SEQ ID NO: 71865 - DNA, 15 bp, Homo sapiens
tcaaactgttgacca

SEQ ID NO: 71866 - DNA, 15 bp, Homo sapiens
caaactgttgaccaa

SEQ ID NO: 71867 - DNA, 15 bp, Homo sapiens
aaactgttgaccaaa

SEQ ID NO: 71868 - DNA, 15 bp, Homo sapiens
aactgttgaccaaag

SEQ ID NO: 71869 - DNA, 15 bp, Homo sapiens
actgttgaccaaagt

SEQ ID NO: 71870 - DNA, 15 bp, Homo sapiens
ctgttgaccaaagta

SEQ ID NO: 71871 - DNA, 15 bp, Homo sapiens
tgttgaccaaagtaa

SEQ ID NO: 71872 - DNA, 15 bp, Homo sapiens
gttgaccaaagtaaa

SEQ ID NO: 71873 - DNA, 15 bp, Homo sapiens
ttgaccaaagtaaaa

SEQ ID NO: 71874 - DNA, 15 bp, Homo sapiens
tgaccaaagtaaaat

SEQ ID NO: 71875 - DNA, 15 bp, Homo sapiens
gaccaaagtaaaatt

SEQ ID NO: 71876 - DNA, 15 bp, Homo sapiens
accaaagtaaaatta

SEQ ID NO: 71877 - DNA, 15 bp, Homo sapiens
ccaaagtaaaattaa

SEQ ID NO: 71878 - DNA, 15 bp, Homo sapiens
caaagtaaaattaat

SEQ ID NO: 71879 - DNA, 15 bp, Homo sapiens
aaagtaaaattaatt

SEQ ID NO: 71880 - DNA, 15 bp, Homo sapiens
aagtaaaattaatta

SEQ ID NO: 71881 - DNA, 15 bp, Homo sapiens
agtaaaattaattat

SEQ ID NO: 71882 - DNA, 15 bp, Homo sapiens
gtaaaattaattatg

SEQ ID NO: 71883 - DNA, 15 bp, Homo sapiens
taaaattaattatgc

SEQ ID NO: 71884 - DNA, 15 bp, Homo sapiens
aaaattaattatgcc

SEQ ID NO: 71885 - DNA, 15 bp, Homo sapiens
aaattaattatgcca

SEQ ID NO: 71886 - DNA, 15 bp, Homo sapiens
aattaattatgccaa

SEQ ID NO: 71887 - DNA, 15 bp, Homo sapiens
attaattatgccaat

SEQ ID NO: 71888 - DNA, 15 bp, Homo sapiens
ttaattatgccaatc

SEQ ID NO: 71889 - DNA, 15 bp, Homo sapiens
taattatgccaatca

SEQ ID NO: 71890 - DNA, 15 bp, Homo sapiens
aattatgccaatcaa

SEQ ID NO: 71891 - DNA, 15 bp, Homo sapiens
attatgccaatcaaa

SEQ ID NO: 71892 - DNA, 15 bp, Homo sapiens
ttatgccaatcaaaa

SEQ ID NO: 71893 - DNA, 15 bp, Homo sapiens
tatgccaatcaaaaa

SEQ ID NO: 71894 - DNA, 15 bp, Homo sapiens
atgccaatcaaaaac

SEQ ID NO: 71895 - DNA, 15 bp, Homo sapiens
tgccaatcaaaaact

SEQ ID NO: 71896 - DNA, 15 bp, Homo sapiens
gccaatcaaaaacta

SEQ ID NO: 71897 - DNA, 15 bp, Homo sapiens
ccaatcaaaaactat

SEQ ID NO: 71898 - DNA, 15 bp, Homo sapiens
caatcaaaaactatt

SEQ ID NO: 71899 - DNA, 15 bp, Homo sapiens
aatcaaaaactattt

SEQ ID NO: 71900 - DNA, 15 bp, Homo sapiens
atcaaaaactatttg

SEQ ID NO: 71901 - DNA, 15 bp, Homo sapiens
tcaaaaactatttgc

SEQ ID NO: 71902 - DNA, 15 bp, Homo sapiens
caaaaactatttgct

SEQ ID NO: 71903 - DNA, 15 bp, Homo sapiens
aaaaactatttgctt

SEQ ID NO: 71904 - DNA, 15 bp, Homo sapiens
aaaactatttgcttt

SEQ ID NO: 71905 - DNA, 15 bp, Homo sapiens
aaactatttgcttta

SEQ ID NO: 71906 - DNA, 15 bp, Homo sapiens
aactatttgctttaa

SEQ ID NO: 71907 - DNA, 15 bp, Homo sapiens
actatttgctttaaa

SEQ ID NO: 71908 - DNA, 15 bp, Homo sapiens
ctatttgctttaaaa

SEQ ID NO: 71909 - DNA, 15 bp, Homo sapiens
tatttgctttaaaat

SEQ ID NO: 71910 - DNA, 15 bp, Homo sapiens
atttgctttaaaata

SEQ ID NO: 71911 - DNA, 15 bp, Homo sapiens
tttgctttaaaatat

SEQ ID NO: 71912 - DNA, 15 bp, Homo sapiens
ttgctttaaaatata

SEQ ID NO: 71913 - DNA, 15 bp, Homo sapiens
tgctttaaaatataa

SEQ ID NO: 71914 - DNA, 15 bp, Homo sapiens
gctttaaaatataaa

SEQ ID NO: 71915 - DNA, 15 bp, Homo sapiens
ctttaaaatataaaa

SEQ ID NO: 71916 - DNA, 15 bp, Homo sapiens
tttaaaatataaaag

SEQ ID NO: 71917 - DNA, 15 bp, Homo sapiens
ttaaaatataaaagg

SEQ ID NO: 71918 - DNA, 15 bp, Homo sapiens
taaaatataaaaggc

SEQ ID NO: 71919 - DNA, 15 bp, Homo sapiens
aaaatataaaaggca

SEQ ID NO: 71920 - DNA, 15 bp, Homo sapiens
aaatataaaaggcaa

SEQ ID NO: 71921 - DNA, 15 bp, Homo sapiens
aatataaaaggcaaa

SEQ ID NO: 71922 - DNA, 15 bp, Homo sapiens
atataaaaggcaaaa

SEQ ID NO: 71923 - DNA, 15 bp, Homo sapiens
tataaaaggcaaaaa

SEQ ID NO: 71924 - DNA, 15 bp, Homo sapiens
ataaaaggcaaaaac

SEQ ID NO: 71925 - DNA, 15 bp, Homo sapiens
taaaaggcaaaaact

SEQ ID NO: 71926 - DNA, 15 bp, Homo sapiens
aaaaggcaaaaactt

SEQ ID NO: 71927 - DNA, 15 bp, Homo sapiens
aaaggcaaaaacttc

SEQ ID NO: 71928 - DNA, 15 bp, Homo sapiens
aaggcaaaaacttcc

SEQ ID NO: 71929 - DNA, 15 bp, Homo sapiens
aggcaaaaacttcct

SEQ ID NO: 71930 - DNA, 15 bp, Homo sapiens
ggcaaaaacttccta

SEQ ID NO: 71931 - DNA, 15 bp, Homo sapiens
gcaaaaacttcctat

SEQ ID NO: 71932 - DNA, 15 bp, Homo sapiens
caaaaacttcctatt

SEQ ID NO: 71933 - DNA, 15 bp, Homo sapiens
aaaaacttcctatta

SEQ ID NO: 71934 - DNA, 15 bp, Homo sapiens
aaaacttcctattag

SEQ ID NO: 71935 - DNA, 15 bp, Homo sapiens
aaacttcctattagc

SEQ ID NO: 71936 - DNA, 15 bp, Homo sapiens
aacttcctattagca

SEQ ID NO: 71937 - DNA, 15 bp, Homo sapiens
acttcctattagcat

SEQ ID NO: 71938 - DNA, 15 bp, Homo sapiens
cttcctattagcata

SEQ ID NO: 71939 - DNA, 15 bp, Homo sapiens
ttcctattagcataa

SEQ ID NO: 71940 - DNA, 15 bp, Homo sapiens
tcctattagcataat

SEQ ID NO: 71941 - DNA, 15 bp, Homo sapiens
cctattagcataatg

SEQ ID NO: 71942 - DNA, 15 bp, Homo sapiens
ctattagcataatga

SEQ ID NO: 71943 - DNA, 15 bp, Homo sapiens
tattagcataatgaa

SEQ ID NO: 71944 - DNA, 15 bp, Homo sapiens
attagcataatgaag

SEQ ID NO: 71945 - DNA, 15 bp, Homo sapiens
ttagcataatgaagt

SEQ ID NO: 71946 - DNA, 15 bp, Homo sapiens
tagcataatgaagta

SEQ ID NO: 71947 - DNA, 15 bp, Homo sapiens
agcataatgaagtag

SEQ ID NO: 71948 - DNA, 15 bp, Homo sapiens
gcataatgaagtaga

SEQ ID NO: 71949 - DNA, 15 bp, Homo sapiens
cataatgaagtagaa

SEQ ID NO: 71950 - DNA, 15 bp, Homo sapiens
ataatgaagtagaat

SEQ ID NO: 71951 - DNA, 15 bp, Homo sapiens
taatgaagtagaatt

SEQ ID NO: 71952 - DNA, 15 bp, Homo sapiens
aatgaagtagaattt

SEQ ID NO: 71953 - DNA, 15 bp, Homo sapiens
atgaagtagaatttt

SEQ ID NO: 71954 - DNA, 15 bp, Homo sapiens
tgaagtagaattttt

SEQ ID NO: 71955 - DNA, 15 bp, Homo sapiens
gaagtagaattttta

SEQ ID NO: 71956 - DNA, 15 bp, Homo sapiens
aagtagaatttttaa

SEQ ID NO: 71957 - DNA, 15 bp, Homo sapiens
agtagaatttttaaa

SEQ ID NO: 71958 - DNA, 15 bp, Homo sapiens
gtagaatttttaaac

SEQ ID NO: 71959 - DNA, 15 bp, Homo sapiens
tagaatttttaaact

SEQ ID NO: 71960 - DNA, 15 bp, Homo sapiens
agaatttttaaactt

SEQ ID NO: 71961 - DNA, 15 bp, Homo sapiens
gaatttttaaacttt

SEQ ID NO: 71962 - DNA, 15 bp, Homo sapiens
aatttttaaactttg

SEQ ID NO: 71963 - DNA, 15 bp, Homo sapiens
atttttaaactttgt

SEQ ID NO: 71964 - DNA, 15 bp, Homo sapiens
tttttaaactttgtt

SEQ ID NO: 71965 - DNA, 15 bp, Homo sapiens
ttttaaactttgtta

SEQ ID NO: 71966 - DNA, 15 bp, Homo sapiens
tttaaactttgttat

SEQ ID NO: 71967 - DNA, 15 bp, Homo sapiens
ttaaactttgttata

SEQ ID NO: 71968 - DNA, 15 bp, Homo sapiens
taaactttgttataa

SEQ ID NO: 71969 - DNA, 15 bp, Homo sapiens
aaactttgttataat

SEQ ID NO: 71970 - DNA, 15 bp, Homo sapiens
aactttgttataatc

SEQ ID NO: 71971 - DNA, 15 bp, Homo sapiens
actttgttataatct

SEQ ID NO: 71972 - DNA, 15 bp, Homo sapiens
ctttgttataatctt

SEQ ID NO: 71973 - DNA, 15 bp, Homo sapiens
tttgttataatctta

SEQ ID NO: 71974 - DNA, 15 bp, Homo sapiens
ttgttataatcttaa

SEQ ID NO: 71975 - DNA, 15 bp, Homo sapiens
tgttataatcttaaa

SEQ ID NO: 71976 - DNA, 15 bp, Homo sapiens
gttataatcttaaat

SEQ ID NO: 71977 - DNA, 15 bp, Homo sapiens
ttataatcttaaatt

SEQ ID NO: 71978 - DNA, 15 bp, Homo sapiens
tataatcttaaattt

SEQ ID NO: 71979 - DNA, 15 bp, Homo sapiens
ataatcttaaatttt

SEQ ID NO: 71980 - DNA, 15 bp, Homo sapiens
taatcttaaattttc

SEQ ID NO: 71981 - DNA, 15 bp, Homo sapiens
aatcttaaattttct

SEQ ID NO: 71982 - DNA, 15 bp, Homo sapiens
atcttaaattttctt

SEQ ID NO: 71983 - DNA, 15 bp, Homo sapiens
tcttaaattttcttt

SEQ ID NO: 71984 - DNA, 15 bp, Homo sapiens
cttaaattttcttta

SEQ ID NO: 71985 - DNA, 15 bp, Homo sapiens
ttaaattttctttag

SEQ ID NO: 71986 - DNA, 15 bp, Homo sapiens
taaattttctttagt

SEQ ID NO: 71987 - DNA, 15 bp, Homo sapiens
aaattttctttagtg

SEQ ID NO: 71988 - DNA, 15 bp, Homo sapiens
aattttctttagtgt

SEQ ID NO: 71989 - DNA, 15 bp, Homo sapiens
attttctttagtgtt

SEQ ID NO: 71990 - DNA, 15 bp, Homo sapiens
ttttctttagtgttg

SEQ ID NO: 71991 - DNA, 15 bp, Homo sapiens
tttctttagtgttga

SEQ ID NO: 71992 - DNA, 15 bp, Homo sapiens
ttctttagtgttgaa

SEQ ID NO: 71993 - DNA, 15 bp, Homo sapiens
tctttagtgttgaag

SEQ ID NO: 71994 - DNA, 15 bp, Homo sapiens
ctttagtgttgaaga

SEQ ID NO: 71995 - DNA, 15 bp, Homo sapiens
tttagtgttgaagat

SEQ ID NO: 71996 - DNA, 15 bp, Homo sapiens
ttagtgttgaagata

SEQ ID NO: 71997 - DNA, 15 bp, Homo sapiens
tagtgttgaagatag

SEQ ID NO: 71998 - DNA, 15 bp, Homo sapiens
agtgttgaagatagg

SEQ ID NO: 71999 - DNA, 15 bp, Homo sapiens
gtgttgaagataggt

SEQ ID NO: 72000 - DNA, 15 bp, Homo sapiens
tgttgaagataggtc

SEQ ID NO: 72001 - DNA, 15 bp, Homo sapiens
gttgaagataggtca

SEQ ID NO: 72002 - DNA, 15 bp, Homo sapiens
ttgaagataggtcaa

SEQ ID NO: 72003 - DNA, 15 bp, Homo sapiens
tgaagataggtcaac

SEQ ID NO: 72004 - DNA, 15 bp, Homo sapiens
gaagataggtcaact

SEQ ID NO: 72005 - DNA, 15 bp, Homo sapiens
aagataggtcaactt

SEQ ID NO: 72006 - DNA, 15 bp, Homo sapiens
agataggtcaactta

SEQ ID NO: 72007 - DNA, 15 bp, Homo sapiens
gataggtcaacttaa

SEQ ID NO: 72008 - DNA, 15 bp, Homo sapiens
ataggtcaacttaac

SEQ ID NO: 72009 - DNA, 15 bp, Homo sapiens
taggtcaacttaact

SEQ ID NO: 72010 - DNA, 15 bp, Homo sapiens
aggtcaacttaacta

SEQ ID NO: 72011 - DNA, 15 bp, Homo sapiens
ggtcaacttaactat

SEQ ID NO: 72012 - DNA, 15 bp, Homo sapiens
gtcaacttaactatc

SEQ ID NO: 72013 - DNA, 15 bp, Homo sapiens
tcaacttaactatca

SEQ ID NO: 72014 - DNA, 15 bp, Homo sapiens
caacttaactatcat

SEQ ID NO: 72015 - DNA, 15 bp, Homo sapiens
aacttaactatcata

SEQ ID NO: 72016 - DNA, 15 bp, Homo sapiens
acttaactatcatac

SEQ ID NO: 72017 - DNA, 15 bp, Homo sapiens
cttaactatcataca

SEQ ID NO: 72018 - DNA, 15 bp, Homo sapiens
ttaactatcatacat

SEQ ID NO: 72019 - DNA, 15 bp, Homo sapiens
taactatcatacatt

SEQ ID NO: 72020 - DNA, 15 bp, Homo sapiens
aactatcatacattt

SEQ ID NO: 72021 - DNA, 15 bp, Homo sapiens
actatcatacatttt

SEQ ID NO: 72022 - DNA, 15 bp, Homo sapiens
ctatcatacattttt

SEQ ID NO: 72023 - DNA, 15 bp, Homo sapiens
tatcatacattttta

SEQ ID NO: 72024 - DNA, 15 bp, Homo sapiens
atcatacatttttat

SEQ ID NO: 72025 - DNA, 15 bp, Homo sapiens
tcatacatttttatt

SEQ ID NO: 72026 - DNA, 15 bp, Homo sapiens
catacatttttattc

SEQ ID NO: 72027 - DNA, 15 bp, Homo sapiens
atacatttttattca

SEQ ID NO: 72028 - DNA, 15 bp, Homo sapiens
tacatttttattcac

SEQ ID NO: 72029 - DNA, 15 bp, Homo sapiens
acatttttattcaca

SEQ ID NO: 72030 - DNA, 15 bp, Homo sapiens
catttttattcacat

SEQ ID NO: 72031 - DNA, 15 bp, Homo sapiens
atttttattcacata

SEQ ID NO: 72032 - DNA, 15 bp, Homo sapiens
tttttattcacataa

SEQ ID NO: 72033 - DNA, 15 bp, Homo sapiens
ttttattcacataaa

SEQ ID NO: 72034 - DNA, 15 bp, Homo sapiens
tttattcacataaag

SEQ ID NO: 72035 - DNA, 15 bp, Homo sapiens
ttattcacataaagt

SEQ ID NO: 72036 - DNA, 15 bp, Homo sapiens
tattcacataaagta

SEQ ID NO: 72037 - DNA, 15 bp, Homo sapiens
attcacataaagtaa

SEQ ID NO: 72038 - DNA, 15 bp, Homo sapiens
ttcacataaagtaaa

SEQ ID NO: 72039 - DNA, 15 bp, Homo sapiens
tcacataaagtaaac

SEQ ID NO: 72040 - DNA, 15 bp, Homo sapiens
cacataaagtaaact

SEQ ID NO: 72041 - DNA, 15 bp, Homo sapiens
acataaagtaaactc

SEQ ID NO: 72042 - DNA, 15 bp, Homo sapiens
cataaagtaaactct

SEQ ID NO: 72043 - DNA, 15 bp, Homo sapiens
ataaagtaaactctg

SEQ ID NO: 72044 - DNA, 15 bp, Homo sapiens
taaagtaaactctgc

SEQ ID NO: 72045 - DNA, 15 bp, Homo sapiens
aaagtaaactctgcc

SEQ ID NO: 72046 - DNA, 15 bp, Homo sapiens
aagtaaactctgcct

SEQ ID NO: 72047 - DNA, 15 bp, Homo sapiens
agtaaactctgcctc

SEQ ID NO: 72048 - DNA, 15 bp, Homo sapiens
gtaaactctgcctca

SEQ ID NO: 72049 - DNA, 15 bp, Homo sapiens
taaactctgcctcaa

SEQ ID NO: 72050 - DNA, 15 bp, Homo sapiens
aaactctgcctcaaa

SEQ ID NO: 72051 - DNA, 15 bp, Homo sapiens
aactctgcctcaaat

SEQ ID NO: 72052 - DNA, 15 bp, Homo sapiens
actctgcctcaaatg

SEQ ID NO: 72053 - DNA, 15 bp, Homo sapiens
ctctgcctcaaatgt

SEQ ID NO: 72054 - DNA, 15 bp, Homo sapiens
tctgcctcaaatgta

SEQ ID NO: 72055 - DNA, 15 bp, Homo sapiens
ctgcctcaaatgtaa

SEQ ID NO: 72056 - DNA, 15 bp, Homo sapiens
tgcctcaaatgtaat

SEQ ID NO: 72057 - DNA, 15 bp, Homo sapiens
gcctcaaatgtaata

SEQ ID NO: 72058 - DNA, 15 bp, Homo sapiens
cctcaaatgtaataa

SEQ ID NO: 72059 - DNA, 15 bp, Homo sapiens
ctcaaatgtaataaa

SEQ ID NO: 72060 - DNA, 15 bp, Homo sapiens
tcaaatgtaataaac

SEQ ID NO: 72061 - DNA, 15 bp, Homo sapiens
caaatgtaataaact

SEQ ID NO: 72062 - DNA, 15 bp, Homo sapiens
aaatgtaataaactt

SEQ ID NO: 72063 - DNA, 15 bp, Homo sapiens
aatgtaataaactta

SEQ ID NO: 72064 - DNA, 15 bp, Homo sapiens
atgtaataaacttaa

SEQ ID NO: 72065 - DNA, 15 bp, Homo sapiens
tgtaataaacttaat

SEQ ID NO: 72066 - DNA, 15 bp, Homo sapiens
gtaataaacttaata

SEQ ID NO: 72067 - DNA, 15 bp, Homo sapiens
taataaacttaatat

SEQ ID NO: 72068 - DNA, 15 bp, Homo sapiens
aataaacttaatatg

SEQ ID NO: 72069 - DNA, 15 bp, Homo sapiens
ataaacttaatatga

SEQ ID NO: 72070 - DNA, 15 bp, Homo sapiens
taaacttaatatgag

SEQ ID NO: 72071 - DNA, 15 bp, Homo sapiens
aaacttaatatgagt

SEQ ID NO: 72072 - DNA, 15 bp, Homo sapiens
aacttaatatgagtt

SEQ ID NO: 72073 - DNA, 15 bp, Homo sapiens
acttaatatgagtta

SEQ ID NO: 72074 - DNA, 15 bp, Homo sapiens
cttaatatgagttat

SEQ ID NO: 72075 - DNA, 15 bp, Homo sapiens
ttaatatgagttatg

SEQ ID NO: 72076 - DNA, 15 bp, Homo sapiens
taatatgagttatgt

SEQ ID NO: 72077 - DNA, 15 bp, Homo sapiens
aatatgagttatgta

SEQ ID NO: 72078 - DNA, 15 bp, Homo sapiens
atatgagttatgtaa

SEQ ID NO: 72079 - DNA, 15 bp, Homo sapiens
tatgagttatgtaaa

SEQ ID NO: 72080 - DNA, 15 bp, Homo sapiens
atgagttatgtaaac

SEQ ID NO: 72081 - DNA, 15 bp, Homo sapiens
tgagttatgtaaact

SEQ ID NO: 72082 - DNA, 15 bp, Homo sapiens
gagttatgtaaactt

SEQ ID NO: 72083 - DNA, 15 bp, Homo sapiens
agttatgtaaacttt

SEQ ID NO: 72084 - DNA, 15 bp, Homo sapiens
gttatgtaaactttg

SEQ ID NO: 72085 - DNA, 15 bp, Homo sapiens
ttatgtaaactttgg

SEQ ID NO: 72086 - DNA, 15 bp, Homo sapiens
tatgtaaactttggt

SEQ ID NO: 72087 - DNA, 15 bp, Homo sapiens
atgtaaactttggtc

SEQ ID NO: 72088 - DNA, 15 bp, Homo sapiens
tgtaaactttggtca

SEQ ID NO: 72089 - DNA, 15 bp, Homo sapiens
gtaaactttggtcaa

SEQ ID NO: 72090 - DNA, 15 bp, Homo sapiens
taaactttggtcaat

SEQ ID NO: 72091 - DNA, 15 bp, Homo sapiens
aaactttggtcaata

SEQ ID NO: 72092 - DNA, 15 bp, Homo sapiens
aactttggtcaatag

SEQ ID NO: 72093 - DNA, 15 bp, Homo sapiens
actttggtcaataga

SEQ ID NO: 72094 - DNA, 15 bp, Homo sapiens
ctttggtcaatagag

SEQ ID NO: 72095 - DNA, 15 bp, Homo sapiens
tttggtcaatagagg

SEQ ID NO: 72096 - DNA, 15 bp, Homo sapiens
ttggtcaatagaggt

SEQ ID NO: 72097 - DNA, 15 bp, Homo sapiens
tggtcaatagaggta

SEQ ID NO: 72098 - DNA, 15 bp, Homo sapiens
ggtcaatagaggtat

SEQ ID NO: 72099 - DNA, 15 bp, Homo sapiens
gtcaatagaggtata

SEQ ID NO: 72100 - DNA, 15 bp, Homo sapiens
tcaatagaggtatat

SEQ ID NO: 72101 - DNA, 15 bp, Homo sapiens
caatagaggtatatt

SEQ ID NO: 72102 - DNA, 15 bp, Homo sapiens
aatagaggtatattt

SEQ ID NO: 72103 - DNA, 15 bp, Homo sapiens
atagaggtatatttt

SEQ ID NO: 72104 - DNA, 15 bp, Homo sapiens
tagaggtatattttt

SEQ ID NO: 72105 - DNA, 15 bp, Homo sapiens
agaggtatatttttt

SEQ ID NO: 72106 - DNA, 15 bp, Homo sapiens
gaggtatatttttta

SEQ ID NO: 72107 - DNA, 15 bp, Homo sapiens
aggtatattttttag

SEQ ID NO: 72108 - DNA, 15 bp, Homo sapiens
ggtatattttttagc

SEQ ID NO: 72109 - DNA, 15 bp, Homo sapiens
gtatattttttagca

SEQ ID NO: 72110 - DNA, 15 bp, Homo sapiens
tatattttttagcat

SEQ ID NO: 72111 - DNA, 15 bp, Homo sapiens
atattttttagcatt

SEQ ID NO: 72112 - DNA, 15 bp, Homo sapiens
tattttttagcattt

SEQ ID NO: 72113 - DNA, 15 bp, Homo sapiens
attttttagcatttc

SEQ ID NO: 72114 - DNA, 15 bp, Homo sapiens
ttttttagcatttcc

SEQ ID NO: 72115 - DNA, 15 bp, Homo sapiens
tttttagcatttcct

SEQ ID NO: 72116 - DNA, 15 bp, Homo sapiens
ttttagcatttcctt

SEQ ID NO: 72117 - DNA, 15 bp, Homo sapiens
tttagcatttccttt

SEQ ID NO: 72118 - DNA, 15 bp, Homo sapiens
ttagcatttcctttt

SEQ ID NO: 72119 - DNA, 15 bp, Homo sapiens
tagcatttccttttg

SEQ ID NO: 72120 - DNA, 15 bp, Homo sapiens
agcatttccttttga

SEQ ID NO: 72121 - DNA, 15 bp, Homo sapiens
gcatttccttttgaa

SEQ ID NO: 72122 - DNA, 15 bp, Homo sapiens
catttccttttgaaa

SEQ ID NO: 72123 - DNA, 15 bp, Homo sapiens
atttccttttgaaaa

SEQ ID NO: 72124 - DNA, 15 bp, Homo sapiens
tttccttttgaaaat

SEQ ID NO: 72125 - DNA, 15 bp, Homo sapiens
ttccttttgaaaatt

SEQ ID NO: 72126 - DNA, 15 bp, Homo sapiens
tccttttgaaaattt

SEQ ID NO: 72127 - DNA, 15 bp, Homo sapiens
ccttttgaaaatttc

SEQ ID NO: 72128 - DNA, 15 bp, Homo sapiens
cttttgaaaatttca

SEQ ID NO: 72129 - DNA, 15 bp, Homo sapiens
ttttgaaaatttcag

SEQ ID NO: 72130 - DNA, 15 bp, Homo sapiens
tttgaaaatttcagc

SEQ ID NO: 72131 - DNA, 15 bp, Homo sapiens
ttgaaaatttcagcc

SEQ ID NO: 72132 - DNA, 15 bp, Homo sapiens
tgaaaatttcagcct

SEQ ID NO: 72133 - DNA, 15 bp, Homo sapiens
gaaaatttcagcctt

SEQ ID NO: 72134 - DNA, 15 bp, Homo sapiens
aaaatttcagccttt

SEQ ID NO: 72135 - DNA, 15 bp, Homo sapiens
aaatttcagcctttt

SEQ ID NO: 72136 - DNA, 15 bp, Homo sapiens
aatttcagccttttg

SEQ ID NO: 72137 - DNA, 15 bp, Homo sapiens
atttcagccttttga

SEQ ID NO: 72138 - DNA, 15 bp, Homo sapiens
tttcagccttttgag

SEQ ID NO: 72139 - DNA, 15 bp, Homo sapiens
ttcagccttttgagg

SEQ ID NO: 72140 - DNA, 15 bp, Homo sapiens
tcagccttttgaggg

SEQ ID NO: 72141 - DNA, 15 bp, Homo sapiens
cagccttttgaggga

SEQ ID NO: 72142 - DNA, 15 bp, Homo sapiens
agccttttgagggag

SEQ ID NO: 72143 - DNA, 15 bp, Homo sapiens
gccttttgagggagt

SEQ ID NO: 72144 - DNA, 15 bp, Homo sapiens
ccttttgagggagtc

SEQ ID NO: 72145 - DNA, 15 bp, Homo sapiens
cttttgagggagtct

SEQ ID NO: 72146 - DNA, 15 bp, Homo sapiens
ttttgagggagtctt

SEQ ID NO: 72147 - DNA, 15 bp, Homo sapiens
tttgagggagtcttg

SEQ ID NO: 72148 - DNA, 15 bp, Homo sapiens
ttgagggagtcttgc

SEQ ID NO: 72149 - DNA, 15 bp, Homo sapiens
tgagggagtcttgca

SEQ ID NO: 72150 - DNA, 15 bp, Homo sapiens
gagggagtcttgcaa

SEQ ID NO: 72151 - DNA, 15 bp, Homo sapiens
agggagtcttgcaac

SEQ ID NO: 72152 - DNA, 15 bp, Homo sapiens
gggagtcttgcaact

SEQ ID NO: 72153 - DNA, 15 bp, Homo sapiens
ggagtcttgcaactg

SEQ ID NO: 72154 - DNA, 15 bp, Homo sapiens
gagtcttgcaactga

SEQ ID NO: 72155 - DNA, 15 bp, Homo sapiens
agtcttgcaactgaa

SEQ ID NO: 72156 - DNA, 15 bp, Homo sapiens
gtcttgcaactgaat

SEQ ID NO: 72157 - DNA, 15 bp, Homo sapiens
tcttgcaactgaatg

SEQ ID NO: 72158 - DNA, 15 bp, Homo sapiens
cttgcaactgaatgt

SEQ ID NO: 72159 - DNA, 15 bp, Homo sapiens
ttgcaactgaatgtc

SEQ ID NO: 72160 - DNA, 15 bp, Homo sapiens
tgcaactgaatgtca

SEQ ID NO: 72161 - DNA, 15 bp, Homo sapiens
gcaactgaatgtcaa

SEQ ID NO: 72162 - DNA, 15 bp, Homo sapiens
caactgaatgtcaag

SEQ ID NO: 72163 - DNA, 15 bp, Homo sapiens
aactgaatgtcaagt

SEQ ID NO: 72164 - DNA, 15 bp, Homo sapiens
actgaatgtcaagtt

SEQ ID NO: 72165 - DNA, 15 bp, Homo sapiens
ctgaatgtcaagtta

SEQ ID NO: 72166 - DNA, 15 bp, Homo sapiens
tgaatgtcaagttac

SEQ ID NO: 72167 - DNA, 15 bp, Homo sapiens
gaatgtcaagttaca

SEQ ID NO: 72168 - DNA, 15 bp, Homo sapiens
aatgtcaagttacat

SEQ ID NO: 72169 - DNA, 15 bp, Homo sapiens
atgtcaagttacatt

SEQ ID NO: 72170 - DNA, 15 bp, Homo sapiens
tgtcaagttacattt

SEQ ID NO: 72171 - DNA, 15 bp, Homo sapiens
gtcaagttacattta

SEQ ID NO: 72172 - DNA, 15 bp, Homo sapiens
tcaagttacatttat

SEQ ID NO: 72173 - DNA, 15 bp, Homo sapiens
caagttacatttatt

SEQ ID NO: 72174 - DNA, 15 bp, Homo sapiens
aagttacatttatta

SEQ ID NO: 72175 - DNA, 15 bp, Homo sapiens
agttacatttattac

SEQ ID NO: 72176 - DNA, 15 bp, Homo sapiens
gttacatttattaca

SEQ ID NO: 72177 - DNA, 15 bp, Homo sapiens
ttacatttattacaa

SEQ ID NO: 72178 - DNA, 15 bp, Homo sapiens
tacatttattacaat

SEQ ID NO: 72179 - DNA, 15 bp, Homo sapiens
acatttattacaata

SEQ ID NO: 72180 - DNA, 15 bp, Homo sapiens
catttattacaataa

SEQ ID NO: 72181 - DNA, 15 bp, Homo sapiens
atttattacaataaa

SEQ ID NO: 72182 - DNA, 15 bp, Homo sapiens
tttattacaataaaa

SEQ ID NO: 72183 - DNA, 15 bp, Homo sapiens
ttattacaataaaat

SEQ ID NO: 72184 - DNA, 15 bp, Homo sapiens
tattacaataaaatg

SEQ ID NO: 72185 - DNA, 15 bp, Homo sapiens
attacaataaaatgg

SEQ ID NO: 72186 - DNA, 15 bp, Homo sapiens
ttacaataaaatgga

SEQ ID NO: 72187 - DNA, 15 bp, Homo sapiens
tacaataaaatggac

SEQ ID NO: 72188 - DNA, 15 bp, Homo sapiens
acaataaaatggaca

SEQ ID NO: 72189 - DNA, 15 bp, Homo sapiens
caataaaatggacac

SEQ ID NO: 72190 - DNA, 15 bp, Homo sapiens
aataaaatggacact

SEQ ID NO: 72191 - DNA, 15 bp, Homo sapiens
ataaaatggacactt

SEQ ID NO: 72192 - DNA, 15 bp, Homo sapiens
taaaatggacactta

SEQ ID NO: 72193 - DNA, 15 bp, Homo sapiens
aaaatggacacttaa

SEQ ID NO: 72194 - DNA, 15 bp, Homo sapiens
aaatggacacttaat

SEQ ID NO: 72195 - DNA, 15 bp, Homo sapiens
aatggacacttaata

SEQ ID NO: 72196 - DNA, 15 bp, Homo sapiens
atggacacttaatat

SEQ ID NO: 72197 - DNA, 15 bp, Homo sapiens
tggacacttaatata

SEQ ID NO: 72198 - DNA, 15 bp, Homo sapiens
ggacacttaatataa

SEQ ID NO: 72199 - DNA, 15 bp, Homo sapiens
gacacttaatataat

SEQ ID NO: 72200 - DNA, 15 bp, Homo sapiens
acacttaatataatc

SEQ ID NO: 72201 - DNA, 15 bp, Homo sapiens
cacttaatataatct

SEQ ID NO: 72202 - DNA, 15 bp, Homo sapiens
acttaatataatctg

SEQ ID NO: 72203 - DNA, 15 bp, Homo sapiens
cttaatataatctgt

SEQ ID NO: 72204 - DNA, 15 bp, Homo sapiens
ttaatataatctgta

SEQ ID NO: 72205 - DNA, 15 bp, Homo sapiens
taatataatctgtaa

SEQ ID NO: 72206 - DNA, 15 bp, Homo sapiens
aatataatctgtaat

SEQ ID NO: 72207 - DNA, 15 bp, Homo sapiens
atataatctgtaatg

SEQ ID NO: 72208 - DNA, 15 bp, Homo sapiens
tataatctgtaatgc

SEQ ID NO: 72209 - DNA, 15 bp, Homo sapiens
ataatctgtaatgca

SEQ ID NO: 72210 - DNA, 15 bp, Homo sapiens
taatctgtaatgcat

SEQ ID NO: 72211 - DNA, 15 bp, Homo sapiens
aatctgtaatgcatt

SEQ ID NO: 72212 - DNA, 15 bp, Homo sapiens
atctgtaatgcatta

SEQ ID NO: 72213 - DNA, 15 bp, Homo sapiens
tctgtaatgcattaa

SEQ ID NO: 72214 - DNA, 15 bp, Homo sapiens
ctgtaatgcattaac

SEQ ID NO: 72215 - DNA, 15 bp, Homo sapiens
tgtaatgcattaaca

SEQ ID NO: 72216 - DNA, 15 bp, Homo sapiens
gtaatgcattaacat

SEQ ID NO: 72217 - DNA, 15 bp, Homo sapiens
taatgcattaacata

SEQ ID NO: 72218 - DNA, 15 bp, Homo sapiens
aatgcattaacataa

SEQ ID NO: 72219 - DNA, 15 bp, Homo sapiens
atgcattaacataat

SEQ ID NO: 72220 - DNA, 15 bp, Homo sapiens
tgcattaacataata

SEQ ID NO: 72221 - DNA, 15 bp, Homo sapiens
gcattaacataatat

SEQ ID NO: 72222 - DNA, 15 bp, Homo sapiens
cattaacataatatg

SEQ ID NO: 72223 - DNA, 15 bp, Homo sapiens
attaacataatatgg

SEQ ID NO: 72224 - DNA, 15 bp, Homo sapiens
ttaacataatatggg

SEQ ID NO: 72225 - DNA, 15 bp, Homo sapiens
taacataatatggga

SEQ ID NO: 72226 - DNA, 15 bp, Homo sapiens
aacataatatgggaa

SEQ ID NO: 72227 - DNA, 15 bp, Homo sapiens
acataatatgggaac

SEQ ID NO: 72228 - DNA, 15 bp, Homo sapiens
cataatatgggaact

SEQ ID NO: 72229 - DNA, 15 bp, Homo sapiens
ataatatgggaactt

SEQ ID NO: 72230 - DNA, 15 bp, Homo sapiens
taatatgggaacttt

SEQ ID NO: 72231 - DNA, 15 bp, Homo sapiens
aatatgggaactttt

SEQ ID NO: 72232 - DNA, 15 bp, Homo sapiens
atatgggaactttta

SEQ ID NO: 72233 - DNA, 15 bp, Homo sapiens
tatgggaacttttaa

SEQ ID NO: 72234 - DNA, 15 bp, Homo sapiens
atgggaacttttaaa

SEQ ID NO: 72235 - DNA, 15 bp, Homo sapiens
tgggaacttttaaag

SEQ ID NO: 72236 - DNA, 15 bp, Homo sapiens
gggaacttttaaagt

SEQ ID NO: 72237 - DNA, 15 bp, Homo sapiens
ggaacttttaaagta

SEQ ID NO: 72238 - DNA, 15 bp, Homo sapiens
gaacttttaaagtat

SEQ ID NO: 72239 - DNA, 15 bp, Homo sapiens
aacttttaaagtatt

SEQ ID NO: 72240 - DNA, 15 bp, Homo sapiens
acttttaaagtattc

SEQ ID NO: 72241 - DNA, 15 bp, Homo sapiens
cttttaaagtattca

SEQ ID NO: 72242 - DNA, 15 bp, Homo sapiens
ttttaaagtattcag

SEQ ID NO: 72243 - DNA, 15 bp, Homo sapiens
tttaaagtattcagt

SEQ ID NO: 72244 - DNA, 15 bp, Homo sapiens
ttaaagtattcagtc

SEQ ID NO: 72245 - DNA, 15 bp, Homo sapiens
taaagtattcagtct

SEQ ID NO: 72246 - DNA, 15 bp, Homo sapiens
aaagtattcagtctc

SEQ ID NO: 72247 - DNA, 15 bp, Homo sapiens
aagtattcagtctct

SEQ ID NO: 72248 - DNA, 15 bp, Homo sapiens
agtattcagtctctg

SEQ ID NO: 72249 - DNA, 15 bp, Homo sapiens
gtattcagtctctgt

SEQ ID NO: 72250 - DNA, 15 bp, Homo sapiens
tattcagtctctgta

SEQ ID NO: 72251 - DNA, 15 bp, Homo sapiens
attcagtctctgtat

SEQ ID NO: 72252 - DNA, 15 bp, Homo sapiens
ttcagtctctgtatt

SEQ ID NO: 72253 - DNA, 15 bp, Homo sapiens
tcagtctctgtatta

SEQ ID NO: 72254 - DNA, 15 bp, Homo sapiens
cagtctctgtattat

SEQ ID NO: 72255 - DNA, 15 bp, Homo sapiens
agtctctgtattatt

SEQ ID NO: 72256 - DNA, 15 bp, Homo sapiens
gtctctgtattattg

SEQ ID NO: 72257 - DNA, 15 bp, Homo sapiens
tctctgtattattga

SEQ ID NO: 72258 - DNA, 15 bp, Homo sapiens
ctctgtattattgag

SEQ ID NO: 72259 - DNA, 15 bp, Homo sapiens
tctgtattattgagt

SEQ ID NO: 72260 - DNA, 15 bp, Homo sapiens
ctgtattattgagtc

SEQ ID NO: 72261 - DNA, 15 bp, Homo sapiens
tgtattattgagtcc

SEQ ID NO: 72262 - DNA, 15 bp, Homo sapiens
gtattattgagtcct

SEQ ID NO: 72263 - DNA, 15 bp, Homo sapiens
tattattgagtccta

SEQ ID NO: 72264 - DNA, 15 bp, Homo sapiens
attattgagtcctat

SEQ ID NO: 72265 - DNA, 15 bp, Homo sapiens
ttattgagtcctatt

SEQ ID NO: 72266 - DNA, 15 bp, Homo sapiens
tattgagtcctattt

SEQ ID NO: 72267 - DNA, 15 bp, Homo sapiens
attgagtcctatttc

SEQ ID NO: 72268 - DNA, 15 bp, Homo sapiens
ttgagtcctatttcc

SEQ ID NO: 72269 - DNA, 15 bp, Homo sapiens
tgagtcctatttcca

SEQ ID NO: 72270 - DNA, 15 bp, Homo sapiens
gagtcctatttccac

SEQ ID NO: 72271 - DNA, 15 bp, Homo sapiens
agtcctatttccaca

SEQ ID NO: 72272 - DNA, 15 bp, Homo sapiens
gtcctatttccacat

SEQ ID NO: 72273 - DNA, 15 bp, Homo sapiens
tcctatttccacatt

SEQ ID NO: 72274 - DNA, 15 bp, Homo sapiens
cctatttccacattt

SEQ ID NO: 72275 - DNA, 15 bp, Homo sapiens
ctatttccacatttg

SEQ ID NO: 72276 - DNA, 15 bp, Homo sapiens
tatttccacatttgg

SEQ ID NO: 72277 - DNA, 15 bp, Homo sapiens
atttccacatttggc

SEQ ID NO: 72278 - DNA, 15 bp, Homo sapiens
tttccacatttggcc

SEQ ID NO: 72279 - DNA, 15 bp, Homo sapiens
ttccacatttggcca

SEQ ID NO: 72280 - DNA, 15 bp, Homo sapiens
tccacatttggccag

SEQ ID NO: 72281 - DNA, 15 bp, Homo sapiens
ccacatttggccagg

SEQ ID NO: 72282 - DNA, 15 bp, Homo sapiens
cacatttggccagga

SEQ ID NO: 72283 - DNA, 15 bp, Homo sapiens
acatttggccaggat

SEQ ID NO: 72284 - DNA, 15 bp, Homo sapiens
catttggccaggatt

SEQ ID NO: 72285 - DNA, 15 bp, Homo sapiens
atttggccaggattc

SEQ ID NO: 72286 - DNA, 15 bp, Homo sapiens
tttggccaggattct

SEQ ID NO: 72287 - DNA, 15 bp, Homo sapiens
ttggccaggattctc

SEQ ID NO: 72288 - DNA, 15 bp, Homo sapiens
tggccaggattctca

SEQ ID NO: 72289 - DNA, 15 bp, Homo sapiens
ggccaggattctcaa

SEQ ID NO: 72290 - DNA, 15 bp, Homo sapiens
gccaggattctcaat

SEQ ID NO: 72291 - DNA, 15 bp, Homo sapiens
ccaggattctcaata

SEQ ID NO: 72292 - DNA, 15 bp, Homo sapiens
caggattctcaatat

SEQ ID NO: 72293 - DNA, 15 bp, Homo sapiens
aggattctcaatatg

SEQ ID NO: 72294 - DNA, 15 bp, Homo sapiens
ggattctcaatatga

SEQ ID NO: 72295 - DNA, 15 bp, Homo sapiens
gattctcaatatgat

SEQ ID NO: 72296 - DNA, 15 bp, Homo sapiens
attctcaatatgatt

SEQ ID NO: 72297 - DNA, 15 bp, Homo sapiens
ttctcaatatgattt

SEQ ID NO: 72298 - DNA, 15 bp, Homo sapiens
tctcaatatgattta

SEQ ID NO: 72299 - DNA, 15 bp, Homo sapiens
ctcaatatgatttag

SEQ ID NO: 72300 - DNA, 15 bp, Homo sapiens
tcaatatgatttagg

SEQ ID NO: 72301 - DNA, 15 bp, Homo sapiens
caatatgatttaggc

SEQ ID NO: 72302 - DNA, 15 bp, Homo sapiens
aatatgatttaggcc

SEQ ID NO: 72303 - DNA, 15 bp, Homo sapiens
atatgatttaggccc

SEQ ID NO: 72304 - DNA, 15 bp, Homo sapiens
tatgatttaggccca

SEQ ID NO: 72305 - DNA, 15 bp, Homo sapiens
atgatttaggcccaa

SEQ ID NO: 72306 - DNA, 15 bp, Homo sapiens
tgatttaggcccaag

SEQ ID NO: 72307 - DNA, 15 bp, Homo sapiens
gatttaggcccaaga

SEQ ID NO: 72308 - DNA, 15 bp, Homo sapiens
atttaggcccaagac

SEQ ID NO: 72309 - DNA, 15 bp, Homo sapiens
tttaggcccaagacg

SEQ ID NO: 72310 - DNA, 15 bp, Homo sapiens
ttaggcccaagacgt

SEQ ID NO: 72311 - DNA, 15 bp, Homo sapiens
taggcccaagacgtg

SEQ ID NO: 72312 - DNA, 15 bp, Homo sapiens
aggcccaagacgtgg

SEQ ID NO: 72313 - DNA, 15 bp, Homo sapiens
ggcccaagacgtggg

SEQ ID NO: 72314 - DNA, 15 bp, Homo sapiens
gcccaagacgtggga

SEQ ID NO: 72315 - DNA, 15 bp, Homo sapiens
cccaagacgtgggaa

SEQ ID NO: 72316 - DNA, 15 bp, Homo sapiens
ccaagacgtgggaag

SEQ ID NO: 72317 - DNA, 15 bp, Homo sapiens
caagacgtgggaaga

SEQ ID NO: 72318 - DNA, 15 bp, Homo sapiens
aagacgtgggaagaa

SEQ ID NO: 72319 - DNA, 15 bp, Homo sapiens
agacgtgggaagaaa

SEQ ID NO: 72320 - DNA, 15 bp, Homo sapiens
gacgtgggaagaaag

SEQ ID NO: 72321 - DNA, 15 bp, Homo sapiens
acgtgggaagaaaga

SEQ ID NO: 72322 - DNA, 15 bp, Homo sapiens
cgtgggaagaaagaa

SEQ ID NO: 72323 - DNA, 15 bp, Homo sapiens
gtgggaagaaagaag

SEQ ID NO: 72324 - DNA, 15 bp, Homo sapiens
tgggaagaaagaagt

SEQ ID NO: 72325 - DNA, 15 bp, Homo sapiens
gggaagaaagaagta

SEQ ID NO: 72326 - DNA, 15 bp, Homo sapiens
ggaagaaagaagtaa

SEQ ID NO: 72327 - DNA, 15 bp, Homo sapiens
gaagaaagaagtaaa

SEQ ID NO: 72328 - DNA, 15 bp, Homo sapiens
aagaaagaagtaaag

SEQ ID NO: 72329 - DNA, 15 bp, Homo sapiens
agaaagaagtaaaga

SEQ ID NO: 72330 - DNA, 15 bp, Homo sapiens
gaaagaagtaaagaa

SEQ ID NO: 72331 - DNA, 15 bp, Homo sapiens
aaagaagtaaagaac

SEQ ID NO: 72332 - DNA, 15 bp, Homo sapiens
aagaagtaaagaact

SEQ ID NO: 72333 - DNA, 15 bp, Homo sapiens
agaagtaaagaacta

SEQ ID NO: 72334 - DNA, 15 bp, Homo sapiens
gaagtaaagaactaa

SEQ ID NO: 72335 - DNA, 15 bp, Homo sapiens
aagtaaagaactaaa

SEQ ID NO: 72336 - DNA, 15 bp, Homo sapiens
agtaaagaactaaag

SEQ ID NO: 72337 - DNA, 15 bp, Homo sapiens
gtaaagaactaaagg

SEQ ID NO: 72338 - DNA, 15 bp, Homo sapiens
taaagaactaaagga

SEQ ID NO: 72339 - DNA, 15 bp, Homo sapiens
aaagaactaaaggat

SEQ ID NO: 72340 - DNA, 15 bp, Homo sapiens
aagaactaaaggatt

SEQ ID NO: 72341 - DNA, 15 bp, Homo sapiens
agaactaaaggattt

SEQ ID NO: 72342 - DNA, 15 bp, Homo sapiens
gaactaaaggatttt

SEQ ID NO: 72343 - DNA, 15 bp, Homo sapiens
aactaaaggattttt

SEQ ID NO: 72344 - DNA, 15 bp, Homo sapiens
actaaaggatttttt

SEQ ID NO: 72345 - DNA, 15 bp, Homo sapiens
ctaaaggattttttt

SEQ ID NO: 72346 - DNA, 15 bp, Homo sapiens
taaaggatttttttc

SEQ ID NO: 72347 - DNA, 15 bp, Homo sapiens
aaaggatttttttct

SEQ ID NO: 72348 - DNA, 15 bp, Homo sapiens
aaggatttttttctt

SEQ ID NO: 72349 - DNA, 15 bp, Homo sapiens
aggatttttttcttc

SEQ ID NO: 72350 - DNA, 15 bp, Homo sapiens
ggatttttttcttca

SEQ ID NO: 72351 - DNA, 15 bp, Homo sapiens
gatttttttcttcat

SEQ ID NO: 72352 - DNA, 15 bp, Homo sapiens
atttttttcttcatt

SEQ ID NO: 72353 - DNA, 15 bp, Homo sapiens
tttttttcttcattt

SEQ ID NO: 72354 - DNA, 15 bp, Homo sapiens
ttttttcttcatttt

SEQ ID NO: 72355 - DNA, 15 bp, Homo sapiens
tttcttcattttttt

SEQ ID NO: 72356 - DNA, 15 bp, Homo sapiens
ttcttcattttttta

SEQ ID NO: 72357 - DNA, 15 bp, Homo sapiens
tcttcatttttttaa

SEQ ID NO: 72358 - DNA, 15 bp, Homo sapiens
cttcatttttttaat

SEQ ID NO: 72359 - DNA, 15 bp, Homo sapiens
ttcatttttttaatt

SEQ ID NO: 72360 - DNA, 15 bp, Homo sapiens
tcatttttttaattg

SEQ ID NO: 72361 - DNA, 15 bp, Homo sapiens
catttttttaattga

SEQ ID NO: 72362 - DNA, 15 bp, Homo sapiens
atttttttaattgaa

SEQ ID NO: 72363 - DNA, 15 bp, Homo sapiens
tttttttaattgaat

SEQ ID NO: 72364 - DNA, 15 bp, Homo sapiens
ttttttaattgaata

SEQ ID NO: 72365 - DNA, 15 bp, Homo sapiens
tttttaattgaatat

SEQ ID NO: 72366 - DNA, 15 bp, Homo sapiens
ttttaattgaatatg

SEQ ID NO: 72367 - DNA, 15 bp, Homo sapiens
tttaattgaatatgg

SEQ ID NO: 72368 - DNA, 15 bp, Homo sapiens
ttaattgaatatggg

SEQ ID NO: 72369 - DNA, 15 bp, Homo sapiens
taattgaatatgggg

SEQ ID NO: 72370 - DNA, 15 bp, Homo sapiens
aattgaatatgggga

SEQ ID NO: 72371 - DNA, 15 bp, Homo sapiens
attgaatatggggaa

SEQ ID NO: 72372 - DNA, 15 bp, Homo sapiens
ttgaatatggggaaa

SEQ ID NO: 72373 - DNA, 15 bp, Homo sapiens
tgaatatggggaaag

SEQ ID NO: 72374 - DNA, 15 bp, Homo sapiens
gaatatggggaaaga

SEQ ID NO: 72375 - DNA, 15 bp, Homo sapiens
aatatggggaaagat

SEQ ID NO: 72376 - DNA, 15 bp, Homo sapiens
atatggggaaagatg

SEQ ID NO: 72377 - DNA, 15 bp, Homo sapiens
tatggggaaagatgg

SEQ ID NO: 72378 - DNA, 15 bp, Homo sapiens
atggggaaagatgga

SEQ ID NO: 72379 - DNA, 15 bp, Homo sapiens
tggggaaagatggaa

SEQ ID NO: 72380 - DNA, 15 bp, Homo sapiens
ggggaaagatggaat

SEQ ID NO: 72381 - DNA, 15 bp, Homo sapiens
gggaaagatggaata

SEQ ID NO: 72382 - DNA, 15 bp, Homo sapiens
ggaaagatggaataa

SEQ ID NO: 72383 - DNA, 15 bp, Homo sapiens
gaaagatggaataag

SEQ ID NO: 72384 - DNA, 15 bp, Homo sapiens
aaagatggaataagc

SEQ ID NO: 72385 - DNA, 15 bp, Homo sapiens
aagatggaataagct

SEQ ID NO: 72386 - DNA, 15 bp, Homo sapiens
agatggaataagctt

SEQ ID NO: 72387 - DNA, 15 bp, Homo sapiens
gatggaataagctta

SEQ ID NO: 72388 - DNA, 15 bp, Homo sapiens
atggaataagcttat

SEQ ID NO: 72389 - DNA, 15 bp, Homo sapiens
tggaataagcttatc

SEQ ID NO: 72390 - DNA, 15 bp, Homo sapiens
ggaataagcttatct

SEQ ID NO: 72391 - DNA, 15 bp, Homo sapiens
gaataagcttatctg

SEQ ID NO: 72392 - DNA, 15 bp, Homo sapiens
aataagcttatctgt

SEQ ID NO: 72393 - DNA, 15 bp, Homo sapiens
ataagcttatctgtc

SEQ ID NO: 72394 - DNA, 15 bp, Homo sapiens
taagcttatctgtcc

SEQ ID NO: 72395 - DNA, 15 bp, Homo sapiens
aagcttatctgtcca

SEQ ID NO: 72396 - DNA, 15 bp, Homo sapiens
agcttatctgtccag

SEQ ID NO: 72397 - DNA, 15 bp, Homo sapiens
gcttatctgtccagt

SEQ ID NO: 72398 - DNA, 15 bp, Homo sapiens
cttatctgtccagta

SEQ ID NO: 72399 - DNA, 15 bp, Homo sapiens
ttatctgtccagtaa

SEQ ID NO: 72400 - DNA, 15 bp, Homo sapiens
tatctgtccagtaaa

SEQ ID NO: 72401 - DNA, 15 bp, Homo sapiens
atctgtccagtaaag

SEQ ID NO: 72402 - DNA, 15 bp, Homo sapiens
tctgtccagtaaagg

SEQ ID NO: 72403 - DNA, 15 bp, Homo sapiens
ctgtccagtaaaggc

SEQ ID NO: 72404 - DNA, 15 bp, Homo sapiens
tgtccagtaaaggcc

SEQ ID NO: 72405 - DNA, 15 bp, Homo sapiens
gtccagtaaaggcca

SEQ ID NO: 72406 - DNA, 15 bp, Homo sapiens
tccagtaaaggccat

SEQ ID NO: 72407 - DNA, 15 bp, Homo sapiens
ccagtaaaggccatt

SEQ ID NO: 72408 - DNA, 15 bp, Homo sapiens
cagtaaaggccatta

SEQ ID NO: 72409 - DNA, 15 bp, Homo sapiens
agtaaaggccattat

SEQ ID NO: 72410 - DNA, 15 bp, Homo sapiens
gtaaaggccattatg

SEQ ID NO: 72411 - DNA, 15 bp, Homo sapiens
taaaggccattatgt

SEQ ID NO: 72412 - DNA, 15 bp, Homo sapiens
aaaggccattatgtg

SEQ ID NO: 72413 - DNA, 15 bp, Homo sapiens
aaggccattatgtgt

SEQ ID NO: 72414 - DNA, 15 bp, Homo sapiens
aggccattatgtgta

SEQ ID NO: 72415 - DNA, 15 bp, Homo sapiens
ggccattatgtgtac

SEQ ID NO: 72416 - DNA, 15 bp, Homo sapiens
gccattatgtgtaca

SEQ ID NO: 72417 - DNA, 15 bp, Homo sapiens
ccattatgtgtacat

SEQ ID NO: 72418 - DNA, 15 bp, Homo sapiens
cattatgtgtacata

SEQ ID NO: 72419 - DNA, 15 bp, Homo sapiens
attatgtgtacatag

SEQ ID NO: 72420 - DNA, 15 bp, Homo sapiens
ttatgtgtacatagg

SEQ ID NO: 72421 - DNA, 15 bp, Homo sapiens
tatgtgtacataggg

SEQ ID NO: 72422 - DNA, 15 bp, Homo sapiens
atgtgtacataggga

SEQ ID NO: 72423 - DNA, 15 bp, Homo sapiens
tgtgtacatagggat

SEQ ID NO: 72424 - DNA, 15 bp, Homo sapiens
gtgtacatagggatt

SEQ ID NO: 72425 - DNA, 15 bp, Homo sapiens
tgtacatagggatta

SEQ ID NO: 72426 - DNA, 15 bp, Homo sapiens
gtacatagggattat

SEQ ID NO: 72427 - DNA, 15 bp, Homo sapiens
tacatagggattatt

SEQ ID NO: 72428 - DNA, 15 bp, Homo sapiens
acatagggattatta

SEQ ID NO: 72429 - DNA, 15 bp, Homo sapiens
catagggattattat

SEQ ID NO: 72430 - DNA, 15 bp, Homo sapiens
atagggattattatt

SEQ ID NO: 72431 - DNA, 15 bp, Homo sapiens
tagggattattattt

SEQ ID NO: 72432 - DNA, 15 bp, Homo sapiens
agggattattatttt

SEQ ID NO: 72433 - DNA, 15 bp, Homo sapiens
gggattattattttt

SEQ ID NO: 72434 - DNA, 15 bp, Homo sapiens
ggattattatttttc

SEQ ID NO: 72435 - DNA, 15 bp, Homo sapiens
gattattatttttcc

SEQ ID NO: 72436 - DNA, 15 bp, Homo sapiens
attattatttttccc

SEQ ID NO: 72437 - DNA, 15 bp, Homo sapiens
ttattatttttcccc

SEQ ID NO: 72438 - DNA, 15 bp, Homo sapiens
tattatttttccccc

SEQ ID NO: 72439 - DNA, 15 bp, Homo sapiens
attatttttcccccc

SEQ ID NO: 72440 - DNA, 15 bp, Homo sapiens
ttatttttccccccc

SEQ ID NO: 72441 - DNA, 15 bp, Homo sapiens
tatttttccccccct

SEQ ID NO: 72442 - DNA, 15 bp, Homo sapiens
atttttccccccctt

SEQ ID NO: 72443 - DNA, 15 bp, Homo sapiens
tttttcccccccttg

SEQ ID NO: 72444 - DNA, 15 bp, Homo sapiens
ttttcccccccttgg

SEQ ID NO: 72445 - DNA, 15 bp, Homo sapiens
tttcccccccttggg

SEQ ID NO: 72446 - DNA, 15 bp, Homo sapiens
ttcccccccttgggc

SEQ ID NO: 72447 - DNA, 15 bp, Homo sapiens
tcccccccttgggct

SEQ ID NO: 72448 - DNA, 15 bp, Homo sapiens
cccccccttgggctg

SEQ ID NO: 72449 - DNA, 15 bp, Homo sapiens
ccccccttgggctgt

SEQ ID NO: 72450 - DNA, 15 bp, Homo sapiens
cccccttgggctgta

SEQ ID NO: 72451 - DNA, 15 bp, Homo sapiens
ccccttgggctgtac

SEQ ID NO: 72452 - DNA, 15 bp, Homo sapiens
cccttgggctgtact

SEQ ID NO: 72453 - DNA, 15 bp, Homo sapiens
ccttgggctgtactg

SEQ ID NO: 72454 - DNA, 15 bp, Homo sapiens
cttgggctgtactga

SEQ ID NO: 72455 - DNA, 15 bp, Homo sapiens
ttgggctgtactgat

SEQ ID NO: 72456 - DNA, 15 bp, Homo sapiens
tgggctgtactgatt

SEQ ID NO: 72457 - DNA, 15 bp, Homo sapiens
gggctgtactgattt

SEQ ID NO: 72458 - DNA, 15 bp, Homo sapiens
ggctgtactgatttc

SEQ ID NO: 72459 - DNA, 15 bp, Homo sapiens
gctgtactgatttcc

SEQ ID NO: 72460 - DNA, 15 bp, Homo sapiens
ctgtactgatttccc

SEQ ID NO: 72461 - DNA, 15 bp, Homo sapiens
tgtactgatttccca

SEQ ID NO: 72462 - DNA, 15 bp, Homo sapiens
gtactgatttcccag

SEQ ID NO: 72463 - DNA, 15 bp, Homo sapiens
tactgatttcccaga

SEQ ID NO: 72464 - DNA, 15 bp, Homo sapiens
actgatttcccagat

SEQ ID NO: 72465 - DNA, 15 bp, Homo sapiens
ctgatttcccagatg

SEQ ID NO: 72466 - DNA, 15 bp, Homo sapiens
tgatttcccagatgt

SEQ ID NO: 72467 - DNA, 15 bp, Homo sapiens
gatttcccagatgta

SEQ ID NO: 72468 - DNA, 15 bp, Homo sapiens
atttcccagatgtac

SEQ ID NO: 72469 - DNA, 15 bp, Homo sapiens
tttcccagatgtacc

SEQ ID NO: 72470 - DNA, 15 bp, Homo sapiens
ttcccagatgtacca

SEQ ID NO: 72471 - DNA, 15 bp, Homo sapiens
tcccagatgtaccac

SEQ ID NO: 72472 - DNA, 15 bp, Homo sapiens
cccagatgtaccaca

SEQ ID NO: 72473 - DNA, 15 bp, Homo sapiens
ccagatgtaccacag

SEQ ID NO: 72474 - DNA, 15 bp, Homo sapiens
cagatgtaccacagc

SEQ ID NO: 72475 - DNA, 15 bp, Homo sapiens
agatgtaccacagca

SEQ ID NO: 72476 - DNA, 15 bp, Homo sapiens
gatgtaccacagcac

SEQ ID NO: 72477 - DNA, 15 bp, Homo sapiens
atgtaccacagcact

SEQ ID NO: 72478 - DNA, 15 bp, Homo sapiens
tgtaccacagcactc

SEQ ID NO: 72479 - DNA, 15 bp, Homo sapiens
gtaccacagcactct

SEQ ID NO: 72480 - DNA, 15 bp, Homo sapiens
taccacagcactctt

SEQ ID NO: 72481 - DNA, 15 bp, Homo sapiens
accacagcactctta

SEQ ID NO: 72482 - DNA, 15 bp, Homo sapiens
ccacagcactcttag

SEQ ID NO: 72483 - DNA, 15 bp, Homo sapiens
cacagcactcttagt

SEQ ID NO: 72484 - DNA, 15 bp, Homo sapiens
acagcactcttagta

SEQ ID NO: 72485 - DNA, 15 bp, Homo sapiens
cagcactcttagtag

SEQ ID NO: 72486 - DNA, 15 bp, Homo sapiens
agcactcttagtagt

SEQ ID NO: 72487 - DNA, 15 bp, Homo sapiens
gcactcttagtagtg

SEQ ID NO: 72488 - DNA, 15 bp, Homo sapiens
cactcttagtagtga

SEQ ID NO: 72489 - DNA, 15 bp, Homo sapiens
actcttagtagtgaa

SEQ ID NO: 72490 - DNA, 15 bp, Homo sapiens
ctcttagtagtgaag

SEQ ID NO: 72491 - DNA, 15 bp, Homo sapiens
tcttagtagtgaagc

SEQ ID NO: 72492 - DNA, 15 bp, Homo sapiens
cttagtagtgaagca

SEQ ID NO: 72493 - DNA, 15 bp, Homo sapiens
ttagtagtgaagcac

SEQ ID NO: 72494 - DNA, 15 bp, Homo sapiens
tagtagtgaagcact

SEQ ID NO: 72495 - DNA, 15 bp, Homo sapiens
agtagtgaagcactt

SEQ ID NO: 72496 - DNA, 15 bp, Homo sapiens
gtagtgaagcacttg

SEQ ID NO: 72497 - DNA, 15 bp, Homo sapiens
tagtgaagcacttga

SEQ ID NO: 72498 - DNA, 15 bp, Homo sapiens
agtgaagcacttgac

SEQ ID NO: 72499 - DNA, 15 bp, Homo sapiens
gtgaagcacttgact

SEQ ID NO: 72500 - DNA, 15 bp, Homo sapiens
tgaagcacttgactt

SEQ ID NO: 72501 - DNA, 15 bp, Homo sapiens
gaagcacttgacttc

SEQ ID NO: 72502 - DNA, 15 bp, Homo sapiens
aagcacttgacttct

SEQ ID NO: 72503 - DNA, 15 bp, Homo sapiens
agcacttgacttcta

SEQ ID NO: 72504 - DNA, 15 bp, Homo sapiens
gcacttgacttctag

SEQ ID NO: 72505 - DNA, 15 bp, Homo sapiens
cacttgacttctagt

SEQ ID NO: 72506 - DNA, 15 bp, Homo sapiens
acttgacttctagtg

SEQ ID NO: 72507 - DNA, 15 bp, Homo sapiens
cttgacttctagtga

SEQ ID NO: 72508 - DNA, 15 bp, Homo sapiens
ttgacttctagtgag

SEQ ID NO: 72509 - DNA, 15 bp, Homo sapiens
tgacttctagtgagt

SEQ ID NO: 72510 - DNA, 15 bp, Homo sapiens
gacttctagtgagtg

SEQ ID NO: 72511 - DNA, 15 bp, Homo sapiens
acttctagtgagtgg

SEQ ID NO: 72512 - DNA, 15 bp, Homo sapiens
cttctagtgagtgga

SEQ ID NO: 72513 - DNA, 15 bp, Homo sapiens
ttctagtgagtggat

SEQ ID NO: 72514 - DNA, 15 bp, Homo sapiens
tctagtgagtggatt

SEQ ID NO: 72515 - DNA, 15 bp, Homo sapiens
ctagtgagtggattt

SEQ ID NO: 72516 - DNA, 15 bp, Homo sapiens
tagtgagtggatttt

SEQ ID NO: 72517 - DNA, 15 bp, Homo sapiens
agtgagtggattttt

SEQ ID NO: 72518 - DNA, 15 bp, Homo sapiens
gtgagtggatttttt

SEQ ID NO: 72519 - DNA, 15 bp, Homo sapiens
tgagtggattttttg

SEQ ID NO: 72520 - DNA, 15 bp, Homo sapiens
gagtggattttttgt

SEQ ID NO: 72521 - DNA, 15 bp, Homo sapiens
agtggattttttgtg

SEQ ID NO: 72522 - DNA, 15 bp, Homo sapiens
gtggattttttgtgt

SEQ ID NO: 72523 - DNA, 15 bp, Homo sapiens
tggattttttgtgtg

SEQ ID NO: 72524 - DNA, 15 bp, Homo sapiens
ggattttttgtgtgt

SEQ ID NO: 72525 - DNA, 15 bp, Homo sapiens
gattttttgtgtgtg

SEQ ID NO: 72526 - DNA, 15 bp, Homo sapiens
attttttgtgtgtgt

SEQ ID NO: 72527 - DNA, 15 bp, Homo sapiens
ttttttgtgtgtgtg

SEQ ID NO: 72528 - DNA, 15 bp, Homo sapiens
tttttgtgtgtgtgt

SEQ ID NO: 72529 - DNA, 15 bp, Homo sapiens
ttttgtgtgtgtgtt

SEQ ID NO: 72530 - DNA, 15 bp, Homo sapiens
tttgtgtgtgtgttt

SEQ ID NO: 72531 - DNA, 15 bp, Homo sapiens
ttgtgtgtgtgtttt

SEQ ID NO: 72532 - DNA, 15 bp, Homo sapiens
tgtgtgtgtgtttta

SEQ ID NO: 72533 - DNA, 15 bp, Homo sapiens
gtgtgtgtgttttat

SEQ ID NO: 72534 - DNA, 15 bp, Homo sapiens
tgtgtgtgttttata

SEQ ID NO: 72535 - DNA, 15 bp, Homo sapiens
gtgtgtgttttatat

SEQ ID NO: 72536 - DNA, 15 bp, Homo sapiens
tgtgtgttttatatt

SEQ ID NO: 72537 - DNA, 15 bp, Homo sapiens
gtgtgttttatattg

SEQ ID NO: 72538 - DNA, 15 bp, Homo sapiens
tgtgttttatattgc

SEQ ID NO: 72539 - DNA, 15 bp, Homo sapiens
gtgttttatattgca

SEQ ID NO: 72540 - DNA, 15 bp, Homo sapiens
tgttttatattgcag

SEQ ID NO: 72541 - DNA, 15 bp, Homo sapiens
gttttatattgcaga

SEQ ID NO: 72542 - DNA, 15 bp, Homo sapiens
ttttatattgcagag

SEQ ID NO: 72543 - DNA, 15 bp, Homo sapiens
tttatattgcagagt

SEQ ID NO: 72544 - DNA, 15 bp, Homo sapiens
ttatattgcagagtg

SEQ ID NO: 72545 - DNA, 15 bp, Homo sapiens
tatattgcagagtga

SEQ ID NO: 72546 - DNA, 15 bp, Homo sapiens
atattgcagagtgaa

SEQ ID NO: 72547 - DNA, 15 bp, Homo sapiens
tattgcagagtgaat

SEQ ID NO: 72548 - DNA, 15 bp, Homo sapiens
attgcagagtgaata

SEQ ID NO: 72549 - DNA, 15 bp, Homo sapiens
ttgcagagtgaatac

SEQ ID NO: 72550 - DNA, 15 bp, Homo sapiens
tgcagagtgaataca

SEQ ID NO: 72551 - DNA, 15 bp, Homo sapiens
gcagagtgaatacac

SEQ ID NO: 72552 - DNA, 15 bp, Homo sapiens
cagagtgaatacact

SEQ ID NO: 72553 - DNA, 15 bp, Homo sapiens
agagtgaatacactc

SEQ ID NO: 72554 - DNA, 15 bp, Homo sapiens
gagtgaatacactct

SEQ ID NO: 72555 - DNA, 15 bp, Homo sapiens
agtgaatacactctg

SEQ ID NO: 72556 - DNA, 15 bp, Homo sapiens
gtgaatacactctgt

SEQ ID NO: 72557 - DNA, 15 bp, Homo sapiens
tgaatacactctgtc

SEQ ID NO: 72558 - DNA, 15 bp, Homo sapiens
gaatacactctgtct

SEQ ID NO: 72559 - DNA, 15 bp, Homo sapiens
aatacactctgtctg

SEQ ID NO: 72560 - DNA, 15 bp, Homo sapiens
atacactctgtctga

SEQ ID NO: 72561 - DNA, 15 bp, Homo sapiens
tacactctgtctgat

SEQ ID NO: 72562 - DNA, 15 bp, Homo sapiens
acactctgtctgata

SEQ ID NO: 72563 - DNA, 15 bp, Homo sapiens
cactctgtctgatac

SEQ ID NO: 72564 - DNA, 15 bp, Homo sapiens
actctgtctgatact

SEQ ID NO: 72565 - DNA, 15 bp, Homo sapiens
ctctgtctgatacta

SEQ ID NO: 72566 - DNA, 15 bp, Homo sapiens
tctgtctgatactat

SEQ ID NO: 72567 - DNA, 15 bp, Homo sapiens
ctgtctgatactatg

SEQ ID NO: 72568 - DNA, 15 bp, Homo sapiens
tgtctgatactatgt

SEQ ID NO: 72569 - DNA, 15 bp, Homo sapiens
gtctgatactatgtg

SEQ ID NO: 72570 - DNA, 15 bp, Homo sapiens
tctgatactatgtga

SEQ ID NO: 72571 - DNA, 15 bp, Homo sapiens
ctgatactatgtgac

SEQ ID NO: 72572 - DNA, 15 bp, Homo sapiens
tgatactatgtgact

SEQ ID NO: 72573 - DNA, 15 bp, Homo sapiens
gatactatgtgactt

SEQ ID NO: 72574 - DNA, 15 bp, Homo sapiens
atactatgtgacttt

SEQ ID NO: 72575 - DNA, 15 bp, Homo sapiens
tactatgtgactttc

SEQ ID NO: 72576 - DNA, 15 bp, Homo sapiens
actatgtgactttct

SEQ ID NO: 72577 - DNA, 15 bp, Homo sapiens
ctatgtgactttctg

SEQ ID NO: 72578 - DNA, 15 bp, Homo sapiens
tatgtgactttctga

SEQ ID NO: 72579 - DNA, 15 bp, Homo sapiens
atgtgactttctgat

SEQ ID NO: 72580 - DNA, 15 bp, Homo sapiens
tgtgactttctgatt

SEQ ID NO: 72581 - DNA, 15 bp, Homo sapiens
gtgactttctgatta

SEQ ID NO: 72582 - DNA, 15 bp, Homo sapiens
tgactttctgattat

SEQ ID NO: 72583 - DNA, 15 bp, Homo sapiens
gactttctgattatg

SEQ ID NO: 72584 - DNA, 15 bp, Homo sapiens
actttctgattatgt

SEQ ID NO: 72585 - DNA, 15 bp, Homo sapiens
ctttctgattatgtg

SEQ ID NO: 72586 - DNA, 15 bp, Homo sapiens
tttctgattatgtga

SEQ ID NO: 72587 - DNA, 15 bp, Homo sapiens
ttctgattatgtgat

SEQ ID NO: 72588 - DNA, 15 bp, Homo sapiens
tctgattatgtgatt

SEQ ID NO: 72589 - DNA, 15 bp, Homo sapiens
ctgattatgtgattt

SEQ ID NO: 72590 - DNA, 15 bp, Homo sapiens
tgattatgtgatttt

SEQ ID NO: 72591 - DNA, 15 bp, Homo sapiens
gattatgtgattttt

SEQ ID NO: 72592 - DNA, 15 bp, Homo sapiens
attatgtgattttta

SEQ ID NO: 72593 - DNA, 15 bp, Homo sapiens
ttatgtgatttttat

SEQ ID NO: 72594 - DNA, 15 bp, Homo sapiens
tatgtgatttttatg

SEQ ID NO: 72595 - DNA, 15 bp, Homo sapiens
atgtgatttttatgc

SEQ ID NO: 72596 - DNA, 15 bp, Homo sapiens
tgtgatttttatgca

SEQ ID NO: 72597 - DNA, 15 bp, Homo sapiens
gtgatttttatgcat

SEQ ID NO: 72598 - DNA, 15 bp, Homo sapiens
tgatttttatgcatt

SEQ ID NO: 72599 - DNA, 15 bp, Homo sapiens
gatttttatgcattt

SEQ ID NO: 72600 - DNA, 15 bp, Homo sapiens
atttttatgcatttt

SEQ ID NO: 72601 - DNA, 15 bp, Homo sapiens
tttttatgcatttta

SEQ ID NO: 72602 - DNA, 15 bp, Homo sapiens
ttttatgcattttat

SEQ ID NO: 72603 - DNA, 15 bp, Homo sapiens
tttatgcattttatg

SEQ ID NO: 72604 - DNA, 15 bp, Homo sapiens
ttatgcattttatgt

SEQ ID NO: 72605 - DNA, 15 bp, Homo sapiens
tatgcattttatgtg

SEQ ID NO: 72606 - DNA, 15 bp, Homo sapiens
atgcattttatgtgt

SEQ ID NO: 72607 - DNA, 15 bp, Homo sapiens
tgcattttatgtgtt

SEQ ID NO: 72608 - DNA, 15 bp, Homo sapiens
gcattttatgtgttt

SEQ ID NO: 72609 - DNA, 15 bp, Homo sapiens
cattttatgtgtttt

SEQ ID NO: 72610 - DNA, 15 bp, Homo sapiens
attttatgtgttttg

SEQ ID NO: 72611 - DNA, 15 bp, Homo sapiens
ttttatgtgttttgt

SEQ ID NO: 72612 - DNA, 15 bp, Homo sapiens
tttatgtgttttgta

SEQ ID NO: 72613 - DNA, 15 bp, Homo sapiens
ttatgtgttttgtaa

SEQ ID NO: 72614 - DNA, 15 bp, Homo sapiens
tatgtgttttgtaaa

SEQ ID NO: 72615 - DNA, 15 bp, Homo sapiens
atgtgttttgtaaac

SEQ ID NO: 72616 - DNA, 15 bp, Homo sapiens
tgtgttttgtaaact

SEQ ID NO: 72617 - DNA, 15 bp, Homo sapiens
gtgttttgtaaacta

SEQ ID NO: 72618 - DNA, 15 bp, Homo sapiens
tgttttgtaaactag

SEQ ID NO: 72619 - DNA, 15 bp, Homo sapiens
gttttgtaaactagc

SEQ ID NO: 72620 - DNA, 15 bp, Homo sapiens
ttttgtaaactagct

SEQ ID NO: 72621 - DNA, 15 bp, Homo sapiens
tttgtaaactagctg

SEQ ID NO: 72622 - DNA, 15 bp, Homo sapiens
ttgtaaactagctgt

SEQ ID NO: 72623 - DNA, 15 bp, Homo sapiens
tgtaaactagctgta

SEQ ID NO: 72624 - DNA, 15 bp, Homo sapiens
gtaaactagctgtat

SEQ ID NO: 72625 - DNA, 15 bp, Homo sapiens
taaactagctgtatt

SEQ ID NO: 72626 - DNA, 15 bp, Homo sapiens
aaactagctgtattt

SEQ ID NO: 72627 - DNA, 15 bp, Homo sapiens
aactagctgtatttt

SEQ ID NO: 72628 - DNA, 15 bp, Homo sapiens
actagctgtattttt

SEQ ID NO: 72629 - DNA, 15 bp, Homo sapiens
ctagctgtatttttg

SEQ ID NO: 72630 - DNA, 15 bp, Homo sapiens
tagctgtatttttgg

SEQ ID NO: 72631 - DNA, 15 bp, Homo sapiens
agctgtatttttggt

SEQ ID NO: 72632 - DNA, 15 bp, Homo sapiens
gctgtatttttggtc

SEQ ID NO: 72633 - DNA, 15 bp, Homo sapiens
ctgtatttttggtcc

SEQ ID NO: 72634 - DNA, 15 bp, Homo sapiens
tgtatttttggtcca

SEQ ID NO: 72635 - DNA, 15 bp, Homo sapiens
gtatttttggtccat

SEQ ID NO: 72636 - DNA, 15 bp, Homo sapiens
tatttttggtccatg

SEQ ID NO: 72637 - DNA, 15 bp, Homo sapiens
atttttggtccatgt

SEQ ID NO: 72638 - DNA, 15 bp, Homo sapiens
tttttggtccatgtc

SEQ ID NO: 72639 - DNA, 15 bp, Homo sapiens
ttttggtccatgtct

SEQ ID NO: 72640 - DNA, 15 bp, Homo sapiens
tttggtccatgtcta

SEQ ID NO: 72641 - DNA, 15 bp, Homo sapiens
ttggtccatgtctag

SEQ ID NO: 72642 - DNA, 15 bp, Homo sapiens
tggtccatgtctagg

SEQ ID NO: 72643 - DNA, 15 bp, Homo sapiens
ggtccatgtctaggt

SEQ ID NO: 72644 - DNA, 15 bp, Homo sapiens
gtccatgtctaggtt

SEQ ID NO: 72645 - DNA, 15 bp, Homo sapiens
tccatgtctaggttg

SEQ ID NO: 72646 - DNA, 15 bp, Homo sapiens
ccatgtctaggttgt

SEQ ID NO: 72647 - DNA, 15 bp, Homo sapiens
catgtctaggttgta

SEQ ID NO: 72648 - DNA, 15 bp, Homo sapiens
atgtctaggttgtag

SEQ ID NO: 72649 - DNA, 15 bp, Homo sapiens
tgtctaggttgtaga

SEQ ID NO: 72650 - DNA, 15 bp, Homo sapiens
gtctaggttgtagaa

SEQ ID NO: 72651 - DNA, 15 bp, Homo sapiens
tctaggttgtagaat

SEQ ID NO: 72652 - DNA, 15 bp, Homo sapiens
ctaggttgtagaatt

SEQ ID NO: 72653 - DNA, 15 bp, Homo sapiens
taggttgtagaattg

SEQ ID NO: 72654 - DNA, 15 bp, Homo sapiens
aggttgtagaattga

SEQ ID NO: 72655 - DNA, 15 bp, Homo sapiens
ggttgtagaattgaa

SEQ ID NO: 72656 - DNA, 15 bp, Homo sapiens
gttgtagaattgaat

SEQ ID NO: 72657 - DNA, 15 bp, Homo sapiens
ttgtagaattgaatt

SEQ ID NO: 72658 - DNA, 15 bp, Homo sapiens
tgtagaattgaattg

SEQ ID NO: 72659 - DNA, 15 bp, Homo sapiens
gtagaattgaattgt

SEQ ID NO: 72660 - DNA, 15 bp, Homo sapiens
tagaattgaattgtg

SEQ ID NO: 72661 - DNA, 15 bp, Homo sapiens
agaattgaattgtgc

SEQ ID NO: 72662 - DNA, 15 bp, Homo sapiens
gaattgaattgtgca

SEQ ID NO: 72663 - DNA, 15 bp, Homo sapiens
aattgaattgtgcat

SEQ ID NO: 72664 - DNA, 15 bp, Homo sapiens
attgaattgtgcatt

SEQ ID NO: 72665 - DNA, 15 bp, Homo sapiens
ttgaattgtgcattt

SEQ ID NO: 72666 - DNA, 15 bp, Homo sapiens
tgaattgtgcatttt

SEQ ID NO: 72667 - DNA, 15 bp, Homo sapiens
gaattgtgcattttg

SEQ ID NO: 72668 - DNA, 15 bp, Homo sapiens
aattgtgcattttgg

SEQ ID NO: 72669 - DNA, 15 bp, Homo sapiens
attgtgcattttggc

SEQ ID NO: 72670 - DNA, 15 bp, Homo sapiens
ttgtgcattttggca

SEQ ID NO: 72671 - DNA, 15 bp, Homo sapiens
tgtgcattttggcat

SEQ ID NO: 72672 - DNA, 15 bp, Homo sapiens
gtgcattttggcatc

SEQ ID NO: 72673 - DNA, 15 bp, Homo sapiens
ttggaaagggacatc

SEQ ID NO: 72674 - DNA, 15 bp, Homo sapiens
tggaaagggacatcc

SEQ ID NO: 72675 - DNA, 15 bp, Homo sapiens
ggaaagggacatccc

SEQ ID NO: 72676 - DNA, 15 bp, Homo sapiens
gaaagggacatcccc

SEQ ID NO: 72677 - DNA, 15 bp, Homo sapiens
aaagggacatccccc

SEQ ID NO: 72678 - DNA, 15 bp, Homo sapiens
aagggacatcccccg

SEQ ID NO: 72679 - DNA, 15 bp, Homo sapiens
agggacatcccccga

SEQ ID NO: 72680 - DNA, 15 bp, Homo sapiens
gggacatcccccgac

SEQ ID NO: 72681 - DNA, 15 bp, Homo sapiens
ggacatcccccgacc

SEQ ID NO: 72682 - DNA, 15 bp, Homo sapiens
gacatcccccgaccc

SEQ ID NO: 72683 - DNA, 15 bp, Homo sapiens
acatcccccgacccc

SEQ ID NO: 72684 - DNA, 15 bp, Homo sapiens
catcccccgacccct

SEQ ID NO: 72685 - DNA, 15 bp, Homo sapiens
atcccccgacccctt

SEQ ID NO: 72686 - DNA, 15 bp, Homo sapiens
tcccccgaccccttg

SEQ ID NO: 72687 - DNA, 15 bp, Homo sapiens
cccccgaccccttgt

SEQ ID NO: 72688 - DNA, 15 bp, Homo sapiens
ccccgaccccttgtg

SEQ ID NO: 72689 - DNA, 15 bp, Homo sapiens
cccgaccccttgtgc

SEQ ID NO: 72690 - DNA, 15 bp, Homo sapiens
ccgaccccttgtgct

SEQ ID NO: 72691 - DNA, 15 bp, Homo sapiens
cgaccccttgtgctt

SEQ ID NO: 72692 - DNA, 15 bp, Homo sapiens
gaccccttgtgcttc

SEQ ID NO: 72693 - DNA, 15 bp, Homo sapiens
accccttgtgcttcc

SEQ ID NO: 72694 - DNA, 15 bp, Homo sapiens
ccccttgtgcttcct

SEQ ID NO: 72695 - DNA, 15 bp, Homo sapiens
cccttgtgcttcctg

SEQ ID NO: 72696 - DNA, 15 bp, Homo sapiens
ccttgtgcttcctgg

SEQ ID NO: 72697 - DNA, 15 bp, Homo sapiens
cttgtgcttcctggg

SEQ ID NO: 72698 - DNA, 15 bp, Homo sapiens
ttgtgcttcctgggt

SEQ ID NO: 72699 - DNA, 15 bp, Homo sapiens
tgtgcttcctgggtg

SEQ ID NO: 72700 - DNA, 15 bp, Homo sapiens
gtgcttcctgggtga

SEQ ID NO: 72701 - DNA, 15 bp, Homo sapiens
tgcttcctgggtgag

SEQ ID NO: 72702 - DNA, 15 bp, Homo sapiens
gcttcctgggtgagg

SEQ ID NO: 72703 - DNA, 15 bp, Homo sapiens
cttcctgggtgaggc

SEQ ID NO: 72704 - DNA, 15 bp, Homo sapiens
ttcctgggtgaggca

SEQ ID NO: 72705 - DNA, 15 bp, Homo sapiens
tcctgggtgaggcaa

SEQ ID NO: 72706 - DNA, 15 bp, Homo sapiens
cctgggtgaggcaat

SEQ ID NO: 72707 - DNA, 15 bp, Homo sapiens
ctgggtgaggcaatg

SEQ ID NO: 72708 - DNA, 15 bp, Homo sapiens
tgggtgaggcaatgc

SEQ ID NO: 72709 - DNA, 15 bp, Homo sapiens
gggtgaggcaatgcc

SEQ ID NO: 72710 - DNA, 15 bp, Homo sapiens
ggtgaggcaatgccc

SEQ ID NO: 72711 - DNA, 15 bp, Homo sapiens
gtgaggcaatgcccc

SEQ ID NO: 72712 - DNA, 15 bp, Homo sapiens
tgaggcaatgccccg

SEQ ID NO: 72713 - DNA, 15 bp, Homo sapiens
gaggcaatgccccgc

SEQ ID NO: 72714 - DNA, 15 bp, Homo sapiens
aggcaatgccccgcc

SEQ ID NO: 72715 - DNA, 15 bp, Homo sapiens
ggcaatgccccgccc

SEQ ID NO: 72716 - DNA, 15 bp, Homo sapiens
gcaatgccccgccct

SEQ ID NO: 72717 - DNA, 15 bp, Homo sapiens
caatgccccgccctg

SEQ ID NO: 72718 - DNA, 15 bp, Homo sapiens
aatgccccgccctgc

SEQ ID NO: 72719 - DNA, 15 bp, Homo sapiens
atgccccgccctgct

SEQ ID NO: 72720 - DNA, 15 bp, Homo sapiens
tgccccgccctgctt

SEQ ID NO: 72721 - DNA, 15 bp, Homo sapiens
gccccgccctgcttc

SEQ ID NO: 72722 - DNA, 15 bp, Homo sapiens
ccccgccctgcttca

SEQ ID NO: 72723 - DNA, 15 bp, Homo sapiens
cccgccctgcttcag

SEQ ID NO: 72724 - DNA, 15 bp, Homo sapiens
ccgccctgcttcagc

SEQ ID NO: 72725 - DNA, 15 bp, Homo sapiens
cgccctgcttcagct

SEQ ID NO: 72726 - DNA, 15 bp, Homo sapiens
gccctgcttcagctc

SEQ ID NO: 72727 - DNA, 15 bp, Homo sapiens
ccctgcttcagctca

SEQ ID NO: 72728 - DNA, 15 bp, Homo sapiens
cctgcttcagctcac

SEQ ID NO: 72729 - DNA, 15 bp, Homo sapiens
ctgcttcagctcacc

SEQ ID NO: 72730 - DNA, 15 bp, Homo sapiens
tgcttcagctcaccc

SEQ ID NO: 72731 - DNA, 15 bp, Homo sapiens
gcttcagctcaccct

SEQ ID NO: 72732 - DNA, 15 bp, Homo sapiens
cttcagctcaccctc

SEQ ID NO: 72733 - DNA, 15 bp, Homo sapiens
ttcagctcaccctcc

SEQ ID NO: 72734 - DNA, 15 bp, Homo sapiens
tcagctcaccctccg

SEQ ID NO: 72735 - DNA, 15 bp, Homo sapiens
cagctcaccctccgt

SEQ ID NO: 72736 - DNA, 15 bp, Homo sapiens
agctcaccctccgtg

SEQ ID NO: 72737 - DNA, 15 bp, Homo sapiens
gctcaccctccgtgg

SEQ ID NO: 72738 - DNA, 15 bp, Homo sapiens
ctcaccctccgtggg

SEQ ID NO: 72739 - DNA, 15 bp, Homo sapiens
tcaccctccgtgggc

SEQ ID NO: 72740 - DNA, 15 bp, Homo sapiens
caccctccgtgggct

SEQ ID NO: 72741 - DNA, 15 bp, Homo sapiens
accctccgtgggctg

SEQ ID NO: 72742 - DNA, 15 bp, Homo sapiens
ccctccgtgggctgc

SEQ ID NO: 72743 - DNA, 15 bp, Homo sapiens
cctccgtgggctgca

SEQ ID NO: 72744 - DNA, 15 bp, Homo sapiens
ctccgtgggctgcac

SEQ ID NO: 72745 - DNA, 15 bp, Homo sapiens
tccgtgggctgcacc

SEQ ID NO: 72746 - DNA, 15 bp, Homo sapiens
ccgtgggctgcaccc

SEQ ID NO: 72747 - DNA, 15 bp, Homo sapiens
cgtgggctgcaccca

SEQ ID NO: 72748 - DNA, 15 bp, Homo sapiens
gtgggctgcacccac

SEQ ID NO: 72749 - DNA, 15 bp, Homo sapiens
tgggctgcacccact

SEQ ID NO: 72750 - DNA, 15 bp, Homo sapiens
gggctgcacccactt

SEQ ID NO: 72751 - DNA, 15 bp, Homo sapiens
ggctgcacccacttt

SEQ ID NO: 72752 - DNA, 15 bp, Homo sapiens
gctgcacccactttc

SEQ ID NO: 72753 - DNA, 15 bp, Homo sapiens
ctgcacccactttcc

SEQ ID NO: 72754 - DNA, 15 bp, Homo sapiens
tgcacccactttcca

SEQ ID NO: 72755 - DNA, 15 bp, Homo sapiens
gcacccactttccaa

SEQ ID NO: 72756 - DNA, 15 bp, Homo sapiens
cacccactttccaac

SEQ ID NO: 72757 - DNA, 15 bp, Homo sapiens
acccactttccaacc

SEQ ID NO: 72758 - DNA, 15 bp, Homo sapiens
cccactttccaacca

SEQ ID NO: 72759 - DNA, 15 bp, Homo sapiens
ccactttccaaccag

SEQ ID NO: 72760 - DNA, 15 bp, Homo sapiens
cactttccaaccagt

SEQ ID NO: 72761 - DNA, 15 bp, Homo sapiens
actttccaaccagtc

SEQ ID NO: 72762 - DNA, 15 bp, Homo sapiens
ctttccaaccagtcc

SEQ ID NO: 72763 - DNA, 15 bp, Homo sapiens
tttccaaccagtccc

SEQ ID NO: 72764 - DNA, 15 bp, Homo sapiens
ttccaaccagtccca

SEQ ID NO: 72765 - DNA, 15 bp, Homo sapiens
tccaaccagtcccag

SEQ ID NO: 72766 - DNA, 15 bp, Homo sapiens
ccaaccagtcccagt

SEQ ID NO: 72767 - DNA, 15 bp, Homo sapiens
caaccagtcccagtg

SEQ ID NO: 72768 - DNA, 15 bp, Homo sapiens
aaccagtcccagtga

SEQ ID NO: 72769 - DNA, 15 bp, Homo sapiens
accagtcccagtgag

SEQ ID NO: 72770 - DNA, 15 bp, Homo sapiens
ccagtcccagtgaga

SEQ ID NO: 72771 - DNA, 15 bp, Homo sapiens
cagtcccagtgagaa

SEQ ID NO: 72772 - DNA, 15 bp, Homo sapiens
agtcccagtgagaag

SEQ ID NO: 72773 - DNA, 15 bp, Homo sapiens
gtcccagtgagaaga

SEQ ID NO: 72774 - DNA, 15 bp, Homo sapiens
tcccagtgagaagaa

SEQ ID NO: 72775 - DNA, 15 bp, Homo sapiens
cccagtgagaagaac

SEQ ID NO: 72776 - DNA, 15 bp, Homo sapiens
ccagtgagaagaacc

SEQ ID NO: 72777 - DNA, 15 bp, Homo sapiens
cagtgagaagaacca

SEQ ID NO: 72778 - DNA, 15 bp, Homo sapiens
agtgagaagaaccag

SEQ ID NO: 72779 - DNA, 15 bp, Homo sapiens
gtgagaagaaccagg

SEQ ID NO: 72780 - DNA, 15 bp, Homo sapiens
tgagaagaaccaggt

SEQ ID NO: 72781 - DNA, 15 bp, Homo sapiens
gagaagaaccaggta

SEQ ID NO: 72782 - DNA, 15 bp, Homo sapiens
agaagaaccaggtac

SEQ ID NO: 72783 - DNA, 15 bp, Homo sapiens
gaagaaccaggtacc

SEQ ID NO: 72784 - DNA, 15 bp, Homo sapiens
aagaaccaggtacct

SEQ ID NO: 72785 - DNA, 15 bp, Homo sapiens
agaaccaggtacctc

SEQ ID NO: 72786 - DNA, 15 bp, Homo sapiens
gaaccaggtacctca

SEQ ID NO: 72787 - DNA, 15 bp, Homo sapiens
aaccaggtacctcag

SEQ ID NO: 72788 - DNA, 15 bp, Homo sapiens
accaggtacctcagt

SEQ ID NO: 72789 - DNA, 15 bp, Homo sapiens
ccaggtacctcagtt

SEQ ID NO: 72790 - DNA, 15 bp, Homo sapiens
caggtacctcagttg

SEQ ID NO: 72791 - DNA, 15 bp, Homo sapiens
aggtacctcagttgg

SEQ ID NO: 72792 - DNA, 15 bp, Homo sapiens
ggtacctcagttgga

SEQ ID NO: 72793 - DNA, 15 bp, Homo sapiens
gtacctcagttggaa

SEQ ID NO: 72794 - DNA, 15 bp, Homo sapiens
tacctcagttggaaa

SEQ ID NO: 72795 - DNA, 15 bp, Homo sapiens
acctcagttggaaat

SEQ ID NO: 72796 - DNA, 15 bp, Homo sapiens
cctcagttggaaatg

SEQ ID NO: 72797 - DNA, 15 bp, Homo sapiens
ctcagttggaaatgc

SEQ ID NO: 72798 - DNA, 15 bp, Homo sapiens
tcagttggaaatgca

SEQ ID NO: 72799 - DNA, 15 bp, Homo sapiens
cagttggaaatgcag

SEQ ID NO: 72800 - DNA, 15 bp, Homo sapiens
agttggaaatgcaga

SEQ ID NO: 72801 - DNA, 15 bp, Homo sapiens
gttggaaatgcagaa

SEQ ID NO: 72802 - DNA, 15 bp, Homo sapiens
ttggaaatgcagaaa

SEQ ID NO: 72803 - DNA, 15 bp, Homo sapiens
tggaaatgcagaaat

SEQ ID NO: 72804 - DNA, 15 bp, Homo sapiens
ggaaatgcagaaatc

SEQ ID NO: 72805 - DNA, 15 bp, Homo sapiens
gaaatgcagaaatca

SEQ ID NO: 72806 - DNA, 15 bp, Homo sapiens
aaatgcagaaatcac

SEQ ID NO: 72807 - DNA, 15 bp, Homo sapiens
aatgcagaaatcacc

SEQ ID NO: 72808 - DNA, 15 bp, Homo sapiens
atgcagaaatcacct

SEQ ID NO: 72809 - DNA, 15 bp, Homo sapiens
tgcagaaatcacctg

SEQ ID NO: 72810 - DNA, 15 bp, Homo sapiens
gcagaaatcacctgt

SEQ ID NO: 72811 - DNA, 15 bp, Homo sapiens
cagaaatcacctgtc

SEQ ID NO: 72812 - DNA, 15 bp, Homo sapiens
agaaatcacctgtct

SEQ ID NO: 72813 - DNA, 15 bp, Homo sapiens
gaaatcacctgtctt

SEQ ID NO: 72814 - DNA, 15 bp, Homo sapiens
aaatcacctgtcttc

SEQ ID NO: 72815 - DNA, 15 bp, Homo sapiens
aatcacctgtcttcc

SEQ ID NO: 72816 - DNA, 15 bp, Homo sapiens
atcacctgtcttccg

SEQ ID NO: 72817 - DNA, 15 bp, Homo sapiens
tcacctgtcttccgc

SEQ ID NO: 72818 - DNA, 15 bp, Homo sapiens
cacctgtcttccgcg

SEQ ID NO: 72819 - DNA, 15 bp, Homo sapiens
acctgtcttccgcgt

SEQ ID NO: 72820 - DNA, 15 bp, Homo sapiens
cctgtcttccgcgtg

SEQ ID NO: 72821 - DNA, 15 bp, Homo sapiens
ctgtcttccgcgtgg

SEQ ID NO: 72822 - DNA, 15 bp, Homo sapiens
tgtcttccgcgtgga

SEQ ID NO: 72823 - DNA, 15 bp, Homo sapiens
gtcttccgcgtggat

SEQ ID NO: 72824 - DNA, 15 bp, Homo sapiens
tcttccgcgtggatc

SEQ ID NO: 72825 - DNA, 15 bp, Homo sapiens
cttccgcgtggatca

SEQ ID NO: 72826 - DNA, 15 bp, Homo sapiens
ttccgcgtggatcat

SEQ ID NO: 72827 - DNA, 15 bp, Homo sapiens
tccgcgtggatcatg

SEQ ID NO: 72828 - DNA, 15 bp, Homo sapiens
ccgcgtggatcatgc

SEQ ID NO: 72829 - DNA, 15 bp, Homo sapiens
cgcgtggatcatgct

SEQ ID NO: 72830 - DNA, 15 bp, Homo sapiens
gcgtggatcatgctg

SEQ ID NO: 72831 - DNA, 15 bp, Homo sapiens
cgtggatcatgctgg

SEQ ID NO: 72832 - DNA, 15 bp, Homo sapiens
gtggatcatgctggg

SEQ ID NO: 72833 - DNA, 15 bp, Homo sapiens
tggatcatgctggga

SEQ ID NO: 72834 - DNA, 15 bp, Homo sapiens
ggatcatgctgggag

SEQ ID NO: 72835 - DNA, 15 bp, Homo sapiens
gatcatgctgggagc

SEQ ID NO: 72836 - DNA, 15 bp, Homo sapiens
atcatgctgggagct

SEQ ID NO: 72837 - DNA, 15 bp, Homo sapiens
tcatgctgggagctg

SEQ ID NO: 72838 - DNA, 15 bp, Homo sapiens
catgctgggagctgc

SEQ ID NO: 72839 - DNA, 15 bp, Homo sapiens
atgctgggagctgca

SEQ ID NO: 72840 - DNA, 15 bp, Homo sapiens
tgctgggagctgcag

SEQ ID NO: 72841 - DNA, 15 bp, Homo sapiens
gctgggagctgcaga

SEQ ID NO: 72842 - DNA, 15 bp, Homo sapiens
ctgggagctgcagac

SEQ ID NO: 72843 - DNA, 15 bp, Homo sapiens
tgggagctgcagaca

SEQ ID NO: 72844 - DNA, 15 bp, Homo sapiens
gggagctgcagacag

SEQ ID NO: 72845 - DNA, 15 bp, Homo sapiens
ggagctgcagacagg

SEQ ID NO: 72846 - DNA, 15 bp, Homo sapiens
gagctgcagacagga

SEQ ID NO: 72847 - DNA, 15 bp, Homo sapiens
agctgcagacaggag

SEQ ID NO: 72848 - DNA, 15 bp, Homo sapiens
gctgcagacaggagc

SEQ ID NO: 72849 - DNA, 15 bp, Homo sapiens
ctgcagacaggagct

SEQ ID NO: 72850 - DNA, 15 bp, Homo sapiens
tgcagacaggagctg

SEQ ID NO: 72851 - DNA, 15 bp, Homo sapiens
gcagacaggagctgt

SEQ ID NO: 72852 - DNA, 15 bp, Homo sapiens
cagacaggagctgtt

SEQ ID NO: 72853 - DNA, 15 bp, Homo sapiens
agacaggagctgttc

SEQ ID NO: 72854 - DNA, 15 bp, Homo sapiens
gacaggagctgttcc

SEQ ID NO: 72855 - DNA, 15 bp, Homo sapiens
acaggagctgttcct

SEQ ID NO: 72856 - DNA, 15 bp, Homo sapiens
caggagctgttccta

SEQ ID NO: 72857 - DNA, 15 bp, Homo sapiens
aggagctgttcctat

SEQ ID NO: 72858 - DNA, 15 bp, Homo sapiens
ggagctgttcctatt

SEQ ID NO: 72859 - DNA, 15 bp, Homo sapiens
gagctgttcctattt

SEQ ID NO: 72860 - DNA, 15 bp, Homo sapiens
agctgttcctatttg

SEQ ID NO: 72861 - DNA, 15 bp, Homo sapiens
gctgttcctatttga

SEQ ID NO: 72862 - DNA, 15 bp, Homo sapiens
ctgttcctatttgac

SEQ ID NO: 72863 - DNA, 15 bp, Homo sapiens
tgttcctatttgacc

SEQ ID NO: 72864 - DNA, 15 bp, Homo sapiens
gttcctatttgacca

SEQ ID NO: 72865 - DNA, 15 bp, Homo sapiens
ttcctatttgaccat

SEQ ID NO: 72866 - DNA, 15 bp, Homo sapiens
tcctatttgaccatc

SEQ ID NO: 72867 - DNA, 15 bp, Homo sapiens
cctatttgaccatct

SEQ ID NO: 72868 - DNA, 15 bp, Homo sapiens
ctatttgaccatctt

SEQ ID NO: 72869 - DNA, 15 bp, Homo sapiens
tatttgaccatcttg

SEQ ID NO: 72870 - DNA, 15 bp, Homo sapiens
atttgaccatcttgg

SEQ ID NO: 72871 - DNA, 15 bp, Homo sapiens
tttgaccatcttgga

SEQ ID NO: 72872 - DNA, 15 bp, Homo sapiens
ttgaccatcttggaa

SEQ ID NO: 72873 - DNA, 15 bp, Homo sapiens
tgaccatcttggaat

SEQ ID NO: 72874 - DNA, 15 bp, Homo sapiens
gaccatcttggaatg

SEQ ID NO: 72875 - DNA, 15 bp, Homo sapiens
accatcttggaatgc

SEQ ID NO: 72876 - DNA, 15 bp, Homo sapiens
ccatcttggaatgcc

SEQ ID NO: 72877 - DNA, 15 bp, Homo sapiens
catcttggaatgcca

SEQ ID NO: 72878 - DNA, 15 bp, Homo sapiens
atcttggaatgccac

SEQ ID NO: 72879 - DNA, 15 bp, Homo sapiens
tcttggaatgccacc

SEQ ID NO: 72880 - DNA, 15 bp, Homo sapiens
cttggaatgccacct

SEQ ID NO: 72881 - DNA, 15 bp, Homo sapiens
ttggaatgccacctt

SEQ ID NO: 72882 - DNA, 15 bp, Homo sapiens
tggaatgccaccttt

SEQ ID NO: 72883 - DNA, 15 bp, Homo sapiens
ggaatgccacctttt

SEQ ID NO: 72884 - DNA, 15 bp, Homo sapiens
gaatgccaccttttt

SEQ ID NO: 72885 - DNA, 15 bp, Homo sapiens
aatgccacctttttt

SEQ ID NO: 72886 - DNA, 15 bp, Homo sapiens
atgccaccttttttt

SEQ ID NO: 72887 - DNA, 15 bp, Homo sapiens
tgccacctttttttt

SEQ ID NO: 72888 - DNA, 15 bp, Homo sapiens
gccaccttttttttt

SEQ ID NO: 72889 - DNA, 15 bp, Homo sapiens
caccttttttttttt

SEQ ID NO: 72890 - DNA, 15 bp, Homo sapiens
acctttttttttttt

SEQ ID NO: 72891 - DNA, 15 bp, Homo sapiens
tttttttttttaagg

SEQ ID NO: 72892 - DNA, 15 bp, Homo sapiens
ttttttttttaaggc

SEQ ID NO: 72893 - DNA, 15 bp, Homo sapiens
tttttttttaaggca

SEQ ID NO: 72894 - DNA, 15 bp, Homo sapiens
ttttttttaaggcag

SEQ ID NO: 72895 - DNA, 15 bp, Homo sapiens
tttttttaaggcagt

SEQ ID NO: 72896 - DNA, 15 bp, Homo sapiens
ttttttaaggcagtt

SEQ ID NO: 72897 - DNA, 15 bp, Homo sapiens
tttttaaggcagttt

SEQ ID NO: 72898 - DNA, 15 bp, Homo sapiens
ttttaaggcagtttc

SEQ ID NO: 72899 - DNA, 15 bp, Homo sapiens
tttaaggcagtttct

SEQ ID NO: 72900 - DNA, 15 bp, Homo sapiens
ttaaggcagtttctt

SEQ ID NO: 72901 - DNA, 15 bp, Homo sapiens
taaggcagtttcttg

SEQ ID NO: 72902 - DNA, 15 bp, Homo sapiens
aaggcagtttcttgc

SEQ ID NO: 72903 - DNA, 15 bp, Homo sapiens
aggcagtttcttgct

SEQ ID NO: 72904 - DNA, 15 bp, Homo sapiens
ggcagtttcttgctc

SEQ ID NO: 72905 - DNA, 15 bp, Homo sapiens
gcagtttcttgctct

SEQ ID NO: 72906 - DNA, 15 bp, Homo sapiens
cagtttcttgctctg

SEQ ID NO: 72907 - DNA, 15 bp, Homo sapiens
agtttcttgctctgt

SEQ ID NO: 72908 - DNA, 15 bp, Homo sapiens
gtttcttgctctgtc

SEQ ID NO: 72909 - DNA, 15 bp, Homo sapiens
tttcttgctctgtca

SEQ ID NO: 72910 - DNA, 15 bp, Homo sapiens
ttcttgctctgtcac

SEQ ID NO: 72911 - DNA, 15 bp, Homo sapiens
gtcacccaggctggg

SEQ ID NO: 72912 - DNA, 15 bp, Homo sapiens
tcacccaggctgggg

SEQ ID NO: 72913 - DNA, 15 bp, Homo sapiens
cacccaggctggggt

SEQ ID NO: 72914 - DNA, 15 bp, Homo sapiens
acccaggctggggtg

SEQ ID NO: 72915 - DNA, 15 bp, Homo sapiens
cccaggctggggtgc

SEQ ID NO: 72916 - DNA, 15 bp, Homo sapiens
ccaggctggggtgca

SEQ ID NO: 72917 - DNA, 15 bp, Homo sapiens
caggctggggtgcag

SEQ ID NO: 72918 - DNA, 15 bp, Homo sapiens
aggctggggtgcaga

SEQ ID NO: 72919 - DNA, 15 bp, Homo sapiens
ggctggggtgcagag

SEQ ID NO: 72920 - DNA, 15 bp, Homo sapiens
gctggggtgcagagg

SEQ ID NO: 72921 - DNA, 15 bp, Homo sapiens
ctggggtgcagaggc

SEQ ID NO: 72922 - DNA, 15 bp, Homo sapiens
tggggtgcagaggca

SEQ ID NO: 72923 - DNA, 15 bp, Homo sapiens
ggggtgcagaggcat

SEQ ID NO: 72924 - DNA, 15 bp, Homo sapiens
gggtgcagaggcatg

SEQ ID NO: 72925 - DNA, 15 bp, Homo sapiens
ggtgcagaggcatga

SEQ ID NO: 72926 - DNA, 15 bp, Homo sapiens
gtgcagaggcatgat

SEQ ID NO: 72927 - DNA, 15 bp, Homo sapiens
tgcagaggcatgatc

SEQ ID NO: 72928 - DNA, 15 bp, Homo sapiens
gcagaggcatgatca

SEQ ID NO: 72929 - DNA, 15 bp, Homo sapiens
cagaggcatgatcac

SEQ ID NO: 72930 - DNA, 15 bp, Homo sapiens
agaggcatgatcacg

SEQ ID NO: 72931 - DNA, 15 bp, Homo sapiens
gaggcatgatcacgg

SEQ ID NO: 72932 - DNA, 15 bp, Homo sapiens
aggcatgatcacggc

SEQ ID NO: 72933 - DNA, 15 bp, Homo sapiens
ggcatgatcacggct

SEQ ID NO: 72934 - DNA, 15 bp, Homo sapiens
gcatgatcacggctc

SEQ ID NO: 72935 - DNA, 15 bp, Homo sapiens
catgatcacggctca

SEQ ID NO: 72936 - DNA, 15 bp, Homo sapiens
atgatcacggctcac

SEQ ID NO: 72937 - DNA, 15 bp, Homo sapiens
tgatcacggctcact

SEQ ID NO: 72938 - DNA, 15 bp, Homo sapiens
gatcacggctcactg

SEQ ID NO: 72939 - DNA, 15 bp, Homo sapiens
atcacggctcactgc

SEQ ID NO: 72940 - DNA, 15 bp, Homo sapiens
tcacggctcactgca

SEQ ID NO: 72941 - DNA, 15 bp, Homo sapiens
cacggctcactgcaa

SEQ ID NO: 72942 - DNA, 15 bp, Homo sapiens
acggctcactgcaac

SEQ ID NO: 72943 - DNA, 15 bp, Homo sapiens
tgcaacctctgcctt

SEQ ID NO: 72944 - DNA, 15 bp, Homo sapiens
gcaacctctgccttc

SEQ ID NO: 72945 - DNA, 15 bp, Homo sapiens
caacctctgccttct

SEQ ID NO: 72946 - DNA, 15 bp, Homo sapiens
aacctctgccttctg

SEQ ID NO: 72947 - DNA, 15 bp, Homo sapiens
acctctgccttctgg

SEQ ID NO: 72948 - DNA, 15 bp, Homo sapiens
cctctgccttctggg

SEQ ID NO: 72949 - DNA, 15 bp, Homo sapiens
ctctgccttctgggc

SEQ ID NO: 72950 - DNA, 15 bp, Homo sapiens
tctgccttctgggct

SEQ ID NO: 72951 - DNA, 15 bp, Homo sapiens
ctgccttctgggctc

SEQ ID NO: 72952 - DNA, 15 bp, Homo sapiens
tgccttctgggctca

SEQ ID NO: 72953 - DNA, 15 bp, Homo sapiens
gccttctgggctcaa

SEQ ID NO: 72954 - DNA, 15 bp, Homo sapiens
ccttctgggctcaag

SEQ ID NO: 72955 - DNA, 15 bp, Homo sapiens
cttctgggctcaagt

SEQ ID NO: 72956 - DNA, 15 bp, Homo sapiens
ttctgggctcaagtg

SEQ ID NO: 72957 - DNA, 15 bp, Homo sapiens
tctgggctcaagtga

SEQ ID NO: 72958 - DNA, 15 bp, Homo sapiens
ctgggctcaagtgat

SEQ ID NO: 72959 - DNA, 15 bp, Homo sapiens
tgggctcaagtgatc

SEQ ID NO: 72960 - DNA, 15 bp, Homo sapiens
gggctcaagtgatcc

SEQ ID NO: 72961 - DNA, 15 bp, Homo sapiens
ggctcaagtgatcct

SEQ ID NO: 72962 - DNA, 15 bp, Homo sapiens
gctcaagtgatcctc

SEQ ID NO: 72963 - DNA, 15 bp, Homo sapiens
ctcaagtgatcctcc

SEQ ID NO: 72964 - DNA, 15 bp, Homo sapiens
tcaagtgatcctccc

SEQ ID NO: 72965 - DNA, 15 bp, Homo sapiens
gtgatcctcccacct

SEQ ID NO: 72966 - DNA, 15 bp, Homo sapiens
tgatcctcccacctc

SEQ ID NO: 72967 - DNA, 15 bp, Homo sapiens
gatcctcccacctca

SEQ ID NO: 72968 - DNA, 15 bp, Homo sapiens
atcctcccacctcag

SEQ ID NO: 72969 - DNA, 15 bp, Homo sapiens
tcctcccacctcagc

SEQ ID NO: 72970 - DNA, 15 bp, Homo sapiens
cctcccacctcagcc

SEQ ID NO: 72971 - DNA, 15 bp, Homo sapiens
tcagcctcccaagtt

SEQ ID NO: 72972 - DNA, 15 bp, Homo sapiens
cagcctcccaagttg

SEQ ID NO: 72973 - DNA, 15 bp, Homo sapiens
agcctcccaagttgc

SEQ ID NO: 72974 - DNA, 15 bp, Homo sapiens
gcctcccaagttgct

SEQ ID NO: 72975 - DNA, 15 bp, Homo sapiens
cctcccaagttgctg

SEQ ID NO: 72976 - DNA, 15 bp, Homo sapiens
ctcccaagttgctgg

SEQ ID NO: 72977 - DNA, 15 bp, Homo sapiens
tcccaagttgctggg

SEQ ID NO: 72978 - DNA, 15 bp, Homo sapiens
cccaagttgctggga

SEQ ID NO: 72979 - DNA, 15 bp, Homo sapiens
ccaagttgctgggac

SEQ ID NO: 72980 - DNA, 15 bp, Homo sapiens
caagttgctgggacc

SEQ ID NO: 72981 - DNA, 15 bp, Homo sapiens
aagttgctgggacca

SEQ ID NO: 72982 - DNA, 15 bp, Homo sapiens
agttgctgggaccac

SEQ ID NO: 72983 - DNA, 15 bp, Homo sapiens
gttgctgggaccaca

SEQ ID NO: 72984 - DNA, 15 bp, Homo sapiens
ttgctgggaccacag

SEQ ID NO: 72985 - DNA, 15 bp, Homo sapiens
tgctgggaccacagc

SEQ ID NO: 72986 - DNA, 15 bp, Homo sapiens
gctgggaccacagcc

SEQ ID NO: 72987 - DNA, 15 bp, Homo sapiens
ctgggaccacagcca

SEQ ID NO: 72988 - DNA, 15 bp, Homo sapiens
tgggaccacagccac

SEQ ID NO: 72989 - DNA, 15 bp, Homo sapiens
gggaccacagccacg

SEQ ID NO: 72990 - DNA, 15 bp, Homo sapiens
ggaccacagccacgc

SEQ ID NO: 72991 - DNA, 15 bp, Homo sapiens
gaccacagccacgca

SEQ ID NO: 72992 - DNA, 15 bp, Homo sapiens
accacagccacgcat

SEQ ID NO: 72993 - DNA, 15 bp, Homo sapiens
ccacagccacgcatc

SEQ ID NO: 72994 - DNA, 15 bp, Homo sapiens
cacagccacgcatca

SEQ ID NO: 72995 - DNA, 15 bp, Homo sapiens
acagccacgcatcac

SEQ ID NO: 72996 - DNA, 15 bp, Homo sapiens
cagccacgcatcacc

SEQ ID NO: 72997 - DNA, 15 bp, Homo sapiens
agccacgcatcacca

SEQ ID NO: 72998 - DNA, 15 bp, Homo sapiens
gccacgcatcaccag

SEQ ID NO: 72999 - DNA, 15 bp, Homo sapiens
ccacgcatcaccagg

SEQ ID NO: 73000 - DNA, 15 bp, Homo sapiens
cacgcatcaccaggc

SEQ ID NO: 73001 - DNA, 15 bp, Homo sapiens
acgcatcaccaggcc

SEQ ID NO: 73002 - DNA, 15 bp, Homo sapiens
cgcatcaccaggcct

SEQ ID NO: 73003 - DNA, 15 bp, Homo sapiens
gcatcaccaggcctg

SEQ ID NO: 73004 - DNA, 15 bp, Homo sapiens
catcaccaggcctgg

SEQ ID NO: 73005 - DNA, 15 bp, Homo sapiens
atcaccaggcctggc

SEQ ID NO: 73006 - DNA, 15 bp, Homo sapiens
tcaccaggcctggct

SEQ ID NO: 73007 - DNA, 15 bp, Homo sapiens
caccaggcctggcta

SEQ ID NO: 73008 - DNA, 15 bp, Homo sapiens
accaggcctggctaa

SEQ ID NO: 73009 - DNA, 15 bp, Homo sapiens
ccaggcctggctaat

SEQ ID NO: 73010 - DNA, 15 bp, Homo sapiens
caggcctggctaatt

SEQ ID NO: 73011 - DNA, 15 bp, Homo sapiens
aggcctggctaattt

SEQ ID NO: 73012 - DNA, 15 bp, Homo sapiens
ggcctggctaatttt

SEQ ID NO: 73013 - DNA, 15 bp, Homo sapiens
gcctggctaattttt

SEQ ID NO: 73014 - DNA, 15 bp, Homo sapiens
tggctaatttttgtg

SEQ ID NO: 73015 - DNA, 15 bp, Homo sapiens
ggctaatttttgtgt

SEQ ID NO: 73016 - DNA, 15 bp, Homo sapiens
atttttgtgtttttt

SEQ ID NO: 73017 - DNA, 15 bp, Homo sapiens
tttttgtgttttttg

SEQ ID NO: 73018 - DNA, 15 bp, Homo sapiens
ttttgtgttttttgt

SEQ ID NO: 73019 - DNA, 15 bp, Homo sapiens
tttgtgttttttgta

SEQ ID NO: 73020 - DNA, 15 bp, Homo sapiens
ttgtgttttttgtag

SEQ ID NO: 73021 - DNA, 15 bp, Homo sapiens
tgtgttttttgtaga

SEQ ID NO: 73022 - DNA, 15 bp, Homo sapiens
gtgttttttgtagag

SEQ ID NO: 73023 - DNA, 15 bp, Homo sapiens
tgttttttgtagaga

SEQ ID NO: 73024 - DNA, 15 bp, Homo sapiens
gttttttgtagagat

SEQ ID NO: 73025 - DNA, 15 bp, Homo sapiens
ttttttgtagagata

SEQ ID NO: 73026 - DNA, 15 bp, Homo sapiens
tttttgtagagatag

SEQ ID NO: 73027 - DNA, 15 bp, Homo sapiens
ttttgtagagatagg

SEQ ID NO: 73028 - DNA, 15 bp, Homo sapiens
tttgtagagataggg

SEQ ID NO: 73029 - DNA, 15 bp, Homo sapiens
ttgtagagatagggt

SEQ ID NO: 73030 - DNA, 15 bp, Homo sapiens
tgtagagatagggtt

SEQ ID NO: 73031 - DNA, 15 bp, Homo sapiens
gtagagatagggttt

SEQ ID NO: 73032 - DNA, 15 bp, Homo sapiens
tagagatagggtttc

SEQ ID NO: 73033 - DNA, 15 bp, Homo sapiens
agagatagggtttcg

SEQ ID NO: 73034 - DNA, 15 bp, Homo sapiens
gagatagggtttcgc

SEQ ID NO: 73035 - DNA, 15 bp, Homo sapiens
agatagggtttcgct

SEQ ID NO: 73036 - DNA, 15 bp, Homo sapiens
gatagggtttcgctg

SEQ ID NO: 73037 - DNA, 15 bp, Homo sapiens
atagggtttcgctgt

SEQ ID NO: 73038 - DNA, 15 bp, Homo sapiens
tagggtttcgctgtg

SEQ ID NO: 73039 - DNA, 15 bp, Homo sapiens
agggtttcgctgtgt

SEQ ID NO: 73040 - DNA, 15 bp, Homo sapiens
gggtttcgctgtgtt

SEQ ID NO: 73041 - DNA, 15 bp, Homo sapiens
ggtttcgctgtgttt

SEQ ID NO: 73042 - DNA, 15 bp, Homo sapiens
gtttcgctgtgtttc

SEQ ID NO: 73043 - DNA, 15 bp, Homo sapiens
tttcgctgtgtttcc

SEQ ID NO: 73044 - DNA, 15 bp, Homo sapiens
ttcgctgtgtttccc

SEQ ID NO: 73045 - DNA, 15 bp, Homo sapiens
tcgctgtgtttccca

SEQ ID NO: 73046 - DNA, 15 bp, Homo sapiens
cgctgtgtttcccag

SEQ ID NO: 73047 - DNA, 15 bp, Homo sapiens
gctgtgtttcccagg

SEQ ID NO: 73048 - DNA, 15 bp, Homo sapiens
ctgtgtttcccaggc

SEQ ID NO: 73049 - DNA, 15 bp, Homo sapiens
tgtgtttcccaggct

SEQ ID NO: 73050 - DNA, 15 bp, Homo sapiens
gtgtttcccaggctg

SEQ ID NO: 73051 - DNA, 15 bp, Homo sapiens
tgtttcccaggctgg

SEQ ID NO: 73052 - DNA, 15 bp, Homo sapiens
gtttcccaggctggt

SEQ ID NO: 73053 - DNA, 15 bp, Homo sapiens
tttcccaggctggtc

SEQ ID NO: 73054 - DNA, 15 bp, Homo sapiens
ttcccaggctggtct

SEQ ID NO: 73055 - DNA, 15 bp, Homo sapiens
tcccaggctggtctc

SEQ ID NO: 73056 - DNA, 15 bp, Homo sapiens
gtctcaaactcctgc

SEQ ID NO: 73057 - DNA, 15 bp, Homo sapiens
tctcaaactcctgcg

SEQ ID NO: 73058 - DNA, 15 bp, Homo sapiens
ctcaaactcctgcgc

SEQ ID NO: 73059 - DNA, 15 bp, Homo sapiens
tcaaactcctgcgct

SEQ ID NO: 73060 - DNA, 15 bp, Homo sapiens
caaactcctgcgctc

SEQ ID NO: 73061 - DNA, 15 bp, Homo sapiens
aaactcctgcgctca

SEQ ID NO: 73062 - DNA, 15 bp, Homo sapiens
aactcctgcgctcaa

SEQ ID NO: 73063 - DNA, 15 bp, Homo sapiens
actcctgcgctcaag

SEQ ID NO: 73064 - DNA, 15 bp, Homo sapiens
ctcctgcgctcaagc

SEQ ID NO: 73065 - DNA, 15 bp, Homo sapiens
tcctgcgctcaagcg

SEQ ID NO: 73066 - DNA, 15 bp, Homo sapiens
cctgcgctcaagcga

SEQ ID NO: 73067 - DNA, 15 bp, Homo sapiens
ctgcgctcaagcgat

SEQ ID NO: 73068 - DNA, 15 bp, Homo sapiens
tgcgctcaagcgatc

SEQ ID NO: 73069 - DNA, 15 bp, Homo sapiens
gcgctcaagcgatcc

SEQ ID NO: 73070 - DNA, 15 bp, Homo sapiens
cgctcaagcgatccg

SEQ ID NO: 73071 - DNA, 15 bp, Homo sapiens
gctcaagcgatccgc

SEQ ID NO: 73072 - DNA, 15 bp, Homo sapiens
ctcaagcgatccgcc

SEQ ID NO: 73073 - DNA, 15 bp, Homo sapiens
cctcagcctcccaaa

SEQ ID NO: 73074 - DNA, 15 bp, Homo sapiens
gcatgagccactgca

SEQ ID NO: 73075 - DNA, 15 bp, Homo sapiens
catgagccactgcac

SEQ ID NO: 73076 - DNA, 15 bp, Homo sapiens
atgagccactgcacc

SEQ ID NO: 73077 - DNA, 15 bp, Homo sapiens
tgagccactgcaccc

SEQ ID NO: 73078 - DNA, 15 bp, Homo sapiens
gagccactgcacccg

SEQ ID NO: 73079 - DNA, 15 bp, Homo sapiens
agccactgcacccgg

SEQ ID NO: 73080 - DNA, 15 bp, Homo sapiens
gccactgcacccggc

SEQ ID NO: 73081 - DNA, 15 bp, Homo sapiens
ccactgcacccggcc

SEQ ID NO: 73082 - DNA, 15 bp, Homo sapiens
cactgcacccggcca

SEQ ID NO: 73083 - DNA, 15 bp, Homo sapiens
actgcacccggccaa

SEQ ID NO: 73084 - DNA, 15 bp, Homo sapiens
ctgcacccggccaat

SEQ ID NO: 73085 - DNA, 15 bp, Homo sapiens
tgcacccggccaata

SEQ ID NO: 73086 - DNA, 15 bp, Homo sapiens
gcacccggccaatat

SEQ ID NO: 73087 - DNA, 15 bp, Homo sapiens
cacccggccaatatg

SEQ ID NO: 73088 - DNA, 15 bp, Homo sapiens
acccggccaatatgt

SEQ ID NO: 73089 - DNA, 15 bp, Homo sapiens
cccggccaatatgta

SEQ ID NO: 73090 - DNA, 15 bp, Homo sapiens
ccggccaatatgtat

SEQ ID NO: 73091 - DNA, 15 bp, Homo sapiens
cggccaatatgtatg

SEQ ID NO: 73092 - DNA, 15 bp, Homo sapiens
ggccaatatgtatgt

SEQ ID NO: 73093 - DNA, 15 bp, Homo sapiens
gccaatatgtatgtt

SEQ ID NO: 73094 - DNA, 15 bp, Homo sapiens
ccaatatgtatgtta

SEQ ID NO: 73095 - DNA, 15 bp, Homo sapiens
caatatgtatgttaa

SEQ ID NO: 73096 - DNA, 15 bp, Homo sapiens
atgtatgttaatctc

SEQ ID NO: 73097 - DNA, 15 bp, Homo sapiens
tgtatgttaatctca

SEQ ID NO: 73098 - DNA, 15 bp, Homo sapiens
gtatgttaatctcat

SEQ ID NO: 73099 - DNA, 15 bp, Homo sapiens
tatgttaatctcatc

SEQ ID NO: 73100 - DNA, 15 bp, Homo sapiens
atgttaatctcatcc

SEQ ID NO: 73101 - DNA, 15 bp, Homo sapiens
tgttaatctcatccc

SEQ ID NO: 73102 - DNA, 15 bp, Homo sapiens
gttaatctcatccct

SEQ ID NO: 73103 - DNA, 15 bp, Homo sapiens
ttaatctcatccctc

SEQ ID NO: 73104 - DNA, 15 bp, Homo sapiens
taatctcatccctca

SEQ ID NO: 73105 - DNA, 15 bp, Homo sapiens
aatctcatccctcaa

SEQ ID NO: 73106 - DNA, 15 bp, Homo sapiens
atctcatccctcaag

SEQ ID NO: 73107 - DNA, 15 bp, Homo sapiens
tctcatccctcaagc

SEQ ID NO: 73108 - DNA, 15 bp, Homo sapiens
ctcatccctcaagct

SEQ ID NO: 73109 - DNA, 15 bp, Homo sapiens
tcatccctcaagctg

SEQ ID NO: 73110 - DNA, 15 bp, Homo sapiens
catccctcaagctga

SEQ ID NO: 73111 - DNA, 15 bp, Homo sapiens
atccctcaagctgat

SEQ ID NO: 73112 - DNA, 15 bp, Homo sapiens
tccctcaagctgata

SEQ ID NO: 73113 - DNA, 15 bp, Homo sapiens
ccctcaagctgatac

SEQ ID NO: 73114 - DNA, 15 bp, Homo sapiens
cctcaagctgatact

SEQ ID NO: 73115 - DNA, 15 bp, Homo sapiens
ctcaagctgatactg

SEQ ID NO: 73116 - DNA, 15 bp, Homo sapiens
tcaagctgatactga

SEQ ID NO: 73117 - DNA, 15 bp, Homo sapiens
caagctgatactgaa

SEQ ID NO: 73118 - DNA, 15 bp, Homo sapiens
aagctgatactgaag

SEQ ID NO: 73119 - DNA, 15 bp, Homo sapiens
agctgatactgaagt

SEQ ID NO: 73120 - DNA, 15 bp, Homo sapiens
gctgatactgaagtt

SEQ ID NO: 73121 - DNA, 15 bp, Homo sapiens
ctgatactgaagttt

SEQ ID NO: 73122 - DNA, 15 bp, Homo sapiens
tgatactgaagtttt

SEQ ID NO: 73123 - DNA, 15 bp, Homo sapiens
gatactgaagttttt

SEQ ID NO: 73124 - DNA, 15 bp, Homo sapiens
atactgaagtttttc

SEQ ID NO: 73125 - DNA, 15 bp, Homo sapiens
tactgaagtttttca

SEQ ID NO: 73126 - DNA, 15 bp, Homo sapiens
actgaagtttttcaa

SEQ ID NO: 73127 - DNA, 15 bp, Homo sapiens
ctgaagtttttcaat

SEQ ID NO: 73128 - DNA, 15 bp, Homo sapiens
tgaagtttttcaatt

SEQ ID NO: 73129 - DNA, 15 bp, Homo sapiens
gaagtttttcaattt

SEQ ID NO: 73130 - DNA, 15 bp, Homo sapiens
aagtttttcaattta

SEQ ID NO: 73131 - DNA, 15 bp, Homo sapiens
agtttttcaatttat

SEQ ID NO: 73132 - DNA, 15 bp, Homo sapiens
gtttttcaatttatg

SEQ ID NO: 73133 - DNA, 15 bp, Homo sapiens
tttttcaatttatgt

SEQ ID NO: 73134 - DNA, 15 bp, Homo sapiens
ttttcaatttatgtt

SEQ ID NO: 73135 - DNA, 15 bp, Homo sapiens
tttcaatttatgtta

SEQ ID NO: 73136 - DNA, 15 bp, Homo sapiens
ttcaatttatgttat

SEQ ID NO: 73137 - DNA, 15 bp, Homo sapiens
tcaatttatgttatt

SEQ ID NO: 73138 - DNA, 15 bp, Homo sapiens
caatttatgttattt

SEQ ID NO: 73139 - DNA, 15 bp, Homo sapiens
aatttatgttatttg

SEQ ID NO: 73140 - DNA, 15 bp, Homo sapiens
atttatgttatttgg

SEQ ID NO: 73141 - DNA, 15 bp, Homo sapiens
tttatgttatttggt

SEQ ID NO: 73142 - DNA, 15 bp, Homo sapiens
ttatgttatttggtg

SEQ ID NO: 73143 - DNA, 15 bp, Homo sapiens
tatgttatttggtgt

SEQ ID NO: 73144 - DNA, 15 bp, Homo sapiens
atgttatttggtgta

SEQ ID NO: 73145 - DNA, 15 bp, Homo sapiens
tgttatttggtgtaa

SEQ ID NO: 73146 - DNA, 15 bp, Homo sapiens
gttatttggtgtaaa

SEQ ID NO: 73147 - DNA, 15 bp, Homo sapiens
ttatttggtgtaaat

SEQ ID NO: 73148 - DNA, 15 bp, Homo sapiens
tatttggtgtaaatc

SEQ ID NO: 73149 - DNA, 15 bp, Homo sapiens
atttggtgtaaatct

SEQ ID NO: 73150 - DNA, 15 bp, Homo sapiens
tttggtgtaaatcta

SEQ ID NO: 73151 - DNA, 15 bp, Homo sapiens
ttggtgtaaatctag

SEQ ID NO: 73152 - DNA, 15 bp, Homo sapiens
tggtgtaaatctagg

SEQ ID NO: 73153 - DNA, 15 bp, Homo sapiens
ggtgtaaatctaggc

SEQ ID NO: 73154 - DNA, 15 bp, Homo sapiens
gtgtaaatctaggca

SEQ ID NO: 73155 - DNA, 15 bp, Homo sapiens
tgtaaatctaggcag

SEQ ID NO: 73156 - DNA, 15 bp, Homo sapiens
gtaaatctaggcagt

SEQ ID NO: 73157 - DNA, 15 bp, Homo sapiens
taaatctaggcagtc

SEQ ID NO: 73158 - DNA, 15 bp, Homo sapiens
aaatctaggcagtct

SEQ ID NO: 73159 - DNA, 15 bp, Homo sapiens
aatctaggcagtctt

SEQ ID NO: 73160 - DNA, 15 bp, Homo sapiens
atctaggcagtcttt

SEQ ID NO: 73161 - DNA, 15 bp, Homo sapiens
tctaggcagtcttta

SEQ ID NO: 73162 - DNA, 15 bp, Homo sapiens
ctaggcagtctttaa

SEQ ID NO: 73163 - DNA, 15 bp, Homo sapiens
taggcagtctttaac

SEQ ID NO: 73164 - DNA, 15 bp, Homo sapiens
aggcagtctttaaca

SEQ ID NO: 73165 - DNA, 15 bp, Homo sapiens
ggcagtctttaacaa

SEQ ID NO: 73166 - DNA, 15 bp, Homo sapiens
gcagtctttaacaaa

SEQ ID NO: 73167 - DNA, 15 bp, Homo sapiens
cagtctttaacaaaa

SEQ ID NO: 73168 - DNA, 15 bp, Homo sapiens
agtctttaacaaaat

SEQ ID NO: 73169 - DNA, 15 bp, Homo sapiens
gtctttaacaaaatt

SEQ ID NO: 73170 - DNA, 15 bp, Homo sapiens
tctttaacaaaattg

SEQ ID NO: 73171 - DNA, 15 bp, Homo sapiens
ctttaacaaaattgg

SEQ ID NO: 73172 - DNA, 15 bp, Homo sapiens
tttaacaaaattggt

SEQ ID NO: 73173 - DNA, 15 bp, Homo sapiens
ttaacaaaattggtg

SEQ ID NO: 73174 - DNA, 15 bp, Homo sapiens
taacaaaattggtgc

SEQ ID NO: 73175 - DNA, 15 bp, Homo sapiens
aacaaaattggtgct

SEQ ID NO: 73176 - DNA, 15 bp, Homo sapiens
acaaaattggtgctt

SEQ ID NO: 73177 - DNA, 15 bp, Homo sapiens
caaaattggtgcttc

SEQ ID NO: 73178 - DNA, 15 bp, Homo sapiens
aaaattggtgcttca

SEQ ID NO: 73179 - DNA, 15 bp, Homo sapiens
aaattggtgcttcat

SEQ ID NO: 73180 - DNA, 15 bp, Homo sapiens
aattggtgcttcatg

SEQ ID NO: 73181 - DNA, 15 bp, Homo sapiens
attggtgcttcatgt

SEQ ID NO: 73182 - DNA, 15 bp, Homo sapiens
ttggtgcttcatgtg

SEQ ID NO: 73183 - DNA, 15 bp, Homo sapiens
tggtgcttcatgtgt

SEQ ID NO: 73184 - DNA, 15 bp, Homo sapiens
ggtgcttcatgtgtt

SEQ ID NO: 73185 - DNA, 15 bp, Homo sapiens
gtgcttcatgtgttt

SEQ ID NO: 73186 - DNA, 15 bp, Homo sapiens
tgcttcatgtgttta

SEQ ID NO: 73187 - DNA, 15 bp, Homo sapiens
gcttcatgtgtttaa

SEQ ID NO: 73188 - DNA, 15 bp, Homo sapiens
cttcatgtgtttaag

SEQ ID NO: 73189 - DNA, 15 bp, Homo sapiens
ttcatgtgtttaaga

SEQ ID NO: 73190 - DNA, 15 bp, Homo sapiens
tcatgtgtttaagag

SEQ ID NO: 73191 - DNA, 15 bp, Homo sapiens
catgtgtttaagagg

SEQ ID NO: 73192 - DNA, 15 bp, Homo sapiens
atgtgtttaagaggc

SEQ ID NO: 73193 - DNA, 15 bp, Homo sapiens
tgtgtttaagaggca

SEQ ID NO: 73194 - DNA, 15 bp, Homo sapiens
gtgtttaagaggcat

SEQ ID NO: 73195 - DNA, 15 bp, Homo sapiens
tgtttaagaggcata

SEQ ID NO: 73196 - DNA, 15 bp, Homo sapiens
gtttaagaggcataa

SEQ ID NO: 73197 - DNA, 15 bp, Homo sapiens
tttaagaggcataac

SEQ ID NO: 73198 - DNA, 15 bp, Homo sapiens
ttaagaggcataact

SEQ ID NO: 73199 - DNA, 15 bp, Homo sapiens
taagaggcataactt

SEQ ID NO: 73200 - DNA, 15 bp, Homo sapiens
aagaggcataactta

SEQ ID NO: 73201 - DNA, 15 bp, Homo sapiens
agaggcataacttaa

SEQ ID NO: 73202 - DNA, 15 bp, Homo sapiens
gaggcataacttaag

SEQ ID NO: 73203 - DNA, 15 bp, Homo sapiens
aggcataacttaaga

SEQ ID NO: 73204 - DNA, 15 bp, Homo sapiens
ggcataacttaagaa

SEQ ID NO: 73205 - DNA, 15 bp, Homo sapiens
gcataacttaagaat

SEQ ID NO: 73206 - DNA, 15 bp, Homo sapiens
cataacttaagaatt

SEQ ID NO: 73207 - DNA, 15 bp, Homo sapiens
ataacttaagaattg

SEQ ID NO: 73208 - DNA, 15 bp, Homo sapiens
taacttaagaattgt

SEQ ID NO: 73209 - DNA, 15 bp, Homo sapiens
aacttaagaattgtt

SEQ ID NO: 73210 - DNA, 15 bp, Homo sapiens
acttaagaattgttt

SEQ ID NO: 73211 - DNA, 15 bp, Homo sapiens
cttaagaattgtttg

SEQ ID NO: 73212 - DNA, 15 bp, Homo sapiens
ttaagaattgtttgt

SEQ ID NO: 73213 - DNA, 15 bp, Homo sapiens
taagaattgtttgtt

SEQ ID NO: 73214 - DNA, 15 bp, Homo sapiens
aagaattgtttgttt

SEQ ID NO: 73215 - DNA, 15 bp, Homo sapiens
agaattgtttgtttc

SEQ ID NO: 73216 - DNA, 15 bp, Homo sapiens
gaattgtttgtttct

SEQ ID NO: 73217 - DNA, 15 bp, Homo sapiens
aattgtttgtttctt

SEQ ID NO: 73218 - DNA, 15 bp, Homo sapiens
attgtttgtttctta

SEQ ID NO: 73219 - DNA, 15 bp, Homo sapiens
ttgtttgtttcttat

SEQ ID NO: 73220 - DNA, 15 bp, Homo sapiens
tgtttgtttcttata

SEQ ID NO: 73221 - DNA, 15 bp, Homo sapiens
gtttgtttcttataa

SEQ ID NO: 73222 - DNA, 15 bp, Homo sapiens
tttgtttcttataaa

SEQ ID NO: 73223 - DNA, 15 bp, Homo sapiens
ttgtttcttataaat

SEQ ID NO: 73224 - DNA, 15 bp, Homo sapiens
tgtttcttataaatc

SEQ ID NO: 73225 - DNA, 15 bp, Homo sapiens
gtttcttataaatca

SEQ ID NO: 73226 - DNA, 15 bp, Homo sapiens
tttcttataaatcag

SEQ ID NO: 73227 - DNA, 15 bp, Homo sapiens
ttcttataaatcagg

SEQ ID NO: 73228 - DNA, 15 bp, Homo sapiens
tcttataaatcagga

SEQ ID NO: 73229 - DNA, 15 bp, Homo sapiens
cttataaatcaggag

SEQ ID NO: 73230 - DNA, 15 bp, Homo sapiens
ttataaatcaggaga

SEQ ID NO: 73231 - DNA, 15 bp, Homo sapiens
tataaatcaggagaa

SEQ ID NO: 73232 - DNA, 15 bp, Homo sapiens
ataaatcaggagaat

SEQ ID NO: 73233 - DNA, 15 bp, Homo sapiens
taaatcaggagaatg

SEQ ID NO: 73234 - DNA, 15 bp, Homo sapiens
aaatcaggagaatgg

SEQ ID NO: 73235 - DNA, 15 bp, Homo sapiens
aatcaggagaatgga

SEQ ID NO: 73236 - DNA, 15 bp, Homo sapiens
atcaggagaatggag

SEQ ID NO: 73237 - DNA, 15 bp, Homo sapiens
tcaggagaatggagg

SEQ ID NO: 73238 - DNA, 15 bp, Homo sapiens
caggagaatggaggt

SEQ ID NO: 73239 - DNA, 15 bp, Homo sapiens
aggagaatggaggtt

SEQ ID NO: 73240 - DNA, 15 bp, Homo sapiens
ggagaatggaggttt

SEQ ID NO: 73241 - DNA, 15 bp, Homo sapiens
gagaatggaggttta

SEQ ID NO: 73242 - DNA, 15 bp, Homo sapiens
agaatggaggtttaa

SEQ ID NO: 73243 - DNA, 15 bp, Homo sapiens
gaatggaggtttaat

SEQ ID NO: 73244 - DNA, 15 bp, Homo sapiens
aatggaggtttaata

SEQ ID NO: 73245 - DNA, 15 bp, Homo sapiens
atggaggtttaatag

SEQ ID NO: 73246 - DNA, 15 bp, Homo sapiens
tggaggtttaataga

SEQ ID NO: 73247 - DNA, 15 bp, Homo sapiens
ggaggtttaatagag

SEQ ID NO: 73248 - DNA, 15 bp, Homo sapiens
gaggtttaatagagg

SEQ ID NO: 73249 - DNA, 15 bp, Homo sapiens
aggtttaatagaggt

SEQ ID NO: 73250 - DNA, 15 bp, Homo sapiens
ggtttaatagaggtg

SEQ ID NO: 73251 - DNA, 15 bp, Homo sapiens
gtttaatagaggtga

SEQ ID NO: 73252 - DNA, 15 bp, Homo sapiens
tttaatagaggtgaa

SEQ ID NO: 73253 - DNA, 15 bp, Homo sapiens
ttaatagaggtgaac

SEQ ID NO: 73254 - DNA, 15 bp, Homo sapiens
taatagaggtgaact

SEQ ID NO: 73255 - DNA, 15 bp, Homo sapiens
aatagaggtgaactg

SEQ ID NO: 73256 - DNA, 15 bp, Homo sapiens
atagaggtgaactgt

SEQ ID NO: 73257 - DNA, 15 bp, Homo sapiens
tagaggtgaactgtc

SEQ ID NO: 73258 - DNA, 15 bp, Homo sapiens
agaggtgaactgtct

SEQ ID NO: 73259 - DNA, 15 bp, Homo sapiens
gaggtgaactgtctt

SEQ ID NO: 73260 - DNA, 15 bp, Homo sapiens
aggtgaactgtcttt

SEQ ID NO: 73261 - DNA, 15 bp, Homo sapiens
ggtgaactgtctttc

SEQ ID NO: 73262 - DNA, 15 bp, Homo sapiens
gtgaactgtctttct

SEQ ID NO: 73263 - DNA, 15 bp, Homo sapiens
tgaactgtctttctc

SEQ ID NO: 73264 - DNA, 15 bp, Homo sapiens
gaactgtctttctca

SEQ ID NO: 73265 - DNA, 15 bp, Homo sapiens
aactgtctttctcac

SEQ ID NO: 73266 - DNA, 15 bp, Homo sapiens
actgtctttctcact

SEQ ID NO: 73267 - DNA, 15 bp, Homo sapiens
ctgtctttctcactg

SEQ ID NO: 73268 - DNA, 15 bp, Homo sapiens
tgtctttctcactgc

SEQ ID NO: 73269 - DNA, 15 bp, Homo sapiens
gtctttctcactgca

SEQ ID NO: 73270 - DNA, 15 bp, Homo sapiens
tctttctcactgcag

SEQ ID NO: 73271 - DNA, 15 bp, Homo sapiens
ctttctcactgcaga

SEQ ID NO: 73272 - DNA, 15 bp, Homo sapiens
tttctcactgcagaa

SEQ ID NO: 73273 - DNA, 15 bp, Homo sapiens
ttctcactgcagaac

SEQ ID NO: 73274 - DNA, 15 bp, Homo sapiens
tctcactgcagaacc

SEQ ID NO: 73275 - DNA, 15 bp, Homo sapiens
ctcactgcagaacct

SEQ ID NO: 73276 - DNA, 15 bp, Homo sapiens
tcactgcagaacctt

SEQ ID NO: 73277 - DNA, 15 bp, Homo sapiens
cactgcagaaccttt

SEQ ID NO: 73278 - DNA, 15 bp, Homo sapiens
actgcagaaccttta

SEQ ID NO: 73279 - DNA, 15 bp, Homo sapiens
ctgcagaacctttaa

SEQ ID NO: 73280 - DNA, 15 bp, Homo sapiens
tgcagaacctttaat

SEQ ID NO: 73281 - DNA, 15 bp, Homo sapiens
gcagaacctttaata

SEQ ID NO: 73282 - DNA, 15 bp, Homo sapiens
cagaacctttaatat

SEQ ID NO: 73283 - DNA, 15 bp, Homo sapiens
agaacctttaatatg

SEQ ID NO: 73284 - DNA, 15 bp, Homo sapiens
gaacctttaatatgc

SEQ ID NO: 73285 - DNA, 15 bp, Homo sapiens
aacctttaatatgcc

SEQ ID NO: 73286 - DNA, 15 bp, Homo sapiens
acctttaatatgcca

SEQ ID NO: 73287 - DNA, 15 bp, Homo sapiens
cctttaatatgccac

SEQ ID NO: 73288 - DNA, 15 bp, Homo sapiens
ctttaatatgccact

SEQ ID NO: 73289 - DNA, 15 bp, Homo sapiens
tttaatatgccacta

SEQ ID NO: 73290 - DNA, 15 bp, Homo sapiens
ttaatatgccactat

SEQ ID NO: 73291 - DNA, 15 bp, Homo sapiens
taatatgccactatg

SEQ ID NO: 73292 - DNA, 15 bp, Homo sapiens
aatatgccactatgc

SEQ ID NO: 73293 - DNA, 15 bp, Homo sapiens
atatgccactatgca

SEQ ID NO: 73294 - DNA, 15 bp, Homo sapiens
tatgccactatgcat

SEQ ID NO: 73295 - DNA, 15 bp, Homo sapiens
atgccactatgcatt

SEQ ID NO: 73296 - DNA, 15 bp, Homo sapiens
tgccactatgcattg

SEQ ID NO: 73297 - DNA, 15 bp, Homo sapiens
gccactatgcattgt

SEQ ID NO: 73298 - DNA, 15 bp, Homo sapiens
ccactatgcattgta

SEQ ID NO: 73299 - DNA, 15 bp, Homo sapiens
cactatgcattgtaa

SEQ ID NO: 73300 - DNA, 15 bp, Homo sapiens
actatgcattgtaaa

SEQ ID NO: 73301 - DNA, 15 bp, Homo sapiens
ctatgcattgtaaat

SEQ ID NO: 73302 - DNA, 15 bp, Homo sapiens
tatgcattgtaaatc

SEQ ID NO: 73303 - DNA, 15 bp, Homo sapiens
atgcattgtaaatct

SEQ ID NO: 73304 - DNA, 15 bp, Homo sapiens
tgcattgtaaatctc

SEQ ID NO: 73305 - DNA, 15 bp, Homo sapiens
gcattgtaaatctcc

SEQ ID NO: 73306 - DNA, 15 bp, Homo sapiens
cattgtaaatctccc

SEQ ID NO: 73307 - DNA, 15 bp, Homo sapiens
attgtaaatctccca

SEQ ID NO: 73308 - DNA, 15 bp, Homo sapiens
ttgtaaatctcccaa

SEQ ID NO: 73309 - DNA, 15 bp, Homo sapiens
tgtaaatctcccaag

SEQ ID NO: 73310 - DNA, 15 bp, Homo sapiens
gtaaatctcccaaga

SEQ ID NO: 73311 - DNA, 15 bp, Homo sapiens
taaatctcccaagag

SEQ ID NO: 73312 - DNA, 15 bp, Homo sapiens
aaatctcccaagagt

SEQ ID NO: 73313 - DNA, 15 bp, Homo sapiens
aatctcccaagagtg

SEQ ID NO: 73314 - DNA, 15 bp, Homo sapiens
atctcccaagagtga

SEQ ID NO: 73315 - DNA, 15 bp, Homo sapiens
tctcccaagagtgag

SEQ ID NO: 73316 - DNA, 15 bp, Homo sapiens
ctcccaagagtgaga

SEQ ID NO: 73317 - DNA, 15 bp, Homo sapiens
tcccaagagtgagat

SEQ ID NO: 73318 - DNA, 15 bp, Homo sapiens
cccaagagtgagatt

SEQ ID NO: 73319 - DNA, 15 bp, Homo sapiens
ccaagagtgagattc

SEQ ID NO: 73320 - DNA, 15 bp, Homo sapiens
caagagtgagattct

SEQ ID NO: 73321 - DNA, 15 bp, Homo sapiens
aagagtgagattcta

SEQ ID NO: 73322 - DNA, 15 bp, Homo sapiens
agagtgagattctag

SEQ ID NO: 73323 - DNA, 15 bp, Homo sapiens
gagtgagattctagt

SEQ ID NO: 73324 - DNA, 15 bp, Homo sapiens
agtgagattctagta

SEQ ID NO: 73325 - DNA, 15 bp, Homo sapiens
gtgagattctagtat

SEQ ID NO: 73326 - DNA, 15 bp, Homo sapiens
tgagattctagtatg

SEQ ID NO: 73327 - DNA, 15 bp, Homo sapiens
gagattctagtatga

SEQ ID NO: 73328 - DNA, 15 bp, Homo sapiens
agattctagtatgat

SEQ ID NO: 73329 - DNA, 15 bp, Homo sapiens
gattctagtatgatg

SEQ ID NO: 73330 - DNA, 15 bp, Homo sapiens
attctagtatgatgc

SEQ ID NO: 73331 - DNA, 15 bp, Homo sapiens
ttctagtatgatgct

SEQ ID NO: 73332 - DNA, 15 bp, Homo sapiens
tctagtatgatgctt

SEQ ID NO: 73333 - DNA, 15 bp, Homo sapiens
ctagtatgatgcttt

SEQ ID NO: 73334 - DNA, 15 bp, Homo sapiens
tagtatgatgctttt

SEQ ID NO: 73335 - DNA, 15 bp, Homo sapiens
agtatgatgcttttc

SEQ ID NO: 73336 - DNA, 15 bp, Homo sapiens
gtatgatgcttttct

SEQ ID NO: 73337 - DNA, 15 bp, Homo sapiens
tatgatgcttttctt

SEQ ID NO: 73338 - DNA, 15 bp, Homo sapiens
atgatgcttttcttt

SEQ ID NO: 73339 - DNA, 15 bp, Homo sapiens
tgatgcttttctttt

SEQ ID NO: 73340 - DNA, 15 bp, Homo sapiens
gatgcttttcttttc

SEQ ID NO: 73341 - DNA, 15 bp, Homo sapiens
atgcttttcttttcc

SEQ ID NO: 73342 - DNA, 15 bp, Homo sapiens
tgcttttcttttcct

SEQ ID NO: 73343 - DNA, 15 bp, Homo sapiens
gcttttcttttcctt

SEQ ID NO: 73344 - DNA, 15 bp, Homo sapiens
cttttcttttccttt

SEQ ID NO: 73345 - DNA, 15 bp, Homo sapiens
ttttcttttcctttt

SEQ ID NO: 73346 - DNA, 15 bp, Homo sapiens
tttcttttccttttc

SEQ ID NO: 73347 - DNA, 15 bp, Homo sapiens
ttcttttccttttct

SEQ ID NO: 73348 - DNA, 15 bp, Homo sapiens
tcttttccttttctg

SEQ ID NO: 73349 - DNA, 15 bp, Homo sapiens
cttttccttttctgt

SEQ ID NO: 73350 - DNA, 15 bp, Homo sapiens
ttttccttttctgtt

SEQ ID NO: 73351 - DNA, 15 bp, Homo sapiens
tttccttttctgttc

SEQ ID NO: 73352 - DNA, 15 bp, Homo sapiens
ttccttttctgttct

SEQ ID NO: 73353 - DNA, 15 bp, Homo sapiens
tccttttctgttctt

SEQ ID NO: 73354 - DNA, 15 bp, Homo sapiens
ccttttctgttcttt

SEQ ID NO: 73355 - DNA, 15 bp, Homo sapiens
cttttctgttctttc

SEQ ID NO: 73356 - DNA, 15 bp, Homo sapiens
ttttctgttctttcc

SEQ ID NO: 73357 - DNA, 15 bp, Homo sapiens
tttctgttctttccc

SEQ ID NO: 73358 - DNA, 15 bp, Homo sapiens
ttctgttctttccct

SEQ ID NO: 73359 - DNA, 15 bp, Homo sapiens
tctgttctttccctt

SEQ ID NO: 73360 - DNA, 15 bp, Homo sapiens
ctgttctttcccttt

SEQ ID NO: 73361 - DNA, 15 bp, Homo sapiens
tgttctttccctttc

SEQ ID NO: 73362 - DNA, 15 bp, Homo sapiens
gttctttccctttcc

SEQ ID NO: 73363 - DNA, 15 bp, Homo sapiens
ttctttccctttccc

SEQ ID NO: 73364 - DNA, 15 bp, Homo sapiens
tctttccctttccct

SEQ ID NO: 73365 - DNA, 15 bp, Homo sapiens
ctttccctttccctc

SEQ ID NO: 73366 - DNA, 15 bp, Homo sapiens
tttccctttccctct

SEQ ID NO: 73367 - DNA, 15 bp, Homo sapiens
ttccctttccctcta

SEQ ID NO: 73368 - DNA, 15 bp, Homo sapiens
tccctttccctctac

SEQ ID NO: 73369 - DNA, 15 bp, Homo sapiens
ccctttccctctacc

SEQ ID NO: 73370 - DNA, 15 bp, Homo sapiens
cctttccctctacct

SEQ ID NO: 73371 - DNA, 15 bp, Homo sapiens
ctttccctctacctc

SEQ ID NO: 73372 - DNA, 15 bp, Homo sapiens
tttccctctacctcc

SEQ ID NO: 73373 - DNA, 15 bp, Homo sapiens
ttccctctacctcct

SEQ ID NO: 73374 - DNA, 15 bp, Homo sapiens
tccctctacctcctt

SEQ ID NO: 73375 - DNA, 15 bp, Homo sapiens
ccctctacctccttt

SEQ ID NO: 73376 - DNA, 15 bp, Homo sapiens
cctctacctcctttt

SEQ ID NO: 73377 - DNA, 15 bp, Homo sapiens
ctctacctccttttt

SEQ ID NO: 73378 - DNA, 15 bp, Homo sapiens
tctacctcctttttc

SEQ ID NO: 73379 - DNA, 15 bp, Homo sapiens
ctacctcctttttct

SEQ ID NO: 73380 - DNA, 15 bp, Homo sapiens
tacctcctttttctt

SEQ ID NO: 73381 - DNA, 15 bp, Homo sapiens
acctcctttttcttt

SEQ ID NO: 73382 - DNA, 15 bp, Homo sapiens
cctcctttttctttt

SEQ ID NO: 73383 - DNA, 15 bp, Homo sapiens
ctcctttttcttttc

SEQ ID NO: 73384 - DNA, 15 bp, Homo sapiens
tcctttttcttttct

SEQ ID NO: 73385 - DNA, 15 bp, Homo sapiens
cctttttcttttctt

SEQ ID NO: 73386 - DNA, 15 bp, Homo sapiens
ctttttcttttcttt

SEQ ID NO: 73387 - DNA, 15 bp, Homo sapiens
tttttcttttctttg

SEQ ID NO: 73388 - DNA, 15 bp, Homo sapiens
ttttcttttctttgt

SEQ ID NO: 73389 - DNA, 15 bp, Homo sapiens
tttcttttctttgtt

SEQ ID NO: 73390 - DNA, 15 bp, Homo sapiens
ttcttttctttgttg

SEQ ID NO: 73391 - DNA, 15 bp, Homo sapiens
tcttttctttgttgg

SEQ ID NO: 73392 - DNA, 15 bp, Homo sapiens
cttttctttgttggt

SEQ ID NO: 73393 - DNA, 15 bp, Homo sapiens
ttttctttgttggtg

SEQ ID NO: 73394 - DNA, 15 bp, Homo sapiens
tttctttgttggtgg

SEQ ID NO: 73395 - DNA, 15 bp, Homo sapiens
ttctttgttggtggc

SEQ ID NO: 73396 - DNA, 15 bp, Homo sapiens
tctttgttggtggca

SEQ ID NO: 73397 - DNA, 15 bp, Homo sapiens
ctttgttggtggcat

SEQ ID NO: 73398 - DNA, 15 bp, Homo sapiens
tttgttggtggcatg

SEQ ID NO: 73399 - DNA, 15 bp, Homo sapiens
ttgttggtggcatga

SEQ ID NO: 73400 - DNA, 15 bp, Homo sapiens
tgttggtggcatgag

SEQ ID NO: 73401 - DNA, 15 bp, Homo sapiens
gttggtggcatgagt

SEQ ID NO: 73402 - DNA, 15 bp, Homo sapiens
ttggtggcatgagtc

SEQ ID NO: 73403 - DNA, 15 bp, Homo sapiens
tggtggcatgagtcc

SEQ ID NO: 73404 - DNA, 15 bp, Homo sapiens
ggtggcatgagtcct

SEQ ID NO: 73405 - DNA, 15 bp, Homo sapiens
gtggcatgagtccta

SEQ ID NO: 73406 - DNA, 15 bp, Homo sapiens
tggcatgagtcctat

SEQ ID NO: 73407 - DNA, 15 bp, Homo sapiens
ggcatgagtcctata

SEQ ID NO: 73408 - DNA, 15 bp, Homo sapiens
gcatgagtcctatat

SEQ ID NO: 73409 - DNA, 15 bp, Homo sapiens
catgagtcctatatt

SEQ ID NO: 73410 - DNA, 15 bp, Homo sapiens
atgagtcctatatta

SEQ ID NO: 73411 - DNA, 15 bp, Homo sapiens
tgagtcctatattat

SEQ ID NO: 73412 - DNA, 15 bp, Homo sapiens
gagtcctatattata

SEQ ID NO: 73413 - DNA, 15 bp, Homo sapiens
agtcctatattataa

SEQ ID NO: 73414 - DNA, 15 bp, Homo sapiens
gtcctatattataag

SEQ ID NO: 73415 - DNA, 15 bp, Homo sapiens
tcctatattataagg

SEQ ID NO: 73416 - DNA, 15 bp, Homo sapiens
cctatattataagga

SEQ ID NO: 73417 - DNA, 15 bp, Homo sapiens
ctatattataaggaa

SEQ ID NO: 73418 - DNA, 15 bp, Homo sapiens
tatattataaggaaa

SEQ ID NO: 73419 - DNA, 15 bp, Homo sapiens
atattataaggaaat

SEQ ID NO: 73420 - DNA, 15 bp, Homo sapiens
tattataaggaaatg

SEQ ID NO: 73421 - DNA, 15 bp, Homo sapiens
attataaggaaatgc

SEQ ID NO: 73422 - DNA, 15 bp, Homo sapiens
ttataaggaaatgct

SEQ ID NO: 73423 - DNA, 15 bp, Homo sapiens
tataaggaaatgctt

SEQ ID NO: 73424 - DNA, 15 bp, Homo sapiens
ataaggaaatgcttt

SEQ ID NO: 73425 - DNA, 15 bp, Homo sapiens
taaggaaatgctttt

SEQ ID NO: 73426 - DNA, 15 bp, Homo sapiens
aaggaaatgctttta

SEQ ID NO: 73427 - DNA, 15 bp, Homo sapiens
aggaaatgcttttag

SEQ ID NO: 73428 - DNA, 15 bp, Homo sapiens
ggaaatgcttttaga

SEQ ID NO: 73429 - DNA, 15 bp, Homo sapiens
gaaatgcttttagag

SEQ ID NO: 73430 - DNA, 15 bp, Homo sapiens
aaatgcttttagagt

SEQ ID NO: 73431 - DNA, 15 bp, Homo sapiens
aatgcttttagagta

SEQ ID NO: 73432 - DNA, 15 bp, Homo sapiens
atgcttttagagtac

SEQ ID NO: 73433 - DNA, 15 bp, Homo sapiens
tgcttttagagtaca

SEQ ID NO: 73434 - DNA, 15 bp, Homo sapiens
gcttttagagtacag

SEQ ID NO: 73435 - DNA, 15 bp, Homo sapiens
cttttagagtacagt

SEQ ID NO: 73436 - DNA, 15 bp, Homo sapiens
ttttagagtacagtc

SEQ ID NO: 73437 - DNA, 15 bp, Homo sapiens
tttagagtacagtct

SEQ ID NO: 73438 - DNA, 15 bp, Homo sapiens
ttagagtacagtctt

SEQ ID NO: 73439 - DNA, 15 bp, Homo sapiens
tagagtacagtcttc

SEQ ID NO: 73440 - DNA, 15 bp, Homo sapiens
agagtacagtcttct

SEQ ID NO: 73441 - DNA, 15 bp, Homo sapiens
gagtacagtcttctg

SEQ ID NO: 73442 - DNA, 15 bp, Homo sapiens
agtacagtcttctga

SEQ ID NO: 73443 - DNA, 15 bp, Homo sapiens
gtacagtcttctgat

SEQ ID NO: 73444 - DNA, 15 bp, Homo sapiens
tacagtcttctgata

SEQ ID NO: 73445 - DNA, 15 bp, Homo sapiens
acagtcttctgatat

SEQ ID NO: 73446 - DNA, 15 bp, Homo sapiens
cagtcttctgatata

SEQ ID NO: 73447 - DNA, 15 bp, Homo sapiens
agtcttctgatatat

SEQ ID NO: 73448 - DNA, 15 bp, Homo sapiens
gtcttctgatatata

SEQ ID NO: 73449 - DNA, 15 bp, Homo sapiens
tcttctgatatatag

SEQ ID NO: 73450 - DNA, 15 bp, Homo sapiens
cttctgatatatagt

SEQ ID NO: 73451 - DNA, 15 bp, Homo sapiens
ttctgatatatagtg

SEQ ID NO: 73452 - DNA, 15 bp, Homo sapiens
tctgatatatagtga

SEQ ID NO: 73453 - DNA, 15 bp, Homo sapiens
ctgatatatagtgat

SEQ ID NO: 73454 - DNA, 15 bp, Homo sapiens
tgatatatagtgatt

SEQ ID NO: 73455 - DNA, 15 bp, Homo sapiens
gatatatagtgattt

SEQ ID NO: 73456 - DNA, 15 bp, Homo sapiens
atatatagtgatttt

SEQ ID NO: 73457 - DNA, 15 bp, Homo sapiens
tatatagtgattttt

SEQ ID NO: 73458 - DNA, 15 bp, Homo sapiens
atatagtgatttttg

SEQ ID NO: 73459 - DNA, 15 bp, Homo sapiens
tatagtgatttttga

SEQ ID NO: 73460 - DNA, 15 bp, Homo sapiens
atagtgatttttgaa

SEQ ID NO: 73461 - DNA, 15 bp, Homo sapiens
tagtgatttttgaaa

SEQ ID NO: 73462 - DNA, 15 bp, Homo sapiens
agtgatttttgaaaa

SEQ ID NO: 73463 - DNA, 15 bp, Homo sapiens
gtgatttttgaaaaa

SEQ ID NO: 73464 - DNA, 15 bp, Homo sapiens
tgatttttgaaaaag

SEQ ID NO: 73465 - DNA, 15 bp, Homo sapiens
gatttttgaaaaaga

SEQ ID NO: 73466 - DNA, 15 bp, Homo sapiens
atttttgaaaaagat

SEQ ID NO: 73467 - DNA, 15 bp, Homo sapiens
tttttgaaaaagatt

SEQ ID NO: 73468 - DNA, 15 bp, Homo sapiens
ttttgaaaaagattt

SEQ ID NO: 73469 - DNA, 15 bp, Homo sapiens
tttgaaaaagattta

SEQ ID NO: 73470 - DNA, 15 bp, Homo sapiens
ttgaaaaagatttat

SEQ ID NO: 73471 - DNA, 15 bp, Homo sapiens
tgaaaaagatttatt

SEQ ID NO: 73472 - DNA, 15 bp, Homo sapiens
gaaaaagatttattt

SEQ ID NO: 73473 - DNA, 15 bp, Homo sapiens
aaaaagatttattta

SEQ ID NO: 73474 - DNA, 15 bp, Homo sapiens
aaaagatttatttat

SEQ ID NO: 73475 - DNA, 15 bp, Homo sapiens
aaagatttatttatt

SEQ ID NO: 73476 - DNA, 15 bp, Homo sapiens
aagatttatttattg

SEQ ID NO: 73477 - DNA, 15 bp, Homo sapiens
agatttatttattgt

SEQ ID NO: 73478 - DNA, 15 bp, Homo sapiens
gatttatttattgtc

SEQ ID NO: 73479 - DNA, 15 bp, Homo sapiens
atttatttattgtct

SEQ ID NO: 73480 - DNA, 15 bp, Homo sapiens
tttatttattgtctt

SEQ ID NO: 73481 - DNA, 15 bp, Homo sapiens
ttatttattgtcttg

SEQ ID NO: 73482 - DNA, 15 bp, Homo sapiens
tatttattgtcttgt

SEQ ID NO: 73483 - DNA, 15 bp, Homo sapiens
atttattgtcttgtt

SEQ ID NO: 73484 - DNA, 15 bp, Homo sapiens
tttattgtcttgttc

SEQ ID NO: 73485 - DNA, 15 bp, Homo sapiens
ttattgtcttgttca

SEQ ID NO: 73486 - DNA, 15 bp, Homo sapiens
tattgtcttgttcac

SEQ ID NO: 73487 - DNA, 15 bp, Homo sapiens
attgtcttgttcact

SEQ ID NO: 73488 - DNA, 15 bp, Homo sapiens
ttgtcttgttcactg

SEQ ID NO: 73489 - DNA, 15 bp, Homo sapiens
tgtcttgttcactgt

SEQ ID NO: 73490 - DNA, 15 bp, Homo sapiens
gtcttgttcactgtg

SEQ ID NO: 73491 - DNA, 15 bp, Homo sapiens
tcttgttcactgtga

SEQ ID NO: 73492 - DNA, 15 bp, Homo sapiens
cttgttcactgtgag

SEQ ID NO: 73493 - DNA, 15 bp, Homo sapiens
ttgttcactgtgagc

SEQ ID NO: 73494 - DNA, 15 bp, Homo sapiens
tgttcactgtgagct

SEQ ID NO: 73495 - DNA, 15 bp, Homo sapiens
gttcactgtgagctt

SEQ ID NO: 73496 - DNA, 15 bp, Homo sapiens
ttcactgtgagcttt

SEQ ID NO: 73497 - DNA, 15 bp, Homo sapiens
tcactgtgagctttt

SEQ ID NO: 73498 - DNA, 15 bp, Homo sapiens
cactgtgagcttttt

SEQ ID NO: 73499 - DNA, 15 bp, Homo sapiens
actgtgagctttttc

SEQ ID NO: 73500 - DNA, 15 bp, Homo sapiens
ctgtgagctttttcc

SEQ ID NO: 73501 - DNA, 15 bp, Homo sapiens
tgtgagctttttccc

SEQ ID NO: 73502 - DNA, 15 bp, Homo sapiens
gtgagctttttcccc

SEQ ID NO: 73503 - DNA, 15 bp, Homo sapiens
tgagctttttccccc

SEQ ID NO: 73504 - DNA, 15 bp, Homo sapiens
gagctttttccccca

SEQ ID NO: 73505 - DNA, 15 bp, Homo sapiens
agctttttcccccat

SEQ ID NO: 73506 - DNA, 15 bp, Homo sapiens
gctttttcccccatg

SEQ ID NO: 73507 - DNA, 15 bp, Homo sapiens
ctttttcccccatgt

SEQ ID NO: 73508 - DNA, 15 bp, Homo sapiens
tttttcccccatgta

SEQ ID NO: 73509 - DNA, 15 bp, Homo sapiens
ttttcccccatgtat

SEQ ID NO: 73510 - DNA, 15 bp, Homo sapiens
tttcccccatgtata

SEQ ID NO: 73511 - DNA, 15 bp, Homo sapiens
ttcccccatgtataa

SEQ ID NO: 73512 - DNA, 15 bp, Homo sapiens
tcccccatgtataag

SEQ ID NO: 73513 - DNA, 15 bp, Homo sapiens
cccccatgtataagc

SEQ ID NO: 73514 - DNA, 15 bp, Homo sapiens
ccccatgtataagca

SEQ ID NO: 73515 - DNA, 15 bp, Homo sapiens
cccatgtataagcag

SEQ ID NO: 73516 - DNA, 15 bp, Homo sapiens
ccatgtataagcagc

SEQ ID NO: 73517 - DNA, 15 bp, Homo sapiens
catgtataagcagct

SEQ ID NO: 73518 - DNA, 15 bp, Homo sapiens
atgtataagcagctg

SEQ ID NO: 73519 - DNA, 15 bp, Homo sapiens
tgtataagcagctgt

SEQ ID NO: 73520 - DNA, 15 bp, Homo sapiens
gtataagcagctgtg

SEQ ID NO: 73521 - DNA, 15 bp, Homo sapiens
tataagcagctgtgt

SEQ ID NO: 73522 - DNA, 15 bp, Homo sapiens
ataagcagctgtgta

SEQ ID NO: 73523 - DNA, 15 bp, Homo sapiens
taagcagctgtgtaa

SEQ ID NO: 73524 - DNA, 15 bp, Homo sapiens
aagcagctgtgtaat

SEQ ID NO: 73525 - DNA, 15 bp, Homo sapiens
agcagctgtgtaata

SEQ ID NO: 73526 - DNA, 15 bp, Homo sapiens
gcagctgtgtaatag

SEQ ID NO: 73527 - DNA, 15 bp, Homo sapiens
cagctgtgtaataga

SEQ ID NO: 73528 - DNA, 15 bp, Homo sapiens
agctgtgtaatagat

SEQ ID NO: 73529 - DNA, 15 bp, Homo sapiens
gctgtgtaatagatt

SEQ ID NO: 73530 - DNA, 15 bp, Homo sapiens
ctgtgtaatagattc

SEQ ID NO: 73531 - DNA, 15 bp, Homo sapiens
tgtgtaatagattca

SEQ ID NO: 73532 - DNA, 15 bp, Homo sapiens
gtgtaatagattcaa

SEQ ID NO: 73533 - DNA, 15 bp, Homo sapiens
tgtaatagattcaag

SEQ ID NO: 73534 - DNA, 15 bp, Homo sapiens
gtaatagattcaaga

SEQ ID NO: 73535 - DNA, 15 bp, Homo sapiens
taatagattcaagag

SEQ ID NO: 73536 - DNA, 15 bp, Homo sapiens
aatagattcaagagc

SEQ ID NO: 73537 - DNA, 15 bp, Homo sapiens
atagattcaagagca

SEQ ID NO: 73538 - DNA, 15 bp, Homo sapiens
tagattcaagagcac

SEQ ID NO: 73539 - DNA, 15 bp, Homo sapiens
agattcaagagcacc

SEQ ID NO: 73540 - DNA, 15 bp, Homo sapiens
gattcaagagcaccc

SEQ ID NO: 73541 - DNA, 15 bp, Homo sapiens
attcaagagcacccc

SEQ ID NO: 73542 - DNA, 15 bp, Homo sapiens
ttcaagagcaccccc

SEQ ID NO: 73543 - DNA, 15 bp, Homo sapiens
tcaagagcaccccct

SEQ ID NO: 73544 - DNA, 15 bp, Homo sapiens
caagagcaccccctc

SEQ ID NO: 73545 - DNA, 15 bp, Homo sapiens
aagagcaccccctcg

SEQ ID NO: 73546 - DNA, 15 bp, Homo sapiens
agagcaccccctcgc

SEQ ID NO: 73547 - DNA, 15 bp, Homo sapiens
gagcaccccctcgcc

SEQ ID NO: 73548 - DNA, 15 bp, Homo sapiens
agcaccccctcgccc

SEQ ID NO: 73549 - DNA, 15 bp, Homo sapiens
gcaccccctcgcccc

SEQ ID NO: 73550 - DNA, 15 bp, Homo sapiens
caccccctcgcccct

SEQ ID NO: 73551 - DNA, 15 bp, Homo sapiens
accccctcgcccctt

SEQ ID NO: 73552 - DNA, 15 bp, Homo sapiens
ccccctcgccccttt

SEQ ID NO: 73553 - DNA, 15 bp, Homo sapiens
cccctcgcccctttt

SEQ ID NO: 73554 - DNA, 15 bp, Homo sapiens
ccctcgccccttttt

SEQ ID NO: 73555 - DNA, 15 bp, Homo sapiens
cctcgcccctttttt

SEQ ID NO: 73556 - DNA, 15 bp, Homo sapiens
ctcgccccttttttt

SEQ ID NO: 73557 - DNA, 15 bp, Homo sapiens
tcgcccctttttttt

SEQ ID NO: 73558 - DNA, 15 bp, Homo sapiens
cgccccttttttttt

SEQ ID NO: 73559 - DNA, 15 bp, Homo sapiens
gcccctttttttttg

SEQ ID NO: 73560 - DNA, 15 bp, Homo sapiens
cccctttttttttga

SEQ ID NO: 73561 - DNA, 15 bp, Homo sapiens
ccctttttttttgag

SEQ ID NO: 73562 - DNA, 15 bp, Homo sapiens
cctttttttttgaga

SEQ ID NO: 73563 - DNA, 15 bp, Homo sapiens
ctttttttttgagac

SEQ ID NO: 73564 - DNA, 15 bp, Homo sapiens
tttttttttgagaca

SEQ ID NO: 73565 - DNA, 15 bp, Homo sapiens
ttttttttgagacag

SEQ ID NO: 73566 - DNA, 15 bp, Homo sapiens
tttttttgagacaga

SEQ ID NO: 73567 - DNA, 15 bp, Homo sapiens
ttttttgagacagag

SEQ ID NO: 73568 - DNA, 15 bp, Homo sapiens
tttttgagacagagt

SEQ ID NO: 73569 - DNA, 15 bp, Homo sapiens
ttttgagacagagtc

SEQ ID NO: 73570 - DNA, 15 bp, Homo sapiens
tttgagacagagtct

SEQ ID NO: 73571 - DNA, 15 bp, Homo sapiens
ttgagacagagtctc

SEQ ID NO: 73572 - DNA, 15 bp, Homo sapiens
tgagacagagtctcg

SEQ ID NO: 73573 - DNA, 15 bp, Homo sapiens
gacagagtctcgctc

SEQ ID NO: 73574 - DNA, 15 bp, Homo sapiens
acagagtctcgctcg

SEQ ID NO: 73575 - DNA, 15 bp, Homo sapiens
cagagtctcgctcgg

SEQ ID NO: 73576 - DNA, 15 bp, Homo sapiens
agagtctcgctcggt

SEQ ID NO: 73577 - DNA, 15 bp, Homo sapiens
gagtctcgctcggtc

SEQ ID NO: 73578 - DNA, 15 bp, Homo sapiens
agtctcgctcggtca

SEQ ID NO: 73579 - DNA, 15 bp, Homo sapiens
gtctcgctcggtcac

SEQ ID NO: 73580 - DNA, 15 bp, Homo sapiens
tctcgctcggtcact

SEQ ID NO: 73581 - DNA, 15 bp, Homo sapiens
ctcgctcggtcactc

SEQ ID NO: 73582 - DNA, 15 bp, Homo sapiens
tcgctcggtcactca

SEQ ID NO: 73583 - DNA, 15 bp, Homo sapiens
cgctcggtcactcag

SEQ ID NO: 73584 - DNA, 15 bp, Homo sapiens
gctcggtcactcagg

SEQ ID NO: 73585 - DNA, 15 bp, Homo sapiens
ctcggtcactcaggc

SEQ ID NO: 73586 - DNA, 15 bp, Homo sapiens
tcggtcactcaggct

SEQ ID NO: 73587 - DNA, 15 bp, Homo sapiens
cggtcactcaggctg

SEQ ID NO: 73588 - DNA, 15 bp, Homo sapiens
ggtcactcaggctgg

SEQ ID NO: 73589 - DNA, 15 bp, Homo sapiens
gtcactcaggctgga

SEQ ID NO: 73590 - DNA, 15 bp, Homo sapiens
tcactcaggctggag

SEQ ID NO: 73591 - DNA, 15 bp, Homo sapiens
cactcaggctggagt

SEQ ID NO: 73592 - DNA, 15 bp, Homo sapiens
actcaggctggagta

SEQ ID NO: 73593 - DNA, 15 bp, Homo sapiens
ctcaggctggagtac

SEQ ID NO: 73594 - DNA, 15 bp, Homo sapiens
tcaggctggagtacg

SEQ ID NO: 73595 - DNA, 15 bp, Homo sapiens
caggctggagtacgg

SEQ ID NO: 73596 - DNA, 15 bp, Homo sapiens
aggctggagtacggt

SEQ ID NO: 73597 - DNA, 15 bp, Homo sapiens
ggctggagtacggtg

SEQ ID NO: 73598 - DNA, 15 bp, Homo sapiens
gctggagtacggtgg

SEQ ID NO: 73599 - DNA, 15 bp, Homo sapiens
ctggagtacggtggt

SEQ ID NO: 73600 - DNA, 15 bp, Homo sapiens
tggagtacggtggtg

SEQ ID NO: 73601 - DNA, 15 bp, Homo sapiens
ggagtacggtggtgc

SEQ ID NO: 73602 - DNA, 15 bp, Homo sapiens
gagtacggtggtgct

SEQ ID NO: 73603 - DNA, 15 bp, Homo sapiens
agtacggtggtgctg

SEQ ID NO: 73604 - DNA, 15 bp, Homo sapiens
gtacggtggtgctgt

SEQ ID NO: 73605 - DNA, 15 bp, Homo sapiens
tacggtggtgctgtg

SEQ ID NO: 73606 - DNA, 15 bp, Homo sapiens
acggtggtgctgtga

SEQ ID NO: 73607 - DNA, 15 bp, Homo sapiens
cggtggtgctgtgat

SEQ ID NO: 73608 - DNA, 15 bp, Homo sapiens
ggtggtgctgtgatc

SEQ ID NO: 73609 - DNA, 15 bp, Homo sapiens
gtggtgctgtgatca

SEQ ID NO: 73610 - DNA, 15 bp, Homo sapiens
tggtgctgtgatcat

SEQ ID NO: 73611 - DNA, 15 bp, Homo sapiens
ggtgctgtgatcatg

SEQ ID NO: 73612 - DNA, 15 bp, Homo sapiens
gtgctgtgatcatgg

SEQ ID NO: 73613 - DNA, 15 bp, Homo sapiens
tgctgtgatcatggt

SEQ ID NO: 73614 - DNA, 15 bp, Homo sapiens
gctgtgatcatggtt

SEQ ID NO: 73615 - DNA, 15 bp, Homo sapiens
ctgtgatcatggttc

SEQ ID NO: 73616 - DNA, 15 bp, Homo sapiens
tgtgatcatggttca

SEQ ID NO: 73617 - DNA, 15 bp, Homo sapiens
gtgatcatggttcac

SEQ ID NO: 73618 - DNA, 15 bp, Homo sapiens
tgatcatggttcacc

SEQ ID NO: 73619 - DNA, 15 bp, Homo sapiens
gatcatggttcacct

SEQ ID NO: 73620 - DNA, 15 bp, Homo sapiens
atcatggttcacctc

SEQ ID NO: 73621 - DNA, 15 bp, Homo sapiens
tcatggttcacctcg

SEQ ID NO: 73622 - DNA, 15 bp, Homo sapiens
catggttcacctcga

SEQ ID NO: 73623 - DNA, 15 bp, Homo sapiens
atggttcacctcgac

SEQ ID NO: 73624 - DNA, 15 bp, Homo sapiens
tggttcacctcgact

SEQ ID NO: 73625 - DNA, 15 bp, Homo sapiens
ggttcacctcgactt

SEQ ID NO: 73626 - DNA, 15 bp, Homo sapiens
gttcacctcgacttc

SEQ ID NO: 73627 - DNA, 15 bp, Homo sapiens
ttcacctcgacttct

SEQ ID NO: 73628 - DNA, 15 bp, Homo sapiens
tcacctcgacttctg

SEQ ID NO: 73629 - DNA, 15 bp, Homo sapiens
cacctcgacttctgg

SEQ ID NO: 73630 - DNA, 15 bp, Homo sapiens
acctcgacttctggg

SEQ ID NO: 73631 - DNA, 15 bp, Homo sapiens
cctcgacttctgggc

SEQ ID NO: 73632 - DNA, 15 bp, Homo sapiens
ctcgacttctgggct

SEQ ID NO: 73633 - DNA, 15 bp, Homo sapiens
tcgacttctgggctc

SEQ ID NO: 73634 - DNA, 15 bp, Homo sapiens
cgacttctgggctcc

SEQ ID NO: 73635 - DNA, 15 bp, Homo sapiens
gacttctgggctcca

SEQ ID NO: 73636 - DNA, 15 bp, Homo sapiens
acttctgggctccag

SEQ ID NO: 73637 - DNA, 15 bp, Homo sapiens
cttctgggctccagc

SEQ ID NO: 73638 - DNA, 15 bp, Homo sapiens
ttctgggctccagcg
